United States Patent Application Publication US 2005/0255487 A1 - sequence listing, part 95

SEQ ID NO: 2613339 - RNA, 19 nt, Homo sapiens
  misc_RNA (1)...(19): siRNA sense strand
agaaauugaaccaggaaca

SEQ ID NO: 2613340 - RNA, 19 nt, Homo sapiens
  misc_RNA (1)...(19): siRNA sense strand
gcuacaaauccaugcagaa

SEQ ID NO: 2613341 - RNA, 19 nt, Homo sapiens
  misc_RNA (1)...(19): siRNA sense strand
ggaaauuagccgagcugca

SEQ ID NO: 2613342 - RNA, 19 nt, Homo sapiens
  misc_RNA (1)...(19): siRNA sense strand
acagcugggccaagggaaa

SEQ ID NO: 2613343 - RNA, 19 nt, Homo sapiens
  misc_RNA (1)...(19): siRNA sense strand
caucgauacaagugaaaca

SEQ ID NO: 2613344 - RNA, 19 nt, Homo sapiens
  misc_RNA (1)...(19): siRNA sense strand
uggugauauucuuggagua

SEQ ID NO: 2613345 - RNA, 19 nt, Homo sapiens
  misc_RNA (1)...(19): siRNA sense strand
acaaagaagaaaacagcaa

SEQ ID NO: 2613346 - RNA, 19 nt, Homo sapiens
  misc_RNA (1)...(19): siRNA sense strand
gugaucaauauuuggacaa

SEQ ID NO: 2613347 - RNA, 19 nt, Homo sapiens
  misc_RNA (1)...(19): siRNA sense strand
gagaaguuaaauggaguaa

SEQ ID NO: 2613348 - RNA, 19 nt, Homo sapiens
  misc_RNA (1)...(19): siRNA sense strand
cugagaaguuaaauggagu

SEQ ID NO: 2613349 - RNA, 19 nt, Homo sapiens
  misc_RNA (1)...(19): siRNA sense strand
ggaacaugacaucgauaca

SEQ ID NO: 2613350 - RNA, 19 nt, Homo sapiens
  misc_RNA (1)...(19): siRNA sense strand
guuugaaauccugaagaaa

SEQ ID NO: 2613351 - RNA, 19 nt, Homo sapiens
  misc_RNA (1)...(19): siRNA sense strand
auuggaagauucagagcuu

SEQ ID NO: 2613352 - RNA, 19 nt, Homo sapiens
  misc_RNA (1)...(19): siRNA sense strand
ggagucuugaacagggaaa

SEQ ID NO: 2613353 - RNA, 19 nt, Homo sapiens
  misc_RNA (1)...(19): siRNA sense strand
uaucaaagcggaaucgaga

SEQ ID NO: 2613354 - RNA, 19 nt, Homo sapiens
  misc_RNA (1)...(19): siRNA sense strand
cgauacaagugaaacagca

SEQ ID NO: 2613355 - RNA, 19 nt, Homo sapiens
  misc_RNA (1)...(19): siRNA sense strand
ugaggaaagcaguggaaac

SEQ ID NO: 2613356 - RNA, 19 nt, Homo sapiens
  misc_RNA (1)...(19): siRNA sense strand
cgagcagcuaaaugugaaa

SEQ ID NO: 2613357 - RNA, 19 nt, Homo sapiens
  misc_RNA (1)...(19): siRNA sense strand
guaaacuaccaaaggacca

SEQ ID NO: 2613358 - RNA, 19 nt, Homo sapiens
  misc_RNA (1)...(19): siRNA sense strand
ugagaaguuaaauggagua

SEQ ID NO: 2613359 - RNA, 19 nt, Homo sapiens
  misc_RNA (1)...(19): siRNA sense strand
gauacaagugaaacagcau

SEQ ID NO: 2613360 - RNA, 19 nt, Homo sapiens
  misc_RNA (1)...(19): siRNA sense strand
gugaaacagcauuccagaa

SEQ ID NO: 2613361 - RNA, 19 nt, Homo sapiens
  misc_RNA (1)...(19): siRNA sense strand
gguuagaaauguauaucac

SEQ ID NO: 2613362 - RNA, 19 nt, Homo sapiens
  misc_RNA (1)...(19): siRNA sense strand
gaaacaaugcccaggcucu

SEQ ID NO: 2613363 - RNA, 19 nt, Homo sapiens
  misc_RNA (1)...(19): siRNA sense strand
ucgagaacgaagaaagaaa

SEQ ID NO: 2613364 - RNA, 19 nt, Homo sapiens
  misc_RNA (1)...(19): siRNA sense strand
gaacaggcuucgagaacga

SEQ ID NO: 2613365 - RNA, 19 nt, Homo sapiens
  misc_RNA (1)...(19): siRNA sense strand
gaacgaagaaagaaacaga

SEQ ID NO: 2613366 - RNA, 19 nt, Homo sapiens
  misc_RNA (1)...(19): siRNA sense strand
gugaagaguuacuagcuca

SEQ ID NO: 2613367 - RNA, 19 nt, Homo sapiens
  misc_RNA (1)...(19): siRNA sense strand
ugagaagggcguagaccau

SEQ ID NO: 2613368 - RNA, 19 nt, Homo sapiens
  misc_RNA (1)...(19): siRNA sense strand
gugaauaugagaagggcgu

SEQ ID NO: 2613369 - RNA, 19 nt, Homo sapiens
  misc_RNA (1)...(19): siRNA sense strand
gagaacgaagaaagaaaca

SEQ ID NO: 2613370 - RNA, 19 nt, Homo sapiens
  misc_RNA (1)...(19): siRNA sense strand
ccuugaagaaauacagcuu

SEQ ID NO: 2613371 - RNA, 19 nt, Homo sapiens
  misc_RNA (1)...(19): siRNA sense strand
aagaaauacagcuugguga

SEQ ID NO: 2613372 - RNA, 19 nt, Homo sapiens
  misc_RNA (1)...(19): siRNA sense strand
cugcaggucuuacagcaaa

SEQ ID NO: 2613373 - RNA, 19 nt, Homo sapiens
  misc_RNA (1)...(19): siRNA sense strand
ccaucugacaaaugcaauu

SEQ ID NO: 2613374 - RNA, 19 nt, Homo sapiens
  misc_RNA (1)...(19): siRNA sense strand
agaaagaaacagaagcuug

SEQ ID NO: 2613375 - RNA, 19 nt, Homo sapiens
  misc_RNA (1)...(19): siRNA sense strand
gaacaaagguauuggcaga

SEQ ID NO: 2613376 - RNA, 19 nt, Homo sapiens
  misc_RNA (1)...(19): siRNA sense strand
cuuaaucagccucgggaaa

SEQ ID NO: 2613377 - RNA, 19 nt, Homo sapiens
  misc_RNA (1)...(19): siRNA sense strand
cagaaauuaacaaggaaca

SEQ ID NO: 2613378 - RNA, 19 nt, Homo sapiens
  misc_RNA (1)...(19): siRNA sense strand
agguauuggcagaagauuu

SEQ ID NO: 2613379 - RNA, 19 nt, Homo sapiens
  misc_RNA (1)...(19): siRNA sense strand
aggaaacaaguccgggaua

SEQ ID NO: 2613380 - RNA, 19 nt, Homo sapiens
  misc_RNA (1)...(19): siRNA sense strand
cugaaaaguuaaucaccaa

SEQ ID NO: 2613381 - RNA, 19 nt, Homo sapiens
  misc_RNA (1)...(19): siRNA sense strand
gugcuaucaaagagcgaau

SEQ ID NO: 2613382 - RNA, 19 nt, Homo sapiens
  misc_RNA (1)...(19): siRNA sense strand
aguuaaugcaacaggacca

SEQ ID NO: 2613383 - RNA, 19 nt, Homo sapiens
  misc_RNA (1)...(19): siRNA sense strand
cgggauacuuuggcagcaa

SEQ ID NO: 2613384 - RNA, 19 nt, Homo sapiens
  misc_RNA (1)...(19): siRNA sense strand
ggaaaagaaaagaggcacu

SEQ ID NO: 2613385 - RNA, 19 nt, Homo sapiens
  misc_RNA (1)...(19): siRNA sense strand
cgggaaaagaaaagaggca

SEQ ID NO: 2613386 - RNA, 19 nt, Homo sapiens
  misc_RNA (1)...(19): siRNA sense strand
gaucauuagcacagagccu

SEQ ID NO: 2613387 - RNA, 19 nt, Homo sapiens
  misc_RNA (1)...(19): siRNA sense strand
aagaaaagaggcacugaaa

SEQ ID NO: 2613388 - RNA, 19 nt, Homo sapiens
  misc_RNA (1)...(19): siRNA sense strand
agaaauggaaacagacagu

SEQ ID NO: 2613389 - RNA, 19 nt, Homo sapiens
  misc_RNA (1)...(19): siRNA sense strand
aagcaguaauaaaugccua

SEQ ID NO: 2613390 - RNA, 19 nt, Homo sapiens
  misc_RNA (1)...(19): siRNA sense strand
agacaguggaguaccucaa

SEQ ID NO: 2613391 - RNA, 19 nt, Homo sapiens
  misc_RNA (1)...(19): siRNA sense strand
gcaaagacucaacaagcga

SEQ ID NO: 2613392 - RNA, 19 nt, Homo sapiens
  misc_RNA (1)...(19): siRNA sense strand
agaaaagaggcacugaaaa

SEQ ID NO: 2613393 - RNA, 19 nt, Homo sapiens
  misc_RNA (1)...(19): siRNA sense strand
ccucaaaacacuggaauga

SEQ ID NO: 2613394 - RNA, 19 nt, Homo sapiens
  misc_RNA (1)...(19): siRNA sense strand
ugguugauagacaggcaaa

SEQ ID NO: 2613395 - RNA, 19 nt, Homo sapiens
  misc_RNA (1)...(19): siRNA sense strand
cgaaggagguggaggagac

SEQ ID NO: 2613396 - RNA, 19 nt, Homo sapiens
  misc_RNA (1)...(19): siRNA sense strand
aggcgaaggagguggagga

SEQ ID NO: 2613397 - RNA, 19 nt, Homo sapiens
  misc_RNA (1)...(19): siRNA sense strand
ggcuagaggccuucgucaa

SEQ ID NO: 2613398 - RNA, 19 nt, Homo sapiens
  misc_RNA (1)...(19): siRNA sense strand
ucgucaagaugguuggaca

SEQ ID NO: 2613399 - RNA, 19 nt, Homo sapiens
  misc_RNA (1)...(19): siRNA sense strand
ccuuaaggccaaacugaca

SEQ ID NO: 2613400 - RNA, 19 nt, Homo sapiens
  misc_RNA (1)...(19): siRNA sense strand
aggagaccaucgagggcau

SEQ ID NO: 2613401 - RNA, 19 nt, Homo sapiens
  misc_RNA (1)...(19): siRNA sense strand
cgaaggagguggaggagac

SEQ ID NO: 2613402 - RNA, 19 nt, Homo sapiens
  misc_RNA (1)...(19): siRNA sense strand
aggcgaaggagguggagga

SEQ ID NO: 2613403 - RNA, 19 nt, Homo sapiens
  misc_RNA (1)...(19): siRNA sense strand
ggcuagaggccuucgucaa

SEQ ID NO: 2613404 - RNA, 19 nt, Homo sapiens
  misc_RNA (1)...(19): siRNA sense strand
ucgucaagaugguuggaca

SEQ ID NO: 2613405 - RNA, 19 nt, Homo sapiens
  misc_RNA (1)...(19): siRNA sense strand
ccuuaaggccaaacugaca

SEQ ID NO: 2613406 - RNA, 19 nt, Homo sapiens
  misc_RNA (1)...(19): siRNA sense strand
aggagaccaucgagggcau

SEQ ID NO: 2613407 - RNA, 19 nt, Homo sapiens
  misc_RNA (1)...(19): siRNA sense strand
gugucaaauuugugggaaa

SEQ ID NO: 2613408 - RNA, 19 nt, Homo sapiens
  misc_RNA (1)...(19): siRNA sense strand
auguaaacaaugugggaaa

SEQ ID NO: 2613409 - RNA, 19 nt, Homo sapiens
  misc_RNA (1)...(19): siRNA sense strand
auguaagagaugugggaaa

SEQ ID NO: 2613410 - RNA, 19 nt, Homo sapiens
  misc_RNA (1)...(19): siRNA sense strand
gugaugugguagagagauu

SEQ ID NO: 2613411 - RNA, 19 nt, Homo sapiens
  misc_RNA (1)...(19): siRNA sense strand
gguagagagauuugguaaa

SEQ ID NO: 2613412 - RNA, 19 nt, Homo sapiens
  misc_RNA (1)...(19): siRNA sense strand
ggagaaaccuuaagccaga

SEQ ID NO: 2613413 - RNA, 19 nt, Homo sapiens
  misc_RNA (1)...(19): siRNA sense strand
auguaaacagugugggaaa

SEQ ID NO: 2613414 - RNA, 19 nt, Homo sapiens
  misc_RNA (1)...(19): siRNA sense strand
auguaaacacugugguaaa

SEQ ID NO: 2613415 - RNA, 19 nt, Homo sapiens
  misc_RNA (1)...(19): siRNA sense strand
acauaagcagugugggaaa

SEQ ID NO: 2613416 - RNA, 19 nt, Homo sapiens
  misc_RNA (1)...(19): siRNA sense strand
auguaaggagugugggaaa

SEQ ID NO: 2613417 - RNA, 19 nt, Homo sapiens
  misc_RNA (1)...(19): siRNA sense strand
augcaagcaaugugggaaa

SEQ ID NO: 2613418 - RNA, 19 nt, Homo sapiens
  misc_RNA (1)...(19): siRNA sense strand
auguaagcaaugugggaaa

SEQ ID NO: 2613419 - RNA, 19 nt, Homo sapiens
  misc_RNA (1)...(19): siRNA sense strand
agagaugugaugcgagaaa

SEQ ID NO: 2613420 - RNA, 19 nt, Homo sapiens
  misc_RNA (1)...(19): siRNA sense strand
gagaagucauaauggguca

SEQ ID NO: 2613421 - RNA, 19 nt, Homo sapiens
  misc_RNA (1)...(19): siRNA sense strand
aguugauacuggacacaaa

SEQ ID NO: 2613422 - RNA, 19 nt, Homo sapiens
  misc_RNA (1)...(19): siRNA sense strand
aguaaaagguggagaugga

SEQ ID NO: 2613423 - RNA, 19 nt, Homo sapiens
  misc_RNA (1)...(19): siRNA sense strand
ugguagagagauuugguaa

SEQ ID NO: 2613424 - RNA, 19 nt, Homo sapiens
  misc_RNA (1)...(19): siRNA sense strand
gugggaaaggcuuaaguua

SEQ ID NO: 2613425 - RNA, 19 nt, Homo sapiens
  misc_RNA (1)...(19): siRNA sense strand
ugggaaaggcuuaaguuau

SEQ ID NO: 2613426 - RNA, 19 nt, Homo sapiens
  misc_RNA (1)...(19): siRNA sense strand
acagagaugugaugcgaga

SEQ ID NO: 2613427 - RNA, 19 nt, Homo sapiens
  misc_RNA (1)...(19): siRNA sense strand
auaggaaugaaaugggaaa

SEQ ID NO: 2613428 - RNA, 19 nt, Homo sapiens
  misc_RNA (1)...(19): siRNA sense strand
augugaauugugugggaaa

SEQ ID NO: 2613429 - RNA, 19 nt, Homo sapiens
  misc_RNA (1)...(19): siRNA sense strand
gccucacgcuggaaagaaa

SEQ ID NO: 2613430 - RNA, 19 nt, Homo sapiens
  misc_RNA (1)...(19): siRNA sense strand
cccuaugauuguaaggaau

SEQ ID NO: 2613431 - RNA, 19 nt, Homo sapiens
  misc_RNA (1)...(19): siRNA sense strand
aacucacacuggagagaaa

SEQ ID NO: 2613432 - RNA, 19 nt, Homo sapiens
  misc_RNA (1)...(19): siRNA sense strand
aacucacacuggagagaaa

SEQ ID NO: 2613433 - RNA, 19 nt, Homo sapiens
  misc_RNA (1)...(19): siRNA sense strand
acagugaagaggagccuua

SEQ ID NO: 2613434 - RNA, 19 nt, Homo sapiens
  misc_RNA (1)...(19): siRNA sense strand
ccuuaagccagauucgaaa

SEQ ID NO: 2613435 - RNA, 19 nt, Homo sapiens
  misc_RNA (1)...(19): siRNA sense strand
ugugaauggagaagucaua

SEQ ID NO: 2613436 - RNA, 19 nt, Homo sapiens
  misc_RNA (1)...(19): siRNA sense strand
uuguaaggaauguggaaaa

SEQ ID NO: 2613437 - RNA, 19 nt, Homo sapiens
  misc_RNA (1)...(19): siRNA sense strand
gcgagaaaccauuaggaac

SEQ ID NO: 2613438 - RNA, 19 nt, Homo sapiens
  misc_RNA (1)...(19): siRNA sense strand
gauuguaaggaauguggaa

SEQ ID NO: 2613439 - RNA, 19 nt, Homo sapiens
  misc_RNA (1)...(19): siRNA sense strand
aacucacacucuagagaaa

SEQ ID NO: 2613440 - RNA, 19 nt, Homo sapiens
  misc_RNA (1)...(19): siRNA sense strand
ggaccuuauaaaugugaau

SEQ ID NO: 2613441 - RNA, 19 nt, Homo sapiens
  misc_RNA (1)...(19): siRNA sense strand
ucaaagacaugaaaggacu

SEQ ID NO: 2613442 - RNA, 19 nt, Homo sapiens
  misc_RNA (1)...(19): siRNA sense strand
ccgggagugucaugaauau

SEQ ID NO: 2613443 - RNA, 19 nt, Homo sapiens
  misc_RNA (1)...(19): siRNA sense strand
caggagaaauccaaggugu

SEQ ID NO: 2613444 - RNA, 19 nt, Homo sapiens
  misc_RNA (1)...(19): siRNA sense strand
acgaauucaugaaggaacu

SEQ ID NO: 2613445 - RNA, 19 nt, Homo sapiens
  misc_RNA (1)...(19): siRNA sense strand
gugugaugugguagagaga

SEQ ID NO: 2613446 - RNA, 19 nt, Homo sapiens
  misc_RNA (1)...(19): siRNA sense strand
gcagugugggaaaggcuua

SEQ ID NO: 2613447 - RNA, 19 nt, Homo sapiens
  misc_RNA (1)...(19): siRNA sense strand
ccauaugaauguaagcagu

SEQ ID NO: 2613448 - RNA, 19 nt, Homo sapiens
  misc_RNA (1)...(19): siRNA sense strand
ccuucgaguacaugaaaga

SEQ ID NO: 2613449 - RNA, 19 nt, Homo sapiens
  misc_RNA (1)...(19): siRNA sense strand
cagagaagucauauacaca

SEQ ID NO: 2613450 - RNA, 19 nt, Homo sapiens
  misc_RNA (1)...(19): siRNA sense strand
auguggaagcagugugaau

SEQ ID NO: 2613451 - RNA, 19 nt, Homo sapiens
  misc_RNA (1)...(19): siRNA sense strand
gaagacacaugauggcaca

SEQ ID NO: 2613452 - RNA, 19 nt, Homo sapiens
  misc_RNA (1)...(19): siRNA sense strand
aacacacacuggagagcaa

SEQ ID NO: 2613453 - RNA, 19 nt, Homo sapiens
  misc_RNA (1)...(19): siRNA sense strand
ggacacaaacaccgggagu

SEQ ID NO: 2613454 - RNA, 19 nt, Homo sapiens
  misc_RNA (1)...(19): siRNA sense strand
aggauguggcugugaacuu

SEQ ID NO: 2613455 - RNA, 19 nt, Homo sapiens
  misc_RNA (1)...(19): siRNA sense strand
gaauguaagcaauguggga

SEQ ID NO: 2613456 - RNA, 19 nt, Homo sapiens
  misc_RNA (1)...(19): siRNA sense strand
gaauguaagcaaugcagga

SEQ ID NO: 2613457 - RNA, 19 nt, Homo sapiens
  misc_RNA (1)...(19): siRNA sense strand
uggagauggcccucauaaa

SEQ ID NO: 2613458 - RNA, 19 nt, Homo sapiens
  misc_RNA (1)...(19): siRNA sense strand
gaauguaaggaguguggga

SEQ ID NO: 2613459 - RNA, 19 nt, Homo sapiens
  misc_RNA (1)...(19): siRNA sense strand
aagcagugugaauggagaa

SEQ ID NO: 2613460 - RNA, 19 nt, Homo sapiens
  misc_RNA (1)...(19): siRNA sense strand
gguaguaaaagguggagau

SEQ ID NO: 2613461 - RNA, 19 nt, Homo sapiens
  misc_RNA (1)...(19): siRNA sense strand
uguucaaauuagugggcaa

SEQ ID NO: 2613462 - RNA, 19 nt, Homo sapiens
  misc_RNA (1)...(19): siRNA sense strand
cguauggugcaaugguaaa

SEQ ID NO: 2613463 - RNA, 19 nt, Homo sapiens
  misc_RNA (1)...(19): siRNA sense strand
guucaaauuagugggcaaa

SEQ ID NO: 2613464 - RNA, 19 nt, Homo sapiens
  misc_RNA (1)...(19): siRNA sense strand
guuuguagaugaugggacu

SEQ ID NO: 2613465 - RNA, 19 nt, Homo sapiens
  misc_RNA (1)...(19): siRNA sense strand
acguauggugcaaugguaa

SEQ ID NO: 2613466 - RNA, 19 nt, Homo sapiens
  misc_RNA (1)...(19): siRNA sense strand
agaaaagaguggauguuca

SEQ ID NO: 2613467 - RNA, 19 nt, Homo sapiens
  misc_RNA (1)...(19): siRNA sense strand
gggaaaagucucaagaagu

SEQ ID NO: 2613468 - RNA, 19 nt, Homo sapiens
  misc_RNA (1)...(19): siRNA sense strand
gggugaguuuguagaugau

SEQ ID NO: 2613469 - RNA, 19 nt, Homo sapiens
  misc_RNA (1)...(19): siRNA sense strand
auguagauggaaaggaaga

SEQ ID NO: 2613470 - RNA, 19 nt, Homo sapiens
  misc_RNA (1)...(19): siRNA sense strand
ucaagaaguauauggagga

SEQ ID NO: 2613471 - RNA, 19 nt, Homo sapiens
  misc_RNA (1)...(19): siRNA sense strand
cgaauuugaacaugggacu

SEQ ID NO: 2613472 - RNA, 19 nt, Homo sapiens
  misc_RNA (1)...(19): siRNA sense strand
auggaaaggaagagauaag

SEQ ID NO: 2613473 - RNA, 19 nt, Homo sapiens
  misc_RNA (1)...(19): siRNA sense strand
agaaguauauggaggacag

SEQ ID NO: 2613474 - RNA, 19 nt, Homo sapiens
  misc_RNA (1)...(19): siRNA sense strand
auuagugggcaaagaaaca

SEQ ID NO: 2613475 - RNA, 19 nt, Homo sapiens
  misc_RNA (1)...(19): siRNA sense strand
ucucguagcuguuugggau

SEQ ID NO: 2613476 - RNA, 19 nt, Homo sapiens
  misc_RNA (1)...(19): siRNA sense strand
acauggauggugagaacuu

SEQ ID NO: 2613477 - RNA, 19 nt, Homo sapiens
  misc_RNA (1)...(19): siRNA sense strand
ugggacuacaucaggcaaa

SEQ ID NO: 2613478 - RNA, 19 nt, Homo sapiens
  misc_RNA (1)...(19): siRNA sense strand
gaccauaaauauagacgcu

SEQ ID NO: 2613479 - RNA, 19 nt, Homo sapiens
  misc_RNA (1)...(19): siRNA sense strand
ccauauugucagaggagau

SEQ ID NO: 2613480 - RNA, 19 nt, Homo sapiens
  misc_RNA (1)...(19): siRNA sense strand
agguguuccuucagguaaa

SEQ ID NO: 2613481 - RNA, 19 nt, Homo sapiens
  misc_RNA (1)...(19): siRNA sense strand
guggaaauauuaaaggcau

SEQ ID NO: 2613482 - RNA, 19 nt, Homo sapiens
  misc_RNA (1)...(19): siRNA sense strand
guagcagcucuuugggaaa

SEQ ID NO: 2613483 - RNA, 19 nt, Homo sapiens
  misc_RNA (1)...(19): siRNA sense strand
uuaaaggcauugaaggaca

SEQ ID NO: 2613484 - RNA, 19 nt, Homo sapiens
  misc_RNA (1)...(19): siRNA sense strand
aguagcagcucuuugggaa

SEQ ID NO: 2613485 - RNA, 19 nt, Homo sapiens
  misc_RNA (1)...(19): siRNA sense strand
acauauacugagagcuaca

SEQ ID NO: 2613486 - RNA, 19 nt, Homo sapiens
  misc_RNA (1)...(19): siRNA sense strand
aagcagacagagagcugaa

SEQ ID NO: 2613487 - RNA, 19 nt, Homo sapiens
  misc_RNA (1)...(19): siRNA sense strand
ucuaauuggagaaggaaac

SEQ ID NO: 2613488 - RNA, 19 nt, Homo sapiens
  misc_RNA (1)...(19): siRNA sense strand
ugaaaaugcagcugauaga

SEQ ID NO: 2613489 - RNA, 19 nt, Homo sapiens
  misc_RNA (1)...(19): siRNA sense strand
gaaaccaucuaauuggaga

SEQ ID NO: 2613490 - RNA, 19 nt, Homo sapiens
  misc_RNA (1)...(19): siRNA sense strand
aggugugcuuacaaacaaa

SEQ ID NO: 2613491 - RNA, 19 nt, Homo sapiens
  misc_RNA (1)...(19): siRNA sense strand
cuguagaaugggccaaauu

SEQ ID NO: 2613492 - RNA, 19 nt, Homo sapiens
  misc_RNA (1)...(19): siRNA sense strand
ugauucaagcagacagaga

SEQ ID NO: 2613493 - RNA, 19 nt, Homo sapiens
  misc_RNA (1)...(19): siRNA sense strand
gguggaaauauuaaaggca

SEQ ID NO: 2613494 - RNA, 19 nt, Homo sapiens
  misc_RNA (1)...(19): siRNA sense strand
agucagcaaaguagagaaa

SEQ ID NO: 2613495 - RNA, 19 nt, Homo sapiens
  misc_RNA (1)...(19): siRNA sense strand
cuguaguugcucugagaaa

SEQ ID NO: 2613496 - RNA, 19 nt, Homo sapiens
  misc_RNA (1)...(19): siRNA sense strand
ggagagagaaagugggaag

SEQ ID NO: 2613497 - RNA, 19 nt, Homo sapiens
  misc_RNA (1)...(19): siRNA sense strand
agcaacauggagagagaaa

SEQ ID NO: 2613498 - RNA, 19 nt, Homo sapiens
  misc_RNA (1)...(19): siRNA sense strand
gagaaagagcauuggcugu

SEQ ID NO: 2613499 - RNA, 19 nt, Homo sapiens
  misc_RNA (1)...(19): siRNA sense strand
ugacacugcugcuggguga

SEQ ID NO: 2613500 - RNA, 19 nt, Homo sapiens
  misc_RNA (1)...(19): siRNA sense strand
ggaccggaacucugggaga

SEQ ID NO: 2613501 - RNA, 19 nt, Homo sapiens
  misc_RNA (1)...(19): siRNA sense strand
aaaccauggaagacacaaa

SEQ ID NO: 2613502 - RNA, 19 nt, Homo sapiens
  misc_RNA (1)...(19): siRNA sense strand
gaauaucuccagaggcaga

SEQ ID NO: 2613503 - RNA, 19 nt, Homo sapiens
  misc_RNA (1)...(19): siRNA sense strand
cugcaggagcugaggaauc

SEQ ID NO: 2613504 - RNA, 19 nt, Homo sapiens
  misc_RNA (1)...(19): siRNA sense strand
gcaaaguagagaaagagca

SEQ ID NO: 2613505 - RNA, 19 nt, Homo sapiens
  misc_RNA (1)...(19): siRNA sense strand
cguuauaaguuugacguga

SEQ ID NO: 2613506 - RNA, 19 nt, Homo sapiens
  misc_RNA (1)...(19): siRNA sense strand
guagcagaucggugccaaa

SEQ ID NO: 2613507 - RNA, 19 nt, Homo sapiens
  misc_RNA (1)...(19): siRNA sense strand
guauguucuccuuuggaaa

SEQ ID NO: 2613508 - RNA, 19 nt, Homo sapiens
  misc_RNA (1)...(19): siRNA sense strand
cuggagaagugcuggugga

SEQ ID NO: 2613509 - RNA, 19 nt, Homo sapiens
  misc_RNA (1)...(19): siRNA sense strand
acuuuggagauaacagaaa

SEQ ID NO: 2613510 - RNA, 19 nt, Homo sapiens
  misc_RNA (1)...(19): siRNA sense strand
ucagcaggugcaugggaaa

SEQ ID NO: 2613511 - RNA, 19 nt, Homo sapiens
  misc_RNA (1)...(19): siRNA sense strand
caagccaagcaguggaaaa

SEQ ID NO: 2613512 - RNA, 19 nt, Homo sapiens
  misc_RNA (1)...(19): siRNA sense strand
gguaaucucuuguugcuga

SEQ ID NO: 2613513 - RNA, 19 nt, Homo sapiens
  misc_RNA (1)...(19): siRNA sense strand
ugagaagcuucgaguggca

SEQ ID NO: 2613514 - RNA, 19 nt, Homo sapiens
  misc_RNA (1)...(19): siRNA sense strand
acccagcgauacagagaau

SEQ ID NO: 2613515 - RNA, 19 nt, Homo sapiens
  misc_RNA (1)...(19): siRNA sense strand
uggcagagcuggagcgcau

SEQ ID NO: 2613516 - RNA, 19 nt, Homo sapiens
  misc_RNA (1)...(19): siRNA sense strand
gcaagaagcuggagcacag

SEQ ID NO: 2613517 - RNA, 19 nt, Homo sapiens
  misc_RNA (1)...(19): siRNA sense strand
gcaauuucauggaggacga

SEQ ID NO: 2613518 - RNA, 19 nt, Homo sapiens
  misc_RNA (1)...(19): siRNA sense strand
acgaaguggaggaugacua

SEQ ID NO: 2613519 - RNA, 19 nt, Homo sapiens
  misc_RNA (1)...(19): siRNA sense strand
caugagaacuccaagcaga

SEQ ID NO: 2613520 - RNA, 19 nt, Homo sapiens
  misc_RNA (1)...(19): siRNA sense strand
aggaugaggaggagaagga

SEQ ID NO: 2613521 - RNA, 19 nt, Homo sapiens
  misc_RNA (1)...(19): siRNA sense strand
gaugaggaggagaaggaga

SEQ ID NO: 2613522 - RNA, 19 nt, Homo sapiens
  misc_RNA (1)...(19): siRNA sense strand
ucaagagcugggaggacaa

SEQ ID NO: 2613523 - RNA, 19 nt, Homo sapiens
  misc_RNA (1)...(19): siRNA sense strand
gcugggaggaugaggagga

SEQ ID NO: 2613524 - RNA, 19 nt, Homo sapiens
  misc_RNA (1)...(19): siRNA sense strand
caaucagcaaggagaugaa

SEQ ID NO: 2613525 - RNA, 19 nt, Homo sapiens
  misc_RNA (1)...(19): siRNA sense strand
cgugaaacuccauggaaac

SEQ ID NO: 2613526 - RNA, 19 nt, Homo sapiens
  misc_RNA (1)...(19): siRNA sense strand
gagcaauggcugucgucca

SEQ ID NO: 2613527 - RNA, 19 nt, Homo sapiens
  misc_RNA (1)...(19): siRNA sense strand
aggacaaucagcaaggaga

SEQ ID NO: 2613528 - RNA, 19 nt, Homo sapiens
  misc_RNA (1)...(19): siRNA sense strand
augagaacuccaagcagaa

SEQ ID NO: 2613529 - RNA, 19 nt, Homo sapiens
  misc_RNA (1)...(19): siRNA sense strand
ccgccaucaaccuggacaa

SEQ ID NO: 2613530 - RNA, 19 nt, Homo sapiens
  misc_RNA (1)...(19): siRNA sense strand
gcugcgacgaggauggcua

SEQ ID NO: 2613531 - RNA, 19 nt, Homo sapiens
  misc_RNA (1)...(19): siRNA sense strand
ccaagaagaagccaggcau

SEQ ID NO: 2613532 - RNA, 19 nt, Homo sapiens
  misc_RNA (1)...(19): siRNA sense strand
aggaggagaaggagacgga

SEQ ID NO: 2613533 - RNA, 19 nt, Homo sapiens
  misc_RNA (1)...(19): siRNA sense strand
uggcagagcuggagcgcau

SEQ ID NO: 2613534 - RNA, 19 nt, Homo sapiens
  misc_RNA (1)...(19): siRNA sense strand
gcaagaagcuggagcacag

SEQ ID NO: 2613535 - RNA, 19 nt, Homo sapiens
  misc_RNA (1)...(19): siRNA sense strand
gcaauuucauggaggacga

SEQ ID NO: 2613536 - RNA, 19 nt, Homo sapiens
  misc_RNA (1)...(19): siRNA sense strand
acgaaguggaggaugacua

SEQ ID NO: 2613537 - RNA, 19 nt, Homo sapiens
  misc_RNA (1)...(19): siRNA sense strand
caugagaacuccaagcaga

SEQ ID NO: 2613538 - RNA, 19 nt, Homo sapiens
  misc_RNA (1)...(19): siRNA sense strand
aggaugaggaggagaagga

SEQ ID NO: 2613539 - RNA, 19 nt, Homo sapiens
  misc_RNA (1)...(19): siRNA sense strand
gaugaggaggagaaggaga

SEQ ID NO: 2613540 - RNA, 19 nt, Homo sapiens
  misc_RNA (1)...(19): siRNA sense strand
ucaagagcugggaggacaa

SEQ ID NO: 2613541 - RNA, 19 nt, Homo sapiens
  misc_RNA (1)...(19): siRNA sense strand
gcugggaggaugaggagga

SEQ ID NO: 2613542 - RNA, 19 nt, Homo sapiens
  misc_RNA (1)...(19): siRNA sense strand
caaucagcaaggagaugaa

SEQ ID NO: 2613543 - RNA, 19 nt, Homo sapiens
  misc_RNA (1)...(19): siRNA sense strand
cgugaaacuccauggaaac

SEQ ID NO: 2613544 - RNA, 19 nt, Homo sapiens
  misc_RNA (1)...(19): siRNA sense strand
gagcaauggcugucgucca

SEQ ID NO: 2613545 - RNA, 19 nt, Homo sapiens
  misc_RNA (1)...(19): siRNA sense strand
aggacaaucagcaaggaga

SEQ ID NO: 2613546 - RNA, 19 nt, Homo sapiens
  misc_RNA (1)...(19): siRNA sense strand
augagaacuccaagcagaa

SEQ ID NO: 2613547 - RNA, 19 nt, Homo sapiens
  misc_RNA (1)...(19): siRNA sense strand
ccgccaucaaccuggacaa

SEQ ID NO: 2613548 - RNA, 19 nt, Homo sapiens
  misc_RNA (1)...(19): siRNA sense strand
gcugcgacgaggauggcua

SEQ ID NO: 2613549 - RNA, 19 nt, Homo sapiens
  misc_RNA (1)...(19): siRNA sense strand
ccaagaagaagccaggcau

SEQ ID NO: 2613550 - RNA, 19 nt, Homo sapiens
  misc_RNA (1)...(19): siRNA sense strand
aggaggagaaggagacgga

SEQ ID NO: 2613551 - RNA, 19 nt, Homo sapiens
  misc_RNA (1)...(19): siRNA sense strand
ccaucaaugugguccgaga

SEQ ID NO: 2613552 - RNA, 19 nt, Homo sapiens
  misc_RNA (1)...(19): siRNA sense strand
gaacgaagguguugcacag

SEQ ID NO: 2613553 - RNA, 19 nt, Homo sapiens
  misc_RNA (1)...(19): siRNA sense strand
auccagaagcugagugaca

SEQ ID NO: 2613554 - RNA, 19 nt, Homo sapiens
  misc_RNA (1)...(19): siRNA sense strand
cguggaggaaccaugguaa

SEQ ID NO: 2613555 - RNA, 19 nt, Homo sapiens
  misc_RNA (1)...(19): siRNA sense strand
acucaagaaccuggagcua

SEQ ID NO: 2613556 - RNA, 19 nt, Homo sapiens
  misc_RNA (1)...(19): siRNA sense strand
ggaacgaagguguugcaca

SEQ ID NO: 2613557 - RNA, 19 nt, Homo sapiens
  misc_RNA (1)...(19): siRNA sense strand
ccugauauccagaagcuga

SEQ ID NO: 2613558 - RNA, 19 nt, Homo sapiens
  misc_RNA (1)...(19): siRNA sense strand
ccaguuagcgcguggagga

SEQ ID NO: 2613559 - RNA, 19 nt, Homo sapiens
  misc_RNA (1)...(19): siRNA sense strand
gcgaggaagcacugaucca

SEQ ID NO: 2613560 - RNA, 19 nt, Homo sapiens
  misc_RNA (1)...(19): siRNA sense strand
aaauaugauccaaggaaac

SEQ ID NO: 2613561 - RNA, 19 nt, Homo sapiens
  misc_RNA (1)...(19): siRNA sense strand
ccagaagcugagugacaga

SEQ ID NO: 2613562 - RNA, 19 nt, Homo sapiens
  misc_RNA (1)...(19): siRNA sense strand
ugauggacuucgagcaacu

SEQ ID NO: 2613563 - RNA, 19 nt, Homo sapiens
  misc_RNA (1)...(19): siRNA sense strand
acaggauguugauggacuu

SEQ ID NO: 2613564 - RNA, 19 nt, Homo sapiens
  misc_RNA (1)...(19): siRNA sense strand
ccgcugaggaauugagaaa

SEQ ID NO: 2613565 - RNA, 19 nt, Homo sapiens
  misc_RNA (1)...(19): siRNA sense strand
cugccaagguccagaaauu

SEQ ID NO: 2613566 - RNA, 19 nt, Homo sapiens
  misc_RNA (1)...(19): siRNA sense strand
gcguaugaucaaagacaaa

SEQ ID NO: 2613567 - RNA, 19 nt, Homo sapiens
  misc_RNA (1)...(19): siRNA sense strand
gggaacaaguagagcaagu

SEQ ID NO: 2613568 - RNA, 19 nt, Homo sapiens
  misc_RNA (1)...(19): siRNA sense strand
ucuaaaggcagcagugaaa

SEQ ID NO: 2613569 - RNA, 19 nt, Homo sapiens
  misc_RNA (1)...(19): siRNA sense strand
ggaaugaagaagaugaaaa

SEQ ID NO: 2613570 - RNA, 19 nt, Homo sapiens
  misc_RNA (1)...(19): siRNA sense strand
ccaccgaagaggagcacaa

SEQ ID NO: 2613571 - RNA, 19 nt, Homo sapiens
  misc_RNA (1)...(19): siRNA sense strand
gaacugaaaaggaaagaaa

SEQ ID NO: 2613572 - RNA, 19 nt, Homo sapiens
  misc_RNA (1)...(19): siRNA sense strand
ccgaagaggagcacaaaga

SEQ ID NO: 2613573 - RNA, 19 nt, Homo sapiens
  misc_RNA (1)...(19): siRNA sense strand
gaaaaugauggcugggaaa

SEQ ID NO: 2613574 - RNA, 19 nt, Homo sapiens
  misc_RNA (1)...(19): siRNA sense strand
gagcagaccucuccgggaa

SEQ ID NO: 2613575 - RNA, 19 nt, Homo sapiens
  misc_RNA (1)...(19): siRNA sense strand
cagcucaacaacaggguaa

SEQ ID NO: 2613576 - RNA, 19 nt, Homo sapiens
  misc_RNA (1)...(19): siRNA sense strand
ccuaaaaccagaagaagua

SEQ ID NO: 2613577 - RNA, 19 nt, Homo sapiens
  misc_RNA (1)...(19): siRNA sense strand
guggaaucgguuuggaaua

SEQ ID NO: 2613578 - RNA, 19 nt, Homo sapiens
  misc_RNA (1)...(19): siRNA sense strand
acacagaugcuuugcggaa

SEQ ID NO: 2613579 - RNA, 19 nt, Homo sapiens
  misc_RNA (1)...(19): siRNA sense strand
guucagaaagcuaagaaau

SEQ ID NO: 2613580 - RNA, 19 nt, Homo sapiens
  misc_RNA (1)...(19): siRNA sense strand
agacaaaggcagggcgaga

SEQ ID NO: 2613581 - RNA, 19 nt, Homo sapiens
  misc_RNA (1)...(19): siRNA sense strand
uuggaaaggcgaugcuaaa

SEQ ID NO: 2613582 - RNA, 19 nt, Homo sapiens
  misc_RNA (1)...(19): siRNA sense strand
ccgggaacaaguagagcaa

SEQ ID NO: 2613583 - RNA, 19 nt, Homo sapiens
  misc_RNA (1)...(19): siRNA sense strand
gcuuaacaguccugcaaaa

SEQ ID NO: 2613584 - RNA, 19 nt, Homo sapiens
  misc_RNA (1)...(19): siRNA sense strand
caguauaugaccauggcaa

SEQ ID NO: 2613585 - RNA, 19 nt, Homo sapiens
  misc_RNA (1)...(19): siRNA sense strand
gauucaucauugugggaga

SEQ ID NO: 2613586 - RNA, 19 nt, Homo sapiens
  misc_RNA (1)...(19): siRNA sense strand
aguauaugaccauggcaaa

SEQ ID NO: 2613587 - RNA, 19 nt, Homo sapiens
  misc_RNA (1)...(19): siRNA sense strand
ggacacacuccuagcucua

SEQ ID NO: 2613588 - RNA, 19 nt, Homo sapiens
  misc_RNA (1)...(19): siRNA sense strand
caucaaagcuggacgacuc

SEQ ID NO: 2613589 - RNA, 19 nt, Homo sapiens
  misc_RNA (1)...(19): siRNA sense strand
aagaagauugaaacggaaa

SEQ ID NO: 2613590 - RNA, 19 nt, Homo sapiens
  misc_RNA (1)...(19): siRNA sense strand
caacuauggaauaagguuu

SEQ ID NO: 2613591 - RNA, 19 nt, Homo sapiens
  misc_RNA (1)...(19): siRNA sense strand
cggaauccacacagaacua

SEQ ID NO: 2613592 - RNA, 19 nt, Homo sapiens
  misc_RNA (1)...(19): siRNA sense strand
ugucaauacccuacaaaga

SEQ ID NO: 2613593 - RNA, 19 nt, Homo sapiens
  misc_RNA (1)...(19): siRNA sense strand
ccuacaaagacaaaguaau

SEQ ID NO: 2613594 - RNA, 19 nt, Homo sapiens
  misc_RNA (1)...(19): siRNA sense strand
caugaaggguaaacgucua

SEQ ID NO: 2613595 - RNA, 19 nt, Homo sapiens
  misc_RNA (1)...(19): siRNA sense strand
cugccagguccaagcaaua

SEQ ID NO: 2613596 - RNA, 19 nt, Homo sapiens
  misc_RNA (1)...(19): siRNA sense strand
aaaucaaagaccagacgaa

SEQ ID NO: 2613597 - RNA, 19 nt, Homo sapiens
  misc_RNA (1)...(19): siRNA sense strand
ggucauacucuguccguga

SEQ ID NO: 2613598 - RNA, 19 nt, Homo sapiens
  misc_RNA (1)...(19): siRNA sense strand
ccuuaaagacacaggauug

SEQ ID NO: 2613599 - RNA, 19 nt, Homo sapiens
  misc_RNA (1)...(19): siRNA sense strand
ucaaaaucaugguacgaaa

SEQ ID NO: 2613600 - RNA, 19 nt, Homo sapiens
  misc_RNA (1)...(19): siRNA sense strand
ccagaaacacagaugcuuu

SEQ ID NO: 2613601 - RNA, 19 nt, Homo sapiens
  misc_RNA (1)...(19): siRNA sense strand
uggcaugaacaguuggaau

SEQ ID NO: 2613602 - RNA, 19 nt, Homo sapiens
  misc_RNA (1)...(19): siRNA sense strand
gugaugaagcgcugguaga

SEQ ID NO: 2613603 - RNA, 19 nt, Homo sapiens
  misc_RNA (1)...(19): siRNA sense strand
ggcaacagauaaugcaaaa

SEQ ID NO: 2613604 - RNA, 19 nt, Homo sapiens
  misc_RNA (1)...(19): siRNA sense strand
gauguugcauggaggucaa

SEQ ID NO: 2613605 - RNA, 19 nt, Homo sapiens
  misc_RNA (1)...(19): siRNA sense strand
ccugaaaggcaaagcagca

SEQ ID NO: 2613606 - RNA, 19 nt, Homo sapiens
  misc_RNA (1)...(19): siRNA sense strand
ccauggaauuugugauaac

SEQ ID NO: 2613607 - RNA, 19 nt, Homo sapiens
  misc_RNA (1)...(19): siRNA sense strand
agguggacccugagguauu

SEQ ID NO: 2613608 - RNA, 19 nt, Homo sapiens
  misc_RNA (1)...(19): siRNA sense strand
gaggccagcuagugaccaa

SEQ ID NO: 2613609 - RNA, 19 nt, Homo sapiens
  misc_RNA (1)...(19): siRNA sense strand
ggaaacaugggguggguau

SEQ ID NO: 2613610 - RNA, 19 nt, Homo sapiens
  misc_RNA (1)...(19): siRNA sense strand
ggaauauggcauuugacuu

SEQ ID NO: 2613611 - RNA, 19 nt, Homo sapiens
  misc_RNA (1)...(19): siRNA sense strand
uaagaagauugaaacggaa

SEQ ID NO: 2613612 - RNA, 19 nt, Homo sapiens
  misc_RNA (1)...(19): siRNA sense strand
aggcaacagauaaugcaaa

SEQ ID NO: 2613613 - RNA, 19 nt, Homo sapiens
  misc_RNA (1)...(19): siRNA sense strand
cagagaaaccccuggaaga

SEQ ID NO: 2613614 - RNA, 19 nt, Homo sapiens
  misc_RNA (1)...(19): siRNA sense strand
gguccaagcaauauagcca

SEQ ID NO: 2613615 - RNA, 19 nt, Homo sapiens
  misc_RNA (1)...(19): siRNA sense strand
aaggaaacagaauggaauu

SEQ ID NO: 2613616 - RNA, 19 nt, Homo sapiens
  misc_RNA (1)...(19): siRNA sense strand
gcuaagaaauccaccgaag

SEQ ID NO: 2613617 - RNA, 19 nt, Homo sapiens
  misc_RNA (1)...(19): siRNA sense strand
caacaaacuuauggaagca

SEQ ID NO: 2613618 - RNA, 19 nt, Homo sapiens
  misc_RNA (1)...(19): siRNA sense strand
ccagaauggauuguggaaa

SEQ ID NO: 2613619 - RNA, 19 nt, Homo sapiens
  misc_RNA (1)...(19): siRNA sense strand
uuucccaggaggaggauaa

SEQ ID NO: 2613620 - RNA, 19 nt, Homo sapiens
  misc_RNA (1)...(19): siRNA sense strand
agggaaauggaauggucua

SEQ ID NO: 2613621 - RNA, 19 nt, Homo sapiens
  misc_RNA (1)...(19): siRNA sense strand
aagucaaagucaauggcau

SEQ ID NO: 2613622 - RNA, 19 nt, Homo sapiens
  misc_RNA (1)...(19): siRNA sense strand
aggaggaggauaaggcuga

SEQ ID NO: 2613623 - RNA, 19 nt, Homo sapiens
  misc_RNA (1)...(19): siRNA sense strand
guaacugacacaggagaua

SEQ ID NO: 2613624 - RNA, 19 nt, Homo sapiens
  misc_RNA (1)...(19): siRNA sense strand
cauauaaggaagucgcaca

SEQ ID NO: 2613625 - RNA, 19 nt, Homo sapiens
  misc_RNA (1)...(19): siRNA sense strand
ccaccuaaaaccagaagaa

SEQ ID NO: 2613626 - RNA, 19 nt, Homo sapiens
  misc_RNA (1)...(19): siRNA sense strand
ugaccaggcaacagauaau

SEQ ID NO: 2613627 - RNA, 19 nt, Homo sapiens
  misc_RNA (1)...(19): siRNA sense strand
agaaauuggaggaacaguu

SEQ ID NO: 2613628 - RNA, 19 nt, Homo sapiens
  misc_RNA (1)...(19): siRNA sense strand
ggguauacgaaauagacca

SEQ ID NO: 2613629 - RNA, 19 nt, Homo sapiens
  misc_RNA (1)...(19): siRNA sense strand
aggacgaaucagauguaua

SEQ ID NO: 2613630 - RNA, 19 nt, Homo sapiens
  misc_RNA (1)...(19): siRNA sense strand
ccuacuggcaggaggucaa

SEQ ID NO: 2613631 - RNA, 19 nt, Homo sapiens
  misc_RNA (1)...(19): siRNA sense strand
gaggaagacugaaggggau

SEQ ID NO: 2613632 - RNA, 19 nt, Homo sapiens
  misc_RNA (1)...(19): siRNA sense strand
caauuagagaugaagcaau

SEQ ID NO: 2613633 - RNA, 19 nt, Homo sapiens
  misc_RNA (1)...(19): siRNA sense strand
uuccaguagucuucagaaa

SEQ ID NO: 2613634 - RNA, 19 nt, Homo sapiens
  misc_RNA (1)...(19): siRNA sense strand
auacagaagaauuugccua

SEQ ID NO: 2613635 - RNA, 19 nt, Homo sapiens
  misc_RNA (1)...(19): siRNA sense strand
uggugaauaucaaggagga

SEQ ID NO: 2613636 - RNA, 19 nt, Homo sapiens
  misc_RNA (1)...(19): siRNA sense strand
ggauaaguggacagugacu

SEQ ID NO: 2613637 - RNA, 19 nt, Homo sapiens
  misc_RNA (1)...(19): siRNA sense strand
uugaaaaugggcaagaaua

SEQ ID NO: 2613638 - RNA, 19 nt, Homo sapiens
  misc_RNA (1)...(19): siRNA sense strand
agaugaagcaauauaccau

SEQ ID NO: 2613639 - RNA, 19 nt, Homo sapiens
  misc_RNA (1)...(19): siRNA sense strand
uaagacgauuggaggcaga

SEQ ID NO: 2613640 - RNA, 19 nt, Homo sapiens
  misc_RNA (1)...(19): siRNA sense strand
aagaauaaccaaagugcac

SEQ ID NO: 2613641 - RNA, 19 nt, Homo sapiens
  misc_RNA (1)...(19): siRNA sense strand
gugaauaucaaggaggaca

SEQ ID NO: 2613642 - RNA, 19 nt, Homo sapiens
  misc_RNA (1)...(19): siRNA sense strand
gagagaaagaggaggcaga

SEQ ID NO: 2613643 - RNA, 19 nt, Homo sapiens
  misc_RNA (1)...(19): siRNA sense strand
gggcuuacaaagugaccaa

SEQ ID NO: 2613644 - RNA, 19 nt, Homo sapiens
  misc_RNA (1)...(19): siRNA sense strand
ucuuaaaguuugcagcaga

SEQ ID NO: 2613645 - RNA, 19 nt, Homo sapiens
  misc_RNA (1)...(19): siRNA sense strand
cggauuauuccuagagauc

SEQ ID NO: 2613646 - RNA, 19 nt, Homo sapiens
  misc_RNA (1)...(19): siRNA sense strand
ugcacagacugcuggaaau

SEQ ID NO: 2613647 - RNA, 19 nt, Homo sapiens
  misc_RNA (1)...(19): siRNA sense strand
uggccaaaguauagggaca

SEQ ID NO: 2613648 - RNA, 19 nt, Homo sapiens
  misc_RNA (1)...(19): siRNA sense strand
aggaacuggugcagaaaca

SEQ ID NO: 2613649 - RNA, 19 nt, Homo sapiens
  misc_RNA (1)...(19): siRNA sense strand
agaagaaccucuaugcaga

SEQ ID NO: 2613650 - RNA, 19 nt, Homo sapiens
  misc_RNA (1)...(19): siRNA sense strand
agaaacauaaagaagggaa

SEQ ID NO: 2613651 - RNA, 19 nt, Homo sapiens
  misc_RNA (1)...(19): siRNA sense strand
cgggaaacccacagagaag

SEQ ID NO: 2613652 - RNA, 19 nt, Homo sapiens
  misc_RNA (1)...(19): siRNA sense strand
gaugaaagccggacgcguu

SEQ ID NO: 2613653 - RNA, 19 nt, Homo sapiens
  misc_RNA (1)...(19): siRNA sense strand
aggacuaggaucacggauu

SEQ ID NO: 2613654 - RNA, 19 nt, Homo sapiens
  misc_RNA (1)...(19): siRNA sense strand
auguggaacuuuauggaca

SEQ ID NO: 2613655 - RNA, 19 nt, Homo sapiens
  misc_RNA (1)...(19): siRNA sense strand
uggcuugcucuuaggacaa

SEQ ID NO: 2613656 - RNA, 19 nt, Homo sapiens
  misc_RNA (1)...(19): siRNA sense strand
gaaacauaaagaagggaag

SEQ ID NO: 2613657 - RNA, 19 nt, Homo sapiens
  misc_RNA (1)...(19): siRNA sense strand
ucuuucauuuagugagcua

SEQ ID NO: 2613658 - RNA, 19 nt, Homo sapiens
  misc_RNA (1)...(19): siRNA sense strand
ccaaagaccuguggagccu

SEQ ID NO: 2613659 - RNA, 19 nt, Homo sapiens
  misc_RNA (1)...(19): siRNA sense strand
ggguugaaggagcagguca

SEQ ID NO: 2613660 - RNA, 19 nt, Homo sapiens
  misc_RNA (1)...(19): siRNA sense strand
cugagagagaggagagaaa

SEQ ID NO: 2613661 - RNA, 19 nt, Homo sapiens
  misc_RNA (1)...(19): siRNA sense strand
aggaggaggagaagcuaaa

SEQ ID NO: 2613662 - RNA, 19 nt, Homo sapiens
  misc_RNA (1)...(19): siRNA sense strand
gcauggcacuggagggcau

SEQ ID NO: 2613663 - RNA, 19 nt, Homo sapiens
  misc_RNA (1)...(19): siRNA sense strand
ucaccgaagucaugggcau

SEQ ID NO: 2613664 - RNA, 19 nt, Homo sapiens
  misc_RNA (1)...(19): siRNA sense strand
gcgagaaggucaagcaggu

SEQ ID NO: 2613665 - RNA, 19 nt, Homo sapiens
  misc_RNA (1)...(19): siRNA sense strand
cagaauccacagagaccaa

SEQ ID NO: 2613666 - RNA, 19 nt, Homo sapiens
  misc_RNA (1)...(19): siRNA sense strand
acaacuacuccgaggcaga

SEQ ID NO: 2613667 - RNA, 19 nt, Homo sapiens
  misc_RNA (1)...(19): siRNA sense strand
acuccgaggcagaaaucaa

SEQ ID NO: 2613668 - RNA, 19 nt, Homo sapiens
  misc_RNA (1)...(19): siRNA sense strand
cagaaaucaaggugcgcga

SEQ ID NO: 2613669 - RNA, 19 nt, Homo sapiens
  misc_RNA (1)...(19): siRNA sense strand
gagaggagagaaaggagga

SEQ ID NO: 2613670 - RNA, 19 nt, Homo sapiens
  misc_RNA (1)...(19): siRNA sense strand
gggaagaggaacugcagcu

SEQ ID NO: 2613671 - RNA, 19 nt, Homo sapiens
  misc_RNA (1)...(19): siRNA sense strand
aggagagaaaggaggagga

SEQ ID NO: 2613672 - RNA, 19 nt, Homo sapiens
  misc_RNA (1)...(19): siRNA sense strand
aaggaggaggagaagcuaa

SEQ ID NO: 2613673 - RNA, 19 nt, Homo sapiens
  misc_RNA (1)...(19): siRNA sense strand
gggcaucggcauuggcagu

SEQ ID NO: 2613674 - RNA, 19 nt, Homo sapiens
  misc_RNA (1)...(19): siRNA sense strand
cucuaacauugcuggacua

SEQ ID NO: 2613675 - RNA, 19 nt, Homo sapiens
  misc_RNA (1)...(19): siRNA sense strand
gagaaggucaagcagguga

SEQ ID NO: 2613676 - RNA, 19 nt, Homo sapiens
  misc_RNA (1)...(19): siRNA sense strand
gagagaaaggaggaggaga

SEQ ID NO: 2613677 - RNA, 19 nt, Homo sapiens
  misc_RNA (1)...(19): siRNA sense strand
gagaagaacucaagcgaag

SEQ ID NO: 2613678 - RNA, 19 nt, Homo sapiens
  misc_RNA (1)...(19): siRNA sense strand
cuuuacaauuccaggacaa

SEQ ID NO: 2613679 - RNA, 19 nt, Homo sapiens
  misc_RNA (1)...(19): siRNA sense strand
aggaaguggcagagagacu

SEQ ID NO: 2613680 - RNA, 19 nt, Homo sapiens
  misc_RNA (1)...(19): siRNA sense strand
ugaugcagcaccugggaaa

SEQ ID NO: 2613681 - RNA, 19 nt, Homo sapiens
  misc_RNA (1)...(19): siRNA sense strand
aagaagaggaugacgcaga

SEQ ID NO: 2613682 - RNA, 19 nt, Homo sapiens
  misc_RNA (1)...(19): siRNA sense strand
agccaauacaggaagcaaa

SEQ ID NO: 2613683 - RNA, 19 nt, Homo sapiens
  misc_RNA (1)...(19): siRNA sense strand
agaggaugacgcagagaau

SEQ ID NO: 2613684 - RNA, 19 nt, Homo sapiens
  misc_RNA (1)...(19): siRNA sense strand
cagagagacuugcagccaa

SEQ ID NO: 2613685 - RNA, 19 nt, Homo sapiens
  misc_RNA (1)...(19): siRNA sense strand
ccaagauagagcagccauu

SEQ ID NO: 2613686 - RNA, 19 nt, Homo sapiens
  misc_RNA (1)...(19): siRNA sense strand
ugagaauuguucauggaga

SEQ ID NO: 2613687 - RNA, 19 nt, Homo sapiens
  misc_RNA (1)...(19): siRNA sense strand
uguuagaguuggcagacau

SEQ ID NO: 2613688 - RNA, 19 nt, Homo sapiens
  misc_RNA (1)...(19): siRNA sense strand
cugacagauaagauuguaa

SEQ ID NO: 2613689 - RNA, 19 nt, Homo sapiens
  misc_RNA (1)...(19): siRNA sense strand
uguaaggaaagcuggcaau

SEQ ID NO: 2613690 - RNA, 19 nt, Homo sapiens
  misc_RNA (1)...(19): siRNA sense strand
agagaagaacucaagcgaa

SEQ ID NO: 2613691 - RNA, 19 nt, Homo sapiens
  misc_RNA (1)...(19): siRNA sense strand
acgcagagaauuacagacu

SEQ ID NO: 2613692 - RNA, 19 nt, Homo sapiens
  misc_RNA (1)...(19): siRNA sense strand
aggagacgguacugggcuu

SEQ ID NO: 2613693 - RNA, 19 nt, Homo sapiens
  misc_RNA (1)...(19): siRNA sense strand
caucacagcuggagggucc

SEQ ID NO: 2613694 - RNA, 19 nt, Homo sapiens
  misc_RNA (1)...(19): siRNA sense strand
aggcaguguuggagcgaca

SEQ ID NO: 2613695 - RNA, 19 nt, Homo sapiens
  misc_RNA (1)...(19): siRNA sense strand
uuacagagaaugaaggaga

SEQ ID NO: 2613696 - RNA, 19 nt, Homo sapiens
  misc_RNA (1)...(19): siRNA sense strand
agcaacaguuacagagaau

SEQ ID NO: 2613697 - RNA, 19 nt, Homo sapiens
  misc_RNA (1)...(19): siRNA sense strand
gcuuugaagaagaugaaga

SEQ ID NO: 2613698 - RNA, 19 nt, Homo sapiens
  misc_RNA (1)...(19): siRNA sense strand
agaaugaaggagaaugcaa

SEQ ID NO: 2613699 - RNA, 19 nt, Homo sapiens
  misc_RNA (1)...(19): siRNA sense strand
cuguagagaagaaggggaa

SEQ ID NO: 2613700 - RNA, 19 nt, Homo sapiens
  misc_RNA (1)...(19): siRNA sense strand
aagaagaauuugaguggcu

SEQ ID NO: 2613701 - RNA, 19 nt, Homo sapiens
  misc_RNA (1)...(19): siRNA sense strand
guagagaagaaggggaaua

SEQ ID NO: 2613702 - RNA, 19 nt, Homo sapiens
  misc_RNA (1)...(19): siRNA sense strand
acgacaacauggugaugau

SEQ ID NO: 2613703 - RNA, 19 nt, Homo sapiens
  misc_RNA (1)...(19): siRNA sense strand
cguaaagaggagaaaauga

SEQ ID NO: 2613704 - RNA, 19 nt, Homo sapiens
  misc_RNA (1)...(19): siRNA sense strand
aggagaaaaugaagagcca

SEQ ID NO: 2613705 - RNA, 19 nt, Homo sapiens
  misc_RNA (1)...(19): siRNA sense strand
cacuauaacccuuggagca

SEQ ID NO: 2613706 - RNA, 19 nt, Homo sapiens
  misc_RNA (1)...(19): siRNA sense strand
gcaccguaaagaggagaaa

SEQ ID NO: 2613707 - RNA, 19 nt, Homo sapiens
  misc_RNA (1)...(19): siRNA sense strand
gaaaagaccccuaaggacu

SEQ ID NO: 2613708 - RNA, 19 nt, Homo sapiens
  misc_RNA (1)...(19): siRNA sense strand
gcucuguagaugugcgcau

SEQ ID NO: 2613709 - RNA, 19 nt, Homo sapiens
  misc_RNA (1)...(19): siRNA sense strand
gcacacgacaacaugguga

SEQ ID NO: 2613710 - RNA, 19 nt, Homo sapiens
  misc_RNA (1)...(19): siRNA sense strand
aggaaauuguagugacuca

SEQ ID NO: 2613711 - RNA, 19 nt, Homo sapiens
  misc_RNA (1)...(19): siRNA sense strand
ccucauugacacuggagaa

SEQ ID NO: 2613712 - RNA, 19 nt, Homo sapiens
  misc_RNA (1)...(19): siRNA sense strand
ucgugagaacuuugagaaa

SEQ ID NO: 2613713 - RNA, 19 nt, Homo sapiens
  misc_RNA (1)...(19): siRNA sense strand
cagaaauauucgagagcag

SEQ ID NO: 2613714 - RNA, 19 nt, Homo sapiens
  misc_RNA (1)...(19): siRNA sense strand
caguaauggagcuuguaaa

SEQ ID NO: 2613715 - RNA, 19 nt, Homo sapiens
  misc_RNA (1)...(19): siRNA sense strand
cauuauuucgugagaacuu

SEQ ID NO: 2613716 - RNA, 19 nt, Homo sapiens
  misc_RNA (1)...(19): siRNA sense strand
aggacauggcccaguaauu

SEQ ID NO: 2613717 - RNA, 19 nt, Homo sapiens
  misc_RNA (1)...(19): siRNA sense strand
uaggaaauggagagcaaca

SEQ ID NO: 2613718 - RNA, 19 nt, Homo sapiens
  misc_RNA (1)...(19): siRNA sense strand
aguaauggagcuuguaaaa

SEQ ID NO: 2613719 - RNA, 19 nt, Homo sapiens
  misc_RNA (1)...(19): siRNA sense strand
gacaagaaauggaaagcuc

SEQ ID NO: 2613720 - RNA, 19 nt, Homo sapiens
  misc_RNA (1)...(19): siRNA sense strand
caagaaauggaaagcucau

SEQ ID NO: 2613721 - RNA, 19 nt, Homo sapiens
  misc_RNA (1)...(19): siRNA sense strand
cggaauccucagagagaag

SEQ ID NO: 2613722 - RNA, 19 nt, Homo sapiens
  misc_RNA (1)...(19): siRNA sense strand
gguggaugguaauggagua

SEQ ID NO: 2613723 - RNA, 19 nt, Homo sapiens
  misc_RNA (1)...(19): siRNA sense strand
gugaccaacucuagggaca

SEQ ID NO: 2613724 - RNA, 19 nt, Homo sapiens
  misc_RNA (1)...(19): siRNA sense strand
aggaagugccucuggaaaa

SEQ ID NO: 2613725 - RNA, 19 nt, Homo sapiens
  misc_RNA (1)...(19): siRNA sense strand
cgauaaagcauaacaugga

SEQ ID NO: 2613726 - RNA, 19 nt, Homo sapiens
  misc_RNA (1)...(19): siRNA sense strand
acgccaaagaggaagaaga

SEQ ID NO: 2613727 - RNA, 19 nt, Homo sapiens
  misc_RNA (1)...(19): siRNA sense strand
uaacauggauauuggaacu

SEQ ID NO: 2613728 - RNA, 19 nt, Homo sapiens
  misc_RNA (1)...(19): siRNA sense strand
ccucacaggcuuugguuca

SEQ ID NO: 2613729 - RNA, 19 nt, Homo sapiens
  misc_RNA (1)...(19): siRNA sense strand
caauaaggcuccuggcaug

SEQ ID NO: 2613730 - RNA, 19 nt, Homo sapiens
  misc_RNA (1)...(19): siRNA sense strand
ggaugguaauggaguagga

SEQ ID NO: 2613731 - RNA, 19 nt, Homo sapiens
  misc_RNA (1)...(19): siRNA sense strand
ccuagagaacaacgagaau

SEQ ID NO: 2613732 - RNA, 19 nt, Homo sapiens
  misc_RNA (1)...(19): siRNA sense strand
cuguaggucagcaggcuaa

SEQ ID NO: 2613733 - RNA, 19 nt, Homo sapiens
  misc_RNA (1)...(19): siRNA sense strand
caguagggcaacagacaca

SEQ ID NO: 2613734 - RNA, 19 nt, Homo sapiens
  misc_RNA (1)...(19): siRNA sense strand
acauucgccuagagaacaa

SEQ ID NO: 2613735 - RNA, 19 nt, Homo sapiens
  misc_RNA (1)...(19): siRNA sense strand
ggauauuggaacuugggau

SEQ ID NO: 2613736 - RNA, 19 nt, Homo sapiens
  misc_RNA (1)...(19): siRNA sense strand
caggaagugccucuggaaa

SEQ ID NO: 2613737 - RNA, 19 nt, Homo sapiens
  misc_RNA (1)...(19): siRNA sense strand
cuuauggacagcugagcaa

SEQ ID NO: 2613738 - RNA, 19 nt, Homo sapiens
  misc_RNA (1)...(19): siRNA sense strand
uauaauauuuggugcagca

SEQ ID NO: 2613739 - RNA, 19 nt, Homo sapiens
  misc_RNA (1)...(19): siRNA sense strand
acacauucgccuagagaac

SEQ ID NO: 2613740 - RNA, 19 nt, Homo sapiens
  misc_RNA (1)...(19): siRNA sense strand
caaccuaaacugaagacca

SEQ ID NO: 2613741 - RNA, 19 nt, Homo sapiens
  misc_RNA (1)...(19): siRNA sense strand
gccuagagaacaacgagaa

SEQ ID NO: 2613742 - RNA, 19 nt, Homo sapiens
  misc_RNA (1)...(19): siRNA sense strand
auaaugggguggaugguaa

SEQ ID NO: 2613743 - RNA, 19 nt, Homo sapiens
  misc_RNA (1)...(19): siRNA sense strand
cugcaaaacagcaaccuaa

SEQ ID NO: 2613744 - RNA, 19 nt, Homo sapiens
  misc_RNA (1)...(19): siRNA sense strand
ggucaaggaaacaaaguac

SEQ ID NO: 2613745 - RNA, 19 nt, Homo sapiens
  misc_RNA (1)...(19): siRNA sense strand
agaugcaauguuugggcaa

SEQ ID NO: 2613746 - RNA, 19 nt, Homo sapiens
  misc_RNA (1)...(19): siRNA sense strand
ccaauagccaacugcgaca

SEQ ID NO: 2613747 - RNA, 19 nt, Homo sapiens
  misc_RNA (1)...(19): siRNA sense strand
ugagaaacgccaaagagga

SEQ ID NO: 2613748 - RNA, 19 nt, Homo sapiens
  misc_RNA (1)...(19): siRNA sense strand
aggaagaagaaaguguuaa

SEQ ID NO: 2613749 - RNA, 19 nt, Homo sapiens
  misc_RNA (1)...(19): siRNA sense strand
gcuaagcagguguugaaaa

SEQ ID NO: 2613750 - RNA, 19 nt, Homo sapiens
  misc_RNA (1)...(19): siRNA sense strand
accaaaaggucaaggaaac

SEQ ID NO: 2613751 - RNA, 19 nt, Homo sapiens
  misc_RNA (1)...(19): siRNA sense strand
uggauuaaacgaugaugau

SEQ ID NO: 2613752 - RNA, 19 nt, Homo sapiens
  misc_RNA (1)...(19): siRNA sense strand
gugaagaagcagaggagga

SEQ ID NO: 2613753 - RNA, 19 nt, Homo sapiens
  misc_RNA (1)...(19): siRNA sense strand
ggugcuaauccgagaggaa

SEQ ID NO: 2613754 - RNA, 19 nt, Homo sapiens
  misc_RNA (1)...(19): siRNA sense strand
agaaagaaauguuggugga

SEQ ID NO: 2613755 - RNA, 19 nt, Homo sapiens
  misc_RNA (1)...(19): siRNA sense strand
gggagaugcucgugccaga

SEQ ID NO: 2613756 - RNA, 19 nt, Homo sapiens
  misc_RNA (1)...(19): siRNA sense strand
gggagagacaacagggagu

SEQ ID NO: 2613757 - RNA, 19 nt, Homo sapiens
  misc_RNA (1)...(19): siRNA sense strand
aagaagcagaggaggaaaa

SEQ ID NO: 2613758 - RNA, 19 nt, Homo sapiens
  misc_RNA (1)...(19): siRNA sense strand
ggacagcauucgagaggcu

SEQ ID NO: 2613759 - RNA, 19 nt, Homo sapiens
  misc_RNA (1)...(19): siRNA sense strand
uggcagagaggguggacga

SEQ ID NO: 2613760 - RNA, 19 nt, Homo sapiens
  misc_RNA (1)...(19): siRNA sense strand
aaauguugguggauggaca

SEQ ID NO: 2613761 - RNA, 19 nt, Homo sapiens
  misc_RNA (1)...(19): siRNA sense strand
acuaaaacgaaguggcaau

SEQ ID NO: 2613762 - RNA, 19 nt, Homo sapiens
  misc_RNA (1)...(19): siRNA sense strand
guggcaauuccuugaacaa

SEQ ID NO: 2613763 - RNA, 19 nt, Homo sapiens
  misc_RNA (1)...(19): siRNA sense strand
ggauagucggggagagaca

SEQ ID NO: 2613764 - RNA, 19 nt, Homo sapiens
  misc_RNA (1)...(19): siRNA sense strand
ugaacaaagaauggaagaa

SEQ ID NO: 2613765 - RNA, 19 nt, Homo sapiens
  misc_RNA (1)...(19): siRNA sense strand
ucuucagccuggaggauga

SEQ ID NO: 2613766 - RNA, 19 nt, Homo sapiens
  misc_RNA (1)...(19): siRNA sense strand
gagcagaagucagacgaca

SEQ ID NO: 2613767 - RNA, 19 nt, Homo sapiens
  misc_RNA (1)...(19): siRNA sense strand
gcacagacagccaaagcga

SEQ ID NO: 2613768 - RNA, 19 nt, Homo sapiens
  misc_RNA (1)...(19): siRNA sense strand
ccuugaacaaagaauggaa

SEQ ID NO: 2613769 - RNA, 19 nt, Homo sapiens
  misc_RNA (1)...(19): siRNA sense strand
gcacuguccagauggguga

SEQ ID NO: 2613770 - RNA, 19 nt, Homo sapiens
  misc_RNA (1)...(19): siRNA sense strand
cagagagugagcaguacaa

SEQ ID NO: 2613771 - RNA, 19 nt, Homo sapiens
  misc_RNA (1)...(19): siRNA sense strand
gugcuggagaagacagaga

SEQ ID NO: 2613772 - RNA, 19 nt, Homo sapiens
  misc_RNA (1)...(19): siRNA sense strand
ugugagagcagcaagguca

SEQ ID NO: 2613773 - RNA, 19 nt, Homo sapiens
  misc_RNA (1)...(19): siRNA sense strand
gagauggacuugcugcgaa

SEQ ID NO: 2613774 - RNA, 19 nt, Homo sapiens
  misc_RNA (1)...(19): siRNA sense strand
gguccaggccaucgagagu

SEQ ID NO: 2613775 - RNA, 19 nt, Homo sapiens
  misc_RNA (1)...(19): siRNA sense strand
gcuacaaggccgaugucca

SEQ ID NO: 2613776 - RNA, 19 nt, Homo sapiens
  misc_RNA (1)...(19): siRNA sense strand
cugugaugguggugagaaa

SEQ ID NO: 2613777 - RNA, 19 nt, Homo sapiens
  misc_RNA (1)...(19): siRNA sense strand
caucaaaggaucauggaca

SEQ ID NO: 2613778 - RNA, 19 nt, Homo sapiens
  misc_RNA (1)...(19): siRNA sense strand
gaaagaaggugacacggaa

SEQ ID NO: 2613779 - RNA, 19 nt, Homo sapiens
  misc_RNA (1)...(19): siRNA sense strand
ggaggaaaguggaagucga

SEQ ID NO: 2613780 - RNA, 19 nt, Homo sapiens
  misc_RNA (1)...(19): siRNA sense strand
aaagaaggugacacggaaa

SEQ ID NO: 2613781 - RNA, 19 nt, Homo sapiens
  misc_RNA (1)...(19): siRNA sense strand
gaaagaggaacuaccgcua

SEQ ID NO: 2613782 - RNA, 19 nt, Homo sapiens
  misc_RNA (1)...(19): siRNA sense strand
caaaugagaugccggagga

SEQ ID NO: 2613783 - RNA, 19 nt, Homo sapiens
  misc_RNA (1)...(19): siRNA sense strand
gggaauuguguuggaaaga

SEQ ID NO: 2613784 - RNA, 19 nt, Homo sapiens
  misc_RNA (1)...(19): siRNA sense strand
agaaagaaggugacacgga

SEQ ID NO: 2613785 - RNA, 19 nt, Homo sapiens
  misc_RNA (1)...(19): siRNA sense strand
gcuacacuguugaggacca

SEQ ID NO: 2613786 - RNA, 19 nt, Homo sapiens
  misc_RNA (1)...(19): siRNA sense strand
acaacuguguggagcgcuu

SEQ ID NO: 2613787 - RNA, 19 nt, Homo sapiens
  misc_RNA (1)...(19): siRNA sense strand
guggugagaaagaagguga

SEQ ID NO: 2613788 - RNA, 19 nt, Homo sapiens
  misc_RNA (1)...(19): siRNA sense strand
aagaaggugacacggaaau

SEQ ID NO: 2613789 - RNA, 19 nt, Homo sapiens
  misc_RNA (1)...(19): siRNA sense strand
gugacacggaaaugggaga

SEQ ID NO: 2613790 - RNA, 19 nt, Homo sapiens
  misc_RNA (1)...(19): siRNA sense strand
ggaaaguggaagucgaccu

SEQ ID NO: 2613791 - RNA, 19 nt, Homo sapiens
  misc_RNA (1)...(19): siRNA sense strand
cuccaagauucuaggacaa

SEQ ID NO: 2613792 - RNA, 19 nt, Homo sapiens
  misc_RNA (1)...(19): siRNA sense strand
gggcauggccuuagggucu

SEQ ID NO: 2613793 - RNA, 19 nt, Homo sapiens
  misc_RNA (1)...(19): siRNA sense strand
augcaggacuuuauggaca

SEQ ID NO: 2613794 - RNA, 19 nt, Homo sapiens
  misc_RNA (1)...(19): siRNA sense strand
aauuagucuuugugcagaa

SEQ ID NO: 2613795 - RNA, 19 nt, Homo sapiens
  misc_RNA (1)...(19): siRNA sense strand
acuccaagauucuaggaca

SEQ ID NO: 2613796 - RNA, 19 nt, Homo sapiens
  misc_RNA (1)...(19): siRNA sense strand
uguuugucgagaugggaaa

SEQ ID NO: 2613797 - RNA, 19 nt, Homo sapiens
  misc_RNA (1)...(19): siRNA sense strand
caagauucuaggacaaaca

SEQ ID NO: 2613798 - RNA, 19 nt, Homo sapiens
  misc_RNA (1)...(19): siRNA sense strand
gauaagguccacaugccaa

SEQ ID NO: 2613799 - RNA, 19 nt, Homo sapiens
  misc_RNA (1)...(19): siRNA sense strand
ccuuagugauguuggagau

SEQ ID NO: 2613800 - RNA, 19 nt, Homo sapiens
  misc_RNA (1)...(19): siRNA sense strand
gguucaugccacagccaaa

SEQ ID NO: 2613801 - RNA, 19 nt, Homo sapiens
  misc_RNA (1)...(19): siRNA sense strand
auacaaggaaagugaagau

SEQ ID NO: 2613802 - RNA, 19 nt, Homo sapiens
  misc_RNA (1)...(19): siRNA sense strand
uagugauguuggagauuau

SEQ ID NO: 2613803 - RNA, 19 nt, Homo sapiens
  misc_RNA (1)...(19): siRNA sense strand
auccaaacuucuacagcaa

SEQ ID NO: 2613804 - RNA, 19 nt, Homo sapiens
  misc_RNA (1)...(19): siRNA sense strand
cacacacagaggaggauaa

SEQ ID NO: 2613805 - RNA, 19 nt, Homo sapiens
  misc_RNA (1)...(19): siRNA sense strand
cuguaugaaagcggagaaa

SEQ ID NO: 2613806 - RNA, 19 nt, Homo sapiens
  misc_RNA (1)...(19): siRNA sense strand
gcaauugaacugaacccua

SEQ ID NO: 2613807 - RNA, 19 nt, Homo sapiens
  misc_RNA (1)...(19): siRNA sense strand
ccuugguaucaaagaagaa

SEQ ID NO: 2613808 - RNA, 19 nt, Homo sapiens
  misc_RNA (1)...(19): siRNA sense strand
gggcagaacaaguggaucc

SEQ ID NO: 2613809 - RNA, 19 nt, Homo sapiens
  misc_RNA (1)...(19): siRNA sense strand
gugaagaugcagaguuacu

SEQ ID NO: 2613810 - RNA, 19 nt, Homo sapiens
  misc_RNA (1)...(19): siRNA sense strand
cagcacacacagaggagga

SEQ ID NO: 2613811 - RNA, 19 nt, Homo sapiens
  misc_RNA (1)...(19): siRNA sense strand
uaugaaggcaucaaggcua

SEQ ID NO: 2613812 - RNA, 19 nt, Homo sapiens
  misc_RNA (1)...(19): siRNA sense strand
aggaaagugaagaugcaga

SEQ ID NO: 2613813 - RNA, 19 nt, Homo sapiens
  misc_RNA (1)...(19): siRNA sense strand
cauauaucaucaaggagca

SEQ ID NO: 2613814 - RNA, 19 nt, Homo sapiens
  misc_RNA (1)...(19): siRNA sense strand
ccuaaagaugcuacuucaa

SEQ ID NO: 2613815 - RNA, 19 nt, Homo sapiens
  misc_RNA (1)...(19): siRNA sense strand
gugcuauacauuugccgaa

SEQ ID NO: 2613816 - RNA, 19 nt, Homo sapiens
  misc_RNA (1)...(19): siRNA sense strand
gauccaaacuucuacagca

SEQ ID NO: 2613817 - RNA, 19 nt, Homo sapiens
  misc_RNA (1)...(19): siRNA sense strand
cuugaaacuacacaacaaa

SEQ ID NO: 2613818 - RNA, 19 nt, Homo sapiens
  misc_RNA (1)...(19): siRNA sense strand
uggaagacuugcagaaaau

SEQ ID NO: 2613819 - RNA, 19 nt, Homo sapiens
  misc_RNA (1)...(19): siRNA sense strand
auggaagacuugcagaaaa

SEQ ID NO: 2613820 - RNA, 19 nt, Homo sapiens
  misc_RNA (1)...(19): siRNA sense strand
ccucagugggauaaaggau

SEQ ID NO: 2613821 - RNA, 19 nt, Homo sapiens
  misc_RNA (1)...(19): siRNA sense strand
aaaugaugguuguggcacu

SEQ ID NO: 2613822 - RNA, 19 nt, Homo sapiens
  misc_RNA (1)...(19): siRNA sense strand
ugaaaugguuugaggcugu

SEQ ID NO: 2613823 - RNA, 19 nt, Homo sapiens
  misc_RNA (1)...(19): siRNA sense strand
cguauguaauucagcggua

SEQ ID NO: 2613824 - RNA, 19 nt, Homo sapiens
  misc_RNA (1)...(19): siRNA sense strand
ccaugcacguccagggcuu

SEQ ID NO: 2613825 - RNA, 19 nt, Homo sapiens
  misc_RNA (1)...(19): siRNA sense strand
gaccagaugaggagggauc

SEQ ID NO: 2613826 - RNA, 19 nt, Homo sapiens
  misc_RNA (1)...(19): siRNA sense strand
ugaugaggagcuagcguau

SEQ ID NO: 2613827 - RNA, 19 nt, Homo sapiens
  misc_RNA (1)...(19): siRNA sense strand
gaggagggauccagagggu

SEQ ID NO: 2613828 - RNA, 19 nt, Homo sapiens
  misc_RNA (1)...(19): siRNA sense strand
ccgugaagucggagaugaa

SEQ ID NO: 2613829 - RNA, 19 nt, Homo sapiens
  misc_RNA (1)...(19): siRNA sense strand
ugggacaacagaagagaaa

SEQ ID NO: 2613830 - RNA, 19 nt, Homo sapiens
  misc_RNA (1)...(19): siRNA sense strand
gcaugaaauacaaagacaa

SEQ ID NO: 2613831 - RNA, 19 nt, Homo sapiens
  misc_RNA (1)...(19): siRNA sense strand
aagaaauggaagacagcua

SEQ ID NO: 2613832 - RNA, 19 nt, Homo sapiens
  misc_RNA (1)...(19): siRNA sense strand
ccuaaaugcaaaagugaaa

SEQ ID NO: 2613833 - RNA, 19 nt, Homo sapiens
  misc_RNA (1)...(19): siRNA sense strand
ggcaaugaugagacagaua

SEQ ID NO: 2613834 - RNA, 19 nt, Homo sapiens
  misc_RNA (1)...(19): siRNA sense strand
agugaaagacaaaguguau

SEQ ID NO: 2613835 - RNA, 19 nt, Homo sapiens
  misc_RNA (1)...(19): siRNA sense strand
cugagaaaucugugcguuu

SEQ ID NO: 2613836 - RNA, 19 nt, Homo sapiens
  misc_RNA (1)...(19): siRNA sense strand
ccguaaaacccuugcagaa

SEQ ID NO: 2613837 - RNA, 19 nt, Homo sapiens
  misc_RNA (1)...(19): siRNA sense strand
ggagaggacucaagccaca

SEQ ID NO: 2613838 - RNA, 19 nt, Homo sapiens
  misc_RNA (1)...(19): siRNA sense strand
augcaaaagugaaagacaa

SEQ ID NO: 2613839 - RNA, 19 nt, Homo sapiens
  misc_RNA (1)...(19): siRNA sense strand
aggccaaaacccagggaaa

SEQ ID NO: 2613840 - RNA, 19 nt, Homo sapiens
  misc_RNA (1)...(19): siRNA sense strand
caaugaugagacagauaaa

SEQ ID NO: 2613841 - RNA, 19 nt, Homo sapiens
  misc_RNA (1)...(19): siRNA sense strand
gcacugaggauaaggagga

SEQ ID NO: 2613842 - RNA, 19 nt, Homo sapiens
  misc_RNA (1)...(19): siRNA sense strand
cccuaaggugccugagaaa

SEQ ID NO: 2613843 - RNA, 19 nt, Homo sapiens
  misc_RNA (1)...(19): siRNA sense strand
gggacaacauugccggaga

SEQ ID NO: 2613844 - RNA, 19 nt, Homo sapiens
  misc_RNA (1)...(19): siRNA sense strand
gagaacaggaagagcacga

SEQ ID NO: 2613845 - RNA, 19 nt, Homo sapiens
  misc_RNA (1)...(19): siRNA sense strand
ggaaaucaucacuuggcaa

SEQ ID NO: 2613846 - RNA, 19 nt, Homo sapiens
  misc_RNA (1)...(19): siRNA sense strand
cugaggauaaggaggagaa

SEQ ID NO: 2613847 - RNA, 19 nt, Homo sapiens
  misc_RNA (1)...(19): siRNA sense strand
ggugcaacucuguggaaaa

SEQ ID NO: 2613848 - RNA, 19 nt, Homo sapiens
  misc_RNA (1)...(19): siRNA sense strand
gugaaagaugacaggacau

SEQ ID NO: 2613849 - RNA, 19 nt, Homo sapiens
  misc_RNA (1)...(19): siRNA sense strand
acacaaggauggaaggaug

SEQ ID NO: 2613850 - RNA, 19 nt, Homo sapiens
  misc_RNA (1)...(19): siRNA sense strand
aguggaaagcaaagcacaa

SEQ ID NO: 2613851 - RNA, 19 nt, Homo sapiens
  misc_RNA (1)...(19): siRNA sense strand
ugggaaagucagagaguuc

SEQ ID NO: 2613852 - RNA, 19 nt, Homo sapiens
  misc_RNA (1)...(19): siRNA sense strand
gacucaagccacagagaga

SEQ ID NO: 2613853 - RNA, 19 nt, Homo sapiens
  misc_RNA (1)...(19): siRNA sense strand
ccacacaggaaguugucua

SEQ ID NO: 2613854 - RNA, 19 nt, Homo sapiens
  misc_RNA (1)...(19): siRNA sense strand
aagacaaggcaucggaaaa

SEQ ID NO: 2613855 - RNA, 19 nt, Homo sapiens
  misc_RNA (1)...(19): siRNA sense strand
ccaaccgcacugaggauaa

SEQ ID NO: 2613856 - RNA, 19 nt, Homo sapiens
  misc_RNA (1)...(19): siRNA sense strand
cagcaggacagcaugaaau

SEQ ID NO: 2613857 - RNA, 19 nt, Homo sapiens
  misc_RNA (1)...(19): siRNA sense strand
aaagguaucucuuggguca

SEQ ID NO: 2613858 - RNA, 19 nt, Homo sapiens
  misc_RNA (1)...(19): siRNA sense strand
gaggagaacaggaagagca

SEQ ID NO: 2613859 - RNA, 19 nt, Homo sapiens
  misc_RNA (1)...(19): siRNA sense strand
gggcugcgagacugagaaa

SEQ ID NO: 2613860 - RNA, 19 nt, Homo sapiens
  misc_RNA (1)...(19): siRNA sense strand
ggccaaaacccagggaaaa

SEQ ID NO: 2613861 - RNA, 19 nt, Homo sapiens
  misc_RNA (1)...(19): siRNA sense strand
ugugaaagaugacaggaca

SEQ ID NO: 2613862 - RNA, 19 nt, Homo sapiens
  misc_RNA (1)...(19): siRNA sense strand
cggaaaguccucugcuaga

SEQ ID NO: 2613863 - RNA, 19 nt, Homo sapiens
  misc_RNA (1)...(19): siRNA sense strand
caacauugccggagaggag

SEQ ID NO: 2613864 - RNA, 19 nt, Homo sapiens
  misc_RNA (1)...(19): siRNA sense strand
ccugaacgagcucgggaua

SEQ ID NO: 2613865 - RNA, 19 nt, Homo sapiens
  misc_RNA (1)...(19): siRNA sense strand
gggccacagaccaggaaga

SEQ ID NO: 2613866 - RNA, 19 nt, Homo sapiens
  misc_RNA (1)...(19): siRNA sense strand
ggaccuacugguugaacuu

SEQ ID NO: 2613867 - RNA, 19 nt, Homo sapiens
  misc_RNA (1)...(19): siRNA sense strand
guuccugaagagaagguua

SEQ ID NO: 2613868 - RNA, 19 nt, Homo sapiens
  misc_RNA (1)...(19): siRNA sense strand
auaaggaggagaacaggaa

SEQ ID NO: 2613869 - RNA, 19 nt, Homo sapiens
  misc_RNA (1)...(19): siRNA sense strand
uggugaggccacacgguua

SEQ ID NO: 2613870 - RNA, 19 nt, Homo sapiens
  misc_RNA (1)...(19): siRNA sense strand
agacaaaguguauggcugu

SEQ ID NO: 2613871 - RNA, 19 nt, Homo sapiens
  misc_RNA (1)...(19): siRNA sense strand
aggauaaggaggagaacag

SEQ ID NO: 2613872 - RNA, 19 nt, Homo sapiens
  misc_RNA (1)...(19): siRNA sense strand
gcgcauaggagccccaaaa

SEQ ID NO: 2613873 - RNA, 19 nt, Homo sapiens
  misc_RNA (1)...(19): siRNA sense strand
aaggaggagaacaggaaga

SEQ ID NO: 2613874 - RNA, 19 nt, Homo sapiens
  misc_RNA (1)...(19): siRNA sense strand
ugucagaggcggaggagac

SEQ ID NO: 2613875 - RNA, 19 nt, Homo sapiens
  misc_RNA (1)...(19): siRNA sense strand
uggaagaaauggaagacag

SEQ ID NO: 2613876 - RNA, 19 nt, Homo sapiens
  misc_RNA (1)...(19): siRNA sense strand
ccauuaagauugacgagcu

SEQ ID NO: 2613877 - RNA, 19 nt, Homo sapiens
  misc_RNA (1)...(19): siRNA sense strand
agaagaacguccagccagu

SEQ ID NO: 2613878 - RNA, 19 nt, Homo sapiens
  misc_RNA (1)...(19): siRNA sense strand
ugcaaaagugaaagacaaa

SEQ ID NO: 2613879 - RNA, 19 nt, Homo sapiens
  misc_RNA (1)...(19): siRNA sense strand
guuaugccgagaaggguua

SEQ ID NO: 2613880 - RNA, 19 nt, Homo sapiens
  misc_RNA (1)...(19): siRNA sense strand
ggacaacagaagagaaacc

SEQ ID NO: 2613881 - RNA, 19 nt, Homo sapiens
  misc_RNA (1)...(19): siRNA sense strand
augaugagacagauaaaga

SEQ ID NO: 2613882 - RNA, 19 nt, Homo sapiens
  misc_RNA (1)...(19): siRNA sense strand
uugaugaagaccuggaaga

SEQ ID NO: 2613883 - RNA, 19 nt, Homo sapiens
  misc_RNA (1)...(19): siRNA sense strand
ugaugaagaccuggaagaa

SEQ ID NO: 2613884 - RNA, 19 nt, Homo sapiens
  misc_RNA (1)...(19): siRNA sense strand
gugaagucggagaugaaga

SEQ ID NO: 2613885 - RNA, 19 nt, Homo sapiens
  misc_RNA (1)...(19): siRNA sense strand
agaaguaaccccagaacaa

SEQ ID NO: 2613886 - RNA, 19 nt, Homo sapiens
  misc_RNA (1)...(19): siRNA sense strand
acuuaagcgaauagcuaaa

SEQ ID NO: 2613887 - RNA, 19 nt, Homo sapiens
  misc_RNA (1)...(19): siRNA sense strand
acucagaaagugaagguga

SEQ ID NO: 2613888 - RNA, 19 nt, Homo sapiens
  misc_RNA (1)...(19): siRNA sense strand
gugaagaaagaaacgguga

SEQ ID NO: 2613889 - RNA, 19 nt, Homo sapiens
  misc_RNA (1)...(19): siRNA sense strand
gcgggaacacagagagcga

SEQ ID NO: 2613890 - RNA, 19 nt, Homo sapiens
  misc_RNA (1)...(19): siRNA sense strand
uugcagaagcuaagaaaau

SEQ ID NO: 2613891 - RNA, 19 nt, Homo sapiens
  misc_RNA (1)...(19): siRNA sense strand
auauagaaaugaagagggu

SEQ ID NO: 2613892 - RNA, 19 nt, Homo sapiens
  misc_RNA (1)...(19): siRNA sense strand
gcggauugaacgagagaag

SEQ ID NO: 2613893 - RNA, 19 nt, Homo sapiens
  misc_RNA (1)...(19): siRNA sense strand
cuuuaauaggcccaggaua

SEQ ID NO: 2613894 - RNA, 19 nt, Homo sapiens
  misc_RNA (1)...(19): siRNA sense strand
gagaccuugcagaaagaaa

SEQ ID NO: 2613895 - RNA, 19 nt, Homo sapiens
  misc_RNA (1)...(19): siRNA sense strand
ggguuaaacuccaggaugg

SEQ ID NO: 2613896 - RNA, 19 nt, Homo sapiens
  misc_RNA (1)...(19): siRNA sense strand
cuaagaaaaucgaaagacu

SEQ ID NO: 2613897 - RNA, 19 nt, Homo sapiens
  misc_RNA (1)...(19): siRNA sense strand
agugaaaggaguuaccaau

SEQ ID NO: 2613898 - RNA, 19 nt, Homo sapiens
  misc_RNA (1)...(19): siRNA sense strand
auagcuaaagaaaggcaaa

SEQ ID NO: 2613899 - RNA, 19 nt, Homo sapiens
  misc_RNA (1)...(19): siRNA sense strand
agacuaaggaagaaguaac

SEQ ID NO: 2613900 - RNA, 19 nt, Homo sapiens
  misc_RNA (1)...(19): siRNA sense strand
aagaaaggcaaaagcagua

SEQ ID NO: 2613901 - RNA, 19 nt, Homo sapiens
  misc_RNA (1)...(19): siRNA sense strand
aaugaagaggguugcagaa

SEQ ID NO: 2613902 - RNA, 19 nt, Homo sapiens
  misc_RNA (1)...(19): siRNA sense strand
ggcccaggauagagaccuu

SEQ ID NO: 2613903 - RNA, 19 nt, Homo sapiens
  misc_RNA (1)...(19): siRNA sense strand
uugaacgagagaagaaauu

SEQ ID NO: 2613904 - RNA, 19 nt, Homo sapiens
  misc_RNA (1)...(19): siRNA sense strand
aagaauaccucaaagcucu

SEQ ID NO: 2613905 - RNA, 19 nt, Homo sapiens
  misc_RNA (1)...(19): siRNA sense strand
auagaaaugaagaggguug

SEQ ID NO: 2613906 - RNA, 19 nt, Homo sapiens
  misc_RNA (1)...(19): siRNA sense strand
gaaaauucaaacacgcaaa

SEQ ID NO: 2613907 - RNA, 19 nt, Homo sapiens
  misc_RNA (1)...(19): siRNA sense strand
cagcagaacaagauggaca

SEQ ID NO: 2613908 - RNA, 19 nt, Homo sapiens
  misc_RNA (1)...(19): siRNA sense strand
cugacaagacggaggguga

SEQ ID NO: 2613909 - RNA, 19 nt, Homo sapiens
  misc_RNA (1)...(19): siRNA sense strand
ggugauggcgagagcgaga

SEQ ID NO: 2613910 - RNA, 19 nt, Homo sapiens
  misc_RNA (1)...(19): siRNA sense strand
ucgaggagcuggagcgcuu

SEQ ID NO: 2613911 - RNA, 19 nt, Homo sapiens
  misc_RNA (1)...(19): siRNA sense strand
cugaacagcaugcggaaca

SEQ ID NO: 2613912 - RNA, 19 nt, Homo sapiens
  misc_RNA (1)...(19): siRNA sense strand
ggcuaaaggaaaaggauga

SEQ ID NO: 2613913 - RNA, 19 nt, Homo sapiens
  misc_RNA (1)...(19): siRNA sense strand
gcggcgaaggcuaaaggaa

SEQ ID NO: 2613914 - RNA, 19 nt, Homo sapiens
  misc_RNA (1)...(19): siRNA sense strand
gaucgaaggcggcagcaga

SEQ ID NO: 2613915 - RNA, 19 nt, Homo sapiens
  misc_RNA (1)...(19): siRNA sense strand
gagacaaaacguaaagaca

SEQ ID NO: 2613916 - RNA, 19 nt, Homo sapiens
  misc_RNA (1)...(19): siRNA sense strand
agcagaacaagauggacaa

SEQ ID NO: 2613917 - RNA, 19 nt, Homo sapiens
  misc_RNA (1)...(19): siRNA sense strand
cagcagaacaagauggaca

SEQ ID NO: 2613918 - RNA, 19 nt, Homo sapiens
  misc_RNA (1)...(19): siRNA sense strand
cugacaagacggaggguga

SEQ ID NO: 2613919 - RNA, 19 nt, Homo sapiens
  misc_RNA (1)...(19): siRNA sense strand
ggugauggcgagagcgaga

SEQ ID NO: 2613920 - RNA, 19 nt, Homo sapiens
  misc_RNA (1)...(19): siRNA sense strand
ucgaggagcuggagcgcuu

SEQ ID NO: 2613921 - RNA, 19 nt, Homo sapiens
  misc_RNA (1)...(19): siRNA sense strand
cugaacagcaugcggaaca

SEQ ID NO: 2613922 - RNA, 19 nt, Homo sapiens
  misc_RNA (1)...(19): siRNA sense strand
ggcuaaaggaaaaggauga

SEQ ID NO: 2613923 - RNA, 19 nt, Homo sapiens
  misc_RNA (1)...(19): siRNA sense strand
gcggcgaaggcuaaaggaa

SEQ ID NO: 2613924 - RNA, 19 nt, Homo sapiens
  misc_RNA (1)...(19): siRNA sense strand
gaucgaaggcggcagcaga

SEQ ID NO: 2613925 - RNA, 19 nt, Homo sapiens
  misc_RNA (1)...(19): siRNA sense strand
gagacaaaacguaaagaca

SEQ ID NO: 2613926 - RNA, 19 nt, Homo sapiens
  misc_RNA (1)...(19): siRNA sense strand
agcagaacaagauggacaa

SEQ ID NO: 2613927 - RNA, 19 nt, Homo sapiens
  misc_RNA (1)...(19): siRNA sense strand
aggaagaagaagaagguga

SEQ ID NO: 2613928 - RNA, 19 nt, Homo sapiens
  misc_RNA (1)...(19): siRNA sense strand
ugaagaagcccauggcgaa

SEQ ID NO: 2613929 - RNA, 19 nt, Homo sapiens
  misc_RNA (1)...(19): siRNA sense strand
cgaugaaccuucuggagga

SEQ ID NO: 2613930 - RNA, 19 nt, Homo sapiens
  misc_RNA (1)...(19): siRNA sense strand
gaggauuggugcaggggaa

SEQ ID NO: 2613931 - RNA, 19 nt, Homo sapiens
  misc_RNA (1)...(19): siRNA sense strand
aggcagaaauugaggagac

SEQ ID NO: 2613932 - RNA, 19 nt, Homo sapiens
  misc_RNA (1)...(19): siRNA sense strand
aggaguuggcuuugaagaa

SEQ ID NO: 2613933 - RNA, 19 nt, Homo sapiens
  misc_RNA (1)...(19): siRNA sense strand
cagaaauugaggagaccuu

SEQ ID NO: 2613934 - RNA, 19 nt, Homo sapiens
  misc_RNA (1)...(19): siRNA sense strand
aaagaaagggccaggcuca

SEQ ID NO: 2613935 - RNA, 19 nt, Homo sapiens
  misc_RNA (1)...(19): siRNA sense strand
aggagaaagaagcagaaga

SEQ ID NO: 2613936 - RNA, 19 nt, Homo sapiens
  misc_RNA (1)...(19): siRNA sense strand
gguuggugaaggugugaau

SEQ ID NO: 2613937 - RNA, 19 nt, Homo sapiens
  misc_RNA (1)...(19): siRNA sense strand
gcagcagggaggaagguga

SEQ ID NO: 2613938 - RNA, 19 nt, Homo sapiens
  misc_RNA (1)...(19): siRNA sense strand
gugugaauaaggaggaguu

SEQ ID NO: 2613939 - RNA, 19 nt, Homo sapiens
  misc_RNA (1)...(19): siRNA sense strand
ggggaauggaaguggacau

SEQ ID NO: 2613940 - RNA, 19 nt, Homo sapiens
  misc_RNA (1)...(19): siRNA sense strand
cgaucaagggcagcagaaa

SEQ ID NO: 2613941 - RNA, 19 nt, Homo sapiens
  misc_RNA (1)...(19): siRNA sense strand
ucagaagauggcaggaaga

SEQ ID NO: 2613942 - RNA, 19 nt, Homo sapiens
  misc_RNA (1)...(19): siRNA sense strand
cccaugaggaagaagaaga

SEQ ID NO: 2613943 - RNA, 19 nt, Homo sapiens
  misc_RNA (1)...(19): siRNA sense strand
gcucaagaagggaggcauc

SEQ ID NO: 2613944 - RNA, 19 nt, Homo sapiens
  misc_RNA (1)...(19): siRNA sense strand
ccgaucaagggcagcagaa

SEQ ID NO: 2613945 - RNA, 19 nt, Homo sapiens
  misc_RNA (1)...(19): siRNA sense strand
gggcaguguccuugcugaa

SEQ ID NO: 2613946 - RNA, 19 nt, Homo sapiens
  misc_RNA (1)...(19): siRNA sense strand
gaacacugcuccuggcaca

SEQ ID NO: 2613947 - RNA, 19 nt, Homo sapiens
  misc_RNA (1)...(19): siRNA sense strand
agucagccgcucugggaaa

SEQ ID NO: 2613948 - RNA, 19 nt, Homo sapiens
  misc_RNA (1)...(19): siRNA sense strand
ggugaaaaggaacaagaua

SEQ ID NO: 2613949 - RNA, 19 nt, Homo sapiens
  misc_RNA (1)...(19): siRNA sense strand
acagcaaagcgcaguacaa

SEQ ID NO: 2613950 - RNA, 19 nt, Homo sapiens
  misc_RNA (1)...(19): siRNA sense strand
ugagcagagagcugugaaa

SEQ ID NO: 2613951 - RNA, 19 nt, Homo sapiens
  misc_RNA (1)...(19): siRNA sense strand
gcacacuggccucagggaa

SEQ ID NO: 2613952 - RNA, 19 nt, Homo sapiens
  misc_RNA (1)...(19): siRNA sense strand
ccacaugccucgagcacag

SEQ ID NO: 2613953 - RNA, 19 nt, Homo sapiens
  misc_RNA (1)...(19): siRNA sense strand
ugugaaauaucuuuggcuu

SEQ ID NO: 2613954 - RNA, 19 nt, Homo sapiens
  misc_RNA (1)...(19): siRNA sense strand
aggaagaagccucagcuca

SEQ ID NO: 2613955 - RNA, 19 nt, Homo sapiens
  misc_RNA (1)...(19): siRNA sense strand
ucaucaugcuggugggcaa

SEQ ID NO: 2613956 - RNA, 19 nt, Homo sapiens
  misc_RNA (1)...(19): siRNA sense strand
gccaaagaacugagcguca

SEQ ID NO: 2613957 - RNA, 19 nt, Homo sapiens
  misc_RNA (1)...(19): siRNA sense strand
caacagaccucuaagugga

SEQ ID NO: 2613958 - RNA, 19 nt, Homo sapiens
  misc_RNA (1)...(19): siRNA sense strand
gggaauccacugagaaaau

SEQ ID NO: 2613959 - RNA, 19 nt, Homo sapiens
  misc_RNA (1)...(19): siRNA sense strand
uugggaauccacugagaaa

SEQ ID NO: 2613960 - RNA, 19 nt, Homo sapiens
  misc_RNA (1)...(19): siRNA sense strand
ggacacagcuggucaggag

SEQ ID NO: 2613961 - RNA, 19 nt, Homo sapiens
  misc_RNA (1)...(19): siRNA sense strand
cgacugcagcucugggaca

SEQ ID NO: 2613962 - RNA, 19 nt, Homo sapiens
  misc_RNA (1)...(19): siRNA sense strand
gcgccaaagaacugagcgu

SEQ ID NO: 2613963 - RNA, 19 nt, Homo sapiens
  misc_RNA (1)...(19): siRNA sense strand
aauucaaguugguguucuu

SEQ ID NO: 2613964 - RNA, 19 nt, Homo sapiens
  misc_RNA (1)...(19): siRNA sense strand
auaggaaagaagagagaaa

SEQ ID NO: 2613965 - RNA, 19 nt, Homo sapiens
  misc_RNA (1)...(19): siRNA sense strand
gagagugguuugagggaca

SEQ ID NO: 2613966 - RNA, 19 nt, Homo sapiens
  misc_RNA (1)...(19): siRNA sense strand
gaaaugaggucguggucca

SEQ ID NO: 2613967 - RNA, 19 nt, Homo sapiens
  misc_RNA (1)...(19): siRNA sense strand
ccauaggaaagaagagaga

SEQ ID NO: 2613968 - RNA, 19 nt, Homo sapiens
  misc_RNA (1)...(19): siRNA sense strand
gaacuuagucugagccaca

SEQ ID NO: 2613969 - RNA, 19 nt, Homo sapiens
  misc_RNA (1)...(19): siRNA sense strand
ggagagugggauuggaaca

SEQ ID NO: 2613970 - RNA, 19 nt, Homo sapiens
  misc_RNA (1)...(19): siRNA sense strand
gagaagauguugaggaacc

SEQ ID NO: 2613971 - RNA, 19 nt, Homo sapiens
  misc_RNA (1)...(19): siRNA sense strand
acaaggaguugaugagcca

SEQ ID NO: 2613972 - RNA, 19 nt, Homo sapiens
  misc_RNA (1)...(19): siRNA sense strand
gacaagaugaagagugaca

SEQ ID NO: 2613973 - RNA, 19 nt, Homo sapiens
  misc_RNA (1)...(19): siRNA sense strand
aggaaagaagagagaaauc

SEQ ID NO: 2613974 - RNA, 19 nt, Homo sapiens
  misc_RNA (1)...(19): siRNA sense strand
gugacaaaguggagaugcu

SEQ ID NO: 2613975 - RNA, 19 nt, Homo sapiens
  misc_RNA (1)...(19): siRNA sense strand
ggaagaagccucugggcag

SEQ ID NO: 2613976 - RNA, 19 nt, Homo sapiens
  misc_RNA (1)...(19): siRNA sense strand
gauaaagacuggucgaccu

SEQ ID NO: 2613977 - RNA, 19 nt, Homo sapiens
  misc_RNA (1)...(19): siRNA sense strand
gugccaggagagugggauu

SEQ ID NO: 2613978 - RNA, 19 nt, Homo sapiens
  misc_RNA (1)...(19): siRNA sense strand
acaaaguggagaugcucua

SEQ ID NO: 2613979 - RNA, 19 nt, Homo sapiens
  misc_RNA (1)...(19): siRNA sense strand
gugaaggaauugaagucca

SEQ ID NO: 2613980 - RNA, 19 nt, Homo sapiens
  misc_RNA (1)...(19): siRNA sense strand
cuuuacucccagagagcaa

SEQ ID NO: 2613981 - RNA, 19 nt, Homo sapiens
  misc_RNA (1)...(19): siRNA sense strand
acaaggaccagguggacau

SEQ ID NO: 2613982 - RNA, 19 nt, Homo sapiens
  misc_RNA (1)...(19): siRNA sense strand
ggauuggaacacugugcua

SEQ ID NO: 2613983 - RNA, 19 nt, Homo sapiens
  misc_RNA (1)...(19): siRNA sense strand
aucugaagcaguugauaaa

SEQ ID NO: 2613984 - RNA, 19 nt, Homo sapiens
  misc_RNA (1)...(19): siRNA sense strand
gcagauaaagacuggucga

SEQ ID NO: 2613985 - RNA, 19 nt, Homo sapiens
  misc_RNA (1)...(19): siRNA sense strand
gugcagugcucuaaccuca

SEQ ID NO: 2613986 - RNA, 19 nt, Homo sapiens
  misc_RNA (1)...(19): siRNA sense strand
caggagagugggauuggaa

SEQ ID NO: 2613987 - RNA, 19 nt, Homo sapiens
  misc_RNA (1)...(19): siRNA sense strand
ucacccagcugcagggcau

SEQ ID NO: 2613988 - RNA, 19 nt, Homo sapiens
  misc_RNA (1)...(19): siRNA sense strand
gccuggaggagcuggagaa

SEQ ID NO: 2613989 - RNA, 19 nt, Homo sapiens
  misc_RNA (1)...(19): siRNA sense strand
cuuuacaguccaauacuaa

SEQ ID NO: 2613990 - RNA, 19 nt, Homo sapiens
  misc_RNA (1)...(19): siRNA sense strand
gcccaagugcagugcucua

SEQ ID NO: 2613991 - RNA, 19 nt, Homo sapiens
  misc_RNA (1)...(19): siRNA sense strand
aguccaauacuaagaagau

SEQ ID NO: 2613992 - RNA, 19 nt, Homo sapiens
  misc_RNA (1)...(19): siRNA sense strand
cugacaaggaccaggugga

SEQ ID NO: 2613993 - RNA, 19 nt, Homo sapiens
  misc_RNA (1)...(19): siRNA sense strand
uggaagagaugaagacaaa

SEQ ID NO: 2613994 - RNA, 19 nt, Homo sapiens
  misc_RNA (1)...(19): siRNA sense strand
cuauaaagcuacaccuuaa

SEQ ID NO: 2613995 - RNA, 19 nt, Homo sapiens
  misc_RNA (1)...(19): siRNA sense strand
aaguagaagucucaggcaa

SEQ ID NO: 2613996 - RNA, 19 nt, Homo sapiens
  misc_RNA (1)...(19): siRNA sense strand
aagcauuggaagagaugaa

SEQ ID NO: 2613997 - RNA, 19 nt, Homo sapiens
  misc_RNA (1)...(19): siRNA sense strand
gcgacuagauguacagcuu

SEQ ID NO: 2613998 - RNA, 19 nt, Homo sapiens
  misc_RNA (1)...(19): siRNA sense strand
uggaacaagcauuggaaga

SEQ ID NO: 2613999 - RNA, 19 nt, Homo sapiens
  misc_RNA (1)...(19): siRNA sense strand
gaacaagcauuggaagaga

SEQ ID NO: 2614000 - RNA, 19 nt, Homo sapiens
  misc_RNA (1)...(19): siRNA sense strand
gauuaaaccagcagugacu

SEQ ID NO: 2614001 - RNA, 19 nt, Homo sapiens
  misc_RNA (1)...(19): siRNA sense strand
uggaauuguccgaggagca

SEQ ID NO: 2614002 - RNA, 19 nt, Homo sapiens
  misc_RNA (1)...(19): siRNA sense strand
guaggagaguuguucgcaa

SEQ ID NO: 2614003 - RNA, 19 nt, Homo sapiens
  misc_RNA (1)...(19): siRNA sense strand
uuggaagagaugaagacaa

SEQ ID NO: 2614004 - RNA, 19 nt, Homo sapiens
  misc_RNA (1)...(19): siRNA sense strand
agaaaagagaucagaacga

SEQ ID NO: 2614005 - RNA, 19 nt, Homo sapiens
  misc_RNA (1)...(19): siRNA sense strand
agcagugacuauaaagcua

SEQ ID NO: 2614006 - RNA, 19 nt, Homo sapiens
  misc_RNA (1)...(19): siRNA sense strand
gacaaaucacuguaggaga

SEQ ID NO: 2614007 - RNA, 19 nt, Homo sapiens
  misc_RNA (1)...(19): siRNA sense strand
caccaagccuucccaguua

SEQ ID NO: 2614008 - RNA, 19 nt, Homo sapiens
  misc_RNA (1)...(19): siRNA sense strand
ugaauggcgacuagaugua

SEQ ID NO: 2614009 - RNA, 19 nt, Homo sapiens
  misc_RNA (1)...(19): siRNA sense strand
gaagagaugaagacaaauc

SEQ ID NO: 2614010 - RNA, 19 nt, Homo sapiens
  misc_RNA (1)...(19): siRNA sense strand
gcugugugcccgagaccaa

SEQ ID NO: 2614011 - RNA, 19 nt, Homo sapiens
  misc_RNA (1)...(19): siRNA sense strand
acugggaguucgagcagau

SEQ ID NO: 2614012 - RNA, 19 nt, Homo sapiens
  misc_RNA (1)...(19): siRNA sense strand
aaagaagaaacaaggacau

SEQ ID NO: 2614013 - RNA, 19 nt, Homo sapiens
  misc_RNA (1)...(19): siRNA sense strand
ggacaaaagaagaaacaag

SEQ ID NO: 2614014 - RNA, 19 nt, Homo sapiens
  misc_RNA (1)...(19): siRNA sense strand
agcagcacuuugagagcaa

SEQ ID NO: 2614015 - RNA, 19 nt, Homo sapiens
  misc_RNA (1)...(19): siRNA sense strand
agaagaaagauuuggaaga

SEQ ID NO: 2614016 - RNA, 19 nt, Homo sapiens
  misc_RNA (1)...(19): siRNA sense strand
aggaguuauuagugaggaa

SEQ ID NO: 2614017 - RNA, 19 nt, Homo sapiens
  misc_RNA (1)...(19): siRNA sense strand
ucaucaagaaauagaggaa

SEQ ID NO: 2614018 - RNA, 19 nt, Homo sapiens
  misc_RNA (1)...(19): siRNA sense strand
cgcagaagaaguagaagaa

SEQ ID NO: 2614019 - RNA, 19 nt, Homo sapiens
  misc_RNA (1)...(19): siRNA sense strand
gggaaauacccaaguacca

SEQ ID NO: 2614020 - RNA, 19 nt, Homo sapiens
  misc_RNA (1)...(19): siRNA sense strand
cggaaugcugcucgaauaa

SEQ ID NO: 2614021 - RNA, 19 nt, Homo sapiens
  misc_RNA (1)...(19): siRNA sense strand
acgcagaagaaguagaaga

SEQ ID NO: 2614022 - RNA, 19 nt, Homo sapiens
  misc_RNA (1)...(19): siRNA sense strand
guggaauauuggugaacga

SEQ ID NO: 2614023 - RNA, 19 nt, Homo sapiens
  misc_RNA (1)...(19): siRNA sense strand
ucacuuugucagaaggaaa

SEQ ID NO: 2614024 - RNA, 19 nt, Homo sapiens
  misc_RNA (1)...(19): siRNA sense strand
gggaaacagaaguuggaga

SEQ ID NO: 2614025 - RNA, 19 nt, Homo sapiens
  misc_RNA (1)...(19): siRNA sense strand
cugaagaacaccaaaugaa

SEQ ID NO: 2614026 - RNA, 19 nt, Homo sapiens
  misc_RNA (1)...(19): siRNA sense strand
ucgaauaagugaaaagaga

SEQ ID NO: 2614027 - RNA, 19 nt, Homo sapiens
  misc_RNA (1)...(19): siRNA sense strand
ccgagaaucaagaacuuaa

SEQ ID NO: 2614028 - RNA, 19 nt, Homo sapiens
  misc_RNA (1)...(19): siRNA sense strand
gcgacgaggaggacgaaaa

SEQ ID NO: 2614029 - RNA, 19 nt, Homo sapiens
  misc_RNA (1)...(19): siRNA sense strand
agaauuuccagcagcgaua

SEQ ID NO: 2614030 - RNA, 19 nt, Homo sapiens
  misc_RNA (1)...(19): siRNA sense strand
gauuugaggaacagcagaa

SEQ ID NO: 2614031 - RNA, 19 nt, Homo sapiens
  misc_RNA (1)...(19): siRNA sense strand
ucucaaaauuggucaacua

SEQ ID NO: 2614032 - RNA, 19 nt, Homo sapiens
  misc_RNA (1)...(19): siRNA sense strand
guauugugcuagaggagga

SEQ ID NO: 2614033 - RNA, 19 nt, Homo sapiens
  misc_RNA (1)...(19): siRNA sense strand
uggagaaauacaacagaau

SEQ ID NO: 2614034 - RNA, 19 nt, Homo sapiens
  misc_RNA (1)...(19): siRNA sense strand
ugauaauggcagugucgua

SEQ ID NO: 2614035 - RNA, 19 nt, Homo sapiens
  misc_RNA (1)...(19): siRNA sense strand
aagaagcagaagaaugaaa

SEQ ID NO: 2614036 - RNA, 19 nt, Homo sapiens
  misc_RNA (1)...(19): siRNA sense strand
aggauaagaagcuuguuaa

SEQ ID NO: 2614037 - RNA, 19 nt, Homo sapiens
  misc_RNA (1)...(19): siRNA sense strand
cgaguggaauauuggugaa

SEQ ID NO: 2614038 - RNA, 19 nt, Homo sapiens
  misc_RNA (1)...(19): siRNA sense strand
caucaagucuucagccaca

SEQ ID NO: 2614039 - RNA, 19 nt, Homo sapiens
  misc_RNA (1)...(19): siRNA sense strand
agcagaagaaugaaagcaa

SEQ ID NO: 2614040 - RNA, 19 nt, Homo sapiens
  misc_RNA (1)...(19): siRNA sense strand
cagaguuggcuccgguaaa

SEQ ID NO: 2614041 - RNA, 19 nt, Homo sapiens
  misc_RNA (1)...(19): siRNA sense strand
gcacuaggugugacagaca

SEQ ID NO: 2614042 - RNA, 19 nt, Homo sapiens
  misc_RNA (1)...(19): siRNA sense strand
gguucucagagcagcgaaa

SEQ ID NO: 2614043 - RNA, 19 nt, Homo sapiens
  misc_RNA (1)...(19): siRNA sense strand
agaaauacaaguaaaggca

SEQ ID NO: 2614044 - RNA, 19 nt, Homo sapiens
  misc_RNA (1)...(19): siRNA sense strand
gugaaaagagaaaagagua

SEQ ID NO: 2614045 - RNA, 19 nt, Homo sapiens
  misc_RNA (1)...(19): siRNA sense strand
guggagaagcaaacaauca

SEQ ID NO: 2614046 - RNA, 19 nt, Homo sapiens
  misc_RNA (1)...(19): siRNA sense strand
uggaauguaccucaggaua

SEQ ID NO: 2614047 - RNA, 19 nt, Homo sapiens
  misc_RNA (1)...(19): siRNA sense strand
caaaugaaagauugcccaa

SEQ ID NO: 2614048 - RNA, 19 nt, Homo sapiens
  misc_RNA (1)...(19): siRNA sense strand
agaaggauguguuugccaa

SEQ ID NO: 2614049 - RNA, 19 nt, Homo sapiens
  misc_RNA (1)...(19): siRNA sense strand
aagaacaccaaaugaaaga

SEQ ID NO: 2614050 - RNA, 19 nt, Homo sapiens
  misc_RNA (1)...(19): siRNA sense strand
cagaagaaugaaagcaacu

SEQ ID NO: 2614051 - RNA, 19 nt, Homo sapiens
  misc_RNA (1)...(19): siRNA sense strand
guggaagaguccugugcca

SEQ ID NO: 2614052 - RNA, 19 nt, Homo sapiens
  misc_RNA (1)...(19): siRNA sense strand
cgaauaagugaaaagagaa

SEQ ID NO: 2614053 - RNA, 19 nt, Homo sapiens
  misc_RNA (1)...(19): siRNA sense strand
caacagaauaaaaguguca

SEQ ID NO: 2614054 - RNA, 19 nt, Homo sapiens
  misc_RNA (1)...(19): siRNA sense strand
cgagaaucaagaacuuaaa

SEQ ID NO: 2614055 - RNA, 19 nt, Homo sapiens
  misc_RNA (1)...(19): siRNA sense strand
gaaauacaaguaaaggcaa

SEQ ID NO: 2614056 - RNA, 19 nt, Homo sapiens
  misc_RNA (1)...(19): siRNA sense strand
auaccugacaugagcaaau

SEQ ID NO: 2614057 - RNA, 19 nt, Homo sapiens
  misc_RNA (1)...(19): siRNA sense strand
uggcagaaucuacuggaau

SEQ ID NO: 2614058 - RNA, 19 nt, Homo sapiens
  misc_RNA (1)...(19): siRNA sense strand
cgccgagaaucaagaacuu

SEQ ID NO: 2614059 - RNA, 19 nt, Homo sapiens
  misc_RNA (1)...(19): siRNA sense strand
uuucaguguuguaggaagu

SEQ ID NO: 2614060 - RNA, 19 nt, Homo sapiens
  misc_RNA (1)...(19): siRNA sense strand
ggaacuucaagaugcacua

SEQ ID NO: 2614061 - RNA, 19 nt, Homo sapiens
  misc_RNA (1)...(19): siRNA sense strand
auaucuacucccagaggaa

SEQ ID NO: 2614062 - RNA, 19 nt, Homo sapiens
  misc_RNA (1)...(19): siRNA sense strand
uagaagggcaagaaauaca

SEQ ID NO: 2614063 - RNA, 19 nt, Homo sapiens
  misc_RNA (1)...(19): siRNA sense strand
ccagacgaauggaggaucu

SEQ ID NO: 2614064 - RNA, 19 nt, Homo sapiens
  misc_RNA (1)...(19): siRNA sense strand
gaagaacagcagaggcgga

SEQ ID NO: 2614065 - RNA, 19 nt, Homo sapiens
  misc_RNA (1)...(19): siRNA sense strand
uauggaugccuguggagaa

SEQ ID NO: 2614066 - RNA, 19 nt, Homo sapiens
  misc_RNA (1)...(19): siRNA sense strand
auucaagccaggaguuauu

SEQ ID NO: 2614067 - RNA, 19 nt, Homo sapiens
  misc_RNA (1)...(19): siRNA sense strand
aguccaaagaagcagaaga

SEQ ID NO: 2614068 - RNA, 19 nt, Homo sapiens
  misc_RNA (1)...(19): siRNA sense strand
gcagaagaaugaaagcaac

SEQ ID NO: 2614069 - RNA, 19 nt, Homo sapiens
  misc_RNA (1)...(19): siRNA sense strand
aggcaugagcaguggaaga

SEQ ID NO: 2614070 - RNA, 19 nt, Homo sapiens
  misc_RNA (1)...(19): siRNA sense strand
ccaaauacauucaagagca

SEQ ID NO: 2614071 - RNA, 19 nt, Homo sapiens
  misc_RNA (1)...(19): siRNA sense strand
agucauaucucgaagguug

SEQ ID NO: 2614072 - RNA, 19 nt, Homo sapiens
  misc_RNA (1)...(19): siRNA sense strand
augcagaagcagagaagcu

SEQ ID NO: 2614073 - RNA, 19 nt, Homo sapiens
  misc_RNA (1)...(19): siRNA sense strand
gugaagagagguugcgaga

SEQ ID NO: 2614074 - RNA, 19 nt, Homo sapiens
  misc_RNA (1)...(19): siRNA sense strand
agaugaaaccauugcuaau

SEQ ID NO: 2614075 - RNA, 19 nt, Homo sapiens
  misc_RNA (1)...(19): siRNA sense strand
ggaauaagaucgacagacc

SEQ ID NO: 2614076 - RNA, 19 nt, Homo sapiens
  misc_RNA (1)...(19): siRNA sense strand
cgacagaccugaagccauc

SEQ ID NO: 2614077 - RNA, 19 nt, Homo sapiens
  misc_RNA (1)...(19): siRNA sense strand
agaugacagacuuggacaa

SEQ ID NO: 2614078 - RNA, 19 nt, Homo sapiens
  misc_RNA (1)...(19): siRNA sense strand
guucaagcucgaagagugu

SEQ ID NO: 2614079 - RNA, 19 nt, Homo sapiens
  misc_RNA (1)...(19): siRNA sense strand
ccaucagugaagagagguu

SEQ ID NO: 2614080 - RNA, 19 nt, Homo sapiens
  misc_RNA (1)...(19): siRNA sense strand
gcucaaaagacaagguuac

SEQ ID NO: 2614081 - RNA, 19 nt, Homo sapiens
  misc_RNA (1)...(19): siRNA sense strand
ggugaagaaaagagggaua

SEQ ID NO: 2614082 - RNA, 19 nt, Homo sapiens
  misc_RNA (1)...(19): siRNA sense strand
gagaugaacugguugccaa

SEQ ID NO: 2614083 - RNA, 19 nt, Homo sapiens
  misc_RNA (1)...(19): siRNA sense strand
cuauacaacaagagaugaa

SEQ ID NO: 2614084 - RNA, 19 nt, Homo sapiens
  misc_RNA (1)...(19): siRNA sense strand
gggcacuggcuguggaaaa

SEQ ID NO: 2614085 - RNA, 19 nt, Homo sapiens
  misc_RNA (1)...(19): siRNA sense strand
cgaucuguuuccagccaaa

SEQ ID NO: 2614086 - RNA, 19 nt, Homo sapiens
  misc_RNA (1)...(19): siRNA sense strand
aagugagaguucugucaaa

SEQ ID NO: 2614087 - RNA, 19 nt, Homo sapiens
  misc_RNA (1)...(19): siRNA sense strand
acaaaguggaucaccuaaa

SEQ ID NO: 2614088 - RNA, 19 nt, Homo sapiens
  misc_RNA (1)...(19): siRNA sense strand
caaaccuaguucagagaca

SEQ ID NO: 2614089 - RNA, 19 nt, Homo sapiens
  misc_RNA (1)...(19): siRNA sense strand
caggaagcucagagguaga

SEQ ID NO: 2614090 - RNA, 19 nt, Homo sapiens
  misc_RNA (1)...(19): siRNA sense strand
aggcagugaaauagaagau

SEQ ID NO: 2614091 - RNA, 19 nt, Homo sapiens
  misc_RNA (1)...(19): siRNA sense strand
gcaucagcucagcaggaaa

SEQ ID NO: 2614092 - RNA, 19 nt, Homo sapiens
  misc_RNA (1)...(19): siRNA sense strand
ggguuaacuuccaaaacua

SEQ ID NO: 2614093 - RNA, 19 nt, Homo sapiens
  misc_RNA (1)...(19): siRNA sense strand
aaccaaugaagaugugaaa

SEQ ID NO: 2614094 - RNA, 19 nt, Homo sapiens
  misc_RNA (1)...(19): siRNA sense strand
gguaacaacggcaggaucu

SEQ ID NO: 2614095 - RNA, 19 nt, Homo sapiens
  misc_RNA (1)...(19): siRNA sense strand
gaguagcaaugaaggggua

SEQ ID NO: 2614096 - RNA, 19 nt, Homo sapiens
  misc_RNA (1)...(19): siRNA sense strand
cucaggaagcucagaggua

SEQ ID NO: 2614097 - RNA, 19 nt, Homo sapiens
  misc_RNA (1)...(19): siRNA sense strand
acuaaaacauccucaagaa

SEQ ID NO: 2614098 - RNA, 19 nt, Homo sapiens
  misc_RNA (1)...(19): siRNA sense strand
uagacaacaaaguggauca

SEQ ID NO: 2614099 - RNA, 19 nt, Homo sapiens
  misc_RNA (1)...(19): siRNA sense strand
aacgaguuauagaaggaaa

SEQ ID NO: 2614100 - RNA, 19 nt, Homo sapiens
  misc_RNA (1)...(19): siRNA sense strand
acgaguuauagaaggaaaa

SEQ ID NO: 2614101 - RNA, 19 nt, Homo sapiens
  misc_RNA (1)...(19): siRNA sense strand
gcaaugaagggguagaaga

SEQ ID NO: 2614102 - RNA, 19 nt, Homo sapiens
  misc_RNA (1)...(19): siRNA sense strand
agucagaauagcucuacaa

SEQ ID NO: 2614103 - RNA, 19 nt, Homo sapiens
  misc_RNA (1)...(19): siRNA sense strand
ucuaguacuccuugaugaa

SEQ ID NO: 2614104 - RNA, 19 nt, Homo sapiens
  misc_RNA (1)...(19): siRNA sense strand
ggguagaagagccauccaa

SEQ ID NO: 2614105 - RNA, 19 nt, Homo sapiens
  misc_RNA (1)...(19): siRNA sense strand
ugagcaagaucacgcaaaa

SEQ ID NO: 2614106 - RNA, 19 nt, Homo sapiens
  misc_RNA (1)...(19): siRNA sense strand
guagaagagccauccaaaa

SEQ ID NO: 2614107 - RNA, 19 nt, Homo sapiens
  misc_RNA (1)...(19): siRNA sense strand
caguucugcaguugagcaa

SEQ ID NO: 2614108 - RNA, 19 nt, Homo sapiens
  misc_RNA (1)...(19): siRNA sense strand
cuuuagucccaaugugaau

SEQ ID NO: 2614109 - RNA, 19 nt, Homo sapiens
  misc_RNA (1)...(19): siRNA sense strand
aaggaaauacagaggcagu

SEQ ID NO: 2614110 - RNA, 19 nt, Homo sapiens
  misc_RNA (1)...(19): siRNA sense strand
gggagaagcugcugggcua

SEQ ID NO: 2614111 - RNA, 19 nt, Homo sapiens
  misc_RNA (1)...(19): siRNA sense strand
ucaucaugcucgugggcga

SEQ ID NO: 2614112 - RNA, 19 nt, Homo sapiens
  misc_RNA (1)...(19): siRNA sense strand
gcaccaucaucaucgggaa

SEQ ID NO: 2614113 - RNA, 19 nt, Homo sapiens
  misc_RNA (1)...(19): siRNA sense strand
cagcugaaaaugaagguaa

SEQ ID NO: 2614114 - RNA, 19 nt, Homo sapiens
  misc_RNA (1)...(19): siRNA sense strand
gggaaguggaagugaaauu

SEQ ID NO: 2614115 - RNA, 19 nt, Homo sapiens
  misc_RNA (1)...(19): siRNA sense strand
agaagaaacuguuaggcua

SEQ ID NO: 2614116 - RNA, 19 nt, Homo sapiens
  misc_RNA (1)...(19): siRNA sense strand
ggaaagugggaguguggaa

SEQ ID NO: 2614117 - RNA, 19 nt, Homo sapiens
  misc_RNA (1)...(19): siRNA sense strand
guggauuggaagugcauaa

SEQ ID NO: 2614118 - RNA, 19 nt, Homo sapiens
  misc_RNA (1)...(19): siRNA sense strand
gugaagaauuggagcguuc

SEQ ID NO: 2614119 - RNA, 19 nt, Homo sapiens
  misc_RNA (1)...(19): siRNA sense strand
acauggagacaaagacaaa

SEQ ID NO: 2614120 - RNA, 19 nt, Homo sapiens
  misc_RNA (1)...(19): siRNA sense strand
agguauuccuagucguaaa

SEQ ID NO: 2614121 - RNA, 19 nt, Homo sapiens
  misc_RNA (1)...(19): siRNA sense strand
caauacaagcugaagugaa

SEQ ID NO: 2614122 - RNA, 19 nt, Homo sapiens
  misc_RNA (1)...(19): siRNA sense strand
aggaugggcucaagaccaa

SEQ ID NO: 2614123 - RNA, 19 nt, Homo sapiens
  misc_RNA (1)...(19): siRNA sense strand
ccauauuuggauuggacua

SEQ ID NO: 2614124 - RNA, 19 nt, Homo sapiens
  misc_RNA (1)...(19): siRNA sense strand
cugcuauggauaugguuaa

SEQ ID NO: 2614125 - RNA, 19 nt, Homo sapiens
  misc_RNA (1)...(19): siRNA sense strand
uaggaagaaaggaggauuu

SEQ ID NO: 2614126 - RNA, 19 nt, Homo sapiens
  misc_RNA (1)...(19): siRNA sense strand
ugauagagauccagcagca

SEQ ID NO: 2614127 - RNA, 19 nt, Homo sapiens
  misc_RNA (1)...(19): siRNA sense strand
gaagaaagaaaguucccua

SEQ ID NO: 2614128 - RNA, 19 nt, Homo sapiens
  misc_RNA (1)...(19): siRNA sense strand
cacgagucauacagggaaa

SEQ ID NO: 2614129 - RNA, 19 nt, Homo sapiens
  misc_RNA (1)...(19): siRNA sense strand
ucauuuacagugagggaau

SEQ ID NO: 2614130 - RNA, 19 nt, Homo sapiens
  misc_RNA (1)...(19): siRNA sense strand
gggaaaugguacacagccu

SEQ ID NO: 2614131 - RNA, 19 nt, Homo sapiens
  misc_RNA (1)...(19): siRNA sense strand
ggacaaaagaacuagacuu

SEQ ID NO: 2614132 - RNA, 19 nt, Homo sapiens
  misc_RNA (1)...(19): siRNA sense strand
ccgaagaagagcuacucaa

SEQ ID NO: 2614133 - RNA, 19 nt, Homo sapiens
  misc_RNA (1)...(19): siRNA sense strand
ccaugaggccuuacagaga

SEQ ID NO: 2614134 - RNA, 19 nt, Homo sapiens
  misc_RNA (1)...(19): siRNA sense strand
ccacauggagacaaagaca

SEQ ID NO: 2614135 - RNA, 19 nt, Homo sapiens
  misc_RNA (1)...(19): siRNA sense strand
acucaaauuacucgaucaa

SEQ ID NO: 2614136 - RNA, 19 nt, Homo sapiens
  misc_RNA (1)...(19): siRNA sense strand
ggauguaacaauggaucaa

SEQ ID NO: 2614137 - RNA, 19 nt, Homo sapiens
  misc_RNA (1)...(19): siRNA sense strand
uguacaacacccagagaca

SEQ ID NO: 2614138 - RNA, 19 nt, Homo sapiens
  misc_RNA (1)...(19): siRNA sense strand
uggaggagacagaaaguca

SEQ ID NO: 2614139 - RNA, 19 nt, Homo sapiens
  misc_RNA (1)...(19): siRNA sense strand
agugguaacuggaucgaga

SEQ ID NO: 2614140 - RNA, 19 nt, Homo sapiens
  misc_RNA (1)...(19): siRNA sense strand
agggccacauggagacaaa

SEQ ID NO: 2614141 - RNA, 19 nt, Homo sapiens
  misc_RNA (1)...(19): siRNA sense strand
gcucaagaccaaggcgcua

SEQ ID NO: 2614142 - RNA, 19 nt, Homo sapiens
  misc_RNA (1)...(19): siRNA sense strand
cgauggaggaacugacuca

SEQ ID NO: 2614143 - RNA, 19 nt, Homo sapiens
  misc_RNA (1)...(19): siRNA sense strand
agauaaggauguagguggu

SEQ ID NO: 2614144 - RNA, 19 nt, Homo sapiens
  misc_RNA (1)...(19): siRNA sense strand
gggcaacaggggaauguaa

SEQ ID NO: 2614145 - RNA, 19 nt, Homo sapiens
  misc_RNA (1)...(19): siRNA sense strand
uugcugagugggagaauuu

SEQ ID NO: 2614146 - RNA, 19 nt, Homo sapiens
  misc_RNA (1)...(19): siRNA sense strand
gcaacaggggaauguaaua

SEQ ID NO: 2614147 - RNA, 19 nt, Homo sapiens
  misc_RNA (1)...(19): siRNA sense strand
gauuggaagugcauaaaau

SEQ ID NO: 2614148 - RNA, 19 nt, Homo sapiens
  misc_RNA (1)...(19): siRNA sense strand
aagugaaauuggaguguuc

SEQ ID NO: 2614149 - RNA, 19 nt, Homo sapiens
  misc_RNA (1)...(19): siRNA sense strand
augaggccuuacagagaaa

SEQ ID NO: 2614150 - RNA, 19 nt, Homo sapiens
  misc_RNA (1)...(19): siRNA sense strand
gaaaggggcaacaggggaa

SEQ ID NO: 2614151 - RNA, 19 nt, Homo sapiens
  misc_RNA (1)...(19): siRNA sense strand
aguuugagagaauuggaua

SEQ ID NO: 2614152 - RNA, 19 nt, Homo sapiens
  misc_RNA (1)...(19): siRNA sense strand
acuuaaggggagugaguau

SEQ ID NO: 2614153 - RNA, 19 nt, Homo sapiens
  misc_RNA (1)...(19): siRNA sense strand
ccuugcgaaugaaagauaa

SEQ ID NO: 2614154 - RNA, 19 nt, Homo sapiens
  misc_RNA (1)...(19): siRNA sense strand
ccgaagucccguaacaaaa

SEQ ID NO: 2614155 - RNA, 19 nt, Homo sapiens
  misc_RNA (1)...(19): siRNA sense strand
gagaagaaacuguuaggcu

SEQ ID NO: 2614156 - RNA, 19 nt, Homo sapiens
  misc_RNA (1)...(19): siRNA sense strand
acgaaaggugcuaauagua

SEQ ID NO: 2614157 - RNA, 19 nt, Homo sapiens
  misc_RNA (1)...(19): siRNA sense strand
gcgagaucguccaacugaa

SEQ ID NO: 2614158 - RNA, 19 nt, Homo sapiens
  misc_RNA (1)...(19): siRNA sense strand
uuucacaguuauagggacu

SEQ ID NO: 2614159 - RNA, 19 nt, Homo sapiens
  misc_RNA (1)...(19): siRNA sense strand
auacagggaaagugggagu

SEQ ID NO: 2614160 - RNA, 19 nt, Homo sapiens
  misc_RNA (1)...(19): siRNA sense strand
uggagcaguacgagugauu

SEQ ID NO: 2614161 - RNA, 19 nt, Homo sapiens
  misc_RNA (1)...(19): siRNA sense strand
gagcaguacgagugauugu

SEQ ID NO: 2614162 - RNA, 19 nt, Homo sapiens
  misc_RNA (1)...(19): siRNA sense strand
auuuaguaccucaagacaa

SEQ ID NO: 2614163 - RNA, 19 nt, Homo sapiens
  misc_RNA (1)...(19): siRNA sense strand
aaaggugguuggagggcca

SEQ ID NO: 2614164 - RNA, 19 nt, Homo sapiens
  misc_RNA (1)...(19): siRNA sense strand
uggaaaugacauaggaccu

SEQ ID NO: 2614165 - RNA, 19 nt, Homo sapiens
  misc_RNA (1)...(19): siRNA sense strand
agacaaacucuuaugugga

SEQ ID NO: 2614166 - RNA, 19 nt, Homo sapiens
  misc_RNA (1)...(19): siRNA sense strand
cucuggaacgggagaagaa

SEQ ID NO: 2614167 - RNA, 19 nt, Homo sapiens
  misc_RNA (1)...(19): siRNA sense strand
aaaucaugcuaucagagaa

SEQ ID NO: 2614168 - RNA, 19 nt, Homo sapiens
  misc_RNA (1)...(19): siRNA sense strand
caggcaugaagcagaauuu

SEQ ID NO: 2614169 - RNA, 19 nt, Homo sapiens
  misc_RNA (1)...(19): siRNA sense strand
cgaacgaguagcuuuaaau

SEQ ID NO: 2614170 - RNA, 19 nt, Homo sapiens
  misc_RNA (1)...(19): siRNA sense strand
gcgaaugaaagauaaugau

SEQ ID NO: 2614171 - RNA, 19 nt, Homo sapiens
  misc_RNA (1)...(19): siRNA sense strand
gggcagaacgcuuggaaaa

SEQ ID NO: 2614172 - RNA, 19 nt, Homo sapiens
  misc_RNA (1)...(19): siRNA sense strand
aggcaaagaaagaagaauu

SEQ ID NO: 2614173 - RNA, 19 nt, Homo sapiens
  misc_RNA (1)...(19): siRNA sense strand
agacauuggaagagaaaca

SEQ ID NO: 2614174 - RNA, 19 nt, Homo sapiens
  misc_RNA (1)...(19): siRNA sense strand
gguuaaaacuucagcaaca

SEQ ID NO: 2614175 - RNA, 19 nt, Homo sapiens
  misc_RNA (1)...(19): siRNA sense strand
gcuagaaagagaaaggaau

SEQ ID NO: 2614176 - RNA, 19 nt, Homo sapiens
  misc_RNA (1)...(19): siRNA sense strand
cugccaaagaagaagguua

SEQ ID NO: 2614177 - RNA, 19 nt, Homo sapiens
  misc_RNA (1)...(19): siRNA sense strand
gaagagaaauugcgggcuu

SEQ ID NO: 2614178 - RNA, 19 nt, Homo sapiens
  misc_RNA (1)...(19): siRNA sense strand
cuucagaguguuagguuaa

SEQ ID NO: 2614179 - RNA, 19 nt, Homo sapiens
  misc_RNA (1)...(19): siRNA sense strand
uagaagucuuggaggcaaa

SEQ ID NO: 2614180 - RNA, 19 nt, Homo sapiens
  misc_RNA (1)...(19): siRNA sense strand
accaaaugcugaaggaaau

SEQ ID NO: 2614181 - RNA, 19 nt, Homo sapiens
  misc_RNA (1)...(19): siRNA sense strand
aggcugaaguagcggaauu

SEQ ID NO: 2614182 - RNA, 19 nt, Homo sapiens
  misc_RNA (1)...(19): siRNA sense strand
aaccaaaugcugaaggaaa

SEQ ID NO: 2614183 - RNA, 19 nt, Homo sapiens
  misc_RNA (1)...(19): siRNA sense strand
agaaagaagaauuggaaac

SEQ ID NO: 2614184 - RNA, 19 nt, Homo sapiens
  misc_RNA (1)...(19): siRNA sense strand
acaaucaagcagugaacaa

SEQ ID NO: 2614185 - RNA, 19 nt, Homo sapiens
  misc_RNA (1)...(19): siRNA sense strand
cauaaagcugaacgagaaa

SEQ ID NO: 2614186 - RNA, 19 nt, Homo sapiens
  misc_RNA (1)...(19): siRNA sense strand
cugaaaagacauuggaaga

SEQ ID NO: 2614187 - RNA, 19 nt, Homo sapiens
  misc_RNA (1)...(19): siRNA sense strand
cugaaguagcggaauuaaa

SEQ ID NO: 2614188 - RNA, 19 nt, Homo sapiens
  misc_RNA (1)...(19): siRNA sense strand
augaagagguagaaaagua

SEQ ID NO: 2614189 - RNA, 19 nt, Homo sapiens
  misc_RNA (1)...(19): siRNA sense strand
uggaagagaaacagauaca

SEQ ID NO: 2614190 - RNA, 19 nt, Homo sapiens
  misc_RNA (1)...(19): siRNA sense strand
cagcaaacgaguggaacaa

SEQ ID NO: 2614191 - RNA, 19 nt, Homo sapiens
  misc_RNA (1)...(19): siRNA sense strand
gaaaaugcagagaaggaaa

SEQ ID NO: 2614192 - RNA, 19 nt, Homo sapiens
  misc_RNA (1)...(19): siRNA sense strand
uggaaauaacagacaucaa

SEQ ID NO: 2614193 - RNA, 19 nt, Homo sapiens
  misc_RNA (1)...(19): siRNA sense strand
aagcugaacgagaaauaaa

SEQ ID NO: 2614194 - RNA, 19 nt, Homo sapiens
  misc_RNA (1)...(19): siRNA sense strand
acaaucaagcuaaggagaa

SEQ ID NO: 2614195 - RNA, 19 nt, Homo sapiens
  misc_RNA (1)...(19): siRNA sense strand
gauuagcagauuuggagaa

SEQ ID NO: 2614196 - RNA, 19 nt, Homo sapiens
  misc_RNA (1)...(19): siRNA sense strand
ggagaaaaugaaaguggaa

SEQ ID NO: 2614197 - RNA, 19 nt, Homo sapiens
  misc_RNA (1)...(19): siRNA sense strand
agaaaaugaaaguggaaca

SEQ ID NO: 2614198 - RNA, 19 nt, Homo sapiens
  misc_RNA (1)...(19): siRNA sense strand
agucagaauuugaacacca

SEQ ID NO: 2614199 - RNA, 19 nt, Homo sapiens
  misc_RNA (1)...(19): siRNA sense strand
gguuggaagaaaagcauaa

SEQ ID NO: 2614200 - RNA, 19 nt, Homo sapiens
  misc_RNA (1)...(19): siRNA sense strand
cauucaaacaaacuggaaa

SEQ ID NO: 2614201 - RNA, 19 nt, Homo sapiens
  misc_RNA (1)...(19): siRNA sense strand
agacagcaaacgaguggaa

SEQ ID NO: 2614202 - RNA, 19 nt, Homo sapiens
  misc_RNA (1)...(19): siRNA sense strand
aaagacauuggaagagaaa

SEQ ID NO: 2614203 - RNA, 19 nt, Homo sapiens
  misc_RNA (1)...(19): siRNA sense strand
cuggagacagcaagagcua

SEQ ID NO: 2614204 - RNA, 19 nt, Homo sapiens
  misc_RNA (1)...(19): siRNA sense strand
ugccaaagaagaagguuau

SEQ ID NO: 2614205 - RNA, 19 nt, Homo sapiens
  misc_RNA (1)...(19): siRNA sense strand
agauacagugguuggaaga

SEQ ID NO: 2614206 - RNA, 19 nt, Homo sapiens
  misc_RNA (1)...(19): siRNA sense strand
acagcaaacgaguggaaca

SEQ ID NO: 2614207 - RNA, 19 nt, Homo sapiens
  misc_RNA (1)...(19): siRNA sense strand
aagugaacuggauggauua

SEQ ID NO: 2614208 - RNA, 19 nt, Homo sapiens
  misc_RNA (1)...(19): siRNA sense strand
uggaaaaugcccaaagaau

SEQ ID NO: 2614209 - RNA, 19 nt, Homo sapiens
  misc_RNA (1)...(19): siRNA sense strand
uugcacagucagagaauga

SEQ ID NO: 2614210 - RNA, 19 nt, Homo sapiens
  misc_RNA (1)...(19): siRNA sense strand
cagagaaugacuugcugaa

SEQ ID NO: 2614211 - RNA, 19 nt, Homo sapiens
  misc_RNA (1)...(19): siRNA sense strand
agaaaaguauagagcugua

SEQ ID NO: 2614212 - RNA, 19 nt, Homo sapiens
  misc_RNA (1)...(19): siRNA sense strand
aggaagaguaugcacguau

SEQ ID NO: 2614213 - RNA, 19 nt, Homo sapiens
  misc_RNA (1)...(19): siRNA sense strand
ucacagacagagaagaaaa

SEQ ID NO: 2614214 - RNA, 19 nt, Homo sapiens
  misc_RNA (1)...(19): siRNA sense strand
agguuuagaggcugaagua

SEQ ID NO: 2614215 - RNA, 19 nt, Homo sapiens
  misc_RNA (1)...(19): siRNA sense strand
cggaauuaaaggcugaaaa

SEQ ID NO: 2614216 - RNA, 19 nt, Homo sapiens
  misc_RNA (1)...(19): siRNA sense strand
acuagaagcugaaaagaca

SEQ ID NO: 2614217 - RNA, 19 nt, Homo sapiens
  misc_RNA (1)...(19): siRNA sense strand
aagacuggaggaagauaaa

SEQ ID NO: 2614218 - RNA, 19 nt, Homo sapiens
  misc_RNA (1)...(19): siRNA sense strand
uggaggaagauaaagaaga

SEQ ID NO: 2614219 - RNA, 19 nt, Homo sapiens
  misc_RNA (1)...(19): siRNA sense strand
ccgaaauuuuagaagccaa

SEQ ID NO: 2614220 - RNA, 19 nt, Homo sapiens
  misc_RNA (1)...(19): siRNA sense strand
acauuaaggcuguggugaa

SEQ ID NO: 2614221 - RNA, 19 nt, Homo sapiens
  misc_RNA (1)...(19): siRNA sense strand
gaauggauguauauggcua

SEQ ID NO: 2614222 - RNA, 19 nt, Homo sapiens
  misc_RNA (1)...(19): siRNA sense strand
caucuguucacuagagaaa

SEQ ID NO: 2614223 - RNA, 19 nt, Homo sapiens
  misc_RNA (1)...(19): siRNA sense strand
acaaaauggcugaauguua

SEQ ID NO: 2614224 - RNA, 19 nt, Homo sapiens
  misc_RNA (1)...(19): siRNA sense strand
ggcuagaggauguugagaa

SEQ ID NO: 2614225 - RNA, 19 nt, Homo sapiens
  misc_RNA (1)...(19): siRNA sense strand
aagaaagcgcuaaguaaaa

SEQ ID NO: 2614226 - RNA, 19 nt, Homo sapiens
  misc_RNA (1)...(19): siRNA sense strand
aggaggaggauguggacga

SEQ ID NO: 2614227 - RNA, 19 nt, Homo sapiens
  misc_RNA (1)...(19): siRNA sense strand
agaacuacuuagcagagaa

SEQ ID NO: 2614228 - RNA, 19 nt, Homo sapiens
  misc_RNA (1)...(19): siRNA sense strand
ugaggaacgcacuggcuaa

SEQ ID NO: 2614229 - RNA, 19 nt, Homo sapiens
  misc_RNA (1)...(19): siRNA sense strand
uggcuuuacagcagaagaa

SEQ ID NO: 2614230 - RNA, 19 nt, Homo sapiens
  misc_RNA (1)...(19): siRNA sense strand
ugacaaugaaugugaucca

SEQ ID NO: 2614231 - RNA, 19 nt, Homo sapiens
  misc_RNA (1)...(19): siRNA sense strand
uugaagacccagugacaca

SEQ ID NO: 2614232 - RNA, 19 nt, Homo sapiens
  misc_RNA (1)...(19): siRNA sense strand
uuagcagagaacagaaaua

SEQ ID NO: 2614233 - RNA, 19 nt, Homo sapiens
  misc_RNA (1)...(19): siRNA sense strand
agacaaagaacucccaaaa

SEQ ID NO: 2614234 - RNA, 19 nt, Homo sapiens
  misc_RNA (1)...(19): siRNA sense strand
auaaggaggugcugaggca

SEQ ID NO: 2614235 - RNA, 19 nt, Homo sapiens
  misc_RNA (1)...(19): siRNA sense strand
ggagcagcacuuaggaaca

SEQ ID NO: 2614236 - RNA, 19 nt, Homo sapiens
  misc_RNA (1)...(19): siRNA sense strand
acuuagcagagaacagaaa

SEQ ID NO: 2614237 - RNA, 19 nt, Homo sapiens
  misc_RNA (1)...(19): siRNA sense strand
augaguaucaggaggcaau

SEQ ID NO: 2614238 - RNA, 19 nt, Homo sapiens
  misc_RNA (1)...(19): siRNA sense strand
acaaugaaugugauccaaa

SEQ ID NO: 2614239 - RNA, 19 nt, Homo sapiens
  misc_RNA (1)...(19): siRNA sense strand
gcagaguccaagaagcaau

SEQ ID NO: 2614240 - RNA, 19 nt, Homo sapiens
  misc_RNA (1)...(19): siRNA sense strand
ugacacaggagaaagccaa

SEQ ID NO: 2614241 - RNA, 19 nt, Homo sapiens
  misc_RNA (1)...(19): siRNA sense strand
agaagauggagaaggagga

SEQ ID NO: 2614242 - RNA, 19 nt, Homo sapiens
  misc_RNA (1)...(19): siRNA sense strand
ugauagaccacgugcggga

SEQ ID NO: 2614243 - RNA, 19 nt, Homo sapiens
  misc_RNA (1)...(19): siRNA sense strand
ccacucaggaggaggaugu

SEQ ID NO: 2614244 - RNA, 19 nt, Homo sapiens
  misc_RNA (1)...(19): siRNA sense strand
gauaaaaggaauggaugua

SEQ ID NO: 2614245 - RNA, 19 nt, Homo sapiens
  misc_RNA (1)...(19): siRNA sense strand
gcacuuaggaacaugggca

SEQ ID NO: 2614246 - RNA, 19 nt, Homo sapiens
  misc_RNA (1)...(19): siRNA sense strand
gcuaacaacguuuacaaaa

SEQ ID NO: 2614247 - RNA, 19 nt, Homo sapiens
  misc_RNA (1)...(19): siRNA sense strand
cagauuacauuaaggcugu

SEQ ID NO: 2614248 - RNA, 19 nt, Homo sapiens
  misc_RNA (1)...(19): siRNA sense strand
gcaucggauccuaggagau

SEQ ID NO: 2614249 - RNA, 19 nt, Homo sapiens
  misc_RNA (1)...(19): siRNA sense strand
gagcaaaugcacagacccu

SEQ ID NO: 2614250 - RNA, 19 nt, Homo sapiens
  misc_RNA (1)...(19): siRNA sense strand
acuuaagggagcagcacuu

SEQ ID NO: 2614251 - RNA, 19 nt, Homo sapiens
  misc_RNA (1)...(19): siRNA sense strand
aucggaaugcugugaguaa

SEQ ID NO: 2614252 - RNA, 19 nt, Homo sapiens
  misc_RNA (1)...(19): siRNA sense strand
gaagcaaugguaauggcua

SEQ ID NO: 2614253 - RNA, 19 nt, Homo sapiens
  misc_RNA (1)...(19): siRNA sense strand
gggaugcagaagauggaga

SEQ ID NO: 2614254 - RNA, 19 nt, Homo sapiens
  misc_RNA (1)...(19): siRNA sense strand
ggaagggaguggggaagaa

SEQ ID NO: 2614255 - RNA, 19 nt, Homo sapiens
  misc_RNA (1)...(19): siRNA sense strand
cauggaagggaguggggaa

SEQ ID NO: 2614256 - RNA, 19 nt, Homo sapiens
  misc_RNA (1)...(19): siRNA sense strand
cggaaugcugugaguaagu

SEQ ID NO: 2614257 - RNA, 19 nt, Homo sapiens
  misc_RNA (1)...(19): siRNA sense strand
aagacaaagaacucccaaa

SEQ ID NO: 2614258 - RNA, 19 nt, Homo sapiens
  misc_RNA (1)...(19): siRNA sense strand
ccuucagucaccagcuaua

SEQ ID NO: 2614259 - RNA, 19 nt, Homo sapiens
  misc_RNA (1)...(19): siRNA sense strand
gaacaagaguagugaggac

SEQ ID NO: 2614260 - RNA, 19 nt, Homo sapiens
  misc_RNA (1)...(19): siRNA sense strand
uggcagacgagcaggacaa

SEQ ID NO: 2614261 - RNA, 19 nt, Homo sapiens
  misc_RNA (1)...(19): siRNA sense strand
acaaggaaguggaucgcua

SEQ ID NO: 2614262 - RNA, 19 nt, Homo sapiens
  misc_RNA (1)...(19): siRNA sense strand
agauauagucacugccaau

SEQ ID NO: 2614263 - RNA, 19 nt, Homo sapiens
  misc_RNA (1)...(19): siRNA sense strand
ucaagaugucacugguaaa

SEQ ID NO: 2614264 - RNA, 19 nt, Homo sapiens
  misc_RNA (1)...(19): siRNA sense strand
ggucaggcaacgagccaca

SEQ ID NO: 2614265 - RNA, 19 nt, Homo sapiens
  misc_RNA (1)...(19): siRNA sense strand
aggagacaagugugguuaa

SEQ ID NO: 2614266 - RNA, 19 nt, Homo sapiens
  misc_RNA (1)...(19): siRNA sense strand
ccuaccaggagcugaguga

SEQ ID NO: 2614267 - RNA, 19 nt, Homo sapiens
  misc_RNA (1)...(19): siRNA sense strand
cugucaugucugugucuua

SEQ ID NO: 2614268 - RNA, 19 nt, Homo sapiens
  misc_RNA (1)...(19): siRNA sense strand
cuauaacaguucagcaaaa

SEQ ID NO: 2614269 - RNA, 19 nt, Homo sapiens
  misc_RNA (1)...(19): siRNA sense strand
agcuuugcguggagaaaua

SEQ ID NO: 2614270 - RNA, 19 nt, Homo sapiens
  misc_RNA (1)...(19): siRNA sense strand
ccucaagaaggauggaaga

SEQ ID NO: 2614271 - RNA, 19 nt, Homo sapiens
  misc_RNA (1)...(19): siRNA sense strand
gaacaaacccauaacacca

SEQ ID NO: 2614272 - RNA, 19 nt, Homo sapiens
  misc_RNA (1)...(19): siRNA sense strand
ccucaaguccagaaaauaa

SEQ ID NO: 2614273 - RNA, 19 nt, Homo sapiens
  misc_RNA (1)...(19): siRNA sense strand
gaacaaagcuauaugccac

SEQ ID NO: 2614274 - RNA, 19 nt, Homo sapiens
  misc_RNA (1)...(19): siRNA sense strand
cuacugaagaacugaaaca

SEQ ID NO: 2614275 - RNA, 19 nt, Homo sapiens
  misc_RNA (1)...(19): siRNA sense strand
cugcaagagaugacagcuu

SEQ ID NO: 2614276 - RNA, 19 nt, Homo sapiens
  misc_RNA (1)...(19): siRNA sense strand
ugugcagaaucuugaacaa

SEQ ID NO: 2614277 - RNA, 19 nt, Homo sapiens
  misc_RNA (1)...(19): siRNA sense strand
cugaagaacugaaacagca

SEQ ID NO: 2614278 - RNA, 19 nt, Homo sapiens
  misc_RNA (1)...(19): siRNA sense strand
aaguaauggcaaaguguca

SEQ ID NO: 2614279 - RNA, 19 nt, Homo sapiens
  misc_RNA (1)...(19): siRNA sense strand
cauaaggagauuugaagca

SEQ ID NO: 2614280 - RNA, 19 nt, Homo sapiens
  misc_RNA (1)...(19): siRNA sense strand
agcuauaacaguucagcaa

SEQ ID NO: 2614281 - RNA, 19 nt, Homo sapiens
  misc_RNA (1)...(19): siRNA sense strand
gcaaauaucuuacuggaug

SEQ ID NO: 2614282 - RNA, 19 nt, Homo sapiens
  misc_RNA (1)...(19): siRNA sense strand
auuaggaagcugucagauu

SEQ ID NO: 2614283 - RNA, 19 nt, Homo sapiens
  misc_RNA (1)...(19): siRNA sense strand
uggagaaauaacacccaaa

SEQ ID NO: 2614284 - RNA, 19 nt, Homo sapiens
  misc_RNA (1)...(19): siRNA sense strand
uggugaugauagauacaau

SEQ ID NO: 2614285 - RNA, 19 nt, Homo sapiens
  misc_RNA (1)...(19): siRNA sense strand
gaggauuuggaguuguaua

SEQ ID NO: 2614286 - RNA, 19 nt, Homo sapiens
  misc_RNA (1)...(19): siRNA sense strand
aggauuuggaguuguauau

SEQ ID NO: 2614287 - RNA, 19 nt, Homo sapiens
  misc_RNA (1)...(19): siRNA sense strand
cugccucaauguuggacua

SEQ ID NO: 2614288 - RNA, 19 nt, Homo sapiens
  misc_RNA (1)...(19): siRNA sense strand
uugcacaguuggugaucuu

SEQ ID NO: 2614289 - RNA, 19 nt, Homo sapiens
  misc_RNA (1)...(19): siRNA sense strand
uaauaaaaugggagaggga

SEQ ID NO: 2614290 - RNA, 19 nt, Homo sapiens
  misc_RNA (1)...(19): siRNA sense strand
gaguuguauauaaaggcua

SEQ ID NO: 2614291 - RNA, 19 nt, Homo sapiens
  misc_RNA (1)...(19): siRNA sense strand
cagcaguuugaucaagaaa

SEQ ID NO: 2614292 - RNA, 19 nt, Homo sapiens
  misc_RNA (1)...(19): siRNA sense strand
agagggaggauuuggaguu

SEQ ID NO: 2614293 - RNA, 19 nt, Homo sapiens
  misc_RNA (1)...(19): siRNA sense strand
ugaugacaccugugcagaa

SEQ ID NO: 2614294 - RNA, 19 nt, Homo sapiens
  misc_RNA (1)...(19): siRNA sense strand
cauuucuguuggugguaau

SEQ ID NO: 2614295 - RNA, 19 nt, Homo sapiens
  misc_RNA (1)...(19): siRNA sense strand
gugcaaauaucuuacugga

SEQ ID NO: 2614296 - RNA, 19 nt, Homo sapiens
  misc_RNA (1)...(19): siRNA sense strand
gugaaagacuagaggccuu

SEQ ID NO: 2614297 - RNA, 19 nt, Homo sapiens
  misc_RNA (1)...(19): siRNA sense strand
aagaagaagauuggagaaa

SEQ ID NO: 2614298 - RNA, 19 nt, Homo sapiens
  misc_RNA (1)...(19): siRNA sense strand
cuaugggauccuagagaaa

SEQ ID NO: 2614299 - RNA, 19 nt, Homo sapiens
  misc_RNA (1)...(19): siRNA sense strand
ggaugaaaggugccagcaa

SEQ ID NO: 2614300 - RNA, 19 nt, Homo sapiens
  misc_RNA (1)...(19): siRNA sense strand
gaaagaagaagauuggaga

SEQ ID NO: 2614301 - RNA, 19 nt, Homo sapiens
  misc_RNA (1)...(19): siRNA sense strand
auaaagaucuggcuggcaa

SEQ ID NO: 2614302 - RNA, 19 nt, Homo sapiens
  misc_RNA (1)...(19): siRNA sense strand
caguccaggcagaggcuua

SEQ ID NO: 2614303 - RNA, 19 nt, Homo sapiens
  misc_RNA (1)...(19): siRNA sense strand
aaagaagaagauuggagaa

SEQ ID NO: 2614304 - RNA, 19 nt, Homo sapiens
  misc_RNA (1)...(19): siRNA sense strand
cuugaagauugcuaggcua

SEQ ID NO: 2614305 - RNA, 19 nt, Homo sapiens
  misc_RNA (1)...(19): siRNA sense strand
gugaauaaccuuuuggaga

SEQ ID NO: 2614306 - RNA, 19 nt, Homo sapiens
  misc_RNA (1)...(19): siRNA sense strand
uuguggaagcaaugguaaa

SEQ ID NO: 2614307 - RNA, 19 nt, Homo sapiens
  misc_RNA (1)...(19): siRNA sense strand
gcacaaagguacaaugagc

SEQ ID NO: 2614308 - RNA, 19 nt, Homo sapiens
  misc_RNA (1)...(19): siRNA sense strand
agcaaugguaaaugagaau

SEQ ID NO: 2614309 - RNA, 19 nt, Homo sapiens
  misc_RNA (1)...(19): siRNA sense strand
aggaaaucaacuucaagaa

SEQ ID NO: 2614310 - RNA, 19 nt, Homo sapiens
  misc_RNA (1)...(19): siRNA sense strand
uuugaaagcuuuuguggaa

SEQ ID NO: 2614311 - RNA, 19 nt, Homo sapiens
  misc_RNA (1)...(19): siRNA sense strand
uaggaucaucagaggaaau

SEQ ID NO: 2614312 - RNA, 19 nt, Homo sapiens
  misc_RNA (1)...(19): siRNA sense strand
gccugauagcacagccaaa

SEQ ID NO: 2614313 - RNA, 19 nt, Homo sapiens
  misc_RNA (1)...(19): siRNA sense strand
cagcuaaggcggaaaagau

SEQ ID NO: 2614314 - RNA, 19 nt, Homo sapiens
  misc_RNA (1)...(19): siRNA sense strand
agucaaacagcaccagaau

SEQ ID NO: 2614315 - RNA, 19 nt, Homo sapiens
  misc_RNA (1)...(19): siRNA sense strand
cuggagacuuacuugaaga

SEQ ID NO: 2614316 - RNA, 19 nt, Homo sapiens
  misc_RNA (1)...(19): siRNA sense strand
aggaagugguaaaggaaau

SEQ ID NO: 2614317 - RNA, 19 nt, Homo sapiens
  misc_RNA (1)...(19): siRNA sense strand
aguaaagagguuaaggaaa

SEQ ID NO: 2614318 - RNA, 19 nt, Homo sapiens
  misc_RNA (1)...(19): siRNA sense strand
agccgaaauuugagcaaua

SEQ ID NO: 2614319 - RNA, 19 nt, Homo sapiens
  misc_RNA (1)...(19): siRNA sense strand
ccaaugaagaggacaggaa

SEQ ID NO: 2614320 - RNA, 19 nt, Homo sapiens
  misc_RNA (1)...(19): siRNA sense strand
aggagaagugugacaguua

SEQ ID NO: 2614321 - RNA, 19 nt, Homo sapiens
  misc_RNA (1)...(19): siRNA sense strand
aaagaaagacuuaagggua

SEQ ID NO: 2614322 - RNA, 19 nt, Homo sapiens
  misc_RNA (1)...(19): siRNA sense strand
aagcaggaauggaaggauu

SEQ ID NO: 2614323 - RNA, 19 nt, Homo sapiens
  misc_RNA (1)...(19): siRNA sense strand
aaugugaagccgugaauaa

SEQ ID NO: 2614324 - RNA, 19 nt, Homo sapiens
  misc_RNA (1)...(19): siRNA sense strand
gaagaagaugaaugagaau

SEQ ID NO: 2614325 - RNA, 19 nt, Homo sapiens
  misc_RNA (1)...(19): siRNA sense strand
acaaaagacuucagaucua

SEQ ID NO: 2614326 - RNA, 19 nt, Homo sapiens
  misc_RNA (1)...(19): siRNA sense strand
aauuacagguugacagauu

SEQ ID NO: 2614327 - RNA, 19 nt, Homo sapiens
  misc_RNA (1)...(19): siRNA sense strand
auaaagcggaagagcaaua

SEQ ID NO: 2614328 - RNA, 19 nt, Homo sapiens
  misc_RNA (1)...(19): siRNA sense strand
aaacagaaauugaugcuga

SEQ ID NO: 2614329 - RNA, 19 nt, Homo sapiens
  misc_RNA (1)...(19): siRNA sense strand
ugaguguacauuagagaaa

SEQ ID NO: 2614330 - RNA, 19 nt, Homo sapiens
  misc_RNA (1)...(19): siRNA sense strand
guuaaucaacccaaagaaa

SEQ ID NO: 2614331 - RNA, 19 nt, Homo sapiens
  misc_RNA (1)...(19): siRNA sense strand
caucuaaagcagaaagcau

SEQ ID NO: 2614332 - RNA, 19 nt, Homo sapiens
  misc_RNA (1)...(19): siRNA sense strand
uggaaggauuagauaaaga

SEQ ID NO: 2614333 - RNA, 19 nt, Homo sapiens
  misc_RNA (1)...(19): siRNA sense strand
agaauaaaccaaauggaca

SEQ ID NO: 2614334 - RNA, 19 nt, Homo sapiens
  misc_RNA (1)...(19): siRNA sense strand
gagaaaacugacaaagaua

SEQ ID NO: 2614335 - RNA, 19 nt, Homo sapiens
  misc_RNA (1)...(19): siRNA sense strand
aagaagaagaugaaugaga

SEQ ID NO: 2614336 - RNA, 19 nt, Homo sapiens
  misc_RNA (1)...(19): siRNA sense strand
ccaaaguuaacaagaaaga

SEQ ID NO: 2614337 - RNA, 19 nt, Homo sapiens
  misc_RNA (1)...(19): siRNA sense strand
ugauaauccaggaaaggaa

SEQ ID NO: 2614338 - RNA, 19 nt, Homo sapiens
  misc_RNA (1)...(19): siRNA sense strand
aaaauuggccugaggauaa

SEQ ID NO: 2614339 - RNA, 19 nt, Homo sapiens
  misc_RNA (1)...(19): siRNA sense strand
guuucagaauugagcagaa

SEQ ID NO: 2614340 - RNA, 19 nt, Homo sapiens
  misc_RNA (1)...(19): siRNA sense strand
aagaaagacuuaaggguag

SEQ ID NO: 2614341 - RNA, 19 nt, Homo sapiens
  misc_RNA (1)...(19): siRNA sense strand
uggaaaugagcucaagaaa

SEQ ID NO: 2614342 - RNA, 19 nt, Homo sapiens
  misc_RNA (1)...(19): siRNA sense strand
cagcccaggaagugguaaa

SEQ ID NO: 2614343 - RNA, 19 nt, Homo sapiens
  misc_RNA (1)...(19): siRNA sense strand
acaaaggagaagugugaca

SEQ ID NO: 2614344 - RNA, 19 nt, Homo sapiens
  misc_RNA (1)...(19): siRNA sense strand
ucugaaacaucuuggcauu

SEQ ID NO: 2614345 - RNA, 19 nt, Homo sapiens
  misc_RNA (1)...(19): siRNA sense strand
cgagggauggagagaggaa

SEQ ID NO: 2614346 - RNA, 19 nt, Homo sapiens
  misc_RNA (1)...(19): siRNA sense strand
cagccuaugucaagaacuu

SEQ ID NO: 2614347 - RNA, 19 nt, Homo sapiens
  misc_RNA (1)...(19): siRNA sense strand
gucuggaagccuugaauaa

SEQ ID NO: 2614348 - RNA, 19 nt, Homo sapiens
  misc_RNA (1)...(19): siRNA sense strand
gggaagcucuguagaaaau

SEQ ID NO: 2614349 - RNA, 19 nt, Homo sapiens
  misc_RNA (1)...(19): siRNA sense strand
aggauuuacccauuagaaa

SEQ ID NO: 2614350 - RNA, 19 nt, Homo sapiens
  misc_RNA (1)...(19): siRNA sense strand
caaugaagaggacaggaaa

SEQ ID NO: 2614351 - RNA, 19 nt, Homo sapiens
  misc_RNA (1)...(19): siRNA sense strand
aggccaggauugaugacaa

SEQ ID NO: 2614352 - RNA, 19 nt, Homo sapiens
  misc_RNA (1)...(19): siRNA sense strand
cuguagaaaugagggacaa

SEQ ID NO: 2614353 - RNA, 19 nt, Homo sapiens
  misc_RNA (1)...(19): siRNA sense strand
uaauaaacugagugagcau

SEQ ID NO: 2614354 - RNA, 19 nt, Homo sapiens
  misc_RNA (1)...(19): siRNA sense strand
caggaagugguaaaggaaa

SEQ ID NO: 2614355 - RNA, 19 nt, Homo sapiens
  misc_RNA (1)...(19): siRNA sense strand
ggaucuacagaaagaaaga

SEQ ID NO: 2614356 - RNA, 19 nt, Homo sapiens
  misc_RNA (1)...(19): siRNA sense strand
uugcuaaggaauugcuaaa

SEQ ID NO: 2614357 - RNA, 19 nt, Homo sapiens
  misc_RNA (1)...(19): siRNA sense strand
cagaaguacugguagcuca

SEQ ID NO: 2614358 - RNA, 19 nt, Homo sapiens
  misc_RNA (1)...(19): siRNA sense strand
gcuguagaaaugagggaca

SEQ ID NO: 2614359 - RNA, 19 nt, Homo sapiens
  misc_RNA (1)...(19): siRNA sense strand
cagaagaaauauuugccau

SEQ ID NO: 2614360 - RNA, 19 nt, Homo sapiens
  misc_RNA (1)...(19): siRNA sense strand
acccauugcuguaggauca

SEQ ID NO: 2614361 - RNA, 19 nt, Homo sapiens
  misc_RNA (1)...(19): siRNA sense strand
ugcaauggaauuagaacaa

SEQ ID NO: 2614362 - RNA, 19 nt, Homo sapiens
  misc_RNA (1)...(19): siRNA sense strand
cuguaggaucaaugaguau

SEQ ID NO: 2614363 - RNA, 19 nt, Homo sapiens
  misc_RNA (1)...(19): siRNA sense strand
ccaggaagugguaaaggaa

SEQ ID NO: 2614364 - RNA, 19 nt, Homo sapiens
  misc_RNA (1)...(19): siRNA sense strand
ccaagaauuaagaaaggau

SEQ ID NO: 2614365 - RNA, 19 nt, Homo sapiens
  misc_RNA (1)...(19): siRNA sense strand
aagcacaauuacagguuga

SEQ ID NO: 2614366 - RNA, 19 nt, Homo sapiens
  misc_RNA (1)...(19): siRNA sense strand
agggauggagagaggaaaa

SEQ ID NO: 2614367 - RNA, 19 nt, Homo sapiens
  misc_RNA (1)...(19): siRNA sense strand
caccaacaaaggagcauua

SEQ ID NO: 2614368 - RNA, 19 nt, Homo sapiens
  misc_RNA (1)...(19): siRNA sense strand
agugaacuuugaagaacaa

SEQ ID NO: 2614369 - RNA, 19 nt, Homo sapiens
  misc_RNA (1)...(19): siRNA sense strand
caggaucuacagaaagaaa

SEQ ID NO: 2614370 - RNA, 19 nt, Homo sapiens
  misc_RNA (1)...(19): siRNA sense strand
uaauaagcauagcaaggaa

SEQ ID NO: 2614371 - RNA, 19 nt, Homo sapiens
  misc_RNA (1)...(19): siRNA sense strand
gcucaagaaagaaaagcaa

SEQ ID NO: 2614372 - RNA, 19 nt, Homo sapiens
  misc_RNA (1)...(19): siRNA sense strand
ugguaaaggaaauucguuu

SEQ ID NO: 2614373 - RNA, 19 nt, Homo sapiens
  misc_RNA (1)...(19): siRNA sense strand
ggagagaggaaaaguauga

SEQ ID NO: 2614374 - RNA, 19 nt, Homo sapiens
  misc_RNA (1)...(19): siRNA sense strand
uggcaauguacgaauguaa

SEQ ID NO: 2614375 - RNA, 19 nt, Homo sapiens
  misc_RNA (1)...(19): siRNA sense strand
gaggcauaacaaugggaaa

SEQ ID NO: 2614376 - RNA, 19 nt, Homo sapiens
  misc_RNA (1)...(19): siRNA sense strand
auguaaaguuaucgcagaa

SEQ ID NO: 2614377 - RNA, 19 nt, Homo sapiens
  misc_RNA (1)...(19): siRNA sense strand
aaaucaugccagugcuaaa

SEQ ID NO: 2614378 - RNA, 19 nt, Homo sapiens
  misc_RNA (1)...(19): siRNA sense strand
cugcauugacagacaucua

SEQ ID NO: 2614379 - RNA, 19 nt, Homo sapiens
  misc_RNA (1)...(19): siRNA sense strand
uggccuuggaguaggaauu

SEQ ID NO: 2614380 - RNA, 19 nt, Homo sapiens
  misc_RNA (1)...(19): siRNA sense strand
ugguauaaaucaugccagu

SEQ ID NO: 2614381 - RNA, 19 nt, Homo sapiens
  misc_RNA (1)...(19): siRNA sense strand
cuucagauucagagaaaug

SEQ ID NO: 2614382 - RNA, 19 nt, Homo sapiens
  misc_RNA (1)...(19): siRNA sense strand
gggagaaagaggaaggcag

SEQ ID NO: 2614383 - RNA, 19 nt, Homo sapiens
  misc_RNA (1)...(19): siRNA sense strand
ggaaaagaccagagaccaa

SEQ ID NO: 2614384 - RNA, 19 nt, Homo sapiens
  misc_RNA (1)...(19): siRNA sense strand
aagaagaggaagaagagaa

SEQ ID NO: 2614385 - RNA, 19 nt, Homo sapiens
  misc_RNA (1)...(19): siRNA sense strand
agagaaugaagaaggagaa

SEQ ID NO: 2614386 - RNA, 19 nt, Homo sapiens
  misc_RNA (1)...(19): siRNA sense strand
ccuccaaaccagagaaacu

SEQ ID NO: 2614387 - RNA, 19 nt, Homo sapiens
  misc_RNA (1)...(19): siRNA sense strand
cagagaaugaagaaggaga

SEQ ID NO: 2614388 - RNA, 19 nt, Homo sapiens
  misc_RNA (1)...(19): siRNA sense strand
gagaaugaagaaggagaaa

SEQ ID NO: 2614389 - RNA, 19 nt, Homo sapiens
  misc_RNA (1)...(19): siRNA sense strand
cguggaaacagacaagaaa

SEQ ID NO: 2614390 - RNA, 19 nt, Homo sapiens
  misc_RNA (1)...(19): siRNA sense strand
gggucaaagaaauggcaga

SEQ ID NO: 2614391 - RNA, 19 nt, Homo sapiens
  misc_RNA (1)...(19): siRNA sense strand
cgaaggagaaagaagagau

SEQ ID NO: 2614392 - RNA, 19 nt, Homo sapiens
  misc_RNA (1)...(19): siRNA sense strand
gugaaauaaaggugaaauc

SEQ ID NO: 2614393 - RNA, 19 nt, Homo sapiens
  misc_RNA (1)...(19): siRNA sense strand
aggcgaaggagaaagaaga

SEQ ID NO: 2614394 - RNA, 19 nt, Homo sapiens
  misc_RNA (1)...(19): siRNA sense strand
gagacaaaugccaaagaga

SEQ ID NO: 2614395 - RNA, 19 nt, Homo sapiens
  misc_RNA (1)...(19): siRNA sense strand
ccguggaaacagacaagaa

SEQ ID NO: 2614396 - RNA, 19 nt, Homo sapiens
  misc_RNA (1)...(19): siRNA sense strand
uggagaagaauuagagacu

SEQ ID NO: 2614397 - RNA, 19 nt, Homo sapiens
  misc_RNA (1)...(19): siRNA sense strand
aggagagacaaaugccaaa

SEQ ID NO: 2614398 - RNA, 19 nt, Homo sapiens
  misc_RNA (1)...(19): siRNA sense strand
gccauagaaaggagccaaa

SEQ ID NO: 2614399 - RNA, 19 nt, Homo sapiens
  misc_RNA (1)...(19): siRNA sense strand
gacaugagcugcagggcca

SEQ ID NO: 2614400 - RNA, 19 nt, Homo sapiens
  misc_RNA (1)...(19): siRNA sense strand
uucccaagaaagugaaaua

SEQ ID NO: 2614401 - RNA, 19 nt, Homo sapiens
  misc_RNA (1)...(19): siRNA sense strand
agauggaaacugugagcca

SEQ ID NO: 2614402 - RNA, 19 nt, Homo sapiens
  misc_RNA (1)...(19): siRNA sense strand
auacugagcaagucaacaa

SEQ ID NO: 2614403 - RNA, 19 nt, Homo sapiens
  misc_RNA (1)...(19): siRNA sense strand
ucaaguauguagcaggaga

SEQ ID NO: 2614404 - RNA, 19 nt, Homo sapiens
  misc_RNA (1)...(19): siRNA sense strand
gaaagugaaauaaagguga

SEQ ID NO: 2614405 - RNA, 19 nt, Homo sapiens
  misc_RNA (1)...(19): siRNA sense strand
auguagcaggagagacaaa

SEQ ID NO: 2614406 - RNA, 19 nt, Homo sapiens
  misc_RNA (1)...(19): siRNA sense strand
caggagagacaaaugccaa

SEQ ID NO: 2614407 - RNA, 19 nt, Homo sapiens
  misc_RNA (1)...(19): siRNA sense strand
agagcaacucaaagaaaca

SEQ ID NO: 2614408 - RNA, 19 nt, Homo sapiens
  misc_RNA (1)...(19): siRNA sense strand
agucaaguauguagcagga

SEQ ID NO: 2614409 - RNA, 19 nt, Homo sapiens
  misc_RNA (1)...(19): siRNA sense strand
gaaaacucauuaugggcua

SEQ ID NO: 2614410 - RNA, 19 nt, Homo sapiens
  misc_RNA (1)...(19): siRNA sense strand
aauuagagcaacucaaaga

SEQ ID NO: 2614411 - RNA, 19 nt, Homo sapiens
  misc_RNA (1)...(19): siRNA sense strand
ggucaaagaaauggcagau

SEQ ID NO: 2614412 - RNA, 19 nt, Homo sapiens
  misc_RNA (1)...(19): siRNA sense strand
caguauuucuagaggcauc

SEQ ID NO: 2614413 - RNA, 19 nt, Homo sapiens
  misc_RNA (1)...(19): siRNA sense strand
cccuagucccagugaaauu

SEQ ID NO: 2614414 - RNA, 19 nt, Homo sapiens
  misc_RNA (1)...(19): siRNA sense strand
uacgagaggcgaaggagaa

SEQ ID NO: 2614415 - RNA, 19 nt, Homo sapiens
  misc_RNA (1)...(19): siRNA sense strand
agcacaggaaagaguguua

SEQ ID NO: 2614416 - RNA, 19 nt, Homo sapiens
  misc_RNA (1)...(19): siRNA sense strand
ugaccaagccauuagcaga

SEQ ID NO: 2614417 - RNA, 19 nt, Homo sapiens
  misc_RNA (1)...(19): siRNA sense strand
cagaaaauacugagcaagu

SEQ ID NO: 2614418 - RNA, 19 nt, Homo sapiens
  misc_RNA (1)...(19): siRNA sense strand
agcagaaaauacugagcaa

SEQ ID NO: 2614419 - RNA, 19 nt, Homo sapiens
  misc_RNA (1)...(19): siRNA sense strand
guggaaacagacaagaaaa

SEQ ID NO: 2614420 - RNA, 19 nt, Homo sapiens
  misc_RNA (1)...(19): siRNA sense strand
uuugugaagaagaggaaga

SEQ ID NO: 2614421 - RNA, 19 nt, Homo sapiens
  misc_RNA (1)...(19): siRNA sense strand
aggugaaaucuauccuuaa

SEQ ID NO: 2614422 - RNA, 19 nt, Homo sapiens
  misc_RNA (1)...(19): siRNA sense strand
caauggaugugauagcaga

SEQ ID NO: 2614423 - RNA, 19 nt, Homo sapiens
  misc_RNA (1)...(19): siRNA sense strand
cacaggaaagaguguuaua

SEQ ID NO: 2614424 - RNA, 19 nt, Homo sapiens
  misc_RNA (1)...(19): siRNA sense strand
guuuggaugccuuagaauu

SEQ ID NO: 2614425 - RNA, 19 nt, Homo sapiens
  misc_RNA (1)...(19): siRNA sense strand
acgagaggcgaaggagaaa

SEQ ID NO: 2614426 - RNA, 19 nt, Homo sapiens
  misc_RNA (1)...(19): siRNA sense strand
ggguguuaccagaaggcaa

SEQ ID NO: 2614427 - RNA, 19 nt, Homo sapiens
  misc_RNA (1)...(19): siRNA sense strand
ccagaagauaguaggauca

SEQ ID NO: 2614428 - RNA, 19 nt, Homo sapiens
  misc_RNA (1)...(19): siRNA sense strand
cagugaaagaagugaagau

SEQ ID NO: 2614429 - RNA, 19 nt, Homo sapiens
  misc_RNA (1)...(19): siRNA sense strand
gauacauuuccaugguaaa

SEQ ID NO: 2614430 - RNA, 19 nt, Homo sapiens
  misc_RNA (1)...(19): siRNA sense strand
ggagaaaucuguggaccga

SEQ ID NO: 2614431 - RNA, 19 nt, Homo sapiens
  misc_RNA (1)...(19): siRNA sense strand
guauacaauuaucaggcau

SEQ ID NO: 2614432 - RNA, 19 nt, Homo sapiens
  misc_RNA (1)...(19): siRNA sense strand
guauacaauuaucaggcau

SEQ ID NO: 2614433 - RNA, 19 nt, Homo sapiens
  misc_RNA (1)...(19): siRNA sense strand
guauacaauuaucaggcau

SEQ ID NO: 2614434 - RNA, 19 nt, Homo sapiens
  misc_RNA (1)...(19): siRNA sense strand
guauacaauuaucaggcau

SEQ ID NO: 2614435 - RNA, 19 nt, Homo sapiens
  misc_RNA (1)...(19): siRNA sense strand
guauacaauuaucaggcau

SEQ ID NO: 2614436 - RNA, 19 nt, Homo sapiens
  misc_RNA (1)...(19): siRNA sense strand
guauacaauuaucaggcau

SEQ ID NO: 2614437 - RNA, 19 nt, Homo sapiens
  misc_RNA (1)...(19): siRNA sense strand
cggaauccaaacacugaaa

SEQ ID NO: 2614438 - RNA, 19 nt, Homo sapiens
  misc_RNA (1)...(19): siRNA sense strand
ugacaaaggaagugaggca

SEQ ID NO: 2614439 - RNA, 19 nt, Homo sapiens
  misc_RNA (1)...(19): siRNA sense strand
gggacuugcuggacaaaga

SEQ ID NO: 2614440 - RNA, 19 nt, Homo sapiens
  misc_RNA (1)...(19): siRNA sense strand
aguccagauuucagagauu

SEQ ID NO: 2614441 - RNA, 19 nt, Homo sapiens
  misc_RNA (1)...(19): siRNA sense strand
gugccuucuuugugaacua

SEQ ID NO: 2614442 - RNA, 19 nt, Homo sapiens
  misc_RNA (1)...(19): siRNA sense strand
uuaaguacaaagaggagaa

SEQ ID NO: 2614443 - RNA, 19 nt, Homo sapiens
  misc_RNA (1)...(19): siRNA sense strand
acaaaggaagugaggcaga

SEQ ID NO: 2614444 - RNA, 19 nt, Homo sapiens
  misc_RNA (1)...(19): siRNA sense strand
caggagaaguccauggcca

SEQ ID NO: 2614445 - RNA, 19 nt, Homo sapiens
  misc_RNA (1)...(19): siRNA sense strand
cugcugacccugaggacau

SEQ ID NO: 2614446 - RNA, 19 nt, Homo sapiens
  misc_RNA (1)...(19): siRNA sense strand
agagaugccaggaaggaga

SEQ ID NO: 2614447 - RNA, 19 nt, Homo sapiens
  misc_RNA (1)...(19): siRNA sense strand
cugagaagagccugaccua

SEQ ID NO: 2614448 - RNA, 19 nt, Homo sapiens
  misc_RNA (1)...(19): siRNA sense strand
ggggaaaaccagaucauga

SEQ ID NO: 2614449 - RNA, 19 nt, Homo sapiens
  misc_RNA (1)...(19): siRNA sense strand
gaagugaggcagaggccca

SEQ ID NO: 2614450 - RNA, 19 nt, Homo sapiens
  misc_RNA (1)...(19): siRNA sense strand
caacaauagcaaaccuaca

SEQ ID NO: 2614451 - RNA, 19 nt, Homo sapiens
  misc_RNA (1)...(19): siRNA sense strand
ucacagaggaagaacgcca

SEQ ID NO: 2614452 - RNA, 19 nt, Homo sapiens
  misc_RNA (1)...(19): siRNA sense strand
aguacaaagaggagaaccu

SEQ ID NO: 2614453 - RNA, 19 nt, Homo sapiens
  misc_RNA (1)...(19): siRNA sense strand
agaggaucacagaggaaga

SEQ ID NO: 2614454 - RNA, 19 nt, Homo sapiens
  misc_RNA (1)...(19): siRNA sense strand
ggacagugcuuggcgcaga

SEQ ID NO: 2614455 - RNA, 19 nt, Homo sapiens
  misc_RNA (1)...(19): siRNA sense strand
ccauuaaguacaaagagga

SEQ ID NO: 2614456 - RNA, 19 nt, Homo sapiens
  misc_RNA (1)...(19): siRNA sense strand
ggaaggagacuguggagag

SEQ ID NO: 2614457 - RNA, 19 nt, Homo sapiens
  misc_RNA (1)...(19): siRNA sense strand
ccacaacaucagcgggacu

SEQ ID NO: 2614458 - RNA, 19 nt, Homo sapiens
  misc_RNA (1)...(19): siRNA sense strand
aggagacuguggagagcca

SEQ ID NO: 2614459 - RNA, 19 nt, Homo sapiens
  misc_RNA (1)...(19): siRNA sense strand
cuacaaaacagaagagccu

SEQ ID NO: 2614460 - RNA, 19 nt, Homo sapiens
  misc_RNA (1)...(19): siRNA sense strand
gagaagaaauacugcguca

SEQ ID NO: 2614461 - RNA, 19 nt, Homo sapiens
  misc_RNA (1)...(19): siRNA sense strand
agggaauagaggaguauaa

SEQ ID NO: 2614462 - RNA, 19 nt, Homo sapiens
  misc_RNA (1)...(19): siRNA sense strand
agacagaauuacacgaaaa

SEQ ID NO: 2614463 - RNA, 19 nt, Homo sapiens
  misc_RNA (1)...(19): siRNA sense strand
ccaagaauauguagagcca

SEQ ID NO: 2614464 - RNA, 19 nt, Homo sapiens
  misc_RNA (1)...(19): siRNA sense strand
agguggaagcagugguuua

SEQ ID NO: 2614465 - RNA, 19 nt, Homo sapiens
  misc_RNA (1)...(19): siRNA sense strand
aaggaagaggauuggaaua

SEQ ID NO: 2614466 - RNA, 19 nt, Homo sapiens
  misc_RNA (1)...(19): siRNA sense strand
ccugaagaaaugaaacaaa

SEQ ID NO: 2614467 - RNA, 19 nt, Homo sapiens
  misc_RNA (1)...(19): siRNA sense strand
ggaaauuauggcagaagau

SEQ ID NO: 2614468 - RNA, 19 nt, Homo sapiens
  misc_RNA (1)...(19): siRNA sense strand
agaaggaaauuauggcaga

SEQ ID NO: 2614469 - RNA, 19 nt, Homo sapiens
  misc_RNA (1)...(19): siRNA sense strand
gggugaagauggagcugga

SEQ ID NO: 2614470 - RNA, 19 nt, Homo sapiens
  misc_RNA (1)...(19): siRNA sense strand
gugaagauggagcuggaaa

SEQ ID NO: 2614471 - RNA, 19 nt, Homo sapiens
  misc_RNA (1)...(19): siRNA sense strand
cgucacaagaagacaaaga

SEQ ID NO: 2614472 - RNA, 19 nt, Homo sapiens
  misc_RNA (1)...(19): siRNA sense strand
gaggaguauaagaaaggaa

SEQ ID NO: 2614473 - RNA, 19 nt, Homo sapiens
  misc_RNA (1)...(19): siRNA sense strand
aggaagaggauuggaauau

SEQ ID NO: 2614474 - RNA, 19 nt, Homo sapiens
  misc_RNA (1)...(19): siRNA sense strand
uggagaaagaacaugacua

SEQ ID NO: 2614475 - RNA, 19 nt, Homo sapiens
  misc_RNA (1)...(19): siRNA sense strand
cauuaguguauuggagaaa

SEQ ID NO: 2614476 - RNA, 19 nt, Homo sapiens
  misc_RNA (1)...(19): siRNA sense strand
ggaguauaagaaaggaaga

SEQ ID NO: 2614477 - RNA, 19 nt, Homo sapiens
  misc_RNA (1)...(19): siRNA sense strand
cuuagauguucaugcagaa

SEQ ID NO: 2614478 - RNA, 19 nt, Homo sapiens
  misc_RNA (1)...(19): siRNA sense strand
gggcagaaccuuugguccu

SEQ ID NO: 2614479 - RNA, 19 nt, Homo sapiens
  misc_RNA (1)...(19): siRNA sense strand
uauaagaaaggaagaggau

SEQ ID NO: 2614480 - RNA, 19 nt, Homo sapiens
  misc_RNA (1)...(19): siRNA sense strand
cuuaaaugugcaugaugaa

SEQ ID NO: 2614481 - RNA, 19 nt, Homo sapiens
  misc_RNA (1)...(19): siRNA sense strand
aggaaauuauggcagaaga

SEQ ID NO: 2614482 - RNA, 19 nt, Homo sapiens
  misc_RNA (1)...(19): siRNA sense strand
ugaagauggagcuggaaaa

SEQ ID NO: 2614483 - RNA, 19 nt, Homo sapiens
  misc_RNA (1)...(19): siRNA sense strand
guguauuggagaaagaaca

SEQ ID NO: 2614484 - RNA, 19 nt, Homo sapiens
  misc_RNA (1)...(19): siRNA sense strand
guauaagaaaggaagagga

SEQ ID NO: 2614485 - RNA, 19 nt, Homo sapiens
  misc_RNA (1)...(19): siRNA sense strand
uuagagaacauguugacaa

SEQ ID NO: 2614486 - RNA, 19 nt, Homo sapiens
  misc_RNA (1)...(19): siRNA sense strand
acgagauagcgucgggcaa

SEQ ID NO: 2614487 - RNA, 19 nt, Homo sapiens
  misc_RNA (1)...(19): siRNA sense strand
cagaagaugaucagguguu

SEQ ID NO: 2614488 - RNA, 19 nt, Homo sapiens
  misc_RNA (1)...(19): siRNA sense strand
cugcuguuguuguggaaaa

SEQ ID NO: 2614489 - RNA, 19 nt, Homo sapiens
  misc_RNA (1)...(19): siRNA sense strand
cugaaggauacucuaguua

SEQ ID NO: 2614490 - RNA, 19 nt, Homo sapiens
  misc_RNA (1)...(19): siRNA sense strand
auauguagagccaggagaa

SEQ ID NO: 2614491 - RNA, 19 nt, Homo sapiens
  misc_RNA (1)...(19): siRNA sense strand
aaauuauggcagaagauga

SEQ ID NO: 2614492 - RNA, 19 nt, Homo sapiens
  misc_RNA (1)...(19): siRNA sense strand
uuaguguauuggagaaaga

SEQ ID NO: 2614493 - RNA, 19 nt, Homo sapiens
  misc_RNA (1)...(19): siRNA sense strand
cuauaagauuccugcuguu

SEQ ID NO: 2614494 - RNA, 19 nt, Homo sapiens
  misc_RNA (1)...(19): siRNA sense strand
auggagaccuauaucacaa

SEQ ID NO: 2614495 - RNA, 19 nt, Homo sapiens
  misc_RNA (1)...(19): siRNA sense strand
gaaaugaaacaaauggaac

SEQ ID NO: 2614496 - RNA, 19 nt, Homo sapiens
  misc_RNA (1)...(19): siRNA sense strand
auuccagcagggugggaua

SEQ ID NO: 2614497 - RNA, 19 nt, Homo sapiens
  misc_RNA (1)...(19): siRNA sense strand
caucauaacuaaaccaccu

SEQ ID NO: 2614498 - RNA, 19 nt, Homo sapiens
  misc_RNA (1)...(19): siRNA sense strand
agaacuagacagaauuaca

SEQ ID NO: 2614499 - RNA, 19 nt, Homo sapiens
  misc_RNA (1)...(19): siRNA sense strand
ucuuagauggagaccuaua

SEQ ID NO: 2614500 - RNA, 19 nt, Homo sapiens
  misc_RNA (1)...(19): siRNA sense strand
acauguugacaaacugaaa

SEQ ID NO: 2614501 - RNA, 19 nt, Homo sapiens
  misc_RNA (1)...(19): siRNA sense strand
aagacaaagaugacagugu

SEQ ID NO: 2614502 - RNA, 19 nt, Homo sapiens
  misc_RNA (1)...(19): siRNA sense strand
uggaaaaggaugcaguauu

SEQ ID NO: 2614503 - RNA, 19 nt, Homo sapiens
  misc_RNA (1)...(19): siRNA sense strand
aagaacaugacuacagaga

SEQ ID NO: 2614504 - RNA, 19 nt, Homo sapiens
  misc_RNA (1)...(19): siRNA sense strand
aauuauggcagaagaugau

SEQ ID NO: 2614505 - RNA, 19 nt, Homo sapiens
  misc_RNA (1)...(19): siRNA sense strand
augcagaagaguuagcaaa

SEQ ID NO: 2614506 - RNA, 19 nt, Homo sapiens
  misc_RNA (1)...(19): siRNA sense strand
gcuaaaauccggaagccaa

SEQ ID NO: 2614507 - RNA, 19 nt, Homo sapiens
  misc_RNA (1)...(19): siRNA sense strand
uagugaacaacgugggaau

SEQ ID NO: 2614508 - RNA, 19 nt, Homo sapiens
  misc_RNA (1)...(19): siRNA sense strand
caugaggaguauaggagca

SEQ ID NO: 2614509 - RNA, 19 nt, Homo sapiens
  misc_RNA (1)...(19): siRNA sense strand
gcucacuaucugaagaaaa

SEQ ID NO: 2614510 - RNA, 19 nt, Homo sapiens
  misc_RNA (1)...(19): siRNA sense strand
aucauaugcagaagaguua

SEQ ID NO: 2614511 - RNA, 19 nt, Homo sapiens
  misc_RNA (1)...(19): siRNA sense strand
aauucaaaguggagacaag

SEQ ID NO: 2614512 - RNA, 19 nt, Homo sapiens
  misc_RNA (1)...(19): siRNA sense strand
uggaaaaucauaugcagaa

SEQ ID NO: 2614513 - RNA, 19 nt, Homo sapiens
  misc_RNA (1)...(19): siRNA sense strand
ugggaaugucguaugagua

SEQ ID NO: 2614514 - RNA, 19 nt, Homo sapiens
  misc_RNA (1)...(19): siRNA sense strand
ucggcaucuuagugaacaa

SEQ ID NO: 2614515 - RNA, 19 nt, Homo sapiens
  misc_RNA (1)...(19): siRNA sense strand
acuuggacaaugugaucaa

SEQ ID NO: 2614516 - RNA, 19 nt, Homo sapiens
  misc_RNA (1)...(19): siRNA sense strand
gggugaacaaagagaagau

SEQ ID NO: 2614517 - RNA, 19 nt, Homo sapiens
  misc_RNA (1)...(19): siRNA sense strand
gucaaacaacaguggcaaa

SEQ ID NO: 2614518 - RNA, 19 nt, Homo sapiens
  misc_RNA (1)...(19): siRNA sense strand
gggagagcgucuauggcga

SEQ ID NO: 2614519 - RNA, 19 nt, Homo sapiens
  misc_RNA (1)...(19): siRNA sense strand
cagugugccugaugggaca

SEQ ID NO: 2614520 - RNA, 19 nt, Homo sapiens
  misc_RNA (1)...(19): siRNA sense strand
gugaacaaagagaagauca

SEQ ID NO: 2614521 - RNA, 19 nt, Homo sapiens
  misc_RNA (1)...(19): siRNA sense strand
ugcuuggacuauugcgaaa

SEQ ID NO: 2614522 - RNA, 19 nt, Homo sapiens
  misc_RNA (1)...(19): siRNA sense strand
acaugaaagaagacagacu

SEQ ID NO: 2614523 - RNA, 19 nt, Homo sapiens
  misc_RNA (1)...(19): siRNA sense strand
ggguguuagcugaccaaaa

SEQ ID NO: 2614524 - RNA, 19 nt, Homo sapiens
  misc_RNA (1)...(19): siRNA sense strand
cagccgagccugaucguga

SEQ ID NO: 2614525 - RNA, 19 nt, Homo sapiens
  misc_RNA (1)...(19): siRNA sense strand
gugcaaugacucugaccga

SEQ ID NO: 2614526 - RNA, 19 nt, Homo sapiens
  misc_RNA (1)...(19): siRNA sense strand
ugggauuggaagaccgcaa

SEQ ID NO: 2614527 - RNA, 19 nt, Homo sapiens
  misc_RNA (1)...(19): siRNA sense strand
ccuauguagcagaugccaa

SEQ ID NO: 2614528 - RNA, 19 nt, Homo sapiens
  misc_RNA (1)...(19): siRNA sense strand
gcuacaaggaccuggaccu

SEQ ID NO: 2614529 - RNA, 19 nt, Homo sapiens
  misc_RNA (1)...(19): siRNA sense strand
aguccuauuugcagaacca

SEQ ID NO: 2614530 - RNA, 19 nt, Homo sapiens
  misc_RNA (1)...(19): siRNA sense strand
ccgaagaggaagaggaauu

SEQ ID NO: 2614531 - RNA, 19 nt, Homo sapiens
  misc_RNA (1)...(19): siRNA sense strand
augaagaacuacucagcaa

SEQ ID NO: 2614532 - RNA, 19 nt, Homo sapiens
  misc_RNA (1)...(19): siRNA sense strand
gagagauggguuugaacaa

SEQ ID NO: 2614533 - RNA, 19 nt, Homo sapiens
  misc_RNA (1)...(19): siRNA sense strand
aucuuaaacucgagggaau

SEQ ID NO: 2614534 - RNA, 19 nt, Homo sapiens
  misc_RNA (1)...(19): siRNA sense strand
gagcaagguagaaaagaaa

SEQ ID NO: 2614535 - RNA, 19 nt, Homo sapiens
  misc_RNA (1)...(19): siRNA sense strand
ggagguaaacagugcccua

SEQ ID NO: 2614536 - RNA, 19 nt, Homo sapiens
  misc_RNA (1)...(19): siRNA sense strand
auccaagcuaagagagaaa

SEQ ID NO: 2614537 - RNA, 19 nt, Homo sapiens
  misc_RNA (1)...(19): siRNA sense strand
aaucuuacccagagaguca

SEQ ID NO: 2614538 - RNA, 19 nt, Homo sapiens
  misc_RNA (1)...(19): siRNA sense strand
ugccagaaccagagagcuu

SEQ ID NO: 2614539 - RNA, 19 nt, Homo sapiens
  misc_RNA (1)...(19): siRNA sense strand
cagaaaugaauaagcagau

SEQ ID NO: 2614540 - RNA, 19 nt, Homo sapiens
  misc_RNA (1)...(19): siRNA sense strand
cagcaugaugggugauaga

SEQ ID NO: 2614541 - RNA, 19 nt, Homo sapiens
  misc_RNA (1)...(19): siRNA sense strand
ggggacagccggagaaaga

SEQ ID NO: 2614542 - RNA, 19 nt, Homo sapiens
  misc_RNA (1)...(19): siRNA sense strand
cuggaugcccucaaggaaa

SEQ ID NO: 2614543 - RNA, 19 nt, Homo sapiens
  misc_RNA (1)...(19): siRNA sense strand
gccaggacguggaugggaa

SEQ ID NO: 2614544 - RNA, 19 nt, Homo sapiens
  misc_RNA (1)...(19): siRNA sense strand
uggagacccaguugagaaa

SEQ ID NO: 2614545 - RNA, 19 nt, Homo sapiens
  misc_RNA (1)...(19): siRNA sense strand
guauccaagcuaagagaga

SEQ ID NO: 2614546 - RNA, 19 nt, Homo sapiens
  misc_RNA (1)...(19): siRNA sense strand
uugaacaaagucuggauaa

SEQ ID NO: 2614547 - RNA, 19 nt, Homo sapiens
  misc_RNA (1)...(19): siRNA sense strand
acaagaaaacgauggaauu

SEQ ID NO: 2614548 - RNA, 19 nt, Homo sapiens
  misc_RNA (1)...(19): siRNA sense strand
ccccaaacuuaaugaagaa

SEQ ID NO: 2614549 - RNA, 19 nt, Homo sapiens
  misc_RNA (1)...(19): siRNA sense strand
ugagcaagguagaaaagaa

SEQ ID NO: 2614550 - RNA, 19 nt, Homo sapiens
  misc_RNA (1)...(19): siRNA sense strand
aguucaaauucucagguau

SEQ ID NO: 2614551 - RNA, 19 nt, Homo sapiens
  misc_RNA (1)...(19): siRNA sense strand
caacuugagaagauugaau

SEQ ID NO: 2614552 - RNA, 19 nt, Homo sapiens
  misc_RNA (1)...(19): siRNA sense strand
caagaaaggcccaagcagu

SEQ ID NO: 2614553 - RNA, 19 nt, Homo sapiens
  misc_RNA (1)...(19): siRNA sense strand
acagugagaauuugaaaca

SEQ ID NO: 2614554 - RNA, 19 nt, Homo sapiens
  misc_RNA (1)...(19): siRNA sense strand
acagaaaugaauaagcaga

SEQ ID NO: 2614555 - RNA, 19 nt, Homo sapiens
  misc_RNA (1)...(19): siRNA sense strand
ccacaucagaacuugacaa

SEQ ID NO: 2614556 - RNA, 19 nt, Homo sapiens
  misc_RNA (1)...(19): siRNA sense strand
cggagaaagaagcccaaga

SEQ ID NO: 2614557 - RNA, 19 nt, Homo sapiens
  misc_RNA (1)...(19): siRNA sense strand
ccgaugaagagcaaguaga

SEQ ID NO: 2614558 - RNA, 19 nt, Homo sapiens
  misc_RNA (1)...(19): siRNA sense strand
aggaagaggaauucggugu

SEQ ID NO: 2614559 - RNA, 19 nt, Homo sapiens
  misc_RNA (1)...(19): siRNA sense strand
agguagaaaagaaagcaaa

SEQ ID NO: 2614560 - RNA, 19 nt, Homo sapiens
  misc_RNA (1)...(19): siRNA sense strand
agaacuacucagcaagcaa

SEQ ID NO: 2614561 - RNA, 19 nt, Homo sapiens
  misc_RNA (1)...(19): siRNA sense strand
aauaaaacccacagugaga

SEQ ID NO: 2614562 - RNA, 19 nt, Homo sapiens
  misc_RNA (1)...(19): siRNA sense strand
ccuucagcaugauggguga

SEQ ID NO: 2614563 - RNA, 19 nt, Homo sapiens
  misc_RNA (1)...(19): siRNA sense strand
aauucggugugguuggaaa

SEQ ID NO: 2614564 - RNA, 19 nt, Homo sapiens
  misc_RNA (1)...(19): siRNA sense strand
cuccgaagaggaagaggaa

SEQ ID NO: 2614565 - RNA, 19 nt, Homo sapiens
  misc_RNA (1)...(19): siRNA sense strand
gcuccgaagaggaagagga

SEQ ID NO: 2614566 - RNA, 19 nt, Homo sapiens
  misc_RNA (1)...(19): siRNA sense strand
guucaaauucucagguauc

SEQ ID NO: 2614567 - RNA, 19 nt, Homo sapiens
  misc_RNA (1)...(19): siRNA sense strand
gagcaaguagagaguuuca

SEQ ID NO: 2614568 - RNA, 19 nt, Homo sapiens
  misc_RNA (1)...(19): siRNA sense strand
guggaugaacacaagaaaa

SEQ ID NO: 2614569 - RNA, 19 nt, Homo sapiens
  misc_RNA (1)...(19): siRNA sense strand
gguaccagagacagaauga

SEQ ID NO: 2614570 - RNA, 19 nt, Homo sapiens
  misc_RNA (1)...(19): siRNA sense strand
ccgauggagauggaagaua

SEQ ID NO: 2614571 - RNA, 19 nt, Homo sapiens
  misc_RNA (1)...(19): siRNA sense strand
agggaaugaacgagacagu

SEQ ID NO: 2614572 - RNA, 19 nt, Homo sapiens
  misc_RNA (1)...(19): siRNA sense strand
acaucaaagccaucagcau

SEQ ID NO: 2614573 - RNA, 19 nt, Homo sapiens
  misc_RNA (1)...(19): siRNA sense strand
cauuugauuccgauggaga

SEQ ID NO: 2614574 - RNA, 19 nt, Homo sapiens
  misc_RNA (1)...(19): siRNA sense strand
agcccaaguagaagaaaua

SEQ ID NO: 2614575 - RNA, 19 nt, Homo sapiens
  misc_RNA (1)...(19): siRNA sense strand
agccauagugaguguguua

SEQ ID NO: 2614576 - RNA, 19 nt, Homo sapiens
  misc_RNA (1)...(19): siRNA sense strand
ugauauaugagcagaagau

SEQ ID NO: 2614577 - RNA, 19 nt, Homo sapiens
  misc_RNA (1)...(19): siRNA sense strand
auuaagagaaggaccgauu

SEQ ID NO: 2614578 - RNA, 19 nt, Homo sapiens
  misc_RNA (1)...(19): siRNA sense strand
agaagauagcagaguuaca

SEQ ID NO: 2614579 - RNA, 19 nt, Homo sapiens
  misc_RNA (1)...(19): siRNA sense strand
uugaagaagaaguacagaa

SEQ ID NO: 2614580 - RNA, 19 nt, Homo sapiens
  misc_RNA (1)...(19): siRNA sense strand
acccauggauacagaucaa

SEQ ID NO: 2614581 - RNA, 19 nt, Homo sapiens
  misc_RNA (1)...(19): siRNA sense strand
caguuauguuccuguuaau

SEQ ID NO: 2614582 - RNA, 19 nt, Homo sapiens
  misc_RNA (1)...(19): siRNA sense strand
uggauacagaucaagguaa

SEQ ID NO: 2614583 - RNA, 19 nt, Homo sapiens
  misc_RNA (1)...(19): siRNA sense strand
auacgaagacaucagcaaa

SEQ ID NO: 2614584 - RNA, 19 nt, Homo sapiens
  misc_RNA (1)...(19): siRNA sense strand
gaauuugauacgaagacau

SEQ ID NO: 2614585 - RNA, 19 nt, Homo sapiens
  misc_RNA (1)...(19): siRNA sense strand
cagcaggcucugugguuca

SEQ ID NO: 2614586 - RNA, 19 nt, Homo sapiens
  misc_RNA (1)...(19): siRNA sense strand
gagaauaucagaaggaagc

SEQ ID NO: 2614587 - RNA, 19 nt, Homo sapiens
  misc_RNA (1)...(19): siRNA sense strand
cgcaaagaaagcucaggaa

SEQ ID NO: 2614588 - RNA, 19 nt, Homo sapiens
  misc_RNA (1)...(19): siRNA sense strand
uguuaaugggagacuguau

SEQ ID NO: 2614589 - RNA, 19 nt, Homo sapiens
  misc_RNA (1)...(19): siRNA sense strand
aguuaauaccacuaguaga

SEQ ID NO: 2614590 - RNA, 19 nt, Homo sapiens
  misc_RNA (1)...(19): siRNA sense strand
auacaaaaguacagugaag

SEQ ID NO: 2614591 - RNA, 19 nt, Homo sapiens
  misc_RNA (1)...(19): siRNA sense strand
aaaacagaacgcaaagaaa

SEQ ID NO: 2614592 - RNA, 19 nt, Homo sapiens
  misc_RNA (1)...(19): siRNA sense strand
aguagaagaaauauggagu

SEQ ID NO: 2614593 - RNA, 19 nt, Homo sapiens
  misc_RNA (1)...(19): siRNA sense strand
auaucagaaggaagcauaa

SEQ ID NO: 2614594 - RNA, 19 nt, Homo sapiens
  misc_RNA (1)...(19): siRNA sense strand
gggcaggggaaaaggaaaa

SEQ ID NO: 2614595 - RNA, 19 nt, Homo sapiens
  misc_RNA (1)...(19): siRNA sense strand
ggaaagagcuaucgccacu

SEQ ID NO: 2614596 - RNA, 19 nt, Homo sapiens
  misc_RNA (1)...(19): siRNA sense strand
acaaagagccacagccaca

SEQ ID NO: 2614597 - RNA, 19 nt, Homo sapiens
  misc_RNA (1)...(19): siRNA sense strand
ugaaagaagagguguggga

SEQ ID NO: 2614598 - RNA, 19 nt, Homo sapiens
  misc_RNA (1)...(19): siRNA sense strand
ccaacaagacagaccgaca

SEQ ID NO: 2614599 - RNA, 19 nt, Homo sapiens
  misc_RNA (1)...(19): siRNA sense strand
agacaagacagcagcacau

SEQ ID NO: 2614600 - RNA, 19 nt, Homo sapiens
  misc_RNA (1)...(19): siRNA sense strand
ccauggcggcugaggacaa

SEQ ID NO: 2614601 - RNA, 19 nt, Homo sapiens
  misc_RNA (1)...(19): siRNA sense strand
aagaagaggccacggacau

SEQ ID NO: 2614602 - RNA, 19 nt, Homo sapiens
  misc_RNA (1)...(19): siRNA sense strand
ccacaaagagccacagcca

SEQ ID NO: 2614603 - RNA, 19 nt, Homo sapiens
  misc_RNA (1)...(19): siRNA sense strand
gaaaaggaaaauagcagaa

SEQ ID NO: 2614604 - RNA, 19 nt, Homo sapiens
  misc_RNA (1)...(19): siRNA sense strand
ccacaaagaggaagaggac

SEQ ID NO: 2614605 - RNA, 19 nt, Homo sapiens
  misc_RNA (1)...(19): siRNA sense strand
ggaaggaguggcagaggca

SEQ ID NO: 2614606 - RNA, 19 nt, Homo sapiens
  misc_RNA (1)...(19): siRNA sense strand
cccuauaagugcagugagu

SEQ ID NO: 2614607 - RNA, 19 nt, Homo sapiens
  misc_RNA (1)...(19): siRNA sense strand
ggaagaggaaggaguggca

SEQ ID NO: 2614608 - RNA, 19 nt, Homo sapiens
  misc_RNA (1)...(19): siRNA sense strand
uggcaaggccuuucggaca

SEQ ID NO: 2614609 - RNA, 19 nt, Homo sapiens
  misc_RNA (1)...(19): siRNA sense strand
cuuaagaaccacagcagga

SEQ ID NO: 2614610 - RNA, 19 nt, Homo sapiens
  misc_RNA (1)...(19): siRNA sense strand
ggcaaggaguuggggaaaa

SEQ ID NO: 2614611 - RNA, 19 nt, Homo sapiens
  misc_RNA (1)...(19): siRNA sense strand
cuauaagugcagugagugu

SEQ ID NO: 2614612 - RNA, 19 nt, Homo sapiens
  misc_RNA (1)...(19): siRNA sense strand
ccaucggacuggagaguac

SEQ ID NO: 2614613 - RNA, 19 nt, Homo sapiens
  misc_RNA (1)...(19): siRNA sense strand
gaagaagaggccacggaca

SEQ ID NO: 2614614 - RNA, 19 nt, Homo sapiens
  misc_RNA (1)...(19): siRNA sense strand
cggugggagagaagccaaa

SEQ ID NO: 2614615 - RNA, 19 nt, Homo sapiens
  misc_RNA (1)...(19): siRNA sense strand
cccgggagcuagaagacaa

SEQ ID NO: 2614616 - RNA, 19 nt, Homo sapiens
  misc_RNA (1)...(19): siRNA sense strand
ugaggaaggugguggcacu

SEQ ID NO: 2614617 - RNA, 19 nt, Homo sapiens
  misc_RNA (1)...(19): siRNA sense strand
gaggaaguggccaggguga

SEQ ID NO: 2614618 - RNA, 19 nt, Homo sapiens
  misc_RNA (1)...(19): siRNA sense strand
ucuagugaaggcugggaaa

SEQ ID NO: 2614619 - RNA, 19 nt, Homo sapiens
  misc_RNA (1)...(19): siRNA sense strand
gagacuguggaaagagcua

SEQ ID NO: 2614620 - RNA, 19 nt, Homo sapiens
  misc_RNA (1)...(19): siRNA sense strand
uggccagggugaaagaaga

SEQ ID NO: 2614621 - RNA, 19 nt, Homo sapiens
  misc_RNA (1)...(19): siRNA sense strand
ccagaaggaggcagcaaca

SEQ ID NO: 2614622 - RNA, 19 nt, Homo sapiens
  misc_RNA (1)...(19): siRNA sense strand
gggagcaugaggagacaga

SEQ ID NO: 2614623 - RNA, 19 nt, Homo sapiens
  misc_RNA (1)...(19): siRNA sense strand
acauagacgcccagaccuu

SEQ ID NO: 2614624 - RNA, 19 nt, Homo sapiens
  misc_RNA (1)...(19): siRNA sense strand
agguagaacucccgccuga

SEQ ID NO: 2614625 - RNA, 19 nt, Homo sapiens
  misc_RNA (1)...(19): siRNA sense strand
aggagagaguguggagaga

SEQ ID NO: 2614626 - RNA, 19 nt, Homo sapiens
  misc_RNA (1)...(19): siRNA sense strand
gcaacaagccccagcacau

SEQ ID NO: 2614627 - RNA, 19 nt, Homo sapiens
  misc_RNA (1)...(19): siRNA sense strand
aagaagaggugugggagga

SEQ ID NO: 2614628 - RNA, 19 nt, Homo sapiens
  misc_RNA (1)...(19): siRNA sense strand
ugugcaaacaugaagaaga

SEQ ID NO: 2614629 - RNA, 19 nt, Homo sapiens
  misc_RNA (1)...(19): siRNA sense strand
ccacccacaaagaggaaga

SEQ ID NO: 2614630 - RNA, 19 nt, Homo sapiens
  misc_RNA (1)...(19): siRNA sense strand
agaaagggagccagccaau

SEQ ID NO: 2614631 - RNA, 19 nt, Homo sapiens
  misc_RNA (1)...(19): siRNA sense strand
ggguggaugaagaccagaa

SEQ ID NO: 2614632 - RNA, 19 nt, Homo sapiens
  misc_RNA (1)...(19): siRNA sense strand
aagaggaaggaguggcaga

SEQ ID NO: 2614633 - RNA, 19 nt, Homo sapiens
  misc_RNA (1)...(19): siRNA sense strand
ggauggagucccaaggcca

SEQ ID NO: 2614634 - RNA, 19 nt, Homo sapiens
  misc_RNA (1)...(19): siRNA sense strand
gggacuguuugcaggcuga

SEQ ID NO: 2614635 - RNA, 19 nt, Homo sapiens
  misc_RNA (1)...(19): siRNA sense strand
cagaaagggagccagccaa

SEQ ID NO: 2614636 - RNA, 19 nt, Homo sapiens
  misc_RNA (1)...(19): siRNA sense strand
gggaaaaccagacaaaaca

SEQ ID NO: 2614637 - RNA, 19 nt, Homo sapiens
  misc_RNA (1)...(19): siRNA sense strand
agacaaaacauacagaaga

SEQ ID NO: 2614638 - RNA, 19 nt, Homo sapiens
  misc_RNA (1)...(19): siRNA sense strand
cugagagccuugaacguca

SEQ ID NO: 2614639 - RNA, 19 nt, Homo sapiens
  misc_RNA (1)...(19): siRNA sense strand
caggcaaggaguuggggaa

SEQ ID NO: 2614640 - RNA, 19 nt, Homo sapiens
  misc_RNA (1)...(19): siRNA sense strand
aaaguuuguuggaggcuca

SEQ ID NO: 2614641 - RNA, 19 nt, Homo sapiens
  misc_RNA (1)...(19): siRNA sense strand
ggucagaggagccagagga

SEQ ID NO: 2614642 - RNA, 19 nt, Homo sapiens
  misc_RNA (1)...(19): siRNA sense strand
caaagagaaggcuuggcaa

SEQ ID NO: 2614643 - RNA, 19 nt, Homo sapiens
  misc_RNA (1)...(19): siRNA sense strand
guuucaaggaguucucuaa

SEQ ID NO: 2614644 - RNA, 19 nt, Homo sapiens
  misc_RNA (1)...(19): siRNA sense strand
ccauuuccagggugauaaa

SEQ ID NO: 2614645 - RNA, 19 nt, Homo sapiens
  misc_RNA (1)...(19): siRNA sense strand
cagaggagccagaggacag

SEQ ID NO: 2614646 - RNA, 19 nt, Homo sapiens
  misc_RNA (1)...(19): siRNA sense strand
ggaaaaggaaaauagcaga

SEQ ID NO: 2614647 - RNA, 19 nt, Homo sapiens
  misc_RNA (1)...(19): siRNA sense strand
agauggaggaggccagaga

SEQ ID NO: 2614648 - RNA, 19 nt, Homo sapiens
  misc_RNA (1)...(19): siRNA sense strand
gagagaguguggagagagc

SEQ ID NO: 2614649 - RNA, 19 nt, Homo sapiens
  misc_RNA (1)...(19): siRNA sense strand
agugguggccaaugggaaa

SEQ ID NO: 2614650 - RNA, 19 nt, Homo sapiens
  misc_RNA (1)...(19): siRNA sense strand
gcacagaaauguuugaggu

SEQ ID NO: 2614651 - RNA, 19 nt, Homo sapiens
  misc_RNA (1)...(19): siRNA sense strand
gggccauguggaugaguuu

SEQ ID NO: 2614652 - RNA, 19 nt, Homo sapiens
  misc_RNA (1)...(19): siRNA sense strand
ucuuucaagugguggaaca

SEQ ID NO: 2614653 - RNA, 19 nt, Homo sapiens
  misc_RNA (1)...(19): siRNA sense strand
cuucaagaccgagaggaaa

SEQ ID NO: 2614654 - RNA, 19 nt, Homo sapiens
  misc_RNA (1)...(19): siRNA sense strand
ucaaguggccgcaggguca

SEQ ID NO: 2614655 - RNA, 19 nt, Homo sapiens
  misc_RNA (1)...(19): siRNA sense strand
augagauggagcugggcua

SEQ ID NO: 2614656 - RNA, 19 nt, Homo sapiens
  misc_RNA (1)...(19): siRNA sense strand
ccaaacgggcacaggucuu

SEQ ID NO: 2614657 - RNA, 19 nt, Homo sapiens
  misc_RNA (1)...(19): siRNA sense strand
uggagaucaucguggucau

SEQ ID NO: 2614658 - RNA, 19 nt, Homo sapiens
  misc_RNA (1)...(19): siRNA sense strand
aggaugugugugaggccua

SEQ ID NO: 2614659 - RNA, 19 nt, Homo sapiens
  misc_RNA (1)...(19): siRNA sense strand
gugaggugcugaagcggga

SEQ ID NO: 2614660 - RNA, 19 nt, Homo sapiens
  misc_RNA (1)...(19): siRNA sense strand
uggagacccucguggacau

SEQ ID NO: 2614661 - RNA, 19 nt, Homo sapiens
  misc_RNA (1)...(19): siRNA sense strand
agaagaagguuaugggucu

SEQ ID NO: 2614662 - RNA, 19 nt, Homo sapiens
  misc_RNA (1)...(19): siRNA sense strand
uggugaagagucugugaaa

SEQ ID NO: 2614663 - RNA, 19 nt, Homo sapiens
  misc_RNA (1)...(19): siRNA sense strand
auucaaacugcaaggaaaa

SEQ ID NO: 2614664 - RNA, 19 nt, Homo sapiens
  misc_RNA (1)...(19): siRNA sense strand
cuucauugccuaaagguga

SEQ ID NO: 2614665 - RNA, 19 nt, Homo sapiens
  misc_RNA (1)...(19): siRNA sense strand
aagacuacgugaagaggga

SEQ ID NO: 2614666 - RNA, 19 nt, Homo sapiens
  misc_RNA (1)...(19): siRNA sense strand
uguucaagaagaagguuau

SEQ ID NO: 2614667 - RNA, 19 nt, Homo sapiens
  misc_RNA (1)...(19): siRNA sense strand
ucguaaaguguaucagaca

SEQ ID NO: 2614668 - RNA, 19 nt, Homo sapiens
  misc_RNA (1)...(19): siRNA sense strand
aagaacaagacuacgugaa

SEQ ID NO: 2614669 - RNA, 19 nt, Homo sapiens
  misc_RNA (1)...(19): siRNA sense strand
aggaaaaguugaaugaugu

SEQ ID NO: 2614670 - RNA, 19 nt, Homo sapiens
  misc_RNA (1)...(19): siRNA sense strand
uuguucaagaagaagguua

SEQ ID NO: 2614671 - RNA, 19 nt, Homo sapiens
  misc_RNA (1)...(19): siRNA sense strand
caaacaugaaggagagaaa

SEQ ID NO: 2614672 - RNA, 19 nt, Homo sapiens
  misc_RNA (1)...(19): siRNA sense strand
guccagaugaugugggaua

SEQ ID NO: 2614673 - RNA, 19 nt, Homo sapiens
  misc_RNA (1)...(19): siRNA sense strand
gaacuuuacccaugggcaa

SEQ ID NO: 2614674 - RNA, 19 nt, Homo sapiens
  misc_RNA (1)...(19): siRNA sense strand
cggcagaaggacaaaggaa

SEQ ID NO: 2614675 - RNA, 19 nt, Homo sapiens
  misc_RNA (1)...(19): siRNA sense strand
gcugauaaaccaugcacaa

SEQ ID NO: 2614676 - RNA, 19 nt, Homo sapiens
  misc_RNA (1)...(19): siRNA sense strand
gagaaauugcccagaacuu

SEQ ID NO: 2614677 - RNA, 19 nt, Homo sapiens
  misc_RNA (1)...(19): siRNA sense strand
gagggagagcaguuggaaa

SEQ ID NO: 2614678 - RNA, 19 nt, Homo sapiens
  misc_RNA (1)...(19): siRNA sense strand
aggccaaacaugaaggaga

SEQ ID NO: 2614679 - RNA, 19 nt, Homo sapiens
  misc_RNA (1)...(19): siRNA sense strand
cauguaugguagugauauu

SEQ ID NO: 2614680 - RNA, 19 nt, Homo sapiens
  misc_RNA (1)...(19): siRNA sense strand
cgacagaggacuugaggcu

SEQ ID NO: 2614681 - RNA, 19 nt, Homo sapiens
  misc_RNA (1)...(19): siRNA sense strand
gcagaaaauugcagaaucu

SEQ ID NO: 2614682 - RNA, 19 nt, Homo sapiens
  misc_RNA (1)...(19): siRNA sense strand
ccauggacaccgugcuuaa

SEQ ID NO: 2614683 - RNA, 19 nt, Homo sapiens
  misc_RNA (1)...(19): siRNA sense strand
agauauuguugaaaggcuu

SEQ ID NO: 2614684 - RNA, 19 nt, Homo sapiens
  misc_RNA (1)...(19): siRNA sense strand
acacagugcaugauggaga

SEQ ID NO: 2614685 - RNA, 19 nt, Homo sapiens
  misc_RNA (1)...(19): siRNA sense strand
cuuccagacuuaugccaaa

SEQ ID NO: 2614686 - RNA, 19 nt, Homo sapiens
  misc_RNA (1)...(19): siRNA sense strand
cucaauagaugaagaggca

SEQ ID NO: 2614687 - RNA, 19 nt, Homo sapiens
  misc_RNA (1)...(19): siRNA sense strand
gguugugggucauugggaa

SEQ ID NO: 2614688 - RNA, 19 nt, Homo sapiens
  misc_RNA (1)...(19): siRNA sense strand
guugugggucauugggaaa

SEQ ID NO: 2614689 - RNA, 19 nt, Homo sapiens
  misc_RNA (1)...(19): siRNA sense strand
agacgggagccaugaagaa

SEQ ID NO: 2614690 - RNA, 19 nt, Homo sapiens
  misc_RNA (1)...(19): siRNA sense strand
cauuggaagaagauagaga

SEQ ID NO: 2614691 - RNA, 19 nt, Homo sapiens
  misc_RNA (1)...(19): siRNA sense strand
agcuugaacugaaggaaga

SEQ ID NO: 2614692 - RNA, 19 nt, Homo sapiens
  misc_RNA (1)...(19): siRNA sense strand
cggccaaacaggagcugau

SEQ ID NO: 2614693 - RNA, 19 nt, Homo sapiens
  misc_RNA (1)...(19): siRNA sense strand
ggagucagauugaggccau

SEQ ID NO: 2614694 - RNA, 19 nt, Homo sapiens
  misc_RNA (1)...(19): siRNA sense strand
gugcuuucuuccaaauaaa

SEQ ID NO: 2614695 - RNA, 19 nt, Homo sapiens
  misc_RNA (1)...(19): siRNA sense strand
cagaaaaugaaaaggacuu

SEQ ID NO: 2614696 - RNA, 19 nt, Homo sapiens
  misc_RNA (1)...(19): siRNA sense strand
ucaaguaccacaaggccaa

SEQ ID NO: 2614697 - RNA, 19 nt, Homo sapiens
  misc_RNA (1)...(19): siRNA sense strand
acucaguggccaacaacaa

SEQ ID NO: 2614698 - RNA, 19 nt, Homo sapiens
  misc_RNA (1)...(19): siRNA sense strand
aaucagagaacgacggcuu

SEQ ID NO: 2614699 - RNA, 19 nt, Homo sapiens
  misc_RNA (1)...(19): siRNA sense strand
ggucagcacugcagggaug

SEQ ID NO: 2614700 - RNA, 19 nt, Homo sapiens
  misc_RNA (1)...(19): siRNA sense strand
ucucaauccugcaguguca

SEQ ID NO: 2614701 - RNA, 19 nt, Homo sapiens
  misc_RNA (1)...(19): siRNA sense strand
agguaaugcugaaagccau

SEQ ID NO: 2614702 - RNA, 19 nt, Homo sapiens
  misc_RNA (1)...(19): siRNA sense strand
cagccgggaaugagagaca

SEQ ID NO: 2614703 - RNA, 19 nt, Homo sapiens
  misc_RNA (1)...(19): siRNA sense strand
guaacagaguuucgaacca

SEQ ID NO: 2614704 - RNA, 19 nt, Homo sapiens
  misc_RNA (1)...(19): siRNA sense strand
ucacauacccuguagcaca

SEQ ID NO: 2614705 - RNA, 19 nt, Homo sapiens
  misc_RNA (1)...(19): siRNA sense strand
ccgcacgagcugaggaguu

SEQ ID NO: 2614706 - RNA, 19 nt, Homo sapiens
  misc_RNA (1)...(19): siRNA sense strand
cuuauauccagcugugaaa

SEQ ID NO: 2614707 - RNA, 19 nt, Homo sapiens
  misc_RNA (1)...(19): siRNA sense strand
gcucuguguucaagaucau

SEQ ID NO: 2614708 - RNA, 19 nt, Homo sapiens
  misc_RNA (1)...(19): siRNA sense strand
cagugucacccuaagguaa

SEQ ID NO: 2614709 - RNA, 19 nt, Homo sapiens
  misc_RNA (1)...(19): siRNA sense strand
gaaggagagaaaagauaua

SEQ ID NO: 2614710 - RNA, 19 nt, Homo sapiens
  misc_RNA (1)...(19): siRNA sense strand
agaaccuagaggagaaauu

SEQ ID NO: 2614711 - RNA, 19 nt, Homo sapiens
  misc_RNA (1)...(19): siRNA sense strand
gcagaaucuccucaagaau

SEQ ID NO: 2614712 - RNA, 19 nt, Homo sapiens
  misc_RNA (1)...(19): siRNA sense strand
agugcaugauggagaggau

SEQ ID NO: 2614713 - RNA, 19 nt, Homo sapiens
  misc_RNA (1)...(19): siRNA sense strand
cuuaaaagcaagacaacuu

SEQ ID NO: 2614714 - RNA, 19 nt, Homo sapiens
  misc_RNA (1)...(19): siRNA sense strand
ugcaggaggagcagagcaa

SEQ ID NO: 2614715 - RNA, 19 nt, Homo sapiens
  misc_RNA (1)...(19): siRNA sense strand
agucuuuagucuugcccua

SEQ ID NO: 2614716 - RNA, 19 nt, Homo sapiens
  misc_RNA (1)...(19): siRNA sense strand
gcccgaaggagcuguggua

SEQ ID NO: 2614717 - RNA, 19 nt, Homo sapiens
  misc_RNA (1)...(19): siRNA sense strand
uggagaggaugaugaggga

SEQ ID NO: 2614718 - RNA, 19 nt, Homo sapiens
  misc_RNA (1)...(19): siRNA sense strand
ggguguuuacucucagaua

SEQ ID NO: 2614719 - RNA, 19 nt, Homo sapiens
  misc_RNA (1)...(19): siRNA sense strand
aagcagaugugcaggcugu

SEQ ID NO: 2614720 - RNA, 19 nt, Homo sapiens
  misc_RNA (1)...(19): siRNA sense strand
aggaagauauuguugaaag

SEQ ID NO: 2614721 - RNA, 19 nt, Homo sapiens
  misc_RNA (1)...(19): siRNA sense strand
acucaguggccuugcugua

SEQ ID NO: 2614722 - RNA, 19 nt, Homo sapiens
  misc_RNA (1)...(19): siRNA sense strand
ggaucgaugccgagguaac

SEQ ID NO: 2614723 - RNA, 19 nt, Homo sapiens
  misc_RNA (1)...(19): siRNA sense strand
agacggacacagugcauga

SEQ ID NO: 2614724 - RNA, 19 nt, Homo sapiens
  misc_RNA (1)...(19): siRNA sense strand
ccugggaagauaaacuaaa

SEQ ID NO: 2614725 - RNA, 19 nt, Homo sapiens
  misc_RNA (1)...(19): siRNA sense strand
aagcuggacccgaagguau

SEQ ID NO: 2614726 - RNA, 19 nt, Homo sapiens
  misc_RNA (1)...(19): siRNA sense strand
guauagaaccuagaggaga

SEQ ID NO: 2614727 - RNA, 19 nt, Homo sapiens
  misc_RNA (1)...(19): siRNA sense strand
augaaggagagaaaagaua

SEQ ID NO: 2614728 - RNA, 19 nt, Homo sapiens
  misc_RNA (1)...(19): siRNA sense strand
agggagagcaguuggaaag

SEQ ID NO: 2614729 - RNA, 19 nt, Homo sapiens
  misc_RNA (1)...(19): siRNA sense strand
ccuuauauccagcugugaa

SEQ ID NO: 2614730 - RNA, 19 nt, Homo sapiens
  misc_RNA (1)...(19): siRNA sense strand
agauuggaccacagagcuu

SEQ ID NO: 2614731 - RNA, 19 nt, Homo sapiens
  misc_RNA (1)...(19): siRNA sense strand
ucuugcagauccugaaauu

SEQ ID NO: 2614732 - RNA, 19 nt, Homo sapiens
  misc_RNA (1)...(19): siRNA sense strand
acccuaagguaaugcugaa

SEQ ID NO: 2614733 - RNA, 19 nt, Homo sapiens
  misc_RNA (1)...(19): siRNA sense strand
uacuaaacucaguggccaa

SEQ ID NO: 2614734 - RNA, 19 nt, Homo sapiens
  misc_RNA (1)...(19): siRNA sense strand
cuucuugguuacuugcaaa

SEQ ID NO: 2614735 - RNA, 19 nt, Homo sapiens
  misc_RNA (1)...(19): siRNA sense strand
ggacguucuuagaggagcu

SEQ ID NO: 2614736 - RNA, 19 nt, Homo sapiens
  misc_RNA (1)...(19): siRNA sense strand
ucuuuaaggagcucuauaa

SEQ ID NO: 2614737 - RNA, 19 nt, Homo sapiens
  misc_RNA (1)...(19): siRNA sense strand
ccucaagaauggaaagacc

SEQ ID NO: 2614738 - RNA, 19 nt, Homo sapiens
  misc_RNA (1)...(19): siRNA sense strand
agaagaaacucgaggagcu

SEQ ID NO: 2614739 - RNA, 19 nt, Homo sapiens
  misc_RNA (1)...(19): siRNA sense strand
aggagauggacgaggaaga

SEQ ID NO: 2614740 - RNA, 19 nt, Homo sapiens
  misc_RNA (1)...(19): siRNA sense strand
gcgaagguggcaagaagaa

SEQ ID NO: 2614741 - RNA, 19 nt, Homo sapiens
  misc_RNA (1)...(19): siRNA sense strand
ccaaggagauggacgagga

SEQ ID NO: 2614742 - RNA, 19 nt, Homo sapiens
  misc_RNA (1)...(19): siRNA sense strand
agaaacucgaggagcuaaa

SEQ ID NO: 2614743 - RNA, 19 nt, Homo sapiens
  misc_RNA (1)...(19): siRNA sense strand
gaauuaagaaaucuggcaa

SEQ ID NO: 2614744 - RNA, 19 nt, Homo sapiens
  misc_RNA (1)...(19): siRNA sense strand
acgaggaagauaaggcuuu

SEQ ID NO: 2614745 - RNA, 19 nt, Homo sapiens
  misc_RNA (1)...(19): siRNA sense strand
ccgcgaagguggcaagaag

SEQ ID NO: 2614746 - RNA, 19 nt, Homo sapiens
  misc_RNA (1)...(19): siRNA sense strand
aggccaaggagauggacga

SEQ ID NO: 2614747 - RNA, 19 nt, Homo sapiens
  misc_RNA (1)...(19): siRNA sense strand
cacagguggaauuaagaaa

SEQ ID NO: 2614748 - RNA, 19 nt, Homo sapiens
  misc_RNA (1)...(19): siRNA sense strand
gguugaugcugcugagaau

SEQ ID NO: 2614749 - RNA, 19 nt, Homo sapiens
  misc_RNA (1)...(19): siRNA sense strand
gagcgaagaugcuggccaa

SEQ ID NO: 2614750 - RNA, 19 nt, Homo sapiens
  misc_RNA (1)...(19): siRNA sense strand
agauagagcguuuggaaga

SEQ ID NO: 2614751 - RNA, 19 nt, Homo sapiens
  misc_RNA (1)...(19): siRNA sense strand
uaauaugggacaagaacaa

SEQ ID NO: 2614752 - RNA, 19 nt, Homo sapiens
  misc_RNA (1)...(19): siRNA sense strand
cuucagacaaagagagaga

SEQ ID NO: 2614753 - RNA, 19 nt, Homo sapiens
  misc_RNA (1)...(19): siRNA sense strand
gcuuaaugaaggaggagau

SEQ ID NO: 2614754 - RNA, 19 nt, Homo sapiens
  misc_RNA (1)...(19): siRNA sense strand
uaaugaaggaggagaugaa

SEQ ID NO: 2614755 - RNA, 19 nt, Homo sapiens
  misc_RNA (1)...(19): siRNA sense strand
ggaggagcuaacagagaua

SEQ ID NO: 2614756 - RNA, 19 nt, Homo sapiens
  misc_RNA (1)...(19): siRNA sense strand
agaugaaagccaagcaaga

SEQ ID NO: 2614757 - RNA, 19 nt, Homo sapiens
  misc_RNA (1)...(19): siRNA sense strand
caagaguaguagaugaaca

SEQ ID NO: 2614758 - RNA, 19 nt, Homo sapiens
  misc_RNA (1)...(19): siRNA sense strand
gagucaaggggaagaaaua

SEQ ID NO: 2614759 - RNA, 19 nt, Homo sapiens
  misc_RNA (1)...(19): siRNA sense strand
gugugaaaguacaagauca

SEQ ID NO: 2614760 - RNA, 19 nt, Homo sapiens
  misc_RNA (1)...(19): siRNA sense strand
aagaguaguagaugaacaa

SEQ ID NO: 2614761 - RNA, 19 nt, Homo sapiens
  misc_RNA (1)...(19): siRNA sense strand
uagauaaagcgcuggaaga

SEQ ID NO: 2614762 - RNA, 19 nt, Homo sapiens
  misc_RNA (1)...(19): siRNA sense strand
aaagaauaccaaagcagaa

SEQ ID NO: 2614763 - RNA, 19 nt, Homo sapiens
  misc_RNA (1)...(19): siRNA sense strand
ugaagagagucaaggggaa

SEQ ID NO: 2614764 - RNA, 19 nt, Homo sapiens
  misc_RNA (1)...(19): siRNA sense strand
agaaguuacaagaguagua

SEQ ID NO: 2614765 - RNA, 19 nt, Homo sapiens
  misc_RNA (1)...(19): siRNA sense strand
acaggaaguuucaaggaga

SEQ ID NO: 2614766 - RNA, 19 nt, Homo sapiens
  misc_RNA (1)...(19): siRNA sense strand
ugauagaauuguggaugaa

SEQ ID NO: 2614767 - RNA, 19 nt, Homo sapiens
  misc_RNA (1)...(19): siRNA sense strand
cugaacggauagaggagau

SEQ ID NO: 2614768 - RNA, 19 nt, Homo sapiens
  misc_RNA (1)...(19): siRNA sense strand
ggacuguaauaugggacaa

SEQ ID NO: 2614769 - RNA, 19 nt, Homo sapiens
  misc_RNA (1)...(19): siRNA sense strand
ggaaucaauggcuggagaa

SEQ ID NO: 2614770 - RNA, 19 nt, Homo sapiens
  misc_RNA (1)...(19): siRNA sense strand
gcugaggagaagccaguua

SEQ ID NO: 2614771 - RNA, 19 nt, Homo sapiens
  misc_RNA (1)...(19): siRNA sense strand
augaagguguagaugaauu

SEQ ID NO: 2614772 - RNA, 19 nt, Homo sapiens
  misc_RNA (1)...(19): siRNA sense strand
uuaccaagaaggugaccaa

SEQ ID NO: 2614773 - RNA, 19 nt, Homo sapiens
  misc_RNA (1)...(19): siRNA sense strand
cuguaauaugggacaagaa

SEQ ID NO: 2614774 - RNA, 19 nt, Homo sapiens
  misc_RNA (1)...(19): siRNA sense strand
ugugaaaguacaagaucau

SEQ ID NO: 2614775 - RNA, 19 nt, Homo sapiens
  misc_RNA (1)...(19): siRNA sense strand
gggaagaaauagggaaggu

SEQ ID NO: 2614776 - RNA, 19 nt, Homo sapiens
  misc_RNA (1)...(19): siRNA sense strand
gaaaauaccuucaagagca

SEQ ID NO: 2614777 - RNA, 19 nt, Homo sapiens
  misc_RNA (1)...(19): siRNA sense strand
ggagaguggaugaaggugu

SEQ ID NO: 2614778 - RNA, 19 nt, Homo sapiens
  misc_RNA (1)...(19): siRNA sense strand
gcuacgaaaucacgagacu

SEQ ID NO: 2614779 - RNA, 19 nt, Homo sapiens
  misc_RNA (1)...(19): siRNA sense strand
uacaagaguaguagaugaa

SEQ ID NO: 2614780 - RNA, 19 nt, Homo sapiens
  misc_RNA (1)...(19): siRNA sense strand
acaaagagagagauggcca

SEQ ID NO: 2614781 - RNA, 19 nt, Homo sapiens
  misc_RNA (1)...(19): siRNA sense strand
agcagaugauugacagaau

SEQ ID NO: 2614782 - RNA, 19 nt, Homo sapiens
  misc_RNA (1)...(19): siRNA sense strand
cagaugauugacagaauau

SEQ ID NO: 2614783 - RNA, 19 nt, Homo sapiens
  misc_RNA (1)...(19): siRNA sense strand
ucuaaaacguuguuaccaa

SEQ ID NO: 2614784 - RNA, 19 nt, Homo sapiens
  misc_RNA (1)...(19): siRNA sense strand
ccuaaauccaaaaggaaga

SEQ ID NO: 2614785 - RNA, 19 nt, Homo sapiens
  misc_RNA (1)...(19): siRNA sense strand
cggccuguuucuagggcuu

SEQ ID NO: 2614786 - RNA, 19 nt, Homo sapiens
  misc_RNA (1)...(19): siRNA sense strand
agaaauagggaagguggaa

SEQ ID NO: 2614787 - RNA, 19 nt, Homo sapiens
  misc_RNA (1)...(19): siRNA sense strand
agagauagagcguuuggaa

SEQ ID NO: 2614788 - RNA, 19 nt, Homo sapiens
  misc_RNA (1)...(19): siRNA sense strand
aaaaguuccuucagacaaa

SEQ ID NO: 2614789 - RNA, 19 nt, Homo sapiens
  misc_RNA (1)...(19): siRNA sense strand
augaacaacuaaaggcguu

SEQ ID NO: 2614790 - RNA, 19 nt, Homo sapiens
  misc_RNA (1)...(19): siRNA sense strand
ccaacauagucucacaaga

SEQ ID NO: 2614791 - RNA, 19 nt, Homo sapiens
  misc_RNA (1)...(19): siRNA sense strand
guaauaugggacaagaaca

SEQ ID NO: 2614792 - RNA, 19 nt, Homo sapiens
  misc_RNA (1)...(19): siRNA sense strand
ccauguugguggugcaucu

SEQ ID NO: 2614793 - RNA, 19 nt, Homo sapiens
  misc_RNA (1)...(19): siRNA sense strand
guggaggagcuaacagaga

SEQ ID NO: 2614794 - RNA, 19 nt, Homo sapiens
  misc_RNA (1)...(19): siRNA sense strand
gggaacaccagaaaagaau

SEQ ID NO: 2614795 - RNA, 19 nt, Homo sapiens
  misc_RNA (1)...(19): siRNA sense strand
auaccaaagcagaacccaa

SEQ ID NO: 2614796 - RNA, 19 nt, Homo sapiens
  misc_RNA (1)...(19): siRNA sense strand
uggaaaagaacuacacauu

SEQ ID NO: 2614797 - RNA, 19 nt, Homo sapiens
  misc_RNA (1)...(19): siRNA sense strand
ugaagguguagaugaauuu

SEQ ID NO: 2614798 - RNA, 19 nt, Homo sapiens
  misc_RNA (1)...(19): siRNA sense strand
gggacaugggagcgaagau

SEQ ID NO: 2614799 - RNA, 19 nt, Homo sapiens
  misc_RNA (1)...(19): siRNA sense strand
guaucaagaacaaaagcaa

SEQ ID NO: 2614800 - RNA, 19 nt, Homo sapiens
  misc_RNA (1)...(19): siRNA sense strand
acagaauaugugugaaagu

SEQ ID NO: 2614801 - RNA, 19 nt, Homo sapiens
  misc_RNA (1)...(19): siRNA sense strand
uggaugaagguguagauga

SEQ ID NO: 2614802 - RNA, 19 nt, Homo sapiens
  misc_RNA (1)...(19): siRNA sense strand
gguuugggaacaccagaaa

SEQ ID NO: 2614803 - RNA, 19 nt, Homo sapiens
  misc_RNA (1)...(19): siRNA sense strand
aaaacuaccugcuacgaaa

SEQ ID NO: 2614804 - RNA, 19 nt, Homo sapiens
  misc_RNA (1)...(19): siRNA sense strand
ggagaaguuacaagaguag

SEQ ID NO: 2614805 - RNA, 19 nt, Homo sapiens
  misc_RNA (1)...(19): siRNA sense strand
cagaagcccaagaggaaaa

SEQ ID NO: 2614806 - RNA, 19 nt, Homo sapiens
  misc_RNA (1)...(19): siRNA sense strand
gagaagcagaaaaggcaaa

SEQ ID NO: 2614807 - RNA, 19 nt, Homo sapiens
  misc_RNA (1)...(19): siRNA sense strand
cuccaagagaccagaugua

SEQ ID NO: 2614808 - RNA, 19 nt, Homo sapiens
  misc_RNA (1)...(19): siRNA sense strand
agaaucacagggaggaaaa

SEQ ID NO: 2614809 - RNA, 19 nt, Homo sapiens
  misc_RNA (1)...(19): siRNA sense strand
cgaaaauuagccagguauu

SEQ ID NO: 2614810 - RNA, 19 nt, Homo sapiens
  misc_RNA (1)...(19): siRNA sense strand
cccaagaggaaaagaauca

SEQ ID NO: 2614811 - RNA, 19 nt, Homo sapiens
  misc_RNA (1)...(19): siRNA sense strand
ucauuugugcuuuggagaa

SEQ ID NO: 2614812 - RNA, 19 nt, Homo sapiens
  misc_RNA (1)...(19): siRNA sense strand
acgccagcgcagagagaaa

SEQ ID NO: 2614813 - RNA, 19 nt, Homo sapiens
  misc_RNA (1)...(19): siRNA sense strand
uggaaaaucucuaucgcaa

SEQ ID NO: 2614814 - RNA, 19 nt, Homo sapiens
  misc_RNA (1)...(19): siRNA sense strand
ugacaaggauguugagggu

SEQ ID NO: 2614815 - RNA, 19 nt, Homo sapiens
  misc_RNA (1)...(19): siRNA sense strand
uacuaugaagugugggaua

SEQ ID NO: 2614816 - RNA, 19 nt, Homo sapiens
  misc_RNA (1)...(19): siRNA sense strand
ggcccaucccugaggagaa

SEQ ID NO: 2614817 - RNA, 19 nt, Homo sapiens
  misc_RNA (1)...(19): siRNA sense strand
gagagaaacuggcuccaca

SEQ ID NO: 2614818 - RNA, 19 nt, Homo sapiens
  misc_RNA (1)...(19): siRNA sense strand
ccguagagucugcugccaa

SEQ ID NO: 2614819 - RNA, 19 nt, Homo sapiens
  misc_RNA (1)...(19): siRNA sense strand
ggaccugauuaaaggccca

SEQ ID NO: 2614820 - RNA, 19 nt, Homo sapiens
  misc_RNA (1)...(19): siRNA sense strand
cgggcugugauuagaggaa

SEQ ID NO: 2614821 - RNA, 19 nt, Homo sapiens
  misc_RNA (1)...(19): siRNA sense strand
cagacguggcauuguguuu

SEQ ID NO: 2614822 - RNA, 19 nt, Homo sapiens
  misc_RNA (1)...(19): siRNA sense strand
uugugggaaugcauggaaa

SEQ ID NO: 2614823 - RNA, 19 nt, Homo sapiens
  misc_RNA (1)...(19): siRNA sense strand
uguugaggguaugguguaa

SEQ ID NO: 2614824 - RNA, 19 nt, Homo sapiens
  misc_RNA (1)...(19): siRNA sense strand
uagagaccucagagagaau

SEQ ID NO: 2614825 - RNA, 19 nt, Homo sapiens
  misc_RNA (1)...(19): siRNA sense strand
gcaucuacauggacaccga

SEQ ID NO: 2614826 - RNA, 19 nt, Homo sapiens
  misc_RNA (1)...(19): siRNA sense strand
ccaaguagcugcauagcca

SEQ ID NO: 2614827 - RNA, 19 nt, Homo sapiens
  misc_RNA (1)...(19): siRNA sense strand
acacagaagacgaugcuga

SEQ ID NO: 2614828 - RNA, 19 nt, Homo sapiens
  misc_RNA (1)...(19): siRNA sense strand
ugaaggugcaggagcggua

SEQ ID NO: 2614829 - RNA, 19 nt, Homo sapiens
  misc_RNA (1)...(19): siRNA sense strand
ccgcucagugggauggaaa

SEQ ID NO: 2614830 - RNA, 19 nt, Homo sapiens
  misc_RNA (1)...(19): siRNA sense strand
gugcaggagcgguacgaca

SEQ ID NO: 2614831 - RNA, 19 nt, Homo sapiens
  misc_RNA (1)...(19): siRNA sense strand
ucauauuagugugggaaca

SEQ ID NO: 2614832 - RNA, 19 nt, Homo sapiens
  misc_RNA (1)...(19): siRNA sense strand
ucggcaaguuggagugcuu

SEQ ID NO: 2614833 - RNA, 19 nt, Homo sapiens
  misc_RNA (1)...(19): siRNA sense strand
gaaagagaugcuuggagga

SEQ ID NO: 2614834 - RNA, 19 nt, Homo sapiens
  misc_RNA (1)...(19): siRNA sense strand
cugcauagccaguaggccu

SEQ ID NO: 2614835 - RNA, 19 nt, Homo sapiens
  misc_RNA (1)...(19): siRNA sense strand
gagcauuccaaguccguga

SEQ ID NO: 2614836 - RNA, 19 nt, Homo sapiens
  misc_RNA (1)...(19): siRNA sense strand
gugauauggaagagagaaa

SEQ ID NO: 2614837 - RNA, 19 nt, Homo sapiens
  misc_RNA (1)...(19): siRNA sense strand
cugacuaaccacacagaaa

SEQ ID NO: 2614838 - RNA, 19 nt, Homo sapiens
  misc_RNA (1)...(19): siRNA sense strand
aggacuggcaagaaagaaa

SEQ ID NO: 2614839 - RNA, 19 nt, Homo sapiens
  misc_RNA (1)...(19): siRNA sense strand
gguuacugaugaagagaca

SEQ ID NO: 2614840 - RNA, 19 nt, Homo sapiens
  misc_RNA (1)...(19): siRNA sense strand
aguuacagaucaaggucaa

SEQ ID NO: 2614841 - RNA, 19 nt, Homo sapiens
  misc_RNA (1)...(19): siRNA sense strand
aaaacaaagaggaaggaaa

SEQ ID NO: 2614842 - RNA, 19 nt, Homo sapiens
  misc_RNA (1)...(19): siRNA sense strand
uugacaaggaagagaaaga

SEQ ID NO: 2614843 - RNA, 19 nt, Homo sapiens
  misc_RNA (1)...(19): siRNA sense strand
auuuaggacuggcaagaaa

SEQ ID NO: 2614844 - RNA, 19 nt, Homo sapiens
  misc_RNA (1)...(19): siRNA sense strand
gcaaaauggagaagaacau

SEQ ID NO: 2614845 - RNA, 19 nt, Homo sapiens
  misc_RNA (1)...(19): siRNA sense strand
aagcacaaaggaagugaaa

SEQ ID NO: 2614846 - RNA, 19 nt, Homo sapiens
  misc_RNA (1)...(19): siRNA sense strand
gauugacaaggaagagaaa

SEQ ID NO: 2614847 - RNA, 19 nt, Homo sapiens
  misc_RNA (1)...(19): siRNA sense strand
aaagcaaaauggagaagaa

SEQ ID NO: 2614848 - RNA, 19 nt, Homo sapiens
  misc_RNA (1)...(19): siRNA sense strand
cggagauugacaaggaaga

SEQ ID NO: 2614849 - RNA, 19 nt, Homo sapiens
  misc_RNA (1)...(19): siRNA sense strand
uccaaguaccagagaguau

SEQ ID NO: 2614850 - RNA, 19 nt, Homo sapiens
  misc_RNA (1)...(19): siRNA sense strand
aagaugaaggcguguacaa

SEQ ID NO: 2614851 - RNA, 19 nt, Homo sapiens
  misc_RNA (1)...(19): siRNA sense strand
agauuugguuacugaugaa

SEQ ID NO: 2614852 - RNA, 19 nt, Homo sapiens
  misc_RNA (1)...(19): siRNA sense strand
acggaagauucuaguacau

SEQ ID NO: 2614853 - RNA, 19 nt, Homo sapiens
  misc_RNA (1)...(19): siRNA sense strand
acaaggaagagaaagaaca

SEQ ID NO: 2614854 - RNA, 19 nt, Homo sapiens
  misc_RNA (1)...(19): siRNA sense strand
cauccaaguaccagagagu

SEQ ID NO: 2614855 - RNA, 19 nt, Homo sapiens
  misc_RNA (1)...(19): siRNA sense strand
agauugacaaggaagagaa

SEQ ID NO: 2614856 - RNA, 19 nt, Homo sapiens
  misc_RNA (1)...(19): siRNA sense strand
aauuugaaacugaugggaa

SEQ ID NO: 2614857 - RNA, 19 nt, Homo sapiens
  misc_RNA (1)...(19): siRNA sense strand
gaggaaggccagacgcuca

SEQ ID NO: 2614858 - RNA, 19 nt, Homo sapiens
  misc_RNA (1)...(19): siRNA sense strand
cgguuugaagauuugguua

SEQ ID NO: 2614859 - RNA, 19 nt, Homo sapiens
  misc_RNA (1)...(19): siRNA sense strand
cugcauuauccgacacaga

SEQ ID NO: 2614860 - RNA, 19 nt, Homo sapiens
  misc_RNA (1)...(19): siRNA sense strand
cagaaagcaaaauggagaa

SEQ ID NO: 2614861 - RNA, 19 nt, Homo sapiens
  misc_RNA (1)...(19): siRNA sense strand
aggaagagaaagaacaaac

SEQ ID NO: 2614862 - RNA, 19 nt, Homo sapiens
  misc_RNA (1)...(19): siRNA sense strand
agaacaaaccacucaagau

SEQ ID NO: 2614863 - RNA, 19 nt, Homo sapiens
  misc_RNA (1)...(19): siRNA sense strand
auuugaaacugaugggaag

SEQ ID NO: 2614864 - RNA, 19 nt, Homo sapiens
  misc_RNA (1)...(19): siRNA sense strand
acugaugggaagaaaugua

SEQ ID NO: 2614865 - RNA, 19 nt, Homo sapiens
  misc_RNA (1)...(19): siRNA sense strand
caucaugaagcugaggaaa

SEQ ID NO: 2614866 - RNA, 19 nt, Homo sapiens
  misc_RNA (1)...(19): siRNA sense strand
gauucuaguacaucggaga

SEQ ID NO: 2614867 - RNA, 19 nt, Homo sapiens
  misc_RNA (1)...(19): siRNA sense strand
cuguaagcacaaaggaagu

SEQ ID NO: 2614868 - RNA, 19 nt, Homo sapiens
  misc_RNA (1)...(19): siRNA sense strand
aguuaaagcucgugcgcac

SEQ ID NO: 2614869 - RNA, 19 nt, Homo sapiens
  misc_RNA (1)...(19): siRNA sense strand
augagaugguggacaaaca

SEQ ID NO: 2614870 - RNA, 19 nt, Homo sapiens
  misc_RNA (1)...(19): siRNA sense strand
aggaauuuggugacgacaa

SEQ ID NO: 2614871 - RNA, 19 nt, Homo sapiens
  misc_RNA (1)...(19): siRNA sense strand
cagccugagcuccgaggaa

SEQ ID NO: 2614872 - RNA, 19 nt, Homo sapiens
  misc_RNA (1)...(19): siRNA sense strand
agaagaaguuaaagcucgu

SEQ ID NO: 2614873 - RNA, 19 nt, Homo sapiens
  misc_RNA (1)...(19): siRNA sense strand
gaaauugacaaguuggcca

SEQ ID NO: 2614874 - RNA, 19 nt, Homo sapiens
  misc_RNA (1)...(19): siRNA sense strand
gcacagaauccucgaccca

SEQ ID NO: 2614875 - RNA, 19 nt, Homo sapiens
  misc_RNA (1)...(19): siRNA sense strand
gggaagaccucaugggacg

SEQ ID NO: 2614876 - RNA, 19 nt, Homo sapiens
  misc_RNA (1)...(19): siRNA sense strand
ccgaauucagcaagagauu

SEQ ID NO: 2614877 - RNA, 19 nt, Homo sapiens
  misc_RNA (1)...(19): siRNA sense strand
agaccaggccugacggcaa

SEQ ID NO: 2614878 - RNA, 19 nt, Homo sapiens
  misc_RNA (1)...(19): siRNA sense strand
cugccaagagcaaggaaga

SEQ ID NO: 2614879 - RNA, 19 nt, Homo sapiens
  misc_RNA (1)...(19): siRNA sense strand
agguggagcccaugugcaa

SEQ ID NO: 2614880 - RNA, 19 nt, Homo sapiens
  misc_RNA (1)...(19): siRNA sense strand
gagcagguggagaggcaga

SEQ ID NO: 2614881 - RNA, 19 nt, Homo sapiens
  misc_RNA (1)...(19): siRNA sense strand
aggaagaccugguguccca

SEQ ID NO: 2614882 - RNA, 19 nt, Homo sapiens
  misc_RNA (1)...(19): siRNA sense strand
cggccuggacacuacgaua

SEQ ID NO: 2614883 - RNA, 19 nt, Homo sapiens
  misc_RNA (1)...(19): siRNA sense strand
aagagauugcugugcagaa

SEQ ID NO: 2614884 - RNA, 19 nt, Homo sapiens
  misc_RNA (1)...(19): siRNA sense strand
agaucaaggaccuccacaa

SEQ ID NO: 2614885 - RNA, 19 nt, Homo sapiens
  misc_RNA (1)...(19): siRNA sense strand
ucuaucaacagaagaucaa

SEQ ID NO: 2614886 - RNA, 19 nt, Homo sapiens
  misc_RNA (1)...(19): siRNA sense strand
gcacuuaacugcuucacca

SEQ ID NO: 2614887 - RNA, 19 nt, Homo sapiens
  misc_RNA (1)...(19): siRNA sense strand
gggaaaacaccauucggaa

SEQ ID NO: 2614888 - RNA, 19 nt, Homo sapiens
  misc_RNA (1)...(19): siRNA sense strand
accaaaggucagaagaaca

SEQ ID NO: 2614889 - RNA, 19 nt, Homo sapiens
  misc_RNA (1)...(19): siRNA sense strand
gugacuacaguuuggccaa

SEQ ID NO: 2614890 - RNA, 19 nt, Homo sapiens
  misc_RNA (1)...(19): siRNA sense strand
acugggaaauagaggauaa

SEQ ID NO: 2614891 - RNA, 19 nt, Homo sapiens
  misc_RNA (1)...(19): siRNA sense strand
gggaaauagaggauaauca

SEQ ID NO: 2614892 - RNA, 19 nt, Homo sapiens
  misc_RNA (1)...(19): siRNA sense strand
aggugaaguaggugggaau

SEQ ID NO: 2614893 - RNA, 19 nt, Homo sapiens
  misc_RNA (1)...(19): siRNA sense strand
gaagaauugcaguggaaaa

SEQ ID NO: 2614894 - RNA, 19 nt, Homo sapiens
  misc_RNA (1)...(19): siRNA sense strand
agaaacaagucaaagccaa

SEQ ID NO: 2614895 - RNA, 19 nt, Homo sapiens
  misc_RNA (1)...(19): siRNA sense strand
cgauaacauaagacugaaa

SEQ ID NO: 2614896 - RNA, 19 nt, Homo sapiens
  misc_RNA (1)...(19): siRNA sense strand
gguucgaguaggugaagua

SEQ ID NO: 2614897 - RNA, 19 nt, Homo sapiens
  misc_RNA (1)...(19): siRNA sense strand
gugaagauacacagaguca

SEQ ID NO: 2614898 - RNA, 19 nt, Homo sapiens
  misc_RNA (1)...(19): siRNA sense strand
ggucaugaaaacuggguaa

SEQ ID NO: 2614899 - RNA, 19 nt, Homo sapiens
  misc_RNA (1)...(19): siRNA sense strand
cuuuagaaacucaggauga

SEQ ID NO: 2614900 - RNA, 19 nt, Homo sapiens
  misc_RNA (1)...(19): siRNA sense strand
uggaaacagaauacaguua

SEQ ID NO: 2614901 - RNA, 19 nt, Homo sapiens
  misc_RNA (1)...(19): siRNA sense strand
aauauuagcauguggcaau

SEQ ID NO: 2614902 - RNA, 19 nt, Homo sapiens
  misc_RNA (1)...(19): siRNA sense strand
cacugggagucgagacaaa

SEQ ID NO: 2614903 - RNA, 19 nt, Homo sapiens
  misc_RNA (1)...(19): siRNA sense strand
uuguaaggcagcuaagaaa

SEQ ID NO: 2614904 - RNA, 19 nt, Homo sapiens
  misc_RNA (1)...(19): siRNA sense strand
ugaauuaguuucuggagga

SEQ ID NO: 2614905 - RNA, 19 nt, Homo sapiens
  misc_RNA (1)...(19): siRNA sense strand
gguacugaucagacaacua

SEQ ID NO: 2614906 - RNA, 19 nt, Homo sapiens
  misc_RNA (1)...(19): siRNA sense strand
ggguaugaccugaaauguu

SEQ ID NO: 2614907 - RNA, 19 nt, Homo sapiens
  misc_RNA (1)...(19): siRNA sense strand
ccaugaaggaccuguuuau

SEQ ID NO: 2614908 - RNA, 19 nt, Homo sapiens
  misc_RNA (1)...(19): siRNA sense strand
agacagugcuagccgguca

SEQ ID NO: 2614909 - RNA, 19 nt, Homo sapiens
  misc_RNA (1)...(19): siRNA sense strand
gugggaauacuuugggauu

SEQ ID NO: 2614910 - RNA, 19 nt, Homo sapiens
  misc_RNA (1)...(19): siRNA sense strand
cuuggaaacaggugcagaa

SEQ ID NO: 2614911 - RNA, 19 nt, Homo sapiens
  misc_RNA (1)...(19): siRNA sense strand
agaaaauuaugcuggaaga

SEQ ID NO: 2614912 - RNA, 19 nt, Homo sapiens
  misc_RNA (1)...(19): siRNA sense strand
caguagaauuauuuggucu

SEQ ID NO: 2614913 - RNA, 19 nt, Homo sapiens
  misc_RNA (1)...(19): siRNA sense strand
agaauauggaagcuguaua

SEQ ID NO: 2614914 - RNA, 19 nt, Homo sapiens
  misc_RNA (1)...(19): siRNA sense strand
gaccugaaauguuuggcaa

SEQ ID NO: 2614915 - RNA, 19 nt, Homo sapiens
  misc_RNA (1)...(19): siRNA sense strand
uugcaaggccucagauaca

SEQ ID NO: 2614916 - RNA, 19 nt, Homo sapiens
  misc_RNA (1)...(19): siRNA sense strand
agauacacagagucaauaa

SEQ ID NO: 2614917 - RNA, 19 nt, Homo sapiens
  misc_RNA (1)...(19): siRNA sense strand
gccaaauacugauguacca

SEQ ID NO: 2614918 - RNA, 19 nt, Homo sapiens
  misc_RNA (1)...(19): siRNA sense strand
gggaauacuuugggauuuu

SEQ ID NO: 2614919 - RNA, 19 nt, Homo sapiens
  misc_RNA (1)...(19): siRNA sense strand
acaguuaacccaagagagu

SEQ ID NO: 2614920 - RNA, 19 nt, Homo sapiens
  misc_RNA (1)...(19): siRNA sense strand
cagaaggugcugagugguu

SEQ ID NO: 2614921 - RNA, 19 nt, Homo sapiens
  misc_RNA (1)...(19): siRNA sense strand
agaugaagagucaggaguu

SEQ ID NO: 2614922 - RNA, 19 nt, Homo sapiens
  misc_RNA (1)...(19): siRNA sense strand
agauauagcuucucagccu

SEQ ID NO: 2614923 - RNA, 19 nt, Homo sapiens
  misc_RNA (1)...(19): siRNA sense strand
cagaauacaguuaacccaa

SEQ ID NO: 2614924 - RNA, 19 nt, Homo sapiens
  misc_RNA (1)...(19): siRNA sense strand
gcaugaaauugcaaggccu

SEQ ID NO: 2614925 - RNA, 19 nt, Homo sapiens
  misc_RNA (1)...(19): siRNA sense strand
gauuaaucgguuucaguuu

SEQ ID NO: 2614926 - RNA, 19 nt, Homo sapiens
  misc_RNA (1)...(19): siRNA sense strand
auacacuggcuaucagaaa

SEQ ID NO: 2614927 - RNA, 19 nt, Homo sapiens
  misc_RNA (1)...(19): siRNA sense strand
ugggaauacuuugggauuu

SEQ ID NO: 2614928 - RNA, 19 nt, Homo sapiens
  misc_RNA (1)...(19): siRNA sense strand
gaugaagaggagcuguuaa

SEQ ID NO: 2614929 - RNA, 19 nt, Homo sapiens
  misc_RNA (1)...(19): siRNA sense strand
ugucuuucagggagauaua

SEQ ID NO: 2614930 - RNA, 19 nt, Homo sapiens
  misc_RNA (1)...(19): siRNA sense strand
uuggauuagaggaguggaa

SEQ ID NO: 2614931 - RNA, 19 nt, Homo sapiens
  misc_RNA (1)...(19): siRNA sense strand
ggauuagaggaguggaaug

SEQ ID NO: 2614932 - RNA, 19 nt, Homo sapiens
  misc_RNA (1)...(19): siRNA sense strand
gcucuguaaucaagauagu

SEQ ID NO: 2614933 - RNA, 19 nt, Homo sapiens
  misc_RNA (1)...(19): siRNA sense strand
ggaagaauugcaguggaaa

SEQ ID NO: 2614934 - RNA, 19 nt, Homo sapiens
  misc_RNA (1)...(19): siRNA sense strand
ggugaaguaggugggaaua

SEQ ID NO: 2614935 - RNA, 19 nt, Homo sapiens
  misc_RNA (1)...(19): siRNA sense strand
cugcauugggauuaucaaa

SEQ ID NO: 2614936 - RNA, 19 nt, Homo sapiens
  misc_RNA (1)...(19): siRNA sense strand
cagaauacuuuguggccug

SEQ ID NO: 2614937 - RNA, 19 nt, Homo sapiens
  misc_RNA (1)...(19): siRNA sense strand
augacuguauugagcacaa

SEQ ID NO: 2614938 - RNA, 19 nt, Homo sapiens
  misc_RNA (1)...(19): siRNA sense strand
gcuguuuaccagaggagga

SEQ ID NO: 2614939 - RNA, 19 nt, Homo sapiens
  misc_RNA (1)...(19): siRNA sense strand
uggcaaugauuaaucgguu

SEQ ID NO: 2614940 - RNA, 19 nt, Homo sapiens
  misc_RNA (1)...(19): siRNA sense strand
caggacaaucacugaauca

SEQ ID NO: 2614941 - RNA, 19 nt, Homo sapiens
  misc_RNA (1)...(19): siRNA sense strand
aagcugucuuucagggaga

SEQ ID NO: 2614942 - RNA, 19 nt, Homo sapiens
  misc_RNA (1)...(19): siRNA sense strand
cugaaauguuuggcaauga

SEQ ID NO: 2614943 - RNA, 19 nt, Homo sapiens
  misc_RNA (1)...(19): siRNA sense strand
gcuaucauucuuuggaaca

SEQ ID NO: 2614944 - RNA, 19 nt, Homo sapiens
  misc_RNA (1)...(19): siRNA sense strand
ccugauaagaauauggaag

SEQ ID NO: 2614945 - RNA, 19 nt, Homo sapiens
  misc_RNA (1)...(19): siRNA sense strand
ccauagaaaaugaaagugu

SEQ ID NO: 2614946 - RNA, 19 nt, Homo sapiens
  misc_RNA (1)...(19): siRNA sense strand
cugaugaagaggagcuguu

SEQ ID NO: 2614947 - RNA, 19 nt, Homo sapiens
  misc_RNA (1)...(19): siRNA sense strand
ucuuagaucugaagggaga

SEQ ID NO: 2614948 - RNA, 19 nt, Homo sapiens
  misc_RNA (1)...(19): siRNA sense strand
cucuaauaucuuugggaca

SEQ ID NO: 2614949 - RNA, 19 nt, Homo sapiens
  misc_RNA (1)...(19): siRNA sense strand
gucuagugguggcagggaa

SEQ ID NO: 2614950 - RNA, 19 nt, Homo sapiens
  misc_RNA (1)...(19): siRNA sense strand
caucuuguucaaagggaaa

SEQ ID NO: 2614951 - RNA, 19 nt, Homo sapiens
  misc_RNA (1)...(19): siRNA sense strand
aggaagaggaagaugagca

SEQ ID NO: 2614952 - RNA, 19 nt, Homo sapiens
  misc_RNA (1)...(19): siRNA sense strand
gaaccagaccagcagggua

SEQ ID NO: 2614953 - RNA, 19 nt, Homo sapiens
  misc_RNA (1)...(19): siRNA sense strand
acaucuuguucaaagggaa

SEQ ID NO: 2614954 - RNA, 19 nt, Homo sapiens
  misc_RNA (1)...(19): siRNA sense strand
auacagagugcgugccuau

SEQ ID NO: 2614955 - RNA, 19 nt, Homo sapiens
  misc_RNA (1)...(19): siRNA sense strand
augaagaaaccucuggaau

SEQ ID NO: 2614956 - RNA, 19 nt, Homo sapiens
  misc_RNA (1)...(19): siRNA sense strand
ccucagaaccagaccagca

SEQ ID NO: 2614957 - RNA, 19 nt, Homo sapiens
  misc_RNA (1)...(19): siRNA sense strand
agugauugaaguugaugaa

SEQ ID NO: 2614958 - RNA, 19 nt, Homo sapiens
  misc_RNA (1)...(19): siRNA sense strand
uggacaaguacaagaccau

SEQ ID NO: 2614959 - RNA, 19 nt, Homo sapiens
  misc_RNA (1)...(19): siRNA sense strand
ccaaauuaauucuugugga

SEQ ID NO: 2614960 - RNA, 19 nt, Homo sapiens
  misc_RNA (1)...(19): siRNA sense strand
uggugguccucauggagaa

SEQ ID NO: 2614961 - RNA, 19 nt, Homo sapiens
  misc_RNA (1)...(19): siRNA sense strand
aagaggaagaugagcagga

SEQ ID NO: 2614962 - RNA, 19 nt, Homo sapiens
  misc_RNA (1)...(19): siRNA sense strand
caaucaagugagaaggaaa

SEQ ID NO: 2614963 - RNA, 19 nt, Homo sapiens
  misc_RNA (1)...(19): siRNA sense strand
gugaagggcagaagggcaa

SEQ ID NO: 2614964 - RNA, 19 nt, Homo sapiens
  misc_RNA (1)...(19): siRNA sense strand
cagcauaauggauggaaaa

SEQ ID NO: 2614965 - RNA, 19 nt, Homo sapiens
  misc_RNA (1)...(19): siRNA sense strand
gggcaguagaucauggaau

SEQ ID NO: 2614966 - RNA, 19 nt, Homo sapiens
  misc_RNA (1)...(19): siRNA sense strand
aaucaagugagaaggaaaa

SEQ ID NO: 2614967 - RNA, 19 nt, Homo sapiens
  misc_RNA (1)...(19): siRNA sense strand
ugguaaaauaacagccaaa

SEQ ID NO: 2614968 - RNA, 19 nt, Homo sapiens
  misc_RNA (1)...(19): siRNA sense strand
ugaaaauacuggagcucau

SEQ ID NO: 2614969 - RNA, 19 nt, Homo sapiens
  misc_RNA (1)...(19): siRNA sense strand
ggaaacuagagcuggcaga

SEQ ID NO: 2614970 - RNA, 19 nt, Homo sapiens
  misc_RNA (1)...(19): siRNA sense strand
cgagcuugucagaaggcaa

SEQ ID NO: 2614971 - RNA, 19 nt, Homo sapiens
  misc_RNA (1)...(19): siRNA sense strand
aggaaugggaucuaaucua

SEQ ID NO: 2614972 - RNA, 19 nt, Homo sapiens
  misc_RNA (1)...(19): siRNA sense strand
aagccaaggaguauaaaca

SEQ ID NO: 2614973 - RNA, 19 nt, Homo sapiens
  misc_RNA (1)...(19): siRNA sense strand
cugcagcacugguggaacu

SEQ ID NO: 2614974 - RNA, 19 nt, Homo sapiens
  misc_RNA (1)...(19): siRNA sense strand
cgugcuuggcggagugauu

SEQ ID NO: 2614975 - RNA, 19 nt, Homo sapiens
  misc_RNA (1)...(19): siRNA sense strand
cucaggauguggagagcau

SEQ ID NO: 2614976 - RNA, 19 nt, Homo sapiens
  misc_RNA (1)...(19): siRNA sense strand
acagaugggcaguagauca

SEQ ID NO: 2614977 - RNA, 19 nt, Homo sapiens
  misc_RNA (1)...(19): siRNA sense strand
cuauaaagagaaacgagga

SEQ ID NO: 2614978 - RNA, 19 nt, Homo sapiens
  misc_RNA (1)...(19): siRNA sense strand
cagaugggcaguagaucau

SEQ ID NO: 2614979 - RNA, 19 nt, Homo sapiens
  misc_RNA (1)...(19): siRNA sense strand
ggaaaaugacucaggcacu

SEQ ID NO: 2614980 - RNA, 19 nt, Homo sapiens
  misc_RNA (1)...(19): siRNA sense strand
agagcaugugugucggaua

SEQ ID NO: 2614981 - RNA, 19 nt, Homo sapiens
  misc_RNA (1)...(19): siRNA sense strand
aaaagaaacaagaggaaac

SEQ ID NO: 2614982 - RNA, 19 nt, Homo sapiens
  misc_RNA (1)...(19): siRNA sense strand
acgagaaggugcuaggcua

SEQ ID NO: 2614983 - RNA, 19 nt, Homo sapiens
  misc_RNA (1)...(19): siRNA sense strand
ugucugaagucuuggccaa

SEQ ID NO: 2614984 - RNA, 19 nt, Homo sapiens
  misc_RNA (1)...(19): siRNA sense strand
agccaaagaaguugccaaa

SEQ ID NO: 2614985 - RNA, 19 nt, Homo sapiens
  misc_RNA (1)...(19): siRNA sense strand
cuacagaagaagcuggaga

SEQ ID NO: 2614986 - RNA, 19 nt, Homo sapiens
  misc_RNA (1)...(19): siRNA sense strand
gggaaauguggaaaggcuu

SEQ ID NO: 2614987 - RNA, 19 nt, Homo sapiens
  misc_RNA (1)...(19): siRNA sense strand
cagucauccugaagccaaa

SEQ ID NO: 2614988 - RNA, 19 nt, Homo sapiens
  misc_RNA (1)...(19): siRNA sense strand
cgggaaauguggaaaggcu

SEQ ID NO: 2614989 - RNA, 19 nt, Homo sapiens
  misc_RNA (1)...(19): siRNA sense strand
ccgauaaggagaauggcga

SEQ ID NO: 2614990 - RNA, 19 nt, Homo sapiens
  misc_RNA (1)...(19): siRNA sense strand
auuacaaggugaagcggga

SEQ ID NO: 2614991 - RNA, 19 nt, Homo sapiens
  misc_RNA (1)...(19): siRNA sense strand
aggagaauggcgagaaugu

SEQ ID NO: 2614992 - RNA, 19 nt, Homo sapiens
  misc_RNA (1)...(19): siRNA sense strand
uggcagacaugacggcaga

SEQ ID NO: 2614993 - RNA, 19 nt, Homo sapiens
  misc_RNA (1)...(19): siRNA sense strand
gcuacguggaagccgauaa

SEQ ID NO: 2614994 - RNA, 19 nt, Homo sapiens
  misc_RNA (1)...(19): siRNA sense strand
accuuggagugucgggaaa

SEQ ID NO: 2614995 - RNA, 19 nt, Homo sapiens
  misc_RNA (1)...(19): siRNA sense strand
uggaagccgauaaggagaa

SEQ ID NO: 2614996 - RNA, 19 nt, Homo sapiens
  misc_RNA (1)...(19): siRNA sense strand
aagccaaagaaguugccaa

SEQ ID NO: 2614997 - RNA, 19 nt, Homo sapiens
  misc_RNA (1)...(19): siRNA sense strand
guggaagccgauaaggaga

SEQ ID NO: 2614998 - RNA, 19 nt, Homo sapiens
  misc_RNA (1)...(19): siRNA sense strand
gaaagaagcuaaacuggaa

SEQ ID NO: 2614999 - RNA, 19 nt, Homo sapiens
  misc_RNA (1)...(19): siRNA sense strand
gcaauaugaacgagcgcaa

SEQ ID NO: 2615000 - RNA, 19 nt, Homo sapiens
  misc_RNA (1)...(19): siRNA sense strand
aguggaaaguggagcaaau

SEQ ID NO: 2615001 - RNA, 19 nt, Homo sapiens
  misc_RNA (1)...(19): siRNA sense strand
ucuacagagaugagguuaa

SEQ ID NO: 2615002 - RNA, 19 nt, Homo sapiens
  misc_RNA (1)...(19): siRNA sense strand
acaacacagcagaaggaaa

SEQ ID NO: 2615003 - RNA, 19 nt, Homo sapiens
  misc_RNA (1)...(19): siRNA sense strand
gaaaugggaaagaagcuaa

SEQ ID NO: 2615004 - RNA, 19 nt, Homo sapiens
  misc_RNA (1)...(19): siRNA sense strand
aaaugagggaggagccaaa

SEQ ID NO: 2615005 - RNA, 19 nt, Homo sapiens
  misc_RNA (1)...(19): siRNA sense strand
ugaagaaagaaguugguga

SEQ ID NO: 2615006 - RNA, 19 nt, Homo sapiens
  misc_RNA (1)...(19): siRNA sense strand
aaagcagggaaaugggaaa

SEQ ID NO: 2615007 - RNA, 19 nt, Homo sapiens
  misc_RNA (1)...(19): siRNA sense strand
gcgggaagcgcaaaggcaa

SEQ ID NO: 2615008 - RNA, 19 nt, Homo sapiens
  misc_RNA (1)...(19): siRNA sense strand
gugaagagcccuaaggauc

SEQ ID NO: 2615009 - RNA, 19 nt, Homo sapiens
  misc_RNA (1)...(19): siRNA sense strand
uugccugaguguugugaaa

SEQ ID NO: 2615010 - RNA, 19 nt, Homo sapiens
  misc_RNA (1)...(19): siRNA sense strand
ggaaagaagcuaaacugga

SEQ ID NO: 2615011 - RNA, 19 nt, Homo sapiens
  misc_RNA (1)...(19): siRNA sense strand
cggacaaaucagaccaaaa

SEQ ID NO: 2615012 - RNA, 19 nt, Homo sapiens
  misc_RNA (1)...(19): siRNA sense strand
ggaaaugggaaagaagcua

SEQ ID NO: 2615013 - RNA, 19 nt, Homo sapiens
  misc_RNA (1)...(19): siRNA sense strand
ccagcagguaccagagaau

SEQ ID NO: 2615014 - RNA, 19 nt, Homo sapiens
  misc_RNA (1)...(19): siRNA sense strand
gauccaagucaaaugaaaa

SEQ ID NO: 2615015 - RNA, 19 nt, Homo sapiens
  misc_RNA (1)...(19): siRNA sense strand
uggaagugagggagaggau

SEQ ID NO: 2615016 - RNA, 19 nt, Homo sapiens
  misc_RNA (1)...(19): siRNA sense strand
gggaaaugggaaagaagcu

SEQ ID NO: 2615017 - RNA, 19 nt, Homo sapiens
  misc_RNA (1)...(19): siRNA sense strand
acgaauacggcgacgacau

SEQ ID NO: 2615018 - RNA, 19 nt, Homo sapiens
  misc_RNA (1)...(19): siRNA sense strand
ggugaagagcccuaaggau

SEQ ID NO: 2615019 - RNA, 19 nt, Homo sapiens
  misc_RNA (1)...(19): siRNA sense strand
agagaugagguuaagaaga

SEQ ID NO: 2615020 - RNA, 19 nt, Homo sapiens
  misc_RNA (1)...(19): siRNA sense strand
aagaaguuggugacauuaa

SEQ ID NO: 2615021 - RNA, 19 nt, Homo sapiens
  misc_RNA (1)...(19): siRNA sense strand
ugugaauagagaagaaguu

SEQ ID NO: 2615022 - RNA, 19 nt, Homo sapiens
  misc_RNA (1)...(19): siRNA sense strand
gcagggaaaugggaaagaa

SEQ ID NO: 2615023 - RNA, 19 nt, Homo sapiens
  misc_RNA (1)...(19): siRNA sense strand
uuaacucaaagcagggaaa

SEQ ID NO: 2615024 - RNA, 19 nt, Homo sapiens
  misc_RNA (1)...(19): siRNA sense strand
aagucaagccacagaagga

SEQ ID NO: 2615025 - RNA, 19 nt, Homo sapiens
  misc_RNA (1)...(19): siRNA sense strand
aaaugggaaagaagcuaaa

SEQ ID NO: 2615026 - RNA, 19 nt, Homo sapiens
  misc_RNA (1)...(19): siRNA sense strand
ccaaaacaacacagcagaa

SEQ ID NO: 2615027 - RNA, 19 nt, Homo sapiens
  misc_RNA (1)...(19): siRNA sense strand
gggauagagccugagaaau

SEQ ID NO: 2615028 - RNA, 19 nt, Homo sapiens
  misc_RNA (1)...(19): siRNA sense strand
gaagaaagaaguuggugac

SEQ ID NO: 2615029 - RNA, 19 nt, Homo sapiens
  misc_RNA (1)...(19): siRNA sense strand
cagaaaauaaaguggaucu

SEQ ID NO: 2615030 - RNA, 19 nt, Homo sapiens
  misc_RNA (1)...(19): siRNA sense strand
cagugguaguagaaaucau

SEQ ID NO: 2615031 - RNA, 19 nt, Homo sapiens
  misc_RNA (1)...(19): siRNA sense strand
aggcaaaggauaaaggaca

SEQ ID NO: 2615032 - RNA, 19 nt, Homo sapiens
  misc_RNA (1)...(19): siRNA sense strand
agaugaagaagaagaugaa

SEQ ID NO: 2615033 - RNA, 19 nt, Homo sapiens
  misc_RNA (1)...(19): siRNA sense strand
augaagaagaagaugaaga

SEQ ID NO: 2615034 - RNA, 19 nt, Homo sapiens
  misc_RNA (1)...(19): siRNA sense strand
gugcaacagaagaagguau

SEQ ID NO: 2615035 - RNA, 19 nt, Homo sapiens
  misc_RNA (1)...(19): siRNA sense strand
cugcaugcaaggugggauu

SEQ ID NO: 2615036 - RNA, 19 nt, Homo sapiens
  misc_RNA (1)...(19): siRNA sense strand
gauaaaggacagacagcca

SEQ ID NO: 2615037 - RNA, 19 nt, Homo sapiens
  misc_RNA (1)...(19): siRNA sense strand
agguuuggcugguguggua

SEQ ID NO: 2615038 - RNA, 19 nt, Homo sapiens
  misc_RNA (1)...(19): siRNA sense strand
uuauagugcaacagaagaa

SEQ ID NO: 2615039 - RNA, 19 nt, Homo sapiens
  misc_RNA (1)...(19): siRNA sense strand
aauaugaagaacaggauga

SEQ ID NO: 2615040 - RNA, 19 nt, Homo sapiens
  misc_RNA (1)...(19): siRNA sense strand
uguuagaugaagaagaaga

SEQ ID NO: 2615041 - RNA, 19 nt, Homo sapiens
  misc_RNA (1)...(19): siRNA sense strand
ugaacaugaaccugaacaa

SEQ ID NO: 2615042 - RNA, 19 nt, Homo sapiens
  misc_RNA (1)...(19): siRNA sense strand
aggugggauuauagugcaa

SEQ ID NO: 2615043 - RNA, 19 nt, Homo sapiens
  misc_RNA (1)...(19): siRNA sense strand
cauugaagaggcugaguga

SEQ ID NO: 2615044 - RNA, 19 nt, Homo sapiens
  misc_RNA (1)...(19): siRNA sense strand
gggaaaccaugaagccuca

SEQ ID NO: 2615045 - RNA, 19 nt, Homo sapiens
  misc_RNA (1)...(19): siRNA sense strand
guguaaggaucgguggaau

SEQ ID NO: 2615046 - RNA, 19 nt, Homo sapiens
  misc_RNA (1)...(19): siRNA sense strand
ucuacaaucaggaguauau

SEQ ID NO: 2615047 - RNA, 19 nt, Homo sapiens
  misc_RNA (1)...(19): siRNA sense strand
agcaucaggcaaaggauaa

SEQ ID NO: 2615048 - RNA, 19 nt, Homo sapiens
  misc_RNA (1)...(19): siRNA sense strand
cuguggaauaugccagaaa

SEQ ID NO: 2615049 - RNA, 19 nt, Homo sapiens
  misc_RNA (1)...(19): siRNA sense strand
uagaugaagaagaagauga

SEQ ID NO: 2615050 - RNA, 19 nt, Homo sapiens
  misc_RNA (1)...(19): siRNA sense strand
cugcaguggaugaugauga

SEQ ID NO: 2615051 - RNA, 19 nt, Homo sapiens
  misc_RNA (1)...(19): siRNA sense strand
accugaacaaagaaagaaa

SEQ ID NO: 2615052 - RNA, 19 nt, Homo sapiens
  misc_RNA (1)...(19): siRNA sense strand
gcuccugauuacuuggaau

SEQ ID NO: 2615053 - RNA, 19 nt, Homo sapiens
  misc_RNA (1)...(19): siRNA sense strand
agaagguaugaaagaagua

SEQ ID NO: 2615054 - RNA, 19 nt, Homo sapiens
  misc_RNA (1)...(19): siRNA sense strand
cuagcaagccacagacaca

SEQ ID NO: 2615055 - RNA, 19 nt, Homo sapiens
  misc_RNA (1)...(19): siRNA sense strand
aagaagaagaugaagauag

SEQ ID NO: 2615056 - RNA, 19 nt, Homo sapiens
  misc_RNA (1)...(19): siRNA sense strand
gaggcugagugaugaacau

SEQ ID NO: 2615057 - RNA, 19 nt, Homo sapiens
  misc_RNA (1)...(19): siRNA sense strand
gcaucaggcaaaggauaaa

SEQ ID NO: 2615058 - RNA, 19 nt, Homo sapiens
  misc_RNA (1)...(19): siRNA sense strand
aacagaagaagguaugaaa

SEQ ID NO: 2615059 - RNA, 19 nt, Homo sapiens
  misc_RNA (1)...(19): siRNA sense strand
gugaauaugaagaacagga

SEQ ID NO: 2615060 - RNA, 19 nt, Homo sapiens
  misc_RNA (1)...(19): siRNA sense strand
guuagaugaagaagaagau

SEQ ID NO: 2615061 - RNA, 19 nt, Homo sapiens
  misc_RNA (1)...(19): siRNA sense strand
gaagaggcugagugaugaa

SEQ ID NO: 2615062 - RNA, 19 nt, Homo sapiens
  misc_RNA (1)...(19): siRNA sense strand
aguccaaggaagaacauca

SEQ ID NO: 2615063 - RNA, 19 nt, Homo sapiens
  misc_RNA (1)...(19): siRNA sense strand
uugaagaggcugagugaug

SEQ ID NO: 2615064 - RNA, 19 nt, Homo sapiens
  misc_RNA (1)...(19): siRNA sense strand
ucaucuacaaucaggagua

SEQ ID NO: 2615065 - RNA, 19 nt, Homo sapiens
  misc_RNA (1)...(19): siRNA sense strand
augaagaacaggaugaugu

SEQ ID NO: 2615066 - RNA, 19 nt, Homo sapiens
  misc_RNA (1)...(19): siRNA sense strand
cagggaauggagaggacuu

SEQ ID NO: 2615067 - RNA, 19 nt, Homo sapiens
  misc_RNA (1)...(19): siRNA sense strand
ggcaaaggauaaaggacag

SEQ ID NO: 2615068 - RNA, 19 nt, Homo sapiens
  misc_RNA (1)...(19): siRNA sense strand
guggugaauaugaagaaca

SEQ ID NO: 2615069 - RNA, 19 nt, Homo sapiens
  misc_RNA (1)...(19): siRNA sense strand
guaaaauaccgagguguaa

SEQ ID NO: 2615070 - RNA, 19 nt, Homo sapiens
  misc_RNA (1)...(19): siRNA sense strand
ugauuggccaagaaguaua

SEQ ID NO: 2615071 - RNA, 19 nt, Homo sapiens
  misc_RNA (1)...(19): siRNA sense strand
ccucagagcuuuuagagca

SEQ ID NO: 2615072 - RNA, 19 nt, Homo sapiens
  misc_RNA (1)...(19): siRNA sense strand
cuccugauuacuuggaaua

SEQ ID NO: 2615073 - RNA, 19 nt, Homo sapiens
  misc_RNA (1)...(19): siRNA sense strand
guguggugaauaugaagaa

SEQ ID NO: 2615074 - RNA, 19 nt, Homo sapiens
  misc_RNA (1)...(19): siRNA sense strand
gcgagcuggauaagaucua

SEQ ID NO: 2615075 - RNA, 19 nt, Homo sapiens
  misc_RNA (1)...(19): siRNA sense strand
cuggauaagaucuaugaga

SEQ ID NO: 2615076 - RNA, 19 nt, Homo sapiens
  misc_RNA (1)...(19): siRNA sense strand
uguaaggaucgguggaauc

SEQ ID NO: 2615077 - RNA, 19 nt, Homo sapiens
  misc_RNA (1)...(19): siRNA sense strand
cacaaaugcagcugauuca

SEQ ID NO: 2615078 - RNA, 19 nt, Homo sapiens
  misc_RNA (1)...(19): siRNA sense strand
ggggaaaccugguggacuc

SEQ ID NO: 2615079 - RNA, 19 nt, Homo sapiens
  misc_RNA (1)...(19): siRNA sense strand
gaaagaaaauuaagaggag

SEQ ID NO: 2615080 - RNA, 19 nt, Homo sapiens
  misc_RNA (1)...(19): siRNA sense strand
acauauagacauggagaga

SEQ ID NO: 2615081 - RNA, 19 nt, Homo sapiens
  misc_RNA (1)...(19): siRNA sense strand
cgagcaauggagauggauu

SEQ ID NO: 2615082 - RNA, 19 nt, Homo sapiens
  misc_RNA (1)...(19): siRNA sense strand
agacauauagacauggaga

SEQ ID NO: 2615083 - RNA, 19 nt, Homo sapiens
  misc_RNA (1)...(19): siRNA sense strand
auuaaagagaucaggaaca

SEQ ID NO: 2615084 - RNA, 19 nt, Homo sapiens
  misc_RNA (1)...(19): siRNA sense strand
gugaagaagaggagaagcu

SEQ ID NO: 2615085 - RNA, 19 nt, Homo sapiens
  misc_RNA (1)...(19): siRNA sense strand
aggaauacaagcaggagau

SEQ ID NO: 2615086 - RNA, 19 nt, Homo sapiens
  misc_RNA (1)...(19): siRNA sense strand
ugugugaagaagaggagaa

SEQ ID NO: 2615087 - RNA, 19 nt, Homo sapiens
  misc_RNA (1)...(19): siRNA sense strand
gcagaauggcagacagaac

SEQ ID NO: 2615088 - RNA, 19 nt, Homo sapiens
  misc_RNA (1)...(19): siRNA sense strand
guggcuaggaagcaggaua

SEQ ID NO: 2615089 - RNA, 19 nt, Homo sapiens
  misc_RNA (1)...(19): siRNA sense strand
aggcugaguuugaggcacu

SEQ ID NO: 2615090 - RNA, 19 nt, Homo sapiens
  misc_RNA (1)...(19): siRNA sense strand
aagcagaauggcagacaga

SEQ ID NO: 2615091 - RNA, 19 nt, Homo sapiens
  misc_RNA (1)...(19): siRNA sense strand
guuugaggcacuugaguca

SEQ ID NO: 2615092 - RNA, 19 nt, Homo sapiens
  misc_RNA (1)...(19): siRNA sense strand
ugugcaaauuggaaagcau

SEQ ID NO: 2615093 - RNA, 19 nt, Homo sapiens
  misc_RNA (1)...(19): siRNA sense strand
cugagaaugaccuaaacaa

SEQ ID NO: 2615094 - RNA, 19 nt, Homo sapiens
  misc_RNA (1)...(19): siRNA sense strand
cugcagauggagaagauca

SEQ ID NO: 2615095 - RNA, 19 nt, Homo sapiens
  misc_RNA (1)...(19): siRNA sense strand
ugaaagaacauguggaugc

SEQ ID NO: 2615096 - RNA, 19 nt, Homo sapiens
  misc_RNA (1)...(19): siRNA sense strand
cagaaagcagaauggcaga

SEQ ID NO: 2615097 - RNA, 19 nt, Homo sapiens
  misc_RNA (1)...(19): siRNA sense strand
acugaaagaacauguggau

SEQ ID NO: 2615098 - RNA, 19 nt, Homo sapiens
  misc_RNA (1)...(19): siRNA sense strand
ugcaaauuggaaagcauua

SEQ ID NO: 2615099 - RNA, 19 nt, Homo sapiens
  misc_RNA (1)...(19): siRNA sense strand
cuaucaaacaaucugagaa

SEQ ID NO: 2615100 - RNA, 19 nt, Homo sapiens
  misc_RNA (1)...(19): siRNA sense strand
ggguguuaccagaaggcaa

SEQ ID NO: 2615101 - RNA, 19 nt, Homo sapiens
  misc_RNA (1)...(19): siRNA sense strand
ccagaagauaguaggauca

SEQ ID NO: 2615102 - RNA, 19 nt, Homo sapiens
  misc_RNA (1)...(19): siRNA sense strand
cagugaaagaagugaagau

SEQ ID NO: 2615103 - RNA, 19 nt, Homo sapiens
  misc_RNA (1)...(19): siRNA sense strand
gauacauuuccaugguaaa

SEQ ID NO: 2615104 - RNA, 19 nt, Homo sapiens
  misc_RNA (1)...(19): siRNA sense strand
ggagaaaucuguggaccga

SEQ ID NO: 2615105 - RNA, 19 nt, Homo sapiens
  misc_RNA (1)...(19): siRNA sense strand
guauacaauuaucaggcau

SEQ ID NO: 2615106 - RNA, 19 nt, Homo sapiens
  misc_RNA (1)...(19): siRNA sense strand
guauacaauuaucaggcau

SEQ ID NO: 2615107 - RNA, 19 nt, Homo sapiens
  misc_RNA (1)...(19): siRNA sense strand
cggaauccaaacacugaaa

SEQ ID NO: 2615108 - RNA, 19 nt, Homo sapiens
  misc_RNA (1)...(19): siRNA sense strand
uguacuaugaugagaagaa

SEQ ID NO: 2615109 - RNA, 19 nt, Homo sapiens
  misc_RNA (1)...(19): siRNA sense strand
ucaugaguucguugagaaa

SEQ ID NO: 2615110 - RNA, 19 nt, Homo sapiens
  misc_RNA (1)...(19): siRNA sense strand
ccaacagggaagaaaugaa

SEQ ID NO: 2615111 - RNA, 19 nt, Homo sapiens
  misc_RNA (1)...(19): siRNA sense strand
cccuaagagaauugaauau

SEQ ID NO: 2615112 - RNA, 19 nt, Homo sapiens
  misc_RNA (1)...(19): siRNA sense strand
agaggagcuuauugagaau

SEQ ID NO: 2615113 - RNA, 19 nt, Homo sapiens
  misc_RNA (1)...(19): siRNA sense strand
auuaauaagcaacagggaa

SEQ ID NO: 2615114 - RNA, 19 nt, Homo sapiens
  misc_RNA (1)...(19): siRNA sense strand
gaugagaagaagauggcca

SEQ ID NO: 2615115 - RNA, 19 nt, Homo sapiens
  misc_RNA (1)...(19): siRNA sense strand
augagaagaagauggccaa

SEQ ID NO: 2615116 - RNA, 19 nt, Homo sapiens
  misc_RNA (1)...(19): siRNA sense strand
uugagaagaugcuuggaga

SEQ ID NO: 2615117 - RNA, 19 nt, Homo sapiens
  misc_RNA (1)...(19): siRNA sense strand
cauggaaggaaaugugaca

SEQ ID NO: 2615118 - RNA, 19 nt, Homo sapiens
  misc_RNA (1)...(19): siRNA sense strand
ccaauguacugguggcauc

SEQ ID NO: 2615119 - RNA, 19 nt, Homo sapiens
  misc_RNA (1)...(19): siRNA sense strand
uuuaacuggaacuggauua

SEQ ID NO: 2615120 - RNA, 19 nt, Homo sapiens
  misc_RNA (1)...(19): siRNA sense strand
augaugagcagcagaacuu

SEQ ID NO: 2615121 - RNA, 19 nt, Homo sapiens
  misc_RNA (1)...(19): siRNA sense strand
aaguggccauaaugagaaa

SEQ ID NO: 2615122 - RNA, 19 nt, Homo sapiens
  misc_RNA (1)...(19): siRNA sense strand
acuaugaugagcagcagaa

SEQ ID NO: 2615123 - RNA, 19 nt, Homo sapiens
  misc_RNA (1)...(19): siRNA sense strand
ugcaagagaauauuggcaa

SEQ ID NO: 2615124 - RNA, 19 nt, Homo sapiens
  misc_RNA (1)...(19): siRNA sense strand
caaagaaggugaaggcaga

SEQ ID NO: 2615125 - RNA, 19 nt, Homo sapiens
  misc_RNA (1)...(19): siRNA sense strand
gauuacaggagcugggcau

SEQ ID NO: 2615126 - RNA, 19 nt, Homo sapiens
  misc_RNA (1)...(19): siRNA sense strand
gcaaagaaggugaaggcag

SEQ ID NO: 2615127 - RNA, 19 nt, Homo sapiens
  misc_RNA (1)...(19): siRNA sense strand
gaagaauaaccauggccau

SEQ ID NO: 2615128 - RNA, 19 nt, Homo sapiens
  misc_RNA (1)...(19): siRNA sense strand
aagcauggacuggaggaaa

SEQ ID NO: 2615129 - RNA, 19 nt, Homo sapiens
  misc_RNA (1)...(19): siRNA sense strand
aacccgaggaagugguaaa

SEQ ID NO: 2615130 - RNA, 19 nt, Homo sapiens
  misc_RNA (1)...(19): siRNA sense strand
guguuaaguuugaugcagu

SEQ ID NO: 2615131 - RNA, 19 nt, Homo sapiens
  misc_RNA (1)...(19): siRNA sense strand
cugcagcaaccgagaagau

SEQ ID NO: 2615132 - RNA, 19 nt, Homo sapiens
  misc_RNA (1)...(19): siRNA sense strand
gagaagauauuuacagcuc

SEQ ID NO: 2615133 - RNA, 19 nt, Homo sapiens
  misc_RNA (1)...(19): siRNA sense strand
aagcugguucucugggaua

SEQ ID NO: 2615134 - RNA, 19 nt, Homo sapiens
  misc_RNA (1)...(19): siRNA sense strand
acaucagauuuguuugcua

SEQ ID NO: 2615135 - RNA, 19 nt, Homo sapiens
  misc_RNA (1)...(19): siRNA sense strand
cugacugagcagaagauga

SEQ ID NO: 2615136 - RNA, 19 nt, Homo sapiens
  misc_RNA (1)...(19): siRNA sense strand
acaacaugucuguguccua

SEQ ID NO: 2615137 - RNA, 19 nt, Homo sapiens
  misc_RNA (1)...(19): siRNA sense strand
acguaaagguuaucaaaga

SEQ ID NO: 2615138 - RNA, 19 nt, Homo sapiens
  misc_RNA (1)...(19): siRNA sense strand
ugaaacuaagggagaauaa

SEQ ID NO: 2615139 - RNA, 19 nt, Homo sapiens
  misc_RNA (1)...(19): siRNA sense strand
ugaagaaagacaugaguca

SEQ ID NO: 2615140 - RNA, 19 nt, Homo sapiens
  misc_RNA (1)...(19): siRNA sense strand
cugcaugaacagagauauu

SEQ ID NO: 2615141 - RNA, 19 nt, Homo sapiens
  misc_RNA (1)...(19): siRNA sense strand
ugagaauauuucagagcau

SEQ ID NO: 2615142 - RNA, 19 nt, Homo sapiens
  misc_RNA (1)...(19): siRNA sense strand
uaucaaagagccagaugaa

SEQ ID NO: 2615143 - RNA, 19 nt, Homo sapiens
  misc_RNA (1)...(19): siRNA sense strand
aagaugaaacuaagggaga

SEQ ID NO: 2615144 - RNA, 19 nt, Homo sapiens
  misc_RNA (1)...(19): siRNA sense strand
agaugaaacuaagggagaa

SEQ ID NO: 2615145 - RNA, 19 nt, Homo sapiens
  misc_RNA (1)...(19): siRNA sense strand
caguugaaccuuggaaaua

SEQ ID NO: 2615146 - RNA, 19 nt, Homo sapiens
  misc_RNA (1)...(19): siRNA sense strand
gaggaggucuggaagaaaa

SEQ ID NO: 2615147 - RNA, 19 nt, Homo sapiens
  misc_RNA (1)...(19): siRNA sense strand
agaaauacucacugcauga

SEQ ID NO: 2615148 - RNA, 19 nt, Homo sapiens
  misc_RNA (1)...(19): siRNA sense strand
ggaaagucuucauccagua

SEQ ID NO: 2615149 - RNA, 19 nt, Homo sapiens
  misc_RNA (1)...(19): siRNA sense strand
gagcacagcugcaccaaaa

SEQ ID NO: 2615150 - RNA, 19 nt, Homo sapiens
  misc_RNA (1)...(19): siRNA sense strand
gaugaaacuaagggagaau

SEQ ID NO: 2615151 - RNA, 19 nt, Homo sapiens
  misc_RNA (1)...(19): siRNA sense strand
agaauaaucucaacagacu

SEQ ID NO: 2615152 - RNA, 19 nt, Homo sapiens
  misc_RNA (1)...(19): siRNA sense strand
aguugaaccuuggaaauaa

SEQ ID NO: 2615153 - RNA, 19 nt, Homo sapiens
  misc_RNA (1)...(19): siRNA sense strand
auucaagucaguuuggaaa

SEQ ID NO: 2615154 - RNA, 19 nt, Homo sapiens
  misc_RNA (1)...(19): siRNA sense strand
aggacagccaucagagaau

SEQ ID NO: 2615155 - RNA, 19 nt, Homo sapiens
  misc_RNA (1)...(19): siRNA sense strand
caagcuacccucugaagaa

SEQ ID NO: 2615156 - RNA, 19 nt, Homo sapiens
  misc_RNA (1)...(19): siRNA sense strand
gauucuaccucugaaguaa

SEQ ID NO: 2615157 - RNA, 19 nt, Homo sapiens
  misc_RNA (1)...(19): siRNA sense strand
gaaccaauauuucccuuaa

SEQ ID NO: 2615158 - RNA, 19 nt, Homo sapiens
  misc_RNA (1)...(19): siRNA sense strand
gagcaucauuugaggaggu

SEQ ID NO: 2615159 - RNA, 19 nt, Homo sapiens
  misc_RNA (1)...(19): siRNA sense strand
gauucaagucaguuuggaa

SEQ ID NO: 2615160 - RNA, 19 nt, Homo sapiens
  misc_RNA (1)...(19): siRNA sense strand
gcuacccucugaagaaaua

SEQ ID NO: 2615161 - RNA, 19 nt, Homo sapiens
  misc_RNA (1)...(19): siRNA sense strand
ccagaugaacggauuguuu

SEQ ID NO: 2615162 - RNA, 19 nt, Homo sapiens
  misc_RNA (1)...(19): siRNA sense strand
aucaguaccuggagaccaa

SEQ ID NO: 2615163 - RNA, 19 nt, Homo sapiens
  misc_RNA (1)...(19): siRNA sense strand
caguauucuaccaggcauu

SEQ ID NO: 2615164 - RNA, 19 nt, Homo sapiens
  misc_RNA (1)...(19): siRNA sense strand
auuugaaagugcaguagau

SEQ ID NO: 2615165 - RNA, 19 nt, Homo sapiens
  misc_RNA (1)...(19): siRNA sense strand
agaauauuucagagcauca

SEQ ID NO: 2615166 - RNA, 19 nt, Homo sapiens
  misc_RNA (1)...(19): siRNA sense strand
guugaaccuuggaaauaau

SEQ ID NO: 2615167 - RNA, 19 nt, Homo sapiens
  misc_RNA (1)...(19): siRNA sense strand
ucaguugaaccuuggaaau

SEQ ID NO: 2615168 - RNA, 19 nt, Homo sapiens
  misc_RNA (1)...(19): siRNA sense strand
cauuugaggaggucuggaa

SEQ ID NO: 2615169 - RNA, 19 nt, Homo sapiens
  misc_RNA (1)...(19): siRNA sense strand
uugaggaggucuggaagaa

SEQ ID NO: 2615170 - RNA, 19 nt, Homo sapiens
  misc_RNA (1)...(19): siRNA sense strand
gggaaagcuucauuugcca

SEQ ID NO: 2615171 - RNA, 19 nt, Homo sapiens
  misc_RNA (1)...(19): siRNA sense strand
gaagaaauacucacugcau

SEQ ID NO: 2615172 - RNA, 19 nt, Homo sapiens
  misc_RNA (1)...(19): siRNA sense strand
ucacggaggccuuuaucua

SEQ ID NO: 2615173 - RNA, 19 nt, Homo sapiens
  misc_RNA (1)...(19): siRNA sense strand
caguaacagccaugaccaa

SEQ ID NO: 2615174 - RNA, 19 nt, Homo sapiens
  misc_RNA (1)...(19): siRNA sense strand
ccacagaggccugaggaga

SEQ ID NO: 2615175 - RNA, 19 nt, Homo sapiens
  misc_RNA (1)...(19): siRNA sense strand
ccauaugguguccgaguca

SEQ ID NO: 2615176 - RNA, 19 nt, Homo sapiens
  misc_RNA (1)...(19): siRNA sense strand
aggaggaagaagaggcuuu

SEQ ID NO: 2615177 - RNA, 19 nt, Homo sapiens
  misc_RNA (1)...(19): siRNA sense strand
ugguuguggcgcugggaaa

SEQ ID NO: 2615178 - RNA, 19 nt, Homo sapiens
  misc_RNA (1)...(19): siRNA sense strand
ggucuuucuuccuggguca

SEQ ID NO: 2615179 - RNA, 19 nt, Homo sapiens
  misc_RNA (1)...(19): siRNA sense strand
caggagcagaggaggaaga

SEQ ID NO: 2615180 - RNA, 19 nt, Homo sapiens
  misc_RNA (1)...(19): siRNA sense strand
uggccuugguguuggcaau

SEQ ID NO: 2615181 - RNA, 19 nt, Homo sapiens
  misc_RNA (1)...(19): siRNA sense strand
aggaggaagagaaggagga

SEQ ID NO: 2615182 - RNA, 19 nt, Homo sapiens
  misc_RNA (1)...(19): siRNA sense strand
gggccuaccugauggcacu

SEQ ID NO: 2615183 - RNA, 19 nt, Homo sapiens
  misc_RNA (1)...(19): siRNA sense strand
uggcagggcugguuggucu

SEQ ID NO: 2615184 - RNA, 19 nt, Homo sapiens
  misc_RNA (1)...(19): siRNA sense strand
uguccagagcagagaggaa

SEQ ID NO: 2615185 - RNA, 19 nt, Homo sapiens
  misc_RNA (1)...(19): siRNA sense strand
caacgagagccaagccaca

SEQ ID NO: 2615186 - RNA, 19 nt, Homo sapiens
  misc_RNA (1)...(19): siRNA sense strand
gcuuaaaaucagagaaaga

SEQ ID NO: 2615187 - RNA, 19 nt, Homo sapiens
  misc_RNA (1)...(19): siRNA sense strand
cggaaaagcaagaagaauu

SEQ ID NO: 2615188 - RNA, 19 nt, Homo sapiens
  misc_RNA (1)...(19): siRNA sense strand
agaaaaugcuacugaggaa

SEQ ID NO: 2615189 - RNA, 19 nt, Homo sapiens
  misc_RNA (1)...(19): siRNA sense strand
cagaauuggaacaagcaaa

SEQ ID NO: 2615190 - RNA, 19 nt, Homo sapiens
  misc_RNA (1)...(19): siRNA sense strand
cguguuugucggaggauua

SEQ ID NO: 2615191 - RNA, 19 nt, Homo sapiens
  misc_RNA (1)...(19): siRNA sense strand
uggaggaagccaaggagaa

SEQ ID NO: 2615192 - RNA, 19 nt, Homo sapiens
  misc_RNA (1)...(19): siRNA sense strand
uggaacaagcaaaggaaga

SEQ ID NO: 2615193 - RNA, 19 nt, Homo sapiens
  misc_RNA (1)...(19): siRNA sense strand
gaacauagacauuuggcga

SEQ ID NO: 2615194 - RNA, 19 nt, Homo sapiens
  misc_RNA (1)...(19): siRNA sense strand
cggugauauuacagcaauu

SEQ ID NO: 2615195 - RNA, 19 nt, Homo sapiens
  misc_RNA (1)...(19): siRNA sense strand
aggcuuaaaaucagagaaa

SEQ ID NO: 2615196 - RNA, 19 nt, Homo sapiens
  misc_RNA (1)...(19): siRNA sense strand
ucucgaaagcccagcgcaa

SEQ ID NO: 2615197 - RNA, 19 nt, Homo sapiens
  misc_RNA (1)...(19): siRNA sense strand
gguagaugcagguggaguu

SEQ ID NO: 2615198 - RNA, 19 nt, Homo sapiens
  misc_RNA (1)...(19): siRNA sense strand
gggaaugcaagcagaggau

SEQ ID NO: 2615199 - RNA, 19 nt, Homo sapiens
  misc_RNA (1)...(19): siRNA sense strand
ggcuguugucaaagaaaua

SEQ ID NO: 2615200 - RNA, 19 nt, Homo sapiens
  misc_RNA (1)...(19): siRNA sense strand
ccauccaggaggaguuaaa

SEQ ID NO: 2615201 - RNA, 19 nt, Homo sapiens
  misc_RNA (1)...(19): siRNA sense strand
cagaaguggcuguugucaa

SEQ ID NO: 2615202 - RNA, 19 nt, Homo sapiens
  misc_RNA (1)...(19): siRNA sense strand
uggaaaugucugaugauga

SEQ ID NO: 2615203 - RNA, 19 nt, Homo sapiens
  misc_RNA (1)...(19): siRNA sense strand
accaagaccgagagaacaa

SEQ ID NO: 2615204 - RNA, 19 nt, Homo sapiens
  misc_RNA (1)...(19): siRNA sense strand
cagguggaguugagaacau

SEQ ID NO: 2615205 - RNA, 19 nt, Homo sapiens
  misc_RNA (1)...(19): siRNA sense strand
ggaaugagguggagcugcu

SEQ ID NO: 2615206 - RNA, 19 nt, Homo sapiens
  misc_RNA (1)...(19): siRNA sense strand
uauuacagcaauucggaaa

SEQ ID NO: 2615207 - RNA, 19 nt, Homo sapiens
  misc_RNA (1)...(19): siRNA sense strand
cauagaauaucuuugguca

SEQ ID NO: 2615208 - RNA, 19 nt, Homo sapiens
  misc_RNA (1)...(19): siRNA sense strand
gggaguauagcgauagaca

SEQ ID NO: 2615209 - RNA, 19 nt, Homo sapiens
  misc_RNA (1)...(19): siRNA sense strand
ccgcgaagaagaaauggaa

SEQ ID NO: 2615210 - RNA, 19 nt, Homo sapiens
  misc_RNA (1)...(19): siRNA sense strand
cugaaagaggagaaugaca

SEQ ID NO: 2615211 - RNA, 19 nt, Homo sapiens
  misc_RNA (1)...(19): siRNA sense strand
aggaagccaaggagaauuu

SEQ ID NO: 2615212 - RNA, 19 nt, Homo sapiens
  misc_RNA (1)...(19): siRNA sense strand
ggucauacaugcagcagcu

SEQ ID NO: 2615213 - RNA, 19 nt, Homo sapiens
  misc_RNA (1)...(19): siRNA sense strand
ccaugaauaaccugggcau

SEQ ID NO: 2615214 - RNA, 19 nt, Homo sapiens
  misc_RNA (1)...(19): siRNA sense strand
cuacaaagaaaaugagagu

SEQ ID NO: 2615215 - RNA, 19 nt, Homo sapiens
  misc_RNA (1)...(19): siRNA sense strand
aggccuacgcucugaaaga

SEQ ID NO: 2615216 - RNA, 19 nt, Homo sapiens
  misc_RNA (1)...(19): siRNA sense strand
auacacaagcguuacuaaa

SEQ ID NO: 2615217 - RNA, 19 nt, Homo sapiens
  misc_RNA (1)...(19): siRNA sense strand
ugaacagugcggugauauu

SEQ ID NO: 2615218 - RNA, 19 nt, Homo sapiens
  misc_RNA (1)...(19): siRNA sense strand
agcugaaagaugauagcaa

SEQ ID NO: 2615219 - RNA, 19 nt, Homo sapiens
  misc_RNA (1)...(19): siRNA sense strand
agaacgaccuccugggugu

SEQ ID NO: 2615220 - RNA, 19 nt, Homo sapiens
  misc_RNA (1)...(19): siRNA sense strand
auuaaaagguaccaaggaa

SEQ ID NO: 2615221 - RNA, 19 nt, Homo sapiens
  misc_RNA (1)...(19): siRNA sense strand
gaugaugagaacugugaca

SEQ ID NO: 2615222 - RNA, 19 nt, Homo sapiens
  misc_RNA (1)...(19): siRNA sense strand
agacauuuggcgaaagcau

SEQ ID NO: 2615223 - RNA, 19 nt, Homo sapiens
  misc_RNA (1)...(19): siRNA sense strand
cgcgaagaagaaauggaaa

SEQ ID NO: 2615224 - RNA, 19 nt, Homo sapiens
  misc_RNA (1)...(19): siRNA sense strand
cagcaaaccaugcaaggca

SEQ ID NO: 2615225 - RNA, 19 nt, Homo sapiens
  misc_RNA (1)...(19): siRNA sense strand
aagagauggaggaagccaa

SEQ ID NO: 2615226 - RNA, 19 nt, Homo sapiens
  misc_RNA (1)...(19): siRNA sense strand
aaggaagagcagucccaua

SEQ ID NO: 2615227 - RNA, 19 nt, Homo sapiens
  misc_RNA (1)...(19): siRNA sense strand
gcugaaagaugauagcaag

SEQ ID NO: 2615228 - RNA, 19 nt, Homo sapiens
  misc_RNA (1)...(19): siRNA sense strand
ucgaaagcccagcgcaaga

SEQ ID NO: 2615229 - RNA, 19 nt, Homo sapiens
  misc_RNA (1)...(19): siRNA sense strand
aagcaaaggaagagcaguc

SEQ ID NO: 2615230 - RNA, 19 nt, Homo sapiens
  misc_RNA (1)...(19): siRNA sense strand
cuggauugaacgaggggaa

SEQ ID NO: 2615231 - RNA, 19 nt, Homo sapiens
  misc_RNA (1)...(19): siRNA sense strand
gcgaaagcauucugaggag

SEQ ID NO: 2615232 - RNA, 19 nt, Homo sapiens
  misc_RNA (1)...(19): siRNA sense strand
gucccauacacaagcguua

SEQ ID NO: 2615233 - RNA, 19 nt, Homo sapiens
  misc_RNA (1)...(19): siRNA sense strand
cugaaagaugauagcaagu

SEQ ID NO: 2615234 - RNA, 19 nt, Homo sapiens
  misc_RNA (1)...(19): siRNA sense strand
uugcauuagucaaccaaga

SEQ ID NO: 2615235 - RNA, 19 nt, Homo sapiens
  misc_RNA (1)...(19): siRNA sense strand
aagaaauggaaaugucuga

SEQ ID NO: 2615236 - RNA, 19 nt, Homo sapiens
  misc_RNA (1)...(19): siRNA sense strand
cggaggauuaccagaaaau

SEQ ID NO: 2615237 - RNA, 19 nt, Homo sapiens
  misc_RNA (1)...(19): siRNA sense strand
gcugaaaagcugaaagaug

SEQ ID NO: 2615238 - RNA, 19 nt, Homo sapiens
  misc_RNA (1)...(19): siRNA sense strand
agauggaaguugugugccu

SEQ ID NO: 2615239 - RNA, 19 nt, Homo sapiens
  misc_RNA (1)...(19): siRNA sense strand
ggguagcagccuagaagaa

SEQ ID NO: 2615240 - RNA, 19 nt, Homo sapiens
  misc_RNA (1)...(19): siRNA sense strand
agcuagaaaugcagaguga

SEQ ID NO: 2615241 - RNA, 19 nt, Homo sapiens
  misc_RNA (1)...(19): siRNA sense strand
augaagagugugacaggaa

SEQ ID NO: 2615242 - RNA, 19 nt, Homo sapiens
  misc_RNA (1)...(19): siRNA sense strand
cauaugagaaggaggcuga

SEQ ID NO: 2615243 - RNA, 19 nt, Homo sapiens
  misc_RNA (1)...(19): siRNA sense strand
agaaaugcagagugaugaa

SEQ ID NO: 2615244 - RNA, 19 nt, Homo sapiens
  misc_RNA (1)...(19): siRNA sense strand
agggcaaccuucugagaca

SEQ ID NO: 2615245 - RNA, 19 nt, Homo sapiens
  misc_RNA (1)...(19): siRNA sense strand
guucacuggaggagcacaa

SEQ ID NO: 2615246 - RNA, 19 nt, Homo sapiens
  misc_RNA (1)...(19): siRNA sense strand
uggaagauuguaaggaaca

SEQ ID NO: 2615247 - RNA, 19 nt, Homo sapiens
  misc_RNA (1)...(19): siRNA sense strand
gaauaugggaaaacguaaa

SEQ ID NO: 2615248 - RNA, 19 nt, Homo sapiens
  misc_RNA (1)...(19): siRNA sense strand
cagcuuacaugaaggagga

SEQ ID NO: 2615249 - RNA, 19 nt, Homo sapiens
  misc_RNA (1)...(19): siRNA sense strand
agaaggaggcugagcugau

SEQ ID NO: 2615250 - RNA, 19 nt, Homo sapiens
  misc_RNA (1)...(19): siRNA sense strand
cagcuuauucucaggucua

SEQ ID NO: 2615251 - RNA, 19 nt, Homo sapiens
  misc_RNA (1)...(19): siRNA sense strand
agacccauuagcagggaaa

SEQ ID NO: 2615252 - RNA, 19 nt, Homo sapiens
  misc_RNA (1)...(19): siRNA sense strand
ggcuauauaacgugugaca

SEQ ID NO: 2615253 - RNA, 19 nt, Homo sapiens
  misc_RNA (1)...(19): siRNA sense strand
guacauaaaaggagucaca

SEQ ID NO: 2615254 - RNA, 19 nt, Homo sapiens
  misc_RNA (1)...(19): siRNA sense strand
cacaaauucaguaaagcua

SEQ ID NO: 2615255 - RNA, 19 nt, Homo sapiens
  misc_RNA (1)...(19): siRNA sense strand
uagagaagcucacggggaa

SEQ ID NO: 2615256 - RNA, 19 nt, Homo sapiens
  misc_RNA (1)...(19): siRNA sense strand
ggaauaugggaaaacguaa

SEQ ID NO: 2615257 - RNA, 19 nt, Homo sapiens
  misc_RNA (1)...(19): siRNA sense strand
uccaaauaggauagaaaga

SEQ ID NO: 2615258 - RNA, 19 nt, Homo sapiens
  misc_RNA (1)...(19): siRNA sense strand
cuagaaaugcagagugaug

SEQ ID NO: 2615259 - RNA, 19 nt, Homo sapiens
  misc_RNA (1)...(19): siRNA sense strand
cuucaaggcgagggaggaa

SEQ ID NO: 2615260 - RNA, 19 nt, Homo sapiens
  misc_RNA (1)...(19): siRNA sense strand
uccgaaugguaaacugaaa

SEQ ID NO: 2615261 - RNA, 19 nt, Homo sapiens
  misc_RNA (1)...(19): siRNA sense strand
ccgaaugguaaacugaaau

SEQ ID NO: 2615262 - RNA, 19 nt, Homo sapiens
  misc_RNA (1)...(19): siRNA sense strand
cuuaaaucccaagaggaaa

SEQ ID NO: 2615263 - RNA, 19 nt, Homo sapiens
  misc_RNA (1)...(19): siRNA sense strand
ggagaacagauuagggccu

SEQ ID NO: 2615264 - RNA, 19 nt, Homo sapiens
  misc_RNA (1)...(19): siRNA sense strand
aaucccaagaggaaacaaa

SEQ ID NO: 2615265 - RNA, 19 nt, Homo sapiens
  misc_RNA (1)...(19): siRNA sense strand
gagcacuccaauauggcaa

SEQ ID NO: 2615266 - RNA, 19 nt, Homo sapiens
  misc_RNA (1)...(19): siRNA sense strand
agagugaugaagaguguga

SEQ ID NO: 2615267 - RNA, 19 nt, Homo sapiens
  misc_RNA (1)...(19): siRNA sense strand
ugaugaggguagcagccua

SEQ ID NO: 2615268 - RNA, 19 nt, Homo sapiens
  misc_RNA (1)...(19): siRNA sense strand
caggaaaguccaggagcuu

SEQ ID NO: 2615269 - RNA, 19 nt, Homo sapiens
  misc_RNA (1)...(19): siRNA sense strand
gagaaggagaacagauuag

SEQ ID NO: 2615270 - RNA, 19 nt, Homo sapiens
  misc_RNA (1)...(19): siRNA sense strand
acgcagggaccauggcaga

SEQ ID NO: 2615271 - RNA, 19 nt, Homo sapiens
  misc_RNA (1)...(19): siRNA sense strand
gagcaaacgcccuggagga

SEQ ID NO: 2615272 - RNA, 19 nt, Homo sapiens
  misc_RNA (1)...(19): siRNA sense strand
agaagcaggaggagaucaa

SEQ ID NO: 2615273 - RNA, 19 nt, Homo sapiens
  misc_RNA (1)...(19): siRNA sense strand
aggugaaggacuuaacuaa

SEQ ID NO: 2615274 - RNA, 19 nt, Homo sapiens
  misc_RNA (1)...(19): siRNA sense strand
gagcaggagcugagagccu

SEQ ID NO: 2615275 - RNA, 19 nt, Homo sapiens
  misc_RNA (1)...(19): siRNA sense strand
ugugcaagauggagaggga

SEQ ID NO: 2615276 - RNA, 19 nt, Homo sapiens
  misc_RNA (1)...(19): siRNA sense strand
ggacuacggugaaggcagu

SEQ ID NO: 2615277 - RNA, 19 nt, Homo sapiens
  misc_RNA (1)...(19): siRNA sense strand
ugcaagauggagagggaga

SEQ ID NO: 2615278 - RNA, 19 nt, Homo sapiens
  misc_RNA (1)...(19): siRNA sense strand
cagcuggugcacagagcaa

SEQ ID NO: 2615279 - RNA, 19 nt, Homo sapiens
  misc_RNA (1)...(19): siRNA sense strand
uggagagggagaagagcau

SEQ ID NO: 2615280 - RNA, 19 nt, Homo sapiens
  misc_RNA (1)...(19): siRNA sense strand
caucagaaacggagauccu

SEQ ID NO: 2615281 - RNA, 19 nt, Homo sapiens
  misc_RNA (1)...(19): siRNA sense strand
agagcgagcuggagcagga

SEQ ID NO: 2615282 - RNA, 19 nt, Homo sapiens
  misc_RNA (1)...(19): siRNA sense strand
aggacuacaucgacaggau

SEQ ID NO: 2615283 - RNA, 19 nt, Homo sapiens
  misc_RNA (1)...(19): siRNA sense strand
gagcugagagccugcgaga

SEQ ID NO: 2615284 - RNA, 19 nt, Homo sapiens
  misc_RNA (1)...(19): siRNA sense strand
aggccaacauugagcgucu

SEQ ID NO: 2615285 - RNA, 19 nt, Homo sapiens
  misc_RNA (1)...(19): siRNA sense strand
cugcaggacuacaucgaca

SEQ ID NO: 2615286 - RNA, 19 nt, Homo sapiens
  misc_RNA (1)...(19): siRNA sense strand
caccaguuccagagggaca

SEQ ID NO: 2615287 - RNA, 19 nt, Homo sapiens
  misc_RNA (1)...(19): siRNA sense strand
gaaagcagcuggagcaccu

SEQ ID NO: 2615288 - RNA, 19 nt, Homo sapiens
  misc_RNA (1)...(19): siRNA sense strand
gaggagaagcagaagcugu

SEQ ID NO: 2615289 - RNA, 19 nt, Homo sapiens
  misc_RNA (1)...(19): siRNA sense strand
aggagcagcugaaggagca

SEQ ID NO: 2615290 - RNA, 19 nt, Homo sapiens
  misc_RNA (1)...(19): siRNA sense strand
agcaacuggacgaggagaa

SEQ ID NO: 2615291 - RNA, 19 nt, Homo sapiens
  misc_RNA (1)...(19): siRNA sense strand
gcaaccugaaggagcagaa

SEQ ID NO: 2615292 - RNA, 19 nt, Homo sapiens
  misc_RNA (1)...(19): siRNA sense strand
gggcagaucauuacccuca

SEQ ID NO: 2615293 - RNA, 19 nt, Homo sapiens
  misc_RNA (1)...(19): siRNA sense strand
gagcaggagaacaagagga

SEQ ID NO: 2615294 - RNA, 19 nt, Homo sapiens
  misc_RNA (1)...(19): siRNA sense strand
gaauauuguuucaggcaca

SEQ ID NO: 2615295 - RNA, 19 nt, Homo sapiens
  misc_RNA (1)...(19): siRNA sense strand
agacauuaagccagggaau

SEQ ID NO: 2615296 - RNA, 19 nt, Homo sapiens
  misc_RNA (1)...(19): siRNA sense strand
cuaccuagaugaagggcga

SEQ ID NO: 2615297 - RNA, 19 nt, Homo sapiens
  misc_RNA (1)...(19): siRNA sense strand
cauguuaaacccugggcaa

SEQ ID NO: 2615298 - RNA, 19 nt, Homo sapiens
  misc_RNA (1)...(19): siRNA sense strand
uggauuggccagaguggaa

SEQ ID NO: 2615299 - RNA, 19 nt, Homo sapiens
  misc_RNA (1)...(19): siRNA sense strand
gggauguaucuuugcagaa

SEQ ID NO: 2615300 - RNA, 19 nt, Homo sapiens
  misc_RNA (1)...(19): siRNA sense strand
aguggaagaauuagaugaa

SEQ ID NO: 2615301 - RNA, 19 nt, Homo sapiens
  misc_RNA (1)...(19): siRNA sense strand
ccagaaauccugaugggca

SEQ ID NO: 2615302 - RNA, 19 nt, Homo sapiens
  misc_RNA (1)...(19): siRNA sense strand
gugaaggcgcuaaggcaca

SEQ ID NO: 2615303 - RNA, 19 nt, Homo sapiens
  misc_RNA (1)...(19): siRNA sense strand
cauuuuacaucgagacauu

SEQ ID NO: 2615304 - RNA, 19 nt, Homo sapiens
  misc_RNA (1)...(19): siRNA sense strand
aguuuauaccagugacuuu

SEQ ID NO: 2615305 - RNA, 19 nt, Homo sapiens
  misc_RNA (1)...(19): siRNA sense strand
agaacuacuaggacgaaga

SEQ ID NO: 2615306 - RNA, 19 nt, Homo sapiens
  misc_RNA (1)...(19): siRNA sense strand
cagaaauccugaugggcag

SEQ ID NO: 2615307 - RNA, 19 nt, Homo sapiens
  misc_RNA (1)...(19): siRNA sense strand
gaaaggaaacagagugccu

SEQ ID NO: 2615308 - RNA, 19 nt, Homo sapiens
  misc_RNA (1)...(19): siRNA sense strand
agagauggaaagagaguag

SEQ ID NO: 2615309 - RNA, 19 nt, Homo sapiens
  misc_RNA (1)...(19): siRNA sense strand
auguaucuuugcagaacua

SEQ ID NO: 2615310 - RNA, 19 nt, Homo sapiens
  misc_RNA (1)...(19): siRNA sense strand
cuggauauugagccggaua

SEQ ID NO: 2615311 - RNA, 19 nt, Homo sapiens
  misc_RNA (1)...(19): siRNA sense strand
gcaaaagggucuuccggga

SEQ ID NO: 2615312 - RNA, 19 nt, Homo sapiens
  misc_RNA (1)...(19): siRNA sense strand
augacacuuucgagaagaa

SEQ ID NO: 2615313 - RNA, 19 nt, Homo sapiens
  misc_RNA (1)...(19): siRNA sense strand
acuccaaccuccacacauu

SEQ ID NO: 2615314 - RNA, 19 nt, Homo sapiens
  misc_RNA (1)...(19): siRNA sense strand
acucagggguccucauaaa

SEQ ID NO: 2615315 - RNA, 19 nt, Homo sapiens
  misc_RNA (1)...(19): siRNA sense strand
augaagggcgacuacgaua

SEQ ID NO: 2615316 - RNA, 19 nt, Homo sapiens
  misc_RNA (1)...(19): siRNA sense strand
caguuaaggcgcaccauca

SEQ ID NO: 2615317 - RNA, 19 nt, Homo sapiens
  misc_RNA (1)...(19): siRNA sense strand
agacaaaacagaagagcua

SEQ ID NO: 2615318 - RNA, 19 nt, Homo sapiens
  misc_RNA (1)...(19): siRNA sense strand
cguugagggaugugacaaa

SEQ ID NO: 2615319 - RNA, 19 nt, Homo sapiens
  misc_RNA (1)...(19): siRNA sense strand
gcuaugagcuccagggacu

SEQ ID NO: 2615320 - RNA, 19 nt, Homo sapiens
  misc_RNA (1)...(19): siRNA sense strand
gaaauaagcuggugcgccu

SEQ ID NO: 2615321 - RNA, 19 nt, Homo sapiens
  misc_RNA (1)...(19): siRNA sense strand
uggaggaagaggagauaau

SEQ ID NO: 2615322 - RNA, 19 nt, Homo sapiens
  misc_RNA (1)...(19): siRNA sense strand
agaugaaaugacagaagaa

SEQ ID NO: 2615323 - RNA, 19 nt, Homo sapiens
  misc_RNA (1)...(19): siRNA sense strand
agguccaacugaagacaaa

SEQ ID NO: 2615324 - RNA, 19 nt, Homo sapiens
  misc_RNA (1)...(19): siRNA sense strand
ccauagaugaaaugacaga

SEQ ID NO: 2615325 - RNA, 19 nt, Homo sapiens
  misc_RNA (1)...(19): siRNA sense strand
gagcagaugugaaggaccu

SEQ ID NO: 2615326 - RNA, 19 nt, Homo sapiens
  misc_RNA (1)...(19): siRNA sense strand
agaaacagcccaagaggca

SEQ ID NO: 2615327 - RNA, 19 nt, Homo sapiens
  misc_RNA (1)...(19): siRNA sense strand
ccaugaagaaacagcccaa

SEQ ID NO: 2615328 - RNA, 19 nt, Homo sapiens
  misc_RNA (1)...(19): siRNA sense strand
ugauaaacuuuccaggaga

SEQ ID NO: 2615329 - RNA, 19 nt, Homo sapiens
  misc_RNA (1)...(19): siRNA sense strand
augaaaugacagaagaaca

SEQ ID NO: 2615330 - RNA, 19 nt, Homo sapiens
  misc_RNA (1)...(19): siRNA sense strand
cugugaaggcauauuuaaa

SEQ ID NO: 2615331 - RNA, 19 nt, Homo sapiens
  misc_RNA (1)...(19): siRNA sense strand
ccugugacaacuaaggaaa

SEQ ID NO: 2615332 - RNA, 19 nt, Homo sapiens
  misc_RNA (1)...(19): siRNA sense strand
ggagaagagaauagacaag

SEQ ID NO: 2615333 - RNA, 19 nt, Homo sapiens
  misc_RNA (1)...(19): siRNA sense strand
agccaagcuaaaugaguua

SEQ ID NO: 2615334 - RNA, 19 nt, Homo sapiens
  misc_RNA (1)...(19): siRNA sense strand
caguuauuguggagucauu

SEQ ID NO: 2615335 - RNA, 19 nt, Homo sapiens
  misc_RNA (1)...(19): siRNA sense strand
uugcaaagagagaguggau

SEQ ID NO: 2615336 - RNA, 19 nt, Homo sapiens
  misc_RNA (1)...(19): siRNA sense strand
aggcauauuuaaaguccuu

SEQ ID NO: 2615337 - RNA, 19 nt, Homo sapiens
  misc_RNA (1)...(19): siRNA sense strand
ccguuaacccaugaagaaa

SEQ ID NO: 2615338 - RNA, 19 nt, Homo sapiens
  misc_RNA (1)...(19): siRNA sense strand
auaaaacagcugagaaaga

SEQ ID NO: 2615339 - RNA, 19 nt, Homo sapiens
  misc_RNA (1)...(19): siRNA sense strand
uggaaggugcauaaagaga

SEQ ID NO: 2615340 - RNA, 19 nt, Homo sapiens
  misc_RNA (1)...(19): siRNA sense strand
uggagaagagaauagacaa

SEQ ID NO: 2615341 - RNA, 19 nt, Homo sapiens
  misc_RNA (1)...(19): siRNA sense strand
agacaagggaagcagcuau

SEQ ID NO: 2615342 - RNA, 19 nt, Homo sapiens
  misc_RNA (1)...(19): siRNA sense strand
auacacuggcuaugggaau

SEQ ID NO: 2615343 - RNA, 19 nt, Homo sapiens
  misc_RNA (1)...(19): siRNA sense strand
ggcuggaggaagaggagau

SEQ ID NO: 2615344 - RNA, 19 nt, Homo sapiens
  misc_RNA (1)...(19): siRNA sense strand
agagaauagacaagggaag

SEQ ID NO: 2615345 - RNA, 19 nt, Homo sapiens
  misc_RNA (1)...(19): siRNA sense strand
cagucaaccuuuuaagcaa

SEQ ID NO: 2615346 - RNA, 19 nt, Homo sapiens
  misc_RNA (1)...(19): siRNA sense strand
gguuuuaguuccugugaca

SEQ ID NO: 2615347 - RNA, 19 nt, Homo sapiens
  misc_RNA (1)...(19): siRNA sense strand
ggaagcagcuauagagagg

SEQ ID NO: 2615348 - RNA, 19 nt, Homo sapiens
  misc_RNA (1)...(19): siRNA sense strand
cugagggauuacagcgaca

SEQ ID NO: 2615349 - RNA, 19 nt, Homo sapiens
  misc_RNA (1)...(19): siRNA sense strand
agcgacaagcauagggcua

SEQ ID NO: 2615350 - RNA, 19 nt, Homo sapiens
  misc_RNA (1)...(19): siRNA sense strand
cggaaauuuaucaaugaca

SEQ ID NO: 2615351 - RNA, 19 nt, Homo sapiens
  misc_RNA (1)...(19): siRNA sense strand
agacacugaagaauacaaa

SEQ ID NO: 2615352 - RNA, 19 nt, Homo sapiens
  misc_RNA (1)...(19): siRNA sense strand
ccaggagagcagaugugaa

SEQ ID NO: 2615353 - RNA, 19 nt, Homo sapiens
  misc_RNA (1)...(19): siRNA sense strand
aggaaaauaugcagauacu

SEQ ID NO: 2615354 - RNA, 19 nt, Homo sapiens
  misc_RNA (1)...(19): siRNA sense strand
aauaugaagccaugaaacu

SEQ ID NO: 2615355 - RNA, 19 nt, Homo sapiens
  misc_RNA (1)...(19): siRNA sense strand
uuagaugauucuuuggaga

SEQ ID NO: 2615356 - RNA, 19 nt, Homo sapiens
  misc_RNA (1)...(19): siRNA sense strand
ggaacuuaaucuugcugca

SEQ ID NO: 2615357 - RNA, 19 nt, Homo sapiens
  misc_RNA (1)...(19): siRNA sense strand
aagagagaguggauagucu

SEQ ID NO: 2615358 - RNA, 19 nt, Homo sapiens
  misc_RNA (1)...(19): siRNA sense strand
gaggaugaggacacagaca

SEQ ID NO: 2615359 - RNA, 19 nt, Homo sapiens
  misc_RNA (1)...(19): siRNA sense strand
aagaauaugaagccaugaa

SEQ ID NO: 2615360 - RNA, 19 nt, Homo sapiens
  misc_RNA (1)...(19): siRNA sense strand
agaauaugaagccaugaaa

SEQ ID NO: 2615361 - RNA, 19 nt, Homo sapiens
  misc_RNA (1)...(19): siRNA sense strand
gaaagugcaaggaccggaa

SEQ ID NO: 2615362 - RNA, 19 nt, Homo sapiens
  misc_RNA (1)...(19): siRNA sense strand
auggagaagagaauagaca

SEQ ID NO: 2615363 - RNA, 19 nt, Homo sapiens
  misc_RNA (1)...(19): siRNA sense strand
caucgaaacauccgaaaau

SEQ ID NO: 2615364 - RNA, 19 nt, Homo sapiens
  misc_RNA (1)...(19): siRNA sense strand
ccauaagaucugugcaaaa

SEQ ID NO: 2615365 - RNA, 19 nt, Homo sapiens
  misc_RNA (1)...(19): siRNA sense strand
caaagauggaagaagguau

SEQ ID NO: 2615366 - RNA, 19 nt, Homo sapiens
  misc_RNA (1)...(19): siRNA sense strand
gaaucgaagaagaggacuu

SEQ ID NO: 2615367 - RNA, 19 nt, Homo sapiens
  misc_RNA (1)...(19): siRNA sense strand
cugcaguguuggucagcaa

SEQ ID NO: 2615368 - RNA, 19 nt, Homo sapiens
  misc_RNA (1)...(19): siRNA sense strand
cugagaauucauuggcaua

SEQ ID NO: 2615369 - RNA, 19 nt, Homo sapiens
  misc_RNA (1)...(19): siRNA sense strand
ccggaaggaaguggagaaa

SEQ ID NO: 2615370 - RNA, 19 nt, Homo sapiens
  misc_RNA (1)...(19): siRNA sense strand
cuguauacuuccugguuga

SEQ ID NO: 2615371 - RNA, 19 nt, Homo sapiens
  misc_RNA (1)...(19): siRNA sense strand
ugauaugauuguugggaag

SEQ ID NO: 2615372 - RNA, 19 nt, Homo sapiens
  misc_RNA (1)...(19): siRNA sense strand
cagucuggccaauggaaau

SEQ ID NO: 2615373 - RNA, 19 nt, Homo sapiens
  misc_RNA (1)...(19): siRNA sense strand
ccaauggaaauauggucaa

SEQ ID NO: 2615374 - RNA, 19 nt, Homo sapiens
  misc_RNA (1)...(19): siRNA sense strand
ggaaagaugugcaaagugc

SEQ ID NO: 2615375 - RNA, 19 nt, Homo sapiens
  misc_RNA (1)...(19): siRNA sense strand
uugauaugauuguugggaa

SEQ ID NO: 2615376 - RNA, 19 nt, Homo sapiens
  misc_RNA (1)...(19): siRNA sense strand
cgucauuagagcagguugu

SEQ ID NO: 2615377 - RNA, 19 nt, Homo sapiens
  misc_RNA (1)...(19): siRNA sense strand
aauucaagaugcugagugu

SEQ ID NO: 2615378 - RNA, 19 nt, Homo sapiens
  misc_RNA (1)...(19): siRNA sense strand
guaaaaugucucucaacaa

SEQ ID NO: 2615379 - RNA, 19 nt, Homo sapiens
  misc_RNA (1)...(19): siRNA sense strand
gucaauuguaacagugcaa

SEQ ID NO: 2615380 - RNA, 19 nt, Homo sapiens
  misc_RNA (1)...(19): siRNA sense strand
aauuuggaaucgaagaaga

SEQ ID NO: 2615381 - RNA, 19 nt, Homo sapiens
  misc_RNA (1)...(19): siRNA sense strand
acauggaacccaaaguuau

SEQ ID NO: 2615382 - RNA, 19 nt, Homo sapiens
  misc_RNA (1)...(19): siRNA sense strand
auggaaauauggucaacau

SEQ ID NO: 2615383 - RNA, 19 nt, Homo sapiens
  misc_RNA (1)...(19): siRNA sense strand
uggugagguuauuguucaa

SEQ ID NO: 2615384 - RNA, 19 nt, Homo sapiens
  misc_RNA (1)...(19): siRNA sense strand
auccauaagaucugugcaa

SEQ ID NO: 2615385 - RNA, 19 nt, Homo sapiens
  misc_RNA (1)...(19): siRNA sense strand
cuggaaacaacugggcaua

SEQ ID NO: 2615386 - RNA, 19 nt, Homo sapiens
  misc_RNA (1)...(19): siRNA sense strand
aggcaugaagaaucuauaa

SEQ ID NO: 2615387 - RNA, 19 nt, Homo sapiens
  misc_RNA (1)...(19): siRNA sense strand
aggaaguggagaaauguga

SEQ ID NO: 2615388 - RNA, 19 nt, Homo sapiens
  misc_RNA (1)...(19): siRNA sense strand
acauaauccggaaggaagu

SEQ ID NO: 2615389 - RNA, 19 nt, Homo sapiens
  misc_RNA (1)...(19): siRNA sense strand
caaucaaguccucgcacau

SEQ ID NO: 2615390 - RNA, 19 nt, Homo sapiens
  misc_RNA (1)...(19): siRNA sense strand
acagccaguucuuaguaaa

SEQ ID NO: 2615391 - RNA, 19 nt, Homo sapiens
  misc_RNA (1)...(19): siRNA sense strand
agguagagcacguggugaa

SEQ ID NO: 2615392 - RNA, 19 nt, Homo sapiens
  misc_RNA (1)...(19): siRNA sense strand
ggauagaacccgugugcgu

SEQ ID NO: 2615393 - RNA, 19 nt, Homo sapiens
  misc_RNA (1)...(19): siRNA sense strand
aggcaaagguauagggcgc

SEQ ID NO: 2615394 - RNA, 19 nt, Homo sapiens
  misc_RNA (1)...(19): siRNA sense strand
uggaccugcuggugaacaa

SEQ ID NO: 2615395 - RNA, 19 nt, Homo sapiens
  misc_RNA (1)...(19): siRNA sense strand
guaacuaaccauagcgucu

SEQ ID NO: 2615396 - RNA, 19 nt, Homo sapiens
  misc_RNA (1)...(19): siRNA sense strand
cccacaaggccaagacuau

SEQ ID NO: 2615397 - RNA, 19 nt, Homo sapiens
  misc_RNA (1)...(19): siRNA sense strand
ggugauggcccuagagcuc

SEQ ID NO: 2615398 - RNA, 19 nt, Homo sapiens
  misc_RNA (1)...(19): siRNA sense strand
uccaaaguucagaaagaaa

SEQ ID NO: 2615399 - RNA, 19 nt, Homo sapiens
  misc_RNA (1)...(19): siRNA sense strand
agacaaaaugggaauacaa

SEQ ID NO: 2615400 - RNA, 19 nt, Homo sapiens
  misc_RNA (1)...(19): siRNA sense strand
aggaauucuuauugggaaa

SEQ ID NO: 2615401 - RNA, 19 nt, Homo sapiens
  misc_RNA (1)...(19): siRNA sense strand
guuuaagcuuggaggaaca

SEQ ID NO: 2615402 - RNA, 19 nt, Homo sapiens
  misc_RNA (1)...(19): siRNA sense strand
cccuauuggugcagcuaua

SEQ ID NO: 2615403 - RNA, 19 nt, Homo sapiens
  misc_RNA (1)...(19): siRNA sense strand
ugcaauguguccagagcaa

SEQ ID NO: 2615404 - RNA, 19 nt, Homo sapiens
  misc_RNA (1)...(19): siRNA sense strand
agcuauagaagcaggaauu

SEQ ID NO: 2615405 - RNA, 19 nt, Homo sapiens
  misc_RNA (1)...(19): siRNA sense strand
agguuguacuccaggauuu

SEQ ID NO: 2615406 - RNA, 19 nt, Homo sapiens
  misc_RNA (1)...(19): siRNA sense strand
agaucaagaaacuggaaaa

SEQ ID NO: 2615407 - RNA, 19 nt, Homo sapiens
  misc_RNA (1)...(19): siRNA sense strand
ccacaagcucagaaauaca

SEQ ID NO: 2615408 - RNA, 19 nt, Homo sapiens
  misc_RNA (1)...(19): siRNA sense strand
aauacaucgcggaaaguaa

SEQ ID NO: 2615409 - RNA, 19 nt, Homo sapiens
  misc_RNA (1)...(19): siRNA sense strand
gaguguucagccagagaua

SEQ ID NO: 2615410 - RNA, 19 nt, Homo sapiens
  misc_RNA (1)...(19): siRNA sense strand
agauguugccagacugaua

SEQ ID NO: 2615411 - RNA, 19 nt, Homo sapiens
  misc_RNA (1)...(19): siRNA sense strand
cugccaaagaggaaaccaa

SEQ ID NO: 2615412 - RNA, 19 nt, Homo sapiens
  misc_RNA (1)...(19): siRNA sense strand
auccacaagcucagaaaua

SEQ ID NO: 2615413 - RNA, 19 nt, Homo sapiens
  misc_RNA (1)...(19): siRNA sense strand
guguucagccagagauauu

SEQ ID NO: 2615414 - RNA, 19 nt, Homo sapiens
  misc_RNA (1)...(19): siRNA sense strand
cagaaauacaucgcggaaa

SEQ ID NO: 2615415 - RNA, 19 nt, Homo sapiens
  misc_RNA (1)...(19): siRNA sense strand
caggaauucuuauugggaa

SEQ ID NO: 2615416 - RNA, 19 nt, Homo sapiens
  misc_RNA (1)...(19): siRNA sense strand
gcgcgagccaugaugaaau

SEQ ID NO: 2615417 - RNA, 19 nt, Homo sapiens
  misc_RNA (1)...(19): siRNA sense strand
ucuaugagucugaugggaa

SEQ ID NO: 2615418 - RNA, 19 nt, Homo sapiens
  misc_RNA (1)...(19): siRNA sense strand
agauacuggagaagaaaca

SEQ ID NO: 2615419 - RNA, 19 nt, Homo sapiens
  misc_RNA (1)...(19): siRNA sense strand
ggacgaaucaggagccagu

SEQ ID NO: 2615420 - RNA, 19 nt, Homo sapiens
  misc_RNA (1)...(19): siRNA sense strand
ugggaagaacucugccaaa

SEQ ID NO: 2615421 - RNA, 19 nt, Homo sapiens
  misc_RNA (1)...(19): siRNA sense strand
ucuucuugcuuauggaauu

SEQ ID NO: 2615422 - RNA, 19 nt, Homo sapiens
  misc_RNA (1)...(19): siRNA sense strand
aguuaaggguguggacgaa

SEQ ID NO: 2615423 - RNA, 19 nt, Homo sapiens
  misc_RNA (1)...(19): siRNA sense strand
auacuggagaagaaacaaa

SEQ ID NO: 2615424 - RNA, 19 nt, Homo sapiens
  misc_RNA (1)...(19): siRNA sense strand
guguuuaagcuuggaggaa

SEQ ID NO: 2615425 - RNA, 19 nt, Homo sapiens
  misc_RNA (1)...(19): siRNA sense strand
ucacagaaaccuuagcaca

SEQ ID NO: 2615426 - RNA, 19 nt, Homo sapiens
  misc_RNA (1)...(19): siRNA sense strand
cucagaaaaugaagagauu

SEQ ID NO: 2615427 - RNA, 19 nt, Homo sapiens
  misc_RNA (1)...(19): siRNA sense strand
gauagaguguucagccaga

SEQ ID NO: 2615428 - RNA, 19 nt, Homo sapiens
  misc_RNA (1)...(19): siRNA sense strand
augcacagaucaagaaacu

SEQ ID NO: 2615429 - RNA, 19 nt, Homo sapiens
  misc_RNA (1)...(19): siRNA sense strand
cccagaagauguugccaga

SEQ ID NO: 2615430 - RNA, 19 nt, Homo sapiens
  misc_RNA (1)...(19): siRNA sense strand
caauguguccagagcaaga

SEQ ID NO: 2615431 - RNA, 19 nt, Homo sapiens
  misc_RNA (1)...(19): siRNA sense strand
ucccaaagcuacagcaacu

SEQ ID NO: 2615432 - RNA, 19 nt, Homo sapiens
  misc_RNA (1)...(19): siRNA sense strand
cagcuauagaagcaggaau

SEQ ID NO: 2615433 - RNA, 19 nt, Homo sapiens
  misc_RNA (1)...(19): siRNA sense strand
cagaaaaugaagagauugu

SEQ ID NO: 2615434 - RNA, 19 nt, Homo sapiens
  misc_RNA (1)...(19): siRNA sense strand
ucagaaauacaucgcggaa

SEQ ID NO: 2615435 - RNA, 19 nt, Homo sapiens
  misc_RNA (1)...(19): siRNA sense strand
ugggaaauuacgauaugaa

SEQ ID NO: 2615436 - RNA, 19 nt, Homo sapiens
  misc_RNA (1)...(19): siRNA sense strand
gggcagaagcuccagugau

SEQ ID NO: 2615437 - RNA, 19 nt, Homo sapiens
  misc_RNA (1)...(19): siRNA sense strand
cagugcugaaguagcgaaa

SEQ ID NO: 2615438 - RNA, 19 nt, Homo sapiens
  misc_RNA (1)...(19): siRNA sense strand
cagagcaagauuugaacuu

SEQ ID NO: 2615439 - RNA, 19 nt, Homo sapiens
  misc_RNA (1)...(19): siRNA sense strand
uaguuaaggguguggacga

SEQ ID NO: 2615440 - RNA, 19 nt, Homo sapiens
  misc_RNA (1)...(19): siRNA sense strand
gauuuacagcagaugauau

SEQ ID NO: 2615441 - RNA, 19 nt, Homo sapiens
  misc_RNA (1)...(19): siRNA sense strand
agcuacagcaacugauuaa

SEQ ID NO: 2615442 - RNA, 19 nt, Homo sapiens
  misc_RNA (1)...(19): siRNA sense strand
aagaaaaccuguuggugga

SEQ ID NO: 2615443 - RNA, 19 nt, Homo sapiens
  misc_RNA (1)...(19): siRNA sense strand
cagaucaagaaacuggaaa

SEQ ID NO: 2615444 - RNA, 19 nt, Homo sapiens
  misc_RNA (1)...(19): siRNA sense strand
caguaaugaaaguaaagca

SEQ ID NO: 2615445 - RNA, 19 nt, Homo sapiens
  misc_RNA (1)...(19): siRNA sense strand
gcagcaaaacaaaguagaa

SEQ ID NO: 2615446 - RNA, 19 nt, Homo sapiens
  misc_RNA (1)...(19): siRNA sense strand
guuguugcuuacucagaaa

SEQ ID NO: 2615447 - RNA, 19 nt, Homo sapiens
  misc_RNA (1)...(19): siRNA sense strand
aguuauuacugucccguuu

SEQ ID NO: 2615448 - RNA, 19 nt, Homo sapiens
  misc_RNA (1)...(19): siRNA sense strand
uggaaauuuuggagggaau

SEQ ID NO: 2615449 - RNA, 19 nt, Homo sapiens
  misc_RNA (1)...(19): siRNA sense strand
ccuuauuuguggaggccuu

SEQ ID NO: 2615450 - RNA, 19 nt, Homo sapiens
  misc_RNA (1)...(19): siRNA sense strand
aacaagaaucagaagaaga

SEQ ID NO: 2615451 - RNA, 19 nt, Homo sapiens
  misc_RNA (1)...(19): siRNA sense strand
ccauugucaucguuggaau

SEQ ID NO: 2615452 - RNA, 19 nt, Homo sapiens
  misc_RNA (1)...(19): siRNA sense strand
cugaaguauaucugcaaaa

SEQ ID NO: 2615453 - RNA, 19 nt, Homo sapiens
  misc_RNA (1)...(19): siRNA sense strand
gaauuacaauaguuggcau

SEQ ID NO: 2615454 - RNA, 19 nt, Homo sapiens
  misc_RNA (1)...(19): siRNA sense strand
aaaugcugaacgagaacaa

SEQ ID NO: 2615455 - RNA, 19 nt, Homo sapiens
  misc_RNA (1)...(19): siRNA sense strand
cagaaauaccagaagagaa

SEQ ID NO: 2615456 - RNA, 19 nt, Homo sapiens
  misc_RNA (1)...(19): siRNA sense strand
ucauauaaaugguggcaga

SEQ ID NO: 2615457 - RNA, 19 nt, Homo sapiens
  misc_RNA (1)...(19): siRNA sense strand
ggauaguaaagaagccaaa

SEQ ID NO: 2615458 - RNA, 19 nt, Homo sapiens
  misc_RNA (1)...(19): siRNA sense strand
cugcagagagugaggaaga

SEQ ID NO: 2615459 - RNA, 19 nt, Homo sapiens
  misc_RNA (1)...(19): siRNA sense strand
agugaaagcaauuggaaga

SEQ ID NO: 2615460 - RNA, 19 nt, Homo sapiens
  misc_RNA (1)...(19): siRNA sense strand
cagcagagauauaugccua

SEQ ID NO: 2615461 - RNA, 19 nt, Homo sapiens
  misc_RNA (1)...(19): siRNA sense strand
uggaauugagauagugaaa

SEQ ID NO: 2615462 - RNA, 19 nt, Homo sapiens
  misc_RNA (1)...(19): siRNA sense strand
ggauuuuggaauugagaua

SEQ ID NO: 2615463 - RNA, 19 nt, Homo sapiens
  misc_RNA (1)...(19): siRNA sense strand
gugaggaagaagaugaaau

SEQ ID NO: 2615464 - RNA, 19 nt, Homo sapiens
  misc_RNA (1)...(19): siRNA sense strand
gcugagaccuuaauggaca

SEQ ID NO: 2615465 - RNA, 19 nt, Homo sapiens
  misc_RNA (1)...(19): siRNA sense strand
ggauggaaguuuacggcca

SEQ ID NO: 2615466 - RNA, 19 nt, Homo sapiens
  misc_RNA (1)...(19): siRNA sense strand
ccucaauaagugccagaua

SEQ ID NO: 2615467 - RNA, 19 nt, Homo sapiens
  misc_RNA (1)...(19): siRNA sense strand
agaccuuaauggacagaau

SEQ ID NO: 2615468 - RNA, 19 nt, Homo sapiens
  misc_RNA (1)...(19): siRNA sense strand
uggacagaaucaagaaaca

SEQ ID NO: 2615469 - RNA, 19 nt, Homo sapiens
  misc_RNA (1)...(19): siRNA sense strand
cuguaaacaaugucaagaa

SEQ ID NO: 2615470 - RNA, 19 nt, Homo sapiens
  misc_RNA (1)...(19): siRNA sense strand
agugaaagugaaagcaauu

SEQ ID NO: 2615471 - RNA, 19 nt, Homo sapiens
  misc_RNA (1)...(19): siRNA sense strand
caguguaagaucugugcaa

SEQ ID NO: 2615472 - RNA, 19 nt, Homo sapiens
  misc_RNA (1)...(19): siRNA sense strand
uagugaaagugaaagcaau

SEQ ID NO: 2615473 - RNA, 19 nt, Homo sapiens
  misc_RNA (1)...(19): siRNA sense strand
aggaagaagaugaaaugga

SEQ ID NO: 2615474 - RNA, 19 nt, Homo sapiens
  misc_RNA (1)...(19): siRNA sense strand
gagugaggaagaagaugaa

SEQ ID NO: 2615475 - RNA, 19 nt, Homo sapiens
  misc_RNA (1)...(19): siRNA sense strand
aaauggaaguugaagacca

SEQ ID NO: 2615476 - RNA, 19 nt, Homo sapiens
  misc_RNA (1)...(19): siRNA sense strand
agaacaggauuuuggaauu

SEQ ID NO: 2615477 - RNA, 19 nt, Homo sapiens
  misc_RNA (1)...(19): siRNA sense strand
augaaauggaaguugaaga

SEQ ID NO: 2615478 - RNA, 19 nt, Homo sapiens
  misc_RNA (1)...(19): siRNA sense strand
agacaaagguucaaagucc

SEQ ID NO: 2615479 - RNA, 19 nt, Homo sapiens
  misc_RNA (1)...(19): siRNA sense strand
gcgaaggagaucagcagga

SEQ ID NO: 2615480 - RNA, 19 nt, Homo sapiens
  misc_RNA (1)...(19): siRNA sense strand
guguauaaggcuugcaacu

SEQ ID NO: 2615481 - RNA, 19 nt, Homo sapiens
  misc_RNA (1)...(19): siRNA sense strand
agagugaggaagaagauga

SEQ ID NO: 2615482 - RNA, 19 nt, Homo sapiens
  misc_RNA (1)...(19): siRNA sense strand
gaauaaauguacuucccuu

SEQ ID NO: 2615483 - RNA, 19 nt, Homo sapiens
  misc_RNA (1)...(19): siRNA sense strand
gcaauguacaggaaaggga

SEQ ID NO: 2615484 - RNA, 19 nt, Homo sapiens
  misc_RNA (1)...(19): siRNA sense strand
cagagagugaggaagaaga

SEQ ID NO: 2615485 - RNA, 19 nt, Homo sapiens
  misc_RNA (1)...(19): siRNA sense strand
aagaagaugaaauggaagu

SEQ ID NO: 2615486 - RNA, 19 nt, Homo sapiens
  misc_RNA (1)...(19): siRNA sense strand
cagcugguuuccuggguau

SEQ ID NO: 2615487 - RNA, 19 nt, Homo sapiens
  misc_RNA (1)...(19): siRNA sense strand
agaugaaauggaaguugaa

SEQ ID NO: 2615488 - RNA, 19 nt, Homo sapiens
  misc_RNA (1)...(19): siRNA sense strand
auauaaaugguggcagaaa

SEQ ID NO: 2615489 - RNA, 19 nt, Homo sapiens
  misc_RNA (1)...(19): siRNA sense strand
aaagcaauuggaagacaaa

SEQ ID NO: 2615490 - RNA, 19 nt, Homo sapiens
  misc_RNA (1)...(19): siRNA sense strand
ccugauucccggacagaca

SEQ ID NO: 2615491 - RNA, 19 nt, Homo sapiens
  misc_RNA (1)...(19): siRNA sense strand
caauguacaggaaagggaa

SEQ ID NO: 2615492 - RNA, 19 nt, Homo sapiens
  misc_RNA (1)...(19): siRNA sense strand
cagaaucaagaaacagcua

SEQ ID NO: 2615493 - RNA, 19 nt, Homo sapiens
  misc_RNA (1)...(19): siRNA sense strand
aagucaguauggugcggaa

SEQ ID NO: 2615494 - RNA, 19 nt, Homo sapiens
  misc_RNA (1)...(19): siRNA sense strand
aagaaacagcuacgugaau

SEQ ID NO: 2615495 - RNA, 19 nt, Homo sapiens
  misc_RNA (1)...(19): siRNA sense strand
uggauaugugcaugagaca

SEQ ID NO: 2615496 - RNA, 19 nt, Homo sapiens
  misc_RNA (1)...(19): siRNA sense strand
uugagauagugaaagugaa

SEQ ID NO: 2615497 - RNA, 19 nt, Homo sapiens
  misc_RNA (1)...(19): siRNA sense strand
auagugaaagugaaagcaa

SEQ ID NO: 2615498 - RNA, 19 nt, Homo sapiens
  misc_RNA (1)...(19): siRNA sense strand
ucaagaaacagcuacguga

SEQ ID NO: 2615499 - RNA, 19 nt, Homo sapiens
  misc_RNA (1)...(19): siRNA sense strand
aaguccagacaaaguaaua

SEQ ID NO: 2615500 - RNA, 19 nt, Homo sapiens
  misc_RNA (1)...(19): siRNA sense strand
gcagcaaaguugagggcua

SEQ ID NO: 2615501 - RNA, 19 nt, Homo sapiens
  misc_RNA (1)...(19): siRNA sense strand
aggaggagcuugagcccaa

SEQ ID NO: 2615502 - RNA, 19 nt, Homo sapiens
  misc_RNA (1)...(19): siRNA sense strand
uggaagaggaccuggacau

SEQ ID NO: 2615503 - RNA, 19 nt, Homo sapiens
  misc_RNA (1)...(19): siRNA sense strand
ccggaaaagcucugggauu

SEQ ID NO: 2615504 - RNA, 19 nt, Homo sapiens
  misc_RNA (1)...(19): siRNA sense strand
caaugaagacccagagcca

SEQ ID NO: 2615505 - RNA, 19 nt, Homo sapiens
  misc_RNA (1)...(19): siRNA sense strand
acccagagccagagcaaga

SEQ ID NO: 2615506 - RNA, 19 nt, Homo sapiens
  misc_RNA (1)...(19): siRNA sense strand
gcaaaguauauguggcagu

SEQ ID NO: 2615507 - RNA, 19 nt, Homo sapiens
  misc_RNA (1)...(19): siRNA sense strand
gcucagcagaagaggcaga

SEQ ID NO: 2615508 - RNA, 19 nt, Homo sapiens
  misc_RNA (1)...(19): siRNA sense strand
cagcaaaguauauguggca

SEQ ID NO: 2615509 - RNA, 19 nt, Homo sapiens
  misc_RNA (1)...(19): siRNA sense strand
aggcugagguucuggacca

SEQ ID NO: 2615510 - RNA, 19 nt, Homo sapiens
  misc_RNA (1)...(19): siRNA sense strand
uggagaaagaugaugacuu

SEQ ID NO: 2615511 - RNA, 19 nt, Homo sapiens
  misc_RNA (1)...(19): siRNA sense strand
augaagacccagagccaga

SEQ ID NO: 2615512 - RNA, 19 nt, Homo sapiens
  misc_RNA (1)...(19): siRNA sense strand
cggaagaagcggagcuggu

SEQ ID NO: 2615513 - RNA, 19 nt, Homo sapiens
  misc_RNA (1)...(19): siRNA sense strand
gcuacuuucacgaggccua

SEQ ID NO: 2615514 - RNA, 19 nt, Homo sapiens
  misc_RNA (1)...(19): siRNA sense strand
gguaugaacacacggcuga

SEQ ID NO: 2615515 - RNA, 19 nt, Homo sapiens
  misc_RNA (1)...(19): siRNA sense strand
cuuuauucgaauggagaaa

SEQ ID NO: 2615516 - RNA, 19 nt, Homo sapiens
  misc_RNA (1)...(19): siRNA sense strand
uggacauugcuguggauuu

SEQ ID NO: 2615517 - RNA, 19 nt, Homo sapiens
  misc_RNA (1)...(19): siRNA sense strand
ccauggaugugguggcacu

SEQ ID NO: 2615518 - RNA, 19 nt, Homo sapiens
  misc_RNA (1)...(19): siRNA sense strand
gucugaagaaagaagcuua

SEQ ID NO: 2615519 - RNA, 19 nt, Homo sapiens
  misc_RNA (1)...(19): siRNA sense strand
agacccagagccagagcaa

SEQ ID NO: 2615520 - RNA, 19 nt, Homo sapiens
  misc_RNA (1)...(19): siRNA sense strand
gggauugggacauguggau

SEQ ID NO: 2615521 - RNA, 19 nt, Homo sapiens
  misc_RNA (1)...(19): siRNA sense strand
gccucaacaugaauggcua

SEQ ID NO: 2615522 - RNA, 19 nt, Homo sapiens
  misc_RNA (1)...(19): siRNA sense strand
uugcugugguucuggaaga

SEQ ID NO: 2615523 - RNA, 19 nt, Homo sapiens
  misc_RNA (1)...(19): siRNA sense strand
aggauaucuuggucagaaa

SEQ ID NO: 2615524 - RNA, 19 nt, Homo sapiens
  misc_RNA (1)...(19): siRNA sense strand
ggaccaugucuuagggcuu

SEQ ID NO: 2615525 - RNA, 19 nt, Homo sapiens
  misc_RNA (1)...(19): siRNA sense strand
ccgacaugaucaaggagca

SEQ ID NO: 2615526 - RNA, 19 nt, Homo sapiens
  misc_RNA (1)...(19): siRNA sense strand
auguccagcucuuggcaaa

SEQ ID NO: 2615527 - RNA, 19 nt, Homo sapiens
  misc_RNA (1)...(19): siRNA sense strand
ugaugaugacagaggcuuu

SEQ ID NO: 2615528 - RNA, 19 nt, Homo sapiens
  misc_RNA (1)...(19): siRNA sense strand
agaaaagagcuugaagaaa

SEQ ID NO: 2615529 - RNA, 19 nt, Homo sapiens
  misc_RNA (1)...(19): siRNA sense strand
ccugaaggugggaagauga

SEQ ID NO: 2615530 - RNA, 19 nt, Homo sapiens
  misc_RNA (1)...(19): siRNA sense strand
ccauugauugagaaagaga

SEQ ID NO: 2615531 - RNA, 19 nt, Homo sapiens
  misc_RNA (1)...(19): siRNA sense strand
gauaaugaauuggugguca

SEQ ID NO: 2615532 - RNA, 19 nt, Homo sapiens
  misc_RNA (1)...(19): siRNA sense strand
cucaguauuuggagaacau

SEQ ID NO: 2615533 - RNA, 19 nt, Homo sapiens
  misc_RNA (1)...(19): siRNA sense strand
ccaaccagacagaggagga

SEQ ID NO: 2615534 - RNA, 19 nt, Homo sapiens
  misc_RNA (1)...(19): siRNA sense strand
uggccgaucaccugggaau

SEQ ID NO: 2615535 - RNA, 19 nt, Homo sapiens
  misc_RNA (1)...(19): siRNA sense strand
aggaagaggaagaggaaga

SEQ ID NO: 2615536 - RNA, 19 nt, Homo sapiens
  misc_RNA (1)...(19): siRNA sense strand
cagaugaagaagaggaaau

SEQ ID NO: 2615537 - RNA, 19 nt, Homo sapiens
  misc_RNA (1)...(19): siRNA sense strand
gauaaaugcugguagccaa

SEQ ID NO: 2615538 - RNA, 19 nt, Homo sapiens
  misc_RNA (1)...(19): siRNA sense strand
uagaagaggaggaggaaga

SEQ ID NO: 2615539 - RNA, 19 nt, Homo sapiens
  misc_RNA (1)...(19): siRNA sense strand
aggaagaggaagaagagaa

SEQ ID NO: 2615540 - RNA, 19 nt, Homo sapiens
  misc_RNA (1)...(19): siRNA sense strand
gaggaagaagagaaagaaa

SEQ ID NO: 2615541 - RNA, 19 nt, Homo sapiens
  misc_RNA (1)...(19): siRNA sense strand
cagcaaauauuguuggaga

SEQ ID NO: 2615542 - RNA, 19 nt, Homo sapiens
  misc_RNA (1)...(19): siRNA sense strand
cugaaauuucugagagauu

SEQ ID NO: 2615543 - RNA, 19 nt, Homo sapiens
  misc_RNA (1)...(19): siRNA sense strand
aggaggaggaagaggaaga

SEQ ID NO: 2615544 - RNA, 19 nt, Homo sapiens
  misc_RNA (1)...(19): siRNA sense strand
ggacauagcacuuggcucu

SEQ ID NO: 2615545 - RNA, 19 nt, Homo sapiens
  misc_RNA (1)...(19): siRNA sense strand
aagaggaagaagagaaaga

SEQ ID NO: 2615546 - RNA, 19 nt, Homo sapiens
  misc_RNA (1)...(19): siRNA sense strand
ccucugaaaggaagauaaa

SEQ ID NO: 2615547 - RNA, 19 nt, Homo sapiens
  misc_RNA (1)...(19): siRNA sense strand
aggaagaagagaaagaaaa

SEQ ID NO: 2615548 - RNA, 19 nt, Homo sapiens
  misc_RNA (1)...(19): siRNA sense strand
agcaaauauuguuggagaa

SEQ ID NO: 2615549 - RNA, 19 nt, Homo sapiens
  misc_RNA (1)...(19): siRNA sense strand
ugaccgagaaggagaagaa

SEQ ID NO: 2615550 - RNA, 19 nt, Homo sapiens
  misc_RNA (1)...(19): siRNA sense strand
uguaaagccagcagagauu

SEQ ID NO: 2615551 - RNA, 19 nt, Homo sapiens
  misc_RNA (1)...(19): siRNA sense strand
gaaugaaagaugagccuga

SEQ ID NO: 2615552 - RNA, 19 nt, Homo sapiens
  misc_RNA (1)...(19): siRNA sense strand
aagcagcagugcaggaaau

SEQ ID NO: 2615553 - RNA, 19 nt, Homo sapiens
  misc_RNA (1)...(19): siRNA sense strand
aguugaaggaauugcgcaa

SEQ ID NO: 2615554 - RNA, 19 nt, Homo sapiens
  misc_RNA (1)...(19): siRNA sense strand
ugagaaaagcagaggugaa

SEQ ID NO: 2615555 - RNA, 19 nt, Homo sapiens
  misc_RNA (1)...(19): siRNA sense strand
aggaagaccgagaggcaga

SEQ ID NO: 2615556 - RNA, 19 nt, Homo sapiens
  misc_RNA (1)...(19): siRNA sense strand
aagagaagacucagaugaa

SEQ ID NO: 2615557 - RNA, 19 nt, Homo sapiens
  misc_RNA (1)...(19): siRNA sense strand
gaaaacaacugguggcuga

SEQ ID NO: 2615558 - RNA, 19 nt, Homo sapiens
  misc_RNA (1)...(19): siRNA sense strand
aaguagaagaggaggagga

SEQ ID NO: 2615559 - RNA, 19 nt, Homo sapiens
  misc_RNA (1)...(19): siRNA sense strand
aagaaaaggaggagcauga

SEQ ID NO: 2615560 - RNA, 19 nt, Homo sapiens
  misc_RNA (1)...(19): siRNA sense strand
gaaugaagaaggcuggcaa

SEQ ID NO: 2615561 - RNA, 19 nt, Homo sapiens
  misc_RNA (1)...(19): siRNA sense strand
aaaugaugcugaaagggaa

SEQ ID NO: 2615562 - RNA, 19 nt, Homo sapiens
  misc_RNA (1)...(19): siRNA sense strand
agaagaugcaguagaggau

SEQ ID NO: 2615563 - RNA, 19 nt, Homo sapiens
  misc_RNA (1)...(19): siRNA sense strand
ggccacagccagagauaga

SEQ ID NO: 2615564 - RNA, 19 nt, Homo sapiens
  misc_RNA (1)...(19): siRNA sense strand
cugaggagguacagaagga

SEQ ID NO: 2615565 - RNA, 19 nt, Homo sapiens
  misc_RNA (1)...(19): siRNA sense strand
gggaaugggagaagaugca

SEQ ID NO: 2615566 - RNA, 19 nt, Homo sapiens
  misc_RNA (1)...(19): siRNA sense strand
cuggcaagauugaugagaa

SEQ ID NO: 2615567 - RNA, 19 nt, Homo sapiens
  misc_RNA (1)...(19): siRNA sense strand
aggcaaacuuccaccaaca

SEQ ID NO: 2615568 - RNA, 19 nt, Homo sapiens
  misc_RNA (1)...(19): siRNA sense strand
caguagaggaugaugcuga

SEQ ID NO: 2615569 - RNA, 19 nt, Homo sapiens
  misc_RNA (1)...(19): siRNA sense strand
aggaugaugcugaagagaa

SEQ ID NO: 2615570 - RNA, 19 nt, Homo sapiens
  misc_RNA (1)...(19): siRNA sense strand
ugauagugaugaugacaca

SEQ ID NO: 2615571 - RNA, 19 nt, Homo sapiens
  misc_RNA (1)...(19): siRNA sense strand
cugaaguagaagaggagga

SEQ ID NO: 2615572 - RNA, 19 nt, Homo sapiens
  misc_RNA (1)...(19): siRNA sense strand
agccagagauagagccaga

SEQ ID NO: 2615573 - RNA, 19 nt, Homo sapiens
  misc_RNA (1)...(19): siRNA sense strand
agaggaagaccgagaggca

SEQ ID NO: 2615574 - RNA, 19 nt, Homo sapiens
  misc_RNA (1)...(19): siRNA sense strand
gagaagaugcaguagagga

SEQ ID NO: 2615575 - RNA, 19 nt, Homo sapiens
  misc_RNA (1)...(19): siRNA sense strand
cccuauugucuuagaguuu

SEQ ID NO: 2615576 - RNA, 19 nt, Homo sapiens
  misc_RNA (1)...(19): siRNA sense strand
ggacgauucaacuggaaaa

SEQ ID NO: 2615577 - RNA, 19 nt, Homo sapiens
  misc_RNA (1)...(19): siRNA sense strand
aagaggaagaggaagaaga

SEQ ID NO: 2615578 - RNA, 19 nt, Homo sapiens
  misc_RNA (1)...(19): siRNA sense strand
ccaagaacugggaagauga

SEQ ID NO: 2615579 - RNA, 19 nt, Homo sapiens
  misc_RNA (1)...(19): siRNA sense strand
acggagaaugcgacagcaa

SEQ ID NO: 2615580 - RNA, 19 nt, Homo sapiens
  misc_RNA (1)...(19): siRNA sense strand
cgauucaacuggaaaacaa

SEQ ID NO: 2615581 - RNA, 19 nt, Homo sapiens
  misc_RNA (1)...(19): siRNA sense strand
auuggaagcuugucggauu

SEQ ID NO: 2615582 - RNA, 19 nt, Homo sapiens
  misc_RNA (1)...(19): siRNA sense strand
uggcaagauugaugagaag

SEQ ID NO: 2615583 - RNA, 19 nt, Homo sapiens
  misc_RNA (1)...(19): siRNA sense strand
ugaacugaggaaagaacaa

SEQ ID NO: 2615584 - RNA, 19 nt, Homo sapiens
  misc_RNA (1)...(19): siRNA sense strand
cuucaaacccugaggaggu

SEQ ID NO: 2615585 - RNA, 19 nt, Homo sapiens
  misc_RNA (1)...(19): siRNA sense strand
augagaagccagagaccuu

SEQ ID NO: 2615586 - RNA, 19 nt, Homo sapiens
  misc_RNA (1)...(19): siRNA sense strand
agcagagauuccagaacua

SEQ ID NO: 2615587 - RNA, 19 nt, Homo sapiens
  misc_RNA (1)...(19): siRNA sense strand
uuaucaagacuguagcaaa

SEQ ID NO: 2615588 - RNA, 19 nt, Homo sapiens
  misc_RNA (1)...(19): siRNA sense strand
gagaaggagaagaauuaga

SEQ ID NO: 2615589 - RNA, 19 nt, Homo sapiens
  misc_RNA (1)...(19): siRNA sense strand
aagaugcaguagaggauga

SEQ ID NO: 2615590 - RNA, 19 nt, Homo sapiens
  misc_RNA (1)...(19): siRNA sense strand
cagagauuccagaacuaaa

SEQ ID NO: 2615591 - RNA, 19 nt, Homo sapiens
  misc_RNA (1)...(19): siRNA sense strand
augaaaggaggaagcaaau

SEQ ID NO: 2615592 - RNA, 19 nt, Homo sapiens
  misc_RNA (1)...(19): siRNA sense strand
gaccagaggaagaccgaga

SEQ ID NO: 2615593 - RNA, 19 nt, Homo sapiens
  misc_RNA (1)...(19): siRNA sense strand
ugagauuaccuguggacga

SEQ ID NO: 2615594 - RNA, 19 nt, Homo sapiens
  misc_RNA (1)...(19): siRNA sense strand
agaaagaaaaggaggagca

SEQ ID NO: 2615595 - RNA, 19 nt, Homo sapiens
  misc_RNA (1)...(19): siRNA sense strand
aggagaagcuagaggagga

SEQ ID NO: 2615596 - RNA, 19 nt, Homo sapiens
  misc_RNA (1)...(19): siRNA sense strand
agccaaagccugaggaaaa

SEQ ID NO: 2615597 - RNA, 19 nt, Homo sapiens
  misc_RNA (1)...(19): siRNA sense strand
agauaaggagagucagaaa

SEQ ID NO: 2615598 - RNA, 19 nt, Homo sapiens
  misc_RNA (1)...(19): siRNA sense strand
agccagaagaggaggagaa

SEQ ID NO: 2615599 - RNA, 19 nt, Homo sapiens
  misc_RNA (1)...(19): siRNA sense strand
aggaagagccaaagccuga

SEQ ID NO: 2615600 - RNA, 19 nt, Homo sapiens
  misc_RNA (1)...(19): siRNA sense strand
agcuagaggaggaggccaa

SEQ ID NO: 2615601 - RNA, 19 nt, Homo sapiens
  misc_RNA (1)...(19): siRNA sense strand
agcaugaggaagagccaaa

SEQ ID NO: 2615602 - RNA, 19 nt, Homo sapiens
  misc_RNA (1)...(19): siRNA sense strand
aggaaaagccagaagagga

SEQ ID NO: 2615603 - RNA, 19 nt, Homo sapiens
  misc_RNA (1)...(19): siRNA sense strand
aaggaaaaccagaaaauga

SEQ ID NO: 2615604 - RNA, 19 nt, Homo sapiens
  misc_RNA (1)...(19): siRNA sense strand
ggccaaagcaaaaggaacu

SEQ ID NO: 2615605 - RNA, 19 nt, Homo sapiens
  misc_RNA (1)...(19): siRNA sense strand
aagaggaggagaagcuaga

SEQ ID NO: 2615606 - RNA, 19 nt, Homo sapiens
  misc_RNA (1)...(19): siRNA sense strand
acgaaagaauacauggaga

SEQ ID NO: 2615607 - RNA, 19 nt, Homo sapiens
  misc_RNA (1)...(19): siRNA sense strand
cuguaauccuguugaucuu

SEQ ID NO: 2615608 - RNA, 19 nt, Homo sapiens
  misc_RNA (1)...(19): siRNA sense strand
cgaaagaauacauggagag

SEQ ID NO: 2615609 - RNA, 19 nt, Homo sapiens
  misc_RNA (1)...(19): siRNA sense strand
ugaacaauuguguaggaga

SEQ ID NO: 2615610 - RNA, 19 nt, Homo sapiens
  misc_RNA (1)...(19): siRNA sense strand
acgacgagacggagaucga

SEQ ID NO: 2615611 - RNA, 19 nt, Homo sapiens
  misc_RNA (1)...(19): siRNA sense strand
cuucaaaagcaauggaaua

SEQ ID NO: 2615612 - RNA, 19 nt, Homo sapiens
  misc_RNA (1)...(19): siRNA sense strand
ggggcaaggcggaagucaa

SEQ ID NO: 2615613 - RNA, 19 nt, Homo sapiens
  misc_RNA (1)...(19): siRNA sense strand
aggaugaaauugaacgaga

SEQ ID NO: 2615614 - RNA, 19 nt, Homo sapiens
  misc_RNA (1)...(19): siRNA sense strand
acgagaagcagaagcgaga

SEQ ID NO: 2615615 - RNA, 19 nt, Homo sapiens
  misc_RNA (1)...(19): siRNA sense strand
aaggaugaaacuagaacaa

SEQ ID NO: 2615616 - RNA, 19 nt, Homo sapiens
  misc_RNA (1)...(19): siRNA sense strand
aagcuagagaggaggaaga

SEQ ID NO: 2615617 - RNA, 19 nt, Homo sapiens
  misc_RNA (1)...(19): siRNA sense strand
acaaggagcgcgugcggaa

SEQ ID NO: 2615618 - RNA, 19 nt, Homo sapiens
  misc_RNA (1)...(19): siRNA sense strand
agcgagaggaggaggagaa

SEQ ID NO: 2615619 - RNA, 19 nt, Homo sapiens
  misc_RNA (1)...(19): siRNA sense strand
uggaggaagaacuggagaa

SEQ ID NO: 2615620 - RNA, 19 nt, Homo sapiens
  misc_RNA (1)...(19): siRNA sense strand
agcgaauacuggaagagaa

SEQ ID NO: 2615621 - RNA, 19 nt, Homo sapiens
  misc_RNA (1)...(19): siRNA sense strand
agaaagauucaugaggaaa

SEQ ID NO: 2615622 - RNA, 19 nt, Homo sapiens
  misc_RNA (1)...(19): siRNA sense strand
gagaaaaggaaggaugaaa

SEQ ID NO: 2615623 - RNA, 19 nt, Homo sapiens
  misc_RNA (1)...(19): siRNA sense strand
agaaaaggaaggaugaaau

SEQ ID NO: 2615624 - RNA, 19 nt, Homo sapiens
  misc_RNA (1)...(19): siRNA sense strand
aaagaaagauucaugagga

SEQ ID NO: 2615625 - RNA, 19 nt, Homo sapiens
  misc_RNA (1)...(19): siRNA sense strand
agaagaauugguagcaaaa

SEQ ID NO: 2615626 - RNA, 19 nt, Homo sapiens
  misc_RNA (1)...(19): siRNA sense strand
agcacgaagaguagaagaa

SEQ ID NO: 2615627 - RNA, 19 nt, Homo sapiens
  misc_RNA (1)...(19): siRNA sense strand
aggagaagaaagcggaguu

SEQ ID NO: 2615628 - RNA, 19 nt, Homo sapiens
  misc_RNA (1)...(19): siRNA sense strand
aagcggaguucgagcggca

SEQ ID NO: 2615629 - RNA, 19 nt, Homo sapiens
  misc_RNA (1)...(19): siRNA sense strand
aguugagaauuguugaaga

SEQ ID NO: 2615630 - RNA, 19 nt, Homo sapiens
  misc_RNA (1)...(19): siRNA sense strand
acaagaacgacaacgucaa

SEQ ID NO: 2615631 - RNA, 19 nt, Homo sapiens
  misc_RNA (1)...(19): siRNA sense strand
uugcagaagcacaagccaa

SEQ ID NO: 2615632 - RNA, 19 nt, Homo sapiens
  misc_RNA (1)...(19): siRNA sense strand
acgucaacagaaagaagaa

SEQ ID NO: 2615633 - RNA, 19 nt, Homo sapiens
  misc_RNA (1)...(19): siRNA sense strand
cgaggaagaaacagcacga

SEQ ID NO: 2615634 - RNA, 19 nt, Homo sapiens
  misc_RNA (1)...(19): siRNA sense strand
acuagaacaagaacgacaa

SEQ ID NO: 2615635 - RNA, 19 nt, Homo sapiens
  misc_RNA (1)...(19): siRNA sense strand
gcuuggaguuggaaggaaa

SEQ ID NO: 2615636 - RNA, 19 nt, Homo sapiens
  misc_RNA (1)...(19): siRNA sense strand
aggaaagaguuauggguuu

SEQ ID NO: 2615637 - RNA, 19 nt, Homo sapiens
  misc_RNA (1)...(19): siRNA sense strand
gggaaauccaagagauauu

SEQ ID NO: 2615638 - RNA, 19 nt, Homo sapiens
  misc_RNA (1)...(19): siRNA sense strand
aaugauugcuggagggaau

SEQ ID NO: 2615639 - RNA, 19 nt, Homo sapiens
  misc_RNA (1)...(19): siRNA sense strand
cuggaagaguauugggcaa

SEQ ID NO: 2615640 - RNA, 19 nt, Homo sapiens
  misc_RNA (1)...(19): siRNA sense strand
cggcagcaauugaggaaga

SEQ ID NO: 2615641 - RNA, 19 nt, Homo sapiens
  misc_RNA (1)...(19): siRNA sense strand
aagggaaauccaagagaua

SEQ ID NO: 2615642 - RNA, 19 nt, Homo sapiens
  misc_RNA (1)...(19): siRNA sense strand
agccuaaauuugagaagaa

SEQ ID NO: 2615643 - RNA, 19 nt, Homo sapiens
  misc_RNA (1)...(19): siRNA sense strand
caacagaggauuuggcuga

SEQ ID NO: 2615644 - RNA, 19 nt, Homo sapiens
  misc_RNA (1)...(19): siRNA sense strand
agaagguacuuguggaaaa

SEQ ID NO: 2615645 - RNA, 19 nt, Homo sapiens
  misc_RNA (1)...(19): siRNA sense strand
agaaugaagaccugaggaa

SEQ ID NO: 2615646 - RNA, 19 nt, Homo sapiens
  misc_RNA (1)...(19): siRNA sense strand
augaaagugcugaggagaa

SEQ ID NO: 2615647 - RNA, 19 nt, Homo sapiens
  misc_RNA (1)...(19): siRNA sense strand
ggguaaaccaggugaaaug

SEQ ID NO: 2615648 - RNA, 19 nt, Homo sapiens
  misc_RNA (1)...(19): siRNA sense strand
cuggauaaagaaagagaau

SEQ ID NO: 2615649 - RNA, 19 nt, Homo sapiens
  misc_RNA (1)...(19): siRNA sense strand
caauugaggaagaaagaga

SEQ ID NO: 2615650 - RNA, 19 nt, Homo sapiens
  misc_RNA (1)...(19): siRNA sense strand
gugcugaggagaaugguaa

SEQ ID NO: 2615651 - RNA, 19 nt, Homo sapiens
  misc_RNA (1)...(19): siRNA sense strand
gcagaagguacuuguggaa

SEQ ID NO: 2615652 - RNA, 19 nt, Homo sapiens
  misc_RNA (1)...(19): siRNA sense strand
gggacagaaacgacacaaa

SEQ ID NO: 2615653 - RNA, 19 nt, Homo sapiens
  misc_RNA (1)...(19): siRNA sense strand
acaaauugacucuggaaga

SEQ ID NO: 2615654 - RNA, 19 nt, Homo sapiens
  misc_RNA (1)...(19): siRNA sense strand
aggacuagacaaucagaaa

SEQ ID NO: 2615655 - RNA, 19 nt, Homo sapiens
  misc_RNA (1)...(19): siRNA sense strand
agaccugaggaaagaguua

SEQ ID NO: 2615656 - RNA, 19 nt, Homo sapiens
  misc_RNA (1)...(19): siRNA sense strand
gagacuaaacgguggcaga

SEQ ID NO: 2615657 - RNA, 19 nt, Homo sapiens
  misc_RNA (1)...(19): siRNA sense strand
uggcugagcuuguugggua

SEQ ID NO: 2615658 - RNA, 19 nt, Homo sapiens
  misc_RNA (1)...(19): siRNA sense strand
cagacuaacaagagagacu

SEQ ID NO: 2615659 - RNA, 19 nt, Homo sapiens
  misc_RNA (1)...(19): siRNA sense strand
guuaaucugaagaggacaa

SEQ ID NO: 2615660 - RNA, 19 nt, Homo sapiens
  misc_RNA (1)...(19): siRNA sense strand
uccuagaaauguugaagaa

SEQ ID NO: 2615661 - RNA, 19 nt, Homo sapiens
  misc_RNA (1)...(19): siRNA sense strand
ucggaggagucaagaaaga

SEQ ID NO: 2615662 - RNA, 19 nt, Homo sapiens
  misc_RNA (1)...(19): siRNA sense strand
gaagaauuucggagaggau

SEQ ID NO: 2615663 - RNA, 19 nt, Homo sapiens
  misc_RNA (1)...(19): siRNA sense strand
aagauggacaacugggaaa

SEQ ID NO: 2615664 - RNA, 19 nt, Homo sapiens
  misc_RNA (1)...(19): siRNA sense strand
cccaagaagcuuuagaaau

SEQ ID NO: 2615665 - RNA, 19 nt, Homo sapiens
  misc_RNA (1)...(19): siRNA sense strand
cauuggaagacuugaaaga

SEQ ID NO: 2615666 - RNA, 19 nt, Homo sapiens
  misc_RNA (1)...(19): siRNA sense strand
uggaaaaccauuugaguau

SEQ ID NO: 2615667 - RNA, 19 nt, Homo sapiens
  misc_RNA (1)...(19): siRNA sense strand
gggaaaugguggaacacgu

SEQ ID NO: 2615668 - RNA, 19 nt, Homo sapiens
  misc_RNA (1)...(19): siRNA sense strand
agaaacaucuucagggagu

SEQ ID NO: 2615669 - RNA, 19 nt, Homo sapiens
  misc_RNA (1)...(19): siRNA sense strand
gguuucauuuaguggagaa

SEQ ID NO: 2615670 - RNA, 19 nt, Homo sapiens
  misc_RNA (1)...(19): siRNA sense strand
cugaaugaagggacuguaa

SEQ ID NO: 2615671 - RNA, 19 nt, Homo sapiens
  misc_RNA (1)...(19): siRNA sense strand
ucuaacagucagaaggaau

SEQ ID NO: 2615672 - RNA, 19 nt, Homo sapiens
  misc_RNA (1)...(19): siRNA sense strand
aauggaaacaguugaagaa

SEQ ID NO: 2615673 - RNA, 19 nt, Homo sapiens
  misc_RNA (1)...(19): siRNA sense strand
ggaugaaagugcugaggag

SEQ ID NO: 2615674 - RNA, 19 nt, Homo sapiens
  misc_RNA (1)...(19): siRNA sense strand
aagaagcugcacaggguaa

SEQ ID NO: 2615675 - RNA, 19 nt, Homo sapiens
  misc_RNA (1)...(19): siRNA sense strand
acugggaaaugguggaaca

SEQ ID NO: 2615676 - RNA, 19 nt, Homo sapiens
  misc_RNA (1)...(19): siRNA sense strand
aggugauaacuuugaggaa

SEQ ID NO: 2615677 - RNA, 19 nt, Homo sapiens
  misc_RNA (1)...(19): siRNA sense strand
cauuugaguaugacaacua

SEQ ID NO: 2615678 - RNA, 19 nt, Homo sapiens
  misc_RNA (1)...(19): siRNA sense strand
cuuguuggguauagaguga

SEQ ID NO: 2615679 - RNA, 19 nt, Homo sapiens
  misc_RNA (1)...(19): siRNA sense strand
aaacgguggcagagcacaa

SEQ ID NO: 2615680 - RNA, 19 nt, Homo sapiens
  misc_RNA (1)...(19): siRNA sense strand
uugaaggacuagacaauca

SEQ ID NO: 2615681 - RNA, 19 nt, Homo sapiens
  misc_RNA (1)...(19): siRNA sense strand
aggaagaaagagagucuga

SEQ ID NO: 2615682 - RNA, 19 nt, Homo sapiens
  misc_RNA (1)...(19): siRNA sense strand
agaauuucggagaggauuu

SEQ ID NO: 2615683 - RNA, 19 nt, Homo sapiens
  misc_RNA (1)...(19): siRNA sense strand
ggaccaaggagcagagcac

SEQ ID NO: 2615684 - RNA, 19 nt, Homo sapiens
  misc_RNA (1)...(19): siRNA sense strand
cgucauauucagucacuuu

SEQ ID NO: 2615685 - RNA, 19 nt, Homo sapiens
  misc_RNA (1)...(19): siRNA sense strand
gccuaaauuugagaagaaa

SEQ ID NO: 2615686 - RNA, 19 nt, Homo sapiens
  misc_RNA (1)...(19): siRNA sense strand
gaggaaagaguuauggguu

SEQ ID NO: 2615687 - RNA, 19 nt, Homo sapiens
  misc_RNA (1)...(19): siRNA sense strand
cguuaugaaccaggauaua

SEQ ID NO: 2615688 - RNA, 19 nt, Homo sapiens
  misc_RNA (1)...(19): siRNA sense strand
caauggaaacaguugaaga

SEQ ID NO: 2615689 - RNA, 19 nt, Homo sapiens
  misc_RNA (1)...(19): siRNA sense strand
ccggagaagcccacagcau

SEQ ID NO: 2615690 - RNA, 19 nt, Homo sapiens
  misc_RNA (1)...(19): siRNA sense strand
ccucagaaaaggaguuaau

SEQ ID NO: 2615691 - RNA, 19 nt, Homo sapiens
  misc_RNA (1)...(19): siRNA sense strand
gaaaagaagaacuacagaa

SEQ ID NO: 2615692 - RNA, 19 nt, Homo sapiens
  misc_RNA (1)...(19): siRNA sense strand
cuggauuacuaacaugaua

SEQ ID NO: 2615693 - RNA, 19 nt, Homo sapiens
  misc_RNA (1)...(19): siRNA sense strand
guucaagcucuccuagaaa

SEQ ID NO: 2615694 - RNA, 19 nt, Homo sapiens
  misc_RNA (1)...(19): siRNA sense strand
ccgaauuagaaaucagaau

SEQ ID NO: 2615695 - RNA, 19 nt, Homo sapiens
  misc_RNA (1)...(19): siRNA sense strand
agucggucaaggagaauaa

SEQ ID NO: 2615696 - RNA, 19 nt, Homo sapiens
  misc_RNA (1)...(19): siRNA sense strand
gcgacaagucagacccgaa

SEQ ID NO: 2615697 - RNA, 19 nt, Homo sapiens
  misc_RNA (1)...(19): siRNA sense strand
cggacgaggaccaugccua

SEQ ID NO: 2615698 - RNA, 19 nt, Homo sapiens
  misc_RNA (1)...(19): siRNA sense strand
uggaauacuaugagaggga

SEQ ID NO: 2615699 - RNA, 19 nt, Homo sapiens
  misc_RNA (1)...(19): siRNA sense strand
gaauacuaugagagggauu

SEQ ID NO: 2615700 - RNA, 19 nt, Homo sapiens
  misc_RNA (1)...(19): siRNA sense strand
ccgaggacaccgagagcuu

SEQ ID NO: 2615701 - RNA, 19 nt, Homo sapiens
  misc_RNA (1)...(19): siRNA sense strand
guaugcaguaagagaagaa

SEQ ID NO: 2615702 - RNA, 19 nt, Homo sapiens
  misc_RNA (1)...(19): siRNA sense strand
aagcaauggaucuggugaa

SEQ ID NO: 2615703 - RNA, 19 nt, Homo sapiens
  misc_RNA (1)...(19): siRNA sense strand
acucuuuacuugaacgaga

SEQ ID NO: 2615704 - RNA, 19 nt, Homo sapiens
  misc_RNA (1)...(19): siRNA sense strand
ugauguaugcaguaagaga

SEQ ID NO: 2615705 - RNA, 19 nt, Homo sapiens
  misc_RNA (1)...(19): siRNA sense strand
caguuaacaccuaugaaca

SEQ ID NO: 2615706 - RNA, 19 nt, Homo sapiens
  misc_RNA (1)...(19): siRNA sense strand
caguaagagaagaagugga

SEQ ID NO: 2615707 - RNA, 19 nt, Homo sapiens
  misc_RNA (1)...(19): siRNA sense strand
aguggaaguuuuaaaggaa

SEQ ID NO: 2615708 - RNA, 19 nt, Homo sapiens
  misc_RNA (1)...(19): siRNA sense strand
ggggauugcauuagacaca

SEQ ID NO: 2615709 - RNA, 19 nt, Homo sapiens
  misc_RNA (1)...(19): siRNA sense strand
acacguuaaaggaaucaaa

SEQ ID NO: 2615710 - RNA, 19 nt, Homo sapiens
  misc_RNA (1)...(19): siRNA sense strand
uggaauacuaugagaggga

SEQ ID NO: 2615711 - RNA, 19 nt, Homo sapiens
  misc_RNA (1)...(19): siRNA sense strand
gaauacuaugagagggauu

SEQ ID NO: 2615712 - RNA, 19 nt, Homo sapiens
  misc_RNA (1)...(19): siRNA sense strand
ccgaggacaccgagagcuu

SEQ ID NO: 2615713 - RNA, 19 nt, Homo sapiens
  misc_RNA (1)...(19): siRNA sense strand
guaugcaguaagagaagaa

SEQ ID NO: 2615714 - RNA, 19 nt, Homo sapiens
  misc_RNA (1)...(19): siRNA sense strand
aagcaauggaucuggugaa

SEQ ID NO: 2615715 - RNA, 19 nt, Homo sapiens
  misc_RNA (1)...(19): siRNA sense strand
acucuuuacuugaacgaga

SEQ ID NO: 2615716 - RNA, 19 nt, Homo sapiens
  misc_RNA (1)...(19): siRNA sense strand
ugauguaugcaguaagaga

SEQ ID NO: 2615717 - RNA, 19 nt, Homo sapiens
  misc_RNA (1)...(19): siRNA sense strand
caguuaacaccuaugaaca

SEQ ID NO: 2615718 - RNA, 19 nt, Homo sapiens
  misc_RNA (1)...(19): siRNA sense strand
caguaagagaagaagugga

SEQ ID NO: 2615719 - RNA, 19 nt, Homo sapiens
  misc_RNA (1)...(19): siRNA sense strand
aguggaaguuuuaaaggaa

SEQ ID NO: 2615720 - RNA, 19 nt, Homo sapiens
  misc_RNA (1)...(19): siRNA sense strand
ggggauugcauuagacaca

SEQ ID NO: 2615721 - RNA, 19 nt, Homo sapiens
  misc_RNA (1)...(19): siRNA sense strand
acacguuaaaggaaucaaa

SEQ ID NO: 2615722 - RNA, 19 nt, Homo sapiens
  misc_RNA (1)...(19): siRNA sense strand
ccgaaagaugaaugagaaa

SEQ ID NO: 2615723 - RNA, 19 nt, Homo sapiens
  misc_RNA (1)...(19): siRNA sense strand
agauauacaagcaggguaa

SEQ ID NO: 2615724 - RNA, 19 nt, Homo sapiens
  misc_RNA (1)...(19): siRNA sense strand
aggaaggagaugcgagaaa

SEQ ID NO: 2615725 - RNA, 19 nt, Homo sapiens
  misc_RNA (1)...(19): siRNA sense strand
gaguuauaucguugggaaa

SEQ ID NO: 2615726 - RNA, 19 nt, Homo sapiens
  misc_RNA (1)...(19): siRNA sense strand
uggacaaagggaugaguua

SEQ ID NO: 2615727 - RNA, 19 nt, Homo sapiens
  misc_RNA (1)...(19): siRNA sense strand
gggaaagacuggagggacc

SEQ ID NO: 2615728 - RNA, 19 nt, Homo sapiens
  misc_RNA (1)...(19): siRNA sense strand
cguccacaucaaaggaaua

SEQ ID NO: 2615729 - RNA, 19 nt, Homo sapiens
  misc_RNA (1)...(19): siRNA sense strand
caguauuaaugaagaucga

SEQ ID NO: 2615730 - RNA, 19 nt, Homo sapiens
  misc_RNA (1)...(19): siRNA sense strand
aauacuuccucaagaacaa

SEQ ID NO: 2615731 - RNA, 19 nt, Homo sapiens
  misc_RNA (1)...(19): siRNA sense strand
gaagcuuacuggauggaga

SEQ ID NO: 2615732 - RNA, 19 nt, Homo sapiens
  misc_RNA (1)...(19): siRNA sense strand
ccuuggagcagaugaguga

SEQ ID NO: 2615733 - RNA, 19 nt, Homo sapiens
  misc_RNA (1)...(19): siRNA sense strand
cuuacuggauggagaggau

SEQ ID NO: 2615734 - RNA, 19 nt, Homo sapiens
  misc_RNA (1)...(19): siRNA sense strand
ggauuugacccuaaagcau

SEQ ID NO: 2615735 - RNA, 19 nt, Homo sapiens
  misc_RNA (1)...(19): siRNA sense strand
aaugauaagcggaggccuu

SEQ ID NO: 2615736 - RNA, 19 nt, Homo sapiens
  misc_RNA (1)...(19): siRNA sense strand
ugcagaaaggccagauaua

SEQ ID NO: 2615737 - RNA, 19 nt, Homo sapiens
  misc_RNA (1)...(19): siRNA sense strand
cauuauauccagcugggaa

SEQ ID NO: 2615738 - RNA, 19 nt, Homo sapiens
  misc_RNA (1)...(19): siRNA sense strand
aguaugaguaugacccaaa

SEQ ID NO: 2615739 - RNA, 19 nt, Homo sapiens
  misc_RNA (1)...(19): siRNA sense strand
gugucuuacucugggauaa

SEQ ID NO: 2615740 - RNA, 19 nt, Homo sapiens
  misc_RNA (1)...(19): siRNA sense strand
acauugaaaucuauggcuu

SEQ ID NO: 2615741 - RNA, 19 nt, Homo sapiens
  misc_RNA (1)...(19): siRNA sense strand
aaucaggaaguaugaguau

SEQ ID NO: 2615742 - RNA, 19 nt, Homo sapiens
  misc_RNA (1)...(19): siRNA sense strand
ugaguuauaucguugggaa

SEQ ID NO: 2615743 - RNA, 19 nt, Homo sapiens
  misc_RNA (1)...(19): siRNA sense strand
aaaggaaggagaugcgaga

SEQ ID NO: 2615744 - RNA, 19 nt, Homo sapiens
  misc_RNA (1)...(19): siRNA sense strand
aagcauggcuggaggacug

SEQ ID NO: 2615745 - RNA, 19 nt, Homo sapiens
  misc_RNA (1)...(19): siRNA sense strand
cagauauacaagcagggua

SEQ ID NO: 2615746 - RNA, 19 nt, Homo sapiens
  misc_RNA (1)...(19): siRNA sense strand
ggaaacacgaugaagcagu

SEQ ID NO: 2615747 - RNA, 19 nt, Homo sapiens
  misc_RNA (1)...(19): siRNA sense strand
ugacuggcuuauuggaaca

SEQ ID NO: 2615748 - RNA, 19 nt, Homo sapiens
  misc_RNA (1)...(19): siRNA sense strand
gcuuauuggaacagaugca

SEQ ID NO: 2615749 - RNA, 19 nt, Homo sapiens
  misc_RNA (1)...(19): siRNA sense strand
acagagaugcugagucaca

SEQ ID NO: 2615750 - RNA, 19 nt, Homo sapiens
  misc_RNA (1)...(19): siRNA sense strand
guuauaucguugggaaaga

SEQ ID NO: 2615751 - RNA, 19 nt, Homo sapiens
  misc_RNA (1)...(19): siRNA sense strand
caucaaugaacaccgguau

SEQ ID NO: 2615752 - RNA, 19 nt, Homo sapiens
  misc_RNA (1)...(19): siRNA sense strand
ggagcagaugagugacuuu

SEQ ID NO: 2615753 - RNA, 19 nt, Homo sapiens
  misc_RNA (1)...(19): siRNA sense strand
gagcaauacauucaaacca

SEQ ID NO: 2615754 - RNA, 19 nt, Homo sapiens
  misc_RNA (1)...(19): siRNA sense strand
gcgcaguguuggccaaacu

SEQ ID NO: 2615755 - RNA, 19 nt, Homo sapiens
  misc_RNA (1)...(19): siRNA sense strand
ugagugacuuuuacggaaa

SEQ ID NO: 2615756 - RNA, 19 nt, Homo sapiens
  misc_RNA (1)...(19): siRNA sense strand
gagcaauugaagcagacau

SEQ ID NO: 2615757 - RNA, 19 nt, Homo sapiens
  misc_RNA (1)...(19): siRNA sense strand
acuuuaugucuguggcaaa

SEQ ID NO: 2615758 - RNA, 19 nt, Homo sapiens
  misc_RNA (1)...(19): siRNA sense strand
cugugaacacuguggauuu

SEQ ID NO: 2615759 - RNA, 19 nt, Homo sapiens
  misc_RNA (1)...(19): siRNA sense strand
aaucaaauguucugcacca

SEQ ID NO: 2615760 - RNA, 19 nt, Homo sapiens
  misc_RNA (1)...(19): siRNA sense strand
uuauguugccugagggaga

SEQ ID NO: 2615761 - RNA, 19 nt, Homo sapiens
  misc_RNA (1)...(19): siRNA sense strand
cuuaaaacaugcagaagca

SEQ ID NO: 2615762 - RNA, 19 nt, Homo sapiens
  misc_RNA (1)...(19): siRNA sense strand
aacucuaggaagugggaau

SEQ ID NO: 2615763 - RNA, 19 nt, Homo sapiens
  misc_RNA (1)...(19): siRNA sense strand
aauagagaaacuuggauca

SEQ ID NO: 2615764 - RNA, 19 nt, Homo sapiens
  misc_RNA (1)...(19): siRNA sense strand
guucaggguuuaugcccau

SEQ ID NO: 2615765 - RNA, 19 nt, Homo sapiens
  misc_RNA (1)...(19): siRNA sense strand
ccgaggaagagcuggaaga

SEQ ID NO: 2615766 - RNA, 19 nt, Homo sapiens
  misc_RNA (1)...(19): siRNA sense strand
ccuauggagaagagaauga

SEQ ID NO: 2615767 - RNA, 19 nt, Homo sapiens
  misc_RNA (1)...(19): siRNA sense strand
cuggaagacugguuggaca

SEQ ID NO: 2615768 - RNA, 19 nt, Homo sapiens
  misc_RNA (1)...(19): siRNA sense strand
ggucaauaaugaaagugga

SEQ ID NO: 2615769 - RNA, 19 nt, Homo sapiens
  misc_RNA (1)...(19): siRNA sense strand
augcagagaccuauggaga

SEQ ID NO: 2615770 - RNA, 19 nt, Homo sapiens
  misc_RNA (1)...(19): siRNA sense strand
gaccuauggagaagagaau

SEQ ID NO: 2615771 - RNA, 19 nt, Homo sapiens
  misc_RNA (1)...(19): siRNA sense strand
aggaagagcuggaagacug

SEQ ID NO: 2615772 - RNA, 19 nt, Homo sapiens
  misc_RNA (1)...(19): siRNA sense strand
aggugaaaccaaagagaac

SEQ ID NO: 2615773 - RNA, 19 nt, Homo sapiens
  misc_RNA (1)...(19): siRNA sense strand
cugaugauggcaagggauu

SEQ ID NO: 2615774 - RNA, 19 nt, Homo sapiens
  misc_RNA (1)...(19): siRNA sense strand
ggagagucacagaggggaa

SEQ ID NO: 2615775 - RNA, 19 nt, Homo sapiens
  misc_RNA (1)...(19): siRNA sense strand
uggagaagagaaugaugaa

SEQ ID NO: 2615776 - RNA, 19 nt, Homo sapiens
  misc_RNA (1)...(19): siRNA sense strand
uggcaagggauuagggaug

SEQ ID NO: 2615777 - RNA, 19 nt, Homo sapiens
  misc_RNA (1)...(19): siRNA sense strand
cgguugaagaugacagcga

SEQ ID NO: 2615778 - RNA, 19 nt, Homo sapiens
  misc_RNA (1)...(19): siRNA sense strand
agaccuauggagaagagaa

SEQ ID NO: 2615779 - RNA, 19 nt, Homo sapiens
  misc_RNA (1)...(19): siRNA sense strand
cuauaaaagagggagauaa

SEQ ID NO: 2615780 - RNA, 19 nt, Homo sapiens
  misc_RNA (1)...(19): siRNA sense strand
agagaaugaugaacaggga

SEQ ID NO: 2615781 - RNA, 19 nt, Homo sapiens
  misc_RNA (1)...(19): siRNA sense strand
gggaggugguccaagagga

SEQ ID NO: 2615782 - RNA, 19 nt, Homo sapiens
  misc_RNA (1)...(19): siRNA sense strand
gagaaugaugaacagggaa

SEQ ID NO: 2615783 - RNA, 19 nt, Homo sapiens
  misc_RNA (1)...(19): siRNA sense strand
ccuauaaaagagggagaua

SEQ ID NO: 2615784 - RNA, 19 nt, Homo sapiens
  misc_RNA (1)...(19): siRNA sense strand
ucucuaacugggaucgaua

SEQ ID NO: 2615785 - RNA, 19 nt, Homo sapiens
  misc_RNA (1)...(19): siRNA sense strand
agugaagcuucuuguccaa

SEQ ID NO: 2615786 - RNA, 19 nt, Homo sapiens
  misc_RNA (1)...(19): siRNA sense strand
guuauugguucgagcccuu

SEQ ID NO: 2615787 - RNA, 19 nt, Homo sapiens
  misc_RNA (1)...(19): siRNA sense strand
caucugugacugaagaaaa

SEQ ID NO: 2615788 - RNA, 19 nt, Homo sapiens
  misc_RNA (1)...(19): siRNA sense strand
acagcgaugcagagaccua

SEQ ID NO: 2615789 - RNA, 19 nt, Homo sapiens
  misc_RNA (1)...(19): siRNA sense strand
agagaacugaugauggcaa

SEQ ID NO: 2615790 - RNA, 19 nt, Homo sapiens
  misc_RNA (1)...(19): siRNA sense strand
accugaaauccaaggaaga

SEQ ID NO: 2615791 - RNA, 19 nt, Homo sapiens
  misc_RNA (1)...(19): siRNA sense strand
gguuugcugaggagaaaga

SEQ ID NO: 2615792 - RNA, 19 nt, Homo sapiens
  misc_RNA (1)...(19): siRNA sense strand
ugaugauggcaagggauua

SEQ ID NO: 2615793 - RNA, 19 nt, Homo sapiens
  misc_RNA (1)...(19): siRNA sense strand
aggugguccaagaggaaga

SEQ ID NO: 2615794 - RNA, 19 nt, Homo sapiens
  misc_RNA (1)...(19): siRNA sense strand
gcagaauugcagauggauu

SEQ ID NO: 2615795 - RNA, 19 nt, Homo sapiens
  misc_RNA (1)...(19): siRNA sense strand
aggacaaauugaagaucuu

SEQ ID NO: 2615796 - RNA, 19 nt, Homo sapiens
  misc_RNA (1)...(19): siRNA sense strand
uggaaaugaaagggaauua

SEQ ID NO: 2615797 - RNA, 19 nt, Homo sapiens
  misc_RNA (1)...(19): siRNA sense strand
uugugaugacugugggaaa

SEQ ID NO: 2615798 - RNA, 19 nt, Homo sapiens
  misc_RNA (1)...(19): siRNA sense strand
guuuggaaaugaaagggaa

SEQ ID NO: 2615799 - RNA, 19 nt, Homo sapiens
  misc_RNA (1)...(19): siRNA sense strand
acacaaauguuaacaggca

SEQ ID NO: 2615800 - RNA, 19 nt, Homo sapiens
  misc_RNA (1)...(19): siRNA sense strand
ugucgaguaugcaaggaaa

SEQ ID NO: 2615801 - RNA, 19 nt, Homo sapiens
  misc_RNA (1)...(19): siRNA sense strand
ucugauagaacaugccaaa

SEQ ID NO: 2615802 - RNA, 19 nt, Homo sapiens
  misc_RNA (1)...(19): siRNA sense strand
acaugaaacuaaugaucca

SEQ ID NO: 2615803 - RNA, 19 nt, Homo sapiens
  misc_RNA (1)...(19): siRNA sense strand
augcgauuucugaggauua

SEQ ID NO: 2615804 - RNA, 19 nt, Homo sapiens
  misc_RNA (1)...(19): siRNA sense strand
gcuugaugagguuuggaaa

SEQ ID NO: 2615805 - RNA, 19 nt, Homo sapiens
  misc_RNA (1)...(19): siRNA sense strand
cagaagacuugcauagcca

SEQ ID NO: 2615806 - RNA, 19 nt, Homo sapiens
  misc_RNA (1)...(19): siRNA sense strand
cuagaauauugcaagcauu

SEQ ID NO: 2615807 - RNA, 19 nt, Homo sapiens
  misc_RNA (1)...(19): siRNA sense strand
cuugaugagguuuggaaau

SEQ ID NO: 2615808 - RNA, 19 nt, Homo sapiens
  misc_RNA (1)...(19): siRNA sense strand
ccucuauaaaugugaacuu

SEQ ID NO: 2615809 - RNA, 19 nt, Homo sapiens
  misc_RNA (1)...(19): siRNA sense strand
caauggugaacauggacaa

SEQ ID NO: 2615810 - RNA, 19 nt, Homo sapiens
  misc_RNA (1)...(19): siRNA sense strand
uguagaagugcaugcgauu

SEQ ID NO: 2615811 - RNA, 19 nt, Homo sapiens
  misc_RNA (1)...(19): siRNA sense strand
augaagaaccgccagcuaa

SEQ ID NO: 2615812 - RNA, 19 nt, Homo sapiens
  misc_RNA (1)...(19): siRNA sense strand
gugugaacagugugaugua

SEQ ID NO: 2615813 - RNA, 19 nt, Homo sapiens
  misc_RNA (1)...(19): siRNA sense strand
ccagcuaaacuuuguaaaa

SEQ ID NO: 2615814 - RNA, 19 nt, Homo sapiens
  misc_RNA (1)...(19): siRNA sense strand
cggaguagacuucacacaa

SEQ ID NO: 2615815 - RNA, 19 nt, Homo sapiens
  misc_RNA (1)...(19): siRNA sense strand
cuguagaagugcaugcgau

SEQ ID NO: 2615816 - RNA, 19 nt, Homo sapiens
  misc_RNA (1)...(19): siRNA sense strand
uggccuuuacugagagcua

SEQ ID NO: 2615817 - RNA, 19 nt, Homo sapiens
  misc_RNA (1)...(19): siRNA sense strand
gguaaaugagcaugcaugu

SEQ ID NO: 2615818 - RNA, 19 nt, Homo sapiens
  misc_RNA (1)...(19): siRNA sense strand
gaauauucaacaggacaaa

SEQ ID NO: 2615819 - RNA, 19 nt, Homo sapiens
  misc_RNA (1)...(19): siRNA sense strand
gaggauuaugauauagaga

SEQ ID NO: 2615820 - RNA, 19 nt, Homo sapiens
  misc_RNA (1)...(19): siRNA sense strand
uugcauagccaugugguaa

SEQ ID NO: 2615821 - RNA, 19 nt, Homo sapiens
  misc_RNA (1)...(19): siRNA sense strand
uagcaguggccucuauaaa

SEQ ID NO: 2615822 - RNA, 19 nt, Homo sapiens
  misc_RNA (1)...(19): siRNA sense strand
acuuaaagcagcauaugau

SEQ ID NO: 2615823 - RNA, 19 nt, Homo sapiens
  misc_RNA (1)...(19): siRNA sense strand
ugcauagccaugugguaaa

SEQ ID NO: 2615824 - RNA, 19 nt, Homo sapiens
  misc_RNA (1)...(19): siRNA sense strand
ccaugugguaaaugagcau

SEQ ID NO: 2615825 - RNA, 19 nt, Homo sapiens
  misc_RNA (1)...(19): siRNA sense strand
cagcaaacccaagaggaga

SEQ ID NO: 2615826 - RNA, 19 nt, Homo sapiens
  misc_RNA (1)...(19): siRNA sense strand
uggaauaagcagaauugca

SEQ ID NO: 2615827 - RNA, 19 nt, Homo sapiens
  misc_RNA (1)...(19): siRNA sense strand
gggagaagcugccagggaa

SEQ ID NO: 2615828 - RNA, 19 nt, Homo sapiens
  misc_RNA (1)...(19): siRNA sense strand
agcuggaguucguggacua

SEQ ID NO: 2615829 - RNA, 19 nt, Homo sapiens
  misc_RNA (1)...(19): siRNA sense strand
acacagagauccaccgagu

SEQ ID NO: 2615830 - RNA, 19 nt, Homo sapiens
  misc_RNA (1)...(19): siRNA sense strand
gaguggagccugaggacgu

SEQ ID NO: 2615831 - RNA, 19 nt, Homo sapiens
  misc_RNA (1)...(19): siRNA sense strand
gcucugugacggagaaacu

SEQ ID NO: 2615832 - RNA, 19 nt, Homo sapiens
  misc_RNA (1)...(19): siRNA sense strand
acuaaagauuccagaggag

SEQ ID NO: 2615833 - RNA, 19 nt, Homo sapiens
  misc_RNA (1)...(19): siRNA sense strand
aguuucaggucaucgacaa

SEQ ID NO: 2615834 - RNA, 19 nt, Homo sapiens
  misc_RNA (1)...(19): siRNA sense strand
gcaagcaggugaagccacu

SEQ ID NO: 2615835 - RNA, 19 nt, Homo sapiens
  misc_RNA (1)...(19): siRNA sense strand
aggaggaagaagaggagga

SEQ ID NO: 2615836 - RNA, 19 nt, Homo sapiens
  misc_RNA (1)...(19): siRNA sense strand
aagaagaggaggaugagga

SEQ ID NO: 2615837 - RNA, 19 nt, Homo sapiens
  misc_RNA (1)...(19): siRNA sense strand
aagacagccaggaggaaga

SEQ ID NO: 2615838 - RNA, 19 nt, Homo sapiens
  misc_RNA (1)...(19): siRNA sense strand
aggaagacagccaggagga

SEQ ID NO: 2615839 - RNA, 19 nt, Homo sapiens
  misc_RNA (1)...(19): siRNA sense strand
gcaaauaucuucagagcca

SEQ ID NO: 2615840 - RNA, 19 nt, Homo sapiens
  misc_RNA (1)...(19): siRNA sense strand
cuguagaaguugagacuga

SEQ ID NO: 2615841 - RNA, 19 nt, Homo sapiens
  misc_RNA (1)...(19): siRNA sense strand
cuucagagccagaggacuu

SEQ ID NO: 2615842 - RNA, 19 nt, Homo sapiens
  misc_RNA (1)...(19): siRNA sense strand
gggaggaaaaccagggaaa

SEQ ID NO: 2615843 - RNA, 19 nt, Homo sapiens
  misc_RNA (1)...(19): siRNA sense strand
uggaagacacugagcaaau

SEQ ID NO: 2615844 - RNA, 19 nt, Homo sapiens
  misc_RNA (1)...(19): siRNA sense strand
aauagaagcaaguggaaaa

SEQ ID NO: 2615845 - RNA, 19 nt, Homo sapiens
  misc_RNA (1)...(19): siRNA sense strand
aguugagacugaagaagaa

SEQ ID NO: 2615846 - RNA, 19 nt, Homo sapiens
  misc_RNA (1)...(19): siRNA sense strand
uaaccagagaacagggaaa

SEQ ID NO: 2615847 - RNA, 19 nt, Homo sapiens
  misc_RNA (1)...(19): siRNA sense strand
auaaguauguaguggaaga

SEQ ID NO: 2615848 - RNA, 19 nt, Homo sapiens
  misc_RNA (1)...(19): siRNA sense strand
augaaggagucaagaugua

SEQ ID NO: 2615849 - RNA, 19 nt, Homo sapiens
  misc_RNA (1)...(19): siRNA sense strand
uggaagacuugaaagguga

SEQ ID NO: 2615850 - RNA, 19 nt, Homo sapiens
  misc_RNA (1)...(19): siRNA sense strand
agaagugggcccugaacaa

SEQ ID NO: 2615851 - RNA, 19 nt, Homo sapiens
  misc_RNA (1)...(19): siRNA sense strand
augcaaaguguguaaguau

SEQ ID NO: 2615852 - RNA, 19 nt, Homo sapiens
  misc_RNA (1)...(19): siRNA sense strand
gagagauguuacaggcaca

SEQ ID NO: 2615853 - RNA, 19 nt, Homo sapiens
  misc_RNA (1)...(19): siRNA sense strand
cucuagagcugcauguaaa

SEQ ID NO: 2615854 - RNA, 19 nt, Homo sapiens
  misc_RNA (1)...(19): siRNA sense strand
cagcaacagagaagcacaa

SEQ ID NO: 2615855 - RNA, 19 nt, Homo sapiens
  misc_RNA (1)...(19): siRNA sense strand
aaggacagcaugaggaauu

SEQ ID NO: 2615856 - RNA, 19 nt, Homo sapiens
  misc_RNA (1)...(19): siRNA sense strand
gaaacauaaaggacgggua

SEQ ID NO: 2615857 - RNA, 19 nt, Homo sapiens
  misc_RNA (1)...(19): siRNA sense strand
cauaaaggacggguagaaa

SEQ ID NO: 2615858 - RNA, 19 nt, Homo sapiens
  misc_RNA (1)...(19): siRNA sense strand
ggguagaaauagaagcaag

SEQ ID NO: 2615859 - RNA, 19 nt, Homo sapiens
  misc_RNA (1)...(19): siRNA sense strand
ugccagaaaccaugugaaa

SEQ ID NO: 2615860 - RNA, 19 nt, Homo sapiens
  misc_RNA (1)...(19): siRNA sense strand
ccgcaaugaaagaccacua

SEQ ID NO: 2615861 - RNA, 19 nt, Homo sapiens
  misc_RNA (1)...(19): siRNA sense strand
gagcaaaucaaccgcgaga

SEQ ID NO: 2615862 - RNA, 19 nt, Homo sapiens
  misc_RNA (1)...(19): siRNA sense strand
ggagaaaagccguuuaaau

SEQ ID NO: 2615863 - RNA, 19 nt, Homo sapiens
  misc_RNA (1)...(19): siRNA sense strand
ucaagugcgaugaguguaa

SEQ ID NO: 2615864 - RNA, 19 nt, Homo sapiens
  misc_RNA (1)...(19): siRNA sense strand
caucauuaugccugaagaa

SEQ ID NO: 2615865 - RNA, 19 nt, Homo sapiens
  misc_RNA (1)...(19): siRNA sense strand
agacugaagaagaaucuaa

SEQ ID NO: 2615866 - RNA, 19 nt, Homo sapiens
  misc_RNA (1)...(19): siRNA sense strand
caaggauaaaguuaggaaa

SEQ ID NO: 2615867 - RNA, 19 nt, Homo sapiens
  misc_RNA (1)...(19): siRNA sense strand
acauaaaggacggguagaa

SEQ ID NO: 2615868 - RNA, 19 nt, Homo sapiens
  misc_RNA (1)...(19): siRNA sense strand
ucaacaaaauucugaggaa

SEQ ID NO: 2615869 - RNA, 19 nt, Homo sapiens
  misc_RNA (1)...(19): siRNA sense strand
ugccuuaaauugugagaca

SEQ ID NO: 2615870 - RNA, 19 nt, Homo sapiens
  misc_RNA (1)...(19): siRNA sense strand
cguucuauaccgaaagcaa

SEQ ID NO: 2615871 - RNA, 19 nt, Homo sapiens
  misc_RNA (1)...(19): siRNA sense strand
gguagaaauagaagcaagu

SEQ ID NO: 2615872 - RNA, 19 nt, Homo sapiens
  misc_RNA (1)...(19): siRNA sense strand
aagaauaaccagagaacag

SEQ ID NO: 2615873 - RNA, 19 nt, Homo sapiens
  misc_RNA (1)...(19): siRNA sense strand
uagcaacgggagugagaau

SEQ ID NO: 2615874 - RNA, 19 nt, Homo sapiens
  misc_RNA (1)...(19): siRNA sense strand
aaagagagggagaccuaaa

SEQ ID NO: 2615875 - RNA, 19 nt, Homo sapiens
  misc_RNA (1)...(19): siRNA sense strand
caauugaagcugaaguuga

SEQ ID NO: 2615876 - RNA, 19 nt, Homo sapiens
  misc_RNA (1)...(19): siRNA sense strand
cagaguugcacgugggcau

SEQ ID NO: 2615877 - RNA, 19 nt, Homo sapiens
  misc_RNA (1)...(19): siRNA sense strand
aagaagagcaucaacaaaa

SEQ ID NO: 2615878 - RNA, 19 nt, Homo sapiens
  misc_RNA (1)...(19): siRNA sense strand
aaauagaagcaaguggaaa

SEQ ID NO: 2615879 - RNA, 19 nt, Homo sapiens
  misc_RNA (1)...(19): siRNA sense strand
ggucaaacugugcugaaaa

SEQ ID NO: 2615880 - RNA, 19 nt, Homo sapiens
  misc_RNA (1)...(19): siRNA sense strand
caggcacaggugagaauaa

SEQ ID NO: 2615881 - RNA, 19 nt, Homo sapiens
  misc_RNA (1)...(19): siRNA sense strand
agacuugaaaggugaccaa

SEQ ID NO: 2615882 - RNA, 19 nt, Homo sapiens
  misc_RNA (1)...(19): siRNA sense strand
aauaaagaacccugaagau

SEQ ID NO: 2615883 - RNA, 19 nt, Homo sapiens
  misc_RNA (1)...(19): siRNA sense strand
auaaaggacggguagaaau

SEQ ID NO: 2615884 - RNA, 19 nt, Homo sapiens
  misc_RNA (1)...(19): siRNA sense strand
uuaaauugugagacagcaa

SEQ ID NO: 2615885 - RNA, 19 nt, Homo sapiens
  misc_RNA (1)...(19): siRNA sense strand
cugcaaguauugugggaag

SEQ ID NO: 2615886 - RNA, 19 nt, Homo sapiens
  misc_RNA (1)...(19): siRNA sense strand
caccuugggaugagggaau

SEQ ID NO: 2615887 - RNA, 19 nt, Homo sapiens
  misc_RNA (1)...(19): siRNA sense strand
caacagagaagcacaaaau

SEQ ID NO: 2615888 - RNA, 19 nt, Homo sapiens
  misc_RNA (1)...(19): siRNA sense strand
cuacaaaagagaagcacuu

SEQ ID NO: 2615889 - RNA, 19 nt, Homo sapiens
  misc_RNA (1)...(19): siRNA sense strand
ucauuaugccugaagaaga

SEQ ID NO: 2615890 - RNA, 19 nt, Homo sapiens
  misc_RNA (1)...(19): siRNA sense strand
uuaggaaaccugaggagau

SEQ ID NO: 2615891 - RNA, 19 nt, Homo sapiens
  misc_RNA (1)...(19): siRNA sense strand
acacuguaacuaagggaga

SEQ ID NO: 2615892 - RNA, 19 nt, Homo sapiens
  misc_RNA (1)...(19): siRNA sense strand
cugaagaagagcaucaaca

SEQ ID NO: 2615893 - RNA, 19 nt, Homo sapiens
  misc_RNA (1)...(19): siRNA sense strand
agaagaaaucugagggcag

SEQ ID NO: 2615894 - RNA, 19 nt, Homo sapiens
  misc_RNA (1)...(19): siRNA sense strand
ugucagaugaacaugcuaa

SEQ ID NO: 2615895 - RNA, 19 nt, Homo sapiens
  misc_RNA (1)...(19): siRNA sense strand
aaguugagacugaagaaga

SEQ ID NO: 2615896 - RNA, 19 nt, Homo sapiens
  misc_RNA (1)...(19): siRNA sense strand
gauagcaacgggagugaga

SEQ ID NO: 2615897 - RNA, 19 nt, Homo sapiens
  misc_RNA (1)...(19): siRNA sense strand
cagacagcacacaggagaa

SEQ ID NO: 2615898 - RNA, 19 nt, Homo sapiens
  misc_RNA (1)...(19): siRNA sense strand
agacagcacacaggagaaa

SEQ ID NO: 2615899 - RNA, 19 nt, Homo sapiens
  misc_RNA (1)...(19): siRNA sense strand
cauucugcauacuggcaaa

SEQ ID NO: 2615900 - RNA, 19 nt, Homo sapiens
  misc_RNA (1)...(19): siRNA sense strand
agggagauauggaacguca

SEQ ID NO: 2615901 - RNA, 19 nt, Homo sapiens
  misc_RNA (1)...(19): siRNA sense strand
uggacugaguggacugaau

SEQ ID NO: 2615902 - RNA, 19 nt, Homo sapiens
  misc_RNA (1)...(19): siRNA sense strand
acauauuaaaggacagcau

SEQ ID NO: 2615903 - RNA, 19 nt, Homo sapiens
  misc_RNA (1)...(19): siRNA sense strand
gcaacacaaugaagggcaa

SEQ ID NO: 2615904 - RNA, 19 nt, Homo sapiens
  misc_RNA (1)...(19): siRNA sense strand
aauagaaacuggaacgcua

SEQ ID NO: 2615905 - RNA, 19 nt, Homo sapiens
  misc_RNA (1)...(19): siRNA sense strand
auucggaaguggaggugaa

SEQ ID NO: 2615906 - RNA, 19 nt, Homo sapiens
  misc_RNA (1)...(19): siRNA sense strand
ggaaagggagccagcgaca

SEQ ID NO: 2615907 - RNA, 19 nt, Homo sapiens
  misc_RNA (1)...(19): siRNA sense strand
cggaaguggaggugaaauc

SEQ ID NO: 2615908 - RNA, 19 nt, Homo sapiens
  misc_RNA (1)...(19): siRNA sense strand
aggugaaaucagugguaga

SEQ ID NO: 2615909 - RNA, 19 nt, Homo sapiens
  misc_RNA (1)...(19): siRNA sense strand
acugcaaucuggacggcaa

SEQ ID NO: 2615910 - RNA, 19 nt, Homo sapiens
  misc_RNA (1)...(19): siRNA sense strand
uagaguacgcagugacaau

SEQ ID NO: 2615911 - RNA, 19 nt, Homo sapiens
  misc_RNA (1)...(19): siRNA sense strand
cugcauuggugcugaccca

SEQ ID NO: 2615912 - RNA, 19 nt, Homo sapiens
  misc_RNA (1)...(19): siRNA sense strand
gauuaaugucagaaaugga

SEQ ID NO: 2615913 - RNA, 19 nt, Homo sapiens
  misc_RNA (1)...(19): siRNA sense strand
cagaaauggagacgagauc

SEQ ID NO: 2615914 - RNA, 19 nt, Homo sapiens
  misc_RNA (1)...(19): siRNA sense strand
ugauguauccauaugggua

SEQ ID NO: 2615915 - RNA, 19 nt, Homo sapiens
  misc_RNA (1)...(19): siRNA sense strand
augaaaugcaacacaauga

SEQ ID NO: 2615916 - RNA, 19 nt, Homo sapiens
  misc_RNA (1)...(19): siRNA sense strand
gggcguaugacaacggcau

SEQ ID NO: 2615917 - RNA, 19 nt, Homo sapiens
  misc_RNA (1)...(19): siRNA sense strand
aggaagacgcggucccgaa

SEQ ID NO: 2615918 - RNA, 19 nt, Homo sapiens
  misc_RNA (1)...(19): siRNA sense strand
gggaccaaguuuugaggau

SEQ ID NO: 2615919 - RNA, 19 nt, Homo sapiens
  misc_RNA (1)...(19): siRNA sense strand
ugucagaaauggagacgag

SEQ ID NO: 2615920 - RNA, 19 nt, Homo sapiens
  misc_RNA (1)...(19): siRNA sense strand
gcauuuaaauccuuccuga

SEQ ID NO: 2615921 - RNA, 19 nt, Homo sapiens
  misc_RNA (1)...(19): siRNA sense strand
cuauuuaccacgagaugga

SEQ ID NO: 2615922 - RNA, 19 nt, Homo sapiens
  misc_RNA (1)...(19): siRNA sense strand
ugaggauuaaugucagaaa

SEQ ID NO: 2615923 - RNA, 19 nt, Homo sapiens
  misc_RNA (1)...(19): siRNA sense strand
ccacaguuuaggaggaaau

SEQ ID NO: 2615924 - RNA, 19 nt, Homo sapiens
  misc_RNA (1)...(19): siRNA sense strand
augaaagacuccaguggga

SEQ ID NO: 2615925 - RNA, 19 nt, Homo sapiens
  misc_RNA (1)...(19): siRNA sense strand
gaacuuugcuucugaccga

SEQ ID NO: 2615926 - RNA, 19 nt, Homo sapiens
  misc_RNA (1)...(19): siRNA sense strand
ccaaaaugaaccugaacga

SEQ ID NO: 2615927 - RNA, 19 nt, Homo sapiens
  misc_RNA (1)...(19): siRNA sense strand
cagcaagccuggaugaccu

SEQ ID NO: 2615928 - RNA, 19 nt, Homo sapiens
  misc_RNA (1)...(19): siRNA sense strand
gggauggacauguggagca

SEQ ID NO: 2615929 - RNA, 19 nt, Homo sapiens
  misc_RNA (1)...(19): siRNA sense strand
guucauugucucaggucuu

SEQ ID NO: 2615930 - RNA, 19 nt, Homo sapiens
  misc_RNA (1)...(19): siRNA sense strand
aguucaggcuucaccgaau

SEQ ID NO: 2615931 - RNA, 19 nt, Homo sapiens
  misc_RNA (1)...(19): siRNA sense strand
cagaagaagaaaaggacaa

SEQ ID NO: 2615932 - RNA, 19 nt, Homo sapiens
  misc_RNA (1)...(19): siRNA sense strand
acuacgagggccuggauaa

SEQ ID NO: 2615933 - RNA, 19 nt, Homo sapiens
  misc_RNA (1)...(19): siRNA sense strand
guggaggcucugagggauu

SEQ ID NO: 2615934 - RNA, 19 nt, Homo sapiens
  misc_RNA (1)...(19): siRNA sense strand
cgagacaaggaguggauca

SEQ ID NO: 2615935 - RNA, 19 nt, Homo sapiens
  misc_RNA (1)...(19): siRNA sense strand
uggaggagaugcugcccaa

SEQ ID NO: 2615936 - RNA, 19 nt, Homo sapiens
  misc_RNA (1)...(19): siRNA sense strand
agucaaguuucgagacaag

SEQ ID NO: 2615937 - RNA, 19 nt, Homo sapiens
  misc_RNA (1)...(19): siRNA sense strand
agauguacaaggugcauga

SEQ ID NO: 2615938 - RNA, 19 nt, Homo sapiens
  misc_RNA (1)...(19): siRNA sense strand
ccuuuguaguucuggguaa

SEQ ID NO: 2615939 - RNA, 19 nt, Homo sapiens
  misc_RNA (1)...(19): siRNA sense strand
agacaaagaggauaggcaa

SEQ ID NO: 2615940 - RNA, 19 nt, Homo sapiens
  misc_RNA (1)...(19): siRNA sense strand
gguaacuggcagaaagaau

SEQ ID NO: 2615941 - RNA, 19 nt, Homo sapiens
  misc_RNA (1)...(19): siRNA sense strand
ugaugguggaguugggaaa

SEQ ID NO: 2615942 - RNA, 19 nt, Homo sapiens
  misc_RNA (1)...(19): siRNA sense strand
agaugauacuaaugugaca

SEQ ID NO: 2615943 - RNA, 19 nt, Homo sapiens
  misc_RNA (1)...(19): siRNA sense strand
aggucauucucuuggguga

SEQ ID NO: 2615944 - RNA, 19 nt, Homo sapiens
  misc_RNA (1)...(19): siRNA sense strand
uuucaagagccuuaggaca

SEQ ID NO: 2615945 - RNA, 19 nt, Homo sapiens
  misc_RNA (1)...(19): siRNA sense strand
ccaacaaauuugacuccca

SEQ ID NO: 2615946 - RNA, 19 nt, Homo sapiens
  misc_RNA (1)...(19): siRNA sense strand
ccauagggguagaguucuu

SEQ ID NO: 2615947 - RNA, 19 nt, Homo sapiens
  misc_RNA (1)...(19): siRNA sense strand
ugugaaggacccugagcau

SEQ ID NO: 2615948 - RNA, 19 nt, Homo sapiens
  misc_RNA (1)...(19): siRNA sense strand
agguagacaaagaggauag

SEQ ID NO: 2615949 - RNA, 19 nt, Homo sapiens
  misc_RNA (1)...(19): siRNA sense strand
gauaagauccugugggaga

SEQ ID NO: 2615950 - RNA, 19 nt, Homo sapiens
  misc_RNA (1)...(19): siRNA sense strand
gccaaguggacgagacaga

SEQ ID NO: 2615951 - RNA, 19 nt, Homo sapiens
  misc_RNA (1)...(19): siRNA sense strand
acaaaugccaaguggacga

SEQ ID NO: 2615952 - RNA, 19 nt, Homo sapiens
  misc_RNA (1)...(19): siRNA sense strand
caaugggagcacagcgcua

SEQ ID NO: 2615953 - RNA, 19 nt, Homo sapiens
  misc_RNA (1)...(19): siRNA sense strand
cugauaagauccuguggga

SEQ ID NO: 2615954 - RNA, 19 nt, Homo sapiens
  misc_RNA (1)...(19): siRNA sense strand
gcuucuucuuccuggucua

SEQ ID NO: 2615955 - RNA, 19 nt, Homo sapiens
  misc_RNA (1)...(19): siRNA sense strand
cggaggagcuucuacgugu

SEQ ID NO: 2615956 - RNA, 19 nt, Homo sapiens
  misc_RNA (1)...(19): siRNA sense strand
acacaaauuuagaggacgu

SEQ ID NO: 2615957 - RNA, 19 nt, Homo sapiens
  misc_RNA (1)...(19): siRNA sense strand
ugggcauguuggugguaaa

SEQ ID NO: 2615958 - RNA, 19 nt, Homo sapiens
  misc_RNA (1)...(19): siRNA sense strand
uguuaaaauccucuggaaa

SEQ ID NO: 2615959 - RNA, 19 nt, Homo sapiens
  misc_RNA (1)...(19): siRNA sense strand
uggugguaaacuugagauu

SEQ ID NO: 2615960 - RNA, 19 nt, Homo sapiens
  misc_RNA (1)...(19): siRNA sense strand
gagaaagacuguaagccaa

SEQ ID NO: 2615961 - RNA, 19 nt, Homo sapiens
  misc_RNA (1)...(19): siRNA sense strand
ggagaaagacuguaagcca

SEQ ID NO: 2615962 - RNA, 19 nt, Homo sapiens
  misc_RNA (1)...(19): siRNA sense strand
acuaaagaggaauggagaa

SEQ ID NO: 2615963 - RNA, 19 nt, Homo sapiens
  misc_RNA (1)...(19): siRNA sense strand
cuguaagccaagugucaaa

SEQ ID NO: 2615964 - RNA, 19 nt, Homo sapiens
  misc_RNA (1)...(19): siRNA sense strand
auaaguggcuagacggaca

SEQ ID NO: 2615965 - RNA, 19 nt, Homo sapiens
  misc_RNA (1)...(19): siRNA sense strand
gcuaauucaagcaagaaaa

SEQ ID NO: 2615966 - RNA, 19 nt, Homo sapiens
  misc_RNA (1)...(19): siRNA sense strand
gcaaacaucuggugagacc

SEQ ID NO: 2615967 - RNA, 19 nt, Homo sapiens
  misc_RNA (1)...(19): siRNA sense strand
cacuaaagaggaauggaga

SEQ ID NO: 2615968 - RNA, 19 nt, Homo sapiens
  misc_RNA (1)...(19): siRNA sense strand
caagagaucucauggucaa

SEQ ID NO: 2615969 - RNA, 19 nt, Homo sapiens
  misc_RNA (1)...(19): siRNA sense strand
cagaagaaucccagggcca

SEQ ID NO: 2615970 - RNA, 19 nt, Homo sapiens
  misc_RNA (1)...(19): siRNA sense strand
agggagaucucauggccaa

SEQ ID NO: 2615971 - RNA, 19 nt, Homo sapiens
  misc_RNA (1)...(19): siRNA sense strand
cauaaaucagucagggaga

SEQ ID NO: 2615972 - RNA, 19 nt, Homo sapiens
  misc_RNA (1)...(19): siRNA sense strand
cuuuaauugagcaggagaa

SEQ ID NO: 2615973 - RNA, 19 nt, Homo sapiens
  misc_RNA (1)...(19): siRNA sense strand
aggcccaagcagagaagaa

SEQ ID NO: 2615974 - RNA, 19 nt, Homo sapiens
  misc_RNA (1)...(19): siRNA sense strand
cagaaggaaauccggacaa

SEQ ID NO: 2615975 - RNA, 19 nt, Homo sapiens
  misc_RNA (1)...(19): siRNA sense strand
gggccaaccagaagaaaau

SEQ ID NO: 2615976 - RNA, 19 nt, Homo sapiens
  misc_RNA (1)...(19): siRNA sense strand
agacagaucucaagggcag

SEQ ID NO: 2615977 - RNA, 19 nt, Homo sapiens
  misc_RNA (1)...(19): siRNA sense strand
aaaucaucccagucggaaa

SEQ ID NO: 2615978 - RNA, 19 nt, Homo sapiens
  misc_RNA (1)...(19): siRNA sense strand
cggacaaaucagaagaauc

SEQ ID NO: 2615979 - RNA, 19 nt, Homo sapiens
  misc_RNA (1)...(19): siRNA sense strand
gaucucaagggcagcuaaa

SEQ ID NO: 2615980 - RNA, 19 nt, Homo sapiens
  misc_RNA (1)...(19): siRNA sense strand
ucauagucacucagagaga

SEQ ID NO: 2615981 - RNA, 19 nt, Homo sapiens
  misc_RNA (1)...(19): siRNA sense strand
auaaagaguuagaagggac

SEQ ID NO: 2615982 - RNA, 19 nt, Homo sapiens
  misc_RNA (1)...(19): siRNA sense strand
cagaaagaucucauagcca

SEQ ID NO: 2615983 - RNA, 19 nt, Homo sapiens
  misc_RNA (1)...(19): siRNA sense strand
gcugaagaagaaaagaaua

SEQ ID NO: 2615984 - RNA, 19 nt, Homo sapiens
  misc_RNA (1)...(19): siRNA sense strand
aaucaaaagcucauagaca

SEQ ID NO: 2615985 - RNA, 19 nt, Homo sapiens
  misc_RNA (1)...(19): siRNA sense strand
aagggcagcuaaagagaca

SEQ ID NO: 2615986 - RNA, 19 nt, Homo sapiens
  misc_RNA (1)...(19): siRNA sense strand
cagagaagaaucaaggcca

SEQ ID NO: 2615987 - RNA, 19 nt, Homo sapiens
  misc_RNA (1)...(19): siRNA sense strand
agcaucaaucagaaggaaa

SEQ ID NO: 2615988 - RNA, 19 nt, Homo sapiens
  misc_RNA (1)...(19): siRNA sense strand
aagacagaaccauaguaaa

SEQ ID NO: 2615989 - RNA, 19 nt, Homo sapiens
  misc_RNA (1)...(19): siRNA sense strand
ccuucaagacagcaaucaa

SEQ ID NO: 2615990 - RNA, 19 nt, Homo sapiens
  misc_RNA (1)...(19): siRNA sense strand
ucucaagggcagcuaaaga

SEQ ID NO: 2615991 - RNA, 19 nt, Homo sapiens
  misc_RNA (1)...(19): siRNA sense strand
cuuuaaaugggcagccuuu

SEQ ID NO: 2615992 - RNA, 19 nt, Homo sapiens
  misc_RNA (1)...(19): siRNA sense strand
cagaauauguggaagagga

SEQ ID NO: 2615993 - RNA, 19 nt, Homo sapiens
  misc_RNA (1)...(19): siRNA sense strand
ucucagaauauguggaaga

SEQ ID NO: 2615994 - RNA, 19 nt, Homo sapiens
  misc_RNA (1)...(19): siRNA sense strand
agaagaaggugaaggcacu

SEQ ID NO: 2615995 - RNA, 19 nt, Homo sapiens
  misc_RNA (1)...(19): siRNA sense strand
aggugaaggcacuggaaga

SEQ ID NO: 2615996 - RNA, 19 nt, Homo sapiens
  misc_RNA (1)...(19): siRNA sense strand
agcggaagcgggaggaaua

SEQ ID NO: 2615997 - RNA, 19 nt, Homo sapiens
  misc_RNA (1)...(19): siRNA sense strand
acuuagaugaacugaggaa

SEQ ID NO: 2615998 - RNA, 19 nt, Homo sapiens
  misc_RNA (1)...(19): siRNA sense strand
ggauugaugagcagguaca

SEQ ID NO: 2615999 - RNA, 19 nt, Homo sapiens
  misc_RNA (1)...(19): siRNA sense strand
augaugaggaagaggacuu

SEQ ID NO: 2616000 - RNA, 19 nt, Homo sapiens
  misc_RNA (1)...(19): siRNA sense strand
cagcaaacacugagaggag

SEQ ID NO: 2616001 - RNA, 19 nt, Homo sapiens
  misc_RNA (1)...(19): siRNA sense strand
gcaaacacugagaggagga

SEQ ID NO: 2616002 - RNA, 19 nt, Homo sapiens
  misc_RNA (1)...(19): siRNA sense strand
ucuuggaugaggaggauuu

SEQ ID NO: 2616003 - RNA, 19 nt, Homo sapiens
  misc_RNA (1)...(19): siRNA sense strand
acugagaggaggaaguuga

SEQ ID NO: 2616004 - RNA, 19 nt, Homo sapiens
  misc_RNA (1)...(19): siRNA sense strand
agaauauguggaagaggau

SEQ ID NO: 2616005 - RNA, 19 nt, Homo sapiens
  misc_RNA (1)...(19): siRNA sense strand
agaacuuugacgugaccaa

SEQ ID NO: 2616006 - RNA, 19 nt, Homo sapiens
  misc_RNA (1)...(19): siRNA sense strand
cagaagaaggugaaggcac

SEQ ID NO: 2616007 - RNA, 19 nt, Homo sapiens
  misc_RNA (1)...(19): siRNA sense strand
cuucaggagguacgaggua

SEQ ID NO: 2616008 - RNA, 19 nt, Homo sapiens
  misc_RNA (1)...(19): siRNA sense strand
cauaaucacuucaggaggu

SEQ ID NO: 2616009 - RNA, 19 nt, Homo sapiens
  misc_RNA (1)...(19): siRNA sense strand
aggcauacagacucaagua

SEQ ID NO: 2616010 - RNA, 19 nt, Homo sapiens
  misc_RNA (1)...(19): siRNA sense strand
aguauuaugacucucgaaa

SEQ ID NO: 2616011 - RNA, 19 nt, Homo sapiens
  misc_RNA (1)...(19): siRNA sense strand
agaucuuggaugaggagga

SEQ ID NO: 2616012 - RNA, 19 nt, Homo sapiens
  misc_RNA (1)...(19): siRNA sense strand
caaucugcccaaagccaaa

SEQ ID NO: 2616013 - RNA, 19 nt, Homo sapiens
  misc_RNA (1)...(19): siRNA sense strand
agcaaggacuauagagaga

SEQ ID NO: 2616014 - RNA, 19 nt, Homo sapiens
  misc_RNA (1)...(19): siRNA sense strand
gcgcaggaggagaaaggua

SEQ ID NO: 2616015 - RNA, 19 nt, Homo sapiens
  misc_RNA (1)...(19): siRNA sense strand
gugcaucacccgugggaga

SEQ ID NO: 2616016 - RNA, 19 nt, Homo sapiens
  misc_RNA (1)...(19): siRNA sense strand
gagaacagccagcaggcaa

SEQ ID NO: 2616017 - RNA, 19 nt, Homo sapiens
  misc_RNA (1)...(19): siRNA sense strand
ggaaaaggagagggagaaa

SEQ ID NO: 2616018 - RNA, 19 nt, Homo sapiens
  misc_RNA (1)...(19): siRNA sense strand
accaaauguuaguagcaaa

SEQ ID NO: 2616019 - RNA, 19 nt, Homo sapiens
  misc_RNA (1)...(19): siRNA sense strand
ggacagagcaugaccagca

SEQ ID NO: 2616020 - RNA, 19 nt, Homo sapiens
  misc_RNA (1)...(19): siRNA sense strand
gccaaagggauuaggacuu

SEQ ID NO: 2616021 - RNA, 19 nt, Homo sapiens
  misc_RNA (1)...(19): siRNA sense strand
gaaaagaccucuauggcau

SEQ ID NO: 2616022 - RNA, 19 nt, Homo sapiens
  misc_RNA (1)...(19): siRNA sense strand
ggagaaagguaaaacgcau

SEQ ID NO: 2616023 - RNA, 19 nt, Homo sapiens
  misc_RNA (1)...(19): siRNA sense strand
agauaaucgagcugaaaga

SEQ ID NO: 2616024 - RNA, 19 nt, Homo sapiens
  misc_RNA (1)...(19): siRNA sense strand
cugcaggauuuguagguga

SEQ ID NO: 2616025 - RNA, 19 nt, Homo sapiens
  misc_RNA (1)...(19): siRNA sense strand
cgcaggaggagaaagguaa

SEQ ID NO: 2616026 - RNA, 19 nt, Homo sapiens
  misc_RNA (1)...(19): siRNA sense strand
agaacagccagcaggcaaa

SEQ ID NO: 2616027 - RNA, 19 nt, Homo sapiens
  misc_RNA (1)...(19): siRNA sense strand
ggacagugauagagccuac

SEQ ID NO: 2616028 - RNA, 19 nt, Homo sapiens
  misc_RNA (1)...(19): siRNA sense strand
uaucaaacggagaagaaaa

SEQ ID NO: 2616029 - RNA, 19 nt, Homo sapiens
  misc_RNA (1)...(19): siRNA sense strand
guuuagaagaaccaagcaa

SEQ ID NO: 2616030 - RNA, 19 nt, Homo sapiens
  misc_RNA (1)...(19): siRNA sense strand
aaggaaaaggagagggaga

SEQ ID NO: 2616031 - RNA, 19 nt, Homo sapiens
  misc_RNA (1)...(19): siRNA sense strand
uggaaugugaagagcaaaa

SEQ ID NO: 2616032 - RNA, 19 nt, Homo sapiens
  misc_RNA (1)...(19): siRNA sense strand
gugaugaugaacagaguga

SEQ ID NO: 2616033 - RNA, 19 nt, Homo sapiens
  misc_RNA (1)...(19): siRNA sense strand
aggaaacgaaccagaccaa

SEQ ID NO: 2616034 - RNA, 19 nt, Homo sapiens
  misc_RNA (1)...(19): siRNA sense strand
cugaaagaggacacaagaa

SEQ ID NO: 2616035 - RNA, 19 nt, Homo sapiens
  misc_RNA (1)...(19): siRNA sense strand
gggagauaucaaacggaga

SEQ ID NO: 2616036 - RNA, 19 nt, Homo sapiens
  misc_RNA (1)...(19): siRNA sense strand
caaugaugagggaagacaa

SEQ ID NO: 2616037 - RNA, 19 nt, Homo sapiens
  misc_RNA (1)...(19): siRNA sense strand
ggacaaaauggaaugugaa

SEQ ID NO: 2616038 - RNA, 19 nt, Homo sapiens
  misc_RNA (1)...(19): siRNA sense strand
agaugaaggaguaguuuua

SEQ ID NO: 2616039 - RNA, 19 nt, Homo sapiens
  misc_RNA (1)...(19): siRNA sense strand
ccugaggguuguagagauc

SEQ ID NO: 2616040 - RNA, 19 nt, Homo sapiens
  misc_RNA (1)...(19): siRNA sense strand
agccaauccuagaaaauaa

SEQ ID NO: 2616041 - RNA, 19 nt, Homo sapiens
  misc_RNA (1)...(19): siRNA sense strand
gagacuggucacugcuuaa

SEQ ID NO: 2616042 - RNA, 19 nt, Homo sapiens
  misc_RNA (1)...(19): siRNA sense strand
gugacugguucuacgaaaa

SEQ ID NO: 2616043 - RNA, 19 nt, Homo sapiens
  misc_RNA (1)...(19): siRNA sense strand
agguggauuugcugaaaca

SEQ ID NO: 2616044 - RNA, 19 nt, Homo sapiens
  misc_RNA (1)...(19): siRNA sense strand
gcaaggaaaaggagaggga

SEQ ID NO: 2616045 - RNA, 19 nt, Homo sapiens
  misc_RNA (1)...(19): siRNA sense strand
augcagaggccaaagggau

SEQ ID NO: 2616046 - RNA, 19 nt, Homo sapiens
  misc_RNA (1)...(19): siRNA sense strand
cagcauuggaagagagcuc

SEQ ID NO: 2616047 - RNA, 19 nt, Homo sapiens
  misc_RNA (1)...(19): siRNA sense strand
ccauggaggagcugguuca

SEQ ID NO: 2616048 - RNA, 19 nt, Homo sapiens
  misc_RNA (1)...(19): siRNA sense strand
aggaguaguuuuagaaagu

SEQ ID NO: 2616049 - RNA, 19 nt, Homo sapiens
  misc_RNA (1)...(19): siRNA sense strand
aggcaaacaagcaugcauu

SEQ ID NO: 2616050 - RNA, 19 nt, Homo sapiens
  misc_RNA (1)...(19): siRNA sense strand
gugaaaaugcccagccaau

SEQ ID NO: 2616051 - RNA, 19 nt, Homo sapiens
  misc_RNA (1)...(19): siRNA sense strand
cugcuuaagugaaggcucu

SEQ ID NO: 2616052 - RNA, 19 nt, Homo sapiens
  misc_RNA (1)...(19): siRNA sense strand
aggacuauagagagaauca

SEQ ID NO: 2616053 - RNA, 19 nt, Homo sapiens
  misc_RNA (1)...(19): siRNA sense strand
caggacauggacagugaua

SEQ ID NO: 2616054 - RNA, 19 nt, Homo sapiens
  misc_RNA (1)...(19): siRNA sense strand
aguuuuagaaagugaggaa

SEQ ID NO: 2616055 - RNA, 19 nt, Homo sapiens
  misc_RNA (1)...(19): siRNA sense strand
uagaaagugaggaaacgaa

SEQ ID NO: 2616056 - RNA, 19 nt, Homo sapiens
  misc_RNA (1)...(19): siRNA sense strand
gaaaaggagagggagaaaa

SEQ ID NO: 2616057 - RNA, 19 nt, Homo sapiens
  misc_RNA (1)...(19): siRNA sense strand
ggccaaagggauuaggacu

SEQ ID NO: 2616058 - RNA, 19 nt, Homo sapiens
  misc_RNA (1)...(19): siRNA sense strand
gaugaugaacagagugacu

SEQ ID NO: 2616059 - RNA, 19 nt, Homo sapiens
  misc_RNA (1)...(19): siRNA sense strand
aagcagaagagguuuccaa

SEQ ID NO: 2616060 - RNA, 19 nt, Homo sapiens
  misc_RNA (1)...(19): siRNA sense strand
agaaaacggaggucguaua

SEQ ID NO: 2616061 - RNA, 19 nt, Homo sapiens
  misc_RNA (1)...(19): siRNA sense strand
agugacugguucuacgaaa

SEQ ID NO: 2616062 - RNA, 19 nt, Homo sapiens
  misc_RNA (1)...(19): siRNA sense strand
aauaauaauguucgaggga

SEQ ID NO: 2616063 - RNA, 19 nt, Homo sapiens
  misc_RNA (1)...(19): siRNA sense strand
ugcagaggccaaagggauu

SEQ ID NO: 2616064 - RNA, 19 nt, Homo sapiens
  misc_RNA (1)...(19): siRNA sense strand
aggaaaaggagagggagaa

SEQ ID NO: 2616065 - RNA, 19 nt, Homo sapiens
  misc_RNA (1)...(19): siRNA sense strand
cuauagagagaaucacaau

SEQ ID NO: 2616066 - RNA, 19 nt, Homo sapiens
  misc_RNA (1)...(19): siRNA sense strand
uguggacaauguugggaau

SEQ ID NO: 2616067 - RNA, 19 nt, Homo sapiens
  misc_RNA (1)...(19): siRNA sense strand
uaccaagaacaaagucaaa

SEQ ID NO: 2616068 - RNA, 19 nt, Homo sapiens
  misc_RNA (1)...(19): siRNA sense strand
uggcauuucaguagaacca

SEQ ID NO: 2616069 - RNA, 19 nt, Homo sapiens
  misc_RNA (1)...(19): siRNA sense strand
aggacaaggugguggucuu

SEQ ID NO: 2616070 - RNA, 19 nt, Homo sapiens
  misc_RNA (1)...(19): siRNA sense strand
cgacaaggcauuaaagacu

SEQ ID NO: 2616071 - RNA, 19 nt, Homo sapiens
  misc_RNA (1)...(19): siRNA sense strand
ccuacaacgugcuggacga

SEQ ID NO: 2616072 - RNA, 19 nt, Homo sapiens
  misc_RNA (1)...(19): siRNA sense strand
gcauuaaagacuauuccaa

SEQ ID NO: 2616073 - RNA, 19 nt, Homo sapiens
  misc_RNA (1)...(19): siRNA sense strand
gggacuugguggaagaacu

SEQ ID NO: 2616074 - RNA, 19 nt, Homo sapiens
  misc_RNA (1)...(19): siRNA sense strand
uggacgcgcuggugaagaa

SEQ ID NO: 2616075 - RNA, 19 nt, Homo sapiens
  misc_RNA (1)...(19): siRNA sense strand
gacaaggcauuaaagacua

SEQ ID NO: 2616076 - RNA, 19 nt, Homo sapiens
  misc_RNA (1)...(19): siRNA sense strand
guaccucaauggcgaguuu

SEQ ID NO: 2616077 - RNA, 19 nt, Homo sapiens
  misc_RNA (1)...(19): siRNA sense strand
agacaaacuuccuuggcaa

SEQ ID NO: 2616078 - RNA, 19 nt, Homo sapiens
  misc_RNA (1)...(19): siRNA sense strand
augucaugcuugagaacua

SEQ ID NO: 2616079 - RNA, 19 nt, Homo sapiens
  misc_RNA (1)...(19): siRNA sense strand
agaagaaccucuacaggga

SEQ ID NO: 2616080 - RNA, 19 nt, Homo sapiens
  misc_RNA (1)...(19): siRNA sense strand
auggaagcuauguaagaaa

SEQ ID NO: 2616081 - RNA, 19 nt, Homo sapiens
  misc_RNA (1)...(19): siRNA sense strand
aggacguguuuguggacuu

SEQ ID NO: 2616082 - RNA, 19 nt, Homo sapiens
  misc_RNA (1)...(19): siRNA sense strand
gggaaaaggcauucaaaac

SEQ ID NO: 2616083 - RNA, 19 nt, Homo sapiens
  misc_RNA (1)...(19): siRNA sense strand
aaauggaagcuauguaaga

SEQ ID NO: 2616084 - RNA, 19 nt, Homo sapiens
  misc_RNA (1)...(19): siRNA sense strand
gaaggaugaaagcggucaa

SEQ ID NO: 2616085 - RNA, 19 nt, Homo sapiens
  misc_RNA (1)...(19): siRNA sense strand
caaaauggaagcuauguaa

SEQ ID NO: 2616086 - RNA, 19 nt, Homo sapiens
  misc_RNA (1)...(19): siRNA sense strand
ggaagcuauguaagaaaga

SEQ ID NO: 2616087 - RNA, 19 nt, Homo sapiens
  misc_RNA (1)...(19): siRNA sense strand
aggaaagccaagacaaacu

SEQ ID NO: 2616088 - RNA, 19 nt, Homo sapiens
  misc_RNA (1)...(19): siRNA sense strand
auuugauucuguaaggcaa

SEQ ID NO: 2616089 - RNA, 19 nt, Homo sapiens
  misc_RNA (1)...(19): siRNA sense strand
auucauaggcaaggaaaca

SEQ ID NO: 2616090 - RNA, 19 nt, Homo sapiens
  misc_RNA (1)...(19): siRNA sense strand
cugcauaggcccuggaagu

SEQ ID NO: 2616091 - RNA, 19 nt, Homo sapiens
  misc_RNA (1)...(19): siRNA sense strand
aagaagaggagguggugga

SEQ ID NO: 2616092 - RNA, 19 nt, Homo sapiens
  misc_RNA (1)...(19): siRNA sense strand
ugagagucgugcaggcgaa

SEQ ID NO: 2616093 - RNA, 19 nt, Homo sapiens
  misc_RNA (1)...(19): siRNA sense strand
aggaagaagaggagguggu

SEQ ID NO: 2616094 - RNA, 19 nt, Homo sapiens
  misc_RNA (1)...(19): siRNA sense strand
aggaggagcugcugcacca

SEQ ID NO: 2616095 - RNA, 19 nt, Homo sapiens
  misc_RNA (1)...(19): siRNA sense strand
gagaaugggcuguugguug

SEQ ID NO: 2616096 - RNA, 19 nt, Homo sapiens
  misc_RNA (1)...(19): siRNA sense strand
ccgccacgcaggaagagaa

SEQ ID NO: 2616097 - RNA, 19 nt, Homo sapiens
  misc_RNA (1)...(19): siRNA sense strand
gcuacaauuggaagagaaa

SEQ ID NO: 2616098 - RNA, 19 nt, Homo sapiens
  misc_RNA (1)...(19): siRNA sense strand
uggaaauacuauagagucu

SEQ ID NO: 2616099 - RNA, 19 nt, Homo sapiens
  misc_RNA (1)...(19): siRNA sense strand
gagaaaaggauauggaaca

SEQ ID NO: 2616100 - RNA, 19 nt, Homo sapiens
  misc_RNA (1)...(19): siRNA sense strand
cagaauacgaagaugaaaa

SEQ ID NO: 2616101 - RNA, 19 nt, Homo sapiens
  misc_RNA (1)...(19): siRNA sense strand
ggaugguggaggaaugaaa

SEQ ID NO: 2616102 - RNA, 19 nt, Homo sapiens
  misc_RNA (1)...(19): siRNA sense strand
gcugaaaguuugagagcug

SEQ ID NO: 2616103 - RNA, 19 nt, Homo sapiens
  misc_RNA (1)...(19): siRNA sense strand
aggaugaagaugaagacaa

SEQ ID NO: 2616104 - RNA, 19 nt, Homo sapiens
  misc_RNA (1)...(19): siRNA sense strand
gguuggaagugaaggaacu

SEQ ID NO: 2616105 - RNA, 19 nt, Homo sapiens
  misc_RNA (1)...(19): siRNA sense strand
gggaccaugccuuggguaa

SEQ ID NO: 2616106 - RNA, 19 nt, Homo sapiens
  misc_RNA (1)...(19): siRNA sense strand
cguuagucuuccaaauaaa

SEQ ID NO: 2616107 - RNA, 19 nt, Homo sapiens
  misc_RNA (1)...(19): siRNA sense strand
agucaaaauuggagaaacu

SEQ ID NO: 2616108 - RNA, 19 nt, Homo sapiens
  misc_RNA (1)...(19): siRNA sense strand
ggaagaaaggagagggccu

SEQ ID NO: 2616109 - RNA, 19 nt, Homo sapiens
  misc_RNA (1)...(19): siRNA sense strand
ugauagugaaccagaggaa

SEQ ID NO: 2616110 - RNA, 19 nt, Homo sapiens
  misc_RNA (1)...(19): siRNA sense strand
auauaaagauagagcugga

SEQ ID NO: 2616111 - RNA, 19 nt, Homo sapiens
  misc_RNA (1)...(19): siRNA sense strand
uggagaaguuggaacguga

SEQ ID NO: 2616112 - RNA, 19 nt, Homo sapiens
  misc_RNA (1)...(19): siRNA sense strand
caguaaguuucaugcagaa

SEQ ID NO: 2616113 - RNA, 19 nt, Homo sapiens
  misc_RNA (1)...(19): siRNA sense strand
cugaaauuacugauagcaa

SEQ ID NO: 2616114 - RNA, 19 nt, Homo sapiens
  misc_RNA (1)...(19): siRNA sense strand
cugcaacaaaugaggaaaa

SEQ ID NO: 2616115 - RNA, 19 nt, Homo sapiens
  misc_RNA (1)...(19): siRNA sense strand
auacagaauacgaagauga

SEQ ID NO: 2616116 - RNA, 19 nt, Homo sapiens
  misc_RNA (1)...(19): siRNA sense strand
ggucggaagauguuggaga

SEQ ID NO: 2616117 - RNA, 19 nt, Homo sapiens
  misc_RNA (1)...(19): siRNA sense strand
ggacaaagcacgagagcgg

SEQ ID NO: 2616118 - RNA, 19 nt, Homo sapiens
  misc_RNA (1)...(19): siRNA sense strand
ggaccaugccuuggguaaa

SEQ ID NO: 2616119 - RNA, 19 nt, Homo sapiens
  misc_RNA (1)...(19): siRNA sense strand
ggaucaaggcagucaaaau

SEQ ID NO: 2616120 - RNA, 19 nt, Homo sapiens
  misc_RNA (1)...(19): siRNA sense strand
gugggagaaaugaagauaa

SEQ ID NO: 2616121 - RNA, 19 nt, Homo sapiens
  misc_RNA (1)...(19): siRNA sense strand
ggauuugaacucagaggau

SEQ ID NO: 2616122 - RNA, 19 nt, Homo sapiens
  misc_RNA (1)...(19): siRNA sense strand
agaucaagcuaucgaaacu

SEQ ID NO: 2616123 - RNA, 19 nt, Homo sapiens
  misc_RNA (1)...(19): siRNA sense strand
agaaaaucauggagacuga

SEQ ID NO: 2616124 - RNA, 19 nt, Homo sapiens
  misc_RNA (1)...(19): siRNA sense strand
aggcaauguaacugcagaa

SEQ ID NO: 2616125 - RNA, 19 nt, Homo sapiens
  misc_RNA (1)...(19): siRNA sense strand
ggagacugauagugaacca

SEQ ID NO: 2616126 - RNA, 19 nt, Homo sapiens
  misc_RNA (1)...(19): siRNA sense strand
ugcagaagauagugaggau

SEQ ID NO: 2616127 - RNA, 19 nt, Homo sapiens
  misc_RNA (1)...(19): siRNA sense strand
acacuaaguaaggaggaaa

SEQ ID NO: 2616128 - RNA, 19 nt, Homo sapiens
  misc_RNA (1)...(19): siRNA sense strand
agguggaagaacucaguaa

SEQ ID NO: 2616129 - RNA, 19 nt, Homo sapiens
  misc_RNA (1)...(19): siRNA sense strand
acugaaaacuucccagaaa

SEQ ID NO: 2616130 - RNA, 19 nt, Homo sapiens
  misc_RNA (1)...(19): siRNA sense strand
agacauugaagaauccaaa

SEQ ID NO: 2616131 - RNA, 19 nt, Homo sapiens
  misc_RNA (1)...(19): siRNA sense strand
acuugagcauggagaugaa

SEQ ID NO: 2616132 - RNA, 19 nt, Homo sapiens
  misc_RNA (1)...(19): siRNA sense strand
auaaagauagagcuggaaa

SEQ ID NO: 2616133 - RNA, 19 nt, Homo sapiens
  misc_RNA (1)...(19): siRNA sense strand
uagugaggaugaagaugaa

SEQ ID NO: 2616134 - RNA, 19 nt, Homo sapiens
  misc_RNA (1)...(19): siRNA sense strand
cuccaaaacaagaacaaaa

SEQ ID NO: 2616135 - RNA, 19 nt, Homo sapiens
  misc_RNA (1)...(19): siRNA sense strand
guggaagaacucaguaaaa

SEQ ID NO: 2616136 - RNA, 19 nt, Homo sapiens
  misc_RNA (1)...(19): siRNA sense strand
ugaggauaguuaugacgaa

SEQ ID NO: 2616137 - RNA, 19 nt, Homo sapiens
  misc_RNA (1)...(19): siRNA sense strand
ggggaaggaugguggagga

SEQ ID NO: 2616138 - RNA, 19 nt, Homo sapiens
  misc_RNA (1)...(19): siRNA sense strand
ccaaauaaagugacugaac

SEQ ID NO: 2616139 - RNA, 19 nt, Homo sapiens
  misc_RNA (1)...(19): siRNA sense strand
uauccgacuucuagcacaa

SEQ ID NO: 2616140 - RNA, 19 nt, Homo sapiens
  misc_RNA (1)...(19): siRNA sense strand
uaaagauagagcuggaaaa

SEQ ID NO: 2616141 - RNA, 19 nt, Homo sapiens
  misc_RNA (1)...(19): siRNA sense strand
ccaaagagaugaugcuccu

SEQ ID NO: 2616142 - RNA, 19 nt, Homo sapiens
  misc_RNA (1)...(19): siRNA sense strand
uguggaaaguggucguuau

SEQ ID NO: 2616143 - RNA, 19 nt, Homo sapiens
  misc_RNA (1)...(19): siRNA sense strand
gggaaggaugguggaggaa

SEQ ID NO: 2616144 - RNA, 19 nt, Homo sapiens
  misc_RNA (1)...(19): siRNA sense strand
gaagaaaagaaaagaucca

SEQ ID NO: 2616145 - RNA, 19 nt, Homo sapiens
  misc_RNA (1)...(19): siRNA sense strand
gcugcaaugaggaagaaaa

SEQ ID NO: 2616146 - RNA, 19 nt, Homo sapiens
  misc_RNA (1)...(19): siRNA sense strand
gguuuacagaauacagaau

SEQ ID NO: 2616147 - RNA, 19 nt, Homo sapiens
  misc_RNA (1)...(19): siRNA sense strand
aaguacaaacagagaacca

SEQ ID NO: 2616148 - RNA, 19 nt, Homo sapiens
  misc_RNA (1)...(19): siRNA sense strand
accagaacgcagaaagcaa

SEQ ID NO: 2616149 - RNA, 19 nt, Homo sapiens
  misc_RNA (1)...(19): siRNA sense strand
gugaggaugaagaugaaga

SEQ ID NO: 2616150 - RNA, 19 nt, Homo sapiens
  misc_RNA (1)...(19): siRNA sense strand
cugcaaugaggaagaaaau

SEQ ID NO: 2616151 - RNA, 19 nt, Homo sapiens
  misc_RNA (1)...(19): siRNA sense strand
cacuaaguaaggaggaaaa

SEQ ID NO: 2616152 - RNA, 19 nt, Homo sapiens
  misc_RNA (1)...(19): siRNA sense strand
ccagaaacuaagccucaaa

SEQ ID NO: 2616153 - RNA, 19 nt, Homo sapiens
  misc_RNA (1)...(19): siRNA sense strand
caacaaaugaggaaaagga

SEQ ID NO: 2616154 - RNA, 19 nt, Homo sapiens
  misc_RNA (1)...(19): siRNA sense strand
auuugaacucagaggauca

SEQ ID NO: 2616155 - RNA, 19 nt, Homo sapiens
  misc_RNA (1)...(19): siRNA sense strand
ugcuacaauuggaagagaa

SEQ ID NO: 2616156 - RNA, 19 nt, Homo sapiens
  misc_RNA (1)...(19): siRNA sense strand
cuuacaaaguuauguccuu

SEQ ID NO: 2616157 - RNA, 19 nt, Homo sapiens
  misc_RNA (1)...(19): siRNA sense strand
cugccaaggaacaaauuaa

SEQ ID NO: 2616158 - RNA, 19 nt, Homo sapiens
  misc_RNA (1)...(19): siRNA sense strand
augaaggagcagaugguuu

SEQ ID NO: 2616159 - RNA, 19 nt, Homo sapiens
  misc_RNA (1)...(19): siRNA sense strand
caagugauccagaagguga

SEQ ID NO: 2616160 - RNA, 19 nt, Homo sapiens
  misc_RNA (1)...(19): siRNA sense strand
caacaagaccagccggacu

SEQ ID NO: 2616161 - RNA, 19 nt, Homo sapiens
  misc_RNA (1)...(19): siRNA sense strand
ggaagaacguggagaagcg

SEQ ID NO: 2616162 - RNA, 19 nt, Homo sapiens
  misc_RNA (1)...(19): siRNA sense strand
gaacaaauuaaauggucgu

SEQ ID NO: 2616163 - RNA, 19 nt, Homo sapiens
  misc_RNA (1)...(19): siRNA sense strand
gaacauggacggagccuuc

SEQ ID NO: 2616164 - RNA, 19 nt, Homo sapiens
  misc_RNA (1)...(19): siRNA sense strand
uggccaaguauuaugauga

SEQ ID NO: 2616165 - RNA, 19 nt, Homo sapiens
  misc_RNA (1)...(19): siRNA sense strand
ccggacugagagugagauu

SEQ ID NO: 2616166 - RNA, 19 nt, Homo sapiens
  misc_RNA (1)...(19): siRNA sense strand
agaacaacuugaagagcaa

SEQ ID NO: 2616167 - RNA, 19 nt, Homo sapiens
  misc_RNA (1)...(19): siRNA sense strand
gcugaaaguggcaaagaaa

SEQ ID NO: 2616168 - RNA, 19 nt, Homo sapiens
  misc_RNA (1)...(19): siRNA sense strand
ccgucaaacuauugccaaa

SEQ ID NO: 2616169 - RNA, 19 nt, Homo sapiens
  misc_RNA (1)...(19): siRNA sense strand
gggauaaagauuugauaga

SEQ ID NO: 2616170 - RNA, 19 nt, Homo sapiens
  misc_RNA (1)...(19): siRNA sense strand
cccaacaagaagagaaaua

SEQ ID NO: 2616171 - RNA, 19 nt, Homo sapiens
  misc_RNA (1)...(19): siRNA sense strand
ccugauaugccuagaacaa

SEQ ID NO: 2616172 - RNA, 19 nt, Homo sapiens
  misc_RNA (1)...(19): siRNA sense strand
ugaaaguggcaaagaaauu

SEQ ID NO: 2616173 - RNA, 19 nt, Homo sapiens
  misc_RNA (1)...(19): siRNA sense strand
ggcaaagaaauuagggaau

SEQ ID NO: 2616174 - RNA, 19 nt, Homo sapiens
  misc_RNA (1)...(19): siRNA sense strand
cauuaaaggacuugaagau

SEQ ID NO: 2616175 - RNA, 19 nt, Homo sapiens
  misc_RNA (1)...(19): siRNA sense strand
caaacaagaacuagcaaau

SEQ ID NO: 2616176 - RNA, 19 nt, Homo sapiens
  misc_RNA (1)...(19): siRNA sense strand
auguacagcaguagaaaua

SEQ ID NO: 2616177 - RNA, 19 nt, Homo sapiens
  misc_RNA (1)...(19): siRNA sense strand
cagcaguagaaauaagaaa

SEQ ID NO: 2616178 - RNA, 19 nt, Homo sapiens
  misc_RNA (1)...(19): siRNA sense strand
cugaagcagucacgagaaa

SEQ ID NO: 2616179 - RNA, 19 nt, Homo sapiens
  misc_RNA (1)...(19): siRNA sense strand
uugaagaagaagucaguaa

SEQ ID NO: 2616180 - RNA, 19 nt, Homo sapiens
  misc_RNA (1)...(19): siRNA sense strand
agguaaacuugacggacua

SEQ ID NO: 2616181 - RNA, 19 nt, Homo sapiens
  misc_RNA (1)...(19): siRNA sense strand
cagaaaugaugguggaauc

SEQ ID NO: 2616182 - RNA, 19 nt, Homo sapiens
  misc_RNA (1)...(19): siRNA sense strand
accaaaagauucaggauaa

SEQ ID NO: 2616183 - RNA, 19 nt, Homo sapiens
  misc_RNA (1)...(19): siRNA sense strand
gcaacaagaacgggauaaa

SEQ ID NO: 2616184 - RNA, 19 nt, Homo sapiens
  misc_RNA (1)...(19): siRNA sense strand
uggcaaagaaauuagggaa

SEQ ID NO: 2616185 - RNA, 19 nt, Homo sapiens
  misc_RNA (1)...(19): siRNA sense strand
cugaaauuauccaggaaaa

SEQ ID NO: 2616186 - RNA, 19 nt, Homo sapiens
  misc_RNA (1)...(19): siRNA sense strand
caagagagaaaaugagaaa

SEQ ID NO: 2616187 - RNA, 19 nt, Homo sapiens
  misc_RNA (1)...(19): siRNA sense strand
ucaaagauggaaagagauu

SEQ ID NO: 2616188 - RNA, 19 nt, Homo sapiens
  misc_RNA (1)...(19): siRNA sense strand
aagcagaaacugaugaaau

SEQ ID NO: 2616189 - RNA, 19 nt, Homo sapiens
  misc_RNA (1)...(19): siRNA sense strand
gaugcaaguuagagguuga

SEQ ID NO: 2616190 - RNA, 19 nt, Homo sapiens
  misc_RNA (1)...(19): siRNA sense strand
gcgauagacaguagacgaa

SEQ ID NO: 2616191 - RNA, 19 nt, Homo sapiens
  misc_RNA (1)...(19): siRNA sense strand
ccaaacaagaacuagcaaa

SEQ ID NO: 2616192 - RNA, 19 nt, Homo sapiens
  misc_RNA (1)...(19): siRNA sense strand
gcuguuagaaagagucaaa

SEQ ID NO: 2616193 - RNA, 19 nt, Homo sapiens
  misc_RNA (1)...(19): siRNA sense strand
guaaaauguucucuggaaa

SEQ ID NO: 2616194 - RNA, 19 nt, Homo sapiens
  misc_RNA (1)...(19): siRNA sense strand
cagaaaaugacauggaaau

SEQ ID NO: 2616195 - RNA, 19 nt, Homo sapiens
  misc_RNA (1)...(19): siRNA sense strand
ugaucaagauggagagaag

SEQ ID NO: 2616196 - RNA, 19 nt, Homo sapiens
  misc_RNA (1)...(19): siRNA sense strand
uauccagaaccuugagaaa

SEQ ID NO: 2616197 - RNA, 19 nt, Homo sapiens
  misc_RNA (1)...(19): siRNA sense strand
cuugagaaagacagacaaa

SEQ ID NO: 2616198 - RNA, 19 nt, Homo sapiens
  misc_RNA (1)...(19): siRNA sense strand
gaaacugaagagaaugaaa

SEQ ID NO: 2616199 - RNA, 19 nt, Homo sapiens
  misc_RNA (1)...(19): siRNA sense strand
gcugaaauuauccaggaaa

SEQ ID NO: 2616200 - RNA, 19 nt, Homo sapiens
  misc_RNA (1)...(19): siRNA sense strand
cgaguuaauuaguagacau

SEQ ID NO: 2616201 - RNA, 19 nt, Homo sapiens
  misc_RNA (1)...(19): siRNA sense strand
uccagaaccuugagaaaga

SEQ ID NO: 2616202 - RNA, 19 nt, Homo sapiens
  misc_RNA (1)...(19): siRNA sense strand
cgguuaaaucaaagacuga

SEQ ID NO: 2616203 - RNA, 19 nt, Homo sapiens
  misc_RNA (1)...(19): siRNA sense strand
cugugaacuuccagauauu

SEQ ID NO: 2616204 - RNA, 19 nt, Homo sapiens
  misc_RNA (1)...(19): siRNA sense strand
agcuaaguuucuagaacaa

SEQ ID NO: 2616205 - RNA, 19 nt, Homo sapiens
  misc_RNA (1)...(19): siRNA sense strand
agaugaaggaagaguggau

SEQ ID NO: 2616206 - RNA, 19 nt, Homo sapiens
  misc_RNA (1)...(19): siRNA sense strand
gguggucaauggaggagaa

SEQ ID NO: 2616207 - RNA, 19 nt, Homo sapiens
  misc_RNA (1)...(19): siRNA sense strand
uugagaagguuaugacaga

SEQ ID NO: 2616208 - RNA, 19 nt, Homo sapiens
  misc_RNA (1)...(19): siRNA sense strand
agauagauccgcuguggaa

SEQ ID NO: 2616209 - RNA, 19 nt, Homo sapiens
  misc_RNA (1)...(19): siRNA sense strand
agacgaacgccaugacaau

SEQ ID NO: 2616210 - RNA, 19 nt, Homo sapiens
  misc_RNA (1)...(19): siRNA sense strand
auguagaguuguugcccaa

SEQ ID NO: 2616211 - RNA, 19 nt, Homo sapiens
  misc_RNA (1)...(19): siRNA sense strand
cugaagagaaugaaaacaa

SEQ ID NO: 2616212 - RNA, 19 nt, Homo sapiens
  misc_RNA (1)...(19): siRNA sense strand
caguuaauucagaagcuua

SEQ ID NO: 2616213 - RNA, 19 nt, Homo sapiens
  misc_RNA (1)...(19): siRNA sense strand
agcagaaaguccugaauca

SEQ ID NO: 2616214 - RNA, 19 nt, Homo sapiens
  misc_RNA (1)...(19): siRNA sense strand
gcaguagaaauaagaaaca

SEQ ID NO: 2616215 - RNA, 19 nt, Homo sapiens
  misc_RNA (1)...(19): siRNA sense strand
aggaaacugaagagaauga

SEQ ID NO: 2616216 - RNA, 19 nt, Homo sapiens
  misc_RNA (1)...(19): siRNA sense strand
guacaaugcagcaacaaga

SEQ ID NO: 2616217 - RNA, 19 nt, Homo sapiens
  misc_RNA (1)...(19): siRNA sense strand
cagcaacaagaacgggaua

SEQ ID NO: 2616218 - RNA, 19 nt, Homo sapiens
  misc_RNA (1)...(19): siRNA sense strand
agaauacugucaagccaaa

SEQ ID NO: 2616219 - RNA, 19 nt, Homo sapiens
  misc_RNA (1)...(19): siRNA sense strand
uguaugaaguugccaagaa

SEQ ID NO: 2616220 - RNA, 19 nt, Homo sapiens
  misc_RNA (1)...(19): siRNA sense strand
acuugaaggaacugagaaa

SEQ ID NO: 2616221 - RNA, 19 nt, Homo sapiens
  misc_RNA (1)...(19): siRNA sense strand
uugaaggaacugagaaaca

SEQ ID NO: 2616222 - RNA, 19 nt, Homo sapiens
  misc_RNA (1)...(19): siRNA sense strand
ccguuggacauguggacua

SEQ ID NO: 2616223 - RNA, 19 nt, Homo sapiens
  misc_RNA (1)...(19): siRNA sense strand
gaacugagaaacaaggaca

SEQ ID NO: 2616224 - RNA, 19 nt, Homo sapiens
  misc_RNA (1)...(19): siRNA sense strand
ggacuggauuuaugggucu

SEQ ID NO: 2616225 - RNA, 19 nt, Homo sapiens
  misc_RNA (1)...(19): siRNA sense strand
ggaaaggaaucauagccca

SEQ ID NO: 2616226 - RNA, 19 nt, Homo sapiens
  misc_RNA (1)...(19): siRNA sense strand
gaaaggaaucauagcccau

SEQ ID NO: 2616227 - RNA, 19 nt, Homo sapiens
  misc_RNA (1)...(19): siRNA sense strand
acaccgacaauuuggguau

SEQ ID NO: 2616228 - RNA, 19 nt, Homo sapiens
  misc_RNA (1)...(19): siRNA sense strand
ggacuaccauuauugggaa

SEQ ID NO: 2616229 - RNA, 19 nt, Homo sapiens
  misc_RNA (1)...(19): siRNA sense strand
cuuacaagcaagugugacu

SEQ ID NO: 2616230 - RNA, 19 nt, Homo sapiens
  misc_RNA (1)...(19): siRNA sense strand
gcuaguagaaggaagcagu

SEQ ID NO: 2616231 - RNA, 19 nt, Homo sapiens
  misc_RNA (1)...(19): siRNA sense strand
auucaggguuuuaggaaca

SEQ ID NO: 2616232 - RNA, 19 nt, Homo sapiens
  misc_RNA (1)...(19): siRNA sense strand
aagaagagcucauggccaa

SEQ ID NO: 2616233 - RNA, 19 nt, Homo sapiens
  misc_RNA (1)...(19): siRNA sense strand
agacaugaugaaagggaau

SEQ ID NO: 2616234 - RNA, 19 nt, Homo sapiens
  misc_RNA (1)...(19): siRNA sense strand
agauaaugccgcugaccaa

SEQ ID NO: 2616235 - RNA, 19 nt, Homo sapiens
  misc_RNA (1)...(19): siRNA sense strand
ccucaauguauuugggcuu

SEQ ID NO: 2616236 - RNA, 19 nt, Homo sapiens
  misc_RNA (1)...(19): siRNA sense strand
cagacaugaugaaagggaa

SEQ ID NO: 2616237 - RNA, 19 nt, Homo sapiens
  misc_RNA (1)...(19): siRNA sense strand
ccucagggaaaauggaaaa

SEQ ID NO: 2616238 - RNA, 19 nt, Homo sapiens
  misc_RNA (1)...(19): siRNA sense strand
aguccuaauucgaagcaga

SEQ ID NO: 2616239 - RNA, 19 nt, Homo sapiens
  misc_RNA (1)...(19): siRNA sense strand
ggccagaacuguugcucga

SEQ ID NO: 2616240 - RNA, 19 nt, Homo sapiens
  misc_RNA (1)...(19): siRNA sense strand
acagcaaggaaucgagcua

SEQ ID NO: 2616241 - RNA, 19 nt, Homo sapiens
  misc_RNA (1)...(19): siRNA sense strand
aagcagaguccucagggaa

SEQ ID NO: 2616242 - RNA, 19 nt, Homo sapiens
  misc_RNA (1)...(19): siRNA sense strand
agcagaguccucagggaaa

SEQ ID NO: 2616243 - RNA, 19 nt, Homo sapiens
  misc_RNA (1)...(19): siRNA sense strand
gaagaagagcucauggcca

SEQ ID NO: 2616244 - RNA, 19 nt, Homo sapiens
  misc_RNA (1)...(19): siRNA sense strand
cuauguuacagcaaggaau

SEQ ID NO: 2616245 - RNA, 19 nt, Homo sapiens
  misc_RNA (1)...(19): siRNA sense strand
ucuuauugguggauggauc

SEQ ID NO: 2616246 - RNA, 19 nt, Homo sapiens
  misc_RNA (1)...(19): siRNA sense strand
aggaagaacaggaggaaga

SEQ ID NO: 2616247 - RNA, 19 nt, Homo sapiens
  misc_RNA (1)...(19): siRNA sense strand
caguauaaucacagaguau

SEQ ID NO: 2616248 - RNA, 19 nt, Homo sapiens
  misc_RNA (1)...(19): siRNA sense strand
uggcagaggaugaggauga

SEQ ID NO: 2616249 - RNA, 19 nt, Homo sapiens
  misc_RNA (1)...(19): siRNA sense strand
ccaacaacuacaagaggaa

SEQ ID NO: 2616250 - RNA, 19 nt, Homo sapiens
  misc_RNA (1)...(19): siRNA sense strand
uggaggaggacgacaauaa

SEQ ID NO: 2616251 - RNA, 19 nt, Homo sapiens
  misc_RNA (1)...(19): siRNA sense strand
cagccaaagcccagccaua

SEQ ID NO: 2616252 - RNA, 19 nt, Homo sapiens
  misc_RNA (1)...(19): siRNA sense strand
ugacauggcuguagaugau

SEQ ID NO: 2616253 - RNA, 19 nt, Homo sapiens
  misc_RNA (1)...(19): siRNA sense strand
ggacaagcgcagugaccau

SEQ ID NO: 2616254 - RNA, 19 nt, Homo sapiens
  misc_RNA (1)...(19): siRNA sense strand
ucuaaagggcuuggagaaa

SEQ ID NO: 2616255 - RNA, 19 nt, Homo sapiens
  misc_RNA (1)...(19): siRNA sense strand
agaguaucuuagagaacaa

SEQ ID NO: 2616256 - RNA, 19 nt, Homo sapiens
  misc_RNA (1)...(19): siRNA sense strand
aggcuaaaccgcagggcau

SEQ ID NO: 2616257 - RNA, 19 nt, Homo sapiens
  misc_RNA (1)...(19): siRNA sense strand
acuuaauggaagagaggau

SEQ ID NO: 2616258 - RNA, 19 nt, Homo sapiens
  misc_RNA (1)...(19): siRNA sense strand
auucacagcugguggcaau

SEQ ID NO: 2616259 - RNA, 19 nt, Homo sapiens
  misc_RNA (1)...(19): siRNA sense strand
uguagaugaugcugaaauu

SEQ ID NO: 2616260 - RNA, 19 nt, Homo sapiens
  misc_RNA (1)...(19): siRNA sense strand
augaggaggcuguggauau

SEQ ID NO: 2616261 - RNA, 19 nt, Homo sapiens
  misc_RNA (1)...(19): siRNA sense strand
gagcuauguugcaggcaga

SEQ ID NO: 2616262 - RNA, 19 nt, Homo sapiens
  misc_RNA (1)...(19): siRNA sense strand
aggcggaguuggaggagga

SEQ ID NO: 2616263 - RNA, 19 nt, Homo sapiens
  misc_RNA (1)...(19): siRNA sense strand
aggcagaugaugaagauga

SEQ ID NO: 2616264 - RNA, 19 nt, Homo sapiens
  misc_RNA (1)...(19): siRNA sense strand
agaagaugaugaugaagau

SEQ ID NO: 2616265 - RNA, 19 nt, Homo sapiens
  misc_RNA (1)...(19): siRNA sense strand
aagaggaggaccaggaaga

SEQ ID NO: 2616266 - RNA, 19 nt, Homo sapiens
  misc_RNA (1)...(19): siRNA sense strand
aagaagaugaugaugaaga

SEQ ID NO: 2616267 - RNA, 19 nt, Homo sapiens
  misc_RNA (1)...(19): siRNA sense strand
aggaugaagaggaggacca

SEQ ID NO: 2616268 - RNA, 19 nt, Homo sapiens
  misc_RNA (1)...(19): siRNA sense strand
aagaacaggaggaagaaga

SEQ ID NO: 2616269 - RNA, 19 nt, Homo sapiens
  misc_RNA (1)...(19): siRNA sense strand
aagaugacuuaauggaaga

SEQ ID NO: 2616270 - RNA, 19 nt, Homo sapiens
  misc_RNA (1)...(19): siRNA sense strand
ccauugaugugaaacggaa

SEQ ID NO: 2616271 - RNA, 19 nt, Homo sapiens
  misc_RNA (1)...(19): siRNA sense strand
cggaguuggaggaggacga

SEQ ID NO: 2616272 - RNA, 19 nt, Homo sapiens
  misc_RNA (1)...(19): siRNA sense strand
cagaugaggagguggaacu

SEQ ID NO: 2616273 - RNA, 19 nt, Homo sapiens
  misc_RNA (1)...(19): siRNA sense strand
ucacagaugcagaccaaau

SEQ ID NO: 2616274 - RNA, 19 nt, Homo sapiens
  misc_RNA (1)...(19): siRNA sense strand
agggaauugucgagaaucu

SEQ ID NO: 2616275 - RNA, 19 nt, Homo sapiens
  misc_RNA (1)...(19): siRNA sense strand
agaugaugaagaugacuua

SEQ ID NO: 2616276 - RNA, 19 nt, Homo sapiens
  misc_RNA (1)...(19): siRNA sense strand
aguuggaggaggacgacaa

SEQ ID NO: 2616277 - RNA, 19 nt, Homo sapiens
  misc_RNA (1)...(19): siRNA sense strand
aggaccaggaagaggaaga

SEQ ID NO: 2616278 - RNA, 19 nt, Homo sapiens
  misc_RNA (1)...(19): siRNA sense strand
cugaugaggagcuagcaaa

SEQ ID NO: 2616279 - RNA, 19 nt, Homo sapiens
  misc_RNA (1)...(19): siRNA sense strand
ucacagaguaucuuagaga

SEQ ID NO: 2616280 - RNA, 19 nt, Homo sapiens
  misc_RNA (1)...(19): siRNA sense strand
ccgggaagccaaugaagau

SEQ ID NO: 2616281 - RNA, 19 nt, Homo sapiens
  misc_RNA (1)...(19): siRNA sense strand
aggaggaagaagaugauga

SEQ ID NO: 2616282 - RNA, 19 nt, Homo sapiens
  misc_RNA (1)...(19): siRNA sense strand
ggaugaagacucugaugca

SEQ ID NO: 2616283 - RNA, 19 nt, Homo sapiens
  misc_RNA (1)...(19): siRNA sense strand
ggcaauagugcuucgaaga

SEQ ID NO: 2616284 - RNA, 19 nt, Homo sapiens
  misc_RNA (1)...(19): siRNA sense strand
ucuuauuucuaaagggcuu

SEQ ID NO: 2616285 - RNA, 19 nt, Homo sapiens
  misc_RNA (1)...(19): siRNA sense strand
caggaggaggccagcuaua

SEQ ID NO: 2616286 - RNA, 19 nt, Homo sapiens
  misc_RNA (1)...(19): siRNA sense strand
aggaagaggaagaacagga

SEQ ID NO: 2616287 - RNA, 19 nt, Homo sapiens
  misc_RNA (1)...(19): siRNA sense strand
aacuuuacgucaaggcuaa

SEQ ID NO: 2616288 - RNA, 19 nt, Homo sapiens
  misc_RNA (1)...(19): siRNA sense strand
cuuuaauccuacagaugau

SEQ ID NO: 2616289 - RNA, 19 nt, Homo sapiens
  misc_RNA (1)...(19): siRNA sense strand
aggagggaauugucgagaa

SEQ ID NO: 2616290 - RNA, 19 nt, Homo sapiens
  misc_RNA (1)...(19): siRNA sense strand
agaugaugaugaagaugau

SEQ ID NO: 2616291 - RNA, 19 nt, Homo sapiens
  misc_RNA (1)...(19): siRNA sense strand
caacaugcucgcugcaaga

SEQ ID NO: 2616292 - RNA, 19 nt, Homo sapiens
  misc_RNA (1)...(19): siRNA sense strand
gaagaugacuuaauggaag

SEQ ID NO: 2616293 - RNA, 19 nt, Homo sapiens
  misc_RNA (1)...(19): siRNA sense strand
ggacgacaauaaugagaac

SEQ ID NO: 2616294 - RNA, 19 nt, Homo sapiens
  misc_RNA (1)...(19): siRNA sense strand
aggcuguggauauggacua

SEQ ID NO: 2616295 - RNA, 19 nt, Homo sapiens
  misc_RNA (1)...(19): siRNA sense strand
cugcaaguaugcugcugaa

SEQ ID NO: 2616296 - RNA, 19 nt, Homo sapiens
  misc_RNA (1)...(19): siRNA sense strand
uugaacgggugucaggaaa

SEQ ID NO: 2616297 - RNA, 19 nt, Homo sapiens
  misc_RNA (1)...(19): siRNA sense strand
ucaccaauguccugagcca

SEQ ID NO: 2616298 - RNA, 19 nt, Homo sapiens
  misc_RNA (1)...(19): siRNA sense strand
cggcacaaaaggagacauu

SEQ ID NO: 2616299 - RNA, 19 nt, Homo sapiens
  misc_RNA (1)...(19): siRNA sense strand
cagaggaugaggaugaaga

SEQ ID NO: 2616300 - RNA, 19 nt, Homo sapiens
  misc_RNA (1)...(19): siRNA sense strand
uagcaaaccuucuagagga

SEQ ID NO: 2616301 - RNA, 19 nt, Homo sapiens
  misc_RNA (1)...(19): siRNA sense strand
gugacauggcuguagauga

SEQ ID NO: 2616302 - RNA, 19 nt, Homo sapiens
  misc_RNA (1)...(19): siRNA sense strand
accaauguccugagccaaa

SEQ ID NO: 2616303 - RNA, 19 nt, Homo sapiens
  misc_RNA (1)...(19): siRNA sense strand
cuacaaaccuauagcaacc

SEQ ID NO: 2616304 - RNA, 19 nt, Homo sapiens
  misc_RNA (1)...(19): siRNA sense strand
ggcuguagaugaugcugaa

SEQ ID NO: 2616305 - RNA, 19 nt, Homo sapiens
  misc_RNA (1)...(19): siRNA sense strand
gggcuuggagaaacagcaa

SEQ ID NO: 2616306 - RNA, 19 nt, Homo sapiens
  misc_RNA (1)...(19): siRNA sense strand
gccaaagcccagccauaaa

SEQ ID NO: 2616307 - RNA, 19 nt, Homo sapiens
  misc_RNA (1)...(19): siRNA sense strand
acucugauuuggaagauga

SEQ ID NO: 2616308 - RNA, 19 nt, Homo sapiens
  misc_RNA (1)...(19): siRNA sense strand
ggaagaacaggaggaagaa

SEQ ID NO: 2616309 - RNA, 19 nt, Homo sapiens
  misc_RNA (1)...(19): siRNA sense strand
gggaagccaaugaagauga

SEQ ID NO: 2616310 - RNA, 19 nt, Homo sapiens
  misc_RNA (1)...(19): siRNA sense strand
gagacauugcccacauuua

SEQ ID NO: 2616311 - RNA, 19 nt, Homo sapiens
  misc_RNA (1)...(19): siRNA sense strand
gggaagauggggacaauga

SEQ ID NO: 2616312 - RNA, 19 nt, Homo sapiens
  misc_RNA (1)...(19): siRNA sense strand
ucaugaaugcacuggugaa

SEQ ID NO: 2616313 - RNA, 19 nt, Homo sapiens
  misc_RNA (1)...(19): siRNA sense strand
cauggugccuacagccaaa

SEQ ID NO: 2616314 - RNA, 19 nt, Homo sapiens
  misc_RNA (1)...(19): siRNA sense strand
ugaagaugacuuaauggaa

SEQ ID NO: 2616315 - RNA, 19 nt, Homo sapiens
  misc_RNA (1)...(19): siRNA sense strand
aggaugaggaugaagagga

SEQ ID NO: 2616316 - RNA, 19 nt, Homo sapiens
  misc_RNA (1)...(19): siRNA sense strand
ggaugaggaugaagaggag

SEQ ID NO: 2616317 - RNA, 19 nt, Homo sapiens
  misc_RNA (1)...(19): siRNA sense strand
ccaacuauagagaugaaaa

SEQ ID NO: 2616318 - RNA, 19 nt, Homo sapiens
  misc_RNA (1)...(19): siRNA sense strand
cggcagaucaucaguaaac

SEQ ID NO: 2616319 - RNA, 19 nt, Homo sapiens
  misc_RNA (1)...(19): siRNA sense strand
acacgggaacagugaugua

SEQ ID NO: 2616320 - RNA, 19 nt, Homo sapiens
  misc_RNA (1)...(19): siRNA sense strand
gacuacaaaccuauagcaa

SEQ ID NO: 2616321 - RNA, 19 nt, Homo sapiens
  misc_RNA (1)...(19): siRNA sense strand
uggaagaagagaaagaaaa

SEQ ID NO: 2616322 - RNA, 19 nt, Homo sapiens
  misc_RNA (1)...(19): siRNA sense strand
auggaagaagagaaagaaa

SEQ ID NO: 2616323 - RNA, 19 nt, Homo sapiens
  misc_RNA (1)...(19): siRNA sense strand
augacagagagaugauaua

SEQ ID NO: 2616324 - RNA, 19 nt, Homo sapiens
  misc_RNA (1)...(19): siRNA sense strand
cagcaggagcagcggacuu

SEQ ID NO: 2616325 - RNA, 19 nt, Homo sapiens
  misc_RNA (1)...(19): siRNA sense strand
ggcuauauauuaugggugu

SEQ ID NO: 2616326 - RNA, 19 nt, Homo sapiens
  misc_RNA (1)...(19): siRNA sense strand
acagaaaaguauggaagaa

SEQ ID NO: 2616327 - RNA, 19 nt, Homo sapiens
  misc_RNA (1)...(19): siRNA sense strand
gagagaugauauacccgaa

SEQ ID NO: 2616328 - RNA, 19 nt, Homo sapiens
  misc_RNA (1)...(19): siRNA sense strand
aaaguauggaagaagagaa

SEQ ID NO: 2616329 - RNA, 19 nt, Homo sapiens
  misc_RNA (1)...(19): siRNA sense strand
guaacuggcaugugggugu

SEQ ID NO: 2616330 - RNA, 19 nt, Homo sapiens
  misc_RNA (1)...(19): siRNA sense strand
aagagaaagaaaagccuaa

SEQ ID NO: 2616331 - RNA, 19 nt, Homo sapiens
  misc_RNA (1)...(19): siRNA sense strand
gaagagaacuggaguggca

SEQ ID NO: 2616332 - RNA, 19 nt, Homo sapiens
  misc_RNA (1)...(19): siRNA sense strand
cagagaaagcacuggccaa

SEQ ID NO: 2616333 - RNA, 19 nt, Homo sapiens
  misc_RNA (1)...(19): siRNA sense strand
cgagaugcggagugagcua

SEQ ID NO: 2616334 - RNA, 19 nt, Homo sapiens
  misc_RNA (1)...(19): siRNA sense strand
cggaagagaugcuaggacu

SEQ ID NO: 2616335 - RNA, 19 nt, Homo sapiens
  misc_RNA (1)...(19): siRNA sense strand
uggagaaacugaagacgga

SEQ ID NO: 2616336 - RNA, 19 nt, Homo sapiens
  misc_RNA (1)...(19): siRNA sense strand
cugagauggacguaaggaa

SEQ ID NO: 2616337 - RNA, 19 nt, Homo sapiens
  misc_RNA (1)...(19): siRNA sense strand
aggcgauggcagcggagaa

SEQ ID NO: 2616338 - RNA, 19 nt, Homo sapiens
  misc_RNA (1)...(19): siRNA sense strand
aucagaaccuccaggaaaa

SEQ ID NO: 2616339 - RNA, 19 nt, Homo sapiens
  misc_RNA (1)...(19): siRNA sense strand
ugaaaauggcggaccagaa

SEQ ID NO: 2616340 - RNA, 19 nt, Homo sapiens
  misc_RNA (1)...(19): siRNA sense strand
ugaagguccacgcgagcaa

SEQ ID NO: 2616341 - RNA, 19 nt, Homo sapiens
  misc_RNA (1)...(19): siRNA sense strand
ggcgauggcagcggagaaa

SEQ ID NO: 2616342 - RNA, 19 nt, Homo sapiens
  misc_RNA (1)...(19): siRNA sense strand
acgaguggcgccuggagaa

SEQ ID NO: 2616343 - RNA, 19 nt, Homo sapiens
  misc_RNA (1)...(19): siRNA sense strand
aagagaaagagaagacaaa

SEQ ID NO: 2616344 - RNA, 19 nt, Homo sapiens
  misc_RNA (1)...(19): siRNA sense strand
ggugaauauaagagaaaga

SEQ ID NO: 2616345 - RNA, 19 nt, Homo sapiens
  misc_RNA (1)...(19): siRNA sense strand
guauuaaggugaagggugu

SEQ ID NO: 2616346 - RNA, 19 nt, Homo sapiens
  misc_RNA (1)...(19): siRNA sense strand
ggguaaaauauuuggagua

SEQ ID NO: 2616347 - RNA, 19 nt, Homo sapiens
  misc_RNA (1)...(19): siRNA sense strand
ccuaaaagcacuaaagaau

SEQ ID NO: 2616348 - RNA, 19 nt, Homo sapiens
  misc_RNA (1)...(19): siRNA sense strand
aagacaaaguguaggagau

SEQ ID NO: 2616349 - RNA, 19 nt, Homo sapiens
  misc_RNA (1)...(19): siRNA sense strand
ucuuagauccagugagaau

SEQ ID NO: 2616350 - RNA, 19 nt, Homo sapiens
  misc_RNA (1)...(19): siRNA sense strand
cuggugaauauaagagaaa

SEQ ID NO: 2616351 - RNA, 19 nt, Homo sapiens
  misc_RNA (1)...(19): siRNA sense strand
cuuugaagaaggugaauau

SEQ ID NO: 2616352 - RNA, 19 nt, Homo sapiens
  misc_RNA (1)...(19): siRNA sense strand
auaugaaacuccuggugaa

SEQ ID NO: 2616353 - RNA, 19 nt, Homo sapiens
  misc_RNA (1)...(19): siRNA sense strand
gcagaguggaaucaggaaa

SEQ ID NO: 2616354 - RNA, 19 nt, Homo sapiens
  misc_RNA (1)...(19): siRNA sense strand
acaguuaggcacagaggaa

SEQ ID NO: 2616355 - RNA, 19 nt, Homo sapiens
  misc_RNA (1)...(19): siRNA sense strand
gaggaaaagaauaaagcua

SEQ ID NO: 2616356 - RNA, 19 nt, Homo sapiens
  misc_RNA (1)...(19): siRNA sense strand
cgauuaugcaucagauauu

SEQ ID NO: 2616357 - RNA, 19 nt, Homo sapiens
  misc_RNA (1)...(19): siRNA sense strand
gagaaagagaagacaaagu

SEQ ID NO: 2616358 - RNA, 19 nt, Homo sapiens
  misc_RNA (1)...(19): siRNA sense strand
gcccagauguugaugaaaa

SEQ ID NO: 2616359 - RNA, 19 nt, Homo sapiens
  misc_RNA (1)...(19): siRNA sense strand
aguaauauuugcaccgaau

SEQ ID NO: 2616360 - RNA, 19 nt, Homo sapiens
  misc_RNA (1)...(19): siRNA sense strand
acuggaaggcuuugaagaa

SEQ ID NO: 2616361 - RNA, 19 nt, Homo sapiens
  misc_RNA (1)...(19): siRNA sense strand
gugccaaggcgaaguaaaa

SEQ ID NO: 2616362 - RNA, 19 nt, Homo sapiens
  misc_RNA (1)...(19): siRNA sense strand
agacaaaguguaggagauu

SEQ ID NO: 2616363 - RNA, 19 nt, Homo sapiens
  misc_RNA (1)...(19): siRNA sense strand
gcagagaaguaaauggaug

SEQ ID NO: 2616364 - RNA, 19 nt, Homo sapiens
  misc_RNA (1)...(19): siRNA sense strand
ucagacaagugaaggacau

SEQ ID NO: 2616365 - RNA, 19 nt, Homo sapiens
  misc_RNA (1)...(19): siRNA sense strand
uaagagaaagagaagacaa

SEQ ID NO: 2616366 - RNA, 19 nt, Homo sapiens
  misc_RNA (1)...(19): siRNA sense strand
gcaugaagcacuuuugaaa

SEQ ID NO: 2616367 - RNA, 19 nt, Homo sapiens
  misc_RNA (1)...(19): siRNA sense strand
aguuaggcacagaggaaaa

SEQ ID NO: 2616368 - RNA, 19 nt, Homo sapiens
  misc_RNA (1)...(19): siRNA sense strand
gaaacagcagccacggaaa

SEQ ID NO: 2616369 - RNA, 19 nt, Homo sapiens
  misc_RNA (1)...(19): siRNA sense strand
agaaaagaagcuacgauua

SEQ ID NO: 2616370 - RNA, 19 nt, Homo sapiens
  misc_RNA (1)...(19): siRNA sense strand
gagaagacaaaguguagga

SEQ ID NO: 2616371 - RNA, 19 nt, Homo sapiens
  misc_RNA (1)...(19): siRNA sense strand
agugagaauaagauggaca

SEQ ID NO: 2616372 - RNA, 19 nt, Homo sapiens
  misc_RNA (1)...(19): siRNA sense strand
ucgcaggagacaugaaaca

SEQ ID NO: 2616373 - RNA, 19 nt, Homo sapiens
  misc_RNA (1)...(19): siRNA sense strand
cagaguggaaucaggaaaa

SEQ ID NO: 2616374 - RNA, 19 nt, Homo sapiens
  misc_RNA (1)...(19): siRNA sense strand
ugaaaguguugguuggcga

SEQ ID NO: 2616375 - RNA, 19 nt, Homo sapiens
  misc_RNA (1)...(19): siRNA sense strand
gguggaaaccauuugauca

SEQ ID NO: 2616376 - RNA, 19 nt, Homo sapiens
  misc_RNA (1)...(19): siRNA sense strand
cagagaaguaaauggaugu

SEQ ID NO: 2616377 - RNA, 19 nt, Homo sapiens
  misc_RNA (1)...(19): siRNA sense strand
gaagacaaaguguaggaga

SEQ ID NO: 2616378 - RNA, 19 nt, Homo sapiens
  misc_RNA (1)...(19): siRNA sense strand
agaauaagauggacagcag

SEQ ID NO: 2616379 - RNA, 19 nt, Homo sapiens
  misc_RNA (1)...(19): siRNA sense strand
ccuggugaauauaagagaa

SEQ ID NO: 2616380 - RNA, 19 nt, Homo sapiens
  misc_RNA (1)...(19): siRNA sense strand
cagaaaagaagcuacgauu

SEQ ID NO: 2616381 - RNA, 19 nt, Homo sapiens
  misc_RNA (1)...(19): siRNA sense strand
auuacaggcugcaguagua

SEQ ID NO: 2616382 - RNA, 19 nt, Homo sapiens
  misc_RNA (1)...(19): siRNA sense strand
gcuuugaagaaggugaaua

SEQ ID NO: 2616383 - RNA, 19 nt, Homo sapiens
  misc_RNA (1)...(19): siRNA sense strand
gggaacugccagagcccau

SEQ ID NO: 2616384 - RNA, 19 nt, Homo sapiens
  misc_RNA (1)...(19): siRNA sense strand
caguaauauuugcaccgaa

SEQ ID NO: 2616385 - RNA, 19 nt, Homo sapiens
  misc_RNA (1)...(19): siRNA sense strand
gcgacuugcaaaucaacaa

SEQ ID NO: 2616386 - RNA, 19 nt, Homo sapiens
  misc_RNA (1)...(19): siRNA sense strand
agaaaagguucgaagaucu

SEQ ID NO: 2616387 - RNA, 19 nt, Homo sapiens
  misc_RNA (1)...(19): siRNA sense strand
acaaaguguaggagauuuu

SEQ ID NO: 2616388 - RNA, 19 nt, Homo sapiens
  misc_RNA (1)...(19): siRNA sense strand
aaacagcagccacggaaau

SEQ ID NO: 2616389 - RNA, 19 nt, Homo sapiens
  misc_RNA (1)...(19): siRNA sense strand
cugcaguaguacagacucu

SEQ ID NO: 2616390 - RNA, 19 nt, Homo sapiens
  misc_RNA (1)...(19): siRNA sense strand
uugaagaaggugaauauga

SEQ ID NO: 2616391 - RNA, 19 nt, Homo sapiens
  misc_RNA (1)...(19): siRNA sense strand
ucuuuaacuuucucaggaa

SEQ ID NO: 2616392 - RNA, 19 nt, Homo sapiens
  misc_RNA (1)...(19): siRNA sense strand
aggcuuugaagaaggugaa

SEQ ID NO: 2616393 - RNA, 19 nt, Homo sapiens
  misc_RNA (1)...(19): siRNA sense strand
auaaaguggaucaugguga

SEQ ID NO: 2616394 - RNA, 19 nt, Homo sapiens
  misc_RNA (1)...(19): siRNA sense strand
uuagauccagugagaauaa

SEQ ID NO: 2616395 - RNA, 19 nt, Homo sapiens
  misc_RNA (1)...(19): siRNA sense strand
cuuuagaagaccauauuca

SEQ ID NO: 2616396 - RNA, 19 nt, Homo sapiens
  misc_RNA (1)...(19): siRNA sense strand
gccuaaaagcacuaaagaa

SEQ ID NO: 2616397 - RNA, 19 nt, Homo sapiens
  misc_RNA (1)...(19): siRNA sense strand
agauauugggcguguacca

SEQ ID NO: 2616398 - RNA, 19 nt, Homo sapiens
  misc_RNA (1)...(19): siRNA sense strand
uauaagagaaagagaagac

SEQ ID NO: 2616399 - RNA, 19 nt, Homo sapiens
  misc_RNA (1)...(19): siRNA sense strand
aagagaaagagaagacaaa

SEQ ID NO: 2616400 - RNA, 19 nt, Homo sapiens
  misc_RNA (1)...(19): siRNA sense strand
ggugaauauaagagaaaga

SEQ ID NO: 2616401 - RNA, 19 nt, Homo sapiens
  misc_RNA (1)...(19): siRNA sense strand
guauuaaggugaagggugu

SEQ ID NO: 2616402 - RNA, 19 nt, Homo sapiens
  misc_RNA (1)...(19): siRNA sense strand
ggguaaaauauuuggagua

SEQ ID NO: 2616403 - RNA, 19 nt, Homo sapiens
  misc_RNA (1)...(19): siRNA sense strand
ccuaaaagcacuaaagaau

SEQ ID NO: 2616404 - RNA, 19 nt, Homo sapiens
  misc_RNA (1)...(19): siRNA sense strand
aagacaaaguguaggagau

SEQ ID NO: 2616405 - RNA, 19 nt, Homo sapiens
  misc_RNA (1)...(19): siRNA sense strand
ucuuagauccagugagaau

SEQ ID NO: 2616406 - RNA, 19 nt, Homo sapiens
  misc_RNA (1)...(19): siRNA sense strand
cuggugaauauaagagaaa

SEQ ID NO: 2616407 - RNA, 19 nt, Homo sapiens
  misc_RNA (1)...(19): siRNA sense strand
cuuugaagaaggugaauau

SEQ ID NO: 2616408 - RNA, 19 nt, Homo sapiens
  misc_RNA (1)...(19): siRNA sense strand
auaugaaacuccuggugaa

SEQ ID NO: 2616409 - RNA, 19 nt, Homo sapiens
  misc_RNA (1)...(19): siRNA sense strand
gcagaguggaaucaggaaa

SEQ ID NO: 2616410 - RNA, 19 nt, Homo sapiens
  misc_RNA (1)...(19): siRNA sense strand
acaguuaggcacagaggaa

SEQ ID NO: 2616411 - RNA, 19 nt, Homo sapiens
  misc_RNA (1)...(19): siRNA sense strand
gaggaaaagaauaaagcua

SEQ ID NO: 2616412 - RNA, 19 nt, Homo sapiens
  misc_RNA (1)...(19): siRNA sense strand
cgauuaugcaucagauauu

SEQ ID NO: 2616413 - RNA, 19 nt, Homo sapiens
  misc_RNA (1)...(19): siRNA sense strand
gagaaagagaagacaaagu

SEQ ID NO: 2616414 - RNA, 19 nt, Homo sapiens
  misc_RNA (1)...(19): siRNA sense strand
gcccagauguugaugaaaa

SEQ ID NO: 2616415 - RNA, 19 nt, Homo sapiens
  misc_RNA (1)...(19): siRNA sense strand
aguaauauuugcaccgaau

SEQ ID NO: 2616416 - RNA, 19 nt, Homo sapiens
  misc_RNA (1)...(19): siRNA sense strand
acuggaaggcuuugaagaa

SEQ ID NO: 2616417 - RNA, 19 nt, Homo sapiens
  misc_RNA (1)...(19): siRNA sense strand
gugccaaggcgaaguaaaa

SEQ ID NO: 2616418 - RNA, 19 nt, Homo sapiens
  misc_RNA (1)...(19): siRNA sense strand
agacaaaguguaggagauu

SEQ ID NO: 2616419 - RNA, 19 nt, Homo sapiens
  misc_RNA (1)...(19): siRNA sense strand
gcagagaaguaaauggaug

SEQ ID NO: 2616420 - RNA, 19 nt, Homo sapiens
  misc_RNA (1)...(19): siRNA sense strand
ucagacaagugaaggacau

SEQ ID NO: 2616421 - RNA, 19 nt, Homo sapiens
  misc_RNA (1)...(19): siRNA sense strand
uaagagaaagagaagacaa

SEQ ID NO: 2616422 - RNA, 19 nt, Homo sapiens
  misc_RNA (1)...(19): siRNA sense strand
gcaugaagcacuuuugaaa

SEQ ID NO: 2616423 - RNA, 19 nt, Homo sapiens
  misc_RNA (1)...(19): siRNA sense strand
aguuaggcacagaggaaaa

SEQ ID NO: 2616424 - RNA, 19 nt, Homo sapiens
  misc_RNA (1)...(19): siRNA sense strand
gaaacagcagccacggaaa

SEQ ID NO: 2616425 - RNA, 19 nt, Homo sapiens
  misc_RNA (1)...(19): siRNA sense strand
agaaaagaagcuacgauua

SEQ ID NO: 2616426 - RNA, 19 nt, Homo sapiens
  misc_RNA (1)...(19): siRNA sense strand
gagaagacaaaguguagga

SEQ ID NO: 2616427 - RNA, 19 nt, Homo sapiens
  misc_RNA (1)...(19): siRNA sense strand
agugagaauaagauggaca

SEQ ID NO: 2616428 - RNA, 19 nt, Homo sapiens
  misc_RNA (1)...(19): siRNA sense strand
ucgcaggagacaugaaaca

SEQ ID NO: 2616429 - RNA, 19 nt, Homo sapiens
  misc_RNA (1)...(19): siRNA sense strand
cagaguggaaucaggaaaa

SEQ ID NO: 2616430 - RNA, 19 nt, Homo sapiens
  misc_RNA (1)...(19): siRNA sense strand
ugaaaguguugguuggcga

SEQ ID NO: 2616431 - RNA, 19 nt, Homo sapiens
  misc_RNA (1)...(19): siRNA sense strand
gguggaaaccauuugauca

SEQ ID NO: 2616432 - RNA, 19 nt, Homo sapiens
  misc_RNA (1)...(19): siRNA sense strand
cagagaaguaaauggaugu

SEQ ID NO: 2616433 - RNA, 19 nt, Homo sapiens
  misc_RNA (1)...(19): siRNA sense strand
gaagacaaaguguaggaga

SEQ ID NO: 2616434 - RNA, 19 nt, Homo sapiens
  misc_RNA (1)...(19): siRNA sense strand
agaauaagauggacagcag

SEQ ID NO: 2616435 - RNA, 19 nt, Homo sapiens
  misc_RNA (1)...(19): siRNA sense strand
ccuggugaauauaagagaa

SEQ ID NO: 2616436 - RNA, 19 nt, Homo sapiens
  misc_RNA (1)...(19): siRNA sense strand
cagaaaagaagcuacgauu

SEQ ID NO: 2616437 - RNA, 19 nt, Homo sapiens
  misc_RNA (1)...(19): siRNA sense strand
auuacaggcugcaguagua

SEQ ID NO: 2616438 - RNA, 19 nt, Homo sapiens
  misc_RNA (1)...(19): siRNA sense strand
gcuuugaagaaggugaaua

SEQ ID NO: 2616439 - RNA, 19 nt, Homo sapiens
  misc_RNA (1)...(19): siRNA sense strand
gggaacugccagagcccau

SEQ ID NO: 2616440 - RNA, 19 nt, Homo sapiens
  misc_RNA (1)...(19): siRNA sense strand
caguaauauuugcaccgaa

SEQ ID NO: 2616441 - RNA, 19 nt, Homo sapiens
  misc_RNA (1)...(19): siRNA sense strand
gcgacuugcaaaucaacaa

SEQ ID NO: 2616442 - RNA, 19 nt, Homo sapiens
  misc_RNA (1)...(19): siRNA sense strand
agaaaagguucgaagaucu

SEQ ID NO: 2616443 - RNA, 19 nt, Homo sapiens
  misc_RNA (1)...(19): siRNA sense strand
acaaaguguaggagauuuu

SEQ ID NO: 2616444 - RNA, 19 nt, Homo sapiens
  misc_RNA (1)...(19): siRNA sense strand
aaacagcagccacggaaau

SEQ ID NO: 2616445 - RNA, 19 nt, Homo sapiens
  misc_RNA (1)...(19): siRNA sense strand
cugcaguaguacagacucu

SEQ ID NO: 2616446 - RNA, 19 nt, Homo sapiens
  misc_RNA (1)...(19): siRNA sense strand
uugaagaaggugaauauga

SEQ ID NO: 2616447 - RNA, 19 nt, Homo sapiens
  misc_RNA (1)...(19): siRNA sense strand
ucuuuaacuuucucaggaa

SEQ ID NO: 2616448 - RNA, 19 nt, Homo sapiens
  misc_RNA (1)...(19): siRNA sense strand
aggcuuugaagaaggugaa

SEQ ID NO: 2616449 - RNA, 19 nt, Homo sapiens
  misc_RNA (1)...(19): siRNA sense strand
auaaaguggaucaugguga

SEQ ID NO: 2616450 - RNA, 19 nt, Homo sapiens
  misc_RNA (1)...(19): siRNA sense strand
uuagauccagugagaauaa

SEQ ID NO: 2616451 - RNA, 19 nt, Homo sapiens
  misc_RNA (1)...(19): siRNA sense strand
cuuuagaagaccauauuca

SEQ ID NO: 2616452 - RNA, 19 nt, Homo sapiens
  misc_RNA (1)...(19): siRNA sense strand
gccuaaaagcacuaaagaa

SEQ ID NO: 2616453 - RNA, 19 nt, Homo sapiens
  misc_RNA (1)...(19): siRNA sense strand
agauauugggcguguacca

SEQ ID NO: 2616454 - RNA, 19 nt, Homo sapiens
  misc_RNA (1)...(19): siRNA sense strand
uauaagagaaagagaagac

SEQ ID NO: 2616455 - RNA, 19 nt, Homo sapiens
  misc_RNA (1)...(19): siRNA sense strand
agauaaacugcgagaggua

SEQ ID NO: 2616456 - RNA, 19 nt, Homo sapiens
  misc_RNA (1)...(19): siRNA sense strand
gcauaaacaccgaggaacu

SEQ ID NO: 2616457 - RNA, 19 nt, Homo sapiens
  misc_RNA (1)...(19): siRNA sense strand
caaagaagguggugugcca

SEQ ID NO: 2616458 - RNA, 19 nt, Homo sapiens
  misc_RNA (1)...(19): siRNA sense strand
gcaauauaaucaaugggaa

SEQ ID NO: 2616459 - RNA, 19 nt, Homo sapiens
  misc_RNA (1)...(19): siRNA sense strand
gugcauaaacaccgaggaa

SEQ ID NO: 2616460 - RNA, 19 nt, Homo sapiens
  misc_RNA (1)...(19): siRNA sense strand
cagaagaaacaguggauac

SEQ ID NO: 2616461 - RNA, 19 nt, Homo sapiens
  misc_RNA (1)...(19): siRNA sense strand
cuguucugaucgaggguua

SEQ ID NO: 2616462 - RNA, 19 nt, Homo sapiens
  misc_RNA (1)...(19): siRNA sense strand
guaccuaauuacugcaaaa

SEQ ID NO: 2616463 - RNA, 19 nt, Homo sapiens
  misc_RNA (1)...(19): siRNA sense strand
gaaggaaguugcugcccaa

SEQ ID NO: 2616464 - RNA, 19 nt, Homo sapiens
  misc_RNA (1)...(19): siRNA sense strand
gggaaaugugaauguaaca

SEQ ID NO: 2616465 - RNA, 19 nt, Homo sapiens
  misc_RNA (1)...(19): siRNA sense strand
uggaauauuaugauggaga

SEQ ID NO: 2616466 - RNA, 19 nt, Homo sapiens
  misc_RNA (1)...(19): siRNA sense strand
gagaauugaagaagagaag

SEQ ID NO: 2616467 - RNA, 19 nt, Homo sapiens
  misc_RNA (1)...(19): siRNA sense strand
caucugucgcuguaagaaa

SEQ ID NO: 2616468 - RNA, 19 nt, Homo sapiens
  misc_RNA (1)...(19): siRNA sense strand
gaaggagaaacguggaaca

SEQ ID NO: 2616469 - RNA, 19 nt, Homo sapiens
  misc_RNA (1)...(19): siRNA sense strand
ugcccaguguggugagaua

SEQ ID NO: 2616470 - RNA, 19 nt, Homo sapiens
  misc_RNA (1)...(19): siRNA sense strand
agagaauugaagaagagaa

SEQ ID NO: 2616471 - RNA, 19 nt, Homo sapiens
  misc_RNA (1)...(19): siRNA sense strand
gagaauacuuuguggaagg

SEQ ID NO: 2616472 - RNA, 19 nt, Homo sapiens
  misc_RNA (1)...(19): siRNA sense strand
ccauaaucugugacaagua

SEQ ID NO: 2616473 - RNA, 19 nt, Homo sapiens
  misc_RNA (1)...(19): siRNA sense strand
aggagaauacuuuguggaa

SEQ ID NO: 2616474 - RNA, 19 nt, Homo sapiens
  misc_RNA (1)...(19): siRNA sense strand
cccaagaagugcagaccca

SEQ ID NO: 2616475 - RNA, 19 nt, Homo sapiens
  misc_RNA (1)...(19): siRNA sense strand
ccaucaacguggaaggaag

SEQ ID NO: 2616476 - RNA, 19 nt, Homo sapiens
  misc_RNA (1)...(19): siRNA sense strand
ccuucuguauccugugaaa

SEQ ID NO: 2616477 - RNA, 19 nt, Homo sapiens
  misc_RNA (1)...(19): siRNA sense strand
caacaagaugcgagugucu

SEQ ID NO: 2616478 - RNA, 19 nt, Homo sapiens
  misc_RNA (1)...(19): siRNA sense strand
cgggaaugcuacugucuca

SEQ ID NO: 2616479 - RNA, 19 nt, Homo sapiens
  misc_RNA (1)...(19): siRNA sense strand
ucaucaaucagaagaaaca

SEQ ID NO: 2616480 - RNA, 19 nt, Homo sapiens
  misc_RNA (1)...(19): siRNA sense strand
cguauuuaacaauguggaa

SEQ ID NO: 2616481 - RNA, 19 nt, Homo sapiens
  misc_RNA (1)...(19): siRNA sense strand
ggugagauaaacugcgaga

SEQ ID NO: 2616482 - RNA, 19 nt, Homo sapiens
  misc_RNA (1)...(19): siRNA sense strand
uugaagaagagaagccaga

SEQ ID NO: 2616483 - RNA, 19 nt, Homo sapiens
  misc_RNA (1)...(19): siRNA sense strand
uguuaaugauacaaagcca

SEQ ID NO: 2616484 - RNA, 19 nt, Homo sapiens
  misc_RNA (1)...(19): siRNA sense strand
cggaccugucagugcauaa

SEQ ID NO: 2616485 - RNA, 19 nt, Homo sapiens
  misc_RNA (1)...(19): siRNA sense strand
cuuggauugcugaagaaua

SEQ ID NO: 2616486 - RNA, 19 nt, Homo sapiens
  misc_RNA (1)...(19): siRNA sense strand
uggcccacgccuagugaaa

SEQ ID NO: 2616487 - RNA, 19 nt, Homo sapiens
  misc_RNA (1)...(19): siRNA sense strand
gcgaugggacaccuggaaa

SEQ ID NO: 2616488 - RNA, 19 nt, Homo sapiens
  misc_RNA (1)...(19): siRNA sense strand
gcgaagaaccaaccaucau

SEQ ID NO: 2616489 - RNA, 19 nt, Homo sapiens
  misc_RNA (1)...(19): siRNA sense strand
acagggaaggacugcauua

SEQ ID NO: 2616490 - RNA, 19 nt, Homo sapiens
  misc_RNA (1)...(19): siRNA sense strand
cagaugacuuuguggugca

SEQ ID NO: 2616491 - RNA, 19 nt, Homo sapiens
  misc_RNA (1)...(19): siRNA sense strand
ggaaggaaguugcugccca

SEQ ID NO: 2616492 - RNA, 19 nt, Homo sapiens
  misc_RNA (1)...(19): siRNA sense strand
cagccugcguauuuaacaa

SEQ ID NO: 2616493 - RNA, 19 nt, Homo sapiens
  misc_RNA (1)...(19): siRNA sense strand
cacgaugggugccgggaau

SEQ ID NO: 2616494 - RNA, 19 nt, Homo sapiens
  misc_RNA (1)...(19): siRNA sense strand
uggacaguucccagagaau

SEQ ID NO: 2616495 - RNA, 19 nt, Homo sapiens
  misc_RNA (1)...(19): siRNA sense strand
ugucaaaagccucagggaa

SEQ ID NO: 2616496 - RNA, 19 nt, Homo sapiens
  misc_RNA (1)...(19): siRNA sense strand
uaagaaauguccagagcuc

SEQ ID NO: 2616497 - RNA, 19 nt, Homo sapiens
  misc_RNA (1)...(19): siRNA sense strand
aauacuuuguggaaggaga

SEQ ID NO: 2616498 - RNA, 19 nt, Homo sapiens
  misc_RNA (1)...(19): siRNA sense strand
gcguuugcgaagaugagaa

SEQ ID NO: 2616499 - RNA, 19 nt, Homo sapiens
  misc_RNA (1)...(19): siRNA sense strand
cccaguguggugagauaaa

SEQ ID NO: 2616500 - RNA, 19 nt, Homo sapiens
  misc_RNA (1)...(19): siRNA sense strand
caauaacagcguaccuaau

SEQ ID NO: 2616501 - RNA, 19 nt, Homo sapiens
  misc_RNA (1)...(19): siRNA sense strand
gaaccagaugcaagauuca

SEQ ID NO: 2616502 - RNA, 19 nt, Homo sapiens
  misc_RNA (1)...(19): siRNA sense strand
cccagagaaugcuaagaau

SEQ ID NO: 2616503 - RNA, 19 nt, Homo sapiens
  misc_RNA (1)...(19): siRNA sense strand
ccaucuacaggcagacaau

SEQ ID NO: 2616504 - RNA, 19 nt, Homo sapiens
  misc_RNA (1)...(19): siRNA sense strand
gaauauuaugauggagaca

SEQ ID NO: 2616505 - RNA, 19 nt, Homo sapiens
  misc_RNA (1)...(19): siRNA sense strand
uggaaggagaaacguggaa

SEQ ID NO: 2616506 - RNA, 19 nt, Homo sapiens
  misc_RNA (1)...(19): siRNA sense strand
cagaaauguaugucccaga

SEQ ID NO: 2616507 - RNA, 19 nt, Homo sapiens
  misc_RNA (1)...(19): siRNA sense strand
gauaacaggcugcacccaa

SEQ ID NO: 2616508 - RNA, 19 nt, Homo sapiens
  misc_RNA (1)...(19): siRNA sense strand
guggacugcaagaaaggaa

SEQ ID NO: 2616509 - RNA, 19 nt, Homo sapiens
  misc_RNA (1)...(19): siRNA sense strand
augggaaaugugaauguaa

SEQ ID NO: 2616510 - RNA, 19 nt, Homo sapiens
  misc_RNA (1)...(19): siRNA sense strand
agucaggauaugugccuuu

SEQ ID NO: 2616511 - RNA, 19 nt, Homo sapiens
  misc_RNA (1)...(19): siRNA sense strand
cugcaagaaaggaaccaga

SEQ ID NO: 2616512 - RNA, 19 nt, Homo sapiens
  misc_RNA (1)...(19): siRNA sense strand
guucaaugucacagagaaa

SEQ ID NO: 2616513 - RNA, 19 nt, Homo sapiens
  misc_RNA (1)...(19): siRNA sense strand
cagcaagggugcaggccaa

SEQ ID NO: 2616514 - RNA, 19 nt, Homo sapiens
  misc_RNA (1)...(19): siRNA sense strand
cagcaaagauggaagagga

SEQ ID NO: 2616515 - RNA, 19 nt, Homo sapiens
  misc_RNA (1)...(19): siRNA sense strand
agaaggaggcccaggacaa

SEQ ID NO: 2616516 - RNA, 19 nt, Homo sapiens
  misc_RNA (1)...(19): siRNA sense strand
aggaagaggaagaagaaga

SEQ ID NO: 2616517 - RNA, 19 nt, Homo sapiens
  misc_RNA (1)...(19): siRNA sense strand
ccucgaaagggaagagcaa

SEQ ID NO: 2616518 - RNA, 19 nt, Homo sapiens
  misc_RNA (1)...(19): siRNA sense strand
cuucagaacccauggaaaa

SEQ ID NO: 2616519 - RNA, 19 nt, Homo sapiens
  misc_RNA (1)...(19): siRNA sense strand
aggaggaggaagaggaaga

SEQ ID NO: 2616520 - RNA, 19 nt, Homo sapiens
  misc_RNA (1)...(19): siRNA sense strand
ccaagauccuggugcggaa

SEQ ID NO: 2616521 - RNA, 19 nt, Homo sapiens
  misc_RNA (1)...(19): siRNA sense strand
gcacagaaguacaacgcca

SEQ ID NO: 2616522 - RNA, 19 nt, Homo sapiens
  misc_RNA (1)...(19): siRNA sense strand
uggaagaggaggaggagga

SEQ ID NO: 2616523 - RNA, 19 nt, Homo sapiens
  misc_RNA (1)...(19): siRNA sense strand
gggugcaggccaagagcaa

SEQ ID NO: 2616524 - RNA, 19 nt, Homo sapiens
  misc_RNA (1)...(19): siRNA sense strand
gggagaacgaagaggagga

SEQ ID NO: 2616525 - RNA, 19 nt, Homo sapiens
  misc_RNA (1)...(19): siRNA sense strand
uggagaagcugaaggagga

SEQ ID NO: 2616526 - RNA, 19 nt, Homo sapiens
  misc_RNA (1)...(19): siRNA sense strand
cggaggaagaggaaaguga

SEQ ID NO: 2616527 - RNA, 19 nt, Homo sapiens
  misc_RNA (1)...(19): siRNA sense strand
ccgaggaggaucuggagaa

SEQ ID NO: 2616528 - RNA, 19 nt, Homo sapiens
  misc_RNA (1)...(19): siRNA sense strand
caccaagagucaaguguuu

SEQ ID NO: 2616529 - RNA, 19 nt, Homo sapiens
  misc_RNA (1)...(19): siRNA sense strand
agggaugccagcugggaaa

SEQ ID NO: 2616530 - RNA, 19 nt, Homo sapiens
  misc_RNA (1)...(19): siRNA sense strand
ucuccaagaagaagaacaa

SEQ ID NO: 2616531 - RNA, 19 nt, Homo sapiens
  misc_RNA (1)...(19): siRNA sense strand
gcacugugaugaagggagu

SEQ ID NO: 2616532 - RNA, 19 nt, Homo sapiens
  misc_RNA (1)...(19): siRNA sense strand
cguccuacaagaagaagaa

SEQ ID NO: 2616533 - RNA, 19 nt, Homo sapiens
  misc_RNA (1)...(19): siRNA sense strand
caaagauggaagaggagga

SEQ ID NO: 2616534 - RNA, 19 nt, Homo sapiens
  misc_RNA (1)...(19): siRNA sense strand
aggaggaagaggaagaaga

SEQ ID NO: 2616535 - RNA, 19 nt, Homo sapiens
  misc_RNA (1)...(19): siRNA sense strand
gaagagaagcugaaggaag

SEQ ID NO: 2616536 - RNA, 19 nt, Homo sapiens
  misc_RNA (1)...(19): siRNA sense strand
cgaaugggaugaaggagga

SEQ ID NO: 2616537 - RNA, 19 nt, Homo sapiens
  misc_RNA (1)...(19): siRNA sense strand
ccaaagaagaugacuggga

SEQ ID NO: 2616538 - RNA, 19 nt, Homo sapiens
  misc_RNA (1)...(19): siRNA sense strand
ggucugugguguuggacga

SEQ ID NO: 2616539 - RNA, 19 nt, Homo sapiens
  misc_RNA (1)...(19): siRNA sense strand
agaacgaagaggaggagga

SEQ ID NO: 2616540 - RNA, 19 nt, Homo sapiens
  misc_RNA (1)...(19): siRNA sense strand
aagaagaagaagagagccu

SEQ ID NO: 2616541 - RNA, 19 nt, Homo sapiens
  misc_RNA (1)...(19): siRNA sense strand
augaagaggaagugaagca

SEQ ID NO: 2616542 - RNA, 19 nt, Homo sapiens
  misc_RNA (1)...(19): siRNA sense strand
aagaaagaugagaagaaga

SEQ ID NO: 2616543 - RNA, 19 nt, Homo sapiens
  misc_RNA (1)...(19): siRNA sense strand
ucaagcagcuccaggguca

SEQ ID NO: 2616544 - RNA, 19 nt, Homo sapiens
  misc_RNA (1)...(19): siRNA sense strand
acgaagaggaggaggaccu

SEQ ID NO: 2616545 - RNA, 19 nt, Homo sapiens
  misc_RNA (1)...(19): siRNA sense strand
agaagaagaaggaggccca

SEQ ID NO: 2616546 - RNA, 19 nt, Homo sapiens
  misc_RNA (1)...(19): siRNA sense strand
aagaggaagaagaagaaga

SEQ ID NO: 2616547 - RNA, 19 nt, Homo sapiens
  misc_RNA (1)...(19): siRNA sense strand
agacugugauucuggucaa

SEQ ID NO: 2616548 - RNA, 19 nt, Homo sapiens
  misc_RNA (1)...(19): siRNA sense strand
agauggaagaggaggagga

SEQ ID NO: 2616549 - RNA, 19 nt, Homo sapiens
  misc_RNA (1)...(19): siRNA sense strand
ccuacaagaagaagaagga

SEQ ID NO: 2616550 - RNA, 19 nt, Homo sapiens
  misc_RNA (1)...(19): siRNA sense strand
ccuucagaacccauggaaa

SEQ ID NO: 2616551 - RNA, 19 nt, Homo sapiens
  misc_RNA (1)...(19): siRNA sense strand
cugaaauccaagaugguga

SEQ ID NO: 2616552 - RNA, 19 nt, Homo sapiens
  misc_RNA (1)...(19): siRNA sense strand
gcuccaucuccaagaagaa

SEQ ID NO: 2616553 - RNA, 19 nt, Homo sapiens
  misc_RNA (1)...(19): siRNA sense strand
aggccagagccgagacaga

SEQ ID NO: 2616554 - RNA, 19 nt, Homo sapiens
  misc_RNA (1)...(19): siRNA sense strand
ugaaaauccaacagaggaa

SEQ ID NO: 2616555 - RNA, 19 nt, Homo sapiens
  misc_RNA (1)...(19): siRNA sense strand
ggaagaagaagaagagagc

SEQ ID NO: 2616556 - RNA, 19 nt, Homo sapiens
  misc_RNA (1)...(19): siRNA sense strand
uguuugaccacgagaccaa

SEQ ID NO: 2616557 - RNA, 19 nt, Homo sapiens
  misc_RNA (1)...(19): siRNA sense strand
gcagcagagcgaagcaaga

SEQ ID NO: 2616558 - RNA, 19 nt, Homo sapiens
  misc_RNA (1)...(19): siRNA sense strand
ggaaagagacagcaagggu

SEQ ID NO: 2616559 - RNA, 19 nt, Homo sapiens
  misc_RNA (1)...(19): siRNA sense strand
cguucaaugucacagagaa

SEQ ID NO: 2616560 - RNA, 19 nt, Homo sapiens
  misc_RNA (1)...(19): siRNA sense strand
gaagaagaacaaagcagga

SEQ ID NO: 2616561 - RNA, 19 nt, Homo sapiens
  misc_RNA (1)...(19): siRNA sense strand
ggaacgagccacuaagcca

SEQ ID NO: 2616562 - RNA, 19 nt, Homo sapiens
  misc_RNA (1)...(19): siRNA sense strand
cgugaagaaucucccgaau

SEQ ID NO: 2616563 - RNA, 19 nt, Homo sapiens
  misc_RNA (1)...(19): siRNA sense strand
ucaccaagcaggaugcgaa

SEQ ID NO: 2616564 - RNA, 19 nt, Homo sapiens
  misc_RNA (1)...(19): siRNA sense strand
cagaaggcacagaagcauu

SEQ ID NO: 2616565 - RNA, 19 nt, Homo sapiens
  misc_RNA (1)...(19): siRNA sense strand
cagaggaaggagcagacaa

SEQ ID NO: 2616566 - RNA, 19 nt, Homo sapiens
  misc_RNA (1)...(19): siRNA sense strand
aucgagguguucagggaaa

SEQ ID NO: 2616567 - RNA, 19 nt, Homo sapiens
  misc_RNA (1)...(19): siRNA sense strand
aaacagugccugauggcga

SEQ ID NO: 2616568 - RNA, 19 nt, Homo sapiens
  misc_RNA (1)...(19): siRNA sense strand
cagacaacucuucagcaaa

SEQ ID NO: 2616569 - RNA, 19 nt, Homo sapiens
  misc_RNA (1)...(19): siRNA sense strand
ccagaaauuaagaaagaug

SEQ ID NO: 2616570 - RNA, 19 nt, Homo sapiens
  misc_RNA (1)...(19): siRNA sense strand
uggcaggucaacuggagaa

SEQ ID NO: 2616571 - RNA, 19 nt, Homo sapiens
  misc_RNA (1)...(19): siRNA sense strand
ggaccuggaagaagaggca

SEQ ID NO: 2616572 - RNA, 19 nt, Homo sapiens
  misc_RNA (1)...(19): siRNA sense strand
ccagcaaaccagaaggaac

SEQ ID NO: 2616573 - RNA, 19 nt, Homo sapiens
  misc_RNA (1)...(19): siRNA sense strand
ccguuuacccucuggcaca

SEQ ID NO: 2616574 - RNA, 19 nt, Homo sapiens
  misc_RNA (1)...(19): siRNA sense strand
aggaaaauggcgagaaaau

SEQ ID NO: 2616575 - RNA, 19 nt, Homo sapiens
  misc_RNA (1)...(19): siRNA sense strand
aggaaugccucuaagaaaa

SEQ ID NO: 2616576 - RNA, 19 nt, Homo sapiens
  misc_RNA (1)...(19): siRNA sense strand
ccaaagauaaagauagcau

SEQ ID NO: 2616577 - RNA, 19 nt, Homo sapiens
  misc_RNA (1)...(19): siRNA sense strand
ucaggaaaauggcgagaaa

SEQ ID NO: 2616578 - RNA, 19 nt, Homo sapiens
  misc_RNA (1)...(19): siRNA sense strand
cccuagaagaagucauaaa

SEQ ID NO: 2616579 - RNA, 19 nt, Homo sapiens
  misc_RNA (1)...(19): siRNA sense strand
cuuacagacugcaguggaa

SEQ ID NO: 2616580 - RNA, 19 nt, Homo sapiens
  misc_RNA (1)...(19): siRNA sense strand
ccaugaagugccuagcaaa

SEQ ID NO: 2616581 - RNA, 19 nt, Homo sapiens
  misc_RNA (1)...(19): siRNA sense strand
caugaagugccuagcaaau

SEQ ID NO: 2616582 - RNA, 19 nt, Homo sapiens
  misc_RNA (1)...(19): siRNA sense strand
gguauccagaauugagaaa

SEQ ID NO: 2616583 - RNA, 19 nt, Homo sapiens
  misc_RNA (1)...(19): siRNA sense strand
gcaauugauaauagagaac

SEQ ID NO: 2616584 - RNA, 19 nt, Homo sapiens
  misc_RNA (1)...(19): siRNA sense strand
cucuaaaggagaaaagaaa

SEQ ID NO: 2616585 - RNA, 19 nt, Homo sapiens
  misc_RNA (1)...(19): siRNA sense strand
uggauuugaacgagaugua

SEQ ID NO: 2616586 - RNA, 19 nt, Homo sapiens
  misc_RNA (1)...(19): siRNA sense strand
caggagaagcaguggauug

SEQ ID NO: 2616587 - RNA, 19 nt, Homo sapiens
  misc_RNA (1)...(19): siRNA sense strand
guuacaaggcaacagacua

SEQ ID NO: 2616588 - RNA, 19 nt, Homo sapiens
  misc_RNA (1)...(19): siRNA sense strand
gagaacuaagccaggaaga

SEQ ID NO: 2616589 - RNA, 19 nt, Homo sapiens
  misc_RNA (1)...(19): siRNA sense strand
ggguauuaucugccaugaa

SEQ ID NO: 2616590 - RNA, 19 nt, Homo sapiens
  misc_RNA (1)...(19): siRNA sense strand
gugcugaagaaguggaucu

SEQ ID NO: 2616591 - RNA, 19 nt, Homo sapiens
  misc_RNA (1)...(19): siRNA sense strand
ccucuaaaggagaaaagaa

SEQ ID NO: 2616592 - RNA, 19 nt, Homo sapiens
  misc_RNA (1)...(19): siRNA sense strand
accaaaucguagaaagcuu

SEQ ID NO: 2616593 - RNA, 19 nt, Homo sapiens
  misc_RNA (1)...(19): siRNA sense strand
ugaaaauccuggagaugga

SEQ ID NO: 2616594 - RNA, 19 nt, Homo sapiens
  misc_RNA (1)...(19): siRNA sense strand
ucaggaguuugaugagcaa

SEQ ID NO: 2616595 - RNA, 19 nt, Homo sapiens
  misc_RNA (1)...(19): siRNA sense strand
agaagaagucauaaaucca

SEQ ID NO: 2616596 - RNA, 19 nt, Homo sapiens
  misc_RNA (1)...(19): siRNA sense strand
uccugaaguuacaaggcaa

SEQ ID NO: 2616597 - RNA, 19 nt, Homo sapiens
  misc_RNA (1)...(19): siRNA sense strand
uccuaaaaggcauggauua

SEQ ID NO: 2616598 - RNA, 19 nt, Homo sapiens
  misc_RNA (1)...(19): siRNA sense strand
caauacaaguaaacgugga

SEQ ID NO: 2616599 - RNA, 19 nt, Homo sapiens
  misc_RNA (1)...(19): siRNA sense strand
ggccaagaagcaaugauau

SEQ ID NO: 2616600 - RNA, 19 nt, Homo sapiens
  misc_RNA (1)...(19): siRNA sense strand
gccaggaagauguugaaga

SEQ ID NO: 2616601 - RNA, 19 nt, Homo sapiens
  misc_RNA (1)...(19): siRNA sense strand
uguugaagaaguuuggaga

SEQ ID NO: 2616602 - RNA, 19 nt, Homo sapiens
  misc_RNA (1)...(19): siRNA sense strand
guugaagaaguuuggagau

SEQ ID NO: 2616603 - RNA, 19 nt, Homo sapiens
  misc_RNA (1)...(19): siRNA sense strand
uacaaguaaacguggagua

SEQ ID NO: 2616604 - RNA, 19 nt, Homo sapiens
  misc_RNA (1)...(19): siRNA sense strand
gagaagcgcugcugggaca

SEQ ID NO: 2616605 - RNA, 19 nt, Homo sapiens
  misc_RNA (1)...(19): siRNA sense strand
uuagaaaguucaagccaga

SEQ ID NO: 2616606 - RNA, 19 nt, Homo sapiens
  misc_RNA (1)...(19): siRNA sense strand
ggaguucagugguggagga

SEQ ID NO: 2616607 - RNA, 19 nt, Homo sapiens
  misc_RNA (1)...(19): siRNA sense strand
uggacaagcaagugccuga

SEQ ID NO: 2616608 - RNA, 19 nt, Homo sapiens
  misc_RNA (1)...(19): siRNA sense strand
cgcucuacccagucgguua

SEQ ID NO: 2616609 - RNA, 19 nt, Homo sapiens
  misc_RNA (1)...(19): siRNA sense strand
uggucuaucucauugggaa

SEQ ID NO: 2616610 - RNA, 19 nt, Homo sapiens
  misc_RNA (1)...(19): siRNA sense strand
gaaccagacucgauggaga

SEQ ID NO: 2616611 - RNA, 19 nt, Homo sapiens
  misc_RNA (1)...(19): siRNA sense strand
gagaagagcuuaacccuca

SEQ ID NO: 2616612 - RNA, 19 nt, Homo sapiens
  misc_RNA (1)...(19): siRNA sense strand
aagccaggaaagagauuaa

SEQ ID NO: 2616613 - RNA, 19 nt, Homo sapiens
  misc_RNA (1)...(19): siRNA sense strand
aggcuucaccagaaagaaa

SEQ ID NO: 2616614 - RNA, 19 nt, Homo sapiens
  misc_RNA (1)...(19): siRNA sense strand
cgauauaagaaggaaucaa

SEQ ID NO: 2616615 - RNA, 19 nt, Homo sapiens
  misc_RNA (1)...(19): siRNA sense strand
aggcaguacuggagcagca

SEQ ID NO: 2616616 - RNA, 19 nt, Homo sapiens
  misc_RNA (1)...(19): siRNA sense strand
acacaauggcagauggguu

SEQ ID NO: 2616617 - RNA, 19 nt, Homo sapiens
  misc_RNA (1)...(19): siRNA sense strand
ggaaagagauuaaacagcu

SEQ ID NO: 2616618 - RNA, 19 nt, Homo sapiens
  misc_RNA (1)...(19): siRNA sense strand
agaccgacguggugcccua

SEQ ID NO: 2616619 - RNA, 19 nt, Homo sapiens
  misc_RNA (1)...(19): siRNA sense strand
ccaugaaagggaaagugaa

SEQ ID NO: 2616620 - RNA, 19 nt, Homo sapiens
  misc_RNA (1)...(19): siRNA sense strand
cugauaaagauaaaggcau

SEQ ID NO: 2616621 - RNA, 19 nt, Homo sapiens
  misc_RNA (1)...(19): siRNA sense strand
cgauuggaaugguugguga

SEQ ID NO: 2616622 - RNA, 19 nt, Homo sapiens
  misc_RNA (1)...(19): siRNA sense strand
aggacuggauugaggagga

SEQ ID NO: 2616623 - RNA, 19 nt, Homo sapiens
  misc_RNA (1)...(19): siRNA sense strand
agguuuguucgaugagaua

SEQ ID NO: 2616624 - RNA, 19 nt, Homo sapiens
  misc_RNA (1)...(19): siRNA sense strand
gggcuaacguccuggagcu

SEQ ID NO: 2616625 - RNA, 19 nt, Homo sapiens
  misc_RNA (1)...(19): siRNA sense strand
gauuggaaugguuggugaa

SEQ ID NO: 2616626 - RNA, 19 nt, Homo sapiens
  misc_RNA (1)...(19): siRNA sense strand
ugugaaaccagguagugaa

SEQ ID NO: 2616627 - RNA, 19 nt, Homo sapiens
  misc_RNA (1)...(19): siRNA sense strand
aagaggugacagugagaca

SEQ ID NO: 2616628 - RNA, 19 nt, Homo sapiens
  misc_RNA (1)...(19): siRNA sense strand
cugccuuagugguugauuu

SEQ ID NO: 2616629 - RNA, 19 nt, Homo sapiens
  misc_RNA (1)...(19): siRNA sense strand
acgccaauguggaugcaga

SEQ ID NO: 2616630 - RNA, 19 nt, Homo sapiens
  misc_RNA (1)...(19): siRNA sense strand
ccccaaacccagagcagua

SEQ ID NO: 2616631 - RNA, 19 nt, Homo sapiens
  misc_RNA (1)...(19): siRNA sense strand
gcugauaaagauaaaggca

SEQ ID NO: 2616632 - RNA, 19 nt, Homo sapiens
  misc_RNA (1)...(19): siRNA sense strand
ucaugagagagcuggauuu

SEQ ID NO: 2616633 - RNA, 19 nt, Homo sapiens
  misc_RNA (1)...(19): siRNA sense strand
ucucgauauaagaaggaau

SEQ ID NO: 2616634 - RNA, 19 nt, Homo sapiens
  misc_RNA (1)...(19): siRNA sense strand
cgacuccaugaaagggaaa

SEQ ID NO: 2616635 - RNA, 19 nt, Homo sapiens
  misc_RNA (1)...(19): siRNA sense strand
gcgggaagcaagcggucuu

SEQ ID NO: 2616636 - RNA, 19 nt, Homo sapiens
  misc_RNA (1)...(19): siRNA sense strand
gaguaauggagcuucguca

SEQ ID NO: 2616637 - RNA, 19 nt, Homo sapiens
  misc_RNA (1)...(19): siRNA sense strand
gaagaaagauucauggcua

SEQ ID NO: 2616638 - RNA, 19 nt, Homo sapiens
  misc_RNA (1)...(19): siRNA sense strand
cagugauggccgagggaaa

SEQ ID NO: 2616639 - RNA, 19 nt, Homo sapiens
  misc_RNA (1)...(19): siRNA sense strand
ccaucaagcuggaggaagc

SEQ ID NO: 2616640 - RNA, 19 nt, Homo sapiens
  misc_RNA (1)...(19): siRNA sense strand
cauucuuggaggaggauga

SEQ ID NO: 2616641 - RNA, 19 nt, Homo sapiens
  misc_RNA (1)...(19): siRNA sense strand
cagugagagucgaguagca

SEQ ID NO: 2616642 - RNA, 19 nt, Homo sapiens
  misc_RNA (1)...(19): siRNA sense strand
ggaggaagccuggguauuu

SEQ ID NO: 2616643 - RNA, 19 nt, Homo sapiens
  misc_RNA (1)...(19): siRNA sense strand
guuccaugccagugagagu

SEQ ID NO: 2616644 - RNA, 19 nt, Homo sapiens
  misc_RNA (1)...(19): siRNA sense strand
cagucaaguacgucuacaa

SEQ ID NO: 2616645 - RNA, 19 nt, Homo sapiens
  misc_RNA (1)...(19): siRNA sense strand
guacagacuuggcgaggac

SEQ ID NO: 2616646 - RNA, 19 nt, Homo sapiens
  misc_RNA (1)...(19): siRNA sense strand
aggaugaaggugggaagaa

SEQ ID NO: 2616647 - RNA, 19 nt, Homo sapiens
  misc_RNA (1)...(19): siRNA sense strand
gaccuuaaacuuaggggaa

SEQ ID NO: 2616648 - RNA, 19 nt, Homo sapiens
  misc_RNA (1)...(19): siRNA sense strand
ggaggaugaaggugggaag

SEQ ID NO: 2616649 - RNA, 19 nt, Homo sapiens
  misc_RNA (1)...(19): siRNA sense strand
caacaagagaugaaggcaa

SEQ ID NO: 2616650 - RNA, 19 nt, Homo sapiens
  misc_RNA (1)...(19): siRNA sense strand
aggaaagaccugaagaaga

SEQ ID NO: 2616651 - RNA, 19 nt, Homo sapiens
  misc_RNA (1)...(19): siRNA sense strand
cagaacugcaagagugaua

SEQ ID NO: 2616652 - RNA, 19 nt, Homo sapiens
  misc_RNA (1)...(19): siRNA sense strand
aaauagcugcagagagaaa

SEQ ID NO: 2616653 - RNA, 19 nt, Homo sapiens
  misc_RNA (1)...(19): siRNA sense strand
gcaaugagacugaagccaa

SEQ ID NO: 2616654 - RNA, 19 nt, Homo sapiens
  misc_RNA (1)...(19): siRNA sense strand
gcucacgaucacugggaaa

SEQ ID NO: 2616655 - RNA, 19 nt, Homo sapiens
  misc_RNA (1)...(19): siRNA sense strand
aguccuaaugccagaguua

SEQ ID NO: 2616656 - RNA, 19 nt, Homo sapiens
  misc_RNA (1)...(19): siRNA sense strand
augaauaacauaagagcca

SEQ ID NO: 2616657 - RNA, 19 nt, Homo sapiens
  misc_RNA (1)...(19): siRNA sense strand
aggacaaggaagaaaguca

SEQ ID NO: 2616658 - RNA, 19 nt, Homo sapiens
  misc_RNA (1)...(19): siRNA sense strand
cgacauaguccuaaugcca

SEQ ID NO: 2616659 - RNA, 19 nt, Homo sapiens
  misc_RNA (1)...(19): siRNA sense strand
aaugauugcaugagggaca

SEQ ID NO: 2616660 - RNA, 19 nt, Homo sapiens
  misc_RNA (1)...(19): siRNA sense strand
uaccaaauccaaaggacaa

SEQ ID NO: 2616661 - RNA, 19 nt, Homo sapiens
  misc_RNA (1)...(19): siRNA sense strand
aggccuggucagauggaaa

SEQ ID NO: 2616662 - RNA, 19 nt, Homo sapiens
  misc_RNA (1)...(19): siRNA sense strand
gaacacauuaagaaggaca

SEQ ID NO: 2616663 - RNA, 19 nt, Homo sapiens
  misc_RNA (1)...(19): siRNA sense strand
agaugaaggcaaugagacu

SEQ ID NO: 2616664 - RNA, 19 nt, Homo sapiens
  misc_RNA (1)...(19): siRNA sense strand
aagaaguggcaaggaaaua

SEQ ID NO: 2616665 - RNA, 19 nt, Homo sapiens
  misc_RNA (1)...(19): siRNA sense strand
aguuggagaaugaagaaau

SEQ ID NO: 2616666 - RNA, 19 nt, Homo sapiens
  misc_RNA (1)...(19): siRNA sense strand
aaagaaguggcaaggaaau

SEQ ID NO: 2616667 - RNA, 19 nt, Homo sapiens
  misc_RNA (1)...(19): siRNA sense strand
gaauaacauaagagccaca

SEQ ID NO: 2616668 - RNA, 19 nt, Homo sapiens
  misc_RNA (1)...(19): siRNA sense strand
aauccaaaggacaaugaaa

SEQ ID NO: 2616669 - RNA, 19 nt, Homo sapiens
  misc_RNA (1)...(19): siRNA sense strand
guaucacacuggagccaau

SEQ ID NO: 2616670 - RNA, 19 nt, Homo sapiens
  misc_RNA (1)...(19): siRNA sense strand
aagaaggacaaggaagaaa

SEQ ID NO: 2616671 - RNA, 19 nt, Homo sapiens
  misc_RNA (1)...(19): siRNA sense strand
agacaggcucuaggagaaa

SEQ ID NO: 2616672 - RNA, 19 nt, Homo sapiens
  misc_RNA (1)...(19): siRNA sense strand
agaugagagcacagacuuu

SEQ ID NO: 2616673 - RNA, 19 nt, Homo sapiens
  misc_RNA (1)...(19): siRNA sense strand
gaagaagaucaaugccaga

SEQ ID NO: 2616674 - RNA, 19 nt, Homo sapiens
  misc_RNA (1)...(19): siRNA sense strand
cggauauguccaauucaaa

SEQ ID NO: 2616675 - RNA, 19 nt, Homo sapiens
  misc_RNA (1)...(19): siRNA sense strand
caaagaggcagcugagcca

SEQ ID NO: 2616676 - RNA, 19 nt, Homo sapiens
  misc_RNA (1)...(19): siRNA sense strand
agacugaagccaacagcau

SEQ ID NO: 2616677 - RNA, 19 nt, Homo sapiens
  misc_RNA (1)...(19): siRNA sense strand
aagaaauaugaguuggaga

SEQ ID NO: 2616678 - RNA, 19 nt, Homo sapiens
  misc_RNA (1)...(19): siRNA sense strand
cuucauugagacuggauuu

SEQ ID NO: 2616679 - RNA, 19 nt, Homo sapiens
  misc_RNA (1)...(19): siRNA sense strand
ccaugaagaaauaugaguu

SEQ ID NO: 2616680 - RNA, 19 nt, Homo sapiens
  misc_RNA (1)...(19): siRNA sense strand
caacagaccuccacggcgu

SEQ ID NO: 2616681 - RNA, 19 nt, Homo sapiens
  misc_RNA (1)...(19): siRNA sense strand
auccaaaggacaaugaaau

SEQ ID NO: 2616682 - RNA, 19 nt, Homo sapiens
  misc_RNA (1)...(19): siRNA sense strand
auaccaaauccaaaggaca

SEQ ID NO: 2616683 - RNA, 19 nt, Homo sapiens
  misc_RNA (1)...(19): siRNA sense strand
acggauauguccaauucaa

SEQ ID NO: 2616684 - RNA, 19 nt, Homo sapiens
  misc_RNA (1)...(19): siRNA sense strand
gaaugaagaaauagcugca

SEQ ID NO: 2616685 - RNA, 19 nt, Homo sapiens
  misc_RNA (1)...(19): siRNA sense strand
augaagaaauagcugcaga

SEQ ID NO: 2616686 - RNA, 19 nt, Homo sapiens
  misc_RNA (1)...(19): siRNA sense strand
agaaaauaaacuaggcuca

SEQ ID NO: 2616687 - RNA, 19 nt, Homo sapiens
  misc_RNA (1)...(19): siRNA sense strand
ugaagaaauaugaguugga

SEQ ID NO: 2616688 - RNA, 19 nt, Homo sapiens
  misc_RNA (1)...(19): siRNA sense strand
uguacgauuugaagcaaca

SEQ ID NO: 2616689 - RNA, 19 nt, Homo sapiens
  misc_RNA (1)...(19): siRNA sense strand
ucucauagucucugggaug

SEQ ID NO: 2616690 - RNA, 19 nt, Homo sapiens
  misc_RNA (1)...(19): siRNA sense strand
ucugggaugucgauaggaa

SEQ ID NO: 2616691 - RNA, 19 nt, Homo sapiens
  misc_RNA (1)...(19): siRNA sense strand
ggagaaacggauaugucca

SEQ ID NO: 2616692 - RNA, 19 nt, Homo sapiens
  misc_RNA (1)...(19): siRNA sense strand
acauuaagaaggacaagga

SEQ ID NO: 2616693 - RNA, 19 nt, Homo sapiens
  misc_RNA (1)...(19): siRNA sense strand
acauaguccuaaugccaga

SEQ ID NO: 2616694 - RNA, 19 nt, Homo sapiens
  misc_RNA (1)...(19): siRNA sense strand
gacagaacugcaagaguga

SEQ ID NO: 2616695 - RNA, 19 nt, Homo sapiens
  misc_RNA (1)...(19): siRNA sense strand
gguacauugcaaagaggca

SEQ ID NO: 2616696 - RNA, 19 nt, Homo sapiens
  misc_RNA (1)...(19): siRNA sense strand
augaacacauuaagaagga

SEQ ID NO: 2616697 - RNA, 19 nt, Homo sapiens
  misc_RNA (1)...(19): siRNA sense strand
gggaaaacccugaaggaau

SEQ ID NO: 2616698 - RNA, 19 nt, Homo sapiens
  misc_RNA (1)...(19): siRNA sense strand
acuguaaagaucuggaaua

SEQ ID NO: 2616699 - RNA, 19 nt, Homo sapiens
  misc_RNA (1)...(19): siRNA sense strand
cugucaaagauguggaaga

SEQ ID NO: 2616700 - RNA, 19 nt, Homo sapiens
  misc_RNA (1)...(19): siRNA sense strand
augcaguacuugaaggaga

SEQ ID NO: 2616701 - RNA, 19 nt, Homo sapiens
  misc_RNA (1)...(19): siRNA sense strand
aggcaaggcagcugucaaa

SEQ ID NO: 2616702 - RNA, 19 nt, Homo sapiens
  misc_RNA (1)...(19): siRNA sense strand
gguuuaaaaucugggaaaa

SEQ ID NO: 2616703 - RNA, 19 nt, Homo sapiens
  misc_RNA (1)...(19): siRNA sense strand
uggacaauguuuaaggaga

SEQ ID NO: 2616704 - RNA, 19 nt, Homo sapiens
  misc_RNA (1)...(19): siRNA sense strand
gaagauucagaguggacaa

SEQ ID NO: 2616705 - RNA, 19 nt, Homo sapiens
  misc_RNA (1)...(19): siRNA sense strand
cuggcaaacuggagagaac

SEQ ID NO: 2616706 - RNA, 19 nt, Homo sapiens
  misc_RNA (1)...(19): siRNA sense strand
gaaggaauuucguggccau

SEQ ID NO: 2616707 - RNA, 19 nt, Homo sapiens
  misc_RNA (1)...(19): siRNA sense strand
gauacagaaauguuagcaa

SEQ ID NO: 2616708 - RNA, 19 nt, Homo sapiens
  misc_RNA (1)...(19): siRNA sense strand
agucagauccuuagugcuu

SEQ ID NO: 2616709 - RNA, 19 nt, Homo sapiens
  misc_RNA (1)...(19): siRNA sense strand
cgauauauucaucuggaga

SEQ ID NO: 2616710 - RNA, 19 nt, Homo sapiens
  misc_RNA (1)...(19): siRNA sense strand
ugacauuaacaguggccau

SEQ ID NO: 2616711 - RNA, 19 nt, Homo sapiens
  misc_RNA (1)...(19): siRNA sense strand
aacaguggccauugggaua

SEQ ID NO: 2616712 - RNA, 19 nt, Homo sapiens
  misc_RNA (1)...(19): siRNA sense strand
acuuuaugaugauggauga

SEQ ID NO: 2616713 - RNA, 19 nt, Homo sapiens
  misc_RNA (1)...(19): siRNA sense strand
ugguuuaaaaucugggaaa

SEQ ID NO: 2616714 - RNA, 19 nt, Homo sapiens
  misc_RNA (1)...(19): siRNA sense strand
aauaugaagaccacagaau

SEQ ID NO: 2616715 - RNA, 19 nt, Homo sapiens
  misc_RNA (1)...(19): siRNA sense strand
acuugaaggagaacaguuu

SEQ ID NO: 2616716 - RNA, 19 nt, Homo sapiens
  misc_RNA (1)...(19): siRNA sense strand
aguaccaggcccaagauaa

SEQ ID NO: 2616717 - RNA, 19 nt, Homo sapiens
  misc_RNA (1)...(19): siRNA sense strand
ugcaguacuugaaggagaa

SEQ ID NO: 2616718 - RNA, 19 nt, Homo sapiens
  misc_RNA (1)...(19): siRNA sense strand
uugagagggcacacaguaa

SEQ ID NO: 2616719 - RNA, 19 nt, Homo sapiens
  misc_RNA (1)...(19): siRNA sense strand
gauacuguguugcaggcua

SEQ ID NO: 2616720 - RNA, 19 nt, Homo sapiens
  misc_RNA (1)...(19): siRNA sense strand
ggcagcagcaucagggauu

SEQ ID NO: 2616721 - RNA, 19 nt, Homo sapiens
  misc_RNA (1)...(19): siRNA sense strand
gugaagauggacuccuaaa

SEQ ID NO: 2616722 - RNA, 19 nt, Homo sapiens
  misc_RNA (1)...(19): siRNA sense strand
cagcaauugcccaggccuu

SEQ ID NO: 2616723 - RNA, 19 nt, Homo sapiens
  misc_RNA (1)...(19): siRNA sense strand
auguguuucagcagagaua

SEQ ID NO: 2616724 - RNA, 19 nt, Homo sapiens
  misc_RNA (1)...(19): siRNA sense strand
aggcauacccagauggaag

SEQ ID NO: 2616725 - RNA, 19 nt, Homo sapiens
  misc_RNA (1)...(19): siRNA sense strand
gaacuuugacagugcacga

SEQ ID NO: 2616726 - RNA, 19 nt, Homo sapiens
  misc_RNA (1)...(19): siRNA sense strand
cccagauggaaguagcaaa

SEQ ID NO: 2616727 - RNA, 19 nt, Homo sapiens
  misc_RNA (1)...(19): siRNA sense strand
gaaggaugugauugguauu

SEQ ID NO: 2616728 - RNA, 19 nt, Homo sapiens
  misc_RNA (1)...(19): siRNA sense strand
aaaucaagguguggaagau

SEQ ID NO: 2616729 - RNA, 19 nt, Homo sapiens
  misc_RNA (1)...(19): siRNA sense strand
ggcuauacagucucugaaa

SEQ ID NO: 2616730 - RNA, 19 nt, Homo sapiens
  misc_RNA (1)...(19): siRNA sense strand
aagauguggaagaagaaaa

SEQ ID NO: 2616731 - RNA, 19 nt, Homo sapiens
  misc_RNA (1)...(19): siRNA sense strand
agauaaagcuacugggcaa

SEQ ID NO: 2616732 - RNA, 19 nt, Homo sapiens
  misc_RNA (1)...(19): siRNA sense strand
aggaaauggccaaggaaau

SEQ ID NO: 2616733 - RNA, 19 nt, Homo sapiens
  misc_RNA (1)...(19): siRNA sense strand
uggaauggauugaaggcaa

SEQ ID NO: 2616734 - RNA, 19 nt, Homo sapiens
  misc_RNA (1)...(19): siRNA sense strand
ccagaacgaacgugggaaa

SEQ ID NO: 2616735 - RNA, 19 nt, Homo sapiens
  misc_RNA (1)...(19): siRNA sense strand
gaaucaggaaagugagcaa

SEQ ID NO: 2616736 - RNA, 19 nt, Homo sapiens
  misc_RNA (1)...(19): siRNA sense strand
gaaaggaggaaauggccaa

SEQ ID NO: 2616737 - RNA, 19 nt, Homo sapiens
  misc_RNA (1)...(19): siRNA sense strand
caaguaauuuggaagggaa

SEQ ID NO: 2616738 - RNA, 19 nt, Homo sapiens
  misc_RNA (1)...(19): siRNA sense strand
agaugagaaaggaggaaau

SEQ ID NO: 2616739 - RNA, 19 nt, Homo sapiens
  misc_RNA (1)...(19): siRNA sense strand
aaguaauuuggaagggaaa

SEQ ID NO: 2616740 - RNA, 19 nt, Homo sapiens
  misc_RNA (1)...(19): siRNA sense strand
ccuaugaacaauacgcaaa

SEQ ID NO: 2616741 - RNA, 19 nt, Homo sapiens
  misc_RNA (1)...(19): siRNA sense strand
ccaacuacaacgugagcuu

SEQ ID NO: 2616742 - RNA, 19 nt, Homo sapiens
  misc_RNA (1)...(19): siRNA sense strand
gggcuauaugugugaccua

SEQ ID NO: 2616743 - RNA, 19 nt, Homo sapiens
  misc_RNA (1)...(19): siRNA sense strand
uugaaggcaaagaaagaaa

SEQ ID NO: 2616744 - RNA, 19 nt, Homo sapiens
  misc_RNA (1)...(19): siRNA sense strand
ugggaaaggaucaaguaau

SEQ ID NO: 2616745 - RNA, 19 nt, Homo sapiens
  misc_RNA (1)...(19): siRNA sense strand
gagaugagaaaggaggaaa

SEQ ID NO: 2616746 - RNA, 19 nt, Homo sapiens
  misc_RNA (1)...(19): siRNA sense strand
gucaagaagcccagcaaaa

SEQ ID NO: 2616747 - RNA, 19 nt, Homo sapiens
  misc_RNA (1)...(19): siRNA sense strand
ggacaauagcugagaugag

SEQ ID NO: 2616748 - RNA, 19 nt, Homo sapiens
  misc_RNA (1)...(19): siRNA sense strand
caacgaugguuaugaaucu

SEQ ID NO: 2616749 - RNA, 19 nt, Homo sapiens
  misc_RNA (1)...(19): siRNA sense strand
cagcaacgaugguuaugaa

SEQ ID NO: 2616750 - RNA, 19 nt, Homo sapiens
  misc_RNA (1)...(19): siRNA sense strand
ugauguacucauuggagaa

SEQ ID NO: 2616751 - RNA, 19 nt, Homo sapiens
  misc_RNA (1)...(19): siRNA sense strand
agucaggaguggaagaugu

SEQ ID NO: 2616752 - RNA, 19 nt, Homo sapiens
  misc_RNA (1)...(19): siRNA sense strand
gaauauguauaacuggcua

SEQ ID NO: 2616753 - RNA, 19 nt, Homo sapiens
  misc_RNA (1)...(19): siRNA sense strand
ugaccaacacacagauauu

SEQ ID NO: 2616754 - RNA, 19 nt, Homo sapiens
  misc_RNA (1)...(19): siRNA sense strand
ccuaagagugggagaaggu

SEQ ID NO: 2616755 - RNA, 19 nt, Homo sapiens
  misc_RNA (1)...(19): siRNA sense strand
ccagcuacacaaagggaga

SEQ ID NO: 2616756 - RNA, 19 nt, Homo sapiens
  misc_RNA (1)...(19): siRNA sense strand
gugggaaaggaucaaguaa

SEQ ID NO: 2616757 - RNA, 19 nt, Homo sapiens
  misc_RNA (1)...(19): siRNA sense strand
aggcaaagaaagaaauauc

SEQ ID NO: 2616758 - RNA, 19 nt, Homo sapiens
  misc_RNA (1)...(19): siRNA sense strand
uggauugaaggcaaagaaa

SEQ ID NO: 2616759 - RNA, 19 nt, Homo sapiens
  misc_RNA (1)...(19): siRNA sense strand
ggucaggauuugcuggguu

SEQ ID NO: 2616760 - RNA, 19 nt, Homo sapiens
  misc_RNA (1)...(19): siRNA sense strand
ugcuaaaccaggaggcuuu

SEQ ID NO: 2616761 - RNA, 19 nt, Homo sapiens
  misc_RNA (1)...(19): siRNA sense strand
uggauuggguggaggauuc

SEQ ID NO: 2616762 - RNA, 19 nt, Homo sapiens
  misc_RNA (1)...(19): siRNA sense strand
gugauguacucauuggaga

SEQ ID NO: 2616763 - RNA, 19 nt, Homo sapiens
  misc_RNA (1)...(19): siRNA sense strand
cgaacgugggaaaggauca

SEQ ID NO: 2616764 - RNA, 19 nt, Homo sapiens
  misc_RNA (1)...(19): siRNA sense strand
ugggcaacccuaugaacaa

SEQ ID NO: 2616765 - RNA, 19 nt, Homo sapiens
  misc_RNA (1)...(19): siRNA sense strand
gacacaucuucuagaguga

SEQ ID NO: 2616766 - RNA, 19 nt, Homo sapiens
  misc_RNA (1)...(19): siRNA sense strand
guauacaaucugucaccua

SEQ ID NO: 2616767 - RNA, 19 nt, Homo sapiens
  misc_RNA (1)...(19): siRNA sense strand
auaacuggcuacugcagaa

SEQ ID NO: 2616768 - RNA, 19 nt, Homo sapiens
  misc_RNA (1)...(19): siRNA sense strand
augcaaagcgaccaggaau

SEQ ID NO: 2616769 - RNA, 19 nt, Homo sapiens
  misc_RNA (1)...(19): siRNA sense strand
aagaaauaucagagcccuu

SEQ ID NO: 2616770 - RNA, 19 nt, Homo sapiens
  misc_RNA (1)...(19): siRNA sense strand
ugcaaagcgaccaggaauu

SEQ ID NO: 2616771 - RNA, 19 nt, Homo sapiens
  misc_RNA (1)...(19): siRNA sense strand
gaguggaagauguguuuca

SEQ ID NO: 2616772 - RNA, 19 nt, Homo sapiens
  misc_RNA (1)...(19): siRNA sense strand
ugggaacauuacugcacaa

SEQ ID NO: 2616773 - RNA, 19 nt, Homo sapiens
  misc_RNA (1)...(19): siRNA sense strand
gcgaccaggaauuggacuu

SEQ ID NO: 2616774 - RNA, 19 nt, Homo sapiens
  misc_RNA (1)...(19): siRNA sense strand
uggaaugggaagcaaguca

SEQ ID NO: 2616775 - RNA, 19 nt, Homo sapiens
  misc_RNA (1)...(19): siRNA sense strand
cgacccaacuacaacguga

SEQ ID NO: 2616776 - RNA, 19 nt, Homo sapiens
  misc_RNA (1)...(19): siRNA sense strand
gugacaagccucauggagu

SEQ ID NO: 2616777 - RNA, 19 nt, Homo sapiens
  misc_RNA (1)...(19): siRNA sense strand
gugaagaagguguacagga

SEQ ID NO: 2616778 - RNA, 19 nt, Homo sapiens
  misc_RNA (1)...(19): siRNA sense strand
ggucugaauuugaaaacca

SEQ ID NO: 2616779 - RNA, 19 nt, Homo sapiens
  misc_RNA (1)...(19): siRNA sense strand
gaaugaaagaauaucgugu

SEQ ID NO: 2616780 - RNA, 19 nt, Homo sapiens
  misc_RNA (1)...(19): siRNA sense strand
gcaugugauguaccagaaa

SEQ ID NO: 2616781 - RNA, 19 nt, Homo sapiens
  misc_RNA (1)...(19): siRNA sense strand
caccaggaacaucaagaua

SEQ ID NO: 2616782 - RNA, 19 nt, Homo sapiens
  misc_RNA (1)...(19): siRNA sense strand
cagaaaucggagaagucau

SEQ ID NO: 2616783 - RNA, 19 nt, Homo sapiens
  misc_RNA (1)...(19): siRNA sense strand
uagugaaucaggaaaguga

SEQ ID NO: 2616784 - RNA, 19 nt, Homo sapiens
  misc_RNA (1)...(19): siRNA sense strand
gagucaagaagcccagcaa

SEQ ID NO: 2616785 - RNA, 19 nt, Homo sapiens
  misc_RNA (1)...(19): siRNA sense strand
uggacagucaggaguggaa

SEQ ID NO: 2616786 - RNA, 19 nt, Homo sapiens
  misc_RNA (1)...(19): siRNA sense strand
ggaggaaauggccaaggaa

SEQ ID NO: 2616787 - RNA, 19 nt, Homo sapiens
  misc_RNA (1)...(19): siRNA sense strand
ggacaguaacggggacuua

SEQ ID NO: 2616788 - RNA, 19 nt, Homo sapiens
  misc_RNA (1)...(19): siRNA sense strand
ccucgggagcuaccggaaa

SEQ ID NO: 2616789 - RNA, 19 nt, Homo sapiens
  misc_RNA (1)...(19): siRNA sense strand
ggagaauuuaauagagcaa

SEQ ID NO: 2616790 - RNA, 19 nt, Homo sapiens
  misc_RNA (1)...(19): siRNA sense strand
gcuuagaauuacagcccaa

SEQ ID NO: 2616791 - RNA, 19 nt, Homo sapiens
  misc_RNA (1)...(19): siRNA sense strand
auccaauggcagagagaaa

SEQ ID NO: 2616792 - RNA, 19 nt, Homo sapiens
  misc_RNA (1)...(19): siRNA sense strand
cggcuagugagaagggaua

SEQ ID NO: 2616793 - RNA, 19 nt, Homo sapiens
  misc_RNA (1)...(19): siRNA sense strand
ggauaagaugcaagcagaa

SEQ ID NO: 2616794 - RNA, 19 nt, Homo sapiens
  misc_RNA (1)...(19): siRNA sense strand
agaacugagugguggaaaa

SEQ ID NO: 2616795 - RNA, 19 nt, Homo sapiens
  misc_RNA (1)...(19): siRNA sense strand
gggauaagaugcaagcaga

SEQ ID NO: 2616796 - RNA, 19 nt, Homo sapiens
  misc_RNA (1)...(19): siRNA sense strand
agaacaaggauauggaaaa

SEQ ID NO: 2616797 - RNA, 19 nt, Homo sapiens
  misc_RNA (1)...(19): siRNA sense strand
gugaaugagcaacaagaaa

SEQ ID NO: 2616798 - RNA, 19 nt, Homo sapiens
  misc_RNA (1)...(19): siRNA sense strand
uggccuuggcugugaguua

SEQ ID NO: 2616799 - RNA, 19 nt, Homo sapiens
  misc_RNA (1)...(19): siRNA sense strand
acagagaagcggucagcaa

SEQ ID NO: 2616800 - RNA, 19 nt, Homo sapiens
  misc_RNA (1)...(19): siRNA sense strand
aagaacaaggauauggaaa

SEQ ID NO: 2616801 - RNA, 19 nt, Homo sapiens
  misc_RNA (1)...(19): siRNA sense strand
ccuuagaagaagaguuuga

SEQ ID NO: 2616802 - RNA, 19 nt, Homo sapiens
  misc_RNA (1)...(19): siRNA sense strand
gcucggaggaacuggauau

SEQ ID NO: 2616803 - RNA, 19 nt, Homo sapiens
  misc_RNA (1)...(19): siRNA sense strand
aagcagaaugggaagaaau

SEQ ID NO: 2616804 - RNA, 19 nt, Homo sapiens
  misc_RNA (1)...(19): siRNA sense strand
uggaaggggugaaggaauu

SEQ ID NO: 2616805 - RNA, 19 nt, Homo sapiens
  misc_RNA (1)...(19): siRNA sense strand
aggaagccguggaggccua

SEQ ID NO: 2616806 - RNA, 19 nt, Homo sapiens
  misc_RNA (1)...(19): siRNA sense strand
ggagaaugaaaaugaacaa

SEQ ID NO: 2616807 - RNA, 19 nt, Homo sapiens
  misc_RNA (1)...(19): siRNA sense strand
gugaaaagcaagaagggau

SEQ ID NO: 2616808 - RNA, 19 nt, Homo sapiens
  misc_RNA (1)...(19): siRNA sense strand
ccagauacaaccuaggaau

SEQ ID NO: 2616809 - RNA, 19 nt, Homo sapiens
  misc_RNA (1)...(19): siRNA sense strand
aaaccaaaucggaagcaau

SEQ ID NO: 2616810 - RNA, 19 nt, Homo sapiens
  misc_RNA (1)...(19): siRNA sense strand
gaagaauuggauuaagcaa

SEQ ID NO: 2616811 - RNA, 19 nt, Homo sapiens
  misc_RNA (1)...(19): siRNA sense strand
gaagaguuugaaagggcaa

SEQ ID NO: 2616812 - RNA, 19 nt, Homo sapiens
  misc_RNA (1)...(19): siRNA sense strand
ccauggugaugaaggagau

SEQ ID NO: 2616813 - RNA, 19 nt, Homo sapiens
  misc_RNA (1)...(19): siRNA sense strand
ggugaaugagcaacaagaa

SEQ ID NO: 2616814 - RNA, 19 nt, Homo sapiens
  misc_RNA (1)...(19): siRNA sense strand
auucaaacacaacuggaaa

SEQ ID NO: 2616815 - RNA, 19 nt, Homo sapiens
  misc_RNA (1)...(19): siRNA sense strand
gccuggagcauuugaagaa

SEQ ID NO: 2616816 - RNA, 19 nt, Homo sapiens
  misc_RNA (1)...(19): siRNA sense strand
gagcauuugaagaaggcuu

SEQ ID NO: 2616817 - RNA, 19 nt, Homo sapiens
  misc_RNA (1)...(19): siRNA sense strand
auacagaguuuugggauaa

SEQ ID NO: 2616818 - RNA, 19 nt, Homo sapiens
  misc_RNA (1)...(19): siRNA sense strand
gaugcaagcagaaugggaa

SEQ ID NO: 2616819 - RNA, 19 nt, Homo sapiens
  misc_RNA (1)...(19): siRNA sense strand
gugaugaagaccucgaaau

SEQ ID NO: 2616820 - RNA, 19 nt, Homo sapiens
  misc_RNA (1)...(19): siRNA sense strand
uaauagagcaauagaugca

SEQ ID NO: 2616821 - RNA, 19 nt, Homo sapiens
  misc_RNA (1)...(19): siRNA sense strand
uugcaaagaaagagcagga

SEQ ID NO: 2616822 - RNA, 19 nt, Homo sapiens
  misc_RNA (1)...(19): siRNA sense strand
auguuaaguuucauggaga

SEQ ID NO: 2616823 - RNA, 19 nt, Homo sapiens
  misc_RNA (1)...(19): siRNA sense strand
gagauaugaucgacccaga

SEQ ID NO: 2616824 - RNA, 19 nt, Homo sapiens
  misc_RNA (1)...(19): siRNA sense strand
uguauugaccacuggcuua

SEQ ID NO: 2616825 - RNA, 19 nt, Homo sapiens
  misc_RNA (1)...(19): siRNA sense strand
cagauaaggcuguugccau

SEQ ID NO: 2616826 - RNA, 19 nt, Homo sapiens
  misc_RNA (1)...(19): siRNA sense strand
aagaaauggcucggaggaa

SEQ ID NO: 2616827 - RNA, 19 nt, Homo sapiens
  misc_RNA (1)...(19): siRNA sense strand
uguuaaguuucauggagau

SEQ ID NO: 2616828 - RNA, 19 nt, Homo sapiens
  misc_RNA (1)...(19): siRNA sense strand
cgaccuuggcgaacggaga

SEQ ID NO: 2616829 - RNA, 19 nt, Homo sapiens
  misc_RNA (1)...(19): siRNA sense strand
gcagcaguggagucagaua

SEQ ID NO: 2616830 - RNA, 19 nt, Homo sapiens
  misc_RNA (1)...(19): siRNA sense strand
aaaacuaagcagugaugaa

SEQ ID NO: 2616831 - RNA, 19 nt, Homo sapiens
  misc_RNA (1)...(19): siRNA sense strand
cugugaaaccaaaucggaa

SEQ ID NO: 2616832 - RNA, 19 nt, Homo sapiens
  misc_RNA (1)...(19): siRNA sense strand
ccugugacgcucugaagaa

SEQ ID NO: 2616833 - RNA, 19 nt, Homo sapiens
  misc_RNA (1)...(19): siRNA sense strand
gaagaaauggcucggagga

SEQ ID NO: 2616834 - RNA, 19 nt, Homo sapiens
  misc_RNA (1)...(19): siRNA sense strand
agagaagcggucagcaauu

SEQ ID NO: 2616835 - RNA, 19 nt, Homo sapiens
  misc_RNA (1)...(19): siRNA sense strand
cauucaaacacaacuggaa

SEQ ID NO: 2616836 - RNA, 19 nt, Homo sapiens
  misc_RNA (1)...(19): siRNA sense strand
accaagaagcccagaacca

SEQ ID NO: 2616837 - RNA, 19 nt, Homo sapiens
  misc_RNA (1)...(19): siRNA sense strand
agauaaggcuguugccaug

SEQ ID NO: 2616838 - RNA, 19 nt, Homo sapiens
  misc_RNA (1)...(19): siRNA sense strand
ugaaggagauaccgaggga

SEQ ID NO: 2616839 - RNA, 19 nt, Homo sapiens
  misc_RNA (1)...(19): siRNA sense strand
cuccuuagaagaagaguuu

SEQ ID NO: 2616840 - RNA, 19 nt, Homo sapiens
  misc_RNA (1)...(19): siRNA sense strand
gaaauggcucggaggaacu

SEQ ID NO: 2616841 - RNA, 19 nt, Homo sapiens
  misc_RNA (1)...(19): siRNA sense strand
caaguaaccaucucggcua

SEQ ID NO: 2616842 - RNA, 19 nt, Homo sapiens
  misc_RNA (1)...(19): siRNA sense strand
agaucuagacauucaaaca

SEQ ID NO: 2616843 - RNA, 19 nt, Homo sapiens
  misc_RNA (1)...(19): siRNA sense strand
ccaccaaaauggagauaug

SEQ ID NO: 2616844 - RNA, 19 nt, Homo sapiens
  misc_RNA (1)...(19): siRNA sense strand
gggauaacccaggcggaga

SEQ ID NO: 2616845 - RNA, 19 nt, Homo sapiens
  misc_RNA (1)...(19): siRNA sense strand
cuguucggccagaggacua

SEQ ID NO: 2616846 - RNA, 19 nt, Homo sapiens
  misc_RNA (1)...(19): siRNA sense strand
gccaugacguggaggccua

SEQ ID NO: 2616847 - RNA, 19 nt, Homo sapiens
  misc_RNA (1)...(19): siRNA sense strand
gugcaggagcagcggaaga

SEQ ID NO: 2616848 - RNA, 19 nt, Homo sapiens
  misc_RNA (1)...(19): siRNA sense strand
ugcacaaugaggaggagaa

SEQ ID NO: 2616849 - RNA, 19 nt, Homo sapiens
  misc_RNA (1)...(19): siRNA sense strand
cugcagagucguccgggaa

SEQ ID NO: 2616850 - RNA, 19 nt, Homo sapiens
  misc_RNA (1)...(19): siRNA sense strand
uuggagaagaccagaucua

SEQ ID NO: 2616851 - RNA, 19 nt, Homo sapiens
  misc_RNA (1)...(19): siRNA sense strand
gagaagagcucuaguccug

SEQ ID NO: 2616852 - RNA, 19 nt, Homo sapiens
  misc_RNA (1)...(19): siRNA sense strand
cugucugguucgugaagaa

SEQ ID NO: 2616853 - RNA, 19 nt, Homo sapiens
  misc_RNA (1)...(19): siRNA sense strand
ugguauugggcaaggccua

SEQ ID NO: 2616854 - RNA, 19 nt, Homo sapiens
  misc_RNA (1)...(19): siRNA sense strand
uggcaaagagccgggacua

SEQ ID NO: 2616855 - RNA, 19 nt, Homo sapiens
  misc_RNA (1)...(19): siRNA sense strand
cggucaguggccuggcaaa

SEQ ID NO: 2616856 - RNA, 19 nt, Homo sapiens
  misc_RNA (1)...(19): siRNA sense strand
acacacauuacuaugacaa

SEQ ID NO: 2616857 - RNA, 19 nt, Homo sapiens
  misc_RNA (1)...(19): siRNA sense strand
cugugaaugauguggauuu

SEQ ID NO: 2616858 - RNA, 19 nt, Homo sapiens
  misc_RNA (1)...(19): siRNA sense strand
cuacaauuaucaucgccaa

SEQ ID NO: 2616859 - RNA, 19 nt, Homo sapiens
  misc_RNA (1)...(19): siRNA sense strand
aggaggaggaggagagcaa

SEQ ID NO: 2616860 - RNA, 19 nt, Homo sapiens
  misc_RNA (1)...(19): siRNA sense strand
agaacaaacuccaagagga

SEQ ID NO: 2616861 - RNA, 19 nt, Homo sapiens
  misc_RNA (1)...(19): siRNA sense strand
gggcccaaucccugagcua

SEQ ID NO: 2616862 - RNA, 19 nt, Homo sapiens
  misc_RNA (1)...(19): siRNA sense strand
uggcaaucagcuuggaauu

SEQ ID NO: 2616863 - RNA, 19 nt, Homo sapiens
  misc_RNA (1)...(19): siRNA sense strand
ccaaccaggaagagagcga

SEQ ID NO: 2616864 - RNA, 19 nt, Homo sapiens
  misc_RNA (1)...(19): siRNA sense strand
gaggaggaggagagcaaca

SEQ ID NO: 2616865 - RNA, 19 nt, Homo sapiens
  misc_RNA (1)...(19): siRNA sense strand
guucaucacugcuggcaca

SEQ ID NO: 2616866 - RNA, 19 nt, Homo sapiens
  misc_RNA (1)...(19): siRNA sense strand
ucaugacacuggugggcau

SEQ ID NO: 2616867 - RNA, 19 nt, Homo sapiens
  misc_RNA (1)...(19): siRNA sense strand
cugcacagguauuugggau

SEQ ID NO: 2616868 - RNA, 19 nt, Homo sapiens
  misc_RNA (1)...(19): siRNA sense strand
uccaagaggaggaggagga

SEQ ID NO: 2616869 - RNA, 19 nt, Homo sapiens
  misc_RNA (1)...(19): siRNA sense strand
cugcugugucagaggauca

SEQ ID NO: 2616870 - RNA, 19 nt, Homo sapiens
  misc_RNA (1)...(19): siRNA sense strand
gguccaaaaccuacaaaga

SEQ ID NO: 2616871 - RNA, 19 nt, Homo sapiens
  misc_RNA (1)...(19): siRNA sense strand
gggccagauuauugacaac

SEQ ID NO: 2616872 - RNA, 19 nt, Homo sapiens
  misc_RNA (1)...(19): siRNA sense strand
uguucaaggagaaaccuaa

SEQ ID NO: 2616873 - RNA, 19 nt, Homo sapiens
  misc_RNA (1)...(19): siRNA sense strand
guuccuuacucuuggagca

SEQ ID NO: 2616874 - RNA, 19 nt, Homo sapiens
  misc_RNA (1)...(19): siRNA sense strand
ggaagaagugaaugcugga

SEQ ID NO: 2616875 - RNA, 19 nt, Homo sapiens
  misc_RNA (1)...(19): siRNA sense strand
cuccggagacagaaagcaa

SEQ ID NO: 2616876 - RNA, 19 nt, Homo sapiens
  misc_RNA (1)...(19): siRNA sense strand
gguuuaaagcccugaggau

SEQ ID NO: 2616877 - RNA, 19 nt, Homo sapiens
  misc_RNA (1)...(19): siRNA sense strand
ccauagucacaguaauaau

SEQ ID NO: 2616878 - RNA, 19 nt, Homo sapiens
  misc_RNA (1)...(19): siRNA sense strand
gcaagcacuucuagccaga

SEQ ID NO: 2616879 - RNA, 19 nt, Homo sapiens
  misc_RNA (1)...(19): siRNA sense strand
cguauaugagcaagacaca

SEQ ID NO: 2616880 - RNA, 19 nt, Homo sapiens
  misc_RNA (1)...(19): siRNA sense strand
uaauaauggguaugggagu

SEQ ID NO: 2616881 - RNA, 19 nt, Homo sapiens
  misc_RNA (1)...(19): siRNA sense strand
cuacaggagaugauggcaa

SEQ ID NO: 2616882 - RNA, 19 nt, Homo sapiens
  misc_RNA (1)...(19): siRNA sense strand
ucgauauugcaguggguaa

SEQ ID NO: 2616883 - RNA, 19 nt, Homo sapiens
  misc_RNA (1)...(19): siRNA sense strand
gguagagaucacagagcga

SEQ ID NO: 2616884 - RNA, 19 nt, Homo sapiens
  misc_RNA (1)...(19): siRNA sense strand
ggaggaaauacgcagguga

SEQ ID NO: 2616885 - RNA, 19 nt, Homo sapiens
  misc_RNA (1)...(19): siRNA sense strand
cgauauugcaguggguaau

SEQ ID NO: 2616886 - RNA, 19 nt, Homo sapiens
  misc_RNA (1)...(19): siRNA sense strand
cagaugaaguagaggugac

SEQ ID NO: 2616887 - RNA, 19 nt, Homo sapiens
  misc_RNA (1)...(19): siRNA sense strand
acacagagguaucggacag

SEQ ID NO: 2616888 - RNA, 19 nt, Homo sapiens
  misc_RNA (1)...(19): siRNA sense strand
auggcaaggugcuggcgaa

SEQ ID NO: 2616889 - RNA, 19 nt, Homo sapiens
  misc_RNA (1)...(19): siRNA sense strand
uugcuacagaugagagauu

SEQ ID NO: 2616890 - RNA, 19 nt, Homo sapiens
  misc_RNA (1)...(19): siRNA sense strand
ggacagaugaaguagaggu

SEQ ID NO: 2616891 - RNA, 19 nt, Homo sapiens
  misc_RNA (1)...(19): siRNA sense strand
augugaggcuacaggagau

SEQ ID NO: 2616892 - RNA, 19 nt, Homo sapiens
  misc_RNA (1)...(19): siRNA sense strand
agauauugggagaaacaaa

SEQ ID NO: 2616893 - RNA, 19 nt, Homo sapiens
  misc_RNA (1)...(19): siRNA sense strand
acuauaaagaccuggaaaa

SEQ ID NO: 2616894 - RNA, 19 nt, Homo sapiens
  misc_RNA (1)...(19): siRNA sense strand
gaacggugaaagugggaga

SEQ ID NO: 2616895 - RNA, 19 nt, Homo sapiens
  misc_RNA (1)...(19): siRNA sense strand
ugggagaaacaaaguggaa

SEQ ID NO: 2616896 - RNA, 19 nt, Homo sapiens
  misc_RNA (1)...(19): siRNA sense strand
ggguguucuccgagggaca

SEQ ID NO: 2616897 - RNA, 19 nt, Homo sapiens
  misc_RNA (1)...(19): siRNA sense strand
ggggcuagauauugggaga

SEQ ID NO: 2616898 - RNA, 19 nt, Homo sapiens
  misc_RNA (1)...(19): siRNA sense strand
agaagcaggaacagagaca

SEQ ID NO: 2616899 - RNA, 19 nt, Homo sapiens
  misc_RNA (1)...(19): siRNA sense strand
gaaacaaaguggaagaugc

SEQ ID NO: 2616900 - RNA, 19 nt, Homo sapiens
  misc_RNA (1)...(19): siRNA sense strand
uuugaagagaagacugaaa

SEQ ID NO: 2616901 - RNA, 19 nt, Homo sapiens
  misc_RNA (1)...(19): siRNA sense strand
guguuacggcgguggaaaa

SEQ ID NO: 2616902 - RNA, 19 nt, Homo sapiens
  misc_RNA (1)...(19): siRNA sense strand
aagaaaagcagaacgguga

SEQ ID NO: 2616903 - RNA, 19 nt, Homo sapiens
  misc_RNA (1)...(19): siRNA sense strand
agaugagugagcaggaaga

SEQ ID NO: 2616904 - RNA, 19 nt, Homo sapiens
  misc_RNA (1)...(19): siRNA sense strand
gggcuagauauugggagaa

SEQ ID NO: 2616905 - RNA, 19 nt, Homo sapiens
  misc_RNA (1)...(19): siRNA sense strand
aggaagaggagcuugagga

SEQ ID NO: 2616906 - RNA, 19 nt, Homo sapiens
  misc_RNA (1)...(19): siRNA sense strand
uguuugaagagaagacuga

SEQ ID NO: 2616907 - RNA, 19 nt, Homo sapiens
  misc_RNA (1)...(19): siRNA sense strand
gcuucaagaacgagagaua

SEQ ID NO: 2616908 - RNA, 19 nt, Homo sapiens
  misc_RNA (1)...(19): siRNA sense strand
caucagaacaagagaaaga

SEQ ID NO: 2616909 - RNA, 19 nt, Homo sapiens
  misc_RNA (1)...(19): siRNA sense strand
gcgaaugacacuagaagaa

SEQ ID NO: 2616910 - RNA, 19 nt, Homo sapiens
  misc_RNA (1)...(19): siRNA sense strand
gcgagaagaacgagaucaa

SEQ ID NO: 2616911 - RNA, 19 nt, Homo sapiens
  misc_RNA (1)...(19): siRNA sense strand
gagaagaagcagcgaaaga

SEQ ID NO: 2616912 - RNA, 19 nt, Homo sapiens
  misc_RNA (1)...(19): siRNA sense strand
ggaaaauagucuagaagau

SEQ ID NO: 2616913 - RNA, 19 nt, Homo sapiens
  misc_RNA (1)...(19): siRNA sense strand
caacagaaugaaauggaaa

SEQ ID NO: 2616914 - RNA, 19 nt, Homo sapiens
  misc_RNA (1)...(19): siRNA sense strand
agaaggaacacuacagaaa

SEQ ID NO: 2616915 - RNA, 19 nt, Homo sapiens
  misc_RNA (1)...(19): siRNA sense strand
gcauaaugauagugaugau

SEQ ID NO: 2616916 - RNA, 19 nt, Homo sapiens
  misc_RNA (1)...(19): siRNA sense strand
acaauagacuaaaggagaa

SEQ ID NO: 2616917 - RNA, 19 nt, Homo sapiens
  misc_RNA (1)...(19): siRNA sense strand
cccaagacguaaagggcua

SEQ ID NO: 2616918 - RNA, 19 nt, Homo sapiens
  misc_RNA (1)...(19): siRNA sense strand
agaagaaaucacacaguua

SEQ ID NO: 2616919 - RNA, 19 nt, Homo sapiens
  misc_RNA (1)...(19): siRNA sense strand
agaggaaggaagaagauua

SEQ ID NO: 2616920 - RNA, 19 nt, Homo sapiens
  misc_RNA (1)...(19): siRNA sense strand
agagaaagauagugaccuu

SEQ ID NO: 2616921 - RNA, 19 nt, Homo sapiens
  misc_RNA (1)...(19): siRNA sense strand
cuuuauugacucugggaaa

SEQ ID NO: 2616922 - RNA, 19 nt, Homo sapiens
  misc_RNA (1)...(19): siRNA sense strand
guaaugaaauggaggagga

SEQ ID NO: 2616923 - RNA, 19 nt, Homo sapiens
  misc_RNA (1)...(19): siRNA sense strand
caagaacccaauagggaaa

SEQ ID NO: 2616924 - RNA, 19 nt, Homo sapiens
  misc_RNA (1)...(19): siRNA sense strand
ugaaagaagaauugcaaga

SEQ ID NO: 2616925 - RNA, 19 nt, Homo sapiens
  misc_RNA (1)...(19): siRNA sense strand
gauuaagcaaguacagaaa

SEQ ID NO: 2616926 - RNA, 19 nt, Homo sapiens
  misc_RNA (1)...(19): siRNA sense strand
guuaagagagacugggaau

SEQ ID NO: 2616927 - RNA, 19 nt, Homo sapiens
  misc_RNA (1)...(19): siRNA sense strand
ucgagaagaagcagcgaaa

SEQ ID NO: 2616928 - RNA, 19 nt, Homo sapiens
  misc_RNA (1)...(19): siRNA sense strand
ccauuuacacagucagaaa

SEQ ID NO: 2616929 - RNA, 19 nt, Homo sapiens
  misc_RNA (1)...(19): siRNA sense strand
gcaacuacacagaaggaau

SEQ ID NO: 2616930 - RNA, 19 nt, Homo sapiens
  misc_RNA (1)...(19): siRNA sense strand
gguaaguaagcaaguuaaa

SEQ ID NO: 2616931 - RNA, 19 nt, Homo sapiens
  misc_RNA (1)...(19): siRNA sense strand
gaacaagacauuuuggaaa

SEQ ID NO: 2616932 - RNA, 19 nt, Homo sapiens
  misc_RNA (1)...(19): siRNA sense strand
guagaagcaaguaaagaaa

SEQ ID NO: 2616933 - RNA, 19 nt, Homo sapiens
  misc_RNA (1)...(19): siRNA sense strand
cuccaaauacugaggcaaa

SEQ ID NO: 2616934 - RNA, 19 nt, Homo sapiens
  misc_RNA (1)...(19): siRNA sense strand
agaacaagagaaagaagaa

SEQ ID NO: 2616935 - RNA, 19 nt, Homo sapiens
  misc_RNA (1)...(19): siRNA sense strand
ugauggaagacgaggauuu

SEQ ID NO: 2616936 - RNA, 19 nt, Homo sapiens
  misc_RNA (1)...(19): siRNA sense strand
ccaaaagaaaagugaagaa

SEQ ID NO: 2616937 - RNA, 19 nt, Homo sapiens
  misc_RNA (1)...(19): siRNA sense strand
aagaagaagaagaaaccaa

SEQ ID NO: 2616938 - RNA, 19 nt, Homo sapiens
  misc_RNA (1)...(19): siRNA sense strand
aggauaaauuacugaggau

SEQ ID NO: 2616939 - RNA, 19 nt, Homo sapiens
  misc_RNA (1)...(19): siRNA sense strand
ccaaagaagccuauagacu

SEQ ID NO: 2616940 - RNA, 19 nt, Homo sapiens
  misc_RNA (1)...(19): siRNA sense strand
gaacaagagaaagaagaaa

SEQ ID NO: 2616941 - RNA, 19 nt, Homo sapiens
  misc_RNA (1)...(19): siRNA sense strand
cagcauauucacuguuaaa

SEQ ID NO: 2616942 - RNA, 19 nt, Homo sapiens
  misc_RNA (1)...(19): siRNA sense strand
cugaauuacaugugcagaa

SEQ ID NO: 2616943 - RNA, 19 nt, Homo sapiens
  misc_RNA (1)...(19): siRNA sense strand
ugugaagugucaacagaaa

SEQ ID NO: 2616944 - RNA, 19 nt, Homo sapiens
  misc_RNA (1)...(19): siRNA sense strand
cuaaagucucauauggaaa

SEQ ID NO: 2616945 - RNA, 19 nt, Homo sapiens
  misc_RNA (1)...(19): siRNA sense strand
ggucaaauaaagaacauga

SEQ ID NO: 2616946 - RNA, 19 nt, Homo sapiens
  misc_RNA (1)...(19): siRNA sense strand
ugacagagaaagauaguga

SEQ ID NO: 2616947 - RNA, 19 nt, Homo sapiens
  misc_RNA (1)...(19): siRNA sense strand
gcucggaagaggaagagua

SEQ ID NO: 2616948 - RNA, 19 nt, Homo sapiens
  misc_RNA (1)...(19): siRNA sense strand
auguaucacuagacaguaa

SEQ ID NO: 2616949 - RNA, 19 nt, Homo sapiens
  misc_RNA (1)...(19): siRNA sense strand
gcuauaaggaugaaaacaa

SEQ ID NO: 2616950 - RNA, 19 nt, Homo sapiens
  misc_RNA (1)...(19): siRNA sense strand
cagccaaguuagaacaaga

SEQ ID NO: 2616951 - RNA, 19 nt, Homo sapiens
  misc_RNA (1)...(19): siRNA sense strand
aagcagagaauauacgaaa

SEQ ID NO: 2616952 - RNA, 19 nt, Homo sapiens
  misc_RNA (1)...(19): siRNA sense strand
aaacaaaauggcagugaaa

SEQ ID NO: 2616953 - RNA, 19 nt, Homo sapiens
  misc_RNA (1)...(19): siRNA sense strand
aggcagaaguaaaaggcua

SEQ ID NO: 2616954 - RNA, 19 nt, Homo sapiens
  misc_RNA (1)...(19): siRNA sense strand
cuaugaagacacagaauga

SEQ ID NO: 2616955 - RNA, 19 nt, Homo sapiens
  misc_RNA (1)...(19): siRNA sense strand
gcauguaguugaaggaaag

SEQ ID NO: 2616956 - RNA, 19 nt, Homo sapiens
  misc_RNA (1)...(19): siRNA sense strand
caacaguaugagagagcau

SEQ ID NO: 2616957 - RNA, 19 nt, Homo sapiens
  misc_RNA (1)...(19): siRNA sense strand
cggaagaggaagaguaaug

SEQ ID NO: 2616958 - RNA, 19 nt, Homo sapiens
  misc_RNA (1)...(19): siRNA sense strand
augaaauggaggaggacuu

SEQ ID NO: 2616959 - RNA, 19 nt, Homo sapiens
  misc_RNA (1)...(19): siRNA sense strand
uguagaagcaaguaaagaa

SEQ ID NO: 2616960 - RNA, 19 nt, Homo sapiens
  misc_RNA (1)...(19): siRNA sense strand
agaaaaugaaggagaguga

SEQ ID NO: 2616961 - RNA, 19 nt, Homo sapiens
  misc_RNA (1)...(19): siRNA sense strand
gggcuaaccaauucaggaa

SEQ ID NO: 2616962 - RNA, 19 nt, Homo sapiens
  misc_RNA (1)...(19): siRNA sense strand
ccaaaggagaauuaaucaa

SEQ ID NO: 2616963 - RNA, 19 nt, Homo sapiens
  misc_RNA (1)...(19): siRNA sense strand
agcauguaguugaaggaaa

SEQ ID NO: 2616964 - RNA, 19 nt, Homo sapiens
  misc_RNA (1)...(19): siRNA sense strand
cagcugacagagaaagaua

SEQ ID NO: 2616965 - RNA, 19 nt, Homo sapiens
  misc_RNA (1)...(19): siRNA sense strand
ugggaagaauguaaagaga

SEQ ID NO: 2616966 - RNA, 19 nt, Homo sapiens
  misc_RNA (1)...(19): siRNA sense strand
gaggaaggaagaagauuau

SEQ ID NO: 2616967 - RNA, 19 nt, Homo sapiens
  misc_RNA (1)...(19): siRNA sense strand
aagaggaagaguaaugaaa

SEQ ID NO: 2616968 - RNA, 19 nt, Homo sapiens
  misc_RNA (1)...(19): siRNA sense strand
aaggaacacuacagaaauu

SEQ ID NO: 2616969 - RNA, 19 nt, Homo sapiens
  misc_RNA (1)...(19): siRNA sense strand
ccucgaacuuugaauguau

SEQ ID NO: 2616970 - RNA, 19 nt, Homo sapiens
  misc_RNA (1)...(19): siRNA sense strand
uugcagaaauugaagacau

SEQ ID NO: 2616971 - RNA, 19 nt, Homo sapiens
  misc_RNA (1)...(19): siRNA sense strand
caucagaguuuuacaagaa

SEQ ID NO: 2616972 - RNA, 19 nt, Homo sapiens
  misc_RNA (1)...(19): siRNA sense strand
gggaagaagaagagaagac

SEQ ID NO: 2616973 - RNA, 19 nt, Homo sapiens
  misc_RNA (1)...(19): siRNA sense strand
ggacugagcugguagagca

SEQ ID NO: 2616974 - RNA, 19 nt, Homo sapiens
  misc_RNA (1)...(19): siRNA sense strand
gugaagacuuggaagagga

SEQ ID NO: 2616975 - RNA, 19 nt, Homo sapiens
  misc_RNA (1)...(19): siRNA sense strand
gguccuucagcuugggaaa

SEQ ID NO: 2616976 - RNA, 19 nt, Homo sapiens
  misc_RNA (1)...(19): siRNA sense strand
caggaaacugugagcaaaa

SEQ ID NO: 2616977 - RNA, 19 nt, Homo sapiens
  misc_RNA (1)...(19): siRNA sense strand
ucucaaagugggagggauc

SEQ ID NO: 2616978 - RNA, 19 nt, Homo sapiens
  misc_RNA (1)...(19): siRNA sense strand
gaagaggaacggagggaag

SEQ ID NO: 2616979 - RNA, 19 nt, Homo sapiens
  misc_RNA (1)...(19): siRNA sense strand
cuggaagagaaguugacua

SEQ ID NO: 2616980 - RNA, 19 nt, Homo sapiens
  misc_RNA (1)...(19): siRNA sense strand
gcaucuacucggaggugau

SEQ ID NO: 2616981 - RNA, 19 nt, Homo sapiens
  misc_RNA (1)...(19): siRNA sense strand
gcuuauaaagacuuggcau

SEQ ID NO: 2616982 - RNA, 19 nt, Homo sapiens
  misc_RNA (1)...(19): siRNA sense strand
cggaaacggacuaaagaac

SEQ ID NO: 2616983 - RNA, 19 nt, Homo sapiens
  misc_RNA (1)...(19): siRNA sense strand
aucaggaaacugugagcaa

SEQ ID NO: 2616984 - RNA, 19 nt, Homo sapiens
  misc_RNA (1)...(19): siRNA sense strand
agucuuugccagucggauu

SEQ ID NO: 2616985 - RNA, 19 nt, Homo sapiens
  misc_RNA (1)...(19): siRNA sense strand
gcgugcagaaagagcauga

SEQ ID NO: 2616986 - RNA, 19 nt, Homo sapiens
  misc_RNA (1)...(19): siRNA sense strand
ggaagaggaacggagggaa

SEQ ID NO: 2616987 - RNA, 19 nt, Homo sapiens
  misc_RNA (1)...(19): siRNA sense strand
gccagaagguccugagccu

SEQ ID NO: 2616988 - RNA, 19 nt, Homo sapiens
  misc_RNA (1)...(19): siRNA sense strand
acggaaacggacuaaagaa

SEQ ID NO: 2616989 - RNA, 19 nt, Homo sapiens
  misc_RNA (1)...(19): siRNA sense strand
ugaagagcugauagauaau

SEQ ID NO: 2616990 - RNA, 19 nt, Homo sapiens
  misc_RNA (1)...(19): siRNA sense strand
ccauucagagucaggaaaa

SEQ ID NO: 2616991 - RNA, 19 nt, Homo sapiens
  misc_RNA (1)...(19): siRNA sense strand
cugccaagacugugguuga

SEQ ID NO: 2616992 - RNA, 19 nt, Homo sapiens
  misc_RNA (1)...(19): siRNA sense strand
gagcaggagacgcgaacca

SEQ ID NO: 2616993 - RNA, 19 nt, Homo sapiens
  misc_RNA (1)...(19): siRNA sense strand
uggaauuugaggaggagga

SEQ ID NO: 2616994 - RNA, 19 nt, Homo sapiens
  misc_RNA (1)...(19): siRNA sense strand
cggcagaagaaaaggaaaa

SEQ ID NO: 2616995 - RNA, 19 nt, Homo sapiens
  misc_RNA (1)...(19): siRNA sense strand
uagaaaaccaccaggaaaa

SEQ ID NO: 2616996 - RNA, 19 nt, Homo sapiens
  misc_RNA (1)...(19): siRNA sense strand
agaagaagaagcagcgcaa

SEQ ID NO: 2616997 - RNA, 19 nt, Homo sapiens
  misc_RNA (1)...(19): siRNA sense strand
cagaauuggaugaagaaca

SEQ ID NO: 2616998 - RNA, 19 nt, Homo sapiens
  misc_RNA (1)...(19): siRNA sense strand
aggaagucccugaggccaa

SEQ ID NO: 2616999 - RNA, 19 nt, Homo sapiens
  misc_RNA (1)...(19): siRNA sense strand
cgugaaaugcauaagugaa

SEQ ID NO: 2617000 - RNA, 19 nt, Homo sapiens
  misc_RNA (1)...(19): siRNA sense strand
gcggagaaccagaagacga

SEQ ID NO: 2617001 - RNA, 19 nt, Homo sapiens
  misc_RNA (1)...(19): siRNA sense strand
aaauucaacuggaagggaa

SEQ ID NO: 2617002 - RNA, 19 nt, Homo sapiens
  misc_RNA (1)...(19): siRNA sense strand
guggugaaucagugaagaa

SEQ ID NO: 2617003 - RNA, 19 nt, Homo sapiens
  misc_RNA (1)...(19): siRNA sense strand
uggaugaagaacaguuuaa

SEQ ID NO: 2617004 - RNA, 19 nt, Homo sapiens
  misc_RNA (1)...(19): siRNA sense strand
uugcauugacugcgguaaa

SEQ ID NO: 2617005 - RNA, 19 nt, Homo sapiens
  misc_RNA (1)...(19): siRNA sense strand
acucggaaguugaaacaga

SEQ ID NO: 2617006 - RNA, 19 nt, Homo sapiens
  misc_RNA (1)...(19): siRNA sense strand
cggagaaccagaagacgau

SEQ ID NO: 2617007 - RNA, 19 nt, Homo sapiens
  misc_RNA (1)...(19): siRNA sense strand
ggcaaauccacaugcagaa

SEQ ID NO: 2617008 - RNA, 19 nt, Homo sapiens
  misc_RNA (1)...(19): siRNA sense strand
gaauuaauaaagagaccca

SEQ ID NO: 2617009 - RNA, 19 nt, Homo sapiens
  misc_RNA (1)...(19): siRNA sense strand
agugaaagacgccguggaa

SEQ ID NO: 2617010 - RNA, 19 nt, Homo sapiens
  misc_RNA (1)...(19): siRNA sense strand
ggugaaucagugaagaaaa

SEQ ID NO: 2617011 - RNA, 19 nt, Homo sapiens
  misc_RNA (1)...(19): siRNA sense strand
ucaaggaaucagaagccua

SEQ ID NO: 2617012 - RNA, 19 nt, Homo sapiens
  misc_RNA (1)...(19): siRNA sense strand
ggggaggugaagaagaaua

SEQ ID NO: 2617013 - RNA, 19 nt, Homo sapiens
  misc_RNA (1)...(19): siRNA sense strand
aaagaaaggaagaacggca

SEQ ID NO: 2617014 - RNA, 19 nt, Homo sapiens
  misc_RNA (1)...(19): siRNA sense strand
cgaaccagucaauaaggaa

SEQ ID NO: 2617015 - RNA, 19 nt, Homo sapiens
  misc_RNA (1)...(19): siRNA sense strand
gaucagaaguaugguggca

SEQ ID NO: 2617016 - RNA, 19 nt, Homo sapiens
  misc_RNA (1)...(19): siRNA sense strand
guaugguggcaaaggcuau

SEQ ID NO: 2617017 - RNA, 19 nt, Homo sapiens
  misc_RNA (1)...(19): siRNA sense strand
aggcguggauucagaaaau

SEQ ID NO: 2617018 - RNA, 19 nt, Homo sapiens
  misc_RNA (1)...(19): siRNA sense strand
gcguggauucagaaaauua

SEQ ID NO: 2617019 - RNA, 19 nt, Homo sapiens
  misc_RNA (1)...(19): siRNA sense strand
gugaauuaauaaagagacc

SEQ ID NO: 2617020 - RNA, 19 nt, Homo sapiens
  misc_RNA (1)...(19): siRNA sense strand
uggcaaauccacaugcaga

SEQ ID NO: 2617021 - RNA, 19 nt, Homo sapiens
  misc_RNA (1)...(19): siRNA sense strand
gaggugaagaagaauaaaa

SEQ ID NO: 2617022 - RNA, 19 nt, Homo sapiens
  misc_RNA (1)...(19): siRNA sense strand
aguacuacacagugacaga

SEQ ID NO: 2617023 - RNA, 19 nt, Homo sapiens
  misc_RNA (1)...(19): siRNA sense strand
aaggggaggugaagaagaa

SEQ ID NO: 2617024 - RNA, 19 nt, Homo sapiens
  misc_RNA (1)...(19): siRNA sense strand
aagagaaagaaaggaagaa

SEQ ID NO: 2617025 - RNA, 19 nt, Homo sapiens
  misc_RNA (1)...(19): siRNA sense strand
gaaaaggaaaagagaaaag

SEQ ID NO: 2617026 - RNA, 19 nt, Homo sapiens
  misc_RNA (1)...(19): siRNA sense strand
augcauaagugaagaucag

SEQ ID NO: 2617027 - RNA, 19 nt, Homo sapiens
  misc_RNA (1)...(19): siRNA sense strand
gagaacuuuuagagcaaau

SEQ ID NO: 2617028 - RNA, 19 nt, Homo sapiens
  misc_RNA (1)...(19): siRNA sense strand
aagaggaagcggaggcacu

SEQ ID NO: 2617029 - RNA, 19 nt, Homo sapiens
  misc_RNA (1)...(19): siRNA sense strand
cuggaagggaacuauuaaa

SEQ ID NO: 2617030 - RNA, 19 nt, Homo sapiens
  misc_RNA (1)...(19): siRNA sense strand
agaggagcaagaagaagaa

SEQ ID NO: 2617031 - RNA, 19 nt, Homo sapiens
  misc_RNA (1)...(19): siRNA sense strand
gcacucggaaguugaaaca

SEQ ID NO: 2617032 - RNA, 19 nt, Homo sapiens
  misc_RNA (1)...(19): siRNA sense strand
aagggaacuauuaaagcaa

SEQ ID NO: 2617033 - RNA, 19 nt, Homo sapiens
  misc_RNA (1)...(19): siRNA sense strand
ccgucuggauacugagaaa

SEQ ID NO: 2617034 - RNA, 19 nt, Homo sapiens
  misc_RNA (1)...(19): siRNA sense strand
gggauaaaguugugagugg

SEQ ID NO: 2617035 - RNA, 19 nt, Homo sapiens
  misc_RNA (1)...(19): siRNA sense strand
aggugaugauguaucguaa

SEQ ID NO: 2617036 - RNA, 19 nt, Homo sapiens
  misc_RNA (1)...(19): siRNA sense strand
guuucuugccauagcuaaa

SEQ ID NO: 2617037 - RNA, 19 nt, Homo sapiens
  misc_RNA (1)...(19): siRNA sense strand
ggauaaaguugugagugga

SEQ ID NO: 2617038 - RNA, 19 nt, Homo sapiens
  misc_RNA (1)...(19): siRNA sense strand
agcuaaagccauggaggaa

SEQ ID NO: 2617039 - RNA, 19 nt, Homo sapiens
  misc_RNA (1)...(19): siRNA sense strand
ugaacagugcagagaagau

SEQ ID NO: 2617040 - RNA, 19 nt, Homo sapiens
  misc_RNA (1)...(19): siRNA sense strand
ccuuaugaucucugguuca

SEQ ID NO: 2617041 - RNA, 19 nt, Homo sapiens
  misc_RNA (1)...(19): siRNA sense strand
guuucguggaguugaagaa

SEQ ID NO: 2617042 - RNA, 19 nt, Homo sapiens
  misc_RNA (1)...(19): siRNA sense strand
uagcuaaagccauggagga

SEQ ID NO: 2617043 - RNA, 19 nt, Homo sapiens
  misc_RNA (1)...(19): siRNA sense strand
aauaccaaguaccgggauu

SEQ ID NO: 2617044 - RNA, 19 nt, Homo sapiens
  misc_RNA (1)...(19): siRNA sense strand
gggaagacauccugagcga

SEQ ID NO: 2617045 - RNA, 19 nt, Homo sapiens
  misc_RNA (1)...(19): siRNA sense strand
cgcaauaaccggugggaag

SEQ ID NO: 2617046 - RNA, 19 nt, Homo sapiens
  misc_RNA (1)...(19): siRNA sense strand
ccagauggcaagaugguga

SEQ ID NO: 2617047 - RNA, 19 nt, Homo sapiens
  misc_RNA (1)...(19): siRNA sense strand
agauggagcccguggcaca

SEQ ID NO: 2617048 - RNA, 19 nt, Homo sapiens
  misc_RNA (1)...(19): siRNA sense strand
ucggauaucuucugcgaca

SEQ ID NO: 2617049 - RNA, 19 nt, Homo sapiens
  misc_RNA (1)...(19): siRNA sense strand
ugaccgacuucgacggaga

SEQ ID NO: 2617050 - RNA, 19 nt, Homo sapiens
  misc_RNA (1)...(19): siRNA sense strand
uggacaucgucuauggcaa

SEQ ID NO: 2617051 - RNA, 19 nt, Homo sapiens
  misc_RNA (1)...(19): siRNA sense strand
agaagcggcuggugaacau

SEQ ID NO: 2617052 - RNA, 19 nt, Homo sapiens
  misc_RNA (1)...(19): siRNA sense strand
gcaauaaccggugggaaga

SEQ ID NO: 2617053 - RNA, 19 nt, Homo sapiens
  misc_RNA (1)...(19): siRNA sense strand
ccugaugcccucauugaaa

SEQ ID NO: 2617054 - RNA, 19 nt, Homo sapiens
  misc_RNA (1)...(19): siRNA sense strand
uggagaucuucuucaacaa

SEQ ID NO: 2617055 - RNA, 19 nt, Homo sapiens
  misc_RNA (1)...(19): siRNA sense strand
ccacguacaccgacaaguu

SEQ ID NO: 2617056 - RNA, 19 nt, Homo sapiens
  misc_RNA (1)...(19): siRNA sense strand
cgucauccguagagagcac

SEQ ID NO: 2617057 - RNA, 19 nt, Homo sapiens
  misc_RNA (1)...(19): siRNA sense strand
acucagugcuggagauccu

SEQ ID NO: 2617058 - RNA, 19 nt, Homo sapiens
  misc_RNA (1)...(19): siRNA sense strand
cgacaaugagaaugggccu

SEQ ID NO: 2617059 - RNA, 19 nt, Homo sapiens
  misc_RNA (1)...(19): siRNA sense strand
acuucaaccgugauggcaa

SEQ ID NO: 2617060 - RNA, 19 nt, Homo sapiens
  misc_RNA (1)...(19): siRNA sense strand
gcucaacuaugguguggca

SEQ ID NO: 2617061 - RNA, 19 nt, Homo sapiens
  misc_RNA (1)...(19): siRNA sense strand
ccgcaauaaccggugggaa

SEQ ID NO: 2617062 - RNA, 19 nt, Homo sapiens
  misc_RNA (1)...(19): siRNA sense strand
ggauucucccagcaggaaa

SEQ ID NO: 2617063 - RNA, 19 nt, Homo sapiens
  misc_RNA (1)...(19): siRNA sense strand
gggacaugaacguggggaa

SEQ ID NO: 2617064 - RNA, 19 nt, Homo sapiens
  misc_RNA (1)...(19): siRNA sense strand
ggaacaaaguggaccucac

SEQ ID NO: 2617065 - RNA, 19 nt, Homo sapiens
  misc_RNA (1)...(19): siRNA sense strand
ccgagaaggccuugagaga

SEQ ID NO: 2617066 - RNA, 19 nt, Homo sapiens
  misc_RNA (1)...(19): siRNA sense strand
aggaaauggccuuguuuaa

SEQ ID NO: 2617067 - RNA, 19 nt, Homo sapiens
  misc_RNA (1)...(19): siRNA sense strand
ggucaaaggccggaagcaa

SEQ ID NO: 2617068 - RNA, 19 nt, Homo sapiens
  misc_RNA (1)...(19): siRNA sense strand
ccauaaauaucauuggaga

SEQ ID NO: 2617069 - RNA, 19 nt, Homo sapiens
  misc_RNA (1)...(19): siRNA sense strand
gagguaugagguagagaaa

SEQ ID NO: 2617070 - RNA, 19 nt, Homo sapiens
  misc_RNA (1)...(19): siRNA sense strand
ccaucgauguguugggaga

SEQ ID NO: 2617071 - RNA, 19 nt, Homo sapiens
  misc_RNA (1)...(19): siRNA sense strand
gagaugucgaauaaggaaa

SEQ ID NO: 2617072 - RNA, 19 nt, Homo sapiens
  misc_RNA (1)...(19): siRNA sense strand
cugugaagccaaagaauca

SEQ ID NO: 2617073 - RNA, 19 nt, Homo sapiens
  misc_RNA (1)...(19): siRNA sense strand
cugcugaagcucugggaau

SEQ ID NO: 2617074 - RNA, 19 nt, Homo sapiens
  misc_RNA (1)...(19): siRNA sense strand
gguggagagaugucgaaua

SEQ ID NO: 2617075 - RNA, 19 nt, Homo sapiens
  misc_RNA (1)...(19): siRNA sense strand
uggagaagaggcauggaaa

SEQ ID NO: 2617076 - RNA, 19 nt, Homo sapiens
  misc_RNA (1)...(19): siRNA sense strand
cuacagaagaagcagaaaa

SEQ ID NO: 2617077 - RNA, 19 nt, Homo sapiens
  misc_RNA (1)...(19): siRNA sense strand
ccguggagaaggaagacua

SEQ ID NO: 2617078 - RNA, 19 nt, Homo sapiens
  misc_RNA (1)...(19): siRNA sense strand
gcacgaugaaccugcgcaa

SEQ ID NO: 2617079 - RNA, 19 nt, Homo sapiens
  misc_RNA (1)...(19): siRNA sense strand
acuggaagaaagaggaaca

SEQ ID NO: 2617080 - RNA, 19 nt, Homo sapiens
  misc_RNA (1)...(19): siRNA sense strand
ccauugacaacgugaugaa

SEQ ID NO: 2617081 - RNA, 19 nt, Homo sapiens
  misc_RNA (1)...(19): siRNA sense strand
gcugacggaaugugacaaa

SEQ ID NO: 2617082 - RNA, 19 nt, Homo sapiens
  misc_RNA (1)...(19): siRNA sense strand
gaguucuacauuagugaaa

SEQ ID NO: 2617083 - RNA, 19 nt, Homo sapiens
  misc_RNA (1)...(19): siRNA sense strand
gagagaaguugauugacca

SEQ ID NO: 2617084 - RNA, 19 nt, Homo sapiens
  misc_RNA (1)...(19): siRNA sense strand
ggaaaugaguaaugcagac

SEQ ID NO: 2617085 - RNA, 19 nt, Homo sapiens
  misc_RNA (1)...(19): siRNA sense strand
agccaaagaaucaggacau

SEQ ID NO: 2617086 - RNA, 19 nt, Homo sapiens
  misc_RNA (1)...(19): siRNA sense strand
caacuggaagaaagaggaa

SEQ ID NO: 2617087 - RNA, 19 nt, Homo sapiens
  misc_RNA (1)...(19): siRNA sense strand
aagaacacacugagagcau

SEQ ID NO: 2617088 - RNA, 19 nt, Homo sapiens
  misc_RNA (1)...(19): siRNA sense strand
ugaaaagacagguugcaaa

SEQ ID NO: 2617089 - RNA, 19 nt, Homo sapiens
  misc_RNA (1)...(19): siRNA sense strand
ggaaaugccuguuggaacc

SEQ ID NO: 2617090 - RNA, 19 nt, Homo sapiens
  misc_RNA (1)...(19): siRNA sense strand
agaugagggcacggagaaa

SEQ ID NO: 2617091 - RNA, 19 nt, Homo sapiens
  misc_RNA (1)...(19): siRNA sense strand
uguggaugcaguaggacaa

SEQ ID NO: 2617092 - RNA, 19 nt, Homo sapiens
  misc_RNA (1)...(19): siRNA sense strand
cgaagggcggacugagcaa

SEQ ID NO: 2617093 - RNA, 19 nt, Homo sapiens
  misc_RNA (1)...(19): siRNA sense strand
ccuggagcauagaguguau

SEQ ID NO: 2617094 - RNA, 19 nt, Homo sapiens
  misc_RNA (1)...(19): siRNA sense strand
agcaagagcuccagcagga

SEQ ID NO: 2617095 - RNA, 19 nt, Homo sapiens
  misc_RNA (1)...(19): siRNA sense strand
ucucguuagaagagccaua

SEQ ID NO: 2617096 - RNA, 19 nt, Homo sapiens
  misc_RNA (1)...(19): siRNA sense strand
ggagaagaggcauggaaag

SEQ ID NO: 2617097 - RNA, 19 nt, Homo sapiens
  misc_RNA (1)...(19): siRNA sense strand
acgaugaaccugcgcaaga

SEQ ID NO: 2617098 - RNA, 19 nt, Homo sapiens
  misc_RNA (1)...(19): siRNA sense strand
cuaugauuaugccaagaaa

SEQ ID NO: 2617099 - RNA, 19 nt, Homo sapiens
  misc_RNA (1)...(19): siRNA sense strand
aggagaagaagcagcagau

SEQ ID NO: 2617100 - RNA, 19 nt, Homo sapiens
  misc_RNA (1)...(19): siRNA sense strand
cggaaaugaguaaugcaga

SEQ ID NO: 2617101 - RNA, 19 nt, Homo sapiens
  misc_RNA (1)...(19): siRNA sense strand
caguaggacaauuucuuaa

SEQ ID NO: 2617102 - RNA, 19 nt, Homo sapiens
  misc_RNA (1)...(19): siRNA sense strand
agaaagaggaacagaaaac

SEQ ID NO: 2617103 - RNA, 19 nt, Homo sapiens
  misc_RNA (1)...(19): siRNA sense strand
uggcagagcuacagaugcu

SEQ ID NO: 2617104 - RNA, 19 nt, Homo sapiens
  misc_RNA (1)...(19): siRNA sense strand
cuggcagcacugaaagaaa

SEQ ID NO: 2617105 - RNA, 19 nt, Homo sapiens
  misc_RNA (1)...(19): siRNA sense strand
gugccguggagaaggaaga

SEQ ID NO: 2617106 - RNA, 19 nt, Homo sapiens
  misc_RNA (1)...(19): siRNA sense strand
cagaaguugcacagaucau

SEQ ID NO: 2617107 - RNA, 19 nt, Homo sapiens
  misc_RNA (1)...(19): siRNA sense strand
ccccaaaagaagauuuaaa

SEQ ID NO: 2617108 - RNA, 19 nt, Homo sapiens
  misc_RNA (1)...(19): siRNA sense strand
gauuuaaagaacacacuga

SEQ ID NO: 2617109 - RNA, 19 nt, Homo sapiens
  misc_RNA (1)...(19): siRNA sense strand
uugacaacgugaugaaguu

SEQ ID NO: 2617110 - RNA, 19 nt, Homo sapiens
  misc_RNA (1)...(19): siRNA sense strand
ggcuacagaagaagcagaa

SEQ ID NO: 2617111 - RNA, 19 nt, Homo sapiens
  misc_RNA (1)...(19): siRNA sense strand
cggaugagcacuaucuaga

SEQ ID NO: 2617112 - RNA, 19 nt, Homo sapiens
  misc_RNA (1)...(19): siRNA sense strand
ggcacugcagccagggaaa

SEQ ID NO: 2617113 - RNA, 19 nt, Homo sapiens
  misc_RNA (1)...(19): siRNA sense strand
ccuaucaagcagagcgguu

SEQ ID NO: 2617114 - RNA, 19 nt, Homo sapiens
  misc_RNA (1)...(19): siRNA sense strand
uucaaaugguggagagaug

SEQ ID NO: 2617115 - RNA, 19 nt, Homo sapiens
  misc_RNA (1)...(19): siRNA sense strand
uggaaaugccuguuggaac

SEQ ID NO: 2617116 - RNA, 19 nt, Homo sapiens
  misc_RNA (1)...(19): siRNA sense strand
aauagauggcagagcuaca

SEQ ID NO: 2617117 - RNA, 19 nt, Homo sapiens
  misc_RNA (1)...(19): siRNA sense strand
ccaaggagaagaagcagca

SEQ ID NO: 2617118 - RNA, 19 nt, Homo sapiens
  misc_RNA (1)...(19): siRNA sense strand
acugaguaaacuugaaaca

SEQ ID NO: 2617119 - RNA, 19 nt, Homo sapiens
  misc_RNA (1)...(19): siRNA sense strand
aggagaaggcagcggacaa

SEQ ID NO: 2617120 - RNA, 19 nt, Homo sapiens
  misc_RNA (1)...(19): siRNA sense strand
cagcggacaaagagguaaa

SEQ ID NO: 2617121 - RNA, 19 nt, Homo sapiens
  misc_RNA (1)...(19): siRNA sense strand
agaaaauacugaaggccaa

SEQ ID NO: 2617122 - RNA, 19 nt, Homo sapiens
  misc_RNA (1)...(19): siRNA sense strand
caccaggacacuagagcaa

SEQ ID NO: 2617123 - RNA, 19 nt, Homo sapiens
  misc_RNA (1)...(19): siRNA sense strand
aagaaggcguauaggcaga

SEQ ID NO: 2617124 - RNA, 19 nt, Homo sapiens
  misc_RNA (1)...(19): siRNA sense strand
aggagagugaggaggaaga

SEQ ID NO: 2617125 - RNA, 19 nt, Homo sapiens
  misc_RNA (1)...(19): siRNA sense strand
agugcaagaaggaggauga

SEQ ID NO: 2617126 - RNA, 19 nt, Homo sapiens
  misc_RNA (1)...(19): siRNA sense strand
cuaaaauggaagugcaaga

SEQ ID NO: 2617127 - RNA, 19 nt, Homo sapiens
  misc_RNA (1)...(19): siRNA sense strand
ccaagaagcaagcagcaga

SEQ ID NO: 2617128 - RNA, 19 nt, Homo sapiens
  misc_RNA (1)...(19): siRNA sense strand
gaggaacagcagaggcuca

SEQ ID NO: 2617129 - RNA, 19 nt, Homo sapiens
  misc_RNA (1)...(19): siRNA sense strand
agaucgaacgccugagaga

SEQ ID NO: 2617130 - RNA, 19 nt, Homo sapiens
  misc_RNA (1)...(19): siRNA sense strand
ugcuaggcauugaggagaa

SEQ ID NO: 2617131 - RNA, 19 nt, Homo sapiens
  misc_RNA (1)...(19): siRNA sense strand
uuuccugguuggagggaca

SEQ ID NO: 2617132 - RNA, 19 nt, Homo sapiens
  misc_RNA (1)...(19): siRNA sense strand
cacuagagcaagagaucga

SEQ ID NO: 2617133 - RNA, 19 nt, Homo sapiens
  misc_RNA (1)...(19): siRNA sense strand
gguugagaggaaaggcaga

SEQ ID NO: 2617134 - RNA, 19 nt, Homo sapiens
  misc_RNA (1)...(19): siRNA sense strand
gagaggaaaggcagaaaau

SEQ ID NO: 2617135 - RNA, 19 nt, Homo sapiens
  misc_RNA (1)...(19): siRNA sense strand
ccagauaaucccagagcag

SEQ ID NO: 2617136 - RNA, 19 nt, Homo sapiens
  misc_RNA (1)...(19): siRNA sense strand
ccuuggaggugcugaccga

SEQ ID NO: 2617137 - RNA, 19 nt, Homo sapiens
  misc_RNA (1)...(19): siRNA sense strand
uaaagaaggcguauaggca

SEQ ID NO: 2617138 - RNA, 19 nt, Homo sapiens
  misc_RNA (1)...(19): siRNA sense strand
acaaagagguaaagaaggc

SEQ ID NO: 2617139 - RNA, 19 nt, Homo sapiens
  misc_RNA (1)...(19): siRNA sense strand
cagaaaauacugaaggcca

SEQ ID NO: 2617140 - RNA, 19 nt, Homo sapiens
  misc_RNA (1)...(19): siRNA sense strand
ggaagugcaagaaggagga

SEQ ID NO: 2617141 - RNA, 19 nt, Homo sapiens
  misc_RNA (1)...(19): siRNA sense strand
gcaagaaggaggaugaguc

SEQ ID NO: 2617142 - RNA, 19 nt, Homo sapiens
  misc_RNA (1)...(19): siRNA sense strand
ggacacuagagcaagagau

SEQ ID NO: 2617143 - RNA, 19 nt, Homo sapiens
  misc_RNA (1)...(19): siRNA sense strand
ggaagauggaaaaggaaau

SEQ ID NO: 2617144 - RNA, 19 nt, Homo sapiens
  misc_RNA (1)...(19): siRNA sense strand
auuuaaugugugagaggaa

SEQ ID NO: 2617145 - RNA, 19 nt, Homo sapiens
  misc_RNA (1)...(19): siRNA sense strand
uggagauauuauggagaua

SEQ ID NO: 2617146 - RNA, 19 nt, Homo sapiens
  misc_RNA (1)...(19): siRNA sense strand
ggucugucaugcagcgcaa

SEQ ID NO: 2617147 - RNA, 19 nt, Homo sapiens
  misc_RNA (1)...(19): siRNA sense strand
aaucagaacuaaagggcac

SEQ ID NO: 2617148 - RNA, 19 nt, Homo sapiens
  misc_RNA (1)...(19): siRNA sense strand
uggaagauggaaaaggaaa

SEQ ID NO: 2617149 - RNA, 19 nt, Homo sapiens
  misc_RNA (1)...(19): siRNA sense strand
gcacaacuuaacaugggaa

SEQ ID NO: 2617150 - RNA, 19 nt, Homo sapiens
  misc_RNA (1)...(19): siRNA sense strand
ggaucgagaaagagagaaa

SEQ ID NO: 2617151 - RNA, 19 nt, Homo sapiens
  misc_RNA (1)...(19): siRNA sense strand
aaguagaagcaaagagaaa

SEQ ID NO: 2617152 - RNA, 19 nt, Homo sapiens
  misc_RNA (1)...(19): siRNA sense strand
aaguagaaguagaagcaaa

SEQ ID NO: 2617153 - RNA, 19 nt, Homo sapiens
  misc_RNA (1)...(19): siRNA sense strand
ugauaaggaaagaggaaau

SEQ ID NO: 2617154 - RNA, 19 nt, Homo sapiens
  misc_RNA (1)...(19): siRNA sense strand
gagaaaggaagcaggaaaa

SEQ ID NO: 2617155 - RNA, 19 nt, Homo sapiens
  misc_RNA (1)...(19): siRNA sense strand
guauagaacaagagagcca

SEQ ID NO: 2617156 - RNA, 19 nt, Homo sapiens
  misc_RNA (1)...(19): siRNA sense strand
agguagaagagaagaaaca

SEQ ID NO: 2617157 - RNA, 19 nt, Homo sapiens
  misc_RNA (1)...(19): siRNA sense strand
ggggagagguagaagagaa

SEQ ID NO: 2617158 - RNA, 19 nt, Homo sapiens
  misc_RNA (1)...(19): siRNA sense strand
aggaaggugcugaggaaau

SEQ ID NO: 2617159 - RNA, 19 nt, Homo sapiens
  misc_RNA (1)...(19): siRNA sense strand
gagaaagagagaaagaaaa

SEQ ID NO: 2617160 - RNA, 19 nt, Homo sapiens
  misc_RNA (1)...(19): siRNA sense strand
gagagguagaagagaagaa

SEQ ID NO: 2617161 - RNA, 19 nt, Homo sapiens
  misc_RNA (1)...(19): siRNA sense strand
agaagcagaagcagagaaa

SEQ ID NO: 2617162 - RNA, 19 nt, Homo sapiens
  misc_RNA (1)...(19): siRNA sense strand
ucgaagucgugauaggaaa

SEQ ID NO: 2617163 - RNA, 19 nt, Homo sapiens
  misc_RNA (1)...(19): siRNA sense strand
cagaagcagagaaaggaaa

SEQ ID NO: 2617164 - RNA, 19 nt, Homo sapiens
  misc_RNA (1)...(19): siRNA sense strand
caguagaagcagaagcaga

SEQ ID NO: 2617165 - RNA, 19 nt, Homo sapiens
  misc_RNA (1)...(19): siRNA sense strand
cguugaaccaugggagaaa

SEQ ID NO: 2617166 - RNA, 19 nt, Homo sapiens
  misc_RNA (1)...(19): siRNA sense strand
ugagagagguagaagacga

SEQ ID NO: 2617167 - RNA, 19 nt, Homo sapiens
  misc_RNA (1)...(19): siRNA sense strand
agagaaagguccaaggaac

SEQ ID NO: 2617168 - RNA, 19 nt, Homo sapiens
  misc_RNA (1)...(19): siRNA sense strand
cugaggaaauagacagaca

SEQ ID NO: 2617169 - RNA, 19 nt, Homo sapiens
  misc_RNA (1)...(19): siRNA sense strand
agccaaagaaagggagaaa

SEQ ID NO: 2617170 - RNA, 19 nt, Homo sapiens
  misc_RNA (1)...(19): siRNA sense strand
uaugauaaggaaagaggaa

SEQ ID NO: 2617171 - RNA, 19 nt, Homo sapiens
  misc_RNA (1)...(19): siRNA sense strand
gcauagaagucgcagucga

SEQ ID NO: 2617172 - RNA, 19 nt, Homo sapiens
  misc_RNA (1)...(19): siRNA sense strand
gaaccaugggagaaaggaa

SEQ ID NO: 2617173 - RNA, 19 nt, Homo sapiens
  misc_RNA (1)...(19): siRNA sense strand
gagaaguaggggagaggua

SEQ ID NO: 2617174 - RNA, 19 nt, Homo sapiens
  misc_RNA (1)...(19): siRNA sense strand
agaggaaaugaacgagaaa

SEQ ID NO: 2617175 - RNA, 19 nt, Homo sapiens
  misc_RNA (1)...(19): siRNA sense strand
ucgaaggagccaaaguaua

SEQ ID NO: 2617176 - RNA, 19 nt, Homo sapiens
  misc_RNA (1)...(19): siRNA sense strand
cgcagcagaaguagggaaa

SEQ ID NO: 2617177 - RNA, 19 nt, Homo sapiens
  misc_RNA (1)...(19): siRNA sense strand
aaagaaaaugagagaggua

SEQ ID NO: 2617178 - RNA, 19 nt, Homo sapiens
  misc_RNA (1)...(19): siRNA sense strand
gcagaagcagagaaaggaa

SEQ ID NO: 2617179 - RNA, 19 nt, Homo sapiens
  misc_RNA (1)...(19): siRNA sense strand
acuagagcgugaagccaaa

SEQ ID NO: 2617180 - RNA, 19 nt, Homo sapiens
  misc_RNA (1)...(19): siRNA sense strand
aaguaggagucgaaguaga

SEQ ID NO: 2617181 - RNA, 19 nt, Homo sapiens
  misc_RNA (1)...(19): siRNA sense strand
gucaagaaguagaagucau

SEQ ID NO: 2617182 - RNA, 19 nt, Homo sapiens
  misc_RNA (1)...(19): siRNA sense strand
aaaucaagaaagaugggaa

SEQ ID NO: 2617183 - RNA, 19 nt, Homo sapiens
  misc_RNA (1)...(19): siRNA sense strand
agggacagggaucgagaaa

SEQ ID NO: 2617184 - RNA, 19 nt, Homo sapiens
  misc_RNA (1)...(19): siRNA sense strand
gguccaaggaacagagaag

SEQ ID NO: 2617185 - RNA, 19 nt, Homo sapiens
  misc_RNA (1)...(19): siRNA sense strand
agaaagaacgccagcgacu

SEQ ID NO: 2617186 - RNA, 19 nt, Homo sapiens
  misc_RNA (1)...(19): siRNA sense strand
gcgcagcagaaguagggaa

SEQ ID NO: 2617187 - RNA, 19 nt, Homo sapiens
  misc_RNA (1)...(19): siRNA sense strand
agagaaagaaaaugagaga

SEQ ID NO: 2617188 - RNA, 19 nt, Homo sapiens
  misc_RNA (1)...(19): siRNA sense strand
gaacgcaggcgcagcagaa

SEQ ID NO: 2617189 - RNA, 19 nt, Homo sapiens
  misc_RNA (1)...(19): siRNA sense strand
gcguaguagaagcaaagaa

SEQ ID NO: 2617190 - RNA, 19 nt, Homo sapiens
  misc_RNA (1)...(19): siRNA sense strand
aguaaggaccagucagaca

SEQ ID NO: 2617191 - RNA, 19 nt, Homo sapiens
  misc_RNA (1)...(19): siRNA sense strand
gaaagcaagugaugggucu

SEQ ID NO: 2617192 - RNA, 19 nt, Homo sapiens
  misc_RNA (1)...(19): siRNA sense strand
gauagaagggacagggauc

SEQ ID NO: 2617193 - RNA, 19 nt, Homo sapiens
  misc_RNA (1)...(19): siRNA sense strand
aguaggagucgaaguagaa

SEQ ID NO: 2617194 - RNA, 19 nt, Homo sapiens
  misc_RNA (1)...(19): siRNA sense strand
aaagcguaguagaagcaaa

SEQ ID NO: 2617195 - RNA, 19 nt, Homo sapiens
  misc_RNA (1)...(19): siRNA sense strand
gagaagaccaugaaccuca

SEQ ID NO: 2617196 - RNA, 19 nt, Homo sapiens
  misc_RNA (1)...(19): siRNA sense strand
ggagauaaacccagggcua

SEQ ID NO: 2617197 - RNA, 19 nt, Homo sapiens
  misc_RNA (1)...(19): siRNA sense strand
gcacgaggcuggaacccaa

SEQ ID NO: 2617198 - RNA, 19 nt, Homo sapiens
  misc_RNA (1)...(19): siRNA sense strand
gcauagugcgugacggaga

SEQ ID NO: 2617199 - RNA, 19 nt, Homo sapiens
  misc_RNA (1)...(19): siRNA sense strand
ugggaaugaaagagaauca

SEQ ID NO: 2617200 - RNA, 19 nt, Homo sapiens
  misc_RNA (1)...(19): siRNA sense strand
gcugggaaugaaagagaau

SEQ ID NO: 2617201 - RNA, 19 nt, Homo sapiens
  misc_RNA (1)...(19): siRNA sense strand
agagaaggugguggagaua

SEQ ID NO: 2617202 - RNA, 19 nt, Homo sapiens
  misc_RNA (1)...(19): siRNA sense strand
ccauggacaaagccggaua

SEQ ID NO: 2617203 - RNA, 19 nt, Homo sapiens
  misc_RNA (1)...(19): siRNA sense strand
ucgacagcuaggaggcaua

SEQ ID NO: 2617204 - RNA, 19 nt, Homo sapiens
  misc_RNA (1)...(19): siRNA sense strand
aggcauagugcgugacgga

SEQ ID NO: 2617205 - RNA, 19 nt, Homo sapiens
  misc_RNA (1)...(19): siRNA sense strand
aggaagcucccauggacaa

SEQ ID NO: 2617206 - RNA, 19 nt, Homo sapiens
  misc_RNA (1)...(19): siRNA sense strand
uaaagacaauccaggccaa

SEQ ID NO: 2617207 - RNA, 19 nt, Homo sapiens
  misc_RNA (1)...(19): siRNA sense strand
acccaaaguaugacaacau

SEQ ID NO: 2617208 - RNA, 19 nt, Homo sapiens
  misc_RNA (1)...(19): siRNA sense strand
cugcauaccaccucgccaa

SEQ ID NO: 2617209 - RNA, 19 nt, Homo sapiens
  misc_RNA (1)...(19): siRNA sense strand
ggagagaaggugguggaga

SEQ ID NO: 2617210 - RNA, 19 nt, Homo sapiens
  misc_RNA (1)...(19): siRNA sense strand
ccaaauauucgguugccca

SEQ ID NO: 2617211 - RNA, 19 nt, Homo sapiens
  misc_RNA (1)...(19): siRNA sense strand
augcaaagaaugugggaaa

SEQ ID NO: 2617212 - RNA, 19 nt, Homo sapiens
  misc_RNA (1)...(19): siRNA sense strand
auguaaagaaugugggaaa

SEQ ID NO: 2617213 - RNA, 19 nt, Homo sapiens
  misc_RNA (1)...(19): siRNA sense strand
aggaauaccuuuagcaaaa

SEQ ID NO: 2617214 - RNA, 19 nt, Homo sapiens
  misc_RNA (1)...(19): siRNA sense strand
guguaacgcaugugggaaa

SEQ ID NO: 2617215 - RNA, 19 nt, Homo sapiens
  misc_RNA (1)...(19): siRNA sense strand
aauucauaguggugagaaa

SEQ ID NO: 2617216 - RNA, 19 nt, Homo sapiens
  misc_RNA (1)...(19): siRNA sense strand
aguucauacaggagagaaa

SEQ ID NO: 2617217 - RNA, 19 nt, Homo sapiens
  misc_RNA (1)...(19): siRNA sense strand
ccuuaugaguguauggaau

SEQ ID NO: 2617218 - RNA, 19 nt, Homo sapiens
  misc_RNA (1)...(19): siRNA sense strand
caaacaacuuagugaacau

SEQ ID NO: 2617219 - RNA, 19 nt, Homo sapiens
  misc_RNA (1)...(19): siRNA sense strand
aauucauacaggagagaaa

SEQ ID NO: 2617220 - RNA, 19 nt, Homo sapiens
  misc_RNA (1)...(19): siRNA sense strand
caaaauuaccugugaagaa

SEQ ID NO: 2617221 - RNA, 19 nt, Homo sapiens
  misc_RNA (1)...(19): siRNA sense strand
aacucauacuggagagaaa

SEQ ID NO: 2617222 - RNA, 19 nt, Homo sapiens
  misc_RNA (1)...(19): siRNA sense strand
aauucauacaggugagaaa

SEQ ID NO: 2617223 - RNA, 19 nt, Homo sapiens
  misc_RNA (1)...(19): siRNA sense strand
augugauguuggagaacua

SEQ ID NO: 2617224 - RNA, 19 nt, Homo sapiens
  misc_RNA (1)...(19): siRNA sense strand
caggaauaccuuuagcaaa

SEQ ID NO: 2617225 - RNA, 19 nt, Homo sapiens
  misc_RNA (1)...(19): siRNA sense strand
ggugagaaacauuaugaau

SEQ ID NO: 2617226 - RNA, 19 nt, Homo sapiens
  misc_RNA (1)...(19): siRNA sense strand
cccuaugaauguaaagaau

SEQ ID NO: 2617227 - RNA, 19 nt, Homo sapiens
  misc_RNA (1)...(19): siRNA sense strand
cccuaugaauguaaggaau

SEQ ID NO: 2617228 - RNA, 19 nt, Homo sapiens
  misc_RNA (1)...(19): siRNA sense strand
gaagaaaaggccacugaaa

SEQ ID NO: 2617229 - RNA, 19 nt, Homo sapiens
  misc_RNA (1)...(19): siRNA sense strand
cuuuauucguguugcauau

SEQ ID NO: 2617230 - RNA, 19 nt, Homo sapiens
  misc_RNA (1)...(19): siRNA sense strand
ccuuauucaacaugaggaa

SEQ ID NO: 2617231 - RNA, 19 nt, Homo sapiens
  misc_RNA (1)...(19): siRNA sense strand
cccuaugaauguaaggauu

SEQ ID NO: 2617232 - RNA, 19 nt, Homo sapiens
  misc_RNA (1)...(19): siRNA sense strand
uuacuuaccaucagagaau

SEQ ID NO: 2617233 - RNA, 19 nt, Homo sapiens
  misc_RNA (1)...(19): siRNA sense strand
aaggcaacuuagaggguca

SEQ ID NO: 2617234 - RNA, 19 nt, Homo sapiens
  misc_RNA (1)...(19): siRNA sense strand
gaguguaaggaauguggaa

SEQ ID NO: 2617235 - RNA, 19 nt, Homo sapiens
  misc_RNA (1)...(19): siRNA sense strand
gggcuuuacauguguguca

SEQ ID NO: 2617236 - RNA, 19 nt, Homo sapiens
  misc_RNA (1)...(19): siRNA sense strand
cuuagagggucaagaagca

SEQ ID NO: 2617237 - RNA, 19 nt, Homo sapiens
  misc_RNA (1)...(19): siRNA sense strand
auguaaggauugugggaag

SEQ ID NO: 2617238 - RNA, 19 nt, Homo sapiens
  misc_RNA (1)...(19): siRNA sense strand
uggcaaacaacuuagugaa

SEQ ID NO: 2617239 - RNA, 19 nt, Homo sapiens
  misc_RNA (1)...(19): siRNA sense strand
gaauguaaacaguguggga

SEQ ID NO: 2617240 - RNA, 19 nt, Homo sapiens
  misc_RNA (1)...(19): siRNA sense strand
ucucaggaggaaugggaau

SEQ ID NO: 2617241 - RNA, 19 nt, Homo sapiens
  misc_RNA (1)...(19): siRNA sense strand
uuacauaccaucagagagu

SEQ ID NO: 2617242 - RNA, 19 nt, Homo sapiens
  misc_RNA (1)...(19): siRNA sense strand
uuagugaacaucagagaau

SEQ ID NO: 2617243 - RNA, 19 nt, Homo sapiens
  misc_RNA (1)...(19): siRNA sense strand
uuagugaacaucagagaau

SEQ ID NO: 2617244 - RNA, 19 nt, Homo sapiens
  misc_RNA (1)...(19): siRNA sense strand
guguaaggaauguggaaag

SEQ ID NO: 2617245 - RNA, 19 nt, Homo sapiens
  misc_RNA (1)...(19): siRNA sense strand
ggugaaaagccuuacauau

SEQ ID NO: 2617246 - RNA, 19 nt, Homo sapiens
  misc_RNA (1)...(19): siRNA sense strand
cuuuagauguccuucacaa

SEQ ID NO: 2617247 - RNA, 19 nt, Homo sapiens
  misc_RNA (1)...(19): siRNA sense strand
uguaaagaaugcgggaaga

SEQ ID NO: 2617248 - RNA, 19 nt, Homo sapiens
  misc_RNA (1)...(19): siRNA sense strand
aaguuaagaaacacaggaa

SEQ ID NO: 2617249 - RNA, 19 nt, Homo sapiens
  misc_RNA (1)...(19): siRNA sense strand
ucucauucaacaucagaaa

SEQ ID NO: 2617250 - RNA, 19 nt, Homo sapiens
  misc_RNA (1)...(19): siRNA sense strand
ggugaaaagcccuacaaau

SEQ ID NO: 2617251 - RNA, 19 nt, Homo sapiens
  misc_RNA (1)...(19): siRNA sense strand
aaauguaaggaauguggaa

SEQ ID NO: 2617252 - RNA, 19 nt, Homo sapiens
  misc_RNA (1)...(19): siRNA sense strand
cagaaaaggaaguuuauga

SEQ ID NO: 2617253 - RNA, 19 nt, Homo sapiens
  misc_RNA (1)...(19): siRNA sense strand
gcucagagggacuuguaca

SEQ ID NO: 2617254 - RNA, 19 nt, Homo sapiens
  misc_RNA (1)...(19): siRNA sense strand
ggccuuuagucguggcuca

SEQ ID NO: 2617255 - RNA, 19 nt, Homo sapiens
  misc_RNA (1)...(19): siRNA sense strand
uguuggagaacuacagcaa

SEQ ID NO: 2617256 - RNA, 19 nt, Homo sapiens
  misc_RNA (1)...(19): siRNA sense strand
guguauggaauguggaaag

SEQ ID NO: 2617257 - RNA, 19 nt, Homo sapiens
  misc_RNA (1)...(19): siRNA sense strand
auacaggagagaaaccaua

SEQ ID NO: 2617258 - RNA, 19 nt, Homo sapiens
  misc_RNA (1)...(19): siRNA sense strand
uguaaggaaugugggaaga

SEQ ID NO: 2617259 - RNA, 19 nt, Homo sapiens
  misc_RNA (1)...(19): siRNA sense strand
ccuuaugaauguaaacagu

SEQ ID NO: 2617260 - RNA, 19 nt, Homo sapiens
  misc_RNA (1)...(19): siRNA sense strand
gagaauauggggaaacgua

SEQ ID NO: 2617261 - RNA, 19 nt, Homo sapiens
  misc_RNA (1)...(19): siRNA sense strand
ccuuaucaguguaacgcau

SEQ ID NO: 2617262 - RNA, 19 nt, Homo sapiens
  misc_RNA (1)...(19): siRNA sense strand
agaaaccuuaugaguguaa

SEQ ID NO: 2617263 - RNA, 19 nt, Homo sapiens
  misc_RNA (1)...(19): siRNA sense strand
aguuaagaaacacaggaau

SEQ ID NO: 2617264 - RNA, 19 nt, Homo sapiens
  misc_RNA (1)...(19): siRNA sense strand
gaguguauggaauguggaa

SEQ ID NO: 2617265 - RNA, 19 nt, Homo sapiens
  misc_RNA (1)...(19): siRNA sense strand
gaauguaaggauuguggga

SEQ ID NO: 2617266 - RNA, 19 nt, Homo sapiens
  misc_RNA (1)...(19): siRNA sense strand
agaaaaggccacugaaagu

SEQ ID NO: 2617267 - RNA, 19 nt, Homo sapiens
  misc_RNA (1)...(19): siRNA sense strand
aguucauucaggugagaga

SEQ ID NO: 2617268 - RNA, 19 nt, Homo sapiens
  misc_RNA (1)...(19): siRNA sense strand
auguaaggaaugcagacaa

SEQ ID NO: 2617269 - RNA, 19 nt, Homo sapiens
  misc_RNA (1)...(19): siRNA sense strand
auguaaagaaugcgggaag

SEQ ID NO: 2617270 - RNA, 19 nt, Homo sapiens
  misc_RNA (1)...(19): siRNA sense strand
cugaggagcaagaggauaa

SEQ ID NO: 2617271 - RNA, 19 nt, Homo sapiens
  misc_RNA (1)...(19): siRNA sense strand
ggaacaagacaaaggaaaa

SEQ ID NO: 2617272 - RNA, 19 nt, Homo sapiens
  misc_RNA (1)...(19): siRNA sense strand
agccaaagccacagauaaa

SEQ ID NO: 2617273 - RNA, 19 nt, Homo sapiens
  misc_RNA (1)...(19): siRNA sense strand
aaagaagggcagagaggaa

SEQ ID NO: 2617274 - RNA, 19 nt, Homo sapiens
  misc_RNA (1)...(19): siRNA sense strand
gaacaauauaagcggaaau

SEQ ID NO: 2617275 - RNA, 19 nt, Homo sapiens
  misc_RNA (1)...(19): siRNA sense strand
aggaagaggauauggaaga

SEQ ID NO: 2617276 - RNA, 19 nt, Homo sapiens
  misc_RNA (1)...(19): siRNA sense strand
agacaaaggaaaaggggaa

SEQ ID NO: 2617277 - RNA, 19 nt, Homo sapiens
  misc_RNA (1)...(19): siRNA sense strand
aggaacaagacaaaggaaa

SEQ ID NO: 2617278 - RNA, 19 nt, Homo sapiens
  misc_RNA (1)...(19): siRNA sense strand
gaaugaggcuggugggcuu

SEQ ID NO: 2617279 - RNA, 19 nt, Homo sapiens
  misc_RNA (1)...(19): siRNA sense strand
aguaaauaucccuaggaaa

SEQ ID NO: 2617280 - RNA, 19 nt, Homo sapiens
  misc_RNA (1)...(19): siRNA sense strand
gggccguggcaaaggauaa

SEQ ID NO: 2617281 - RNA, 19 nt, Homo sapiens
  misc_RNA (1)...(19): siRNA sense strand
acacagaggaacaaagcaa

SEQ ID NO: 2617282 - RNA, 19 nt, Homo sapiens
  misc_RNA (1)...(19): siRNA sense strand
gggcagagaggaagaggau

SEQ ID NO: 2617283 - RNA, 19 nt, Homo sapiens
  misc_RNA (1)...(19): siRNA sense strand
ccuccuagaagcagguaaa

SEQ ID NO: 2617284 - RNA, 19 nt, Homo sapiens
  misc_RNA (1)...(19): siRNA sense strand
aggauauggaagaggaaga

SEQ ID NO: 2617285 - RNA, 19 nt, Homo sapiens
  misc_RNA (1)...(19): siRNA sense strand
uauugaugauggagaggaa

SEQ ID NO: 2617286 - RNA, 19 nt, Homo sapiens
  misc_RNA (1)...(19): siRNA sense strand
ugcuacuaguggagagaaa

SEQ ID NO: 2617287 - RNA, 19 nt, Homo sapiens
  misc_RNA (1)...(19): siRNA sense strand
uggauugggccguggcaaa

SEQ ID NO: 2617288 - RNA, 19 nt, Homo sapiens
  misc_RNA (1)...(19): siRNA sense strand
ucaaaggaguucaugggaa

SEQ ID NO: 2617289 - RNA, 19 nt, Homo sapiens
  misc_RNA (1)...(19): siRNA sense strand
ccccagagcagaagagaaa

SEQ ID NO: 2617290 - RNA, 19 nt, Homo sapiens
  misc_RNA (1)...(19): siRNA sense strand
gcccaaagaaggagccgaa

SEQ ID NO: 2617291 - RNA, 19 nt, Homo sapiens
  misc_RNA (1)...(19): siRNA sense strand
aagggaaauaagacggaaa

SEQ ID NO: 2617292 - RNA, 19 nt, Homo sapiens
  misc_RNA (1)...(19): siRNA sense strand
cuaggaaaccagaugggaa

SEQ ID NO: 2617293 - RNA, 19 nt, Homo sapiens
  misc_RNA (1)...(19): siRNA sense strand
gggacaaaggcaaagugaa

SEQ ID NO: 2617294 - RNA, 19 nt, Homo sapiens
  misc_RNA (1)...(19): siRNA sense strand
augacaaacagcucagaaa

SEQ ID NO: 2617295 - RNA, 19 nt, Homo sapiens
  misc_RNA (1)...(19): siRNA sense strand
cuuuaaguguucagaagau

SEQ ID NO: 2617296 - RNA, 19 nt, Homo sapiens
  misc_RNA (1)...(19): siRNA sense strand
auucggaaccugagcuuua

SEQ ID NO: 2617297 - RNA, 19 nt, Homo sapiens
  misc_RNA (1)...(19): siRNA sense strand
aggauaaagcugugcaagu

SEQ ID NO: 2617298 - RNA, 19 nt, Homo sapiens
  misc_RNA (1)...(19): siRNA sense strand
gugagcagcuggaggaacu

SEQ ID NO: 2617299 - RNA, 19 nt, Homo sapiens
  misc_RNA (1)...(19): siRNA sense strand
cugcuauaggugaggaaaa

SEQ ID NO: 2617300 - RNA, 19 nt, Homo sapiens
  misc_RNA (1)...(19): siRNA sense strand
aaacugaggaacaagacaa

SEQ ID NO: 2617301 - RNA, 19 nt, Homo sapiens
  misc_RNA (1)...(19): siRNA sense strand
guggcaaaggauaaauaua

SEQ ID NO: 2617302 - RNA, 19 nt, Homo sapiens
  misc_RNA (1)...(19): siRNA sense strand
cgauaguauugaugaugga

SEQ ID NO: 2617303 - RNA, 19 nt, Homo sapiens
  misc_RNA (1)...(19): siRNA sense strand
ccugauggaaagaagagaa

SEQ ID NO: 2617304 - RNA, 19 nt, Homo sapiens
  misc_RNA (1)...(19): siRNA sense strand
gaagaaagguccuggcgcu

SEQ ID NO: 2617305 - RNA, 19 nt, Homo sapiens
  misc_RNA (1)...(19): siRNA sense strand
aucaaggaguguagaguga

SEQ ID NO: 2617306 - RNA, 19 nt, Homo sapiens
  misc_RNA (1)...(19): siRNA sense strand
ggaaaagagccaugaaucu

SEQ ID NO: 2617307 - RNA, 19 nt, Homo sapiens
  misc_RNA (1)...(19): siRNA sense strand
gaaucuaaacaucaggaau

SEQ ID NO: 2617308 - RNA, 19 nt, Homo sapiens
  misc_RNA (1)...(19): siRNA sense strand
aagccaaagccacagauaa

SEQ ID NO: 2617309 - RNA, 19 nt, Homo sapiens
  misc_RNA (1)...(19): siRNA sense strand
cgagcagguaucuaggaaa

SEQ ID NO: 2617310 - RNA, 19 nt, Homo sapiens
  misc_RNA (1)...(19): siRNA sense strand
ccagauuaauuauucggaa

SEQ ID NO: 2617311 - RNA, 19 nt, Homo sapiens
  misc_RNA (1)...(19): siRNA sense strand
aggaacuggcucagaguga

SEQ ID NO: 2617312 - RNA, 19 nt, Homo sapiens
  misc_RNA (1)...(19): siRNA sense strand
acucagaagaagaagaacu

SEQ ID NO: 2617313 - RNA, 19 nt, Homo sapiens
  misc_RNA (1)...(19): siRNA sense strand
cugcaaagcuucagacgac

SEQ ID NO: 2617314 - RNA, 19 nt, Homo sapiens
  misc_RNA (1)...(19): siRNA sense strand
cugcaaaagaccagcaaca

SEQ ID NO: 2617315 - RNA, 19 nt, Homo sapiens
  misc_RNA (1)...(19): siRNA sense strand
gaccuagaggaaagcgaua

SEQ ID NO: 2617316 - RNA, 19 nt, Homo sapiens
  misc_RNA (1)...(19): siRNA sense strand
agacgacgaaggugaagaa

SEQ ID NO: 2617317 - RNA, 19 nt, Homo sapiens
  misc_RNA (1)...(19): siRNA sense strand
ucgaacaauauaagcggaa

SEQ ID NO: 2617318 - RNA, 19 nt, Homo sapiens
  misc_RNA (1)...(19): siRNA sense strand
gugaagaagccgacuggca

SEQ ID NO: 2617319 - RNA, 19 nt, Homo sapiens
  misc_RNA (1)...(19): siRNA sense strand
cuuuagaagaucgaagaaa

SEQ ID NO: 2617320 - RNA, 19 nt, Homo sapiens
  misc_RNA (1)...(19): siRNA sense strand
aguggaagcaggagaagca

SEQ ID NO: 2617321 - RNA, 19 nt, Homo sapiens
  misc_RNA (1)...(19): siRNA sense strand
caggagaagcagcaauuau

SEQ ID NO: 2617322 - RNA, 19 nt, Homo sapiens
  misc_RNA (1)...(19): siRNA sense strand
auauggaagaggaagaaaa

SEQ ID NO: 2617323 - RNA, 19 nt, Homo sapiens
  misc_RNA (1)...(19): siRNA sense strand
cagauuaauuauucggaac

SEQ ID NO: 2617324 - RNA, 19 nt, Homo sapiens
  misc_RNA (1)...(19): siRNA sense strand
acaucaggaaucaguuaaa

SEQ ID NO: 2617325 - RNA, 19 nt, Homo sapiens
  misc_RNA (1)...(19): siRNA sense strand
gcaacagaaggcagcucaa

SEQ ID NO: 2617326 - RNA, 19 nt, Homo sapiens
  misc_RNA (1)...(19): siRNA sense strand
cgugacuguugccaagaaa

SEQ ID NO: 2617327 - RNA, 19 nt, Homo sapiens
  misc_RNA (1)...(19): siRNA sense strand
guaaagcucucaaaggcau

SEQ ID NO: 2617328 - RNA, 19 nt, Homo sapiens
  misc_RNA (1)...(19): siRNA sense strand
ggaagaaaacgaugaugau

SEQ ID NO: 2617329 - RNA, 19 nt, Homo sapiens
  misc_RNA (1)...(19): siRNA sense strand
gcacugaggagcaagagga

SEQ ID NO: 2617330 - RNA, 19 nt, Homo sapiens
  misc_RNA (1)...(19): siRNA sense strand
aguguagagugaugcgaga

SEQ ID NO: 2617331 - RNA, 19 nt, Homo sapiens
  misc_RNA (1)...(19): siRNA sense strand
gggcauaggguguggcgaa

SEQ ID NO: 2617332 - RNA, 19 nt, Homo sapiens
  misc_RNA (1)...(19): siRNA sense strand
gggaggaguuugcggcuga

SEQ ID NO: 2617333 - RNA, 19 nt, Homo sapiens
  misc_RNA (1)...(19): siRNA sense strand
cugccaagguccagaacca

SEQ ID NO: 2617334 - RNA, 19 nt, Homo sapiens
  misc_RNA (1)...(19): siRNA sense strand
caagagagcagcacggaca

SEQ ID NO: 2617335 - RNA, 19 nt, Homo sapiens
  misc_RNA (1)...(19): siRNA sense strand
cuggaaagacagacaggau

SEQ ID NO: 2617336 - RNA, 19 nt, Homo sapiens
  misc_RNA (1)...(19): siRNA sense strand
gaugagacgcaaaggcaca

SEQ ID NO: 2617337 - RNA, 19 nt, Homo sapiens
  misc_RNA (1)...(19): siRNA sense strand
acgcaaaggcacagugucu

SEQ ID NO: 2617338 - RNA, 19 nt, Homo sapiens
  misc_RNA (1)...(19): siRNA sense strand
agggagugaugaauggcaa

SEQ ID NO: 2617339 - RNA, 19 nt, Homo sapiens
  misc_RNA (1)...(19): siRNA sense strand
acccagagccguauggcaa

SEQ ID NO: 2617340 - RNA, 19 nt, Homo sapiens
  misc_RNA (1)...(19): siRNA sense strand
gcagcggcuuguugggcua

SEQ ID NO: 2617341 - RNA, 19 nt, Homo sapiens
  misc_RNA (1)...(19): siRNA sense strand
ggguaugacuucuacacca

SEQ ID NO: 2617342 - RNA, 19 nt, Homo sapiens
  misc_RNA (1)...(19): siRNA sense strand
gcaaaggccaagagagcag

SEQ ID NO: 2617343 - RNA, 19 nt, Homo sapiens
  misc_RNA (1)...(19): siRNA sense strand
ugaauguguucuugggcca

SEQ ID NO: 2617344 - RNA, 19 nt, Homo sapiens
  misc_RNA (1)...(19): siRNA sense strand
gggaugagacgcaaaggca

SEQ ID NO: 2617345 - RNA, 19 nt, Homo sapiens
  misc_RNA (1)...(19): siRNA sense strand
uggacuggaucaagggagu

SEQ ID NO: 2617346 - RNA, 19 nt, Homo sapiens
  misc_RNA (1)...(19): siRNA sense strand
aggguguggcgaaggguau

SEQ ID NO: 2617347 - RNA, 19 nt, Homo sapiens
  misc_RNA (1)...(19): siRNA sense strand
ggaaguuggaugaggaaau

SEQ ID NO: 2617348 - RNA, 19 nt, Homo sapiens
  misc_RNA (1)...(19): siRNA sense strand
ccaagaggcaacagcgaaa

SEQ ID NO: 2617349 - RNA, 19 nt, Homo sapiens
  misc_RNA (1)...(19): siRNA sense strand
gcucaagucucaagggcau

SEQ ID NO: 2617350 - RNA, 19 nt, Homo sapiens
  misc_RNA (1)...(19): siRNA sense strand
ccauuuaugcugaggagaa

SEQ ID NO: 2617351 - RNA, 19 nt, Homo sapiens
  misc_RNA (1)...(19): siRNA sense strand
cuggaagaaauaugagaaa

SEQ ID NO: 2617352 - RNA, 19 nt, Homo sapiens
  misc_RNA (1)...(19): siRNA sense strand
cgauauagguggaggagug

SEQ ID NO: 2617353 - RNA, 19 nt, Homo sapiens
  misc_RNA (1)...(19): siRNA sense strand
ucaagaaagauguggaaaa

SEQ ID NO: 2617354 - RNA, 19 nt, Homo sapiens
  misc_RNA (1)...(19): siRNA sense strand
ugaaagagcgcaagcggaa

SEQ ID NO: 2617355 - RNA, 19 nt, Homo sapiens
  misc_RNA (1)...(19): siRNA sense strand
aggaaaugcgggaggccaa

SEQ ID NO: 2617356 - RNA, 19 nt, Homo sapiens
  misc_RNA (1)...(19): siRNA sense strand
cagagauaccugaggaaca

SEQ ID NO: 2617357 - RNA, 19 nt, Homo sapiens
  misc_RNA (1)...(19): siRNA sense strand
ccaaggacauugagagcca

SEQ ID NO: 2617358 - RNA, 19 nt, Homo sapiens
  misc_RNA (1)...(19): siRNA sense strand
augagaaaguagagaagga

SEQ ID NO: 2617359 - RNA, 19 nt, Homo sapiens
  misc_RNA (1)...(19): siRNA sense strand
gcaagagagcagagaagga

SEQ ID NO: 2617360 - RNA, 19 nt, Homo sapiens
  misc_RNA (1)...(19): siRNA sense strand
ccagaagaacuguaaggaa

SEQ ID NO: 2617361 - RNA, 19 nt, Homo sapiens
  misc_RNA (1)...(19): siRNA sense strand
aguucuacccagagacaaa

SEQ ID NO: 2617362 - RNA, 19 nt, Homo sapiens
  misc_RNA (1)...(19): siRNA sense strand
agaugaauuggaugggaaa

SEQ ID NO: 2617363 - RNA, 19 nt, Homo sapiens
  misc_RNA (1)...(19): siRNA sense strand
gugaagacgaugaugaaga

SEQ ID NO: 2617364 - RNA, 19 nt, Homo sapiens
  misc_RNA (1)...(19): siRNA sense strand
aagaugaauuggaugggaa

SEQ ID NO: 2617365 - RNA, 19 nt, Homo sapiens
  misc_RNA (1)...(19): siRNA sense strand
gagugaagacgaugaugaa

SEQ ID NO: 2617366 - RNA, 19 nt, Homo sapiens
  misc_RNA (1)...(19): siRNA sense strand
ucacgagacaggugguuaa

SEQ ID NO: 2617367 - RNA, 19 nt, Homo sapiens
  misc_RNA (1)...(19): siRNA sense strand
ggaguuauuugaacggcaa

SEQ ID NO: 2617368 - RNA, 19 nt, Homo sapiens
  misc_RNA (1)...(19): siRNA sense strand
uagaccuacuggaggaaua

SEQ ID NO: 2617369 - RNA, 19 nt, Homo sapiens
  misc_RNA (1)...(19): siRNA sense strand
aggaacuaccaaaggcaaa

SEQ ID NO: 2617370 - RNA, 19 nt, Homo sapiens
  misc_RNA (1)...(19): siRNA sense strand
cugcaaagagccaaggaga

SEQ ID NO: 2617371 - RNA, 19 nt, Homo sapiens
  misc_RNA (1)...(19): siRNA sense strand
gggaaaaguaugcagagaa

SEQ ID NO: 2617372 - RNA, 19 nt, Homo sapiens
  misc_RNA (1)...(19): siRNA sense strand
acaucacacaggaggauua

SEQ ID NO: 2617373 - RNA, 19 nt, Homo sapiens
  misc_RNA (1)...(19): siRNA sense strand
aggaggauuaugauaguaa

SEQ ID NO: 2617374 - RNA, 19 nt, Homo sapiens
  misc_RNA (1)...(19): siRNA sense strand
gcugaggagaaucaagaaa

SEQ ID NO: 2617375 - RNA, 19 nt, Homo sapiens
  misc_RNA (1)...(19): siRNA sense strand
ugcaaagagccaaggagaa

SEQ ID NO: 2617376 - RNA, 19 nt, Homo sapiens
  misc_RNA (1)...(19): siRNA sense strand
acgacgaagaguuggagaa

SEQ ID NO: 2617377 - RNA, 19 nt, Homo sapiens
  misc_RNA (1)...(19): siRNA sense strand
gcaaacgagauauggguca

SEQ ID NO: 2617378 - RNA, 19 nt, Homo sapiens
  misc_RNA (1)...(19): siRNA sense strand
auggcaaauugaaagguua

SEQ ID NO: 2617379 - RNA, 19 nt, Homo sapiens
  misc_RNA (1)...(19): siRNA sense strand
cugacaagauugagauucu

SEQ ID NO: 2617380 - RNA, 19 nt, Homo sapiens
  misc_RNA (1)...(19): siRNA sense strand
aguuuaggaagguguguaa

SEQ ID NO: 2617381 - RNA, 19 nt, Homo sapiens
  misc_RNA (1)...(19): siRNA sense strand
uggaggaauacaugguuua

SEQ ID NO: 2617382 - RNA, 19 nt, Homo sapiens
  misc_RNA (1)...(19): siRNA sense strand
aggagaagagugagauuca

SEQ ID NO: 2617383 - RNA, 19 nt, Homo sapiens
  misc_RNA (1)...(19): siRNA sense strand
ugauagaccuacuggagga

SEQ ID NO: 2617384 - RNA, 19 nt, Homo sapiens
  misc_RNA (1)...(19): siRNA sense strand
aauacaugguuuacaggaa

SEQ ID NO: 2617385 - RNA, 19 nt, Homo sapiens
  misc_RNA (1)...(19): siRNA sense strand
gugaagauggacuggauga

SEQ ID NO: 2617386 - RNA, 19 nt, Homo sapiens
  misc_RNA (1)...(19): siRNA sense strand
aagacgaagagaugaagaa

SEQ ID NO: 2617387 - RNA, 19 nt, Homo sapiens
  misc_RNA (1)...(19): siRNA sense strand
guaaaacaguacagagcau

SEQ ID NO: 2617388 - RNA, 19 nt, Homo sapiens
  misc_RNA (1)...(19): siRNA sense strand
ccagauaccuugaaaccca

SEQ ID NO: 2617389 - RNA, 19 nt, Homo sapiens
  misc_RNA (1)...(19): siRNA sense strand
ccgcaagagagcagagaag

SEQ ID NO: 2617390 - RNA, 19 nt, Homo sapiens
  misc_RNA (1)...(19): siRNA sense strand
gccaaggagaagagugaga

SEQ ID NO: 2617391 - RNA, 19 nt, Homo sapiens
  misc_RNA (1)...(19): siRNA sense strand
aaaccaaccgagugaaaga

SEQ ID NO: 2617392 - RNA, 19 nt, Homo sapiens
  misc_RNA (1)...(19): siRNA sense strand
cgcaagcggaagcgggaaa

SEQ ID NO: 2617393 - RNA, 19 nt, Homo sapiens
  misc_RNA (1)...(19): siRNA sense strand
aggaauauuucuagugaug

SEQ ID NO: 2617394 - RNA, 19 nt, Homo sapiens
  misc_RNA (1)...(19): siRNA sense strand
gaggagugguaguuaacau

SEQ ID NO: 2617395 - RNA, 19 nt, Homo sapiens
  misc_RNA (1)...(19): siRNA sense strand
acacaggaggauuaugaua

SEQ ID NO: 2617396 - RNA, 19 nt, Homo sapiens
  misc_RNA (1)...(19): siRNA sense strand
uggcaaauugaaagguuau

SEQ ID NO: 2617397 - RNA, 19 nt, Homo sapiens
  misc_RNA (1)...(19): siRNA sense strand
gcaggaagagaaacggcaa

SEQ ID NO: 2617398 - RNA, 19 nt, Homo sapiens
  misc_RNA (1)...(19): siRNA sense strand
caaaaugugauaaggggaa

SEQ ID NO: 2617399 - RNA, 19 nt, Homo sapiens
  misc_RNA (1)...(19): siRNA sense strand
ggauuaugauaguaaccau

SEQ ID NO: 2617400 - RNA, 19 nt, Homo sapiens
  misc_RNA (1)...(19): siRNA sense strand
ccugaagaaugcugaaaau

SEQ ID NO: 2617401 - RNA, 19 nt, Homo sapiens
  misc_RNA (1)...(19): siRNA sense strand
augaaaugggccuugguaa

SEQ ID NO: 2617402 - RNA, 19 nt, Homo sapiens
  misc_RNA (1)...(19): siRNA sense strand
agaaaguagagaaggagca

SEQ ID NO: 2617403 - RNA, 19 nt, Homo sapiens
  misc_RNA (1)...(19): siRNA sense strand
caaggagaagagugagauu

SEQ ID NO: 2617404 - RNA, 19 nt, Homo sapiens
  misc_RNA (1)...(19): siRNA sense strand
uggcauucuugcugaugaa

SEQ ID NO: 2617405 - RNA, 19 nt, Homo sapiens
  misc_RNA (1)...(19): siRNA sense strand
aauacaugguacuggauga

SEQ ID NO: 2617406 - RNA, 19 nt, Homo sapiens
  misc_RNA (1)...(19): siRNA sense strand
ccacaugaccagcagccua

SEQ ID NO: 2617407 - RNA, 19 nt, Homo sapiens
  misc_RNA (1)...(19): siRNA sense strand
uggugaaacuucuggagca

SEQ ID NO: 2617408 - RNA, 19 nt, Homo sapiens
  misc_RNA (1)...(19): siRNA sense strand
agaaggaagcuuuggagca

SEQ ID NO: 2617409 - RNA, 19 nt, Homo sapiens
  misc_RNA (1)...(19): siRNA sense strand
agacagaguuguaugccca

SEQ ID NO: 2617410 - RNA, 19 nt, Homo sapiens
  misc_RNA (1)...(19): siRNA sense strand
ggaaguuggaugaggaaau

SEQ ID NO: 2617411 - RNA, 19 nt, Homo sapiens
  misc_RNA (1)...(19): siRNA sense strand
ccaagaggcaacagcgaaa

SEQ ID NO: 2617412 - RNA, 19 nt, Homo sapiens
  misc_RNA (1)...(19): siRNA sense strand
gcucaagucucaagggcau

SEQ ID NO: 2617413 - RNA, 19 nt, Homo sapiens
  misc_RNA (1)...(19): siRNA sense strand
ccauuuaugcugaggagaa

SEQ ID NO: 2617414 - RNA, 19 nt, Homo sapiens
  misc_RNA (1)...(19): siRNA sense strand
cuggaagaaauaugagaaa

SEQ ID NO: 2617415 - RNA, 19 nt, Homo sapiens
  misc_RNA (1)...(19): siRNA sense strand
cgauauagguggaggagug

SEQ ID NO: 2617416 - RNA, 19 nt, Homo sapiens
  misc_RNA (1)...(19): siRNA sense strand
ucaagaaagauguggaaaa

SEQ ID NO: 2617417 - RNA, 19 nt, Homo sapiens
  misc_RNA (1)...(19): siRNA sense strand
ugaaagagcgcaagcggaa

SEQ ID NO: 2617418 - RNA, 19 nt, Homo sapiens
  misc_RNA (1)...(19): siRNA sense strand
aggaaaugcgggaggccaa

SEQ ID NO: 2617419 - RNA, 19 nt, Homo sapiens
  misc_RNA (1)...(19): siRNA sense strand
cagagauaccugaggaaca

SEQ ID NO: 2617420 - RNA, 19 nt, Homo sapiens
  misc_RNA (1)...(19): siRNA sense strand
ccaaggacauugagagcca

SEQ ID NO: 2617421 - RNA, 19 nt, Homo sapiens
  misc_RNA (1)...(19): siRNA sense strand
augagaaaguagagaagga

SEQ ID NO: 2617422 - RNA, 19 nt, Homo sapiens
  misc_RNA (1)...(19): siRNA sense strand
gcaagagagcagagaagga

SEQ ID NO: 2617423 - RNA, 19 nt, Homo sapiens
  misc_RNA (1)...(19): siRNA sense strand
ccagaagaacuguaaggaa

SEQ ID NO: 2617424 - RNA, 19 nt, Homo sapiens
  misc_RNA (1)...(19): siRNA sense strand
aguucuacccagagacaaa

SEQ ID NO: 2617425 - RNA, 19 nt, Homo sapiens
  misc_RNA (1)...(19): siRNA sense strand
agaugaauuggaugggaaa

SEQ ID NO: 2617426 - RNA, 19 nt, Homo sapiens
  misc_RNA (1)...(19): siRNA sense strand
gugaagacgaugaugaaga

SEQ ID NO: 2617427 - RNA, 19 nt, Homo sapiens
  misc_RNA (1)...(19): siRNA sense strand
aagaugaauuggaugggaa

SEQ ID NO: 2617428 - RNA, 19 nt, Homo sapiens
  misc_RNA (1)...(19): siRNA sense strand
gagugaagacgaugaugaa

SEQ ID NO: 2617429 - RNA, 19 nt, Homo sapiens
  misc_RNA (1)...(19): siRNA sense strand
ucacgagacaggugguuaa

SEQ ID NO: 2617430 - RNA, 19 nt, Homo sapiens
  misc_RNA (1)...(19): siRNA sense strand
ggaguuauuugaacggcaa

SEQ ID NO: 2617431 - RNA, 19 nt, Homo sapiens
  misc_RNA (1)...(19): siRNA sense strand
uagaccuacuggaggaaua

SEQ ID NO: 2617432 - RNA, 19 nt, Homo sapiens
  misc_RNA (1)...(19): siRNA sense strand
aggaacuaccaaaggcaaa

SEQ ID NO: 2617433 - RNA, 19 nt, Homo sapiens
  misc_RNA (1)...(19): siRNA sense strand
cugcaaagagccaaggaga

SEQ ID NO: 2617434 - RNA, 19 nt, Homo sapiens
  misc_RNA (1)...(19): siRNA sense strand
gggaaaaguaugcagagaa

SEQ ID NO: 2617435 - RNA, 19 nt, Homo sapiens
  misc_RNA (1)...(19): siRNA sense strand
acaucacacaggaggauua

SEQ ID NO: 2617436 - RNA, 19 nt, Homo sapiens
  misc_RNA (1)...(19): siRNA sense strand
aggaggauuaugauaguaa

SEQ ID NO: 2617437 - RNA, 19 nt, Homo sapiens
  misc_RNA (1)...(19): siRNA sense strand
gcugaggagaaucaagaaa

SEQ ID NO: 2617438 - RNA, 19 nt, Homo sapiens
  misc_RNA (1)...(19): siRNA sense strand
ugcaaagagccaaggagaa

SEQ ID NO: 2617439 - RNA, 19 nt, Homo sapiens
  misc_RNA (1)...(19): siRNA sense strand
acgacgaagaguuggagaa

SEQ ID NO: 2617440 - RNA, 19 nt, Homo sapiens
  misc_RNA (1)...(19): siRNA sense strand
gcaaacgagauauggguca

SEQ ID NO: 2617441 - RNA, 19 nt, Homo sapiens
  misc_RNA (1)...(19): siRNA sense strand
auggcaaauugaaagguua

SEQ ID NO: 2617442 - RNA, 19 nt, Homo sapiens
  misc_RNA (1)...(19): siRNA sense strand
cugacaagauugagauucu

SEQ ID NO: 2617443 - RNA, 19 nt, Homo sapiens
  misc_RNA (1)...(19): siRNA sense strand
aguuuaggaagguguguaa

SEQ ID NO: 2617444 - RNA, 19 nt, Homo sapiens
  misc_RNA (1)...(19): siRNA sense strand
uggaggaauacaugguuua

SEQ ID NO: 2617445 - RNA, 19 nt, Homo sapiens
  misc_RNA (1)...(19): siRNA sense strand
aggagaagagugagauuca

SEQ ID NO: 2617446 - RNA, 19 nt, Homo sapiens
  misc_RNA (1)...(19): siRNA sense strand
ugauagaccuacuggagga

SEQ ID NO: 2617447 - RNA, 19 nt, Homo sapiens
  misc_RNA (1)...(19): siRNA sense strand
aauacaugguuuacaggaa

SEQ ID NO: 2617448 - RNA, 19 nt, Homo sapiens
  misc_RNA (1)...(19): siRNA sense strand
gugaagauggacuggauga

SEQ ID NO: 2617449 - RNA, 19 nt, Homo sapiens
  misc_RNA (1)...(19): siRNA sense strand
aagacgaagagaugaagaa

SEQ ID NO: 2617450 - RNA, 19 nt, Homo sapiens
  misc_RNA (1)...(19): siRNA sense strand
guaaaacaguacagagcau

SEQ ID NO: 2617451 - RNA, 19 nt, Homo sapiens
  misc_RNA (1)...(19): siRNA sense strand
ccagauaccuugaaaccca

SEQ ID NO: 2617452 - RNA, 19 nt, Homo sapiens
  misc_RNA (1)...(19): siRNA sense strand
ccgcaagagagcagagaag

SEQ ID NO: 2617453 - RNA, 19 nt, Homo sapiens
  misc_RNA (1)...(19): siRNA sense strand
gccaaggagaagagugaga

SEQ ID NO: 2617454 - RNA, 19 nt, Homo sapiens
  misc_RNA (1)...(19): siRNA sense strand
aaaccaaccgagugaaaga

SEQ ID NO: 2617455 - RNA, 19 nt, Homo sapiens
  misc_RNA (1)...(19): siRNA sense strand
cgcaagcggaagcgggaaa

SEQ ID NO: 2617456 - RNA, 19 nt, Homo sapiens
  misc_RNA (1)...(19): siRNA sense strand
aggaauauuucuagugaug

SEQ ID NO: 2617457 - RNA, 19 nt, Homo sapiens
  misc_RNA (1)...(19): siRNA sense strand
gaggagugguaguuaacau

SEQ ID NO: 2617458 - RNA, 19 nt, Homo sapiens
  misc_RNA (1)...(19): siRNA sense strand
acacaggaggauuaugaua

SEQ ID NO: 2617459 - RNA, 19 nt, Homo sapiens
  misc_RNA (1)...(19): siRNA sense strand
uggcaaauugaaagguuau

SEQ ID NO: 2617460 - RNA, 19 nt, Homo sapiens
  misc_RNA (1)...(19): siRNA sense strand
gcaggaagagaaacggcaa

SEQ ID NO: 2617461 - RNA, 19 nt, Homo sapiens
  misc_RNA (1)...(19): siRNA sense strand
caaaaugugauaaggggaa

SEQ ID NO: 2617462 - RNA, 19 nt, Homo sapiens
  misc_RNA (1)...(19): siRNA sense strand
ggauuaugauaguaaccau

SEQ ID NO: 2617463 - RNA, 19 nt, Homo sapiens
  misc_RNA (1)...(19): siRNA sense strand
ccugaagaaugcugaaaau

SEQ ID NO: 2617464 - RNA, 19 nt, Homo sapiens
  misc_RNA (1)...(19): siRNA sense strand
augaaaugggccuugguaa

SEQ ID NO: 2617465 - RNA, 19 nt, Homo sapiens
  misc_RNA (1)...(19): siRNA sense strand
agaaaguagagaaggagca

SEQ ID NO: 2617466 - RNA, 19 nt, Homo sapiens
  misc_RNA (1)...(19): siRNA sense strand
caaggagaagagugagauu

SEQ ID NO: 2617467 - RNA, 19 nt, Homo sapiens
  misc_RNA (1)...(19): siRNA sense strand
uggcauucuugcugaugaa

SEQ ID NO: 2617468 - RNA, 19 nt, Homo sapiens
  misc_RNA (1)...(19): siRNA sense strand
aauacaugguacuggauga

SEQ ID NO: 2617469 - RNA, 19 nt, Homo sapiens
  misc_RNA (1)...(19): siRNA sense strand
ccacaugaccagcagccua

SEQ ID NO: 2617470 - RNA, 19 nt, Homo sapiens
  misc_RNA (1)...(19): siRNA sense strand
uggugaaacuucuggagca

SEQ ID NO: 2617471 - RNA, 19 nt, Homo sapiens
  misc_RNA (1)...(19): siRNA sense strand
agaaggaagcuuuggagca

SEQ ID NO: 2617472 - RNA, 19 nt, Homo sapiens
  misc_RNA (1)...(19): siRNA sense strand
agacagaguuguaugccca

SEQ ID NO: 2617473 - RNA, 19 nt, Homo sapiens
  misc_RNA (1)...(19): siRNA sense strand
cugcagaggacgagggaga

SEQ ID NO: 2617474 - RNA, 19 nt, Homo sapiens
  misc_RNA (1)...(19): siRNA sense strand
ggaagauaccucuggggaa

SEQ ID NO: 2617475 - RNA, 19 nt, Homo sapiens
  misc_RNA (1)...(19): siRNA sense strand
cuggaaaagccauggaaga

SEQ ID NO: 2617476 - RNA, 19 nt, Homo sapiens
  misc_RNA (1)...(19): siRNA sense strand
gcugauaacaucuugcgaa

SEQ ID NO: 2617477 - RNA, 19 nt, Homo sapiens
  misc_RNA (1)...(19): siRNA sense strand
ccgcaaggaugcugagcuc

SEQ ID NO: 2617478 - RNA, 19 nt, Homo sapiens
  misc_RNA (1)...(19): siRNA sense strand
agaagaagcgaacgggcca

SEQ ID NO: 2617479 - RNA, 19 nt, Homo sapiens
  misc_RNA (1)...(19): siRNA sense strand
gggacgaaggagaggagcu

SEQ ID NO: 2617480 - RNA, 19 nt, Homo sapiens
  misc_RNA (1)...(19): siRNA sense strand
ggaccuugagagagaugaa

SEQ ID NO: 2617481 - RNA, 19 nt, Homo sapiens
  misc_RNA (1)...(19): siRNA sense strand
cacuggagcagcagggaau

SEQ ID NO: 2617482 - RNA, 19 nt, Homo sapiens
  misc_RNA (1)...(19): siRNA sense strand
gggcaucucuuuacaggga

SEQ ID NO: 2617483 - RNA, 19 nt, Homo sapiens
  misc_RNA (1)...(19): siRNA sense strand
acgaguaaauggaagguug

SEQ ID NO: 2617484 - RNA, 19 nt, Homo sapiens
  misc_RNA (1)...(19): siRNA sense strand
gagccuacguggaagcagu

SEQ ID NO: 2617485 - RNA, 19 nt, Homo sapiens
  misc_RNA (1)...(19): siRNA sense strand
gcucacagcuuuaacugga

SEQ ID NO: 2617486 - RNA, 19 nt, Homo sapiens
  misc_RNA (1)...(19): siRNA sense strand
cguggaagcaguggagaga

SEQ ID NO: 2617487 - RNA, 19 nt, Homo sapiens
  misc_RNA (1)...(19): siRNA sense strand
gaagugaacugaagaccgu

SEQ ID NO: 2617488 - RNA, 19 nt, Homo sapiens
  misc_RNA (1)...(19): siRNA sense strand
augcaaggacggagggcaa

SEQ ID NO: 2617489 - RNA, 19 nt, Homo sapiens
  misc_RNA (1)...(19): siRNA sense strand
ugacagaagggcagggaga

SEQ ID NO: 2617490 - RNA, 19 nt, Homo sapiens
  misc_RNA (1)...(19): siRNA sense strand
ggucaaggcaggagccaga

SEQ ID NO: 2617491 - RNA, 19 nt, Homo sapiens
  misc_RNA (1)...(19): siRNA sense strand
ggucaaggcaggagccaga

SEQ ID NO: 2617492 - RNA, 19 nt, Homo sapiens
  misc_RNA (1)...(19): siRNA sense strand
agaugaggccagagagaca

SEQ ID NO: 2617493 - RNA, 19 nt, Homo sapiens
  misc_RNA (1)...(19): siRNA sense strand
ggacugagauccacgguca

SEQ ID NO: 2617494 - RNA, 19 nt, Homo sapiens
  misc_RNA (1)...(19): siRNA sense strand
gggcuagagaacagggaca

SEQ ID NO: 2617495 - RNA, 19 nt, Homo sapiens
  misc_RNA (1)...(19): siRNA sense strand
cuggagaaggcaagaggaa

SEQ ID NO: 2617496 - RNA, 19 nt, Homo sapiens
  misc_RNA (1)...(19): siRNA sense strand
ggucaaagauggaugcaag

SEQ ID NO: 2617497 - RNA, 19 nt, Homo sapiens
  misc_RNA (1)...(19): siRNA sense strand
gauggaugcaagugagcaa

SEQ ID NO: 2617498 - RNA, 19 nt, Homo sapiens
  misc_RNA (1)...(19): siRNA sense strand
aggaauggguugaugacca

SEQ ID NO: 2617499 - RNA, 19 nt, Homo sapiens
  misc_RNA (1)...(19): siRNA sense strand
agagaugaggccagagaga

SEQ ID NO: 2617500 - RNA, 19 nt, Homo sapiens
  misc_RNA (1)...(19): siRNA sense strand
gagcgagagugcugaggga

SEQ ID NO: 2617501 - RNA, 19 nt, Homo sapiens
  misc_RNA (1)...(19): siRNA sense strand
aggcaggaguggagcagca

SEQ ID NO: 2617502 - RNA, 19 nt, Homo sapiens
  misc_RNA (1)...(19): siRNA sense strand
ggaagaaccagcaagcaga

SEQ ID NO: 2617503 - RNA, 19 nt, Homo sapiens
  misc_RNA (1)...(19): siRNA sense strand
agacagagccagcaggguu

SEQ ID NO: 2617504 - RNA, 19 nt, Homo sapiens
  misc_RNA (1)...(19): siRNA sense strand
gcagccaggcaguggucaa

SEQ ID NO: 2617505 - RNA, 19 nt, Homo sapiens
  misc_RNA (1)...(19): siRNA sense strand
ggagcaggacagaagccaa

SEQ ID NO: 2617506 - RNA, 19 nt, Homo sapiens
  misc_RNA (1)...(19): siRNA sense strand
gaugaccacucaagggaga

SEQ ID NO: 2617507 - RNA, 19 nt, Homo sapiens
  misc_RNA (1)...(19): siRNA sense strand
ucagauacaggcagggaca

SEQ ID NO: 2617508 - RNA, 19 nt, Homo sapiens
  misc_RNA (1)...(19): siRNA sense strand
caacagagaugaggccaga

SEQ ID NO: 2617509 - RNA, 19 nt, Homo sapiens
  misc_RNA (1)...(19): siRNA sense strand
gaacagggacagacccaga

SEQ ID NO: 2617510 - RNA, 19 nt, Homo sapiens
  misc_RNA (1)...(19): siRNA sense strand
cuguauuccuacuugagaa

SEQ ID NO: 2617511 - RNA, 19 nt, Homo sapiens
  misc_RNA (1)...(19): siRNA sense strand
aggcaagaggaaucagaca

SEQ ID NO: 2617512 - RNA, 19 nt, Homo sapiens
  misc_RNA (1)...(19): siRNA sense strand
guuucaagacacugagcga

SEQ ID NO: 2617513 - RNA, 19 nt, Homo sapiens
  misc_RNA (1)...(19): siRNA sense strand
cggggaaagggcagcauua

SEQ ID NO: 2617514 - RNA, 19 nt, Homo sapiens
  misc_RNA (1)...(19): siRNA sense strand
agaaagcuggagaaggcaa

SEQ ID NO: 2617515 - RNA, 19 nt, Homo sapiens
  misc_RNA (1)...(19): siRNA sense strand
aggaaucagacaacagaga

SEQ ID NO: 2617516 - RNA, 19 nt, Homo sapiens
  misc_RNA (1)...(19): siRNA sense strand
ugaccagaacagagggacu

SEQ ID NO: 2617517 - RNA, 19 nt, Homo sapiens
  misc_RNA (1)...(19): siRNA sense strand
ucagauacaggcaggguca

SEQ ID NO: 2617518 - RNA, 19 nt, Homo sapiens
  misc_RNA (1)...(19): siRNA sense strand
acagaagggcagggagaca

SEQ ID NO: 2617519 - RNA, 19 nt, Homo sapiens
  misc_RNA (1)...(19): siRNA sense strand
uggaugagguccugcgucu

SEQ ID NO: 2617520 - RNA, 19 nt, Homo sapiens
  misc_RNA (1)...(19): siRNA sense strand
gcaaaacauuaaugggauc

SEQ ID NO: 2617521 - RNA, 19 nt, Homo sapiens
  misc_RNA (1)...(19): siRNA sense strand
acaccgagacuguggagca

SEQ ID NO: 2617522 - RNA, 19 nt, Homo sapiens
  misc_RNA (1)...(19): siRNA sense strand
cagcccagucagaagagaa

SEQ ID NO: 2617523 - RNA, 19 nt, Homo sapiens
  misc_RNA (1)...(19): siRNA sense strand
gagaacagggacagaccca

SEQ ID NO: 2617524 - RNA, 19 nt, Homo sapiens
  misc_RNA (1)...(19): siRNA sense strand
ccgaggagacuguggacca

SEQ ID NO: 2617525 - RNA, 19 nt, Homo sapiens
  misc_RNA (1)...(19): siRNA sense strand
ccaggaacugcgagcgcua

SEQ ID NO: 2617526 - RNA, 19 nt, Homo sapiens
  misc_RNA (1)...(19): siRNA sense strand
cugaagacccagagccuga

SEQ ID NO: 2617527 - RNA, 19 nt, Homo sapiens
  misc_RNA (1)...(19): siRNA sense strand
cagaguggguacaggagca

SEQ ID NO: 2617528 - RNA, 19 nt, Homo sapiens
  misc_RNA (1)...(19): siRNA sense strand
ccucaacacugucccggaa

SEQ ID NO: 2617529 - RNA, 19 nt, Homo sapiens
  misc_RNA (1)...(19): siRNA sense strand
ccugagacccguuuaugaa

SEQ ID NO: 2617530 - RNA, 19 nt, Homo sapiens
  misc_RNA (1)...(19): siRNA sense strand
cggucaaggugaugggcga

SEQ ID NO: 2617531 - RNA, 19 nt, Homo sapiens
  misc_RNA (1)...(19): siRNA sense strand
ucaaauggcccuucggcaa

SEQ ID NO: 2617532 - RNA, 19 nt, Homo sapiens
  misc_RNA (1)...(19): siRNA sense strand
agaaggugcuguugggcuu

SEQ ID NO: 2617533 - RNA, 19 nt, Homo sapiens
  misc_RNA (1)...(19): siRNA sense strand
cuaccaagccggagcacga

SEQ ID NO: 2617534 - RNA, 19 nt, Homo sapiens
  misc_RNA (1)...(19): siRNA sense strand
cggagacugucgaagguca

SEQ ID NO: 2617535 - RNA, 19 nt, Homo sapiens
  misc_RNA (1)...(19): siRNA sense strand
ccaugagugugacgcgcua

SEQ ID NO: 2617536 - RNA, 19 nt, Homo sapiens
  misc_RNA (1)...(19): siRNA sense strand
agccggagcacgaggauca

SEQ ID NO: 2617537 - RNA, 19 nt, Homo sapiens
  misc_RNA (1)...(19): siRNA sense strand
ugaacaaggauaagggaga

SEQ ID NO: 2617538 - RNA, 19 nt, Homo sapiens
  misc_RNA (1)...(19): siRNA sense strand
aggauaagggagagaagga

SEQ ID NO: 2617539 - RNA, 19 nt, Homo sapiens
  misc_RNA (1)...(19): siRNA sense strand
aaaaggaagggaaggaaaa

SEQ ID NO: 2617540 - RNA, 19 nt, Homo sapiens
  misc_RNA (1)...(19): siRNA sense strand
gaagaagaucccaggcuca

SEQ ID NO: 2617541 - RNA, 19 nt, Homo sapiens
  misc_RNA (1)...(19): siRNA sense strand
gagagaaggaagagagacc

SEQ ID NO: 2617542 - RNA, 19 nt, Homo sapiens
  misc_RNA (1)...(19): siRNA sense strand
ccagagaagccgcugccaa

SEQ ID NO: 2617543 - RNA, 19 nt, Homo sapiens
  misc_RNA (1)...(19): siRNA sense strand
ggaagagagaccaaggcca

SEQ ID NO: 2617544 - RNA, 19 nt, Homo sapiens
  misc_RNA (1)...(19): siRNA sense strand
caaagagacuggugagagc

SEQ ID NO: 2617545 - RNA, 19 nt, Homo sapiens
  misc_RNA (1)...(19): siRNA sense strand
ccacaagacccgcagagga

SEQ ID NO: 2617546 - RNA, 19 nt, Homo sapiens
  misc_RNA (1)...(19): siRNA sense strand
gggaaaaggaagggaagga

SEQ ID NO: 2617547 - RNA, 19 nt, Homo sapiens
  misc_RNA (1)...(19): siRNA sense strand
auaagggagagaaggaaga

SEQ ID NO: 2617548 - RNA, 19 nt, Homo sapiens
  misc_RNA (1)...(19): siRNA sense strand
agacaaacguccugcggug

SEQ ID NO: 2617549 - RNA, 19 nt, Homo sapiens
  misc_RNA (1)...(19): siRNA sense strand
ggccaggagccaagagauc

SEQ ID NO: 2617550 - RNA, 19 nt, Homo sapiens
  misc_RNA (1)...(19): siRNA sense strand
ucaauaaaguagcagggaa

SEQ ID NO: 2617551 - RNA, 19 nt, Homo sapiens
  misc_RNA (1)...(19): siRNA sense strand
agaaagaguggcagaggau

SEQ ID NO: 2617552 - RNA, 19 nt, Homo sapiens
  misc_RNA (1)...(19): siRNA sense strand
acgaaguagacaaggauuu

SEQ ID NO: 2617553 - RNA, 19 nt, Homo sapiens
  misc_RNA (1)...(19): siRNA sense strand
cagcagaaagaguggcaga

SEQ ID NO: 2617554 - RNA, 19 nt, Homo sapiens
  misc_RNA (1)...(19): siRNA sense strand
augaauacgaaguagacaa

SEQ ID NO: 2617555 - RNA, 19 nt, Homo sapiens
  misc_RNA (1)...(19): siRNA sense strand
ugguauuguuggaggaauc

SEQ ID NO: 2617556 - RNA, 19 nt, Homo sapiens
  misc_RNA (1)...(19): siRNA sense strand
ucaauauguuggagcggau

SEQ ID NO: 2617557 - RNA, 19 nt, Homo sapiens
  misc_RNA (1)...(19): siRNA sense strand
cagaaagaguggcagagga

SEQ ID NO: 2617558 - RNA, 19 nt, Homo sapiens
  misc_RNA (1)...(19): siRNA sense strand
guuacauggaauuggaaaa

SEQ ID NO: 2617559 - RNA, 19 nt, Homo sapiens
  misc_RNA (1)...(19): siRNA sense strand
guuuaugaaccaacaguau

SEQ ID NO: 2617560 - RNA, 19 nt, Homo sapiens
  misc_RNA (1)...(19): siRNA sense strand
augcagaauucauggccau

SEQ ID NO: 2617561 - RNA, 19 nt, Homo sapiens
  misc_RNA (1)...(19): siRNA sense strand
uaacagugggcaaggcaau

SEQ ID NO: 2617562 - RNA, 19 nt, Homo sapiens
  misc_RNA (1)...(19): siRNA sense strand
gggcaaggcaauuccacau

SEQ ID NO: 2617563 - RNA, 19 nt, Homo sapiens
  misc_RNA (1)...(19): siRNA sense strand
uggauuuagcagaaacaau

SEQ ID NO: 2617564 - RNA, 19 nt, Homo sapiens
  misc_RNA (1)...(19): siRNA sense strand
agagcuuguuccagcaauu

SEQ ID NO: 2617565 - RNA, 19 nt, Homo sapiens
  misc_RNA (1)...(19): siRNA sense strand
gcauuuacaacuauggcuu

SEQ ID NO: 2617566 - RNA, 19 nt, Homo sapiens
  misc_RNA (1)...(19): siRNA sense strand
auaaaguagcagggaauuu

SEQ ID NO: 2617567 - RNA, 19 nt, Homo sapiens
  misc_RNA (1)...(19): siRNA sense strand
cuggaucgggagagggcua

SEQ ID NO: 2617568 - RNA, 19 nt, Homo sapiens
  misc_RNA (1)...(19): siRNA sense strand
gcaaaguagaggucccaga

SEQ ID NO: 2617569 - RNA, 19 nt, Homo sapiens
  misc_RNA (1)...(19): siRNA sense strand
ggcucaggggagagagaaa

SEQ ID NO: 2617570 - RNA, 19 nt, Homo sapiens
  misc_RNA (1)...(19): siRNA sense strand
gagccaaccugaggcgcua

SEQ ID NO: 2617571 - RNA, 19 nt, Homo sapiens
  misc_RNA (1)...(19): siRNA sense strand
caccaagaacagagggaac

SEQ ID NO: 2617572 - RNA, 19 nt, Homo sapiens
  misc_RNA (1)...(19): siRNA sense strand
cagccagugaggaggacuu

SEQ ID NO: 2617573 - RNA, 19 nt, Homo sapiens
  misc_RNA (1)...(19): siRNA sense strand
guacaauacuguugcgugc

SEQ ID NO: 2617574 - RNA, 19 nt, Homo sapiens
  misc_RNA (1)...(19): siRNA sense strand
agcaacgucucaaggacaa

SEQ ID NO: 2617575 - RNA, 19 nt, Homo sapiens
  misc_RNA (1)...(19): siRNA sense strand
uauauaaggauguucguga

SEQ ID NO: 2617576 - RNA, 19 nt, Homo sapiens
  misc_RNA (1)...(19): siRNA sense strand
uccaagagcuacagcgugu

SEQ ID NO: 2617577 - RNA, 19 nt, Homo sapiens
  misc_RNA (1)...(19): siRNA sense strand
aagaaaggucugacggaaa

SEQ ID NO: 2617578 - RNA, 19 nt, Homo sapiens
  misc_RNA (1)...(19): siRNA sense strand
gauaacuaccagaggguca

SEQ ID NO: 2617579 - RNA, 19 nt, Homo sapiens
  misc_RNA (1)...(19): siRNA sense strand
cagcagcaguuaaaggaga

SEQ ID NO: 2617580 - RNA, 19 nt, Homo sapiens
  misc_RNA (1)...(19): siRNA sense strand
caggauuaguggccggaau

SEQ ID NO: 2617581 - RNA, 19 nt, Homo sapiens
  misc_RNA (1)...(19): siRNA sense strand
cugggagagaggaggacaa

SEQ ID NO: 2617582 - RNA, 19 nt, Homo sapiens
  misc_RNA (1)...(19): siRNA sense strand
caguuaaaggagaugaaaa

SEQ ID NO: 2617583 - RNA, 19 nt, Homo sapiens
  misc_RNA (1)...(19): siRNA sense strand
gcucaaggucaguggguug

SEQ ID NO: 2617584 - RNA, 19 nt, Homo sapiens
  misc_RNA (1)...(19): siRNA sense strand
ugauggugcuaaugggaca

SEQ ID NO: 2617585 - RNA, 19 nt, Homo sapiens
  misc_RNA (1)...(19): siRNA sense strand
cagcaaaaggacagaacuu

SEQ ID NO: 2617586 - RNA, 19 nt, Homo sapiens
  misc_RNA (1)...(19): siRNA sense strand
cuaaugggacacugaggaa

SEQ ID NO: 2617587 - RNA, 19 nt, Homo sapiens
  misc_RNA (1)...(19): siRNA sense strand
caacagucuuccugaggca

SEQ ID NO: 2617588 - RNA, 19 nt, Homo sapiens
  misc_RNA (1)...(19): siRNA sense strand
ggugguacucugugacuau

SEQ ID NO: 2617589 - RNA, 19 nt, Homo sapiens
  misc_RNA (1)...(19): siRNA sense strand
gugacuauguucuuggaga

SEQ ID NO: 2617590 - RNA, 19 nt, Homo sapiens
  misc_RNA (1)...(19): siRNA sense strand
aaagaaaggucugacggaa

SEQ ID NO: 2617591 - RNA, 19 nt, Homo sapiens
  misc_RNA (1)...(19): siRNA sense strand
ccugaggcaagaagaaauu

SEQ ID NO: 2617592 - RNA, 19 nt, Homo sapiens
  misc_RNA (1)...(19): siRNA sense strand
aguccaacgcccagaagau

SEQ ID NO: 2617593 - RNA, 19 nt, Homo sapiens
  misc_RNA (1)...(19): siRNA sense strand
gcuaauucagagaaauaca

SEQ ID NO: 2617594 - RNA, 19 nt, Homo sapiens
  misc_RNA (1)...(19): siRNA sense strand
cagugaaguccaacaacau

SEQ ID NO: 2617595 - RNA, 19 nt, Homo sapiens
  misc_RNA (1)...(19): siRNA sense strand
caggcagaggacagauuua

SEQ ID NO: 2617596 - RNA, 19 nt, Homo sapiens
  misc_RNA (1)...(19): siRNA sense strand
ggcaagaagaaauucaaga

SEQ ID NO: 2617597 - RNA, 19 nt, Homo sapiens
  misc_RNA (1)...(19): siRNA sense strand
aggauuaguggccggaauu

SEQ ID NO: 2617598 - RNA, 19 nt, Homo sapiens
  misc_RNA (1)...(19): siRNA sense strand
ggaccauucacuuggcuga

SEQ ID NO: 2617599 - RNA, 19 nt, Homo sapiens
  misc_RNA (1)...(19): siRNA sense strand
ucuuggagaagcugaauau

SEQ ID NO: 2617600 - RNA, 19 nt, Homo sapiens
  misc_RNA (1)...(19): siRNA sense strand
guacacuuagcguggagaa

SEQ ID NO: 2617601 - RNA, 19 nt, Homo sapiens
  misc_RNA (1)...(19): siRNA sense strand
gcccguuuccuguggacaa

SEQ ID NO: 2617602 - RNA, 19 nt, Homo sapiens
  misc_RNA (1)...(19): siRNA sense strand
aagaaaggucugacggaaa

SEQ ID NO: 2617603 - RNA, 19 nt, Homo sapiens
  misc_RNA (1)...(19): siRNA sense strand
gauaacuaccagaggguca

SEQ ID NO: 2617604 - RNA, 19 nt, Homo sapiens
  misc_RNA (1)...(19): siRNA sense strand
cagcagcaguuaaaggaga

SEQ ID NO: 2617605 - RNA, 19 nt, Homo sapiens
  misc_RNA (1)...(19): siRNA sense strand
caggauuaguggccggaau

SEQ ID NO: 2617606 - RNA, 19 nt, Homo sapiens
  misc_RNA (1)...(19): siRNA sense strand
cugggagagaggaggacaa

SEQ ID NO: 2617607 - RNA, 19 nt, Homo sapiens
  misc_RNA (1)...(19): siRNA sense strand
caguuaaaggagaugaaaa

SEQ ID NO: 2617608 - RNA, 19 nt, Homo sapiens
  misc_RNA (1)...(19): siRNA sense strand
gcucaaggucaguggguug

SEQ ID NO: 2617609 - RNA, 19 nt, Homo sapiens
  misc_RNA (1)...(19): siRNA sense strand
ugauggugcuaaugggaca

SEQ ID NO: 2617610 - RNA, 19 nt, Homo sapiens
  misc_RNA (1)...(19): siRNA sense strand
cagcaaaaggacagaacuu

SEQ ID NO: 2617611 - RNA, 19 nt, Homo sapiens
  misc_RNA (1)...(19): siRNA sense strand
cuaaugggacacugaggaa

SEQ ID NO: 2617612 - RNA, 19 nt, Homo sapiens
  misc_RNA (1)...(19): siRNA sense strand
caacagucuuccugaggca

SEQ ID NO: 2617613 - RNA, 19 nt, Homo sapiens
  misc_RNA (1)...(19): siRNA sense strand
ggugguacucugugacuau

SEQ ID NO: 2617614 - RNA, 19 nt, Homo sapiens
  misc_RNA (1)...(19): siRNA sense strand
gugacuauguucuuggaga

SEQ ID NO: 2617615 - RNA, 19 nt, Homo sapiens
  misc_RNA (1)...(19): siRNA sense strand
aaagaaaggucugacggaa

SEQ ID NO: 2617616 - RNA, 19 nt, Homo sapiens
  misc_RNA (1)...(19): siRNA sense strand
ccugaggcaagaagaaauu

SEQ ID NO: 2617617 - RNA, 19 nt, Homo sapiens
  misc_RNA (1)...(19): siRNA sense strand
aguccaacgcccagaagau

SEQ ID NO: 2617618 - RNA, 19 nt, Homo sapiens
  misc_RNA (1)...(19): siRNA sense strand
gcuaauucagagaaauaca

SEQ ID NO: 2617619 - RNA, 19 nt, Homo sapiens
  misc_RNA (1)...(19): siRNA sense strand
cagugaaguccaacaacau

SEQ ID NO: 2617620 - RNA, 19 nt, Homo sapiens
  misc_RNA (1)...(19): siRNA sense strand
caggcagaggacagauuua

SEQ ID NO: 2617621 - RNA, 19 nt, Homo sapiens
  misc_RNA (1)...(19): siRNA sense strand
ggcaagaagaaauucaaga

SEQ ID NO: 2617622 - RNA, 19 nt, Homo sapiens
  misc_RNA (1)...(19): siRNA sense strand
aggauuaguggccggaauu

SEQ ID NO: 2617623 - RNA, 19 nt, Homo sapiens
  misc_RNA (1)...(19): siRNA sense strand
ggaccauucacuuggcuga

SEQ ID NO: 2617624 - RNA, 19 nt, Homo sapiens
  misc_RNA (1)...(19): siRNA sense strand
ucuuggagaagcugaauau

SEQ ID NO: 2617625 - RNA, 19 nt, Homo sapiens
  misc_RNA (1)...(19): siRNA sense strand
guacacuuagcguggagaa

SEQ ID NO: 2617626 - RNA, 19 nt, Homo sapiens
  misc_RNA (1)...(19): siRNA sense strand
gcccguuuccuguggacaa

SEQ ID NO: 2617627 - RNA, 19 nt, Homo sapiens
  misc_RNA (1)...(19): siRNA sense strand
ggaaagggcugcaagguug

SEQ ID NO: 2617628 - RNA, 19 nt, Homo sapiens
  misc_RNA (1)...(19): siRNA sense strand
uuguguacagugugaauaa

SEQ ID NO: 2617629 - RNA, 19 nt, Homo sapiens
  misc_RNA (1)...(19): siRNA sense strand
agagacaaguggacgcuga

SEQ ID NO: 2617630 - RNA, 19 nt, Homo sapiens
  misc_RNA (1)...(19): siRNA sense strand
guggcacagcagugggcaa

SEQ ID NO: 2617631 - RNA, 19 nt, Homo sapiens
  misc_RNA (1)...(19): siRNA sense strand
ucauacuauuggaauggaa

SEQ ID NO: 2617632 - RNA, 19 nt, Homo sapiens
  misc_RNA (1)...(19): siRNA sense strand
aucgauaaguucaaagaca

SEQ ID NO: 2617633 - RNA, 19 nt, Homo sapiens
  misc_RNA (1)...(19): siRNA sense strand
uggcacagcagugggcaaa

SEQ ID NO: 2617634 - RNA, 19 nt, Homo sapiens
  misc_RNA (1)...(19): siRNA sense strand
ugacaaaggaagaggccaa

SEQ ID NO: 2617635 - RNA, 19 nt, Homo sapiens
  misc_RNA (1)...(19): siRNA sense strand
gggcuacagaagagaguaa

SEQ ID NO: 2617636 - RNA, 19 nt, Homo sapiens
  misc_RNA (1)...(19): siRNA sense strand
gggaagagacaaaugacaa

SEQ ID NO: 2617637 - RNA, 19 nt, Homo sapiens
  misc_RNA (1)...(19): siRNA sense strand
ccaggaaauucgagagcau

SEQ ID NO: 2617638 - RNA, 19 nt, Homo sapiens
  misc_RNA (1)...(19): siRNA sense strand
gagcaaugacaaaggaaga

SEQ ID NO: 2617639 - RNA, 19 nt, Homo sapiens
  misc_RNA (1)...(19): siRNA sense strand
acacaaagccagaggccau

SEQ ID NO: 2617640 - RNA, 19 nt, Homo sapiens
  misc_RNA (1)...(19): siRNA sense strand
ggaaaagaccaguaugaaa

SEQ ID NO: 2617641 - RNA, 19 nt, Homo sapiens
  misc_RNA (1)...(19): siRNA sense strand
ggaaagaagaugaagccau

SEQ ID NO: 2617642 - RNA, 19 nt, Homo sapiens
  misc_RNA (1)...(19): siRNA sense strand
cugaagaugagguagauaa

SEQ ID NO: 2617643 - RNA, 19 nt, Homo sapiens
  misc_RNA (1)...(19): siRNA sense strand
gagcugaagaagagacaau

SEQ ID NO: 2617644 - RNA, 19 nt, Homo sapiens
  misc_RNA (1)...(19): siRNA sense strand
cuaaggaacugcaaggcaa

SEQ ID NO: 2617645 - RNA, 19 nt, Homo sapiens
  misc_RNA (1)...(19): siRNA sense strand
agucuagccuggaggacaa

SEQ ID NO: 2617646 - RNA, 19 nt, Homo sapiens
  misc_RNA (1)...(19): siRNA sense strand
gggccagagcaaugacaaa

SEQ ID NO: 2617647 - RNA, 19 nt, Homo sapiens
  misc_RNA (1)...(19): siRNA sense strand
auguaaagugugugaggaa

SEQ ID NO: 2617648 - RNA, 19 nt, Homo sapiens
  misc_RNA (1)...(19): siRNA sense strand
cuuauuagcuacaggcaau

SEQ ID NO: 2617649 - RNA, 19 nt, Homo sapiens
  misc_RNA (1)...(19): siRNA sense strand
cauccugggaauaggguaa

SEQ ID NO: 2617650 - RNA, 19 nt, Homo sapiens
  misc_RNA (1)...(19): siRNA sense strand
caggcuagcagcugagaaa

SEQ ID NO: 2617651 - RNA, 19 nt, Homo sapiens
  misc_RNA (1)...(19): siRNA sense strand
uccacaaaguugagaaauu

SEQ ID NO: 2617652 - RNA, 19 nt, Homo sapiens
  misc_RNA (1)...(19): siRNA sense strand
ggucuaagaaagaagucua

SEQ ID NO: 2617653 - RNA, 19 nt, Homo sapiens
  misc_RNA (1)...(19): siRNA sense strand
accaagaggcugaggaaga

SEQ ID NO: 2617654 - RNA, 19 nt, Homo sapiens
  misc_RNA (1)...(19): siRNA sense strand
gcuacagaagagaguaaua

SEQ ID NO: 2617655 - RNA, 19 nt, Homo sapiens
  misc_RNA (1)...(19): siRNA sense strand
gacaaagccauuaaggaaa

SEQ ID NO: 2617656 - RNA, 19 nt, Homo sapiens
  misc_RNA (1)...(19): siRNA sense strand
uuucaaauggguagacaaa

SEQ ID NO: 2617657 - RNA, 19 nt, Homo sapiens
  misc_RNA (1)...(19): siRNA sense strand
ggaagagacaaaugacaau

SEQ ID NO: 2617658 - RNA, 19 nt, Homo sapiens
  misc_RNA (1)...(19): siRNA sense strand
cagaggaggaagaggacau

SEQ ID NO: 2617659 - RNA, 19 nt, Homo sapiens
  misc_RNA (1)...(19): siRNA sense strand
uggagaacaaguugauaua

SEQ ID NO: 2617660 - RNA, 19 nt, Homo sapiens
  misc_RNA (1)...(19): siRNA sense strand
ggucuugguuugaggcuga

SEQ ID NO: 2617661 - RNA, 19 nt, Homo sapiens
  misc_RNA (1)...(19): siRNA sense strand
gguuugaggcugaagauga

SEQ ID NO: 2617662 - RNA, 19 nt, Homo sapiens
  misc_RNA (1)...(19): siRNA sense strand
ggaacagcugucuggaaua

SEQ ID NO: 2617663 - RNA, 19 nt, Homo sapiens
  misc_RNA (1)...(19): siRNA sense strand
agagaaacucccagaccaa

SEQ ID NO: 2617664 - RNA, 19 nt, Homo sapiens
  misc_RNA (1)...(19): siRNA sense strand
uggccaaucaagaggcuaa

SEQ ID NO: 2617665 - RNA, 19 nt, Homo sapiens
  misc_RNA (1)...(19): siRNA sense strand
caaccaagaggcugaggaa

SEQ ID NO: 2617666 - RNA, 19 nt, Homo sapiens
  misc_RNA (1)...(19): siRNA sense strand
uuaacagggaagagacaaa

SEQ ID NO: 2617667 - RNA, 19 nt, Homo sapiens
  misc_RNA (1)...(19): siRNA sense strand
agaguaaggccaaggcaau

SEQ ID NO: 2617668 - RNA, 19 nt, Homo sapiens
  misc_RNA (1)...(19): siRNA sense strand
auacagacacugagagcuu

SEQ ID NO: 2617669 - RNA, 19 nt, Homo sapiens
  misc_RNA (1)...(19): siRNA sense strand
gcaucuuuauucugugaaa

SEQ ID NO: 2617670 - RNA, 19 nt, Homo sapiens
  misc_RNA (1)...(19): siRNA sense strand
aggcugaagaugagguaga

SEQ ID NO: 2617671 - RNA, 19 nt, Homo sapiens
  misc_RNA (1)...(19): siRNA sense strand
aggauagagaacugguuaa

SEQ ID NO: 2617672 - RNA, 19 nt, Homo sapiens
  misc_RNA (1)...(19): siRNA sense strand
gucuacaaguggaggauga

SEQ ID NO: 2617673 - RNA, 19 nt, Homo sapiens
  misc_RNA (1)...(19): siRNA sense strand
gggaauaggguaaaagaca

SEQ ID NO: 2617674 - RNA, 19 nt, Homo sapiens
  misc_RNA (1)...(19): siRNA sense strand
cagcugagaaagaagguau

SEQ ID NO: 2617675 - RNA, 19 nt, Homo sapiens
  misc_RNA (1)...(19): siRNA sense strand
ggacccaggcccagauaau

SEQ ID NO: 2617676 - RNA, 19 nt, Homo sapiens
  misc_RNA (1)...(19): siRNA sense strand
gaguaaggccaaggcaaua

SEQ ID NO: 2617677 - RNA, 19 nt, Homo sapiens
  misc_RNA (1)...(19): siRNA sense strand
ucaaaggaggagaccaaua

SEQ ID NO: 2617678 - RNA, 19 nt, Homo sapiens
  misc_RNA (1)...(19): siRNA sense strand
gguaaaagacaguaacaga

SEQ ID NO: 2617679 - RNA, 19 nt, Homo sapiens
  misc_RNA (1)...(19): siRNA sense strand
guagauaacaggacugaca

SEQ ID NO: 2617680 - RNA, 19 nt, Homo sapiens
  misc_RNA (1)...(19): siRNA sense strand
gggcuggaaaggaggccaa

SEQ ID NO: 2617681 - RNA, 19 nt, Homo sapiens
  misc_RNA (1)...(19): siRNA sense strand
cugaagaagaggccaguau

SEQ ID NO: 2617682 - RNA, 19 nt, Homo sapiens
  misc_RNA (1)...(19): siRNA sense strand
cugaagaagaagccaguau

SEQ ID NO: 2617683 - RNA, 19 nt, Homo sapiens
  misc_RNA (1)...(19): siRNA sense strand
gcugaaaaccagaccuaua

SEQ ID NO: 2617684 - RNA, 19 nt, Homo sapiens
  misc_RNA (1)...(19): siRNA sense strand
cauuauaggguccugguua

SEQ ID NO: 2617685 - RNA, 19 nt, Homo sapiens
  misc_RNA (1)...(19): siRNA sense strand
aaaagaagucagugaagaa

SEQ ID NO: 2617686 - RNA, 19 nt, Homo sapiens
  misc_RNA (1)...(19): siRNA sense strand
gcauacaaugugagcugaa

SEQ ID NO: 2617687 - RNA, 19 nt, Homo sapiens
  misc_RNA (1)...(19): siRNA sense strand
aaacuaaccaggagcucua

SEQ ID NO: 2617688 - RNA, 19 nt, Homo sapiens
  misc_RNA (1)...(19): siRNA sense strand
gggaccugguucugggcua

SEQ ID NO: 2617689 - RNA, 19 nt, Homo sapiens
  misc_RNA (1)...(19): siRNA sense strand
aggacaaggaagaggccau

SEQ ID NO: 2617690 - RNA, 19 nt, Homo sapiens
  misc_RNA (1)...(19): siRNA sense strand
cugaagaggaagaagucau

SEQ ID NO: 2617691 - RNA, 19 nt, Homo sapiens
  misc_RNA (1)...(19): siRNA sense strand
ggcccaugaucaagaaaga

SEQ ID NO: 2617692 - RNA, 19 nt, Homo sapiens
  misc_RNA (1)...(19): siRNA sense strand
gaggaaauggagucagaga

SEQ ID NO: 2617693 - RNA, 19 nt, Homo sapiens
  misc_RNA (1)...(19): siRNA sense strand
gggucgugguucuggguca

SEQ ID NO: 2617694 - RNA, 19 nt, Homo sapiens
  misc_RNA (1)...(19): siRNA sense strand
aagcuuguguggaggguga

SEQ ID NO: 2617695 - RNA, 19 nt, Homo sapiens
  misc_RNA (1)...(19): siRNA sense strand
ugcugagacuagagaagaa

SEQ ID NO: 2617696 - RNA, 19 nt, Homo sapiens
  misc_RNA (1)...(19): siRNA sense strand
uguaaagugugugaggaaa

SEQ ID NO: 2617697 - RNA, 19 nt, Homo sapiens
  misc_RNA (1)...(19): siRNA sense strand
gggaagagguuguaggugg

SEQ ID NO: 2617698 - RNA, 19 nt, Homo sapiens
  misc_RNA (1)...(19): siRNA sense strand
cuggaaaggaggccaaauu

SEQ ID NO: 2617699 - RNA, 19 nt, Homo sapiens
  misc_RNA (1)...(19): siRNA sense strand
gagcugggaaggaggccaa

SEQ ID NO: 2617700 - RNA, 19 nt, Homo sapiens
  misc_RNA (1)...(19): siRNA sense strand
gguaucaggugaagcggau

SEQ ID NO: 2617701 - RNA, 19 nt, Homo sapiens
  misc_RNA (1)...(19): siRNA sense strand
agacaugaugagaucgaau

SEQ ID NO: 2617702 - RNA, 19 nt, Homo sapiens
  misc_RNA (1)...(19): siRNA sense strand
agucuggcuccgagaagaa

SEQ ID NO: 2617703 - RNA, 19 nt, Homo sapiens
  misc_RNA (1)...(19): siRNA sense strand
cagaagguggugugcaaca

SEQ ID NO: 2617704 - RNA, 19 nt, Homo sapiens
  misc_RNA (1)...(19): siRNA sense strand
cggugaucgacgugaggau

SEQ ID NO: 2617705 - RNA, 19 nt, Homo sapiens
  misc_RNA (1)...(19): siRNA sense strand
gcggcgacgagcaggaaaa

SEQ ID NO: 2617706 - RNA, 19 nt, Homo sapiens
  misc_RNA (1)...(19): siRNA sense strand
cagacugguaucaggugaa

SEQ ID NO: 2617707 - RNA, 19 nt, Homo sapiens
  misc_RNA (1)...(19): siRNA sense strand
cgucgagacaugaugagau

SEQ ID NO: 2617708 - RNA, 19 nt, Homo sapiens
  misc_RNA (1)...(19): siRNA sense strand
cgagacaugaugagaucga

SEQ ID NO: 2617709 - RNA, 19 nt, Homo sapiens
  misc_RNA (1)...(19): siRNA sense strand
augcaguacuucuccgaau

SEQ ID NO: 2617710 - RNA, 19 nt, Homo sapiens
  misc_RNA (1)...(19): siRNA sense strand
cauggaagacgaugcccaa

SEQ ID NO: 2617711 - RNA, 19 nt, Homo sapiens
  misc_RNA (1)...(19): siRNA sense strand
acacagugcugguggacga

SEQ ID NO: 2617712 - RNA, 19 nt, Homo sapiens
  misc_RNA (1)...(19): siRNA sense strand
ucacccacucggagguaaa

SEQ ID NO: 2617713 - RNA, 19 nt, Homo sapiens
  misc_RNA (1)...(19): siRNA sense strand
acgaggagucacagaggga

SEQ ID NO: 2617714 - RNA, 19 nt, Homo sapiens
  misc_RNA (1)...(19): siRNA sense strand
uggaagagguggaggcuga

SEQ ID NO: 2617715 - RNA, 19 nt, Homo sapiens
  misc_RNA (1)...(19): siRNA sense strand
ccacgaaguucaaggccca

SEQ ID NO: 2617716 - RNA, 19 nt, Homo sapiens
  misc_RNA (1)...(19): siRNA sense strand
cugaggagaagcaggagaa

SEQ ID NO: 2617717 - RNA, 19 nt, Homo sapiens
  misc_RNA (1)...(19): siRNA sense strand
acuacuaccuccagggcau

SEQ ID NO: 2617718 - RNA, 19 nt, Homo sapiens
  misc_RNA (1)...(19): siRNA sense strand
cagaagauguagagggagg

SEQ ID NO: 2617719 - RNA, 19 nt, Homo sapiens
  misc_RNA (1)...(19): siRNA sense strand
ccucuguccuccagcggaa

SEQ ID NO: 2617720 - RNA, 19 nt, Homo sapiens
  misc_RNA (1)...(19): siRNA sense strand
uagagaagcugccggagga

SEQ ID NO: 2617721 - RNA, 19 nt, Homo sapiens
  misc_RNA (1)...(19): siRNA sense strand
cagaagaugcuccacggaa

SEQ ID NO: 2617722 - RNA, 19 nt, Homo sapiens
  misc_RNA (1)...(19): siRNA sense strand
gcuagcaucuguuggggaa

SEQ ID NO: 2617723 - RNA, 19 nt, Homo sapiens
  misc_RNA (1)...(19): siRNA sense strand
gaaggaggcuggcagggau

SEQ ID NO: 2617724 - RNA, 19 nt, Homo sapiens
  misc_RNA (1)...(19): siRNA sense strand
gugauggacaugaucgcua

SEQ ID NO: 2617725 - RNA, 19 nt, Homo sapiens
  misc_RNA (1)...(19): siRNA sense strand
agaagaugcuccacggaac

SEQ ID NO: 2617726 - RNA, 19 nt, Homo sapiens
  misc_RNA (1)...(19): siRNA sense strand
gcugaggagaagcaggaga

SEQ ID NO: 2617727 - RNA, 19 nt, Homo sapiens
  misc_RNA (1)...(19): siRNA sense strand
gggccaaguuguaccugga

SEQ ID NO: 2617728 - RNA, 19 nt, Homo sapiens
  misc_RNA (1)...(19): siRNA sense strand
ggaaggaguucaaggagca

SEQ ID NO: 2617729 - RNA, 19 nt, Homo sapiens
  misc_RNA (1)...(19): siRNA sense strand
agagagaggacguggcuga

SEQ ID NO: 2617730 - RNA, 19 nt, Homo sapiens
  misc_RNA (1)...(19): siRNA sense strand
cgccaaacggacugagauu

SEQ ID NO: 2617731 - RNA, 19 nt, Homo sapiens
  misc_RNA (1)...(19): siRNA sense strand
gagaaguggcggaaggagu

SEQ ID NO: 2617732 - RNA, 19 nt, Homo sapiens
  misc_RNA (1)...(19): siRNA sense strand
cugaggaagccgaggacca

SEQ ID NO: 2617733 - RNA, 19 nt, Homo sapiens
  misc_RNA (1)...(19): siRNA sense strand
gaacuggacuugcggcuca

SEQ ID NO: 2617734 - RNA, 19 nt, Homo sapiens
  misc_RNA (1)...(19): siRNA sense strand
cgagaauggccgagcguug

SEQ ID NO: 2617735 - RNA, 19 nt, Homo sapiens
  misc_RNA (1)...(19): siRNA sense strand
cugcacgauuuauggaaaa

SEQ ID NO: 2617736 - RNA, 19 nt, Homo sapiens
  misc_RNA (1)...(19): siRNA sense strand
ucucgaaauuggacagcga

SEQ ID NO: 2617737 - RNA, 19 nt, Homo sapiens
  misc_RNA (1)...(19): siRNA sense strand
cagaagacccagaaccuga

SEQ ID NO: 2617738 - RNA, 19 nt, Homo sapiens
  misc_RNA (1)...(19): siRNA sense strand
ugaaggagcagaagcggau

SEQ ID NO: 2617739 - RNA, 19 nt, Homo sapiens
  misc_RNA (1)...(19): siRNA sense strand
ugggagacgggcuggagaa

SEQ ID NO: 2617740 - RNA, 19 nt, Homo sapiens
  misc_RNA (1)...(19): siRNA sense strand
uggacgcagcccuggaaua

SEQ ID NO: 2617741 - RNA, 19 nt, Homo sapiens
  misc_RNA (1)...(19): siRNA sense strand
ccgccagccauguaaguau

SEQ ID NO: 2617742 - RNA, 19 nt, Homo sapiens
  misc_RNA (1)...(19): siRNA sense strand
ccauggagacaguggccca

SEQ ID NO: 2617743 - RNA, 19 nt, Homo sapiens
  misc_RNA (1)...(19): siRNA sense strand
gagggcaggaagagguaca

SEQ ID NO: 2617744 - RNA, 19 nt, Homo sapiens
  misc_RNA (1)...(19): siRNA sense strand
aguggaugaaggagcagaa

SEQ ID NO: 2617745 - RNA, 19 nt, Homo sapiens
  misc_RNA (1)...(19): siRNA sense strand
acaagaugucugccaacaa

SEQ ID NO: 2617746 - RNA, 19 nt, Homo sapiens
  misc_RNA (1)...(19): siRNA sense strand
gaagagaucccuuaggcaa

SEQ ID NO: 2617747 - RNA, 19 nt, Homo sapiens
  misc_RNA (1)...(19): siRNA sense strand
agacagaagaacuggcaga

SEQ ID NO: 2617748 - RNA, 19 nt, Homo sapiens
  misc_RNA (1)...(19): siRNA sense strand
agaagaacuggcagagaau

SEQ ID NO: 2617749 - RNA, 19 nt, Homo sapiens
  misc_RNA (1)...(19): siRNA sense strand
aagaacuggcagagaauau

SEQ ID NO: 2617750 - RNA, 19 nt, Homo sapiens
  misc_RNA (1)...(19): siRNA sense strand
aagagaucccuuaggcaaa

SEQ ID NO: 2617751 - RNA, 19 nt, Homo sapiens
  misc_RNA (1)...(19): siRNA sense strand
ucacaaauauucaagcuga

SEQ ID NO: 2617752 - RNA, 19 nt, Homo sapiens
  misc_RNA (1)...(19): siRNA sense strand
aggcaaagacuguugaaac

SEQ ID NO: 2617753 - RNA, 19 nt, Homo sapiens
  misc_RNA (1)...(19): siRNA sense strand
ccaaaauauuagcugaaga

SEQ ID NO: 2617754 - RNA, 19 nt, Homo sapiens
  misc_RNA (1)...(19): siRNA sense strand
gcugcaaaucuaaagaaaa

SEQ ID NO: 2617755 - RNA, 19 nt, Homo sapiens
  misc_RNA (1)...(19): siRNA sense strand
acucaaguggcguaaacaa

SEQ ID NO: 2617756 - RNA, 19 nt, Homo sapiens
  misc_RNA (1)...(19): siRNA sense strand
agcugcaaaucuaaagaaa

SEQ ID NO: 2617757 - RNA, 19 nt, Homo sapiens
  misc_RNA (1)...(19): siRNA sense strand
agaaaaugaaccaggcuuu

SEQ ID NO: 2617758 - RNA, 19 nt, Homo sapiens
  misc_RNA (1)...(19): siRNA sense strand
ggugacugagacagaagaa

SEQ ID NO: 2617759 - RNA, 19 nt, Homo sapiens
  misc_RNA (1)...(19): siRNA sense strand
cugacaagaaacugcgcaa

SEQ ID NO: 2617760 - RNA, 19 nt, Homo sapiens
  misc_RNA (1)...(19): siRNA sense strand
aggaaaaggaaaagggaaa

SEQ ID NO: 2617761 - RNA, 19 nt, Homo sapiens
  misc_RNA (1)...(19): siRNA sense strand
augaaaugauaguggaaga

SEQ ID NO: 2617762 - RNA, 19 nt, Homo sapiens
  misc_RNA (1)...(19): siRNA sense strand
aggaagaagaagaagaaaa

SEQ ID NO: 2617763 - RNA, 19 nt, Homo sapiens
  misc_RNA (1)...(19): siRNA sense strand
cauacaaggaaaaggaaaa

SEQ ID NO: 2617764 - RNA, 19 nt, Homo sapiens
  misc_RNA (1)...(19): siRNA sense strand
ggaaaagggaaaaggucaa

SEQ ID NO: 2617765 - RNA, 19 nt, Homo sapiens
  misc_RNA (1)...(19): siRNA sense strand
auccagaggccuugggaaa

SEQ ID NO: 2617766 - RNA, 19 nt, Homo sapiens
  misc_RNA (1)...(19): siRNA sense strand
ugauaguggaagaggaaga

SEQ ID NO: 2617767 - RNA, 19 nt, Homo sapiens
  misc_RNA (1)...(19): siRNA sense strand
ugaaagacuucgaccguga

SEQ ID NO: 2617768 - RNA, 19 nt, Homo sapiens
  misc_RNA (1)...(19): siRNA sense strand
cuucaaacugcaagaguca

SEQ ID NO: 2617769 - RNA, 19 nt, Homo sapiens
  misc_RNA (1)...(19): siRNA sense strand
acgaaagguaauacaggua

SEQ ID NO: 2617770 - RNA, 19 nt, Homo sapiens
  misc_RNA (1)...(19): siRNA sense strand
agaugaaaugauaguggaa

SEQ ID NO: 2617771 - RNA, 19 nt, Homo sapiens
  misc_RNA (1)...(19): siRNA sense strand
ggaaaaggaaaagggaaaa

SEQ ID NO: 2617772 - RNA, 19 nt, Homo sapiens
  misc_RNA (1)...(19): siRNA sense strand
agguaauacagguagauga

SEQ ID NO: 2617773 - RNA, 19 nt, Homo sapiens
  misc_RNA (1)...(19): siRNA sense strand
aagaggaagaagaagaaga

SEQ ID NO: 2617774 - RNA, 19 nt, Homo sapiens
  misc_RNA (1)...(19): siRNA sense strand
uggauaucaccgaaauaaa

SEQ ID NO: 2617775 - RNA, 19 nt, Homo sapiens
  misc_RNA (1)...(19): siRNA sense strand
aguggaagaggaagaagaa

SEQ ID NO: 2617776 - RNA, 19 nt, Homo sapiens
  misc_RNA (1)...(19): siRNA sense strand
ccauacaaggaaaaggaaa

SEQ ID NO: 2617777 - RNA, 19 nt, Homo sapiens
  misc_RNA (1)...(19): siRNA sense strand
gugaaguggaaauacgaau

SEQ ID NO: 2617778 - RNA, 19 nt, Homo sapiens
  misc_RNA (1)...(19): siRNA sense strand
aagcaaauugagucagaca

SEQ ID NO: 2617779 - RNA, 19 nt, Homo sapiens
  misc_RNA (1)...(19): siRNA sense strand
ccuggauaucaccgaaaua

SEQ ID NO: 2617780 - RNA, 19 nt, Homo sapiens
  misc_RNA (1)...(19): siRNA sense strand
aggaaaagggaaaagguca

SEQ ID NO: 2617781 - RNA, 19 nt, Homo sapiens
  misc_RNA (1)...(19): siRNA sense strand
aaaugauaguggaagagga

SEQ ID NO: 2617782 - RNA, 19 nt, Homo sapiens
  misc_RNA (1)...(19): siRNA sense strand
uaguggaagaggaagaaga

SEQ ID NO: 2617783 - RNA, 19 nt, Homo sapiens
  misc_RNA (1)...(19): siRNA sense strand
ugccaaaacacgaaaggua

SEQ ID NO: 2617784 - RNA, 19 nt, Homo sapiens
  misc_RNA (1)...(19): siRNA sense strand
ccuccauccaagaagagaa

SEQ ID NO: 2617785 - RNA, 19 nt, Homo sapiens
  misc_RNA (1)...(19): siRNA sense strand
ccaaaacacgaaagguaau

SEQ ID NO: 2617786 - RNA, 19 nt, Homo sapiens
  misc_RNA (1)...(19): siRNA sense strand
ccagugacuugcagaggca

SEQ ID NO: 2617787 - RNA, 19 nt, Homo sapiens
  misc_RNA (1)...(19): siRNA sense strand
uaaacaaacuaacagcaga

SEQ ID NO: 2617788 - RNA, 19 nt, Homo sapiens
  misc_RNA (1)...(19): siRNA sense strand
gcaguagucggguggccaa

SEQ ID NO: 2617789 - RNA, 19 nt, Homo sapiens
  misc_RNA (1)...(19): siRNA sense strand
cgcccuuggaggaaacaaa

SEQ ID NO: 2617790 - RNA, 19 nt, Homo sapiens
  misc_RNA (1)...(19): siRNA sense strand
gugaagaucuugcccguca

SEQ ID NO: 2617791 - RNA, 19 nt, Homo sapiens
  misc_RNA (1)...(19): siRNA sense strand
cgcaagaggacaucgccaa

SEQ ID NO: 2617792 - RNA, 19 nt, Homo sapiens
  misc_RNA (1)...(19): siRNA sense strand
gagaaugaugcuaagaaaa

SEQ ID NO: 2617793 - RNA, 19 nt, Homo sapiens
  misc_RNA (1)...(19): siRNA sense strand
acagaaggaucgaaaggca

SEQ ID NO: 2617794 - RNA, 19 nt, Homo sapiens
  misc_RNA (1)...(19): siRNA sense strand
cuggaagaguggaaaggca

SEQ ID NO: 2617795 - RNA, 19 nt, Homo sapiens
  misc_RNA (1)...(19): siRNA sense strand
aggcacuccaugagcuaaa

SEQ ID NO: 2617796 - RNA, 19 nt, Homo sapiens
  misc_RNA (1)...(19): siRNA sense strand
ggaagaguggaaaggcaga

SEQ ID NO: 2617797 - RNA, 19 nt, Homo sapiens
  misc_RNA (1)...(19): siRNA sense strand
uggcauaauuggagccuug

SEQ ID NO: 2617798 - RNA, 19 nt, Homo sapiens
  misc_RNA (1)...(19): siRNA sense strand
ccgguuugaugcugugcaa

SEQ ID NO: 2617799 - RNA, 19 nt, Homo sapiens
  misc_RNA (1)...(19): siRNA sense strand
gcagagaauuucaaaggac

SEQ ID NO: 2617800 - RNA, 19 nt, Homo sapiens
  misc_RNA (1)...(19): siRNA sense strand
uggcaaagaugaacagcag

SEQ ID NO: 2617801 - RNA, 19 nt, Homo sapiens
  misc_RNA (1)...(19): siRNA sense strand
gaaaguaguuuacaggaag

SEQ ID NO: 2617802 - RNA, 19 nt, Homo sapiens
  misc_RNA (1)...(19): siRNA sense strand
auaaagaugccuuaagcca

SEQ ID NO: 2617803 - RNA, 19 nt, Homo sapiens
  misc_RNA (1)...(19): siRNA sense strand
cccuucaguaauagauaaa

SEQ ID NO: 2617804 - RNA, 19 nt, Homo sapiens
  misc_RNA (1)...(19): siRNA sense strand
agaacaagacucucggcua

SEQ ID NO: 2617805 - RNA, 19 nt, Homo sapiens
  misc_RNA (1)...(19): siRNA sense strand
gaagaaauccagaaagccu

SEQ ID NO: 2617806 - RNA, 19 nt, Homo sapiens
  misc_RNA (1)...(19): siRNA sense strand
agucggaauaugagaaaau

SEQ ID NO: 2617807 - RNA, 19 nt, Homo sapiens
  misc_RNA (1)...(19): siRNA sense strand
cggaauaugagaaaaucaa

SEQ ID NO: 2617808 - RNA, 19 nt, Homo sapiens
  misc_RNA (1)...(19): siRNA sense strand
agagucggaauaugagaaa

SEQ ID NO: 2617809 - RNA, 19 nt, Homo sapiens
  misc_RNA (1)...(19): siRNA sense strand
ccuccaaggaagaaaucca

SEQ ID NO: 2617810 - RNA, 19 nt, Homo sapiens
  misc_RNA (1)...(19): siRNA sense strand
gaaauaagaagaagggaca

SEQ ID NO: 2617811 - RNA, 19 nt, Homo sapiens
  misc_RNA (1)...(19): siRNA sense strand
gaaguuaacuguucgggua

SEQ ID NO: 2617812 - RNA, 19 nt, Homo sapiens
  misc_RNA (1)...(19): siRNA sense strand
uugaagaacagcagagaga

SEQ ID NO: 2617813 - RNA, 19 nt, Homo sapiens
  misc_RNA (1)...(19): siRNA sense strand
ggaaauaagaagaagggac

SEQ ID NO: 2617814 - RNA, 19 nt, Homo sapiens
  misc_RNA (1)...(19): siRNA sense strand
cuauauacaaccagcacaa

SEQ ID NO: 2617815 - RNA, 19 nt, Homo sapiens
  misc_RNA (1)...(19): siRNA sense strand
auuaaaugcuuggcagaaa

SEQ ID NO: 2617816 - RNA, 19 nt, Homo sapiens
  misc_RNA (1)...(19): siRNA sense strand
ggaauuacuaugaaggcuu

SEQ ID NO: 2617817 - RNA, 19 nt, Homo sapiens
  misc_RNA (1)...(19): siRNA sense strand
ucaaaguugccaugaacaa

SEQ ID NO: 2617818 - RNA, 19 nt, Homo sapiens
  misc_RNA (1)...(19): siRNA sense strand
gaagaacagcagagagacu

SEQ ID NO: 2617819 - RNA, 19 nt, Homo sapiens
  misc_RNA (1)...(19): siRNA sense strand
cagcagagagacuggauca

SEQ ID NO: 2617820 - RNA, 19 nt, Homo sapiens
  misc_RNA (1)...(19): siRNA sense strand
ggagcaaauauguuggaga

SEQ ID NO: 2617821 - RNA, 19 nt, Homo sapiens
  misc_RNA (1)...(19): siRNA sense strand
gagcaaauauguuggagac

SEQ ID NO: 2617822 - RNA, 19 nt, Homo sapiens
  misc_RNA (1)...(19): siRNA sense strand
augaugauguuguggcaau

SEQ ID NO: 2617823 - RNA, 19 nt, Homo sapiens
  misc_RNA (1)...(19): siRNA sense strand
aggaauaccuggggagauu

SEQ ID NO: 2617824 - RNA, 19 nt, Homo sapiens
  misc_RNA (1)...(19): siRNA sense strand
uuggaaagagucuggaaau

SEQ ID NO: 2617825 - RNA, 19 nt, Homo sapiens
  misc_RNA (1)...(19): siRNA sense strand
ggaugaugauguuguggca

SEQ ID NO: 2617826 - RNA, 19 nt, Homo sapiens
  misc_RNA (1)...(19): siRNA sense strand
cuuccaaauuagaggcugu

SEQ ID NO: 2617827 - RNA, 19 nt, Homo sapiens
  misc_RNA (1)...(19): siRNA sense strand
ccauuaugaucguaaggca

SEQ ID NO: 2617828 - RNA, 19 nt, Homo sapiens
  misc_RNA (1)...(19): siRNA sense strand
aacaggagccuuuggaaau

SEQ ID NO: 2617829 - RNA, 19 nt, Homo sapiens
  misc_RNA (1)...(19): siRNA sense strand
agucuggaaauaagaagaa

SEQ ID NO: 2617830 - RNA, 19 nt, Homo sapiens
  misc_RNA (1)...(19): siRNA sense strand
aauuaugguugaaaggcuu

SEQ ID NO: 2617831 - RNA, 19 nt, Homo sapiens
  misc_RNA (1)...(19): siRNA sense strand
ugauuaaaugcuuggcaga

SEQ ID NO: 2617832 - RNA, 19 nt, Homo sapiens
  misc_RNA (1)...(19): siRNA sense strand
auauacaaccagcacaaua

SEQ ID NO: 2617833 - RNA, 19 nt, Homo sapiens
  misc_RNA (1)...(19): siRNA sense strand
gaagcuaccaauaaggaca

SEQ ID NO: 2617834 - RNA, 19 nt, Homo sapiens
  misc_RNA (1)...(19): siRNA sense strand
gaugagcacuuuugggcua

SEQ ID NO: 2617835 - RNA, 19 nt, Homo sapiens
  misc_RNA (1)...(19): siRNA sense strand
auucuaagguggacccuau

SEQ ID NO: 2617836 - RNA, 19 nt, Homo sapiens
  misc_RNA (1)...(19): siRNA sense strand
caaauauguuggagacggu

SEQ ID NO: 2617837 - RNA, 19 nt, Homo sapiens
  misc_RNA (1)...(19): siRNA sense strand
cuaccaauaaggacaaaca

SEQ ID NO: 2617838 - RNA, 19 nt, Homo sapiens
  misc_RNA (1)...(19): siRNA sense strand
aagucagguaugaaguuaa

SEQ ID NO: 2617839 - RNA, 19 nt, Homo sapiens
  misc_RNA (1)...(19): siRNA sense strand
caauuaugguugaaaggcu

SEQ ID NO: 2617840 - RNA, 19 nt, Homo sapiens
  misc_RNA (1)...(19): siRNA sense strand
gcuuaucaaagauggacau

SEQ ID NO: 2617841 - RNA, 19 nt, Homo sapiens
  misc_RNA (1)...(19): siRNA sense strand
guggcaaugaccagugauu

SEQ ID NO: 2617842 - RNA, 19 nt, Homo sapiens
  misc_RNA (1)...(19): siRNA sense strand
acaauuuagcuaagugcuu

SEQ ID NO: 2617843 - RNA, 19 nt, Homo sapiens
  misc_RNA (1)...(19): siRNA sense strand
ucagauauuuguuggcagu

SEQ ID NO: 2617844 - RNA, 19 nt, Homo sapiens
  misc_RNA (1)...(19): siRNA sense strand
uggcaauaucaaagcauaa

SEQ ID NO: 2617845 - RNA, 19 nt, Homo sapiens
  misc_RNA (1)...(19): siRNA sense strand
agaagaaaagugaagcaaa

SEQ ID NO: 2617846 - RNA, 19 nt, Homo sapiens
  misc_RNA (1)...(19): siRNA sense strand
agauguugccucagauaau

SEQ ID NO: 2617847 - RNA, 19 nt, Homo sapiens
  misc_RNA (1)...(19): siRNA sense strand
cuguuuugguggaggaauu

SEQ ID NO: 2617848 - RNA, 19 nt, Homo sapiens
  misc_RNA (1)...(19): siRNA sense strand
gcaucuucaaucugguaua

SEQ ID NO: 2617849 - RNA, 19 nt, Homo sapiens
  misc_RNA (1)...(19): siRNA sense strand
cugcauuggcauggaagaa

SEQ ID NO: 2617850 - RNA, 19 nt, Homo sapiens
  misc_RNA (1)...(19): siRNA sense strand
gugaccagaacuuggaaaa

SEQ ID NO: 2617851 - RNA, 19 nt, Homo sapiens
  misc_RNA (1)...(19): siRNA sense strand
auuggaaaccagaagguga

SEQ ID NO: 2617852 - RNA, 19 nt, Homo sapiens
  misc_RNA (1)...(19): siRNA sense strand
caugauagcuauuggaugg

SEQ ID NO: 2617853 - RNA, 19 nt, Homo sapiens
  misc_RNA (1)...(19): siRNA sense strand
uuucaucaugugagaagaa

SEQ ID NO: 2617854 - RNA, 19 nt, Homo sapiens
  misc_RNA (1)...(19): siRNA sense strand
ggagagaagcgaagggcaa

SEQ ID NO: 2617855 - RNA, 19 nt, Homo sapiens
  misc_RNA (1)...(19): siRNA sense strand
gguuauagaacuuggccaa

SEQ ID NO: 2617856 - RNA, 19 nt, Homo sapiens
  misc_RNA (1)...(19): siRNA sense strand
agaaacgaaacaagagcaa

SEQ ID NO: 2617857 - RNA, 19 nt, Homo sapiens
  misc_RNA (1)...(19): siRNA sense strand
aguaugacguggagcugau

SEQ ID NO: 2617858 - RNA, 19 nt, Homo sapiens
  misc_RNA (1)...(19): siRNA sense strand
gagcagagucuucucgaca

SEQ ID NO: 2617859 - RNA, 19 nt, Homo sapiens
  misc_RNA (1)...(19): siRNA sense strand
ucgacaugugugugggaga

SEQ ID NO: 2617860 - RNA, 19 nt, Homo sapiens
  misc_RNA (1)...(19): siRNA sense strand
aaggaagagaaacgaaaca

SEQ ID NO: 2617861 - RNA, 19 nt, Homo sapiens
  misc_RNA (1)...(19): siRNA sense strand
cgacaaauaaagagaagaa

SEQ ID NO: 2617862 - RNA, 19 nt, Homo sapiens
  misc_RNA (1)...(19): siRNA sense strand
ugaaauagacagugaugaa

SEQ ID NO: 2617863 - RNA, 19 nt, Homo sapiens
  misc_RNA (1)...(19): siRNA sense strand
cuggaaagacagaccgaaa

SEQ ID NO: 2617864 - RNA, 19 nt, Homo sapiens
  misc_RNA (1)...(19): siRNA sense strand
gaugaagauggaugggaaa

SEQ ID NO: 2617865 - RNA, 19 nt, Homo sapiens
  misc_RNA (1)...(19): siRNA sense strand
ugaugaagauggaugggaa

SEQ ID NO: 2617866 - RNA, 19 nt, Homo sapiens
  misc_RNA (1)...(19): siRNA sense strand
gggaaaugccagaagagga

SEQ ID NO: 2617867 - RNA, 19 nt, Homo sapiens
  misc_RNA (1)...(19): siRNA sense strand
ggaagaaaaccaaaacaaa

SEQ ID NO: 2617868 - RNA, 19 nt, Homo sapiens
  misc_RNA (1)...(19): siRNA sense strand
cuuugaucuugcugagaaa

SEQ ID NO: 2617869 - RNA, 19 nt, Homo sapiens
  misc_RNA (1)...(19): siRNA sense strand
augcaaaacacaagaacaa

SEQ ID NO: 2617870 - RNA, 19 nt, Homo sapiens
  misc_RNA (1)...(19): siRNA sense strand
aguacaagaauauggagaa

SEQ ID NO: 2617871 - RNA, 19 nt, Homo sapiens
  misc_RNA (1)...(19): siRNA sense strand
ucuccagauuggugggaau

SEQ ID NO: 2617872 - RNA, 19 nt, Homo sapiens
  misc_RNA (1)...(19): siRNA sense strand
augaagaacagcaagaaau

SEQ ID NO: 2617873 - RNA, 19 nt, Homo sapiens
  misc_RNA (1)...(19): siRNA sense strand
agcaagaguacaagaauau

SEQ ID NO: 2617874 - RNA, 19 nt, Homo sapiens
  misc_RNA (1)...(19): siRNA sense strand
acauugaaauagacaguga

SEQ ID NO: 2617875 - RNA, 19 nt, Homo sapiens
  misc_RNA (1)...(19): siRNA sense strand
cagaagaaauuccggggua

SEQ ID NO: 2617876 - RNA, 19 nt, Homo sapiens
  misc_RNA (1)...(19): siRNA sense strand
aggcaaugaaagugcucaa

SEQ ID NO: 2617877 - RNA, 19 nt, Homo sapiens
  misc_RNA (1)...(19): siRNA sense strand
ccgaugaagaacagcaaga

SEQ ID NO: 2617878 - RNA, 19 nt, Homo sapiens
  misc_RNA (1)...(19): siRNA sense strand
aaugaaagugcucaagaaa

SEQ ID NO: 2617879 - RNA, 19 nt, Homo sapiens
  misc_RNA (1)...(19): siRNA sense strand
aggagagguuugaagugaa

SEQ ID NO: 2617880 - RNA, 19 nt, Homo sapiens
  misc_RNA (1)...(19): siRNA sense strand
agccaaagucugacaaaga

SEQ ID NO: 2617881 - RNA, 19 nt, Homo sapiens
  misc_RNA (1)...(19): siRNA sense strand
gaguacaagaauauggaga

SEQ ID NO: 2617882 - RNA, 19 nt, Homo sapiens
  misc_RNA (1)...(19): siRNA sense strand
cacaagaacaauaaaguga

SEQ ID NO: 2617883 - RNA, 19 nt, Homo sapiens
  misc_RNA (1)...(19): siRNA sense strand
aguaggaaucaaugcuaua

SEQ ID NO: 2617884 - RNA, 19 nt, Homo sapiens
  misc_RNA (1)...(19): siRNA sense strand
gaugauggaccaacagcaa

SEQ ID NO: 2617885 - RNA, 19 nt, Homo sapiens
  misc_RNA (1)...(19): siRNA sense strand
cuugagugcuguaaggaga

SEQ ID NO: 2617886 - RNA, 19 nt, Homo sapiens
  misc_RNA (1)...(19): siRNA sense strand
agaaagaagagaaugcuga

SEQ ID NO: 2617887 - RNA, 19 nt, Homo sapiens
  misc_RNA (1)...(19): siRNA sense strand
aguugagaaagaagagaau

SEQ ID NO: 2617888 - RNA, 19 nt, Homo sapiens
  misc_RNA (1)...(19): siRNA sense strand
acuccgaaucugaggauga

SEQ ID NO: 2617889 - RNA, 19 nt, Homo sapiens
  misc_RNA (1)...(19): siRNA sense strand
cucagaugcugcagaagaa

SEQ ID NO: 2617890 - RNA, 19 nt, Homo sapiens
  misc_RNA (1)...(19): siRNA sense strand
gcauggcccaaaugagaaa

SEQ ID NO: 2617891 - RNA, 19 nt, Homo sapiens
  misc_RNA (1)...(19): siRNA sense strand
gugacugauaucaagaaua

SEQ ID NO: 2617892 - RNA, 19 nt, Homo sapiens
  misc_RNA (1)...(19): siRNA sense strand
gcauguuucucuaagguca

SEQ ID NO: 2617893 - RNA, 19 nt, Homo sapiens
  misc_RNA (1)...(19): siRNA sense strand
acaauaugcuacagggaag

SEQ ID NO: 2617894 - RNA, 19 nt, Homo sapiens
  misc_RNA (1)...(19): siRNA sense strand
agaagaaauuccgggguaa

SEQ ID NO: 2617895 - RNA, 19 nt, Homo sapiens
  misc_RNA (1)...(19): siRNA sense strand
agaagagaaugcugaaaau

SEQ ID NO: 2617896 - RNA, 19 nt, Homo sapiens
  misc_RNA (1)...(19): siRNA sense strand
ccaaaugagaaaagaacuu

SEQ ID NO: 2617897 - RNA, 19 nt, Homo sapiens
  misc_RNA (1)...(19): siRNA sense strand
uuacauuccaggagcagaa

SEQ ID NO: 2617898 - RNA, 19 nt, Homo sapiens
  misc_RNA (1)...(19): siRNA sense strand
ggccaaagcugcagccauc

SEQ ID NO: 2617899 - RNA, 19 nt, Homo sapiens
  misc_RNA (1)...(19): siRNA sense strand
acccagaguaccuaaguaa

SEQ ID NO: 2617900 - RNA, 19 nt, Homo sapiens
  misc_RNA (1)...(19): siRNA sense strand
cuggagaagucaugacagu

SEQ ID NO: 2617901 - RNA, 19 nt, Homo sapiens
  misc_RNA (1)...(19): siRNA sense strand
uggaaaaggcaaugaaagu

SEQ ID NO: 2617902 - RNA, 19 nt, Homo sapiens
  misc_RNA (1)...(19): siRNA sense strand
aggaagaaaaccaaaacaa

SEQ ID NO: 2617903 - RNA, 19 nt, Homo sapiens
  misc_RNA (1)...(19): siRNA sense strand
agauauuaguugccgcuuu

SEQ ID NO: 2617904 - RNA, 19 nt, Homo sapiens
  misc_RNA (1)...(19): siRNA sense strand
cacaaggauaagaauguaa

SEQ ID NO: 2617905 - RNA, 19 nt, Homo sapiens
  misc_RNA (1)...(19): siRNA sense strand
aaguugagaaagaagagaa

SEQ ID NO: 2617906 - RNA, 19 nt, Homo sapiens
  misc_RNA (1)...(19): siRNA sense strand
uggaggagcggaaggccaa

SEQ ID NO: 2617907 - RNA, 19 nt, Homo sapiens
  misc_RNA (1)...(19): siRNA sense strand
aaagaauuugugaggaaga

SEQ ID NO: 2617908 - RNA, 19 nt, Homo sapiens
  misc_RNA (1)...(19): siRNA sense strand
agucaugacaguaggaauc

SEQ ID NO: 2617909 - RNA, 19 nt, Homo sapiens
  misc_RNA (1)...(19): siRNA sense strand
aagaagagaaugcugaaaa

SEQ ID NO: 2617910 - RNA, 19 nt, Homo sapiens
  misc_RNA (1)...(19): siRNA sense strand
gugaauggauugaugugca

SEQ ID NO: 2617911 - RNA, 19 nt, Homo sapiens
  misc_RNA (1)...(19): siRNA sense strand
aaauagacagugaugaaga

SEQ ID NO: 2617912 - RNA, 19 nt, Homo sapiens
  misc_RNA (1)...(19): siRNA sense strand
acuuuaugaugaugcggua

SEQ ID NO: 2617913 - RNA, 19 nt, Homo sapiens
  misc_RNA (1)...(19): siRNA sense strand
gaauuugugaggaagaaaa

SEQ ID NO: 2617914 - RNA, 19 nt, Homo sapiens
  misc_RNA (1)...(19): siRNA sense strand
agaagcaagaguacaagaa

SEQ ID NO: 2617915 - RNA, 19 nt, Homo sapiens
  misc_RNA (1)...(19): siRNA sense strand
aggaggaugcugaugguga

SEQ ID NO: 2617916 - RNA, 19 nt, Homo sapiens
  misc_RNA (1)...(19): siRNA sense strand
ccaaagucugacaaagaga

SEQ ID NO: 2617917 - RNA, 19 nt, Homo sapiens
  misc_RNA (1)...(19): siRNA sense strand
ggacagugacuccgaaucu

SEQ ID NO: 2617918 - RNA, 19 nt, Homo sapiens
  misc_RNA (1)...(19): siRNA sense strand
cuccauagaagcaagagua

SEQ ID NO: 2617919 - RNA, 19 nt, Homo sapiens
  misc_RNA (1)...(19): siRNA sense strand
ccagaagaggaaauacauu

SEQ ID NO: 2617920 - RNA, 19 nt, Homo sapiens
  misc_RNA (1)...(19): siRNA sense strand
aagaauuugugaggaagaa

SEQ ID NO: 2617921 - RNA, 19 nt, Homo sapiens
  misc_RNA (1)...(19): siRNA sense strand
gggaaaagaaagaggaauu

SEQ ID NO: 2617922 - RNA, 19 nt, Homo sapiens
  misc_RNA (1)...(19): siRNA sense strand
uggccuagugguugggaaa

SEQ ID NO: 2617923 - RNA, 19 nt, Homo sapiens
  misc_RNA (1)...(19): siRNA sense strand
caucaaggagaaagccaaa

SEQ ID NO: 2617924 - RNA, 19 nt, Homo sapiens
  misc_RNA (1)...(19): siRNA sense strand
gaugaagaacguagguaca

SEQ ID NO: 2617925 - RNA, 19 nt, Homo sapiens
  misc_RNA (1)...(19): siRNA sense strand
aggaauuuguacaaggaga

SEQ ID NO: 2617926 - RNA, 19 nt, Homo sapiens
  misc_RNA (1)...(19): siRNA sense strand
agaugaacucgaugaagaa

SEQ ID NO: 2617927 - RNA, 19 nt, Homo sapiens
  misc_RNA (1)...(19): siRNA sense strand
uagaggugcccgagaggaa

SEQ ID NO: 2617928 - RNA, 19 nt, Homo sapiens
  misc_RNA (1)...(19): siRNA sense strand
agaaagaggaauuuguaca

SEQ ID NO: 2617929 - RNA, 19 nt, Homo sapiens
  misc_RNA (1)...(19): siRNA sense strand
ucuacagggugcuggagaa

SEQ ID NO: 2617930 - RNA, 19 nt, Homo sapiens
  misc_RNA (1)...(19): siRNA sense strand
ucagaauacugcagggacu

SEQ ID NO: 2617931 - RNA, 19 nt, Homo sapiens
  misc_RNA (1)...(19): siRNA sense strand
cagcauauuuugaggaagu

SEQ ID NO: 2617932 - RNA, 19 nt, Homo sapiens
  misc_RNA (1)...(19): siRNA sense strand
gguacauagaagaaagcau

SEQ ID NO: 2617933 - RNA, 19 nt, Homo sapiens
  misc_RNA (1)...(19): siRNA sense strand
aggagaaguacaagacuca

SEQ ID NO: 2617934 - RNA, 19 nt, Homo sapiens
  misc_RNA (1)...(19): siRNA sense strand
acguagguacauagaagaa

SEQ ID NO: 2617935 - RNA, 19 nt, Homo sapiens
  misc_RNA (1)...(19): siRNA sense strand
auucaguggauuugcuaua

SEQ ID NO: 2617936 - RNA, 19 nt, Homo sapiens
  misc_RNA (1)...(19): siRNA sense strand
cgacagugagaaagaucau

SEQ ID NO: 2617937 - RNA, 19 nt, Homo sapiens
  misc_RNA (1)...(19): siRNA sense strand
aggagaaagccaaauucaa

SEQ ID NO: 2617938 - RNA, 19 nt, Homo sapiens
  misc_RNA (1)...(19): siRNA sense strand
cauuggagagagugcaaau

SEQ ID NO: 2617939 - RNA, 19 nt, Homo sapiens
  misc_RNA (1)...(19): siRNA sense strand
auguuaaccacuuggauau

SEQ ID NO: 2617940 - RNA, 19 nt, Homo sapiens
  misc_RNA (1)...(19): siRNA sense strand
cuauaaggaccgaguugau

SEQ ID NO: 2617941 - RNA, 19 nt, Homo sapiens
  misc_RNA (1)...(19): siRNA sense strand
gaucaugaauugugguggu

SEQ ID NO: 2617942 - RNA, 19 nt, Homo sapiens
  misc_RNA (1)...(19): siRNA sense strand
aggaaacaagugaagaaaa

SEQ ID NO: 2617943 - RNA, 19 nt, Homo sapiens
  misc_RNA (1)...(19): siRNA sense strand
auuuguacaaggagaagua

SEQ ID NO: 2617944 - RNA, 19 nt, Homo sapiens
  misc_RNA (1)...(19): siRNA sense strand
gugucaucuuugucagaau

SEQ ID NO: 2617945 - RNA, 19 nt, Homo sapiens
  misc_RNA (1)...(19): siRNA sense strand
cuggagaagaagcaagaca

SEQ ID NO: 2617946 - RNA, 19 nt, Homo sapiens
  misc_RNA (1)...(19): siRNA sense strand
caaucgagcugacggagga

SEQ ID NO: 2617947 - RNA, 19 nt, Homo sapiens
  misc_RNA (1)...(19): siRNA sense strand
acuacgacagugagaaaga

SEQ ID NO: 2617948 - RNA, 19 nt, Homo sapiens
  misc_RNA (1)...(19): siRNA sense strand
ucacauagcuauaaggacc

SEQ ID NO: 2617949 - RNA, 19 nt, Homo sapiens
  misc_RNA (1)...(19): siRNA sense strand
ucaucaaggagaaagccaa

SEQ ID NO: 2617950 - RNA, 19 nt, Homo sapiens
  misc_RNA (1)...(19): siRNA sense strand
uagaagaaagcauuggaga

SEQ ID NO: 2617951 - RNA, 19 nt, Homo sapiens
  misc_RNA (1)...(19): siRNA sense strand
ccaguaucuuaaugggcau

SEQ ID NO: 2617952 - RNA, 19 nt, Homo sapiens
  misc_RNA (1)...(19): siRNA sense strand
ggaaaagaggggcuaaaga

SEQ ID NO: 2617953 - RNA, 19 nt, Homo sapiens
  misc_RNA (1)...(19): siRNA sense strand
gagaggaguagacuggcaa

SEQ ID NO: 2617954 - RNA, 19 nt, Homo sapiens
  misc_RNA (1)...(19): siRNA sense strand
gagaaguacaagacucaca

SEQ ID NO: 2617955 - RNA, 19 nt, Homo sapiens
  misc_RNA (1)...(19): siRNA sense strand
caauauuugccucaggaga

SEQ ID NO: 2617956 - RNA, 19 nt, Homo sapiens
  misc_RNA (1)...(19): siRNA sense strand
caugaauuguggugguuuu

SEQ ID NO: 2617957 - RNA, 19 nt, Homo sapiens
  misc_RNA (1)...(19): siRNA sense strand
gcuccuggucguuggcuau

SEQ ID NO: 2617958 - RNA, 19 nt, Homo sapiens
  misc_RNA (1)...(19): siRNA sense strand
ugguacuugcagugggauu

SEQ ID NO: 2617959 - RNA, 19 nt, Homo sapiens
  misc_RNA (1)...(19): siRNA sense strand
ugaagaugaacucgaugaa

SEQ ID NO: 2617960 - RNA, 19 nt, Homo sapiens
  misc_RNA (1)...(19): siRNA sense strand
gaagagagaagaugggcua

SEQ ID NO: 2617961 - RNA, 19 nt, Homo sapiens
  misc_RNA (1)...(19): siRNA sense strand
cagaauaccuccagccaga

SEQ ID NO: 2617962 - RNA, 19 nt, Homo sapiens
  misc_RNA (1)...(19): siRNA sense strand
acuaaagaauucaucgaga

SEQ ID NO: 2617963 - RNA, 19 nt, Homo sapiens
  misc_RNA (1)...(19): siRNA sense strand
agagagaagaugggcuaaa

SEQ ID NO: 2617964 - RNA, 19 nt, Homo sapiens
  misc_RNA (1)...(19): siRNA sense strand
ugagacgggaauagaacaa

SEQ ID NO: 2617965 - RNA, 19 nt, Homo sapiens
  misc_RNA (1)...(19): siRNA sense strand
gggaagaaauggcagagac

SEQ ID NO: 2617966 - RNA, 19 nt, Homo sapiens
  misc_RNA (1)...(19): siRNA sense strand
cccucaucauggugggauu

SEQ ID NO: 2617967 - RNA, 19 nt, Homo sapiens
  misc_RNA (1)...(19): siRNA sense strand
acuguguaggcgagaacaa

SEQ ID NO: 2617968 - RNA, 19 nt, Homo sapiens
  misc_RNA (1)...(19): siRNA sense strand
uuugaagaagauuggacaa

SEQ ID NO: 2617969 - RNA, 19 nt, Homo sapiens
  misc_RNA (1)...(19): siRNA sense strand
aggaagagcuggaggacag

SEQ ID NO: 2617970 - RNA, 19 nt, Homo sapiens
  misc_RNA (1)...(19): siRNA sense strand
gugacuacuugcagggcuu

SEQ ID NO: 2617971 - RNA, 19 nt, Homo sapiens
  misc_RNA (1)...(19): siRNA sense strand
gauggugucuggaggguca

SEQ ID NO: 2617972 - RNA, 19 nt, Homo sapiens
  misc_RNA (1)...(19): siRNA sense strand
ccacacacaaagaggaacu

SEQ ID NO: 2617973 - RNA, 19 nt, Homo sapiens
  misc_RNA (1)...(19): siRNA sense strand
ggguauagacagagcaugc

SEQ ID NO: 2617974 - RNA, 19 nt, Homo sapiens
  misc_RNA (1)...(19): siRNA sense strand
ucacacugcaguugggaca

SEQ ID NO: 2617975 - RNA, 19 nt, Homo sapiens
  misc_RNA (1)...(19): siRNA sense strand
ggggaggcccagagaaaca

SEQ ID NO: 2617976 - RNA, 19 nt, Homo sapiens
  misc_RNA (1)...(19): siRNA sense strand
gguggacucuacagggaca

SEQ ID NO: 2617977 - RNA, 19 nt, Homo sapiens
  misc_RNA (1)...(19): siRNA sense strand
caccacacacaaagaggaa

SEQ ID NO: 2617978 - RNA, 19 nt, Homo sapiens
  misc_RNA (1)...(19): siRNA sense strand
agagaaacaucuaucgucu

SEQ ID NO: 2617979 - RNA, 19 nt, Homo sapiens
  misc_RNA (1)...(19): siRNA sense strand
aggaugaacuggcgggugu

SEQ ID NO: 2617980 - RNA, 19 nt, Homo sapiens
  misc_RNA (1)...(19): siRNA sense strand
ugauugagaagaagcggaa

SEQ ID NO: 2617981 - RNA, 19 nt, Homo sapiens
  misc_RNA (1)...(19): siRNA sense strand
ggaaagacgccucagccuu

SEQ ID NO: 2617982 - RNA, 19 nt, Homo sapiens
  misc_RNA (1)...(19): siRNA sense strand
auugagaagaagcggaaaa

SEQ ID NO: 2617983 - RNA, 19 nt, Homo sapiens
  misc_RNA (1)...(19): siRNA sense strand
ugaacuuucuggaggggaa

SEQ ID NO: 2617984 - RNA, 19 nt, Homo sapiens
  misc_RNA (1)...(19): siRNA sense strand
gaugagaguucgugggcca

SEQ ID NO: 2617985 - RNA, 19 nt, Homo sapiens
  misc_RNA (1)...(19): siRNA sense strand
gacaagagcuggaggugca

SEQ ID NO: 2617986 - RNA, 19 nt, Homo sapiens
  misc_RNA (1)...(19): siRNA sense strand
acuuaguucaguuggacaa

SEQ ID NO: 2617987 - RNA, 19 nt, Homo sapiens
  misc_RNA (1)...(19): siRNA sense strand
caggaaugccuaucggaca

SEQ ID NO: 2617988 - RNA, 19 nt, Homo sapiens
  misc_RNA (1)...(19): siRNA sense strand
cugcaggugaaauggaaaa

SEQ ID NO: 2617989 - RNA, 19 nt, Homo sapiens
  misc_RNA (1)...(19): siRNA sense strand
cauacauguucuucagcau

SEQ ID NO: 2617990 - RNA, 19 nt, Homo sapiens
  misc_RNA (1)...(19): siRNA sense strand
cugaacagccugcagguga

SEQ ID NO: 2617991 - RNA, 19 nt, Homo sapiens
  misc_RNA (1)...(19): siRNA sense strand
agaugaaagccaugauuuu

SEQ ID NO: 2617992 - RNA, 19 nt, Homo sapiens
  misc_RNA (1)...(19): siRNA sense strand
gcauccaaaaugagaagaa

SEQ ID NO: 2617993 - RNA, 19 nt, Homo sapiens
  misc_RNA (1)...(19): siRNA sense strand
uuguaugggccgagaaauc

SEQ ID NO: 2617994 - RNA, 19 nt, Homo sapiens
  misc_RNA (1)...(19): siRNA sense strand
gaugugaagaugaaagcca

SEQ ID NO: 2617995 - RNA, 19 nt, Homo sapiens
  misc_RNA (1)...(19): siRNA sense strand
cggcaaaugcugaggaaga

SEQ ID NO: 2617996 - RNA, 19 nt, Homo sapiens
  misc_RNA (1)...(19): siRNA sense strand
agaagaaagcauagaagaa

SEQ ID NO: 2617997 - RNA, 19 nt, Homo sapiens
  misc_RNA (1)...(19): siRNA sense strand
gaggaagagcagagaguau

SEQ ID NO: 2617998 - RNA, 19 nt, Homo sapiens
  misc_RNA (1)...(19): siRNA sense strand
gcuagaagagagagagaga

SEQ ID NO: 2617999 - RNA, 19 nt, Homo sapiens
  misc_RNA (1)...(19): siRNA sense strand
ugacagaacucaaagccaa

SEQ ID NO: 2618000 - RNA, 19 nt, Homo sapiens
  misc_RNA (1)...(19): siRNA sense strand
ccaagaagcagguggacga

SEQ ID NO: 2618001 - RNA, 19 nt, Homo sapiens
  misc_RNA (1)...(19): siRNA sense strand
ucaaggaggcugagugcaa

SEQ ID NO: 2618002 - RNA, 19 nt, Homo sapiens
  misc_RNA (1)...(19): siRNA sense strand
gguagaagauaaacaacuu

SEQ ID NO: 2618003 - RNA, 19 nt, Homo sapiens
  misc_RNA (1)...(19): siRNA sense strand
agaagaaguuccaagccaa

SEQ ID NO: 2618004 - RNA, 19 nt, Homo sapiens
  misc_RNA (1)...(19): siRNA sense strand
ggagagauccagaggcuca

SEQ ID NO: 2618005 - RNA, 19 nt, Homo sapiens
  misc_RNA (1)...(19): siRNA sense strand
gugcuaagguauaaagcca

SEQ ID NO: 2618006 - RNA, 19 nt, Homo sapiens
  misc_RNA (1)...(19): siRNA sense strand
gagcuagaagagagagaga

SEQ ID NO: 2618007 - RNA, 19 nt, Homo sapiens
  misc_RNA (1)...(19): siRNA sense strand
gcuaaugaagaacaagaaa

SEQ ID NO: 2618008 - RNA, 19 nt, Homo sapiens
  misc_RNA (1)...(19): siRNA sense strand
cgacggcagcagugacaaa

SEQ ID NO: 2618009 - RNA, 19 nt, Homo sapiens
  misc_RNA (1)...(19): siRNA sense strand
gaaaauuagaagacaggaa

SEQ ID NO: 2618010 - RNA, 19 nt, Homo sapiens
  misc_RNA (1)...(19): siRNA sense strand
ccaagcuaaugaagaacaa

SEQ ID NO: 2618011 - RNA, 19 nt, Homo sapiens
  misc_RNA (1)...(19): siRNA sense strand
agaaaagaguaaccgaaaa

SEQ ID NO: 2618012 - RNA, 19 nt, Homo sapiens
  misc_RNA (1)...(19): siRNA sense strand
ggaugaaaguuuagcagcu

SEQ ID NO: 2618013 - RNA, 19 nt, Homo sapiens
  misc_RNA (1)...(19): siRNA sense strand
gcucagaaagggcaggauu

SEQ ID NO: 2618014 - RNA, 19 nt, Homo sapiens
  misc_RNA (1)...(19): siRNA sense strand
cacacuggguagaagauaa

SEQ ID NO: 2618015 - RNA, 19 nt, Homo sapiens
  misc_RNA (1)...(19): siRNA sense strand
gcaauaugauccaagcaga

SEQ ID NO: 2618016 - RNA, 19 nt, Homo sapiens
  misc_RNA (1)...(19): siRNA sense strand
cgggauauucggaggcuga

SEQ ID NO: 2618017 - RNA, 19 nt, Homo sapiens
  misc_RNA (1)...(19): siRNA sense strand
acacuggguagaagauaaa

SEQ ID NO: 2618018 - RNA, 19 nt, Homo sapiens
  misc_RNA (1)...(19): siRNA sense strand
aagaacuagacuacagaaa

SEQ ID NO: 2618019 - RNA, 19 nt, Homo sapiens
  misc_RNA (1)...(19): siRNA sense strand
gguacgugauggagagauc

SEQ ID NO: 2618020 - RNA, 19 nt, Homo sapiens
  misc_RNA (1)...(19): siRNA sense strand
agaaggaggcuuuggacga

SEQ ID NO: 2618021 - RNA, 19 nt, Homo sapiens
  misc_RNA (1)...(19): siRNA sense strand
aaguuuagcagcugaagaa

SEQ ID NO: 2618022 - RNA, 19 nt, Homo sapiens
  misc_RNA (1)...(19): siRNA sense strand
aaggcuaucuggaggaaga

SEQ ID NO: 2618023 - RNA, 19 nt, Homo sapiens
  misc_RNA (1)...(19): siRNA sense strand
uccaagaaagggcgaaaua

SEQ ID NO: 2618024 - RNA, 19 nt, Homo sapiens
  misc_RNA (1)...(19): siRNA sense strand
augaagaacaagaaacaga

SEQ ID NO: 2618025 - RNA, 19 nt, Homo sapiens
  misc_RNA (1)...(19): siRNA sense strand
ugaacuaagauuucgacaa

SEQ ID NO: 2618026 - RNA, 19 nt, Homo sapiens
  misc_RNA (1)...(19): siRNA sense strand
uggaugaaaucaaagccaa

SEQ ID NO: 2618027 - RNA, 19 nt, Homo sapiens
  misc_RNA (1)...(19): siRNA sense strand
uggaaagugacauggaaca

SEQ ID NO: 2618028 - RNA, 19 nt, Homo sapiens
  misc_RNA (1)...(19): siRNA sense strand
cgaagaaaucaaaagagaa

SEQ ID NO: 2618029 - RNA, 19 nt, Homo sapiens
  misc_RNA (1)...(19): siRNA sense strand
gaacauuauugaugagcuc

SEQ ID NO: 2618030 - RNA, 19 nt, Homo sapiens
  misc_RNA (1)...(19): siRNA sense strand
augaagaacaaguggccau

SEQ ID NO: 2618031 - RNA, 19 nt, Homo sapiens
  misc_RNA (1)...(19): siRNA sense strand
cucaagaagcgaagaggau

SEQ ID NO: 2618032 - RNA, 19 nt, Homo sapiens
  misc_RNA (1)...(19): siRNA sense strand
ccgguuacaacaagaacua

SEQ ID NO: 2618033 - RNA, 19 nt, Homo sapiens
  misc_RNA (1)...(19): siRNA sense strand
ucgaagaucaagugggagu

SEQ ID NO: 2618034 - RNA, 19 nt, Homo sapiens
  misc_RNA (1)...(19): siRNA sense strand
caauaugauccaagcagau

SEQ ID NO: 2618035 - RNA, 19 nt, Homo sapiens
  misc_RNA (1)...(19): siRNA sense strand
aagaaagcauagaagaagu

SEQ ID NO: 2618036 - RNA, 19 nt, Homo sapiens
  misc_RNA (1)...(19): siRNA sense strand
aguccugauuugcgaagaa

SEQ ID NO: 2618037 - RNA, 19 nt, Homo sapiens
  misc_RNA (1)...(19): siRNA sense strand
aagaaaagaguaaccgaaa

SEQ ID NO: 2618038 - RNA, 19 nt, Homo sapiens
  misc_RNA (1)...(19): siRNA sense strand
aagaacagcuccaagcaga

SEQ ID NO: 2618039 - RNA, 19 nt, Homo sapiens
  misc_RNA (1)...(19): siRNA sense strand
ggguagaagauaaacaacu

SEQ ID NO: 2618040 - RNA, 19 nt, Homo sapiens
  misc_RNA (1)...(19): siRNA sense strand
cugcaggcugugagggaga

SEQ ID NO: 2618041 - RNA, 19 nt, Homo sapiens
  misc_RNA (1)...(19): siRNA sense strand
agagaauagcugaauugaa

SEQ ID NO: 2618042 - RNA, 19 nt, Homo sapiens
  misc_RNA (1)...(19): siRNA sense strand
cugcaaaauaaaaggcuau

SEQ ID NO: 2618043 - RNA, 19 nt, Homo sapiens
  misc_RNA (1)...(19): siRNA sense strand
aggagaagaugaaggagcu

SEQ ID NO: 2618044 - RNA, 19 nt, Homo sapiens
  misc_RNA (1)...(19): siRNA sense strand
ggaacaagugccucgccaa

SEQ ID NO: 2618045 - RNA, 19 nt, Homo sapiens
  misc_RNA (1)...(19): siRNA sense strand
ugaaggagcugcaggcugu

SEQ ID NO: 2618046 - RNA, 19 nt, Homo sapiens
  misc_RNA (1)...(19): siRNA sense strand
ggugaagguacgugaugga

SEQ ID NO: 2618047 - RNA, 19 nt, Homo sapiens
  misc_RNA (1)...(19): siRNA sense strand
acuucaggucauugagcaa

SEQ ID NO: 2618048 - RNA, 19 nt, Homo sapiens
  misc_RNA (1)...(19): siRNA sense strand
ucauugagcaacagaacau

SEQ ID NO: 2618049 - RNA, 19 nt, Homo sapiens
  misc_RNA (1)...(19): siRNA sense strand
cguagaagaaagcauagaa

SEQ ID NO: 2618050 - RNA, 19 nt, Homo sapiens
  misc_RNA (1)...(19): siRNA sense strand
agacagaacaccagcuacu

SEQ ID NO: 2618051 - RNA, 19 nt, Homo sapiens
  misc_RNA (1)...(19): siRNA sense strand
cugaugaugacuuggauga

SEQ ID NO: 2618052 - RNA, 19 nt, Homo sapiens
  misc_RNA (1)...(19): siRNA sense strand
gggugauaaugggaauuua

SEQ ID NO: 2618053 - RNA, 19 nt, Homo sapiens
  misc_RNA (1)...(19): siRNA sense strand
cugaggaagagcagagagu

SEQ ID NO: 2618054 - RNA, 19 nt, Homo sapiens
  misc_RNA (1)...(19): siRNA sense strand
gggcgaaauaagggcgaga

SEQ ID NO: 2618055 - RNA, 19 nt, Homo sapiens
  misc_RNA (1)...(19): siRNA sense strand
gguuacaacaagaacuaca

SEQ ID NO: 2618056 - RNA, 19 nt, Homo sapiens
  misc_RNA (1)...(19): siRNA sense strand
cagcaagcccaucagagaa

SEQ ID NO: 2618057 - RNA, 19 nt, Homo sapiens
  misc_RNA (1)...(19): siRNA sense strand
cggcaaaugcugaggaaga

SEQ ID NO: 2618058 - RNA, 19 nt, Homo sapiens
  misc_RNA (1)...(19): siRNA sense strand
agaagaaagcauagaagaa

SEQ ID NO: 2618059 - RNA, 19 nt, Homo sapiens
  misc_RNA (1)...(19): siRNA sense strand
gaggaagagcagagaguau

SEQ ID NO: 2618060 - RNA, 19 nt, Homo sapiens
  misc_RNA (1)...(19): siRNA sense strand
gcuagaagagagagagaga

SEQ ID NO: 2618061 - RNA, 19 nt, Homo sapiens
  misc_RNA (1)...(19): siRNA sense strand
ugacagaacucaaagccaa

SEQ ID NO: 2618062 - RNA, 19 nt, Homo sapiens
  misc_RNA (1)...(19): siRNA sense strand
ccaagaagcagguggacga

SEQ ID NO: 2618063 - RNA, 19 nt, Homo sapiens
  misc_RNA (1)...(19): siRNA sense strand
ucaaggaggcugagugcaa

SEQ ID NO: 2618064 - RNA, 19 nt, Homo sapiens
  misc_RNA (1)...(19): siRNA sense strand
gguagaagauaaacaacuu

SEQ ID NO: 2618065 - RNA, 19 nt, Homo sapiens
  misc_RNA (1)...(19): siRNA sense strand
agaagaaguuccaagccaa

SEQ ID NO: 2618066 - RNA, 19 nt, Homo sapiens
  misc_RNA (1)...(19): siRNA sense strand
ggagagauccagaggcuca

SEQ ID NO: 2618067 - RNA, 19 nt, Homo sapiens
  misc_RNA (1)...(19): siRNA sense strand
gugcuaagguauaaagcca

SEQ ID NO: 2618068 - RNA, 19 nt, Homo sapiens
  misc_RNA (1)...(19): siRNA sense strand
gagcuagaagagagagaga

SEQ ID NO: 2618069 - RNA, 19 nt, Homo sapiens
  misc_RNA (1)...(19): siRNA sense strand
gcuaaugaagaacaagaaa

SEQ ID NO: 2618070 - RNA, 19 nt, Homo sapiens
  misc_RNA (1)...(19): siRNA sense strand
cgacggcagcagugacaaa

SEQ ID NO: 2618071 - RNA, 19 nt, Homo sapiens
  misc_RNA (1)...(19): siRNA sense strand
gaaaauuagaagacaggaa

SEQ ID NO: 2618072 - RNA, 19 nt, Homo sapiens
  misc_RNA (1)...(19): siRNA sense strand
ccaagcuaaugaagaacaa

SEQ ID NO: 2618073 - RNA, 19 nt, Homo sapiens
  misc_RNA (1)...(19): siRNA sense strand
agaaaagaguaaccgaaaa

SEQ ID NO: 2618074 - RNA, 19 nt, Homo sapiens
  misc_RNA (1)...(19): siRNA sense strand
ggaugaaaguuuagcagcu

SEQ ID NO: 2618075 - RNA, 19 nt, Homo sapiens
  misc_RNA (1)...(19): siRNA sense strand
gcucagaaagggcaggauu

SEQ ID NO: 2618076 - RNA, 19 nt, Homo sapiens
  misc_RNA (1)...(19): siRNA sense strand
cacacuggguagaagauaa

SEQ ID NO: 2618077 - RNA, 19 nt, Homo sapiens
  misc_RNA (1)...(19): siRNA sense strand
gcaauaugauccaagcaga

SEQ ID NO: 2618078 - RNA, 19 nt, Homo sapiens
  misc_RNA (1)...(19): siRNA sense strand
cgggauauucggaggcuga

SEQ ID NO: 2618079 - RNA, 19 nt, Homo sapiens
  misc_RNA (1)...(19): siRNA sense strand
acacuggguagaagauaaa

SEQ ID NO: 2618080 - RNA, 19 nt, Homo sapiens
  misc_RNA (1)...(19): siRNA sense strand
aagaacuagacuacagaaa

SEQ ID NO: 2618081 - RNA, 19 nt, Homo sapiens
  misc_RNA (1)...(19): siRNA sense strand
gguacgugauggagagauc

SEQ ID NO: 2618082 - RNA, 19 nt, Homo sapiens
  misc_RNA (1)...(19): siRNA sense strand
agaaggaggcuuuggacga

SEQ ID NO: 2618083 - RNA, 19 nt, Homo sapiens
  misc_RNA (1)...(19): siRNA sense strand
aaguuuagcagcugaagaa

SEQ ID NO: 2618084 - RNA, 19 nt, Homo sapiens
  misc_RNA (1)...(19): siRNA sense strand
aaggcuaucuggaggaaga

SEQ ID NO: 2618085 - RNA, 19 nt, Homo sapiens
  misc_RNA (1)...(19): siRNA sense strand
uccaagaaagggcgaaaua

SEQ ID NO: 2618086 - RNA, 19 nt, Homo sapiens
  misc_RNA (1)...(19): siRNA sense strand
augaagaacaagaaacaga

SEQ ID NO: 2618087 - RNA, 19 nt, Homo sapiens
  misc_RNA (1)...(19): siRNA sense strand
ugaacuaagauuucgacaa

SEQ ID NO: 2618088 - RNA, 19 nt, Homo sapiens
  misc_RNA (1)...(19): siRNA sense strand
uggaugaaaucaaagccaa

SEQ ID NO: 2618089 - RNA, 19 nt, Homo sapiens
  misc_RNA (1)...(19): siRNA sense strand
uggaaagugacauggaaca

SEQ ID NO: 2618090 - RNA, 19 nt, Homo sapiens
  misc_RNA (1)...(19): siRNA sense strand
cgaagaaaucaaaagagaa

SEQ ID NO: 2618091 - RNA, 19 nt, Homo sapiens
  misc_RNA (1)...(19): siRNA sense strand
gaacauuauugaugagcuc

SEQ ID NO: 2618092 - RNA, 19 nt, Homo sapiens
  misc_RNA (1)...(19): siRNA sense strand
augaagaacaaguggccau

SEQ ID NO: 2618093 - RNA, 19 nt, Homo sapiens
  misc_RNA (1)...(19): siRNA sense strand
cucaagaagcgaagaggau

SEQ ID NO: 2618094 - RNA, 19 nt, Homo sapiens
  misc_RNA (1)...(19): siRNA sense strand
ccgguuacaacaagaacua

SEQ ID NO: 2618095 - RNA, 19 nt, Homo sapiens
  misc_RNA (1)...(19): siRNA sense strand
ucgaagaucaagugggagu

SEQ ID NO: 2618096 - RNA, 19 nt, Homo sapiens
  misc_RNA (1)...(19): siRNA sense strand
caauaugauccaagcagau

SEQ ID NO: 2618097 - RNA, 19 nt, Homo sapiens
  misc_RNA (1)...(19): siRNA sense strand
aagaaagcauagaagaagu

SEQ ID NO: 2618098 - RNA, 19 nt, Homo sapiens
  misc_RNA (1)...(19): siRNA sense strand
aguccugauuugcgaagaa

SEQ ID NO: 2618099 - RNA, 19 nt, Homo sapiens
  misc_RNA (1)...(19): siRNA sense strand
aagaaaagaguaaccgaaa

SEQ ID NO: 2618100 - RNA, 19 nt, Homo sapiens
  misc_RNA (1)...(19): siRNA sense strand
aagaacagcuccaagcaga

SEQ ID NO: 2618101 - RNA, 19 nt, Homo sapiens
  misc_RNA (1)...(19): siRNA sense strand
ggguagaagauaaacaacu

SEQ ID NO: 2618102 - RNA, 19 nt, Homo sapiens
  misc_RNA (1)...(19): siRNA sense strand
cugcaggcugugagggaga

SEQ ID NO: 2618103 - RNA, 19 nt, Homo sapiens
  misc_RNA (1)...(19): siRNA sense strand
agagaauagcugaauugaa

SEQ ID NO: 2618104 - RNA, 19 nt, Homo sapiens
  misc_RNA (1)...(19): siRNA sense strand
cugcaaaauaaaaggcuau

SEQ ID NO: 2618105 - RNA, 19 nt, Homo sapiens
  misc_RNA (1)...(19): siRNA sense strand
aggagaagaugaaggagcu

SEQ ID NO: 2618106 - RNA, 19 nt, Homo sapiens
  misc_RNA (1)...(19): siRNA sense strand
ugaaggagcugcaggcugu

SEQ ID NO: 2618107 - RNA, 19 nt, Homo sapiens
  misc_RNA (1)...(19): siRNA sense strand
ggugaagguacgugaugga

SEQ ID NO: 2618108 - RNA, 19 nt, Homo sapiens
  misc_RNA (1)...(19): siRNA sense strand
acuucaggucauugagcaa

SEQ ID NO: 2618109 - RNA, 19 nt, Homo sapiens
  misc_RNA (1)...(19): siRNA sense strand
ucauugagcaacagaacau

SEQ ID NO: 2618110 - RNA, 19 nt, Homo sapiens
  misc_RNA (1)...(19): siRNA sense strand
cguagaagaaagcauagaa

SEQ ID NO: 2618111 - RNA, 19 nt, Homo sapiens
  misc_RNA (1)...(19): siRNA sense strand
agacagaacaccagcuacu

SEQ ID NO: 2618112 - RNA, 19 nt, Homo sapiens
  misc_RNA (1)...(19): siRNA sense strand
cugaugaugacuuggauga

SEQ ID NO: 2618113 - RNA, 19 nt, Homo sapiens
  misc_RNA (1)...(19): siRNA sense strand
gggugauaaugggaauuua

SEQ ID NO: 2618114 - RNA, 19 nt, Homo sapiens
  misc_RNA (1)...(19): siRNA sense strand
cugaggaagagcagagagu

SEQ ID NO: 2618115 - RNA, 19 nt, Homo sapiens
  misc_RNA (1)...(19): siRNA sense strand
gggcgaaauaagggcgaga

SEQ ID NO: 2618116 - RNA, 19 nt, Homo sapiens
  misc_RNA (1)...(19): siRNA sense strand
gguuacaacaagaacuaca

SEQ ID NO: 2618117 - RNA, 19 nt, Homo sapiens
  misc_RNA (1)...(19): siRNA sense strand
cagcaagcccaucagagaa

SEQ ID NO: 2618118 - RNA, 19 nt, Homo sapiens
  misc_RNA (1)...(19): siRNA sense strand
gcgaaauaagggcgagaag

SEQ ID NO: 2618119 - RNA, 19 nt, Homo sapiens
  misc_RNA (1)...(19): siRNA sense strand
caguauaucaacaggaaau

SEQ ID NO: 2618120 - RNA, 19 nt, Homo sapiens
  misc_RNA (1)...(19): siRNA sense strand
aaccaaaggacuagagaau

SEQ ID NO: 2618121 - RNA, 19 nt, Homo sapiens
  misc_RNA (1)...(19): siRNA sense strand
agagaagguucaugagaga

SEQ ID NO: 2618122 - RNA, 19 nt, Homo sapiens
  misc_RNA (1)...(19): siRNA sense strand
caggaauauuuguaagcaa

SEQ ID NO: 2618123 - RNA, 19 nt, Homo sapiens
  misc_RNA (1)...(19): siRNA sense strand
cuacagagagugaaggcaa

SEQ ID NO: 2618124 - RNA, 19 nt, Homo sapiens
  misc_RNA (1)...(19): siRNA sense strand
ggacuagagaauuggaaga

SEQ ID NO: 2618125 - RNA, 19 nt, Homo sapiens
  misc_RNA (1)...(19): siRNA sense strand
gguuauuacagcaaagaau

SEQ ID NO: 2618126 - RNA, 19 nt, Homo sapiens
  misc_RNA (1)...(19): siRNA sense strand
gauaaaugauggaggaccu

SEQ ID NO: 2618127 - RNA, 19 nt, Homo sapiens
  misc_RNA (1)...(19): siRNA sense strand
augcauucggugaggguaa

SEQ ID NO: 2618128 - RNA, 19 nt, Homo sapiens
  misc_RNA (1)...(19): siRNA sense strand
uggaaaucuucaagccuua

SEQ ID NO: 2618129 - RNA, 19 nt, Homo sapiens
  misc_RNA (1)...(19): siRNA sense strand
aguaaugugugaaggauca

SEQ ID NO: 2618130 - RNA, 19 nt, Homo sapiens
  misc_RNA (1)...(19): siRNA sense strand
uggauauuguggaaguaaa

SEQ ID NO: 2618131 - RNA, 19 nt, Homo sapiens
  misc_RNA (1)...(19): siRNA sense strand
cauuaaacagugugugauu

SEQ ID NO: 2618132 - RNA, 19 nt, Homo sapiens
  misc_RNA (1)...(19): siRNA sense strand
cuuaauagcaacaacacaa

SEQ ID NO: 2618133 - RNA, 19 nt, Homo sapiens
  misc_RNA (1)...(19): siRNA sense strand
ggucagugaagauaugaaa

SEQ ID NO: 2618134 - RNA, 19 nt, Homo sapiens
  misc_RNA (1)...(19): siRNA sense strand
ccuaaagauaccuucgaaa

SEQ ID NO: 2618135 - RNA, 19 nt, Homo sapiens
  misc_RNA (1)...(19): siRNA sense strand
cuagagaauuggaagagau

SEQ ID NO: 2618136 - RNA, 19 nt, Homo sapiens
  misc_RNA (1)...(19): siRNA sense strand
cugcagaauuucaggaucu

SEQ ID NO: 2618137 - RNA, 19 nt, Homo sapiens
  misc_RNA (1)...(19): siRNA sense strand
acugcaaguuguuggacua

SEQ ID NO: 2618138 - RNA, 19 nt, Homo sapiens
  misc_RNA (1)...(19): siRNA sense strand
caagaaaagcugagccauu

SEQ ID NO: 2618139 - RNA, 19 nt, Homo sapiens
  misc_RNA (1)...(19): siRNA sense strand
uaauacugcugguggaaaa

SEQ ID NO: 2618140 - RNA, 19 nt, Homo sapiens
  misc_RNA (1)...(19): siRNA sense strand
agaagaggaaagacuaaua

SEQ ID NO: 2618141 - RNA, 19 nt, Homo sapiens
  misc_RNA (1)...(19): siRNA sense strand
uuauauagugccucagaua

SEQ ID NO: 2618142 - RNA, 19 nt, Homo sapiens
  misc_RNA (1)...(19): siRNA sense strand
ggagcaaguaccuaagauu

SEQ ID NO: 2618143 - RNA, 19 nt, Homo sapiens
  misc_RNA (1)...(19): siRNA sense strand
ucucucaguucuugacaaa

SEQ ID NO: 2618144 - RNA, 19 nt, Homo sapiens
  misc_RNA (1)...(19): siRNA sense strand
acagaagaaugcugcaaaa

SEQ ID NO: 2618145 - RNA, 19 nt, Homo sapiens
  misc_RNA (1)...(19): siRNA sense strand
uugcagaucagaugagaau

SEQ ID NO: 2618146 - RNA, 19 nt, Homo sapiens
  misc_RNA (1)...(19): siRNA sense strand
gagaauuggaagagauuuc

SEQ ID NO: 2618147 - RNA, 19 nt, Homo sapiens
  misc_RNA (1)...(19): siRNA sense strand
guucaugagagaugcaaga

SEQ ID NO: 2618148 - RNA, 19 nt, Homo sapiens
  misc_RNA (1)...(19): siRNA sense strand
ucaaaguugcuucaagaaa

SEQ ID NO: 2618149 - RNA, 19 nt, Homo sapiens
  misc_RNA (1)...(19): siRNA sense strand
cuacaguacagguguuauu

SEQ ID NO: 2618150 - RNA, 19 nt, Homo sapiens
  misc_RNA (1)...(19): siRNA sense strand
gaucauaucacuaaggacu

SEQ ID NO: 2618151 - RNA, 19 nt, Homo sapiens
  misc_RNA (1)...(19): siRNA sense strand
ugugauaaaugauggagga

SEQ ID NO: 2618152 - RNA, 19 nt, Homo sapiens
  misc_RNA (1)...(19): siRNA sense strand
ggacuuaauagcaacaaca

SEQ ID NO: 2618153 - RNA, 19 nt, Homo sapiens
  misc_RNA (1)...(19): siRNA sense strand
cuuucuagauuaaugggaa

SEQ ID NO: 2618154 - RNA, 19 nt, Homo sapiens
  misc_RNA (1)...(19): siRNA sense strand
agaaaggaaaccagcugaa

SEQ ID NO: 2618155 - RNA, 19 nt, Homo sapiens
  misc_RNA (1)...(19): siRNA sense strand
gagugaaggcaacauuaaa

SEQ ID NO: 2618156 - RNA, 19 nt, Homo sapiens
  misc_RNA (1)...(19): siRNA sense strand
ggguaagcuaacaccuaua

SEQ ID NO: 2618157 - RNA, 19 nt, Homo sapiens
  misc_RNA (1)...(19): siRNA sense strand
agauauaugccaugaucga

SEQ ID NO: 2618158 - RNA, 19 nt, Homo sapiens
  misc_RNA (1)...(19): siRNA sense strand
cauuaaacgauccuagauu

SEQ ID NO: 2618159 - RNA, 19 nt, Homo sapiens
  misc_RNA (1)...(19): siRNA sense strand
agcaggaacuucagggcau

SEQ ID NO: 2618160 - RNA, 19 nt, Homo sapiens
  misc_RNA (1)...(19): siRNA sense strand
uagagaauuggaagagauu

SEQ ID NO: 2618161 - RNA, 19 nt, Homo sapiens
  misc_RNA (1)...(19): siRNA sense strand
ccagaauguacuacugauu

SEQ ID NO: 2618162 - RNA, 19 nt, Homo sapiens
  misc_RNA (1)...(19): siRNA sense strand
aaagauaauucacuggaca

SEQ ID NO: 2618163 - RNA, 19 nt, Homo sapiens
  misc_RNA (1)...(19): siRNA sense strand
caggacagaucuggagcaa

SEQ ID NO: 2618164 - RNA, 19 nt, Homo sapiens
  misc_RNA (1)...(19): siRNA sense strand
aacacgaguugcaggacua

SEQ ID NO: 2618165 - RNA, 19 nt, Homo sapiens
  misc_RNA (1)...(19): siRNA sense strand
gagccacagaagaaaggaa

SEQ ID NO: 2618166 - RNA, 19 nt, Homo sapiens
  misc_RNA (1)...(19): siRNA sense strand
caacaacacaagagguucu

SEQ ID NO: 2618167 - RNA, 19 nt, Homo sapiens
  misc_RNA (1)...(19): siRNA sense strand
agccacagaagaaaggaaa

SEQ ID NO: 2618168 - RNA, 19 nt, Homo sapiens
  misc_RNA (1)...(19): siRNA sense strand
ccaaggaacccacagguga

SEQ ID NO: 2618169 - RNA, 19 nt, Homo sapiens
  misc_RNA (1)...(19): siRNA sense strand
caugauaaauccaggacag

SEQ ID NO: 2618170 - RNA, 19 nt, Homo sapiens
  misc_RNA (1)...(19): siRNA sense strand
gauaaauccaggacagauc

SEQ ID NO: 2618171 - RNA, 19 nt, Homo sapiens
  misc_RNA (1)...(19): siRNA sense strand
cagcuuugugaauuagaaa

SEQ ID NO: 2618172 - RNA, 19 nt, Homo sapiens
  misc_RNA (1)...(19): siRNA sense strand
uauuauggucagugaagau

SEQ ID NO: 2618173 - RNA, 19 nt, Homo sapiens
  misc_RNA (1)...(19): siRNA sense strand
cuaggaaagcuggcaaaua

SEQ ID NO: 2618174 - RNA, 19 nt, Homo sapiens
  misc_RNA (1)...(19): siRNA sense strand
ugaucacauagcugaaaua

SEQ ID NO: 2618175 - RNA, 19 nt, Homo sapiens
  misc_RNA (1)...(19): siRNA sense strand
aaaccaaaggacuagagaa

SEQ ID NO: 2618176 - RNA, 19 nt, Homo sapiens
  misc_RNA (1)...(19): siRNA sense strand
cugagauggaagaggucaa

SEQ ID NO: 2618177 - RNA, 19 nt, Homo sapiens
  misc_RNA (1)...(19): siRNA sense strand
ggacaagauuauagcugug

SEQ ID NO: 2618178 - RNA, 19 nt, Homo sapiens
  misc_RNA (1)...(19): siRNA sense strand
ccuggauggcuguguucaa

SEQ ID NO: 2618179 - RNA, 19 nt, Homo sapiens
  misc_RNA (1)...(19): siRNA sense strand
acgaaaggaaauagaaaca

SEQ ID NO: 2618180 - RNA, 19 nt, Homo sapiens
  misc_RNA (1)...(19): siRNA sense strand
gggcuaaaguggugaggcu

SEQ ID NO: 2618181 - RNA, 19 nt, Homo sapiens
  misc_RNA (1)...(19): siRNA sense strand
gugaagaacuggcagcaga

SEQ ID NO: 2618182 - RNA, 19 nt, Homo sapiens
  misc_RNA (1)...(19): siRNA sense strand
cugaagaagcagaggucca

SEQ ID NO: 2618183 - RNA, 19 nt, Homo sapiens
  misc_RNA (1)...(19): siRNA sense strand
auagaaacacagaagcaaa

SEQ ID NO: 2618184 - RNA, 19 nt, Homo sapiens
  misc_RNA (1)...(19): siRNA sense strand
gaaaguggaggcugcgaaa

SEQ ID NO: 2618185 - RNA, 19 nt, Homo sapiens
  misc_RNA (1)...(19): siRNA sense strand
agcaaaguacccagggaaa

SEQ ID NO: 2618186 - RNA, 19 nt, Homo sapiens
  misc_RNA (1)...(19): siRNA sense strand
aggcaaaggcucagcagga

SEQ ID NO: 2618187 - RNA, 19 nt, Homo sapiens
  misc_RNA (1)...(19): siRNA sense strand
gaagaagucugcagcccua

SEQ ID NO: 2618188 - RNA, 19 nt, Homo sapiens
  misc_RNA (1)...(19): siRNA sense strand
cagcaaaguacccagggaa

SEQ ID NO: 2618189 - RNA, 19 nt, Homo sapiens
  misc_RNA (1)...(19): siRNA sense strand
caggagaguugcuggcaca

SEQ ID NO: 2618190 - RNA, 19 nt, Homo sapiens
  misc_RNA (1)...(19): siRNA sense strand
acaagaugaguguggacaa

SEQ ID NO: 2618191 - RNA, 19 nt, Homo sapiens
  misc_RNA (1)...(19): siRNA sense strand
aggacaaccuggugaagca

SEQ ID NO: 2618192 - RNA, 19 nt, Homo sapiens
  misc_RNA (1)...(19): siRNA sense strand
uggugaagcagcugagaga

SEQ ID NO: 2618193 - RNA, 19 nt, Homo sapiens
  misc_RNA (1)...(19): siRNA sense strand
aagcagagguccaucguga

SEQ ID NO: 2618194 - RNA, 19 nt, Homo sapiens
  misc_RNA (1)...(19): siRNA sense strand
aauuaugacguuugggcua

SEQ ID NO: 2618195 - RNA, 19 nt, Homo sapiens
  misc_RNA (1)...(19): siRNA sense strand
ggggaagggcacaggagaa

SEQ ID NO: 2618196 - RNA, 19 nt, Homo sapiens
  misc_RNA (1)...(19): siRNA sense strand
agcaaauguaugaggaaca

SEQ ID NO: 2618197 - RNA, 19 nt, Homo sapiens
  misc_RNA (1)...(19): siRNA sense strand
uggaugagacuguggccua

SEQ ID NO: 2618198 - RNA, 19 nt, Homo sapiens
  misc_RNA (1)...(19): siRNA sense strand
ccaagagcuacgaaaggaa

SEQ ID NO: 2618199 - RNA, 19 nt, Homo sapiens
  misc_RNA (1)...(19): siRNA sense strand
aaauagaaacacagaagca

SEQ ID NO: 2618200 - RNA, 19 nt, Homo sapiens
  misc_RNA (1)...(19): siRNA sense strand
ggauguacaaucaaggaga

SEQ ID NO: 2618201 - RNA, 19 nt, Homo sapiens
  misc_RNA (1)...(19): siRNA sense strand
ccuuggaagaagaagucaa

SEQ ID NO: 2618202 - RNA, 19 nt, Homo sapiens
  misc_RNA (1)...(19): siRNA sense strand
gcaaaguacccagggaaaa

SEQ ID NO: 2618203 - RNA, 19 nt, Homo sapiens
  misc_RNA (1)...(19): siRNA sense strand
uggagaaggaaaagaagaa

SEQ ID NO: 2618204 - RNA, 19 nt, Homo sapiens
  misc_RNA (1)...(19): siRNA sense strand
cgccacaaacccagaagaa

SEQ ID NO: 2618205 - RNA, 19 nt, Homo sapiens
  misc_RNA (1)...(19): siRNA sense strand
aacccaagaccgaggcuua

SEQ ID NO: 2618206 - RNA, 19 nt, Homo sapiens
  misc_RNA (1)...(19): siRNA sense strand
cuacaaggaugaagaggac

SEQ ID NO: 2618207 - RNA, 19 nt, Homo sapiens
  misc_RNA (1)...(19): siRNA sense strand
gcagcaaaauggagaucuu

SEQ ID NO: 2618208 - RNA, 19 nt, Homo sapiens
  misc_RNA (1)...(19): siRNA sense strand
uugccaaggaacugggauu

SEQ ID NO: 2618209 - RNA, 19 nt, Homo sapiens
  misc_RNA (1)...(19): siRNA sense strand
aggaugaagaggacacgaa

SEQ ID NO: 2618210 - RNA, 19 nt, Homo sapiens
  misc_RNA (1)...(19): siRNA sense strand
uggccuaugaacagaaauu

SEQ ID NO: 2618211 - RNA, 19 nt, Homo sapiens
  misc_RNA (1)...(19): siRNA sense strand
ccuccgaauuucuaggaca

SEQ ID NO: 2618212 - RNA, 19 nt, Homo sapiens
  misc_RNA (1)...(19): siRNA sense strand
gggagauacucuugccagu

SEQ ID NO: 2618213 - RNA, 19 nt, Homo sapiens
  misc_RNA (1)...(19): siRNA sense strand
cuggagaagaggaaauuga

SEQ ID NO: 2618214 - RNA, 19 nt, Homo sapiens
  misc_RNA (1)...(19): siRNA sense strand
gaaauugauucuuugcaga

SEQ ID NO: 2618215 - RNA, 19 nt, Homo sapiens
  misc_RNA (1)...(19): siRNA sense strand
uggaagaagaagucaagga

SEQ ID NO: 2618216 - RNA, 19 nt, Homo sapiens
  misc_RNA (1)...(19): siRNA sense strand
agaaaugugcagaguucau

SEQ ID NO: 2618217 - RNA, 19 nt, Homo sapiens
  misc_RNA (1)...(19): siRNA sense strand
ccacugaagaccuccgaau

SEQ ID NO: 2618218 - RNA, 19 nt, Homo sapiens
  misc_RNA (1)...(19): siRNA sense strand
aagaacuggagaaggaaaa

SEQ ID NO: 2618219 - RNA, 19 nt, Homo sapiens
  misc_RNA (1)...(19): siRNA sense strand
gagaagaggaacaaggccu

SEQ ID NO: 2618220 - RNA, 19 nt, Homo sapiens
  misc_RNA (1)...(19): siRNA sense strand
gggaaguuugucuuugaaa

SEQ ID NO: 2618221 - RNA, 19 nt, Homo sapiens
  misc_RNA (1)...(19): siRNA sense strand
cgaauuucuaggacagaca

SEQ ID NO: 2618222 - RNA, 19 nt, Homo sapiens
  misc_RNA (1)...(19): siRNA sense strand
aggauguugagaagaggaa

SEQ ID NO: 2618223 - RNA, 19 nt, Homo sapiens
  misc_RNA (1)...(19): siRNA sense strand
ccacaaacccagaagaagc

SEQ ID NO: 2618224 - RNA, 19 nt, Homo sapiens
  misc_RNA (1)...(19): siRNA sense strand
ugaaggaacccaagaccga

SEQ ID NO: 2618225 - RNA, 19 nt, Homo sapiens
  misc_RNA (1)...(19): siRNA sense strand
agauggaggaguggguuaa

SEQ ID NO: 2618226 - RNA, 19 nt, Homo sapiens
  misc_RNA (1)...(19): siRNA sense strand
acuacaaggaugaagagga

SEQ ID NO: 2618227 - RNA, 19 nt, Homo sapiens
  misc_RNA (1)...(19): siRNA sense strand
gcgaaaauagcucggucaa

SEQ ID NO: 2618228 - RNA, 19 nt, Homo sapiens
  misc_RNA (1)...(19): siRNA sense strand
auccaaagagugaugacua

SEQ ID NO: 2618229 - RNA, 19 nt, Homo sapiens
  misc_RNA (1)...(19): siRNA sense strand
ugaaaucauuccagccuca

SEQ ID NO: 2618230 - RNA, 19 nt, Homo sapiens
  misc_RNA (1)...(19): siRNA sense strand
aggaaauagaaacacagaa

SEQ ID NO: 2618231 - RNA, 19 nt, Homo sapiens
  misc_RNA (1)...(19): siRNA sense strand
cggacuuccaccuacgaua

SEQ ID NO: 2618232 - RNA, 19 nt, Homo sapiens
  misc_RNA (1)...(19): siRNA sense strand
gauaagauccuuucggcaa

SEQ ID NO: 2618233 - RNA, 19 nt, Homo sapiens
  misc_RNA (1)...(19): siRNA sense strand
caacaucgucggugggaca

SEQ ID NO: 2618234 - RNA, 19 nt, Homo sapiens
  misc_RNA (1)...(19): siRNA sense strand
uaaagaaccugcugcacca

SEQ ID NO: 2618235 - RNA, 19 nt, Homo sapiens
  misc_RNA (1)...(19): siRNA sense strand
agaauggaccuauaggaca

SEQ ID NO: 2618236 - RNA, 19 nt, Homo sapiens
  misc_RNA (1)...(19): siRNA sense strand
cuaaagaggugaaggacca

SEQ ID NO: 2618237 - RNA, 19 nt, Homo sapiens
  misc_RNA (1)...(19): siRNA sense strand
caaaagaaaggaagagaaa

SEQ ID NO: 2618238 - RNA, 19 nt, Homo sapiens
  misc_RNA (1)...(19): siRNA sense strand
ccucaauauaccagaaauu

SEQ ID NO: 2618239 - RNA, 19 nt, Homo sapiens
  misc_RNA (1)...(19): siRNA sense strand
cgaagaagacauuugggaa

SEQ ID NO: 2618240 - RNA, 19 nt, Homo sapiens
  misc_RNA (1)...(19): siRNA sense strand
aagucaaagucuucacaaa

SEQ ID NO: 2618241 - RNA, 19 nt, Homo sapiens
  misc_RNA (1)...(19): siRNA sense strand
guacuuuacaugagaguca

SEQ ID NO: 2618242 - RNA, 19 nt, Homo sapiens
  misc_RNA (1)...(19): siRNA sense strand
gugcaagaggaaagcagaa

SEQ ID NO: 2618243 - RNA, 19 nt, Homo sapiens
  misc_RNA (1)...(19): siRNA sense strand
augacaaacuagugggagu

SEQ ID NO: 2618244 - RNA, 19 nt, Homo sapiens
  misc_RNA (1)...(19): siRNA sense strand
uggaaaucuaggagcacaa

SEQ ID NO: 2618245 - RNA, 19 nt, Homo sapiens
  misc_RNA (1)...(19): siRNA sense strand
gggugugccaguugguaaa

SEQ ID NO: 2618246 - RNA, 19 nt, Homo sapiens
  misc_RNA (1)...(19): siRNA sense strand
aagcagggcuggugaucau

SEQ ID NO: 2618247 - RNA, 19 nt, Homo sapiens
  misc_RNA (1)...(19): siRNA sense strand
gcuccgaaguauuugaaaa

SEQ ID NO: 2618248 - RNA, 19 nt, Homo sapiens
  misc_RNA (1)...(19): siRNA sense strand
ccaaaagaaaggaagagaa

SEQ ID NO: 2618249 - RNA, 19 nt, Homo sapiens
  misc_RNA (1)...(19): siRNA sense strand
caagaaaaucccagaguca

SEQ ID NO: 2618250 - RNA, 19 nt, Homo sapiens
  misc_RNA (1)...(19): siRNA sense strand
gcaaaggggcaacaagaaa

SEQ ID NO: 2618251 - RNA, 19 nt, Homo sapiens
  misc_RNA (1)...(19): siRNA sense strand
gcagacaccucgauggcau

SEQ ID NO: 2618252 - RNA, 19 nt, Homo sapiens
  misc_RNA (1)...(19): siRNA sense strand
ccuuuguagccuugaggaa

SEQ ID NO: 2618253 - RNA, 19 nt, Homo sapiens
  misc_RNA (1)...(19): siRNA sense strand
cagaaaggcauuagagggu

SEQ ID NO: 2618254 - RNA, 19 nt, Homo sapiens
  misc_RNA (1)...(19): siRNA sense strand
guuccaaguccuaaucaaa

SEQ ID NO: 2618255 - RNA, 19 nt, Homo sapiens
  misc_RNA (1)...(19): siRNA sense strand
ccaguuuauuguagugaga

SEQ ID NO: 2618256 - RNA, 19 nt, Homo sapiens
  misc_RNA (1)...(19): siRNA sense strand
cuggcaauuuguugaagaa

SEQ ID NO: 2618257 - RNA, 19 nt, Homo sapiens
  misc_RNA (1)...(19): siRNA sense strand
aagcuaaagaggugaagga

SEQ ID NO: 2618258 - RNA, 19 nt, Homo sapiens
  misc_RNA (1)...(19): siRNA sense strand
gcuucaugugcaagaacaa

SEQ ID NO: 2618259 - RNA, 19 nt, Homo sapiens
  misc_RNA (1)...(19): siRNA sense strand
ccaaauugccagaugccuu

SEQ ID NO: 2618260 - RNA, 19 nt, Homo sapiens
  misc_RNA (1)...(19): siRNA sense strand
caucaggcaacuaaagcaa

SEQ ID NO: 2618261 - RNA, 19 nt, Homo sapiens
  misc_RNA (1)...(19): siRNA sense strand
agacauguccauucuauaa

SEQ ID NO: 2618262 - RNA, 19 nt, Homo sapiens
  misc_RNA (1)...(19): siRNA sense strand
cuagaauagcagauguuau

SEQ ID NO: 2618263 - RNA, 19 nt, Homo sapiens
  misc_RNA (1)...(19): siRNA sense strand
gcaguuucagugagacuaa

SEQ ID NO: 2618264 - RNA, 19 nt, Homo sapiens
  misc_RNA (1)...(19): siRNA sense strand
gaaaggcauuagagggugu

SEQ ID NO: 2618265 - RNA, 19 nt, Homo sapiens
  misc_RNA (1)...(19): siRNA sense strand
gcaaauggauauaggugug

SEQ ID NO: 2618266 - RNA, 19 nt, Homo sapiens
  misc_RNA (1)...(19): siRNA sense strand
caucucagcaagagguuau

SEQ ID NO: 2618267 - RNA, 19 nt, Homo sapiens
  misc_RNA (1)...(19): siRNA sense strand
aaagucagguagaagggua

SEQ ID NO: 2618268 - RNA, 19 nt, Homo sapiens
  misc_RNA (1)...(19): siRNA sense strand
ccaaauaauggcucuaaaa

SEQ ID NO: 2618269 - RNA, 19 nt, Homo sapiens
  misc_RNA (1)...(19): siRNA sense strand
cacugaauguauugugaau

SEQ ID NO: 2618270 - RNA, 19 nt, Homo sapiens
  misc_RNA (1)...(19): siRNA sense strand
uauugugaauggugucaaa

SEQ ID NO: 2618271 - RNA, 19 nt, Homo sapiens
  misc_RNA (1)...(19): siRNA sense strand
ucauauuacacacgggaga

SEQ ID NO: 2618272 - RNA, 19 nt, Homo sapiens
  misc_RNA (1)...(19): siRNA sense strand
agucaaagucuucacaaaa

SEQ ID NO: 2618273 - RNA, 19 nt, Homo sapiens
  misc_RNA (1)...(19): siRNA sense strand
gcucauggugggcugcaaa

SEQ ID NO: 2618274 - RNA, 19 nt, Homo sapiens
  misc_RNA (1)...(19): siRNA sense strand
uuacagagucauuugaaga

SEQ ID NO: 2618275 - RNA, 19 nt, Homo sapiens
  misc_RNA (1)...(19): siRNA sense strand
gcucaaucaaauaaacaga

SEQ ID NO: 2618276 - RNA, 19 nt, Homo sapiens
  misc_RNA (1)...(19): siRNA sense strand
agagaaauugcuaggggaa

SEQ ID NO: 2618277 - RNA, 19 nt, Homo sapiens
  misc_RNA (1)...(19): siRNA sense strand
gcaagaggaaagcagaaaa

SEQ ID NO: 2618278 - RNA, 19 nt, Homo sapiens
  misc_RNA (1)...(19): siRNA sense strand
cagauuuuguugagaauga

SEQ ID NO: 2618279 - RNA, 19 nt, Homo sapiens
  misc_RNA (1)...(19): siRNA sense strand
uccuaaugguacugucaua

SEQ ID NO: 2618280 - RNA, 19 nt, Homo sapiens
  misc_RNA (1)...(19): siRNA sense strand
ccuucuggucuuaaguaua

SEQ ID NO: 2618281 - RNA, 19 nt, Homo sapiens
  misc_RNA (1)...(19): siRNA sense strand
gagaaauugcuaggggaaa

SEQ ID NO: 2618282 - RNA, 19 nt, Homo sapiens
  misc_RNA (1)...(19): siRNA sense strand
aaucugaagcagucaauuu

SEQ ID NO: 2618283 - RNA, 19 nt, Homo sapiens
  misc_RNA (1)...(19): siRNA sense strand
caaaacgaguugauccaaa

SEQ ID NO: 2618284 - RNA, 19 nt, Homo sapiens
  misc_RNA (1)...(19): siRNA sense strand
cagaagcuaaagaggugaa

SEQ ID NO: 2618285 - RNA, 19 nt, Homo sapiens
  misc_RNA (1)...(19): siRNA sense strand
gguggcaguuucagugaga

SEQ ID NO: 2618286 - RNA, 19 nt, Homo sapiens
  misc_RNA (1)...(19): siRNA sense strand
gagucagcuuucuguggaa

SEQ ID NO: 2618287 - RNA, 19 nt, Homo sapiens
  misc_RNA (1)...(19): siRNA sense strand
cagucaaaacggaguagaa

SEQ ID NO: 2618288 - RNA, 19 nt, Homo sapiens
  misc_RNA (1)...(19): siRNA sense strand
acgaguugauccaaauaau

SEQ ID NO: 2618289 - RNA, 19 nt, Homo sapiens
  misc_RNA (1)...(19): siRNA sense strand
cugauaacucgguuucaaa

SEQ ID NO: 2618290 - RNA, 19 nt, Homo sapiens
  misc_RNA (1)...(19): siRNA sense strand
caaacaacucagaacacau

SEQ ID NO: 2618291 - RNA, 19 nt, Homo sapiens
  misc_RNA (1)...(19): siRNA sense strand
cagaaaaugacuucaguga

SEQ ID NO: 2618292 - RNA, 19 nt, Homo sapiens
  misc_RNA (1)...(19): siRNA sense strand
guggaacuuucuagugaga

SEQ ID NO: 2618293 - RNA, 19 nt, Homo sapiens
  misc_RNA (1)...(19): siRNA sense strand
uguaggaggaucaagaaaa

SEQ ID NO: 2618294 - RNA, 19 nt, Homo sapiens
  misc_RNA (1)...(19): siRNA sense strand
cuaaagaggugaaggacca

SEQ ID NO: 2618295 - RNA, 19 nt, Homo sapiens
  misc_RNA (1)...(19): siRNA sense strand
caaaagaaaggaagagaaa

SEQ ID NO: 2618296 - RNA, 19 nt, Homo sapiens
  misc_RNA (1)...(19): siRNA sense strand
ccucaauauaccagaaauu

SEQ ID NO: 2618297 - RNA, 19 nt, Homo sapiens
  misc_RNA (1)...(19): siRNA sense strand
cgaagaagacauuugggaa

SEQ ID NO: 2618298 - RNA, 19 nt, Homo sapiens
  misc_RNA (1)...(19): siRNA sense strand
aagucaaagucuucacaaa

SEQ ID NO: 2618299 - RNA, 19 nt, Homo sapiens
  misc_RNA (1)...(19): siRNA sense strand
guacuuuacaugagaguca

SEQ ID NO: 2618300 - RNA, 19 nt, Homo sapiens
  misc_RNA (1)...(19): siRNA sense strand
gugcaagaggaaagcagaa

SEQ ID NO: 2618301 - RNA, 19 nt, Homo sapiens
  misc_RNA (1)...(19): siRNA sense strand
augacaaacuagugggagu

SEQ ID NO: 2618302 - RNA, 19 nt, Homo sapiens
  misc_RNA (1)...(19): siRNA sense strand
uggaaaucuaggagcacaa

SEQ ID NO: 2618303 - RNA, 19 nt, Homo sapiens
  misc_RNA (1)...(19): siRNA sense strand
gggugugccaguugguaaa

SEQ ID NO: 2618304 - RNA, 19 nt, Homo sapiens
  misc_RNA (1)...(19): siRNA sense strand
aagcagggcuggugaucau

SEQ ID NO: 2618305 - RNA, 19 nt, Homo sapiens
  misc_RNA (1)...(19): siRNA sense strand
gcuccgaaguauuugaaaa

SEQ ID NO: 2618306 - RNA, 19 nt, Homo sapiens
  misc_RNA (1)...(19): siRNA sense strand
ccaaaagaaaggaagagaa

SEQ ID NO: 2618307 - RNA, 19 nt, Homo sapiens
  misc_RNA (1)...(19): siRNA sense strand
caagaaaaucccagaguca

SEQ ID NO: 2618308 - RNA, 19 nt, Homo sapiens
  misc_RNA (1)...(19): siRNA sense strand
gcaaaggggcaacaagaaa

SEQ ID NO: 2618309 - RNA, 19 nt, Homo sapiens
  misc_RNA (1)...(19): siRNA sense strand
gcagacaccucgauggcau

SEQ ID NO: 2618310 - RNA, 19 nt, Homo sapiens
  misc_RNA (1)...(19): siRNA sense strand
ccuuuguagccuugaggaa

SEQ ID NO: 2618311 - RNA, 19 nt, Homo sapiens
  misc_RNA (1)...(19): siRNA sense strand
cagaaaggcauuagagggu

SEQ ID NO: 2618312 - RNA, 19 nt, Homo sapiens
  misc_RNA (1)...(19): siRNA sense strand
guuccaaguccuaaucaaa

SEQ ID NO: 2618313 - RNA, 19 nt, Homo sapiens
  misc_RNA (1)...(19): siRNA sense strand
ccaguuuauuguagugaga

SEQ ID NO: 2618314 - RNA, 19 nt, Homo sapiens
  misc_RNA (1)...(19): siRNA sense strand
cuggcaauuuguugaagaa

SEQ ID NO: 2618315 - RNA, 19 nt, Homo sapiens
  misc_RNA (1)...(19): siRNA sense strand
aagcuaaagaggugaagga

SEQ ID NO: 2618316 - RNA, 19 nt, Homo sapiens
  misc_RNA (1)...(19): siRNA sense strand
gcuucaugugcaagaacaa

SEQ ID NO: 2618317 - RNA, 19 nt, Homo sapiens
  misc_RNA (1)...(19): siRNA sense strand
ccaaauugccagaugccuu

SEQ ID NO: 2618318 - RNA, 19 nt, Homo sapiens
  misc_RNA (1)...(19): siRNA sense strand
caucaggcaacuaaagcaa

SEQ ID NO: 2618319 - RNA, 19 nt, Homo sapiens
  misc_RNA (1)...(19): siRNA sense strand
agacauguccauucuauaa

SEQ ID NO: 2618320 - RNA, 19 nt, Homo sapiens
  misc_RNA (1)...(19): siRNA sense strand
cuagaauagcagauguuau

SEQ ID NO: 2618321 - RNA, 19 nt, Homo sapiens
  misc_RNA (1)...(19): siRNA sense strand
gcaguuucagugagacuaa

SEQ ID NO: 2618322 - RNA, 19 nt, Homo sapiens
  misc_RNA (1)...(19): siRNA sense strand
gaaaggcauuagagggugu

SEQ ID NO: 2618323 - RNA, 19 nt, Homo sapiens
  misc_RNA (1)...(19): siRNA sense strand
gcaaauggauauaggugug

SEQ ID NO: 2618324 - RNA, 19 nt, Homo sapiens
  misc_RNA (1)...(19): siRNA sense strand
caucucagcaagagguuau

SEQ ID NO: 2618325 - RNA, 19 nt, Homo sapiens
  misc_RNA (1)...(19): siRNA sense strand
aaagucagguagaagggua

SEQ ID NO: 2618326 - RNA, 19 nt, Homo sapiens
  misc_RNA (1)...(19): siRNA sense strand
ccaaauaauggcucuaaaa

SEQ ID NO: 2618327 - RNA, 19 nt, Homo sapiens
  misc_RNA (1)...(19): siRNA sense strand
cacugaauguauugugaau

SEQ ID NO: 2618328 - RNA, 19 nt, Homo sapiens
  misc_RNA (1)...(19): siRNA sense strand
uauugugaauggugucaaa

SEQ ID NO: 2618329 - RNA, 19 nt, Homo sapiens
  misc_RNA (1)...(19): siRNA sense strand
ucauauuacacacgggaga

SEQ ID NO: 2618330 - RNA, 19 nt, Homo sapiens
  misc_RNA (1)...(19): siRNA sense strand
agucaaagucuucacaaaa

SEQ ID NO: 2618331 - RNA, 19 nt, Homo sapiens
  misc_RNA (1)...(19): siRNA sense strand
gcucauggugggcugcaaa

SEQ ID NO: 2618332 - RNA, 19 nt, Homo sapiens
  misc_RNA (1)...(19): siRNA sense strand
uuacagagucauuugaaga

SEQ ID NO: 2618333 - RNA, 19 nt, Homo sapiens
  misc_RNA (1)...(19): siRNA sense strand
gcucaaucaaauaaacaga

SEQ ID NO: 2618334 - RNA, 19 nt, Homo sapiens
  misc_RNA (1)...(19): siRNA sense strand
agagaaauugcuaggggaa

SEQ ID NO: 2618335 - RNA, 19 nt, Homo sapiens
  misc_RNA (1)...(19): siRNA sense strand
gcaagaggaaagcagaaaa

SEQ ID NO: 2618336 - RNA, 19 nt, Homo sapiens
  misc_RNA (1)...(19): siRNA sense strand
cagauuuuguugagaauga

SEQ ID NO: 2618337 - RNA, 19 nt, Homo sapiens
  misc_RNA (1)...(19): siRNA sense strand
uccuaaugguacugucaua

SEQ ID NO: 2618338 - RNA, 19 nt, Homo sapiens
  misc_RNA (1)...(19): siRNA sense strand
ccuucuggucuuaaguaua

SEQ ID NO: 2618339 - RNA, 19 nt, Homo sapiens
  misc_RNA (1)...(19): siRNA sense strand
gagaaauugcuaggggaaa

SEQ ID NO: 2618340 - RNA, 19 nt, Homo sapiens
  misc_RNA (1)...(19): siRNA sense strand
aaucugaagcagucaauuu

SEQ ID NO: 2618341 - RNA, 19 nt, Homo sapiens
  misc_RNA (1)...(19): siRNA sense strand
caaaacgaguugauccaaa

SEQ ID NO: 2618342 - RNA, 19 nt, Homo sapiens
  misc_RNA (1)...(19): siRNA sense strand
cagaagcuaaagaggugaa

SEQ ID NO: 2618343 - RNA, 19 nt, Homo sapiens
  misc_RNA (1)...(19): siRNA sense strand
gguggcaguuucagugaga

SEQ ID NO: 2618344 - RNA, 19 nt, Homo sapiens
  misc_RNA (1)...(19): siRNA sense strand
gagucagcuuucuguggaa

SEQ ID NO: 2618345 - RNA, 19 nt, Homo sapiens
  misc_RNA (1)...(19): siRNA sense strand
cagucaaaacggaguagaa

SEQ ID NO: 2618346 - RNA, 19 nt, Homo sapiens
  misc_RNA (1)...(19): siRNA sense strand
acgaguugauccaaauaau

SEQ ID NO: 2618347 - RNA, 19 nt, Homo sapiens
  misc_RNA (1)...(19): siRNA sense strand
cugauaacucgguuucaaa

SEQ ID NO: 2618348 - RNA, 19 nt, Homo sapiens
  misc_RNA (1)...(19): siRNA sense strand
caaacaacucagaacacau

SEQ ID NO: 2618349 - RNA, 19 nt, Homo sapiens
  misc_RNA (1)...(19): siRNA sense strand
cagaaaaugacuucaguga

SEQ ID NO: 2618350 - RNA, 19 nt, Homo sapiens
  misc_RNA (1)...(19): siRNA sense strand
guggaacuuucuagugaga

SEQ ID NO: 2618351 - RNA, 19 nt, Homo sapiens
  misc_RNA (1)...(19): siRNA sense strand
uguaggaggaucaagaaaa

SEQ ID NO: 2618352 - RNA, 19 nt, Homo sapiens
  misc_RNA (1)...(19): siRNA sense strand
ggaagaaccacgaggagga

SEQ ID NO: 2618353 - RNA, 19 nt, Homo sapiens
  misc_RNA (1)...(19): siRNA sense strand
cgggaagagauuauagcaa

SEQ ID NO: 2618354 - RNA, 19 nt, Homo sapiens
  misc_RNA (1)...(19): siRNA sense strand
aggaguugguggauggcaa

SEQ ID NO: 2618355 - RNA, 19 nt, Homo sapiens
  misc_RNA (1)...(19): siRNA sense strand
acgcagaguacaagcaauu

SEQ ID NO: 2618356 - RNA, 19 nt, Homo sapiens
  misc_RNA (1)...(19): siRNA sense strand
agacuaucguagaggaguu

SEQ ID NO: 2618357 - RNA, 19 nt, Homo sapiens
  misc_RNA (1)...(19): siRNA sense strand
aggagugguaugacaaaua

SEQ ID NO: 2618358 - RNA, 19 nt, Homo sapiens
  misc_RNA (1)...(19): siRNA sense strand
gcguggaggcugacaucaa

SEQ ID NO: 2618359 - RNA, 19 nt, Homo sapiens
  misc_RNA (1)...(19): siRNA sense strand
acgaggaggaaaugaagaa

SEQ ID NO: 2618360 - RNA, 19 nt, Homo sapiens
  misc_RNA (1)...(19): siRNA sense strand
gccagaacgcagaguacaa

SEQ ID NO: 2618361 - RNA, 19 nt, Homo sapiens
  misc_RNA (1)...(19): siRNA sense strand
gggaggugaccguagaaau

SEQ ID NO: 2618362 - RNA, 19 nt, Homo sapiens
  misc_RNA (1)...(19): siRNA sense strand
caucaauggccugcggaaa

SEQ ID NO: 2618363 - RNA, 19 nt, Homo sapiens
  misc_RNA (1)...(19): siRNA sense strand
agaaaugaaugcugcgcca

SEQ ID NO: 2618364 - RNA, 19 nt, Homo sapiens
  misc_RNA (1)...(19): siRNA sense strand
uggucaaggacgagauuca

SEQ ID NO: 2618365 - RNA, 19 nt, Homo sapiens
  misc_RNA (1)...(19): siRNA sense strand
agaaccacgaggaggaaau

SEQ ID NO: 2618366 - RNA, 19 nt, Homo sapiens
  misc_RNA (1)...(19): siRNA sense strand
gggaggugguguuggcgau

SEQ ID NO: 2618367 - RNA, 19 nt, Homo sapiens
  misc_RNA (1)...(19): siRNA sense strand
augaagaauaugcaaggaa

SEQ ID NO: 2618368 - RNA, 19 nt, Homo sapiens
  misc_RNA (1)...(19): siRNA sense strand
gcaguauuucugaggugaa

SEQ ID NO: 2618369 - RNA, 19 nt, Homo sapiens
  misc_RNA (1)...(19): siRNA sense strand
ggaaaguccuggaugaccu

SEQ ID NO: 2618370 - RNA, 19 nt, Homo sapiens
  misc_RNA (1)...(19): siRNA sense strand
gcgcaucacuacaagcaca

SEQ ID NO: 2618371 - RNA, 19 nt, Homo sapiens
  misc_RNA (1)...(19): siRNA sense strand
cugaggugaaaguuaaaua

SEQ ID NO: 2618372 - RNA, 19 nt, Homo sapiens
  misc_RNA (1)...(19): siRNA sense strand
gccuggagguggagaucga

SEQ ID NO: 2618373 - RNA, 19 nt, Homo sapiens
  misc_RNA (1)...(19): siRNA sense strand
ugguagaaacucaggaucu

SEQ ID NO: 2618374 - RNA, 19 nt, Homo sapiens
  misc_RNA (1)...(19): siRNA sense strand
gguggaucgggaagagauu

SEQ ID NO: 2618375 - RNA, 19 nt, Homo sapiens
  misc_RNA (1)...(19): siRNA sense strand
gacugaaguaugagaacga

SEQ ID NO: 2618376 - RNA, 19 nt, Homo sapiens
  misc_RNA (1)...(19): siRNA sense strand
cgagauucaagcaagacua

SEQ ID NO: 2618377 - RNA, 19 nt, Homo sapiens
  misc_RNA (1)...(19): siRNA sense strand
cuggaggcuucuacagcua

SEQ ID NO: 2618378 - RNA, 19 nt, Homo sapiens
  misc_RNA (1)...(19): siRNA sense strand
acaaaaucaaggaguggua

SEQ ID NO: 2618379 - RNA, 19 nt, Homo sapiens
  misc_RNA (1)...(19): siRNA sense strand
ugguaugggaggugguguu

SEQ ID NO: 2618380 - RNA, 19 nt, Homo sapiens
  misc_RNA (1)...(19): siRNA sense strand
ucaaugaccgcuuggccaa

SEQ ID NO: 2618381 - RNA, 19 nt, Homo sapiens
  misc_RNA (1)...(19): siRNA sense strand
ugcagaauuuggugguaga

SEQ ID NO: 2618382 - RNA, 19 nt, Homo sapiens
  misc_RNA (1)...(19): siRNA sense strand
cugccaagaaugagauaac

SEQ ID NO: 2618383 - RNA, 19 nt, Homo sapiens
  misc_RNA (1)...(19): siRNA sense strand
cagaauuuggugguagaaa

SEQ ID NO: 2618384 - RNA, 19 nt, Homo sapiens
  misc_RNA (1)...(19): siRNA sense strand
ucguagaggaguuggugga

SEQ ID NO: 2618385 - RNA, 19 nt, Homo sapiens
  misc_RNA (1)...(19): siRNA sense strand
ugcaagagaugaugcggaa

SEQ ID NO: 2618386 - RNA, 19 nt, Homo sapiens
  misc_RNA (1)...(19): siRNA sense strand
aggcauugcugcagaucca

SEQ ID NO: 2618387 - RNA, 19 nt, Homo sapiens
  misc_RNA (1)...(19): siRNA sense strand
cggucaaggaguucaaaga

SEQ ID NO: 2618388 - RNA, 19 nt, Homo sapiens
  misc_RNA (1)...(19): siRNA sense strand
gguuuaaggcucagcagga

SEQ ID NO: 2618389 - RNA, 19 nt, Homo sapiens
  misc_RNA (1)...(19): siRNA sense strand
aggaguucaaagaggaaau

SEQ ID NO: 2618390 - RNA, 19 nt, Homo sapiens
  misc_RNA (1)...(19): siRNA sense strand
ccaugaugcaagagaugau

SEQ ID NO: 2618391 - RNA, 19 nt, Homo sapiens
  misc_RNA (1)...(19): siRNA sense strand
aguggaagccggaggagca

SEQ ID NO: 2618392 - RNA, 19 nt, Homo sapiens
  misc_RNA (1)...(19): siRNA sense strand
agcaguugauggagcggaa

SEQ ID NO: 2618393 - RNA, 19 nt, Homo sapiens
  misc_RNA (1)...(19): siRNA sense strand
ucaaggaguucaaagagga

SEQ ID NO: 2618394 - RNA, 19 nt, Homo sapiens
  misc_RNA (1)...(19): siRNA sense strand
acacugaaccagcacggaa

SEQ ID NO: 2618395 - RNA, 19 nt, Homo sapiens
  misc_RNA (1)...(19): siRNA sense strand
cggaaguggcacaaagcau

SEQ ID NO: 2618396 - RNA, 19 nt, Homo sapiens
  misc_RNA (1)...(19): siRNA sense strand
ucauccagucagugaguua

SEQ ID NO: 2618397 - RNA, 19 nt, Homo sapiens
  misc_RNA (1)...(19): siRNA sense strand
ccuuaagucaagucggaau

SEQ ID NO: 2618398 - RNA, 19 nt, Homo sapiens
  misc_RNA (1)...(19): siRNA sense strand
gcucaucagcuuugacaga

SEQ ID NO: 2618399 - RNA, 19 nt, Homo sapiens
  misc_RNA (1)...(19): siRNA sense strand
acacaaagagucagaccga

SEQ ID NO: 2618400 - RNA, 19 nt, Homo sapiens
  misc_RNA (1)...(19): siRNA sense strand
cagaaucaaaagaggaaau

SEQ ID NO: 2618401 - RNA, 19 nt, Homo sapiens
  misc_RNA (1)...(19): siRNA sense strand
agucagugaguuacagcaa

SEQ ID NO: 2618402 - RNA, 19 nt, Homo sapiens
  misc_RNA (1)...(19): siRNA sense strand
cggaauuccacuucgguca

SEQ ID NO: 2618403 - RNA, 19 nt, Homo sapiens
  misc_RNA (1)...(19): siRNA sense strand
ccagaauccccuacacaaa

SEQ ID NO: 2618404 - RNA, 19 nt, Homo sapiens
  misc_RNA (1)...(19): siRNA sense strand
acaaagagucagaccgaag

SEQ ID NO: 2618405 - RNA, 19 nt, Homo sapiens
  misc_RNA (1)...(19): siRNA sense strand
aggaaauacaacacuugaa

SEQ ID NO: 2618406 - RNA, 19 nt, Homo sapiens
  misc_RNA (1)...(19): siRNA sense strand
cuuaagucaagucggaauu

SEQ ID NO: 2618407 - RNA, 19 nt, Homo sapiens
  misc_RNA (1)...(19): siRNA sense strand
gcucagaaugaccuagaca

SEQ ID NO: 2618408 - RNA, 19 nt, Homo sapiens
  misc_RNA (1)...(19): siRNA sense strand
gcaaggagcugcagccugu

SEQ ID NO: 2618409 - RNA, 19 nt, Homo sapiens
  misc_RNA (1)...(19): siRNA sense strand
gugccgugucccagagaau

SEQ ID NO: 2618410 - RNA, 19 nt, Homo sapiens
  misc_RNA (1)...(19): siRNA sense strand
cauuauggcggaagagagu

SEQ ID NO: 2618411 - RNA, 19 nt, Homo sapiens
  misc_RNA (1)...(19): siRNA sense strand
ugguggagacccaggugaa

SEQ ID NO: 2618412 - RNA, 19 nt, Homo sapiens
  misc_RNA (1)...(19): siRNA sense strand
ccaaguggcugguggagac

SEQ ID NO: 2618413 - RNA, 19 nt, Homo sapiens
  misc_RNA (1)...(19): siRNA sense strand
ccugggagaaggagcauca

SEQ ID NO: 2618414 - RNA, 19 nt, Homo sapiens
  misc_RNA (1)...(19): siRNA sense strand
guaaagagcuucaggacca

SEQ ID NO: 2618415 - RNA, 19 nt, Homo sapiens
  misc_RNA (1)...(19): siRNA sense strand
auggaaaccuugauagaaa

SEQ ID NO: 2618416 - RNA, 19 nt, Homo sapiens
  misc_RNA (1)...(19): siRNA sense strand
gauucgaacaccagagaaa

SEQ ID NO: 2618417 - RNA, 19 nt, Homo sapiens
  misc_RNA (1)...(19): siRNA sense strand
gcuaguaaccacagcuaaa

SEQ ID NO: 2618418 - RNA, 19 nt, Homo sapiens
  misc_RNA (1)...(19): siRNA sense strand
ggaaauagaacgcaucaaa

SEQ ID NO: 2618419 - RNA, 19 nt, Homo sapiens
  misc_RNA (1)...(19): siRNA sense strand
ucacaagcagcgaggaaua

SEQ ID NO: 2618420 - RNA, 19 nt, Homo sapiens
  misc_RNA (1)...(19): siRNA sense strand
ggaacguguagaagaguua

SEQ ID NO: 2618421 - RNA, 19 nt, Homo sapiens
  misc_RNA (1)...(19): siRNA sense strand
ugcuaaauguucaaggaaa

SEQ ID NO: 2618422 - RNA, 19 nt, Homo sapiens
  misc_RNA (1)...(19): siRNA sense strand
gcuaaauguucaaggaaag

SEQ ID NO: 2618423 - RNA, 19 nt, Homo sapiens
  misc_RNA (1)...(19): siRNA sense strand
aaucauugaccaagagcaa

SEQ ID NO: 2618424 - RNA, 19 nt, Homo sapiens
  misc_RNA (1)...(19): siRNA sense strand
aaacauaaacagacaccaa

SEQ ID NO: 2618425 - RNA, 19 nt, Homo sapiens
  misc_RNA (1)...(19): siRNA sense strand
cgaaaugguaaaagugaua

SEQ ID NO: 2618426 - RNA, 19 nt, Homo sapiens
  misc_RNA (1)...(19): siRNA sense strand
cuuuacagcacgaggagaa

SEQ ID NO: 2618427 - RNA, 19 nt, Homo sapiens
  misc_RNA (1)...(19): siRNA sense strand
gcaaaaucgaaaugguaaa

SEQ ID NO: 2618428 - RNA, 19 nt, Homo sapiens
  misc_RNA (1)...(19): siRNA sense strand
cagcagugccgaagaugaa

SEQ ID NO: 2618429 - RNA, 19 nt, Homo sapiens
  misc_RNA (1)...(19): siRNA sense strand
aggagauagcccaguauaa

SEQ ID NO: 2618430 - RNA, 19 nt, Homo sapiens
  misc_RNA (1)...(19): siRNA sense strand
agacaaguacagaguagaa

SEQ ID NO: 2618431 - RNA, 19 nt, Homo sapiens
  misc_RNA (1)...(19): siRNA sense strand
uagaaggaguaaagguaga

SEQ ID NO: 2618432 - RNA, 19 nt, Homo sapiens
  misc_RNA (1)...(19): siRNA sense strand
ggagaagauguacaagaaa

SEQ ID NO: 2618433 - RNA, 19 nt, Homo sapiens
  misc_RNA (1)...(19): siRNA sense strand
aaugauaacagcagagaca

SEQ ID NO: 2618434 - RNA, 19 nt, Homo sapiens
  misc_RNA (1)...(19): siRNA sense strand
gcaugcagcugaaagggaa

SEQ ID NO: 2618435 - RNA, 19 nt, Homo sapiens
  misc_RNA (1)...(19): siRNA sense strand
ccaggaagaacuagcagaa

SEQ ID NO: 2618436 - RNA, 19 nt, Homo sapiens
  misc_RNA (1)...(19): siRNA sense strand
uagacaggaucaaggacaa

SEQ ID NO: 2618437 - RNA, 19 nt, Homo sapiens
  misc_RNA (1)...(19): siRNA sense strand
ucaacaugcuauuggucaa

SEQ ID NO: 2618438 - RNA, 19 nt, Homo sapiens
  misc_RNA (1)...(19): siRNA sense strand
cagaauggcagaaaagaua

SEQ ID NO: 2618439 - RNA, 19 nt, Homo sapiens
  misc_RNA (1)...(19): siRNA sense strand
ccagaaaacugucaagaau

SEQ ID NO: 2618440 - RNA, 19 nt, Homo sapiens
  misc_RNA (1)...(19): siRNA sense strand
gaauaauuugccugaacaa

SEQ ID NO: 2618441 - RNA, 19 nt, Homo sapiens
  misc_RNA (1)...(19): siRNA sense strand
aagaauggauaggaggaaa

SEQ ID NO: 2618442 - RNA, 19 nt, Homo sapiens
  misc_RNA (1)...(19): siRNA sense strand
ugauaacagcagagacauu

SEQ ID NO: 2618443 - RNA, 19 nt, Homo sapiens
  misc_RNA (1)...(19): siRNA sense strand
cuggauaucacguggaaga

SEQ ID NO: 2618444 - RNA, 19 nt, Homo sapiens
  misc_RNA (1)...(19): siRNA sense strand
ugaacaaccaaaucagaua

SEQ ID NO: 2618445 - RNA, 19 nt, Homo sapiens
  misc_RNA (1)...(19): siRNA sense strand
ugaugaagauuguagacau

SEQ ID NO: 2618446 - RNA, 19 nt, Homo sapiens
  misc_RNA (1)...(19): siRNA sense strand
guuuagaauacgugcugaa

SEQ ID NO: 2618447 - RNA, 19 nt, Homo sapiens
  misc_RNA (1)...(19): siRNA sense strand
caucgugaucaaagugaaa

SEQ ID NO: 2618448 - RNA, 19 nt, Homo sapiens
  misc_RNA (1)...(19): siRNA sense strand
ggaugguaacaaaggauuu

SEQ ID NO: 2618449 - RNA, 19 nt, Homo sapiens
  misc_RNA (1)...(19): siRNA sense strand
cugagaaagugcuuaguga

SEQ ID NO: 2618450 - RNA, 19 nt, Homo sapiens
  misc_RNA (1)...(19): siRNA sense strand
auuggaagaugcaggaaau

SEQ ID NO: 2618451 - RNA, 19 nt, Homo sapiens
  misc_RNA (1)...(19): siRNA sense strand
uguuaaaucagcagcagaa

SEQ ID NO: 2618452 - RNA, 19 nt, Homo sapiens
  misc_RNA (1)...(19): siRNA sense strand
uauagaaggaguaaaggua

SEQ ID NO: 2618453 - RNA, 19 nt, Homo sapiens
  misc_RNA (1)...(19): siRNA sense strand
auguagaaagggugcuaaa

SEQ ID NO: 2618454 - RNA, 19 nt, Homo sapiens
  misc_RNA (1)...(19): siRNA sense strand
ggaacuagcugaaaugcca

SEQ ID NO: 2618455 - RNA, 19 nt, Homo sapiens
  misc_RNA (1)...(19): siRNA sense strand
gagcaggccaagaagagua

SEQ ID NO: 2618456 - RNA, 19 nt, Homo sapiens
  misc_RNA (1)...(19): siRNA sense strand
cagcaauggccuauaacau

SEQ ID NO: 2618457 - RNA, 19 nt, Homo sapiens
  misc_RNA (1)...(19): siRNA sense strand
acauugaaguagccagcaa

SEQ ID NO: 2618458 - RNA, 19 nt, Homo sapiens
  misc_RNA (1)...(19): siRNA sense strand
gcaucaaaaucgagagucu

SEQ ID NO: 2618459 - RNA, 19 nt, Homo sapiens
  misc_RNA (1)...(19): siRNA sense strand
ggcaagaccucucagggua

SEQ ID NO: 2618460 - RNA, 19 nt, Homo sapiens
  misc_RNA (1)...(19): siRNA sense strand
gaggagaagauguacaaga

SEQ ID NO: 2618461 - RNA, 19 nt, Homo sapiens
  misc_RNA (1)...(19): siRNA sense strand
guagacaugugcugggaga

SEQ ID NO: 2618462 - RNA, 19 nt, Homo sapiens
  misc_RNA (1)...(19): siRNA sense strand
acaaggaaucuguagguau

SEQ ID NO: 2618463 - RNA, 19 nt, Homo sapiens
  misc_RNA (1)...(19): siRNA sense strand
ggaagacagaagagcugaa

SEQ ID NO: 2618464 - RNA, 19 nt, Homo sapiens
  misc_RNA (1)...(19): siRNA sense strand
cuuuaagcuuacugaaaca

SEQ ID NO: 2618465 - RNA, 19 nt, Homo sapiens
  misc_RNA (1)...(19): siRNA sense strand
aaucacaagcagcgaggaa

SEQ ID NO: 2618466 - RNA, 19 nt, Homo sapiens
  misc_RNA (1)...(19): siRNA sense strand
ugaaaagucaugugaacaa

SEQ ID NO: 2618467 - RNA, 19 nt, Homo sapiens
  misc_RNA (1)...(19): siRNA sense strand
guucaaccuuaaagugcaa

SEQ ID NO: 2618468 - RNA, 19 nt, Homo sapiens
  misc_RNA (1)...(19): siRNA sense strand
ucugagagccauugcacaa

SEQ ID NO: 2618469 - RNA, 19 nt, Homo sapiens
  misc_RNA (1)...(19): siRNA sense strand
cguguauaaagucgggaua

SEQ ID NO: 2618470 - RNA, 19 nt, Homo sapiens
  misc_RNA (1)...(19): siRNA sense strand
ucagaaacagagacagcaa

SEQ ID NO: 2618471 - RNA, 19 nt, Homo sapiens
  misc_RNA (1)...(19): siRNA sense strand
cgggauagcauuuaacaca

SEQ ID NO: 2618472 - RNA, 19 nt, Homo sapiens
  misc_RNA (1)...(19): siRNA sense strand
acagcuaaacguugggauu

SEQ ID NO: 2618473 - RNA, 19 nt, Homo sapiens
  misc_RNA (1)...(19): siRNA sense strand
gugcaaaguaugcucagaa

SEQ ID NO: 2618474 - RNA, 19 nt, Homo sapiens
  misc_RNA (1)...(19): siRNA sense strand
gugaauguauagaaggagu

SEQ ID NO: 2618475 - RNA, 19 nt, Homo sapiens
  misc_RNA (1)...(19): siRNA sense strand
ccaaaauggauuagaucau

SEQ ID NO: 2618476 - RNA, 19 nt, Homo sapiens
  misc_RNA (1)...(19): siRNA sense strand
uagacaaaucauugaccaa

SEQ ID NO: 2618477 - RNA, 19 nt, Homo sapiens
  misc_RNA (1)...(19): siRNA sense strand
acacagaaauauuuggaac

SEQ ID NO: 2618478 - RNA, 19 nt, Homo sapiens
  misc_RNA (1)...(19): siRNA sense strand
gcaaaacagcagcuaguaa

SEQ ID NO: 2618479 - RNA, 19 nt, Homo sapiens
  misc_RNA (1)...(19): siRNA sense strand
ugaagcuacuauugaagaa

SEQ ID NO: 2618480 - RNA, 19 nt, Homo sapiens
  misc_RNA (1)...(19): siRNA sense strand
cagcaaagucaguugaauc

SEQ ID NO: 2618481 - RNA, 19 nt, Homo sapiens
  misc_RNA (1)...(19): siRNA sense strand
ccuaaugaaacuacugauu

SEQ ID NO: 2618482 - RNA, 19 nt, Homo sapiens
  misc_RNA (1)...(19): siRNA sense strand
caacaggagacuaggauuc

SEQ ID NO: 2618483 - RNA, 19 nt, Homo sapiens
  misc_RNA (1)...(19): siRNA sense strand
gggaaaagucuucaucaua

SEQ ID NO: 2618484 - RNA, 19 nt, Homo sapiens
  misc_RNA (1)...(19): siRNA sense strand
gagcaaaaucgaaauggua

SEQ ID NO: 2618485 - RNA, 19 nt, Homo sapiens
  misc_RNA (1)...(19): siRNA sense strand
acucaagguuucaagacuu

SEQ ID NO: 2618486 - RNA, 19 nt, Homo sapiens
  misc_RNA (1)...(19): siRNA sense strand
caauuauaccucugagcuu

SEQ ID NO: 2618487 - RNA, 19 nt, Homo sapiens
  misc_RNA (1)...(19): siRNA sense strand
cugaucaaguguuuagaau

SEQ ID NO: 2618488 - RNA, 19 nt, Homo sapiens
  misc_RNA (1)...(19): siRNA sense strand
gcauaaacgagcugaauuu

SEQ ID NO: 2618489 - RNA, 19 nt, Homo sapiens
  misc_RNA (1)...(19): siRNA sense strand
aguacuggauugagaauua

SEQ ID NO: 2618490 - RNA, 19 nt, Homo sapiens
  misc_RNA (1)...(19): siRNA sense strand
uggacuuaauggagaguua

SEQ ID NO: 2618491 - RNA, 19 nt, Homo sapiens
  misc_RNA (1)...(19): siRNA sense strand
ugauagaacuggagauguu

SEQ ID NO: 2618492 - RNA, 19 nt, Homo sapiens
  misc_RNA (1)...(19): siRNA sense strand
cuggaaauuuggaaggaau

SEQ ID NO: 2618493 - RNA, 19 nt, Homo sapiens
  misc_RNA (1)...(19): siRNA sense strand
uuggauaagcaaagugaua

SEQ ID NO: 2618494 - RNA, 19 nt, Homo sapiens
  misc_RNA (1)...(19): siRNA sense strand
ccaacgaaaucuaaaguca

SEQ ID NO: 2618495 - RNA, 19 nt, Homo sapiens
  misc_RNA (1)...(19): siRNA sense strand
cggaagaagaaaaugauaa

SEQ ID NO: 2618496 - RNA, 19 nt, Homo sapiens
  misc_RNA (1)...(19): siRNA sense strand
ccuuagugauacucaguua

SEQ ID NO: 2618497 - RNA, 19 nt, Homo sapiens
  misc_RNA (1)...(19): siRNA sense strand
gaaccaaaucagaugaaaa

SEQ ID NO: 2618498 - RNA, 19 nt, Homo sapiens
  misc_RNA (1)...(19): siRNA sense strand
guaaagucaucguugggaa

SEQ ID NO: 2618499 - RNA, 19 nt, Homo sapiens
  misc_RNA (1)...(19): siRNA sense strand
aaaugaaagaggcuggaaa

SEQ ID NO: 2618500 - RNA, 19 nt, Homo sapiens
  misc_RNA (1)...(19): siRNA sense strand
agacauaauuggagugggu

SEQ ID NO: 2618501 - RNA, 19 nt, Homo sapiens
  misc_RNA (1)...(19): siRNA sense strand
cagcuuuguggguggauaa

SEQ ID NO: 2618502 - RNA, 19 nt, Homo sapiens
  misc_RNA (1)...(19): siRNA sense strand
agcaaauggucgaguugua

SEQ ID NO: 2618503 - RNA, 19 nt, Homo sapiens
  misc_RNA (1)...(19): siRNA sense strand
ggagaguuauguugauaga

SEQ ID NO: 2618504 - RNA, 19 nt, Homo sapiens
  misc_RNA (1)...(19): siRNA sense strand
ggucaagaucauaacucaa

SEQ ID NO: 2618505 - RNA, 19 nt, Homo sapiens
  misc_RNA (1)...(19): siRNA sense strand
aauugaaagaagugugcaa

SEQ ID NO: 2618506 - RNA, 19 nt, Homo sapiens
  misc_RNA (1)...(19): siRNA sense strand
caagaaggggaaugggaaa

SEQ ID NO: 2618507 - RNA, 19 nt, Homo sapiens
  misc_RNA (1)...(19): siRNA sense strand
guuauacggaugagaagaa

SEQ ID NO: 2618508 - RNA, 19 nt, Homo sapiens
  misc_RNA (1)...(19): siRNA sense strand
ggaugaaacugaacccaca

SEQ ID NO: 2618509 - RNA, 19 nt, Homo sapiens
  misc_RNA (1)...(19): siRNA sense strand
cuaaagauggaguggacuu

SEQ ID NO: 2618510 - RNA, 19 nt, Homo sapiens
  misc_RNA (1)...(19): siRNA sense strand
guucaguacuggauugaga

SEQ ID NO: 2618511 - RNA, 19 nt, Homo sapiens
  misc_RNA (1)...(19): siRNA sense strand
gcuuacaggccuuacuaaa

SEQ ID NO: 2618512 - RNA, 19 nt, Homo sapiens
  misc_RNA (1)...(19): siRNA sense strand
aaugaaagaggcuggaaau

SEQ ID NO: 2618513 - RNA, 19 nt, Homo sapiens
  misc_RNA (1)...(19): siRNA sense strand
gcaucguaaccuagcuaua

SEQ ID NO: 2618514 - RNA, 19 nt, Homo sapiens
  misc_RNA (1)...(19): siRNA sense strand
aggugaaacugaaacaaca

SEQ ID NO: 2618515 - RNA, 19 nt, Homo sapiens
  misc_RNA (1)...(19): siRNA sense strand
ggguggauaaagaaaggaa

SEQ ID NO: 2618516 - RNA, 19 nt, Homo sapiens
  misc_RNA (1)...(19): siRNA sense strand
aaacaaaguugcaguacgu

SEQ ID NO: 2618517 - RNA, 19 nt, Homo sapiens
  misc_RNA (1)...(19): siRNA sense strand
gauaaagaaaggaacggau

SEQ ID NO: 2618518 - RNA, 19 nt, Homo sapiens
  misc_RNA (1)...(19): siRNA sense strand
ggaguggacuuaauggaga

SEQ ID NO: 2618519 - RNA, 19 nt, Homo sapiens
  misc_RNA (1)...(19): siRNA sense strand
agaagauauggaucagaaa

SEQ ID NO: 2618520 - RNA, 19 nt, Homo sapiens
  misc_RNA (1)...(19): siRNA sense strand
ggauauucgccgagcaauc

SEQ ID NO: 2618521 - RNA, 19 nt, Homo sapiens
  misc_RNA (1)...(19): siRNA sense strand
ugaccaaugaaaugaaaga

SEQ ID NO: 2618522 - RNA, 19 nt, Homo sapiens
  misc_RNA (1)...(19): siRNA sense strand
cuucggaauacaagccaaa

SEQ ID NO: 2618523 - RNA, 19 nt, Homo sapiens
  misc_RNA (1)...(19): siRNA sense strand
cuuuaacaagggauaguaa

SEQ ID NO: 2618524 - RNA, 19 nt, Homo sapiens
  misc_RNA (1)...(19): siRNA sense strand
agaaaggaacggauguaga

SEQ ID NO: 2618525 - RNA, 19 nt, Homo sapiens
  misc_RNA (1)...(19): siRNA sense strand
ugaaagaggcuggaaauuu

SEQ ID NO: 2618526 - RNA, 19 nt, Homo sapiens
  misc_RNA (1)...(19): siRNA sense strand
agcaauacacagaagauau

SEQ ID NO: 2618527 - RNA, 19 nt, Homo sapiens
  misc_RNA (1)...(19): siRNA sense strand
gaucagaaaucuccaggca

SEQ ID NO: 2618528 - RNA, 19 nt, Homo sapiens
  misc_RNA (1)...(19): siRNA sense strand
guuacaggguucaccuuua

SEQ ID NO: 2618529 - RNA, 19 nt, Homo sapiens
  misc_RNA (1)...(19): siRNA sense strand
ggaaagagcugcugcugug

SEQ ID NO: 2618530 - RNA, 19 nt, Homo sapiens
  misc_RNA (1)...(19): siRNA sense strand
augaagauccacagcucaa

SEQ ID NO: 2618531 - RNA, 19 nt, Homo sapiens
  misc_RNA (1)...(19): siRNA sense strand
gcgcuuuaucucauuaaua

SEQ ID NO: 2618532 - RNA, 19 nt, Homo sapiens
  misc_RNA (1)...(19): siRNA sense strand
gaaagaggcuggaaauuug

SEQ ID NO: 2618533 - RNA, 19 nt, Homo sapiens
  misc_RNA (1)...(19): siRNA sense strand
gcuggaaauuuggaaggaa

SEQ ID NO: 2618534 - RNA, 19 nt, Homo sapiens
  misc_RNA (1)...(19): siRNA sense strand
gccuggagguuuuggcaua

SEQ ID NO: 2618535 - RNA, 19 nt, Homo sapiens
  misc_RNA (1)...(19): siRNA sense strand
ugguaugcaucguaaccua

SEQ ID NO: 2618536 - RNA, 19 nt, Homo sapiens
  misc_RNA (1)...(19): siRNA sense strand
aagcaauacacagaagaua

SEQ ID NO: 2618537 - RNA, 19 nt, Homo sapiens
  misc_RNA (1)...(19): siRNA sense strand
cagcagacauaauuggagu

SEQ ID NO: 2618538 - RNA, 19 nt, Homo sapiens
  misc_RNA (1)...(19): siRNA sense strand
aauuggaguggguuggaua

SEQ ID NO: 2618539 - RNA, 19 nt, Homo sapiens
  misc_RNA (1)...(19): siRNA sense strand
gaaaaguugaccaaugaaa

SEQ ID NO: 2618540 - RNA, 19 nt, Homo sapiens
  misc_RNA (1)...(19): siRNA sense strand
gccacuuuaacaagggaua

SEQ ID NO: 2618541 - RNA, 19 nt, Homo sapiens
  misc_RNA (1)...(19): siRNA sense strand
ucagaaaucuccaggcaac

SEQ ID NO: 2618542 - RNA, 19 nt, Homo sapiens
  misc_RNA (1)...(19): siRNA sense strand
ggguucaccuuuagauguu

SEQ ID NO: 2618543 - RNA, 19 nt, Homo sapiens
  misc_RNA (1)...(19): siRNA sense strand
gugugacgguagacccaua

SEQ ID NO: 2618544 - RNA, 19 nt, Homo sapiens
  misc_RNA (1)...(19): siRNA sense strand
gcauuguucaacuuggaua

SEQ ID NO: 2618545 - RNA, 19 nt, Homo sapiens
  misc_RNA (1)...(19): siRNA sense strand
cggguuauacggaugagaa

SEQ ID NO: 2618546 - RNA, 19 nt, Homo sapiens
  misc_RNA (1)...(19): siRNA sense strand
ggcaguuggacaagcaaau

SEQ ID NO: 2618547 - RNA, 19 nt, Homo sapiens
  misc_RNA (1)...(19): siRNA sense strand
uuccaagccuuuagcacaa

SEQ ID NO: 2618548 - RNA, 19 nt, Homo sapiens
  misc_RNA (1)...(19): siRNA sense strand
ggugaaacugaaacaacau

SEQ ID NO: 2618549 - RNA, 19 nt, Homo sapiens
  misc_RNA (1)...(19): siRNA sense strand
gguggaaagcagcagacau

SEQ ID NO: 2618550 - RNA, 19 nt, Homo sapiens
  misc_RNA (1)...(19): siRNA sense strand
guuccaagccuuuagcaca

SEQ ID NO: 2618551 - RNA, 19 nt, Homo sapiens
  misc_RNA (1)...(19): siRNA sense strand
agccaaaagauguucguaa

SEQ ID NO: 2618552 - RNA, 19 nt, Homo sapiens
  misc_RNA (1)...(19): siRNA sense strand
augaauguacggaagaaga

SEQ ID NO: 2618553 - RNA, 19 nt, Homo sapiens
  misc_RNA (1)...(19): siRNA sense strand
cuuguaaauuccuuaguga

SEQ ID NO: 2618554 - RNA, 19 nt, Homo sapiens
  misc_RNA (1)...(19): siRNA sense strand
uuugauauucacaggagua

SEQ ID NO: 2618555 - RNA, 19 nt, Homo sapiens
  misc_RNA (1)...(19): siRNA sense strand
ggaaccaaaucagaugaaa

SEQ ID NO: 2618556 - RNA, 19 nt, Homo sapiens
  misc_RNA (1)...(19): siRNA sense strand
aaccaaaacccuuaacaaa

SEQ ID NO: 2618557 - RNA, 19 nt, Homo sapiens
  misc_RNA (1)...(19): siRNA sense strand
accaaaacccuuaacaaaa

SEQ ID NO: 2618558 - RNA, 19 nt, Homo sapiens
  misc_RNA (1)...(19): siRNA sense strand
agguaaagucagagacaua

SEQ ID NO: 2618559 - RNA, 19 nt, Homo sapiens
  misc_RNA (1)...(19): siRNA sense strand
auaaauaaccagaaggcua

SEQ ID NO: 2618560 - RNA, 19 nt, Homo sapiens
  misc_RNA (1)...(19): siRNA sense strand
cagaauaacaagucgaauu

SEQ ID NO: 2618561 - RNA, 19 nt, Homo sapiens
  misc_RNA (1)...(19): siRNA sense strand
acucagagcaaguuggaua

SEQ ID NO: 2618562 - RNA, 19 nt, Homo sapiens
  misc_RNA (1)...(19): siRNA sense strand
caguaagaauaaaggugua

SEQ ID NO: 2618563 - RNA, 19 nt, Homo sapiens
  misc_RNA (1)...(19): siRNA sense strand
ccaucaauacugaagaaua

SEQ ID NO: 2618564 - RNA, 19 nt, Homo sapiens
  misc_RNA (1)...(19): siRNA sense strand
ggaaagauccgcagaaaau

SEQ ID NO: 2618565 - RNA, 19 nt, Homo sapiens
  misc_RNA (1)...(19): siRNA sense strand
cagaaauugcaaagcuaaa

SEQ ID NO: 2618566 - RNA, 19 nt, Homo sapiens
  misc_RNA (1)...(19): siRNA sense strand
aagaaaugaugcaaggaau

SEQ ID NO: 2618567 - RNA, 19 nt, Homo sapiens
  misc_RNA (1)...(19): siRNA sense strand
aaucggaauaauagggaua

SEQ ID NO: 2618568 - RNA, 19 nt, Homo sapiens
  misc_RNA (1)...(19): siRNA sense strand
gaguuaugaugaagaaaga

SEQ ID NO: 2618569 - RNA, 19 nt, Homo sapiens
  misc_RNA (1)...(19): siRNA sense strand
uagugaagaaccaggaaua

SEQ ID NO: 2618570 - RNA, 19 nt, Homo sapiens
  misc_RNA (1)...(19): siRNA sense strand
guggaaaacagcugaaaua

SEQ ID NO: 2618571 - RNA, 19 nt, Homo sapiens
  misc_RNA (1)...(19): siRNA sense strand
aagaaauaacuguggaaca

SEQ ID NO: 2618572 - RNA, 19 nt, Homo sapiens
  misc_RNA (1)...(19): siRNA sense strand
gaaagaaauaacuguggaa

SEQ ID NO: 2618573 - RNA, 19 nt, Homo sapiens
  misc_RNA (1)...(19): siRNA sense strand
caugagugggaaagaaaua

SEQ ID NO: 2618574 - RNA, 19 nt, Homo sapiens
  misc_RNA (1)...(19): siRNA sense strand
ggcagaaauugcaaagcua

SEQ ID NO: 2618575 - RNA, 19 nt, Homo sapiens
  misc_RNA (1)...(19): siRNA sense strand
gaucacaacuugaagcaga

SEQ ID NO: 2618576 - RNA, 19 nt, Homo sapiens
  misc_RNA (1)...(19): siRNA sense strand
auugagaucugcagguaaa

SEQ ID NO: 2618577 - RNA, 19 nt, Homo sapiens
  misc_RNA (1)...(19): siRNA sense strand
auuacaacgucgugcuaaa

SEQ ID NO: 2618578 - RNA, 19 nt, Homo sapiens
  misc_RNA (1)...(19): siRNA sense strand
agaaguauugggaaggaaa

SEQ ID NO: 2618579 - RNA, 19 nt, Homo sapiens
  misc_RNA (1)...(19): siRNA sense strand
agaaauaacagcggugaua

SEQ ID NO: 2618580 - RNA, 19 nt, Homo sapiens
  misc_RNA (1)...(19): siRNA sense strand
cagacaacuuggagcucua

SEQ ID NO: 2618581 - RNA, 19 nt, Homo sapiens
  misc_RNA (1)...(19): siRNA sense strand
gcuaguagugcuaaugaaa

SEQ ID NO: 2618582 - RNA, 19 nt, Homo sapiens
  misc_RNA (1)...(19): siRNA sense strand
agcuaugagaguagaguaa

SEQ ID NO: 2618583 - RNA, 19 nt, Homo sapiens
  misc_RNA (1)...(19): siRNA sense strand
gcacuucagaggagaacua

SEQ ID NO: 2618584 - RNA, 19 nt, Homo sapiens
  misc_RNA (1)...(19): siRNA sense strand
gggauuuagugaagaacca

SEQ ID NO: 2618585 - RNA, 19 nt, Homo sapiens
  misc_RNA (1)...(19): siRNA sense strand
gcuagaauugggaaauaaa

SEQ ID NO: 2618586 - RNA, 19 nt, Homo sapiens
  misc_RNA (1)...(19): siRNA sense strand
gcagaaaugcaaagagugu

SEQ ID NO: 2618587 - RNA, 19 nt, Homo sapiens
  misc_RNA (1)...(19): siRNA sense strand
aguugaaggcaaaggaaga

SEQ ID NO: 2618588 - RNA, 19 nt, Homo sapiens
  misc_RNA (1)...(19): siRNA sense strand
agauaugaacgcuaaguua

SEQ ID NO: 2618589 - RNA, 19 nt, Homo sapiens
  misc_RNA (1)...(19): siRNA sense strand
gaugaagaacagaagaauu

SEQ ID NO: 2618590 - RNA, 19 nt, Homo sapiens
  misc_RNA (1)...(19): siRNA sense strand
ggaaaguagaacaaaugua

SEQ ID NO: 2618591 - RNA, 19 nt, Homo sapiens
  misc_RNA (1)...(19): siRNA sense strand
acaacuugaagcagaaaua

SEQ ID NO: 2618592 - RNA, 19 nt, Homo sapiens
  misc_RNA (1)...(19): siRNA sense strand
ucauagaaguauugggaag

SEQ ID NO: 2618593 - RNA, 19 nt, Homo sapiens
  misc_RNA (1)...(19): siRNA sense strand
caucagguuuaauggacaa

SEQ ID NO: 2618594 - RNA, 19 nt, Homo sapiens
  misc_RNA (1)...(19): siRNA sense strand
aggcucaguugaaggcaaa

SEQ ID NO: 2618595 - RNA, 19 nt, Homo sapiens
  misc_RNA (1)...(19): siRNA sense strand
aaacuaaugccaugggauu

SEQ ID NO: 2618596 - RNA, 19 nt, Homo sapiens
  misc_RNA (1)...(19): siRNA sense strand
agaauaaagguguaccaaa

SEQ ID NO: 2618597 - RNA, 19 nt, Homo sapiens
  misc_RNA (1)...(19): siRNA sense strand
gaaugugggaggugaaaca

SEQ ID NO: 2618598 - RNA, 19 nt, Homo sapiens
  misc_RNA (1)...(19): siRNA sense strand
ccuuaaaaguagagaauag

SEQ ID NO: 2618599 - RNA, 19 nt, Homo sapiens
  misc_RNA (1)...(19): siRNA sense strand
uaaaggaaggugugaguau

SEQ ID NO: 2618600 - RNA, 19 nt, Homo sapiens
  misc_RNA (1)...(19): siRNA sense strand
caucaacaggagagagaca

SEQ ID NO: 2618601 - RNA, 19 nt, Homo sapiens
  misc_RNA (1)...(19): siRNA sense strand
aggcaaaggaagaaaugau

SEQ ID NO: 2618602 - RNA, 19 nt, Homo sapiens
  misc_RNA (1)...(19): siRNA sense strand
uugaaaugauggcugauaa

SEQ ID NO: 2618603 - RNA, 19 nt, Homo sapiens
  misc_RNA (1)...(19): siRNA sense strand
gaugggauuuagugaagaa

SEQ ID NO: 2618604 - RNA, 19 nt, Homo sapiens
  misc_RNA (1)...(19): siRNA sense strand
aagaaauggcucagcaaga

SEQ ID NO: 2618605 - RNA, 19 nt, Homo sapiens
  misc_RNA (1)...(19): siRNA sense strand
aguaggaguuugaugaaga

SEQ ID NO: 2618606 - RNA, 19 nt, Homo sapiens
  misc_RNA (1)...(19): siRNA sense strand
ugaagaaagucaagauaac

SEQ ID NO: 2618607 - RNA, 19 nt, Homo sapiens
  misc_RNA (1)...(19): siRNA sense strand
augaaaaugggcagagaaa

SEQ ID NO: 2618608 - RNA, 19 nt, Homo sapiens
  misc_RNA (1)...(19): siRNA sense strand
guagaaguccagaaaggaa

SEQ ID NO: 2618609 - RNA, 19 nt, Homo sapiens
  misc_RNA (1)...(19): siRNA sense strand
augaagaacaagaugaaga

SEQ ID NO: 2618610 - RNA, 19 nt, Homo sapiens
  misc_RNA (1)...(19): siRNA sense strand
ccaaagaagaacaccaaca

SEQ ID NO: 2618611 - RNA, 19 nt, Homo sapiens
  misc_RNA (1)...(19): siRNA sense strand
gcaaagaauugauugguuc

SEQ ID NO: 2618612 - RNA, 19 nt, Homo sapiens
  misc_RNA (1)...(19): siRNA sense strand
ugaagaacaagaugaagaa

SEQ ID NO: 2618613 - RNA, 19 nt, Homo sapiens
  misc_RNA (1)...(19): siRNA sense strand
uaguagugcuaaugaaaca

SEQ ID NO: 2618614 - RNA, 19 nt, Homo sapiens
  misc_RNA (1)...(19): siRNA sense strand
aaaggaugccauagugaua

SEQ ID NO: 2618615 - RNA, 19 nt, Homo sapiens
  misc_RNA (1)...(19): siRNA sense strand
caguagagcaaaugaaaau

SEQ ID NO: 2618616 - RNA, 19 nt, Homo sapiens
  misc_RNA (1)...(19): siRNA sense strand
agagcaaguuggauaucaa

SEQ ID NO: 2618617 - RNA, 19 nt, Homo sapiens
  misc_RNA (1)...(19): siRNA sense strand
ccuucaaguuaaacaaaga

SEQ ID NO: 2618618 - RNA, 19 nt, Homo sapiens
  misc_RNA (1)...(19): siRNA sense strand
gcguaagaccuuucaccaa

SEQ ID NO: 2618619 - RNA, 19 nt, Homo sapiens
  misc_RNA (1)...(19): siRNA sense strand
uggcuagaauugggaaaua

SEQ ID NO: 2618620 - RNA, 19 nt, Homo sapiens
  misc_RNA (1)...(19): siRNA sense strand
ggcuagaauugggaaauaa

SEQ ID NO: 2618621 - RNA, 19 nt, Homo sapiens
  misc_RNA (1)...(19): siRNA sense strand
gagaauugaaggcagaaau

SEQ ID NO: 2618622 - RNA, 19 nt, Homo sapiens
  misc_RNA (1)...(19): siRNA sense strand
gcucugucggcaagaaaua

SEQ ID NO: 2618623 - RNA, 19 nt, Homo sapiens
  misc_RNA (1)...(19): siRNA sense strand
cugcauuugaagucggaua

SEQ ID NO: 2618624 - RNA, 19 nt, Homo sapiens
  misc_RNA (1)...(19): siRNA sense strand
caaaagaagcagagaggca

SEQ ID NO: 2618625 - RNA, 19 nt, Homo sapiens
  misc_RNA (1)...(19): siRNA sense strand
ucacagagaugaaaggguu

SEQ ID NO: 2618626 - RNA, 19 nt, Homo sapiens
  misc_RNA (1)...(19): siRNA sense strand
uggugaaauaugauggaau

SEQ ID NO: 2618627 - RNA, 19 nt, Homo sapiens
  misc_RNA (1)...(19): siRNA sense strand
gagcaugguucuaaggaug

SEQ ID NO: 2618628 - RNA, 19 nt, Homo sapiens
  misc_RNA (1)...(19): siRNA sense strand
ggucuuagcucaagcaccu

SEQ ID NO: 2618629 - RNA, 19 nt, Homo sapiens
  misc_RNA (1)...(19): siRNA sense strand
aggcagaccuucaucccaa

SEQ ID NO: 2618630 - RNA, 19 nt, Homo sapiens
  misc_RNA (1)...(19): siRNA sense strand
gcaaauaccauaauuggca

SEQ ID NO: 2618631 - RNA, 19 nt, Homo sapiens
  misc_RNA (1)...(19): siRNA sense strand
aggaaggagaugagcccau

SEQ ID NO: 2618632 - RNA, 19 nt, Homo sapiens
  misc_RNA (1)...(19): siRNA sense strand
agguaagcauguggaauau

SEQ ID NO: 2618633 - RNA, 19 nt, Homo sapiens
  misc_RNA (1)...(19): siRNA sense strand
uuggcaaagcaguggaaca

SEQ ID NO: 2618634 - RNA, 19 nt, Homo sapiens
  misc_RNA (1)...(19): siRNA sense strand
ucucauggauggaaggaag

SEQ ID NO: 2618635 - RNA, 19 nt, Homo sapiens
  misc_RNA (1)...(19): siRNA sense strand
caaauaccauaauuggcaa

SEQ ID NO: 2618636 - RNA, 19 nt, Homo sapiens
  misc_RNA (1)...(19): siRNA sense strand
gcaggaacaucgugggcug

SEQ ID NO: 2618637 - RNA, 19 nt, Homo sapiens
  misc_RNA (1)...(19): siRNA sense strand
acuaaagagcggacugaga

SEQ ID NO: 2618638 - RNA, 19 nt, Homo sapiens
  misc_RNA (1)...(19): siRNA sense strand
guacaauaaaucuggagga

SEQ ID NO: 2618639 - RNA, 19 nt, Homo sapiens
  misc_RNA (1)...(19): siRNA sense strand
aggauaaaacauugagaga

SEQ ID NO: 2618640 - RNA, 19 nt, Homo sapiens
  misc_RNA (1)...(19): siRNA sense strand
aaguguuggauaaaggaaa

SEQ ID NO: 2618641 - RNA, 19 nt, Homo sapiens
  misc_RNA (1)...(19): siRNA sense strand
gaaaggauucauucgggaa

SEQ ID NO: 2618642 - RNA, 19 nt, Homo sapiens
  misc_RNA (1)...(19): siRNA sense strand
ggauaaaggaaaaccugaa

SEQ ID NO: 2618643 - RNA, 19 nt, Homo sapiens
  misc_RNA (1)...(19): siRNA sense strand
ggaaaggauucauucggga

SEQ ID NO: 2618644 - RNA, 19 nt, Homo sapiens
  misc_RNA (1)...(19): siRNA sense strand
ggggcagaggccagagaaa

SEQ ID NO: 2618645 - RNA, 19 nt, Homo sapiens
  misc_RNA (1)...(19): siRNA sense strand
aguguuggauaaaggaaaa

SEQ ID NO: 2618646 - RNA, 19 nt, Homo sapiens
  misc_RNA (1)...(19): siRNA sense strand
gggacugcuuccagccaau

SEQ ID NO: 2618647 - RNA, 19 nt, Homo sapiens
  misc_RNA (1)...(19): siRNA sense strand
ggacugagaaauugcccau

SEQ ID NO: 2618648 - RNA, 19 nt, Homo sapiens
  misc_RNA (1)...(19): siRNA sense strand
gggccaagaucaugguggu

SEQ ID NO: 2618649 - RNA, 19 nt, Homo sapiens
  misc_RNA (1)...(19): siRNA sense strand
aggccgaagagaacaagaa

SEQ ID NO: 2618650 - RNA, 19 nt, Homo sapiens
  misc_RNA (1)...(19): siRNA sense strand
caccuuuaaacuagaacaa

SEQ ID NO: 2618651 - RNA, 19 nt, Homo sapiens
  misc_RNA (1)...(19): siRNA sense strand
cugcaagucuucagagaua

SEQ ID NO: 2618652 - RNA, 19 nt, Homo sapiens
  misc_RNA (1)...(19): siRNA sense strand
gguaaugguaaauggccaa

SEQ ID NO: 2618653 - RNA, 19 nt, Homo sapiens
  misc_RNA (1)...(19): siRNA sense strand
acaaggaauacaagguaau

SEQ ID NO: 2618654 - RNA, 19 nt, Homo sapiens
  misc_RNA (1)...(19): siRNA sense strand
agguaaugguaaauggcca

SEQ ID NO: 2618655 - RNA, 19 nt, Homo sapiens
  misc_RNA (1)...(19): siRNA sense strand
ccuguugguucgugcguga

SEQ ID NO: 2618656 - RNA, 19 nt, Homo sapiens
  misc_RNA (1)...(19): siRNA sense strand
ccagagugcuuaucagcga

SEQ ID NO: 2618657 - RNA, 19 nt, Homo sapiens
  misc_RNA (1)...(19): siRNA sense strand
caguuguguguuuggcaua

SEQ ID NO: 2618658 - RNA, 19 nt, Homo sapiens
  misc_RNA (1)...(19): siRNA sense strand
cugugaagaugcugcaagu

SEQ ID NO: 2618659 - RNA, 19 nt, Homo sapiens
  misc_RNA (1)...(19): siRNA sense strand
uauggagauaugaggagaa

SEQ ID NO: 2618660 - RNA, 19 nt, Homo sapiens
  misc_RNA (1)...(19): siRNA sense strand
cugcaagucuucagagaua

SEQ ID NO: 2618661 - RNA, 19 nt, Homo sapiens
  misc_RNA (1)...(19): siRNA sense strand
gguaaugguaaauggccaa

SEQ ID NO: 2618662 - RNA, 19 nt, Homo sapiens
  misc_RNA (1)...(19): siRNA sense strand
acaaggaauacaagguaau

SEQ ID NO: 2618663 - RNA, 19 nt, Homo sapiens
  misc_RNA (1)...(19): siRNA sense strand
agguaaugguaaauggcca

SEQ ID NO: 2618664 - RNA, 19 nt, Homo sapiens
  misc_RNA (1)...(19): siRNA sense strand
ccuguugguucgugcguga

SEQ ID NO: 2618665 - RNA, 19 nt, Homo sapiens
  misc_RNA (1)...(19): siRNA sense strand
ccagagugcuuaucagcga

SEQ ID NO: 2618666 - RNA, 19 nt, Homo sapiens
  misc_RNA (1)...(19): siRNA sense strand
caguuguguguuuggcaua

SEQ ID NO: 2618667 - RNA, 19 nt, Homo sapiens
  misc_RNA (1)...(19): siRNA sense strand
cugugaagaugcugcaagu

SEQ ID NO: 2618668 - RNA, 19 nt, Homo sapiens
  misc_RNA (1)...(19): siRNA sense strand
uauggagauaugaggagaa

SEQ ID NO: 2618669 - RNA, 19 nt, Homo sapiens
  misc_RNA (1)...(19): siRNA sense strand
gaaaauaauuacaggagca

SEQ ID NO: 2618670 - RNA, 19 nt, Homo sapiens
  misc_RNA (1)...(19): siRNA sense strand
caggaagaggcgagaaaca

SEQ ID NO: 2618671 - RNA, 19 nt, Homo sapiens
  misc_RNA (1)...(19): siRNA sense strand
cucaagaagcacuuagaaa

SEQ ID NO: 2618672 - RNA, 19 nt, Homo sapiens
  misc_RNA (1)...(19): siRNA sense strand
ccuucauggucgucaacaa

SEQ ID NO: 2618673 - RNA, 19 nt, Homo sapiens
  misc_RNA (1)...(19): siRNA sense strand
cucaggaagaggcgagaaa

SEQ ID NO: 2618674 - RNA, 19 nt, Homo sapiens
  misc_RNA (1)...(19): siRNA sense strand
gggagaugacccucagcaa

SEQ ID NO: 2618675 - RNA, 19 nt, Homo sapiens
  misc_RNA (1)...(19): siRNA sense strand
gcgagaaacaagucaggca

SEQ ID NO: 2618676 - RNA, 19 nt, Homo sapiens
  misc_RNA (1)...(19): siRNA sense strand
gagaagauauuaaagcagu

SEQ ID NO: 2618677 - RNA, 19 nt, Homo sapiens
  misc_RNA (1)...(19): siRNA sense strand
gaagcuguuuccagggaga

SEQ ID NO: 2618678 - RNA, 19 nt, Homo sapiens
  misc_RNA (1)...(19): siRNA sense strand
aggaagaggcgagaaacaa

SEQ ID NO: 2618679 - RNA, 19 nt, Homo sapiens
  misc_RNA (1)...(19): siRNA sense strand
agauacaacgauagcuuau

SEQ ID NO: 2618680 - RNA, 19 nt, Homo sapiens
  misc_RNA (1)...(19): siRNA sense strand
aagaugaagcagugauguu

SEQ ID NO: 2618681 - RNA, 19 nt, Homo sapiens
  misc_RNA (1)...(19): siRNA sense strand
cuuuauaagacagggaaga

SEQ ID NO: 2618682 - RNA, 19 nt, Homo sapiens
  misc_RNA (1)...(19): siRNA sense strand
cgagaaacaagucaggcau

SEQ ID NO: 2618683 - RNA, 19 nt, Homo sapiens
  misc_RNA (1)...(19): siRNA sense strand
uuacaggagcagagaucga

SEQ ID NO: 2618684 - RNA, 19 nt, Homo sapiens
  misc_RNA (1)...(19): siRNA sense strand
guguaagagaggagaggaa

SEQ ID NO: 2618685 - RNA, 19 nt, Homo sapiens
  misc_RNA (1)...(19): siRNA sense strand
ccgcagacugaaugugaaa

SEQ ID NO: 2618686 - RNA, 19 nt, Homo sapiens
  misc_RNA (1)...(19): siRNA sense strand
acuauauguugguggucua

SEQ ID NO: 2618687 - RNA, 19 nt, Homo sapiens
  misc_RNA (1)...(19): siRNA sense strand
ccaaagaaaaguaugggaa

SEQ ID NO: 2618688 - RNA, 19 nt, Homo sapiens
  misc_RNA (1)...(19): siRNA sense strand
ccaggcagccagaggaaaa

SEQ ID NO: 2618689 - RNA, 19 nt, Homo sapiens
  misc_RNA (1)...(19): siRNA sense strand
cugagacagauuuaagaaa

SEQ ID NO: 2618690 - RNA, 19 nt, Homo sapiens
  misc_RNA (1)...(19): siRNA sense strand
ggaucaaacuagaaccugu

SEQ ID NO: 2618691 - RNA, 19 nt, Homo sapiens
  misc_RNA (1)...(19): siRNA sense strand
gaaaaguaugggaaggaau

SEQ ID NO: 2618692 - RNA, 19 nt, Homo sapiens
  misc_RNA (1)...(19): siRNA sense strand
ugccaaagucagaugucaa

SEQ ID NO: 2618693 - RNA, 19 nt, Homo sapiens
  misc_RNA (1)...(19): siRNA sense strand
ccauauauccgaaugacca

SEQ ID NO: 2618694 - RNA, 19 nt, Homo sapiens
  misc_RNA (1)...(19): siRNA sense strand
aagaagaagccucugccaa

SEQ ID NO: 2618695 - RNA, 19 nt, Homo sapiens
  misc_RNA (1)...(19): siRNA sense strand
cauuacugagacagauuua

SEQ ID NO: 2618696 - RNA, 19 nt, Homo sapiens
  misc_RNA (1)...(19): siRNA sense strand
ugagaagccuacagaucca

SEQ ID NO: 2618697 - RNA, 19 nt, Homo sapiens
  misc_RNA (1)...(19): siRNA sense strand
gauuguaaauggccgcaga

SEQ ID NO: 2618698 - RNA, 19 nt, Homo sapiens
  misc_RNA (1)...(19): siRNA sense strand
caugagaagccuacagauc

SEQ ID NO: 2618699 - RNA, 19 nt, Homo sapiens
  misc_RNA (1)...(19): siRNA sense strand
augucaacaaagaguacua

SEQ ID NO: 2618700 - RNA, 19 nt, Homo sapiens
  misc_RNA (1)...(19): siRNA sense strand
gaauaaaacagcagaguca

SEQ ID NO: 2618701 - RNA, 19 nt, Homo sapiens
  misc_RNA (1)...(19): siRNA sense strand
aaguaauggaugaagcaaa

SEQ ID NO: 2618702 - RNA, 19 nt, Homo sapiens
  misc_RNA (1)...(19): siRNA sense strand
gaugaaagucagugggaac

SEQ ID NO: 2618703 - RNA, 19 nt, Homo sapiens
  misc_RNA (1)...(19): siRNA sense strand
ggacaaugaaagaaaagua

SEQ ID NO: 2618704 - RNA, 19 nt, Homo sapiens
  misc_RNA (1)...(19): siRNA sense strand
ggaaauaauucaguggcau

SEQ ID NO: 2618705 - RNA, 19 nt, Homo sapiens
  misc_RNA (1)...(19): siRNA sense strand
uauaagaacacuaggagga

SEQ ID NO: 2618706 - RNA, 19 nt, Homo sapiens
  misc_RNA (1)...(19): siRNA sense strand
aagaacacuaggaggaauu

SEQ ID NO: 2618707 - RNA, 19 nt, Homo sapiens
  misc_RNA (1)...(19): siRNA sense strand
auaccaaggcaucggacaa

SEQ ID NO: 2618708 - RNA, 19 nt, Homo sapiens
  misc_RNA (1)...(19): siRNA sense strand
uguaaaggaaucuggguca

SEQ ID NO: 2618709 - RNA, 19 nt, Homo sapiens
  misc_RNA (1)...(19): siRNA sense strand
cacauuucuucaugggaua

SEQ ID NO: 2618710 - RNA, 19 nt, Homo sapiens
  misc_RNA (1)...(19): siRNA sense strand
cugcuggaacagauaguaa

SEQ ID NO: 2618711 - RNA, 19 nt, Homo sapiens
  misc_RNA (1)...(19): siRNA sense strand
ccacauuucuucaugggau

SEQ ID NO: 2618712 - RNA, 19 nt, Homo sapiens
  misc_RNA (1)...(19): siRNA sense strand
uggaaauaauucaguggca

SEQ ID NO: 2618713 - RNA, 19 nt, Homo sapiens
  misc_RNA (1)...(19): siRNA sense strand
cugugggaacaauggaaua

SEQ ID NO: 2618714 - RNA, 19 nt, Homo sapiens
  misc_RNA (1)...(19): siRNA sense strand
ggagcuuguaggauauaua

SEQ ID NO: 2618715 - RNA, 19 nt, Homo sapiens
  misc_RNA (1)...(19): siRNA sense strand
gucaaugguuauaagaaca

SEQ ID NO: 2618716 - RNA, 19 nt, Homo sapiens
  misc_RNA (1)...(19): siRNA sense strand
agucaaugguuauaagaac

SEQ ID NO: 2618717 - RNA, 19 nt, Homo sapiens
  misc_RNA (1)...(19): siRNA sense strand
aguaauggaugaagcaaac

SEQ ID NO: 2618718 - RNA, 19 nt, Homo sapiens
  misc_RNA (1)...(19): siRNA sense strand
gggaauaugcuucguggca

SEQ ID NO: 2618719 - RNA, 19 nt, Homo sapiens
  misc_RNA (1)...(19): siRNA sense strand
guaauuuggacaugcaaga

SEQ ID NO: 2618720 - RNA, 19 nt, Homo sapiens
  misc_RNA (1)...(19): siRNA sense strand
acucaaauagaaaggagau

SEQ ID NO: 2618721 - RNA, 19 nt, Homo sapiens
  misc_RNA (1)...(19): siRNA sense strand
guuugaaugcaauaggaau

SEQ ID NO: 2618722 - RNA, 19 nt, Homo sapiens
  misc_RNA (1)...(19): siRNA sense strand
uaucauugcaugugcugaa

SEQ ID NO: 2618723 - RNA, 19 nt, Homo sapiens
  misc_RNA (1)...(19): siRNA sense strand
ggaaaagauaccaaggcau

SEQ ID NO: 2618724 - RNA, 19 nt, Homo sapiens
  misc_RNA (1)...(19): siRNA sense strand
ccuuaugggaacuggaagu

SEQ ID NO: 2618725 - RNA, 19 nt, Homo sapiens
  misc_RNA (1)...(19): siRNA sense strand
ggaaccagucugugggaac

SEQ ID NO: 2618726 - RNA, 19 nt, Homo sapiens
  misc_RNA (1)...(19): siRNA sense strand
caccugagauaguagaaaa

SEQ ID NO: 2618727 - RNA, 19 nt, Homo sapiens
  misc_RNA (1)...(19): siRNA sense strand
gaaauaauucaguggcauc

SEQ ID NO: 2618728 - RNA, 19 nt, Homo sapiens
  misc_RNA (1)...(19): siRNA sense strand
gggugaaugcccaagagau

SEQ ID NO: 2618729 - RNA, 19 nt, Homo sapiens
  misc_RNA (1)...(19): siRNA sense strand
gguuauaagaacacuagga

SEQ ID NO: 2618730 - RNA, 19 nt, Homo sapiens
  misc_RNA (1)...(19): siRNA sense strand
agacaaugcugcugccaac

SEQ ID NO: 2618731 - RNA, 19 nt, Homo sapiens
  misc_RNA (1)...(19): siRNA sense strand
uggaaauuugcuugugauu

SEQ ID NO: 2618732 - RNA, 19 nt, Homo sapiens
  misc_RNA (1)...(19): siRNA sense strand
uugucuagcaggaugcaaa

SEQ ID NO: 2618733 - RNA, 19 nt, Homo sapiens
  misc_RNA (1)...(19): siRNA sense strand
uguugcaauucaagucaua

SEQ ID NO: 2618734 - RNA, 19 nt, Homo sapiens
  misc_RNA (1)...(19): siRNA sense strand
agguaguuugaaugcaaua

SEQ ID NO: 2618735 - RNA, 19 nt, Homo sapiens
  misc_RNA (1)...(19): siRNA sense strand
gggaacaauggaauaacuu

SEQ ID NO: 2618736 - RNA, 19 nt, Homo sapiens
  misc_RNA (1)...(19): siRNA sense strand
gagucagcaucuucagaga

SEQ ID NO: 2618737 - RNA, 19 nt, Homo sapiens
  misc_RNA (1)...(19): siRNA sense strand
cagucaaugguuauaagaa

SEQ ID NO: 2618738 - RNA, 19 nt, Homo sapiens
  misc_RNA (1)...(19): siRNA sense strand
aggaauucuagcuccaaua

SEQ ID NO: 2618739 - RNA, 19 nt, Homo sapiens
  misc_RNA (1)...(19): siRNA sense strand
ccauaguaccauuggggau

SEQ ID NO: 2618740 - RNA, 19 nt, Homo sapiens
  misc_RNA (1)...(19): siRNA sense strand
gcugaaaacaaaugaugau

SEQ ID NO: 2618741 - RNA, 19 nt, Homo sapiens
  misc_RNA (1)...(19): siRNA sense strand
ccuugaccuaugauggaaa

SEQ ID NO: 2618742 - RNA, 19 nt, Homo sapiens
  misc_RNA (1)...(19): siRNA sense strand
ugaugaaagucagugggaa

SEQ ID NO: 2618743 - RNA, 19 nt, Homo sapiens
  misc_RNA (1)...(19): siRNA sense strand
caucuauguugcaauucaa

SEQ ID NO: 2618744 - RNA, 19 nt, Homo sapiens
  misc_RNA (1)...(19): siRNA sense strand
uggaacagauaguaaaaca

SEQ ID NO: 2618745 - RNA, 19 nt, Homo sapiens
  misc_RNA (1)...(19): siRNA sense strand
gcacgagagaagagggaca

SEQ ID NO: 2618746 - RNA, 19 nt, Homo sapiens
  misc_RNA (1)...(19): siRNA sense strand
acgcuaaauacguggagaa

SEQ ID NO: 2618747 - RNA, 19 nt, Homo sapiens
  misc_RNA (1)...(19): siRNA sense strand
gggacauggagcagagaca

SEQ ID NO: 2618748 - RNA, 19 nt, Homo sapiens
  misc_RNA (1)...(19): siRNA sense strand
aggcaggagaugagacgua

SEQ ID NO: 2618749 - RNA, 19 nt, Homo sapiens
  misc_RNA (1)...(19): siRNA sense strand
gggccaagauaaugccaca

SEQ ID NO: 2618750 - RNA, 19 nt, Homo sapiens
  misc_RNA (1)...(19): siRNA sense strand
aggccauggcagugaagaa

SEQ ID NO: 2618751 - RNA, 19 nt, Homo sapiens
  misc_RNA (1)...(19): siRNA sense strand
gaaccaagcuuaagagagg

SEQ ID NO: 2618752 - RNA, 19 nt, Homo sapiens
  misc_RNA (1)...(19): siRNA sense strand
gguucaccauucagagcaa

SEQ ID NO: 2618753 - RNA, 19 nt, Homo sapiens
  misc_RNA (1)...(19): siRNA sense strand
gagaagaaguuccugacca

SEQ ID NO: 2618754 - RNA, 19 nt, Homo sapiens
  misc_RNA (1)...(19): siRNA sense strand
gcauuuaagaccuggagca

SEQ ID NO: 2618755 - RNA, 19 nt, Homo sapiens
  misc_RNA (1)...(19): siRNA sense strand
caaagaugagggaggcuga

SEQ ID NO: 2618756 - RNA, 19 nt, Homo sapiens
  misc_RNA (1)...(19): siRNA sense strand
ucaugugugagcugggaaa

SEQ ID NO: 2618757 - RNA, 19 nt, Homo sapiens
  misc_RNA (1)...(19): siRNA sense strand
ggucuugaauucagcacga

SEQ ID NO: 2618758 - RNA, 19 nt, Homo sapiens
  misc_RNA (1)...(19): siRNA sense strand
gccugagauucgagggcga

SEQ ID NO: 2618759 - RNA, 19 nt, Homo sapiens
  misc_RNA (1)...(19): siRNA sense strand
cagaagaaguacaaggacc

SEQ ID NO: 2618760 - RNA, 19 nt, Homo sapiens
  misc_RNA (1)...(19): siRNA sense strand
ucuucuggccugugaguuu

SEQ ID NO: 2618761 - RNA, 19 nt, Homo sapiens
  misc_RNA (1)...(19): siRNA sense strand
cagaacuagugaagcucau

SEQ ID NO: 2618762 - RNA, 19 nt, Homo sapiens
  misc_RNA (1)...(19): siRNA sense strand
agccagaacuagugaagcu

SEQ ID NO: 2618763 - RNA, 19 nt, Homo sapiens
  misc_RNA (1)...(19): siRNA sense strand
gcugaugucaacuggguca

SEQ ID NO: 2618764 - RNA, 19 nt, Homo sapiens
  misc_RNA (1)...(19): siRNA sense strand
ccgugagccugaaccacaa

SEQ ID NO: 2618765 - RNA, 19 nt, Homo sapiens
  misc_RNA (1)...(19): siRNA sense strand
ccagaguguggauggcaau

SEQ ID NO: 2618766 - RNA, 19 nt, Homo sapiens
  misc_RNA (1)...(19): siRNA sense strand
agaagagggacauggagca

SEQ ID NO: 2618767 - RNA, 19 nt, Homo sapiens
  misc_RNA (1)...(19): siRNA sense strand
gauaaggagaagaagaaaa

SEQ ID NO: 2618768 - RNA, 19 nt, Homo sapiens
  misc_RNA (1)...(19): siRNA sense strand
ggguaaaguuccagggagg

SEQ ID NO: 2618769 - RNA, 19 nt, Homo sapiens
  misc_RNA (1)...(19): siRNA sense strand
guggaauccugaagggcuu

SEQ ID NO: 2618770 - RNA, 19 nt, Homo sapiens
  misc_RNA (1)...(19): siRNA sense strand
cgacaagacgauccgggua

SEQ ID NO: 2618771 - RNA, 19 nt, Homo sapiens
  misc_RNA (1)...(19): siRNA sense strand
ccauugaguacaugcgaga

SEQ ID NO: 2618772 - RNA, 19 nt, Homo sapiens
  misc_RNA (1)...(19): siRNA sense strand
aguacaagcucacggagga

SEQ ID NO: 2618773 - RNA, 19 nt, Homo sapiens
  misc_RNA (1)...(19): siRNA sense strand
aggagagcaucuuggacuu

SEQ ID NO: 2618774 - RNA, 19 nt, Homo sapiens
  misc_RNA (1)...(19): siRNA sense strand
cuuaacaagagcagaggaa

SEQ ID NO: 2618775 - RNA, 19 nt, Homo sapiens
  misc_RNA (1)...(19): siRNA sense strand
gcacagacaggguagguga

SEQ ID NO: 2618776 - RNA, 19 nt, Homo sapiens
  misc_RNA (1)...(19): siRNA sense strand
aaguguggcaagagguuua

SEQ ID NO: 2618777 - RNA, 19 nt, Homo sapiens
  misc_RNA (1)...(19): siRNA sense strand
cacaaauaaccuagagcau

SEQ ID NO: 2618778 - RNA, 19 nt, Homo sapiens
  misc_RNA (1)...(19): siRNA sense strand
cuguauaagcacucaaaga

SEQ ID NO: 2618779 - RNA, 19 nt, Homo sapiens
  misc_RNA (1)...(19): siRNA sense strand
acugauaaccaggaagaua

SEQ ID NO: 2618780 - RNA, 19 nt, Homo sapiens
  misc_RNA (1)...(19): siRNA sense strand
cucugaaaauuguggauaa

SEQ ID NO: 2618781 - RNA, 19 nt, Homo sapiens
  misc_RNA (1)...(19): siRNA sense strand
ccacaguugaccagggcau

SEQ ID NO: 2618782 - RNA, 19 nt, Homo sapiens
  misc_RNA (1)...(19): siRNA sense strand
ccaggaagauagugcgauc

SEQ ID NO: 2618783 - RNA, 19 nt, Homo sapiens
  misc_RNA (1)...(19): siRNA sense strand
cagaaggagaucagaccau

SEQ ID NO: 2618784 - RNA, 19 nt, Homo sapiens
  misc_RNA (1)...(19): siRNA sense strand
cuguggaaguggaaggagu

SEQ ID NO: 2618785 - RNA, 19 nt, Homo sapiens
  misc_RNA (1)...(19): siRNA sense strand
cgacaaggacgcugcccau

SEQ ID NO: 2618786 - RNA, 19 nt, Homo sapiens
  misc_RNA (1)...(19): siRNA sense strand
gaggagaacaguuugggau

SEQ ID NO: 2618787 - RNA, 19 nt, Homo sapiens
  misc_RNA (1)...(19): siRNA sense strand
aggccuuaucagagcacaa

SEQ ID NO: 2618788 - RNA, 19 nt, Homo sapiens
  misc_RNA (1)...(19): siRNA sense strand
gcagcgagucuguggaagu

SEQ ID NO: 2618789 - RNA, 19 nt, Homo sapiens
  misc_RNA (1)...(19): siRNA sense strand
ccaaacaccacuagugacu

SEQ ID NO: 2618790 - RNA, 19 nt, Homo sapiens
  misc_RNA (1)...(19): siRNA sense strand
gauaauauuccaaacacca

SEQ ID NO: 2618791 - RNA, 19 nt, Homo sapiens
  misc_RNA (1)...(19): siRNA sense strand
cuaccaaggaggagaacag

SEQ ID NO: 2618792 - RNA, 19 nt, Homo sapiens
  misc_RNA (1)...(19): siRNA sense strand
gcaagaagcacauccgugu

SEQ ID NO: 2618793 - RNA, 19 nt, Homo sapiens
  misc_RNA (1)...(19): siRNA sense strand
gugucauuguaguggggaa

SEQ ID NO: 2618794 - RNA, 19 nt, Homo sapiens
  misc_RNA (1)...(19): siRNA sense strand
agagcaauguaauggaugu

SEQ ID NO: 2618795 - RNA, 19 nt, Homo sapiens
  misc_RNA (1)...(19): siRNA sense strand
ugacagauugcaagaagca

SEQ ID NO: 2618796 - RNA, 19 nt, Homo sapiens
  misc_RNA (1)...(19): siRNA sense strand
acagauugcaagaagcaca

SEQ ID NO: 2618797 - RNA, 19 nt, Homo sapiens
  misc_RNA (1)...(19): siRNA sense strand
cuuaacaagagcagaggaa

SEQ ID NO: 2618798 - RNA, 19 nt, Homo sapiens
  misc_RNA (1)...(19): siRNA sense strand
gcacagacaggguagguga

SEQ ID NO: 2618799 - RNA, 19 nt, Homo sapiens
  misc_RNA (1)...(19): siRNA sense strand
aaguguggcaagagguuua

SEQ ID NO: 2618800 - RNA, 19 nt, Homo sapiens
  misc_RNA (1)...(19): siRNA sense strand
cacaaauaaccuagagcau

SEQ ID NO: 2618801 - RNA, 19 nt, Homo sapiens
  misc_RNA (1)...(19): siRNA sense strand
cuguauaagcacucaaaga

SEQ ID NO: 2618802 - RNA, 19 nt, Homo sapiens
  misc_RNA (1)...(19): siRNA sense strand
acugauaaccaggaagaua

SEQ ID NO: 2618803 - RNA, 19 nt, Homo sapiens
  misc_RNA (1)...(19): siRNA sense strand
cucugaaaauuguggauaa

SEQ ID NO: 2618804 - RNA, 19 nt, Homo sapiens
  misc_RNA (1)...(19): siRNA sense strand
ccacaguugaccagggcau

SEQ ID NO: 2618805 - RNA, 19 nt, Homo sapiens
  misc_RNA (1)...(19): siRNA sense strand
ccaggaagauagugcgauc

SEQ ID NO: 2618806 - RNA, 19 nt, Homo sapiens
  misc_RNA (1)...(19): siRNA sense strand
cagaaggagaucagaccau

SEQ ID NO: 2618807 - RNA, 19 nt, Homo sapiens
  misc_RNA (1)...(19): siRNA sense strand
cuguggaaguggaaggagu

SEQ ID NO: 2618808 - RNA, 19 nt, Homo sapiens
  misc_RNA (1)...(19): siRNA sense strand
cgacaaggacgcugcccau

SEQ ID NO: 2618809 - RNA, 19 nt, Homo sapiens
  misc_RNA (1)...(19): siRNA sense strand
gaggagaacaguuugggau

SEQ ID NO: 2618810 - RNA, 19 nt, Homo sapiens
  misc_RNA (1)...(19): siRNA sense strand
aggccuuaucagagcacaa

SEQ ID NO: 2618811 - RNA, 19 nt, Homo sapiens
  misc_RNA (1)...(19): siRNA sense strand
gcagcgagucuguggaagu

SEQ ID NO: 2618812 - RNA, 19 nt, Homo sapiens
  misc_RNA (1)...(19): siRNA sense strand
ccaaacaccacuagugacu

SEQ ID NO: 2618813 - RNA, 19 nt, Homo sapiens
  misc_RNA (1)...(19): siRNA sense strand
gauaauauuccaaacacca

SEQ ID NO: 2618814 - RNA, 19 nt, Homo sapiens
  misc_RNA (1)...(19): siRNA sense strand
cuaccaaggaggagaacag

SEQ ID NO: 2618815 - RNA, 19 nt, Homo sapiens
  misc_RNA (1)...(19): siRNA sense strand
gcaagaagcacauccgugu

SEQ ID NO: 2618816 - RNA, 19 nt, Homo sapiens
  misc_RNA (1)...(19): siRNA sense strand
gugucauuguaguggggaa

SEQ ID NO: 2618817 - RNA, 19 nt, Homo sapiens
  misc_RNA (1)...(19): siRNA sense strand
agagcaauguaauggaugu

SEQ ID NO: 2618818 - RNA, 19 nt, Homo sapiens
  misc_RNA (1)...(19): siRNA sense strand
ugacagauugcaagaagca

SEQ ID NO: 2618819 - RNA, 19 nt, Homo sapiens
  misc_RNA (1)...(19): siRNA sense strand
acagauugcaagaagcaca

SEQ ID NO: 2618820 - RNA, 19 nt, Homo sapiens
  misc_RNA (1)...(19): siRNA sense strand
ccacagaaaucaaugguga

SEQ ID NO: 2618821 - RNA, 19 nt, Homo sapiens
  misc_RNA (1)...(19): siRNA sense strand
gugaauggacaguggccuu

SEQ ID NO: 2618822 - RNA, 19 nt, Homo sapiens
  misc_RNA (1)...(19): siRNA sense strand
gcagaaagauggacuggaa

SEQ ID NO: 2618823 - RNA, 19 nt, Homo sapiens
  misc_RNA (1)...(19): siRNA sense strand
gggaaaucuccaagaacaa

SEQ ID NO: 2618824 - RNA, 19 nt, Homo sapiens
  misc_RNA (1)...(19): siRNA sense strand
gagucaaguuuguggguca

SEQ ID NO: 2618825 - RNA, 19 nt, Homo sapiens
  misc_RNA (1)...(19): siRNA sense strand
uggaaauaccacaggcuua

SEQ ID NO: 2618826 - RNA, 19 nt, Homo sapiens
  misc_RNA (1)...(19): siRNA sense strand
gcacggaagcagcggaaaa

SEQ ID NO: 2618827 - RNA, 19 nt, Homo sapiens
  misc_RNA (1)...(19): siRNA sense strand
ccaaacaagucccaagaau

SEQ ID NO: 2618828 - RNA, 19 nt, Homo sapiens
  misc_RNA (1)...(19): siRNA sense strand
uggaugagaaugaggauau

SEQ ID NO: 2618829 - RNA, 19 nt, Homo sapiens
  misc_RNA (1)...(19): siRNA sense strand
ccaugaagaaggugggcuu

SEQ ID NO: 2618830 - RNA, 19 nt, Homo sapiens
  misc_RNA (1)...(19): siRNA sense strand
ccuucaagauggcaguaaa

SEQ ID NO: 2618831 - RNA, 19 nt, Homo sapiens
  misc_RNA (1)...(19): siRNA sense strand
guguaugaccugauggcua

SEQ ID NO: 2618832 - RNA, 19 nt, Homo sapiens
  misc_RNA (1)...(19): siRNA sense strand
caucaaaguuggagagacc

SEQ ID NO: 2618833 - RNA, 19 nt, Homo sapiens
  misc_RNA (1)...(19): siRNA sense strand
gcacugagccugagucuuu

SEQ ID NO: 2618834 - RNA, 19 nt, Homo sapiens
  misc_RNA (1)...(19): siRNA sense strand
gggaaacccaugacaguau

SEQ ID NO: 2618835 - RNA, 19 nt, Homo sapiens
  misc_RNA (1)...(19): siRNA sense strand
ccgaaaguaucuggagcua

SEQ ID NO: 2618836 - RNA, 19 nt, Homo sapiens
  misc_RNA (1)...(19): siRNA sense strand
aguaggacgagaagaggaa

SEQ ID NO: 2618837 - RNA, 19 nt, Homo sapiens
  misc_RNA (1)...(19): siRNA sense strand
ucuccaagaacaaggaauu

SEQ ID NO: 2618838 - RNA, 19 nt, Homo sapiens
  misc_RNA (1)...(19): siRNA sense strand
agucaauggcagugaugau

SEQ ID NO: 2618839 - RNA, 19 nt, Homo sapiens
  misc_RNA (1)...(19): siRNA sense strand
ccaucaugagacagacaaa

SEQ ID NO: 2618840 - RNA, 19 nt, Homo sapiens
  misc_RNA (1)...(19): siRNA sense strand
aagaaauaccgcaagguga

SEQ ID NO: 2618841 - RNA, 19 nt, Homo sapiens
  misc_RNA (1)...(19): siRNA sense strand
guguaugauuugcgcauga

SEQ ID NO: 2618842 - RNA, 19 nt, Homo sapiens
  misc_RNA (1)...(19): siRNA sense strand
ggggaaaucuccaagaaca

SEQ ID NO: 2618843 - RNA, 19 nt, Homo sapiens
  misc_RNA (1)...(19): siRNA sense strand
ccagauacaaccugaacau

SEQ ID NO: 2618844 - RNA, 19 nt, Homo sapiens
  misc_RNA (1)...(19): siRNA sense strand
ggaaggugccugagccuga

SEQ ID NO: 2618845 - RNA, 19 nt, Homo sapiens
  misc_RNA (1)...(19): siRNA sense strand
ucaagauggcaguaaagaa

SEQ ID NO: 2618846 - RNA, 19 nt, Homo sapiens
  misc_RNA (1)...(19): siRNA sense strand
agaccuaccaccagcgcaa

SEQ ID NO: 2618847 - RNA, 19 nt, Homo sapiens
  misc_RNA (1)...(19): siRNA sense strand
ucuccuacccugaugauaa

SEQ ID NO: 2618848 - RNA, 19 nt, Homo sapiens
  misc_RNA (1)...(19): siRNA sense strand
ccaugacaguauugaggau

SEQ ID NO: 2618849 - RNA, 19 nt, Homo sapiens
  misc_RNA (1)...(19): siRNA sense strand
gaaaguaucuggagcuaag

SEQ ID NO: 2618850 - RNA, 19 nt, Homo sapiens
  misc_RNA (1)...(19): siRNA sense strand
agcuagggcuggaggacuu

SEQ ID NO: 2618851 - RNA, 19 nt, Homo sapiens
  misc_RNA (1)...(19): siRNA sense strand
aaagaaacacgguggggaa

SEQ ID NO: 2618852 - RNA, 19 nt, Homo sapiens
  misc_RNA (1)...(19): siRNA sense strand
aggaaucagugcacauaau

SEQ ID NO: 2618853 - RNA, 19 nt, Homo sapiens
  misc_RNA (1)...(19): siRNA sense strand
uaugagaagggcagaaaga

SEQ ID NO: 2618854 - RNA, 19 nt, Homo sapiens
  misc_RNA (1)...(19): siRNA sense strand
ucaaaguuggagagaccua

SEQ ID NO: 2618855 - RNA, 19 nt, Homo sapiens
  misc_RNA (1)...(19): siRNA sense strand
ucaaggagucagacaguga

SEQ ID NO: 2618856 - RNA, 19 nt, Homo sapiens
  misc_RNA (1)...(19): siRNA sense strand
gcucaaaagaggcugauuu

SEQ ID NO: 2618857 - RNA, 19 nt, Homo sapiens
  misc_RNA (1)...(19): siRNA sense strand
agauggcaguaaagaaaca

SEQ ID NO: 2618858 - RNA, 19 nt, Homo sapiens
  misc_RNA (1)...(19): siRNA sense strand
agauacaaccugaacauca

SEQ ID NO: 2618859 - RNA, 19 nt, Homo sapiens
  misc_RNA (1)...(19): siRNA sense strand
cgaaaguaucuggagcuaa

SEQ ID NO: 2618860 - RNA, 19 nt, Homo sapiens
  misc_RNA (1)...(19): siRNA sense strand
gcaugauccaggugcucua

SEQ ID NO: 2618861 - RNA, 19 nt, Homo sapiens
  misc_RNA (1)...(19): siRNA sense strand
gagaaugaggauaugcaca

SEQ ID NO: 2618862 - RNA, 19 nt, Homo sapiens
  misc_RNA (1)...(19): siRNA sense strand
gcaagguuucccugagaga

SEQ ID NO: 2618863 - RNA, 19 nt, Homo sapiens
  misc_RNA (1)...(19): siRNA sense strand
acagugaauuugacagcuu

SEQ ID NO: 2618864 - RNA, 19 nt, Homo sapiens
  misc_RNA (1)...(19): siRNA sense strand
acaaggugcucaagggucu

SEQ ID NO: 2618865 - RNA, 19 nt, Homo sapiens
  misc_RNA (1)...(19): siRNA sense strand
agaacaaggaauuugcuuu

SEQ ID NO: 2618866 - RNA, 19 nt, Homo sapiens
  misc_RNA (1)...(19): siRNA sense strand
aggaauuugcuuuggcuga

SEQ ID NO: 2618867 - RNA, 19 nt, Homo sapiens
  misc_RNA (1)...(19): siRNA sense strand
acuuugaugugcauggcaa

SEQ ID NO: 2618868 - RNA, 19 nt, Homo sapiens
  misc_RNA (1)...(19): siRNA sense strand
caagaacccuauugaggca

SEQ ID NO: 2618869 - RNA, 19 nt, Homo sapiens
  misc_RNA (1)...(19): siRNA sense strand
gcauggugucuauguguau

SEQ ID NO: 2618870 - RNA, 19 nt, Homo sapiens
  misc_RNA (1)...(19): siRNA sense strand
gaaugagaugccacagauu

SEQ ID NO: 2618871 - RNA, 19 nt, Homo sapiens
  misc_RNA (1)...(19): siRNA sense strand
agguggaacaugaguuuga

SEQ ID NO: 2618872 - RNA, 19 nt, Homo sapiens
  misc_RNA (1)...(19): siRNA sense strand
gggcuggauguuugcaauu

SEQ ID NO: 2618873 - RNA, 19 nt, Homo sapiens
  misc_RNA (1)...(19): siRNA sense strand
cagccaggucacugaguca

SEQ ID NO: 2618874 - RNA, 19 nt, Homo sapiens
  misc_RNA (1)...(19): siRNA sense strand
ugggaagaacuaugacuuu

SEQ ID NO: 2618875 - RNA, 19 nt, Homo sapiens
  misc_RNA (1)...(19): siRNA sense strand
ucaucaauugugaggugaa

SEQ ID NO: 2618876 - RNA, 19 nt, Homo sapiens
  misc_RNA (1)...(19): siRNA sense strand
gagaaugcaggcugagguu

SEQ ID NO: 2618877 - RNA, 19 nt, Homo sapiens
  misc_RNA (1)...(19): siRNA sense strand
cuaacaacucucaagucua

SEQ ID NO: 2618878 - RNA, 19 nt, Homo sapiens
  misc_RNA (1)...(19): siRNA sense strand
gaaugauuucccugcgauu

SEQ ID NO: 2618879 - RNA, 19 nt, Homo sapiens
  misc_RNA (1)...(19): siRNA sense strand
agaccuuguuugcuggauu

SEQ ID NO: 2618880 - RNA, 19 nt, Homo sapiens
  misc_RNA (1)...(19): siRNA sense strand
cccuucagcuguaccgaaa

SEQ ID NO: 2618881 - RNA, 19 nt, Homo sapiens
  misc_RNA (1)...(19): siRNA sense strand
guaucuggagcuaagcaaa

SEQ ID NO: 2618882 - RNA, 19 nt, Homo sapiens
  misc_RNA (1)...(19): siRNA sense strand
acccguggaugcagagauu

SEQ ID NO: 2618883 - RNA, 19 nt, Homo sapiens
  misc_RNA (1)...(19): siRNA sense strand
acucaacugcaucaagaua

SEQ ID NO: 2618884 - RNA, 19 nt, Homo sapiens
  misc_RNA (1)...(19): siRNA sense strand
gguacuuucuggaccugaa

SEQ ID NO: 2618885 - RNA, 19 nt, Homo sapiens
  misc_RNA (1)...(19): siRNA sense strand
ucaagggucuuuaugagaa

SEQ ID NO: 2618886 - RNA, 19 nt, Homo sapiens
  misc_RNA (1)...(19): siRNA sense strand
ggauaugcacagucuccua

SEQ ID NO: 2618887 - RNA, 19 nt, Homo sapiens
  misc_RNA (1)...(19): siRNA sense strand
gagucaccaucaugagaca

SEQ ID NO: 2618888 - RNA, 19 nt, Homo sapiens
  misc_RNA (1)...(19): siRNA sense strand
uuaaugaggaggaagcaga

SEQ ID NO: 2618889 - RNA, 19 nt, Homo sapiens
  misc_RNA (1)...(19): siRNA sense strand
gagcaaaacaagaggaauu

SEQ ID NO: 2618890 - RNA, 19 nt, Homo sapiens
  misc_RNA (1)...(19): siRNA sense strand
ccaagauaucuguggcaaa

SEQ ID NO: 2618891 - RNA, 19 nt, Homo sapiens
  misc_RNA (1)...(19): siRNA sense strand
aggaaaaucaagagcaaaa

SEQ ID NO: 2618892 - RNA, 19 nt, Homo sapiens
  misc_RNA (1)...(19): siRNA sense strand
agaugugauucaagagcaa

SEQ ID NO: 2618893 - RNA, 19 nt, Homo sapiens
  misc_RNA (1)...(19): siRNA sense strand
gagaauggcuaaagcacga

SEQ ID NO: 2618894 - RNA, 19 nt, Homo sapiens
  misc_RNA (1)...(19): siRNA sense strand
gagaauuaauagaugcaga

SEQ ID NO: 2618895 - RNA, 19 nt, Homo sapiens
  misc_RNA (1)...(19): siRNA sense strand
ucucaaacugucagauaaa

SEQ ID NO: 2618896 - RNA, 19 nt, Homo sapiens
  misc_RNA (1)...(19): siRNA sense strand
caaaagaggaagaagagaa

SEQ ID NO: 2618897 - RNA, 19 nt, Homo sapiens
  misc_RNA (1)...(19): siRNA sense strand
caguguagcaaaaggaaaa

SEQ ID NO: 2618898 - RNA, 19 nt, Homo sapiens
  misc_RNA (1)...(19): siRNA sense strand
aacacaaagucaagaagaa

SEQ ID NO: 2618899 - RNA, 19 nt, Homo sapiens
  misc_RNA (1)...(19): siRNA sense strand
guaugaaacaccaaagaga

SEQ ID NO: 2618900 - RNA, 19 nt, Homo sapiens
  misc_RNA (1)...(19): siRNA sense strand
gcuuugaacacaagguauu

SEQ ID NO: 2618901 - RNA, 19 nt, Homo sapiens
  misc_RNA (1)...(19): siRNA sense strand
cagauuuacaccacagaua

SEQ ID NO: 2618902 - RNA, 19 nt, Homo sapiens
  misc_RNA (1)...(19): siRNA sense strand
ggacauguggauuggugaa

SEQ ID NO: 2618903 - RNA, 19 nt, Homo sapiens
  misc_RNA (1)...(19): siRNA sense strand
cgaggaaagguaugaaaca

SEQ ID NO: 2618904 - RNA, 19 nt, Homo sapiens
  misc_RNA (1)...(19): siRNA sense strand
acauuagaaaggacaguaa

SEQ ID NO: 2618905 - RNA, 19 nt, Homo sapiens
  misc_RNA (1)...(19): siRNA sense strand
acauuagaaaggacaguaa

SEQ ID NO: 2618906 - RNA, 19 nt, Homo sapiens
  misc_RNA (1)...(19): siRNA sense strand
gacaaagcaguuagguaaa

SEQ ID NO: 2618907 - RNA, 19 nt, Homo sapiens
  misc_RNA (1)...(19): siRNA sense strand
acaaagucaagaagaagaa

SEQ ID NO: 2618908 - RNA, 19 nt, Homo sapiens
  misc_RNA (1)...(19): siRNA sense strand
gcauuuacuacaagugauu

SEQ ID NO: 2618909 - RNA, 19 nt, Homo sapiens
  misc_RNA (1)...(19): siRNA sense strand
guaccaagcaugugaugau

SEQ ID NO: 2618910 - RNA, 19 nt, Homo sapiens
  misc_RNA (1)...(19): siRNA sense strand
cacagauagugaugagauu

SEQ ID NO: 2618911 - RNA, 19 nt, Homo sapiens
  misc_RNA (1)...(19): siRNA sense strand
aaaggaaaaucaagagcaa

SEQ ID NO: 2618912 - RNA, 19 nt, Homo sapiens
  misc_RNA (1)...(19): siRNA sense strand
caguaagacaucagaaagu

SEQ ID NO: 2618913 - RNA, 19 nt, Homo sapiens
  misc_RNA (1)...(19): siRNA sense strand
caguaagacaucagaaagu

SEQ ID NO: 2618914 - RNA, 19 nt, Homo sapiens
  misc_RNA (1)...(19): siRNA sense strand
ggacagcaaucuuugguga

SEQ ID NO: 2618915 - RNA, 19 nt, Homo sapiens
  misc_RNA (1)...(19): siRNA sense strand
aaaagaggaagaagagaaa

SEQ ID NO: 2618916 - RNA, 19 nt, Homo sapiens
  misc_RNA (1)...(19): siRNA sense strand
uagaaaggacaguaagaca

SEQ ID NO: 2618917 - RNA, 19 nt, Homo sapiens
  misc_RNA (1)...(19): siRNA sense strand
ucagaaaguauaugugaga

SEQ ID NO: 2618918 - RNA, 19 nt, Homo sapiens
  misc_RNA (1)...(19): siRNA sense strand
uagaaaggacaguaagaca

SEQ ID NO: 2618919 - RNA, 19 nt, Homo sapiens
  misc_RNA (1)...(19): siRNA sense strand
ucagaaaguauaugugaga

SEQ ID NO: 2618920 - RNA, 19 nt, Homo sapiens
  misc_RNA (1)...(19): siRNA sense strand
ccaaagagagcgcugaaaa

SEQ ID NO: 2618921 - RNA, 19 nt, Homo sapiens
  misc_RNA (1)...(19): siRNA sense strand
ccaaaucagacuagugcau

SEQ ID NO: 2618922 - RNA, 19 nt, Homo sapiens
  misc_RNA (1)...(19): siRNA sense strand
agaaaggacaguaagacau

SEQ ID NO: 2618923 - RNA, 19 nt, Homo sapiens
  misc_RNA (1)...(19): siRNA sense strand
agaaaggacaguaagacau

SEQ ID NO: 2618924 - RNA, 19 nt, Homo sapiens
  misc_RNA (1)...(19): siRNA sense strand
ugaaagacuaacucagcaa

SEQ ID NO: 2618925 - RNA, 19 nt, Homo sapiens
  misc_RNA (1)...(19): siRNA sense strand
ggaagagcuagaugugauu

SEQ ID NO: 2618926 - RNA, 19 nt, Homo sapiens
  misc_RNA (1)...(19): siRNA sense strand
agaaaguauaugugagauc

SEQ ID NO: 2618927 - RNA, 19 nt, Homo sapiens
  misc_RNA (1)...(19): siRNA sense strand
agaaaguauaugugagauc

SEQ ID NO: 2618928 - RNA, 19 nt, Homo sapiens
  misc_RNA (1)...(19): siRNA sense strand
auagauaagccaaugaaga

SEQ ID NO: 2618929 - RNA, 19 nt, Homo sapiens
  misc_RNA (1)...(19): siRNA sense strand
aaaucagacuagugcauca

SEQ ID NO: 2618930 - RNA, 19 nt, Homo sapiens
  misc_RNA (1)...(19): siRNA sense strand
uguacuaaggagccagaaa

SEQ ID NO: 2618931 - RNA, 19 nt, Homo sapiens
  misc_RNA (1)...(19): siRNA sense strand
acaagugaauaguuccaaa

SEQ ID NO: 2618932 - RNA, 19 nt, Homo sapiens
  misc_RNA (1)...(19): siRNA sense strand
guaagacaucagaaaguau

SEQ ID NO: 2618933 - RNA, 19 nt, Homo sapiens
  misc_RNA (1)...(19): siRNA sense strand
guaagacaucagaaaguau

SEQ ID NO: 2618934 - RNA, 19 nt, Homo sapiens
  misc_RNA (1)...(19): siRNA sense strand
gggaagcagaugauguaga

SEQ ID NO: 2618935 - RNA, 19 nt, Homo sapiens
  misc_RNA (1)...(19): siRNA sense strand
aagcagaugauguagauga

SEQ ID NO: 2618936 - RNA, 19 nt, Homo sapiens
  misc_RNA (1)...(19): siRNA sense strand
ucacaaauagauaagccaa

SEQ ID NO: 2618937 - RNA, 19 nt, Homo sapiens
  misc_RNA (1)...(19): siRNA sense strand
ggggaaauguauggaaauu

SEQ ID NO: 2618938 - RNA, 19 nt, Homo sapiens
  misc_RNA (1)...(19): siRNA sense strand
caaagagagcgcugaaaau

SEQ ID NO: 2618939 - RNA, 19 nt, Homo sapiens
  misc_RNA (1)...(19): siRNA sense strand
gcaugugaugauauugaaa

SEQ ID NO: 2618940 - RNA, 19 nt, Homo sapiens
  misc_RNA (1)...(19): siRNA sense strand
uugacaaagcaguuaggua

SEQ ID NO: 2618941 - RNA, 19 nt, Homo sapiens
  misc_RNA (1)...(19): siRNA sense strand
gugaugauauugaaagacu

SEQ ID NO: 2618942 - RNA, 19 nt, Homo sapiens
  misc_RNA (1)...(19): siRNA sense strand
agcaacaagacauuagaaa

SEQ ID NO: 2618943 - RNA, 19 nt, Homo sapiens
  misc_RNA (1)...(19): siRNA sense strand
agcaacaagacauuagaaa

SEQ ID NO: 2618944 - RNA, 19 nt, Homo sapiens
  misc_RNA (1)...(19): siRNA sense strand
aagaaaacgccgcacaaaa

SEQ ID NO: 2618945 - RNA, 19 nt, Homo sapiens
  misc_RNA (1)...(19): siRNA sense strand
ggagaaaggggaaauguau

SEQ ID NO: 2618946 - RNA, 19 nt, Homo sapiens
  misc_RNA (1)...(19): siRNA sense strand
uggaggaagcuguuggaca

SEQ ID NO: 2618947 - RNA, 19 nt, Homo sapiens
  misc_RNA (1)...(19): siRNA sense strand
cagaauucuccauugacaa

SEQ ID NO: 2618948 - RNA, 19 nt, Homo sapiens
  misc_RNA (1)...(19): siRNA sense strand
agaauucuccauugacaaa

SEQ ID NO: 2618949 - RNA, 19 nt, Homo sapiens
  misc_RNA (1)...(19): siRNA sense strand
ccacagauagugaugagau

SEQ ID NO: 2618950 - RNA, 19 nt, Homo sapiens
  misc_RNA (1)...(19): siRNA sense strand
cugggaagcagaugaugua

SEQ ID NO: 2618951 - RNA, 19 nt, Homo sapiens
  misc_RNA (1)...(19): siRNA sense strand
ggacaguaagacaucagaa

SEQ ID NO: 2618952 - RNA, 19 nt, Homo sapiens
  misc_RNA (1)...(19): siRNA sense strand
acaaagaggacaaggcuga

SEQ ID NO: 2618953 - RNA, 19 nt, Homo sapiens
  misc_RNA (1)...(19): siRNA sense strand
ggauagagucggagcucga

SEQ ID NO: 2618954 - RNA, 19 nt, Homo sapiens
  misc_RNA (1)...(19): siRNA sense strand
acaagaacuucgagcgcuu

SEQ ID NO: 2618955 - RNA, 19 nt, Homo sapiens
  misc_RNA (1)...(19): siRNA sense strand
gcuccuacuucgaggggaa

SEQ ID NO: 2618956 - RNA, 19 nt, Homo sapiens
  misc_RNA (1)...(19): siRNA sense strand
cagccaaccggcagagcaa

SEQ ID NO: 2618957 - RNA, 19 nt, Homo sapiens
  misc_RNA (1)...(19): siRNA sense strand
augucaagcccgagcggaa

SEQ ID NO: 2618958 - RNA, 19 nt, Homo sapiens
  misc_RNA (1)...(19): siRNA sense strand
gauccguaagcgagagcua

SEQ ID NO: 2618959 - RNA, 19 nt, Homo sapiens
  misc_RNA (1)...(19): siRNA sense strand
aagaagaagaacucgguga

SEQ ID NO: 2618960 - RNA, 19 nt, Homo sapiens
  misc_RNA (1)...(19): siRNA sense strand
cucaagaggcagagugcuu

SEQ ID NO: 2618961 - RNA, 19 nt, Homo sapiens
  misc_RNA (1)...(19): siRNA sense strand
ucggcgaguuccugggcaa

SEQ ID NO: 2618962 - RNA, 19 nt, Homo sapiens
  misc_RNA (1)...(19): siRNA sense strand
cggaagaaauucaccgaug

SEQ ID NO: 2618963 - RNA, 19 nt, Homo sapiens
  misc_RNA (1)...(19): siRNA sense strand
cggacuacucagacgguga

SEQ ID NO: 2618964 - RNA, 19 nt, Homo sapiens
  misc_RNA (1)...(19): siRNA sense strand
gcuaaagaccaaugaggac

SEQ ID NO: 2618965 - RNA, 19 nt, Homo sapiens
  misc_RNA (1)...(19): siRNA sense strand
acguccaacuccaacgaua

SEQ ID NO: 2618966 - RNA, 19 nt, Homo sapiens
  misc_RNA (1)...(19): siRNA sense strand
gcaagaggcacuaccgcau

SEQ ID NO: 2618967 - RNA, 19 nt, Homo sapiens
  misc_RNA (1)...(19): siRNA sense strand
cuaccauggagcuggauga

SEQ ID NO: 2618968 - RNA, 19 nt, Homo sapiens
  misc_RNA (1)...(19): siRNA sense strand
ucauagaggcguucagcca

SEQ ID NO: 2618969 - RNA, 19 nt, Homo sapiens
  misc_RNA (1)...(19): siRNA sense strand
aggugcagaagguggagaa

SEQ ID NO: 2618970 - RNA, 19 nt, Homo sapiens
  misc_RNA (1)...(19): siRNA sense strand
cugagaagggaguccagua

SEQ ID NO: 2618971 - RNA, 19 nt, Homo sapiens
  misc_RNA (1)...(19): siRNA sense strand
cgccaguaccagaugaaca

SEQ ID NO: 2618972 - RNA, 19 nt, Homo sapiens
  misc_RNA (1)...(19): siRNA sense strand
agcagauaucaaaguguua

SEQ ID NO: 2618973 - RNA, 19 nt, Homo sapiens
  misc_RNA (1)...(19): siRNA sense strand
caagagauggagaagcaca

SEQ ID NO: 2618974 - RNA, 19 nt, Homo sapiens
  misc_RNA (1)...(19): siRNA sense strand
uggccaggauggaggagca

SEQ ID NO: 2618975 - RNA, 19 nt, Homo sapiens
  misc_RNA (1)...(19): siRNA sense strand
caagaaggcuggagaggug

SEQ ID NO: 2618976 - RNA, 19 nt, Homo sapiens
  misc_RNA (1)...(19): siRNA sense strand
ggcggaugccauugacaaa

SEQ ID NO: 2618977 - RNA, 19 nt, Homo sapiens
  misc_RNA (1)...(19): siRNA sense strand
gggugguguggcugagcua

SEQ ID NO: 2618978 - RNA, 19 nt, Homo sapiens
  misc_RNA (1)...(19): siRNA sense strand
gcuuagagacaaaggcuuc

SEQ ID NO: 2618979 - RNA, 19 nt, Homo sapiens
  misc_RNA (1)...(19): siRNA sense strand
uugacaggucgguggauuu

SEQ ID NO: 2618980 - RNA, 19 nt, Homo sapiens
  misc_RNA (1)...(19): siRNA sense strand
cggaagaagaugagaugaa

SEQ ID NO: 2618981 - RNA, 19 nt, Homo sapiens
  misc_RNA (1)...(19): siRNA sense strand
gaagaugagaugaaugaua

SEQ ID NO: 2618982 - RNA, 19 nt, Homo sapiens
  misc_RNA (1)...(19): siRNA sense strand
cuacagagacagagagacu

SEQ ID NO: 2618983 - RNA, 19 nt, Homo sapiens
  misc_RNA (1)...(19): siRNA sense strand
gagaauaaucagauggcca

SEQ ID NO: 2618984 - RNA, 19 nt, Homo sapiens
  misc_RNA (1)...(19): siRNA sense strand
cagugaauccagaaagcaa

SEQ ID NO: 2618985 - RNA, 19 nt, Homo sapiens
  misc_RNA (1)...(19): siRNA sense strand
acccagagccagaggaaaa

SEQ ID NO: 2618986 - RNA, 19 nt, Homo sapiens
  misc_RNA (1)...(19): siRNA sense strand
agacagacccagagccaga

SEQ ID NO: 2618987 - RNA, 19 nt, Homo sapiens
  misc_RNA (1)...(19): siRNA sense strand
aagaagaugagaugaauga

SEQ ID NO: 2618988 - RNA, 19 nt, Homo sapiens
  misc_RNA (1)...(19): siRNA sense strand
uuacauugccaaaggugaa

SEQ ID NO: 2618989 - RNA, 19 nt, Homo sapiens
  misc_RNA (1)...(19): siRNA sense strand
cagcauugaugaacacuuu

SEQ ID NO: 2618990 - RNA, 19 nt, Homo sapiens
  misc_RNA (1)...(19): siRNA sense strand
ccauaguccuccugagcca

SEQ ID NO: 2618991 - RNA, 19 nt, Homo sapiens
  misc_RNA (1)...(19): siRNA sense strand
ggaagaagaugagaugaau

SEQ ID NO: 2618992 - RNA, 19 nt, Homo sapiens
  misc_RNA (1)...(19): siRNA sense strand
acaacagccaacagagcaa

SEQ ID NO: 2618993 - RNA, 19 nt, Homo sapiens
  misc_RNA (1)...(19): siRNA sense strand
gcagacagacccagagcca

SEQ ID NO: 2618994 - RNA, 19 nt, Homo sapiens
  misc_RNA (1)...(19): siRNA sense strand
ccaccgaagccuggaacaa

SEQ ID NO: 2618995 - RNA, 19 nt, Homo sapiens
  misc_RNA (1)...(19): siRNA sense strand
cagaggaaaaugaaacaaa

SEQ ID NO: 2618996 - RNA, 19 nt, Homo sapiens
  misc_RNA (1)...(19): siRNA sense strand
cgaaagucugugaggccuu

SEQ ID NO: 2618997 - RNA, 19 nt, Homo sapiens
  misc_RNA (1)...(19): siRNA sense strand
ggacauguggaauggagca

SEQ ID NO: 2618998 - RNA, 19 nt, Homo sapiens
  misc_RNA (1)...(19): siRNA sense strand
cugaaauuugucaagcaua

SEQ ID NO: 2618999 - RNA, 19 nt, Homo sapiens
  misc_RNA (1)...(19): siRNA sense strand
agaauaaucagauggccau

SEQ ID NO: 2619000 - RNA, 19 nt, Homo sapiens
  misc_RNA (1)...(19): siRNA sense strand
cuuaucuggacauggauua

SEQ ID NO: 2619001 - RNA, 19 nt, Homo sapiens
  misc_RNA (1)...(19): siRNA sense strand
agacccagagccagaggaa

SEQ ID NO: 2619002 - RNA, 19 nt, Homo sapiens
  misc_RNA (1)...(19): siRNA sense strand
aggugaagaugaagagcug

SEQ ID NO: 2619003 - RNA, 19 nt, Homo sapiens
  misc_RNA (1)...(19): siRNA sense strand
cuaacagugaauccagaaa

SEQ ID NO: 2619004 - RNA, 19 nt, Homo sapiens
  misc_RNA (1)...(19): siRNA sense strand
agagauuguaagagagauu

SEQ ID NO: 2619005 - RNA, 19 nt, Homo sapiens
  misc_RNA (1)...(19): siRNA sense strand
uguaagagagauuggacaa

SEQ ID NO: 2619006 - RNA, 19 nt, Homo sapiens
  misc_RNA (1)...(19): siRNA sense strand
cagagagccugguggaaaa

SEQ ID NO: 2619007 - RNA, 19 nt, Homo sapiens
  misc_RNA (1)...(19): siRNA sense strand
acacagaggcagaacuaau

SEQ ID NO: 2619008 - RNA, 19 nt, Homo sapiens
  misc_RNA (1)...(19): siRNA sense strand
ugaagagcauagugggaga

SEQ ID NO: 2619009 - RNA, 19 nt, Homo sapiens
  misc_RNA (1)...(19): siRNA sense strand
aggacauggugaaggugaa

SEQ ID NO: 2619010 - RNA, 19 nt, Homo sapiens
  misc_RNA (1)...(19): siRNA sense strand
ccagaggaguuguugaaaa

SEQ ID NO: 2619011 - RNA, 19 nt, Homo sapiens
  misc_RNA (1)...(19): siRNA sense strand
cauucagugucuugaggaa

SEQ ID NO: 2619012 - RNA, 19 nt, Homo sapiens
  misc_RNA (1)...(19): siRNA sense strand
ggguggaggaagagccuuu

SEQ ID NO: 2619013 - RNA, 19 nt, Homo sapiens
  misc_RNA (1)...(19): siRNA sense strand
ccagagguuuggauggaau

SEQ ID NO: 2619014 - RNA, 19 nt, Homo sapiens
  misc_RNA (1)...(19): siRNA sense strand
cguuauaaccauaugcuca

SEQ ID NO: 2619015 - RNA, 19 nt, Homo sapiens
  misc_RNA (1)...(19): siRNA sense strand
cuagaagagaagagaacca

SEQ ID NO: 2619016 - RNA, 19 nt, Homo sapiens
  misc_RNA (1)...(19): siRNA sense strand
ccguaagaugcuugacaau

SEQ ID NO: 2619017 - RNA, 19 nt, Homo sapiens
  misc_RNA (1)...(19): siRNA sense strand
gaucccaaggagaagaaua

SEQ ID NO: 2619018 - RNA, 19 nt, Homo sapiens
  misc_RNA (1)...(19): siRNA sense strand
cagaaauugugggaagcaa

SEQ ID NO: 2619019 - RNA, 19 nt, Homo sapiens
  misc_RNA (1)...(19): siRNA sense strand
gggcaacugacuauggaau

SEQ ID NO: 2619020 - RNA, 19 nt, Homo sapiens
  misc_RNA (1)...(19): siRNA sense strand
cugccagaguugaagucua

SEQ ID NO: 2619021 - RNA, 19 nt, Homo sapiens
  misc_RNA (1)...(19): siRNA sense strand
uggaacuguuggauggcaa

SEQ ID NO: 2619022 - RNA, 19 nt, Homo sapiens
  misc_RNA (1)...(19): siRNA sense strand
gguaagaaagcucggacca

SEQ ID NO: 2619023 - RNA, 19 nt, Homo sapiens
  misc_RNA (1)...(19): siRNA sense strand
gaaacauggucacaggaca

SEQ ID NO: 2619024 - RNA, 19 nt, Homo sapiens
  misc_RNA (1)...(19): siRNA sense strand
augaugaacuagugaagca

SEQ ID NO: 2619025 - RNA, 19 nt, Homo sapiens
  misc_RNA (1)...(19): siRNA sense strand
acgaggaaagccagaaauu

SEQ ID NO: 2619026 - RNA, 19 nt, Homo sapiens
  misc_RNA (1)...(19): siRNA sense strand
cagaugacacagaggcaga

SEQ ID NO: 2619027 - RNA, 19 nt, Homo sapiens
  misc_RNA (1)...(19): siRNA sense strand
acagagagccugguggaaa

SEQ ID NO: 2619028 - RNA, 19 nt, Homo sapiens
  misc_RNA (1)...(19): siRNA sense strand
ugaugaguccagugaggaa

SEQ ID NO: 2619029 - RNA, 19 nt, Homo sapiens
  misc_RNA (1)...(19): siRNA sense strand
ccuacaucaccaaggacaa

SEQ ID NO: 2619030 - RNA, 19 nt, Homo sapiens
  misc_RNA (1)...(19): siRNA sense strand
agacgagacacccaagaaa

SEQ ID NO: 2619031 - RNA, 19 nt, Homo sapiens
  misc_RNA (1)...(19): siRNA sense strand
agcaagaugauguaugaaa

SEQ ID NO: 2619032 - RNA, 19 nt, Homo sapiens
  misc_RNA (1)...(19): siRNA sense strand
agaaguuuccacaggacua

SEQ ID NO: 2619033 - RNA, 19 nt, Homo sapiens
  misc_RNA (1)...(19): siRNA sense strand
cucuggaauuccugauaaa

SEQ ID NO: 2619034 - RNA, 19 nt, Homo sapiens
  misc_RNA (1)...(19): siRNA sense strand
gcauagugggagagauugu

SEQ ID NO: 2619035 - RNA, 19 nt, Homo sapiens
  misc_RNA (1)...(19): siRNA sense strand
gcuuagugaugcugaccuu

SEQ ID NO: 2619036 - RNA, 19 nt, Homo sapiens
  misc_RNA (1)...(19): siRNA sense strand
ggaagauuacagaggccau

SEQ ID NO: 2619037 - RNA, 19 nt, Homo sapiens
  misc_RNA (1)...(19): siRNA sense strand
gcuuaaagucuguaacaac

SEQ ID NO: 2619038 - RNA, 19 nt, Homo sapiens
  misc_RNA (1)...(19): siRNA sense strand
cuggagaaucccaccauua

SEQ ID NO: 2619039 - RNA, 19 nt, Homo sapiens
  misc_RNA (1)...(19): siRNA sense strand
guaagagagauuggacaaa

SEQ ID NO: 2619040 - RNA, 19 nt, Homo sapiens
  misc_RNA (1)...(19): siRNA sense strand
ccagaaauuacaagagaug

SEQ ID NO: 2619041 - RNA, 19 nt, Homo sapiens
  misc_RNA (1)...(19): siRNA sense strand
agccagaaauugugggaag

SEQ ID NO: 2619042 - RNA, 19 nt, Homo sapiens
  misc_RNA (1)...(19): siRNA sense strand
ggaacuguuggauggcaaa

SEQ ID NO: 2619043 - RNA, 19 nt, Homo sapiens
  misc_RNA (1)...(19): siRNA sense strand
ugaguggaucagauagaaa

SEQ ID NO: 2619044 - RNA, 19 nt, Homo sapiens
  misc_RNA (1)...(19): siRNA sense strand
acuauggaaugaagagcau

SEQ ID NO: 2619045 - RNA, 19 nt, Homo sapiens
  misc_RNA (1)...(19): siRNA sense strand
ccugacagaacuagcagaa

SEQ ID NO: 2619046 - RNA, 19 nt, Homo sapiens
  misc_RNA (1)...(19): siRNA sense strand
cuugaauaucuuaggacuu

SEQ ID NO: 2619047 - RNA, 19 nt, Homo sapiens
  misc_RNA (1)...(19): siRNA sense strand
guauguugugcaagaggua

SEQ ID NO: 2619048 - RNA, 19 nt, Homo sapiens
  misc_RNA (1)...(19): siRNA sense strand
cuucagggacaaagggcuu

SEQ ID NO: 2619049 - RNA, 19 nt, Homo sapiens
  misc_RNA (1)...(19): siRNA sense strand
gaacaggagcacaagacca

SEQ ID NO: 2619050 - RNA, 19 nt, Homo sapiens
  misc_RNA (1)...(19): siRNA sense strand
ucaccuggauggagaaaau

SEQ ID NO: 2619051 - RNA, 19 nt, Homo sapiens
  misc_RNA (1)...(19): siRNA sense strand
ccaaggacaagcagacaga

SEQ ID NO: 2619052 - RNA, 19 nt, Homo sapiens
  misc_RNA (1)...(19): siRNA sense strand
aggaagaucuuucagcaga

SEQ ID NO: 2619053 - RNA, 19 nt, Homo sapiens
  misc_RNA (1)...(19): siRNA sense strand
guaagaaagcucggaccaa

SEQ ID NO: 2619054 - RNA, 19 nt, Homo sapiens
  misc_RNA (1)...(19): siRNA sense strand
gugcaggaggugauugaau

SEQ ID NO: 2619055 - RNA, 19 nt, Homo sapiens
  misc_RNA (1)...(19): siRNA sense strand
gagcagaagcuucgggccu

SEQ ID NO: 2619056 - RNA, 19 nt, Homo sapiens
  misc_RNA (1)...(19): siRNA sense strand
caucaaacaucuuccacca

SEQ ID NO: 2619057 - RNA, 19 nt, Homo sapiens
  misc_RNA (1)...(19): siRNA sense strand
gaaaauuacaugaugcgua

SEQ ID NO: 2619058 - RNA, 19 nt, Homo sapiens
  misc_RNA (1)...(19): siRNA sense strand
gguucucaguggcgaucaa

SEQ ID NO: 2619059 - RNA, 19 nt, Homo sapiens
  misc_RNA (1)...(19): siRNA sense strand
cuacaguggugcaggaggu

SEQ ID NO: 2619060 - RNA, 19 nt, Homo sapiens
  misc_RNA (1)...(19): siRNA sense strand
cagaaggagacccagaaau

SEQ ID NO: 2619061 - RNA, 19 nt, Homo sapiens
  misc_RNA (1)...(19): siRNA sense strand
ggagaugcugguacaguau

SEQ ID NO: 2619062 - RNA, 19 nt, Homo sapiens
  misc_RNA (1)...(19): siRNA sense strand
ggagaagcuagaagagaag

SEQ ID NO: 2619063 - RNA, 19 nt, Homo sapiens
  misc_RNA (1)...(19): siRNA sense strand
ccauaugcucagugcuaca

SEQ ID NO: 2619064 - RNA, 19 nt, Homo sapiens
  misc_RNA (1)...(19): siRNA sense strand
gcaugauggcacgaggaaa

SEQ ID NO: 2619065 - RNA, 19 nt, Homo sapiens
  misc_RNA (1)...(19): siRNA sense strand
caugauggcacgaggaaag

SEQ ID NO: 2619066 - RNA, 19 nt, Homo sapiens
  misc_RNA (1)...(19): siRNA sense strand
cuaucaacugcuugccaaa

SEQ ID NO: 2619067 - RNA, 19 nt, Homo sapiens
  misc_RNA (1)...(19): siRNA sense strand
aggaaggaguguuggagga

SEQ ID NO: 2619068 - RNA, 19 nt, Homo sapiens
  misc_RNA (1)...(19): siRNA sense strand
uuagagaacgagacagcaa

SEQ ID NO: 2619069 - RNA, 19 nt, Homo sapiens
  misc_RNA (1)...(19): siRNA sense strand
uguccaaggagcugcacaa

SEQ ID NO: 2619070 - RNA, 19 nt, Homo sapiens
  misc_RNA (1)...(19): siRNA sense strand
ccucuuacaacuaugggaa

SEQ ID NO: 2619071 - RNA, 19 nt, Homo sapiens
  misc_RNA (1)...(19): siRNA sense strand
aggccaagauuuugcaaga

SEQ ID NO: 2619072 - RNA, 19 nt, Homo sapiens
  misc_RNA (1)...(19): siRNA sense strand
cuaugggaacgaagaccaa

SEQ ID NO: 2619073 - RNA, 19 nt, Homo sapiens
  misc_RNA (1)...(19): siRNA sense strand
aaggagaacaagagggcaa

SEQ ID NO: 2619074 - RNA, 19 nt, Homo sapiens
  misc_RNA (1)...(19): siRNA sense strand
aguggagagaauagaaauu

SEQ ID NO: 2619075 - RNA, 19 nt, Homo sapiens
  misc_RNA (1)...(19): siRNA sense strand
uguggaggcugaagcgcaa

SEQ ID NO: 2619076 - RNA, 19 nt, Homo sapiens
  misc_RNA (1)...(19): siRNA sense strand
cggugguggacguggauga

SEQ ID NO: 2619077 - RNA, 19 nt, Homo sapiens
  misc_RNA (1)...(19): siRNA sense strand
gcuacuaccgaauggaaaa

SEQ ID NO: 2619078 - RNA, 19 nt, Homo sapiens
  misc_RNA (1)...(19): siRNA sense strand
aggcugaagcgcaaagaca

SEQ ID NO: 2619079 - RNA, 19 nt, Homo sapiens
  misc_RNA (1)...(19): siRNA sense strand
ggcugaagcgcaaagacaa

SEQ ID NO: 2619080 - RNA, 19 nt, Homo sapiens
  misc_RNA (1)...(19): siRNA sense strand
ccgcacaaggagaacaaga

SEQ ID NO: 2619081 - RNA, 19 nt, Homo sapiens
  misc_RNA (1)...(19): siRNA sense strand
cugcguaaagguuguacaa

SEQ ID NO: 2619082 - RNA, 19 nt, Homo sapiens
  misc_RNA (1)...(19): siRNA sense strand
gaggaagagcaucgcccaa

SEQ ID NO: 2619083 - RNA, 19 nt, Homo sapiens
  misc_RNA (1)...(19): siRNA sense strand
gcaacagaacucagggaag

SEQ ID NO: 2619084 - RNA, 19 nt, Homo sapiens
  misc_RNA (1)...(19): siRNA sense strand
agccaaaggcccuggucuu

SEQ ID NO: 2619085 - RNA, 19 nt, Homo sapiens
  misc_RNA (1)...(19): siRNA sense strand
uuccaaaccuguugagcca

SEQ ID NO: 2619086 - RNA, 19 nt, Homo sapiens
  misc_RNA (1)...(19): siRNA sense strand
aaagguuguacaagaguau

SEQ ID NO: 2619087 - RNA, 19 nt, Homo sapiens
  misc_RNA (1)...(19): siRNA sense strand
cuucugagucccugaggau

SEQ ID NO: 2619088 - RNA, 19 nt, Homo sapiens
  misc_RNA (1)...(19): siRNA sense strand
agucuaagguccagcacaa

SEQ ID NO: 2619089 - RNA, 19 nt, Homo sapiens
  misc_RNA (1)...(19): siRNA sense strand
cgugaaggaauaugugaaa

SEQ ID NO: 2619090 - RNA, 19 nt, Homo sapiens
  misc_RNA (1)...(19): siRNA sense strand
ggaugacaugggagacaaa

SEQ ID NO: 2619091 - RNA, 19 nt, Homo sapiens
  misc_RNA (1)...(19): siRNA sense strand
ccaugaugagggugggcaa

SEQ ID NO: 2619092 - RNA, 19 nt, Homo sapiens
  misc_RNA (1)...(19): siRNA sense strand
gaauaugugaaauggauga

SEQ ID NO: 2619093 - RNA, 19 nt, Homo sapiens
  misc_RNA (1)...(19): siRNA sense strand
aggaauaugugaaauggau

SEQ ID NO: 2619094 - RNA, 19 nt, Homo sapiens
  misc_RNA (1)...(19): siRNA sense strand
acaaggccgugaagacaaa

SEQ ID NO: 2619095 - RNA, 19 nt, Homo sapiens
  misc_RNA (1)...(19): siRNA sense strand
ccaucgaggacuuaggaga

SEQ ID NO: 2619096 - RNA, 19 nt, Homo sapiens
  misc_RNA (1)...(19): siRNA sense strand
gcacaaacccggcagauuc

SEQ ID NO: 2619097 - RNA, 19 nt, Homo sapiens
  misc_RNA (1)...(19): siRNA sense strand
cugaggaugacaugggaga

SEQ ID NO: 2619098 - RNA, 19 nt, Homo sapiens
  misc_RNA (1)...(19): siRNA sense strand
acgugaaggaauaugugaa

SEQ ID NO: 2619099 - RNA, 19 nt, Homo sapiens
  misc_RNA (1)...(19): siRNA sense strand
gugaaauggaugauguacu

SEQ ID NO: 2619100 - RNA, 19 nt, Homo sapiens
  misc_RNA (1)...(19): siRNA sense strand
gaggaugacaugggagaca

SEQ ID NO: 2619101 - RNA, 19 nt, Homo sapiens
  misc_RNA (1)...(19): siRNA sense strand
ccuacaaggccgugaagac

SEQ ID NO: 2619102 - RNA, 19 nt, Homo sapiens
  misc_RNA (1)...(19): siRNA sense strand
ccuucuacuuugaacugaa

SEQ ID NO: 2619103 - RNA, 19 nt, Homo sapiens
  misc_RNA (1)...(19): siRNA sense strand
ugaaggaauaugugaaaug

SEQ ID NO: 2619104 - RNA, 19 nt, Homo sapiens
  misc_RNA (1)...(19): siRNA sense strand
ccagcgugcucuaccgcaa

SEQ ID NO: 2619105 - RNA, 19 nt, Homo sapiens
  misc_RNA (1)...(19): siRNA sense strand
gugaaggaauaugugaaau

SEQ ID NO: 2619106 - RNA, 19 nt, Homo sapiens
  misc_RNA (1)...(19): siRNA sense strand
gugaagagucugagggaga

SEQ ID NO: 2619107 - RNA, 19 nt, Homo sapiens
  misc_RNA (1)...(19): siRNA sense strand
aggcuguacaggagaggaa

SEQ ID NO: 2619108 - RNA, 19 nt, Homo sapiens
  misc_RNA (1)...(19): siRNA sense strand
agcuagaacaggaggauga

SEQ ID NO: 2619109 - RNA, 19 nt, Homo sapiens
  misc_RNA (1)...(19): siRNA sense strand
gggcucgaucagagaggaa

SEQ ID NO: 2619110 - RNA, 19 nt, Homo sapiens
  misc_RNA (1)...(19): siRNA sense strand
aggagagagcucagcaaau

SEQ ID NO: 2619111 - RNA, 19 nt, Homo sapiens
  misc_RNA (1)...(19): siRNA sense strand
aaacagaaccaccuggcua

SEQ ID NO: 2619112 - RNA, 19 nt, Homo sapiens
  misc_RNA (1)...(19): siRNA sense strand
gagcugaguaugaggcgau

SEQ ID NO: 2619113 - RNA, 19 nt, Homo sapiens
  misc_RNA (1)...(19): siRNA sense strand
ggacacaagaguugggccu

SEQ ID NO: 2619114 - RNA, 19 nt, Homo sapiens
  misc_RNA (1)...(19): siRNA sense strand
uagucaugaaggacagaaa

SEQ ID NO: 2619115 - RNA, 19 nt, Homo sapiens
  misc_RNA (1)...(19): siRNA sense strand
uacgagaggucgagggcga

SEQ ID NO: 2619116 - RNA, 19 nt, Homo sapiens
  misc_RNA (1)...(19): siRNA sense strand
ggagaauccagaagccaca

SEQ ID NO: 2619117 - RNA, 19 nt, Homo sapiens
  misc_RNA (1)...(19): siRNA sense strand
cuggagagcuagaacagga

SEQ ID NO: 2619118 - RNA, 19 nt, Homo sapiens
  misc_RNA (1)...(19): siRNA sense strand
ggcuaagugcagagaacca

SEQ ID NO: 2619119 - RNA, 19 nt, Homo sapiens
  misc_RNA (1)...(19): siRNA sense strand
caucaaacagccaggccuu

SEQ ID NO: 2619120 - RNA, 19 nt, Homo sapiens
  misc_RNA (1)...(19): siRNA sense strand
agacagaccuuuggaggga

SEQ ID NO: 2619121 - RNA, 19 nt, Homo sapiens
  misc_RNA (1)...(19): siRNA sense strand
caucagaccuggaaagcag

SEQ ID NO: 2619122 - RNA, 19 nt, Homo sapiens
  misc_RNA (1)...(19): siRNA sense strand
uccagaagccacagaucaa

SEQ ID NO: 2619123 - RNA, 19 nt, Homo sapiens
  misc_RNA (1)...(19): siRNA sense strand
aagcagaacaggaaaccca

SEQ ID NO: 2619124 - RNA, 19 nt, Homo sapiens
  misc_RNA (1)...(19): siRNA sense strand
aagcagaggacuauaccau

SEQ ID NO: 2619125 - RNA, 19 nt, Homo sapiens
  misc_RNA (1)...(19): siRNA sense strand
gaucacagcuccuggcuuc

SEQ ID NO: 2619126 - RNA, 19 nt, Homo sapiens
  misc_RNA (1)...(19): siRNA sense strand
cagaugaagcagaacagga

SEQ ID NO: 2619127 - RNA, 19 nt, Homo sapiens
  misc_RNA (1)...(19): siRNA sense strand
gacucaaauauuaaggaga

SEQ ID NO: 2619128 - RNA, 19 nt, Homo sapiens
  misc_RNA (1)...(19): siRNA sense strand
gaggaacaguggaggggca

SEQ ID NO: 2619129 - RNA, 19 nt, Homo sapiens
  misc_RNA (1)...(19): siRNA sense strand
ggacuuaccgagaaggcaa

SEQ ID NO: 2619130 - RNA, 19 nt, Homo sapiens
  misc_RNA (1)...(19): siRNA sense strand
gaucaaaccugucgccaca

SEQ ID NO: 2619131 - RNA, 19 nt, Homo sapiens
  misc_RNA (1)...(19): siRNA sense strand
ggacacagcugaaagccuu

SEQ ID NO: 2619132 - RNA, 19 nt, Homo sapiens
  misc_RNA (1)...(19): siRNA sense strand
gagacauaauggagggauc

SEQ ID NO: 2619133 - RNA, 19 nt, Homo sapiens
  misc_RNA (1)...(19): siRNA sense strand
ugcuauuacugccgagaaa

SEQ ID NO: 2619134 - RNA, 19 nt, Homo sapiens
  misc_RNA (1)...(19): siRNA sense strand
acuugaaggaggccagaaa

SEQ ID NO: 2619135 - RNA, 19 nt, Homo sapiens
  misc_RNA (1)...(19): siRNA sense strand
cauuaaagcugaugugggu

SEQ ID NO: 2619136 - RNA, 19 nt, Homo sapiens
  misc_RNA (1)...(19): siRNA sense strand
ccuucuugauaaugccaaa

SEQ ID NO: 2619137 - RNA, 19 nt, Homo sapiens
  misc_RNA (1)...(19): siRNA sense strand
cucuaucaguguugcauua

SEQ ID NO: 2619138 - RNA, 19 nt, Homo sapiens
  misc_RNA (1)...(19): siRNA sense strand
gcgguauagccgagaccau

SEQ ID NO: 2619139 - RNA, 19 nt, Homo sapiens
  misc_RNA (1)...(19): siRNA sense strand
cugugaugcugugaagaaa

SEQ ID NO: 2619140 - RNA, 19 nt, Homo sapiens
  misc_RNA (1)...(19): siRNA sense strand
ugguuaugauagacacaau

SEQ ID NO: 2619141 - RNA, 19 nt, Homo sapiens
  misc_RNA (1)...(19): siRNA sense strand
acugugaugcugugaagaa

SEQ ID NO: 2619142 - RNA, 19 nt, Homo sapiens
  misc_RNA (1)...(19): siRNA sense strand
uugauuaccugauuggcaa

SEQ ID NO: 2619143 - RNA, 19 nt, Homo sapiens
  misc_RNA (1)...(19): siRNA sense strand
ccguaugcugguuaugaua

SEQ ID NO: 2619144 - RNA, 19 nt, Homo sapiens
  misc_RNA (1)...(19): siRNA sense strand
auaaagggacacagcugaa

SEQ ID NO: 2619145 - RNA, 19 nt, Homo sapiens
  misc_RNA (1)...(19): siRNA sense strand
cuauuacugccgagaaaca

SEQ ID NO: 2619146 - RNA, 19 nt, Homo sapiens
  misc_RNA (1)...(19): siRNA sense strand
ccuggaacagacugaacua

SEQ ID NO: 2619147 - RNA, 19 nt, Homo sapiens
  misc_RNA (1)...(19): siRNA sense strand
ccuucuuuguggagagcaa

SEQ ID NO: 2619148 - RNA, 19 nt, Homo sapiens
  misc_RNA (1)...(19): siRNA sense strand
guagacaaccugugggacu

SEQ ID NO: 2619149 - RNA, 19 nt, Homo sapiens
  misc_RNA (1)...(19): siRNA sense strand
gaccagagcacgugccaca

SEQ ID NO: 2619150 - RNA, 19 nt, Homo sapiens
  misc_RNA (1)...(19): siRNA sense strand
gagaaggaccagagcacgu

SEQ ID NO: 2619151 - RNA, 19 nt, Homo sapiens
  misc_RNA (1)...(19): siRNA sense strand
ggaagagagcaacgccaga

SEQ ID NO: 2619152 - RNA, 19 nt, Homo sapiens
  misc_RNA (1)...(19): siRNA sense strand
ggacucagcugaaggacug

SEQ ID NO: 2619153 - RNA, 19 nt, Homo sapiens
  misc_RNA (1)...(19): siRNA sense strand
uuggagaagcagagggaaa

SEQ ID NO: 2619154 - RNA, 19 nt, Homo sapiens
  misc_RNA (1)...(19): siRNA sense strand
gcucagaaagagaaggaau

SEQ ID NO: 2619155 - RNA, 19 nt, Homo sapiens
  misc_RNA (1)...(19): siRNA sense strand
aagagaaggaauuggagaa

SEQ ID NO: 2619156 - RNA, 19 nt, Homo sapiens
  misc_RNA (1)...(19): siRNA sense strand
aggaagaucuccaggcaca

SEQ ID NO: 2619157 - RNA, 19 nt, Homo sapiens
  misc_RNA (1)...(19): siRNA sense strand
aggaagagcgagaagguga

SEQ ID NO: 2619158 - RNA, 19 nt, Homo sapiens
  misc_RNA (1)...(19): siRNA sense strand
gaaggauaauugaggcaga

SEQ ID NO: 2619159 - RNA, 19 nt, Homo sapiens
  misc_RNA (1)...(19): siRNA sense strand
acaagaacaccaugggcua

SEQ ID NO: 2619160 - RNA, 19 nt, Homo sapiens
  misc_RNA (1)...(19): siRNA sense strand
gugaaggacucgaagcuca

SEQ ID NO: 2619161 - RNA, 19 nt, Homo sapiens
  misc_RNA (1)...(19): siRNA sense strand
aguacggagcugagaggaa

SEQ ID NO: 2619162 - RNA, 19 nt, Homo sapiens
  misc_RNA (1)...(19): siRNA sense strand
acagagacccagagcucaa

SEQ ID NO: 2619163 - RNA, 19 nt, Homo sapiens
  misc_RNA (1)...(19): siRNA sense strand
gaauggaaauggaggaggu

SEQ ID NO: 2619164 - RNA, 19 nt, Homo sapiens
  misc_RNA (1)...(19): siRNA sense strand
agaagaagcaagaggcgga

SEQ ID NO: 2619165 - RNA, 19 nt, Homo sapiens
  misc_RNA (1)...(19): siRNA sense strand
gcacagagacccagagcuc

SEQ ID NO: 2619166 - RNA, 19 nt, Homo sapiens
  misc_RNA (1)...(19): siRNA sense strand
aggcagaagaguccagaau

SEQ ID NO: 2619167 - RNA, 19 nt, Homo sapiens
  misc_RNA (1)...(19): siRNA sense strand
ggauaauugaggcagaaga

SEQ ID NO: 2619168 - RNA, 19 nt, Homo sapiens
  misc_RNA (1)...(19): siRNA sense strand
cucagaaagagaaggaauu

SEQ ID NO: 2619169 - RNA, 19 nt, Homo sapiens
  misc_RNA (1)...(19): siRNA sense strand
gggccaucuaugauauaua

SEQ ID NO: 2619170 - RNA, 19 nt, Homo sapiens
  misc_RNA (1)...(19): siRNA sense strand
cugcagagagagagagaag

SEQ ID NO: 2619171 - RNA, 19 nt, Homo sapiens
  misc_RNA (1)...(19): siRNA sense strand
gagagagaagagaggagau

SEQ ID NO: 2619172 - RNA, 19 nt, Homo sapiens
  misc_RNA (1)...(19): siRNA sense strand
cugaaauucgagaggaguu

SEQ ID NO: 2619173 - RNA, 19 nt, Homo sapiens
  misc_RNA (1)...(19): siRNA sense strand
ccagaauggaaauggagga

SEQ ID NO: 2619174 - RNA, 19 nt, Homo sapiens
  misc_RNA (1)...(19): siRNA sense strand
gagaggaguuugagcggcu

SEQ ID NO: 2619175 - RNA, 19 nt, Homo sapiens
  misc_RNA (1)...(19): siRNA sense strand
agagagaagagaggagauu

SEQ ID NO: 2619176 - RNA, 19 nt, Homo sapiens
  misc_RNA (1)...(19): siRNA sense strand
ccgaaggauaauugaggca

SEQ ID NO: 2619177 - RNA, 19 nt, Homo sapiens
  misc_RNA (1)...(19): siRNA sense strand
agacaagcacagagaccca

SEQ ID NO: 2619178 - RNA, 19 nt, Homo sapiens
  misc_RNA (1)...(19): siRNA sense strand
gggcucagaaagagaagga

SEQ ID NO: 2619179 - RNA, 19 nt, Homo sapiens
  misc_RNA (1)...(19): siRNA sense strand
gagaagaaccugaaagugc

SEQ ID NO: 2619180 - RNA, 19 nt, Homo sapiens
  misc_RNA (1)...(19): siRNA sense strand
ggagauugcagcagcgaac

SEQ ID NO: 2619181 - RNA, 19 nt, Homo sapiens
  misc_RNA (1)...(19): siRNA sense strand
ucucaacccagaauggaaa

SEQ ID NO: 2619182 - RNA, 19 nt, Homo sapiens
  misc_RNA (1)...(19): siRNA sense strand
aggcggaacgacuguuuaa

SEQ ID NO: 2619183 - RNA, 19 nt, Homo sapiens
  misc_RNA (1)...(19): siRNA sense strand
guuguggaaaggaggagaa

SEQ ID NO: 2619184 - RNA, 19 nt, Homo sapiens
  misc_RNA (1)...(19): siRNA sense strand
cucucaaagucaagcucaa

SEQ ID NO: 2619185 - RNA, 19 nt, Homo sapiens
  misc_RNA (1)...(19): siRNA sense strand
aagagaagaaccugaaagu

SEQ ID NO: 2619186 - RNA, 19 nt, Homo sapiens
  misc_RNA (1)...(19): siRNA sense strand
aaugacaagagcaggaaga

SEQ ID NO: 2619187 - RNA, 19 nt, Homo sapiens
  misc_RNA (1)...(19): siRNA sense strand
aagagcaggaagagcgaga

SEQ ID NO: 2619188 - RNA, 19 nt, Homo sapiens
  misc_RNA (1)...(19): siRNA sense strand
ugggaagagaggacuggaa

SEQ ID NO: 2619189 - RNA, 19 nt, Homo sapiens
  misc_RNA (1)...(19): siRNA sense strand
gagcggcugcagagagaga

SEQ ID NO: 2619190 - RNA, 19 nt, Homo sapiens
  misc_RNA (1)...(19): siRNA sense strand
agaaggugaaggugauuga

SEQ ID NO: 2619191 - RNA, 19 nt, Homo sapiens
  misc_RNA (1)...(19): siRNA sense strand
cggcaaagggauggggaga

SEQ ID NO: 2619192 - RNA, 19 nt, Homo sapiens
  misc_RNA (1)...(19): siRNA sense strand
aaagagaaggaauuggaga

SEQ ID NO: 2619193 - RNA, 19 nt, Homo sapiens
  misc_RNA (1)...(19): siRNA sense strand
augaugaggaguaugaaga

SEQ ID NO: 2619194 - RNA, 19 nt, Homo sapiens
  misc_RNA (1)...(19): siRNA sense strand
agcacaaauuccaagauga

SEQ ID NO: 2619195 - RNA, 19 nt, Homo sapiens
  misc_RNA (1)...(19): siRNA sense strand
cugcaguggcgauggggua

SEQ ID NO: 2619196 - RNA, 19 nt, Homo sapiens
  misc_RNA (1)...(19): siRNA sense strand
gaucaaagauguugcugga

SEQ ID NO: 2619197 - RNA, 19 nt, Homo sapiens
  misc_RNA (1)...(19): siRNA sense strand
acucagaauaggaagaaaa

SEQ ID NO: 2619198 - RNA, 19 nt, Homo sapiens
  misc_RNA (1)...(19): siRNA sense strand
agacaaaguaccugcuaca

SEQ ID NO: 2619199 - RNA, 19 nt, Homo sapiens
  misc_RNA (1)...(19): siRNA sense strand
ucaaagauguugcuggaga

SEQ ID NO: 2619200 - RNA, 19 nt, Homo sapiens
  misc_RNA (1)...(19): siRNA sense strand
cuguuauacuguugaaguu

SEQ ID NO: 2619201 - RNA, 19 nt, Homo sapiens
  misc_RNA (1)...(19): siRNA sense strand
gguacagacccaaggaucu

SEQ ID NO: 2619202 - RNA, 19 nt, Homo sapiens
  misc_RNA (1)...(19): siRNA sense strand
caaaggacucagacgucua

SEQ ID NO: 2619203 - RNA, 19 nt, Homo sapiens
  misc_RNA (1)...(19): siRNA sense strand
aagaaguacugcuacaaaa

SEQ ID NO: 2619204 - RNA, 19 nt, Homo sapiens
  misc_RNA (1)...(19): siRNA sense strand
caggaaacugggacugaau

SEQ ID NO: 2619205 - RNA, 19 nt, Homo sapiens
  misc_RNA (1)...(19): siRNA sense strand
aucuauagcugcugaaguu

SEQ ID NO: 2619206 - RNA, 19 nt, Homo sapiens
  misc_RNA (1)...(19): siRNA sense strand
caugaugaugcuacagaau

SEQ ID NO: 2619207 - RNA, 19 nt, Homo sapiens
  misc_RNA (1)...(19): siRNA sense strand
agucaagauuauucucgaa

SEQ ID NO: 2619208 - RNA, 19 nt, Homo sapiens
  misc_RNA (1)...(19): siRNA sense strand
ccaaauaggaucugcaguc

SEQ ID NO: 2619209 - RNA, 19 nt, Homo sapiens
  misc_RNA (1)...(19): siRNA sense strand
gccaacagguacagaccca

SEQ ID NO: 2619210 - RNA, 19 nt, Homo sapiens
  misc_RNA (1)...(19): siRNA sense strand
ggugguuggacuacaauuu

SEQ ID NO: 2619211 - RNA, 19 nt, Homo sapiens
  misc_RNA (1)...(19): siRNA sense strand
uggagaggguacagggaaa

SEQ ID NO: 2619212 - RNA, 19 nt, Homo sapiens
  misc_RNA (1)...(19): siRNA sense strand
gggaaauggaagagaaauc

SEQ ID NO: 2619213 - RNA, 19 nt, Homo sapiens
  misc_RNA (1)...(19): siRNA sense strand
cuucaaagacagagagcca

SEQ ID NO: 2619214 - RNA, 19 nt, Homo sapiens
  misc_RNA (1)...(19): siRNA sense strand
gaucaaagauguugcugga

SEQ ID NO: 2619215 - RNA, 19 nt, Homo sapiens
  misc_RNA (1)...(19): siRNA sense strand
ugaaggaggcagaagggaa

SEQ ID NO: 2619216 - RNA, 19 nt, Homo sapiens
  misc_RNA (1)...(19): siRNA sense strand
ggagaaacacuaucgggaa

SEQ ID NO: 2619217 - RNA, 19 nt, Homo sapiens
  misc_RNA (1)...(19): siRNA sense strand
ggguacagggaaaggaaaa

SEQ ID NO: 2619218 - RNA, 19 nt, Homo sapiens
  misc_RNA (1)...(19): siRNA sense strand
ucgggaaauggaagagaaa

SEQ ID NO: 2619219 - RNA, 19 nt, Homo sapiens
  misc_RNA (1)...(19): siRNA sense strand
acucagaauaggaagaaaa

SEQ ID NO: 2619220 - RNA, 19 nt, Homo sapiens
  misc_RNA (1)...(19): siRNA sense strand
agacaaaguaccugcuaca

SEQ ID NO: 2619221 - RNA, 19 nt, Homo sapiens
  misc_RNA (1)...(19): siRNA sense strand
ucaaagauguugcuggaga

SEQ ID NO: 2619222 - RNA, 19 nt, Homo sapiens
  misc_RNA (1)...(19): siRNA sense strand
gcugaguaugcucgaaaua

SEQ ID NO: 2619223 - RNA, 19 nt, Homo sapiens
  misc_RNA (1)...(19): siRNA sense strand
auaaauaggcagaaggaag

SEQ ID NO: 2619224 - RNA, 19 nt, Homo sapiens
  misc_RNA (1)...(19): siRNA sense strand
guggaagaagcuuggagaa

SEQ ID NO: 2619225 - RNA, 19 nt, Homo sapiens
  misc_RNA (1)...(19): siRNA sense strand
cagaaacauuggagagggu

SEQ ID NO: 2619226 - RNA, 19 nt, Homo sapiens
  misc_RNA (1)...(19): siRNA sense strand
cuguuauacuguugaaguu

SEQ ID NO: 2619227 - RNA, 19 nt, Homo sapiens
  misc_RNA (1)...(19): siRNA sense strand
gcuuaaauuccuagcgaag

SEQ ID NO: 2619228 - RNA, 19 nt, Homo sapiens
  misc_RNA (1)...(19): siRNA sense strand
gcuccaugcccaagcucaa

SEQ ID NO: 2619229 - RNA, 19 nt, Homo sapiens
  misc_RNA (1)...(19): siRNA sense strand
agauaaauaggcagaagga

SEQ ID NO: 2619230 - RNA, 19 nt, Homo sapiens
  misc_RNA (1)...(19): siRNA sense strand
gguacagacccaaggaucu

SEQ ID NO: 2619231 - RNA, 19 nt, Homo sapiens
  misc_RNA (1)...(19): siRNA sense strand
cagcugaguaugcucgaaa

SEQ ID NO: 2619232 - RNA, 19 nt, Homo sapiens
  misc_RNA (1)...(19): siRNA sense strand
caaaggacucagacgucua

SEQ ID NO: 2619233 - RNA, 19 nt, Homo sapiens
  misc_RNA (1)...(19): siRNA sense strand
aagaaguacugcuacaaaa

SEQ ID NO: 2619234 - RNA, 19 nt, Homo sapiens
  misc_RNA (1)...(19): siRNA sense strand
caggaaacugggacugaau

SEQ ID NO: 2619235 - RNA, 19 nt, Homo sapiens
  misc_RNA (1)...(19): siRNA sense strand
cgaaauaguucauccaggu

SEQ ID NO: 2619236 - RNA, 19 nt, Homo sapiens
  misc_RNA (1)...(19): siRNA sense strand
agaaggaagaagaggaccu

SEQ ID NO: 2619237 - RNA, 19 nt, Homo sapiens
  misc_RNA (1)...(19): siRNA sense strand
gauugauguuccaaaggau

SEQ ID NO: 2619238 - RNA, 19 nt, Homo sapiens
  misc_RNA (1)...(19): siRNA sense strand
ggcagaaggaagaagagga

SEQ ID NO: 2619239 - RNA, 19 nt, Homo sapiens
  misc_RNA (1)...(19): siRNA sense strand
gcaacuucaaagacagaga

SEQ ID NO: 2619240 - RNA, 19 nt, Homo sapiens
  misc_RNA (1)...(19): siRNA sense strand
aucuauagcugcugaaguu

SEQ ID NO: 2619241 - RNA, 19 nt, Homo sapiens
  misc_RNA (1)...(19): siRNA sense strand
ugcccaagcucaagaacga

SEQ ID NO: 2619242 - RNA, 19 nt, Homo sapiens
  misc_RNA (1)...(19): siRNA sense strand
caugaugaugcuacagaau

SEQ ID NO: 2619243 - RNA, 19 nt, Homo sapiens
  misc_RNA (1)...(19): siRNA sense strand
gaggguacagggaaaggaa

SEQ ID NO: 2619244 - RNA, 19 nt, Homo sapiens
  misc_RNA (1)...(19): siRNA sense strand
gguggaagaagcuuggaga

SEQ ID NO: 2619245 - RNA, 19 nt, Homo sapiens
  misc_RNA (1)...(19): siRNA sense strand
agucaagauuauucucgaa

SEQ ID NO: 2619246 - RNA, 19 nt, Homo sapiens
  misc_RNA (1)...(19): siRNA sense strand
cgagaauugcagcugagua

SEQ ID NO: 2619247 - RNA, 19 nt, Homo sapiens
  misc_RNA (1)...(19): siRNA sense strand
ccaaauaggaucugcaguc

SEQ ID NO: 2619248 - RNA, 19 nt, Homo sapiens
  misc_RNA (1)...(19): siRNA sense strand
cuggagauaaauaggcaga

SEQ ID NO: 2619249 - RNA, 19 nt, Homo sapiens
  misc_RNA (1)...(19): siRNA sense strand
gccaacagguacagaccca

SEQ ID NO: 2619250 - RNA, 19 nt, Homo sapiens
  misc_RNA (1)...(19): siRNA sense strand
caacacuacuuuaugggca

SEQ ID NO: 2619251 - RNA, 19 nt, Homo sapiens
  misc_RNA (1)...(19): siRNA sense strand
ggugguuggacuacaauuu

SEQ ID NO: 2619252 - RNA, 19 nt, Homo sapiens
  misc_RNA (1)...(19): siRNA sense strand
gauaaauaggcagaaggaa

SEQ ID NO: 2619253 - RNA, 19 nt, Homo sapiens
  misc_RNA (1)...(19): siRNA sense strand
acugaagaaacgaguggau

SEQ ID NO: 2619254 - RNA, 19 nt, Homo sapiens
  misc_RNA (1)...(19): siRNA sense strand
ccuucgaccucuugggaga

SEQ ID NO: 2619255 - RNA, 19 nt, Homo sapiens
  misc_RNA (1)...(19): siRNA sense strand
cugaaggagcuguuggaga

SEQ ID NO: 2619256 - RNA, 19 nt, Homo sapiens
  misc_RNA (1)...(19): siRNA sense strand
agaaagacccggacgagga

SEQ ID NO: 2619257 - RNA, 19 nt, Homo sapiens
  misc_RNA (1)...(19): siRNA sense strand
gucucagguccuugggaaa

SEQ ID NO: 2619258 - RNA, 19 nt, Homo sapiens
  misc_RNA (1)...(19): siRNA sense strand
ccgcagagaucguggaugg

SEQ ID NO: 2619259 - RNA, 19 nt, Homo sapiens
  misc_RNA (1)...(19): siRNA sense strand
acagagagcugaagagcag

SEQ ID NO: 2619260 - RNA, 19 nt, Homo sapiens
  misc_RNA (1)...(19): siRNA sense strand
uggaggaccugauggacga

SEQ ID NO: 2619261 - RNA, 19 nt, Homo sapiens
  misc_RNA (1)...(19): siRNA sense strand
guggaggagcggaucagaa

SEQ ID NO: 2619262 - RNA, 19 nt, Homo sapiens
  misc_RNA (1)...(19): siRNA sense strand
ugaaggagcuguuggagac

SEQ ID NO: 2619263 - RNA, 19 nt, Homo sapiens
  misc_RNA (1)...(19): siRNA sense strand
accugguggugaagaacaa

SEQ ID NO: 2619264 - RNA, 19 nt, Homo sapiens
  misc_RNA (1)...(19): siRNA sense strand
ggaaauggcuucagacaua

SEQ ID NO: 2619265 - RNA, 19 nt, Homo sapiens
  misc_RNA (1)...(19): siRNA sense strand
ggagaagcugagagagcaa

SEQ ID NO: 2619266 - RNA, 19 nt, Homo sapiens
  misc_RNA (1)...(19): siRNA sense strand
gaaagaaggagaagcccaa

SEQ ID NO: 2619267 - RNA, 19 nt, Homo sapiens
  misc_RNA (1)...(19): siRNA sense strand
cugaaauguuugcaggaau

SEQ ID NO: 2619268 - RNA, 19 nt, Homo sapiens
  misc_RNA (1)...(19): siRNA sense strand
uggaagugcaccagagaga

SEQ ID NO: 2619269 - RNA, 19 nt, Homo sapiens
  misc_RNA (1)...(19): siRNA sense strand
caggaugagguguggaaau

SEQ ID NO: 2619270 - RNA, 19 nt, Homo sapiens
  misc_RNA (1)...(19): siRNA sense strand
ccgggaaguccguggaaaa

SEQ ID NO: 2619271 - RNA, 19 nt, Homo sapiens
  misc_RNA (1)...(19): siRNA sense strand
aggaaaagguucaggaaug

SEQ ID NO: 2619272 - RNA, 19 nt, Homo sapiens
  misc_RNA (1)...(19): siRNA sense strand
gcuuccagcaggugguuaa

SEQ ID NO: 2619273 - RNA, 19 nt, Homo sapiens
  misc_RNA (1)...(19): siRNA sense strand
ggaauuagugcaucggaga

SEQ ID NO: 2619274 - RNA, 19 nt, Homo sapiens
  misc_RNA (1)...(19): siRNA sense strand
cgucaagcaacuucagcaa

SEQ ID NO: 2619275 - RNA, 19 nt, Homo sapiens
  misc_RNA (1)...(19): siRNA sense strand
gguuaagcugaaaggccaa

SEQ ID NO: 2619276 - RNA, 19 nt, Homo sapiens
  misc_RNA (1)...(19): siRNA sense strand
aggcagaauuggaagugca

SEQ ID NO: 2619277 - RNA, 19 nt, Homo sapiens
  misc_RNA (1)...(19): siRNA sense strand
ggcauaacuccgauggaau

SEQ ID NO: 2619278 - RNA, 19 nt, Homo sapiens
  misc_RNA (1)...(19): siRNA sense strand
ggaaaggacauuuuggaau

SEQ ID NO: 2619279 - RNA, 19 nt, Homo sapiens
  misc_RNA (1)...(19): siRNA sense strand
ccucguggcaauugggaga

SEQ ID NO: 2619280 - RNA, 19 nt, Homo sapiens
  misc_RNA (1)...(19): siRNA sense strand
cggaaauggcuucagacau

SEQ ID NO: 2619281 - RNA, 19 nt, Homo sapiens
  misc_RNA (1)...(19): siRNA sense strand
uggaaaaggcggaugcaau

SEQ ID NO: 2619282 - RNA, 19 nt, Homo sapiens
  misc_RNA (1)...(19): siRNA sense strand
cagaauuggaagugcacca

SEQ ID NO: 2619283 - RNA, 19 nt, Homo sapiens
  misc_RNA (1)...(19): siRNA sense strand
cgaugaugaagauggugaa

SEQ ID NO: 2619284 - RNA, 19 nt, Homo sapiens
  misc_RNA (1)...(19): siRNA sense strand
cggucaacccuccggaaau

SEQ ID NO: 2619285 - RNA, 19 nt, Homo sapiens
  misc_RNA (1)...(19): siRNA sense strand
ugaccauaccugaagaaga

SEQ ID NO: 2619286 - RNA, 19 nt, Homo sapiens
  misc_RNA (1)...(19): siRNA sense strand
ugguuaagcugaaaggcca

SEQ ID NO: 2619287 - RNA, 19 nt, Homo sapiens
  misc_RNA (1)...(19): siRNA sense strand
agaagaagaugaugagcuc

SEQ ID NO: 2619288 - RNA, 19 nt, Homo sapiens
  misc_RNA (1)...(19): siRNA sense strand
agagaaucauagugaaauc

SEQ ID NO: 2619289 - RNA, 19 nt, Homo sapiens
  misc_RNA (1)...(19): siRNA sense strand
ccaagauguaucaguguga

SEQ ID NO: 2619290 - RNA, 19 nt, Homo sapiens
  misc_RNA (1)...(19): siRNA sense strand
ggugaaggccccaguaaau

SEQ ID NO: 2619291 - RNA, 19 nt, Homo sapiens
  misc_RNA (1)...(19): siRNA sense strand
gagaagaagaugaugagcu

SEQ ID NO: 2619292 - RNA, 19 nt, Homo sapiens
  misc_RNA (1)...(19): siRNA sense strand
ucggagaagaagaugauga

SEQ ID NO: 2619293 - RNA, 19 nt, Homo sapiens
  misc_RNA (1)...(19): siRNA sense strand
cggaauggacuucgaugau

SEQ ID NO: 2619294 - RNA, 19 nt, Homo sapiens
  misc_RNA (1)...(19): siRNA sense strand
aagaaggagaagcccaaua

SEQ ID NO: 2619295 - RNA, 19 nt, Homo sapiens
  misc_RNA (1)...(19): siRNA sense strand
acaccaacgucaagcaacu

SEQ ID NO: 2619296 - RNA, 19 nt, Homo sapiens
  misc_RNA (1)...(19): siRNA sense strand
ccggaaauggcuucagaca

SEQ ID NO: 2619297 - RNA, 19 nt, Homo sapiens
  misc_RNA (1)...(19): siRNA sense strand
gugcaucggagaagaagau

SEQ ID NO: 2619298 - RNA, 19 nt, Homo sapiens
  misc_RNA (1)...(19): siRNA sense strand
cgaaaggcgcagacggaac

SEQ ID NO: 2619299 - RNA, 19 nt, Homo sapiens
  misc_RNA (1)...(19): siRNA sense strand
acguggagaagcugagaga

SEQ ID NO: 2619300 - RNA, 19 nt, Homo sapiens
  misc_RNA (1)...(19): siRNA sense strand
aggaaugaccauaccugaa

SEQ ID NO: 2619301 - RNA, 19 nt, Homo sapiens
  misc_RNA (1)...(19): siRNA sense strand
ccggaauggacuucgauga

SEQ ID NO: 2619302 - RNA, 19 nt, Homo sapiens
  misc_RNA (1)...(19): siRNA sense strand
cugaagacugggacgguca

SEQ ID NO: 2619303 - RNA, 19 nt, Homo sapiens
  misc_RNA (1)...(19): siRNA sense strand
cggucaagaaagaagggca

SEQ ID NO: 2619304 - RNA, 19 nt, Homo sapiens
  misc_RNA (1)...(19): siRNA sense strand
ggucaagaaagaagggcag

SEQ ID NO: 2619305 - RNA, 19 nt, Homo sapiens
  misc_RNA (1)...(19): siRNA sense strand
ugaaagaaggagaagccca

SEQ ID NO: 2619306 - RNA, 19 nt, Homo sapiens
  misc_RNA (1)...(19): siRNA sense strand
gggaacaaguccaccgaug

SEQ ID NO: 2619307 - RNA, 19 nt, Homo sapiens
  misc_RNA (1)...(19): siRNA sense strand
guggagaagcugagagagc

SEQ ID NO: 2619308 - RNA, 19 nt, Homo sapiens
  misc_RNA (1)...(19): siRNA sense strand
cagcaggaacccagcagau

SEQ ID NO: 2619309 - RNA, 19 nt, Homo sapiens
  misc_RNA (1)...(19): siRNA sense strand
ccaaaucuccggcagcuaa

SEQ ID NO: 2619310 - RNA, 19 nt, Homo sapiens
  misc_RNA (1)...(19): siRNA sense strand
cugaugacguggagaagcu

SEQ ID NO: 2619311 - RNA, 19 nt, Homo sapiens
  misc_RNA (1)...(19): siRNA sense strand
ccucuaaacagaauaacca

SEQ ID NO: 2619312 - RNA, 19 nt, Homo sapiens
  misc_RNA (1)...(19): siRNA sense strand
ugugguggcugcugagaca

SEQ ID NO: 2619313 - RNA, 19 nt, Homo sapiens
  misc_RNA (1)...(19): siRNA sense strand
gggaaaggacauuuuggaa

SEQ ID NO: 2619314 - RNA, 19 nt, Homo sapiens
  misc_RNA (1)...(19): siRNA sense strand
gaggaaaagguucaggaau

SEQ ID NO: 2619315 - RNA, 19 nt, Homo sapiens
  misc_RNA (1)...(19): siRNA sense strand
cccaauaugcuguggucca

SEQ ID NO: 2619316 - RNA, 19 nt, Homo sapiens
  misc_RNA (1)...(19): siRNA sense strand
gcggucaacccuccggaaa

SEQ ID NO: 2619317 - RNA, 19 nt, Homo sapiens
  misc_RNA (1)...(19): siRNA sense strand
gggaagaaguggagggcag

SEQ ID NO: 2619318 - RNA, 19 nt, Homo sapiens
  misc_RNA (1)...(19): siRNA sense strand
uucaaagagcugcgagaaa

SEQ ID NO: 2619319 - RNA, 19 nt, Homo sapiens
  misc_RNA (1)...(19): siRNA sense strand
ugucagaagagauggcaga

SEQ ID NO: 2619320 - RNA, 19 nt, Homo sapiens
  misc_RNA (1)...(19): siRNA sense strand
ugaacaggaagaugggcaa

SEQ ID NO: 2619321 - RNA, 19 nt, Homo sapiens
  misc_RNA (1)...(19): siRNA sense strand
agaaaggagaugugaucca

SEQ ID NO: 2619322 - RNA, 19 nt, Homo sapiens
  misc_RNA (1)...(19): siRNA sense strand
cgaaccaugaacaggaaga

SEQ ID NO: 2619323 - RNA, 19 nt, Homo sapiens
  misc_RNA (1)...(19): siRNA sense strand
ggaugauaacauuccagaa

SEQ ID NO: 2619324 - RNA, 19 nt, Homo sapiens
  misc_RNA (1)...(19): siRNA sense strand
acuucaaagagcugcgaga

SEQ ID NO: 2619325 - RNA, 19 nt, Homo sapiens
  misc_RNA (1)...(19): siRNA sense strand
ugaaacugcagaaaggaga

SEQ ID NO: 2619326 - RNA, 19 nt, Homo sapiens
  misc_RNA (1)...(19): siRNA sense strand
cugagcaagaggagcauga

SEQ ID NO: 2619327 - RNA, 19 nt, Homo sapiens
  misc_RNA (1)...(19): siRNA sense strand
cagaagagauggcagacac

SEQ ID NO: 2619328 - RNA, 19 nt, Homo sapiens
  misc_RNA (1)...(19): siRNA sense strand
cugaagaaguuuaggaaaa

SEQ ID NO: 2619329 - RNA, 19 nt, Homo sapiens
  misc_RNA (1)...(19): siRNA sense strand
cugaaagaguuaagagauu

SEQ ID NO: 2619330 - RNA, 19 nt, Homo sapiens
  misc_RNA (1)...(19): siRNA sense strand
gaagagaaauggacggcua

SEQ ID NO: 2619331 - RNA, 19 nt, Homo sapiens
  misc_RNA (1)...(19): siRNA sense strand
ugaaaggaacugagguaaa

SEQ ID NO: 2619332 - RNA, 19 nt, Homo sapiens
  misc_RNA (1)...(19): siRNA sense strand
ggugaaaggaacugaggua

SEQ ID NO: 2619333 - RNA, 19 nt, Homo sapiens
  misc_RNA (1)...(19): siRNA sense strand
acucagaucuccagagcaa

SEQ ID NO: 2619334 - RNA, 19 nt, Homo sapiens
  misc_RNA (1)...(19): siRNA sense strand
caguaaaggccgacucaaa

SEQ ID NO: 2619335 - RNA, 19 nt, Homo sapiens
  misc_RNA (1)...(19): siRNA sense strand
agauauaauucguggccuu

SEQ ID NO: 2619336 - RNA, 19 nt, Homo sapiens
  misc_RNA (1)...(19): siRNA sense strand
uggaagagaaucagaagua

SEQ ID NO: 2619337 - RNA, 19 nt, Homo sapiens
  misc_RNA (1)...(19): siRNA sense strand
ccgaaguggaagagaauca

SEQ ID NO: 2619338 - RNA, 19 nt, Homo sapiens
  misc_RNA (1)...(19): siRNA sense strand
uguacaaagagaagacaaa

SEQ ID NO: 2619339 - RNA, 19 nt, Homo sapiens
  misc_RNA (1)...(19): siRNA sense strand
ugugacagccgaagagaaa

SEQ ID NO: 2619340 - RNA, 19 nt, Homo sapiens
  misc_RNA (1)...(19): siRNA sense strand
cagaaguauuucaagggaa

SEQ ID NO: 2619341 - RNA, 19 nt, Homo sapiens
  misc_RNA (1)...(19): siRNA sense strand
gguaaacaccacagugauu

SEQ ID NO: 2619342 - RNA, 19 nt, Homo sapiens
  misc_RNA (1)...(19): siRNA sense strand
acgaagacuugcugaguga

SEQ ID NO: 2619343 - RNA, 19 nt, Homo sapiens
  misc_RNA (1)...(19): siRNA sense strand
ucaaaggagaucacagaua

SEQ ID NO: 2619344 - RNA, 19 nt, Homo sapiens
  misc_RNA (1)...(19): siRNA sense strand
gcacugaguacaaggccaa

SEQ ID NO: 2619345 - RNA, 19 nt, Homo sapiens
  misc_RNA (1)...(19): siRNA sense strand
aguacaaggccaaggauga

SEQ ID NO: 2619346 - RNA, 19 nt, Homo sapiens
  misc_RNA (1)...(19): siRNA sense strand
cgaaggaaggggagacaua

SEQ ID NO: 2619347 - RNA, 19 nt, Homo sapiens
  misc_RNA (1)...(19): siRNA sense strand
aggaaugaagcucggguaa

SEQ ID NO: 2619348 - RNA, 19 nt, Homo sapiens
  misc_RNA (1)...(19): siRNA sense strand
cugaguaugagcuggaaua

SEQ ID NO: 2619349 - RNA, 19 nt, Homo sapiens
  misc_RNA (1)...(19): siRNA sense strand
aggcagauauggugaacga

SEQ ID NO: 2619350 - RNA, 19 nt, Homo sapiens
  misc_RNA (1)...(19): siRNA sense strand
cugaggaagugaagcaaga

SEQ ID NO: 2619351 - RNA, 19 nt, Homo sapiens
  misc_RNA (1)...(19): siRNA sense strand
ggaugauacucaggugaaa

SEQ ID NO: 2619352 - RNA, 19 nt, Homo sapiens
  misc_RNA (1)...(19): siRNA sense strand
gaaagaacucagaaagcau

SEQ ID NO: 2619353 - RNA, 19 nt, Homo sapiens
  misc_RNA (1)...(19): siRNA sense strand
guaugaacuaucugacaaa

SEQ ID NO: 2619354 - RNA, 19 nt, Homo sapiens
  misc_RNA (1)...(19): siRNA sense strand
ugauggaacgagugagaau

SEQ ID NO: 2619355 - RNA, 19 nt, Homo sapiens
  misc_RNA (1)...(19): siRNA sense strand
aggaagugaagcaagauaa

SEQ ID NO: 2619356 - RNA, 19 nt, Homo sapiens
  misc_RNA (1)...(19): siRNA sense strand
cugaagauguugaugggau

SEQ ID NO: 2619357 - RNA, 19 nt, Homo sapiens
  misc_RNA (1)...(19): siRNA sense strand
aggcaagacugcugcugua

SEQ ID NO: 2619358 - RNA, 19 nt, Homo sapiens
  misc_RNA (1)...(19): siRNA sense strand
ccagagaagcacagagacu

SEQ ID NO: 2619359 - RNA, 19 nt, Homo sapiens
  misc_RNA (1)...(19): siRNA sense strand
gguuaaugacucugaagau

SEQ ID NO: 2619360 - RNA, 19 nt, Homo sapiens
  misc_RNA (1)...(19): siRNA sense strand
ccaagaaguggaugauuau

SEQ ID NO: 2619361 - RNA, 19 nt, Homo sapiens
  misc_RNA (1)...(19): siRNA sense strand
ugucuuagaaccagagauu

SEQ ID NO: 2619362 - RNA, 19 nt, Homo sapiens
  misc_RNA (1)...(19): siRNA sense strand
uguuugauguguugaggaa

SEQ ID NO: 2619363 - RNA, 19 nt, Homo sapiens
  misc_RNA (1)...(19): siRNA sense strand
cugagauguuccuuaguaa

SEQ ID NO: 2619364 - RNA, 19 nt, Homo sapiens
  misc_RNA (1)...(19): siRNA sense strand
ugagauuggcucugaggaa

SEQ ID NO: 2619365 - RNA, 19 nt, Homo sapiens
  misc_RNA (1)...(19): siRNA sense strand
gcguggaauuggccauuaa

SEQ ID NO: 2619366 - RNA, 19 nt, Homo sapiens
  misc_RNA (1)...(19): siRNA sense strand
guucagaagaaggcagaua

SEQ ID NO: 2619367 - RNA, 19 nt, Homo sapiens
  misc_RNA (1)...(19): siRNA sense strand
cagauauggugaacgaaga

SEQ ID NO: 2619368 - RNA, 19 nt, Homo sapiens
  misc_RNA (1)...(19): siRNA sense strand
gggaacagcuagacccuga

SEQ ID NO: 2619369 - RNA, 19 nt, Homo sapiens
  misc_RNA (1)...(19): siRNA sense strand
uggauuuaacagcgaguaa

SEQ ID NO: 2619370 - RNA, 19 nt, Homo sapiens
  misc_RNA (1)...(19): siRNA sense strand
gcuaagaacuucaucacca

SEQ ID NO: 2619371 - RNA, 19 nt, Homo sapiens
  misc_RNA (1)...(19): siRNA sense strand
gaggaagugaagcaagaua

SEQ ID NO: 2619372 - RNA, 19 nt, Homo sapiens
  misc_RNA (1)...(19): siRNA sense strand
aagaugugguagaguauau

SEQ ID NO: 2619373 - RNA, 19 nt, Homo sapiens
  misc_RNA (1)...(19): siRNA sense strand
gaagacagacacagugcaa

SEQ ID NO: 2619374 - RNA, 19 nt, Homo sapiens
  misc_RNA (1)...(19): siRNA sense strand
ggaacgagugagaaugaau

SEQ ID NO: 2619375 - RNA, 19 nt, Homo sapiens
  misc_RNA (1)...(19): siRNA sense strand
gaacuaucugacaaagaaa

SEQ ID NO: 2619376 - RNA, 19 nt, Homo sapiens
  misc_RNA (1)...(19): siRNA sense strand
agagauaagcuaugagaac

SEQ ID NO: 2619377 - RNA, 19 nt, Homo sapiens
  misc_RNA (1)...(19): siRNA sense strand
guucaaaggagaucacaga

SEQ ID NO: 2619378 - RNA, 19 nt, Homo sapiens
  misc_RNA (1)...(19): siRNA sense strand
auuacaaccuggagauuca

SEQ ID NO: 2619379 - RNA, 19 nt, Homo sapiens
  misc_RNA (1)...(19): siRNA sense strand
ccaagagaucaaacagcua

SEQ ID NO: 2619380 - RNA, 19 nt, Homo sapiens
  misc_RNA (1)...(19): siRNA sense strand
gcauagauugggaauagaa

SEQ ID NO: 2619381 - RNA, 19 nt, Homo sapiens
  misc_RNA (1)...(19): siRNA sense strand
auguagaagugaauagcau

SEQ ID NO: 2619382 - RNA, 19 nt, Homo sapiens
  misc_RNA (1)...(19): siRNA sense strand
gguugauagcagauauaau

SEQ ID NO: 2619383 - RNA, 19 nt, Homo sapiens
  misc_RNA (1)...(19): siRNA sense strand
ccacagcagaguugaugaa

SEQ ID NO: 2619384 - RNA, 19 nt, Homo sapiens
  misc_RNA (1)...(19): siRNA sense strand
cuuacauggcaaaugaaua

SEQ ID NO: 2619385 - RNA, 19 nt, Homo sapiens
  misc_RNA (1)...(19): siRNA sense strand
cagaagacagucaagagaa

SEQ ID NO: 2619386 - RNA, 19 nt, Homo sapiens
  misc_RNA (1)...(19): siRNA sense strand
gagguugauagcagauaua

SEQ ID NO: 2619387 - RNA, 19 nt, Homo sapiens
  misc_RNA (1)...(19): siRNA sense strand
aguaugaacuaucugacaa

SEQ ID NO: 2619388 - RNA, 19 nt, Homo sapiens
  misc_RNA (1)...(19): siRNA sense strand
gcuaaggguccaaucgcaa

SEQ ID NO: 2619389 - RNA, 19 nt, Homo sapiens
  misc_RNA (1)...(19): siRNA sense strand
aagugaagcaagauaaaga

SEQ ID NO: 2619390 - RNA, 19 nt, Homo sapiens
  misc_RNA (1)...(19): siRNA sense strand
gcugaaagccaucgagaaa

SEQ ID NO: 2619391 - RNA, 19 nt, Homo sapiens
  misc_RNA (1)...(19): siRNA sense strand
ggagaaggacgaagaggaa

SEQ ID NO: 2619392 - RNA, 19 nt, Homo sapiens
  misc_RNA (1)...(19): siRNA sense strand
gagaaagagaagaagguga

SEQ ID NO: 2619393 - RNA, 19 nt, Homo sapiens
  misc_RNA (1)...(19): siRNA sense strand
ccaucgagaaagagaagaa

SEQ ID NO: 2619394 - RNA, 19 nt, Homo sapiens
  misc_RNA (1)...(19): siRNA sense strand
ccaaugucucagugggaaa

SEQ ID NO: 2619395 - RNA, 19 nt, Homo sapiens
  misc_RNA (1)...(19): siRNA sense strand
ggauuuggccagagcguuu

SEQ ID NO: 2619396 - RNA, 19 nt, Homo sapiens
  misc_RNA (1)...(19): siRNA sense strand
uggaagaggugauccgcua

SEQ ID NO: 2619397 - RNA, 19 nt, Homo sapiens
  misc_RNA (1)...(19): siRNA sense strand
ugaaagccaucgagaaaga

SEQ ID NO: 2619398 - RNA, 19 nt, Homo sapiens
  misc_RNA (1)...(19): siRNA sense strand
ggaaugaguuuguugcuga

SEQ ID NO: 2619399 - RNA, 19 nt, Homo sapiens
  misc_RNA (1)...(19): siRNA sense strand
cugccuaagagaaggaaaa

SEQ ID NO: 2619400 - RNA, 19 nt, Homo sapiens
  misc_RNA (1)...(19): siRNA sense strand
uggaggaaggcaaggguau

SEQ ID NO: 2619401 - RNA, 19 nt, Homo sapiens
  misc_RNA (1)...(19): siRNA sense strand
ccagaauguaacugccuaa

SEQ ID NO: 2619402 - RNA, 19 nt, Homo sapiens
  misc_RNA (1)...(19): siRNA sense strand
ucuccgaguuccugaagaa

SEQ ID NO: 2619403 - RNA, 19 nt, Homo sapiens
  misc_RNA (1)...(19): siRNA sense strand
augcaguggaggaaggcaa

SEQ ID NO: 2619404 - RNA, 19 nt, Homo sapiens
  misc_RNA (1)...(19): siRNA sense strand
gggucaucgugaagaaguu

SEQ ID NO: 2619405 - RNA, 19 nt, Homo sapiens
  misc_RNA (1)...(19): siRNA sense strand
aagaggaagccuugauuga

SEQ ID NO: 2619406 - RNA, 19 nt, Homo sapiens
  misc_RNA (1)...(19): siRNA sense strand
uggaagagcugaccaagau

SEQ ID NO: 2619407 - RNA, 19 nt, Homo sapiens
  misc_RNA (1)...(19): siRNA sense strand
aggaucaggaagacauuua

SEQ ID NO: 2619408 - RNA, 19 nt, Homo sapiens
  misc_RNA (1)...(19): siRNA sense strand
uggcuggucgcaagggaaa

SEQ ID NO: 2619409 - RNA, 19 nt, Homo sapiens
  misc_RNA (1)...(19): siRNA sense strand
uggagaaggacgaagagga

SEQ ID NO: 2619410 - RNA, 19 nt, Homo sapiens
  misc_RNA (1)...(19): siRNA sense strand
gggccuuggaagaggugau

SEQ ID NO: 2619411 - RNA, 19 nt, Homo sapiens
  misc_RNA (1)...(19): siRNA sense strand
gcaaaugccagaaagagga

SEQ ID NO: 2619412 - RNA, 19 nt, Homo sapiens
  misc_RNA (1)...(19): siRNA sense strand
caagaugguuccuccagaa

SEQ ID NO: 2619413 - RNA, 19 nt, Homo sapiens
  misc_RNA (1)...(19): siRNA sense strand
ugauugaugaacagaguga

SEQ ID NO: 2619414 - RNA, 19 nt, Homo sapiens
  misc_RNA (1)...(19): siRNA sense strand
cgugauuggaacaggggaa

SEQ ID NO: 2619415 - RNA, 19 nt, Homo sapiens
  misc_RNA (1)...(19): siRNA sense strand
aaggaagucauuaaggaau

SEQ ID NO: 2619416 - RNA, 19 nt, Homo sapiens
  misc_RNA (1)...(19): siRNA sense strand
cagcugagcacgagcaucu

SEQ ID NO: 2619417 - RNA, 19 nt, Homo sapiens
  misc_RNA (1)...(19): siRNA sense strand
caggaguacaggucggaga

SEQ ID NO: 2619418 - RNA, 19 nt, Homo sapiens
  misc_RNA (1)...(19): siRNA sense strand
cuggaagagcugaccaaga

SEQ ID NO: 2619419 - RNA, 19 nt, Homo sapiens
  misc_RNA (1)...(19): siRNA sense strand
gaaacaucggccugugcaa

SEQ ID NO: 2619420 - RNA, 19 nt, Homo sapiens
  misc_RNA (1)...(19): siRNA sense strand
agguggacagcguggagaa

SEQ ID NO: 2619421 - RNA, 19 nt, Homo sapiens
  misc_RNA (1)...(19): siRNA sense strand
ccaacaugauccuggugga

SEQ ID NO: 2619422 - RNA, 19 nt, Homo sapiens
  misc_RNA (1)...(19): siRNA sense strand
caugaaugcaguggaggaa

SEQ ID NO: 2619423 - RNA, 19 nt, Homo sapiens
  misc_RNA (1)...(19): siRNA sense strand
uuaagaugaugcaggcuga

SEQ ID NO: 2619424 - RNA, 19 nt, Homo sapiens
  misc_RNA (1)...(19): siRNA sense strand
gugucugugaagaugauaa

SEQ ID NO: 2619425 - RNA, 19 nt, Homo sapiens
  misc_RNA (1)...(19): siRNA sense strand
cagagugagcugaaagcca

SEQ ID NO: 2619426 - RNA, 19 nt, Homo sapiens
  misc_RNA (1)...(19): siRNA sense strand
gaugaugacuucucagcca

SEQ ID NO: 2619427 - RNA, 19 nt, Homo sapiens
  misc_RNA (1)...(19): siRNA sense strand
ucaugaaugcaguggagga

SEQ ID NO: 2619428 - RNA, 19 nt, Homo sapiens
  misc_RNA (1)...(19): siRNA sense strand
aagccuugauugaugaaca

SEQ ID NO: 2619429 - RNA, 19 nt, Homo sapiens
  misc_RNA (1)...(19): siRNA sense strand
cagaaagaggauuuggcca

SEQ ID NO: 2619430 - RNA, 19 nt, Homo sapiens
  misc_RNA (1)...(19): siRNA sense strand
uggaagaacacaagagaau

SEQ ID NO: 2619431 - RNA, 19 nt, Homo sapiens
  misc_RNA (1)...(19): siRNA sense strand
uggcaaaaguucaagaaaa

SEQ ID NO: 2619432 - RNA, 19 nt, Homo sapiens
  misc_RNA (1)...(19): siRNA sense strand
caaaagaggaagaggagaa

SEQ ID NO: 2619433 - RNA, 19 nt, Homo sapiens
  misc_RNA (1)...(19): siRNA sense strand
cugcagaagacaaacgaaa

SEQ ID NO: 2619434 - RNA, 19 nt, Homo sapiens
  misc_RNA (1)...(19): siRNA sense strand
cuacaaacuuacuaggcua

SEQ ID NO: 2619435 - RNA, 19 nt, Homo sapiens
  misc_RNA (1)...(19): siRNA sense strand
aggagaaauuugagcugua

SEQ ID NO: 2619436 - RNA, 19 nt, Homo sapiens
  misc_RNA (1)...(19): siRNA sense strand
aggcaacaaguaagagaaa

SEQ ID NO: 2619437 - RNA, 19 nt, Homo sapiens
  misc_RNA (1)...(19): siRNA sense strand
cuaucuugacuuagagaaa

SEQ ID NO: 2619438 - RNA, 19 nt, Homo sapiens
  misc_RNA (1)...(19): siRNA sense strand
agagaaacaacuugaagaa

SEQ ID NO: 2619439 - RNA, 19 nt, Homo sapiens
  misc_RNA (1)...(19): siRNA sense strand
gaagaagaucggauggcaa

SEQ ID NO: 2619440 - RNA, 19 nt, Homo sapiens
  misc_RNA (1)...(19): siRNA sense strand
cuaaauuugcugaggauga

SEQ ID NO: 2619441 - RNA, 19 nt, Homo sapiens
  misc_RNA (1)...(19): siRNA sense strand
ucaacaaaggagugaaauu

SEQ ID NO: 2619442 - RNA, 19 nt, Homo sapiens
  misc_RNA (1)...(19): siRNA sense strand
cagaagaaaacaagagauu

SEQ ID NO: 2619443 - RNA, 19 nt, Homo sapiens
  misc_RNA (1)...(19): siRNA sense strand
gcuaaaagaagaagcagaa

SEQ ID NO: 2619444 - RNA, 19 nt, Homo sapiens
  misc_RNA (1)...(19): siRNA sense strand
agaagaagcagaaaagaaa

SEQ ID NO: 2619445 - RNA, 19 nt, Homo sapiens
  misc_RNA (1)...(19): siRNA sense strand
uaucaacaaaggagugaaa

SEQ ID NO: 2619446 - RNA, 19 nt, Homo sapiens
  misc_RNA (1)...(19): siRNA sense strand
aagaagaucaguuggaaaa

SEQ ID NO: 2619447 - RNA, 19 nt, Homo sapiens
  misc_RNA (1)...(19): siRNA sense strand
aagaagaucggauggcaaa

SEQ ID NO: 2619448 - RNA, 19 nt, Homo sapiens
  misc_RNA (1)...(19): siRNA sense strand
cagcaaaggcggcaaggau

SEQ ID NO: 2619449 - RNA, 19 nt, Homo sapiens
  misc_RNA (1)...(19): siRNA sense strand
uggaagaagaaaacagaaa

SEQ ID NO: 2619450 - RNA, 19 nt, Homo sapiens
  misc_RNA (1)...(19): siRNA sense strand
aggaagaacaagcugaaau

SEQ ID NO: 2619451 - RNA, 19 nt, Homo sapiens
  misc_RNA (1)...(19): siRNA sense strand
gcagcaaagagaagaagau

SEQ ID NO: 2619452 - RNA, 19 nt, Homo sapiens
  misc_RNA (1)...(19): siRNA sense strand
aagaggagaacuuuagaaa

SEQ ID NO: 2619453 - RNA, 19 nt, Homo sapiens
  misc_RNA (1)...(19): siRNA sense strand
uggcuauggaauuggcaaa

SEQ ID NO: 2619454 - RNA, 19 nt, Homo sapiens
  misc_RNA (1)...(19): siRNA sense strand
gaaacaaagcgaaagcaca

SEQ ID NO: 2619455 - RNA, 19 nt, Homo sapiens
  misc_RNA (1)...(19): siRNA sense strand
aagaauuauaccaggaaga

SEQ ID NO: 2619456 - RNA, 19 nt, Homo sapiens
  misc_RNA (1)...(19): siRNA sense strand
aagcgaaagcacaguacua

SEQ ID NO: 2619457 - RNA, 19 nt, Homo sapiens
  misc_RNA (1)...(19): siRNA sense strand
aagaggaagaggagaacuu

SEQ ID NO: 2619458 - RNA, 19 nt, Homo sapiens
  misc_RNA (1)...(19): siRNA sense strand
ggaagaucuaugaagaaga

SEQ ID NO: 2619459 - RNA, 19 nt, Homo sapiens
  misc_RNA (1)...(19): siRNA sense strand
ggaagaagaaaacagaaaa

SEQ ID NO: 2619460 - RNA, 19 nt, Homo sapiens
  misc_RNA (1)...(19): siRNA sense strand
aagaagaagcagaaaagaa

SEQ ID NO: 2619461 - RNA, 19 nt, Homo sapiens
  misc_RNA (1)...(19): siRNA sense strand
gcaagauuuugaagaacaa

SEQ ID NO: 2619462 - RNA, 19 nt, Homo sapiens
  misc_RNA (1)...(19): siRNA sense strand
ugaaggaauuagugcuaca

SEQ ID NO: 2619463 - RNA, 19 nt, Homo sapiens
  misc_RNA (1)...(19): siRNA sense strand
agugaaaggcaucagaaau

SEQ ID NO: 2619464 - RNA, 19 nt, Homo sapiens
  misc_RNA (1)...(19): siRNA sense strand
aauuauaccaggaagaaca

SEQ ID NO: 2619465 - RNA, 19 nt, Homo sapiens
  misc_RNA (1)...(19): siRNA sense strand
acugaaacaugaaagucua

SEQ ID NO: 2619466 - RNA, 19 nt, Homo sapiens
  misc_RNA (1)...(19): siRNA sense strand
aucaaauggugcagaauga

SEQ ID NO: 2619467 - RNA, 19 nt, Homo sapiens
  misc_RNA (1)...(19): siRNA sense strand
gcugaaauauauaagagca

SEQ ID NO: 2619468 - RNA, 19 nt, Homo sapiens
  misc_RNA (1)...(19): siRNA sense strand
gugaaauuugugaagagaa

SEQ ID NO: 2619469 - RNA, 19 nt, Homo sapiens
  misc_RNA (1)...(19): siRNA sense strand
uagugaaaggcaucagaaa

SEQ ID NO: 2619470 - RNA, 19 nt, Homo sapiens
  misc_RNA (1)...(19): siRNA sense strand
gguauauagaagaguuuca

SEQ ID NO: 2619471 - RNA, 19 nt, Homo sapiens
  misc_RNA (1)...(19): siRNA sense strand
gcagcagcaaagagaagaa

SEQ ID NO: 2619472 - RNA, 19 nt, Homo sapiens
  misc_RNA (1)...(19): siRNA sense strand
gaggaugaucgaauagaau

SEQ ID NO: 2619473 - RNA, 19 nt, Homo sapiens
  misc_RNA (1)...(19): siRNA sense strand
augaaagucuaaaggacga

SEQ ID NO: 2619474 - RNA, 19 nt, Homo sapiens
  misc_RNA (1)...(19): siRNA sense strand
acgugaagauuuggaacaa

SEQ ID NO: 2619475 - RNA, 19 nt, Homo sapiens
  misc_RNA (1)...(19): siRNA sense strand
cuugaaggaauuagugcua

SEQ ID NO: 2619476 - RNA, 19 nt, Homo sapiens
  misc_RNA (1)...(19): siRNA sense strand
uucaaaaggcagaagaaaa

SEQ ID NO: 2619477 - RNA, 19 nt, Homo sapiens
  misc_RNA (1)...(19): siRNA sense strand
gcuaacaugcagcagcaaa

SEQ ID NO: 2619478 - RNA, 19 nt, Homo sapiens
  misc_RNA (1)...(19): siRNA sense strand
uaaugaaugcucagaaaca

SEQ ID NO: 2619479 - RNA, 19 nt, Homo sapiens
  misc_RNA (1)...(19): siRNA sense strand
augaaugcucagaaacaaa

SEQ ID NO: 2619480 - RNA, 19 nt, Homo sapiens
  misc_RNA (1)...(19): siRNA sense strand
cugaaaaggaugccauuaa

SEQ ID NO: 2619481 - RNA, 19 nt, Homo sapiens
  misc_RNA (1)...(19): siRNA sense strand
gaaugcugcagaagacaaa

SEQ ID NO: 2619482 - RNA, 19 nt, Homo sapiens
  misc_RNA (1)...(19): siRNA sense strand
agaagacaaacgaaacaaa

SEQ ID NO: 2619483 - RNA, 19 nt, Homo sapiens
  misc_RNA (1)...(19): siRNA sense strand
aggagauggaagaagaaaa

SEQ ID NO: 2619484 - RNA, 19 nt, Homo sapiens
  misc_RNA (1)...(19): siRNA sense strand
cggcagaagacaagccuga

SEQ ID NO: 2619485 - RNA, 19 nt, Homo sapiens
  misc_RNA (1)...(19): siRNA sense strand
gugccauggucaaagggua

SEQ ID NO: 2619486 - RNA, 19 nt, Homo sapiens
  misc_RNA (1)...(19): siRNA sense strand
agugaauguccuuguuaua

SEQ ID NO: 2619487 - RNA, 19 nt, Homo sapiens
  misc_RNA (1)...(19): siRNA sense strand
aggcucaagucaugcgaca

SEQ ID NO: 2619488 - RNA, 19 nt, Homo sapiens
  misc_RNA (1)...(19): siRNA sense strand
gggcagaagcuguuggcug

SEQ ID NO: 2619489 - RNA, 19 nt, Homo sapiens
  misc_RNA (1)...(19): siRNA sense strand
ggaugauggcaggguguau

SEQ ID NO: 2619490 - RNA, 19 nt, Homo sapiens
  misc_RNA (1)...(19): siRNA sense strand
aagaagaggaugaggaaaa

SEQ ID NO: 2619491 - RNA, 19 nt, Homo sapiens
  misc_RNA (1)...(19): siRNA sense strand
cuucaagugcagagguaaa

SEQ ID NO: 2619492 - RNA, 19 nt, Homo sapiens
  misc_RNA (1)...(19): siRNA sense strand
gugaggagcuggaggcuga

SEQ ID NO: 2619493 - RNA, 19 nt, Homo sapiens
  misc_RNA (1)...(19): siRNA sense strand
aagaaagugaagaaggcaa

SEQ ID NO: 2619494 - RNA, 19 nt, Homo sapiens
  misc_RNA (1)...(19): siRNA sense strand
agaaagugaagaaggcaau

SEQ ID NO: 2619495 - RNA, 19 nt, Homo sapiens
  misc_RNA (1)...(19): siRNA sense strand
cugaagaauaugaaaggau

SEQ ID NO: 2619496 - RNA, 19 nt, Homo sapiens
  misc_RNA (1)...(19): siRNA sense strand
cugugaagaucaaggagga

SEQ ID NO: 2619497 - RNA, 19 nt, Homo sapiens
  misc_RNA (1)...(19): siRNA sense strand
aggaggaaccugugagcga

SEQ ID NO: 2619498 - RNA, 19 nt, Homo sapiens
  misc_RNA (1)...(19): siRNA sense strand
gccucaagaaagugaagaa

SEQ ID NO: 2619499 - RNA, 19 nt, Homo sapiens
  misc_RNA (1)...(19): siRNA sense strand
ugacuuuuaucgugggaaa

SEQ ID NO: 2619500 - RNA, 19 nt, Homo sapiens
  misc_RNA (1)...(19): siRNA sense strand
aggcaaugucucugggcau

SEQ ID NO: 2619501 - RNA, 19 nt, Homo sapiens
  misc_RNA (1)...(19): siRNA sense strand
ccaauaucaucaagccaga

SEQ ID NO: 2619502 - RNA, 19 nt, Homo sapiens
  misc_RNA (1)...(19): siRNA sense strand
caugagugaagcugggauu

SEQ ID NO: 2619503 - RNA, 19 nt, Homo sapiens
  misc_RNA (1)...(19): siRNA sense strand
caagaagaggaugaggaaa

SEQ ID NO: 2619504 - RNA, 19 nt, Homo sapiens
  misc_RNA (1)...(19): siRNA sense strand
ucaucaagccagaccaaca

SEQ ID NO: 2619505 - RNA, 19 nt, Homo sapiens
  misc_RNA (1)...(19): siRNA sense strand
ugaaguggguauuggcagu

SEQ ID NO: 2619506 - RNA, 19 nt, Homo sapiens
  misc_RNA (1)...(19): siRNA sense strand
gugcagagguaaaugcuuc

SEQ ID NO: 2619507 - RNA, 19 nt, Homo sapiens
  misc_RNA (1)...(19): siRNA sense strand
cuuaauuagugaaugccaa

SEQ ID NO: 2619508 - RNA, 19 nt, Homo sapiens
  misc_RNA (1)...(19): siRNA sense strand
gggacaaggcugaggacuc

SEQ ID NO: 2619509 - RNA, 19 nt, Homo sapiens
  misc_RNA (1)...(19): siRNA sense strand
cagcauugaggaugugcaa

SEQ ID NO: 2619510 - RNA, 19 nt, Homo sapiens
  misc_RNA (1)...(19): siRNA sense strand
augaugaacuguuagccua

SEQ ID NO: 2619511 - RNA, 19 nt, Homo sapiens
  misc_RNA (1)...(19): siRNA sense strand
aacuggaggcugugagcua

SEQ ID NO: 2619512 - RNA, 19 nt, Homo sapiens
  misc_RNA (1)...(19): siRNA sense strand
uugauaauaagaagcgcaa

SEQ ID NO: 2619513 - RNA, 19 nt, Homo sapiens
  misc_RNA (1)...(19): siRNA sense strand
gaguuacauacuuggaaca

SEQ ID NO: 2619514 - RNA, 19 nt, Homo sapiens
  misc_RNA (1)...(19): siRNA sense strand
uggugaugaaagaaggaga

SEQ ID NO: 2619515 - RNA, 19 nt, Homo sapiens
  misc_RNA (1)...(19): siRNA sense strand
aguugcaaguagagagaga

SEQ ID NO: 2619516 - RNA, 19 nt, Homo sapiens
  misc_RNA (1)...(19): siRNA sense strand
cuguauugccucagaucaa

SEQ ID NO: 2619517 - RNA, 19 nt, Homo sapiens
  misc_RNA (1)...(19): siRNA sense strand
cuauggaaugcuugugaaa

SEQ ID NO: 2619518 - RNA, 19 nt, Homo sapiens
  misc_RNA (1)...(19): siRNA sense strand
ccacagugucgcugcaaau

SEQ ID NO: 2619519 - RNA, 19 nt, Homo sapiens
  misc_RNA (1)...(19): siRNA sense strand
uuacaagcacuuugagcaa

SEQ ID NO: 2619520 - RNA, 19 nt, Homo sapiens
  misc_RNA (1)...(19): siRNA sense strand
ggccacaagcagaagggaa

SEQ ID NO: 2619521 - RNA, 19 nt, Homo sapiens
  misc_RNA (1)...(19): siRNA sense strand
uaauagaagugcaagcuga

SEQ ID NO: 2619522 - RNA, 19 nt, Homo sapiens
  misc_RNA (1)...(19): siRNA sense strand
guucaacauuacuggcaau

SEQ ID NO: 2619523 - RNA, 19 nt, Homo sapiens
  misc_RNA (1)...(19): siRNA sense strand
acaagaagcuucaggcucu

SEQ ID NO: 2619524 - RNA, 19 nt, Homo sapiens
  misc_RNA (1)...(19): siRNA sense strand
ggucagcuauccugggaga

SEQ ID NO: 2619525 - RNA, 19 nt, Homo sapiens
  misc_RNA (1)...(19): siRNA sense strand
gcugaauaccacaggaagu

SEQ ID NO: 2619526 - RNA, 19 nt, Homo sapiens
  misc_RNA (1)...(19): siRNA sense strand
ggaugcaggaggagggacu

SEQ ID NO: 2619527 - RNA, 19 nt, Homo sapiens
  misc_RNA (1)...(19): siRNA sense strand
gcugcaaauuguugggauc

SEQ ID NO: 2619528 - RNA, 19 nt, Homo sapiens
  misc_RNA (1)...(19): siRNA sense strand
guaacugacaagagggacu

SEQ ID NO: 2619529 - RNA, 19 nt, Homo sapiens
  misc_RNA (1)...(19): siRNA sense strand
ggaagaaauggaagaggcu

SEQ ID NO: 2619530 - RNA, 19 nt, Homo sapiens
  misc_RNA (1)...(19): siRNA sense strand
ccaauguccaggagcaaga

SEQ ID NO: 2619531 - RNA, 19 nt, Homo sapiens
  misc_RNA (1)...(19): siRNA sense strand
ggaacauuacagagaugau

SEQ ID NO: 2619532 - RNA, 19 nt, Homo sapiens
  misc_RNA (1)...(19): siRNA sense strand
agaggaaacacuuagccaa

SEQ ID NO: 2619533 - RNA, 19 nt, Homo sapiens
  misc_RNA (1)...(19): siRNA sense strand
gggagauagaguucaacau

SEQ ID NO: 2619534 - RNA, 19 nt, Homo sapiens
  misc_RNA (1)...(19): siRNA sense strand
uggccaaagaaauugacua

SEQ ID NO: 2619535 - RNA, 19 nt, Homo sapiens
  misc_RNA (1)...(19): siRNA sense strand
cuuccaauguccaggagca

SEQ ID NO: 2619536 - RNA, 19 nt, Homo sapiens
  misc_RNA (1)...(19): siRNA sense strand
auucaaaagcagaggaaac

SEQ ID NO: 2619537 - RNA, 19 nt, Homo sapiens
  misc_RNA (1)...(19): siRNA sense strand
ccucagggaagaaauggaa

SEQ ID NO: 2619538 - RNA, 19 nt, Homo sapiens
  misc_RNA (1)...(19): siRNA sense strand
gauaauaugaugcuggagu

SEQ ID NO: 2619539 - RNA, 19 nt, Homo sapiens
  misc_RNA (1)...(19): siRNA sense strand
auaugaugcuggaguuuua

SEQ ID NO: 2619540 - RNA, 19 nt, Homo sapiens
  misc_RNA (1)...(19): siRNA sense strand
caaagaagcuggcaccgau

SEQ ID NO: 2619541 - RNA, 19 nt, Homo sapiens
  misc_RNA (1)...(19): siRNA sense strand
uagagagagacgugauuga

SEQ ID NO: 2619542 - RNA, 19 nt, Homo sapiens
  misc_RNA (1)...(19): siRNA sense strand
ucagggaagaaauggaaga

SEQ ID NO: 2619543 - RNA, 19 nt, Homo sapiens
  misc_RNA (1)...(19): siRNA sense strand
ccaaacugaagaagcugaa

SEQ ID NO: 2619544 - RNA, 19 nt, Homo sapiens
  misc_RNA (1)...(19): siRNA sense strand
gggaagaaauggaagaggc

SEQ ID NO: 2619545 - RNA, 19 nt, Homo sapiens
  misc_RNA (1)...(19): siRNA sense strand
aauagaagugcaagcugaa

SEQ ID NO: 2619546 - RNA, 19 nt, Homo sapiens
  misc_RNA (1)...(19): siRNA sense strand
aggaagucccugacacuau

SEQ ID NO: 2619547 - RNA, 19 nt, Homo sapiens
  misc_RNA (1)...(19): siRNA sense strand
gaucaaagcacaacaggag

SEQ ID NO: 2619548 - RNA, 19 nt, Homo sapiens
  misc_RNA (1)...(19): siRNA sense strand
cggauaauaugaugcugga

SEQ ID NO: 2619549 - RNA, 19 nt, Homo sapiens
  misc_RNA (1)...(19): siRNA sense strand
ccucagccucccacaguaa

SEQ ID NO: 2619550 - RNA, 19 nt, Homo sapiens
  misc_RNA (1)...(19): siRNA sense strand
agaaauugacuaugcaaac

SEQ ID NO: 2619551 - RNA, 19 nt, Homo sapiens
  misc_RNA (1)...(19): siRNA sense strand
gccacaagcagaagggaac

SEQ ID NO: 2619552 - RNA, 19 nt, Homo sapiens
  misc_RNA (1)...(19): siRNA sense strand
cgaaccagguggcagcaga

SEQ ID NO: 2619553 - RNA, 19 nt, Homo sapiens
  misc_RNA (1)...(19): siRNA sense strand
aagcugaauaccacaggaa

SEQ ID NO: 2619554 - RNA, 19 nt, Homo sapiens
  misc_RNA (1)...(19): siRNA sense strand
gagcaagacaagaagcuuc

SEQ ID NO: 2619555 - RNA, 19 nt, Homo sapiens
  misc_RNA (1)...(19): siRNA sense strand
acuccuaagccgcgacaga

SEQ ID NO: 2619556 - RNA, 19 nt, Homo sapiens
  misc_RNA (1)...(19): siRNA sense strand
caauauuaugggaggcaaa

SEQ ID NO: 2619557 - RNA, 19 nt, Homo sapiens
  misc_RNA (1)...(19): siRNA sense strand
ccgcacaaggaaagguuaa

SEQ ID NO: 2619558 - RNA, 19 nt, Homo sapiens
  misc_RNA (1)...(19): siRNA sense strand
acuacaaaggaguggagaa

SEQ ID NO: 2619559 - RNA, 19 nt, Homo sapiens
  misc_RNA (1)...(19): siRNA sense strand
agugaguguugaaggagaa

SEQ ID NO: 2619560 - RNA, 19 nt, Homo sapiens
  misc_RNA (1)...(19): siRNA sense strand
gagugaguguugaaggaga

SEQ ID NO: 2619561 - RNA, 19 nt, Homo sapiens
  misc_RNA (1)...(19): siRNA sense strand
ccacagaaacuucaggcuu

SEQ ID NO: 2619562 - RNA, 19 nt, Homo sapiens
  misc_RNA (1)...(19): siRNA sense strand
agguggaauugcugauaga

SEQ ID NO: 2619563 - RNA, 19 nt, Homo sapiens
  misc_RNA (1)...(19): siRNA sense strand
ucuaugagacuguggacau

SEQ ID NO: 2619564 - RNA, 19 nt, Homo sapiens
  misc_RNA (1)...(19): siRNA sense strand
gagagauauuuguagagca

SEQ ID NO: 2619565 - RNA, 19 nt, Homo sapiens
  misc_RNA (1)...(19): siRNA sense strand
guggaauugcugauagaca

SEQ ID NO: 2619566 - RNA, 19 nt, Homo sapiens
  misc_RNA (1)...(19): siRNA sense strand
gugcggcuggagagagaua

SEQ ID NO: 2619567 - RNA, 19 nt, Homo sapiens
  misc_RNA (1)...(19): siRNA sense strand
agguauaugaacaugucua

SEQ ID NO: 2619568 - RNA, 19 nt, Homo sapiens
  misc_RNA (1)...(19): siRNA sense strand
ucugcaaugcugugagaga

SEQ ID NO: 2619569 - RNA, 19 nt, Homo sapiens
  misc_RNA (1)...(19): siRNA sense strand
augcugugagagagguaua

SEQ ID NO: 2619570 - RNA, 19 nt, Homo sapiens
  misc_RNA (1)...(19): siRNA sense strand
aaggagaacaucaugaaaa

SEQ ID NO: 2619571 - RNA, 19 nt, Homo sapiens
  misc_RNA (1)...(19): siRNA sense strand
uccucgaguuguugagcua

SEQ ID NO: 2619572 - RNA, 19 nt, Homo sapiens
  misc_RNA (1)...(19): siRNA sense strand
aagaaauggagucgcgcuu

SEQ ID NO: 2619573 - RNA, 19 nt, Homo sapiens
  misc_RNA (1)...(19): siRNA sense strand
ggccaaaagcugugaaaau

SEQ ID NO: 2619574 - RNA, 19 nt, Homo sapiens
  misc_RNA (1)...(19): siRNA sense strand
gguccgaaugcaaggaaau

SEQ ID NO: 2619575 - RNA, 19 nt, Homo sapiens
  misc_RNA (1)...(19): siRNA sense strand
gcaccgagaaacagcggaa

SEQ ID NO: 2619576 - RNA, 19 nt, Homo sapiens
  misc_RNA (1)...(19): siRNA sense strand
gggauuauuaguugugaau

SEQ ID NO: 2619577 - RNA, 19 nt, Homo sapiens
  misc_RNA (1)...(19): siRNA sense strand
gcuagggagaacugugaaa

SEQ ID NO: 2619578 - RNA, 19 nt, Homo sapiens
  misc_RNA (1)...(19): siRNA sense strand
ggacagagaaaaugacgaa

SEQ ID NO: 2619579 - RNA, 19 nt, Homo sapiens
  misc_RNA (1)...(19): siRNA sense strand
cuaugagcuucuugaggaa

SEQ ID NO: 2619580 - RNA, 19 nt, Homo sapiens
  misc_RNA (1)...(19): siRNA sense strand
aguaugagaucgugcacau

SEQ ID NO: 2619581 - RNA, 19 nt, Homo sapiens
  misc_RNA (1)...(19): siRNA sense strand
ccgauuugaagguguuaaa

SEQ ID NO: 2619582 - RNA, 19 nt, Homo sapiens
  misc_RNA (1)...(19): siRNA sense strand
ggaaaaugcuggaggaguc

SEQ ID NO: 2619583 - RNA, 19 nt, Homo sapiens
  misc_RNA (1)...(19): siRNA sense strand
caaugagugcaccgagaaa

SEQ ID NO: 2619584 - RNA, 19 nt, Homo sapiens
  misc_RNA (1)...(19): siRNA sense strand
ggaaagacuccuucagcca

SEQ ID NO: 2619585 - RNA, 19 nt, Homo sapiens
  misc_RNA (1)...(19): siRNA sense strand
gcccagguggacagagaaa

SEQ ID NO: 2619586 - RNA, 19 nt, Homo sapiens
  misc_RNA (1)...(19): siRNA sense strand
agucuaucgcugugaaauu

SEQ ID NO: 2619587 - RNA, 19 nt, Homo sapiens
  misc_RNA (1)...(19): siRNA sense strand
cacacaacgcugagggaga

SEQ ID NO: 2619588 - RNA, 19 nt, Homo sapiens
  misc_RNA (1)...(19): siRNA sense strand
gagaaacagcggaaagacu

SEQ ID NO: 2619589 - RNA, 19 nt, Homo sapiens
  misc_RNA (1)...(19): siRNA sense strand
ccuacauguucaacgagaa

SEQ ID NO: 2619590 - RNA, 19 nt, Homo sapiens
  misc_RNA (1)...(19): siRNA sense strand
cggaagggcucuacgcgau

SEQ ID NO: 2619591 - RNA, 19 nt, Homo sapiens
  misc_RNA (1)...(19): siRNA sense strand
ccacaaauucaucgagaac

SEQ ID NO: 2619592 - RNA, 19 nt, Homo sapiens
  misc_RNA (1)...(19): siRNA sense strand
caggcuggcaugaggaauu

SEQ ID NO: 2619593 - RNA, 19 nt, Homo sapiens
  misc_RNA (1)...(19): siRNA sense strand
ggcaugaggaauucugaaa

SEQ ID NO: 2619594 - RNA, 19 nt, Homo sapiens
  misc_RNA (1)...(19): siRNA sense strand
ucaaugaaggcgagcugaa

SEQ ID NO: 2619595 - RNA, 19 nt, Homo sapiens
  misc_RNA (1)...(19): siRNA sense strand
cgagaaguuuggaaagaac

SEQ ID NO: 2619596 - RNA, 19 nt, Homo sapiens
  misc_RNA (1)...(19): siRNA sense strand
gauuacaggaaguuaucua

SEQ ID NO: 2619597 - RNA, 19 nt, Homo sapiens
  misc_RNA (1)...(19): siRNA sense strand
ugaugaaggaagaacucua

SEQ ID NO: 2619598 - RNA, 19 nt, Homo sapiens
  misc_RNA (1)...(19): siRNA sense strand
ucaagaaguucguugcuca

SEQ ID NO: 2619599 - RNA, 19 nt, Homo sapiens
  misc_RNA (1)...(19): siRNA sense strand
cugaaaaucugacagcaaa

SEQ ID NO: 2619600 - RNA, 19 nt, Homo sapiens
  misc_RNA (1)...(19): siRNA sense strand
cuucagacccucagaucau

SEQ ID NO: 2619601 - RNA, 19 nt, Homo sapiens
  misc_RNA (1)...(19): siRNA sense strand
gcugaaggaaaucaagcaa

SEQ ID NO: 2619602 - RNA, 19 nt, Homo sapiens
  misc_RNA (1)...(19): siRNA sense strand
aggaaaucaagcaagauau

SEQ ID NO: 2619603 - RNA, 19 nt, Homo sapiens
  misc_RNA (1)...(19): siRNA sense strand
uuaagaacgauuacaggaa

SEQ ID NO: 2619604 - RNA, 19 nt, Homo sapiens
  misc_RNA (1)...(19): siRNA sense strand
ucaugaaguuuguagcuca

SEQ ID NO: 2619605 - RNA, 19 nt, Homo sapiens
  misc_RNA (1)...(19): siRNA sense strand
gugaacaagggcaaagaca

SEQ ID NO: 2619606 - RNA, 19 nt, Homo sapiens
  misc_RNA (1)...(19): siRNA sense strand
agaagagguggaagcaauu

SEQ ID NO: 2619607 - RNA, 19 nt, Homo sapiens
  misc_RNA (1)...(19): siRNA sense strand
agggacaagugguggccuu

SEQ ID NO: 2619608 - RNA, 19 nt, Homo sapiens
  misc_RNA (1)...(19): siRNA sense strand
gcuaugagcuucuugagga

SEQ ID NO: 2619609 - RNA, 19 nt, Homo sapiens
  misc_RNA (1)...(19): siRNA sense strand
aggaaguuaucuaugcaau

SEQ ID NO: 2619610 - RNA, 19 nt, Homo sapiens
  misc_RNA (1)...(19): siRNA sense strand
ugaaaaucucucaggcuua

SEQ ID NO: 2619611 - RNA, 19 nt, Homo sapiens
  misc_RNA (1)...(19): siRNA sense strand
ccgagaaacagcggaaaga

SEQ ID NO: 2619612 - RNA, 19 nt, Homo sapiens
  misc_RNA (1)...(19): siRNA sense strand
acuucaacuguguggacua

SEQ ID NO: 2619613 - RNA, 19 nt, Homo sapiens
  misc_RNA (1)...(19): siRNA sense strand
gcaaggaaaucugggagga

SEQ ID NO: 2619614 - RNA, 19 nt, Homo sapiens
  misc_RNA (1)...(19): siRNA sense strand
caugaggaauucugaaaau

SEQ ID NO: 2619615 - RNA, 19 nt, Homo sapiens
  misc_RNA (1)...(19): siRNA sense strand
ucugaaaaucugacagcaa

SEQ ID NO: 2619616 - RNA, 19 nt, Homo sapiens
  misc_RNA (1)...(19): siRNA sense strand
aagcccagguggacagaga

SEQ ID NO: 2619617 - RNA, 19 nt, Homo sapiens
  misc_RNA (1)...(19): siRNA sense strand
ugaacaagggcaaagacau

SEQ ID NO: 2619618 - RNA, 19 nt, Homo sapiens
  misc_RNA (1)...(19): siRNA sense strand
ucagcgagaaguuuggaaa

SEQ ID NO: 2619619 - RNA, 19 nt, Homo sapiens
  misc_RNA (1)...(19): siRNA sense strand
ugggauuauuaguugugaa

SEQ ID NO: 2619620 - RNA, 19 nt, Homo sapiens
  misc_RNA (1)...(19): siRNA sense strand
gugaaaaugaccuugaaau

SEQ ID NO: 2619621 - RNA, 19 nt, Homo sapiens
  misc_RNA (1)...(19): siRNA sense strand
acacagaagagguggaagc

SEQ ID NO: 2619622 - RNA, 19 nt, Homo sapiens
  misc_RNA (1)...(19): siRNA sense strand
ucuucaaguucauggucau

SEQ ID NO: 2619623 - RNA, 19 nt, Homo sapiens
  misc_RNA (1)...(19): siRNA sense strand
gugccaaguccuaaaucau

SEQ ID NO: 2619624 - RNA, 19 nt, Homo sapiens
  misc_RNA (1)...(19): siRNA sense strand
cuacaaaggacuggcgagu

SEQ ID NO: 2619625 - RNA, 19 nt, Homo sapiens
  misc_RNA (1)...(19): siRNA sense strand
cguccaagucugagccgga

SEQ ID NO: 2619626 - RNA, 19 nt, Homo sapiens
  misc_RNA (1)...(19): siRNA sense strand
guguuaaaacccugccaaa

SEQ ID NO: 2619627 - RNA, 19 nt, Homo sapiens
  misc_RNA (1)...(19): siRNA sense strand
ccaccagauaccagaaaau

SEQ ID NO: 2619628 - RNA, 19 nt, Homo sapiens
  misc_RNA (1)...(19): siRNA sense strand
ugaaacagucugagggaaa

SEQ ID NO: 2619629 - RNA, 19 nt, Homo sapiens
  misc_RNA (1)...(19): siRNA sense strand
cggaagaauuucagauaca

SEQ ID NO: 2619630 - RNA, 19 nt, Homo sapiens
  misc_RNA (1)...(19): siRNA sense strand
gcugaagaaauaugagaaa

SEQ ID NO: 2619631 - RNA, 19 nt, Homo sapiens
  misc_RNA (1)...(19): siRNA sense strand
gugccuaaggauagagaua

SEQ ID NO: 2619632 - RNA, 19 nt, Homo sapiens
  misc_RNA (1)...(19): siRNA sense strand
aagcagaagaggagaguga

SEQ ID NO: 2619633 - RNA, 19 nt, Homo sapiens
  misc_RNA (1)...(19): siRNA sense strand
agacaaugcgagagaguca

SEQ ID NO: 2619634 - RNA, 19 nt, Homo sapiens
  misc_RNA (1)...(19): siRNA sense strand
ccuaaagaccucaaaggaa

SEQ ID NO: 2619635 - RNA, 19 nt, Homo sapiens
  misc_RNA (1)...(19): siRNA sense strand
ugugagaauuauagaccaa

SEQ ID NO: 2619636 - RNA, 19 nt, Homo sapiens
  misc_RNA (1)...(19): siRNA sense strand
uaaaagaagacgauggaaa

SEQ ID NO: 2619637 - RNA, 19 nt, Homo sapiens
  misc_RNA (1)...(19): siRNA sense strand
gauacagggcagaggaaaa

SEQ ID NO: 2619638 - RNA, 19 nt, Homo sapiens
  misc_RNA (1)...(19): siRNA sense strand
ggaacaacagagagcaauu

SEQ ID NO: 2619639 - RNA, 19 nt, Homo sapiens
  misc_RNA (1)...(19): siRNA sense strand
agcaaggaauagagaggaa

SEQ ID NO: 2619640 - RNA, 19 nt, Homo sapiens
  misc_RNA (1)...(19): siRNA sense strand
ggggagaguugcuaggaaa

SEQ ID NO: 2619641 - RNA, 19 nt, Homo sapiens
  misc_RNA (1)...(19): siRNA sense strand
acagaagguuaguggauca

SEQ ID NO: 2619642 - RNA, 19 nt, Homo sapiens
  misc_RNA (1)...(19): siRNA sense strand
uggaagagauuuugagaga

SEQ ID NO: 2619643 - RNA, 19 nt, Homo sapiens
  misc_RNA (1)...(19): siRNA sense strand
ggucgaaacgugaagaaca

SEQ ID NO: 2619644 - RNA, 19 nt, Homo sapiens
  misc_RNA (1)...(19): siRNA sense strand
ggugaugaacaauuggaaa

SEQ ID NO: 2619645 - RNA, 19 nt, Homo sapiens
  misc_RNA (1)...(19): siRNA sense strand
aaaagaagacgauggaaaa

SEQ ID NO: 2619646 - RNA, 19 nt, Homo sapiens
  misc_RNA (1)...(19): siRNA sense strand
cuuuaaagauacuggagga

SEQ ID NO: 2619647 - RNA, 19 nt, Homo sapiens
  misc_RNA (1)...(19): siRNA sense strand
gugaugaacaauuggaaaa

SEQ ID NO: 2619648 - RNA, 19 nt, Homo sapiens
  misc_RNA (1)...(19): siRNA sense strand
ucaaaguuccagugagauu

SEQ ID NO: 2619649 - RNA, 19 nt, Homo sapiens
  misc_RNA (1)...(19): siRNA sense strand
ccaaagagauacagggcag

SEQ ID NO: 2619650 - RNA, 19 nt, Homo sapiens
  misc_RNA (1)...(19): siRNA sense strand
cuguauuacugcugcauau

SEQ ID NO: 2619651 - RNA, 19 nt, Homo sapiens
  misc_RNA (1)...(19): siRNA sense strand
caagaagacugauggagca

SEQ ID NO: 2619652 - RNA, 19 nt, Homo sapiens
  misc_RNA (1)...(19): siRNA sense strand
accaagaagcugaagaaau

SEQ ID NO: 2619653 - RNA, 19 nt, Homo sapiens
  misc_RNA (1)...(19): siRNA sense strand
acggaacaacagagagcaa

SEQ ID NO: 2619654 - RNA, 19 nt, Homo sapiens
  misc_RNA (1)...(19): siRNA sense strand
agacuuucuucaugagauu

SEQ ID NO: 2619655 - RNA, 19 nt, Homo sapiens
  misc_RNA (1)...(19): siRNA sense strand
cugugaaauuaaagaggca

SEQ ID NO: 2619656 - RNA, 19 nt, Homo sapiens
  misc_RNA (1)...(19): siRNA sense strand
cuaaagaccucaaaggaag

SEQ ID NO: 2619657 - RNA, 19 nt, Homo sapiens
  misc_RNA (1)...(19): siRNA sense strand
uggacuaccugaagaagau

SEQ ID NO: 2619658 - RNA, 19 nt, Homo sapiens
  misc_RNA (1)...(19): siRNA sense strand
agaagaggagagugauaau

SEQ ID NO: 2619659 - RNA, 19 nt, Homo sapiens
  misc_RNA (1)...(19): siRNA sense strand
ugagaaagaauaucagaca

SEQ ID NO: 2619660 - RNA, 19 nt, Homo sapiens
  misc_RNA (1)...(19): siRNA sense strand
gggaaaaggccauaccaau

SEQ ID NO: 2619661 - RNA, 19 nt, Homo sapiens
  misc_RNA (1)...(19): siRNA sense strand
gagauacagggcagaggaa

SEQ ID NO: 2619662 - RNA, 19 nt, Homo sapiens
  misc_RNA (1)...(19): siRNA sense strand
uucuaauggugaugaacaa

SEQ ID NO: 2619663 - RNA, 19 nt, Homo sapiens
  misc_RNA (1)...(19): siRNA sense strand
guagaggcuuuacgggcaa

SEQ ID NO: 2619664 - RNA, 19 nt, Homo sapiens
  misc_RNA (1)...(19): siRNA sense strand
gggagaguugcuaggaaaa

SEQ ID NO: 2619665 - RNA, 19 nt, Homo sapiens
  misc_RNA (1)...(19): siRNA sense strand
ccuuggugcacgaccgaaa

SEQ ID NO: 2619666 - RNA, 19 nt, Homo sapiens
  misc_RNA (1)...(19): siRNA sense strand
ccugaagaagauaguguuu

SEQ ID NO: 2619667 - RNA, 19 nt, Homo sapiens
  misc_RNA (1)...(19): siRNA sense strand
uaucagacaaugcgagaga

SEQ ID NO: 2619668 - RNA, 19 nt, Homo sapiens
  misc_RNA (1)...(19): siRNA sense strand
uacaaugaacagugaagaa

SEQ ID NO: 2619669 - RNA, 19 nt, Homo sapiens
  misc_RNA (1)...(19): siRNA sense strand
guuauuaagcccaggucga

SEQ ID NO: 2619670 - RNA, 19 nt, Homo sapiens
  misc_RNA (1)...(19): siRNA sense strand
ggaaagagcuaugauggga

SEQ ID NO: 2619671 - RNA, 19 nt, Homo sapiens
  misc_RNA (1)...(19): siRNA sense strand
ugaaaaucauguacgacua

SEQ ID NO: 2619672 - RNA, 19 nt, Homo sapiens
  misc_RNA (1)...(19): siRNA sense strand
agagacuaaugcaggaaca

SEQ ID NO: 2619673 - RNA, 19 nt, Homo sapiens
  misc_RNA (1)...(19): siRNA sense strand
ggaauagagaggaagguug

SEQ ID NO: 2619674 - RNA, 19 nt, Homo sapiens
  misc_RNA (1)...(19): siRNA sense strand
aguguuauuacucgagaua

SEQ ID NO: 2619675 - RNA, 19 nt, Homo sapiens
  misc_RNA (1)...(19): siRNA sense strand
augaaaucuuccagucaau

SEQ ID NO: 2619676 - RNA, 19 nt, Homo sapiens
  misc_RNA (1)...(19): siRNA sense strand
aauccaugggaaagagcua

SEQ ID NO: 2619677 - RNA, 19 nt, Homo sapiens
  misc_RNA (1)...(19): siRNA sense strand
uuacagaagguuaguggau

SEQ ID NO: 2619678 - RNA, 19 nt, Homo sapiens
  misc_RNA (1)...(19): siRNA sense strand
gcauaugccagaggaacaa

SEQ ID NO: 2619679 - RNA, 19 nt, Homo sapiens
  misc_RNA (1)...(19): siRNA sense strand
acagaaacaacuucgaaga

SEQ ID NO: 2619680 - RNA, 19 nt, Homo sapiens
  misc_RNA (1)...(19): siRNA sense strand
uggauaugguagucacaga

SEQ ID NO: 2619681 - RNA, 19 nt, Homo sapiens
  misc_RNA (1)...(19): siRNA sense strand
cagugagauuucagaccau

SEQ ID NO: 2619682 - RNA, 19 nt, Homo sapiens
  misc_RNA (1)...(19): siRNA sense strand
acgacuaugguuugagaga

SEQ ID NO: 2619683 - RNA, 19 nt, Homo sapiens
  misc_RNA (1)...(19): siRNA sense strand
gugaaauuaaagaggcagu

SEQ ID NO: 2619684 - RNA, 19 nt, Homo sapiens
  misc_RNA (1)...(19): siRNA sense strand
gcagaugauaauucuacaa

SEQ ID NO: 2619685 - RNA, 19 nt, Homo sapiens
  misc_RNA (1)...(19): siRNA sense strand
cucaguaugcagaugauaa

SEQ ID NO: 2619686 - RNA, 19 nt, Homo sapiens
  misc_RNA (1)...(19): siRNA sense strand
uguguaugaugaagacauu

SEQ ID NO: 2619687 - RNA, 19 nt, Homo sapiens
  misc_RNA (1)...(19): siRNA sense strand
guaccaaccaagaagcuga

SEQ ID NO: 2619688 - RNA, 19 nt, Homo sapiens
  misc_RNA (1)...(19): siRNA sense strand
acgagaaagagaugcgaaa

SEQ ID NO: 2619689 - RNA, 19 nt, Homo sapiens
  misc_RNA (1)...(19): siRNA sense strand
uguaaagcgcagugccaaa

SEQ ID NO: 2619690 - RNA, 19 nt, Homo sapiens
  misc_RNA (1)...(19): siRNA sense strand
aagguauaauccagagcaa

SEQ ID NO: 2619691 - RNA, 19 nt, Homo sapiens
  misc_RNA (1)...(19): siRNA sense strand
cugcaaagaauguccaaaa

SEQ ID NO: 2619692 - RNA, 19 nt, Homo sapiens
  misc_RNA (1)...(19): siRNA sense strand
cugcaugaacguuucgaaa

SEQ ID NO: 2619693 - RNA, 19 nt, Homo sapiens
  misc_RNA (1)...(19): siRNA sense strand
cauugaucguaucgacaaa

SEQ ID NO: 2619694 - RNA, 19 nt, Homo sapiens
  misc_RNA (1)...(19): siRNA sense strand
cgugcugaaagaaggguua

SEQ ID NO: 2619695 - RNA, 19 nt, Homo sapiens
  misc_RNA (1)...(19): siRNA sense strand
cgcuaggacaugugcgcua

SEQ ID NO: 2619696 - RNA, 19 nt, Homo sapiens
  misc_RNA (1)...(19): siRNA sense strand
cccagaagaacaagaacau

SEQ ID NO: 2619697 - RNA, 19 nt, Homo sapiens
  misc_RNA (1)...(19): siRNA sense strand
cuggauauauggaacccua

SEQ ID NO: 2619698 - RNA, 19 nt, Homo sapiens
  misc_RNA (1)...(19): siRNA sense strand
ucaccgaccaugacggaau

SEQ ID NO: 2619699 - RNA, 19 nt, Homo sapiens
  misc_RNA (1)...(19): siRNA sense strand
agguauaauccagagcaaa

SEQ ID NO: 2619700 - RNA, 19 nt, Homo sapiens
  misc_RNA (1)...(19): siRNA sense strand
gaaagacgauggagggcag

SEQ ID NO: 2619701 - RNA, 19 nt, Homo sapiens
  misc_RNA (1)...(19): siRNA sense strand
ucgucaugcucguggguaa

SEQ ID NO: 2619702 - RNA, 19 nt, Homo sapiens
  misc_RNA (1)...(19): siRNA sense strand
gcgaagguguccaagcaga

SEQ ID NO: 2619703 - RNA, 19 nt, Homo sapiens
  misc_RNA (1)...(19): siRNA sense strand
ggggaauggaacugaggaa

SEQ ID NO: 2619704 - RNA, 19 nt, Homo sapiens
  misc_RNA (1)...(19): siRNA sense strand
ugaaggagcucuaugacca

SEQ ID NO: 2619705 - RNA, 19 nt, Homo sapiens
  misc_RNA (1)...(19): siRNA sense strand
gcgaaucagguguggggaa

SEQ ID NO: 2619706 - RNA, 19 nt, Homo sapiens
  misc_RNA (1)...(19): siRNA sense strand
ucuucaagguggugcugau

SEQ ID NO: 2619707 - RNA, 19 nt, Homo sapiens
  misc_RNA (1)...(19): siRNA sense strand
cugaggaagauuauaacuu

SEQ ID NO: 2619708 - RNA, 19 nt, Homo sapiens
  misc_RNA (1)...(19): siRNA sense strand
ugguguaugaugaggaaau

SEQ ID NO: 2619709 - RNA, 19 nt, Homo sapiens
  misc_RNA (1)...(19): siRNA sense strand
aggcuguguuggaaagcaa

SEQ ID NO: 2619710 - RNA, 19 nt, Homo sapiens
  misc_RNA (1)...(19): siRNA sense strand
gcaaggaggagcugaggca

SEQ ID NO: 2619711 - RNA, 19 nt, Homo sapiens
  misc_RNA (1)...(19): siRNA sense strand
ugacaaaccuguaccagca

SEQ ID NO: 2619712 - RNA, 19 nt, Homo sapiens
  misc_RNA (1)...(19): siRNA sense strand
ugauggauucccagagcua

SEQ ID NO: 2619713 - RNA, 19 nt, Homo sapiens
  misc_RNA (1)...(19): siRNA sense strand
cuagaggagcugucaggaa

SEQ ID NO: 2619714 - RNA, 19 nt, Homo sapiens
  misc_RNA (1)...(19): siRNA sense strand
gcagugaggugcuggcguu

SEQ ID NO: 2619715 - RNA, 19 nt, Homo sapiens
  misc_RNA (1)...(19): siRNA sense strand
aauaaggcuguguuggaaa

SEQ ID NO: 2619716 - RNA, 19 nt, Homo sapiens
  misc_RNA (1)...(19): siRNA sense strand
ggguguuguaugaggggaa

SEQ ID NO: 2619717 - RNA, 19 nt, Homo sapiens
  misc_RNA (1)...(19): siRNA sense strand
ugacagacuacgaggcagu

SEQ ID NO: 2619718 - RNA, 19 nt, Homo sapiens
  misc_RNA (1)...(19): siRNA sense strand
ccugucugcucaagggcua

SEQ ID NO: 2619719 - RNA, 19 nt, Homo sapiens
  misc_RNA (1)...(19): siRNA sense strand
gcgccauguuggacucaau

SEQ ID NO: 2619720 - RNA, 19 nt, Homo sapiens
  misc_RNA (1)...(19): siRNA sense strand
acacuggaccugaggagga

SEQ ID NO: 2619721 - RNA, 19 nt, Homo sapiens
  misc_RNA (1)...(19): siRNA sense strand
gauaagaaguacaagucug

SEQ ID NO: 2619722 - RNA, 19 nt, Homo sapiens
  misc_RNA (1)...(19): siRNA sense strand
gacucaaugaagugcacaa

SEQ ID NO: 2619723 - RNA, 19 nt, Homo sapiens
  misc_RNA (1)...(19): siRNA sense strand
ugguagagaacgagggcag

SEQ ID NO: 2619724 - RNA, 19 nt, Homo sapiens
  misc_RNA (1)...(19): siRNA sense strand
cagaauaagaggaggccuu

SEQ ID NO: 2619725 - RNA, 19 nt, Homo sapiens
  misc_RNA (1)...(19): siRNA sense strand
auuccaacacacagagaaa

SEQ ID NO: 2619726 - RNA, 19 nt, Homo sapiens
  misc_RNA (1)...(19): siRNA sense strand
agccagaagaagauauaaa

SEQ ID NO: 2619727 - RNA, 19 nt, Homo sapiens
  misc_RNA (1)...(19): siRNA sense strand
ccacacaauacuaggaguu

SEQ ID NO: 2619728 - RNA, 19 nt, Homo sapiens
  misc_RNA (1)...(19): siRNA sense strand
gaaaagggcuggugcggau

SEQ ID NO: 2619729 - RNA, 19 nt, Homo sapiens
  misc_RNA (1)...(19): siRNA sense strand
guaagaacauacugcgcuu

SEQ ID NO: 2619730 - RNA, 19 nt, Homo sapiens
  misc_RNA (1)...(19): siRNA sense strand
cagaagaaacauggggaaa

SEQ ID NO: 2619731 - RNA, 19 nt, Homo sapiens
  misc_RNA (1)...(19): siRNA sense strand
acuaggaguugcauggaau

SEQ ID NO: 2619732 - RNA, 19 nt, Homo sapiens
  misc_RNA (1)...(19): siRNA sense strand
agaagaaacauggggaaaa

SEQ ID NO: 2619733 - RNA, 19 nt, Homo sapiens
  misc_RNA (1)...(19): siRNA sense strand
ggaaggaguuacauggucu

SEQ ID NO: 2619734 - RNA, 19 nt, Homo sapiens
  misc_RNA (1)...(19): siRNA sense strand
ucaugagaaagaaggacaa

SEQ ID NO: 2619735 - RNA, 19 nt, Homo sapiens
  misc_RNA (1)...(19): siRNA sense strand
aauuugagccagaagaaga

SEQ ID NO: 2619736 - RNA, 19 nt, Homo sapiens
  misc_RNA (1)...(19): siRNA sense strand
agauuacagggcagauaaa

SEQ ID NO: 2619737 - RNA, 19 nt, Homo sapiens
  misc_RNA (1)...(19): siRNA sense strand
aggugcagcugguacuaaa

SEQ ID NO: 2619738 - RNA, 19 nt, Homo sapiens
  misc_RNA (1)...(19): siRNA sense strand
ggaaugagauuacagggca

SEQ ID NO: 2619739 - RNA, 19 nt, Homo sapiens
  misc_RNA (1)...(19): siRNA sense strand
ccagaagaaacauggggaa

SEQ ID NO: 2619740 - RNA, 19 nt, Homo sapiens
  misc_RNA (1)...(19): siRNA sense strand
acauuauaccggugcugaa

SEQ ID NO: 2619741 - RNA, 19 nt, Homo sapiens
  misc_RNA (1)...(19): siRNA sense strand
ucucaagaaggcacugaaa

SEQ ID NO: 2619742 - RNA, 19 nt, Homo sapiens
  misc_RNA (1)...(19): siRNA sense strand
gcccaucauugaaagggaa

SEQ ID NO: 2619743 - RNA, 19 nt, Homo sapiens
  misc_RNA (1)...(19): siRNA sense strand
aguuauaucuguugcucca

SEQ ID NO: 2619744 - RNA, 19 nt, Homo sapiens
  misc_RNA (1)...(19): siRNA sense strand
ccuauaggaaggaguuaca

SEQ ID NO: 2619745 - RNA, 19 nt, Homo sapiens
  misc_RNA (1)...(19): siRNA sense strand
gguugaugcaauucauaau

SEQ ID NO: 2619746 - RNA, 19 nt, Homo sapiens
  misc_RNA (1)...(19): siRNA sense strand
caggaauaccagauggcca

SEQ ID NO: 2619747 - RNA, 19 nt, Homo sapiens
  misc_RNA (1)...(19): siRNA sense strand
cuagcuacuccuaaugaaa

SEQ ID NO: 2619748 - RNA, 19 nt, Homo sapiens
  misc_RNA (1)...(19): siRNA sense strand
aaaccaauugaucgguaua

SEQ ID NO: 2619749 - RNA, 19 nt, Homo sapiens
  misc_RNA (1)...(19): siRNA sense strand
ggauacacagagaggucca

SEQ ID NO: 2619750 - RNA, 19 nt, Homo sapiens
  misc_RNA (1)...(19): siRNA sense strand
acuccugguugaugcaauu

SEQ ID NO: 2619751 - RNA, 19 nt, Homo sapiens
  misc_RNA (1)...(19): siRNA sense strand
uuuaugugguccagggcau

SEQ ID NO: 2619752 - RNA, 19 nt, Homo sapiens
  misc_RNA (1)...(19): siRNA sense strand
uccaacacacagagaaauu

SEQ ID NO: 2619753 - RNA, 19 nt, Homo sapiens
  misc_RNA (1)...(19): siRNA sense strand
ugagauuacagggcagaua

SEQ ID NO: 2619754 - RNA, 19 nt, Homo sapiens
  misc_RNA (1)...(19): siRNA sense strand
aggaagaagcggaggagcu

SEQ ID NO: 2619755 - RNA, 19 nt, Homo sapiens
  misc_RNA (1)...(19): siRNA sense strand
gcaagaacgucaucugcga

SEQ ID NO: 2619756 - RNA, 19 nt, Homo sapiens
  misc_RNA (1)...(19): siRNA sense strand
cgacagaucaccagcgaug

SEQ ID NO: 2619757 - RNA, 19 nt, Homo sapiens
  misc_RNA (1)...(19): siRNA sense strand
aagcggaggagcuggccaa

SEQ ID NO: 2619758 - RNA, 19 nt, Homo sapiens
  misc_RNA (1)...(19): siRNA sense strand
ugcugaaagacgagggcuu

SEQ ID NO: 2619759 - RNA, 19 nt, Homo sapiens
  misc_RNA (1)...(19): siRNA sense strand
aucaagagguccagccaga

SEQ ID NO: 2619760 - RNA, 19 nt, Homo sapiens
  misc_RNA (1)...(19): siRNA sense strand
uggccaaggagaugagugu

SEQ ID NO: 2619761 - RNA, 19 nt, Homo sapiens
  misc_RNA (1)...(19): siRNA sense strand
ccuuaagacagaugggagu

SEQ ID NO: 2619762 - RNA, 19 nt, Homo sapiens
  misc_RNA (1)...(19): siRNA sense strand
caaaaguggggcuggcaaa

SEQ ID NO: 2619763 - RNA, 19 nt, Homo sapiens
  misc_RNA (1)...(19): siRNA sense strand
ccugacaugagacgggaaa

SEQ ID NO: 2619764 - RNA, 19 nt, Homo sapiens
  misc_RNA (1)...(19): siRNA sense strand
cagcaguaaaacaggcaaa

SEQ ID NO: 2619765 - RNA, 19 nt, Homo sapiens
  misc_RNA (1)...(19): siRNA sense strand
agucaaugaauaugcugaa

SEQ ID NO: 2619766 - RNA, 19 nt, Homo sapiens
  misc_RNA (1)...(19): siRNA sense strand
guuucugaguucaugacaa

SEQ ID NO: 2619767 - RNA, 19 nt, Homo sapiens
  misc_RNA (1)...(19): siRNA sense strand
ccuaaaguggucaacacaa

SEQ ID NO: 2619768 - RNA, 19 nt, Homo sapiens
  misc_RNA (1)...(19): siRNA sense strand
cgggaaauggagcagucaa

SEQ ID NO: 2619769 - RNA, 19 nt, Homo sapiens
  misc_RNA (1)...(19): siRNA sense strand
gggugaagccucaggacug

SEQ ID NO: 2619770 - RNA, 19 nt, Homo sapiens
  misc_RNA (1)...(19): siRNA sense strand
gagugcugguagacggaga

SEQ ID NO: 2619771 - RNA, 19 nt, Homo sapiens
  misc_RNA (1)...(19): siRNA sense strand
acccaaugguuaugaugau

SEQ ID NO: 2619772 - RNA, 19 nt, Homo sapiens
  misc_RNA (1)...(19): siRNA sense strand
uggagcagucaaugaauau

SEQ ID NO: 2619773 - RNA, 19 nt, Homo sapiens
  misc_RNA (1)...(19): siRNA sense strand
gguggaagcuguaggggaa

SEQ ID NO: 2619774 - RNA, 19 nt, Homo sapiens
  misc_RNA (1)...(19): siRNA sense strand
cugugugguuggagagaau

SEQ ID NO: 2619775 - RNA, 19 nt, Homo sapiens
  misc_RNA (1)...(19): siRNA sense strand
augccaaacuggaggagau

SEQ ID NO: 2619776 - RNA, 19 nt, Homo sapiens
  misc_RNA (1)...(19): siRNA sense strand
uggaggagauugaggcuga

SEQ ID NO: 2619777 - RNA, 19 nt, Homo sapiens
  misc_RNA (1)...(19): siRNA sense strand
augcaaagaaguuagagaa

SEQ ID NO: 2619778 - RNA, 19 nt, Homo sapiens
  misc_RNA (1)...(19): siRNA sense strand
ccguguggaaggaggauuu

SEQ ID NO: 2619779 - RNA, 19 nt, Homo sapiens
  misc_RNA (1)...(19): siRNA sense strand
ugacagugugcgagaggau

SEQ ID NO: 2619780 - RNA, 19 nt, Homo sapiens
  misc_RNA (1)...(19): siRNA sense strand
aaggagagucgguuggaau

SEQ ID NO: 2619781 - RNA, 19 nt, Homo sapiens
  misc_RNA (1)...(19): siRNA sense strand
agccacaaagccagggaaa

SEQ ID NO: 2619782 - RNA, 19 nt, Homo sapiens
  misc_RNA (1)...(19): siRNA sense strand
cagugaaugcaaagaaguu

SEQ ID NO: 2619783 - RNA, 19 nt, Homo sapiens
  misc_RNA (1)...(19): siRNA sense strand
cagagaaggacacgcucaa

SEQ ID NO: 2619784 - RNA, 19 nt, Homo sapiens
  misc_RNA (1)...(19): siRNA sense strand
ggacaaggaaucagagguc

SEQ ID NO: 2619785 - RNA, 19 nt, Homo sapiens
  misc_RNA (1)...(19): siRNA sense strand
cggaauggguuggggaaga

SEQ ID NO: 2619786 - RNA, 19 nt, Homo sapiens
  misc_RNA (1)...(19): siRNA sense strand
gaaccaaacuuccaggacu

SEQ ID NO: 2619787 - RNA, 19 nt, Homo sapiens
  misc_RNA (1)...(19): siRNA sense strand
ggagagugacagugugcga

SEQ ID NO: 2619788 - RNA, 19 nt, Homo sapiens
  misc_RNA (1)...(19): siRNA sense strand
gcaucugugugguuggaga

SEQ ID NO: 2619789 - RNA, 19 nt, Homo sapiens
  misc_RNA (1)...(19): siRNA sense strand
ggggagacuuugagaccuu

SEQ ID NO: 2619790 - RNA, 19 nt, Homo sapiens
  misc_RNA (1)...(19): siRNA sense strand
agcuagaugagguggauuu

SEQ ID NO: 2619791 - RNA, 19 nt, Homo sapiens
  misc_RNA (1)...(19): siRNA sense strand
aggagaagcgcucagagaa

SEQ ID NO: 2619792 - RNA, 19 nt, Homo sapiens
  misc_RNA (1)...(19): siRNA sense strand
aauccuaugaugugcgaau

SEQ ID NO: 2619793 - RNA, 19 nt, Homo sapiens
  misc_RNA (1)...(19): siRNA sense strand
aacucaagaugcuggagaa

SEQ ID NO: 2619794 - RNA, 19 nt, Homo sapiens
  misc_RNA (1)...(19): siRNA sense strand
gguuggaaucaucuggcaa

SEQ ID NO: 2619795 - RNA, 19 nt, Homo sapiens
  misc_RNA (1)...(19): siRNA sense strand
caaagaaguuagagaaggc

SEQ ID NO: 2619796 - RNA, 19 nt, Homo sapiens
  misc_RNA (1)...(19): siRNA sense strand
agcugaggccuguggacaa

SEQ ID NO: 2619797 - RNA, 19 nt, Homo sapiens
  misc_RNA (1)...(19): siRNA sense strand
acuucuacauucuggauga

SEQ ID NO: 2619798 - RNA, 19 nt, Homo sapiens
  misc_RNA (1)...(19): siRNA sense strand
gagaacuacgacuguggaa

SEQ ID NO: 2619799 - RNA, 19 nt, Homo sapiens
  misc_RNA (1)...(19): siRNA sense strand
caggacugcuaaagaggga

SEQ ID NO: 2619800 - RNA, 19 nt, Homo sapiens
  misc_RNA (1)...(19): siRNA sense strand
agaacaaauccuaugaugu

SEQ ID NO: 2619801 - RNA, 19 nt, Homo sapiens
  misc_RNA (1)...(19): siRNA sense strand
cugcagagugugcuggaga

SEQ ID NO: 2619802 - RNA, 19 nt, Homo sapiens
  misc_RNA (1)...(19): siRNA sense strand
auccaguugucaaagauaa

SEQ ID NO: 2619803 - RNA, 19 nt, Homo sapiens
  misc_RNA (1)...(19): siRNA sense strand
acagugugcgagaggauuu

SEQ ID NO: 2619804 - RNA, 19 nt, Homo sapiens
  misc_RNA (1)...(19): siRNA sense strand
ccgaaauccugcggagcga

SEQ ID NO: 2619805 - RNA, 19 nt, Homo sapiens
  misc_RNA (1)...(19): siRNA sense strand
gugaauaugaggcgcagca

SEQ ID NO: 2619806 - RNA, 19 nt, Homo sapiens
  misc_RNA (1)...(19): siRNA sense strand
aggaaucagaggucguaau

SEQ ID NO: 2619807 - RNA, 19 nt, Homo sapiens
  misc_RNA (1)...(19): siRNA sense strand
ccaaaaggacaaagagcaa

SEQ ID NO: 2619808 - RNA, 19 nt, Homo sapiens
  misc_RNA (1)...(19): siRNA sense strand
aaaaggacaaagagcaaaa

SEQ ID NO: 2619809 - RNA, 19 nt, Homo sapiens
  misc_RNA (1)...(19): siRNA sense strand
ugucaacaacugugaacau

SEQ ID NO: 2619810 - RNA, 19 nt, Homo sapiens
  misc_RNA (1)...(19): siRNA sense strand
uguacuugggugaugguua

SEQ ID NO: 2619811 - RNA, 19 nt, Homo sapiens
  misc_RNA (1)...(19): siRNA sense strand
cuguggaagaaaucauaaa

SEQ ID NO: 2619812 - RNA, 19 nt, Homo sapiens
  misc_RNA (1)...(19): siRNA sense strand
gagaaggaguuucagagca

SEQ ID NO: 2619813 - RNA, 19 nt, Homo sapiens
  misc_RNA (1)...(19): siRNA sense strand
agaaggaguuucagagcag

SEQ ID NO: 2619814 - RNA, 19 nt, Homo sapiens
  misc_RNA (1)...(19): siRNA sense strand
cuugaaggauguuguggga

SEQ ID NO: 2619815 - RNA, 19 nt, Homo sapiens
  misc_RNA (1)...(19): siRNA sense strand
cggacgugguagaggccua

SEQ ID NO: 2619816 - RNA, 19 nt, Homo sapiens
  misc_RNA (1)...(19): siRNA sense strand
agguacaacucaagcguga

SEQ ID NO: 2619817 - RNA, 19 nt, Homo sapiens
  misc_RNA (1)...(19): siRNA sense strand
uuauaaaugcgccaagaaa

SEQ ID NO: 2619818 - RNA, 19 nt, Homo sapiens
  misc_RNA (1)...(19): siRNA sense strand
gugaagccgacuaaaguua

SEQ ID NO: 2619819 - RNA, 19 nt, Homo sapiens
  misc_RNA (1)...(19): siRNA sense strand
aguuaacgccugugugauu

SEQ ID NO: 2619820 - RNA, 19 nt, Homo sapiens
  misc_RNA (1)...(19): siRNA sense strand
cgacaauacauuugaacuc

SEQ ID NO: 2619821 - RNA, 19 nt, Homo sapiens
  misc_RNA (1)...(19): siRNA sense strand
acgaggaacgaaugggaca

SEQ ID NO: 2619822 - RNA, 19 nt, Homo sapiens
  misc_RNA (1)...(19): siRNA sense strand
cugagguggacguguacaa

SEQ ID NO: 2619823 - RNA, 19 nt, Homo sapiens
  misc_RNA (1)...(19): siRNA sense strand
uauaaaugcgccaagaaaa

SEQ ID NO: 2619824 - RNA, 19 nt, Homo sapiens
  misc_RNA (1)...(19): siRNA sense strand
cgaggaacgaaugggacaa

SEQ ID NO: 2619825 - RNA, 19 nt, Homo sapiens
  misc_RNA (1)...(19): siRNA sense strand
cguccaugaaucagguaca

SEQ ID NO: 2619826 - RNA, 19 nt, Homo sapiens
  misc_RNA (1)...(19): siRNA sense strand
gguagaggccuaugaccca

SEQ ID NO: 2619827 - RNA, 19 nt, Homo sapiens
  misc_RNA (1)...(19): siRNA sense strand
ugacauggacccaggccga

SEQ ID NO: 2619828 - RNA, 19 nt, Homo sapiens
  misc_RNA (1)...(19): siRNA sense strand
ugguauacuuugugagcuu

SEQ ID NO: 2619829 - RNA, 19 nt, Homo sapiens
  misc_RNA (1)...(19): siRNA sense strand
cggccaagaagguggugaa

SEQ ID NO: 2619830 - RNA, 19 nt, Homo sapiens
  misc_RNA (1)...(19): siRNA sense strand
ccuagagaauggaaagcau

SEQ ID NO: 2619831 - RNA, 19 nt, Homo sapiens
  misc_RNA (1)...(19): siRNA sense strand
acgaggaugaugagaucua

SEQ ID NO: 2619832 - RNA, 19 nt, Homo sapiens
  misc_RNA (1)...(19): siRNA sense strand
augaauugauugagaucca

SEQ ID NO: 2619833 - RNA, 19 nt, Homo sapiens
  misc_RNA (1)...(19): siRNA sense strand
ggacccaggaugaggagga

SEQ ID NO: 2619834 - RNA, 19 nt, Homo sapiens
  misc_RNA (1)...(19): siRNA sense strand
gcguagggcauguaacuuu

SEQ ID NO: 2619835 - RNA, 19 nt, Homo sapiens
  misc_RNA (1)...(19): siRNA sense strand
caucuuuuguccaggguua

SEQ ID NO: 2619836 - RNA, 19 nt, Homo sapiens
  misc_RNA (1)...(19): siRNA sense strand
gagaaagacaugugccugu

SEQ ID NO: 2619837 - RNA, 19 nt, Homo sapiens
  misc_RNA (1)...(19): siRNA sense strand
ugguuauuaccgaggagaa

SEQ ID NO: 2619838 - RNA, 19 nt, Homo sapiens
  misc_RNA (1)...(19): siRNA sense strand
aggccuggauggugcugaa

SEQ ID NO: 2619839 - RNA, 19 nt, Homo sapiens
  misc_RNA (1)...(19): siRNA sense strand
cagcauugcauccuggaau

SEQ ID NO: 2619840 - RNA, 19 nt, Homo sapiens
  misc_RNA (1)...(19): siRNA sense strand
ggaugaauugauugagauc

SEQ ID NO: 2619841 - RNA, 19 nt, Homo sapiens
  misc_RNA (1)...(19): siRNA sense strand
caugcgagccaaaggacau

SEQ ID NO: 2619842 - RNA, 19 nt, Homo sapiens
  misc_RNA (1)...(19): siRNA sense strand
acuucacguuggagaauca

SEQ ID NO: 2619843 - RNA, 19 nt, Homo sapiens
  misc_RNA (1)...(19): siRNA sense strand
ccaagaagguggugaaggg

SEQ ID NO: 2619844 - RNA, 19 nt, Homo sapiens
  misc_RNA (1)...(19): siRNA sense strand
cugaccuguucgaguacaa

SEQ ID NO: 2619845 - RNA, 19 nt, Homo sapiens
  misc_RNA (1)...(19): siRNA sense strand
aggaggaugaugaugauga

SEQ ID NO: 2619846 - RNA, 19 nt, Homo sapiens
  misc_RNA (1)...(19): siRNA sense strand
aggucuuuguggugggcuu

SEQ ID NO: 2619847 - RNA, 19 nt, Homo sapiens
  misc_RNA (1)...(19): siRNA sense strand
aggaggaugaauugauuga

SEQ ID NO: 2619848 - RNA, 19 nt, Homo sapiens
  misc_RNA (1)...(19): siRNA sense strand
cugcccugcucauggacaa

SEQ ID NO: 2619849 - RNA, 19 nt, Homo sapiens
  misc_RNA (1)...(19): siRNA sense strand
cugagaaaccagggagaaa

SEQ ID NO: 2619850 - RNA, 19 nt, Homo sapiens
  misc_RNA (1)...(19): siRNA sense strand
ccugagauccugagagcca

SEQ ID NO: 2619851 - RNA, 19 nt, Homo sapiens
  misc_RNA (1)...(19): siRNA sense strand
ugggagagggagaagagaa

SEQ ID NO: 2619852 - RNA, 19 nt, Homo sapiens
  misc_RNA (1)...(19): siRNA sense strand
ccaggagcugucugagaaa

SEQ ID NO: 2619853 - RNA, 19 nt, Homo sapiens
  misc_RNA (1)...(19): siRNA sense strand
ccgcagguucacucgguaa

SEQ ID NO: 2619854 - RNA, 19 nt, Homo sapiens
  misc_RNA (1)...(19): siRNA sense strand
uggaaauaccucaaggagu

SEQ ID NO: 2619855 - RNA, 19 nt, Homo sapiens
  misc_RNA (1)...(19): siRNA sense strand
cggugaguacccaggaaga

SEQ ID NO: 2619856 - RNA, 19 nt, Homo sapiens
  misc_RNA (1)...(19): siRNA sense strand
acagguugggagagggaga

SEQ ID NO: 2619857 - RNA, 19 nt, Homo sapiens
  misc_RNA (1)...(19): siRNA sense strand
aggacagaguggagcagaa

SEQ ID NO: 2619858 - RNA, 19 nt, Homo sapiens
  misc_RNA (1)...(19): siRNA sense strand
agaugauucacgagaagaa

SEQ ID NO: 2619859 - RNA, 19 nt, Homo sapiens
  misc_RNA (1)...(19): siRNA sense strand
caacaaugcugacugccaa

SEQ ID NO: 2619860 - RNA, 19 nt, Homo sapiens
  misc_RNA (1)...(19): siRNA sense strand
auggaacaccugauagaaa

SEQ ID NO: 2619861 - RNA, 19 nt, Homo sapiens
  misc_RNA (1)...(19): siRNA sense strand
acagaguggagcagaaaga

SEQ ID NO: 2619862 - RNA, 19 nt, Homo sapiens
  misc_RNA (1)...(19): siRNA sense strand
cuucagaacugguggaguc

SEQ ID NO: 2619863 - RNA, 19 nt, Homo sapiens
  misc_RNA (1)...(19): siRNA sense strand
ccaccauccaggagcucaa

SEQ ID NO: 2619864 - RNA, 19 nt, Homo sapiens
  misc_RNA (1)...(19): siRNA sense strand
gggugaacugacaggagau

SEQ ID NO: 2619865 - RNA, 19 nt, Homo sapiens
  misc_RNA (1)...(19): siRNA sense strand
ggcaaaugauagagcagcu

SEQ ID NO: 2619866 - RNA, 19 nt, Homo sapiens
  misc_RNA (1)...(19): siRNA sense strand
gagacaagaugauucacga

SEQ ID NO: 2619867 - RNA, 19 nt, Homo sapiens
  misc_RNA (1)...(19): siRNA sense strand
auguugagagcuugaggaa

SEQ ID NO: 2619868 - RNA, 19 nt, Homo sapiens
  misc_RNA (1)...(19): siRNA sense strand
agucaaaggacgccaccau

SEQ ID NO: 2619869 - RNA, 19 nt, Homo sapiens
  misc_RNA (1)...(19): siRNA sense strand
gcaacaaugcugacugcca

SEQ ID NO: 2619870 - RNA, 19 nt, Homo sapiens
  misc_RNA (1)...(19): siRNA sense strand
gugcaggacuugcuggcca

SEQ ID NO: 2619871 - RNA, 19 nt, Homo sapiens
  misc_RNA (1)...(19): siRNA sense strand
ucaagagccagcagcggaa

SEQ ID NO: 2619872 - RNA, 19 nt, Homo sapiens
  misc_RNA (1)...(19): siRNA sense strand
ccgggcaguauuaggauau

SEQ ID NO: 2619873 - RNA, 19 nt, Homo sapiens
  misc_RNA (1)...(19): siRNA sense strand
cagaugaugucaaggccaa

SEQ ID NO: 2619874 - RNA, 19 nt, Homo sapiens
  misc_RNA (1)...(19): siRNA sense strand
agacagaccugauggcuga

SEQ ID NO: 2619875 - RNA, 19 nt, Homo sapiens
  misc_RNA (1)...(19): siRNA sense strand
cuuccuucgugcagggaua

SEQ ID NO: 2619876 - RNA, 19 nt, Homo sapiens
  misc_RNA (1)...(19): siRNA sense strand
acuacaaguaucaggacaa

SEQ ID NO: 2619877 - RNA, 19 nt, Homo sapiens
  misc_RNA (1)...(19): siRNA sense strand
ggauagaauuggaaggcuc

SEQ ID NO: 2619878 - RNA, 19 nt, Homo sapiens
  misc_RNA (1)...(19): siRNA sense strand
ucucaauggauuaugcaaa

SEQ ID NO: 2619879 - RNA, 19 nt, Homo sapiens
  misc_RNA (1)...(19): siRNA sense strand
augaggaagacgagaucua

SEQ ID NO: 2619880 - RNA, 19 nt, Homo sapiens
  misc_RNA (1)...(19): siRNA sense strand
ugauagucuacuugggaau

SEQ ID NO: 2619881 - RNA, 19 nt, Homo sapiens
  misc_RNA (1)...(19): siRNA sense strand
aaguguucguggugaguuu

SEQ ID NO: 2619882 - RNA, 19 nt, Homo sapiens
  misc_RNA (1)...(19): siRNA sense strand
uggaagaugaggagcaguu

SEQ ID NO: 2619883 - RNA, 19 nt, Homo sapiens
  misc_RNA (1)...(19): siRNA sense strand
acacagaccucuacgagca

SEQ ID NO: 2619884 - RNA, 19 nt, Homo sapiens
  misc_RNA (1)...(19): siRNA sense strand
aguccaacccagaagaaga

SEQ ID NO: 2619885 - RNA, 19 nt, Homo sapiens
  misc_RNA (1)...(19): siRNA sense strand
gacaccaacaugagagcua

SEQ ID NO: 2619886 - RNA, 19 nt, Homo sapiens
  misc_RNA (1)...(19): siRNA sense strand
gauccaccaacaugggaaa

SEQ ID NO: 2619887 - RNA, 19 nt, Homo sapiens
  misc_RNA (1)...(19): siRNA sense strand
cccaccaaccagagagcaa

SEQ ID NO: 2619888 - RNA, 19 nt, Homo sapiens
  misc_RNA (1)...(19): siRNA sense strand
cuggaugauucucaagcaa

SEQ ID NO: 2619889 - RNA, 19 nt, Homo sapiens
  misc_RNA (1)...(19): siRNA sense strand
gauccaaaguucaacagga

SEQ ID NO: 2619890 - RNA, 19 nt, Homo sapiens
  misc_RNA (1)...(19): siRNA sense strand
ggagaagcgaggagaacac

SEQ ID NO: 2619891 - RNA, 19 nt, Homo sapiens
  misc_RNA (1)...(19): siRNA sense strand
gagcaacagccuucggcau

SEQ ID NO: 2619892 - RNA, 19 nt, Homo sapiens
  misc_RNA (1)...(19): siRNA sense strand
gcugauaagcugggaagga

SEQ ID NO: 2619893 - RNA, 19 nt, Homo sapiens
  misc_RNA (1)...(19): siRNA sense strand
gggagaagcgaggagaaca

SEQ ID NO: 2619894 - RNA, 19 nt, Homo sapiens
  misc_RNA (1)...(19): siRNA sense strand
gggcccuacagaaugaaua

SEQ ID NO: 2619895 - RNA, 19 nt, Homo sapiens
  misc_RNA (1)...(19): siRNA sense strand
gcaaugaguccaacccaga

SEQ ID NO: 2619896 - RNA, 19 nt, Homo sapiens
  misc_RNA (1)...(19): siRNA sense strand
gauagaauuggaaggcuca

SEQ ID NO: 2619897 - RNA, 19 nt, Homo sapiens
  misc_RNA (1)...(19): siRNA sense strand
uggcugagaggcuggaaga

SEQ ID NO: 2619898 - RNA, 19 nt, Homo sapiens
  misc_RNA (1)...(19): siRNA sense strand
ggcuggaagaugaggagca

SEQ ID NO: 2619899 - RNA, 19 nt, Homo sapiens
  misc_RNA (1)...(19): siRNA sense strand
cccagaagcucaagcggaa

SEQ ID NO: 2619900 - RNA, 19 nt, Homo sapiens
  misc_RNA (1)...(19): siRNA sense strand
aggcgauggauuugggcaa

SEQ ID NO: 2619901 - RNA, 19 nt, Homo sapiens
  misc_RNA (1)...(19): siRNA sense strand
cugaagaagaguaugugaa

SEQ ID NO: 2619902 - RNA, 19 nt, Homo sapiens
  misc_RNA (1)...(19): siRNA sense strand
ccacagaauaagagaacuc

SEQ ID NO: 2619903 - RNA, 19 nt, Homo sapiens
  misc_RNA (1)...(19): siRNA sense strand
uguggaaagcgauggagaa

SEQ ID NO: 2619904 - RNA, 19 nt, Homo sapiens
  misc_RNA (1)...(19): siRNA sense strand
aggaagacucagaaacaca

SEQ ID NO: 2619905 - RNA, 19 nt, Homo sapiens
  misc_RNA (1)...(19): siRNA sense strand
aggagguugugguggauga

SEQ ID NO: 2619906 - RNA, 19 nt, Homo sapiens
  misc_RNA (1)...(19): siRNA sense strand
gaguaugugaaggaagaaa

SEQ ID NO: 2619907 - RNA, 19 nt, Homo sapiens
  misc_RNA (1)...(19): siRNA sense strand
agaaugaagaagcagucaa

SEQ ID NO: 2619908 - RNA, 19 nt, Homo sapiens
  misc_RNA (1)...(19): siRNA sense strand
aguaugugaaggaagaaau

SEQ ID NO: 2619909 - RNA, 19 nt, Homo sapiens
  misc_RNA (1)...(19): siRNA sense strand
cgacucuguucgugaggga

SEQ ID NO: 2619910 - RNA, 19 nt, Homo sapiens
  misc_RNA (1)...(19): siRNA sense strand
acgagaggcuggagcugga

SEQ ID NO: 2619911 - RNA, 19 nt, Homo sapiens
  misc_RNA (1)...(19): siRNA sense strand
uugaggagguuguggugga

SEQ ID NO: 2619912 - RNA, 19 nt, Homo sapiens
  misc_RNA (1)...(19): siRNA sense strand
aaacacagccugaugagga

SEQ ID NO: 2619913 - RNA, 19 nt, Homo sapiens
  misc_RNA (1)...(19): siRNA sense strand
uggaagaggaacagaaaga

SEQ ID NO: 2619914 - RNA, 19 nt, Homo sapiens
  misc_RNA (1)...(19): siRNA sense strand
caacagaaccagacgcaga

SEQ ID NO: 2619915 - RNA, 19 nt, Homo sapiens
  misc_RNA (1)...(19): siRNA sense strand
gggagauggucgggaagaa

SEQ ID NO: 2619916 - RNA, 19 nt, Homo sapiens
  misc_RNA (1)...(19): siRNA sense strand
ggugagcauguuagggaaa

SEQ ID NO: 2619917 - RNA, 19 nt, Homo sapiens
  misc_RNA (1)...(19): siRNA sense strand
ccagcaguccuuugagaaa

SEQ ID NO: 2619918 - RNA, 19 nt, Homo sapiens
  misc_RNA (1)...(19): siRNA sense strand
augcugacuuugaggagaa

SEQ ID NO: 2619919 - RNA, 19 nt, Homo sapiens
  misc_RNA (1)...(19): siRNA sense strand
cagccguggacgagaguuu

SEQ ID NO: 2619920 - RNA, 19 nt, Homo sapiens
  misc_RNA (1)...(19): siRNA sense strand
aggaacagaaagaggcaga

SEQ ID NO: 2619921 - RNA, 19 nt, Homo sapiens
  misc_RNA (1)...(19): siRNA sense strand
uggcaauagcagcggcaau

SEQ ID NO: 2619922 - RNA, 19 nt, Homo sapiens
  misc_RNA (1)...(19): siRNA sense strand
cugaaacagcagaagaaaa

SEQ ID NO: 2619923 - RNA, 19 nt, Homo sapiens
  misc_RNA (1)...(19): siRNA sense strand
agggaaaggauuuggugau

SEQ ID NO: 2619924 - RNA, 19 nt, Homo sapiens
  misc_RNA (1)...(19): siRNA sense strand
gaugaugggacgagugcau

SEQ ID NO: 2619925 - RNA, 19 nt, Homo sapiens
  misc_RNA (1)...(19): siRNA sense strand
ccugggagauggucgggaa

SEQ ID NO: 2619926 - RNA, 19 nt, Homo sapiens
  misc_RNA (1)...(19): siRNA sense strand
gggaagaagaagggagucu

SEQ ID NO: 2619927 - RNA, 19 nt, Homo sapiens
  misc_RNA (1)...(19): siRNA sense strand
ccuuuaacccagcugauua

SEQ ID NO: 2619928 - RNA, 19 nt, Homo sapiens
  misc_RNA (1)...(19): siRNA sense strand
cugcggagaaugugacaau

SEQ ID NO: 2619929 - RNA, 19 nt, Homo sapiens
  misc_RNA (1)...(19): siRNA sense strand
gcggagaaugugacaauca

SEQ ID NO: 2619930 - RNA, 19 nt, Homo sapiens
  misc_RNA (1)...(19): siRNA sense strand
ugugaaugucagugugaau

SEQ ID NO: 2619931 - RNA, 19 nt, Homo sapiens
  misc_RNA (1)...(19): siRNA sense strand
cauguuagggaaaggauuu

SEQ ID NO: 2619932 - RNA, 19 nt, Homo sapiens
  misc_RNA (1)...(19): siRNA sense strand
cagcacggccagugaauca

SEQ ID NO: 2619933 - RNA, 19 nt, Homo sapiens
  misc_RNA (1)...(19): siRNA sense strand
aauccaaugaggaaggcaa

SEQ ID NO: 2619934 - RNA, 19 nt, Homo sapiens
  misc_RNA (1)...(19): siRNA sense strand
caggcaagaaccaggauga

SEQ ID NO: 2619935 - RNA, 19 nt, Homo sapiens
  misc_RNA (1)...(19): siRNA sense strand
guguggagagugaggcgaa

SEQ ID NO: 2619936 - RNA, 19 nt, Homo sapiens
  misc_RNA (1)...(19): siRNA sense strand
acuuugaggagaaggugaa

SEQ ID NO: 2619937 - RNA, 19 nt, Homo sapiens
  misc_RNA (1)...(19): siRNA sense strand
ccaggaugaaugugugauu

SEQ ID NO: 2619938 - RNA, 19 nt, Homo sapiens
  misc_RNA (1)...(19): siRNA sense strand
ugaggaaggcaaagaaaau

SEQ ID NO: 2619939 - RNA, 19 nt, Homo sapiens
  misc_RNA (1)...(19): siRNA sense strand
caccaagaguggagggccu

SEQ ID NO: 2619940 - RNA, 19 nt, Homo sapiens
  misc_RNA (1)...(19): siRNA sense strand
gcauguuagggaaaggauu

SEQ ID NO: 2619941 - RNA, 19 nt, Homo sapiens
  misc_RNA (1)...(19): siRNA sense strand
caacuugccuucagcccua

SEQ ID NO: 2619942 - RNA, 19 nt, Homo sapiens
  misc_RNA (1)...(19): siRNA sense strand
ccaacaagucugccuacaa

SEQ ID NO: 2619943 - RNA, 19 nt, Homo sapiens
  misc_RNA (1)...(19): siRNA sense strand
uugaggagaaggugaaaca

SEQ ID NO: 2619944 - RNA, 19 nt, Homo sapiens
  misc_RNA (1)...(19): siRNA sense strand
gaugguggccagacggaau

SEQ ID NO: 2619945 - RNA, 19 nt, Homo sapiens
  misc_RNA (1)...(19): siRNA sense strand
agaccgggacagagacuau

SEQ ID NO: 2619946 - RNA, 19 nt, Homo sapiens
  misc_RNA (1)...(19): siRNA sense strand
aacugaaacagcagaagaa

SEQ ID NO: 2619947 - RNA, 19 nt, Homo sapiens
  misc_RNA (1)...(19): siRNA sense strand
aaugaggaaggcaaagaaa

SEQ ID NO: 2619948 - RNA, 19 nt, Homo sapiens
  misc_RNA (1)...(19): siRNA sense strand
agaaacugaaacagcagaa

SEQ ID NO: 2619949 - RNA, 19 nt, Homo sapiens
  misc_RNA (1)...(19): siRNA sense strand
gcuccaaguagccuguaua

SEQ ID NO: 2619950 - RNA, 19 nt, Homo sapiens
  misc_RNA (1)...(19): siRNA sense strand
cuuuaugaacagagaucca

SEQ ID NO: 2619951 - RNA, 19 nt, Homo sapiens
  misc_RNA (1)...(19): siRNA sense strand
cugaugauaacuauggcaa

SEQ ID NO: 2619952 - RNA, 19 nt, Homo sapiens
  misc_RNA (1)...(19): siRNA sense strand
caguauggugagcauguua

SEQ ID NO: 2619953 - RNA, 19 nt, Homo sapiens
  misc_RNA (1)...(19): siRNA sense strand
agugaggagauuccaaaua

SEQ ID NO: 2619954 - RNA, 19 nt, Homo sapiens
  misc_RNA (1)...(19): siRNA sense strand
agaugauuucggaccauaa

SEQ ID NO: 2619955 - RNA, 19 nt, Homo sapiens
  misc_RNA (1)...(19): siRNA sense strand
ugaugauaacuauggcaau

SEQ ID NO: 2619956 - RNA, 19 nt, Homo sapiens
  misc_RNA (1)...(19): siRNA sense strand
caaugaggaaggcaaagaa

SEQ ID NO: 2619957 - RNA, 19 nt, Homo sapiens
  misc_RNA (1)...(19): siRNA sense strand
gggacgagugcauggagga

SEQ ID NO: 2619958 - RNA, 19 nt, Homo sapiens
  misc_RNA (1)...(19): siRNA sense strand
cagcauggugugaauguca

SEQ ID NO: 2619959 - RNA, 19 nt, Homo sapiens
  misc_RNA (1)...(19): siRNA sense strand
gacggaauccaaugaggaa

SEQ ID NO: 2619960 - RNA, 19 nt, Homo sapiens
  misc_RNA (1)...(19): siRNA sense strand
auccaaugaggaaggcaaa

SEQ ID NO: 2619961 - RNA, 19 nt, Homo sapiens
  misc_RNA (1)...(19): siRNA sense strand
ggacgagaguuucgagguc

SEQ ID NO: 2619962 - RNA, 19 nt, Homo sapiens
  misc_RNA (1)...(19): siRNA sense strand
cccaguucuuggagcaauu

SEQ ID NO: 2619963 - RNA, 19 nt, Homo sapiens
  misc_RNA (1)...(19): siRNA sense strand
agcagauaucucagggcua

SEQ ID NO: 2619964 - RNA, 19 nt, Homo sapiens
  misc_RNA (1)...(19): siRNA sense strand
ccuccuggcuacaguuaca

SEQ ID NO: 2619965 - RNA, 19 nt, Homo sapiens
  misc_RNA (1)...(19): siRNA sense strand
acugcaaugccuuggaaua

SEQ ID NO: 2619966 - RNA, 19 nt, Homo sapiens
  misc_RNA (1)...(19): siRNA sense strand
gcacggaagcuguacacca

SEQ ID NO: 2619967 - RNA, 19 nt, Homo sapiens
  misc_RNA (1)...(19): siRNA sense strand
cggagccaugugugagaua

SEQ ID NO: 2619968 - RNA, 19 nt, Homo sapiens
  misc_RNA (1)...(19): siRNA sense strand
ggaagauggaauaaggaaa

SEQ ID NO: 2619969 - RNA, 19 nt, Homo sapiens
  misc_RNA (1)...(19): siRNA sense strand
ggucauuggucgacggaga

SEQ ID NO: 2619970 - RNA, 19 nt, Homo sapiens
  misc_RNA (1)...(19): siRNA sense strand
gcaagaaagcauaagggua

SEQ ID NO: 2619971 - RNA, 19 nt, Homo sapiens
  misc_RNA (1)...(19): siRNA sense strand
ccaaaagauugaaggagaa

SEQ ID NO: 2619972 - RNA, 19 nt, Homo sapiens
  misc_RNA (1)...(19): siRNA sense strand
uugaauacauacaggacua

SEQ ID NO: 2619973 - RNA, 19 nt, Homo sapiens
  misc_RNA (1)...(19): siRNA sense strand
aggagaugguucuggacaa

SEQ ID NO: 2619974 - RNA, 19 nt, Homo sapiens
  misc_RNA (1)...(19): siRNA sense strand
guuacuaaacucagagcua

SEQ ID NO: 2619975 - RNA, 19 nt, Homo sapiens
  misc_RNA (1)...(19): siRNA sense strand
ucauaaagcuucagaccca

SEQ ID NO: 2619976 - RNA, 19 nt, Homo sapiens
  misc_RNA (1)...(19): siRNA sense strand
acguggagcaagaguguaa

SEQ ID NO: 2619977 - RNA, 19 nt, Homo sapiens
  misc_RNA (1)...(19): siRNA sense strand
uggaauaaggaaagagcuu

SEQ ID NO: 2619978 - RNA, 19 nt, Homo sapiens
  misc_RNA (1)...(19): siRNA sense strand
cagaauuaugggaaagcaa

SEQ ID NO: 2619979 - RNA, 19 nt, Homo sapiens
  misc_RNA (1)...(19): siRNA sense strand
caaugaagauggaaaacaa

SEQ ID NO: 2619980 - RNA, 19 nt, Homo sapiens
  misc_RNA (1)...(19): siRNA sense strand
gcuucgaaguacagguuau

SEQ ID NO: 2619981 - RNA, 19 nt, Homo sapiens
  misc_RNA (1)...(19): siRNA sense strand
ggacaauaucccaaagcuu

SEQ ID NO: 2619982 - RNA, 19 nt, Homo sapiens
  misc_RNA (1)...(19): siRNA sense strand
cgugaaaacaacauagaaa

SEQ ID NO: 2619983 - RNA, 19 nt, Homo sapiens
  misc_RNA (1)...(19): siRNA sense strand
ccagaagauaccugaaauu

SEQ ID NO: 2619984 - RNA, 19 nt, Homo sapiens
  misc_RNA (1)...(19): siRNA sense strand
cugcguaucucgaggcuau

SEQ ID NO: 2619985 - RNA, 19 nt, Homo sapiens
  misc_RNA (1)...(19): siRNA sense strand
gcuguuagauacugcacaa

SEQ ID NO: 2619986 - RNA, 19 nt, Homo sapiens
  misc_RNA (1)...(19): siRNA sense strand
ugauacaagcuuuggaaga

SEQ ID NO: 2619987 - RNA, 19 nt, Homo sapiens
  misc_RNA (1)...(19): siRNA sense strand
uuuuaaggguccagaauua

SEQ ID NO: 2619988 - RNA, 19 nt, Homo sapiens
  misc_RNA (1)...(19): siRNA sense strand
caacaaagcgcuuacccua

SEQ ID NO: 2619989 - RNA, 19 nt, Homo sapiens
  misc_RNA (1)...(19): siRNA sense strand
cugcacaauuugaguuuau

SEQ ID NO: 2619990 - RNA, 19 nt, Homo sapiens
  misc_RNA (1)...(19): siRNA sense strand
aagagauguucaagcaaau

SEQ ID NO: 2619991 - RNA, 19 nt, Homo sapiens
  misc_RNA (1)...(19): siRNA sense strand
aggaagaaguaucucguau

SEQ ID NO: 2619992 - RNA, 19 nt, Homo sapiens
  misc_RNA (1)...(19): siRNA sense strand
auuacaacguggagcaaga

SEQ ID NO: 2619993 - RNA, 19 nt, Homo sapiens
  misc_RNA (1)...(19): siRNA sense strand
gaacaaccucuguggccaa

SEQ ID NO: 2619994 - RNA, 19 nt, Homo sapiens
  misc_RNA (1)...(19): siRNA sense strand
ugguauccuaugugagaaa

SEQ ID NO: 2619995 - RNA, 19 nt, Homo sapiens
  misc_RNA (1)...(19): siRNA sense strand
acggagaucugaugauauu

SEQ ID NO: 2619996 - RNA, 19 nt, Homo sapiens
  misc_RNA (1)...(19): siRNA sense strand
gugaaagagugcaugcuca

SEQ ID NO: 2619997 - RNA, 19 nt, Homo sapiens
  misc_RNA (1)...(19): siRNA sense strand
ugaaagagugcaugcucaa

SEQ ID NO: 2619998 - RNA, 19 nt, Homo sapiens
  misc_RNA (1)...(19): siRNA sense strand
guuagauacugcacaauuu

SEQ ID NO: 2619999 - RNA, 19 nt, Homo sapiens
  misc_RNA (1)...(19): siRNA sense strand
gggaauggucugccgaaaa

SEQ ID NO: 2620000 - RNA, 19 nt, Homo sapiens
  misc_RNA (1)...(19): siRNA sense strand
agaaaauuauccugagaga

SEQ ID NO: 2620001 - RNA, 19 nt, Homo sapiens
  misc_RNA (1)...(19): siRNA sense strand
cagagcugaucaacagaaa

SEQ ID NO: 2620002 - RNA, 19 nt, Homo sapiens
  misc_RNA (1)...(19): siRNA sense strand
gagaagucagagagaggau

SEQ ID NO: 2620003 - RNA, 19 nt, Homo sapiens
  misc_RNA (1)...(19): siRNA sense strand
cgacggagaucugaugaua

SEQ ID NO: 2620004 - RNA, 19 nt, Homo sapiens
  misc_RNA (1)...(19): siRNA sense strand
agaauuaugggaaagcaaa

SEQ ID NO: 2620005 - RNA, 19 nt, Homo sapiens
  misc_RNA (1)...(19): siRNA sense strand
ucucaaugaagauggaaaa

SEQ ID NO: 2620006 - RNA, 19 nt, Homo sapiens
  misc_RNA (1)...(19): siRNA sense strand
cugaaagaguugggagcga

SEQ ID NO: 2620007 - RNA, 19 nt, Homo sapiens
  misc_RNA (1)...(19): siRNA sense strand
accaaaagauugaaggaga

SEQ ID NO: 2620008 - RNA, 19 nt, Homo sapiens
  misc_RNA (1)...(19): siRNA sense strand
aagacaagcugagggacua

SEQ ID NO: 2620009 - RNA, 19 nt, Homo sapiens
  misc_RNA (1)...(19): siRNA sense strand
gaguuaugcuacuggucau

SEQ ID NO: 2620010 - RNA, 19 nt, Homo sapiens
  misc_RNA (1)...(19): siRNA sense strand
gauugaaggagaagucaga

SEQ ID NO: 2620011 - RNA, 19 nt, Homo sapiens
  misc_RNA (1)...(19): siRNA sense strand
aagaaagcauaaggguaaa

SEQ ID NO: 2620012 - RNA, 19 nt, Homo sapiens
  misc_RNA (1)...(19): siRNA sense strand
gaauaaggaaagagcuugu

SEQ ID NO: 2620013 - RNA, 19 nt, Homo sapiens
  misc_RNA (1)...(19): siRNA sense strand
uagccaaccaggugccaaa

SEQ ID NO: 2620014 - RNA, 19 nt, Homo sapiens
  misc_RNA (1)...(19): siRNA sense strand
ggagaucugaugauauuua

SEQ ID NO: 2620015 - RNA, 19 nt, Homo sapiens
  misc_RNA (1)...(19): siRNA sense strand
caaccaggucucagcguau

SEQ ID NO: 2620016 - RNA, 19 nt, Homo sapiens
  misc_RNA (1)...(19): siRNA sense strand
caagugaauugaugcccaa

SEQ ID NO: 2620017 - RNA, 19 nt, Homo sapiens
  misc_RNA (1)...(19): siRNA sense strand
augcuaagccagagcuaca

SEQ ID NO: 2620018 - RNA, 19 nt, Homo sapiens
  misc_RNA (1)...(19): siRNA sense strand
agagagaggaugcugguuu

SEQ ID NO: 2620019 - RNA, 19 nt, Homo sapiens
  misc_RNA (1)...(19): siRNA sense strand
cgacauuauugaagugccu

SEQ ID NO: 2620020 - RNA, 19 nt, Homo sapiens
  misc_RNA (1)...(19): siRNA sense strand
cuaacagacucucgguaca

SEQ ID NO: 2620021 - RNA, 19 nt, Homo sapiens
  misc_RNA (1)...(19): siRNA sense strand
aaaauuauccugagagaca

SEQ ID NO: 2620022 - RNA, 19 nt, Homo sapiens
  misc_RNA (1)...(19): siRNA sense strand
acauuaaagaggagguucu

SEQ ID NO: 2620023 - RNA, 19 nt, Homo sapiens
  misc_RNA (1)...(19): siRNA sense strand
uggaagauggaauaaggaa

SEQ ID NO: 2620024 - RNA, 19 nt, Homo sapiens
  misc_RNA (1)...(19): siRNA sense strand
ccaaagaagauaacacacu

SEQ ID NO: 2620025 - RNA, 19 nt, Homo sapiens
  misc_RNA (1)...(19): siRNA sense strand
ccacugaauaagauauaca

SEQ ID NO: 2620026 - RNA, 19 nt, Homo sapiens
  misc_RNA (1)...(19): siRNA sense strand
gagagagauaguggauaaa

SEQ ID NO: 2620027 - RNA, 19 nt, Homo sapiens
  misc_RNA (1)...(19): siRNA sense strand
acaaagacaagcugaggga

SEQ ID NO: 2620028 - RNA, 19 nt, Homo sapiens
  misc_RNA (1)...(19): siRNA sense strand
aaagacaagcugagggacu

SEQ ID NO: 2620029 - RNA, 19 nt, Homo sapiens
  misc_RNA (1)...(19): siRNA sense strand
agaacgaagauucaagauu

SEQ ID NO: 2620030 - RNA, 19 nt, Homo sapiens
  misc_RNA (1)...(19): siRNA sense strand
gcagcacagcccuggcaaa

SEQ ID NO: 2620031 - RNA, 19 nt, Homo sapiens
  misc_RNA (1)...(19): siRNA sense strand
uuuccagauaauuggguaa

SEQ ID NO: 2620032 - RNA, 19 nt, Homo sapiens
  misc_RNA (1)...(19): siRNA sense strand
gggagcauuacaagaaaga

SEQ ID NO: 2620033 - RNA, 19 nt, Homo sapiens
  misc_RNA (1)...(19): siRNA sense strand
guuaaaagacagagcugau

SEQ ID NO: 2620034 - RNA, 19 nt, Homo sapiens
  misc_RNA (1)...(19): siRNA sense strand
cuggagaguugguauccua

SEQ ID NO: 2620035 - RNA, 19 nt, Homo sapiens
  misc_RNA (1)...(19): siRNA sense strand
gagcaguguacaagccaga

SEQ ID NO: 2620036 - RNA, 19 nt, Homo sapiens
  misc_RNA (1)...(19): siRNA sense strand
ccauaucagcacagaacaa

SEQ ID NO: 2620037 - RNA, 19 nt, Homo sapiens
  misc_RNA (1)...(19): siRNA sense strand
gguuacaaguacagaucau

SEQ ID NO: 2620038 - RNA, 19 nt, Homo sapiens
  misc_RNA (1)...(19): siRNA sense strand
ccuuauaagcucuguaaca

SEQ ID NO: 2620039 - RNA, 19 nt, Homo sapiens
  misc_RNA (1)...(19): siRNA sense strand
aggaaacacucuuuggaga

SEQ ID NO: 2620040 - RNA, 19 nt, Homo sapiens
  misc_RNA (1)...(19): siRNA sense strand
gugugauggugaugaugaa

SEQ ID NO: 2620041 - RNA, 19 nt, Homo sapiens
  misc_RNA (1)...(19): siRNA sense strand
cagaggaagauuugguaga

SEQ ID NO: 2620042 - RNA, 19 nt, Homo sapiens
  misc_RNA (1)...(19): siRNA sense strand
agaacaagaaauagagugu

SEQ ID NO: 2620043 - RNA, 19 nt, Homo sapiens
  misc_RNA (1)...(19): siRNA sense strand
ggaaaaggacacagcaaca

SEQ ID NO: 2620044 - RNA, 19 nt, Homo sapiens
  misc_RNA (1)...(19): siRNA sense strand
gguagauauuguugauacu

SEQ ID NO: 2620045 - RNA, 19 nt, Homo sapiens
  misc_RNA (1)...(19): siRNA sense strand
gugcauuauuugcugaaaa

SEQ ID NO: 2620046 - RNA, 19 nt, Homo sapiens
  misc_RNA (1)...(19): siRNA sense strand
cugaagaccagcuagagaa

SEQ ID NO: 2620047 - RNA, 19 nt, Homo sapiens
  misc_RNA (1)...(19): siRNA sense strand
cagugugggugguggagga

SEQ ID NO: 2620048 - RNA, 19 nt, Homo sapiens
  misc_RNA (1)...(19): siRNA sense strand
accacaacaaucaggguua

SEQ ID NO: 2620049 - RNA, 19 nt, Homo sapiens
  misc_RNA (1)...(19): siRNA sense strand
aagaccagcuagagaacca

SEQ ID NO: 2620050 - RNA, 19 nt, Homo sapiens
  misc_RNA (1)...(19): siRNA sense strand
ccaaccuaacagaggaaga

SEQ ID NO: 2620051 - RNA, 19 nt, Homo sapiens
  misc_RNA (1)...(19): siRNA sense strand
ugugggugguggaggauca

SEQ ID NO: 2620052 - RNA, 19 nt, Homo sapiens
  misc_RNA (1)...(19): siRNA sense strand
aacaagaaauagagugucu

SEQ ID NO: 2620053 - RNA, 19 nt, Homo sapiens
  misc_RNA (1)...(19): siRNA sense strand
ccugaagaccagcuagaga

SEQ ID NO: 2620054 - RNA, 19 nt, Homo sapiens
  misc_RNA (1)...(19): siRNA sense strand
uugaagaaagggaaggcau

SEQ ID NO: 2620055 - RNA, 19 nt, Homo sapiens
  misc_RNA (1)...(19): siRNA sense strand
agaaauguucacucaggaa

SEQ ID NO: 2620056 - RNA, 19 nt, Homo sapiens
  misc_RNA (1)...(19): siRNA sense strand
ccuuguacagaguuugaaa

SEQ ID NO: 2620057 - RNA, 19 nt, Homo sapiens
  misc_RNA (1)...(19): siRNA sense strand
uggaaguaccagacuauga

SEQ ID NO: 2620058 - RNA, 19 nt, Homo sapiens
  misc_RNA (1)...(19): siRNA sense strand
aaucaggguuacaaguaca

SEQ ID NO: 2620059 - RNA, 19 nt, Homo sapiens
  misc_RNA (1)...(19): siRNA sense strand
cugcgauuauucagaacuu

SEQ ID NO: 2620060 - RNA, 19 nt, Homo sapiens
  misc_RNA (1)...(19): siRNA sense strand
ccacgugggcucagcagau

SEQ ID NO: 2620061 - RNA, 19 nt, Homo sapiens
  misc_RNA (1)...(19): siRNA sense strand
cugaccaaguugacacuau

SEQ ID NO: 2620062 - RNA, 19 nt, Homo sapiens
  misc_RNA (1)...(19): siRNA sense strand
ggaugaggguggugcacga

SEQ ID NO: 2620063 - RNA, 19 nt, Homo sapiens
  misc_RNA (1)...(19): siRNA sense strand
aguuugagguccugcggaa

SEQ ID NO: 2620064 - RNA, 19 nt, Homo sapiens
  misc_RNA (1)...(19): siRNA sense strand
gcuggagagcccugagaau

SEQ ID NO: 2620065 - RNA, 19 nt, Homo sapiens
  misc_RNA (1)...(19): siRNA sense strand
gcuacaacgaggagcagau

SEQ ID NO: 2620066 - RNA, 19 nt, Homo sapiens
  misc_RNA (1)...(19): siRNA sense strand
gcaacaagaaauccggaga

SEQ ID NO: 2620067 - RNA, 19 nt, Homo sapiens
  misc_RNA (1)...(19): siRNA sense strand
ccaacauccuggaggugga

SEQ ID NO: 2620068 - RNA, 19 nt, Homo sapiens
  misc_RNA (1)...(19): siRNA sense strand
aggaggagugcgugcagaa

SEQ ID NO: 2620069 - RNA, 19 nt, Homo sapiens
  misc_RNA (1)...(19): siRNA sense strand
caagaaauccggagagcug

SEQ ID NO: 2620070 - RNA, 19 nt, Homo sapiens
  misc_RNA (1)...(19): siRNA sense strand
gggaugaagcugcuggcau

SEQ ID NO: 2620071 - RNA, 19 nt, Homo sapiens
  misc_RNA (1)...(19): siRNA sense strand
auucagugcuguuuggaca

SEQ ID NO: 2620072 - RNA, 19 nt, Homo sapiens
  misc_RNA (1)...(19): siRNA sense strand
gcuguuuggacaagaugaa

SEQ ID NO: 2620073 - RNA, 19 nt, Homo sapiens
  misc_RNA (1)...(19): siRNA sense strand
cggcagaagguacugguga

SEQ ID NO: 2620074 - RNA, 19 nt, Homo sapiens
  misc_RNA (1)...(19): siRNA sense strand
ccgcaucaucgaacggcua

SEQ ID NO: 2620075 - RNA, 19 nt, Homo sapiens
  misc_RNA (1)...(19): siRNA sense strand
agauucacaagcuggauaa

SEQ ID NO: 2620076 - RNA, 19 nt, Homo sapiens
  misc_RNA (1)...(19): siRNA sense strand
ccggagagcugguugcugu

SEQ ID NO: 2620077 - RNA, 19 nt, Homo sapiens
  misc_RNA (1)...(19): siRNA sense strand
uggaugggcaggagcuaau

SEQ ID NO: 2620078 - RNA, 19 nt, Homo sapiens
  misc_RNA (1)...(19): siRNA sense strand
gcaugaaccaccugcggga

SEQ ID NO: 2620079 - RNA, 19 nt, Homo sapiens
  misc_RNA (1)...(19): siRNA sense strand
gggaucagguacaugagga

SEQ ID NO: 2620080 - RNA, 19 nt, Homo sapiens
  misc_RNA (1)...(19): siRNA sense strand
ccuuagucacacacggcaa

SEQ ID NO: 2620081 - RNA, 19 nt, Homo sapiens
  misc_RNA (1)...(19): siRNA sense strand
cuauaauaccaaaggagaa

SEQ ID NO: 2620082 - RNA, 19 nt, Homo sapiens
  misc_RNA (1)...(19): siRNA sense strand
ccagggagaagcagagaaa

SEQ ID NO: 2620083 - RNA, 19 nt, Homo sapiens
  misc_RNA (1)...(19): siRNA sense strand
accaagaaguuaugaggaa

SEQ ID NO: 2620084 - RNA, 19 nt, Homo sapiens
  misc_RNA (1)...(19): siRNA sense strand
agaagaacaaaguggaaau

SEQ ID NO: 2620085 - RNA, 19 nt, Homo sapiens
  misc_RNA (1)...(19): siRNA sense strand
ccacgagaaucaugggaca

SEQ ID NO: 2620086 - RNA, 19 nt, Homo sapiens
  misc_RNA (1)...(19): siRNA sense strand
gaagagaacuuuaaggaac

SEQ ID NO: 2620087 - RNA, 19 nt, Homo sapiens
  misc_RNA (1)...(19): siRNA sense strand
cagagaaggugguggugga

SEQ ID NO: 2620088 - RNA, 19 nt, Homo sapiens
  misc_RNA (1)...(19): siRNA sense strand
agagaaaggaauacggaca

SEQ ID NO: 2620089 - RNA, 19 nt, Homo sapiens
  misc_RNA (1)...(19): siRNA sense strand
ccuuaauccacgagaauca

SEQ ID NO: 2620090 - RNA, 19 nt, Homo sapiens
  misc_RNA (1)...(19): siRNA sense strand
gcgaaugccucgaaggagu

SEQ ID NO: 2620091 - RNA, 19 nt, Homo sapiens
  misc_RNA (1)...(19): siRNA sense strand
caauagucucauagaagaa

SEQ ID NO: 2620092 - RNA, 19 nt, Homo sapiens
  misc_RNA (1)...(19): siRNA sense strand
agaacaaaguggaaaugau

SEQ ID NO: 2620093 - RNA, 19 nt, Homo sapiens
  misc_RNA (1)...(19): siRNA sense strand
uuaguagaccauagagaaa

SEQ ID NO: 2620094 - RNA, 19 nt, Homo sapiens
  misc_RNA (1)...(19): siRNA sense strand
aaggauaguaagagcagaa

SEQ ID NO: 2620095 - RNA, 19 nt, Homo sapiens
  misc_RNA (1)...(19): siRNA sense strand
cggcagacucagaugaaaa

SEQ ID NO: 2620096 - RNA, 19 nt, Homo sapiens
  misc_RNA (1)...(19): siRNA sense strand
cgaagagaacuuuaaggaa

SEQ ID NO: 2620097 - RNA, 19 nt, Homo sapiens
  misc_RNA (1)...(19): siRNA sense strand
ggaccacuugagagaaaua

SEQ ID NO: 2620098 - RNA, 19 nt, Homo sapiens
  misc_RNA (1)...(19): siRNA sense strand
gagugauagcgaagguaau

SEQ ID NO: 2620099 - RNA, 19 nt, Homo sapiens
  misc_RNA (1)...(19): siRNA sense strand
cugcaaauaucucugggaa

SEQ ID NO: 2620100 - RNA, 19 nt, Homo sapiens
  misc_RNA (1)...(19): siRNA sense strand
cugcaaaggcauaagaugu

SEQ ID NO: 2620101 - RNA, 19 nt, Homo sapiens
  misc_RNA (1)...(19): siRNA sense strand
aguaagagcagaaucagaa

SEQ ID NO: 2620102 - RNA, 19 nt, Homo sapiens
  misc_RNA (1)...(19): siRNA sense strand
auuacuaagaggaagcaaa

SEQ ID NO: 2620103 - RNA, 19 nt, Homo sapiens
  misc_RNA (1)...(19): siRNA sense strand
ccuagaggaagcugaaauu

SEQ ID NO: 2620104 - RNA, 19 nt, Homo sapiens
  misc_RNA (1)...(19): siRNA sense strand
ggucagacuugaacaggca

SEQ ID NO: 2620105 - RNA, 19 nt, Homo sapiens
  misc_RNA (1)...(19): siRNA sense strand
augagaagaaagccagaaa

SEQ ID NO: 2620106 - RNA, 19 nt, Homo sapiens
  misc_RNA (1)...(19): siRNA sense strand
ccagaaaguuuuggaacaa

SEQ ID NO: 2620107 - RNA, 19 nt, Homo sapiens
  misc_RNA (1)...(19): siRNA sense strand
acuugaaugcuguggaaaa

SEQ ID NO: 2620108 - RNA, 19 nt, Homo sapiens
  misc_RNA (1)...(19): siRNA sense strand
ccucauugcaauugaaaau

SEQ ID NO: 2620109 - RNA, 19 nt, Homo sapiens
  misc_RNA (1)...(19): siRNA sense strand
augcagauauagaauggaa

SEQ ID NO: 2620110 - RNA, 19 nt, Homo sapiens
  misc_RNA (1)...(19): siRNA sense strand
caacaaucuccuugaaaau

SEQ ID NO: 2620111 - RNA, 19 nt, Homo sapiens
  misc_RNA (1)...(19): siRNA sense strand
ggguuaaccugcaaaggca

SEQ ID NO: 2620112 - RNA, 19 nt, Homo sapiens
  misc_RNA (1)...(19): siRNA sense strand
agaagguggugguggagga

SEQ ID NO: 2620113 - RNA, 19 nt, Homo sapiens
  misc_RNA (1)...(19): siRNA sense strand
cgaaaggguuaaccugcaa

SEQ ID NO: 2620114 - RNA, 19 nt, Homo sapiens
  misc_RNA (1)...(19): siRNA sense strand
ccuauaauaccaaaggaga

SEQ ID NO: 2620115 - RNA, 19 nt, Homo sapiens
  misc_RNA (1)...(19): siRNA sense strand
gaagauuacgugaccacaa

SEQ ID NO: 2620116 - RNA, 19 nt, Homo sapiens
  misc_RNA (1)...(19): siRNA sense strand
caaccaucgucgaguggau

SEQ ID NO: 2620117 - RNA, 19 nt, Homo sapiens
  misc_RNA (1)...(19): siRNA sense strand
cuucauauggggagaaauu

SEQ ID NO: 2620118 - RNA, 19 nt, Homo sapiens
  misc_RNA (1)...(19): siRNA sense strand
gccagaaaguuuuggaaca

SEQ ID NO: 2620119 - RNA, 19 nt, Homo sapiens
  misc_RNA (1)...(19): siRNA sense strand
gguaauagcaaggacaaga

SEQ ID NO: 2620120 - RNA, 19 nt, Homo sapiens
  misc_RNA (1)...(19): siRNA sense strand
aagagaacuuuaaggaacu

SEQ ID NO: 2620121 - RNA, 19 nt, Homo sapiens
  misc_RNA (1)...(19): siRNA sense strand
gagcaaaaugcaaaccaaa

SEQ ID NO: 2620122 - RNA, 19 nt, Homo sapiens
  misc_RNA (1)...(19): siRNA sense strand
agaccauagagaaaggaau

SEQ ID NO: 2620123 - RNA, 19 nt, Homo sapiens
  misc_RNA (1)...(19): siRNA sense strand
gcucaguucuauuacaaaa

SEQ ID NO: 2620124 - RNA, 19 nt, Homo sapiens
  misc_RNA (1)...(19): siRNA sense strand
caacguuauuugagacacu

SEQ ID NO: 2620125 - RNA, 19 nt, Homo sapiens
  misc_RNA (1)...(19): siRNA sense strand
cagugaagauggugacaug

SEQ ID NO: 2620126 - RNA, 19 nt, Homo sapiens
  misc_RNA (1)...(19): siRNA sense strand
gaugugaaaagcagaauaa

SEQ ID NO: 2620127 - RNA, 19 nt, Homo sapiens
  misc_RNA (1)...(19): siRNA sense strand
guaauagcaaggacaagaa

SEQ ID NO: 2620128 - RNA, 19 nt, Homo sapiens
  misc_RNA (1)...(19): siRNA sense strand
auagaagaacaaaguggaa

SEQ ID NO: 2620129 - RNA, 19 nt, Homo sapiens
  misc_RNA (1)...(19): siRNA sense strand
ccgaagagaacuuuaagga

SEQ ID NO: 2620130 - RNA, 19 nt, Homo sapiens
  misc_RNA (1)...(19): siRNA sense strand
cuuugaaguccugggauua

SEQ ID NO: 2620131 - RNA, 19 nt, Homo sapiens
  misc_RNA (1)...(19): siRNA sense strand
agagugauagcgaagguaa

SEQ ID NO: 2620132 - RNA, 19 nt, Homo sapiens
  misc_RNA (1)...(19): siRNA sense strand
ucaacaggcugcaggacca

SEQ ID NO: 2620133 - RNA, 19 nt, Homo sapiens
  misc_RNA (1)...(19): siRNA sense strand
guuacagguaggaaagaga

SEQ ID NO: 2620134 - RNA, 19 nt, Homo sapiens
  misc_RNA (1)...(19): siRNA sense strand
ggagauuaugccaguguca

SEQ ID NO: 2620135 - RNA, 19 nt, Homo sapiens
  misc_RNA (1)...(19): siRNA sense strand
aauucaagucggaguauga

SEQ ID NO: 2620136 - RNA, 19 nt, Homo sapiens
  misc_RNA (1)...(19): siRNA sense strand
gaagguaauagcaaggaca

SEQ ID NO: 2620137 - RNA, 19 nt, Homo sapiens
  misc_RNA (1)...(19): siRNA sense strand
acacaaaacaccugggaaa

SEQ ID NO: 2620138 - RNA, 19 nt, Homo sapiens
  misc_RNA (1)...(19): siRNA sense strand
gugaaaugaaaguagaaga

SEQ ID NO: 2620139 - RNA, 19 nt, Homo sapiens
  misc_RNA (1)...(19): siRNA sense strand
uugagagaguuuugggaaa

SEQ ID NO: 2620140 - RNA, 19 nt, Homo sapiens
  misc_RNA (1)...(19): siRNA sense strand
gggaggugauaaaggccau

SEQ ID NO: 2620141 - RNA, 19 nt, Homo sapiens
  misc_RNA (1)...(19): siRNA sense strand
aaguagaagaagagcauac

SEQ ID NO: 2620142 - RNA, 19 nt, Homo sapiens
  misc_RNA (1)...(19): siRNA sense strand
ugaaaguagaagaagagca

SEQ ID NO: 2620143 - RNA, 19 nt, Homo sapiens
  misc_RNA (1)...(19): siRNA sense strand
ccucuguggaucugaccaa

SEQ ID NO: 2620144 - RNA, 19 nt, Homo sapiens
  misc_RNA (1)...(19): siRNA sense strand
cauugaagugcgagggaca

SEQ ID NO: 2620145 - RNA, 19 nt, Homo sapiens
  misc_RNA (1)...(19): siRNA sense strand
aggccgacgcggagguuaa

SEQ ID NO: 2620146 - RNA, 19 nt, Homo sapiens
  misc_RNA (1)...(19): siRNA sense strand
caggaagagcagagaggga

SEQ ID NO: 2620147 - RNA, 19 nt, Homo sapiens
  misc_RNA (1)...(19): siRNA sense strand
cagcauuccggguggccaa

SEQ ID NO: 2620148 - RNA, 19 nt, Homo sapiens
  misc_RNA (1)...(19): siRNA sense strand
acugaauugcaaagaagaa

SEQ ID NO: 2620149 - RNA, 19 nt, Homo sapiens
  misc_RNA (1)...(19): siRNA sense strand
gcaaggagaaacuggggaa

SEQ ID NO: 2620150 - RNA, 19 nt, Homo sapiens
  misc_RNA (1)...(19): siRNA sense strand
cagcaugauauuagcacuu

SEQ ID NO: 2620151 - RNA, 19 nt, Homo sapiens
  misc_RNA (1)...(19): siRNA sense strand
acuuagacccagaccaaau

SEQ ID NO: 2620152 - RNA, 19 nt, Homo sapiens
  misc_RNA (1)...(19): siRNA sense strand
cugaauugcaaagaagaaa

SEQ ID NO: 2620153 - RNA, 19 nt, Homo sapiens
  misc_RNA (1)...(19): siRNA sense strand
gguaauugcugaaaaggca

SEQ ID NO: 2620154 - RNA, 19 nt, Homo sapiens
  misc_RNA (1)...(19): siRNA sense strand
acgcggagguuaagcucau

SEQ ID NO: 2620155 - RNA, 19 nt, Homo sapiens
  misc_RNA (1)...(19): siRNA sense strand
guugaaacugaauugcaaa

SEQ ID NO: 2620156 - RNA, 19 nt, Homo sapiens
  misc_RNA (1)...(19): siRNA sense strand
agaaacuugcugaagaaaa

SEQ ID NO: 2620157 - RNA, 19 nt, Homo sapiens
  misc_RNA (1)...(19): siRNA sense strand
gaaacuggggaaacggaaa

SEQ ID NO: 2620158 - RNA, 19 nt, Homo sapiens
  misc_RNA (1)...(19): siRNA sense strand
gcgcuugguaauugcugaa

SEQ ID NO: 2620159 - RNA, 19 nt, Homo sapiens
  misc_RNA (1)...(19): siRNA sense strand
cugaagaagcgaagcaaca

SEQ ID NO: 2620160 - RNA, 19 nt, Homo sapiens
  misc_RNA (1)...(19): siRNA sense strand
gcaaaggcaccuacggcaa

SEQ ID NO: 2620161 - RNA, 19 nt, Homo sapiens
  misc_RNA (1)...(19): siRNA sense strand
gagcaggacuugugcagga

SEQ ID NO: 2620162 - RNA, 19 nt, Homo sapiens
  misc_RNA (1)...(19): siRNA sense strand
aagaaauccaagaaagaga

SEQ ID NO: 2620163 - RNA, 19 nt, Homo sapiens
  misc_RNA (1)...(19): siRNA sense strand
aggacaaaauuaaggauga

SEQ ID NO: 2620164 - RNA, 19 nt, Homo sapiens
  misc_RNA (1)...(19): siRNA sense strand
auauacugcucgaugacaa

SEQ ID NO: 2620165 - RNA, 19 nt, Homo sapiens
  misc_RNA (1)...(19): siRNA sense strand
gggacuugaagcuggaaaa

SEQ ID NO: 2620166 - RNA, 19 nt, Homo sapiens
  misc_RNA (1)...(19): siRNA sense strand
cuuucaagauggagcagga

SEQ ID NO: 2620167 - RNA, 19 nt, Homo sapiens
  misc_RNA (1)...(19): siRNA sense strand
cuugaaacacagcagcaaa

SEQ ID NO: 2620168 - RNA, 19 nt, Homo sapiens
  misc_RNA (1)...(19): siRNA sense strand
gcaaauacucagcgggcac

SEQ ID NO: 2620169 - RNA, 19 nt, Homo sapiens
  misc_RNA (1)...(19): siRNA sense strand
gcgaagcaacagcgagcau

SEQ ID NO: 2620170 - RNA, 19 nt, Homo sapiens
  misc_RNA (1)...(19): siRNA sense strand
cgguggaugcugaugguga

SEQ ID NO: 2620171 - RNA, 19 nt, Homo sapiens
  misc_RNA (1)...(19): siRNA sense strand
accuguaccagaaggauaa

SEQ ID NO: 2620172 - RNA, 19 nt, Homo sapiens
  misc_RNA (1)...(19): siRNA sense strand
ggcuauaagagcagcgugu

SEQ ID NO: 2620173 - RNA, 19 nt, Homo sapiens
  misc_RNA (1)...(19): siRNA sense strand
ucaagauggagcaggacuu

SEQ ID NO: 2620174 - RNA, 19 nt, Homo sapiens
  misc_RNA (1)...(19): siRNA sense strand
gcuacgagcugcaggagac

SEQ ID NO: 2620175 - RNA, 19 nt, Homo sapiens
  misc_RNA (1)...(19): siRNA sense strand
aggucaugcuagagcggca

SEQ ID NO: 2620176 - RNA, 19 nt, Homo sapiens
  misc_RNA (1)...(19): siRNA sense strand
uugaaacacagcagcaaau

SEQ ID NO: 2620177 - RNA, 19 nt, Homo sapiens
  misc_RNA (1)...(19): siRNA sense strand
uggccgagugguugcuaua

SEQ ID NO: 2620178 - RNA, 19 nt, Homo sapiens
  misc_RNA (1)...(19): siRNA sense strand
acaucagacgagagauuga

SEQ ID NO: 2620179 - RNA, 19 nt, Homo sapiens
  misc_RNA (1)...(19): siRNA sense strand
aaccuguaccagaaggaua

SEQ ID NO: 2620180 - RNA, 19 nt, Homo sapiens
  misc_RNA (1)...(19): siRNA sense strand
uggaagaauucaagacgga

SEQ ID NO: 2620181 - RNA, 19 nt, Homo sapiens
  misc_RNA (1)...(19): siRNA sense strand
cggagaagaggcugugcaa

SEQ ID NO: 2620182 - RNA, 19 nt, Homo sapiens
  misc_RNA (1)...(19): siRNA sense strand
gaagaauucaagacggaga

SEQ ID NO: 2620183 - RNA, 19 nt, Homo sapiens
  misc_RNA (1)...(19): siRNA sense strand
cugcagagagugaggauga

SEQ ID NO: 2620184 - RNA, 19 nt, Homo sapiens
  misc_RNA (1)...(19): siRNA sense strand
aggaagaugaugauggaau

SEQ ID NO: 2620185 - RNA, 19 nt, Homo sapiens
  misc_RNA (1)...(19): siRNA sense strand
aggaggaggcggagcagua

SEQ ID NO: 2620186 - RNA, 19 nt, Homo sapiens
  misc_RNA (1)...(19): siRNA sense strand
ggaguucagcagaggcaaa

SEQ ID NO: 2620187 - RNA, 19 nt, Homo sapiens
  misc_RNA (1)...(19): siRNA sense strand
cuggaauauggaugaguaa

SEQ ID NO: 2620188 - RNA, 19 nt, Homo sapiens
  misc_RNA (1)...(19): siRNA sense strand
gggaagaagccgacuaacu

SEQ ID NO: 2620189 - RNA, 19 nt, Homo sapiens
  misc_RNA (1)...(19): siRNA sense strand
ccaucguguugcaggagaa

SEQ ID NO: 2620190 - RNA, 19 nt, Homo sapiens
  misc_RNA (1)...(19): siRNA sense strand
ccaucuuccagcagaauaa

SEQ ID NO: 2620191 - RNA, 19 nt, Homo sapiens
  misc_RNA (1)...(19): siRNA sense strand
cugauaguuuggaaagaau

SEQ ID NO: 2620192 - RNA, 19 nt, Homo sapiens
  misc_RNA (1)...(19): siRNA sense strand
ccaaggugaagaagaaaga

SEQ ID NO: 2620193 - RNA, 19 nt, Homo sapiens
  misc_RNA (1)...(19): siRNA sense strand
gaacgguagccuuggccaa

SEQ ID NO: 2620194 - RNA, 19 nt, Homo sapiens
  misc_RNA (1)...(19): siRNA sense strand
cuugaaaacuugucccaaa

SEQ ID NO: 2620195 - RNA, 19 nt, Homo sapiens
  misc_RNA (1)...(19): siRNA sense strand
aggaggaggugcuugaaca

SEQ ID NO: 2620196 - RNA, 19 nt, Homo sapiens
  misc_RNA (1)...(19): siRNA sense strand
gcagagaacuuagcggaga

SEQ ID NO: 2620197 - RNA, 19 nt, Homo sapiens
  misc_RNA (1)...(19): siRNA sense strand
agaagaaagacccaagaga

SEQ ID NO: 2620198 - RNA, 19 nt, Homo sapiens
  misc_RNA (1)...(19): siRNA sense strand
ccuuaaggaagcugagagu

SEQ ID NO: 2620199 - RNA, 19 nt, Homo sapiens
  misc_RNA (1)...(19): siRNA sense strand
gagcaguacaaacaggauu

SEQ ID NO: 2620200 - RNA, 19 nt, Homo sapiens
  misc_RNA (1)...(19): siRNA sense strand
ccuccugauaguuuggaaa

SEQ ID NO: 2620201 - RNA, 19 nt, Homo sapiens
  misc_RNA (1)...(19): siRNA sense strand
gacaugaagcagacagaca

SEQ ID NO: 2620202 - RNA, 19 nt, Homo sapiens
  misc_RNA (1)...(19): siRNA sense strand
acgagaaagacuugaguac

SEQ ID NO: 2620203 - RNA, 19 nt, Homo sapiens
  misc_RNA (1)...(19): siRNA sense strand
ggagaugggcugauggaag

SEQ ID NO: 2620204 - RNA, 19 nt, Homo sapiens
  misc_RNA (1)...(19): siRNA sense strand
gcccaaggcgaaggagaaa

SEQ ID NO: 2620205 - RNA, 19 nt, Homo sapiens
  misc_RNA (1)...(19): siRNA sense strand
gagaagugcggcagagaag

SEQ ID NO: 2620206 - RNA, 19 nt, Homo sapiens
  misc_RNA (1)...(19): siRNA sense strand
ccauuaagagccagcggau

SEQ ID NO: 2620207 - RNA, 19 nt, Homo sapiens
  misc_RNA (1)...(19): siRNA sense strand
ccuacuggaaccugaagaa

SEQ ID NO: 2620208 - RNA, 19 nt, Homo sapiens
  misc_RNA (1)...(19): siRNA sense strand
aaagcgagcaggaggacau

SEQ ID NO: 2620209 - RNA, 19 nt, Homo sapiens
  misc_RNA (1)...(19): siRNA sense strand
cagagagugaggaugacua

SEQ ID NO: 2620210 - RNA, 19 nt, Homo sapiens
  misc_RNA (1)...(19): siRNA sense strand
acgaugaaccugcagagaa

SEQ ID NO: 2620211 - RNA, 19 nt, Homo sapiens
  misc_RNA (1)...(19): siRNA sense strand
ccagcugccugaugagaca

SEQ ID NO: 2620212 - RNA, 19 nt, Homo sapiens
  misc_RNA (1)...(19): siRNA sense strand
ugccaacaguggucacaaa

SEQ ID NO: 2620213 - RNA, 19 nt, Homo sapiens
  misc_RNA (1)...(19): siRNA sense strand
augauaaugugaagcagau

SEQ ID NO: 2620214 - RNA, 19 nt, Homo sapiens
  misc_RNA (1)...(19): siRNA sense strand
cuggagugcuggugggaag

SEQ ID NO: 2620215 - RNA, 19 nt, Homo sapiens
  misc_RNA (1)...(19): siRNA sense strand
aggcggagcaguacaaaca

SEQ ID NO: 2620216 - RNA, 19 nt, Homo sapiens
  misc_RNA (1)...(19): siRNA sense strand
gcgagcaggaggacaugaa

SEQ ID NO: 2620217 - RNA, 19 nt, Homo sapiens
  misc_RNA (1)...(19): siRNA sense strand
ggaaguacuugucugcaga

SEQ ID NO: 2620218 - RNA, 19 nt, Homo sapiens
  misc_RNA (1)...(19): siRNA sense strand
gcauguacugugugaagga

SEQ ID NO: 2620219 - RNA, 19 nt, Homo sapiens
  misc_RNA (1)...(19): siRNA sense strand
uugcguaucuggaggagga

SEQ ID NO: 2620220 - RNA, 19 nt, Homo sapiens
  misc_RNA (1)...(19): siRNA sense strand
ggaagaaugggaaggaccu

SEQ ID NO: 2620221 - RNA, 19 nt, Homo sapiens
  misc_RNA (1)...(19): siRNA sense strand
uggaauuccuccugauagu

SEQ ID NO: 2620222 - RNA, 19 nt, Homo sapiens
  misc_RNA (1)...(19): siRNA sense strand
ucgaggagacgaugggcau

SEQ ID NO: 2620223 - RNA, 19 nt, Homo sapiens
  misc_RNA (1)...(19): siRNA sense strand
ucacaagucucauagcuga

SEQ ID NO: 2620224 - RNA, 19 nt, Homo sapiens
  misc_RNA (1)...(19): siRNA sense strand
acaggaagguggagaugcu

SEQ ID NO: 2620225 - RNA, 19 nt, Homo sapiens
  misc_RNA (1)...(19): siRNA sense strand
uggaggaggaggugcuuga

SEQ ID NO: 2620226 - RNA, 19 nt, Homo sapiens
  misc_RNA (1)...(19): siRNA sense strand
caggaggacaugaagcaga

SEQ ID NO: 2620227 - RNA, 19 nt, Homo sapiens
  misc_RNA (1)...(19): siRNA sense strand
cgaaggagaaacuggccga

SEQ ID NO: 2620228 - RNA, 19 nt, Homo sapiens
  misc_RNA (1)...(19): siRNA sense strand
ggaacaugagcuccaggaa

SEQ ID NO: 2620229 - RNA, 19 nt, Homo sapiens
  misc_RNA (1)...(19): siRNA sense strand
aggcacauguggagggcac

SEQ ID NO: 2620230 - RNA, 19 nt, Homo sapiens
  misc_RNA (1)...(19): siRNA sense strand
ucaacaggaagguggagau

SEQ ID NO: 2620231 - RNA, 19 nt, Homo sapiens
  misc_RNA (1)...(19): siRNA sense strand
caacacacccacugagaac

SEQ ID NO: 2620232 - RNA, 19 nt, Homo sapiens
  misc_RNA (1)...(19): siRNA sense strand
gugcauaugggguggguaa

SEQ ID NO: 2620233 - RNA, 19 nt, Homo sapiens
  misc_RNA (1)...(19): siRNA sense strand
ucucaaaccuucagaccca

SEQ ID NO: 2620234 - RNA, 19 nt, Homo sapiens
  misc_RNA (1)...(19): siRNA sense strand
guucacaaguucuggcuca

SEQ ID NO: 2620235 - RNA, 19 nt, Homo sapiens
  misc_RNA (1)...(19): siRNA sense strand
gagcuggccaugugggaga

SEQ ID NO: 2620236 - RNA, 19 nt, Homo sapiens
  misc_RNA (1)...(19): siRNA sense strand
cgauugggugcgagcagaa

SEQ ID NO: 2620237 - RNA, 19 nt, Homo sapiens
  misc_RNA (1)...(19): siRNA sense strand
augaagauggcgaacaaau

SEQ ID NO: 2620238 - RNA, 19 nt, Homo sapiens
  misc_RNA (1)...(19): siRNA sense strand
agaacaugaagauggcgaa

SEQ ID NO: 2620239 - RNA, 19 nt, Homo sapiens
  misc_RNA (1)...(19): siRNA sense strand
gggguggguaaaugagaaa

SEQ ID NO: 2620240 - RNA, 19 nt, Homo sapiens
  misc_RNA (1)...(19): siRNA sense strand
gugcauaugggguggguaa

SEQ ID NO: 2620241 - RNA, 19 nt, Homo sapiens
  misc_RNA (1)...(19): siRNA sense strand
ucucaaaccuucagaccca

SEQ ID NO: 2620242 - RNA, 19 nt, Homo sapiens
  misc_RNA (1)...(19): siRNA sense strand
guucacaaguucuggcuca

SEQ ID NO: 2620243 - RNA, 19 nt, Homo sapiens
  misc_RNA (1)...(19): siRNA sense strand
gagcuggccaugugggaga

SEQ ID NO: 2620244 - RNA, 19 nt, Homo sapiens
  misc_RNA (1)...(19): siRNA sense strand
cgauugggugcgagcagaa

SEQ ID NO: 2620245 - RNA, 19 nt, Homo sapiens
  misc_RNA (1)...(19): siRNA sense strand
augaagauggcgaacaaau

SEQ ID NO: 2620246 - RNA, 19 nt, Homo sapiens
  misc_RNA (1)...(19): siRNA sense strand
agaacaugaagauggcgaa

SEQ ID NO: 2620247 - RNA, 19 nt, Homo sapiens
  misc_RNA (1)...(19): siRNA sense strand
gggguggguaaaugagaaa

SEQ ID NO: 2620248 - RNA, 19 nt, Homo sapiens
  misc_RNA (1)...(19): siRNA sense strand
ccaagaagcugaagaaaga

SEQ ID NO: 2620249 - RNA, 19 nt, Homo sapiens
  misc_RNA (1)...(19): siRNA sense strand
cugagaaguuagcgggaaa

SEQ ID NO: 2620250 - RNA, 19 nt, Homo sapiens
  misc_RNA (1)...(19): siRNA sense strand
gcacagaagcccagaguga

SEQ ID NO: 2620251 - RNA, 19 nt, Homo sapiens
  misc_RNA (1)...(19): siRNA sense strand
gauucaaacuguaggccaa

SEQ ID NO: 2620252 - RNA, 19 nt, Homo sapiens
  misc_RNA (1)...(19): siRNA sense strand
cgguaaaccuagaugugaa

SEQ ID NO: 2620253 - RNA, 19 nt, Homo sapiens
  misc_RNA (1)...(19): siRNA sense strand
aagaaaugccuuugaagaa

SEQ ID NO: 2620254 - RNA, 19 nt, Homo sapiens
  misc_RNA (1)...(19): siRNA sense strand
aauggaagauugagaacua

SEQ ID NO: 2620255 - RNA, 19 nt, Homo sapiens
  misc_RNA (1)...(19): siRNA sense strand
ggauauggcuauacugaca

SEQ ID NO: 2620256 - RNA, 19 nt, Homo sapiens
  misc_RNA (1)...(19): siRNA sense strand
agugcaaaggcuagaguua

SEQ ID NO: 2620257 - RNA, 19 nt, Homo sapiens
  misc_RNA (1)...(19): siRNA sense strand
acgaagacgucuaaaccaa

SEQ ID NO: 2620258 - RNA, 19 nt, Homo sapiens
  misc_RNA (1)...(19): siRNA sense strand
acacacaacugcaagaaau

SEQ ID NO: 2620259 - RNA, 19 nt, Homo sapiens
  misc_RNA (1)...(19): siRNA sense strand
acaagaagaugaagaagga

SEQ ID NO: 2620260 - RNA, 19 nt, Homo sapiens
  misc_RNA (1)...(19): siRNA sense strand
ggagaacgcugccgaagaa

SEQ ID NO: 2620261 - RNA, 19 nt, Homo sapiens
  misc_RNA (1)...(19): siRNA sense strand
cggaagaacuacacaagca

SEQ ID NO: 2620262 - RNA, 19 nt, Homo sapiens
  misc_RNA (1)...(19): siRNA sense strand
aagaagaugaagaaggauu

SEQ ID NO: 2620263 - RNA, 19 nt, Homo sapiens
  misc_RNA (1)...(19): siRNA sense strand
gguaaaccuagaugugaaa

SEQ ID NO: 2620264 - RNA, 19 nt, Homo sapiens
  misc_RNA (1)...(19): siRNA sense strand
aguaaaggcauccaagaua

SEQ ID NO: 2620265 - RNA, 19 nt, Homo sapiens
  misc_RNA (1)...(19): siRNA sense strand
acaaauacgaagacgucua

SEQ ID NO: 2620266 - RNA, 19 nt, Homo sapiens
  misc_RNA (1)...(19): siRNA sense strand
uccaaaggucagaaagaaa

SEQ ID NO: 2620267 - RNA, 19 nt, Homo sapiens
  misc_RNA (1)...(19): siRNA sense strand
agaaaugccuuugaagaaa

SEQ ID NO: 2620268 - RNA, 19 nt, Homo sapiens
  misc_RNA (1)...(19): siRNA sense strand
cagcaggauuuaaaggaca

SEQ ID NO: 2620269 - RNA, 19 nt, Homo sapiens
  misc_RNA (1)...(19): siRNA sense strand
ccucagagucagaaacaga

SEQ ID NO: 2620270 - RNA, 19 nt, Homo sapiens
  misc_RNA (1)...(19): siRNA sense strand
cuuuaaauugccagcauua

SEQ ID NO: 2620271 - RNA, 19 nt, Homo sapiens
  misc_RNA (1)...(19): siRNA sense strand
aaaagaaguuccaggauau

SEQ ID NO: 2620272 - RNA, 19 nt, Homo sapiens
  misc_RNA (1)...(19): siRNA sense strand
guaggaaggcagagcauca

SEQ ID NO: 2620273 - RNA, 19 nt, Homo sapiens
  misc_RNA (1)...(19): siRNA sense strand
ggacagccgcucugguuua

SEQ ID NO: 2620274 - RNA, 19 nt, Homo sapiens
  misc_RNA (1)...(19): siRNA sense strand
ucucagugccacaagaaua

SEQ ID NO: 2620275 - RNA, 19 nt, Homo sapiens
  misc_RNA (1)...(19): siRNA sense strand
caagaaaugccuuugaaga

SEQ ID NO: 2620276 - RNA, 19 nt, Homo sapiens
  misc_RNA (1)...(19): siRNA sense strand
aguccaaaggucagaaaga

SEQ ID NO: 2620277 - RNA, 19 nt, Homo sapiens
  misc_RNA (1)...(19): siRNA sense strand
gcacugagcugauuguuga

SEQ ID NO: 2620278 - RNA, 19 nt, Homo sapiens
  misc_RNA (1)...(19): siRNA sense strand
agacaugggaacaacgcua

SEQ ID NO: 2620279 - RNA, 19 nt, Homo sapiens
  misc_RNA (1)...(19): siRNA sense strand
cugcagauguggagguuac

SEQ ID NO: 2620280 - RNA, 19 nt, Homo sapiens
  misc_RNA (1)...(19): siRNA sense strand
gguagggaauccagaagga

SEQ ID NO: 2620281 - RNA, 19 nt, Homo sapiens
  misc_RNA (1)...(19): siRNA sense strand
ggcagagagugaagagagu

SEQ ID NO: 2620282 - RNA, 19 nt, Homo sapiens
  misc_RNA (1)...(19): siRNA sense strand
ugcaaaggcuagaguuaca

SEQ ID NO: 2620283 - RNA, 19 nt, Homo sapiens
  misc_RNA (1)...(19): siRNA sense strand
cagagugaacagaaagaga

SEQ ID NO: 2620284 - RNA, 19 nt, Homo sapiens
  misc_RNA (1)...(19): siRNA sense strand
cauuacaagaagaugaaga

SEQ ID NO: 2620285 - RNA, 19 nt, Homo sapiens
  misc_RNA (1)...(19): siRNA sense strand
ccaaaggucagaaagaaaa

SEQ ID NO: 2620286 - RNA, 19 nt, Homo sapiens
  misc_RNA (1)...(19): siRNA sense strand
ccgaaggucauuacaagaa

SEQ ID NO: 2620287 - RNA, 19 nt, Homo sapiens
  misc_RNA (1)...(19): siRNA sense strand
caucaaagccugacugaag

SEQ ID NO: 2620288 - RNA, 19 nt, Homo sapiens
  misc_RNA (1)...(19): siRNA sense strand
gaaggaaccaucucugaaa

SEQ ID NO: 2620289 - RNA, 19 nt, Homo sapiens
  misc_RNA (1)...(19): siRNA sense strand
agcccagagugaacagaaa

SEQ ID NO: 2620290 - RNA, 19 nt, Homo sapiens
  misc_RNA (1)...(19): siRNA sense strand
cagaaggagcguucaugaa

SEQ ID NO: 2620291 - RNA, 19 nt, Homo sapiens
  misc_RNA (1)...(19): siRNA sense strand
uggcaaagauucaaacugu

SEQ ID NO: 2620292 - RNA, 19 nt, Homo sapiens
  misc_RNA (1)...(19): siRNA sense strand
ggcaaagauucaaacugua

SEQ ID NO: 2620293 - RNA, 19 nt, Homo sapiens
  misc_RNA (1)...(19): siRNA sense strand
uuagaaagugcaaaggcua

SEQ ID NO: 2620294 - RNA, 19 nt, Homo sapiens
  misc_RNA (1)...(19): siRNA sense strand
agacaaaaugggaauacaa

SEQ ID NO: 2620295 - RNA, 19 nt, Homo sapiens
  misc_RNA (1)...(19): siRNA sense strand
agagugaagcccugccaua

SEQ ID NO: 2620296 - RNA, 19 nt, Homo sapiens
  misc_RNA (1)...(19): siRNA sense strand
ggauucagcuggagagcag

SEQ ID NO: 2620297 - RNA, 19 nt, Homo sapiens
  misc_RNA (1)...(19): siRNA sense strand
gauacggaccaauggaaga

SEQ ID NO: 2620298 - RNA, 19 nt, Homo sapiens
  misc_RNA (1)...(19): siRNA sense strand
gcugagauuauuggaauua

SEQ ID NO: 2620299 - RNA, 19 nt, Homo sapiens
  misc_RNA (1)...(19): siRNA sense strand
uggugcagucugaaaguua

SEQ ID NO: 2620300 - RNA, 19 nt, Homo sapiens
  misc_RNA (1)...(19): siRNA sense strand
ccaacaacaaugugagaag

SEQ ID NO: 2620301 - RNA, 19 nt, Homo sapiens
  misc_RNA (1)...(19): siRNA sense strand
cagacaagggucaggcuca

SEQ ID NO: 2620302 - RNA, 19 nt, Homo sapiens
  misc_RNA (1)...(19): siRNA sense strand
gagaaaauaacuugacuga

SEQ ID NO: 2620303 - RNA, 19 nt, Homo sapiens
  misc_RNA (1)...(19): siRNA sense strand
ggaaacagccuggcaaaga

SEQ ID NO: 2620304 - RNA, 19 nt, Homo sapiens
  misc_RNA (1)...(19): siRNA sense strand
agaaagagaagucgcuuga

SEQ ID NO: 2620305 - RNA, 19 nt, Homo sapiens
  misc_RNA (1)...(19): siRNA sense strand
aagcugaguccacaggaaa

SEQ ID NO: 2620306 - RNA, 19 nt, Homo sapiens
  misc_RNA (1)...(19): siRNA sense strand
cgcccaagaagcugaagaa

SEQ ID NO: 2620307 - RNA, 19 nt, Homo sapiens
  misc_RNA (1)...(19): siRNA sense strand
gguaacaaauccaacacca

SEQ ID NO: 2620308 - RNA, 19 nt, Homo sapiens
  misc_RNA (1)...(19): siRNA sense strand
acaccugacucgagccaca

SEQ ID NO: 2620309 - RNA, 19 nt, Homo sapiens
  misc_RNA (1)...(19): siRNA sense strand
uccaagauagaaugggaua

SEQ ID NO: 2620310 - RNA, 19 nt, Homo sapiens
  misc_RNA (1)...(19): siRNA sense strand
agcaggauuuaaaggacaa

SEQ ID NO: 2620311 - RNA, 19 nt, Homo sapiens
  misc_RNA (1)...(19): siRNA sense strand
cccaaggagcauccagaaa

SEQ ID NO: 2620312 - RNA, 19 nt, Homo sapiens
  misc_RNA (1)...(19): siRNA sense strand
cgucuaaaccaaucguaca

SEQ ID NO: 2620313 - RNA, 19 nt, Homo sapiens
  misc_RNA (1)...(19): siRNA sense strand
caaucguacaugccagaaa

SEQ ID NO: 2620314 - RNA, 19 nt, Homo sapiens
  misc_RNA (1)...(19): siRNA sense strand
cauccaagauagaauggga

SEQ ID NO: 2620315 - RNA, 19 nt, Homo sapiens
  misc_RNA (1)...(19): siRNA sense strand
agagugaacagaaagagaa

SEQ ID NO: 2620316 - RNA, 19 nt, Homo sapiens
  misc_RNA (1)...(19): siRNA sense strand
aggugaggaucaagcuuau

SEQ ID NO: 2620317 - RNA, 19 nt, Homo sapiens
  misc_RNA (1)...(19): siRNA sense strand
agaagcaucgguagggaau

SEQ ID NO: 2620318 - RNA, 19 nt, Homo sapiens
  misc_RNA (1)...(19): siRNA sense strand
gcacaagaagucaucuaau

SEQ ID NO: 2620319 - RNA, 19 nt, Homo sapiens
  misc_RNA (1)...(19): siRNA sense strand
guccaaaggucagaaagaa

SEQ ID NO: 2620320 - RNA, 19 nt, Homo sapiens
  misc_RNA (1)...(19): siRNA sense strand
gaaaugccuuugaagaaaa

SEQ ID NO: 2620321 - RNA, 19 nt, Homo sapiens
  misc_RNA (1)...(19): siRNA sense strand
gaagaaagauccagcucag

SEQ ID NO: 2620322 - RNA, 19 nt, Homo sapiens
  misc_RNA (1)...(19): siRNA sense strand
cagaggagcaugagaccca

SEQ ID NO: 2620323 - RNA, 19 nt, Homo sapiens
  misc_RNA (1)...(19): siRNA sense strand
aggcccugguggagaauga

SEQ ID NO: 2620324 - RNA, 19 nt, Homo sapiens
  misc_RNA (1)...(19): siRNA sense strand
aacugaagacacugagcaa

SEQ ID NO: 2620325 - RNA, 19 nt, Homo sapiens
  misc_RNA (1)...(19): siRNA sense strand
uggacaaagaagugggaua

SEQ ID NO: 2620326 - RNA, 19 nt, Homo sapiens
  misc_RNA (1)...(19): siRNA sense strand
cuucaagcacaaagagaaa

SEQ ID NO: 2620327 - RNA, 19 nt, Homo sapiens
  misc_RNA (1)...(19): siRNA sense strand
uugcauaagcucugugaaa

SEQ ID NO: 2620328 - RNA, 19 nt, Homo sapiens
  misc_RNA (1)...(19): siRNA sense strand
uuguuaaacugcagagcua

SEQ ID NO: 2620329 - RNA, 19 nt, Homo sapiens
  misc_RNA (1)...(19): siRNA sense strand
cuacaaucaccuugaagaa

SEQ ID NO: 2620330 - RNA, 19 nt, Homo sapiens
  misc_RNA (1)...(19): siRNA sense strand
ccagaaacuugaaggagca

SEQ ID NO: 2620331 - RNA, 19 nt, Homo sapiens
  misc_RNA (1)...(19): siRNA sense strand
gugaaaggauugaaggucu

SEQ ID NO: 2620332 - RNA, 19 nt, Homo sapiens
  misc_RNA (1)...(19): siRNA sense strand
cagcaaugcaacagcaaga

SEQ ID NO: 2620333 - RNA, 19 nt, Homo sapiens
  misc_RNA (1)...(19): siRNA sense strand
guuaaacugcagagcuaaa

SEQ ID NO: 2620334 - RNA, 19 nt, Homo sapiens
  misc_RNA (1)...(19): siRNA sense strand
caugaaagaggaugccaaa

SEQ ID NO: 2620335 - RNA, 19 nt, Homo sapiens
  misc_RNA (1)...(19): siRNA sense strand
ccucggacucggagaagaa

SEQ ID NO: 2620336 - RNA, 19 nt, Homo sapiens
  misc_RNA (1)...(19): siRNA sense strand
ccaugaaagaggaugccaa

SEQ ID NO: 2620337 - RNA, 19 nt, Homo sapiens
  misc_RNA (1)...(19): siRNA sense strand
ggccaauagccaacugaaa

SEQ ID NO: 2620338 - RNA, 19 nt, Homo sapiens
  misc_RNA (1)...(19): siRNA sense strand
cagcaaagauaaugaggac

SEQ ID NO: 2620339 - RNA, 19 nt, Homo sapiens
  misc_RNA (1)...(19): siRNA sense strand
ugggauaagaaguuguuaa

SEQ ID NO: 2620340 - RNA, 19 nt, Homo sapiens
  misc_RNA (1)...(19): siRNA sense strand
aggcagagcuccagugaac

SEQ ID NO: 2620341 - RNA, 19 nt, Homo sapiens
  misc_RNA (1)...(19): siRNA sense strand
acugacagauaaugagcaa

SEQ ID NO: 2620342 - RNA, 19 nt, Homo sapiens
  misc_RNA (1)...(19): siRNA sense strand
augccuaugagguggaaua

SEQ ID NO: 2620343 - RNA, 19 nt, Homo sapiens
  misc_RNA (1)...(19): siRNA sense strand
agauaggaaauaagccaua

SEQ ID NO: 2620344 - RNA, 19 nt, Homo sapiens
  misc_RNA (1)...(19): siRNA sense strand
ccuucaagcacaaagagaa

SEQ ID NO: 2620345 - RNA, 19 nt, Homo sapiens
  misc_RNA (1)...(19): siRNA sense strand
ggguauaaagcauguggau

SEQ ID NO: 2620346 - RNA, 19 nt, Homo sapiens
  misc_RNA (1)...(19): siRNA sense strand
caaaagucgacgaggagaa

SEQ ID NO: 2620347 - RNA, 19 nt, Homo sapiens
  misc_RNA (1)...(19): siRNA sense strand
cagaaaagauugaagaaag

SEQ ID NO: 2620348 - RNA, 19 nt, Homo sapiens
  misc_RNA (1)...(19): siRNA sense strand
gucuuaauaacuugggaua

SEQ ID NO: 2620349 - RNA, 19 nt, Homo sapiens
  misc_RNA (1)...(19): siRNA sense strand
aggagcaagcagagaugaa

SEQ ID NO: 2620350 - RNA, 19 nt, Homo sapiens
  misc_RNA (1)...(19): siRNA sense strand
uggaauaucaugugcuaca

SEQ ID NO: 2620351 - RNA, 19 nt, Homo sapiens
  misc_RNA (1)...(19): siRNA sense strand
ucacgagggcagccagaaa

SEQ ID NO: 2620352 - RNA, 19 nt, Homo sapiens
  misc_RNA (1)...(19): siRNA sense strand
gugauggagaagggagaaa

SEQ ID NO: 2620353 - RNA, 19 nt, Homo sapiens
  misc_RNA (1)...(19): siRNA sense strand
aagucgacgaggagaaauu

SEQ ID NO: 2620354 - RNA, 19 nt, Homo sapiens
  misc_RNA (1)...(19): siRNA sense strand
cagaaugagaggucggcuu

SEQ ID NO: 2620355 - RNA, 19 nt, Homo sapiens
  misc_RNA (1)...(19): siRNA sense strand
aagauggauuggacaggaa

SEQ ID NO: 2620356 - RNA, 19 nt, Homo sapiens
  misc_RNA (1)...(19): siRNA sense strand
cacuaaaucaguugugcua

SEQ ID NO: 2620357 - RNA, 19 nt, Homo sapiens
  misc_RNA (1)...(19): siRNA sense strand
acacagauugccuaauaaa

SEQ ID NO: 2620358 - RNA, 19 nt, Homo sapiens
  misc_RNA (1)...(19): siRNA sense strand
gguugggcgauuugagauu

SEQ ID NO: 2620359 - RNA, 19 nt, Homo sapiens
  misc_RNA (1)...(19): siRNA sense strand
aguuggugcaugucagaaa

SEQ ID NO: 2620360 - RNA, 19 nt, Homo sapiens
  misc_RNA (1)...(19): siRNA sense strand
augcgauucucguggauuu

SEQ ID NO: 2620361 - RNA, 19 nt, Homo sapiens
  misc_RNA (1)...(19): siRNA sense strand
acaaucaccuugaagaaaa

SEQ ID NO: 2620362 - RNA, 19 nt, Homo sapiens
  misc_RNA (1)...(19): siRNA sense strand
ggagagggccaauagccaa

SEQ ID NO: 2620363 - RNA, 19 nt, Homo sapiens
  misc_RNA (1)...(19): siRNA sense strand
caaacuugacauucugaaa

SEQ ID NO: 2620364 - RNA, 19 nt, Homo sapiens
  misc_RNA (1)...(19): siRNA sense strand
caagauaggaaauaagcca

SEQ ID NO: 2620365 - RNA, 19 nt, Homo sapiens
  misc_RNA (1)...(19): siRNA sense strand
aagccaagcagaagacaca

SEQ ID NO: 2620366 - RNA, 19 nt, Homo sapiens
  misc_RNA (1)...(19): siRNA sense strand
ccagaaaagauugaagaaa

SEQ ID NO: 2620367 - RNA, 19 nt, Homo sapiens
  misc_RNA (1)...(19): siRNA sense strand
cgauuugagauuaaccuua

SEQ ID NO: 2620368 - RNA, 19 nt, Homo sapiens
  misc_RNA (1)...(19): siRNA sense strand
cccgggaagccaagcgaua

SEQ ID NO: 2620369 - RNA, 19 nt, Homo sapiens
  misc_RNA (1)...(19): siRNA sense strand
gguaaugcugacucugaaa

SEQ ID NO: 2620370 - RNA, 19 nt, Homo sapiens
  misc_RNA (1)...(19): siRNA sense strand
aagugauggagaagggaga

SEQ ID NO: 2620371 - RNA, 19 nt, Homo sapiens
  misc_RNA (1)...(19): siRNA sense strand
ggaacgagcugcugccacu

SEQ ID NO: 2620372 - RNA, 19 nt, Homo sapiens
  misc_RNA (1)...(19): siRNA sense strand
cgacgcauguacaaggaga

SEQ ID NO: 2620373 - RNA, 19 nt, Homo sapiens
  misc_RNA (1)...(19): siRNA sense strand
ggauuuguagccagaguuu

SEQ ID NO: 2620374 - RNA, 19 nt, Homo sapiens
  misc_RNA (1)...(19): siRNA sense strand
cugugaggauagugaaacu

SEQ ID NO: 2620375 - RNA, 19 nt, Homo sapiens
  misc_RNA (1)...(19): siRNA sense strand
auagugaaacuuuggagaa

SEQ ID NO: 2620376 - RNA, 19 nt, Homo sapiens
  misc_RNA (1)...(19): siRNA sense strand
aggagaaauuuggcaguuu

SEQ ID NO: 2620377 - RNA, 19 nt, Homo sapiens
  misc_RNA (1)...(19): siRNA sense strand
gagugaagagcaagccuuu

SEQ ID NO: 2620378 - RNA, 19 nt, Homo sapiens
  misc_RNA (1)...(19): siRNA sense strand
uaauggaaugugagagcuu

SEQ ID NO: 2620379 - RNA, 19 nt, Homo sapiens
  misc_RNA (1)...(19): siRNA sense strand
caggaugagcuucaggaau

SEQ ID NO: 2620380 - RNA, 19 nt, Homo sapiens
  misc_RNA (1)...(19): siRNA sense strand
acaaagccaagauaggaaa

SEQ ID NO: 2620381 - RNA, 19 nt, Homo sapiens
  misc_RNA (1)...(19): siRNA sense strand
ugauguuauuagcagcaua

SEQ ID NO: 2620382 - RNA, 19 nt, Homo sapiens
  misc_RNA (1)...(19): siRNA sense strand
uuggaaguguggacaguuu

SEQ ID NO: 2620383 - RNA, 19 nt, Homo sapiens
  misc_RNA (1)...(19): siRNA sense strand
uauucaucuucgagcacaa

SEQ ID NO: 2620384 - RNA, 19 nt, Homo sapiens
  misc_RNA (1)...(19): siRNA sense strand
auguacaaggagaguaauu

SEQ ID NO: 2620385 - RNA, 19 nt, Homo sapiens
  misc_RNA (1)...(19): siRNA sense strand
acagauugccuaauaaaca

SEQ ID NO: 2620386 - RNA, 19 nt, Homo sapiens
  misc_RNA (1)...(19): siRNA sense strand
gaugauggcaagagcaaaa

SEQ ID NO: 2620387 - RNA, 19 nt, Homo sapiens
  misc_RNA (1)...(19): siRNA sense strand
cagaugauggcaagagcaa

SEQ ID NO: 2620388 - RNA, 19 nt, Homo sapiens
  misc_RNA (1)...(19): siRNA sense strand
gugaaagaacggugaccau

SEQ ID NO: 2620389 - RNA, 19 nt, Homo sapiens
  misc_RNA (1)...(19): siRNA sense strand
gguucagguucuucggaau

SEQ ID NO: 2620390 - RNA, 19 nt, Homo sapiens
  misc_RNA (1)...(19): siRNA sense strand
caaggaacaaagagcggaa

SEQ ID NO: 2620391 - RNA, 19 nt, Homo sapiens
  misc_RNA (1)...(19): siRNA sense strand
ccgccugugaggagacaaa

SEQ ID NO: 2620392 - RNA, 19 nt, Homo sapiens
  misc_RNA (1)...(19): siRNA sense strand
agggaggagcagaacauaa

SEQ ID NO: 2620393 - RNA, 19 nt, Homo sapiens
  misc_RNA (1)...(19): siRNA sense strand
gaagcaaaggaguuggaau

SEQ ID NO: 2620394 - RNA, 19 nt, Homo sapiens
  misc_RNA (1)...(19): siRNA sense strand
aagcauaaagggaggagca

SEQ ID NO: 2620395 - RNA, 19 nt, Homo sapiens
  misc_RNA (1)...(19): siRNA sense strand
aggauuuggauuaagcaua

SEQ ID NO: 2620396 - RNA, 19 nt, Homo sapiens
  misc_RNA (1)...(19): siRNA sense strand
agauugaagcaaaggaguu

SEQ ID NO: 2620397 - RNA, 19 nt, Homo sapiens
  misc_RNA (1)...(19): siRNA sense strand
aagacaaacaguaggagga

SEQ ID NO: 2620398 - RNA, 19 nt, Homo sapiens
  misc_RNA (1)...(19): siRNA sense strand
cgacggaaacagugcuuca

SEQ ID NO: 2620399 - RNA, 19 nt, Homo sapiens
  misc_RNA (1)...(19): siRNA sense strand
ccugcuggaccgacggaaa

SEQ ID NO: 2620400 - RNA, 19 nt, Homo sapiens
  misc_RNA (1)...(19): siRNA sense strand
gugaccaucagaagacaaa

SEQ ID NO: 2620401 - RNA, 19 nt, Homo sapiens
  misc_RNA (1)...(19): siRNA sense strand
ggaacaaagagcggaacuu

SEQ ID NO: 2620402 - RNA, 19 nt, Homo sapiens
  misc_RNA (1)...(19): siRNA sense strand
gcauaaagggaggagcaga

SEQ ID NO: 2620403 - RNA, 19 nt, Homo sapiens
  misc_RNA (1)...(19): siRNA sense strand
ggcauuaaugugagaaaau

SEQ ID NO: 2620404 - RNA, 19 nt, Homo sapiens
  misc_RNA (1)...(19): siRNA sense strand
caguaggaggauuuggauu

SEQ ID NO: 2620405 - RNA, 19 nt, Homo sapiens
  misc_RNA (1)...(19): siRNA sense strand
uggauuaagcauaaaggga

SEQ ID NO: 2620406 - RNA, 19 nt, Homo sapiens
  misc_RNA (1)...(19): siRNA sense strand
ugacuggcuacaagcaaua

SEQ ID NO: 2620407 - RNA, 19 nt, Homo sapiens
  misc_RNA (1)...(19): siRNA sense strand
cuguaaaccagcagauugu

SEQ ID NO: 2620408 - RNA, 19 nt, Homo sapiens
  misc_RNA (1)...(19): siRNA sense strand
gagcggaacuuucaggacu

SEQ ID NO: 2620409 - RNA, 19 nt, Homo sapiens
  misc_RNA (1)...(19): siRNA sense strand
cagaagacaaacaguagga

SEQ ID NO: 2620410 - RNA, 19 nt, Homo sapiens
  misc_RNA (1)...(19): siRNA sense strand
aaagggaggagcagaacau

SEQ ID NO: 2620411 - RNA, 19 nt, Homo sapiens
  misc_RNA (1)...(19): siRNA sense strand
agcggaacuuucaggacua

SEQ ID NO: 2620412 - RNA, 19 nt, Homo sapiens
  misc_RNA (1)...(19): siRNA sense strand
auggcauuaaugugagaaa

SEQ ID NO: 2620413 - RNA, 19 nt, Homo sapiens
  misc_RNA (1)...(19): siRNA sense strand
agcaauagcaacuaacauu

SEQ ID NO: 2620414 - RNA, 19 nt, Homo sapiens
  misc_RNA (1)...(19): siRNA sense strand
cugcuuugaugcugcaaca

SEQ ID NO: 2620415 - RNA, 19 nt, Homo sapiens
  misc_RNA (1)...(19): siRNA sense strand
cugcaaggucuguggcaaa

SEQ ID NO: 2620416 - RNA, 19 nt, Homo sapiens
  misc_RNA (1)...(19): siRNA sense strand
gugggaaaguauuggccaa

SEQ ID NO: 2620417 - RNA, 19 nt, Homo sapiens
  misc_RNA (1)...(19): siRNA sense strand
gagaaugacaaucgggaga

SEQ ID NO: 2620418 - RNA, 19 nt, Homo sapiens
  misc_RNA (1)...(19): siRNA sense strand
augacaaucgggagaauaa

SEQ ID NO: 2620419 - RNA, 19 nt, Homo sapiens
  misc_RNA (1)...(19): siRNA sense strand
cccuuaaccucaugagcaa

SEQ ID NO: 2620420 - RNA, 19 nt, Homo sapiens
  misc_RNA (1)...(19): siRNA sense strand
auuccaaagaggcggauaa

SEQ ID NO: 2620421 - RNA, 19 nt, Homo sapiens
  misc_RNA (1)...(19): siRNA sense strand
cuauaaagaggaagagaag

SEQ ID NO: 2620422 - RNA, 19 nt, Homo sapiens
  misc_RNA (1)...(19): siRNA sense strand
gcgacaugugugaaacuaa

SEQ ID NO: 2620423 - RNA, 19 nt, Homo sapiens
  misc_RNA (1)...(19): siRNA sense strand
aaguauagcugcaaggucu

SEQ ID NO: 2620424 - RNA, 19 nt, Homo sapiens
  misc_RNA (1)...(19): siRNA sense strand
ggauggaauauuugagaac

SEQ ID NO: 2620425 - RNA, 19 nt, Homo sapiens
  misc_RNA (1)...(19): siRNA sense strand
gagugaugacagugaggau

SEQ ID NO: 2620426 - RNA, 19 nt, Homo sapiens
  misc_RNA (1)...(19): siRNA sense strand
gugaagagcuggcgcugca

SEQ ID NO: 2620427 - RNA, 19 nt, Homo sapiens
  misc_RNA (1)...(19): siRNA sense strand
cgccaaagacagaagacca

SEQ ID NO: 2620428 - RNA, 19 nt, Homo sapiens
  misc_RNA (1)...(19): siRNA sense strand
aaguauuggccaaagauuu

SEQ ID NO: 2620429 - RNA, 19 nt, Homo sapiens
  misc_RNA (1)...(19): siRNA sense strand
ggaucaaacugcaaagcac

SEQ ID NO: 2620430 - RNA, 19 nt, Homo sapiens
  misc_RNA (1)...(19): siRNA sense strand
gccaaagacagaagaccau

SEQ ID NO: 2620431 - RNA, 19 nt, Homo sapiens
  misc_RNA (1)...(19): siRNA sense strand
guucaaagcaauggagacu

SEQ ID NO: 2620432 - RNA, 19 nt, Homo sapiens
  misc_RNA (1)...(19): siRNA sense strand
augcgcugccugugggaaa

SEQ ID NO: 2620433 - RNA, 19 nt, Homo sapiens
  misc_RNA (1)...(19): siRNA sense strand
ccaucaagugccaccuaaa

SEQ ID NO: 2620434 - RNA, 19 nt, Homo sapiens
  misc_RNA (1)...(19): siRNA sense strand
gagcaaacauguuggugug

SEQ ID NO: 2620435 - RNA, 19 nt, Homo sapiens
  misc_RNA (1)...(19): siRNA sense strand
gcggauaagaacccggaca

SEQ ID NO: 2620436 - RNA, 19 nt, Homo sapiens
  misc_RNA (1)...(19): siRNA sense strand
uagcugagcgucuggguau

SEQ ID NO: 2620437 - RNA, 19 nt, Homo sapiens
  misc_RNA (1)...(19): siRNA sense strand
agggagcuauaaagaggaa

SEQ ID NO: 2620438 - RNA, 19 nt, Homo sapiens
  misc_RNA (1)...(19): siRNA sense strand
aagaggaagagaagaaugu

SEQ ID NO: 2620439 - RNA, 19 nt, Homo sapiens
  misc_RNA (1)...(19): siRNA sense strand
ggaccgaaacucccgggua

SEQ ID NO: 2620440 - RNA, 19 nt, Homo sapiens
  misc_RNA (1)...(19): siRNA sense strand
gcugcaaggucuguggcaa

SEQ ID NO: 2620441 - RNA, 19 nt, Homo sapiens
  misc_RNA (1)...(19): siRNA sense strand
cugccaacuuugagaaggu

SEQ ID NO: 2620442 - RNA, 19 nt, Homo sapiens
  misc_RNA (1)...(19): siRNA sense strand
ugggaaaguauuggccaaa

SEQ ID NO: 2620443 - RNA, 19 nt, Homo sapiens
  misc_RNA (1)...(19): siRNA sense strand
agagaagaauguugccagu

SEQ ID NO: 2620444 - RNA, 19 nt, Homo sapiens
  misc_RNA (1)...(19): siRNA sense strand
cugccaggugugcaagaaa

SEQ ID NO: 2620445 - RNA, 19 nt, Homo sapiens
  misc_RNA (1)...(19): siRNA sense strand
cugaaaacauuuagggaau

SEQ ID NO: 2620446 - RNA, 19 nt, Homo sapiens
  misc_RNA (1)...(19): siRNA sense strand
cauaacaguaucagggaca

SEQ ID NO: 2620447 - RNA, 19 nt, Homo sapiens
  misc_RNA (1)...(19): siRNA sense strand
gugauucagaugaggaaau

SEQ ID NO: 2620448 - RNA, 19 nt, Homo sapiens
  misc_RNA (1)...(19): siRNA sense strand
gggaauuggaacuaaacga

SEQ ID NO: 2620449 - RNA, 19 nt, Homo sapiens
  misc_RNA (1)...(19): siRNA sense strand
gggacuuugaucugaagaa

SEQ ID NO: 2620450 - RNA, 19 nt, Homo sapiens
  misc_RNA (1)...(19): siRNA sense strand
gcccaaagcaccaaaggga

SEQ ID NO: 2620451 - RNA, 19 nt, Homo sapiens
  misc_RNA (1)...(19): siRNA sense strand
aagacgugcaagaggaaaa

SEQ ID NO: 2620452 - RNA, 19 nt, Homo sapiens
  misc_RNA (1)...(19): siRNA sense strand
gcucaaauuacgagagagg

SEQ ID NO: 2620453 - RNA, 19 nt, Homo sapiens
  misc_RNA (1)...(19): siRNA sense strand
cccaaagcaccaaagggaa

SEQ ID NO: 2620454 - RNA, 19 nt, Homo sapiens
  misc_RNA (1)...(19): siRNA sense strand
ugaacuaauugaaagguac

SEQ ID NO: 2620455 - RNA, 19 nt, Homo sapiens
  misc_RNA (1)...(19): siRNA sense strand
uggaagaagaaaugagaaa

SEQ ID NO: 2620456 - RNA, 19 nt, Homo sapiens
  misc_RNA (1)...(19): siRNA sense strand
gaaaugaaauggaggguga

SEQ ID NO: 2620457 - RNA, 19 nt, Homo sapiens
  misc_RNA (1)...(19): siRNA sense strand
gaucaauaugacagagaua

SEQ ID NO: 2620458 - RNA, 19 nt, Homo sapiens
  misc_RNA (1)...(19): siRNA sense strand
agagauaggaggagagaga

SEQ ID NO: 2620459 - RNA, 19 nt, Homo sapiens
  misc_RNA (1)...(19): siRNA sense strand
gagaauagaucuaggucca

SEQ ID NO: 2620460 - RNA, 19 nt, Homo sapiens
  misc_RNA (1)...(19): siRNA sense strand
agacagaagccgagagcga

SEQ ID NO: 2620461 - RNA, 19 nt, Homo sapiens
  misc_RNA (1)...(19): siRNA sense strand
agagaugaaacaagggaaa

SEQ ID NO: 2620462 - RNA, 19 nt, Homo sapiens
  misc_RNA (1)...(19): siRNA sense strand
agaagagaguaaaggauau

SEQ ID NO: 2620463 - RNA, 19 nt, Homo sapiens
  misc_RNA (1)...(19): siRNA sense strand
cagaacaagcuuuggcuaa

SEQ ID NO: 2620464 - RNA, 19 nt, Homo sapiens
  misc_RNA (1)...(19): siRNA sense strand
gcgaaaagaaagaguagaa

SEQ ID NO: 2620465 - RNA, 19 nt, Homo sapiens
  misc_RNA (1)...(19): siRNA sense strand
gauuggaaauggagggcau

SEQ ID NO: 2620466 - RNA, 19 nt, Homo sapiens
  misc_RNA (1)...(19): siRNA sense strand
ggucauuagaggaaggaga

SEQ ID NO: 2620467 - RNA, 19 nt, Homo sapiens
  misc_RNA (1)...(19): siRNA sense strand
gcgaaagcuucuagaacca

SEQ ID NO: 2620468 - RNA, 19 nt, Homo sapiens
  misc_RNA (1)...(19): siRNA sense strand
aagaaaugagaaagcgaaa

SEQ ID NO: 2620469 - RNA, 19 nt, Homo sapiens
  misc_RNA (1)...(19): siRNA sense strand
ggggaaaguucuaaagaga

SEQ ID NO: 2620470 - RNA, 19 nt, Homo sapiens
  misc_RNA (1)...(19): siRNA sense strand
ccaaggaaggcgagcggaa

SEQ ID NO: 2620471 - RNA, 19 nt, Homo sapiens
  misc_RNA (1)...(19): siRNA sense strand
agaaguagagagagagaca

SEQ ID NO: 2620472 - RNA, 19 nt, Homo sapiens
  misc_RNA (1)...(19): siRNA sense strand
cggaagauuuacuuggcaa

SEQ ID NO: 2620473 - RNA, 19 nt, Homo sapiens
  misc_RNA (1)...(19): siRNA sense strand
gcaacuuugaccagaauaa

SEQ ID NO: 2620474 - RNA, 19 nt, Homo sapiens
  misc_RNA (1)...(19): siRNA sense strand
aggaaaucgaagagaugaa

SEQ ID NO: 2620475 - RNA, 19 nt, Homo sapiens
  misc_RNA (1)...(19): siRNA sense strand
aagugaaagaggaaguaaa

SEQ ID NO: 2620476 - RNA, 19 nt, Homo sapiens
  misc_RNA (1)...(19): siRNA sense strand
gagaggaagaaguuacaaa

SEQ ID NO: 2620477 - RNA, 19 nt, Homo sapiens
  misc_RNA (1)...(19): siRNA sense strand
uuccagaaguagagagaga

SEQ ID NO: 2620478 - RNA, 19 nt, Homo sapiens
  misc_RNA (1)...(19): siRNA sense strand
gaauaagcuggaagaagaa

SEQ ID NO: 2620479 - RNA, 19 nt, Homo sapiens
  misc_RNA (1)...(19): siRNA sense strand
gcgagaagagcaacguaaa

SEQ ID NO: 2620480 - RNA, 19 nt, Homo sapiens
  misc_RNA (1)...(19): siRNA sense strand
agaucuagguccaaagaga

SEQ ID NO: 2620481 - RNA, 19 nt, Homo sapiens
  misc_RNA (1)...(19): siRNA sense strand
ugcaggaaaugcugagaaa

SEQ ID NO: 2620482 - RNA, 19 nt, Homo sapiens
  misc_RNA (1)...(19): siRNA sense strand
cugcagagaaucagugaau

SEQ ID NO: 2620483 - RNA, 19 nt, Homo sapiens
  misc_RNA (1)...(19): siRNA sense strand
uuacauggaagaagugaaa

SEQ ID NO: 2620484 - RNA, 19 nt, Homo sapiens
  misc_RNA (1)...(19): siRNA sense strand
aacaagaagaagagagaca

SEQ ID NO: 2620485 - RNA, 19 nt, Homo sapiens
  misc_RNA (1)...(19): siRNA sense strand
agguaaauguguuucgauu

SEQ ID NO: 2620486 - RNA, 19 nt, Homo sapiens
  misc_RNA (1)...(19): siRNA sense strand
guuuagaggacgaugauga

SEQ ID NO: 2620487 - RNA, 19 nt, Homo sapiens
  misc_RNA (1)...(19): siRNA sense strand
acauggaagaagugaaaga

SEQ ID NO: 2620488 - RNA, 19 nt, Homo sapiens
  misc_RNA (1)...(19): siRNA sense strand
aguugauauugaugagcaa

SEQ ID NO: 2620489 - RNA, 19 nt, Homo sapiens
  misc_RNA (1)...(19): siRNA sense strand
ccaaccauuaugaggauua

SEQ ID NO: 2620490 - RNA, 19 nt, Homo sapiens
  misc_RNA (1)...(19): siRNA sense strand
cguuagagaaacaagaaga

SEQ ID NO: 2620491 - RNA, 19 nt, Homo sapiens
  misc_RNA (1)...(19): siRNA sense strand
gaaaacugaugguggggaa

SEQ ID NO: 2620492 - RNA, 19 nt, Homo sapiens
  misc_RNA (1)...(19): siRNA sense strand
uggaagaagugaaagagga

SEQ ID NO: 2620493 - RNA, 19 nt, Homo sapiens
  misc_RNA (1)...(19): siRNA sense strand
gcagaaaucaccaggcuca

SEQ ID NO: 2620494 - RNA, 19 nt, Homo sapiens
  misc_RNA (1)...(19): siRNA sense strand
aagcugaaaaggagggaaa

SEQ ID NO: 2620495 - RNA, 19 nt, Homo sapiens
  misc_RNA (1)...(19): siRNA sense strand
ccagaaguagagagagaga

SEQ ID NO: 2620496 - RNA, 19 nt, Homo sapiens
  misc_RNA (1)...(19): siRNA sense strand
ugucucaagaagagguaaa

SEQ ID NO: 2620497 - RNA, 19 nt, Homo sapiens
  misc_RNA (1)...(19): siRNA sense strand
acuaaagaguguaagaagu

SEQ ID NO: 2620498 - RNA, 19 nt, Homo sapiens
  misc_RNA (1)...(19): siRNA sense strand
guuagagaaacaagaagaa

SEQ ID NO: 2620499 - RNA, 19 nt, Homo sapiens
  misc_RNA (1)...(19): siRNA sense strand
gcagagaaucagugaauac

SEQ ID NO: 2620500 - RNA, 19 nt, Homo sapiens
  misc_RNA (1)...(19): siRNA sense strand
uagagaaacaagaagaaga

SEQ ID NO: 2620501 - RNA, 19 nt, Homo sapiens
  misc_RNA (1)...(19): siRNA sense strand
gaagaaaugagaaagcgaa

SEQ ID NO: 2620502 - RNA, 19 nt, Homo sapiens
  misc_RNA (1)...(19): siRNA sense strand
gcuaaugagaggaagaagu

SEQ ID NO: 2620503 - RNA, 19 nt, Homo sapiens
  misc_RNA (1)...(19): siRNA sense strand
acaggaugguggacagaau

SEQ ID NO: 2620504 - RNA, 19 nt, Homo sapiens
  misc_RNA (1)...(19): siRNA sense strand
guaugagccauuuaggaaa

SEQ ID NO: 2620505 - RNA, 19 nt, Homo sapiens
  misc_RNA (1)...(19): siRNA sense strand
aggaaaagguugccccaaa

SEQ ID NO: 2620506 - RNA, 19 nt, Homo sapiens
  misc_RNA (1)...(19): siRNA sense strand
uagaugaagcagacagaau

SEQ ID NO: 2620507 - RNA, 19 nt, Homo sapiens
  misc_RNA (1)...(19): siRNA sense strand
caaccaacaaauaaaggaa

SEQ ID NO: 2620508 - RNA, 19 nt, Homo sapiens
  misc_RNA (1)...(19): siRNA sense strand
aaguagagagagagacaga

SEQ ID NO: 2620509 - RNA, 19 nt, Homo sapiens
  misc_RNA (1)...(19): siRNA sense strand
cauccaaacccaagcuauu

SEQ ID NO: 2620510 - RNA, 19 nt, Homo sapiens
  misc_RNA (1)...(19): siRNA sense strand
gaaaagaagucugggccaa

SEQ ID NO: 2620511 - RNA, 19 nt, Homo sapiens
  misc_RNA (1)...(19): siRNA sense strand
acagauuacuaaagagugu

SEQ ID NO: 2620512 - RNA, 19 nt, Homo sapiens
  misc_RNA (1)...(19): siRNA sense strand
ugaagaagaauuagagauc

SEQ ID NO: 2620513 - RNA, 19 nt, Homo sapiens
  misc_RNA (1)...(19): siRNA sense strand
gcaaagaacccaaggaagg

SEQ ID NO: 2620514 - RNA, 19 nt, Homo sapiens
  misc_RNA (1)...(19): siRNA sense strand
agauagagauaggaggaga

SEQ ID NO: 2620515 - RNA, 19 nt, Homo sapiens
  misc_RNA (1)...(19): siRNA sense strand
acaaagaugacaaggagga

SEQ ID NO: 2620516 - RNA, 19 nt, Homo sapiens
  misc_RNA (1)...(19): siRNA sense strand
ucauggaggcauugaucaa

SEQ ID NO: 2620517 - RNA, 19 nt, Homo sapiens
  misc_RNA (1)...(19): siRNA sense strand
ggacuggaagagcaggaaa

SEQ ID NO: 2620518 - RNA, 19 nt, Homo sapiens
  misc_RNA (1)...(19): siRNA sense strand
cugaaaagaucaaugccaa

SEQ ID NO: 2620519 - RNA, 19 nt, Homo sapiens
  misc_RNA (1)...(19): siRNA sense strand
gagaaagcgaaaagaaaga

SEQ ID NO: 2620520 - RNA, 19 nt, Homo sapiens
  misc_RNA (1)...(19): siRNA sense strand
ggcgagaagagcaacguaa

SEQ ID NO: 2620521 - RNA, 19 nt, Homo sapiens
  misc_RNA (1)...(19): siRNA sense strand
ggauaauguucguccugau

SEQ ID NO: 2620522 - RNA, 19 nt, Homo sapiens
  misc_RNA (1)...(19): siRNA sense strand
uggcaaagaacccaaggaa

SEQ ID NO: 2620523 - RNA, 19 nt, Homo sapiens
  misc_RNA (1)...(19): siRNA sense strand
ggaagauuuacuuggcaau

SEQ ID NO: 2620524 - RNA, 19 nt, Homo sapiens
  misc_RNA (1)...(19): siRNA sense strand
cugccagggcugagagaca

SEQ ID NO: 2620525 - RNA, 19 nt, Homo sapiens
  misc_RNA (1)...(19): siRNA sense strand
ccacaguguuccagggcgu

SEQ ID NO: 2620526 - RNA, 19 nt, Homo sapiens
  misc_RNA (1)...(19): siRNA sense strand
ugguggaggugcuggcaga

SEQ ID NO: 2620527 - RNA, 19 nt, Homo sapiens
  misc_RNA (1)...(19): siRNA sense strand
cugaggagguggaauggga

SEQ ID NO: 2620528 - RNA, 19 nt, Homo sapiens
  misc_RNA (1)...(19): siRNA sense strand
ggaagguccugguggaggu

SEQ ID NO: 2620529 - RNA, 19 nt, Homo sapiens
  misc_RNA (1)...(19): siRNA sense strand
gggcauagccaguugacca

SEQ ID NO: 2620530 - RNA, 19 nt, Homo sapiens
  misc_RNA (1)...(19): siRNA sense strand
cgugguggaagcagggaaa

SEQ ID NO: 2620531 - RNA, 19 nt, Homo sapiens
  misc_RNA (1)...(19): siRNA sense strand
ggacagaauccuaaugcca

SEQ ID NO: 2620532 - RNA, 19 nt, Homo sapiens
  misc_RNA (1)...(19): siRNA sense strand
ggaauuggauccagcacca

SEQ ID NO: 2620533 - RNA, 19 nt, Homo sapiens
  misc_RNA (1)...(19): siRNA sense strand
gugaguaaggacugggaca

SEQ ID NO: 2620534 - RNA, 19 nt, Homo sapiens
  misc_RNA (1)...(19): siRNA sense strand
gcuugggugaugaggaauu

SEQ ID NO: 2620535 - RNA, 19 nt, Homo sapiens
  misc_RNA (1)...(19): siRNA sense strand
aggacugggacaaugaaua

SEQ ID NO: 2620536 - RNA, 19 nt, Homo sapiens
  misc_RNA (1)...(19): siRNA sense strand
ggaaaugacaauuaccuga

SEQ ID NO: 2620537 - RNA, 19 nt, Homo sapiens
  misc_RNA (1)...(19): siRNA sense strand
cagguauauaagaggaaaa

SEQ ID NO: 2620538 - RNA, 19 nt, Homo sapiens
  misc_RNA (1)...(19): siRNA sense strand
ggauagucuuggagaggag

SEQ ID NO: 2620539 - RNA, 19 nt, Homo sapiens
  misc_RNA (1)...(19): siRNA sense strand
gaguaaggacugggacaau

SEQ ID NO: 2620540 - RNA, 19 nt, Homo sapiens
  misc_RNA (1)...(19): siRNA sense strand
ggaacucaguauagugcca

SEQ ID NO: 2620541 - RNA, 19 nt, Homo sapiens
  misc_RNA (1)...(19): siRNA sense strand
gugaagcacugcagggaug

SEQ ID NO: 2620542 - RNA, 19 nt, Homo sapiens
  misc_RNA (1)...(19): siRNA sense strand
ggcacuggcugcuuacaaa

SEQ ID NO: 2620543 - RNA, 19 nt, Homo sapiens
  misc_RNA (1)...(19): siRNA sense strand
ucucagaugugguuggcca

SEQ ID NO: 2620544 - RNA, 19 nt, Homo sapiens
  misc_RNA (1)...(19): siRNA sense strand
agaagacagucguggugga

SEQ ID NO: 2620545 - RNA, 19 nt, Homo sapiens
  misc_RNA (1)...(19): siRNA sense strand
ugaguaaggacugggacaa

SEQ ID NO: 2620546 - RNA, 19 nt, Homo sapiens
  misc_RNA (1)...(19): siRNA sense strand
ucacagauguaguuccuga

SEQ ID NO: 2620547 - RNA, 19 nt, Homo sapiens
  misc_RNA (1)...(19): siRNA sense strand
ccgacucagcagcaaguua

SEQ ID NO: 2620548 - RNA, 19 nt, Homo sapiens
  misc_RNA (1)...(19): siRNA sense strand
ccugagacuaucugugaga

SEQ ID NO: 2620549 - RNA, 19 nt, Homo sapiens
  misc_RNA (1)...(19): siRNA sense strand
gcgucggagucaagagcaa

SEQ ID NO: 2620550 - RNA, 19 nt, Homo sapiens
  misc_RNA (1)...(19): siRNA sense strand
gugaaaccguaaugaagaa

SEQ ID NO: 2620551 - RNA, 19 nt, Homo sapiens
  misc_RNA (1)...(19): siRNA sense strand
gucaagagcaacagggaca

SEQ ID NO: 2620552 - RNA, 19 nt, Homo sapiens
  misc_RNA (1)...(19): siRNA sense strand
ggugaaaccguaaugaaga

SEQ ID NO: 2620553 - RNA, 19 nt, Homo sapiens
  misc_RNA (1)...(19): siRNA sense strand
ggccaagcaagaagaaaga

SEQ ID NO: 2620554 - RNA, 19 nt, Homo sapiens
  misc_RNA (1)...(19): siRNA sense strand
ccuuguaggacuggugaaa

SEQ ID NO: 2620555 - RNA, 19 nt, Homo sapiens
  misc_RNA (1)...(19): siRNA sense strand
cggccaagcaagaagaaag

SEQ ID NO: 2620556 - RNA, 19 nt, Homo sapiens
  misc_RNA (1)...(19): siRNA sense strand
caaacuccacauacagaaa

SEQ ID NO: 2620557 - RNA, 19 nt, Homo sapiens
  misc_RNA (1)...(19): siRNA sense strand
acagaaagccaccgaccuu

SEQ ID NO: 2620558 - RNA, 19 nt, Homo sapiens
  misc_RNA (1)...(19): siRNA sense strand
gggacaggcuucuccggaa

SEQ ID NO: 2620559 - RNA, 19 nt, Homo sapiens
  misc_RNA (1)...(19): siRNA sense strand
ggugaaaguuacacaagaa

SEQ ID NO: 2620560 - RNA, 19 nt, Homo sapiens
  misc_RNA (1)...(19): siRNA sense strand
cgaaagagaagaaggcgaa

SEQ ID NO: 2620561 - RNA, 19 nt, Homo sapiens
  misc_RNA (1)...(19): siRNA sense strand
agaugaagcuagagaaaau

SEQ ID NO: 2620562 - RNA, 19 nt, Homo sapiens
  misc_RNA (1)...(19): siRNA sense strand
ccgaggaaggugaaaguua

SEQ ID NO: 2620563 - RNA, 19 nt, Homo sapiens
  misc_RNA (1)...(19): siRNA sense strand
aggcaaguguaaaguuaaa

SEQ ID NO: 2620564 - RNA, 19 nt, Homo sapiens
  misc_RNA (1)...(19): siRNA sense strand
cggaugaauauaugugaaa

SEQ ID NO: 2620565 - RNA, 19 nt, Homo sapiens
  misc_RNA (1)...(19): siRNA sense strand
agauugaagauguggaaau

SEQ ID NO: 2620566 - RNA, 19 nt, Homo sapiens
  misc_RNA (1)...(19): siRNA sense strand
gugauuugcuugaagauau

SEQ ID NO: 2620567 - RNA, 19 nt, Homo sapiens
  misc_RNA (1)...(19): siRNA sense strand
ggacauucagucagaagaa

SEQ ID NO: 2620568 - RNA, 19 nt, Homo sapiens
  misc_RNA (1)...(19): siRNA sense strand
gagaguaugcacaggguau

SEQ ID NO: 2620569 - RNA, 19 nt, Homo sapiens
  misc_RNA (1)...(19): siRNA sense strand
auagaugaagcuagagaaa

SEQ ID NO: 2620570 - RNA, 19 nt, Homo sapiens
  misc_RNA (1)...(19): siRNA sense strand
cggaaugauuacaggagca

SEQ ID NO: 2620571 - RNA, 19 nt, Homo sapiens
  misc_RNA (1)...(19): siRNA sense strand
ucaugcaguacgagagaaa

SEQ ID NO: 2620572 - RNA, 19 nt, Homo sapiens
  misc_RNA (1)...(19): siRNA sense strand
ggaagaacuuucagccuca

SEQ ID NO: 2620573 - RNA, 19 nt, Homo sapiens
  misc_RNA (1)...(19): siRNA sense strand
cagugaaagauuuagcuaa

SEQ ID NO: 2620574 - RNA, 19 nt, Homo sapiens
  misc_RNA (1)...(19): siRNA sense strand
ugacaaaacuucaagccaa

SEQ ID NO: 2620575 - RNA, 19 nt, Homo sapiens
  misc_RNA (1)...(19): siRNA sense strand
ccgaaagagaagaaggcga

SEQ ID NO: 2620576 - RNA, 19 nt, Homo sapiens
  misc_RNA (1)...(19): siRNA sense strand
agccaaacaucaagcagaa

SEQ ID NO: 2620577 - RNA, 19 nt, Homo sapiens
  misc_RNA (1)...(19): siRNA sense strand
cgaacagccuccugagcau

SEQ ID NO: 2620578 - RNA, 19 nt, Homo sapiens
  misc_RNA (1)...(19): siRNA sense strand
aaguugagcagaugacaaa

SEQ ID NO: 2620579 - RNA, 19 nt, Homo sapiens
  misc_RNA (1)...(19): siRNA sense strand
guguggaccaguugacaaa

SEQ ID NO: 2620580 - RNA, 19 nt, Homo sapiens
  misc_RNA (1)...(19): siRNA sense strand
ugauacuagccgacaguua

SEQ ID NO: 2620581 - RNA, 19 nt, Homo sapiens
  misc_RNA (1)...(19): siRNA sense strand
gacaaaacuucaagccaaa

SEQ ID NO: 2620582 - RNA, 19 nt, Homo sapiens
  misc_RNA (1)...(19): siRNA sense strand
gauauggaagacuggguaa

SEQ ID NO: 2620583 - RNA, 19 nt, Homo sapiens
  misc_RNA (1)...(19): siRNA sense strand
uggguaaaggcucgaaaua

SEQ ID NO: 2620584 - RNA, 19 nt, Homo sapiens
  misc_RNA (1)...(19): siRNA sense strand
ucgaaauaaaguuggccaa

SEQ ID NO: 2620585 - RNA, 19 nt, Homo sapiens
  misc_RNA (1)...(19): siRNA sense strand
caguguauguuuugugaaa

SEQ ID NO: 2620586 - RNA, 19 nt, Homo sapiens
  misc_RNA (1)...(19): siRNA sense strand
agagauuggccuggaguaa

SEQ ID NO: 2620587 - RNA, 19 nt, Homo sapiens
  misc_RNA (1)...(19): siRNA sense strand
acuccauggaugagagaga

SEQ ID NO: 2620588 - RNA, 19 nt, Homo sapiens
  misc_RNA (1)...(19): siRNA sense strand
cgacaguuagaaucagaaa

SEQ ID NO: 2620589 - RNA, 19 nt, Homo sapiens
  misc_RNA (1)...(19): siRNA sense strand
auuacaagagacagugaaa

SEQ ID NO: 2620590 - RNA, 19 nt, Homo sapiens
  misc_RNA (1)...(19): siRNA sense strand
ugaaccaaguaauggaaga

SEQ ID NO: 2620591 - RNA, 19 nt, Homo sapiens
  misc_RNA (1)...(19): siRNA sense strand
gaagaaggcugcuauugaa

SEQ ID NO: 2620592 - RNA, 19 nt, Homo sapiens
  misc_RNA (1)...(19): siRNA sense strand
agagacagugaaagauuua

SEQ ID NO: 2620593 - RNA, 19 nt, Homo sapiens
  misc_RNA (1)...(19): siRNA sense strand
gagagaaagcugacaucga

SEQ ID NO: 2620594 - RNA, 19 nt, Homo sapiens
  misc_RNA (1)...(19): siRNA sense strand
cuugaagauaugaggacau

SEQ ID NO: 2620595 - RNA, 19 nt, Homo sapiens
  misc_RNA (1)...(19): siRNA sense strand
gaagauaugaggacauuca

SEQ ID NO: 2620596 - RNA, 19 nt, Homo sapiens
  misc_RNA (1)...(19): siRNA sense strand
gcugaugaucggaaugauu

SEQ ID NO: 2620597 - RNA, 19 nt, Homo sapiens
  misc_RNA (1)...(19): siRNA sense strand
gcacagucuaaauaaggaa

SEQ ID NO: 2620598 - RNA, 19 nt, Homo sapiens
  misc_RNA (1)...(19): siRNA sense strand
augcagauaccgaaagaga

SEQ ID NO: 2620599 - RNA, 19 nt, Homo sapiens
  misc_RNA (1)...(19): siRNA sense strand
cugaauuacaagagacagu

SEQ ID NO: 2620600 - RNA, 19 nt, Homo sapiens
  misc_RNA (1)...(19): siRNA sense strand
ccacagaggagcacagucu

SEQ ID NO: 2620601 - RNA, 19 nt, Homo sapiens
  misc_RNA (1)...(19): siRNA sense strand
guuagaagugauugaagau

SEQ ID NO: 2620602 - RNA, 19 nt, Homo sapiens
  misc_RNA (1)...(19): siRNA sense strand
cugcaaggacagugagaag

SEQ ID NO: 2620603 - RNA, 19 nt, Homo sapiens
  misc_RNA (1)...(19): siRNA sense strand
acaaagccgagcagagcua

SEQ ID NO: 2620604 - RNA, 19 nt, Homo sapiens
  misc_RNA (1)...(19): siRNA sense strand
agauuggccuggaguaaaa

SEQ ID NO: 2620605 - RNA, 19 nt, Homo sapiens
  misc_RNA (1)...(19): siRNA sense strand
gcccagucucggaugaaua

SEQ ID NO: 2620606 - RNA, 19 nt, Homo sapiens
  misc_RNA (1)...(19): siRNA sense strand
ugcuauugaaagagaguau

SEQ ID NO: 2620607 - RNA, 19 nt, Homo sapiens
  misc_RNA (1)...(19): siRNA sense strand
gaacaaugcagguagccca

SEQ ID NO: 2620608 - RNA, 19 nt, Homo sapiens
  misc_RNA (1)...(19): siRNA sense strand
caaguugagcagaugacaa

SEQ ID NO: 2620609 - RNA, 19 nt, Homo sapiens
  misc_RNA (1)...(19): siRNA sense strand
auggaaauguguaugauca

SEQ ID NO: 2620610 - RNA, 19 nt, Homo sapiens
  misc_RNA (1)...(19): siRNA sense strand
acagaggagcacagucuaa

SEQ ID NO: 2620611 - RNA, 19 nt, Homo sapiens
  misc_RNA (1)...(19): siRNA sense strand
ugaguugaccauugaggaa

SEQ ID NO: 2620612 - RNA, 19 nt, Homo sapiens
  misc_RNA (1)...(19): siRNA sense strand
aaguuggccaaguggguua

SEQ ID NO: 2620613 - RNA, 19 nt, Homo sapiens
  misc_RNA (1)...(19): siRNA sense strand
gaaggcugcuauugaaaga

SEQ ID NO: 2620614 - RNA, 19 nt, Homo sapiens
  misc_RNA (1)...(19): siRNA sense strand
aggcgaagaguuugaagau

SEQ ID NO: 2620615 - RNA, 19 nt, Homo sapiens
  misc_RNA (1)...(19): siRNA sense strand
ccaaguggguuaugugcca

SEQ ID NO: 2620616 - RNA, 19 nt, Homo sapiens
  misc_RNA (1)...(19): siRNA sense strand
cgaacaaggaggugcagga

SEQ ID NO: 2620617 - RNA, 19 nt, Homo sapiens
  misc_RNA (1)...(19): siRNA sense strand
ggaugaaggaggugaugcu

SEQ ID NO: 2620618 - RNA, 19 nt, Homo sapiens
  misc_RNA (1)...(19): siRNA sense strand
gagcgaacaaggaggugca

SEQ ID NO: 2620619 - RNA, 19 nt, Homo sapiens
  misc_RNA (1)...(19): siRNA sense strand
ggauguguuuggagcgaac

SEQ ID NO: 2620620 - RNA, 19 nt, Homo sapiens
  misc_RNA (1)...(19): siRNA sense strand
acaaggaggugcaggagcu

SEQ ID NO: 2620621 - RNA, 19 nt, Homo sapiens
  misc_RNA (1)...(19): siRNA sense strand
caagaagccuggcagcaga

SEQ ID NO: 2620622 - RNA, 19 nt, Homo sapiens
  misc_RNA (1)...(19): siRNA sense strand
ggguggagucuguguucuu

SEQ ID NO: 2620623 - RNA, 19 nt, Homo sapiens
  misc_RNA (1)...(19): siRNA sense strand
agaagugucuggugaccga

SEQ ID NO: 2620624 - RNA, 19 nt, Homo sapiens
  misc_RNA (1)...(19): siRNA sense strand
guggauuaaauguggcaua

SEQ ID NO: 2620625 - RNA, 19 nt, Homo sapiens
  misc_RNA (1)...(19): siRNA sense strand
agaauaucgucgaacgcaa

SEQ ID NO: 2620626 - RNA, 19 nt, Homo sapiens
  misc_RNA (1)...(19): siRNA sense strand
aaucaggucaauuggauaa

SEQ ID NO: 2620627 - RNA, 19 nt, Homo sapiens
  misc_RNA (1)...(19): siRNA sense strand
ccuugagagaugagcacaa

SEQ ID NO: 2620628 - RNA, 19 nt, Homo sapiens
  misc_RNA (1)...(19): siRNA sense strand
uggauaagguuguagaacu

SEQ ID NO: 2620629 - RNA, 19 nt, Homo sapiens
  misc_RNA (1)...(19): siRNA sense strand
ccgaguguguccaggaaca

SEQ ID NO: 2620630 - RNA, 19 nt, Homo sapiens
  misc_RNA (1)...(19): siRNA sense strand
cugaaagccacucggaauu

SEQ ID NO: 2620631 - RNA, 19 nt, Homo sapiens
  misc_RNA (1)...(19): siRNA sense strand
agugaggaugagaagaaua

SEQ ID NO: 2620632 - RNA, 19 nt, Homo sapiens
  misc_RNA (1)...(19): siRNA sense strand
ucugaaagccacucggaau

SEQ ID NO: 2620633 - RNA, 19 nt, Homo sapiens
  misc_RNA (1)...(19): siRNA sense strand
ccgggaaugguuugagcua

SEQ ID NO: 2620634 - RNA, 19 nt, Homo sapiens
  misc_RNA (1)...(19): siRNA sense strand
cuaaaaggccugaaugaau

SEQ ID NO: 2620635 - RNA, 19 nt, Homo sapiens
  misc_RNA (1)...(19): siRNA sense strand
ucaacaaugacaugaguga

SEQ ID NO: 2620636 - RNA, 19 nt, Homo sapiens
  misc_RNA (1)...(19): siRNA sense strand
cgggaaugguuugagcuaa

SEQ ID NO: 2620637 - RNA, 19 nt, Homo sapiens
  misc_RNA (1)...(19): siRNA sense strand
gagaaaaggucaugaggug

SEQ ID NO: 2620638 - RNA, 19 nt, Homo sapiens
  misc_RNA (1)...(19): siRNA sense strand
aggugaagaaaccgaagaa

SEQ ID NO: 2620639 - RNA, 19 nt, Homo sapiens
  misc_RNA (1)...(19): siRNA sense strand
ccgagaugaguaugauaau

SEQ ID NO: 2620640 - RNA, 19 nt, Homo sapiens
  misc_RNA (1)...(19): siRNA sense strand
cucaagaagaagagaguac

SEQ ID NO: 2620641 - RNA, 19 nt, Homo sapiens
  misc_RNA (1)...(19): siRNA sense strand
ccugaaaauguaugaguuu

SEQ ID NO: 2620642 - RNA, 19 nt, Homo sapiens
  misc_RNA (1)...(19): siRNA sense strand
aguaguuguugguggcuca

SEQ ID NO: 2620643 - RNA, 19 nt, Homo sapiens
  misc_RNA (1)...(19): siRNA sense strand
aacaaugacaugagugaga

SEQ ID NO: 2620644 - RNA, 19 nt, Homo sapiens
  misc_RNA (1)...(19): siRNA sense strand
aguucuaccugaagaucau

SEQ ID NO: 2620645 - RNA, 19 nt, Homo sapiens
  misc_RNA (1)...(19): siRNA sense strand
ggagcuggucuuugcagaa

SEQ ID NO: 2620646 - RNA, 19 nt, Homo sapiens
  misc_RNA (1)...(19): siRNA sense strand
aaaucaggucaauuggaua

SEQ ID NO: 2620647 - RNA, 19 nt, Homo sapiens
  misc_RNA (1)...(19): siRNA sense strand
cccgagaugaguaugauaa

SEQ ID NO: 2620648 - RNA, 19 nt, Homo sapiens
  misc_RNA (1)...(19): siRNA sense strand
aagugaaagaggaggugga

SEQ ID NO: 2620649 - RNA, 19 nt, Homo sapiens
  misc_RNA (1)...(19): siRNA sense strand
cugagaaggugaagaaacc

SEQ ID NO: 2620650 - RNA, 19 nt, Homo sapiens
  misc_RNA (1)...(19): siRNA sense strand
ucucagugaaggaguucua

SEQ ID NO: 2620651 - RNA, 19 nt, Homo sapiens
  misc_RNA (1)...(19): siRNA sense strand
cggcagguacauaugaaaa

SEQ ID NO: 2620652 - RNA, 19 nt, Homo sapiens
  misc_RNA (1)...(19): siRNA sense strand
aagcauuagugcaucccaa

SEQ ID NO: 2620653 - RNA, 19 nt, Homo sapiens
  misc_RNA (1)...(19): siRNA sense strand
cugagaaccuuuuggcuau

SEQ ID NO: 2620654 - RNA, 19 nt, Homo sapiens
  misc_RNA (1)...(19): siRNA sense strand
augaauuggucccugagaa

SEQ ID NO: 2620655 - RNA, 19 nt, Homo sapiens
  misc_RNA (1)...(19): siRNA sense strand
cugcuguugacgaggaaga

SEQ ID NO: 2620656 - RNA, 19 nt, Homo sapiens
  misc_RNA (1)...(19): siRNA sense strand
acuuugaggcuuaucuuua

SEQ ID NO: 2620657 - RNA, 19 nt, Homo sapiens
  misc_RNA (1)...(19): siRNA sense strand
agcuguaaggagaggaaca

SEQ ID NO: 2620658 - RNA, 19 nt, Homo sapiens
  misc_RNA (1)...(19): siRNA sense strand
ccaauuccaacguaguaaa

SEQ ID NO: 2620659 - RNA, 19 nt, Homo sapiens
  misc_RNA (1)...(19): siRNA sense strand
ccugagaaggugaagaaac

SEQ ID NO: 2620660 - RNA, 19 nt, Homo sapiens
  misc_RNA (1)...(19): siRNA sense strand
gugaaggaguucuaccuga

SEQ ID NO: 2620661 - RNA, 19 nt, Homo sapiens
  misc_RNA (1)...(19): siRNA sense strand
cagauuggagcaagaacuu

SEQ ID NO: 2620662 - RNA, 19 nt, Homo sapiens
  misc_RNA (1)...(19): siRNA sense strand
uggccagucaagugaaaga

SEQ ID NO: 2620663 - RNA, 19 nt, Homo sapiens
  misc_RNA (1)...(19): siRNA sense strand
ccugagaaccuuuuggcua

SEQ ID NO: 2620664 - RNA, 19 nt, Homo sapiens
  misc_RNA (1)...(19): siRNA sense strand
guggauuaaauguggcaua

SEQ ID NO: 2620665 - RNA, 19 nt, Homo sapiens
  misc_RNA (1)...(19): siRNA sense strand
agaauaucgucgaacgcaa

SEQ ID NO: 2620666 - RNA, 19 nt, Homo sapiens
  misc_RNA (1)...(19): siRNA sense strand
aaucaggucaauuggauaa

SEQ ID NO: 2620667 - RNA, 19 nt, Homo sapiens
  misc_RNA (1)...(19): siRNA sense strand
ccuugagagaugagcacaa

SEQ ID NO: 2620668 - RNA, 19 nt, Homo sapiens
  misc_RNA (1)...(19): siRNA sense strand
uggauaagguuguagaacu

SEQ ID NO: 2620669 - RNA, 19 nt, Homo sapiens
  misc_RNA (1)...(19): siRNA sense strand
ccgaguguguccaggaaca

SEQ ID NO: 2620670 - RNA, 19 nt, Homo sapiens
  misc_RNA (1)...(19): siRNA sense strand
cugaaagccacucggaauu

SEQ ID NO: 2620671 - RNA, 19 nt, Homo sapiens
  misc_RNA (1)...(19): siRNA sense strand
agugaggaugagaagaaua

SEQ ID NO: 2620672 - RNA, 19 nt, Homo sapiens
  misc_RNA (1)...(19): siRNA sense strand
ucugaaagccacucggaau

SEQ ID NO: 2620673 - RNA, 19 nt, Homo sapiens
  misc_RNA (1)...(19): siRNA sense strand
ccgggaaugguuugagcua

SEQ ID NO: 2620674 - RNA, 19 nt, Homo sapiens
  misc_RNA (1)...(19): siRNA sense strand
cuaaaaggccugaaugaau

SEQ ID NO: 2620675 - RNA, 19 nt, Homo sapiens
  misc_RNA (1)...(19): siRNA sense strand
ucaacaaugacaugaguga

SEQ ID NO: 2620676 - RNA, 19 nt, Homo sapiens
  misc_RNA (1)...(19): siRNA sense strand
cgggaaugguuugagcuaa

SEQ ID NO: 2620677 - RNA, 19 nt, Homo sapiens
  misc_RNA (1)...(19): siRNA sense strand
gagaaaaggucaugaggug

SEQ ID NO: 2620678 - RNA, 19 nt, Homo sapiens
  misc_RNA (1)...(19): siRNA sense strand
aggugaagaaaccgaagaa

SEQ ID NO: 2620679 - RNA, 19 nt, Homo sapiens
  misc_RNA (1)...(19): siRNA sense strand
ccgagaugaguaugauaau

SEQ ID NO: 2620680 - RNA, 19 nt, Homo sapiens
  misc_RNA (1)...(19): siRNA sense strand
cucaagaagaagagaguac

SEQ ID NO: 2620681 - RNA, 19 nt, Homo sapiens
  misc_RNA (1)...(19): siRNA sense strand
ccugaaaauguaugaguuu

SEQ ID NO: 2620682 - RNA, 19 nt, Homo sapiens
  misc_RNA (1)...(19): siRNA sense strand
aguaguuguugguggcuca

SEQ ID NO: 2620683 - RNA, 19 nt, Homo sapiens
  misc_RNA (1)...(19): siRNA sense strand
aacaaugacaugagugaga

SEQ ID NO: 2620684 - RNA, 19 nt, Homo sapiens
  misc_RNA (1)...(19): siRNA sense strand
aguucuaccugaagaucau

SEQ ID NO: 2620685 - RNA, 19 nt, Homo sapiens
  misc_RNA (1)...(19): siRNA sense strand
ggagcuggucuuugcagaa

SEQ ID NO: 2620686 - RNA, 19 nt, Homo sapiens
  misc_RNA (1)...(19): siRNA sense strand
aaaucaggucaauuggaua

SEQ ID NO: 2620687 - RNA, 19 nt, Homo sapiens
  misc_RNA (1)...(19): siRNA sense strand
cccgagaugaguaugauaa

SEQ ID NO: 2620688 - RNA, 19 nt, Homo sapiens
  misc_RNA (1)...(19): siRNA sense strand
aagugaaagaggaggugga

SEQ ID NO: 2620689 - RNA, 19 nt, Homo sapiens
  misc_RNA (1)...(19): siRNA sense strand
cugagaaggugaagaaacc

SEQ ID NO: 2620690 - RNA, 19 nt, Homo sapiens
  misc_RNA (1)...(19): siRNA sense strand
ucucagugaaggaguucua

SEQ ID NO: 2620691 - RNA, 19 nt, Homo sapiens
  misc_RNA (1)...(19): siRNA sense strand
cggcagguacauaugaaaa

SEQ ID NO: 2620692 - RNA, 19 nt, Homo sapiens
  misc_RNA (1)...(19): siRNA sense strand
aagcauuagugcaucccaa

SEQ ID NO: 2620693 - RNA, 19 nt, Homo sapiens
  misc_RNA (1)...(19): siRNA sense strand
cugagaaccuuuuggcuau

SEQ ID NO: 2620694 - RNA, 19 nt, Homo sapiens
  misc_RNA (1)...(19): siRNA sense strand
augaauuggucccugagaa

SEQ ID NO: 2620695 - RNA, 19 nt, Homo sapiens
  misc_RNA (1)...(19): siRNA sense strand
cugcuguugacgaggaaga

SEQ ID NO: 2620696 - RNA, 19 nt, Homo sapiens
  misc_RNA (1)...(19): siRNA sense strand
acuuugaggcuuaucuuua

SEQ ID NO: 2620697 - RNA, 19 nt, Homo sapiens
  misc_RNA (1)...(19): siRNA sense strand
agcuguaaggagaggaaca

SEQ ID NO: 2620698 - RNA, 19 nt, Homo sapiens
  misc_RNA (1)...(19): siRNA sense strand
ccaauuccaacguaguaaa

SEQ ID NO: 2620699 - RNA, 19 nt, Homo sapiens
  misc_RNA (1)...(19): siRNA sense strand
ccugagaaggugaagaaac

SEQ ID NO: 2620700 - RNA, 19 nt, Homo sapiens
  misc_RNA (1)...(19): siRNA sense strand
gugaaggaguucuaccuga

SEQ ID NO: 2620701 - RNA, 19 nt, Homo sapiens
  misc_RNA (1)...(19): siRNA sense strand
cagauuggagcaagaacuu

SEQ ID NO: 2620702 - RNA, 19 nt, Homo sapiens
  misc_RNA (1)...(19): siRNA sense strand
uggccagucaagugaaaga

SEQ ID NO: 2620703 - RNA, 19 nt, Homo sapiens
  misc_RNA (1)...(19): siRNA sense strand
ccugagaaccuuuuggcua

SEQ ID NO: 2620704 - RNA, 19 nt, Homo sapiens
  misc_RNA (1)...(19): siRNA sense strand
aggaugaguaugagaggaa

SEQ ID NO: 2620705 - RNA, 19 nt, Homo sapiens
  misc_RNA (1)...(19): siRNA sense strand
ccuccgggucacaggauaa

SEQ ID NO: 2620706 - RNA, 19 nt, Homo sapiens
  misc_RNA (1)...(19): siRNA sense strand
gcacaaucuaguugaacca

SEQ ID NO: 2620707 - RNA, 19 nt, Homo sapiens
  misc_RNA (1)...(19): siRNA sense strand
uagcaaaacucauggcuga

SEQ ID NO: 2620708 - RNA, 19 nt, Homo sapiens
  misc_RNA (1)...(19): siRNA sense strand
ccauugaacgugacgaaca

SEQ ID NO: 2620709 - RNA, 19 nt, Homo sapiens
  misc_RNA (1)...(19): siRNA sense strand
agacacaaccacuugggaa

SEQ ID NO: 2620710 - RNA, 19 nt, Homo sapiens
  misc_RNA (1)...(19): siRNA sense strand
gcaccaugaugcaggcagu

SEQ ID NO: 2620711 - RNA, 19 nt, Homo sapiens
  misc_RNA (1)...(19): siRNA sense strand
ccaucgacauccuggagau

SEQ ID NO: 2620712 - RNA, 19 nt, Homo sapiens
  misc_RNA (1)...(19): siRNA sense strand
agaaaugcccuccggguca

SEQ ID NO: 2620713 - RNA, 19 nt, Homo sapiens
  misc_RNA (1)...(19): siRNA sense strand
agaggaaucagauggguga

SEQ ID NO: 2620714 - RNA, 19 nt, Homo sapiens
  misc_RNA (1)...(19): siRNA sense strand
uagaagaguuauuuggaac

SEQ ID NO: 2620715 - RNA, 19 nt, Homo sapiens
  misc_RNA (1)...(19): siRNA sense strand
ugagcagagccaaggauga

SEQ ID NO: 2620716 - RNA, 19 nt, Homo sapiens
  misc_RNA (1)...(19): siRNA sense strand
ucugacgguagaagaguua

SEQ ID NO: 2620717 - RNA, 19 nt, Homo sapiens
  misc_RNA (1)...(19): siRNA sense strand
gcagugaagaccacgccua

SEQ ID NO: 2620718 - RNA, 19 nt, Homo sapiens
  misc_RNA (1)...(19): siRNA sense strand
gugggagaagacugauaua

SEQ ID NO: 2620719 - RNA, 19 nt, Homo sapiens
  misc_RNA (1)...(19): siRNA sense strand
gguuuuaugacaagaauga

SEQ ID NO: 2620720 - RNA, 19 nt, Homo sapiens
  misc_RNA (1)...(19): siRNA sense strand
ucacacaguccaaugaaaa

SEQ ID NO: 2620721 - RNA, 19 nt, Homo sapiens
  misc_RNA (1)...(19): siRNA sense strand
cugaugugguagaagagga

SEQ ID NO: 2620722 - RNA, 19 nt, Homo sapiens
  misc_RNA (1)...(19): siRNA sense strand
ugacgguagaagaguuauu

SEQ ID NO: 2620723 - RNA, 19 nt, Homo sapiens
  misc_RNA (1)...(19): siRNA sense strand
cagaaagagcccaauucau

SEQ ID NO: 2620724 - RNA, 19 nt, Homo sapiens
  misc_RNA (1)...(19): siRNA sense strand
cuccagaaacucagguuga

SEQ ID NO: 2620725 - RNA, 19 nt, Homo sapiens
  misc_RNA (1)...(19): siRNA sense strand
gcaaagaaauacggauuaa

SEQ ID NO: 2620726 - RNA, 19 nt, Homo sapiens
  misc_RNA (1)...(19): siRNA sense strand
ugaagaggucauaaagaaa

SEQ ID NO: 2620727 - RNA, 19 nt, Homo sapiens
  misc_RNA (1)...(19): siRNA sense strand
aaauagaugcugaaggcaa

SEQ ID NO: 2620728 - RNA, 19 nt, Homo sapiens
  misc_RNA (1)...(19): siRNA sense strand
gggaacuauugaaguacaa

SEQ ID NO: 2620729 - RNA, 19 nt, Homo sapiens
  misc_RNA (1)...(19): siRNA sense strand
caugcuuaaaggagagaaa

SEQ ID NO: 2620730 - RNA, 19 nt, Homo sapiens
  misc_RNA (1)...(19): siRNA sense strand
agugaaugcucaaaagaaa

SEQ ID NO: 2620731 - RNA, 19 nt, Homo sapiens
  misc_RNA (1)...(19): siRNA sense strand
cuggauacuuaaaggccaa

SEQ ID NO: 2620732 - RNA, 19 nt, Homo sapiens
  misc_RNA (1)...(19): siRNA sense strand
acuuaaaggccaaacagua

SEQ ID NO: 2620733 - RNA, 19 nt, Homo sapiens
  misc_RNA (1)...(19): siRNA sense strand
cuuaaaggccaaacaguau

SEQ ID NO: 2620734 - RNA, 19 nt, Homo sapiens
  misc_RNA (1)...(19): siRNA sense strand
cagccaagaauaaaggcaa

SEQ ID NO: 2620735 - RNA, 19 nt, Homo sapiens
  misc_RNA (1)...(19): siRNA sense strand
ucuuaaacuccuuggaaaa

SEQ ID NO: 2620736 - RNA, 19 nt, Homo sapiens
  misc_RNA (1)...(19): siRNA sense strand
ugugaagcuucgagcaaau

SEQ ID NO: 2620737 - RNA, 19 nt, Homo sapiens
  misc_RNA (1)...(19): siRNA sense strand
uugaagaagcaguggcaga

SEQ ID NO: 2620738 - RNA, 19 nt, Homo sapiens
  misc_RNA (1)...(19): siRNA sense strand
gaacuuaucagcaaggcua

SEQ ID NO: 2620739 - RNA, 19 nt, Homo sapiens
  misc_RNA (1)...(19): siRNA sense strand
uugcaaagaaauacggauu

SEQ ID NO: 2620740 - RNA, 19 nt, Homo sapiens
  misc_RNA (1)...(19): siRNA sense strand
cccaagcagccaagaauaa

SEQ ID NO: 2620741 - RNA, 19 nt, Homo sapiens
  misc_RNA (1)...(19): siRNA sense strand
ucaacaacaguuugguaaa

SEQ ID NO: 2620742 - RNA, 19 nt, Homo sapiens
  misc_RNA (1)...(19): siRNA sense strand
aagagaaagccaaagaaaa

SEQ ID NO: 2620743 - RNA, 19 nt, Homo sapiens
  misc_RNA (1)...(19): siRNA sense strand
cugaugaagauaaagacaa

SEQ ID NO: 2620744 - RNA, 19 nt, Homo sapiens
  misc_RNA (1)...(19): siRNA sense strand
agccaagaauaaaggcaau

SEQ ID NO: 2620745 - RNA, 19 nt, Homo sapiens
  misc_RNA (1)...(19): siRNA sense strand
aaucauaagugaaugcuca

SEQ ID NO: 2620746 - RNA, 19 nt, Homo sapiens
  misc_RNA (1)...(19): siRNA sense strand
gugcaaaagcccaugagaa

SEQ ID NO: 2620747 - RNA, 19 nt, Homo sapiens
  misc_RNA (1)...(19): siRNA sense strand
caaaagaaauagaugcuga

SEQ ID NO: 2620748 - RNA, 19 nt, Homo sapiens
  misc_RNA (1)...(19): siRNA sense strand
uggaaaagagaaagccaaa

SEQ ID NO: 2620749 - RNA, 19 nt, Homo sapiens
  misc_RNA (1)...(19): siRNA sense strand
ccaaauaugugaaagcucu

SEQ ID NO: 2620750 - RNA, 19 nt, Homo sapiens
  misc_RNA (1)...(19): siRNA sense strand
cauuguaccgccaggcaua

SEQ ID NO: 2620751 - RNA, 19 nt, Homo sapiens
  misc_RNA (1)...(19): siRNA sense strand
aagaggaaacauggagaaa

SEQ ID NO: 2620752 - RNA, 19 nt, Homo sapiens
  misc_RNA (1)...(19): siRNA sense strand
cuagacaauaagaaggaau

SEQ ID NO: 2620753 - RNA, 19 nt, Homo sapiens
  misc_RNA (1)...(19): siRNA sense strand
ccaugagaagcuagacaau

SEQ ID NO: 2620754 - RNA, 19 nt, Homo sapiens
  misc_RNA (1)...(19): siRNA sense strand
ccaaaucggaaauggagau

SEQ ID NO: 2620755 - RNA, 19 nt, Homo sapiens
  misc_RNA (1)...(19): siRNA sense strand
cggaaauggagauggccca

SEQ ID NO: 2620756 - RNA, 19 nt, Homo sapiens
  misc_RNA (1)...(19): siRNA sense strand
ccagauaaugcuacaacau

SEQ ID NO: 2620757 - RNA, 19 nt, Homo sapiens
  misc_RNA (1)...(19): siRNA sense strand
caagcuauucagugcuaua

SEQ ID NO: 2620758 - RNA, 19 nt, Homo sapiens
  misc_RNA (1)...(19): siRNA sense strand
aaagaggaaacauggagaa

SEQ ID NO: 2620759 - RNA, 19 nt, Homo sapiens
  misc_RNA (1)...(19): siRNA sense strand
ggaaacauggagaaagcca

SEQ ID NO: 2620760 - RNA, 19 nt, Homo sapiens
  misc_RNA (1)...(19): siRNA sense strand
caacaaagcuauuaaccug

SEQ ID NO: 2620761 - RNA, 19 nt, Homo sapiens
  misc_RNA (1)...(19): siRNA sense strand
auauaagaaucgugaaccu

SEQ ID NO: 2620762 - RNA, 19 nt, Homo sapiens
  misc_RNA (1)...(19): siRNA sense strand
ugcaaagaaauacggauua

SEQ ID NO: 2620763 - RNA, 19 nt, Homo sapiens
  misc_RNA (1)...(19): siRNA sense strand
cacuauacgcccaggcauu

SEQ ID NO: 2620764 - RNA, 19 nt, Homo sapiens
  misc_RNA (1)...(19): siRNA sense strand
uucuuaaacuccuuggaaa

SEQ ID NO: 2620765 - RNA, 19 nt, Homo sapiens
  misc_RNA (1)...(19): siRNA sense strand
guacaaaagcuguugaacu

SEQ ID NO: 2620766 - RNA, 19 nt, Homo sapiens
  misc_RNA (1)...(19): siRNA sense strand
caaagaggaaacauggaga

SEQ ID NO: 2620767 - RNA, 19 nt, Homo sapiens
  misc_RNA (1)...(19): siRNA sense strand
aggaauguuuagaagaugu

SEQ ID NO: 2620768 - RNA, 19 nt, Homo sapiens
  misc_RNA (1)...(19): siRNA sense strand
caguauauggaagaagaaa

SEQ ID NO: 2620769 - RNA, 19 nt, Homo sapiens
  misc_RNA (1)...(19): siRNA sense strand
gcaaaugcucucaucaaaa

SEQ ID NO: 2620770 - RNA, 19 nt, Homo sapiens
  misc_RNA (1)...(19): siRNA sense strand
uugguaaagcugaugaaau

SEQ ID NO: 2620771 - RNA, 19 nt, Homo sapiens
  misc_RNA (1)...(19): siRNA sense strand
gccaagaauaaaggcaaua

SEQ ID NO: 2620772 - RNA, 19 nt, Homo sapiens
  misc_RNA (1)...(19): siRNA sense strand
agaaggaauguuuagaaga

SEQ ID NO: 2620773 - RNA, 19 nt, Homo sapiens
  misc_RNA (1)...(19): siRNA sense strand
aaugugaagcuucgagcaa

SEQ ID NO: 2620774 - RNA, 19 nt, Homo sapiens
  misc_RNA (1)...(19): siRNA sense strand
aaagaaauuuccaaggugu

SEQ ID NO: 2620775 - RNA, 19 nt, Homo sapiens
  misc_RNA (1)...(19): siRNA sense strand
aggcauuaacagaucaaca

SEQ ID NO: 2620776 - RNA, 19 nt, Homo sapiens
  misc_RNA (1)...(19): siRNA sense strand
aggagagaaaucugaugaa

SEQ ID NO: 2620777 - RNA, 19 nt, Homo sapiens
  misc_RNA (1)...(19): siRNA sense strand
cagccaaaccagauuuaga

SEQ ID NO: 2620778 - RNA, 19 nt, Homo sapiens
  misc_RNA (1)...(19): siRNA sense strand
gggaaagggcagagaccag

SEQ ID NO: 2620779 - RNA, 19 nt, Homo sapiens
  misc_RNA (1)...(19): siRNA sense strand
cugaagagccagaggaagg

SEQ ID NO: 2620780 - RNA, 19 nt, Homo sapiens
  misc_RNA (1)...(19): siRNA sense strand
cgauugacuucuacgacga

SEQ ID NO: 2620781 - RNA, 19 nt, Homo sapiens
  misc_RNA (1)...(19): siRNA sense strand
gugggaggucggcaggaaa

SEQ ID NO: 2620782 - RNA, 19 nt, Homo sapiens
  misc_RNA (1)...(19): siRNA sense strand
agcugaagagccagaggaa

SEQ ID NO: 2620783 - RNA, 19 nt, Homo sapiens
  misc_RNA (1)...(19): siRNA sense strand
acagagaggcagaggcaua

SEQ ID NO: 2620784 - RNA, 19 nt, Homo sapiens
  misc_RNA (1)...(19): siRNA sense strand
guuauuacacaaagggaaa

SEQ ID NO: 2620785 - RNA, 19 nt, Homo sapiens
  misc_RNA (1)...(19): siRNA sense strand
agaauaugauggagagcau

SEQ ID NO: 2620786 - RNA, 19 nt, Homo sapiens
  misc_RNA (1)...(19): siRNA sense strand
gcagcagugaugagggaaa

SEQ ID NO: 2620787 - RNA, 19 nt, Homo sapiens
  misc_RNA (1)...(19): siRNA sense strand
gagcauauuugauggcuuu

SEQ ID NO: 2620788 - RNA, 19 nt, Homo sapiens
  misc_RNA (1)...(19): siRNA sense strand
gugaagaauaugauggaga

SEQ ID NO: 2620789 - RNA, 19 nt, Homo sapiens
  misc_RNA (1)...(19): siRNA sense strand
auacauggcacuagaagaa

SEQ ID NO: 2620790 - RNA, 19 nt, Homo sapiens
  misc_RNA (1)...(19): siRNA sense strand
ggaaagacagacagaacau

SEQ ID NO: 2620791 - RNA, 19 nt, Homo sapiens
  misc_RNA (1)...(19): siRNA sense strand
aggcaugaggcgaaacaaa

SEQ ID NO: 2620792 - RNA, 19 nt, Homo sapiens
  misc_RNA (1)...(19): siRNA sense strand
caucagaauagccaggaaa

SEQ ID NO: 2620793 - RNA, 19 nt, Homo sapiens
  misc_RNA (1)...(19): siRNA sense strand
caaaccagcaggaggguau

SEQ ID NO: 2620794 - RNA, 19 nt, Homo sapiens
  misc_RNA (1)...(19): siRNA sense strand
aaauaauacuagccaggaa

SEQ ID NO: 2620795 - RNA, 19 nt, Homo sapiens
  misc_RNA (1)...(19): siRNA sense strand
guucaaagauggagagagg

SEQ ID NO: 2620796 - RNA, 19 nt, Homo sapiens
  misc_RNA (1)...(19): siRNA sense strand
caggaaaagaugagaauga

SEQ ID NO: 2620797 - RNA, 19 nt, Homo sapiens
  misc_RNA (1)...(19): siRNA sense strand
gggaaaugaaccugccaau

SEQ ID NO: 2620798 - RNA, 19 nt, Homo sapiens
  misc_RNA (1)...(19): siRNA sense strand
caaacauggagaagauaau

SEQ ID NO: 2620799 - RNA, 19 nt, Homo sapiens
  misc_RNA (1)...(19): siRNA sense strand
cuuucauguuggaugguaa

SEQ ID NO: 2620800 - RNA, 19 nt, Homo sapiens
  misc_RNA (1)...(19): siRNA sense strand
agaaugaaccugagcuaca

SEQ ID NO: 2620801 - RNA, 19 nt, Homo sapiens
  misc_RNA (1)...(19): siRNA sense strand
ugagaaugaaccugagcua

SEQ ID NO: 2620802 - RNA, 19 nt, Homo sapiens
  misc_RNA (1)...(19): siRNA sense strand
gaaugacaguauugcagaa

SEQ ID NO: 2620803 - RNA, 19 nt, Homo sapiens
  misc_RNA (1)...(19): siRNA sense strand
gaacagguagugaggccaa

SEQ ID NO: 2620804 - RNA, 19 nt, Homo sapiens
  misc_RNA (1)...(19): siRNA sense strand
ccaccagcuaguaaggaaa

SEQ ID NO: 2620805 - RNA, 19 nt, Homo sapiens
  misc_RNA (1)...(19): siRNA sense strand
aggcaggagauauggaaga

SEQ ID NO: 2620806 - RNA, 19 nt, Homo sapiens
  misc_RNA (1)...(19): siRNA sense strand
agugaggaaggcagggaua

SEQ ID NO: 2620807 - RNA, 19 nt, Homo sapiens
  misc_RNA (1)...(19): siRNA sense strand
uggaagaagacaugcuuau

SEQ ID NO: 2620808 - RNA, 19 nt, Homo sapiens
  misc_RNA (1)...(19): siRNA sense strand
cauccuuggaagagggaga

SEQ ID NO: 2620809 - RNA, 19 nt, Homo sapiens
  misc_RNA (1)...(19): siRNA sense strand
cuuggaagagggagaaauu

SEQ ID NO: 2620810 - RNA, 19 nt, Homo sapiens
  misc_RNA (1)...(19): siRNA sense strand
ccaggaaucauuaggcaau

SEQ ID NO: 2620811 - RNA, 19 nt, Homo sapiens
  misc_RNA (1)...(19): siRNA sense strand
gguuaguacgaaacaacaa

SEQ ID NO: 2620812 - RNA, 19 nt, Homo sapiens
  misc_RNA (1)...(19): siRNA sense strand
acuaugaaguguuggaacu

SEQ ID NO: 2620813 - RNA, 19 nt, Homo sapiens
  misc_RNA (1)...(19): siRNA sense strand
uggagaagauaaugaccau

SEQ ID NO: 2620814 - RNA, 19 nt, Homo sapiens
  misc_RNA (1)...(19): siRNA sense strand
caggaaauucagaggucuu

SEQ ID NO: 2620815 - RNA, 19 nt, Homo sapiens
  misc_RNA (1)...(19): siRNA sense strand
aauaauacuagccaggaaa

SEQ ID NO: 2620816 - RNA, 19 nt, Homo sapiens
  misc_RNA (1)...(19): siRNA sense strand
aguuauuacacaaagggaa

SEQ ID NO: 2620817 - RNA, 19 nt, Homo sapiens
  misc_RNA (1)...(19): siRNA sense strand
uagcaguggcccugaagaa

SEQ ID NO: 2620818 - RNA, 19 nt, Homo sapiens
  misc_RNA (1)...(19): siRNA sense strand
gagauauggaagaagacau

SEQ ID NO: 2620819 - RNA, 19 nt, Homo sapiens
  misc_RNA (1)...(19): siRNA sense strand
caguauuugaguuggaaaa

SEQ ID NO: 2620820 - RNA, 19 nt, Homo sapiens
  misc_RNA (1)...(19): siRNA sense strand
ugacaguauugcagaagca

SEQ ID NO: 2620821 - RNA, 19 nt, Homo sapiens
  misc_RNA (1)...(19): siRNA sense strand
cagacaugaaagaagcuua

SEQ ID NO: 2620822 - RNA, 19 nt, Homo sapiens
  misc_RNA (1)...(19): siRNA sense strand
aaccaaaugacaucagaaa

SEQ ID NO: 2620823 - RNA, 19 nt, Homo sapiens
  misc_RNA (1)...(19): siRNA sense strand
agaugaagauaguucugaa

SEQ ID NO: 2620824 - RNA, 19 nt, Homo sapiens
  misc_RNA (1)...(19): siRNA sense strand
gauguggauuggagcauau

SEQ ID NO: 2620825 - RNA, 19 nt, Homo sapiens
  misc_RNA (1)...(19): siRNA sense strand
aggaguugcugaagcuauu

SEQ ID NO: 2620826 - RNA, 19 nt, Homo sapiens
  misc_RNA (1)...(19): siRNA sense strand
cuacaaaagucgggaacau

SEQ ID NO: 2620827 - RNA, 19 nt, Homo sapiens
  misc_RNA (1)...(19): siRNA sense strand
aauaccaaugauagggaaa

SEQ ID NO: 2620828 - RNA, 19 nt, Homo sapiens
  misc_RNA (1)...(19): siRNA sense strand
ucucaagaugaaaugguua

SEQ ID NO: 2620829 - RNA, 19 nt, Homo sapiens
  misc_RNA (1)...(19): siRNA sense strand
caggaaagacagacagaac

SEQ ID NO: 2620830 - RNA, 19 nt, Homo sapiens
  misc_RNA (1)...(19): siRNA sense strand
ggaaaagaaccauggaagu

SEQ ID NO: 2620831 - RNA, 19 nt, Homo sapiens
  misc_RNA (1)...(19): siRNA sense strand
uuaauaggcaugaggcgaa

SEQ ID NO: 2620832 - RNA, 19 nt, Homo sapiens
  misc_RNA (1)...(19): siRNA sense strand
cucaagaguuauuacacaa

SEQ ID NO: 2620833 - RNA, 19 nt, Homo sapiens
  misc_RNA (1)...(19): siRNA sense strand
cagcagugaugagggaaau

SEQ ID NO: 2620834 - RNA, 19 nt, Homo sapiens
  misc_RNA (1)...(19): siRNA sense strand
ggagcauauuugauggcuu

SEQ ID NO: 2620835 - RNA, 19 nt, Homo sapiens
  misc_RNA (1)...(19): siRNA sense strand
cuuaugauccagauggcaa

SEQ ID NO: 2620836 - RNA, 19 nt, Homo sapiens
  misc_RNA (1)...(19): siRNA sense strand
aaguaagagaugaguuuga

SEQ ID NO: 2620837 - RNA, 19 nt, Homo sapiens
  misc_RNA (1)...(19): siRNA sense strand
uuaccaacucuaugacaaa

SEQ ID NO: 2620838 - RNA, 19 nt, Homo sapiens
  misc_RNA (1)...(19): siRNA sense strand
cugcagaagucguggaagg

SEQ ID NO: 2620839 - RNA, 19 nt, Homo sapiens
  misc_RNA (1)...(19): siRNA sense strand
aaacagagaggcagaggca

SEQ ID NO: 2620840 - RNA, 19 nt, Homo sapiens
  misc_RNA (1)...(19): siRNA sense strand
guucaagccagguggacca

SEQ ID NO: 2620841 - RNA, 19 nt, Homo sapiens
  misc_RNA (1)...(19): siRNA sense strand
ccaucagaauagccaggaa

SEQ ID NO: 2620842 - RNA, 19 nt, Homo sapiens
  misc_RNA (1)...(19): siRNA sense strand
cuuaggaagcaguacaaau

SEQ ID NO: 2620843 - RNA, 19 nt, Homo sapiens
  misc_RNA (1)...(19): siRNA sense strand
ggagaaauuccuugguuac

SEQ ID NO: 2620844 - RNA, 19 nt, Homo sapiens
  misc_RNA (1)...(19): siRNA sense strand
gugaagacuuagaugugga

SEQ ID NO: 2620845 - RNA, 19 nt, Homo sapiens
  misc_RNA (1)...(19): siRNA sense strand
acaaagggaaacagaaaau

SEQ ID NO: 2620846 - RNA, 19 nt, Homo sapiens
  misc_RNA (1)...(19): siRNA sense strand
gaacagacauccuuggaag

SEQ ID NO: 2620847 - RNA, 19 nt, Homo sapiens
  misc_RNA (1)...(19): siRNA sense strand
aggaaagcauugauggucu

SEQ ID NO: 2620848 - RNA, 19 nt, Homo sapiens
  misc_RNA (1)...(19): siRNA sense strand
ccagguggaccaagaaaca

SEQ ID NO: 2620849 - RNA, 19 nt, Homo sapiens
  misc_RNA (1)...(19): siRNA sense strand
ggcaagaaguggauaacac

SEQ ID NO: 2620850 - RNA, 19 nt, Homo sapiens
  misc_RNA (1)...(19): siRNA sense strand
gaacagagcucaugagguc

SEQ ID NO: 2620851 - RNA, 19 nt, Homo sapiens
  misc_RNA (1)...(19): siRNA sense strand
aaucaagauacgaguggaa

SEQ ID NO: 2620852 - RNA, 19 nt, Homo sapiens
  misc_RNA (1)...(19): siRNA sense strand
ggaacuggaucucaggcaa

SEQ ID NO: 2620853 - RNA, 19 nt, Homo sapiens
  misc_RNA (1)...(19): siRNA sense strand
ggacauggcccuaaccuga

SEQ ID NO: 2620854 - RNA, 19 nt, Homo sapiens
  misc_RNA (1)...(19): siRNA sense strand
gagucugacacguggguga

SEQ ID NO: 2620855 - RNA, 19 nt, Homo sapiens
  misc_RNA (1)...(19): siRNA sense strand
gggaaauacuacaggccag

SEQ ID NO: 2620856 - RNA, 19 nt, Homo sapiens
  misc_RNA (1)...(19): siRNA sense strand
ggagagagagcaagcgcca

SEQ ID NO: 2620857 - RNA, 19 nt, Homo sapiens
  misc_RNA (1)...(19): siRNA sense strand
gaagagagcuggagacagg

SEQ ID NO: 2620858 - RNA, 19 nt, Homo sapiens
  misc_RNA (1)...(19): siRNA sense strand
ggaaaaugggaguugguga

SEQ ID NO: 2620859 - RNA, 19 nt, Homo sapiens
  misc_RNA (1)...(19): siRNA sense strand
ggcccuaaccugaggcuga

SEQ ID NO: 2620860 - RNA, 19 nt, Homo sapiens
  misc_RNA (1)...(19): siRNA sense strand
gugaagaccagaaggugga

SEQ ID NO: 2620861 - RNA, 19 nt, Homo sapiens
  misc_RNA (1)...(19): siRNA sense strand
ccgagagcuaccaggagua

SEQ ID NO: 2620862 - RNA, 19 nt, Homo sapiens
  misc_RNA (1)...(19): siRNA sense strand
aguucuggagagagagcaa

SEQ ID NO: 2620863 - RNA, 19 nt, Homo sapiens
  misc_RNA (1)...(19): siRNA sense strand
cagcagaugcagcggggaa

SEQ ID NO: 2620864 - RNA, 19 nt, Homo sapiens
  misc_RNA (1)...(19): siRNA sense strand
agacgcagcucuacgccaa

SEQ ID NO: 2620865 - RNA, 19 nt, Homo sapiens
  misc_RNA (1)...(19): siRNA sense strand
cuccacuccugaugggaaa

SEQ ID NO: 2620866 - RNA, 19 nt, Homo sapiens
  misc_RNA (1)...(19): siRNA sense strand
uggaagaacucaaacugga

SEQ ID NO: 2620867 - RNA, 19 nt, Homo sapiens
  misc_RNA (1)...(19): siRNA sense strand
ccacaaacggcaaggaguc

SEQ ID NO: 2620868 - RNA, 19 nt, Homo sapiens
  misc_RNA (1)...(19): siRNA sense strand
cugaagagagcuggagaca

SEQ ID NO: 2620869 - RNA, 19 nt, Homo sapiens
  misc_RNA (1)...(19): siRNA sense strand
caaaaugggaagcuggcaa

SEQ ID NO: 2620870 - RNA, 19 nt, Homo sapiens
  misc_RNA (1)...(19): siRNA sense strand
gccuggaagagcugaaaga

SEQ ID NO: 2620871 - RNA, 19 nt, Homo sapiens
  misc_RNA (1)...(19): siRNA sense strand
aagagcugaaagaggcaaa

SEQ ID NO: 2620872 - RNA, 19 nt, Homo sapiens
  misc_RNA (1)...(19): siRNA sense strand
cggugaagacccugaccca

SEQ ID NO: 2620873 - RNA, 19 nt, Homo sapiens
  misc_RNA (1)...(19): siRNA sense strand
cguaggaaacugcgggcua

SEQ ID NO: 2620874 - RNA, 19 nt, Homo sapiens
  misc_RNA (1)...(19): siRNA sense strand
uggauuaccuggaugacca

SEQ ID NO: 2620875 - RNA, 19 nt, Homo sapiens
  misc_RNA (1)...(19): siRNA sense strand
cguaggaaacugcgggcua

SEQ ID NO: 2620876 - RNA, 19 nt, Homo sapiens
  misc_RNA (1)...(19): siRNA sense strand
ggcuggaucuagacggcaa

SEQ ID NO: 2620877 - RNA, 19 nt, Homo sapiens
  misc_RNA (1)...(19): siRNA sense strand
uggauuaccuggaugacca

SEQ ID NO: 2620878 - RNA, 19 nt, Homo sapiens
  misc_RNA (1)...(19): siRNA sense strand
ggauccgcuuucugggcaa

SEQ ID NO: 2620879 - RNA, 19 nt, Homo sapiens
  misc_RNA (1)...(19): siRNA sense strand
ugaagaagacaguggacaa

SEQ ID NO: 2620880 - RNA, 19 nt, Homo sapiens
  misc_RNA (1)...(19): siRNA sense strand
ggacaaagggaaacggguu

SEQ ID NO: 2620881 - RNA, 19 nt, Homo sapiens
  misc_RNA (1)...(19): siRNA sense strand
gauaaaugaaagggacaaa

SEQ ID NO: 2620882 - RNA, 19 nt, Homo sapiens
  misc_RNA (1)...(19): siRNA sense strand
gugcaagccgacaggacaa

SEQ ID NO: 2620883 - RNA, 19 nt, Homo sapiens
  misc_RNA (1)...(19): siRNA sense strand
gggacaaagacgggaauuu

SEQ ID NO: 2620884 - RNA, 19 nt, Homo sapiens
  misc_RNA (1)...(19): siRNA sense strand
acaauuggccagaucgaaa

SEQ ID NO: 2620885 - RNA, 19 nt, Homo sapiens
  misc_RNA (1)...(19): siRNA sense strand
uggcugaugugcaggagaa

SEQ ID NO: 2620886 - RNA, 19 nt, Homo sapiens
  misc_RNA (1)...(19): siRNA sense strand
uuuaguaagcagaacgaaa

SEQ ID NO: 2620887 - RNA, 19 nt, Homo sapiens
  misc_RNA (1)...(19): siRNA sense strand
gacaguggacaaagggaaa

SEQ ID NO: 2620888 - RNA, 19 nt, Homo sapiens
  misc_RNA (1)...(19): siRNA sense strand
agacaguggacaaagggaa

SEQ ID NO: 2620889 - RNA, 19 nt, Homo sapiens
  misc_RNA (1)...(19): siRNA sense strand
cugauaaaugaaagggaca

SEQ ID NO: 2620890 - RNA, 19 nt, Homo sapiens
  misc_RNA (1)...(19): siRNA sense strand
ugagaaaugcuauggugaa

SEQ ID NO: 2620891 - RNA, 19 nt, Homo sapiens
  misc_RNA (1)...(19): siRNA sense strand
cagacuuacaguaugaaua

SEQ ID NO: 2620892 - RNA, 19 nt, Homo sapiens
  misc_RNA (1)...(19): siRNA sense strand
ggucugaaucucuaaacaa

SEQ ID NO: 2620893 - RNA, 19 nt, Homo sapiens
  misc_RNA (1)...(19): siRNA sense strand
ccuucaacauucugaguga

SEQ ID NO: 2620894 - RNA, 19 nt, Homo sapiens
  misc_RNA (1)...(19): siRNA sense strand
gcaaagaaccucugcucca

SEQ ID NO: 2620895 - RNA, 19 nt, Homo sapiens
  misc_RNA (1)...(19): siRNA sense strand
ccaaauacaaguuagggau

SEQ ID NO: 2620896 - RNA, 19 nt, Homo sapiens
  misc_RNA (1)...(19): siRNA sense strand
gucuaaaggcccagaagau

SEQ ID NO: 2620897 - RNA, 19 nt, Homo sapiens
  misc_RNA (1)...(19): siRNA sense strand
guguagagccaacaaggaa

SEQ ID NO: 2620898 - RNA, 19 nt, Homo sapiens
  misc_RNA (1)...(19): siRNA sense strand
cagacaaucuaaaguggau

SEQ ID NO: 2620899 - RNA, 19 nt, Homo sapiens
  misc_RNA (1)...(19): siRNA sense strand
augcuauggugaaucgaaa

SEQ ID NO: 2620900 - RNA, 19 nt, Homo sapiens
  misc_RNA (1)...(19): siRNA sense strand
ccuuaagugugaacgucua

SEQ ID NO: 2620901 - RNA, 19 nt, Homo sapiens
  misc_RNA (1)...(19): siRNA sense strand
cgagaugacguguugagaa

SEQ ID NO: 2620902 - RNA, 19 nt, Homo sapiens
  misc_RNA (1)...(19): siRNA sense strand
cagaagaagcacaccugaa

SEQ ID NO: 2620903 - RNA, 19 nt, Homo sapiens
  misc_RNA (1)...(19): siRNA sense strand
cagcaaaucccaagcagca

SEQ ID NO: 2620904 - RNA, 19 nt, Homo sapiens
  misc_RNA (1)...(19): siRNA sense strand
gugauaaagaauugaucca

SEQ ID NO: 2620905 - RNA, 19 nt, Homo sapiens
  misc_RNA (1)...(19): siRNA sense strand
gaggagaaugcaagggagu

SEQ ID NO: 2620906 - RNA, 19 nt, Homo sapiens
  misc_RNA (1)...(19): siRNA sense strand
acaaagagcacuucaggga

SEQ ID NO: 2620907 - RNA, 19 nt, Homo sapiens
  misc_RNA (1)...(19): siRNA sense strand
auacagacaucaaggguac

SEQ ID NO: 2620908 - RNA, 19 nt, Homo sapiens
  misc_RNA (1)...(19): siRNA sense strand
gugaugaacaaauugcuaa

SEQ ID NO: 2620909 - RNA, 19 nt, Homo sapiens
  misc_RNA (1)...(19): siRNA sense strand
cuaaaggcccagaagauca

SEQ ID NO: 2620910 - RNA, 19 nt, Homo sapiens
  misc_RNA (1)...(19): siRNA sense strand
cagaugucccagugaaaga

SEQ ID NO: 2620911 - RNA, 19 nt, Homo sapiens
  misc_RNA (1)...(19): siRNA sense strand
ugauaaaugaaagggacaa

SEQ ID NO: 2620912 - RNA, 19 nt, Homo sapiens
  misc_RNA (1)...(19): siRNA sense strand
ccaacgaacauguacaaca

SEQ ID NO: 2620913 - RNA, 19 nt, Homo sapiens
  misc_RNA (1)...(19): siRNA sense strand
ggauuaaaugggaaccaga

SEQ ID NO: 2620914 - RNA, 19 nt, Homo sapiens
  misc_RNA (1)...(19): siRNA sense strand
augcagacuuacaguauga

SEQ ID NO: 2620915 - RNA, 19 nt, Homo sapiens
  misc_RNA (1)...(19): siRNA sense strand
uguagagccaacaaggaaa

SEQ ID NO: 2620916 - RNA, 19 nt, Homo sapiens
  misc_RNA (1)...(19): siRNA sense strand
cugacuaucgcgaagcaaa

SEQ ID NO: 2620917 - RNA, 19 nt, Homo sapiens
  misc_RNA (1)...(19): siRNA sense strand
uggauauagcucugaauga

SEQ ID NO: 2620918 - RNA, 19 nt, Homo sapiens
  misc_RNA (1)...(19): siRNA sense strand
cacagaugucccagugaaa

SEQ ID NO: 2620919 - RNA, 19 nt, Homo sapiens
  misc_RNA (1)...(19): siRNA sense strand
aagagauguuucacaagaa

SEQ ID NO: 2620920 - RNA, 19 nt, Homo sapiens
  misc_RNA (1)...(19): siRNA sense strand
cgaacauguacaacaaaga

SEQ ID NO: 2620921 - RNA, 19 nt, Homo sapiens
  misc_RNA (1)...(19): siRNA sense strand
caggagaaugucauggaau

SEQ ID NO: 2620922 - RNA, 19 nt, Homo sapiens
  misc_RNA (1)...(19): siRNA sense strand
ucucugagguggaguggga

SEQ ID NO: 2620923 - RNA, 19 nt, Homo sapiens
  misc_RNA (1)...(19): siRNA sense strand
ucgaagaaggccugcauga

SEQ ID NO: 2620924 - RNA, 19 nt, Homo sapiens
  misc_RNA (1)...(19): siRNA sense strand
auaauuugccugugaacau

SEQ ID NO: 2620925 - RNA, 19 nt, Homo sapiens
  misc_RNA (1)...(19): siRNA sense strand
ccugugaacaucagucuaa

SEQ ID NO: 2620926 - RNA, 19 nt, Homo sapiens
  misc_RNA (1)...(19): siRNA sense strand
ucagggagcaucuggacaa

SEQ ID NO: 2620927 - RNA, 19 nt, Homo sapiens
  misc_RNA (1)...(19): siRNA sense strand
gaaaccagaucgaagggca

SEQ ID NO: 2620928 - RNA, 19 nt, Homo sapiens
  misc_RNA (1)...(19): siRNA sense strand
aagaauugauccaagaagu

SEQ ID NO: 2620929 - RNA, 19 nt, Homo sapiens
  misc_RNA (1)...(19): siRNA sense strand
gaacgaaaccagaucgaag

SEQ ID NO: 2620930 - RNA, 19 nt, Homo sapiens
  misc_RNA (1)...(19): siRNA sense strand
ccauggaggugaagaagac

SEQ ID NO: 2620931 - RNA, 19 nt, Homo sapiens
  misc_RNA (1)...(19): siRNA sense strand
uagauaacuuugaccguga

SEQ ID NO: 2620932 - RNA, 19 nt, Homo sapiens
  misc_RNA (1)...(19): siRNA sense strand
ggaauguaaccaucgaaga

SEQ ID NO: 2620933 - RNA, 19 nt, Homo sapiens
  misc_RNA (1)...(19): siRNA sense strand
ugcuguacgaagaaggaaa

SEQ ID NO: 2620934 - RNA, 19 nt, Homo sapiens
  misc_RNA (1)...(19): siRNA sense strand
gcgaaggaaaccuaacuau

SEQ ID NO: 2620935 - RNA, 19 nt, Homo sapiens
  misc_RNA (1)...(19): siRNA sense strand
ccucaaugccugggagaau

SEQ ID NO: 2620936 - RNA, 19 nt, Homo sapiens
  misc_RNA (1)...(19): siRNA sense strand
ccgcgaagacauugaggau

SEQ ID NO: 2620937 - RNA, 19 nt, Homo sapiens
  misc_RNA (1)...(19): siRNA sense strand
cuugaaacuuggagagauc

SEQ ID NO: 2620938 - RNA, 19 nt, Homo sapiens
  misc_RNA (1)...(19): siRNA sense strand
ucaaagaggugcugacgga

SEQ ID NO: 2620939 - RNA, 19 nt, Homo sapiens
  misc_RNA (1)...(19): siRNA sense strand
aggcauugcuggacaucau

SEQ ID NO: 2620940 - RNA, 19 nt, Homo sapiens
  misc_RNA (1)...(19): siRNA sense strand
cuaaugaggacgaugccaa

SEQ ID NO: 2620941 - RNA, 19 nt, Homo sapiens
  misc_RNA (1)...(19): siRNA sense strand
ugacgauggugaagcgcau

SEQ ID NO: 2620942 - RNA, 19 nt, Homo sapiens
  misc_RNA (1)...(19): siRNA sense strand
guacaaacuuccugcucca

SEQ ID NO: 2620943 - RNA, 19 nt, Homo sapiens
  misc_RNA (1)...(19): siRNA sense strand
cgugagaagucgcugcaga

SEQ ID NO: 2620944 - RNA, 19 nt, Homo sapiens
  misc_RNA (1)...(19): siRNA sense strand
ggaaggagcgcuggaguga

SEQ ID NO: 2620945 - RNA, 19 nt, Homo sapiens
  misc_RNA (1)...(19): siRNA sense strand
gagaagggcuggguggaca

SEQ ID NO: 2620946 - RNA, 19 nt, Homo sapiens
  misc_RNA (1)...(19): siRNA sense strand
ugauuaaggagcugcugaa

SEQ ID NO: 2620947 - RNA, 19 nt, Homo sapiens
  misc_RNA (1)...(19): siRNA sense strand
ccaaggugguucuggccau

SEQ ID NO: 2620948 - RNA, 19 nt, Homo sapiens
  misc_RNA (1)...(19): siRNA sense strand
gugagaagucgcugcagau

SEQ ID NO: 2620949 - RNA, 19 nt, Homo sapiens
  misc_RNA (1)...(19): siRNA sense strand
acucgauccuggagcgcau

SEQ ID NO: 2620950 - RNA, 19 nt, Homo sapiens
  misc_RNA (1)...(19): siRNA sense strand
cuucgaaguugaugcgacu

SEQ ID NO: 2620951 - RNA, 19 nt, Homo sapiens
  misc_RNA (1)...(19): siRNA sense strand
gucaacaaccuuauggcua

SEQ ID NO: 2620952 - RNA, 19 nt, Homo sapiens
  misc_RNA (1)...(19): siRNA sense strand
augcggagcagaugcacaa

SEQ ID NO: 2620953 - RNA, 19 nt, Homo sapiens
  misc_RNA (1)...(19): siRNA sense strand
gagaaaacccucagcagca

SEQ ID NO: 2620954 - RNA, 19 nt, Homo sapiens
  misc_RNA (1)...(19): siRNA sense strand
cggaggagcucaaguggac

SEQ ID NO: 2620955 - RNA, 19 nt, Homo sapiens
  misc_RNA (1)...(19): siRNA sense strand
ccuucagcgccuggagaaa

SEQ ID NO: 2620956 - RNA, 19 nt, Homo sapiens
  misc_RNA (1)...(19): siRNA sense strand
agugacuaccaaugggcaa

SEQ ID NO: 2620957 - RNA, 19 nt, Homo sapiens
  misc_RNA (1)...(19): siRNA sense strand
agacagccacgcagaucaa

SEQ ID NO: 2620958 - RNA, 19 nt, Homo sapiens
  misc_RNA (1)...(19): siRNA sense strand
gguucauggaggagugugu

SEQ ID NO: 2620959 - RNA, 19 nt, Homo sapiens
  misc_RNA (1)...(19): siRNA sense strand
ggacaaggacagaguggga

SEQ ID NO: 2620960 - RNA, 19 nt, Homo sapiens
  misc_RNA (1)...(19): siRNA sense strand
agggaaaugucuaccacaa

SEQ ID NO: 2620961 - RNA, 19 nt, Homo sapiens
  misc_RNA (1)...(19): siRNA sense strand
cuacuauggacaagaaaca

SEQ ID NO: 2620962 - RNA, 19 nt, Homo sapiens
  misc_RNA (1)...(19): siRNA sense strand
ccaggaaggaggaguacau

SEQ ID NO: 2620963 - RNA, 19 nt, Homo sapiens
  misc_RNA (1)...(19): siRNA sense strand
cagcauugccucagcccaa

SEQ ID NO: 2620964 - RNA, 19 nt, Homo sapiens
  misc_RNA (1)...(19): siRNA sense strand
gggcuggccaucaggaaga

SEQ ID NO: 2620965 - RNA, 19 nt, Homo sapiens
  misc_RNA (1)...(19): siRNA sense strand
ccugaguauaaaaggaaua

SEQ ID NO: 2620966 - RNA, 19 nt, Homo sapiens
  misc_RNA (1)...(19): siRNA sense strand
cagaaaacagcaugaguga

SEQ ID NO: 2620967 - RNA, 19 nt, Homo sapiens
  misc_RNA (1)...(19): siRNA sense strand
cgguagacccugaaguagu

SEQ ID NO: 2620968 - RNA, 19 nt, Homo sapiens
  misc_RNA (1)...(19): siRNA sense strand
ccacaaggggcuagcaaca

SEQ ID NO: 2620969 - RNA, 19 nt, Homo sapiens
  misc_RNA (1)...(19): siRNA sense strand
ccucacagacugcgguaga

SEQ ID NO: 2620970 - RNA, 19 nt, Homo sapiens
  misc_RNA (1)...(19): siRNA sense strand
acaaggacagagugggaca

SEQ ID NO: 2620971 - RNA, 19 nt, Homo sapiens
  misc_RNA (1)...(19): siRNA sense strand
agaggaugccugaugagaa

SEQ ID NO: 2620972 - RNA, 19 nt, Homo sapiens
  misc_RNA (1)...(19): siRNA sense strand
gagugaagaaggaugagga

SEQ ID NO: 2620973 - RNA, 19 nt, Homo sapiens
  misc_RNA (1)...(19): siRNA sense strand
ggucacaaugcaagugcuu

SEQ ID NO: 2620974 - RNA, 19 nt, Homo sapiens
  misc_RNA (1)...(19): siRNA sense strand
agaacucaacauuggacaa

SEQ ID NO: 2620975 - RNA, 19 nt, Homo sapiens
  misc_RNA (1)...(19): siRNA sense strand
caggcagauaggagaccaa

SEQ ID NO: 2620976 - RNA, 19 nt, Homo sapiens
  misc_RNA (1)...(19): siRNA sense strand
gggcagccgcagaaagcuu

SEQ ID NO: 2620977 - RNA, 19 nt, Homo sapiens
  misc_RNA (1)...(19): siRNA sense strand
ccuuagcagcggagaagca

SEQ ID NO: 2620978 - RNA, 19 nt, Homo sapiens
  misc_RNA (1)...(19): siRNA sense strand
agcagaggcacccgggaaa

SEQ ID NO: 2620979 - RNA, 19 nt, Homo sapiens
  misc_RNA (1)...(19): siRNA sense strand
ggcccagaagagugaagaa

SEQ ID NO: 2620980 - RNA, 19 nt, Homo sapiens
  misc_RNA (1)...(19): siRNA sense strand
ccggaaagaggaugccuga

SEQ ID NO: 2620981 - RNA, 19 nt, Homo sapiens
  misc_RNA (1)...(19): siRNA sense strand
augacaaacagcagcauca

SEQ ID NO: 2620982 - RNA, 19 nt, Homo sapiens
  misc_RNA (1)...(19): siRNA sense strand
ccucaguuaucaccagcaa

SEQ ID NO: 2620983 - RNA, 19 nt, Homo sapiens
  misc_RNA (1)...(19): siRNA sense strand
ccucugucuccaagaagua

SEQ ID NO: 2620984 - RNA, 19 nt, Homo sapiens
  misc_RNA (1)...(19): siRNA sense strand
cagccauccuuuaaauaca

SEQ ID NO: 2620985 - RNA, 19 nt, Homo sapiens
  misc_RNA (1)...(19): siRNA sense strand
agcaccaguuauaggcuua

SEQ ID NO: 2620986 - RNA, 19 nt, Homo sapiens
  misc_RNA (1)...(19): siRNA sense strand
ccacaucaggagaacucaa

SEQ ID NO: 2620987 - RNA, 19 nt, Homo sapiens
  misc_RNA (1)...(19): siRNA sense strand
ccaccuaaccucacagacu

SEQ ID NO: 2620988 - RNA, 19 nt, Homo sapiens
  misc_RNA (1)...(19): siRNA sense strand
caacauuggacaaggacag

SEQ ID NO: 2620989 - RNA, 19 nt, Homo sapiens
  misc_RNA (1)...(19): siRNA sense strand
aggauaaaacagagaccau

SEQ ID NO: 2620990 - RNA, 19 nt, Homo sapiens
  misc_RNA (1)...(19): siRNA sense strand
agucagggcaccagcuaca

SEQ ID NO: 2620991 - RNA, 19 nt, Homo sapiens
  misc_RNA (1)...(19): siRNA sense strand
agaccagaucucagggaaa

SEQ ID NO: 2620992 - RNA, 19 nt, Homo sapiens
  misc_RNA (1)...(19): siRNA sense strand
cgauacuauguaagagaaa

SEQ ID NO: 2620993 - RNA, 19 nt, Homo sapiens
  misc_RNA (1)...(19): siRNA sense strand
gcuacuaaacagaguucaa

SEQ ID NO: 2620994 - RNA, 19 nt, Homo sapiens
  misc_RNA (1)...(19): siRNA sense strand
uggagaaccuggaggagga

SEQ ID NO: 2620995 - RNA, 19 nt, Homo sapiens
  misc_RNA (1)...(19): siRNA sense strand
guuuauugcugccgggaga

SEQ ID NO: 2620996 - RNA, 19 nt, Homo sapiens
  misc_RNA (1)...(19): siRNA sense strand
cuuaauagaagaaggagga

SEQ ID NO: 2620997 - RNA, 19 nt, Homo sapiens
  misc_RNA (1)...(19): siRNA sense strand
aaucuaggagagagcgaaa

SEQ ID NO: 2620998 - RNA, 19 nt, Homo sapiens
  misc_RNA (1)...(19): siRNA sense strand
ggucauuaacccuuggcua

SEQ ID NO: 2620999 - RNA, 19 nt, Homo sapiens
  misc_RNA (1)...(19): siRNA sense strand
acuaugaagccuugugcaa

SEQ ID NO: 2621000 - RNA, 19 nt, Homo sapiens
  misc_RNA (1)...(19): siRNA sense strand
gaagaugaguugaagcguu

SEQ ID NO: 2621001 - RNA, 19 nt, Homo sapiens
  misc_RNA (1)...(19): siRNA sense strand
cagaaaaggccaaaagcuu

SEQ ID NO: 2621002 - RNA, 19 nt, Homo sapiens
  misc_RNA (1)...(19): siRNA sense strand
cgguuguggaacaggaaau

SEQ ID NO: 2621003 - RNA, 19 nt, Homo sapiens
  misc_RNA (1)...(19): siRNA sense strand
cagagaagaaucuaggaga

SEQ ID NO: 2621004 - RNA, 19 nt, Homo sapiens
  misc_RNA (1)...(19): siRNA sense strand
aguugaagcguuuggauga

SEQ ID NO: 2621005 - RNA, 19 nt, Homo sapiens
  misc_RNA (1)...(19): siRNA sense strand
uggaugaggagcuggaaga

SEQ ID NO: 2621006 - RNA, 19 nt, Homo sapiens
  misc_RNA (1)...(19): siRNA sense strand
aggcaaaugaagaugaguu

SEQ ID NO: 2621007 - RNA, 19 nt, Homo sapiens
  misc_RNA (1)...(19): siRNA sense strand
uggcaaaggccgaguaccu

SEQ ID NO: 2621008 - RNA, 19 nt, Homo sapiens
  misc_RNA (1)...(19): siRNA sense strand
gagacugggacaggagaaa

SEQ ID NO: 2621009 - RNA, 19 nt, Homo sapiens
  misc_RNA (1)...(19): siRNA sense strand
ggagacugggacaggagaa

SEQ ID NO: 2621010 - RNA, 19 nt, Homo sapiens
  misc_RNA (1)...(19): siRNA sense strand
guuugguguugguguggaa

SEQ ID NO: 2621011 - RNA, 19 nt, Homo sapiens
  misc_RNA (1)...(19): siRNA sense strand
cugccggauaggugacaaa

SEQ ID NO: 2621012 - RNA, 19 nt, Homo sapiens
  misc_RNA (1)...(19): siRNA sense strand
ccaaaagcuuaauagaaga

SEQ ID NO: 2621013 - RNA, 19 nt, Homo sapiens
  misc_RNA (1)...(19): siRNA sense strand
ggccaaaagcuuaauagaa

SEQ ID NO: 2621014 - RNA, 19 nt, Homo sapiens
  misc_RNA (1)...(19): siRNA sense strand
cuggaaucauauaggucau

SEQ ID NO: 2621015 - RNA, 19 nt, Homo sapiens
  misc_RNA (1)...(19): siRNA sense strand
cuauguaagagaaaugaga

SEQ ID NO: 2621016 - RNA, 19 nt, Homo sapiens
  misc_RNA (1)...(19): siRNA sense strand
cagccuuucgcaagacaua

SEQ ID NO: 2621017 - RNA, 19 nt, Homo sapiens
  misc_RNA (1)...(19): siRNA sense strand
ggacaggagaaaccgccua

SEQ ID NO: 2621018 - RNA, 19 nt, Homo sapiens
  misc_RNA (1)...(19): siRNA sense strand
agagaagaaucuaggagag

SEQ ID NO: 2621019 - RNA, 19 nt, Homo sapiens
  misc_RNA (1)...(19): siRNA sense strand
ucuaggagagagcgaaauu

SEQ ID NO: 2621020 - RNA, 19 nt, Homo sapiens
  misc_RNA (1)...(19): siRNA sense strand
agauagacguggaccuacu

SEQ ID NO: 2621021 - RNA, 19 nt, Homo sapiens
  misc_RNA (1)...(19): siRNA sense strand
aagcuuaauagaagaagga

SEQ ID NO: 2621022 - RNA, 19 nt, Homo sapiens
  misc_RNA (1)...(19): siRNA sense strand
aguaugauugccuuagaaa

SEQ ID NO: 2621023 - RNA, 19 nt, Homo sapiens
  misc_RNA (1)...(19): siRNA sense strand
ggaaaaggucauuaaagga

SEQ ID NO: 2621024 - RNA, 19 nt, Homo sapiens
  misc_RNA (1)...(19): siRNA sense strand
gcuauauggcagaagcguu

SEQ ID NO: 2621025 - RNA, 19 nt, Homo sapiens
  misc_RNA (1)...(19): siRNA sense strand
uggcagaagcguuuggugu

SEQ ID NO: 2621026 - RNA, 19 nt, Homo sapiens
  misc_RNA (1)...(19): siRNA sense strand
ccgggagacuacacugcaa

SEQ ID NO: 2621027 - RNA, 19 nt, Homo sapiens
  misc_RNA (1)...(19): siRNA sense strand
gcaaaucccucgacuggca

SEQ ID NO: 2621028 - RNA, 19 nt, Homo sapiens
  misc_RNA (1)...(19): siRNA sense strand
gauaggugacaaagaggga

SEQ ID NO: 2621029 - RNA, 19 nt, Homo sapiens
  misc_RNA (1)...(19): siRNA sense strand
gaaggaggagacugggaca

SEQ ID NO: 2621030 - RNA, 19 nt, Homo sapiens
  misc_RNA (1)...(19): siRNA sense strand
ugucaguaugauugccuua

SEQ ID NO: 2621031 - RNA, 19 nt, Homo sapiens
  misc_RNA (1)...(19): siRNA sense strand
uuaaaggagcagagauucu

SEQ ID NO: 2621032 - RNA, 19 nt, Homo sapiens
  misc_RNA (1)...(19): siRNA sense strand
caacagaccugauagcaag

SEQ ID NO: 2621033 - RNA, 19 nt, Homo sapiens
  misc_RNA (1)...(19): siRNA sense strand
agaagaagauggagggaga

SEQ ID NO: 2621034 - RNA, 19 nt, Homo sapiens
  misc_RNA (1)...(19): siRNA sense strand
uagaaagagccaagagaaa

SEQ ID NO: 2621035 - RNA, 19 nt, Homo sapiens
  misc_RNA (1)...(19): siRNA sense strand
ggguggugguggaaagaaa

SEQ ID NO: 2621036 - RNA, 19 nt, Homo sapiens
  misc_RNA (1)...(19): siRNA sense strand
ccucaagagugcagagaca

SEQ ID NO: 2621037 - RNA, 19 nt, Homo sapiens
  misc_RNA (1)...(19): siRNA sense strand
cugaagaggcugaggaaca

SEQ ID NO: 2621038 - RNA, 19 nt, Homo sapiens
  misc_RNA (1)...(19): siRNA sense strand
uggagaaaguaaagaaaca

SEQ ID NO: 2621039 - RNA, 19 nt, Homo sapiens
  misc_RNA (1)...(19): siRNA sense strand
uggcuaagacagaggcaaa

SEQ ID NO: 2621040 - RNA, 19 nt, Homo sapiens
  misc_RNA (1)...(19): siRNA sense strand
cugaaagagcugaggauga

SEQ ID NO: 2621041 - RNA, 19 nt, Homo sapiens
  misc_RNA (1)...(19): siRNA sense strand
agagaaaacuggaggguga

SEQ ID NO: 2621042 - RNA, 19 nt, Homo sapiens
  misc_RNA (1)...(19): siRNA sense strand
uggaaagaaagguggcaaa

SEQ ID NO: 2621043 - RNA, 19 nt, Homo sapiens
  misc_RNA (1)...(19): siRNA sense strand
ccacagagaacaaggugaa

SEQ ID NO: 2621044 - RNA, 19 nt, Homo sapiens
  misc_RNA (1)...(19): siRNA sense strand
gagcugaggaugaggaaga

SEQ ID NO: 2621045 - RNA, 19 nt, Homo sapiens
  misc_RNA (1)...(19): siRNA sense strand
aggcaagauugaagaugaa

SEQ ID NO: 2621046 - RNA, 19 nt, Homo sapiens
  misc_RNA (1)...(19): siRNA sense strand
aaggaaagaacuagaagaa

SEQ ID NO: 2621047 - RNA, 19 nt, Homo sapiens
  misc_RNA (1)...(19): siRNA sense strand
agggagagauggaggacau

SEQ ID NO: 2621048 - RNA, 19 nt, Homo sapiens
  misc_RNA (1)...(19): siRNA sense strand
gauaagaagcaaagaaacu

SEQ ID NO: 2621049 - RNA, 19 nt, Homo sapiens
  misc_RNA (1)...(19): siRNA sense strand
acagcaacuuaaugagaaa

SEQ ID NO: 2621050 - RNA, 19 nt, Homo sapiens
  misc_RNA (1)...(19): siRNA sense strand
ggaaaauggcagagcaaga

SEQ ID NO: 2621051 - RNA, 19 nt, Homo sapiens
  misc_RNA (1)...(19): siRNA sense strand
ugucaagggucuucgcaaa

SEQ ID NO: 2621052 - RNA, 19 nt, Homo sapiens
  misc_RNA (1)...(19): siRNA sense strand
agaagaaaugcgagaugaa

SEQ ID NO: 2621053 - RNA, 19 nt, Homo sapiens
  misc_RNA (1)...(19): siRNA sense strand
aggaugaggaagagaucaa

SEQ ID NO: 2621054 - RNA, 19 nt, Homo sapiens
  misc_RNA (1)...(19): siRNA sense strand
cagaauggaaacagaagua

SEQ ID NO: 2621055 - RNA, 19 nt, Homo sapiens
  misc_RNA (1)...(19): siRNA sense strand
ucgauaagaagcaaagaaa

SEQ ID NO: 2621056 - RNA, 19 nt, Homo sapiens
  misc_RNA (1)...(19): siRNA sense strand
gugcagagacagagaagga

SEQ ID NO: 2621057 - RNA, 19 nt, Homo sapiens
  misc_RNA (1)...(19): siRNA sense strand
aggaggaaaucgaggcaga

SEQ ID NO: 2621058 - RNA, 19 nt, Homo sapiens
  misc_RNA (1)...(19): siRNA sense strand
ugaacaacaucuuggaaaa

SEQ ID NO: 2621059 - RNA, 19 nt, Homo sapiens
  misc_RNA (1)...(19): siRNA sense strand
agcuagaagaggagacuaa

SEQ ID NO: 2621060 - RNA, 19 nt, Homo sapiens
  misc_RNA (1)...(19): siRNA sense strand
uggccaagguugagaagga

SEQ ID NO: 2621061 - RNA, 19 nt, Homo sapiens
  misc_RNA (1)...(19): siRNA sense strand
ucuccaaagccaaggcaaa

SEQ ID NO: 2621062 - RNA, 19 nt, Homo sapiens
  misc_RNA (1)...(19): siRNA sense strand
gcacagaggagcuggagga

SEQ ID NO: 2621063 - RNA, 19 nt, Homo sapiens
  misc_RNA (1)...(19): siRNA sense strand
ccucaugauugauguggaa

SEQ ID NO: 2621064 - RNA, 19 nt, Homo sapiens
  misc_RNA (1)...(19): siRNA sense strand
augacaagaucgaggacau

SEQ ID NO: 2621065 - RNA, 19 nt, Homo sapiens
  misc_RNA (1)...(19): siRNA sense strand
uggaggaggccaagaagaa

SEQ ID NO: 2621066 - RNA, 19 nt, Homo sapiens
  misc_RNA (1)...(19): siRNA sense strand
aaacaugagagaagaguga

SEQ ID NO: 2621067 - RNA, 19 nt, Homo sapiens
  misc_RNA (1)...(19): siRNA sense strand
cagagaaggagauggccaa

SEQ ID NO: 2621068 - RNA, 19 nt, Homo sapiens
  misc_RNA (1)...(19): siRNA sense strand
gggaagaagcagauccaga

SEQ ID NO: 2621069 - RNA, 19 nt, Homo sapiens
  misc_RNA (1)...(19): siRNA sense strand
gggaacaguaugaggagga

SEQ ID NO: 2621070 - RNA, 19 nt, Homo sapiens
  misc_RNA (1)...(19): siRNA sense strand
guucuaaaugcgagugcua

SEQ ID NO: 2621071 - RNA, 19 nt, Homo sapiens
  misc_RNA (1)...(19): siRNA sense strand
cuucuagggucuauugaaa

SEQ ID NO: 2621072 - RNA, 19 nt, Homo sapiens
  misc_RNA (1)...(19): siRNA sense strand
caagauugaagaugaacaa

SEQ ID NO: 2621073 - RNA, 19 nt, Homo sapiens
  misc_RNA (1)...(19): siRNA sense strand
ccaaauaugacaagaucga

SEQ ID NO: 2621074 - RNA, 19 nt, Homo sapiens
  misc_RNA (1)...(19): siRNA sense strand
aaacaaaggaagaagagca

SEQ ID NO: 2621075 - RNA, 19 nt, Homo sapiens
  misc_RNA (1)...(19): siRNA sense strand
agagaagagugaaggaacu

SEQ ID NO: 2621076 - RNA, 19 nt, Homo sapiens
  misc_RNA (1)...(19): siRNA sense strand
acacaaaagucauaaguga

SEQ ID NO: 2621077 - RNA, 19 nt, Homo sapiens
  misc_RNA (1)...(19): siRNA sense strand
cggaagaagcacgcagaua

SEQ ID NO: 2621078 - RNA, 19 nt, Homo sapiens
  misc_RNA (1)...(19): siRNA sense strand
agcugaagauggagaucaa

SEQ ID NO: 2621079 - RNA, 19 nt, Homo sapiens
  misc_RNA (1)...(19): siRNA sense strand
aagaugaccuuaaggaaca

SEQ ID NO: 2621080 - RNA, 19 nt, Homo sapiens
  misc_RNA (1)...(19): siRNA sense strand
augccaagaccgugaggaa

SEQ ID NO: 2621081 - RNA, 19 nt, Homo sapiens
  misc_RNA (1)...(19): siRNA sense strand
ucgaucagcuaaagaggaa

SEQ ID NO: 2621082 - RNA, 19 nt, Homo sapiens
  misc_RNA (1)...(19): siRNA sense strand
uggccaacaugaaggaaga

SEQ ID NO: 2621083 - RNA, 19 nt, Homo sapiens
  misc_RNA (1)...(19): siRNA sense strand
augcagaggagaaggccaa

SEQ ID NO: 2621084 - RNA, 19 nt, Homo sapiens
  misc_RNA (1)...(19): siRNA sense strand
gcauugaugaccaggaaga

SEQ ID NO: 2621085 - RNA, 19 nt, Homo sapiens
  misc_RNA (1)...(19): siRNA sense strand
aggaagaguacaagaagga

SEQ ID NO: 2621086 - RNA, 19 nt, Homo sapiens
  misc_RNA (1)...(19): siRNA sense strand
ggccaaaaucaaagaggua

SEQ ID NO: 2621087 - RNA, 19 nt, Homo sapiens
  misc_RNA (1)...(19): siRNA sense strand
agguugagaaggagaaaca

SEQ ID NO: 2621088 - RNA, 19 nt, Homo sapiens
  misc_RNA (1)...(19): siRNA sense strand
agauugaguugaacaagaa

SEQ ID NO: 2621089 - RNA, 19 nt, Homo sapiens
  misc_RNA (1)...(19): siRNA sense strand
acaagaagcgggaggcuga

SEQ ID NO: 2621090 - RNA, 19 nt, Homo sapiens
  misc_RNA (1)...(19): siRNA sense strand
ggaccaaguacgagacgga

SEQ ID NO: 2621091 - RNA, 19 nt, Homo sapiens
  misc_RNA (1)...(19): siRNA sense strand
agaaugaaguagaggaccu

SEQ ID NO: 2621092 - RNA, 19 nt, Homo sapiens
  misc_RNA (1)...(19): siRNA sense strand
gagacaagcugaagaggcu

SEQ ID NO: 2621093 - RNA, 19 nt, Homo sapiens
  misc_RNA (1)...(19): siRNA sense strand
gaaacagaaguaugaggaa

SEQ ID NO: 2621094 - RNA, 19 nt, Homo sapiens
  misc_RNA (1)...(19): siRNA sense strand
gugcauagcuggagggagu

SEQ ID NO: 2621095 - RNA, 19 nt, Homo sapiens
  misc_RNA (1)...(19): siRNA sense strand
gggaaauauaccugcauua

SEQ ID NO: 2621096 - RNA, 19 nt, Homo sapiens
  misc_RNA (1)...(19): siRNA sense strand
ugguaaaguuaaaccguaa

SEQ ID NO: 2621097 - RNA, 19 nt, Homo sapiens
  misc_RNA (1)...(19): siRNA sense strand
cuggagaagcucuggaaua

SEQ ID NO: 2621098 - RNA, 19 nt, Homo sapiens
  misc_RNA (1)...(19): siRNA sense strand
acuuaaggauggagcauuu

SEQ ID NO: 2621099 - RNA, 19 nt, Homo sapiens
  misc_RNA (1)...(19): siRNA sense strand
guuccuuauuagugguaaa

SEQ ID NO: 2621100 - RNA, 19 nt, Homo sapiens
  misc_RNA (1)...(19): siRNA sense strand
ggucugagcuuauuggaga

SEQ ID NO: 2621101 - RNA, 19 nt, Homo sapiens
  misc_RNA (1)...(19): siRNA sense strand
gcggaauggaauuagcaaa

SEQ ID NO: 2621102 - RNA, 19 nt, Homo sapiens
  misc_RNA (1)...(19): siRNA sense strand
ccaccaaccaugagaggau

SEQ ID NO: 2621103 - RNA, 19 nt, Homo sapiens
  misc_RNA (1)...(19): siRNA sense strand
agaaauaaaugcacaggca

SEQ ID NO: 2621104 - RNA, 19 nt, Homo sapiens
  misc_RNA (1)...(19): siRNA sense strand
acagaugagcggugaaaca

SEQ ID NO: 2621105 - RNA, 19 nt, Homo sapiens
  misc_RNA (1)...(19): siRNA sense strand
ugagcuuauuggagagauu

SEQ ID NO: 2621106 - RNA, 19 nt, Homo sapiens
  misc_RNA (1)...(19): siRNA sense strand
ccucagauuuccuggcaga

SEQ ID NO: 2621107 - RNA, 19 nt, Homo sapiens
  misc_RNA (1)...(19): siRNA sense strand
caugagaggauaagugaga

SEQ ID NO: 2621108 - RNA, 19 nt, Homo sapiens
  misc_RNA (1)...(19): siRNA sense strand
ggauaagugagaagaaacu

SEQ ID NO: 2621109 - RNA, 19 nt, Homo sapiens
  misc_RNA (1)...(19): siRNA sense strand
ccuuauuagugguaaaguu

SEQ ID NO: 2621110 - RNA, 19 nt, Homo sapiens
  misc_RNA (1)...(19): siRNA sense strand
gacaguaacacgaggugaa

SEQ ID NO: 2621111 - RNA, 19 nt, Homo sapiens
  misc_RNA (1)...(19): siRNA sense strand
agucauaaucgguugucua

SEQ ID NO: 2621112 - RNA, 19 nt, Homo sapiens
  misc_RNA (1)...(19): siRNA sense strand
ccauagaagaugcuaguga

SEQ ID NO: 2621113 - RNA, 19 nt, Homo sapiens
  misc_RNA (1)...(19): siRNA sense strand
aaacauuacaggaagugaa

SEQ ID NO: 2621114 - RNA, 19 nt, Homo sapiens
  misc_RNA (1)...(19): siRNA sense strand
aacuagaacuggaacacaa

SEQ ID NO: 2621115 - RNA, 19 nt, Homo sapiens
  misc_RNA (1)...(19): siRNA sense strand
ccagaguagcauugggcau

SEQ ID NO: 2621116 - RNA, 19 nt, Homo sapiens
  misc_RNA (1)...(19): siRNA sense strand
cuggaggauaagacaguaa

SEQ ID NO: 2621117 - RNA, 19 nt, Homo sapiens
  misc_RNA (1)...(19): siRNA sense strand
ggauaagacaguaacacga

SEQ ID NO: 2621118 - RNA, 19 nt, Homo sapiens
  misc_RNA (1)...(19): siRNA sense strand
gcuugaauaacauggaaga

SEQ ID NO: 2621119 - RNA, 19 nt, Homo sapiens
  misc_RNA (1)...(19): siRNA sense strand
guccaaaugccuaaagaga

SEQ ID NO: 2621120 - RNA, 19 nt, Homo sapiens
  misc_RNA (1)...(19): siRNA sense strand
agaaugugcugcagaggga

SEQ ID NO: 2621121 - RNA, 19 nt, Homo sapiens
  misc_RNA (1)...(19): siRNA sense strand
aggugaaacugcgguguua

SEQ ID NO: 2621122 - RNA, 19 nt, Homo sapiens
  misc_RNA (1)...(19): siRNA sense strand
ggauauauacacaaaggca

SEQ ID NO: 2621123 - RNA, 19 nt, Homo sapiens
  misc_RNA (1)...(19): siRNA sense strand
gguuguauggcuugcgaau

SEQ ID NO: 2621124 - RNA, 19 nt, Homo sapiens
  misc_RNA (1)...(19): siRNA sense strand
uggaagaacuagaacugga

SEQ ID NO: 2621125 - RNA, 19 nt, Homo sapiens
  misc_RNA (1)...(19): siRNA sense strand
agaggauaagugagaagaa

SEQ ID NO: 2621126 - RNA, 19 nt, Homo sapiens
  misc_RNA (1)...(19): siRNA sense strand
caggaaggcuacagcaacu

SEQ ID NO: 2621127 - RNA, 19 nt, Homo sapiens
  misc_RNA (1)...(19): siRNA sense strand
cauuacaggaagugaaaau

SEQ ID NO: 2621128 - RNA, 19 nt, Homo sapiens
  misc_RNA (1)...(19): siRNA sense strand
ccaaagacuauccgaacuu

SEQ ID NO: 2621129 - RNA, 19 nt, Homo sapiens
  misc_RNA (1)...(19): siRNA sense strand
acguggauacugagaauuu

SEQ ID NO: 2621130 - RNA, 19 nt, Homo sapiens
  misc_RNA (1)...(19): siRNA sense strand
cggaauggaauuagcaaac

SEQ ID NO: 2621131 - RNA, 19 nt, Homo sapiens
  misc_RNA (1)...(19): siRNA sense strand
ucuucagacauuagacuua

SEQ ID NO: 2621132 - RNA, 19 nt, Homo sapiens
  misc_RNA (1)...(19): siRNA sense strand
acucacaagucucacuaaa

SEQ ID NO: 2621133 - RNA, 19 nt, Homo sapiens
  misc_RNA (1)...(19): siRNA sense strand
gacuaaagaugaugggccu

SEQ ID NO: 2621134 - RNA, 19 nt, Homo sapiens
  misc_RNA (1)...(19): siRNA sense strand
ggcuagaagaugcugggaa

SEQ ID NO: 2621135 - RNA, 19 nt, Homo sapiens
  misc_RNA (1)...(19): siRNA sense strand
gugucgaucuagagugcuu

SEQ ID NO: 2621136 - RNA, 19 nt, Homo sapiens
  misc_RNA (1)...(19): siRNA sense strand
ugaauguggaucugaaaga

SEQ ID NO: 2621137 - RNA, 19 nt, Homo sapiens
  misc_RNA (1)...(19): siRNA sense strand
ucacaaacacagaggagcu

SEQ ID NO: 2621138 - RNA, 19 nt, Homo sapiens
  misc_RNA (1)...(19): siRNA sense strand
caaacacagaggagcucaa

SEQ ID NO: 2621139 - RNA, 19 nt, Homo sapiens
  misc_RNA (1)...(19): siRNA sense strand
gugguaaaguuaaaccgua

SEQ ID NO: 2621140 - RNA, 19 nt, Homo sapiens
  misc_RNA (1)...(19): siRNA sense strand
gaauguuacagcagcucua

SEQ ID NO: 2621141 - RNA, 19 nt, Homo sapiens
  misc_RNA (1)...(19): siRNA sense strand
cgccaauggaucugacuau

SEQ ID NO: 2621142 - RNA, 19 nt, Homo sapiens
  misc_RNA (1)...(19): siRNA sense strand
ggacguucuugaucagaca

SEQ ID NO: 2621143 - RNA, 19 nt, Homo sapiens
  misc_RNA (1)...(19): siRNA sense strand
acacagaugagcggugaaa

SEQ ID NO: 2621144 - RNA, 19 nt, Homo sapiens
  misc_RNA (1)...(19): siRNA sense strand
aaauaaaugcacaggcacu

SEQ ID NO: 2621145 - RNA, 19 nt, Homo sapiens
  misc_RNA (1)...(19): siRNA sense strand
agagauugaauuuaggaga

SEQ ID NO: 2621146 - RNA, 19 nt, Homo sapiens
  misc_RNA (1)...(19): siRNA sense strand
ggaaaccagauuaagucaa

SEQ ID NO: 2621147 - RNA, 19 nt, Homo sapiens
  misc_RNA (1)...(19): siRNA sense strand
agauggugguacugacuuu

SEQ ID NO: 2621148 - RNA, 19 nt, Homo sapiens
  misc_RNA (1)...(19): siRNA sense strand
ccaggauacuacugcccua

SEQ ID NO: 2621149 - RNA, 19 nt, Homo sapiens
  misc_RNA (1)...(19): siRNA sense strand
gccacagguuacaggauca

SEQ ID NO: 2621150 - RNA, 19 nt, Homo sapiens
  misc_RNA (1)...(19): siRNA sense strand
cuuugaaaaugcagcggaa

SEQ ID NO: 2621151 - RNA, 19 nt, Homo sapiens
  misc_RNA (1)...(19): siRNA sense strand
agccagaaugcuauugaaa

SEQ ID NO: 2621152 - RNA, 19 nt, Homo sapiens
  misc_RNA (1)...(19): siRNA sense strand
ccuauauugcugaggagga

SEQ ID NO: 2621153 - RNA, 19 nt, Homo sapiens
  misc_RNA (1)...(19): siRNA sense strand
agaagaagauggagggaga

SEQ ID NO: 2621154 - RNA, 19 nt, Homo sapiens
  misc_RNA (1)...(19): siRNA sense strand
gagcagagaaggaggaaaa

SEQ ID NO: 2621155 - RNA, 19 nt, Homo sapiens
  misc_RNA (1)...(19): siRNA sense strand
agaggaaacuugaggguga

SEQ ID NO: 2621156 - RNA, 19 nt, Homo sapiens
  misc_RNA (1)...(19): siRNA sense strand
ucuccaaagccaagggaaa

SEQ ID NO: 2621157 - RNA, 19 nt, Homo sapiens
  misc_RNA (1)...(19): siRNA sense strand
agacggaagaagauagaaa

SEQ ID NO: 2621158 - RNA, 19 nt, Homo sapiens
  misc_RNA (1)...(19): siRNA sense strand
augacaagaucgaggauau

SEQ ID NO: 2621159 - RNA, 19 nt, Homo sapiens
  misc_RNA (1)...(19): siRNA sense strand
gagcugaggaugaggaaga

SEQ ID NO: 2621160 - RNA, 19 nt, Homo sapiens
  misc_RNA (1)...(19): siRNA sense strand
agaugaagauggagauuga

SEQ ID NO: 2621161 - RNA, 19 nt, Homo sapiens
  misc_RNA (1)...(19): siRNA sense strand
gagaagaagaaggaagaaa

SEQ ID NO: 2621162 - RNA, 19 nt, Homo sapiens
  misc_RNA (1)...(19): siRNA sense strand
uagaaagggcuaagaggaa

SEQ ID NO: 2621163 - RNA, 19 nt, Homo sapiens
  misc_RNA (1)...(19): siRNA sense strand
agaagaagaaggaagaaau

SEQ ID NO: 2621164 - RNA, 19 nt, Homo sapiens
  misc_RNA (1)...(19): siRNA sense strand
gaaacagaaaugugaggaa

SEQ ID NO: 2621165 - RNA, 19 nt, Homo sapiens
  misc_RNA (1)...(19): siRNA sense strand
gauugcagaaggagggaaa

SEQ ID NO: 2621166 - RNA, 19 nt, Homo sapiens
  misc_RNA (1)...(19): siRNA sense strand
gagaaggagaagagugaga

SEQ ID NO: 2621167 - RNA, 19 nt, Homo sapiens
  misc_RNA (1)...(19): siRNA sense strand
agggaaaccuagagaaaau

SEQ ID NO: 2621168 - RNA, 19 nt, Homo sapiens
  misc_RNA (1)...(19): siRNA sense strand
aagcaagauugaagaugaa

SEQ ID NO: 2621169 - RNA, 19 nt, Homo sapiens
  misc_RNA (1)...(19): siRNA sense strand
aggaugaggaagagaucaa

SEQ ID NO: 2621170 - RNA, 19 nt, Homo sapiens
  misc_RNA (1)...(19): siRNA sense strand
agucugagguugauaggaa

SEQ ID NO: 2621171 - RNA, 19 nt, Homo sapiens
  misc_RNA (1)...(19): siRNA sense strand
aaggagagauggaggacau

SEQ ID NO: 2621172 - RNA, 19 nt, Homo sapiens
  misc_RNA (1)...(19): siRNA sense strand
gugagaagaagaaggaaga

SEQ ID NO: 2621173 - RNA, 19 nt, Homo sapiens
  misc_RNA (1)...(19): siRNA sense strand
gugcagaaacugagaagga

SEQ ID NO: 2621174 - RNA, 19 nt, Homo sapiens
  misc_RNA (1)...(19): siRNA sense strand
gggccaaagcagagaagca

SEQ ID NO: 2621175 - RNA, 19 nt, Homo sapiens
  misc_RNA (1)...(19): siRNA sense strand
uaaagaaacaaguggaaca

SEQ ID NO: 2621176 - RNA, 19 nt, Homo sapiens
  misc_RNA (1)...(19): siRNA sense strand
cugaggaacuacaggaaca

SEQ ID NO: 2621177 - RNA, 19 nt, Homo sapiens
  misc_RNA (1)...(19): siRNA sense strand
aggaggaaaucgaggcaga

SEQ ID NO: 2621178 - RNA, 19 nt, Homo sapiens
  misc_RNA (1)...(19): siRNA sense strand
acgccaagaccgugaggaa

SEQ ID NO: 2621179 - RNA, 19 nt, Homo sapiens
  misc_RNA (1)...(19): siRNA sense strand
gaauaagaaaccagaacuu

SEQ ID NO: 2621180 - RNA, 19 nt, Homo sapiens
  misc_RNA (1)...(19): siRNA sense strand
gagaagagugagaugaaga

SEQ ID NO: 2621181 - RNA, 19 nt, Homo sapiens
  misc_RNA (1)...(19): siRNA sense strand
aaucaaaggaagaggagca

SEQ ID NO: 2621182 - RNA, 19 nt, Homo sapiens
  misc_RNA (1)...(19): siRNA sense strand
aagcaaaggaacuucgaua

SEQ ID NO: 2621183 - RNA, 19 nt, Homo sapiens
  misc_RNA (1)...(19): siRNA sense strand
uugaacaugaagagggaaa

SEQ ID NO: 2621184 - RNA, 19 nt, Homo sapiens
  misc_RNA (1)...(19): siRNA sense strand
cugaggaggcugaggaaca

SEQ ID NO: 2621185 - RNA, 19 nt, Homo sapiens
  misc_RNA (1)...(19): siRNA sense strand
ccaagguggucaaaggcaa

SEQ ID NO: 2621186 - RNA, 19 nt, Homo sapiens
  misc_RNA (1)...(19): siRNA sense strand
uggccaagguugagaagga

SEQ ID NO: 2621187 - RNA, 19 nt, Homo sapiens
  misc_RNA (1)...(19): siRNA sense strand
gcacagaggagcuggagga

SEQ ID NO: 2621188 - RNA, 19 nt, Homo sapiens
  misc_RNA (1)...(19): siRNA sense strand
ucagagagaauuugaacaa

SEQ ID NO: 2621189 - RNA, 19 nt, Homo sapiens
  misc_RNA (1)...(19): siRNA sense strand
uggagaaggagaagaguga

SEQ ID NO: 2621190 - RNA, 19 nt, Homo sapiens
  misc_RNA (1)...(19): siRNA sense strand
uggaggaggccaagaagaa

SEQ ID NO: 2621191 - RNA, 19 nt, Homo sapiens
  misc_RNA (1)...(19): siRNA sense strand
uugaccagcugaagagaaa

SEQ ID NO: 2621192 - RNA, 19 nt, Homo sapiens
  misc_RNA (1)...(19): siRNA sense strand
gcagaaacugagaaggaga

SEQ ID NO: 2621193 - RNA, 19 nt, Homo sapiens
  misc_RNA (1)...(19): siRNA sense strand
aggagaagagugagaugaa

SEQ ID NO: 2621194 - RNA, 19 nt, Homo sapiens
  misc_RNA (1)...(19): siRNA sense strand
aaagaaugccuaugaggaa

SEQ ID NO: 2621195 - RNA, 19 nt, Homo sapiens
  misc_RNA (1)...(19): siRNA sense strand
gggaagaagcagauccaga

SEQ ID NO: 2621196 - RNA, 19 nt, Homo sapiens
  misc_RNA (1)...(19): siRNA sense strand
gggaacaguaugaggagga

SEQ ID NO: 2621197 - RNA, 19 nt, Homo sapiens
  misc_RNA (1)...(19): siRNA sense strand
aggaggaccugaaggaaca

SEQ ID NO: 2621198 - RNA, 19 nt, Homo sapiens
  misc_RNA (1)...(19): siRNA sense strand
gagaaacaugccacagaaa

SEQ ID NO: 2621199 - RNA, 19 nt, Homo sapiens
  misc_RNA (1)...(19): siRNA sense strand
gacugaaucuggugaguuu

SEQ ID NO: 2621200 - RNA, 19 nt, Homo sapiens
  misc_RNA (1)...(19): siRNA sense strand
ccaaauaugacaagaucga

SEQ ID NO: 2621201 - RNA, 19 nt, Homo sapiens
  misc_RNA (1)...(19): siRNA sense strand
acacaaaagucauaaguga

SEQ ID NO: 2621202 - RNA, 19 nt, Homo sapiens
  misc_RNA (1)...(19): siRNA sense strand
uggcaagaguggaguacca

SEQ ID NO: 2621203 - RNA, 19 nt, Homo sapiens
  misc_RNA (1)...(19): siRNA sense strand
agggaaagauccugcgcau

SEQ ID NO: 2621204 - RNA, 19 nt, Homo sapiens
  misc_RNA (1)...(19): siRNA sense strand
cugagagagcugaggauga

SEQ ID NO: 2621205 - RNA, 19 nt, Homo sapiens
  misc_RNA (1)...(19): siRNA sense strand
agguugagaaggagaaaca

SEQ ID NO: 2621206 - RNA, 19 nt, Homo sapiens
  misc_RNA (1)...(19): siRNA sense strand
acaagaagcgggaggcuga

SEQ ID NO: 2621207 - RNA, 19 nt, Homo sapiens
  misc_RNA (1)...(19): siRNA sense strand
ggaccaaauacgagacgga

SEQ ID NO: 2621208 - RNA, 19 nt, Homo sapiens
  misc_RNA (1)...(19): siRNA sense strand
cugcugaggcccugaggaa

SEQ ID NO: 2621209 - RNA, 19 nt, Homo sapiens
  misc_RNA (1)...(19): siRNA sense strand
ugucaaaggucugcgcaaa

SEQ ID NO: 2621210 - RNA, 19 nt, Homo sapiens
  misc_RNA (1)...(19): siRNA sense strand
aggaagaagcaugcagaua

SEQ ID NO: 2621211 - RNA, 19 nt, Homo sapiens
  misc_RNA (1)...(19): siRNA sense strand
cccugaagcgagagaacaa

SEQ ID NO: 2621212 - RNA, 19 nt, Homo sapiens
  misc_RNA (1)...(19): siRNA sense strand
agggagaccucaaugaaau

SEQ ID NO: 2621213 - RNA, 19 nt, Homo sapiens
  misc_RNA (1)...(19): siRNA sense strand
gaacagacagagaggagca

SEQ ID NO: 2621214 - RNA, 19 nt, Homo sapiens
  misc_RNA (1)...(19): siRNA sense strand
cagacagagaggagcagaa

SEQ ID NO: 2621215 - RNA, 19 nt, Homo sapiens
  misc_RNA (1)...(19): siRNA sense strand
guagauaaacuucaggcaa

SEQ ID NO: 2621216 - RNA, 19 nt, Homo sapiens
  misc_RNA (1)...(19): siRNA sense strand
aggcaaaagugaaaucuua

SEQ ID NO: 2621217 - RNA, 19 nt, Homo sapiens
  misc_RNA (1)...(19): siRNA sense strand
gcugacugaccgagagaau

SEQ ID NO: 2621218 - RNA, 19 nt, Homo sapiens
  misc_RNA (1)...(19): siRNA sense strand
cuggcuggcuggagaagaa

SEQ ID NO: 2621219 - RNA, 19 nt, Homo sapiens
  misc_RNA (1)...(19): siRNA sense strand
agaaaggugguaagaagaa

SEQ ID NO: 2621220 - RNA, 19 nt, Homo sapiens
  misc_RNA (1)...(19): siRNA sense strand
cauagaacgaggagagaau

SEQ ID NO: 2621221 - RNA, 19 nt, Homo sapiens
  misc_RNA (1)...(19): siRNA sense strand
ccgaagaagcagacagaga

SEQ ID NO: 2621222 - RNA, 19 nt, Homo sapiens
  misc_RNA (1)...(19): siRNA sense strand
gcaacaagcugaaggccau

SEQ ID NO: 2621223 - RNA, 19 nt, Homo sapiens
  misc_RNA (1)...(19): siRNA sense strand
ggucaagcugagcgggaaa

SEQ ID NO: 2621224 - RNA, 19 nt, Homo sapiens
  misc_RNA (1)...(19): siRNA sense strand
aagcagaagaagugaugaa

SEQ ID NO: 2621225 - RNA, 19 nt, Homo sapiens
  misc_RNA (1)...(19): siRNA sense strand
aagaagugaugaaggucaa

SEQ ID NO: 2621226 - RNA, 19 nt, Homo sapiens
  misc_RNA (1)...(19): siRNA sense strand
ccgaggagauggcggaaaa

SEQ ID NO: 2621227 - RNA, 19 nt, Homo sapiens
  misc_RNA (1)...(19): siRNA sense strand
ggacauagaacgaggagag

SEQ ID NO: 2621228 - RNA, 19 nt, Homo sapiens
  misc_RNA (1)...(19): siRNA sense strand
uugagaaaggagagaauau

SEQ ID NO: 2621229 - RNA, 19 nt, Homo sapiens
  misc_RNA (1)...(19): siRNA sense strand
auguuuaacuggaagaaga

SEQ ID NO: 2621230 - RNA, 19 nt, Homo sapiens
  misc_RNA (1)...(19): siRNA sense strand
uagaacgaggagagaauua

SEQ ID NO: 2621231 - RNA, 19 nt, Homo sapiens
  misc_RNA (1)...(19): siRNA sense strand
cuguaaagucaaaggucuu

SEQ ID NO: 2621232 - RNA, 19 nt, Homo sapiens
  misc_RNA (1)...(19): siRNA sense strand
guguccaggcagaaggaaa

SEQ ID NO: 2621233 - RNA, 19 nt, Homo sapiens
  misc_RNA (1)...(19): siRNA sense strand
uagcaaugcaugaagaaaa

SEQ ID NO: 2621234 - RNA, 19 nt, Homo sapiens
  misc_RNA (1)...(19): siRNA sense strand
cggagaucaugaagaacau

SEQ ID NO: 2621235 - RNA, 19 nt, Homo sapiens
  misc_RNA (1)...(19): siRNA sense strand
gaagagaggccaaagcaca

SEQ ID NO: 2621236 - RNA, 19 nt, Homo sapiens
  misc_RNA (1)...(19): siRNA sense strand
gaagaagugaugaagguca

SEQ ID NO: 2621237 - RNA, 19 nt, Homo sapiens
  misc_RNA (1)...(19): siRNA sense strand
uggaagaggcagaugacga

SEQ ID NO: 2621238 - RNA, 19 nt, Homo sapiens
  misc_RNA (1)...(19): siRNA sense strand
ccuuauuacuacuucacaa

SEQ ID NO: 2621239 - RNA, 19 nt, Homo sapiens
  misc_RNA (1)...(19): siRNA sense strand
cgcaguaccuggagagcca

SEQ ID NO: 2621240 - RNA, 19 nt, Homo sapiens
  misc_RNA (1)...(19): siRNA sense strand
uggacaaauugaucggaga

SEQ ID NO: 2621241 - RNA, 19 nt, Homo sapiens
  misc_RNA (1)...(19): siRNA sense strand
cggucaugcuguaccacaa

SEQ ID NO: 2621242 - RNA, 19 nt, Homo sapiens
  misc_RNA (1)...(19): siRNA sense strand
ccggagaucaugaagaaca

SEQ ID NO: 2621243 - RNA, 19 nt, Homo sapiens
  misc_RNA (1)...(19): siRNA sense strand
cccgauacuacgaggagaa

SEQ ID NO: 2621244 - RNA, 19 nt, Homo sapiens
  misc_RNA (1)...(19): siRNA sense strand
ccggagacacggagaaaau

SEQ ID NO: 2621245 - RNA, 19 nt, Homo sapiens
  misc_RNA (1)...(19): siRNA sense strand
gcgcaaauagccaacgaga

SEQ ID NO: 2621246 - RNA, 19 nt, Homo sapiens
  misc_RNA (1)...(19): siRNA sense strand
aggaauaccagacggccua

SEQ ID NO: 2621247 - RNA, 19 nt, Homo sapiens
  misc_RNA (1)...(19): siRNA sense strand
ggauauuuaccuggagcaa

SEQ ID NO: 2621248 - RNA, 19 nt, Homo sapiens
  misc_RNA (1)...(19): siRNA sense strand
acagagaagacgaggugga

SEQ ID NO: 2621249 - RNA, 19 nt, Homo sapiens
  misc_RNA (1)...(19): siRNA sense strand
agaaaggagagaauaugaa

SEQ ID NO: 2621250 - RNA, 19 nt, Homo sapiens
  misc_RNA (1)...(19): siRNA sense strand
ggacagacuuggcucacuu

SEQ ID NO: 2621251 - RNA, 19 nt, Homo sapiens
  misc_RNA (1)...(19): siRNA sense strand
uguccaggcagaaggaaau

SEQ ID NO: 2621252 - RNA, 19 nt, Homo sapiens
  misc_RNA (1)...(19): siRNA sense strand
gagcacagucaguacgaga

SEQ ID NO: 2621253 - RNA, 19 nt, Homo sapiens
  misc_RNA (1)...(19): siRNA sense strand
uugaugaauaccagaacua

SEQ ID NO: 2621254 - RNA, 19 nt, Homo sapiens
  misc_RNA (1)...(19): siRNA sense strand
auaugaacuguguguguua

SEQ ID NO: 2621255 - RNA, 19 nt, Homo sapiens
  misc_RNA (1)...(19): siRNA sense strand
ccuacaagugccuggccaa

SEQ ID NO: 2621256 - RNA, 19 nt, Homo sapiens
  misc_RNA (1)...(19): siRNA sense strand
ugaaacacgaguaugggaa

SEQ ID NO: 2621257 - RNA, 19 nt, Homo sapiens
  misc_RNA (1)...(19): siRNA sense strand
augagaaagcccuggacau

SEQ ID NO: 2621258 - RNA, 19 nt, Homo sapiens
  misc_RNA (1)...(19): siRNA sense strand
aggagaagggcgugcagau

SEQ ID NO: 2621259 - RNA, 19 nt, Homo sapiens
  misc_RNA (1)...(19): siRNA sense strand
gcaggauggcacuggugaa

SEQ ID NO: 2621260 - RNA, 19 nt, Homo sapiens
  misc_RNA (1)...(19): siRNA sense strand
gcuuccugguggagcacua

SEQ ID NO: 2621261 - RNA, 19 nt, Homo sapiens
  misc_RNA (1)...(19): siRNA sense strand
gcuucuacgauguugaaau

SEQ ID NO: 2621262 - RNA, 19 nt, Homo sapiens
  misc_RNA (1)...(19): siRNA sense strand
gugugagacgccuguguua

SEQ ID NO: 2621263 - RNA, 19 nt, Homo sapiens
  misc_RNA (1)...(19): siRNA sense strand
uggcacuggugaagagguu

SEQ ID NO: 2621264 - RNA, 19 nt, Homo sapiens
  misc_RNA (1)...(19): siRNA sense strand
gggcugggagacuggagaa

SEQ ID NO: 2621265 - RNA, 19 nt, Homo sapiens
  misc_RNA (1)...(19): siRNA sense strand
uuuacacgguggagucaaa

SEQ ID NO: 2621266 - RNA, 19 nt, Homo sapiens
  misc_RNA (1)...(19): siRNA sense strand
aagaaagcccgaagaagca

SEQ ID NO: 2621267 - RNA, 19 nt, Homo sapiens
  misc_RNA (1)...(19): siRNA sense strand
acgugcggaaggaggaaua

SEQ ID NO: 2621268 - RNA, 19 nt, Homo sapiens
  misc_RNA (1)...(19): siRNA sense strand
ccaaggaaacaucacgcaa

SEQ ID NO: 2621269 - RNA, 19 nt, Homo sapiens
  misc_RNA (1)...(19): siRNA sense strand
ugaagaacaucaucggcuu

SEQ ID NO: 2621270 - RNA, 19 nt, Homo sapiens
  misc_RNA (1)...(19): siRNA sense strand
acgcaaauccagugggguu

SEQ ID NO: 2621271 - RNA, 19 nt, Homo sapiens
  misc_RNA (1)...(19): siRNA sense strand
ggacagugcacuaugugga

SEQ ID NO: 2621272 - RNA, 19 nt, Homo sapiens
  misc_RNA (1)...(19): siRNA sense strand
gcaaagcagaagaagugau

SEQ ID NO: 2621273 - RNA, 19 nt, Homo sapiens
  misc_RNA (1)...(19): siRNA sense strand
cuauuaugaccaccagaua

SEQ ID NO: 2621274 - RNA, 19 nt, Homo sapiens
  misc_RNA (1)...(19): siRNA sense strand
caagaaagcccgaagaagc

SEQ ID NO: 2621275 - RNA, 19 nt, Homo sapiens
  misc_RNA (1)...(19): siRNA sense strand
auguggaugagaagggcaa

SEQ ID NO: 2621276 - RNA, 19 nt, Homo sapiens
  misc_RNA (1)...(19): siRNA sense strand
acuacaagguauacggcua

SEQ ID NO: 2621277 - RNA, 19 nt, Homo sapiens
  misc_RNA (1)...(19): siRNA sense strand
cggugauugccaaggagaa

SEQ ID NO: 2621278 - RNA, 19 nt, Homo sapiens
  misc_RNA (1)...(19): siRNA sense strand
uggacgugguggaugagaa

SEQ ID NO: 2621279 - RNA, 19 nt, Homo sapiens
  misc_RNA (1)...(19): siRNA sense strand
ggugauugccaaggagaau

SEQ ID NO: 2621280 - RNA, 19 nt, Homo sapiens
  misc_RNA (1)...(19): siRNA sense strand
gaacggauccugcgggaga

SEQ ID NO: 2621281 - RNA, 19 nt, Homo sapiens
  misc_RNA (1)...(19): siRNA sense strand
acgacgaggacgaggagga

SEQ ID NO: 2621282 - RNA, 19 nt, Homo sapiens
  misc_RNA (1)...(19): siRNA sense strand
aggacgacgacgaggacga

SEQ ID NO: 2621283 - RNA, 19 nt, Homo sapiens
  misc_RNA (1)...(19): siRNA sense strand
cagauggaauagagggcua

SEQ ID NO: 2621284 - RNA, 19 nt, Homo sapiens
  misc_RNA (1)...(19): siRNA sense strand
aggaauagugauaggaguu

SEQ ID NO: 2621285 - RNA, 19 nt, Homo sapiens
  misc_RNA (1)...(19): siRNA sense strand
caucacaauauuuggcaau

SEQ ID NO: 2621286 - RNA, 19 nt, Homo sapiens
  misc_RNA (1)...(19): siRNA sense strand
ccaucaugccauauaguau

SEQ ID NO: 2621287 - RNA, 19 nt, Homo sapiens
  misc_RNA (1)...(19): siRNA sense strand
gguaaaauuuucagcucau

SEQ ID NO: 2621288 - RNA, 19 nt, Homo sapiens
  misc_RNA (1)...(19): siRNA sense strand
aaucaagugaagaaagaca

SEQ ID NO: 2621289 - RNA, 19 nt, Homo sapiens
  misc_RNA (1)...(19): siRNA sense strand
aggccuaugcagauggaau

SEQ ID NO: 2621290 - RNA, 19 nt, Homo sapiens
  misc_RNA (1)...(19): siRNA sense strand
ggucuaugaugguggggau

SEQ ID NO: 2621291 - RNA, 19 nt, Homo sapiens
  misc_RNA (1)...(19): siRNA sense strand
ccaucaauaacuugcgaga

SEQ ID NO: 2621292 - RNA, 19 nt, Homo sapiens
  misc_RNA (1)...(19): siRNA sense strand
guacauuuugcuagguaaa

SEQ ID NO: 2621293 - RNA, 19 nt, Homo sapiens
  misc_RNA (1)...(19): siRNA sense strand
ucucagaggccuaugcaga

SEQ ID NO: 2621294 - RNA, 19 nt, Homo sapiens
  misc_RNA (1)...(19): siRNA sense strand
cggucuucucagaggccua

SEQ ID NO: 2621295 - RNA, 19 nt, Homo sapiens
  misc_RNA (1)...(19): siRNA sense strand
gugaaagcgaagaggagga

SEQ ID NO: 2621296 - RNA, 19 nt, Homo sapiens
  misc_RNA (1)...(19): siRNA sense strand
ucccaggugcugagugaaa

SEQ ID NO: 2621297 - RNA, 19 nt, Homo sapiens
  misc_RNA (1)...(19): siRNA sense strand
ggugcugagugaaagcgaa

SEQ ID NO: 2621298 - RNA, 19 nt, Homo sapiens
  misc_RNA (1)...(19): siRNA sense strand
gagugaaagcgaagaggag

SEQ ID NO: 2621299 - RNA, 19 nt, Homo sapiens
  misc_RNA (1)...(19): siRNA sense strand
cuugaauuugauugaggaa

SEQ ID NO: 2621300 - RNA, 19 nt, Homo sapiens
  misc_RNA (1)...(19): siRNA sense strand
caaagaagacugagagcag

SEQ ID NO: 2621301 - RNA, 19 nt, Homo sapiens
  misc_RNA (1)...(19): siRNA sense strand
gcagugaagucuuggugca

SEQ ID NO: 2621302 - RNA, 19 nt, Homo sapiens
  misc_RNA (1)...(19): siRNA sense strand
gggagauuguggacgagga

SEQ ID NO: 2621303 - RNA, 19 nt, Homo sapiens
  misc_RNA (1)...(19): siRNA sense strand
aagauuuggaugagacuga

SEQ ID NO: 2621304 - RNA, 19 nt, Homo sapiens
  misc_RNA (1)...(19): siRNA sense strand
aggcaaauggagcagugaa

SEQ ID NO: 2621305 - RNA, 19 nt, Homo sapiens
  misc_RNA (1)...(19): siRNA sense strand
gagaagauuuggaugagac

SEQ ID NO: 2621306 - RNA, 19 nt, Homo sapiens
  misc_RNA (1)...(19): siRNA sense strand
ccucaaaugcuaugggaaa

SEQ ID NO: 2621307 - RNA, 19 nt, Homo sapiens
  misc_RNA (1)...(19): siRNA sense strand
caguaauggaagaaagaaa

SEQ ID NO: 2621308 - RNA, 19 nt, Homo sapiens
  misc_RNA (1)...(19): siRNA sense strand
gcacaaagugagagcaaga

SEQ ID NO: 2621309 - RNA, 19 nt, Homo sapiens
  misc_RNA (1)...(19): siRNA sense strand
gaagaaaagcugaggaaau

SEQ ID NO: 2621310 - RNA, 19 nt, Homo sapiens
  misc_RNA (1)...(19): siRNA sense strand
ggaaaagagaaaagugaaa

SEQ ID NO: 2621311 - RNA, 19 nt, Homo sapiens
  misc_RNA (1)...(19): siRNA sense strand
cuggagaaacugaaagaaa

SEQ ID NO: 2621312 - RNA, 19 nt, Homo sapiens
  misc_RNA (1)...(19): siRNA sense strand
ccaagcaaguugaggaaca

SEQ ID NO: 2621313 - RNA, 19 nt, Homo sapiens
  misc_RNA (1)...(19): siRNA sense strand
cauuagaaguggagccaga

SEQ ID NO: 2621314 - RNA, 19 nt, Homo sapiens
  misc_RNA (1)...(19): siRNA sense strand
agugagagcaagagaagaa

SEQ ID NO: 2621315 - RNA, 19 nt, Homo sapiens
  misc_RNA (1)...(19): siRNA sense strand
agauaaauguagggaggaa

SEQ ID NO: 2621316 - RNA, 19 nt, Homo sapiens
  misc_RNA (1)...(19): siRNA sense strand
aaguagaauacgagaaaga

SEQ ID NO: 2621317 - RNA, 19 nt, Homo sapiens
  misc_RNA (1)...(19): siRNA sense strand
ugaaaagguugaaaggaaa

SEQ ID NO: 2621318 - RNA, 19 nt, Homo sapiens
  misc_RNA (1)...(19): siRNA sense strand
agguauaccagaaagauaa

SEQ ID NO: 2621319 - RNA, 19 nt, Homo sapiens
  misc_RNA (1)...(19): siRNA sense strand
cugacagacccuugaguaa

SEQ ID NO: 2621320 - RNA, 19 nt, Homo sapiens
  misc_RNA (1)...(19): siRNA sense strand
cuugagagccacagagcaa

SEQ ID NO: 2621321 - RNA, 19 nt, Homo sapiens
  misc_RNA (1)...(19): siRNA sense strand
aaggaaacuucuuugguaa

SEQ ID NO: 2621322 - RNA, 19 nt, Homo sapiens
  misc_RNA (1)...(19): siRNA sense strand
uugaaaagguugaaaggaa

SEQ ID NO: 2621323 - RNA, 19 nt, Homo sapiens
  misc_RNA (1)...(19): siRNA sense strand
gugcaacucuugaggaaca

SEQ ID NO: 2621324 - RNA, 19 nt, Homo sapiens
  misc_RNA (1)...(19): siRNA sense strand
auuaagaaguucagggagu

SEQ ID NO: 2621325 - RNA, 19 nt, Homo sapiens
  misc_RNA (1)...(19): siRNA sense strand
aggaaguggaagcaagaaa

SEQ ID NO: 2621326 - RNA, 19 nt, Homo sapiens
  misc_RNA (1)...(19): siRNA sense strand
ugaucaagaagaaaggaua

SEQ ID NO: 2621327 - RNA, 19 nt, Homo sapiens
  misc_RNA (1)...(19): siRNA sense strand
cagguauaccagaaagaua

SEQ ID NO: 2621328 - RNA, 19 nt, Homo sapiens
  misc_RNA (1)...(19): siRNA sense strand
acaacaaguucuacaucaa

SEQ ID NO: 2621329 - RNA, 19 nt, Homo sapiens
  misc_RNA (1)...(19): siRNA sense strand
gggaugaugagguggauga

SEQ ID NO: 2621330 - RNA, 19 nt, Homo sapiens
  misc_RNA (1)...(19): siRNA sense strand
agugaaacugauaaggaaa

SEQ ID NO: 2621331 - RNA, 19 nt, Homo sapiens
  misc_RNA (1)...(19): siRNA sense strand
cuuuagagaaugagacaga

SEQ ID NO: 2621332 - RNA, 19 nt, Homo sapiens
  misc_RNA (1)...(19): siRNA sense strand
uggcacaaagugagagcaa

SEQ ID NO: 2621333 - RNA, 19 nt, Homo sapiens
  misc_RNA (1)...(19): siRNA sense strand
cuggaaggaaguaaaguaa

SEQ ID NO: 2621334 - RNA, 19 nt, Homo sapiens
  misc_RNA (1)...(19): siRNA sense strand
aggaaguaaaguaacgaaa

SEQ ID NO: 2621335 - RNA, 19 nt, Homo sapiens
  misc_RNA (1)...(19): siRNA sense strand
gggaaagaacagaagagga

SEQ ID NO: 2621336 - RNA, 19 nt, Homo sapiens
  misc_RNA (1)...(19): siRNA sense strand
ggcaguaaauggagagacu

SEQ ID NO: 2621337 - RNA, 19 nt, Homo sapiens
  misc_RNA (1)...(19): siRNA sense strand
aagugaaacugauaaggaa

SEQ ID NO: 2621338 - RNA, 19 nt, Homo sapiens
  misc_RNA (1)...(19): siRNA sense strand
ggaggagacaagaaggaau

SEQ ID NO: 2621339 - RNA, 19 nt, Homo sapiens
  misc_RNA (1)...(19): siRNA sense strand
acuaguaccaucagauaaa

SEQ ID NO: 2621340 - RNA, 19 nt, Homo sapiens
  misc_RNA (1)...(19): siRNA sense strand
ccacaugggaaauuguuaa

SEQ ID NO: 2621341 - RNA, 19 nt, Homo sapiens
  misc_RNA (1)...(19): siRNA sense strand
ugacaagguguuuggagua

SEQ ID NO: 2621342 - RNA, 19 nt, Homo sapiens
  misc_RNA (1)...(19): siRNA sense strand
gaacuucaggagaaagaaa

SEQ ID NO: 2621343 - RNA, 19 nt, Homo sapiens
  misc_RNA (1)...(19): siRNA sense strand
gauaaauguagggaggaaa

SEQ ID NO: 2621344 - RNA, 19 nt, Homo sapiens
  misc_RNA (1)...(19): siRNA sense strand
gagaagaaaagcugaggaa

SEQ ID NO: 2621345 - RNA, 19 nt, Homo sapiens
  misc_RNA (1)...(19): siRNA sense strand
cuuaacagaugaugaccaa

SEQ ID NO: 2621346 - RNA, 19 nt, Homo sapiens
  misc_RNA (1)...(19): siRNA sense strand
ugugaaugauguaaggauu

SEQ ID NO: 2621347 - RNA, 19 nt, Homo sapiens
  misc_RNA (1)...(19): siRNA sense strand
uuagagaccaugugacaaa

SEQ ID NO: 2621348 - RNA, 19 nt, Homo sapiens
  misc_RNA (1)...(19): siRNA sense strand
ggucagagauaggagaaaa

SEQ ID NO: 2621349 - RNA, 19 nt, Homo sapiens
  misc_RNA (1)...(19): siRNA sense strand
caaacuggaaggaaguaaa

SEQ ID NO: 2621350 - RNA, 19 nt, Homo sapiens
  misc_RNA (1)...(19): siRNA sense strand
uauaacaggugcagggcau

SEQ ID NO: 2621351 - RNA, 19 nt, Homo sapiens
  misc_RNA (1)...(19): siRNA sense strand
gguaacuauuagagaccau

SEQ ID NO: 2621352 - RNA, 19 nt, Homo sapiens
  misc_RNA (1)...(19): siRNA sense strand
uuucaagacaaauggcaaa

SEQ ID NO: 2621353 - RNA, 19 nt, Homo sapiens
  misc_RNA (1)...(19): siRNA sense strand
cuacacagguauaccagaa

SEQ ID NO: 2621354 - RNA, 19 nt, Homo sapiens
  misc_RNA (1)...(19): siRNA sense strand
cuaaacuacgugaagauaa

SEQ ID NO: 2621355 - RNA, 19 nt, Homo sapiens
  misc_RNA (1)...(19): siRNA sense strand
ggagaaacugaaagaaagu

SEQ ID NO: 2621356 - RNA, 19 nt, Homo sapiens
  misc_RNA (1)...(19): siRNA sense strand
aauuaagagccgaaaguga

SEQ ID NO: 2621357 - RNA, 19 nt, Homo sapiens
  misc_RNA (1)...(19): siRNA sense strand
caaaacugguggagauaau

SEQ ID NO: 2621358 - RNA, 19 nt, Homo sapiens
  misc_RNA (1)...(19): siRNA sense strand
gagaaaagugaaacugaua

SEQ ID NO: 2621359 - RNA, 19 nt, Homo sapiens
  misc_RNA (1)...(19): siRNA sense strand
ucuccuagaauuagagcua

SEQ ID NO: 2621360 - RNA, 19 nt, Homo sapiens
  misc_RNA (1)...(19): siRNA sense strand
caaauaacagaaagcacua

SEQ ID NO: 2621361 - RNA, 19 nt, Homo sapiens
  misc_RNA (1)...(19): siRNA sense strand
aggaaacuucuuugguaaa

SEQ ID NO: 2621362 - RNA, 19 nt, Homo sapiens
  misc_RNA (1)...(19): siRNA sense strand
guuucaggucagacagaua

SEQ ID NO: 2621363 - RNA, 19 nt, Homo sapiens
  misc_RNA (1)...(19): siRNA sense strand
guagauacagcuaguacaa

SEQ ID NO: 2621364 - RNA, 19 nt, Homo sapiens
  misc_RNA (1)...(19): siRNA sense strand
cuuccaaagauguuacaaa

SEQ ID NO: 2621365 - RNA, 19 nt, Homo sapiens
  misc_RNA (1)...(19): siRNA sense strand
augaugagguggaugaaaa

SEQ ID NO: 2621366 - RNA, 19 nt, Homo sapiens
  misc_RNA (1)...(19): siRNA sense strand
acgugcaacucuugaggaa

SEQ ID NO: 2621367 - RNA, 19 nt, Homo sapiens
  misc_RNA (1)...(19): siRNA sense strand
gcguagaggugguggccau

SEQ ID NO: 2621368 - RNA, 19 nt, Homo sapiens
  misc_RNA (1)...(19): siRNA sense strand
guucagaaguucaggcaga

SEQ ID NO: 2621369 - RNA, 19 nt, Homo sapiens
  misc_RNA (1)...(19): siRNA sense strand
uguuaagguccaagcgaaa

SEQ ID NO: 2621370 - RNA, 19 nt, Homo sapiens
  misc_RNA (1)...(19): siRNA sense strand
gguccaagcgaaagcucaa

SEQ ID NO: 2621371 - RNA, 19 nt, Homo sapiens
  misc_RNA (1)...(19): siRNA sense strand
aggaagaaggucagguuca

SEQ ID NO: 2621372 - RNA, 19 nt, Homo sapiens
  misc_RNA (1)...(19): siRNA sense strand
gugaugggucaguggagaa

SEQ ID NO: 2621373 - RNA, 19 nt, Homo sapiens
  misc_RNA (1)...(19): siRNA sense strand
gcaguucaguggacagcaa

SEQ ID NO: 2621374 - RNA, 19 nt, Homo sapiens
  misc_RNA (1)...(19): siRNA sense strand
cggcagagaggaugaggca

SEQ ID NO: 2621375 - RNA, 19 nt, Homo sapiens
  misc_RNA (1)...(19): siRNA sense strand
ggcaaagaguggagccgca

SEQ ID NO: 2621376 - RNA, 19 nt, Homo sapiens
  misc_RNA (1)...(19): siRNA sense strand
agaauaaaggugggaucaa

SEQ ID NO: 2621377 - RNA, 19 nt, Homo sapiens
  misc_RNA (1)...(19): siRNA sense strand
agaagaagcuaguggccac

SEQ ID NO: 2621378 - RNA, 19 nt, Homo sapiens
  misc_RNA (1)...(19): siRNA sense strand
ggguaagacagacgaggca

SEQ ID NO: 2621379 - RNA, 19 nt, Homo sapiens
  misc_RNA (1)...(19): siRNA sense strand
aagaagaggugcagggagc

SEQ ID NO: 2621380 - RNA, 19 nt, Homo sapiens
  misc_RNA (1)...(19): siRNA sense strand
gggaugaccaggagcagga

SEQ ID NO: 2621381 - RNA, 19 nt, Homo sapiens
  misc_RNA (1)...(19): siRNA sense strand
cuacaaagguggugcaucg

SEQ ID NO: 2621382 - RNA, 19 nt, Homo sapiens
  misc_RNA (1)...(19): siRNA sense strand
aggaaaacacccagcaaga

SEQ ID NO: 2621383 - RNA, 19 nt, Homo sapiens
  misc_RNA (1)...(19): siRNA sense strand
uuguuaagguccaagcgaa

SEQ ID NO: 2621384 - RNA, 19 nt, Homo sapiens
  misc_RNA (1)...(19): siRNA sense strand
gccagugacuucagcgaca

SEQ ID NO: 2621385 - RNA, 19 nt, Homo sapiens
  misc_RNA (1)...(19): siRNA sense strand
gggacauugaggaggccau

SEQ ID NO: 2621386 - RNA, 19 nt, Homo sapiens
  misc_RNA (1)...(19): siRNA sense strand
agguaucgacgaaggguca

SEQ ID NO: 2621387 - RNA, 19 nt, Homo sapiens
  misc_RNA (1)...(19): siRNA sense strand
gcagcacggcagagaggau

SEQ ID NO: 2621388 - RNA, 19 nt, Homo sapiens
  misc_RNA (1)...(19): siRNA sense strand
acagaauaaaggugggauc

SEQ ID NO: 2621389 - RNA, 19 nt, Homo sapiens
  misc_RNA (1)...(19): siRNA sense strand
gcgugcaggaagaagguca

SEQ ID NO: 2621390 - RNA, 19 nt, Homo sapiens
  misc_RNA (1)...(19): siRNA sense strand
cggaaaaggccaaggaguc

SEQ ID NO: 2621391 - RNA, 19 nt, Homo sapiens
  misc_RNA (1)...(19): siRNA sense strand
ggacagggacauugaggag

SEQ ID NO: 2621392 - RNA, 19 nt, Homo sapiens
  misc_RNA (1)...(19): siRNA sense strand
augggucaguggagaagaa

SEQ ID NO: 2621393 - RNA, 19 nt, Homo sapiens
  misc_RNA (1)...(19): siRNA sense strand
cccgagacccacaggaaaa

SEQ ID NO: 2621394 - RNA, 19 nt, Homo sapiens
  misc_RNA (1)...(19): siRNA sense strand
gaaggaaaccaaagcucca

SEQ ID NO: 2621395 - RNA, 19 nt, Homo sapiens
  misc_RNA (1)...(19): siRNA sense strand
ggacacaucugcugagcug

SEQ ID NO: 2621396 - RNA, 19 nt, Homo sapiens
  misc_RNA (1)...(19): siRNA sense strand
gagcaggaaauccggacau

SEQ ID NO: 2621397 - RNA, 19 nt, Homo sapiens
  misc_RNA (1)...(19): siRNA sense strand
ggaaaaggccaaggaguca

SEQ ID NO: 2621398 - RNA, 19 nt, Homo sapiens
  misc_RNA (1)...(19): siRNA sense strand
gaaugagaagagacagcau

SEQ ID NO: 2621399 - RNA, 19 nt, Homo sapiens
  misc_RNA (1)...(19): siRNA sense strand
aaaugcaggagguggugaa

SEQ ID NO: 2621400 - RNA, 19 nt, Homo sapiens
  misc_RNA (1)...(19): siRNA sense strand
ccaaggagucagugagcag

SEQ ID NO: 2621401 - RNA, 19 nt, Homo sapiens
  misc_RNA (1)...(19): siRNA sense strand
uuacauuggagcugggcua

SEQ ID NO: 2621402 - RNA, 19 nt, Homo sapiens
  misc_RNA (1)...(19): siRNA sense strand
augcagaagaaguaucaaa

SEQ ID NO: 2621403 - RNA, 19 nt, Homo sapiens
  misc_RNA (1)...(19): siRNA sense strand
acaucaaggaccacagcaa

SEQ ID NO: 2621404 - RNA, 19 nt, Homo sapiens
  misc_RNA (1)...(19): siRNA sense strand
cauuaauaacagagcaugu

SEQ ID NO: 2621405 - RNA, 19 nt, Homo sapiens
  misc_RNA (1)...(19): siRNA sense strand
ccauaugguugguugccuu

SEQ ID NO: 2621406 - RNA, 19 nt, Homo sapiens
  misc_RNA (1)...(19): siRNA sense strand
uuaaggaaauaaagggucu

SEQ ID NO: 2621407 - RNA, 19 nt, Homo sapiens
  misc_RNA (1)...(19): siRNA sense strand
gguuuggauuggaugcaga

SEQ ID NO: 2621408 - RNA, 19 nt, Homo sapiens
  misc_RNA (1)...(19): siRNA sense strand
cagcaaaagaaaugauagu

SEQ ID NO: 2621409 - RNA, 19 nt, Homo sapiens
  misc_RNA (1)...(19): siRNA sense strand
cugucuacuuucuggccua

SEQ ID NO: 2621410 - RNA, 19 nt, Homo sapiens
  misc_RNA (1)...(19): siRNA sense strand
gcauuugggcaacagggaa

SEQ ID NO: 2621411 - RNA, 19 nt, Homo sapiens
  misc_RNA (1)...(19): siRNA sense strand
ucaucuacaucaaggacca

SEQ ID NO: 2621412 - RNA, 19 nt, Homo sapiens
  misc_RNA (1)...(19): siRNA sense strand
agaaaggaauagaagacga

SEQ ID NO: 2621413 - RNA, 19 nt, Homo sapiens
  misc_RNA (1)...(19): siRNA sense strand
gcagaaaaggaaagcgaau

SEQ ID NO: 2621414 - RNA, 19 nt, Homo sapiens
  misc_RNA (1)...(19): siRNA sense strand
agaugagcugagugagaaa

SEQ ID NO: 2621415 - RNA, 19 nt, Homo sapiens
  misc_RNA (1)...(19): siRNA sense strand
acgaaugggaacaggagau

SEQ ID NO: 2621416 - RNA, 19 nt, Homo sapiens
  misc_RNA (1)...(19): siRNA sense strand
cggaggaccugaagcgagu

SEQ ID NO: 2621417 - RNA, 19 nt, Homo sapiens
  misc_RNA (1)...(19): siRNA sense strand
cggaaggaguuggcagaca

SEQ ID NO: 2621418 - RNA, 19 nt, Homo sapiens
  misc_RNA (1)...(19): siRNA sense strand
ucgacgaggacgacgacua

SEQ ID NO: 2621419 - RNA, 19 nt, Homo sapiens
  misc_RNA (1)...(19): siRNA sense strand
ugagaaaggaauagaagac

SEQ ID NO: 2621420 - RNA, 19 nt, Homo sapiens
  misc_RNA (1)...(19): siRNA sense strand
uggacgagcagcugagcau

SEQ ID NO: 2621421 - RNA, 19 nt, Homo sapiens
  misc_RNA (1)...(19): siRNA sense strand
cgcuguuccuggagagcau

SEQ ID NO: 2621422 - RNA, 19 nt, Homo sapiens
  misc_RNA (1)...(19): siRNA sense strand
ccgcagaaaaggaaagcga

SEQ ID NO: 2621423 - RNA, 19 nt, Homo sapiens
  misc_RNA (1)...(19): siRNA sense strand
uggauaaagucauggguau

SEQ ID NO: 2621424 - RNA, 19 nt, Homo sapiens
  misc_RNA (1)...(19): siRNA sense strand
ggauaaagucauggguaua

SEQ ID NO: 2621425 - RNA, 19 nt, Homo sapiens
  misc_RNA (1)...(19): siRNA sense strand
aggaaauacaagagaaaca

SEQ ID NO: 2621426 - RNA, 19 nt, Homo sapiens
  misc_RNA (1)...(19): siRNA sense strand
ugaggaaauacaagagaaa

SEQ ID NO: 2621427 - RNA, 19 nt, Homo sapiens
  misc_RNA (1)...(19): siRNA sense strand
gggccauuggagagagaaa

SEQ ID NO: 2621428 - RNA, 19 nt, Homo sapiens
  misc_RNA (1)...(19): siRNA sense strand
ccuaugaagaagaggaaga

SEQ ID NO: 2621429 - RNA, 19 nt, Homo sapiens
  misc_RNA (1)...(19): siRNA sense strand
aagaagaggaggagacaga

SEQ ID NO: 2621430 - RNA, 19 nt, Homo sapiens
  misc_RNA (1)...(19): siRNA sense strand
ucugaaaggcguaugguaa

SEQ ID NO: 2621431 - RNA, 19 nt, Homo sapiens
  misc_RNA (1)...(19): siRNA sense strand
cugaaaggcguaugguaaa

SEQ ID NO: 2621432 - RNA, 19 nt, Homo sapiens
  misc_RNA (1)...(19): siRNA sense strand
acacagacguggaggagga

SEQ ID NO: 2621433 - RNA, 19 nt, Homo sapiens
  misc_RNA (1)...(19): siRNA sense strand
ccugaaagagauagggaga

SEQ ID NO: 2621434 - RNA, 19 nt, Homo sapiens
  misc_RNA (1)...(19): siRNA sense strand
ccacaggaagggagagaga

SEQ ID NO: 2621435 - RNA, 19 nt, Homo sapiens
  misc_RNA (1)...(19): siRNA sense strand
ggcaauaccaggagaccaa

SEQ ID NO: 2621436 - RNA, 19 nt, Homo sapiens
  misc_RNA (1)...(19): siRNA sense strand
gccacuaggugcaggacaa

SEQ ID NO: 2621437 - RNA, 19 nt, Homo sapiens
  misc_RNA (1)...(19): siRNA sense strand
aggaagggagagagaacaa

SEQ ID NO: 2621438 - RNA, 19 nt, Homo sapiens
  misc_RNA (1)...(19): siRNA sense strand
ugagagagaaguagagaga

SEQ ID NO: 2621439 - RNA, 19 nt, Homo sapiens
  misc_RNA (1)...(19): siRNA sense strand
aggcagaggaggagcccaa

SEQ ID NO: 2621440 - RNA, 19 nt, Homo sapiens
  misc_RNA (1)...(19): siRNA sense strand
auacagaugacgaggaaga

SEQ ID NO: 2621441 - RNA, 19 nt, Homo sapiens
  misc_RNA (1)...(19): siRNA sense strand
cagccgaguuagaagagaa

SEQ ID NO: 2621442 - RNA, 19 nt, Homo sapiens
  misc_RNA (1)...(19): siRNA sense strand
agugaauccuugaggugua

SEQ ID NO: 2621443 - RNA, 19 nt, Homo sapiens
  misc_RNA (1)...(19): siRNA sense strand
agaugugacaggagaggaa

SEQ ID NO: 2621444 - RNA, 19 nt, Homo sapiens
  misc_RNA (1)...(19): siRNA sense strand
ccacuaggagaaagacaaa

SEQ ID NO: 2621445 - RNA, 19 nt, Homo sapiens
  misc_RNA (1)...(19): siRNA sense strand
ccuauaagccucagagagu

SEQ ID NO: 2621446 - RNA, 19 nt, Homo sapiens
  misc_RNA (1)...(19): siRNA sense strand
agaaacaaguacagaagca

SEQ ID NO: 2621447 - RNA, 19 nt, Homo sapiens
  misc_RNA (1)...(19): siRNA sense strand
acuaggagaaagacaaaua

SEQ ID NO: 2621448 - RNA, 19 nt, Homo sapiens
  misc_RNA (1)...(19): siRNA sense strand
ugacaggagaggaagaauu

SEQ ID NO: 2621449 - RNA, 19 nt, Homo sapiens
  misc_RNA (1)...(19): siRNA sense strand
gugcaaguccugaaagaga

SEQ ID NO: 2621450 - RNA, 19 nt, Homo sapiens
  misc_RNA (1)...(19): siRNA sense strand
ccaaggacucugaagacaa

SEQ ID NO: 2621451 - RNA, 19 nt, Homo sapiens
  misc_RNA (1)...(19): siRNA sense strand
agagagaaacugagaaacu

SEQ ID NO: 2621452 - RNA, 19 nt, Homo sapiens
  misc_RNA (1)...(19): siRNA sense strand
cggaggaggaaguagauuu

SEQ ID NO: 2621453 - RNA, 19 nt, Homo sapiens
  misc_RNA (1)...(19): siRNA sense strand
ugugauaguuccagagagu

SEQ ID NO: 2621454 - RNA, 19 nt, Homo sapiens
  misc_RNA (1)...(19): siRNA sense strand
ugugguaucucuagaggaa

SEQ ID NO: 2621455 - RNA, 19 nt, Homo sapiens
  misc_RNA (1)...(19): siRNA sense strand
agguagaaauugagacauc

SEQ ID NO: 2621456 - RNA, 19 nt, Homo sapiens
  misc_RNA (1)...(19): siRNA sense strand
aagugauccuggagagaga

SEQ ID NO: 2621457 - RNA, 19 nt, Homo sapiens
  misc_RNA (1)...(19): siRNA sense strand
uuaucaaggaagaggaaga

SEQ ID NO: 2621458 - RNA, 19 nt, Homo sapiens
  misc_RNA (1)...(19): siRNA sense strand
gaaggcugcuagagggcua

SEQ ID NO: 2621459 - RNA, 19 nt, Homo sapiens
  misc_RNA (1)...(19): siRNA sense strand
aaaccaggcaagagaaaga

SEQ ID NO: 2621460 - RNA, 19 nt, Homo sapiens
  misc_RNA (1)...(19): siRNA sense strand
ggguauaccaaaagaaaca

SEQ ID NO: 2621461 - RNA, 19 nt, Homo sapiens
  misc_RNA (1)...(19): siRNA sense strand
gggagaguuugaagguaga

SEQ ID NO: 2621462 - RNA, 19 nt, Homo sapiens
  misc_RNA (1)...(19): siRNA sense strand
ugauaguuccagagaguga

SEQ ID NO: 2621463 - RNA, 19 nt, Homo sapiens
  misc_RNA (1)...(19): siRNA sense strand
caagaggggugcagggaau

SEQ ID NO: 2621464 - RNA, 19 nt, Homo sapiens
  misc_RNA (1)...(19): siRNA sense strand
cugaggaaauacaagagaa

SEQ ID NO: 2621465 - RNA, 19 nt, Homo sapiens
  misc_RNA (1)...(19): siRNA sense strand
gaaagagagaccaggcaga

SEQ ID NO: 2621466 - RNA, 19 nt, Homo sapiens
  misc_RNA (1)...(19): siRNA sense strand
gcaagaugggagucaggaa

SEQ ID NO: 2621467 - RNA, 19 nt, Homo sapiens
  misc_RNA (1)...(19): siRNA sense strand
caacaugcagagauugaaa

SEQ ID NO: 2621468 - RNA, 19 nt, Homo sapiens
  misc_RNA (1)...(19): siRNA sense strand
agacagaugugacaggaga

SEQ ID NO: 2621469 - RNA, 19 nt, Homo sapiens
  misc_RNA (1)...(19): siRNA sense strand
gccacuaggagcaggacaa

SEQ ID NO: 2621470 - RNA, 19 nt, Homo sapiens
  misc_RNA (1)...(19): siRNA sense strand
ugagagagacagugacaca

SEQ ID NO: 2621471 - RNA, 19 nt, Homo sapiens
  misc_RNA (1)...(19): siRNA sense strand
ggagagagcucaugaggug

SEQ ID NO: 2621472 - RNA, 19 nt, Homo sapiens
  misc_RNA (1)...(19): siRNA sense strand
cuagagacacccagagaca

SEQ ID NO: 2621473 - RNA, 19 nt, Homo sapiens
  misc_RNA (1)...(19): siRNA sense strand
ugaaagagauagggagagu

SEQ ID NO: 2621474 - RNA, 19 nt, Homo sapiens
  misc_RNA (1)...(19): siRNA sense strand
uagaagagaaggugcccaa

SEQ ID NO: 2621475 - RNA, 19 nt, Homo sapiens
  misc_RNA (1)...(19): siRNA sense strand
aggaggagcccaacagaau

SEQ ID NO: 2621476 - RNA, 19 nt, Homo sapiens
  misc_RNA (1)...(19): siRNA sense strand
cagauguggaagaaggcaa

SEQ ID NO: 2621477 - RNA, 19 nt, Homo sapiens
  misc_RNA (1)...(19): siRNA sense strand
cagacguggaggaggaaga

SEQ ID NO: 2621478 - RNA, 19 nt, Homo sapiens
  misc_RNA (1)...(19): siRNA sense strand
ggaagagcucccaguggaa

SEQ ID NO: 2621479 - RNA, 19 nt, Homo sapiens
  misc_RNA (1)...(19): siRNA sense strand
ggaaagugcaaguccugaa

SEQ ID NO: 2621480 - RNA, 19 nt, Homo sapiens
  misc_RNA (1)...(19): siRNA sense strand
ucaaggaagaggaagaaga

SEQ ID NO: 2621481 - RNA, 19 nt, Homo sapiens
  misc_RNA (1)...(19): siRNA sense strand
ucacagaucugguggugga

SEQ ID NO: 2621482 - RNA, 19 nt, Homo sapiens
  misc_RNA (1)...(19): siRNA sense strand
agucauggguauaccaaaa

SEQ ID NO: 2621483 - RNA, 19 nt, Homo sapiens
  misc_RNA (1)...(19): siRNA sense strand
augaauauguggugaccga

SEQ ID NO: 2621484 - RNA, 19 nt, Homo sapiens
  misc_RNA (1)...(19): siRNA sense strand
gcaaguccugaaagagaua

SEQ ID NO: 2621485 - RNA, 19 nt, Homo sapiens
  misc_RNA (1)...(19): siRNA sense strand
agagauagggagaguuuga

SEQ ID NO: 2621486 - RNA, 19 nt, Homo sapiens
  misc_RNA (1)...(19): siRNA sense strand
gaguuugaagguagaaauu

SEQ ID NO: 2621487 - RNA, 19 nt, Homo sapiens
  misc_RNA (1)...(19): siRNA sense strand
agaagauacugcagagaag

SEQ ID NO: 2621488 - RNA, 19 nt, Homo sapiens
  misc_RNA (1)...(19): siRNA sense strand
ggagagggacaaugauaca

SEQ ID NO: 2621489 - RNA, 19 nt, Homo sapiens
  misc_RNA (1)...(19): siRNA sense strand
gagaggaagaauuaaccaa

SEQ ID NO: 2621490 - RNA, 19 nt, Homo sapiens
  misc_RNA (1)...(19): siRNA sense strand
cuucauagucaaagagauu

SEQ ID NO: 2621491 - RNA, 19 nt, Homo sapiens
  misc_RNA (1)...(19): siRNA sense strand
guaagaaguuggaggcagu

SEQ ID NO: 2621492 - RNA, 19 nt, Homo sapiens
  misc_RNA (1)...(19): siRNA sense strand
gcgcaguggugaaggagga

SEQ ID NO: 2621493 - RNA, 19 nt, Homo sapiens
  misc_RNA (1)...(19): siRNA sense strand
aggcaaauacgaaggccaa

SEQ ID NO: 2621494 - RNA, 19 nt, Homo sapiens
  misc_RNA (1)...(19): siRNA sense strand
ccucaaagugaacgaguau

SEQ ID NO: 2621495 - RNA, 19 nt, Homo sapiens
  misc_RNA (1)...(19): siRNA sense strand
ccuccaaagcccacacaaa

SEQ ID NO: 2621496 - RNA, 19 nt, Homo sapiens
  misc_RNA (1)...(19): siRNA sense strand
ccuugcaacuuaagagaga

SEQ ID NO: 2621497 - RNA, 19 nt, Homo sapiens
  misc_RNA (1)...(19): siRNA sense strand
ccagaaugcaagagaagca

SEQ ID NO: 2621498 - RNA, 19 nt, Homo sapiens
  misc_RNA (1)...(19): siRNA sense strand
cgaacauaccucaaggauu

SEQ ID NO: 2621499 - RNA, 19 nt, Homo sapiens
  misc_RNA (1)...(19): siRNA sense strand
caguggaagaacucagaaa

SEQ ID NO: 2621500 - RNA, 19 nt, Homo sapiens
  misc_RNA (1)...(19): siRNA sense strand
ggaagauuuguguggagua

SEQ ID NO: 2621501 - RNA, 19 nt, Homo sapiens
  misc_RNA (1)...(19): siRNA sense strand
guggaagaacucagaaaca

SEQ ID NO: 2621502 - RNA, 19 nt, Homo sapiens
  misc_RNA (1)...(19): siRNA sense strand
uggcauacacaaagacuau

SEQ ID NO: 2621503 - RNA, 19 nt, Homo sapiens
  misc_RNA (1)...(19): siRNA sense strand
ccauaugaaagaaggcaca

SEQ ID NO: 2621504 - RNA, 19 nt, Homo sapiens
  misc_RNA (1)...(19): siRNA sense strand
acaguggaaugaagagaau

SEQ ID NO: 2621505 - RNA, 19 nt, Homo sapiens
  misc_RNA (1)...(19): siRNA sense strand
aguuggaggcaguguacaa

SEQ ID NO: 2621506 - RNA, 19 nt, Homo sapiens
  misc_RNA (1)...(19): siRNA sense strand
uggacaacaccauggaaau

SEQ ID NO: 2621507 - RNA, 19 nt, Homo sapiens
  misc_RNA (1)...(19): siRNA sense strand
aaacuaagcuucaagagga

SEQ ID NO: 2621508 - RNA, 19 nt, Homo sapiens
  misc_RNA (1)...(19): siRNA sense strand
cgucaagaguccagcugca

SEQ ID NO: 2621509 - RNA, 19 nt, Homo sapiens
  misc_RNA (1)...(19): siRNA sense strand
guuggguaguagagaugaa

SEQ ID NO: 2621510 - RNA, 19 nt, Homo sapiens
  misc_RNA (1)...(19): siRNA sense strand
cugccagaguuuaaggaca

SEQ ID NO: 2621511 - RNA, 19 nt, Homo sapiens
  misc_RNA (1)...(19): siRNA sense strand
cuggacaacaccauggaaa

SEQ ID NO: 2621512 - RNA, 19 nt, Homo sapiens
  misc_RNA (1)...(19): siRNA sense strand
aaggcaugcugguggaaga

SEQ ID NO: 2621513 - RNA, 19 nt, Homo sapiens
  misc_RNA (1)...(19): siRNA sense strand
aacuaagcuucaagaggaa

SEQ ID NO: 2621514 - RNA, 19 nt, Homo sapiens
  misc_RNA (1)...(19): siRNA sense strand
ggguaguagagaugaaugu

SEQ ID NO: 2621515 - RNA, 19 nt, Homo sapiens
  misc_RNA (1)...(19): siRNA sense strand
ccauggaaauauuugacau

SEQ ID NO: 2621516 - RNA, 19 nt, Homo sapiens
  misc_RNA (1)...(19): siRNA sense strand
guccaagguccguaaacua

SEQ ID NO: 2621517 - RNA, 19 nt, Homo sapiens
  misc_RNA (1)...(19): siRNA sense strand
augaaacgcuggaccgaga

SEQ ID NO: 2621518 - RNA, 19 nt, Homo sapiens
  misc_RNA (1)...(19): siRNA sense strand
caaccuaagccaaaagcaa

SEQ ID NO: 2621519 - RNA, 19 nt, Homo sapiens
  misc_RNA (1)...(19): siRNA sense strand
uggagaaagagaaguggau

SEQ ID NO: 2621520 - RNA, 19 nt, Homo sapiens
  misc_RNA (1)...(19): siRNA sense strand
gugcagcugucgagaacca

SEQ ID NO: 2621521 - RNA, 19 nt, Homo sapiens
  misc_RNA (1)...(19): siRNA sense strand
agauuuguguggaguauca

SEQ ID NO: 2621522 - RNA, 19 nt, Homo sapiens
  misc_RNA (1)...(19): siRNA sense strand
uuucaaagacaguggaaug

SEQ ID NO: 2621523 - RNA, 19 nt, Homo sapiens
  misc_RNA (1)...(19): siRNA sense strand
gaagaaagugauaacgagu

SEQ ID NO: 2621524 - RNA, 19 nt, Homo sapiens
  misc_RNA (1)...(19): siRNA sense strand
gcugagagcaaguacacau

SEQ ID NO: 2621525 - RNA, 19 nt, Homo sapiens
  misc_RNA (1)...(19): siRNA sense strand
gcuacaagaagaauauaca

SEQ ID NO: 2621526 - RNA, 19 nt, Homo sapiens
  misc_RNA (1)...(19): siRNA sense strand
ggccgauggcauacacaaa

SEQ ID NO: 2621527 - RNA, 19 nt, Homo sapiens
  misc_RNA (1)...(19): siRNA sense strand
ccagcuacuuccaaagaca

SEQ ID NO: 2621528 - RNA, 19 nt, Homo sapiens
  misc_RNA (1)...(19): siRNA sense strand
acaaggaguuugagcugca

SEQ ID NO: 2621529 - RNA, 19 nt, Homo sapiens
  misc_RNA (1)...(19): siRNA sense strand
cguuuaaaccugguagaau

SEQ ID NO: 2621530 - RNA, 19 nt, Homo sapiens
  misc_RNA (1)...(19): siRNA sense strand
agagaugaauguaagaacu

SEQ ID NO: 2621531 - RNA, 19 nt, Homo sapiens
  misc_RNA (1)...(19): siRNA sense strand
aggcaguguacaaggaguu

SEQ ID NO: 2621532 - RNA, 19 nt, Homo sapiens
  misc_RNA (1)...(19): siRNA sense strand
uggaagaaagugauaacga

SEQ ID NO: 2621533 - RNA, 19 nt, Homo sapiens
  misc_RNA (1)...(19): siRNA sense strand
aaauaggagauuacgauga

SEQ ID NO: 2621534 - RNA, 19 nt, Homo sapiens
  misc_RNA (1)...(19): siRNA sense strand
aguuggaaauguacggcau

SEQ ID NO: 2621535 - RNA, 19 nt, Homo sapiens
  misc_RNA (1)...(19): siRNA sense strand
uaacggagcugcagcggga

SEQ ID NO: 2621536 - RNA, 19 nt, Homo sapiens
  misc_RNA (1)...(19): siRNA sense strand
aaacccaucauuaggcaaa

SEQ ID NO: 2621537 - RNA, 19 nt, Homo sapiens
  misc_RNA (1)...(19): siRNA sense strand
ggaagaacucagaaacaac

SEQ ID NO: 2621538 - RNA, 19 nt, Homo sapiens
  misc_RNA (1)...(19): siRNA sense strand
augaaagaaggcacagcaa

SEQ ID NO: 2621539 - RNA, 19 nt, Homo sapiens
  misc_RNA (1)...(19): siRNA sense strand
gggagauagaaggaacaua

SEQ ID NO: 2621540 - RNA, 19 nt, Homo sapiens
  misc_RNA (1)...(19): siRNA sense strand
cggaaauaggagauuacga

SEQ ID NO: 2621541 - RNA, 19 nt, Homo sapiens
  misc_RNA (1)...(19): siRNA sense strand
uggaccaaccuaagccaaa

SEQ ID NO: 2621542 - RNA, 19 nt, Homo sapiens
  misc_RNA (1)...(19): siRNA sense strand
gagaaagagaaguggaugc

SEQ ID NO: 2621543 - RNA, 19 nt, Homo sapiens
  misc_RNA (1)...(19): siRNA sense strand
ucagaaacaacuaguagau

SEQ ID NO: 2621544 - RNA, 19 nt, Homo sapiens
  misc_RNA (1)...(19): siRNA sense strand
aauacgaaggccaaagaau

SEQ ID NO: 2621545 - RNA, 19 nt, Homo sapiens
  misc_RNA (1)...(19): siRNA sense strand
agaguaaagcugcuggaca

SEQ ID NO: 2621546 - RNA, 19 nt, Homo sapiens
  misc_RNA (1)...(19): siRNA sense strand
cagauacaguggaagaacu

SEQ ID NO: 2621547 - RNA, 19 nt, Homo sapiens
  misc_RNA (1)...(19): siRNA sense strand
ccaccacacuacagcacau

SEQ ID NO: 2621548 - RNA, 19 nt, Homo sapiens
  misc_RNA (1)...(19): siRNA sense strand
ccaagaagggccugcagca

SEQ ID NO: 2621549 - RNA, 19 nt, Homo sapiens
  misc_RNA (1)...(19): siRNA sense strand
gguggaagaaagugauaac

SEQ ID NO: 2621550 - RNA, 19 nt, Homo sapiens
  misc_RNA (1)...(19): siRNA sense strand
gcagggaguucauccguga

SEQ ID NO: 2621551 - RNA, 19 nt, Homo sapiens
  misc_RNA (1)...(19): siRNA sense strand
acuaagaagucaugggcaa

SEQ ID NO: 2621552 - RNA, 19 nt, Homo sapiens
  misc_RNA (1)...(19): siRNA sense strand
agaggaaggaucagagaaa

SEQ ID NO: 2621553 - RNA, 19 nt, Homo sapiens
  misc_RNA (1)...(19): siRNA sense strand
ccguuuaggaagaaagaua

SEQ ID NO: 2621554 - RNA, 19 nt, Homo sapiens
  misc_RNA (1)...(19): siRNA sense strand
cggauauaguucuggaaga

SEQ ID NO: 2621555 - RNA, 19 nt, Homo sapiens
  misc_RNA (1)...(19): siRNA sense strand
cugcauggcuaaaggugaa

SEQ ID NO: 2621556 - RNA, 19 nt, Homo sapiens
  misc_RNA (1)...(19): siRNA sense strand
aguuaaaagccaaggaaau

SEQ ID NO: 2621557 - RNA, 19 nt, Homo sapiens
  misc_RNA (1)...(19): siRNA sense strand
ggaugaaagugugggaaca

SEQ ID NO: 2621558 - RNA, 19 nt, Homo sapiens
  misc_RNA (1)...(19): siRNA sense strand
cgaauggaagagauggaaa

SEQ ID NO: 2621559 - RNA, 19 nt, Homo sapiens
  misc_RNA (1)...(19): siRNA sense strand
gaauggaagagauggaaaa

SEQ ID NO: 2621560 - RNA, 19 nt, Homo sapiens
  misc_RNA (1)...(19): siRNA sense strand
agccagaagagaugugaaa

SEQ ID NO: 2621561 - RNA, 19 nt, Homo sapiens
  misc_RNA (1)...(19): siRNA sense strand
ccaaaguacuucagaccca

SEQ ID NO: 2621562 - RNA, 19 nt, Homo sapiens
  misc_RNA (1)...(19): siRNA sense strand
gggaacagaggaaggauca

SEQ ID NO: 2621563 - RNA, 19 nt, Homo sapiens
  misc_RNA (1)...(19): siRNA sense strand
cgaagacaguggaucgcaa

SEQ ID NO: 2621564 - RNA, 19 nt, Homo sapiens
  misc_RNA (1)...(19): siRNA sense strand
uggaaaggaaggaaucaaa

SEQ ID NO: 2621565 - RNA, 19 nt, Homo sapiens
  misc_RNA (1)...(19): siRNA sense strand
agguguuagccguggcaaa

SEQ ID NO: 2621566 - RNA, 19 nt, Homo sapiens
  misc_RNA (1)...(19): siRNA sense strand
ccgcaaagcugaaagaggu

SEQ ID NO: 2621567 - RNA, 19 nt, Homo sapiens
  misc_RNA (1)...(19): siRNA sense strand
cugaagaaauguauagacu

SEQ ID NO: 2621568 - RNA, 19 nt, Homo sapiens
  misc_RNA (1)...(19): siRNA sense strand
aagaaauccaggaagaauu

SEQ ID NO: 2621569 - RNA, 19 nt, Homo sapiens
  misc_RNA (1)...(19): siRNA sense strand
ggaagaaaacaaugaccaa

SEQ ID NO: 2621570 - RNA, 19 nt, Homo sapiens
  misc_RNA (1)...(19): siRNA sense strand
gucaguaaacacagcgaaa

SEQ ID NO: 2621571 - RNA, 19 nt, Homo sapiens
  misc_RNA (1)...(19): siRNA sense strand
guugaggacagcaaggaua

SEQ ID NO: 2621572 - RNA, 19 nt, Homo sapiens
  misc_RNA (1)...(19): siRNA sense strand
aggauaugugcgaagauua

SEQ ID NO: 2621573 - RNA, 19 nt, Homo sapiens
  misc_RNA (1)...(19): siRNA sense strand
gcuucaaagacgagguguu

SEQ ID NO: 2621574 - RNA, 19 nt, Homo sapiens
  misc_RNA (1)...(19): siRNA sense strand
agucaugggcaaugucuaa

SEQ ID NO: 2621575 - RNA, 19 nt, Homo sapiens
  misc_RNA (1)...(19): siRNA sense strand
ccaccuagccagaagagau

SEQ ID NO: 2621576 - RNA, 19 nt, Homo sapiens
  misc_RNA (1)...(19): siRNA sense strand
ccaaaagauugaaggaacu

SEQ ID NO: 2621577 - RNA, 19 nt, Homo sapiens
  misc_RNA (1)...(19): siRNA sense strand
ugugaaacgaagacaauuu

SEQ ID NO: 2621578 - RNA, 19 nt, Homo sapiens
  misc_RNA (1)...(19): siRNA sense strand
cugucaagcuggaugcaga

SEQ ID NO: 2621579 - RNA, 19 nt, Homo sapiens
  misc_RNA (1)...(19): siRNA sense strand
gauugaaggaacuagaaga

SEQ ID NO: 2621580 - RNA, 19 nt, Homo sapiens
  misc_RNA (1)...(19): siRNA sense strand
gguaaaagaaauccaggaa

SEQ ID NO: 2621581 - RNA, 19 nt, Homo sapiens
  misc_RNA (1)...(19): siRNA sense strand
cuacagaagcaaauauuca

SEQ ID NO: 2621582 - RNA, 19 nt, Homo sapiens
  misc_RNA (1)...(19): siRNA sense strand
gaguuaaaagccaaggaaa

SEQ ID NO: 2621583 - RNA, 19 nt, Homo sapiens
  misc_RNA (1)...(19): siRNA sense strand
ucuuagaggcugcuacaua

SEQ ID NO: 2621584 - RNA, 19 nt, Homo sapiens
  misc_RNA (1)...(19): siRNA sense strand
uuguaaagaugcagauugu

SEQ ID NO: 2621585 - RNA, 19 nt, Homo sapiens
  misc_RNA (1)...(19): siRNA sense strand
ccaggaagaauuggauaaa

SEQ ID NO: 2621586 - RNA, 19 nt, Homo sapiens
  misc_RNA (1)...(19): siRNA sense strand
ccugaugugguuauagaua

SEQ ID NO: 2621587 - RNA, 19 nt, Homo sapiens
  misc_RNA (1)...(19): siRNA sense strand
gagagauggccaaguacau

SEQ ID NO: 2621588 - RNA, 19 nt, Homo sapiens
  misc_RNA (1)...(19): siRNA sense strand
agaugugaaacgaagacaa

SEQ ID NO: 2621589 - RNA, 19 nt, Homo sapiens
  misc_RNA (1)...(19): siRNA sense strand
ugcaacaaauugaggcuuu

SEQ ID NO: 2621590 - RNA, 19 nt, Homo sapiens
  misc_RNA (1)...(19): siRNA sense strand
uggaaucucuccuggaaaa

SEQ ID NO: 2621591 - RNA, 19 nt, Homo sapiens
  misc_RNA (1)...(19): siRNA sense strand
cccagagguugcagaguga

SEQ ID NO: 2621592 - RNA, 19 nt, Homo sapiens
  misc_RNA (1)...(19): siRNA sense strand
uaaaugugcugcauggcua

SEQ ID NO: 2621593 - RNA, 19 nt, Homo sapiens
  misc_RNA (1)...(19): siRNA sense strand
aggcaguucuggaucguuu

SEQ ID NO: 2621594 - RNA, 19 nt, Homo sapiens
  misc_RNA (1)...(19): siRNA sense strand
ggauaaauugaguccacau

SEQ ID NO: 2621595 - RNA, 19 nt, Homo sapiens
  misc_RNA (1)...(19): siRNA sense strand
agugaaauucggagcagau

SEQ ID NO: 2621596 - RNA, 19 nt, Homo sapiens
  misc_RNA (1)...(19): siRNA sense strand
auguauuagaugcggauau

SEQ ID NO: 2621597 - RNA, 19 nt, Homo sapiens
  misc_RNA (1)...(19): siRNA sense strand
gugcaagcuucaaagacga

SEQ ID NO: 2621598 - RNA, 19 nt, Homo sapiens
  misc_RNA (1)...(19): siRNA sense strand
cgcaaagcugaaagaggua

SEQ ID NO: 2621599 - RNA, 19 nt, Homo sapiens
  misc_RNA (1)...(19): siRNA sense strand
uggucaaggcccagagagu

SEQ ID NO: 2621600 - RNA, 19 nt, Homo sapiens
  misc_RNA (1)...(19): siRNA sense strand
cugaugugguuauagauau

SEQ ID NO: 2621601 - RNA, 19 nt, Homo sapiens
  misc_RNA (1)...(19): siRNA sense strand
guuaaaagccaaggaaauu

SEQ ID NO: 2621602 - RNA, 19 nt, Homo sapiens
  misc_RNA (1)...(19): siRNA sense strand
gucaaggcccagagaguca

SEQ ID NO: 2621603 - RNA, 19 nt, Homo sapiens
  misc_RNA (1)...(19): siRNA sense strand
aagugugggaacagaggaa

SEQ ID NO: 2621604 - RNA, 19 nt, Homo sapiens
  misc_RNA (1)...(19): siRNA sense strand
uuucagaagagcugguaga

SEQ ID NO: 2621605 - RNA, 19 nt, Homo sapiens
  misc_RNA (1)...(19): siRNA sense strand
ccaagagagacuuagcuau

SEQ ID NO: 2621606 - RNA, 19 nt, Homo sapiens
  misc_RNA (1)...(19): siRNA sense strand
agaaugugccguuuaggaa

SEQ ID NO: 2621607 - RNA, 19 nt, Homo sapiens
  misc_RNA (1)...(19): siRNA sense strand
gugaagaaggagugggaga

SEQ ID NO: 2621608 - RNA, 19 nt, Homo sapiens
  misc_RNA (1)...(19): siRNA sense strand
cgaggaaacaguuggguca

SEQ ID NO: 2621609 - RNA, 19 nt, Homo sapiens
  misc_RNA (1)...(19): siRNA sense strand
caguaugggaagugcguuu

SEQ ID NO: 2621610 - RNA, 19 nt, Homo sapiens
  misc_RNA (1)...(19): siRNA sense strand
ggaaccaaggaaaggacaa

SEQ ID NO: 2621611 - RNA, 19 nt, Homo sapiens
  misc_RNA (1)...(19): siRNA sense strand
aggagaugccggcaggaaa

SEQ ID NO: 2621612 - RNA, 19 nt, Homo sapiens
  misc_RNA (1)...(19): siRNA sense strand
gcaaugaggcuguacguca

SEQ ID NO: 2621613 - RNA, 19 nt, Homo sapiens
  misc_RNA (1)...(19): siRNA sense strand
agaaggagugggagagcau

SEQ ID NO: 2621614 - RNA, 19 nt, Homo sapiens
  misc_RNA (1)...(19): siRNA sense strand
cggccugacaagagccuua

SEQ ID NO: 2621615 - RNA, 19 nt, Homo sapiens
  misc_RNA (1)...(19): siRNA sense strand
agucaaguaaagaguggaa

SEQ ID NO: 2621616 - RNA, 19 nt, Homo sapiens
  misc_RNA (1)...(19): siRNA sense strand
aggaaaggacaaaugguga

SEQ ID NO: 2621617 - RNA, 19 nt, Homo sapiens
  misc_RNA (1)...(19): siRNA sense strand
gcggaaagcuaaggaggca

SEQ ID NO: 2621618 - RNA, 19 nt, Homo sapiens
  misc_RNA (1)...(19): siRNA sense strand
aagugaagggagaggagau

SEQ ID NO: 2621619 - RNA, 19 nt, Homo sapiens
  misc_RNA (1)...(19): siRNA sense strand
gcagagaugcugaagggca

SEQ ID NO: 2621620 - RNA, 19 nt, Homo sapiens
  misc_RNA (1)...(19): siRNA sense strand
cgccucaagugaagggaga

SEQ ID NO: 2621621 - RNA, 19 nt, Homo sapiens
  misc_RNA (1)...(19): siRNA sense strand
ccaguggaacagagcacaa

SEQ ID NO: 2621622 - RNA, 19 nt, Homo sapiens
  misc_RNA (1)...(19): siRNA sense strand
uguacgucauggugaagaa

SEQ ID NO: 2621623 - RNA, 19 nt, Homo sapiens
  misc_RNA (1)...(19): siRNA sense strand
cuuucaagagucaaguaaa

SEQ ID NO: 2621624 - RNA, 19 nt, Homo sapiens
  misc_RNA (1)...(19): siRNA sense strand
gcccaaaauuauccagcaa

SEQ ID NO: 2621625 - RNA, 19 nt, Homo sapiens
  misc_RNA (1)...(19): siRNA sense strand
cugcaagaguggcugcuga

SEQ ID NO: 2621626 - RNA, 19 nt, Homo sapiens
  misc_RNA (1)...(19): siRNA sense strand
gggacaucgagcauaagaa

SEQ ID NO: 2621627 - RNA, 19 nt, Homo sapiens
  misc_RNA (1)...(19): siRNA sense strand
gcagaauucuaguggggca

SEQ ID NO: 2621628 - RNA, 19 nt, Homo sapiens
  misc_RNA (1)...(19): siRNA sense strand
acgucauggugaagaagga

SEQ ID NO: 2621629 - RNA, 19 nt, Homo sapiens
  misc_RNA (1)...(19): siRNA sense strand
ugacaagagccuuagccuu

SEQ ID NO: 2621630 - RNA, 19 nt, Homo sapiens
  misc_RNA (1)...(19): siRNA sense strand
ucgugaaccaguaugggaa

SEQ ID NO: 2621631 - RNA, 19 nt, Homo sapiens
  misc_RNA (1)...(19): siRNA sense strand
cagagaugcugaagggcag

SEQ ID NO: 2621632 - RNA, 19 nt, Homo sapiens
  misc_RNA (1)...(19): siRNA sense strand
ccuuucaagagucaaguaa

SEQ ID NO: 2621633 - RNA, 19 nt, Homo sapiens
  misc_RNA (1)...(19): siRNA sense strand
guaagcaagaagccagcaa

SEQ ID NO: 2621634 - RNA, 19 nt, Homo sapiens
  misc_RNA (1)...(19): siRNA sense strand
uggugaagaaggaguggga

SEQ ID NO: 2621635 - RNA, 19 nt, Homo sapiens
  misc_RNA (1)...(19): siRNA sense strand
ugagaaaaguacagaacaa

SEQ ID NO: 2621636 - RNA, 19 nt, Homo sapiens
  misc_RNA (1)...(19): siRNA sense strand
auacauugcaggaggagaa

SEQ ID NO: 2621637 - RNA, 19 nt, Homo sapiens
  misc_RNA (1)...(19): siRNA sense strand
cagcaaaagaaaaggaaga

SEQ ID NO: 2621638 - RNA, 19 nt, Homo sapiens
  misc_RNA (1)...(19): siRNA sense strand
caaguagagaggaggaaau

SEQ ID NO: 2621639 - RNA, 19 nt, Homo sapiens
  misc_RNA (1)...(19): siRNA sense strand
auacagaagaggucaggaa

SEQ ID NO: 2621640 - RNA, 19 nt, Homo sapiens
  misc_RNA (1)...(19): siRNA sense strand
aggaaaugccaguugaaaa

SEQ ID NO: 2621641 - RNA, 19 nt, Homo sapiens
  misc_RNA (1)...(19): siRNA sense strand
cgucaaacuuaaagauuac

SEQ ID NO: 2621642 - RNA, 19 nt, Homo sapiens
  misc_RNA (1)...(19): siRNA sense strand
ccaaggaaacacuggaaca

SEQ ID NO: 2621643 - RNA, 19 nt, Homo sapiens
  misc_RNA (1)...(19): siRNA sense strand
uugugaaaucuguggcaaa

SEQ ID NO: 2621644 - RNA, 19 nt, Homo sapiens
  misc_RNA (1)...(19): siRNA sense strand
cugcagaggaagaaauaca

SEQ ID NO: 2621645 - RNA, 19 nt, Homo sapiens
  misc_RNA (1)...(19): siRNA sense strand
cuuuaaucguggagaaugu

SEQ ID NO: 2621646 - RNA, 19 nt, Homo sapiens
  misc_RNA (1)...(19): siRNA sense strand
ggcaaaucuuucacagcaa

SEQ ID NO: 2621647 - RNA, 19 nt, Homo sapiens
  misc_RNA (1)...(19): siRNA sense strand
gcaaagacugccaucgcaa

SEQ ID NO: 2621648 - RNA, 19 nt, Homo sapiens
  misc_RNA (1)...(19): siRNA sense strand
acagacagcuaaagagcca

SEQ ID NO: 2621649 - RNA, 19 nt, Homo sapiens
  misc_RNA (1)...(19): siRNA sense strand
ccaaguagagaggaggaaa

SEQ ID NO: 2621650 - RNA, 19 nt, Homo sapiens
  misc_RNA (1)...(19): siRNA sense strand
caguuaagagugaacaauu

SEQ ID NO: 2621651 - RNA, 19 nt, Homo sapiens
  misc_RNA (1)...(19): siRNA sense strand
ccucgggagagcaggaaau

SEQ ID NO: 2621652 - RNA, 19 nt, Homo sapiens
  misc_RNA (1)...(19): siRNA sense strand
gaggaucuguggaaggaga

SEQ ID NO: 2621653 - RNA, 19 nt, Homo sapiens
  misc_RNA (1)...(19): siRNA sense strand
cagccagaacagacagcua

SEQ ID NO: 2621654 - RNA, 19 nt, Homo sapiens
  misc_RNA (1)...(19): siRNA sense strand
auguaaugaguguggaaaa

SEQ ID NO: 2621655 - RNA, 19 nt, Homo sapiens
  misc_RNA (1)...(19): siRNA sense strand
uggcaguaguaauacagaa

SEQ ID NO: 2621656 - RNA, 19 nt, Homo sapiens
  misc_RNA (1)...(19): siRNA sense strand
gaucagaggaagaaaggcu

SEQ ID NO: 2621657 - RNA, 19 nt, Homo sapiens
  misc_RNA (1)...(19): siRNA sense strand
aaucagaacuggcugcaga

SEQ ID NO: 2621658 - RNA, 19 nt, Homo sapiens
  misc_RNA (1)...(19): siRNA sense strand
cuguaaagacuguggcaag

SEQ ID NO: 2621659 - RNA, 19 nt, Homo sapiens
  misc_RNA (1)...(19): siRNA sense strand
cauugugacugcagagagu

SEQ ID NO: 2621660 - RNA, 19 nt, Homo sapiens
  misc_RNA (1)...(19): siRNA sense strand
aaauguaaugaguguggaa

SEQ ID NO: 2621661 - RNA, 19 nt, Homo sapiens
  misc_RNA (1)...(19): siRNA sense strand
aagucuaugaccugguaaa

SEQ ID NO: 2621662 - RNA, 19 nt, Homo sapiens
  misc_RNA (1)...(19): siRNA sense strand
guguacugaaugagcaaau

SEQ ID NO: 2621663 - RNA, 19 nt, Homo sapiens
  misc_RNA (1)...(19): siRNA sense strand
cgauacagcaagcggagga

SEQ ID NO: 2621664 - RNA, 19 nt, Homo sapiens
  misc_RNA (1)...(19): siRNA sense strand
aggaagaaauacaguuaag

SEQ ID NO: 2621665 - RNA, 19 nt, Homo sapiens
  misc_RNA (1)...(19): siRNA sense strand
gguccuagccagggaauca

SEQ ID NO: 2621666 - RNA, 19 nt, Homo sapiens
  misc_RNA (1)...(19): siRNA sense strand
ucuccugcccugaguguaa

SEQ ID NO: 2621667 - RNA, 19 nt, Homo sapiens
  misc_RNA (1)...(19): siRNA sense strand
aaacagagccagugcacgu

SEQ ID NO: 2621668 - RNA, 19 nt, Homo sapiens
  misc_RNA (1)...(19): siRNA sense strand
ggcugcagaggaagaaaua

SEQ ID NO: 2621669 - RNA, 19 nt, Homo sapiens
  misc_RNA (1)...(19): siRNA sense strand
uggaugugucucagcuaaa

SEQ ID NO: 2621670 - RNA, 19 nt, Homo sapiens
  misc_RNA (1)...(19): siRNA sense strand
cuaaagaaacaucugcgaa

SEQ ID NO: 2621671 - RNA, 19 nt, Homo sapiens
  misc_RNA (1)...(19): siRNA sense strand
gggaaucagcauugugacu

SEQ ID NO: 2621672 - RNA, 19 nt, Homo sapiens
  misc_RNA (1)...(19): siRNA sense strand
agccagagcaacugcagaa

SEQ ID NO: 2621673 - RNA, 19 nt, Homo sapiens
  misc_RNA (1)...(19): siRNA sense strand
gaacacauucagagccuca

SEQ ID NO: 2621674 - RNA, 19 nt, Homo sapiens
  misc_RNA (1)...(19): siRNA sense strand
ucucaaugauguuugcaga

SEQ ID NO: 2621675 - RNA, 19 nt, Homo sapiens
  misc_RNA (1)...(19): siRNA sense strand
aagcggaggauuuggagau

SEQ ID NO: 2621676 - RNA, 19 nt, Homo sapiens
  misc_RNA (1)...(19): siRNA sense strand
uagacaacuugaaggcuca

SEQ ID NO: 2621677 - RNA, 19 nt, Homo sapiens
  misc_RNA (1)...(19): siRNA sense strand
guuuugaggaucagaggaa

SEQ ID NO: 2621678 - RNA, 19 nt, Homo sapiens
  misc_RNA (1)...(19): siRNA sense strand
gccagaacagacagcuaaa

SEQ ID NO: 2621679 - RNA, 19 nt, Homo sapiens
  misc_RNA (1)...(19): siRNA sense strand
auuucuggcaguaguaaua

SEQ ID NO: 2621680 - RNA, 19 nt, Homo sapiens
  misc_RNA (1)...(19): siRNA sense strand
aggaagaaucggagccuac

SEQ ID NO: 2621681 - RNA, 19 nt, Homo sapiens
  misc_RNA (1)...(19): siRNA sense strand
uuugaggaucagaggaaga

SEQ ID NO: 2621682 - RNA, 19 nt, Homo sapiens
  misc_RNA (1)...(19): siRNA sense strand
aguuaagagugaacaauuc

SEQ ID NO: 2621683 - RNA, 19 nt, Homo sapiens
  misc_RNA (1)...(19): siRNA sense strand
cuucagacccacaucagaa

SEQ ID NO: 2621684 - RNA, 19 nt, Homo sapiens
  misc_RNA (1)...(19): siRNA sense strand
gagaaaaguacagaacaaa

SEQ ID NO: 2621685 - RNA, 19 nt, Homo sapiens
  misc_RNA (1)...(19): siRNA sense strand
gaaacggggaagaccaaaa

SEQ ID NO: 2621686 - RNA, 19 nt, Homo sapiens
  misc_RNA (1)...(19): siRNA sense strand
ugguguacugaaugagcaa

SEQ ID NO: 2621687 - RNA, 19 nt, Homo sapiens
  misc_RNA (1)...(19): siRNA sense strand
gcuaaagagccauuaccga

SEQ ID NO: 2621688 - RNA, 19 nt, Homo sapiens
  misc_RNA (1)...(19): siRNA sense strand
aagccauuuacuugugaaa

SEQ ID NO: 2621689 - RNA, 19 nt, Homo sapiens
  misc_RNA (1)...(19): siRNA sense strand
caacaggagcaaacagaac

SEQ ID NO: 2621690 - RNA, 19 nt, Homo sapiens
  misc_RNA (1)...(19): siRNA sense strand
cagaacacauucagagccu

SEQ ID NO: 2621691 - RNA, 19 nt, Homo sapiens
  misc_RNA (1)...(19): siRNA sense strand
cagcagaaauggaagcaga

SEQ ID NO: 2621692 - RNA, 19 nt, Homo sapiens
  misc_RNA (1)...(19): siRNA sense strand
aagaaagagcagagcaaga

SEQ ID NO: 2621693 - RNA, 19 nt, Homo sapiens
  misc_RNA (1)...(19): siRNA sense strand
agugauggacaaagugaaa

SEQ ID NO: 2621694 - RNA, 19 nt, Homo sapiens
  misc_RNA (1)...(19): siRNA sense strand
aguucaagcaucucagaaa

SEQ ID NO: 2621695 - RNA, 19 nt, Homo sapiens
  misc_RNA (1)...(19): siRNA sense strand
gugaggaggagcagaguca

SEQ ID NO: 2621696 - RNA, 19 nt, Homo sapiens
  misc_RNA (1)...(19): siRNA sense strand
aaaagaaagagcagagcaa

SEQ ID NO: 2621697 - RNA, 19 nt, Homo sapiens
  misc_RNA (1)...(19): siRNA sense strand
gggcuuuggccaagaggau

SEQ ID NO: 2621698 - RNA, 19 nt, Homo sapiens
  misc_RNA (1)...(19): siRNA sense strand
aagugaaagaagagaagca

SEQ ID NO: 2621699 - RNA, 19 nt, Homo sapiens
  misc_RNA (1)...(19): siRNA sense strand
aggaaacacagcagaggau

SEQ ID NO: 2621700 - RNA, 19 nt, Homo sapiens
  misc_RNA (1)...(19): siRNA sense strand
ugauggacaaagugaaaga

SEQ ID NO: 2621701 - RNA, 19 nt, Homo sapiens
  misc_RNA (1)...(19): siRNA sense strand
ggcaauucucacaggaaga

SEQ ID NO: 2621702 - RNA, 19 nt, Homo sapiens
  misc_RNA (1)...(19): siRNA sense strand
gaggaggagcagagucaga

SEQ ID NO: 2621703 - RNA, 19 nt, Homo sapiens
  misc_RNA (1)...(19): siRNA sense strand
gcaacagugaggaggagca

SEQ ID NO: 2621704 - RNA, 19 nt, Homo sapiens
  misc_RNA (1)...(19): siRNA sense strand
ggaggauugaaauggaaga

SEQ ID NO: 2621705 - RNA, 19 nt, Homo sapiens
  misc_RNA (1)...(19): siRNA sense strand
cagaagaaucucaugggca

SEQ ID NO: 2621706 - RNA, 19 nt, Homo sapiens
  misc_RNA (1)...(19): siRNA sense strand
ccucucaggccaagggcau

SEQ ID NO: 2621707 - RNA, 19 nt, Homo sapiens
  misc_RNA (1)...(19): siRNA sense strand
gcuuuggccaagaggauca

SEQ ID NO: 2621708 - RNA, 19 nt, Homo sapiens
  misc_RNA (1)...(19): siRNA sense strand
gagcagagcaagaaagagc

SEQ ID NO: 2621709 - RNA, 19 nt, Homo sapiens
  misc_RNA (1)...(19): siRNA sense strand
cagucugggcuuuggccaa

SEQ ID NO: 2621710 - RNA, 19 nt, Homo sapiens
  misc_RNA (1)...(19): siRNA sense strand
agaagaaucucaugggcag

SEQ ID NO: 2621711 - RNA, 19 nt, Homo sapiens
  misc_RNA (1)...(19): siRNA sense strand
caucaaaggccaaggcacu

SEQ ID NO: 2621712 - RNA, 19 nt, Homo sapiens
  misc_RNA (1)...(19): siRNA sense strand
uggucguggugcugaacaa

SEQ ID NO: 2621713 - RNA, 19 nt, Homo sapiens
  misc_RNA (1)...(19): siRNA sense strand
gugaagaaggugaagucca

SEQ ID NO: 2621714 - RNA, 19 nt, Homo sapiens
  misc_RNA (1)...(19): siRNA sense strand
ggugauuggcuccaggcua

SEQ ID NO: 2621715 - RNA, 19 nt, Homo sapiens
  misc_RNA (1)...(19): siRNA sense strand
guguacaagcugaagcaca

SEQ ID NO: 2621716 - RNA, 19 nt, Homo sapiens
  misc_RNA (1)...(19): siRNA sense strand
cagacaaugaugaggccga

SEQ ID NO: 2621717 - RNA, 19 nt, Homo sapiens
  misc_RNA (1)...(19): siRNA sense strand
ggcuagaggacaggaacua

SEQ ID NO: 2621718 - RNA, 19 nt, Homo sapiens
  misc_RNA (1)...(19): siRNA sense strand
gggcuagaggacaggaacu

SEQ ID NO: 2621719 - RNA, 19 nt, Homo sapiens
  misc_RNA (1)...(19): siRNA sense strand
aaauagaccucuuaccuga

SEQ ID NO: 2621720 - RNA, 19 nt, Homo sapiens
  misc_RNA (1)...(19): siRNA sense strand
cagauaacuuugaccagga

SEQ ID NO: 2621721 - RNA, 19 nt, Homo sapiens
  misc_RNA (1)...(19): siRNA sense strand
uggugaagcuggaccggaa

SEQ ID NO: 2621722 - RNA, 19 nt, Homo sapiens
  misc_RNA (1)...(19): siRNA sense strand
gaauguaacuucaccgagu

SEQ ID NO: 2621723 - RNA, 19 nt, Homo sapiens
  misc_RNA (1)...(19): siRNA sense strand
aguacaaguaacagccaau

SEQ ID NO: 2621724 - RNA, 19 nt, Homo sapiens
  misc_RNA (1)...(19): siRNA sense strand
gccacgacuacuugagaau

SEQ ID NO: 2621725 - RNA, 19 nt, Homo sapiens
  misc_RNA (1)...(19): siRNA sense strand
ccaccagugacaacaacaa

SEQ ID NO: 2621726 - RNA, 19 nt, Homo sapiens
  misc_RNA (1)...(19): siRNA sense strand
ggugaagcuggaccggaaa

SEQ ID NO: 2621727 - RNA, 19 nt, Homo sapiens
  misc_RNA (1)...(19): siRNA sense strand
gagcauaaggauuugcaca

SEQ ID NO: 2621728 - RNA, 19 nt, Homo sapiens
  misc_RNA (1)...(19): siRNA sense strand
ccaaugugguggaggcaug

SEQ ID NO: 2621729 - RNA, 19 nt, Homo sapiens
  misc_RNA (1)...(19): siRNA sense strand
gggucaagagcauaaggau

SEQ ID NO: 2621730 - RNA, 19 nt, Homo sapiens
  misc_RNA (1)...(19): siRNA sense strand
aggaaaggauaauggaaga

SEQ ID NO: 2621731 - RNA, 19 nt, Homo sapiens
  misc_RNA (1)...(19): siRNA sense strand
gagaauuaaaguugggaga

SEQ ID NO: 2621732 - RNA, 19 nt, Homo sapiens
  misc_RNA (1)...(19): siRNA sense strand
acuuacaguucaaggaaau

SEQ ID NO: 2621733 - RNA, 19 nt, Homo sapiens
  misc_RNA (1)...(19): siRNA sense strand
ggauaauggaagagcagca

SEQ ID NO: 2621734 - RNA, 19 nt, Homo sapiens
  misc_RNA (1)...(19): siRNA sense strand
cugauagggauuauggaua

SEQ ID NO: 2621735 - RNA, 19 nt, Homo sapiens
  misc_RNA (1)...(19): siRNA sense strand
ucgacaaggagaagaaaga

SEQ ID NO: 2621736 - RNA, 19 nt, Homo sapiens
  misc_RNA (1)...(19): siRNA sense strand
auaauaaucaccaggcuaa

SEQ ID NO: 2621737 - RNA, 19 nt, Homo sapiens
  misc_RNA (1)...(19): siRNA sense strand
gugacagaucuucgaguua

SEQ ID NO: 2621738 - RNA, 19 nt, Homo sapiens
  misc_RNA (1)...(19): siRNA sense strand
cauuugacauggacggcaa

SEQ ID NO: 2621739 - RNA, 19 nt, Homo sapiens
  misc_RNA (1)...(19): siRNA sense strand
uggucauauucuugaggaa

SEQ ID NO: 2621740 - RNA, 19 nt, Homo sapiens
  misc_RNA (1)...(19): siRNA sense strand
gcuuugaauuggaacucua

SEQ ID NO: 2621741 - RNA, 19 nt, Homo sapiens
  misc_RNA (1)...(19): siRNA sense strand
ugagcuugauagugaacaa

SEQ ID NO: 2621742 - RNA, 19 nt, Homo sapiens
  misc_RNA (1)...(19): siRNA sense strand
agauaagcuuggucauauu

SEQ ID NO: 2621743 - RNA, 19 nt, Homo sapiens
  misc_RNA (1)...(19): siRNA sense strand
aaagaagaguaaagaguac

SEQ ID NO: 2621744 - RNA, 19 nt, Homo sapiens
  misc_RNA (1)...(19): siRNA sense strand
gguucaagcagcagaucuu

SEQ ID NO: 2621745 - RNA, 19 nt, Homo sapiens
  misc_RNA (1)...(19): siRNA sense strand
auacaaacuggguggacau

SEQ ID NO: 2621746 - RNA, 19 nt, Homo sapiens
  misc_RNA (1)...(19): siRNA sense strand
gacaaggagaagaaagaga

SEQ ID NO: 2621747 - RNA, 19 nt, Homo sapiens
  misc_RNA (1)...(19): siRNA sense strand
ucacaaugagccaagcaua

SEQ ID NO: 2621748 - RNA, 19 nt, Homo sapiens
  misc_RNA (1)...(19): siRNA sense strand
aggagaagaaagagaucca

SEQ ID NO: 2621749 - RNA, 19 nt, Homo sapiens
  misc_RNA (1)...(19): siRNA sense strand
aggaaaugucugaccucaa

SEQ ID NO: 2621750 - RNA, 19 nt, Homo sapiens
  misc_RNA (1)...(19): siRNA sense strand
ugacaugcaaagaagagua

SEQ ID NO: 2621751 - RNA, 19 nt, Homo sapiens
  misc_RNA (1)...(19): siRNA sense strand
gcauccaggcccagaauga

SEQ ID NO: 2621752 - RNA, 19 nt, Homo sapiens
  misc_RNA (1)...(19): siRNA sense strand
ccagaaugauacuacaaaa

SEQ ID NO: 2621753 - RNA, 19 nt, Homo sapiens
  misc_RNA (1)...(19): siRNA sense strand
gcuaaaagauguggaggau

SEQ ID NO: 2621754 - RNA, 19 nt, Homo sapiens
  misc_RNA (1)...(19): siRNA sense strand
agaagaaagagauccagaa

SEQ ID NO: 2621755 - RNA, 19 nt, Homo sapiens
  misc_RNA (1)...(19): siRNA sense strand
gcuaaggacuguaucgacu

SEQ ID NO: 2621756 - RNA, 19 nt, Homo sapiens
  misc_RNA (1)...(19): siRNA sense strand
cacaaugagccaagcauau

SEQ ID NO: 2621757 - RNA, 19 nt, Homo sapiens
  misc_RNA (1)...(19): siRNA sense strand
cauucauaauccagacuuu

SEQ ID NO: 2621758 - RNA, 19 nt, Homo sapiens
  misc_RNA (1)...(19): siRNA sense strand
gagaagaaagagauccaga

SEQ ID NO: 2621759 - RNA, 19 nt, Homo sapiens
  misc_RNA (1)...(19): siRNA sense strand
agggcucgacagagagaua

SEQ ID NO: 2621760 - RNA, 19 nt, Homo sapiens
  misc_RNA (1)...(19): siRNA sense strand
gagaaaagcaauacaaacu

SEQ ID NO: 2621761 - RNA, 19 nt, Homo sapiens
  misc_RNA (1)...(19): siRNA sense strand
gagcucaguaugccagaaa

SEQ ID NO: 2621762 - RNA, 19 nt, Homo sapiens
  misc_RNA (1)...(19): siRNA sense strand
uauaauaaucaccaggcua

SEQ ID NO: 2621763 - RNA, 19 nt, Homo sapiens
  misc_RNA (1)...(19): siRNA sense strand
uugaaaugauggaucccaa

SEQ ID NO: 2621764 - RNA, 19 nt, Homo sapiens
  misc_RNA (1)...(19): siRNA sense strand
aagucgacaaggagaagaa

SEQ ID NO: 2621765 - RNA, 19 nt, Homo sapiens
  misc_RNA (1)...(19): siRNA sense strand
gaggaaaggauaauggaag

SEQ ID NO: 2621766 - RNA, 19 nt, Homo sapiens
  misc_RNA (1)...(19): siRNA sense strand
accaugagguuaauagaau

SEQ ID NO: 2621767 - RNA, 19 nt, Homo sapiens
  misc_RNA (1)...(19): siRNA sense strand
uaauggaagagcagcagaa

SEQ ID NO: 2621768 - RNA, 19 nt, Homo sapiens
  misc_RNA (1)...(19): siRNA sense strand
cuugaaaaucugugacauu

SEQ ID NO: 2621769 - RNA, 19 nt, Homo sapiens
  misc_RNA (1)...(19): siRNA sense strand
ugugacauugcaagggaaa

SEQ ID NO: 2621770 - RNA, 19 nt, Homo sapiens
  misc_RNA (1)...(19): siRNA sense strand
gcaguauucagcagaguga

SEQ ID NO: 2621771 - RNA, 19 nt, Homo sapiens
  misc_RNA (1)...(19): siRNA sense strand
gcaaaguacguaaaccgaa

SEQ ID NO: 2621772 - RNA, 19 nt, Homo sapiens
  misc_RNA (1)...(19): siRNA sense strand
ccaacuuugugguuaugaa

SEQ ID NO: 2621773 - RNA, 19 nt, Homo sapiens
  misc_RNA (1)...(19): siRNA sense strand
gccugaacugauagggauu

SEQ ID NO: 2621774 - RNA, 19 nt, Homo sapiens
  misc_RNA (1)...(19): siRNA sense strand
aggaugaggcagagaaggu

SEQ ID NO: 2621775 - RNA, 19 nt, Homo sapiens
  misc_RNA (1)...(19): siRNA sense strand
gaagguugaugcagcgcuu

SEQ ID NO: 2621776 - RNA, 19 nt, Homo sapiens
  misc_RNA (1)...(19): siRNA sense strand
acccggaccaugagguuaa

SEQ ID NO: 2621777 - RNA, 19 nt, Homo sapiens
  misc_RNA (1)...(19): siRNA sense strand
agaggaaaggauaauggaa

SEQ ID NO: 2621778 - RNA, 19 nt, Homo sapiens
  misc_RNA (1)...(19): siRNA sense strand
ccuugcaggaugaggcaga

SEQ ID NO: 2621779 - RNA, 19 nt, Homo sapiens
  misc_RNA (1)...(19): siRNA sense strand
caggaugggagcucaguau

SEQ ID NO: 2621780 - RNA, 19 nt, Homo sapiens
  misc_RNA (1)...(19): siRNA sense strand
uggcagaggaaaggauaau

SEQ ID NO: 2621781 - RNA, 19 nt, Homo sapiens
  misc_RNA (1)...(19): siRNA sense strand
aaccgaaguuugagcuuga

SEQ ID NO: 2621782 - RNA, 19 nt, Homo sapiens
  misc_RNA (1)...(19): siRNA sense strand
uguauguggcagcuaguaa

SEQ ID NO: 2621783 - RNA, 19 nt, Homo sapiens
  misc_RNA (1)...(19): siRNA sense strand
ggaaauggucucaagggaa

SEQ ID NO: 2621784 - RNA, 19 nt, Homo sapiens
  misc_RNA (1)...(19): siRNA sense strand
uggaaauggucucaaggga

SEQ ID NO: 2621785 - RNA, 19 nt, Homo sapiens
  misc_RNA (1)...(19): siRNA sense strand
ucucaagggaaacaggaau

SEQ ID NO: 2621786 - RNA, 19 nt, Homo sapiens
  misc_RNA (1)...(19): siRNA sense strand
uucacuggaccuagagaaa

SEQ ID NO: 2621787 - RNA, 19 nt, Homo sapiens
  misc_RNA (1)...(19): siRNA sense strand
gcguggaggaagaccauga

SEQ ID NO: 2621788 - RNA, 19 nt, Homo sapiens
  misc_RNA (1)...(19): siRNA sense strand
aggcugaggaacuggcaca

SEQ ID NO: 2621789 - RNA, 19 nt, Homo sapiens
  misc_RNA (1)...(19): siRNA sense strand
ccgcagaauucaaggaaaa

SEQ ID NO: 2621790 - RNA, 19 nt, Homo sapiens
  misc_RNA (1)...(19): siRNA sense strand
cugaagagugcuauagaaa

SEQ ID NO: 2621791 - RNA, 19 nt, Homo sapiens
  misc_RNA (1)...(19): siRNA sense strand
ccuagaacuuacagggaca

SEQ ID NO: 2621792 - RNA, 19 nt, Homo sapiens
  misc_RNA (1)...(19): siRNA sense strand
ugauaaaggaacauagaga

SEQ ID NO: 2621793 - RNA, 19 nt, Homo sapiens
  misc_RNA (1)...(19): siRNA sense strand
ccaguauagaggugugaua

SEQ ID NO: 2621794 - RNA, 19 nt, Homo sapiens
  misc_RNA (1)...(19): siRNA sense strand
cgguaauuccaguuauaaa

SEQ ID NO: 2621795 - RNA, 19 nt, Homo sapiens
  misc_RNA (1)...(19): siRNA sense strand
gagaaacagugaaagccua

SEQ ID NO: 2621796 - RNA, 19 nt, Homo sapiens
  misc_RNA (1)...(19): siRNA sense strand
cagugaaagccuauaggaa

SEQ ID NO: 2621797 - RNA, 19 nt, Homo sapiens
  misc_RNA (1)...(19): siRNA sense strand
aaucauugcgagagaaaca

SEQ ID NO: 2621798 - RNA, 19 nt, Homo sapiens
  misc_RNA (1)...(19): siRNA sense strand
augcaggacaggugggcua

SEQ ID NO: 2621799 - RNA, 19 nt, Homo sapiens
  misc_RNA (1)...(19): siRNA sense strand
acacaaagacaaagcucau

SEQ ID NO: 2621800 - RNA, 19 nt, Homo sapiens
  misc_RNA (1)...(19): siRNA sense strand
cagaauauuuggagccagu

SEQ ID NO: 2621801 - RNA, 19 nt, Homo sapiens
  misc_RNA (1)...(19): siRNA sense strand
agagacaagcagaagggaa

SEQ ID NO: 2621802 - RNA, 19 nt, Homo sapiens
  misc_RNA (1)...(19): siRNA sense strand
ugauaaauugcaaguggaa

SEQ ID NO: 2621803 - RNA, 19 nt, Homo sapiens
  misc_RNA (1)...(19): siRNA sense strand
guaaaaucauugcgagaga

SEQ ID NO: 2621804 - RNA, 19 nt, Homo sapiens
  misc_RNA (1)...(19): siRNA sense strand
ugauauuccaagugaugaa

SEQ ID NO: 2621805 - RNA, 19 nt, Homo sapiens
  misc_RNA (1)...(19): siRNA sense strand
cagaugaauacacuggaaa

SEQ ID NO: 2621806 - RNA, 19 nt, Homo sapiens
  misc_RNA (1)...(19): siRNA sense strand
cccgauaaaucaaaaguaa

SEQ ID NO: 2621807 - RNA, 19 nt, Homo sapiens
  misc_RNA (1)...(19): siRNA sense strand
uggaaauacuguagaggag

SEQ ID NO: 2621808 - RNA, 19 nt, Homo sapiens
  misc_RNA (1)...(19): siRNA sense strand
ugcuaaacuuggaacaaau

SEQ ID NO: 2621809 - RNA, 19 nt, Homo sapiens
  misc_RNA (1)...(19): siRNA sense strand
aagaggaaucacuguuaaa

SEQ ID NO: 2621810 - RNA, 19 nt, Homo sapiens
  misc_RNA (1)...(19): siRNA sense strand
agaugaauacacuggaaaa

SEQ ID NO: 2621811 - RNA, 19 nt, Homo sapiens
  misc_RNA (1)...(19): siRNA sense strand
guuaaagcacagacagcau

SEQ ID NO: 2621812 - RNA, 19 nt, Homo sapiens
  misc_RNA (1)...(19): siRNA sense strand
ugcgagagaaacagugaaa

SEQ ID NO: 2621813 - RNA, 19 nt, Homo sapiens
  misc_RNA (1)...(19): siRNA sense strand
ugacaggcuccuagaacuu

SEQ ID NO: 2621814 - RNA, 19 nt, Homo sapiens
  misc_RNA (1)...(19): siRNA sense strand
caaugguauuugcaggaau

SEQ ID NO: 2621815 - RNA, 19 nt, Homo sapiens
  misc_RNA (1)...(19): siRNA sense strand
uugcaaguggaacgagaaa

SEQ ID NO: 2621816 - RNA, 19 nt, Homo sapiens
  misc_RNA (1)...(19): siRNA sense strand
ugagggaauucaagcccaa

SEQ ID NO: 2621817 - RNA, 19 nt, Homo sapiens
  misc_RNA (1)...(19): siRNA sense strand
ccuaaagugcaucgcaaaa

SEQ ID NO: 2621818 - RNA, 19 nt, Homo sapiens
  misc_RNA (1)...(19): siRNA sense strand
uaggcaacuguuugagaua

SEQ ID NO: 2621819 - RNA, 19 nt, Homo sapiens
  misc_RNA (1)...(19): siRNA sense strand
auguugugguggugauauu

SEQ ID NO: 2621820 - RNA, 19 nt, Homo sapiens
  misc_RNA (1)...(19): siRNA sense strand
guggaacgagaaagaggaa

SEQ ID NO: 2621821 - RNA, 19 nt, Homo sapiens
  misc_RNA (1)...(19): siRNA sense strand
uagcauuauuugacggagu

SEQ ID NO: 2621822 - RNA, 19 nt, Homo sapiens
  misc_RNA (1)...(19): siRNA sense strand
caaucugaagagugcuaua

SEQ ID NO: 2621823 - RNA, 19 nt, Homo sapiens
  misc_RNA (1)...(19): siRNA sense strand
ugugaacggcugaaggauu

SEQ ID NO: 2621824 - RNA, 19 nt, Homo sapiens
  misc_RNA (1)...(19): siRNA sense strand
aaguaaaaucauugcgaga

SEQ ID NO: 2621825 - RNA, 19 nt, Homo sapiens
  misc_RNA (1)...(19): siRNA sense strand
aauuaucaauccugcacaa

SEQ ID NO: 2621826 - RNA, 19 nt, Homo sapiens
  misc_RNA (1)...(19): siRNA sense strand
agagcaguucagaagaaua

SEQ ID NO: 2621827 - RNA, 19 nt, Homo sapiens
  misc_RNA (1)...(19): siRNA sense strand
gguucuugauaaauugcaa

SEQ ID NO: 2621828 - RNA, 19 nt, Homo sapiens
  misc_RNA (1)...(19): siRNA sense strand
cuuacagggacaauugaua

SEQ ID NO: 2621829 - RNA, 19 nt, Homo sapiens
  misc_RNA (1)...(19): siRNA sense strand
gguugaugcaaaugaggga

SEQ ID NO: 2621830 - RNA, 19 nt, Homo sapiens
  misc_RNA (1)...(19): siRNA sense strand
aauguauccucuagaccaa

SEQ ID NO: 2621831 - RNA, 19 nt, Homo sapiens
  misc_RNA (1)...(19): siRNA sense strand
uuacaauugugaaggaaag

SEQ ID NO: 2621832 - RNA, 19 nt, Homo sapiens
  misc_RNA (1)...(19): siRNA sense strand
gguuuccaaaggagauaaa

SEQ ID NO: 2621833 - RNA, 19 nt, Homo sapiens
  misc_RNA (1)...(19): siRNA sense strand
uggguuuaaaucagcgaaa

SEQ ID NO: 2621834 - RNA, 19 nt, Homo sapiens
  misc_RNA (1)...(19): siRNA sense strand
cgcaaauaggagauacauu

SEQ ID NO: 2621835 - RNA, 19 nt, Homo sapiens
  misc_RNA (1)...(19): siRNA sense strand
cgagagaaacagugaaagc

SEQ ID NO: 2621836 - RNA, 19 nt, Homo sapiens
  misc_RNA (1)...(19): siRNA sense strand
acuugugguugaugcaaau

SEQ ID NO: 2621837 - RNA, 19 nt, Homo sapiens
  misc_RNA (1)...(19): siRNA sense strand
cuccuaaagugcaucgcaa

SEQ ID NO: 2621838 - RNA, 19 nt, Homo sapiens
  misc_RNA (1)...(19): siRNA sense strand
gcacauacucaaaagacau

SEQ ID NO: 2621839 - RNA, 19 nt, Homo sapiens
  misc_RNA (1)...(19): siRNA sense strand
uggcuggaggcuaggauuu

SEQ ID NO: 2621840 - RNA, 19 nt, Homo sapiens
  misc_RNA (1)...(19): siRNA sense strand
agaaacagugaaagccuau

SEQ ID NO: 2621841 - RNA, 19 nt, Homo sapiens
  misc_RNA (1)...(19): siRNA sense strand
uuugaagagacaagcagaa

SEQ ID NO: 2621842 - RNA, 19 nt, Homo sapiens
  misc_RNA (1)...(19): siRNA sense strand
gaacaagaaaugaagugga

SEQ ID NO: 2621843 - RNA, 19 nt, Homo sapiens
  misc_RNA (1)...(19): siRNA sense strand
cugucaaagaacaagaaau

SEQ ID NO: 2621844 - RNA, 19 nt, Homo sapiens
  misc_RNA (1)...(19): siRNA sense strand
ucagagagauggaaggauc

SEQ ID NO: 2621845 - RNA, 19 nt, Homo sapiens
  misc_RNA (1)...(19): siRNA sense strand
agaaucugucaaagaacaa

SEQ ID NO: 2621846 - RNA, 19 nt, Homo sapiens
  misc_RNA (1)...(19): siRNA sense strand
cuuaugaggaugucgcaau

SEQ ID NO: 2621847 - RNA, 19 nt, Homo sapiens
  misc_RNA (1)...(19): siRNA sense strand
caagaaaugaaguggacag

SEQ ID NO: 2621848 - RNA, 19 nt, Homo sapiens
  misc_RNA (1)...(19): siRNA sense strand
agaucaaagcugugggcaa

SEQ ID NO: 2621849 - RNA, 19 nt, Homo sapiens
  misc_RNA (1)...(19): siRNA sense strand
aggaagaggaggaagaaaa

SEQ ID NO: 2621850 - RNA, 19 nt, Homo sapiens
  misc_RNA (1)...(19): siRNA sense strand
uugaacagguuguggaaau

SEQ ID NO: 2621851 - RNA, 19 nt, Homo sapiens
  misc_RNA (1)...(19): siRNA sense strand
guggagagguagugaaaau

SEQ ID NO: 2621852 - RNA, 19 nt, Homo sapiens
  misc_RNA (1)...(19): siRNA sense strand
ggaagaagaagcagcguca

SEQ ID NO: 2621853 - RNA, 19 nt, Homo sapiens
  misc_RNA (1)...(19): siRNA sense strand
aggaggaggaggaggaaga

SEQ ID NO: 2621854 - RNA, 19 nt, Homo sapiens
  misc_RNA (1)...(19): siRNA sense strand
aggaggaagaggaggaaga

SEQ ID NO: 2621855 - RNA, 19 nt, Homo sapiens
  misc_RNA (1)...(19): siRNA sense strand
uugaagaggaggaagcaaa

SEQ ID NO: 2621856 - RNA, 19 nt, Homo sapiens
  misc_RNA (1)...(19): siRNA sense strand
ggaagaaucucaauggcau

SEQ ID NO: 2621857 - RNA, 19 nt, Homo sapiens
  misc_RNA (1)...(19): siRNA sense strand
uggccaaacuuuacaggaa

SEQ ID NO: 2621858 - RNA, 19 nt, Homo sapiens
  misc_RNA (1)...(19): siRNA sense strand
acgaguagaauuagaagaa

SEQ ID NO: 2621859 - RNA, 19 nt, Homo sapiens
  misc_RNA (1)...(19): siRNA sense strand
cggucaaagcugaggaguu

SEQ ID NO: 2621860 - RNA, 19 nt, Homo sapiens
  misc_RNA (1)...(19): siRNA sense strand
aagaagaggaggaggagga

SEQ ID NO: 2621861 - RNA, 19 nt, Homo sapiens
  misc_RNA (1)...(19): siRNA sense strand
aggaaugucuggaagaaaa

SEQ ID NO: 2621862 - RNA, 19 nt, Homo sapiens
  misc_RNA (1)...(19): siRNA sense strand
agcaagaaaaggagagaaa

SEQ ID NO: 2621863 - RNA, 19 nt, Homo sapiens
  misc_RNA (1)...(19): siRNA sense strand
gaagaaucucaauggcaua

SEQ ID NO: 2621864 - RNA, 19 nt, Homo sapiens
  misc_RNA (1)...(19): siRNA sense strand
ggaaggagcggaagcgaca

SEQ ID NO: 2621865 - RNA, 19 nt, Homo sapiens
  misc_RNA (1)...(19): siRNA sense strand
acacaagcggagaggaaga

SEQ ID NO: 2621866 - RNA, 19 nt, Homo sapiens
  misc_RNA (1)...(19): siRNA sense strand
caguggagagguagugaaa

SEQ ID NO: 2621867 - RNA, 19 nt, Homo sapiens
  misc_RNA (1)...(19): siRNA sense strand
ccauacuucuauugagcaa

SEQ ID NO: 2621868 - RNA, 19 nt, Homo sapiens
  misc_RNA (1)...(19): siRNA sense strand
caagaaaaggagagaaaca

SEQ ID NO: 2621869 - RNA, 19 nt, Homo sapiens
  misc_RNA (1)...(19): siRNA sense strand
cuaucuugcuucagaaauu

SEQ ID NO: 2621870 - RNA, 19 nt, Homo sapiens
  misc_RNA (1)...(19): siRNA sense strand
gagaggaggggaagaguaa

SEQ ID NO: 2621871 - RNA, 19 nt, Homo sapiens
  misc_RNA (1)...(19): siRNA sense strand
cuaagagagauguggaaaa

SEQ ID NO: 2621872 - RNA, 19 nt, Homo sapiens
  misc_RNA (1)...(19): siRNA sense strand
cggcaaccguccagcagaa

SEQ ID NO: 2621873 - RNA, 19 nt, Homo sapiens
  misc_RNA (1)...(19): siRNA sense strand
ccauuuauuuugaggagaa

SEQ ID NO: 2621874 - RNA, 19 nt, Homo sapiens
  misc_RNA (1)...(19): siRNA sense strand
ugguagaggcccagacaca

SEQ ID NO: 2621875 - RNA, 19 nt, Homo sapiens
  misc_RNA (1)...(19): siRNA sense strand
auugagaccuaaaggauuu

SEQ ID NO: 2621876 - RNA, 19 nt, Homo sapiens
  misc_RNA (1)...(19): siRNA sense strand
gaaugaggaucuugaggca

SEQ ID NO: 2621877 - RNA, 19 nt, Homo sapiens
  misc_RNA (1)...(19): siRNA sense strand
gaacaaauaacucuggaga

SEQ ID NO: 2621878 - RNA, 19 nt, Homo sapiens
  misc_RNA (1)...(19): siRNA sense strand
caaagaaauaugagcaugu

SEQ ID NO: 2621879 - RNA, 19 nt, Homo sapiens
  misc_RNA (1)...(19): siRNA sense strand
uugaagaagaggaggagga

SEQ ID NO: 2621880 - RNA, 19 nt, Homo sapiens
  misc_RNA (1)...(19): siRNA sense strand
acaaauaacucuggagaac

SEQ ID NO: 2621881 - RNA, 19 nt, Homo sapiens
  misc_RNA (1)...(19): siRNA sense strand
gcagagagggcaaggagca

SEQ ID NO: 2621882 - RNA, 19 nt, Homo sapiens
  misc_RNA (1)...(19): siRNA sense strand
agggcaaggagcagaagaa

SEQ ID NO: 2621883 - RNA, 19 nt, Homo sapiens
  misc_RNA (1)...(19): siRNA sense strand
gaggaggggaagaguaaaa

SEQ ID NO: 2621884 - RNA, 19 nt, Homo sapiens
  misc_RNA (1)...(19): siRNA sense strand
aggaagaaggccuuaaauu

SEQ ID NO: 2621885 - RNA, 19 nt, Homo sapiens
  misc_RNA (1)...(19): siRNA sense strand
ggaaacaauugaagaggag

SEQ ID NO: 2621886 - RNA, 19 nt, Homo sapiens
  misc_RNA (1)...(19): siRNA sense strand
ccuuauacgaggacguuau

SEQ ID NO: 2621887 - RNA, 19 nt, Homo sapiens
  misc_RNA (1)...(19): siRNA sense strand
gcuuuaaauuaccuggaau

SEQ ID NO: 2621888 - RNA, 19 nt, Homo sapiens
  misc_RNA (1)...(19): siRNA sense strand
ggcaaggagcagaagaaga

SEQ ID NO: 2621889 - RNA, 19 nt, Homo sapiens
  misc_RNA (1)...(19): siRNA sense strand
gggacuaucugcuggagga

SEQ ID NO: 2621890 - RNA, 19 nt, Homo sapiens
  misc_RNA (1)...(19): siRNA sense strand
gcggagaggaagaugcaga

SEQ ID NO: 2621891 - RNA, 19 nt, Homo sapiens
  misc_RNA (1)...(19): siRNA sense strand
uggaaaagcaacuaacaaa

SEQ ID NO: 2621892 - RNA, 19 nt, Homo sapiens
  misc_RNA (1)...(19): siRNA sense strand
gggcaugggaguucuggaa

SEQ ID NO: 2621893 - RNA, 19 nt, Homo sapiens
  misc_RNA (1)...(19): siRNA sense strand
guggaaaugugaucgugaa

SEQ ID NO: 2621894 - RNA, 19 nt, Homo sapiens
  misc_RNA (1)...(19): siRNA sense strand
aggaggaggaagaggagga

SEQ ID NO: 2621895 - RNA, 19 nt, Homo sapiens
  misc_RNA (1)...(19): siRNA sense strand
acgaaguggacgaugaaga

SEQ ID NO: 2621896 - RNA, 19 nt, Homo sapiens
  misc_RNA (1)...(19): siRNA sense strand
uggaguaugucuacgaaga

SEQ ID NO: 2621897 - RNA, 19 nt, Homo sapiens
  misc_RNA (1)...(19): siRNA sense strand
acgaagaugucgaugggca

SEQ ID NO: 2621898 - RNA, 19 nt, Homo sapiens
  misc_RNA (1)...(19): siRNA sense strand
augcaaagacauccacaua

SEQ ID NO: 2621899 - RNA, 19 nt, Homo sapiens
  misc_RNA (1)...(19): siRNA sense strand
aaauaacucuggagaacca

SEQ ID NO: 2621900 - RNA, 19 nt, Homo sapiens
  misc_RNA (1)...(19): siRNA sense strand
aaacaauugaagaggagga

SEQ ID NO: 2621901 - RNA, 19 nt, Homo sapiens
  misc_RNA (1)...(19): siRNA sense strand
ggaagcaaaugaaggcguu

SEQ ID NO: 2621902 - RNA, 19 nt, Homo sapiens
  misc_RNA (1)...(19): siRNA sense strand
gugaagggcaugaccgaga

SEQ ID NO: 2621903 - RNA, 19 nt, Homo sapiens
  misc_RNA (1)...(19): siRNA sense strand
ggagagaaacagugaggac

SEQ ID NO: 2621904 - RNA, 19 nt, Homo sapiens
  misc_RNA (1)...(19): siRNA sense strand
gggaagaccuggaaagcca

SEQ ID NO: 2621905 - RNA, 19 nt, Homo sapiens
  misc_RNA (1)...(19): siRNA sense strand
aggugaacccacugagaaa

SEQ ID NO: 2621906 - RNA, 19 nt, Homo sapiens
  misc_RNA (1)...(19): siRNA sense strand
ggauugagaugguugguga

SEQ ID NO: 2621907 - RNA, 19 nt, Homo sapiens
  misc_RNA (1)...(19): siRNA sense strand
cgauggugaacgugggaau

SEQ ID NO: 2621908 - RNA, 19 nt, Homo sapiens
  misc_RNA (1)...(19): siRNA sense strand
gagaagaaguacauccaca

SEQ ID NO: 2621909 - RNA, 19 nt, Homo sapiens
  misc_RNA (1)...(19): siRNA sense strand
gggacaucuucgugagcga

SEQ ID NO: 2621910 - RNA, 19 nt, Homo sapiens
  misc_RNA (1)...(19): siRNA sense strand
cggaaaggaccaagcggga

SEQ ID NO: 2621911 - RNA, 19 nt, Homo sapiens
  misc_RNA (1)...(19): siRNA sense strand
ccaccgagacagaggcuga

SEQ ID NO: 2621912 - RNA, 19 nt, Homo sapiens
  misc_RNA (1)...(19): siRNA sense strand
ggugagaugacgaugguga

SEQ ID NO: 2621913 - RNA, 19 nt, Homo sapiens
  misc_RNA (1)...(19): siRNA sense strand
gagcagucgguguggguga

SEQ ID NO: 2621914 - RNA, 19 nt, Homo sapiens
  misc_RNA (1)...(19): siRNA sense strand
ccaacaaagugcagggcag

SEQ ID NO: 2621915 - RNA, 19 nt, Homo sapiens
  misc_RNA (1)...(19): siRNA sense strand
ggugaugaggugaggggua

SEQ ID NO: 2621916 - RNA, 19 nt, Homo sapiens
  misc_RNA (1)...(19): siRNA sense strand
caagaaugccacagggaac

SEQ ID NO: 2621917 - RNA, 19 nt, Homo sapiens
  misc_RNA (1)...(19): siRNA sense strand
cugcagugguggugcgacu

SEQ ID NO: 2621918 - RNA, 19 nt, Homo sapiens
  misc_RNA (1)...(19): siRNA sense strand
gggcauuggcugugaggac

SEQ ID NO: 2621919 - RNA, 19 nt, Homo sapiens
  misc_RNA (1)...(19): siRNA sense strand
ccaagaaugccacagggaa

SEQ ID NO: 2621920 - RNA, 19 nt, Homo sapiens
  misc_RNA (1)...(19): siRNA sense strand
cgguguaugcccuggauga

SEQ ID NO: 2621921 - RNA, 19 nt, Homo sapiens
  misc_RNA (1)...(19): siRNA sense strand
cugcagugggccuggguuu

SEQ ID NO: 2621922 - RNA, 19 nt, Homo sapiens
  misc_RNA (1)...(19): siRNA sense strand
uggcaggaccgcagaagau

SEQ ID NO: 2621923 - RNA, 19 nt, Homo sapiens
  misc_RNA (1)...(19): siRNA sense strand
gugagaugacgauggugaa

SEQ ID NO: 2621924 - RNA, 19 nt, Homo sapiens
  misc_RNA (1)...(19): siRNA sense strand
ccaagaaagugcccagcca

SEQ ID NO: 2621925 - RNA, 19 nt, Homo sapiens
  misc_RNA (1)...(19): siRNA sense strand
ggguauacacaggcggcua

SEQ ID NO: 2621926 - RNA, 19 nt, Homo sapiens
  misc_RNA (1)...(19): siRNA sense strand
ugggaaaugugcaaggacu

SEQ ID NO: 2621927 - RNA, 19 nt, Homo sapiens
  misc_RNA (1)...(19): siRNA sense strand
cugcagaaccucuagacga

SEQ ID NO: 2621928 - RNA, 19 nt, Homo sapiens
  misc_RNA (1)...(19): siRNA sense strand
ccacacucugggagggaca

SEQ ID NO: 2621929 - RNA, 19 nt, Homo sapiens
  misc_RNA (1)...(19): siRNA sense strand
ugagaauuuuggaggugaa

SEQ ID NO: 2621930 - RNA, 19 nt, Homo sapiens
  misc_RNA (1)...(19): siRNA sense strand
gggaaaugugcaaggacuc

SEQ ID NO: 2621931 - RNA, 19 nt, Homo sapiens
  misc_RNA (1)...(19): siRNA sense strand
cugacugguacguggauga

SEQ ID NO: 2621932 - RNA, 19 nt, Homo sapiens
  misc_RNA (1)...(19): siRNA sense strand
acagagaggacgucagcca

SEQ ID NO: 2621933 - RNA, 19 nt, Homo sapiens
  misc_RNA (1)...(19): siRNA sense strand
acgaaagacaagaagugga

SEQ ID NO: 2621934 - RNA, 19 nt, Homo sapiens
  misc_RNA (1)...(19): siRNA sense strand
gaaggaaucaacaggagca

SEQ ID NO: 2621935 - RNA, 19 nt, Homo sapiens
  misc_RNA (1)...(19): siRNA sense strand
aguacugggaaaugugcaa

SEQ ID NO: 2621936 - RNA, 19 nt, Homo sapiens
  misc_RNA (1)...(19): siRNA sense strand
ccaagcgggagcuggagaa

SEQ ID NO: 2621937 - RNA, 19 nt, Homo sapiens
  misc_RNA (1)...(19): siRNA sense strand
cagaaugccguguugguga

SEQ ID NO: 2621938 - RNA, 19 nt, Homo sapiens
  misc_RNA (1)...(19): siRNA sense strand
uggugcugcuucauggaaa

SEQ ID NO: 2621939 - RNA, 19 nt, Homo sapiens
  misc_RNA (1)...(19): siRNA sense strand
cagaagagauggaagcaga

SEQ ID NO: 2621940 - RNA, 19 nt, Homo sapiens
  misc_RNA (1)...(19): siRNA sense strand
agauggaagcagaggguga

SEQ ID NO: 2621941 - RNA, 19 nt, Homo sapiens
  misc_RNA (1)...(19): siRNA sense strand
agauggaugaugaggacua

SEQ ID NO: 2621942 - RNA, 19 nt, Homo sapiens
  misc_RNA (1)...(19): siRNA sense strand
aggaagagagugaggagga

SEQ ID NO: 2621943 - RNA, 19 nt, Homo sapiens
  misc_RNA (1)...(19): siRNA sense strand
cuggaugugaucaggaaua

SEQ ID NO: 2621944 - RNA, 19 nt, Homo sapiens
  misc_RNA (1)...(19): siRNA sense strand
agacagagucagaagagga

SEQ ID NO: 2621945 - RNA, 19 nt, Homo sapiens
  misc_RNA (1)...(19): siRNA sense strand
cugaauggugggacgacaa

SEQ ID NO: 2621946 - RNA, 19 nt, Homo sapiens
  misc_RNA (1)...(19): siRNA sense strand
ccgcccagcaagaggaaga

SEQ ID NO: 2621947 - RNA, 19 nt, Homo sapiens
  misc_RNA (1)...(19): siRNA sense strand
agucagaagaggagagcuc

SEQ ID NO: 2621948 - RNA, 19 nt, Homo sapiens
  misc_RNA (1)...(19): siRNA sense strand
aggagaaguuguucaggga

SEQ ID NO: 2621949 - RNA, 19 nt, Homo sapiens
  misc_RNA (1)...(19): siRNA sense strand
cgacaaacugcacgccaga

SEQ ID NO: 2621950 - RNA, 19 nt, Homo sapiens
  misc_RNA (1)...(19): siRNA sense strand
cgagauggaugaugaggac

SEQ ID NO: 2621951 - RNA, 19 nt, Homo sapiens
  misc_RNA (1)...(19): siRNA sense strand
cuaaaggagaaguuguuca

SEQ ID NO: 2621952 - RNA, 19 nt, Homo sapiens
  misc_RNA (1)...(19): siRNA sense strand
gcauucagguggcagggau

SEQ ID NO: 2621953 - RNA, 19 nt, Homo sapiens
  misc_RNA (1)...(19): siRNA sense strand
cuggaggacuggacagcca

SEQ ID NO: 2621954 - RNA, 19 nt, Homo sapiens
  misc_RNA (1)...(19): siRNA sense strand
ggacggacagcaagggcaa

SEQ ID NO: 2621955 - RNA, 19 nt, Homo sapiens
  misc_RNA (1)...(19): siRNA sense strand
ccgugaagguggauggaag

SEQ ID NO: 2621956 - RNA, 19 nt, Homo sapiens
  misc_RNA (1)...(19): siRNA sense strand
gugucgagcagcugggaga

SEQ ID NO: 2621957 - RNA, 19 nt, Homo sapiens
  misc_RNA (1)...(19): siRNA sense strand
cuggguacugccugggaaa

SEQ ID NO: 2621958 - RNA, 19 nt, Homo sapiens
  misc_RNA (1)...(19): siRNA sense strand
ccucagcaggccuggaaga

SEQ ID NO: 2621959 - RNA, 19 nt, Homo sapiens
  misc_RNA (1)...(19): siRNA sense strand
acucaaaagcccagagaaa

SEQ ID NO: 2621960 - RNA, 19 nt, Homo sapiens
  misc_RNA (1)...(19): siRNA sense strand
agcaauagccauaaagcaa

SEQ ID NO: 2621961 - RNA, 19 nt, Homo sapiens
  misc_RNA (1)...(19): siRNA sense strand
accaaagauaccagauaaa

SEQ ID NO: 2621962 - RNA, 19 nt, Homo sapiens
  misc_RNA (1)...(19): siRNA sense strand
gggauaagauaaagguggu

SEQ ID NO: 2621963 - RNA, 19 nt, Homo sapiens
  misc_RNA (1)...(19): siRNA sense strand
ucaaaagcccagagaaaga

SEQ ID NO: 2621964 - RNA, 19 nt, Homo sapiens
  misc_RNA (1)...(19): siRNA sense strand
cuuaaauggagaagaaauc

SEQ ID NO: 2621965 - RNA, 19 nt, Homo sapiens
  misc_RNA (1)...(19): siRNA sense strand
aaaccauaccacagaguga

SEQ ID NO: 2621966 - RNA, 19 nt, Homo sapiens
  misc_RNA (1)...(19): siRNA sense strand
aaagcauggcaaagaggaa

SEQ ID NO: 2621967 - RNA, 19 nt, Homo sapiens
  misc_RNA (1)...(19): siRNA sense strand
agauaaagguggugcccag

SEQ ID NO: 2621968 - RNA, 19 nt, Homo sapiens
  misc_RNA (1)...(19): siRNA sense strand
caacaaucgacguguggga

SEQ ID NO: 2621969 - RNA, 19 nt, Homo sapiens
  misc_RNA (1)...(19): siRNA sense strand
gcccagagaaagaagacuu

SEQ ID NO: 2621970 - RNA, 19 nt, Homo sapiens
  misc_RNA (1)...(19): siRNA sense strand
agacagaaaagcauggcaa

SEQ ID NO: 2621971 - RNA, 19 nt, Homo sapiens
  misc_RNA (1)...(19): siRNA sense strand
ugugacggguugagaggau

SEQ ID NO: 2621972 - RNA, 19 nt, Homo sapiens
  misc_RNA (1)...(19): siRNA sense strand
uugcuguuauugaggcuaa

SEQ ID NO: 2621973 - RNA, 19 nt, Homo sapiens
  misc_RNA (1)...(19): siRNA sense strand
auggcaaagaggaaaggua

SEQ ID NO: 2621974 - RNA, 19 nt, Homo sapiens
  misc_RNA (1)...(19): siRNA sense strand
ugaagagcacugacgggaa

SEQ ID NO: 2621975 - RNA, 19 nt, Homo sapiens
  misc_RNA (1)...(19): siRNA sense strand
agauaaaaccucugaaaag

SEQ ID NO: 2621976 - RNA, 19 nt, Homo sapiens
  misc_RNA (1)...(19): siRNA sense strand
auuaacgcuccaugaaaua

SEQ ID NO: 2621977 - RNA, 19 nt, Homo sapiens
  misc_RNA (1)...(19): siRNA sense strand
cacccagaggagaggaaau

SEQ ID NO: 2621978 - RNA, 19 nt, Homo sapiens
  misc_RNA (1)...(19): siRNA sense strand
cacuguuacuauaaaggaa

SEQ ID NO: 2621979 - RNA, 19 nt, Homo sapiens
  misc_RNA (1)...(19): siRNA sense strand
ccauaaagcaaacaccuga

SEQ ID NO: 2621980 - RNA, 19 nt, Homo sapiens
  misc_RNA (1)...(19): siRNA sense strand
aacucaagcaauagccaua

SEQ ID NO: 2621981 - RNA, 19 nt, Homo sapiens
  misc_RNA (1)...(19): siRNA sense strand
aagcauggcaaagaggaaa

SEQ ID NO: 2621982 - RNA, 19 nt, Homo sapiens
  misc_RNA (1)...(19): siRNA sense strand
aggaacaagacccagcuaa

SEQ ID NO: 2621983 - RNA, 19 nt, Homo sapiens
  misc_RNA (1)...(19): siRNA sense strand
ccuugguagguauggaaau

SEQ ID NO: 2621984 - RNA, 19 nt, Homo sapiens
  misc_RNA (1)...(19): siRNA sense strand
cugauggggauaagauaaa

SEQ ID NO: 2621985 - RNA, 19 nt, Homo sapiens
  misc_RNA (1)...(19): siRNA sense strand
cgggaaacaaggcccaauu

SEQ ID NO: 2621986 - RNA, 19 nt, Homo sapiens
  misc_RNA (1)...(19): siRNA sense strand
gguuaaaaggugaggcaga

SEQ ID NO: 2621987 - RNA, 19 nt, Homo sapiens
  misc_RNA (1)...(19): siRNA sense strand
ccaauuggauagaggguac

SEQ ID NO: 2621988 - RNA, 19 nt, Homo sapiens
  misc_RNA (1)...(19): siRNA sense strand
aggcagaguaccaggagau

SEQ ID NO: 2621989 - RNA, 19 nt, Homo sapiens
  misc_RNA (1)...(19): siRNA sense strand
ccuacgggcaaucgagaaa

SEQ ID NO: 2621990 - RNA, 19 nt, Homo sapiens
  misc_RNA (1)...(19): siRNA sense strand
ccugcaaagcugaugcuaa

SEQ ID NO: 2621991 - RNA, 19 nt, Homo sapiens
  misc_RNA (1)...(19): siRNA sense strand
caggccagguggaggucaa

SEQ ID NO: 2621992 - RNA, 19 nt, Homo sapiens
  misc_RNA (1)...(19): siRNA sense strand
caguaugagccugagguaa

SEQ ID NO: 2621993 - RNA, 19 nt, Homo sapiens
  misc_RNA (1)...(19): siRNA sense strand
agugugguauccugggaaa

SEQ ID NO: 2621994 - RNA, 19 nt, Homo sapiens
  misc_RNA (1)...(19): siRNA sense strand
aguaugagccugagguaac

SEQ ID NO: 2621995 - RNA, 19 nt, Homo sapiens
  misc_RNA (1)...(19): siRNA sense strand
cccaggugguccaggugaa

SEQ ID NO: 2621996 - RNA, 19 nt, Homo sapiens
  misc_RNA (1)...(19): siRNA sense strand
gguuaaaaggugaggcaga

SEQ ID NO: 2621997 - RNA, 19 nt, Homo sapiens
  misc_RNA (1)...(19): siRNA sense strand
ccaauuggauagaggguac

SEQ ID NO: 2621998 - RNA, 19 nt, Homo sapiens
  misc_RNA (1)...(19): siRNA sense strand
aggcagaguaccaggagau

SEQ ID NO: 2621999 - RNA, 19 nt, Homo sapiens
  misc_RNA (1)...(19): siRNA sense strand
ccuacgggcaaucgagaaa

SEQ ID NO: 2622000 - RNA, 19 nt, Homo sapiens
  misc_RNA (1)...(19): siRNA sense strand
ccugcaaagcugaugcuaa

SEQ ID NO: 2622001 - RNA, 19 nt, Homo sapiens
  misc_RNA (1)...(19): siRNA sense strand
caggccagguggaggucaa

SEQ ID NO: 2622002 - RNA, 19 nt, Homo sapiens
  misc_RNA (1)...(19): siRNA sense strand
caguaugagccugagguaa

SEQ ID NO: 2622003 - RNA, 19 nt, Homo sapiens
  misc_RNA (1)...(19): siRNA sense strand
agugugguauccugggaaa

SEQ ID NO: 2622004 - RNA, 19 nt, Homo sapiens
  misc_RNA (1)...(19): siRNA sense strand
aguaugagccugagguaac

SEQ ID NO: 2622005 - RNA, 19 nt, Homo sapiens
  misc_RNA (1)...(19): siRNA sense strand
cccaggugguccaggugaa

SEQ ID NO: 2622006 - RNA, 19 nt, Homo sapiens
  misc_RNA (1)...(19): siRNA sense strand
gguuaaaaggugaggcaga

SEQ ID NO: 2622007 - RNA, 19 nt, Homo sapiens
  misc_RNA (1)...(19): siRNA sense strand
ccaauuggauagaggguac

SEQ ID NO: 2622008 - RNA, 19 nt, Homo sapiens
  misc_RNA (1)...(19): siRNA sense strand
aggcagaguaccaggagau

SEQ ID NO: 2622009 - RNA, 19 nt, Homo sapiens
  misc_RNA (1)...(19): siRNA sense strand
ccuacgggcaaucgagaaa

SEQ ID NO: 2622010 - RNA, 19 nt, Homo sapiens
  misc_RNA (1)...(19): siRNA sense strand
ccugcaaagcugaugcuaa

SEQ ID NO: 2622011 - RNA, 19 nt, Homo sapiens
  misc_RNA (1)...(19): siRNA sense strand
caggccagguggaggucaa

SEQ ID NO: 2622012 - RNA, 19 nt, Homo sapiens
  misc_RNA (1)...(19): siRNA sense strand
caguaugagccugagguaa

SEQ ID NO: 2622013 - RNA, 19 nt, Homo sapiens
  misc_RNA (1)...(19): siRNA sense strand
agugugguauccugggaaa

SEQ ID NO: 2622014 - RNA, 19 nt, Homo sapiens
  misc_RNA (1)...(19): siRNA sense strand
aguaugagccugagguaac

SEQ ID NO: 2622015 - RNA, 19 nt, Homo sapiens
  misc_RNA (1)...(19): siRNA sense strand
cccaggugguccaggugaa

SEQ ID NO: 2622016 - RNA, 19 nt, Homo sapiens
  misc_RNA (1)...(19): siRNA sense strand
ccuccucacucaagggcua

SEQ ID NO: 2622017 - RNA, 19 nt, Homo sapiens
  misc_RNA (1)...(19): siRNA sense strand
ccuucaacaucauggagau

SEQ ID NO: 2622018 - RNA, 19 nt, Homo sapiens
  misc_RNA (1)...(19): siRNA sense strand
ggaaaggccauguagggca

SEQ ID NO: 2622019 - RNA, 19 nt, Homo sapiens
  misc_RNA (1)...(19): siRNA sense strand
ccauccggaagcaggaaua

SEQ ID NO: 2622020 - RNA, 19 nt, Homo sapiens
  misc_RNA (1)...(19): siRNA sense strand
ugacaagaauccugaggcu

SEQ ID NO: 2622021 - RNA, 19 nt, Homo sapiens
  misc_RNA (1)...(19): siRNA sense strand
acaaggagaacguggagca

SEQ ID NO: 2622022 - RNA, 19 nt, Homo sapiens
  misc_RNA (1)...(19): siRNA sense strand
cuuacgaugacaagaucua

SEQ ID NO: 2622023 - RNA, 19 nt, Homo sapiens
  misc_RNA (1)...(19): siRNA sense strand
cugaaagccaugcugguau

SEQ ID NO: 2622024 - RNA, 19 nt, Homo sapiens
  misc_RNA (1)...(19): siRNA sense strand
ggaaggaauaggagaggca

SEQ ID NO: 2622025 - RNA, 19 nt, Homo sapiens
  misc_RNA (1)...(19): siRNA sense strand
agauauggagacugagcua

SEQ ID NO: 2622026 - RNA, 19 nt, Homo sapiens
  misc_RNA (1)...(19): siRNA sense strand
cgcgaauaccugaggguga

SEQ ID NO: 2622027 - RNA, 19 nt, Homo sapiens
  misc_RNA (1)...(19): siRNA sense strand
cugcaaucccagagagagu

SEQ ID NO: 2622028 - RNA, 19 nt, Homo sapiens
  misc_RNA (1)...(19): siRNA sense strand
gcugaggaggaaaggagaa

SEQ ID NO: 2622029 - RNA, 19 nt, Homo sapiens
  misc_RNA (1)...(19): siRNA sense strand
aggaaaggagaaagauuga

SEQ ID NO: 2622030 - RNA, 19 nt, Homo sapiens
  misc_RNA (1)...(19): siRNA sense strand
ucacgauccuggaggcaga

SEQ ID NO: 2622031 - RNA, 19 nt, Homo sapiens
  misc_RNA (1)...(19): siRNA sense strand
cagaggaagaagaagcuau

SEQ ID NO: 2622032 - RNA, 19 nt, Homo sapiens
  misc_RNA (1)...(19): siRNA sense strand
cugaggaggaaaggagaaa

SEQ ID NO: 2622033 - RNA, 19 nt, Homo sapiens
  misc_RNA (1)...(19): siRNA sense strand
ccugaggagcugaggcuga

SEQ ID NO: 2622034 - RNA, 19 nt, Homo sapiens
  misc_RNA (1)...(19): siRNA sense strand
ugcuggagauugaggguga

SEQ ID NO: 2622035 - RNA, 19 nt, Homo sapiens
  misc_RNA (1)...(19): siRNA sense strand
gcacuggagcugcaggcua

SEQ ID NO: 2622036 - RNA, 19 nt, Homo sapiens
  misc_RNA (1)...(19): siRNA sense strand
aggcagcugaagaggagaa

SEQ ID NO: 2622037 - RNA, 19 nt, Homo sapiens
  misc_RNA (1)...(19): siRNA sense strand
ggagaaagauugaaguucc

SEQ ID NO: 2622038 - RNA, 19 nt, Homo sapiens
  misc_RNA (1)...(19): siRNA sense strand
gggugaauguggugaaaac

SEQ ID NO: 2622039 - RNA, 19 nt, Homo sapiens
  misc_RNA (1)...(19): siRNA sense strand
gguuacuguucugggacaa

SEQ ID NO: 2622040 - RNA, 19 nt, Homo sapiens
  misc_RNA (1)...(19): siRNA sense strand
ugaaacaagaaaagccaua

SEQ ID NO: 2622041 - RNA, 19 nt, Homo sapiens
  misc_RNA (1)...(19): siRNA sense strand
ccaacgugcuucagcgcca

SEQ ID NO: 2622042 - RNA, 19 nt, Homo sapiens
  misc_RNA (1)...(19): siRNA sense strand
ccagagaggauuccgguca

SEQ ID NO: 2622043 - RNA, 19 nt, Homo sapiens
  misc_RNA (1)...(19): siRNA sense strand
aggcagagcccauacggau

SEQ ID NO: 2622044 - RNA, 19 nt, Homo sapiens
  misc_RNA (1)...(19): siRNA sense strand
cgguuacuguucugggaca

SEQ ID NO: 2622045 - RNA, 19 nt, Homo sapiens
  misc_RNA (1)...(19): siRNA sense strand
cgugcugguacgagugcaa

SEQ ID NO: 2622046 - RNA, 19 nt, Homo sapiens
  misc_RNA (1)...(19): siRNA sense strand
gggaauguccuauggugca

SEQ ID NO: 2622047 - RNA, 19 nt, Homo sapiens
  misc_RNA (1)...(19): siRNA sense strand
ccagaagaacggugggccu

SEQ ID NO: 2622048 - RNA, 19 nt, Homo sapiens
  misc_RNA (1)...(19): siRNA sense strand
ugcagagguggaaggaaua

SEQ ID NO: 2622049 - RNA, 19 nt, Homo sapiens
  misc_RNA (1)...(19): siRNA sense strand
uggcuagagcagaacauaa

SEQ ID NO: 2622050 - RNA, 19 nt, Homo sapiens
  misc_RNA (1)...(19): siRNA sense strand
augugaaguauguggaaaa

SEQ ID NO: 2622051 - RNA, 19 nt, Homo sapiens
  misc_RNA (1)...(19): siRNA sense strand
ugagauggugguagccaaa

SEQ ID NO: 2622052 - RNA, 19 nt, Homo sapiens
  misc_RNA (1)...(19): siRNA sense strand
augugaggaauguggcaaa

SEQ ID NO: 2622053 - RNA, 19 nt, Homo sapiens
  misc_RNA (1)...(19): siRNA sense strand
augugaagaguguggaaaa

SEQ ID NO: 2622054 - RNA, 19 nt, Homo sapiens
  misc_RNA (1)...(19): siRNA sense strand
augagauggugguagccaa

SEQ ID NO: 2622055 - RNA, 19 nt, Homo sapiens
  misc_RNA (1)...(19): siRNA sense strand
cauacaaaugugaggaaug

SEQ ID NO: 2622056 - RNA, 19 nt, Homo sapiens
  misc_RNA (1)...(19): siRNA sense strand
aagaaaaggcuguaaaagu

SEQ ID NO: 2622057 - RNA, 19 nt, Homo sapiens
  misc_RNA (1)...(19): siRNA sense strand
ccuuacuaaacaucagaua

SEQ ID NO: 2622058 - RNA, 19 nt, Homo sapiens
  misc_RNA (1)...(19): siRNA sense strand
guuaagaaaaggcuguaaa

SEQ ID NO: 2622059 - RNA, 19 nt, Homo sapiens
  misc_RNA (1)...(19): siRNA sense strand
gaacaauguggcaaggucu

SEQ ID NO: 2622060 - RNA, 19 nt, Homo sapiens
  misc_RNA (1)...(19): siRNA sense strand
accuuuggcuagagcagaa

SEQ ID NO: 2622061 - RNA, 19 nt, Homo sapiens
  misc_RNA (1)...(19): siRNA sense strand
agauguaaagaaugugaca

SEQ ID NO: 2622062 - RNA, 19 nt, Homo sapiens
  misc_RNA (1)...(19): siRNA sense strand
ggaagaacgcccaaggcaa

SEQ ID NO: 2622063 - RNA, 19 nt, Homo sapiens
  misc_RNA (1)...(19): siRNA sense strand
gugaagaagcuaagagcca

SEQ ID NO: 2622064 - RNA, 19 nt, Homo sapiens
  misc_RNA (1)...(19): siRNA sense strand
cacuaauauccgugaagaa

SEQ ID NO: 2622065 - RNA, 19 nt, Homo sapiens
  misc_RNA (1)...(19): siRNA sense strand
cagaggaagacgugaccau

SEQ ID NO: 2622066 - RNA, 19 nt, Homo sapiens
  misc_RNA (1)...(19): siRNA sense strand
gggcaugaccuaugacgca

SEQ ID NO: 2622067 - RNA, 19 nt, Homo sapiens
  misc_RNA (1)...(19): siRNA sense strand
gaucaaagcaagaaguggu

SEQ ID NO: 2622068 - RNA, 19 nt, Homo sapiens
  misc_RNA (1)...(19): siRNA sense strand
agcaagaaguggugacaac

SEQ ID NO: 2622069 - RNA, 19 nt, Homo sapiens
  misc_RNA (1)...(19): siRNA sense strand
augaaaacgugaagcacau

SEQ ID NO: 2622070 - RNA, 19 nt, Homo sapiens
  misc_RNA (1)...(19): siRNA sense strand
gguuugaaucacacgugua

SEQ ID NO: 2622071 - RNA, 19 nt, Homo sapiens
  misc_RNA (1)...(19): siRNA sense strand
acuacuaccugcagccaga

SEQ ID NO: 2622072 - RNA, 19 nt, Homo sapiens
  misc_RNA (1)...(19): siRNA sense strand
ggguaaaggagcagauaau

SEQ ID NO: 2622073 - RNA, 19 nt, Homo sapiens
  misc_RNA (1)...(19): siRNA sense strand
aggaacaagucgaggaaaa

SEQ ID NO: 2622074 - RNA, 19 nt, Homo sapiens
  misc_RNA (1)...(19): siRNA sense strand
cugccaaagaacagagaua

SEQ ID NO: 2622075 - RNA, 19 nt, Homo sapiens
  misc_RNA (1)...(19): siRNA sense strand
ggaaaagcucagauaguaa

SEQ ID NO: 2622076 - RNA, 19 nt, Homo sapiens
  misc_RNA (1)...(19): siRNA sense strand
uuaauauagugcaggacaa

SEQ ID NO: 2622077 - RNA, 19 nt, Homo sapiens
  misc_RNA (1)...(19): siRNA sense strand
caggaaacgccgaagaaga

SEQ ID NO: 2622078 - RNA, 19 nt, Homo sapiens
  misc_RNA (1)...(19): siRNA sense strand
acuaaugguuauaugggua

SEQ ID NO: 2622079 - RNA, 19 nt, Homo sapiens
  misc_RNA (1)...(19): siRNA sense strand
aggaaagcuaggcgcaaua

SEQ ID NO: 2622080 - RNA, 19 nt, Homo sapiens
  misc_RNA (1)...(19): siRNA sense strand
agccaaagccgcugaaaca

SEQ ID NO: 2622081 - RNA, 19 nt, Homo sapiens
  misc_RNA (1)...(19): siRNA sense strand
ggugauaugcuucggaaaa

SEQ ID NO: 2622082 - RNA, 19 nt, Homo sapiens
  misc_RNA (1)...(19): siRNA sense strand
cgcugaaacaugagcagaa

SEQ ID NO: 2622083 - RNA, 19 nt, Homo sapiens
  misc_RNA (1)...(19): siRNA sense strand
ugcuggagaaagagaaaua

SEQ ID NO: 2622084 - RNA, 19 nt, Homo sapiens
  misc_RNA (1)...(19): siRNA sense strand
gggugauaugcuucggaaa

SEQ ID NO: 2622085 - RNA, 19 nt, Homo sapiens
  misc_RNA (1)...(19): siRNA sense strand
cucaaaggacuacgagaua

SEQ ID NO: 2622086 - RNA, 19 nt, Homo sapiens
  misc_RNA (1)...(19): siRNA sense strand
acuacgagauagaaaguca

SEQ ID NO: 2622087 - RNA, 19 nt, Homo sapiens
  misc_RNA (1)...(19): siRNA sense strand
auggugaacuaaacgguaa

SEQ ID NO: 2622088 - RNA, 19 nt, Homo sapiens
  misc_RNA (1)...(19): siRNA sense strand
ugaaacaugagcagaaaca

SEQ ID NO: 2622089 - RNA, 19 nt, Homo sapiens
  misc_RNA (1)...(19): siRNA sense strand
aaacaugagcagaaacaca

SEQ ID NO: 2622090 - RNA, 19 nt, Homo sapiens
  misc_RNA (1)...(19): siRNA sense strand
ccucaauggcaaccagcaa

SEQ ID NO: 2622091 - RNA, 19 nt, Homo sapiens
  misc_RNA (1)...(19): siRNA sense strand
cgagauagaaagucaaaau

SEQ ID NO: 2622092 - RNA, 19 nt, Homo sapiens
  misc_RNA (1)...(19): siRNA sense strand
aguuaugcaagcaaaguua

SEQ ID NO: 2622093 - RNA, 19 nt, Homo sapiens
  misc_RNA (1)...(19): siRNA sense strand
aggcuuacgagcuggagaa

SEQ ID NO: 2622094 - RNA, 19 nt, Homo sapiens
  misc_RNA (1)...(19): siRNA sense strand
ccagcaaguuguagacacu

SEQ ID NO: 2622095 - RNA, 19 nt, Homo sapiens
  misc_RNA (1)...(19): siRNA sense strand
cuaaugguuauauggguaa

SEQ ID NO: 2622096 - RNA, 19 nt, Homo sapiens
  misc_RNA (1)...(19): siRNA sense strand
uuauauggguaaaggagca

SEQ ID NO: 2622097 - RNA, 19 nt, Homo sapiens
  misc_RNA (1)...(19): siRNA sense strand
caguagucaaggugcuuua

SEQ ID NO: 2622098 - RNA, 19 nt, Homo sapiens
  misc_RNA (1)...(19): siRNA sense strand
gauaaugaugguaguggau

SEQ ID NO: 2622099 - RNA, 19 nt, Homo sapiens
  misc_RNA (1)...(19): siRNA sense strand
aaggaaaaccucaacaaaa

SEQ ID NO: 2622100 - RNA, 19 nt, Homo sapiens
  misc_RNA (1)...(19): siRNA sense strand
ggccuagaaaggaaugaua

SEQ ID NO: 2622101 - RNA, 19 nt, Homo sapiens
  misc_RNA (1)...(19): siRNA sense strand
agauaaugaugguagugga

SEQ ID NO: 2622102 - RNA, 19 nt, Homo sapiens
  misc_RNA (1)...(19): siRNA sense strand
ccuucaaauaugcaaacua

SEQ ID NO: 2622103 - RNA, 19 nt, Homo sapiens
  misc_RNA (1)...(19): siRNA sense strand
cggauauacaacuccuaaa

SEQ ID NO: 2622104 - RNA, 19 nt, Homo sapiens
  misc_RNA (1)...(19): siRNA sense strand
auagugaacaaaagggaaa

SEQ ID NO: 2622105 - RNA, 19 nt, Homo sapiens
  misc_RNA (1)...(19): siRNA sense strand
acacuaaagaaauggaauc

SEQ ID NO: 2622106 - RNA, 19 nt, Homo sapiens
  misc_RNA (1)...(19): siRNA sense strand
uggguaaaggagcagauaa

SEQ ID NO: 2622107 - RNA, 19 nt, Homo sapiens
  misc_RNA (1)...(19): siRNA sense strand
uaaugaugguaguggaucu

SEQ ID NO: 2622108 - RNA, 19 nt, Homo sapiens
  misc_RNA (1)...(19): siRNA sense strand
uaauauagugcaggacaaa

SEQ ID NO: 2622109 - RNA, 19 nt, Homo sapiens
  misc_RNA (1)...(19): siRNA sense strand
cuuggaacccagucauaua

SEQ ID NO: 2622110 - RNA, 19 nt, Homo sapiens
  misc_RNA (1)...(19): siRNA sense strand
gugcuaaaauaguuccuaa

SEQ ID NO: 2622111 - RNA, 19 nt, Homo sapiens
  misc_RNA (1)...(19): siRNA sense strand
cuccaggacaugagucuaa

SEQ ID NO: 2622112 - RNA, 19 nt, Homo sapiens
  misc_RNA (1)...(19): siRNA sense strand
aagugauggaggugacauu

SEQ ID NO: 2622113 - RNA, 19 nt, Homo sapiens
  misc_RNA (1)...(19): siRNA sense strand
gagcuggagaaacggacua

SEQ ID NO: 2622114 - RNA, 19 nt, Homo sapiens
  misc_RNA (1)...(19): siRNA sense strand
ggauauacaacuccuaaaa

SEQ ID NO: 2622115 - RNA, 19 nt, Homo sapiens
  misc_RNA (1)...(19): siRNA sense strand
gggaaaucgaguagauggu

SEQ ID NO: 2622116 - RNA, 19 nt, Homo sapiens
  misc_RNA (1)...(19): siRNA sense strand
agcagggacugauggaaau

SEQ ID NO: 2622117 - RNA, 19 nt, Homo sapiens
  misc_RNA (1)...(19): siRNA sense strand
auucaguucuccaggacau

SEQ ID NO: 2622118 - RNA, 19 nt, Homo sapiens
  misc_RNA (1)...(19): siRNA sense strand
ggacaaaauaaugcaacaa

SEQ ID NO: 2622119 - RNA, 19 nt, Homo sapiens
  misc_RNA (1)...(19): siRNA sense strand
aaugcuggagaaagagaaa

SEQ ID NO: 2622120 - RNA, 19 nt, Homo sapiens
  misc_RNA (1)...(19): siRNA sense strand
agccugaagcagacuguaa

SEQ ID NO: 2622121 - RNA, 19 nt, Homo sapiens
  misc_RNA (1)...(19): siRNA sense strand
ugggaagucuuaugaaaau

SEQ ID NO: 2622122 - RNA, 19 nt, Homo sapiens
  misc_RNA (1)...(19): siRNA sense strand
guagaugguucgaagccca

SEQ ID NO: 2622123 - RNA, 19 nt, Homo sapiens
  misc_RNA (1)...(19): siRNA sense strand
acucagacccaaucaucaa

SEQ ID NO: 2622124 - RNA, 19 nt, Homo sapiens
  misc_RNA (1)...(19): siRNA sense strand
aggacaaaauaaugcaaca

SEQ ID NO: 2622125 - RNA, 19 nt, Homo sapiens
  misc_RNA (1)...(19): siRNA sense strand
ccaggguccucaauggcaa

SEQ ID NO: 2622126 - RNA, 19 nt, Homo sapiens
  misc_RNA (1)...(19): siRNA sense strand
ggaucugagagcggauaua

SEQ ID NO: 2622127 - RNA, 19 nt, Homo sapiens
  misc_RNA (1)...(19): siRNA sense strand
cccauuuggaaguaugaaa

SEQ ID NO: 2622128 - RNA, 19 nt, Homo sapiens
  misc_RNA (1)...(19): siRNA sense strand
ugacauuucaaggagaaua

SEQ ID NO: 2622129 - RNA, 19 nt, Homo sapiens
  misc_RNA (1)...(19): siRNA sense strand
gacauuucaaggagaauau

SEQ ID NO: 2622130 - RNA, 19 nt, Homo sapiens
  misc_RNA (1)...(19): siRNA sense strand
cggaaguguuacugagaga

SEQ ID NO: 2622131 - RNA, 19 nt, Homo sapiens
  misc_RNA (1)...(19): siRNA sense strand
gggcaaaggaauggacgaa

SEQ ID NO: 2622132 - RNA, 19 nt, Homo sapiens
  misc_RNA (1)...(19): siRNA sense strand
gaauggacgaacauggaaa

SEQ ID NO: 2622133 - RNA, 19 nt, Homo sapiens
  misc_RNA (1)...(19): siRNA sense strand
cuuugaagcuaguggacca

SEQ ID NO: 2622134 - RNA, 19 nt, Homo sapiens
  misc_RNA (1)...(19): siRNA sense strand
ggucauacggaaugcaaaa

SEQ ID NO: 2622135 - RNA, 19 nt, Homo sapiens
  misc_RNA (1)...(19): siRNA sense strand
gauuaguggaguucauaaa

SEQ ID NO: 2622136 - RNA, 19 nt, Homo sapiens
  misc_RNA (1)...(19): siRNA sense strand
ggaaauuaucaacgaggau

SEQ ID NO: 2622137 - RNA, 19 nt, Homo sapiens
  misc_RNA (1)...(19): siRNA sense strand
gaagugaacaugaggcaca

SEQ ID NO: 2622138 - RNA, 19 nt, Homo sapiens
  misc_RNA (1)...(19): siRNA sense strand
aagcuaaggucauacggaa

SEQ ID NO: 2622139 - RNA, 19 nt, Homo sapiens
  misc_RNA (1)...(19): siRNA sense strand
agauacagauauagagaag

SEQ ID NO: 2622140 - RNA, 19 nt, Homo sapiens
  misc_RNA (1)...(19): siRNA sense strand
uggauuagaagaagugaau

SEQ ID NO: 2622141 - RNA, 19 nt, Homo sapiens
  misc_RNA (1)...(19): siRNA sense strand
agauaugggcuuugagacu

SEQ ID NO: 2622142 - RNA, 19 nt, Homo sapiens
  misc_RNA (1)...(19): siRNA sense strand
ccauuugaagacuggauua

SEQ ID NO: 2622143 - RNA, 19 nt, Homo sapiens
  misc_RNA (1)...(19): siRNA sense strand
gaaacaauuaguagaacca

SEQ ID NO: 2622144 - RNA, 19 nt, Homo sapiens
  misc_RNA (1)...(19): siRNA sense strand
gggaaaacuggaagagcuu

SEQ ID NO: 2622145 - RNA, 19 nt, Homo sapiens
  misc_RNA (1)...(19): siRNA sense strand
acuaugaucacuugggauu

SEQ ID NO: 2622146 - RNA, 19 nt, Homo sapiens
  misc_RNA (1)...(19): siRNA sense strand
cagaaaugaaagagcccuu

SEQ ID NO: 2622147 - RNA, 19 nt, Homo sapiens
  misc_RNA (1)...(19): siRNA sense strand
aauacauugaucugggaaa

SEQ ID NO: 2622148 - RNA, 19 nt, Homo sapiens
  misc_RNA (1)...(19): siRNA sense strand
guuggaaguuacagcugaa

SEQ ID NO: 2622149 - RNA, 19 nt, Homo sapiens
  misc_RNA (1)...(19): siRNA sense strand
uagaagaaaccaagagaag

SEQ ID NO: 2622150 - RNA, 19 nt, Homo sapiens
  misc_RNA (1)...(19): siRNA sense strand
caucacauuccuagcaaau

SEQ ID NO: 2622151 - RNA, 19 nt, Homo sapiens
  misc_RNA (1)...(19): siRNA sense strand
agacuggauuaguggaguu

SEQ ID NO: 2622152 - RNA, 19 nt, Homo sapiens
  misc_RNA (1)...(19): siRNA sense strand
cauauguaccugagaacga

SEQ ID NO: 2622153 - RNA, 19 nt, Homo sapiens
  misc_RNA (1)...(19): siRNA sense strand
ccucaguuauugcagaaau

SEQ ID NO: 2622154 - RNA, 19 nt, Homo sapiens
  misc_RNA (1)...(19): siRNA sense strand
gcccuuuggauuagaagaa

SEQ ID NO: 2622155 - RNA, 19 nt, Homo sapiens
  misc_RNA (1)...(19): siRNA sense strand
cuggaaaugucuauaaacu

SEQ ID NO: 2622156 - RNA, 19 nt, Homo sapiens
  misc_RNA (1)...(19): siRNA sense strand
cuggauuaguggaguucau

SEQ ID NO: 2622157 - RNA, 19 nt, Homo sapiens
  misc_RNA (1)...(19): siRNA sense strand
gauuuauguugaugaggca

SEQ ID NO: 2622158 - RNA, 19 nt, Homo sapiens
  misc_RNA (1)...(19): siRNA sense strand
cagcaagaaguucggcaau

SEQ ID NO: 2622159 - RNA, 19 nt, Homo sapiens
  misc_RNA (1)...(19): siRNA sense strand
ggauuaguggaguucauaa

SEQ ID NO: 2622160 - RNA, 19 nt, Homo sapiens
  misc_RNA (1)...(19): siRNA sense strand
cuuauacaacuuugggcaa

SEQ ID NO: 2622161 - RNA, 19 nt, Homo sapiens
  misc_RNA (1)...(19): siRNA sense strand
gcauaaagggcucugaacu

SEQ ID NO: 2622162 - RNA, 19 nt, Homo sapiens
  misc_RNA (1)...(19): siRNA sense strand
ccauguaauuauugguuuc

SEQ ID NO: 2622163 - RNA, 19 nt, Homo sapiens
  misc_RNA (1)...(19): siRNA sense strand
guuucaacaugaugauuca

SEQ ID NO: 2622164 - RNA, 19 nt, Homo sapiens
  misc_RNA (1)...(19): siRNA sense strand
gaggaguguaacugcacaa

SEQ ID NO: 2622165 - RNA, 19 nt, Homo sapiens
  misc_RNA (1)...(19): siRNA sense strand
gaucaaagucugaagagug

SEQ ID NO: 2622166 - RNA, 19 nt, Homo sapiens
  misc_RNA (1)...(19): siRNA sense strand
acccacagccuuuggaaau

SEQ ID NO: 2622167 - RNA, 19 nt, Homo sapiens
  misc_RNA (1)...(19): siRNA sense strand
cgguaaauucaaacagugu

SEQ ID NO: 2622168 - RNA, 19 nt, Homo sapiens
  misc_RNA (1)...(19): siRNA sense strand
auucaaacagugugcuaau

SEQ ID NO: 2622169 - RNA, 19 nt, Homo sapiens
  misc_RNA (1)...(19): siRNA sense strand
ccgauaaacuacaggccuc

SEQ ID NO: 2622170 - RNA, 19 nt, Homo sapiens
  misc_RNA (1)...(19): siRNA sense strand
auacagauauagagaagac

SEQ ID NO: 2622171 - RNA, 19 nt, Homo sapiens
  misc_RNA (1)...(19): siRNA sense strand
cgucauuucaggaguaacu

SEQ ID NO: 2622172 - RNA, 19 nt, Homo sapiens
  misc_RNA (1)...(19): siRNA sense strand
acagcaagaaguucggcaa

SEQ ID NO: 2622173 - RNA, 19 nt, Homo sapiens
  misc_RNA (1)...(19): siRNA sense strand
gcaacauacgacuccuaaa

SEQ ID NO: 2622174 - RNA, 19 nt, Homo sapiens
  misc_RNA (1)...(19): siRNA sense strand
aguguuacugagagaauuu

SEQ ID NO: 2622175 - RNA, 19 nt, Homo sapiens
  misc_RNA (1)...(19): siRNA sense strand
ugucaaagaaaaccgguaa

SEQ ID NO: 2622176 - RNA, 19 nt, Homo sapiens
  misc_RNA (1)...(19): siRNA sense strand
cgaucuacagcaagaaguu

SEQ ID NO: 2622177 - RNA, 19 nt, Homo sapiens
  misc_RNA (1)...(19): siRNA sense strand
cuguagugcuucccgggua

SEQ ID NO: 2622178 - RNA, 19 nt, Homo sapiens
  misc_RNA (1)...(19): siRNA sense strand
aaauucaaacagugugcua

SEQ ID NO: 2622179 - RNA, 19 nt, Homo sapiens
  misc_RNA (1)...(19): siRNA sense strand
ccuccuuagaugaaauuau

SEQ ID NO: 2622180 - RNA, 19 nt, Homo sapiens
  misc_RNA (1)...(19): siRNA sense strand
agcuaaggucauacggaau

SEQ ID NO: 2622181 - RNA, 19 nt, Homo sapiens
  misc_RNA (1)...(19): siRNA sense strand
guaacugcacaaaggauca

SEQ ID NO: 2622182 - RNA, 19 nt, Homo sapiens
  misc_RNA (1)...(19): siRNA sense strand
ccuuuaaacgagaggguua

SEQ ID NO: 2622183 - RNA, 19 nt, Homo sapiens
  misc_RNA (1)...(19): siRNA sense strand
auacaaagggagaggaaau

SEQ ID NO: 2622184 - RNA, 19 nt, Homo sapiens
  misc_RNA (1)...(19): siRNA sense strand
gcuuauaguagcuguugaa

SEQ ID NO: 2622185 - RNA, 19 nt, Homo sapiens
  misc_RNA (1)...(19): siRNA sense strand
uaaagaauacaaagggaga

SEQ ID NO: 2622186 - RNA, 19 nt, Homo sapiens
  misc_RNA (1)...(19): siRNA sense strand
ccaagaagcagguggcucu

SEQ ID NO: 2622187 - RNA, 19 nt, Homo sapiens
  misc_RNA (1)...(19): siRNA sense strand
ggauauuggaaaucgcauu

SEQ ID NO: 2622188 - RNA, 19 nt, Homo sapiens
  misc_RNA (1)...(19): siRNA sense strand
uggaaaaggagaaagauuu

SEQ ID NO: 2622189 - RNA, 19 nt, Homo sapiens
  misc_RNA (1)...(19): siRNA sense strand
ugucauuugcccaggauuu

SEQ ID NO: 2622190 - RNA, 19 nt, Homo sapiens
  misc_RNA (1)...(19): siRNA sense strand
agaugaaguacaacaaaga

SEQ ID NO: 2622191 - RNA, 19 nt, Homo sapiens
  misc_RNA (1)...(19): siRNA sense strand
agccaaauuauguguacaa

SEQ ID NO: 2622192 - RNA, 19 nt, Homo sapiens
  misc_RNA (1)...(19): siRNA sense strand
ggauggcaguauuuggcua

SEQ ID NO: 2622193 - RNA, 19 nt, Homo sapiens
  misc_RNA (1)...(19): siRNA sense strand
cuggaaaaggagaaagauu

SEQ ID NO: 2622194 - RNA, 19 nt, Homo sapiens
  misc_RNA (1)...(19): siRNA sense strand
ccuggauagagauggaaau

SEQ ID NO: 2622195 - RNA, 19 nt, Homo sapiens
  misc_RNA (1)...(19): siRNA sense strand
ucgcauucuucaugugaga

SEQ ID NO: 2622196 - RNA, 19 nt, Homo sapiens
  misc_RNA (1)...(19): siRNA sense strand
cuauugguguucuggaaaa

SEQ ID NO: 2622197 - RNA, 19 nt, Homo sapiens
  misc_RNA (1)...(19): siRNA sense strand
uucaagaaguauagaugga

SEQ ID NO: 2622198 - RNA, 19 nt, Homo sapiens
  misc_RNA (1)...(19): siRNA sense strand
gccacagauguuauggaua

SEQ ID NO: 2622199 - RNA, 19 nt, Homo sapiens
  misc_RNA (1)...(19): siRNA sense strand
gagcacucauccugcgaca

SEQ ID NO: 2622200 - RNA, 19 nt, Homo sapiens
  misc_RNA (1)...(19): siRNA sense strand
accgaaauuuagaaagcua

SEQ ID NO: 2622201 - RNA, 19 nt, Homo sapiens
  misc_RNA (1)...(19): siRNA sense strand
ccuccaaaaccguugaaua

SEQ ID NO: 2622202 - RNA, 19 nt, Homo sapiens
  misc_RNA (1)...(19): siRNA sense strand
cuccaaaaccguugaauau

SEQ ID NO: 2622203 - RNA, 19 nt, Homo sapiens
  misc_RNA (1)...(19): siRNA sense strand
gagacuuagaaccgaaauu

SEQ ID NO: 2622204 - RNA, 19 nt, Homo sapiens
  misc_RNA (1)...(19): siRNA sense strand
ccaugaugugggaagguga

SEQ ID NO: 2622205 - RNA, 19 nt, Homo sapiens
  misc_RNA (1)...(19): siRNA sense strand
cuaucaucauguuguguau

SEQ ID NO: 2622206 - RNA, 19 nt, Homo sapiens
  misc_RNA (1)...(19): siRNA sense strand
aaggagacuuagaaccgaa

SEQ ID NO: 2622207 - RNA, 19 nt, Homo sapiens
  misc_RNA (1)...(19): siRNA sense strand
acacacacagagagagaga

SEQ ID NO: 2622208 - RNA, 19 nt, Homo sapiens
  misc_RNA (1)...(19): siRNA sense strand
uagcagagcuggugggaac

SEQ ID NO: 2622209 - RNA, 19 nt, Homo sapiens
  misc_RNA (1)...(19): siRNA sense strand
cugccgaagcuguuccaaa

SEQ ID NO: 2622210 - RNA, 19 nt, Homo sapiens
  misc_RNA (1)...(19): siRNA sense strand
aaccaaagaaacagaggca

SEQ ID NO: 2622211 - RNA, 19 nt, Homo sapiens
  misc_RNA (1)...(19): siRNA sense strand
cggaauuaucacagagcaa

SEQ ID NO: 2622212 - RNA, 19 nt, Homo sapiens
  misc_RNA (1)...(19): siRNA sense strand
cugaaagugaugaggccaa

SEQ ID NO: 2622213 - RNA, 19 nt, Homo sapiens
  misc_RNA (1)...(19): siRNA sense strand
uggaaaggguggagucgga

SEQ ID NO: 2622214 - RNA, 19 nt, Homo sapiens
  misc_RNA (1)...(19): siRNA sense strand
augaugaaucugaaaggaa

SEQ ID NO: 2622215 - RNA, 19 nt, Homo sapiens
  misc_RNA (1)...(19): siRNA sense strand
gaugaaucugaaaggaaau

SEQ ID NO: 2622216 - RNA, 19 nt, Homo sapiens
  misc_RNA (1)...(19): siRNA sense strand
ccuaaaacaaagaagaaca

SEQ ID NO: 2622217 - RNA, 19 nt, Homo sapiens
  misc_RNA (1)...(19): siRNA sense strand
uugagaaauuguugaggca

SEQ ID NO: 2622218 - RNA, 19 nt, Homo sapiens
  misc_RNA (1)...(19): siRNA sense strand
ugcugauggugcaaggaaa

SEQ ID NO: 2622219 - RNA, 19 nt, Homo sapiens
  misc_RNA (1)...(19): siRNA sense strand
accgauagaagguguuaaa

SEQ ID NO: 2622220 - RNA, 19 nt, Homo sapiens
  misc_RNA (1)...(19): siRNA sense strand
cugaaaggaaauccggaau

SEQ ID NO: 2622221 - RNA, 19 nt, Homo sapiens
  misc_RNA (1)...(19): siRNA sense strand
cuugaggauugcuguggaa

SEQ ID NO: 2622222 - RNA, 19 nt, Homo sapiens
  misc_RNA (1)...(19): siRNA sense strand
agacaugccaccaggaacu

SEQ ID NO: 2622223 - RNA, 19 nt, Homo sapiens
  misc_RNA (1)...(19): siRNA sense strand
gcuagauguggauguguau

SEQ ID NO: 2622224 - RNA, 19 nt, Homo sapiens
  misc_RNA (1)...(19): siRNA sense strand
uaucagucucacagaauau

SEQ ID NO: 2622225 - RNA, 19 nt, Homo sapiens
  misc_RNA (1)...(19): siRNA sense strand
ugaaguucuaggagacauu

SEQ ID NO: 2622226 - RNA, 19 nt, Homo sapiens
  misc_RNA (1)...(19): siRNA sense strand
ucugaaaggaaauccggaa

SEQ ID NO: 2622227 - RNA, 19 nt, Homo sapiens
  misc_RNA (1)...(19): siRNA sense strand
gagaaauuguugaggcagg

SEQ ID NO: 2622228 - RNA, 19 nt, Homo sapiens
  misc_RNA (1)...(19): siRNA sense strand
gagugagacccuaaaacaa

SEQ ID NO: 2622229 - RNA, 19 nt, Homo sapiens
  misc_RNA (1)...(19): siRNA sense strand
uggaucaguacaagggaaa

SEQ ID NO: 2622230 - RNA, 19 nt, Homo sapiens
  misc_RNA (1)...(19): siRNA sense strand
gagccaagcgaaagacgaa

SEQ ID NO: 2622231 - RNA, 19 nt, Homo sapiens
  misc_RNA (1)...(19): siRNA sense strand
gaagaaagucagugagcac

SEQ ID NO: 2622232 - RNA, 19 nt, Homo sapiens
  misc_RNA (1)...(19): siRNA sense strand
uguccugagccaagcgaaa

SEQ ID NO: 2622233 - RNA, 19 nt, Homo sapiens
  misc_RNA (1)...(19): siRNA sense strand
gggaguacguggagucgca

SEQ ID NO: 2622234 - RNA, 19 nt, Homo sapiens
  misc_RNA (1)...(19): siRNA sense strand
gagacaaauacaacagcau

SEQ ID NO: 2622235 - RNA, 19 nt, Homo sapiens
  misc_RNA (1)...(19): siRNA sense strand
caguggaggcagagaccuu

SEQ ID NO: 2622236 - RNA, 19 nt, Homo sapiens
  misc_RNA (1)...(19): siRNA sense strand
guggaucaguacaagggaa

SEQ ID NO: 2622237 - RNA, 19 nt, Homo sapiens
  misc_RNA (1)...(19): siRNA sense strand
cgaggagggaagaaaguca

SEQ ID NO: 2622238 - RNA, 19 nt, Homo sapiens
  misc_RNA (1)...(19): siRNA sense strand
uggaaugaccugggagaca

SEQ ID NO: 2622239 - RNA, 19 nt, Homo sapiens
  misc_RNA (1)...(19): siRNA sense strand
acaccauugcagaaggaau

SEQ ID NO: 2622240 - RNA, 19 nt, Homo sapiens
  misc_RNA (1)...(19): siRNA sense strand
gagacuggagcgacggaga

SEQ ID NO: 2622241 - RNA, 19 nt, Homo sapiens
  misc_RNA (1)...(19): siRNA sense strand
uggaucaguacaagggaaa

SEQ ID NO: 2622242 - RNA, 19 nt, Homo sapiens
  misc_RNA (1)...(19): siRNA sense strand
gagccaagcgaaagacgaa

SEQ ID NO: 2622243 - RNA, 19 nt, Homo sapiens
  misc_RNA (1)...(19): siRNA sense strand
gaagaaagucagugagcac

SEQ ID NO: 2622244 - RNA, 19 nt, Homo sapiens
  misc_RNA (1)...(19): siRNA sense strand
uguccugagccaagcgaaa

SEQ ID NO: 2622245 - RNA, 19 nt, Homo sapiens
  misc_RNA (1)...(19): siRNA sense strand
gggaguacguggagucgca

SEQ ID NO: 2622246 - RNA, 19 nt, Homo sapiens
  misc_RNA (1)...(19): siRNA sense strand
gagacaaauacaacagcau

SEQ ID NO: 2622247 - RNA, 19 nt, Homo sapiens
  misc_RNA (1)...(19): siRNA sense strand
caguggaggcagagaccuu

SEQ ID NO: 2622248 - RNA, 19 nt, Homo sapiens
  misc_RNA (1)...(19): siRNA sense strand
guggaucaguacaagggaa

SEQ ID NO: 2622249 - RNA, 19 nt, Homo sapiens
  misc_RNA (1)...(19): siRNA sense strand
cgaggagggaagaaaguca

SEQ ID NO: 2622250 - RNA, 19 nt, Homo sapiens
  misc_RNA (1)...(19): siRNA sense strand
uggaaugaccugggagaca

SEQ ID NO: 2622251 - RNA, 19 nt, Homo sapiens
  misc_RNA (1)...(19): siRNA sense strand
acaccauugcagaaggaau

SEQ ID NO: 2622252 - RNA, 19 nt, Homo sapiens
  misc_RNA (1)...(19): siRNA sense strand
gagacuggagcgacggaga

SEQ ID NO: 2622253 - RNA, 19 nt, Homo sapiens
  misc_RNA (1)...(19): siRNA sense strand
ggaaauagauaaaggcaug

SEQ ID NO: 2622254 - RNA, 19 nt, Homo sapiens
  misc_RNA (1)...(19): siRNA sense strand
uuggaagagcuuaaggaaa

SEQ ID NO: 2622255 - RNA, 19 nt, Homo sapiens
  misc_RNA (1)...(19): siRNA sense strand
aggaauggccaguggacga

SEQ ID NO: 2622256 - RNA, 19 nt, Homo sapiens
  misc_RNA (1)...(19): siRNA sense strand
ggccaguggacgagaccaa

SEQ ID NO: 2622257 - RNA, 19 nt, Homo sapiens
  misc_RNA (1)...(19): siRNA sense strand
ucuuaagcucugugaggaa

SEQ ID NO: 2622258 - RNA, 19 nt, Homo sapiens
  misc_RNA (1)...(19): siRNA sense strand
aggaaauagauaaaggcau

SEQ ID NO: 2622259 - RNA, 19 nt, Homo sapiens
  misc_RNA (1)...(19): siRNA sense strand
uggaagaaacugcaggaga

SEQ ID NO: 2622260 - RNA, 19 nt, Homo sapiens
  misc_RNA (1)...(19): siRNA sense strand
acaccuuggaagagcuuaa

SEQ ID NO: 2622261 - RNA, 19 nt, Homo sapiens
  misc_RNA (1)...(19): siRNA sense strand
ugucguuggaagaguacaa

SEQ ID NO: 2622262 - RNA, 19 nt, Homo sapiens
  misc_RNA (1)...(19): siRNA sense strand
guacgagagcuuagcgcga

SEQ ID NO: 2622263 - RNA, 19 nt, Homo sapiens
  misc_RNA (1)...(19): siRNA sense strand
uggaagaguacaagcugau

SEQ ID NO: 2622264 - RNA, 19 nt, Homo sapiens
  misc_RNA (1)...(19): siRNA sense strand
cuuucgggagggagagaau

SEQ ID NO: 2622265 - RNA, 19 nt, Homo sapiens
  misc_RNA (1)...(19): siRNA sense strand
cggucaugguccuggagaa

SEQ ID NO: 2622266 - RNA, 19 nt, Homo sapiens
  misc_RNA (1)...(19): siRNA sense strand
aggacuacgucaaggugaa

SEQ ID NO: 2622267 - RNA, 19 nt, Homo sapiens
  misc_RNA (1)...(19): siRNA sense strand
ggaacaagaccguggagcu

SEQ ID NO: 2622268 - RNA, 19 nt, Homo sapiens
  misc_RNA (1)...(19): siRNA sense strand
acgucugcauugaguguaa

SEQ ID NO: 2622269 - RNA, 19 nt, Homo sapiens
  misc_RNA (1)...(19): siRNA sense strand
gaguguaacugcaaccaga

SEQ ID NO: 2622270 - RNA, 19 nt, Homo sapiens
  misc_RNA (1)...(19): siRNA sense strand
ucuccaacaucgaggucau

SEQ ID NO: 2622271 - RNA, 19 nt, Homo sapiens
  misc_RNA (1)...(19): siRNA sense strand
acgucaaggugaaggugga

SEQ ID NO: 2622272 - RNA, 19 nt, Homo sapiens
  misc_RNA (1)...(19): siRNA sense strand
ccaagaaggagaagcacgu

SEQ ID NO: 2622273 - RNA, 19 nt, Homo sapiens
  misc_RNA (1)...(19): siRNA sense strand
acaaggaggaggagggccu

SEQ ID NO: 2622274 - RNA, 19 nt, Homo sapiens
  misc_RNA (1)...(19): siRNA sense strand
gggacuaugacaucugcaa

SEQ ID NO: 2622275 - RNA, 19 nt, Homo sapiens
  misc_RNA (1)...(19): siRNA sense strand
ccaccuacuggcagagcau

SEQ ID NO: 2622276 - RNA, 19 nt, Homo sapiens
  misc_RNA (1)...(19): siRNA sense strand
gccugaaggacuacgucaa

SEQ ID NO: 2622277 - RNA, 19 nt, Homo sapiens
  misc_RNA (1)...(19): siRNA sense strand
guguagagccagaggggau

SEQ ID NO: 2622278 - RNA, 19 nt, Homo sapiens
  misc_RNA (1)...(19): siRNA sense strand
ggacugagggcacugggaa

SEQ ID NO: 2622279 - RNA, 19 nt, Homo sapiens
  misc_RNA (1)...(19): siRNA sense strand
ccuugaggccguaccacaa

SEQ ID NO: 2622280 - RNA, 19 nt, Homo sapiens
  misc_RNA (1)...(19): siRNA sense strand
guacaaagauugaagccaa

SEQ ID NO: 2622281 - RNA, 19 nt, Homo sapiens
  misc_RNA (1)...(19): siRNA sense strand
gggaguuauagguggaauu

SEQ ID NO: 2622282 - RNA, 19 nt, Homo sapiens
  misc_RNA (1)...(19): siRNA sense strand
cauuggaagaugagcgaga

SEQ ID NO: 2622283 - RNA, 19 nt, Homo sapiens
  misc_RNA (1)...(19): siRNA sense strand
acagaaagaaagaagcgua

SEQ ID NO: 2622284 - RNA, 19 nt, Homo sapiens
  misc_RNA (1)...(19): siRNA sense strand
caucagaaucagugcggga

SEQ ID NO: 2622285 - RNA, 19 nt, Homo sapiens
  misc_RNA (1)...(19): siRNA sense strand
gaacaagaacccagggccu

SEQ ID NO: 2622286 - RNA, 19 nt, Homo sapiens
  misc_RNA (1)...(19): siRNA sense strand
aagaaagaagcguagaaaa

SEQ ID NO: 2622287 - RNA, 19 nt, Homo sapiens
  misc_RNA (1)...(19): siRNA sense strand
agaaagaagcguagaaaag

SEQ ID NO: 2622288 - RNA, 19 nt, Homo sapiens
  misc_RNA (1)...(19): siRNA sense strand
agauugaagccaagggaac

SEQ ID NO: 2622289 - RNA, 19 nt, Homo sapiens
  misc_RNA (1)...(19): siRNA sense strand
cuggagcagcagucagaaa

SEQ ID NO: 2622290 - RNA, 19 nt, Homo sapiens
  misc_RNA (1)...(19): siRNA sense strand
ccuuguuaauuuagggaac

SEQ ID NO: 2622291 - RNA, 19 nt, Homo sapiens
  misc_RNA (1)...(19): siRNA sense strand
ggaugcagcaccagagcca

SEQ ID NO: 2622292 - RNA, 19 nt, Homo sapiens
  misc_RNA (1)...(19): siRNA sense strand
guggaacaccagaggacca

SEQ ID NO: 2622293 - RNA, 19 nt, Homo sapiens
  misc_RNA (1)...(19): siRNA sense strand
cugcaaacacugugaacac

SEQ ID NO: 2622294 - RNA, 19 nt, Homo sapiens
  misc_RNA (1)...(19): siRNA sense strand
acauaaaccuagucaacac

SEQ ID NO: 2622295 - RNA, 19 nt, Homo sapiens
  misc_RNA (1)...(19): siRNA sense strand
aaucaguggcugugggucu

SEQ ID NO: 2622296 - RNA, 19 nt, Homo sapiens
  misc_RNA (1)...(19): siRNA sense strand
uggaagacucacuaguaau

SEQ ID NO: 2622297 - RNA, 19 nt, Homo sapiens
  misc_RNA (1)...(19): siRNA sense strand
cagaaagaaagaagcguag

SEQ ID NO: 2622298 - RNA, 19 nt, Homo sapiens
  misc_RNA (1)...(19): siRNA sense strand
uugaagaacaggaugcuca

SEQ ID NO: 2622299 - RNA, 19 nt, Homo sapiens
  misc_RNA (1)...(19): siRNA sense strand
uguuaaacuugcaggagaa

SEQ ID NO: 2622300 - RNA, 19 nt, Homo sapiens
  misc_RNA (1)...(19): siRNA sense strand
cuaaauagucagaugguuu

SEQ ID NO: 2622301 - RNA, 19 nt, Homo sapiens
  misc_RNA (1)...(19): siRNA sense strand
cacuaagggagaagagaua

SEQ ID NO: 2622302 - RNA, 19 nt, Homo sapiens
  misc_RNA (1)...(19): siRNA sense strand
gggcaggaaguaaaggaaa

SEQ ID NO: 2622303 - RNA, 19 nt, Homo sapiens
  misc_RNA (1)...(19): siRNA sense strand
cggaaguaccagugaauca

SEQ ID NO: 2622304 - RNA, 19 nt, Homo sapiens
  misc_RNA (1)...(19): siRNA sense strand
gagaauucacgaagaagua

SEQ ID NO: 2622305 - RNA, 19 nt, Homo sapiens
  misc_RNA (1)...(19): siRNA sense strand
caguggaagaugagaauga

SEQ ID NO: 2622306 - RNA, 19 nt, Homo sapiens
  misc_RNA (1)...(19): siRNA sense strand
gaaaauacccugcuaaaua

SEQ ID NO: 2622307 - RNA, 19 nt, Homo sapiens
  misc_RNA (1)...(19): siRNA sense strand
aggaaaggaguuuggauau

SEQ ID NO: 2622308 - RNA, 19 nt, Homo sapiens
  misc_RNA (1)...(19): siRNA sense strand
uggauugggaggagaacaa

SEQ ID NO: 2622309 - RNA, 19 nt, Homo sapiens
  misc_RNA (1)...(19): siRNA sense strand
auauaagaguggcuacaaa

SEQ ID NO: 2622310 - RNA, 19 nt, Homo sapiens
  misc_RNA (1)...(19): siRNA sense strand
gaggaaauucagaugucaa

SEQ ID NO: 2622311 - RNA, 19 nt, Homo sapiens
  misc_RNA (1)...(19): siRNA sense strand
aaaugaagaaacuggagaa

SEQ ID NO: 2622312 - RNA, 19 nt, Homo sapiens
  misc_RNA (1)...(19): siRNA sense strand
gggaggagaacaagcugaa

SEQ ID NO: 2622313 - RNA, 19 nt, Homo sapiens
  misc_RNA (1)...(19): siRNA sense strand
agaaauugauucagugcca

SEQ ID NO: 2622314 - RNA, 19 nt, Homo sapiens
  misc_RNA (1)...(19): siRNA sense strand
uugcauaugccaaggaaga

SEQ ID NO: 2622315 - RNA, 19 nt, Homo sapiens
  misc_RNA (1)...(19): siRNA sense strand
gggcagaugaacaugaaca

SEQ ID NO: 2622316 - RNA, 19 nt, Homo sapiens
  misc_RNA (1)...(19): siRNA sense strand
aguuccauguacagaaaua

SEQ ID NO: 2622317 - RNA, 19 nt, Homo sapiens
  misc_RNA (1)...(19): siRNA sense strand
agaugaggauacagggcuu

SEQ ID NO: 2622318 - RNA, 19 nt, Homo sapiens
  misc_RNA (1)...(19): siRNA sense strand
gaaguaaaggaaaggaguu

SEQ ID NO: 2622319 - RNA, 19 nt, Homo sapiens
  misc_RNA (1)...(19): siRNA sense strand
uguucauaucugaggaaau

SEQ ID NO: 2622320 - RNA, 19 nt, Homo sapiens
  misc_RNA (1)...(19): siRNA sense strand
gaauucacgaagaaguaua

SEQ ID NO: 2622321 - RNA, 19 nt, Homo sapiens
  misc_RNA (1)...(19): siRNA sense strand
auguuaaacuugcaggaga

SEQ ID NO: 2622322 - RNA, 19 nt, Homo sapiens
  misc_RNA (1)...(19): siRNA sense strand
aaguaaaggaaaggaguuu

SEQ ID NO: 2622323 - RNA, 19 nt, Homo sapiens
  misc_RNA (1)...(19): siRNA sense strand
ugucagauauggucucuaa

SEQ ID NO: 2622324 - RNA, 19 nt, Homo sapiens
  misc_RNA (1)...(19): siRNA sense strand
guauggaacaggaucguau

SEQ ID NO: 2622325 - RNA, 19 nt, Homo sapiens
  misc_RNA (1)...(19): siRNA sense strand
uccucuaacaagugaauua

SEQ ID NO: 2622326 - RNA, 19 nt, Homo sapiens
  misc_RNA (1)...(19): siRNA sense strand
ggaaguaaaggaaaggagu

SEQ ID NO: 2622327 - RNA, 19 nt, Homo sapiens
  misc_RNA (1)...(19): siRNA sense strand
gacaaugaagauagugaau

SEQ ID NO: 2622328 - RNA, 19 nt, Homo sapiens
  misc_RNA (1)...(19): siRNA sense strand
uagcaguggaagaugagaa

SEQ ID NO: 2622329 - RNA, 19 nt, Homo sapiens
  misc_RNA (1)...(19): siRNA sense strand
cuacgagaauucacgaaga

SEQ ID NO: 2622330 - RNA, 19 nt, Homo sapiens
  misc_RNA (1)...(19): siRNA sense strand
gaugaaaauucgaaaccau

SEQ ID NO: 2622331 - RNA, 19 nt, Homo sapiens
  misc_RNA (1)...(19): siRNA sense strand
ggcaggaaguaaaggaaag

SEQ ID NO: 2622332 - RNA, 19 nt, Homo sapiens
  misc_RNA (1)...(19): siRNA sense strand
aaauugauucagugccaaa

SEQ ID NO: 2622333 - RNA, 19 nt, Homo sapiens
  misc_RNA (1)...(19): siRNA sense strand
uugguuugguggaggauuu

SEQ ID NO: 2622334 - RNA, 19 nt, Homo sapiens
  misc_RNA (1)...(19): siRNA sense strand
ugaagaagaugguggggca

SEQ ID NO: 2622335 - RNA, 19 nt, Homo sapiens
  misc_RNA (1)...(19): siRNA sense strand
uggaaaauacccugcuaaa

SEQ ID NO: 2622336 - RNA, 19 nt, Homo sapiens
  misc_RNA (1)...(19): siRNA sense strand
guacuuuguuugaagacca

SEQ ID NO: 2622337 - RNA, 19 nt, Homo sapiens
  misc_RNA (1)...(19): siRNA sense strand
aguuauugaaccuguacaa

SEQ ID NO: 2622338 - RNA, 19 nt, Homo sapiens
  misc_RNA (1)...(19): siRNA sense strand
gcuugaauuaauagcugaa

SEQ ID NO: 2622339 - RNA, 19 nt, Homo sapiens
  misc_RNA (1)...(19): siRNA sense strand
ugacaaugaagauagugaa

SEQ ID NO: 2622340 - RNA, 19 nt, Homo sapiens
  misc_RNA (1)...(19): siRNA sense strand
cggugauuauggugaaaau

SEQ ID NO: 2622341 - RNA, 19 nt, Homo sapiens
  misc_RNA (1)...(19): siRNA sense strand
guuuggauugggaggagaa

SEQ ID NO: 2622342 - RNA, 19 nt, Homo sapiens
  misc_RNA (1)...(19): siRNA sense strand
ucacuaagggagaagagau

SEQ ID NO: 2622343 - RNA, 19 nt, Homo sapiens
  misc_RNA (1)...(19): siRNA sense strand
gcacauucccaaaccucaa

SEQ ID NO: 2622344 - RNA, 19 nt, Homo sapiens
  misc_RNA (1)...(19): siRNA sense strand
caugagagauuauagagga

SEQ ID NO: 2622345 - RNA, 19 nt, Homo sapiens
  misc_RNA (1)...(19): siRNA sense strand
cagaugguuucaacugaua

SEQ ID NO: 2622346 - RNA, 19 nt, Homo sapiens
  misc_RNA (1)...(19): siRNA sense strand
gugaauuaaacggugauua

SEQ ID NO: 2622347 - RNA, 19 nt, Homo sapiens
  misc_RNA (1)...(19): siRNA sense strand
cgagaauucacgaagaagu

SEQ ID NO: 2622348 - RNA, 19 nt, Homo sapiens
  misc_RNA (1)...(19): siRNA sense strand
cagaugucaacgaaagaau

SEQ ID NO: 2622349 - RNA, 19 nt, Homo sapiens
  misc_RNA (1)...(19): siRNA sense strand
acagaagaucaaauagaca

SEQ ID NO: 2622350 - RNA, 19 nt, Homo sapiens
  misc_RNA (1)...(19): siRNA sense strand
aggaaacagaauugccauu

SEQ ID NO: 2622351 - RNA, 19 nt, Homo sapiens
  misc_RNA (1)...(19): siRNA sense strand
cagaauugccauuucccaa

SEQ ID NO: 2622352 - RNA, 19 nt, Homo sapiens
  misc_RNA (1)...(19): siRNA sense strand
acugauaacucuuugucuu

SEQ ID NO: 2622353 - RNA, 19 nt, Homo sapiens
  misc_RNA (1)...(19): siRNA sense strand
auuagaggcuccugaagau

SEQ ID NO: 2622354 - RNA, 19 nt, Homo sapiens
  misc_RNA (1)...(19): siRNA sense strand
cugcucugguggagauaga

SEQ ID NO: 2622355 - RNA, 19 nt, Homo sapiens
  misc_RNA (1)...(19): siRNA sense strand
uuuggaaagagaagagaaa

SEQ ID NO: 2622356 - RNA, 19 nt, Homo sapiens
  misc_RNA (1)...(19): siRNA sense strand
agaaaaggucaaaggcaua

SEQ ID NO: 2622357 - RNA, 19 nt, Homo sapiens
  misc_RNA (1)...(19): siRNA sense strand
uggaaagagaagagaaacu

SEQ ID NO: 2622358 - RNA, 19 nt, Homo sapiens
  misc_RNA (1)...(19): siRNA sense strand
uagaaaaggucaaaggcau

SEQ ID NO: 2622359 - RNA, 19 nt, Homo sapiens
  misc_RNA (1)...(19): siRNA sense strand
agucauggggaguuagaaa

SEQ ID NO: 2622360 - RNA, 19 nt, Homo sapiens
  misc_RNA (1)...(19): siRNA sense strand
guacuuaccaugugccaga

SEQ ID NO: 2622361 - RNA, 19 nt, Homo sapiens
  misc_RNA (1)...(19): siRNA sense strand
gauuacagauagaugcguu

SEQ ID NO: 2622362 - RNA, 19 nt, Homo sapiens
  misc_RNA (1)...(19): siRNA sense strand
aggaaauauucucagucau

SEQ ID NO: 2622363 - RNA, 19 nt, Homo sapiens
  misc_RNA (1)...(19): siRNA sense strand
gggaguuagaaaaggucaa

SEQ ID NO: 2622364 - RNA, 19 nt, Homo sapiens
  misc_RNA (1)...(19): siRNA sense strand
cgacagaaauccaggaagc

SEQ ID NO: 2622365 - RNA, 19 nt, Homo sapiens
  misc_RNA (1)...(19): siRNA sense strand
agaaaguaugugagaggga

SEQ ID NO: 2622366 - RNA, 19 nt, Homo sapiens
  misc_RNA (1)...(19): siRNA sense strand
agggagaugcagcgaauca

SEQ ID NO: 2622367 - RNA, 19 nt, Homo sapiens
  misc_RNA (1)...(19): siRNA sense strand
aaaguaugugagagggaga

SEQ ID NO: 2622368 - RNA, 19 nt, Homo sapiens
  misc_RNA (1)...(19): siRNA sense strand
cuggcaucaucuugggcua

SEQ ID NO: 2622369 - RNA, 19 nt, Homo sapiens
  misc_RNA (1)...(19): siRNA sense strand
cuauggaucuggaggcugu

SEQ ID NO: 2622370 - RNA, 19 nt, Homo sapiens
  misc_RNA (1)...(19): siRNA sense strand
ggaggcuguuucugggaca

SEQ ID NO: 2622371 - RNA, 19 nt, Homo sapiens
  misc_RNA (1)...(19): siRNA sense strand
ggaagcgucugaagggcca

SEQ ID NO: 2622372 - RNA, 19 nt, Homo sapiens
  misc_RNA (1)...(19): siRNA sense strand
ggauuugaaagaacagcau

SEQ ID NO: 2622373 - RNA, 19 nt, Homo sapiens
  misc_RNA (1)...(19): siRNA sense strand
uggaaaagaagaaggguuu

SEQ ID NO: 2622374 - RNA, 19 nt, Homo sapiens
  misc_RNA (1)...(19): siRNA sense strand
ugugaaauuaagugagaca

SEQ ID NO: 2622375 - RNA, 19 nt, Homo sapiens
  misc_RNA (1)...(19): siRNA sense strand
agcuaggguuguaguggaa

SEQ ID NO: 2622376 - RNA, 19 nt, Homo sapiens
  misc_RNA (1)...(19): siRNA sense strand
gcaaauucgcccagccgau

SEQ ID NO: 2622377 - RNA, 19 nt, Homo sapiens
  misc_RNA (1)...(19): siRNA sense strand
aggaagacuaaaaggaaga

SEQ ID NO: 2622378 - RNA, 19 nt, Homo sapiens
  misc_RNA (1)...(19): siRNA sense strand
agacuaaaaggaagaaaca

SEQ ID NO: 2622379 - RNA, 19 nt, Homo sapiens
  misc_RNA (1)...(19): siRNA sense strand
gaacauggcacuuauggga

SEQ ID NO: 2622380 - RNA, 19 nt, Homo sapiens
  misc_RNA (1)...(19): siRNA sense strand
cuaggguuguaguggaaca

SEQ ID NO: 2622381 - RNA, 19 nt, Homo sapiens
  misc_RNA (1)...(19): siRNA sense strand
ccuuggaggaagacuaaaa

SEQ ID NO: 2622382 - RNA, 19 nt, Homo sapiens
  misc_RNA (1)...(19): siRNA sense strand
ggguaaaggaagugguauc

SEQ ID NO: 2622383 - RNA, 19 nt, Homo sapiens
  misc_RNA (1)...(19): siRNA sense strand
gugaaggagaagaaccaaa

SEQ ID NO: 2622384 - RNA, 19 nt, Homo sapiens
  misc_RNA (1)...(19): siRNA sense strand
ggagggaagaccagcgaca

SEQ ID NO: 2622385 - RNA, 19 nt, Homo sapiens
  misc_RNA (1)...(19): siRNA sense strand
cuuaugugaaggagaagaa

SEQ ID NO: 2622386 - RNA, 19 nt, Homo sapiens
  misc_RNA (1)...(19): siRNA sense strand
agcagagccaggugagaaa

SEQ ID NO: 2622387 - RNA, 19 nt, Homo sapiens
  misc_RNA (1)...(19): siRNA sense strand
caggaggagaaucgagcaa

SEQ ID NO: 2622388 - RNA, 19 nt, Homo sapiens
  misc_RNA (1)...(19): siRNA sense strand
ccaaggagcaggagcccau

SEQ ID NO: 2622389 - RNA, 19 nt, Homo sapiens
  misc_RNA (1)...(19): siRNA sense strand
ugagaaaggcagcgccaga

SEQ ID NO: 2622390 - RNA, 19 nt, Homo sapiens
  misc_RNA (1)...(19): siRNA sense strand
agggaagaccagcgacauu

SEQ ID NO: 2622391 - RNA, 19 nt, Homo sapiens
  misc_RNA (1)...(19): siRNA sense strand
gaacccaccuggagggaag

SEQ ID NO: 2622392 - RNA, 19 nt, Homo sapiens
  misc_RNA (1)...(19): siRNA sense strand
gaacauacccaagaggaca

SEQ ID NO: 2622393 - RNA, 19 nt, Homo sapiens
  misc_RNA (1)...(19): siRNA sense strand
ggugagaaaggcagcgcca

SEQ ID NO: 2622394 - RNA, 19 nt, Homo sapiens
  misc_RNA (1)...(19): siRNA sense strand
augugaaggagaagaacca

SEQ ID NO: 2622395 - RNA, 19 nt, Homo sapiens
  misc_RNA (1)...(19): siRNA sense strand
ccaaacaaacccaaggauc

SEQ ID NO: 2622396 - RNA, 19 nt, Homo sapiens
  misc_RNA (1)...(19): siRNA sense strand
gaucagugguuucgaggcu

SEQ ID NO: 2622397 - RNA, 19 nt, Homo sapiens
  misc_RNA (1)...(19): siRNA sense strand
gauuaaaagcauagagcau

SEQ ID NO: 2622398 - RNA, 19 nt, Homo sapiens
  misc_RNA (1)...(19): siRNA sense strand
ggggaaggaagaaaagaaa

SEQ ID NO: 2622399 - RNA, 19 nt, Homo sapiens
  misc_RNA (1)...(19): siRNA sense strand
agauacaagcucuggaaaa

SEQ ID NO: 2622400 - RNA, 19 nt, Homo sapiens
  misc_RNA (1)...(19): siRNA sense strand
cggugaagacggcggacau

SEQ ID NO: 2622401 - RNA, 19 nt, Homo sapiens
  misc_RNA (1)...(19): siRNA sense strand
agaaggaagugcucgccaa

SEQ ID NO: 2622402 - RNA, 19 nt, Homo sapiens
  misc_RNA (1)...(19): siRNA sense strand
ugauagacucagaagugaa

SEQ ID NO: 2622403 - RNA, 19 nt, Homo sapiens
  misc_RNA (1)...(19): siRNA sense strand
ccaccagcgcagacaggua

SEQ ID NO: 2622404 - RNA, 19 nt, Homo sapiens
  misc_RNA (1)...(19): siRNA sense strand
gagaggggaaggaagaaaa

SEQ ID NO: 2622405 - RNA, 19 nt, Homo sapiens
  misc_RNA (1)...(19): siRNA sense strand
gaaucaucugagaaacaua

SEQ ID NO: 2622406 - RNA, 19 nt, Homo sapiens
  misc_RNA (1)...(19): siRNA sense strand
ccagggaagagcugaggau

SEQ ID NO: 2622407 - RNA, 19 nt, Homo sapiens
  misc_RNA (1)...(19): siRNA sense strand
aaucugaagcacugcgaga

SEQ ID NO: 2622408 - RNA, 19 nt, Homo sapiens
  misc_RNA (1)...(19): siRNA sense strand
aggaugaauaugaacucua

SEQ ID NO: 2622409 - RNA, 19 nt, Homo sapiens
  misc_RNA (1)...(19): siRNA sense strand
agcaggagcuccagaaaau

SEQ ID NO: 2622410 - RNA, 19 nt, Homo sapiens
  misc_RNA (1)...(19): siRNA sense strand
guucuuugauauuugguga

SEQ ID NO: 2622411 - RNA, 19 nt, Homo sapiens
  misc_RNA (1)...(19): siRNA sense strand
gggaugagauacaagcucu

SEQ ID NO: 2622412 - RNA, 19 nt, Homo sapiens
  misc_RNA (1)...(19): siRNA sense strand
uggagauggagcuggcauu

SEQ ID NO: 2622413 - RNA, 19 nt, Homo sapiens
  misc_RNA (1)...(19): siRNA sense strand
uggaauuacauaagcccua

SEQ ID NO: 2622414 - RNA, 19 nt, Homo sapiens
  misc_RNA (1)...(19): siRNA sense strand
uucuguagguuuaggaaau

SEQ ID NO: 2622415 - RNA, 19 nt, Homo sapiens
  misc_RNA (1)...(19): siRNA sense strand
agucgaagaugaaagacca

SEQ ID NO: 2622416 - RNA, 19 nt, Homo sapiens
  misc_RNA (1)...(19): siRNA sense strand
gaucaguguccuuugguga

SEQ ID NO: 2622417 - RNA, 19 nt, Homo sapiens
  misc_RNA (1)...(19): siRNA sense strand
ggcuaugaucaaaggcauu

SEQ ID NO: 2622418 - RNA, 19 nt, Homo sapiens
  misc_RNA (1)...(19): siRNA sense strand
cauucagucuucuggaaaa

SEQ ID NO: 2622419 - RNA, 19 nt, Homo sapiens
  misc_RNA (1)...(19): siRNA sense strand
gggucaaagaauucggcga

SEQ ID NO: 2622420 - RNA, 19 nt, Homo sapiens
  misc_RNA (1)...(19): siRNA sense strand
uuguagaaccagaauguga

SEQ ID NO: 2622421 - RNA, 19 nt, Homo sapiens
  misc_RNA (1)...(19): siRNA sense strand
caaagaauucggcgaggca

SEQ ID NO: 2622422 - RNA, 19 nt, Homo sapiens
  misc_RNA (1)...(19): siRNA sense strand
uggcuaugaucaaaggcau

SEQ ID NO: 2622423 - RNA, 19 nt, Homo sapiens
  misc_RNA (1)...(19): siRNA sense strand
aaaauagcaaggugguaaa

SEQ ID NO: 2622424 - RNA, 19 nt, Homo sapiens
  misc_RNA (1)...(19): siRNA sense strand
cgggauuggauuugcaagu

SEQ ID NO: 2622425 - RNA, 19 nt, Homo sapiens
  misc_RNA (1)...(19): siRNA sense strand
ccaaugaagacgcagcuga

SEQ ID NO: 2622426 - RNA, 19 nt, Homo sapiens
  misc_RNA (1)...(19): siRNA sense strand
uggaauuacauaagcccua

SEQ ID NO: 2622427 - RNA, 19 nt, Homo sapiens
  misc_RNA (1)...(19): siRNA sense strand
uucuguagguuuaggaaau

SEQ ID NO: 2622428 - RNA, 19 nt, Homo sapiens
  misc_RNA (1)...(19): siRNA sense strand
agucgaagaugaaagacca

SEQ ID NO: 2622429 - RNA, 19 nt, Homo sapiens
  misc_RNA (1)...(19): siRNA sense strand
gaucaguguccuuugguga

SEQ ID NO: 2622430 - RNA, 19 nt, Homo sapiens
  misc_RNA (1)...(19): siRNA sense strand
ggcuaugaucaaaggcauu

SEQ ID NO: 2622431 - RNA, 19 nt, Homo sapiens
  misc_RNA (1)...(19): siRNA sense strand
cauucagucuucuggaaaa

SEQ ID NO: 2622432 - RNA, 19 nt, Homo sapiens
  misc_RNA (1)...(19): siRNA sense strand
gggucaaagaauucggcga

SEQ ID NO: 2622433 - RNA, 19 nt, Homo sapiens
  misc_RNA (1)...(19): siRNA sense strand
uuguagaaccagaauguga

SEQ ID NO: 2622434 - RNA, 19 nt, Homo sapiens
  misc_RNA (1)...(19): siRNA sense strand
caaagaauucggcgaggca

SEQ ID NO: 2622435 - RNA, 19 nt, Homo sapiens
  misc_RNA (1)...(19): siRNA sense strand
uggcuaugaucaaaggcau

SEQ ID NO: 2622436 - RNA, 19 nt, Homo sapiens
  misc_RNA (1)...(19): siRNA sense strand
aaaauagcaaggugguaaa

SEQ ID NO: 2622437 - RNA, 19 nt, Homo sapiens
  misc_RNA (1)...(19): siRNA sense strand
cgggauuggauuugcaagu

SEQ ID NO: 2622438 - RNA, 19 nt, Homo sapiens
  misc_RNA (1)...(19): siRNA sense strand
ccaaugaagacgcagcuga

SEQ ID NO: 2622439 - RNA, 19 nt, Homo sapiens
  misc_RNA (1)...(19): siRNA sense strand
ggacagggcuucagcgaca

SEQ ID NO: 2622440 - RNA, 19 nt, Homo sapiens
  misc_RNA (1)...(19): siRNA sense strand
cggaaggaggagagaccua

SEQ ID NO: 2622441 - RNA, 19 nt, Homo sapiens
  misc_RNA (1)...(19): siRNA sense strand
aggcccaagaagauggaaa

SEQ ID NO: 2622442 - RNA, 19 nt, Homo sapiens
  misc_RNA (1)...(19): siRNA sense strand
ggcccaagaagauggaaaa

SEQ ID NO: 2622443 - RNA, 19 nt, Homo sapiens
  misc_RNA (1)...(19): siRNA sense strand
cagagaacgacgaagagga

SEQ ID NO: 2622444 - RNA, 19 nt, Homo sapiens
  misc_RNA (1)...(19): siRNA sense strand
cggaaagaggagaggccac

SEQ ID NO: 2622445 - RNA, 19 nt, Homo sapiens
  misc_RNA (1)...(19): siRNA sense strand
agaagauggaagaggaaga

SEQ ID NO: 2622446 - RNA, 19 nt, Homo sapiens
  misc_RNA (1)...(19): siRNA sense strand
cagagaagauggaagagga

SEQ ID NO: 2622447 - RNA, 19 nt, Homo sapiens
  misc_RNA (1)...(19): siRNA sense strand
gcaaaggcauucagccgaa

SEQ ID NO: 2622448 - RNA, 19 nt, Homo sapiens
  misc_RNA (1)...(19): siRNA sense strand
agagaagauggaagaggaa

SEQ ID NO: 2622449 - RNA, 19 nt, Homo sapiens
  misc_RNA (1)...(19): siRNA sense strand
gcauucagccgaagcgcaa

SEQ ID NO: 2622450 - RNA, 19 nt, Homo sapiens
  misc_RNA (1)...(19): siRNA sense strand
gaaaucugcuucaaggcaa

SEQ ID NO: 2622451 - RNA, 19 nt, Homo sapiens
  misc_RNA (1)...(19): siRNA sense strand
ggauguggagagagagcuu

SEQ ID NO: 2622452 - RNA, 19 nt, Homo sapiens
  misc_RNA (1)...(19): siRNA sense strand
gcaugugacgagugugcaa

SEQ ID NO: 2622453 - RNA, 19 nt, Homo sapiens
  misc_RNA (1)...(19): siRNA sense strand
acaacagaaaugugaugaa

SEQ ID NO: 2622454 - RNA, 19 nt, Homo sapiens
  misc_RNA (1)...(19): siRNA sense strand
uugaaaagagacaaggaaa

SEQ ID NO: 2622455 - RNA, 19 nt, Homo sapiens
  misc_RNA (1)...(19): siRNA sense strand
ggaaggacaugauugcaga

SEQ ID NO: 2622456 - RNA, 19 nt, Homo sapiens
  misc_RNA (1)...(19): siRNA sense strand
augugaugaauguggcaaa

SEQ ID NO: 2622457 - RNA, 19 nt, Homo sapiens
  misc_RNA (1)...(19): siRNA sense strand
cagagaauggagaggaaac

SEQ ID NO: 2622458 - RNA, 19 nt, Homo sapiens
  misc_RNA (1)...(19): siRNA sense strand
aggacaugauugcagagaa

SEQ ID NO: 2622459 - RNA, 19 nt, Homo sapiens
  misc_RNA (1)...(19): siRNA sense strand
gagagagcuugauggacca

SEQ ID NO: 2622460 - RNA, 19 nt, Homo sapiens
  misc_RNA (1)...(19): siRNA sense strand
ccagagaauggagaggaaa

SEQ ID NO: 2622461 - RNA, 19 nt, Homo sapiens
  misc_RNA (1)...(19): siRNA sense strand
gcuacagcccagagaccuu

SEQ ID NO: 2622462 - RNA, 19 nt, Homo sapiens
  misc_RNA (1)...(19): siRNA sense strand
gaaagaaaccuuaugcaug

SEQ ID NO: 2622463 - RNA, 19 nt, Homo sapiens
  misc_RNA (1)...(19): siRNA sense strand
aggccugggugcagaagca

SEQ ID NO: 2622464 - RNA, 19 nt, Homo sapiens
  misc_RNA (1)...(19): siRNA sense strand
cggaaaaggagaagaggaa

SEQ ID NO: 2622465 - RNA, 19 nt, Homo sapiens
  misc_RNA (1)...(19): siRNA sense strand
aagaagaagaagaggcauu

SEQ ID NO: 2622466 - RNA, 19 nt, Homo sapiens
  misc_RNA (1)...(19): siRNA sense strand
ccugaagauuauuuggaaa

SEQ ID NO: 2622467 - RNA, 19 nt, Homo sapiens
  misc_RNA (1)...(19): siRNA sense strand
aggaagaagaggaagaaga

SEQ ID NO: 2622468 - RNA, 19 nt, Homo sapiens
  misc_RNA (1)...(19): siRNA sense strand
ccaagauacagauggcaaa

SEQ ID NO: 2622469 - RNA, 19 nt, Homo sapiens
  misc_RNA (1)...(19): siRNA sense strand
agagaagacagaagaguau

SEQ ID NO: 2622470 - RNA, 19 nt, Homo sapiens
  misc_RNA (1)...(19): siRNA sense strand
cugaagucauugagaauca

SEQ ID NO: 2622471 - RNA, 19 nt, Homo sapiens
  misc_RNA (1)...(19): siRNA sense strand
gagaagaggaagaagagga

SEQ ID NO: 2622472 - RNA, 19 nt, Homo sapiens
  misc_RNA (1)...(19): siRNA sense strand
agaagaggaagaagagcaa

SEQ ID NO: 2622473 - RNA, 19 nt, Homo sapiens
  misc_RNA (1)...(19): siRNA sense strand
gaaaaggagaagaggaaga

SEQ ID NO: 2622474 - RNA, 19 nt, Homo sapiens
  misc_RNA (1)...(19): siRNA sense strand
gcaagaagaagaagaggca

SEQ ID NO: 2622475 - RNA, 19 nt, Homo sapiens
  misc_RNA (1)...(19): siRNA sense strand
uagaagaaguaauggcuga

SEQ ID NO: 2622476 - RNA, 19 nt, Homo sapiens
  misc_RNA (1)...(19): siRNA sense strand
aagaggaagaagaggaaga

SEQ ID NO: 2622477 - RNA, 19 nt, Homo sapiens
  misc_RNA (1)...(19): siRNA sense strand
aggaagaagagcaagaaga

SEQ ID NO: 2622478 - RNA, 19 nt, Homo sapiens
  misc_RNA (1)...(19): siRNA sense strand
acuucagggugcagaggaa

SEQ ID NO: 2622479 - RNA, 19 nt, Homo sapiens
  misc_RNA (1)...(19): siRNA sense strand
aagaugaaacugaaaggaa

SEQ ID NO: 2622480 - RNA, 19 nt, Homo sapiens
  misc_RNA (1)...(19): siRNA sense strand
aaguaauggcugaacacaa

SEQ ID NO: 2622481 - RNA, 19 nt, Homo sapiens
  misc_RNA (1)...(19): siRNA sense strand
cuuuguuguauuugggaaa

SEQ ID NO: 2622482 - RNA, 19 nt, Homo sapiens
  misc_RNA (1)...(19): siRNA sense strand
accucaauauucagggaaa

SEQ ID NO: 2622483 - RNA, 19 nt, Homo sapiens
  misc_RNA (1)...(19): siRNA sense strand
aaggagaagaggaagaaga

SEQ ID NO: 2622484 - RNA, 19 nt, Homo sapiens
  misc_RNA (1)...(19): siRNA sense strand
aagaggaagaagagcaaga

SEQ ID NO: 2622485 - RNA, 19 nt, Homo sapiens
  misc_RNA (1)...(19): siRNA sense strand
gcaaagaaguaaaugggga

SEQ ID NO: 2622486 - RNA, 19 nt, Homo sapiens
  misc_RNA (1)...(19): siRNA sense strand
caauaugcuugcagaaaau

SEQ ID NO: 2622487 - RNA, 19 nt, Homo sapiens
  misc_RNA (1)...(19): siRNA sense strand
agaagagcaagaagaagaa

SEQ ID NO: 2622488 - RNA, 19 nt, Homo sapiens
  misc_RNA (1)...(19): siRNA sense strand
ccucaauauucagggaaaa

SEQ ID NO: 2622489 - RNA, 19 nt, Homo sapiens
  misc_RNA (1)...(19): siRNA sense strand
aagaagaggaagaagagca

SEQ ID NO: 2622490 - RNA, 19 nt, Homo sapiens
  misc_RNA (1)...(19): siRNA sense strand
gaaauaaaccagcagagga

SEQ ID NO: 2622491 - RNA, 19 nt, Homo sapiens
  misc_RNA (1)...(19): siRNA sense strand
gaugaagaugaaacugaaa

SEQ ID NO: 2622492 - RNA, 19 nt, Homo sapiens
  misc_RNA (1)...(19): siRNA sense strand
gcuaaauggaaauaaacca

SEQ ID NO: 2622493 - RNA, 19 nt, Homo sapiens
  misc_RNA (1)...(19): siRNA sense strand
aggaaaggugacuaacuaa

SEQ ID NO: 2622494 - RNA, 19 nt, Homo sapiens
  misc_RNA (1)...(19): siRNA sense strand
cauaacacaggcauggaaa

SEQ ID NO: 2622495 - RNA, 19 nt, Homo sapiens
  misc_RNA (1)...(19): siRNA sense strand
gggugcagaggaagaaauu

SEQ ID NO: 2622496 - RNA, 19 nt, Homo sapiens
  misc_RNA (1)...(19): siRNA sense strand
ccuuacagcaaauagaauu

SEQ ID NO: 2622497 - RNA, 19 nt, Homo sapiens
  misc_RNA (1)...(19): siRNA sense strand
uggaaaaugaugagcuauu

SEQ ID NO: 2622498 - RNA, 19 nt, Homo sapiens
  misc_RNA (1)...(19): siRNA sense strand
acguacauguccugugaau

SEQ ID NO: 2622499 - RNA, 19 nt, Homo sapiens
  misc_RNA (1)...(19): siRNA sense strand
auucauacuuggaccucaa

SEQ ID NO: 2622500 - RNA, 19 nt, Homo sapiens
  misc_RNA (1)...(19): siRNA sense strand
guguugaagcuuugccaau

SEQ ID NO: 2622501 - RNA, 19 nt, Homo sapiens
  misc_RNA (1)...(19): siRNA sense strand
agaacagauugcugcugaa

SEQ ID NO: 2622502 - RNA, 19 nt, Homo sapiens
  misc_RNA (1)...(19): siRNA sense strand
ugaacuugucauaaagcua

SEQ ID NO: 2622503 - RNA, 19 nt, Homo sapiens
  misc_RNA (1)...(19): siRNA sense strand
cagauggcaaagaaguaaa

SEQ ID NO: 2622504 - RNA, 19 nt, Homo sapiens
  misc_RNA (1)...(19): siRNA sense strand
acuuaaaccugaaaccuga

SEQ ID NO: 2622505 - RNA, 19 nt, Homo sapiens
  misc_RNA (1)...(19): siRNA sense strand
gaggaagaaauuaaugaca

SEQ ID NO: 2622506 - RNA, 19 nt, Homo sapiens
  misc_RNA (1)...(19): siRNA sense strand
gacuaugauuugugccaga

SEQ ID NO: 2622507 - RNA, 19 nt, Homo sapiens
  misc_RNA (1)...(19): siRNA sense strand
aaagaagaaagaagcccaa

SEQ ID NO: 2622508 - RNA, 19 nt, Homo sapiens
  misc_RNA (1)...(19): siRNA sense strand
aagaaguaauggcugaaca

SEQ ID NO: 2622509 - RNA, 19 nt, Homo sapiens
  misc_RNA (1)...(19): siRNA sense strand
aauggaaaaugaugagcua

SEQ ID NO: 2622510 - RNA, 19 nt, Homo sapiens
  misc_RNA (1)...(19): siRNA sense strand
uccugaagucauugagaau

SEQ ID NO: 2622511 - RNA, 19 nt, Homo sapiens
  misc_RNA (1)...(19): siRNA sense strand
agaagaaagaagcccaaaa

SEQ ID NO: 2622512 - RNA, 19 nt, Homo sapiens
  misc_RNA (1)...(19): siRNA sense strand
accaagauacagauggcaa

SEQ ID NO: 2622513 - RNA, 19 nt, Homo sapiens
  misc_RNA (1)...(19): siRNA sense strand
agaugaagaacaugagcaa

SEQ ID NO: 2622514 - RNA, 19 nt, Homo sapiens
  misc_RNA (1)...(19): siRNA sense strand
augaagaacaugagcaaga

SEQ ID NO: 2622515 - RNA, 19 nt, Homo sapiens
  misc_RNA (1)...(19): siRNA sense strand
guaaugaggcccuugauaa

SEQ ID NO: 2622516 - RNA, 19 nt, Homo sapiens
  misc_RNA (1)...(19): siRNA sense strand
uaaugaggcccuugauaaa

SEQ ID NO: 2622517 - RNA, 19 nt, Homo sapiens
  misc_RNA (1)...(19): siRNA sense strand
gggcauuucauuuguacaa

SEQ ID NO: 2622518 - RNA, 19 nt, Homo sapiens
  misc_RNA (1)...(19): siRNA sense strand
caacauuagguuauaguga

SEQ ID NO: 2622519 - RNA, 19 nt, Homo sapiens
  misc_RNA (1)...(19): siRNA sense strand
acauuagguuauagugaca

SEQ ID NO: 2622520 - RNA, 19 nt, Homo sapiens
  misc_RNA (1)...(19): siRNA sense strand
ccuuguguuuauaggaauu

SEQ ID NO: 2622521 - RNA, 19 nt, Homo sapiens
  misc_RNA (1)...(19): siRNA sense strand
gcgaggagcuagauaugga

SEQ ID NO: 2622522 - RNA, 19 nt, Homo sapiens
  misc_RNA (1)...(19): siRNA sense strand
ccuugauaaaugagcagaa

SEQ ID NO: 2622523 - RNA, 19 nt, Homo sapiens
  misc_RNA (1)...(19): siRNA sense strand
aggcauagugcuuggacca

SEQ ID NO: 2622524 - RNA, 19 nt, Homo sapiens
  misc_RNA (1)...(19): siRNA sense strand
uuucuaugucugagguuua

SEQ ID NO: 2622525 - RNA, 19 nt, Homo sapiens
  misc_RNA (1)...(19): siRNA sense strand
aaguguugaccuaaggaua

SEQ ID NO: 2622526 - RNA, 19 nt, Homo sapiens
  misc_RNA (1)...(19): siRNA sense strand
uggaaaaccaaaugaaaga

SEQ ID NO: 2622527 - RNA, 19 nt, Homo sapiens
  misc_RNA (1)...(19): siRNA sense strand
cugucagucuugugauaau

SEQ ID NO: 2622528 - RNA, 19 nt, Homo sapiens
  misc_RNA (1)...(19): siRNA sense strand
ggaagugaguccuuggagu

SEQ ID NO: 2622529 - RNA, 19 nt, Homo sapiens
  misc_RNA (1)...(19): siRNA sense strand
caaucagccuuguguuuau

SEQ ID NO: 2622530 - RNA, 19 nt, Homo sapiens
  misc_RNA (1)...(19): siRNA sense strand
gcagaauuuugaugggaca

SEQ ID NO: 2622531 - RNA, 19 nt, Homo sapiens
  misc_RNA (1)...(19): siRNA sense strand
guggcugguuggaagaaau

SEQ ID NO: 2622532 - RNA, 19 nt, Homo sapiens
  misc_RNA (1)...(19): siRNA sense strand
ucguuuagacauugugauu

SEQ ID NO: 2622533 - RNA, 19 nt, Homo sapiens
  misc_RNA (1)...(19): siRNA sense strand
ggagcuagauauggaugua

SEQ ID NO: 2622534 - RNA, 19 nt, Homo sapiens
  misc_RNA (1)...(19): siRNA sense strand
aguguugaccuaaggauau

SEQ ID NO: 2622535 - RNA, 19 nt, Homo sapiens
  misc_RNA (1)...(19): siRNA sense strand
agaacaugagcaagagcuu

SEQ ID NO: 2622536 - RNA, 19 nt, Homo sapiens
  misc_RNA (1)...(19): siRNA sense strand
agcuagauauggauguaau

SEQ ID NO: 2622537 - RNA, 19 nt, Homo sapiens
  misc_RNA (1)...(19): siRNA sense strand
cagaauuaauacuggaaga

SEQ ID NO: 2622538 - RNA, 19 nt, Homo sapiens
  misc_RNA (1)...(19): siRNA sense strand
caaugagguauaugggaaa

SEQ ID NO: 2622539 - RNA, 19 nt, Homo sapiens
  misc_RNA (1)...(19): siRNA sense strand
ccuuauaaucaguuggcua

SEQ ID NO: 2622540 - RNA, 19 nt, Homo sapiens
  misc_RNA (1)...(19): siRNA sense strand
ugaaaaugagguagggaaa

SEQ ID NO: 2622541 - RNA, 19 nt, Homo sapiens
  misc_RNA (1)...(19): siRNA sense strand
gagaaauccuuauuggaga

SEQ ID NO: 2622542 - RNA, 19 nt, Homo sapiens
  misc_RNA (1)...(19): siRNA sense strand
ucaaugagguauaugggaa

SEQ ID NO: 2622543 - RNA, 19 nt, Homo sapiens
  misc_RNA (1)...(19): siRNA sense strand
ccaaaggucaccaggguau

SEQ ID NO: 2622544 - RNA, 19 nt, Homo sapiens
  misc_RNA (1)...(19): siRNA sense strand
uggaauacgcuuuagacaa

SEQ ID NO: 2622545 - RNA, 19 nt, Homo sapiens
  misc_RNA (1)...(19): siRNA sense strand
agaaauccuuauuggagaa

SEQ ID NO: 2622546 - RNA, 19 nt, Homo sapiens
  misc_RNA (1)...(19): siRNA sense strand
cugaguaagagcuuggaaa

SEQ ID NO: 2622547 - RNA, 19 nt, Homo sapiens
  misc_RNA (1)...(19): siRNA sense strand
agcaauaaacagacgcaua

SEQ ID NO: 2622548 - RNA, 19 nt, Homo sapiens
  misc_RNA (1)...(19): siRNA sense strand
agaagugaacagagaccaa

SEQ ID NO: 2622549 - RNA, 19 nt, Homo sapiens
  misc_RNA (1)...(19): siRNA sense strand
guauguucaaugagguaua

SEQ ID NO: 2622550 - RNA, 19 nt, Homo sapiens
  misc_RNA (1)...(19): siRNA sense strand
ggauagaaggacugcagau

SEQ ID NO: 2622551 - RNA, 19 nt, Homo sapiens
  misc_RNA (1)...(19): siRNA sense strand
aaauuaugccugugaaaca

SEQ ID NO: 2622552 - RNA, 19 nt, Homo sapiens
  misc_RNA (1)...(19): siRNA sense strand
acuccagauaacagggaua

SEQ ID NO: 2622553 - RNA, 19 nt, Homo sapiens
  misc_RNA (1)...(19): siRNA sense strand
gcaaugaaaccgagcagca

SEQ ID NO: 2622554 - RNA, 19 nt, Homo sapiens
  misc_RNA (1)...(19): siRNA sense strand
aggaaagauacccaaauaa

SEQ ID NO: 2622555 - RNA, 19 nt, Homo sapiens
  misc_RNA (1)...(19): siRNA sense strand
acaagaaaguagaacagga

SEQ ID NO: 2622556 - RNA, 19 nt, Homo sapiens
  misc_RNA (1)...(19): siRNA sense strand
gaaaauuaugccugugaaa

SEQ ID NO: 2622557 - RNA, 19 nt, Homo sapiens
  misc_RNA (1)...(19): siRNA sense strand
caagaaaguagaacaggau

SEQ ID NO: 2622558 - RNA, 19 nt, Homo sapiens
  misc_RNA (1)...(19): siRNA sense strand
caggcaaagaaucgagcaa

SEQ ID NO: 2622559 - RNA, 19 nt, Homo sapiens
  misc_RNA (1)...(19): siRNA sense strand
gugaaaaugagguagggaa

SEQ ID NO: 2622560 - RNA, 19 nt, Homo sapiens
  misc_RNA (1)...(19): siRNA sense strand
cagugaagccaaagagaac

SEQ ID NO: 2622561 - RNA, 19 nt, Homo sapiens
  misc_RNA (1)...(19): siRNA sense strand
cuugaucucuauaggcaaa

SEQ ID NO: 2622562 - RNA, 19 nt, Homo sapiens
  misc_RNA (1)...(19): siRNA sense strand
ccagugaagccaaagagaa

SEQ ID NO: 2622563 - RNA, 19 nt, Homo sapiens
  misc_RNA (1)...(19): siRNA sense strand
gagagaagccagugguuac

SEQ ID NO: 2622564 - RNA, 19 nt, Homo sapiens
  misc_RNA (1)...(19): siRNA sense strand
cagaaaucccagaauuaau

SEQ ID NO: 2622565 - RNA, 19 nt, Homo sapiens
  misc_RNA (1)...(19): siRNA sense strand
gcgccauagugaagccaca

SEQ ID NO: 2622566 - RNA, 19 nt, Homo sapiens
  misc_RNA (1)...(19): siRNA sense strand
acgacgaauacgacagcaa

SEQ ID NO: 2622567 - RNA, 19 nt, Homo sapiens
  misc_RNA (1)...(19): siRNA sense strand
ccucauuccucuaacccaa

SEQ ID NO: 2622568 - RNA, 19 nt, Homo sapiens
  misc_RNA (1)...(19): siRNA sense strand
auggaaagccuaaagucua

SEQ ID NO: 2622569 - RNA, 19 nt, Homo sapiens
  misc_RNA (1)...(19): siRNA sense strand
aagaaacaucugugauaga

SEQ ID NO: 2622570 - RNA, 19 nt, Homo sapiens
  misc_RNA (1)...(19): siRNA sense strand
ugaguaagagcuuggaaaa

SEQ ID NO: 2622571 - RNA, 19 nt, Homo sapiens
  misc_RNA (1)...(19): siRNA sense strand
ucaaggcccauuagggaaa

SEQ ID NO: 2622572 - RNA, 19 nt, Homo sapiens
  misc_RNA (1)...(19): siRNA sense strand
cagcagcagccucuagaaa

SEQ ID NO: 2622573 - RNA, 19 nt, Homo sapiens
  misc_RNA (1)...(19): siRNA sense strand
uaacagggauagaaggacu

SEQ ID NO: 2622574 - RNA, 19 nt, Homo sapiens
  misc_RNA (1)...(19): siRNA sense strand
agaaauuggaagaacaguu

SEQ ID NO: 2622575 - RNA, 19 nt, Homo sapiens
  misc_RNA (1)...(19): siRNA sense strand
agaaaguagaacaggaucu

SEQ ID NO: 2622576 - RNA, 19 nt, Homo sapiens
  misc_RNA (1)...(19): siRNA sense strand
cuuauaaucaguuggcuau

SEQ ID NO: 2622577 - RNA, 19 nt, Homo sapiens
  misc_RNA (1)...(19): siRNA sense strand
aggaggcagugguggauga

SEQ ID NO: 2622578 - RNA, 19 nt, Homo sapiens
  misc_RNA (1)...(19): siRNA sense strand
gcagaagcagaaacagcaa

SEQ ID NO: 2622579 - RNA, 19 nt, Homo sapiens
  misc_RNA (1)...(19): siRNA sense strand
cucuauaggcaaauggauu

SEQ ID NO: 2622580 - RNA, 19 nt, Homo sapiens
  misc_RNA (1)...(19): siRNA sense strand
agaacaggaucucuggaau

SEQ ID NO: 2622581 - RNA, 19 nt, Homo sapiens
  misc_RNA (1)...(19): siRNA sense strand
agccgaaauuuaagcaaca

SEQ ID NO: 2622582 - RNA, 19 nt, Homo sapiens
  misc_RNA (1)...(19): siRNA sense strand
aggccagcaacgacgaaua

SEQ ID NO: 2622583 - RNA, 19 nt, Homo sapiens
  misc_RNA (1)...(19): siRNA sense strand
gaacaggaucucuggaauc

SEQ ID NO: 2622584 - RNA, 19 nt, Homo sapiens
  misc_RNA (1)...(19): siRNA sense strand
aggcaaagaaucgagcaaa

SEQ ID NO: 2622585 - RNA, 19 nt, Homo sapiens
  misc_RNA (1)...(19): siRNA sense strand
cucaaguauuagugcgaca

SEQ ID NO: 2622586 - RNA, 19 nt, Homo sapiens
  misc_RNA (1)...(19): siRNA sense strand
aagucaaggucccagaauu

SEQ ID NO: 2622587 - RNA, 19 nt, Homo sapiens
  misc_RNA (1)...(19): siRNA sense strand
cucucaaucaggaaagaua

SEQ ID NO: 2622588 - RNA, 19 nt, Homo sapiens
  misc_RNA (1)...(19): siRNA sense strand
uuauuaaauuccacgguca

SEQ ID NO: 2622589 - RNA, 19 nt, Homo sapiens
  misc_RNA (1)...(19): siRNA sense strand
gcugcagguucaagcucua

SEQ ID NO: 2622590 - RNA, 19 nt, Homo sapiens
  misc_RNA (1)...(19): siRNA sense strand
ccuccaauggucagccuua

SEQ ID NO: 2622591 - RNA, 19 nt, Homo sapiens
  misc_RNA (1)...(19): siRNA sense strand
aggcagugguggaugaaag

SEQ ID NO: 2622592 - RNA, 19 nt, Homo sapiens
  misc_RNA (1)...(19): siRNA sense strand
uagacaagaaaguagaaca

SEQ ID NO: 2622593 - RNA, 19 nt, Homo sapiens
  misc_RNA (1)...(19): siRNA sense strand
gaaucgagcaaauccgaau

SEQ ID NO: 2622594 - RNA, 19 nt, Homo sapiens
  misc_RNA (1)...(19): siRNA sense strand
ccuacuaccuucagaccca

SEQ ID NO: 2622595 - RNA, 19 nt, Homo sapiens
  misc_RNA (1)...(19): siRNA sense strand
uguuaaugcagcagaagca

SEQ ID NO: 2622596 - RNA, 19 nt, Homo sapiens
  misc_RNA (1)...(19): siRNA sense strand
ggguauuacaggggacaaa

SEQ ID NO: 2622597 - RNA, 19 nt, Homo sapiens
  misc_RNA (1)...(19): siRNA sense strand
cagugguggaugaaagaca

SEQ ID NO: 2622598 - RNA, 19 nt, Homo sapiens
  misc_RNA (1)...(19): siRNA sense strand
agucaaggucccagaauuc

SEQ ID NO: 2622599 - RNA, 19 nt, Homo sapiens
  misc_RNA (1)...(19): siRNA sense strand
cagaauuaauacuggaaga

SEQ ID NO: 2622600 - RNA, 19 nt, Homo sapiens
  misc_RNA (1)...(19): siRNA sense strand
caaugagguauaugggaaa

SEQ ID NO: 2622601 - RNA, 19 nt, Homo sapiens
  misc_RNA (1)...(19): siRNA sense strand
ccuuauaaucaguuggcua

SEQ ID NO: 2622602 - RNA, 19 nt, Homo sapiens
  misc_RNA (1)...(19): siRNA sense strand
ugaaaaugagguagggaaa

SEQ ID NO: 2622603 - RNA, 19 nt, Homo sapiens
  misc_RNA (1)...(19): siRNA sense strand
gagaaauccuuauuggaga

SEQ ID NO: 2622604 - RNA, 19 nt, Homo sapiens
  misc_RNA (1)...(19): siRNA sense strand
ucaaugagguauaugggaa

SEQ ID NO: 2622605 - RNA, 19 nt, Homo sapiens
  misc_RNA (1)...(19): siRNA sense strand
ccaaaggucaccaggguau

SEQ ID NO: 2622606 - RNA, 19 nt, Homo sapiens
  misc_RNA (1)...(19): siRNA sense strand
uggaauacgcuuuagacaa

SEQ ID NO: 2622607 - RNA, 19 nt, Homo sapiens
  misc_RNA (1)...(19): siRNA sense strand
agaaauccuuauuggagaa

SEQ ID NO: 2622608 - RNA, 19 nt, Homo sapiens
  misc_RNA (1)...(19): siRNA sense strand
cugaguaagagcuuggaaa

SEQ ID NO: 2622609 - RNA, 19 nt, Homo sapiens
  misc_RNA (1)...(19): siRNA sense strand
agcaauaaacagacgcaua

SEQ ID NO: 2622610 - RNA, 19 nt, Homo sapiens
  misc_RNA (1)...(19): siRNA sense strand
agaagugaacagagaccaa

SEQ ID NO: 2622611 - RNA, 19 nt, Homo sapiens
  misc_RNA (1)...(19): siRNA sense strand
guauguucaaugagguaua

SEQ ID NO: 2622612 - RNA, 19 nt, Homo sapiens
  misc_RNA (1)...(19): siRNA sense strand
ggauagaaggacugcagau

SEQ ID NO: 2622613 - RNA, 19 nt, Homo sapiens
  misc_RNA (1)...(19): siRNA sense strand
aaauuaugccugugaaaca

SEQ ID NO: 2622614 - RNA, 19 nt, Homo sapiens
  misc_RNA (1)...(19): siRNA sense strand
acuccagauaacagggaua

SEQ ID NO: 2622615 - RNA, 19 nt, Homo sapiens
  misc_RNA (1)...(19): siRNA sense strand
gcaaugaaaccgagcagca

SEQ ID NO: 2622616 - RNA, 19 nt, Homo sapiens
  misc_RNA (1)...(19): siRNA sense strand
aggaaagauacccaaauaa

SEQ ID NO: 2622617 - RNA, 19 nt, Homo sapiens
  misc_RNA (1)...(19): siRNA sense strand
acaagaaaguagaacagga

SEQ ID NO: 2622618 - RNA, 19 nt, Homo sapiens
  misc_RNA (1)...(19): siRNA sense strand
gaaaauuaugccugugaaa

SEQ ID NO: 2622619 - RNA, 19 nt, Homo sapiens
  misc_RNA (1)...(19): siRNA sense strand
caagaaaguagaacaggau

SEQ ID NO: 2622620 - RNA, 19 nt, Homo sapiens
  misc_RNA (1)...(19): siRNA sense strand
caggcaaagaaucgagcaa

SEQ ID NO: 2622621 - RNA, 19 nt, Homo sapiens
  misc_RNA (1)...(19): siRNA sense strand
gugaaaaugagguagggaa

SEQ ID NO: 2622622 - RNA, 19 nt, Homo sapiens
  misc_RNA (1)...(19): siRNA sense strand
cagugaagccaaagagaac

SEQ ID NO: 2622623 - RNA, 19 nt, Homo sapiens
  misc_RNA (1)...(19): siRNA sense strand
cuugaucucuauaggcaaa

SEQ ID NO: 2622624 - RNA, 19 nt, Homo sapiens
  misc_RNA (1)...(19): siRNA sense strand
ccagugaagccaaagagaa

SEQ ID NO: 2622625 - RNA, 19 nt, Homo sapiens
  misc_RNA (1)...(19): siRNA sense strand
gagagaagccagugguuac

SEQ ID NO: 2622626 - RNA, 19 nt, Homo sapiens
  misc_RNA (1)...(19): siRNA sense strand
cagaaaucccagaauuaau

SEQ ID NO: 2622627 - RNA, 19 nt, Homo sapiens
  misc_RNA (1)...(19): siRNA sense strand
gcgccauagugaagccaca

SEQ ID NO: 2622628 - RNA, 19 nt, Homo sapiens
  misc_RNA (1)...(19): siRNA sense strand
acgacgaauacgacagcaa

SEQ ID NO: 2622629 - RNA, 19 nt, Homo sapiens
  misc_RNA (1)...(19): siRNA sense strand
ccucauuccucuaacccaa

SEQ ID NO: 2622630 - RNA, 19 nt, Homo sapiens
  misc_RNA (1)...(19): siRNA sense strand
auggaaagccuaaagucua

SEQ ID NO: 2622631 - RNA, 19 nt, Homo sapiens
  misc_RNA (1)...(19): siRNA sense strand
aagaaacaucugugauaga

SEQ ID NO: 2622632 - RNA, 19 nt, Homo sapiens
  misc_RNA (1)...(19): siRNA sense strand
ugaguaagagcuuggaaaa

SEQ ID NO: 2622633 - RNA, 19 nt, Homo sapiens
  misc_RNA (1)...(19): siRNA sense strand
ucaaggcccauuagggaaa

SEQ ID NO: 2622634 - RNA, 19 nt, Homo sapiens
  misc_RNA (1)...(19): siRNA sense strand
cagcagcagccucuagaaa

SEQ ID NO: 2622635 - RNA, 19 nt, Homo sapiens
  misc_RNA (1)...(19): siRNA sense strand
uaacagggauagaaggacu

SEQ ID NO: 2622636 - RNA, 19 nt, Homo sapiens
  misc_RNA (1)...(19): siRNA sense strand
agaaauuggaagaacaguu

SEQ ID NO: 2622637 - RNA, 19 nt, Homo sapiens
  misc_RNA (1)...(19): siRNA sense strand
agaaaguagaacaggaucu

SEQ ID NO: 2622638 - RNA, 19 nt, Homo sapiens
  misc_RNA (1)...(19): siRNA sense strand
cuuauaaucaguuggcuau

SEQ ID NO: 2622639 - RNA, 19 nt, Homo sapiens
  misc_RNA (1)...(19): siRNA sense strand
aggaggcagugguggauga

SEQ ID NO: 2622640 - RNA, 19 nt, Homo sapiens
  misc_RNA (1)...(19): siRNA sense strand
gcagaagcagaaacagcaa

SEQ ID NO: 2622641 - RNA, 19 nt, Homo sapiens
  misc_RNA (1)...(19): siRNA sense strand
cucuauaggcaaauggauu

SEQ ID NO: 2622642 - RNA, 19 nt, Homo sapiens
  misc_RNA (1)...(19): siRNA sense strand
agaacaggaucucuggaau

SEQ ID NO: 2622643 - RNA, 19 nt, Homo sapiens
  misc_RNA (1)...(19): siRNA sense strand
agccgaaauuuaagcaaca

SEQ ID NO: 2622644 - RNA, 19 nt, Homo sapiens
  misc_RNA (1)...(19): siRNA sense strand
aggccagcaacgacgaaua

SEQ ID NO: 2622645 - RNA, 19 nt, Homo sapiens
  misc_RNA (1)...(19): siRNA sense strand
gaacaggaucucuggaauc

SEQ ID NO: 2622646 - RNA, 19 nt, Homo sapiens
  misc_RNA (1)...(19): siRNA sense strand
aggcaaagaaucgagcaaa

SEQ ID NO: 2622647 - RNA, 19 nt, Homo sapiens
  misc_RNA (1)...(19): siRNA sense strand
cucaaguauuagugcgaca

SEQ ID NO: 2622648 - RNA, 19 nt, Homo sapiens
  misc_RNA (1)...(19): siRNA sense strand
aagucaaggucccagaauu

SEQ ID NO: 2622649 - RNA, 19 nt, Homo sapiens
  misc_RNA (1)...(19): siRNA sense strand
cucucaaucaggaaagaua

SEQ ID NO: 2622650 - RNA, 19 nt, Homo sapiens
  misc_RNA (1)...(19): siRNA sense strand
uuauuaaauuccacgguca

SEQ ID NO: 2622651 - RNA, 19 nt, Homo sapiens
  misc_RNA (1)...(19): siRNA sense strand
gcugcagguucaagcucua

SEQ ID NO: 2622652 - RNA, 19 nt, Homo sapiens
  misc_RNA (1)...(19): siRNA sense strand
ccuccaauggucagccuua

SEQ ID NO: 2622653 - RNA, 19 nt, Homo sapiens
  misc_RNA (1)...(19): siRNA sense strand
aggcagugguggaugaaag

SEQ ID NO: 2622654 - RNA, 19 nt, Homo sapiens
  misc_RNA (1)...(19): siRNA sense strand
uagacaagaaaguagaaca

SEQ ID NO: 2622655 - RNA, 19 nt, Homo sapiens
  misc_RNA (1)...(19): siRNA sense strand
gaaucgagcaaauccgaau

SEQ ID NO: 2622656 - RNA, 19 nt, Homo sapiens
  misc_RNA (1)...(19): siRNA sense strand
ccuacuaccuucagaccca

SEQ ID NO: 2622657 - RNA, 19 nt, Homo sapiens
  misc_RNA (1)...(19): siRNA sense strand
uguuaaugcagcagaagca

SEQ ID NO: 2622658 - RNA, 19 nt, Homo sapiens
  misc_RNA (1)...(19): siRNA sense strand
ggguauuacaggggacaaa

SEQ ID NO: 2622659 - RNA, 19 nt, Homo sapiens
  misc_RNA (1)...(19): siRNA sense strand
cagugguggaugaaagaca

SEQ ID NO: 2622660 - RNA, 19 nt, Homo sapiens
  misc_RNA (1)...(19): siRNA sense strand
agucaaggucccagaauuc

SEQ ID NO: 2622661 - RNA, 19 nt, Homo sapiens
  misc_RNA (1)...(19): siRNA sense strand
cagaauuaauacuggaaga

SEQ ID NO: 2622662 - RNA, 19 nt, Homo sapiens
  misc_RNA (1)...(19): siRNA sense strand
caaugagguauaugggaaa

SEQ ID NO: 2622663 - RNA, 19 nt, Homo sapiens
  misc_RNA (1)...(19): siRNA sense strand
ccuuauaaucaguuggcua

SEQ ID NO: 2622664 - RNA, 19 nt, Homo sapiens
  misc_RNA (1)...(19): siRNA sense strand
ugaaaaugagguagggaaa

SEQ ID NO: 2622665 - RNA, 19 nt, Homo sapiens
  misc_RNA (1)...(19): siRNA sense strand
gagaaauccuuauuggaga

SEQ ID NO: 2622666 - RNA, 19 nt, Homo sapiens
  misc_RNA (1)...(19): siRNA sense strand
ucaaugagguauaugggaa

SEQ ID NO: 2622667 - RNA, 19 nt, Homo sapiens
  misc_RNA (1)...(19): siRNA sense strand
ccaaaggucaccaggguau

SEQ ID NO: 2622668 - RNA, 19 nt, Homo sapiens
  misc_RNA (1)...(19): siRNA sense strand
uggaauacgcuuuagacaa

SEQ ID NO: 2622669 - RNA, 19 nt, Homo sapiens
  misc_RNA (1)...(19): siRNA sense strand
agaaauccuuauuggagaa

SEQ ID NO: 2622670 - RNA, 19 nt, Homo sapiens
  misc_RNA (1)...(19): siRNA sense strand
cugaguaagagcuuggaaa

SEQ ID NO: 2622671 - RNA, 19 nt, Homo sapiens
  misc_RNA (1)...(19): siRNA sense strand
agcaauaaacagacgcaua

SEQ ID NO: 2622672 - RNA, 19 nt, Homo sapiens
  misc_RNA (1)...(19): siRNA sense strand
agaagugaacagagaccaa

SEQ ID NO: 2622673 - RNA, 19 nt, Homo sapiens
  misc_RNA (1)...(19): siRNA sense strand
guauguucaaugagguaua

SEQ ID NO: 2622674 - RNA, 19 nt, Homo sapiens
  misc_RNA (1)...(19): siRNA sense strand
ggauagaaggacugcagau

SEQ ID NO: 2622675 - RNA, 19 nt, Homo sapiens
  misc_RNA (1)...(19): siRNA sense strand
aaauuaugccugugaaaca

SEQ ID NO: 2622676 - RNA, 19 nt, Homo sapiens
  misc_RNA (1)...(19): siRNA sense strand
acuccagauaacagggaua

SEQ ID NO: 2622677 - RNA, 19 nt, Homo sapiens
  misc_RNA (1)...(19): siRNA sense strand
gcaaugaaaccgagcagca

SEQ ID NO: 2622678 - RNA, 19 nt, Homo sapiens
  misc_RNA (1)...(19): siRNA sense strand
aggaaagauacccaaauaa

SEQ ID NO: 2622679 - RNA, 19 nt, Homo sapiens
  misc_RNA (1)...(19): siRNA sense strand
acaagaaaguagaacagga

SEQ ID NO: 2622680 - RNA, 19 nt, Homo sapiens
  misc_RNA (1)...(19): siRNA sense strand
gaaaauuaugccugugaaa

SEQ ID NO: 2622681 - RNA, 19 nt, Homo sapiens
  misc_RNA (1)...(19): siRNA sense strand
caagaaaguagaacaggau

SEQ ID NO: 2622682 - RNA, 19 nt, Homo sapiens
  misc_RNA (1)...(19): siRNA sense strand
caggcaaagaaucgagcaa

SEQ ID NO: 2622683 - RNA, 19 nt, Homo sapiens
  misc_RNA (1)...(19): siRNA sense strand
gugaaaaugagguagggaa

SEQ ID NO: 2622684 - RNA, 19 nt, Homo sapiens
  misc_RNA (1)...(19): siRNA sense strand
cagugaagccaaagagaac

SEQ ID NO: 2622685 - RNA, 19 nt, Homo sapiens
  misc_RNA (1)...(19): siRNA sense strand
cuugaucucuauaggcaaa

SEQ ID NO: 2622686 - RNA, 19 nt, Homo sapiens
  misc_RNA (1)...(19): siRNA sense strand
ccagugaagccaaagagaa

SEQ ID NO: 2622687 - RNA, 19 nt, Homo sapiens
  misc_RNA (1)...(19): siRNA sense strand
gagagaagccagugguuac

SEQ ID NO: 2622688 - RNA, 19 nt, Homo sapiens
  misc_RNA (1)...(19): siRNA sense strand
cagaaaucccagaauuaau

SEQ ID NO: 2622689 - RNA, 19 nt, Homo sapiens
  misc_RNA (1)...(19): siRNA sense strand
gcgccauagugaagccaca

SEQ ID NO: 2622690 - RNA, 19 nt, Homo sapiens
  misc_RNA (1)...(19): siRNA sense strand
acgacgaauacgacagcaa

SEQ ID NO: 2622691 - RNA, 19 nt, Homo sapiens
  misc_RNA (1)...(19): siRNA sense strand
ccucauuccucuaacccaa

SEQ ID NO: 2622692 - RNA, 19 nt, Homo sapiens
  misc_RNA (1)...(19): siRNA sense strand
auggaaagccuaaagucua

SEQ ID NO: 2622693 - RNA, 19 nt, Homo sapiens
  misc_RNA (1)...(19): siRNA sense strand
aagaaacaucugugauaga

SEQ ID NO: 2622694 - RNA, 19 nt, Homo sapiens
  misc_RNA (1)...(19): siRNA sense strand
ugaguaagagcuuggaaaa

SEQ ID NO: 2622695 - RNA, 19 nt, Homo sapiens
  misc_RNA (1)...(19): siRNA sense strand
ucaaggcccauuagggaaa

SEQ ID NO: 2622696 - RNA, 19 nt, Homo sapiens
  misc_RNA (1)...(19): siRNA sense strand
cagcagcagccucuagaaa

SEQ ID NO: 2622697 - RNA, 19 nt, Homo sapiens
  misc_RNA (1)...(19): siRNA sense strand
uaacagggauagaaggacu

SEQ ID NO: 2622698 - RNA, 19 nt, Homo sapiens
  misc_RNA (1)...(19): siRNA sense strand
agaaauuggaagaacaguu

SEQ ID NO: 2622699 - RNA, 19 nt, Homo sapiens
  misc_RNA (1)...(19): siRNA sense strand
agaaaguagaacaggaucu

SEQ ID NO: 2622700 - RNA, 19 nt, Homo sapiens
  misc_RNA (1)...(19): siRNA sense strand
cuuauaaucaguuggcuau

SEQ ID NO: 2622701 - RNA, 19 nt, Homo sapiens
  misc_RNA (1)...(19): siRNA sense strand
aggaggcagugguggauga

SEQ ID NO: 2622702 - RNA, 19 nt, Homo sapiens
  misc_RNA (1)...(19): siRNA sense strand
gcagaagcagaaacagcaa

SEQ ID NO: 2622703 - RNA, 19 nt, Homo sapiens
  misc_RNA (1)...(19): siRNA sense strand
cucuauaggcaaauggauu

SEQ ID NO: 2622704 - RNA, 19 nt, Homo sapiens
  misc_RNA (1)...(19): siRNA sense strand
agaacaggaucucuggaau

SEQ ID NO: 2622705 - RNA, 19 nt, Homo sapiens
  misc_RNA (1)...(19): siRNA sense strand
agccgaaauuuaagcaaca

SEQ ID NO: 2622706 - RNA, 19 nt, Homo sapiens
  misc_RNA (1)...(19): siRNA sense strand
aggccagcaacgacgaaua

SEQ ID NO: 2622707 - RNA, 19 nt, Homo sapiens
  misc_RNA (1)...(19): siRNA sense strand
gaacaggaucucuggaauc

SEQ ID NO: 2622708 - RNA, 19 nt, Homo sapiens
  misc_RNA (1)...(19): siRNA sense strand
aggcaaagaaucgagcaaa

SEQ ID NO: 2622709 - RNA, 19 nt, Homo sapiens
  misc_RNA (1)...(19): siRNA sense strand
cucaaguauuagugcgaca

SEQ ID NO: 2622710 - RNA, 19 nt, Homo sapiens
  misc_RNA (1)...(19): siRNA sense strand
aagucaaggucccagaauu

SEQ ID NO: 2622711 - RNA, 19 nt, Homo sapiens
  misc_RNA (1)...(19): siRNA sense strand
cucucaaucaggaaagaua

SEQ ID NO: 2622712 - RNA, 19 nt, Homo sapiens
  misc_RNA (1)...(19): siRNA sense strand
uuauuaaauuccacgguca

SEQ ID NO: 2622713 - RNA, 19 nt, Homo sapiens
  misc_RNA (1)...(19): siRNA sense strand
gcugcagguucaagcucua

SEQ ID NO: 2622714 - RNA, 19 nt, Homo sapiens
  misc_RNA (1)...(19): siRNA sense strand
ccuccaauggucagccuua

SEQ ID NO: 2622715 - RNA, 19 nt, Homo sapiens
  misc_RNA (1)...(19): siRNA sense strand
aggcagugguggaugaaag

SEQ ID NO: 2622716 - RNA, 19 nt, Homo sapiens
  misc_RNA (1)...(19): siRNA sense strand
uagacaagaaaguagaaca

SEQ ID NO: 2622717 - RNA, 19 nt, Homo sapiens
  misc_RNA (1)...(19): siRNA sense strand
gaaucgagcaaauccgaau

SEQ ID NO: 2622718 - RNA, 19 nt, Homo sapiens
  misc_RNA (1)...(19): siRNA sense strand
ccuacuaccuucagaccca

SEQ ID NO: 2622719 - RNA, 19 nt, Homo sapiens
  misc_RNA (1)...(19): siRNA sense strand
uguuaaugcagcagaagca

SEQ ID NO: 2622720 - RNA, 19 nt, Homo sapiens
  misc_RNA (1)...(19): siRNA sense strand
ggguauuacaggggacaaa

SEQ ID NO: 2622721 - RNA, 19 nt, Homo sapiens
  misc_RNA (1)...(19): siRNA sense strand
cagugguggaugaaagaca

SEQ ID NO: 2622722 - RNA, 19 nt, Homo sapiens
  misc_RNA (1)...(19): siRNA sense strand
agucaaggucccagaauuc

SEQ ID NO: 2622723 - RNA, 19 nt, Homo sapiens
  misc_RNA (1)...(19): siRNA sense strand
cagaauuaauacuggaaga

SEQ ID NO: 2622724 - RNA, 19 nt, Homo sapiens
  misc_RNA (1)...(19): siRNA sense strand
caaugagguauaugggaaa

SEQ ID NO: 2622725 - RNA, 19 nt, Homo sapiens
  misc_RNA (1)...(19): siRNA sense strand
ccuuauaaucaguuggcua

SEQ ID NO: 2622726 - RNA, 19 nt, Homo sapiens
  misc_RNA (1)...(19): siRNA sense strand
ugaaaaugagguagggaaa

SEQ ID NO: 2622727 - RNA, 19 nt, Homo sapiens
  misc_RNA (1)...(19): siRNA sense strand
gagaaauccuuauuggaga

SEQ ID NO: 2622728 - RNA, 19 nt, Homo sapiens
  misc_RNA (1)...(19): siRNA sense strand
ucaaugagguauaugggaa

SEQ ID NO: 2622729 - RNA, 19 nt, Homo sapiens
  misc_RNA (1)...(19): siRNA sense strand
ccaaaggucaccaggguau

SEQ ID NO: 2622730 - RNA, 19 nt, Homo sapiens
  misc_RNA (1)...(19): siRNA sense strand
uggaauacgcuuuagacaa

SEQ ID NO: 2622731 - RNA, 19 nt, Homo sapiens
  misc_RNA (1)...(19): siRNA sense strand
agaaauccuuauuggagaa

SEQ ID NO: 2622732 - RNA, 19 nt, Homo sapiens
  misc_RNA (1)...(19): siRNA sense strand
cugaguaagagcuuggaaa

SEQ ID NO: 2622733 - RNA, 19 nt, Homo sapiens
  misc_RNA (1)...(19): siRNA sense strand
agcaauaaacagacgcaua

SEQ ID NO: 2622734 - RNA, 19 nt, Homo sapiens
  misc_RNA (1)...(19): siRNA sense strand
agaagugaacagagaccaa

SEQ ID NO: 2622735 - RNA, 19 nt, Homo sapiens
  misc_RNA (1)...(19): siRNA sense strand
guauguucaaugagguaua

SEQ ID NO: 2622736 - RNA, 19 nt, Homo sapiens
  misc_RNA (1)...(19): siRNA sense strand
ggauagaaggacugcagau

SEQ ID NO: 2622737 - RNA, 19 nt, Homo sapiens
  misc_RNA (1)...(19): siRNA sense strand
aaauuaugccugugaaaca

SEQ ID NO: 2622738 - RNA, 19 nt, Homo sapiens
  misc_RNA (1)...(19): siRNA sense strand
acuccagauaacagggaua

SEQ ID NO: 2622739 - RNA, 19 nt, Homo sapiens
  misc_RNA (1)...(19): siRNA sense strand
gcaaugaaaccgagcagca

SEQ ID NO: 2622740 - RNA, 19 nt, Homo sapiens
  misc_RNA (1)...(19): siRNA sense strand
aggaaagauacccaaauaa

SEQ ID NO: 2622741 - RNA, 19 nt, Homo sapiens
  misc_RNA (1)...(19): siRNA sense strand
acaagaaaguagaacagga

SEQ ID NO: 2622742 - RNA, 19 nt, Homo sapiens
  misc_RNA (1)...(19): siRNA sense strand
gaaaauuaugccugugaaa

SEQ ID NO: 2622743 - RNA, 19 nt, Homo sapiens
  misc_RNA (1)...(19): siRNA sense strand
caggcaaagaaucgagcaa

SEQ ID NO: 2622744 - RNA, 19 nt, Homo sapiens
  misc_RNA (1)...(19): siRNA sense strand
gugaaaaugagguagggaa

SEQ ID NO: 2622745 - RNA, 19 nt, Homo sapiens
  misc_RNA (1)...(19): siRNA sense strand
caagaaaguagaacaggau

SEQ ID NO: 2622746 - RNA, 19 nt, Homo sapiens
  misc_RNA (1)...(19): siRNA sense strand
cagugaagccaaagagaac

SEQ ID NO: 2622747 - RNA, 19 nt, Homo sapiens
  misc_RNA (1)...(19): siRNA sense strand
cuugaucucuauaggcaaa

SEQ ID NO: 2622748 - RNA, 19 nt, Homo sapiens
  misc_RNA (1)...(19): siRNA sense strand
ccagugaagccaaagagaa

SEQ ID NO: 2622749 - RNA, 19 nt, Homo sapiens
  misc_RNA (1)...(19): siRNA sense strand
gagagaagccagugguuac

SEQ ID NO: 2622750 - RNA, 19 nt, Homo sapiens
  misc_RNA (1)...(19): siRNA sense strand
cagaaaucccagaauuaau

SEQ ID NO: 2622751 - RNA, 19 nt, Homo sapiens
  misc_RNA (1)...(19): siRNA sense strand
gcgccauagugaagccaca

SEQ ID NO: 2622752 - RNA, 19 nt, Homo sapiens
  misc_RNA (1)...(19): siRNA sense strand
acgacgaauacgacagcaa

SEQ ID NO: 2622753 - RNA, 19 nt, Homo sapiens
  misc_RNA (1)...(19): siRNA sense strand
ccucauuccucuaacccaa

SEQ ID NO: 2622754 - RNA, 19 nt, Homo sapiens
  misc_RNA (1)...(19): siRNA sense strand
auggaaagccuaaagucua

SEQ ID NO: 2622755 - RNA, 19 nt, Homo sapiens
  misc_RNA (1)...(19): siRNA sense strand
aagaaacaucugugauaga

SEQ ID NO: 2622756 - RNA, 19 nt, Homo sapiens
  misc_RNA (1)...(19): siRNA sense strand
ugaguaagagcuuggaaaa

SEQ ID NO: 2622757 - RNA, 19 nt, Homo sapiens
  misc_RNA (1)...(19): siRNA sense strand
ucaaggcccauuagggaaa

SEQ ID NO: 2622758 - RNA, 19 nt, Homo sapiens
  misc_RNA (1)...(19): siRNA sense strand
cagcagcagccucuagaaa

SEQ ID NO: 2622759 - RNA, 19 nt, Homo sapiens
  misc_RNA (1)...(19): siRNA sense strand
uaacagggauagaaggacu

SEQ ID NO: 2622760 - RNA, 19 nt, Homo sapiens
  misc_RNA (1)...(19): siRNA sense strand
agaaauuggaagaacaguu

SEQ ID NO: 2622761 - RNA, 19 nt, Homo sapiens
  misc_RNA (1)...(19): siRNA sense strand
agaaaguagaacaggaucu

SEQ ID NO: 2622762 - RNA, 19 nt, Homo sapiens
  misc_RNA (1)...(19): siRNA sense strand
cuuauaaucaguuggcuau

SEQ ID NO: 2622763 - RNA, 19 nt, Homo sapiens
  misc_RNA (1)...(19): siRNA sense strand
aggaggcagugguggauga

SEQ ID NO: 2622764 - RNA, 19 nt, Homo sapiens
  misc_RNA (1)...(19): siRNA sense strand
gcagaagcagaaacagcaa

SEQ ID NO: 2622765 - RNA, 19 nt, Homo sapiens
  misc_RNA (1)...(19): siRNA sense strand
cucuauaggcaaauggauu

SEQ ID NO: 2622766 - RNA, 19 nt, Homo sapiens
  misc_RNA (1)...(19): siRNA sense strand
agccgaaauuuaagcaaca

SEQ ID NO: 2622767 - RNA, 19 nt, Homo sapiens
  misc_RNA (1)...(19): siRNA sense strand
agaacaggaucucuggaau

SEQ ID NO: 2622768 - RNA, 19 nt, Homo sapiens
  misc_RNA (1)...(19): siRNA sense strand
gaacaggaucucuggaauc

SEQ ID NO: 2622769 - RNA, 19 nt, Homo sapiens
  misc_RNA (1)...(19): siRNA sense strand
aggccagcaacgacgaaua

SEQ ID NO: 2622770 - RNA, 19 nt, Homo sapiens
  misc_RNA (1)...(19): siRNA sense strand
aggcaaagaaucgagcaaa

SEQ ID NO: 2622771 - RNA, 19 nt, Homo sapiens
  misc_RNA (1)...(19): siRNA sense strand
cucaaguauuagugcgaca

SEQ ID NO: 2622772 - RNA, 19 nt, Homo sapiens
  misc_RNA (1)...(19): siRNA sense strand
aagucaaggucccagaauu

SEQ ID NO: 2622773 - RNA, 19 nt, Homo sapiens
  misc_RNA (1)...(19): siRNA sense strand
cucucaaucaggaaagaua

SEQ ID NO: 2622774 - RNA, 19 nt, Homo sapiens
  misc_RNA (1)...(19): siRNA sense strand
uuauuaaauuccacgguca

SEQ ID NO: 2622775 - RNA, 19 nt, Homo sapiens
  misc_RNA (1)...(19): siRNA sense strand
gcugcagguucaagcucua

SEQ ID NO: 2622776 - RNA, 19 nt, Homo sapiens
  misc_RNA (1)...(19): siRNA sense strand
ccuccaauggucagccuua

SEQ ID NO: 2622777 - RNA, 19 nt, Homo sapiens
  misc_RNA (1)...(19): siRNA sense strand
aggcagugguggaugaaag

SEQ ID NO: 2622778 - RNA, 19 nt, Homo sapiens
  misc_RNA (1)...(19): siRNA sense strand
uagacaagaaaguagaaca

SEQ ID NO: 2622779 - RNA, 19 nt, Homo sapiens
  misc_RNA (1)...(19): siRNA sense strand
gaaucgagcaaauccgaau

SEQ ID NO: 2622780 - RNA, 19 nt, Homo sapiens
  misc_RNA (1)...(19): siRNA sense strand
ccuacuaccuucagaccca

SEQ ID NO: 2622781 - RNA, 19 nt, Homo sapiens
  misc_RNA (1)...(19): siRNA sense strand
uguuaaugcagcagaagca

SEQ ID NO: 2622782 - RNA, 19 nt, Homo sapiens
  misc_RNA (1)...(19): siRNA sense strand
ggguauuacaggggacaaa

SEQ ID NO: 2622783 - RNA, 19 nt, Homo sapiens
  misc_RNA (1)...(19): siRNA sense strand
cagugguggaugaaagaca

SEQ ID NO: 2622784 - RNA, 19 nt, Homo sapiens
  misc_RNA (1)...(19): siRNA sense strand
agucaaggucccagaauuc

SEQ ID NO: 2622785 - RNA, 19 nt, Homo sapiens
  misc_RNA (1)...(19): siRNA sense strand
cugucaugcugaugggaaa

SEQ ID NO: 2622786 - RNA, 19 nt, Homo sapiens
  misc_RNA (1)...(19): siRNA sense strand
cggaagaacuaccuggaga

SEQ ID NO: 2622787 - RNA, 19 nt, Homo sapiens
  misc_RNA (1)...(19): siRNA sense strand
gugcaguacuucaggcgga

SEQ ID NO: 2622788 - RNA, 19 nt, Homo sapiens
  misc_RNA (1)...(19): siRNA sense strand
gccaaggccucuaagguga

SEQ ID NO: 2622789 - RNA, 19 nt, Homo sapiens
  misc_RNA (1)...(19): siRNA sense strand
gcuuuaugguaccuggcua

SEQ ID NO: 2622790 - RNA, 19 nt, Homo sapiens
  misc_RNA (1)...(19): siRNA sense strand
agacaaacccaguaggcua

SEQ ID NO: 2622791 - RNA, 19 nt, Homo sapiens
  misc_RNA (1)...(19): siRNA sense strand
ccugaaagagauaaagaga

SEQ ID NO: 2622792 - RNA, 19 nt, Homo sapiens
  misc_RNA (1)...(19): siRNA sense strand
augaaagaauuccgagaga

SEQ ID NO: 2622793 - RNA, 19 nt, Homo sapiens
  misc_RNA (1)...(19): siRNA sense strand
auuugaagauagucagcua

SEQ ID NO: 2622794 - RNA, 19 nt, Homo sapiens
  misc_RNA (1)...(19): siRNA sense strand
ccaaagagauugaacaggu

SEQ ID NO: 2622795 - RNA, 19 nt, Homo sapiens
  misc_RNA (1)...(19): siRNA sense strand
cugaaauuucugaguauga

SEQ ID NO: 2622796 - RNA, 19 nt, Homo sapiens
  misc_RNA (1)...(19): siRNA sense strand
ugaaagagauaaagagagg

SEQ ID NO: 2622797 - RNA, 19 nt, Homo sapiens
  misc_RNA (1)...(19): siRNA sense strand
acggcagaaugaaggaaau

SEQ ID NO: 2622798 - RNA, 19 nt, Homo sapiens
  misc_RNA (1)...(19): siRNA sense strand
cucuaaagcaauagcauca

SEQ ID NO: 2622799 - RNA, 19 nt, Homo sapiens
  misc_RNA (1)...(19): siRNA sense strand
aucaaagguguuagacaaa

SEQ ID NO: 2622800 - RNA, 19 nt, Homo sapiens
  misc_RNA (1)...(19): siRNA sense strand
aauacagggacaugagaga

SEQ ID NO: 2622801 - RNA, 19 nt, Homo sapiens
  misc_RNA (1)...(19): siRNA sense strand
cugagggacgauaugaaua

SEQ ID NO: 2622802 - RNA, 19 nt, Homo sapiens
  misc_RNA (1)...(19): siRNA sense strand
aagaauuccgagagaacga

SEQ ID NO: 2622803 - RNA, 19 nt, Homo sapiens
  misc_RNA (1)...(19): siRNA sense strand
aacacaugggauagaauua

SEQ ID NO: 2622804 - RNA, 19 nt, Homo sapiens
  misc_RNA (1)...(19): siRNA sense strand
aaaccaaagagauugaaca

SEQ ID NO: 2622805 - RNA, 19 nt, Homo sapiens
  misc_RNA (1)...(19): siRNA sense strand
ucaucaaagguguuagaca

SEQ ID NO: 2622806 - RNA, 19 nt, Homo sapiens
  misc_RNA (1)...(19): siRNA sense strand
agacaaacccaguaggcua

SEQ ID NO: 2622807 - RNA, 19 nt, Homo sapiens
  misc_RNA (1)...(19): siRNA sense strand
ccugaaagagauaaagaga

SEQ ID NO: 2622808 - RNA, 19 nt, Homo sapiens
  misc_RNA (1)...(19): siRNA sense strand
augaaagaauuccgagaga

SEQ ID NO: 2622809 - RNA, 19 nt, Homo sapiens
  misc_RNA (1)...(19): siRNA sense strand
auuugaagauagucagcua

SEQ ID NO: 2622810 - RNA, 19 nt, Homo sapiens
  misc_RNA (1)...(19): siRNA sense strand
ccaaagagauugaacaggu

SEQ ID NO: 2622811 - RNA, 19 nt, Homo sapiens
  misc_RNA (1)...(19): siRNA sense strand
cugaaauuucugaguauga

SEQ ID NO: 2622812 - RNA, 19 nt, Homo sapiens
  misc_RNA (1)...(19): siRNA sense strand
ugaaagagauaaagagagg

SEQ ID NO: 2622813 - RNA, 19 nt, Homo sapiens
  misc_RNA (1)...(19): siRNA sense strand
acggcagaaugaaggaaau

SEQ ID NO: 2622814 - RNA, 19 nt, Homo sapiens
  misc_RNA (1)...(19): siRNA sense strand
cucuaaagcaauagcauca

SEQ ID NO: 2622815 - RNA, 19 nt, Homo sapiens
  misc_RNA (1)...(19): siRNA sense strand
aucaaagguguuagacaaa

SEQ ID NO: 2622816 - RNA, 19 nt, Homo sapiens
  misc_RNA (1)...(19): siRNA sense strand
aauacagggacaugagaga

SEQ ID NO: 2622817 - RNA, 19 nt, Homo sapiens
  misc_RNA (1)...(19): siRNA sense strand
cgaaauguggucugaggga

SEQ ID NO: 2622818 - RNA, 19 nt, Homo sapiens
  misc_RNA (1)...(19): siRNA sense strand
cugagggacgauaugaaua

SEQ ID NO: 2622819 - RNA, 19 nt, Homo sapiens
  misc_RNA (1)...(19): siRNA sense strand
aagaauuccgagagaacga

SEQ ID NO: 2622820 - RNA, 19 nt, Homo sapiens
  misc_RNA (1)...(19): siRNA sense strand
aacacaugggauagaauua

SEQ ID NO: 2622821 - RNA, 19 nt, Homo sapiens
  misc_RNA (1)...(19): siRNA sense strand
aaaccaaagagauugaaca

SEQ ID NO: 2622822 - RNA, 19 nt, Homo sapiens
  misc_RNA (1)...(19): siRNA sense strand
ucaucaaagguguuagaca

SEQ ID NO: 2622823 - RNA, 19 nt, Homo sapiens
  misc_RNA (1)...(19): siRNA sense strand
agacaaacccaguaggcua

SEQ ID NO: 2622824 - RNA, 19 nt, Homo sapiens
  misc_RNA (1)...(19): siRNA sense strand
ccugaaagagauaaagaga

SEQ ID NO: 2622825 - RNA, 19 nt, Homo sapiens
  misc_RNA (1)...(19): siRNA sense strand
augaaagaauuccgagaga

SEQ ID NO: 2622826 - RNA, 19 nt, Homo sapiens
  misc_RNA (1)...(19): siRNA sense strand
auuugaagauagucagcua

SEQ ID NO: 2622827 - RNA, 19 nt, Homo sapiens
  misc_RNA (1)...(19): siRNA sense strand
ccaaagagauugaacaggu

SEQ ID NO: 2622828 - RNA, 19 nt, Homo sapiens
  misc_RNA (1)...(19): siRNA sense strand
cugaaauuucugaguauga

SEQ ID NO: 2622829 - RNA, 19 nt, Homo sapiens
  misc_RNA (1)...(19): siRNA sense strand
ugaaagagauaaagagagg

SEQ ID NO: 2622830 - RNA, 19 nt, Homo sapiens
  misc_RNA (1)...(19): siRNA sense strand
acggcagaaugaaggaaau

SEQ ID NO: 2622831 - RNA, 19 nt, Homo sapiens
  misc_RNA (1)...(19): siRNA sense strand
cucuaaagcaauagcauca

SEQ ID NO: 2622832 - RNA, 19 nt, Homo sapiens
  misc_RNA (1)...(19): siRNA sense strand
aucaaagguguuagacaaa

SEQ ID NO: 2622833 - RNA, 19 nt, Homo sapiens
  misc_RNA (1)...(19): siRNA sense strand
aauacagggacaugagaga

SEQ ID NO: 2622834 - RNA, 19 nt, Homo sapiens
  misc_RNA (1)...(19): siRNA sense strand
cugagggacgauaugaaua

SEQ ID NO: 2622835 - RNA, 19 nt, Homo sapiens
  misc_RNA (1)...(19): siRNA sense strand
aagaauuccgagagaacga

SEQ ID NO: 2622836 - RNA, 19 nt, Homo sapiens
  misc_RNA (1)...(19): siRNA sense strand
aacacaugggauagaauua

SEQ ID NO: 2622837 - RNA, 19 nt, Homo sapiens
  misc_RNA (1)...(19): siRNA sense strand
aaaccaaagagauugaaca

SEQ ID NO: 2622838 - RNA, 19 nt, Homo sapiens
  misc_RNA (1)...(19): siRNA sense strand
ucaucaaagguguuagaca

SEQ ID NO: 2622839 - RNA, 19 nt, Homo sapiens
  misc_RNA (1)...(19): siRNA sense strand
agacaaacccaguaggcua

SEQ ID NO: 2622840 - RNA, 19 nt, Homo sapiens
  misc_RNA (1)...(19): siRNA sense strand
ccugaaagagauaaagaga

SEQ ID NO: 2622841 - RNA, 19 nt, Homo sapiens
  misc_RNA (1)...(19): siRNA sense strand
augaaagaauuccgagaga

SEQ ID NO: 2622842 - RNA, 19 nt, Homo sapiens
  misc_RNA (1)...(19): siRNA sense strand
auuugaagauagucagcua

SEQ ID NO: 2622843 - RNA, 19 nt, Homo sapiens
  misc_RNA (1)...(19): siRNA sense strand
ccaaagagauugaacaggu

SEQ ID NO: 2622844 - RNA, 19 nt, Homo sapiens
  misc_RNA (1)...(19): siRNA sense strand
cugaaauuucugaguauga

SEQ ID NO: 2622845 - RNA, 19 nt, Homo sapiens
  misc_RNA (1)...(19): siRNA sense strand
ugaaagagauaaagagagg

SEQ ID NO: 2622846 - RNA, 19 nt, Homo sapiens
  misc_RNA (1)...(19): siRNA sense strand
acggcagaaugaaggaaau

SEQ ID NO: 2622847 - RNA, 19 nt, Homo sapiens
  misc_RNA (1)...(19): siRNA sense strand
cucuaaagcaauagcauca

SEQ ID NO: 2622848 - RNA, 19 nt, Homo sapiens
  misc_RNA (1)...(19): siRNA sense strand
aucaaagguguuagacaaa

SEQ ID NO: 2622849 - RNA, 19 nt, Homo sapiens
  misc_RNA (1)...(19): siRNA sense strand
aauacagggacaugagaga

SEQ ID NO: 2622850 - RNA, 19 nt, Homo sapiens
  misc_RNA (1)...(19): siRNA sense strand
cgaaauguggucugaggga

SEQ ID NO: 2622851 - RNA, 19 nt, Homo sapiens
  misc_RNA (1)...(19): siRNA sense strand
cugagggacgauaugaaua

SEQ ID NO: 2622852 - RNA, 19 nt, Homo sapiens
  misc_RNA (1)...(19): siRNA sense strand
aagaauuccgagagaacga

SEQ ID NO: 2622853 - RNA, 19 nt, Homo sapiens
  misc_RNA (1)...(19): siRNA sense strand
aacacaugggauagaauua

SEQ ID NO: 2622854 - RNA, 19 nt, Homo sapiens
  misc_RNA (1)...(19): siRNA sense strand
aaaccaaagagauugaaca

SEQ ID NO: 2622855 - RNA, 19 nt, Homo sapiens
  misc_RNA (1)...(19): siRNA sense strand
ucaucaaagguguuagaca

SEQ ID NO: 2622856 - RNA, 19 nt, Homo sapiens
  misc_RNA (1)...(19): siRNA sense strand
agacaaacccaguaggcua

SEQ ID NO: 2622857 - RNA, 19 nt, Homo sapiens
  misc_RNA (1)...(19): siRNA sense strand
ccugaaagagauaaagaga

SEQ ID NO: 2622858 - RNA, 19 nt, Homo sapiens
  misc_RNA (1)...(19): siRNA sense strand
augaaagaauuccgagaga

SEQ ID NO: 2622859 - RNA, 19 nt, Homo sapiens
  misc_RNA (1)...(19): siRNA sense strand
auuugaagauagucagcua

SEQ ID NO: 2622860 - RNA, 19 nt, Homo sapiens
  misc_RNA (1)...(19): siRNA sense strand
ccaaagagauugaacaggu

SEQ ID NO: 2622861 - RNA, 19 nt, Homo sapiens
  misc_RNA (1)...(19): siRNA sense strand
cugaaauuucugaguauga

SEQ ID NO: 2622862 - RNA, 19 nt, Homo sapiens
  misc_RNA (1)...(19): siRNA sense strand
ugaaagagauaaagagagg

SEQ ID NO: 2622863 - RNA, 19 nt, Homo sapiens
  misc_RNA (1)...(19): siRNA sense strand
acggcagaaugaaggaaau

SEQ ID NO: 2622864 - RNA, 19 nt, Homo sapiens
  misc_RNA (1)...(19): siRNA sense strand
cucuaaagcaauagcauca

SEQ ID NO: 2622865 - RNA, 19 nt, Homo sapiens
  misc_RNA (1)...(19): siRNA sense strand
aucaaagguguuagacaaa

SEQ ID NO: 2622866 - RNA, 19 nt, Homo sapiens
  misc_RNA (1)...(19): siRNA sense strand
aauacagggacaugagaga

SEQ ID NO: 2622867 - RNA, 19 nt, Homo sapiens
  misc_RNA (1)...(19): siRNA sense strand
cgaaauguggucugaggga

SEQ ID NO: 2622868 - RNA, 19 nt, Homo sapiens
  misc_RNA (1)...(19): siRNA sense strand
cugagggacgauaugaaua

SEQ ID NO: 2622869 - RNA, 19 nt, Homo sapiens
  misc_RNA (1)...(19): siRNA sense strand
aagaauuccgagagaacga

SEQ ID NO: 2622870 - RNA, 19 nt, Homo sapiens
  misc_RNA (1)...(19): siRNA sense strand
aacacaugggauagaauua

SEQ ID NO: 2622871 - RNA, 19 nt, Homo sapiens
  misc_RNA (1)...(19): siRNA sense strand
aaaccaaagagauugaaca

SEQ ID NO: 2622872 - RNA, 19 nt, Homo sapiens
  misc_RNA (1)...(19): siRNA sense strand
ucaucaaagguguuagaca

SEQ ID NO: 2622873 - RNA, 19 nt, Homo sapiens
  misc_RNA (1)...(19): siRNA sense strand
gaacaagaaguuugagcca

SEQ ID NO: 2622874 - RNA, 19 nt, Homo sapiens
  misc_RNA (1)...(19): siRNA sense strand
acaagaaguuugagccagu

SEQ ID NO: 2622875 - RNA, 19 nt, Homo sapiens
  misc_RNA (1)...(19): siRNA sense strand
ugguauuguacaugcaaau

SEQ ID NO: 2622876 - RNA, 19 nt, Homo sapiens
  misc_RNA (1)...(19): siRNA sense strand
cuucccaacuggagaaaau

SEQ ID NO: 2622877 - RNA, 19 nt, Homo sapiens
  misc_RNA (1)...(19): siRNA sense strand
ggucaauagugcagguugc

SEQ ID NO: 2622878 - RNA, 19 nt, Homo sapiens
  misc_RNA (1)...(19): siRNA sense strand
uggccaagugucuggucaa

SEQ ID NO: 2622879 - RNA, 19 nt, Homo sapiens
  misc_RNA (1)...(19): siRNA sense strand
auaacauccaucugaacaa

SEQ ID NO: 2622880 - RNA, 19 nt, Homo sapiens
  misc_RNA (1)...(19): siRNA sense strand
cugauuggaaugugcaaca

SEQ ID NO: 2622881 - RNA, 19 nt, Homo sapiens
  misc_RNA (1)...(19): siRNA sense strand
gcggaaacuugcugggcau

SEQ ID NO: 2622882 - RNA, 19 nt, Homo sapiens
  misc_RNA (1)...(19): siRNA sense strand
ggaacuacauugcgggcuu

SEQ ID NO: 2622883 - RNA, 19 nt, Homo sapiens
  misc_RNA (1)...(19): siRNA sense strand
cggaggaggaggugaacca

SEQ ID NO: 2622884 - RNA, 19 nt, Homo sapiens
  misc_RNA (1)...(19): siRNA sense strand
ggucaagacugcugagcug

SEQ ID NO: 2622885 - RNA, 19 nt, Homo sapiens
  misc_RNA (1)...(19): siRNA sense strand
ggugguaucuggaccgaga

SEQ ID NO: 2622886 - RNA, 19 nt, Homo sapiens
  misc_RNA (1)...(19): siRNA sense strand
ugcagaagaucaugggcau

SEQ ID NO: 2622887 - RNA, 19 nt, Homo sapiens
  misc_RNA (1)...(19): siRNA sense strand
ggacuauauggaaguacau

SEQ ID NO: 2622888 - RNA, 19 nt, Homo sapiens
  misc_RNA (1)...(19): siRNA sense strand
caucaugucugcaggguug

SEQ ID NO: 2622889 - RNA, 19 nt, Homo sapiens
  misc_RNA (1)...(19): siRNA sense strand
uggaaguacaugaaggacu

SEQ ID NO: 2622890 - RNA, 19 nt, Homo sapiens
  misc_RNA (1)...(19): siRNA sense strand
gaacaggaaggguggcgga

SEQ ID NO: 2622891 - RNA, 19 nt, Homo sapiens
  misc_RNA (1)...(19): siRNA sense strand
ccaucgagguacagaagac

SEQ ID NO: 2622892 - RNA, 19 nt, Homo sapiens
  misc_RNA (1)...(19): siRNA sense strand
agaaugaccuauuugacca

SEQ ID NO: 2622893 - RNA, 19 nt, Homo sapiens
  misc_RNA (1)...(19): siRNA sense strand
ccaucagccuggagggaag

SEQ ID NO: 2622894 - RNA, 19 nt, Homo sapiens
  misc_RNA (1)...(19): siRNA sense strand
gugaauuacagauggccaa

SEQ ID NO: 2622895 - RNA, 19 nt, Homo sapiens
  misc_RNA (1)...(19): siRNA sense strand
ccuucuggguugauggaga

SEQ ID NO: 2622896 - RNA, 19 nt, Homo sapiens
  misc_RNA (1)...(19): siRNA sense strand
acguacaagaggagauuga

SEQ ID NO: 2622897 - RNA, 19 nt, Homo sapiens
  misc_RNA (1)...(19): siRNA sense strand
gaacauaggaauuacccuu

SEQ ID NO: 2622898 - RNA, 19 nt, Homo sapiens
  misc_RNA (1)...(19): siRNA sense strand
ccuucuuggaggugaauga

SEQ ID NO: 2622899 - RNA, 19 nt, Homo sapiens
  misc_RNA (1)...(19): siRNA sense strand
cagcuuaucuccuggccau

SEQ ID NO: 2622900 - RNA, 19 nt, Homo sapiens
  misc_RNA (1)...(19): siRNA sense strand
cagacguacaagaggagau

SEQ ID NO: 2622901 - RNA, 19 nt, Homo sapiens
  misc_RNA (1)...(19): siRNA sense strand
ggaucuuggaauucagaca

SEQ ID NO: 2622902 - RNA, 19 nt, Homo sapiens
  misc_RNA (1)...(19): siRNA sense strand
ucgacuucuuccagagaga

SEQ ID NO: 2622903 - RNA, 19 nt, Homo sapiens
  misc_RNA (1)...(19): siRNA sense strand
ccaacaguucagaggagga

SEQ ID NO: 2622904 - RNA, 19 nt, Homo sapiens
  misc_RNA (1)...(19): siRNA sense strand
ccuuaucagaacauaggaa

SEQ ID NO: 2622905 - RNA, 19 nt, Homo sapiens
  misc_RNA (1)...(19): siRNA sense strand
agaaacuggagcucagaau

SEQ ID NO: 2622906 - RNA, 19 nt, Homo sapiens
  misc_RNA (1)...(19): siRNA sense strand
uaucagacguacaagagga

SEQ ID NO: 2622907 - RNA, 19 nt, Homo sapiens
  misc_RNA (1)...(19): siRNA sense strand
cuuaagaaaugcaagggaa

SEQ ID NO: 2622908 - RNA, 19 nt, Homo sapiens
  misc_RNA (1)...(19): siRNA sense strand
gaaagaagagcauggcaga

SEQ ID NO: 2622909 - RNA, 19 nt, Homo sapiens
  misc_RNA (1)...(19): siRNA sense strand
uugcacaaucagagaauau

SEQ ID NO: 2622910 - RNA, 19 nt, Homo sapiens
  misc_RNA (1)...(19): siRNA sense strand
caguaaagaaagaaaucca

SEQ ID NO: 2622911 - RNA, 19 nt, Homo sapiens
  misc_RNA (1)...(19): siRNA sense strand
agaggaaggaaguugaaau

SEQ ID NO: 2622912 - RNA, 19 nt, Homo sapiens
  misc_RNA (1)...(19): siRNA sense strand
agaaagaaauccagagagg

SEQ ID NO: 2622913 - RNA, 19 nt, Homo sapiens
  misc_RNA (1)...(19): siRNA sense strand
ccaagaaggacgacgcagu

SEQ ID NO: 2622914 - RNA, 19 nt, Homo sapiens
  misc_RNA (1)...(19): siRNA sense strand
aggaaguugaaaugcaaau

SEQ ID NO: 2622915 - RNA, 19 nt, Homo sapiens
  misc_RNA (1)...(19): siRNA sense strand
aggcaaucauguacagcca

SEQ ID NO: 2622916 - RNA, 19 nt, Homo sapiens
  misc_RNA (1)...(19): siRNA sense strand
acaagugaaagaagagcau

SEQ ID NO: 2622917 - RNA, 19 nt, Homo sapiens
  misc_RNA (1)...(19): siRNA sense strand
guaaagaaagaaauccaga

SEQ ID NO: 2622918 - RNA, 19 nt, Homo sapiens
  misc_RNA (1)...(19): siRNA sense strand
gccccaaagaugucgaaua

SEQ ID NO: 2622919 - RNA, 19 nt, Homo sapiens
  misc_RNA (1)...(19): siRNA sense strand
ucauauaccuaaugggaga

SEQ ID NO: 2622920 - RNA, 19 nt, Homo sapiens
  misc_RNA (1)...(19): siRNA sense strand
cagucaaagagauggagua

SEQ ID NO: 2622921 - RNA, 19 nt, Homo sapiens
  misc_RNA (1)...(19): siRNA sense strand
uccaaaugcaacaaagaaa

SEQ ID NO: 2622922 - RNA, 19 nt, Homo sapiens
  misc_RNA (1)...(19): siRNA sense strand
aguugcaaugaaagagaaa

SEQ ID NO: 2622923 - RNA, 19 nt, Homo sapiens
  misc_RNA (1)...(19): siRNA sense strand
cuggagaaacacauggaau

SEQ ID NO: 2622924 - RNA, 19 nt, Homo sapiens
  misc_RNA (1)...(19): siRNA sense strand
cuguggauuuggauaggaa

SEQ ID NO: 2622925 - RNA, 19 nt, Homo sapiens
  misc_RNA (1)...(19): siRNA sense strand
augcaaguuuggaaugaca

SEQ ID NO: 2622926 - RNA, 19 nt, Homo sapiens
  misc_RNA (1)...(19): siRNA sense strand
ccuccaaaugcaacaaaga

SEQ ID NO: 2622927 - RNA, 19 nt, Homo sapiens
  misc_RNA (1)...(19): siRNA sense strand
guggauuuggauaggaaca

SEQ ID NO: 2622928 - RNA, 19 nt, Homo sapiens
  misc_RNA (1)...(19): siRNA sense strand
agucaguggaucugcauga

SEQ ID NO: 2622929 - RNA, 19 nt, Homo sapiens
  misc_RNA (1)...(19): siRNA sense strand
ggaaugccugagaggaaaa

SEQ ID NO: 2622930 - RNA, 19 nt, Homo sapiens
  misc_RNA (1)...(19): siRNA sense strand
ccaaagacggagaaggaga

SEQ ID NO: 2622931 - RNA, 19 nt, Homo sapiens
  misc_RNA (1)...(19): siRNA sense strand
caggcaagguggagcguga

SEQ ID NO: 2622932 - RNA, 19 nt, Homo sapiens
  misc_RNA (1)...(19): siRNA sense strand
acaaggaagaggaggccaa

SEQ ID NO: 2622933 - RNA, 19 nt, Homo sapiens
  misc_RNA (1)...(19): siRNA sense strand
uggaggugaucgagcgcaa

SEQ ID NO: 2622934 - RNA, 19 nt, Homo sapiens
  misc_RNA (1)...(19): siRNA sense strand
cugaagagagugaggccau

SEQ ID NO: 2622935 - RNA, 19 nt, Homo sapiens
  misc_RNA (1)...(19): siRNA sense strand
cagcaagaaagcaggcuca

SEQ ID NO: 2622936 - RNA, 19 nt, Homo sapiens
  misc_RNA (1)...(19): siRNA sense strand
gcgugugcaaggagaucaa

SEQ ID NO: 2622937 - RNA, 19 nt, Homo sapiens
  misc_RNA (1)...(19): siRNA sense strand
gggaggaggacgaagugga

SEQ ID NO: 2622938 - RNA, 19 nt, Homo sapiens
  misc_RNA (1)...(19): siRNA sense strand
cagaggaggaagaagagga

SEQ ID NO: 2622939 - RNA, 19 nt, Homo sapiens
  misc_RNA (1)...(19): siRNA sense strand
ccuccaccauugacggcaa

SEQ ID NO: 2622940 - RNA, 19 nt, Homo sapiens
  misc_RNA (1)...(19): siRNA sense strand
gaauaagggcuguggugug

SEQ ID NO: 2622941 - RNA, 19 nt, Homo sapiens
  misc_RNA (1)...(19): siRNA sense strand
aaaccaagcuggaguggag

SEQ ID NO: 2622942 - RNA, 19 nt, Homo sapiens
  misc_RNA (1)...(19): siRNA sense strand
aguugaaguaccagcauaa

SEQ ID NO: 2622943 - RNA, 19 nt, Homo sapiens
  misc_RNA (1)...(19): siRNA sense strand
auacaaugcaccagcggaa

SEQ ID NO: 2622944 - RNA, 19 nt, Homo sapiens
  misc_RNA (1)...(19): siRNA sense strand
gcagcgaugcagaaggcaa

SEQ ID NO: 2622945 - RNA, 19 nt, Homo sapiens
  misc_RNA (1)...(19): siRNA sense strand
cguaucagaaagagguuau

SEQ ID NO: 2622946 - RNA, 19 nt, Homo sapiens
  misc_RNA (1)...(19): siRNA sense strand
aauuaaaggagguuguuca

SEQ ID NO: 2622947 - RNA, 19 nt, Homo sapiens
  misc_RNA (1)...(19): siRNA sense strand
gcagaaggcaagaacggca

SEQ ID NO: 2622948 - RNA, 19 nt, Homo sapiens
  misc_RNA (1)...(19): siRNA sense strand
agaaagagaaagacgacgu

SEQ ID NO: 2622949 - RNA, 19 nt, Homo sapiens
  misc_RNA (1)...(19): siRNA sense strand
uagaacagcaaguugaaaa

SEQ ID NO: 2622950 - RNA, 19 nt, Homo sapiens
  misc_RNA (1)...(19): siRNA sense strand
gguuguucacuuccagaaa

SEQ ID NO: 2622951 - RNA, 19 nt, Homo sapiens
  misc_RNA (1)...(19): siRNA sense strand
cagaaagagguuaugugau

SEQ ID NO: 2622952 - RNA, 19 nt, Homo sapiens
  misc_RNA (1)...(19): siRNA sense strand
cggccuaugaucaaagauu

SEQ ID NO: 2622953 - RNA, 19 nt, Homo sapiens
  misc_RNA (1)...(19): siRNA sense strand
auacaggagcagcggguca

SEQ ID NO: 2622954 - RNA, 19 nt, Homo sapiens
  misc_RNA (1)...(19): siRNA sense strand
ucgcacagcaccuggaaca

SEQ ID NO: 2622955 - RNA, 19 nt, Homo sapiens
  misc_RNA (1)...(19): siRNA sense strand
ucucagagcgggaggugga

SEQ ID NO: 2622956 - RNA, 19 nt, Homo sapiens
  misc_RNA (1)...(19): siRNA sense strand
agaaaaggaagaugaacuu

SEQ ID NO: 2622957 - RNA, 19 nt, Homo sapiens
  misc_RNA (1)...(19): siRNA sense strand
uggagaucaucguggagga

SEQ ID NO: 2622958 - RNA, 19 nt, Homo sapiens
  misc_RNA (1)...(19): siRNA sense strand
ccgccaagcugauacagga

SEQ ID NO: 2622959 - RNA, 19 nt, Homo sapiens
  misc_RNA (1)...(19): siRNA sense strand
augcagacacgucggucaa

SEQ ID NO: 2622960 - RNA, 19 nt, Homo sapiens
  misc_RNA (1)...(19): siRNA sense strand
ccuuauuacacaucagaua

SEQ ID NO: 2622961 - RNA, 19 nt, Homo sapiens
  misc_RNA (1)...(19): siRNA sense strand
augugaagaaugugguaaa

SEQ ID NO: 2622962 - RNA, 19 nt, Homo sapiens
  misc_RNA (1)...(19): siRNA sense strand
agauaagacauacuggaaa

SEQ ID NO: 2622963 - RNA, 19 nt, Homo sapiens
  misc_RNA (1)...(19): siRNA sense strand
augugaagaauguggcaaa

SEQ ID NO: 2622964 - RNA, 19 nt, Homo sapiens
  misc_RNA (1)...(19): siRNA sense strand
augugaagaauguggcaaa

SEQ ID NO: 2622965 - RNA, 19 nt, Homo sapiens
  misc_RNA (1)...(19): siRNA sense strand
augugaagaauguggcaaa

SEQ ID NO: 2622966 - RNA, 19 nt, Homo sapiens
  misc_RNA (1)...(19): siRNA sense strand
augugaagaauguggcaaa

SEQ ID NO: 2622967 - RNA, 19 nt, Homo sapiens
  misc_RNA (1)...(19): siRNA sense strand
augugaagaauguggcaaa

SEQ ID NO: 2622968 - RNA, 19 nt, Homo sapiens
  misc_RNA (1)...(19): siRNA sense strand
augugaagaauguggcaaa

SEQ ID NO: 2622969 - RNA, 19 nt, Homo sapiens
  misc_RNA (1)...(19): siRNA sense strand
augugaagaauguggcaaa

SEQ ID NO: 2622970 - RNA, 19 nt, Homo sapiens
  misc_RNA (1)...(19): siRNA sense strand
acugagaacauauggaaaa

SEQ ID NO: 2622971 - RNA, 19 nt, Homo sapiens
  misc_RNA (1)...(19): siRNA sense strand
uggccagagcacagcauaa

SEQ ID NO: 2622972 - RNA, 19 nt, Homo sapiens
  misc_RNA (1)...(19): siRNA sense strand
agagaauucauauggaaga

SEQ ID NO: 2622973 - RNA, 19 nt, Homo sapiens
  misc_RNA (1)...(19): siRNA sense strand
augugaugaauguggcaaa

SEQ ID NO: 2622974 - RNA, 19 nt, Homo sapiens
  misc_RNA (1)...(19): siRNA sense strand
aagauaagacauacuggaa

SEQ ID NO: 2622975 - RNA, 19 nt, Homo sapiens
  misc_RNA (1)...(19): siRNA sense strand
ugacaacuacugacagcaa

SEQ ID NO: 2622976 - RNA, 19 nt, Homo sapiens
  misc_RNA (1)...(19): siRNA sense strand
ccauacaaaugugaagaau

SEQ ID NO: 2622977 - RNA, 19 nt, Homo sapiens
  misc_RNA (1)...(19): siRNA sense strand
agagaaacccugcaaacau

SEQ ID NO: 2622978 - RNA, 19 nt, Homo sapiens
  misc_RNA (1)...(19): siRNA sense strand
aaccaguguuugacaacua

SEQ ID NO: 2622979 - RNA, 19 nt, Homo sapiens
  misc_RNA (1)...(19): siRNA sense strand
gcuaagaaaagaccauaaa

SEQ ID NO: 2622980 - RNA, 19 nt, Homo sapiens
  misc_RNA (1)...(19): siRNA sense strand
auacagaagagaaacccua

SEQ ID NO: 2622981 - RNA, 19 nt, Homo sapiens
  misc_RNA (1)...(19): siRNA sense strand
agaauucauacgggagaaa

SEQ ID NO: 2622982 - RNA, 19 nt, Homo sapiens
  misc_RNA (1)...(19): siRNA sense strand
ugaauguggcagagccuuu

SEQ ID NO: 2622983 - RNA, 19 nt, Homo sapiens
  misc_RNA (1)...(19): siRNA sense strand
gccuuuaacugguccucaa

SEQ ID NO: 2622984 - RNA, 19 nt, Homo sapiens
  misc_RNA (1)...(19): siRNA sense strand
gauaauccauacuggggaa

SEQ ID NO: 2622985 - RNA, 19 nt, Homo sapiens
  misc_RNA (1)...(19): siRNA sense strand
ccuuuaaccaguucucaaa

SEQ ID NO: 2622986 - RNA, 19 nt, Homo sapiens
  misc_RNA (1)...(19): siRNA sense strand
gguguacaaaggagguuau

SEQ ID NO: 2622987 - RNA, 19 nt, Homo sapiens
  misc_RNA (1)...(19): siRNA sense strand
aaagugauacugagaacau

SEQ ID NO: 2622988 - RNA, 19 nt, Homo sapiens
  misc_RNA (1)...(19): siRNA sense strand
ccuuauuacacaucagaua

SEQ ID NO: 2622989 - RNA, 19 nt, Homo sapiens
  misc_RNA (1)...(19): siRNA sense strand
augugaagaaugugguaaa

SEQ ID NO: 2622990 - RNA, 19 nt, Homo sapiens
  misc_RNA (1)...(19): siRNA sense strand
agauaagacauacuggaaa

SEQ ID NO: 2622991 - RNA, 19 nt, Homo sapiens
  misc_RNA (1)...(19): siRNA sense strand
augugaagaauguggcaaa

SEQ ID NO: 2622992 - RNA, 19 nt, Homo sapiens
  misc_RNA (1)...(19): siRNA sense strand
augugaagaauguggcaaa

SEQ ID NO: 2622993 - RNA, 19 nt, Homo sapiens
  misc_RNA (1)...(19): siRNA sense strand
augugaagaauguggcaaa

SEQ ID NO: 2622994 - RNA, 19 nt, Homo sapiens
  misc_RNA (1)...(19): siRNA sense strand
augugaagaauguggcaaa

SEQ ID NO: 2622995 - RNA, 19 nt, Homo sapiens
  misc_RNA (1)...(19): siRNA sense strand
augugaagaauguggcaaa

SEQ ID NO: 2622996 - RNA, 19 nt, Homo sapiens
  misc_RNA (1)...(19): siRNA sense strand
augugaagaauguggcaaa

SEQ ID NO: 2622997 - RNA, 19 nt, Homo sapiens
  misc_RNA (1)...(19): siRNA sense strand
augugaagaauguggcaaa

SEQ ID NO: 2622998 - RNA, 19 nt, Homo sapiens
  misc_RNA (1)...(19): siRNA sense strand
acugagaacauauggaaaa

SEQ ID NO: 2622999 - RNA, 19 nt, Homo sapiens
  misc_RNA (1)...(19): siRNA sense strand
acaugagaugguagacaaa

SEQ ID NO: 2623000 - RNA, 19 nt, Homo sapiens
  misc_RNA (1)...(19): siRNA sense strand
uggccagagcacagcauaa

SEQ ID NO: 2623001 - RNA, 19 nt, Homo sapiens
  misc_RNA (1)...(19): siRNA sense strand
agagaauucauauggaaga

SEQ ID NO: 2623002 - RNA, 19 nt, Homo sapiens
  misc_RNA (1)...(19): siRNA sense strand
augugaugaauguggcaaa

SEQ ID NO: 2623003 - RNA, 19 nt, Homo sapiens
  misc_RNA (1)...(19): siRNA sense strand
aagauaagacauacuggaa

SEQ ID NO: 2623004 - RNA, 19 nt, Homo sapiens
  misc_RNA (1)...(19): siRNA sense strand
ggaaaagagcccuggaauc

SEQ ID NO: 2623005 - RNA, 19 nt, Homo sapiens
  misc_RNA (1)...(19): siRNA sense strand
ugacaacuacugacagcaa

SEQ ID NO: 2623006 - RNA, 19 nt, Homo sapiens
  misc_RNA (1)...(19): siRNA sense strand
ccauacaaaugugaagaau

SEQ ID NO: 2623007 - RNA, 19 nt, Homo sapiens
  misc_RNA (1)...(19): siRNA sense strand
agagaaacccugcaaacau

SEQ ID NO: 2623008 - RNA, 19 nt, Homo sapiens
  misc_RNA (1)...(19): siRNA sense strand
aaccaguguuugacaacua

SEQ ID NO: 2623009 - RNA, 19 nt, Homo sapiens
  misc_RNA (1)...(19): siRNA sense strand
gcuaagaaaagaccauaaa

SEQ ID NO: 2623010 - RNA, 19 nt, Homo sapiens
  misc_RNA (1)...(19): siRNA sense strand
auacagaagagaaacccua

SEQ ID NO: 2623011 - RNA, 19 nt, Homo sapiens
  misc_RNA (1)...(19): siRNA sense strand
agaauucauacgggagaaa

SEQ ID NO: 2623012 - RNA, 19 nt, Homo sapiens
  misc_RNA (1)...(19): siRNA sense strand
ugaauguggcagagccuuu

SEQ ID NO: 2623013 - RNA, 19 nt, Homo sapiens
  misc_RNA (1)...(19): siRNA sense strand
gccuuuaacugguccucaa

SEQ ID NO: 2623014 - RNA, 19 nt, Homo sapiens
  misc_RNA (1)...(19): siRNA sense strand
gauaauccauacuggggaa

SEQ ID NO: 2623015 - RNA, 19 nt, Homo sapiens
  misc_RNA (1)...(19): siRNA sense strand
ccuuuaaccaguucucaaa

SEQ ID NO: 2623016 - RNA, 19 nt, Homo sapiens
  misc_RNA (1)...(19): siRNA sense strand
gguguacaaaggagguuau

SEQ ID NO: 2623017 - RNA, 19 nt, Homo sapiens
  misc_RNA (1)...(19): siRNA sense strand
aaagugauacugagaacau

SEQ ID NO: 2623018 - RNA, 19 nt, Homo sapiens
  misc_RNA (1)...(19): siRNA sense strand
guguaaggagugugggaaa

SEQ ID NO: 2623019 - RNA, 19 nt, Homo sapiens
  misc_RNA (1)...(19): siRNA sense strand
ugguaaaagucgaggagaa

SEQ ID NO: 2623020 - RNA, 19 nt, Homo sapiens
  misc_RNA (1)...(19): siRNA sense strand
agaaagaagagaaaggcaa

SEQ ID NO: 2623021 - RNA, 19 nt, Homo sapiens
  misc_RNA (1)...(19): siRNA sense strand
ccauauaaguguaaggagu

SEQ ID NO: 2623022 - RNA, 19 nt, Homo sapiens
  misc_RNA (1)...(19): siRNA sense strand
gguaaaagucgaggagaaa

SEQ ID NO: 2623023 - RNA, 19 nt, Homo sapiens
  misc_RNA (1)...(19): siRNA sense strand
gugcaaagauuguggcaag

SEQ ID NO: 2623024 - RNA, 19 nt, Homo sapiens
  misc_RNA (1)...(19): siRNA sense strand
ucgaagaucuggagcggga

SEQ ID NO: 2623025 - RNA, 19 nt, Homo sapiens
  misc_RNA (1)...(19): siRNA sense strand
aggagagagacguuauaua

SEQ ID NO: 2623026 - RNA, 19 nt, Homo sapiens
  misc_RNA (1)...(19): siRNA sense strand
gggaaagccuucaaccaca

SEQ ID NO: 2623027 - RNA, 19 nt, Homo sapiens
  misc_RNA (1)...(19): siRNA sense strand
uccaagaaagguagagaau

SEQ ID NO: 2623028 - RNA, 19 nt, Homo sapiens
  misc_RNA (1)...(19): siRNA sense strand
ugaccaagguacuaggcau

SEQ ID NO: 2623029 - RNA, 19 nt, Homo sapiens
  misc_RNA (1)...(19): siRNA sense strand
cagaaaccggugugggaga

SEQ ID NO: 2623030 - RNA, 19 nt, Homo sapiens
  misc_RNA (1)...(19): siRNA sense strand
gagaaagaagagaaaggca

SEQ ID NO: 2623031 - RNA, 19 nt, Homo sapiens
  misc_RNA (1)...(19): siRNA sense strand
gugcaccaagugugggaaa

SEQ ID NO: 2623032 - RNA, 19 nt, Homo sapiens
  misc_RNA (1)...(19): siRNA sense strand
ucgaggagaaagaagagaa

SEQ ID NO: 2623033 - RNA, 19 nt, Homo sapiens
  misc_RNA (1)...(19): siRNA sense strand
gugcguaaaccuugaaaau

SEQ ID NO: 2623034 - RNA, 19 nt, Homo sapiens
  misc_RNA (1)...(19): siRNA sense strand
ccaauaaaccugaggccag

SEQ ID NO: 2623035 - RNA, 19 nt, Homo sapiens
  misc_RNA (1)...(19): siRNA sense strand
aaucagcagaugagcagaa

SEQ ID NO: 2623036 - RNA, 19 nt, Homo sapiens
  misc_RNA (1)...(19): siRNA sense strand
gaaagaagagaaaggcaag

SEQ ID NO: 2623037 - RNA, 19 nt, Homo sapiens
  misc_RNA (1)...(19): siRNA sense strand
uaaaagucgaggagaaaga

SEQ ID NO: 2623038 - RNA, 19 nt, Homo sapiens
  misc_RNA (1)...(19): siRNA sense strand
acgaaugugggaagagcuu

SEQ ID NO: 2623039 - RNA, 19 nt, Homo sapiens
  misc_RNA (1)...(19): siRNA sense strand
acaccggagagaagccaua

SEQ ID NO: 2623040 - RNA, 19 nt, Homo sapiens
  misc_RNA (1)...(19): siRNA sense strand
gcuucaggcaguuugggua

SEQ ID NO: 2623041 - RNA, 19 nt, Homo sapiens
  misc_RNA (1)...(19): siRNA sense strand
aggccagcuuagagaggca

SEQ ID NO: 2623042 - RNA, 19 nt, Homo sapiens
  misc_RNA (1)...(19): siRNA sense strand
ggagagcgcugaagaggcu

SEQ ID NO: 2623043 - RNA, 19 nt, Homo sapiens
  misc_RNA (1)...(19): siRNA sense strand
ugacuguaaguguggaaaa

SEQ ID NO: 2623044 - RNA, 19 nt, Homo sapiens
  misc_RNA (1)...(19): siRNA sense strand
gccuuuaguaauagcucaa

SEQ ID NO: 2623045 - RNA, 19 nt, Homo sapiens
  misc_RNA (1)...(19): siRNA sense strand
gcuuucagccacagcucaa

SEQ ID NO: 2623046 - RNA, 19 nt, Homo sapiens
  misc_RNA (1)...(19): siRNA sense strand
ggaaaggaggacaguggga

SEQ ID NO: 2623047 - RNA, 19 nt, Homo sapiens
  misc_RNA (1)...(19): siRNA sense strand
cggcaaaacgucccugaaa

SEQ ID NO: 2623048 - RNA, 19 nt, Homo sapiens
  misc_RNA (1)...(19): siRNA sense strand
gggaguguggcaagggcuu

SEQ ID NO: 2623049 - RNA, 19 nt, Homo sapiens
  misc_RNA (1)...(19): siRNA sense strand
gggcacaaguccuggguca

SEQ ID NO: 2623050 - RNA, 19 nt, Homo sapiens
  misc_RNA (1)...(19): siRNA sense strand
aggagaugaacgagauuaa

SEQ ID NO: 2623051 - RNA, 19 nt, Homo sapiens
  misc_RNA (1)...(19): siRNA sense strand
cuacaugaccggaaggaga

SEQ ID NO: 2623052 - RNA, 19 nt, Homo sapiens
  misc_RNA (1)...(19): siRNA sense strand
gggaaggagaugaacgaga

SEQ ID NO: 2623053 - RNA, 19 nt, Homo sapiens
  misc_RNA (1)...(19): siRNA sense strand
cgagaaagaucacaagcga

SEQ ID NO: 2623054 - RNA, 19 nt, Homo sapiens
  misc_RNA (1)...(19): siRNA sense strand
gagaaagaucacaagcgaa

SEQ ID NO: 2623055 - RNA, 19 nt, Homo sapiens
  misc_RNA (1)...(19): siRNA sense strand
acgaguuaccugugucaaa

SEQ ID NO: 2623056 - RNA, 19 nt, Homo sapiens
  misc_RNA (1)...(19): siRNA sense strand
cugcuugucaggagggauu

SEQ ID NO: 2623057 - RNA, 19 nt, Homo sapiens
  misc_RNA (1)...(19): siRNA sense strand
agagcaaauccacgaggaa

SEQ ID NO: 2623058 - RNA, 19 nt, Homo sapiens
  misc_RNA (1)...(19): siRNA sense strand
aguaauagccagaggccac

SEQ ID NO: 2623059 - RNA, 19 nt, Homo sapiens
  misc_RNA (1)...(19): siRNA sense strand
ugaacgagauuaagaccca

SEQ ID NO: 2623060 - RNA, 19 nt, Homo sapiens
  misc_RNA (1)...(19): siRNA sense strand
agauagcacaugagagacu

SEQ ID NO: 2623061 - RNA, 19 nt, Homo sapiens
  misc_RNA (1)...(19): siRNA sense strand
ccuauggaguuuaguggca

SEQ ID NO: 2623062 - RNA, 19 nt, Homo sapiens
  misc_RNA (1)...(19): siRNA sense strand
acuuauauaauguggagca

SEQ ID NO: 2623063 - RNA, 19 nt, Homo sapiens
  misc_RNA (1)...(19): siRNA sense strand
gcaaauaguacacagucca

SEQ ID NO: 2623064 - RNA, 19 nt, Homo sapiens
  misc_RNA (1)...(19): siRNA sense strand
aggagaggcaccacgagaa

SEQ ID NO: 2623065 - RNA, 19 nt, Homo sapiens
  misc_RNA (1)...(19): siRNA sense strand
gggcacaaguccuggguca

SEQ ID NO: 2623066 - RNA, 19 nt, Homo sapiens
  misc_RNA (1)...(19): siRNA sense strand
aggagaugaacgagauuaa

SEQ ID NO: 2623067 - RNA, 19 nt, Homo sapiens
  misc_RNA (1)...(19): siRNA sense strand
cuacaugaccggaaggaga

SEQ ID NO: 2623068 - RNA, 19 nt, Homo sapiens
  misc_RNA (1)...(19): siRNA sense strand
gggaaggagaugaacgaga

SEQ ID NO: 2623069 - RNA, 19 nt, Homo sapiens
  misc_RNA (1)...(19): siRNA sense strand
cgagaaagaucacaagcga

SEQ ID NO: 2623070 - RNA, 19 nt, Homo sapiens
  misc_RNA (1)...(19): siRNA sense strand
gagaaagaucacaagcgaa

SEQ ID NO: 2623071 - RNA, 19 nt, Homo sapiens
  misc_RNA (1)...(19): siRNA sense strand
acgaguuaccugugucaaa

SEQ ID NO: 2623072 - RNA, 19 nt, Homo sapiens
  misc_RNA (1)...(19): siRNA sense strand
cugcuugucaggagggauu

SEQ ID NO: 2623073 - RNA, 19 nt, Homo sapiens
  misc_RNA (1)...(19): siRNA sense strand
agagcaaauccacgaggaa

SEQ ID NO: 2623074 - RNA, 19 nt, Homo sapiens
  misc_RNA (1)...(19): siRNA sense strand
aguaauagccagaggccac

SEQ ID NO: 2623075 - RNA, 19 nt, Homo sapiens
  misc_RNA (1)...(19): siRNA sense strand
ugaacgagauuaagaccca

SEQ ID NO: 2623076 - RNA, 19 nt, Homo sapiens
  misc_RNA (1)...(19): siRNA sense strand
agauagcacaugagagacu

SEQ ID NO: 2623077 - RNA, 19 nt, Homo sapiens
  misc_RNA (1)...(19): siRNA sense strand
ccuauggaguuuaguggca

SEQ ID NO: 2623078 - RNA, 19 nt, Homo sapiens
  misc_RNA (1)...(19): siRNA sense strand
acuuauauaauguggagca

SEQ ID NO: 2623079 - RNA, 19 nt, Homo sapiens
  misc_RNA (1)...(19): siRNA sense strand
gcaaauaguacacagucca

SEQ ID NO: 2623080 - RNA, 19 nt, Homo sapiens
  misc_RNA (1)...(19): siRNA sense strand
aggagaggcaccacgagaa

SEQ ID NO: 2623081 - RNA, 19 nt, Homo sapiens
  misc_RNA (1)...(19): siRNA sense strand
gggcacaaguccuggguca

SEQ ID NO: 2623082 - RNA, 19 nt, Homo sapiens
  misc_RNA (1)...(19): siRNA sense strand
cuacaugaccggaaggaga

SEQ ID NO: 2623083 - RNA, 19 nt, Homo sapiens
  misc_RNA (1)...(19): siRNA sense strand
cgagaaagaucacaagcga

SEQ ID NO: 2623084 - RNA, 19 nt, Homo sapiens
  misc_RNA (1)...(19): siRNA sense strand
gagaaagaucacaagcgaa

SEQ ID NO: 2623085 - RNA, 19 nt, Homo sapiens
  misc_RNA (1)...(19): siRNA sense strand
acgaguuaccugugucaaa

SEQ ID NO: 2623086 - RNA, 19 nt, Homo sapiens
  misc_RNA (1)...(19): siRNA sense strand
cugcuugucaggagggauu

SEQ ID NO: 2623087 - RNA, 19 nt, Homo sapiens
  misc_RNA (1)...(19): siRNA sense strand
agagcaaauccacgaggaa

SEQ ID NO: 2623088 - RNA, 19 nt, Homo sapiens
  misc_RNA (1)...(19): siRNA sense strand
aguaauagccagaggccac

SEQ ID NO: 2623089 - RNA, 19 nt, Homo sapiens
  misc_RNA (1)...(19): siRNA sense strand
agauagcacaugagagacu

SEQ ID NO: 2623090 - RNA, 19 nt, Homo sapiens
  misc_RNA (1)...(19): siRNA sense strand
ccuauggaguuuaguggca

SEQ ID NO: 2623091 - RNA, 19 nt, Homo sapiens
  misc_RNA (1)...(19): siRNA sense strand
acuuauauaauguggagca

SEQ ID NO: 2623092 - RNA, 19 nt, Homo sapiens
  misc_RNA (1)...(19): siRNA sense strand
gcaaauaguacacagucca

SEQ ID NO: 2623093 - RNA, 19 nt, Homo sapiens
  misc_RNA (1)...(19): siRNA sense strand
aggagaggcaccacgagaa

SEQ ID NO: 2623094 - RNA, 19 nt, Homo sapiens
  misc_RNA (1)...(19): siRNA sense strand
gggcacaaguccuggguca

SEQ ID NO: 2623095 - RNA, 19 nt, Homo sapiens
  misc_RNA (1)...(19): siRNA sense strand
aggagaugaacgagauuaa

SEQ ID NO: 2623096 - RNA, 19 nt, Homo sapiens
  misc_RNA (1)...(19): siRNA sense strand
cuacaugaccggaaggaga

SEQ ID NO: 2623097 - RNA, 19 nt, Homo sapiens
  misc_RNA (1)...(19): siRNA sense strand
gggaaggagaugaacgaga

SEQ ID NO: 2623098 - RNA, 19 nt, Homo sapiens
  misc_RNA (1)...(19): siRNA sense strand
cgagaaagaucacaagcga

SEQ ID NO: 2623099 - RNA, 19 nt, Homo sapiens
  misc_RNA (1)...(19): siRNA sense strand
gagaaagaucacaagcgaa

SEQ ID NO: 2623100 - RNA, 19 nt, Homo sapiens
  misc_RNA (1)...(19): siRNA sense strand
acgaguuaccugugucaaa

SEQ ID NO: 2623101 - RNA, 19 nt, Homo sapiens
  misc_RNA (1)...(19): siRNA sense strand
cugcuugucaggagggauu

SEQ ID NO: 2623102 - RNA, 19 nt, Homo sapiens
  misc_RNA (1)...(19): siRNA sense strand
agagcaaauccacgaggaa

SEQ ID NO: 2623103 - RNA, 19 nt, Homo sapiens
  misc_RNA (1)...(19): siRNA sense strand
aguaauagccagaggccac

SEQ ID NO: 2623104 - RNA, 19 nt, Homo sapiens
  misc_RNA (1)...(19): siRNA sense strand
ugaacgagauuaagaccca

SEQ ID NO: 2623105 - RNA, 19 nt, Homo sapiens
  misc_RNA (1)...(19): siRNA sense strand
agauagcacaugagagacu

SEQ ID NO: 2623106 - RNA, 19 nt, Homo sapiens
  misc_RNA (1)...(19): siRNA sense strand
ccuauggaguuuaguggca

SEQ ID NO: 2623107 - RNA, 19 nt, Homo sapiens
  misc_RNA (1)...(19): siRNA sense strand
acuuauauaauguggagca

SEQ ID NO: 2623108 - RNA, 19 nt, Homo sapiens
  misc_RNA (1)...(19): siRNA sense strand
gcaaauaguacacagucca

SEQ ID NO: 2623109 - RNA, 19 nt, Homo sapiens
  misc_RNA (1)...(19): siRNA sense strand
aggagaggcaccacgagaa

SEQ ID NO: 2623110 - RNA, 19 nt, Homo sapiens
  misc_RNA (1)...(19): siRNA sense strand
auguaaagaaugugggaaa

SEQ ID NO: 2623111 - RNA, 19 nt, Homo sapiens
  misc_RNA (1)...(19): siRNA sense strand
augcaaugaaugugggaaa

SEQ ID NO: 2623112 - RNA, 19 nt, Homo sapiens
  misc_RNA (1)...(19): siRNA sense strand
gguaaauccuucagccgaa

SEQ ID NO: 2623113 - RNA, 19 nt, Homo sapiens
  misc_RNA (1)...(19): siRNA sense strand
gcuuauuaggcaacagaua

SEQ ID NO: 2623114 - RNA, 19 nt, Homo sapiens
  misc_RNA (1)...(19): siRNA sense strand
augugaugcuggagaacua

SEQ ID NO: 2623115 - RNA, 19 nt, Homo sapiens
  misc_RNA (1)...(19): siRNA sense strand
ugaaggcagauuagagaaa

SEQ ID NO: 2623116 - RNA, 19 nt, Homo sapiens
  misc_RNA (1)...(19): siRNA sense strand
gcaucuaguugcagcacau

SEQ ID NO: 2623117 - RNA, 19 nt, Homo sapiens
  misc_RNA (1)...(19): siRNA sense strand
aggaauguaccuugggauu

SEQ ID NO: 2623118 - RNA, 19 nt, Homo sapiens
  misc_RNA (1)...(19): siRNA sense strand
aauacugaauugagccaaa

SEQ ID NO: 2623119 - RNA, 19 nt, Homo sapiens
  misc_RNA (1)...(19): siRNA sense strand
gcccaaagucagugcuuau

SEQ ID NO: 2623120 - RNA, 19 nt, Homo sapiens
  misc_RNA (1)...(19): siRNA sense strand
uuacauauaugaaggcaga

SEQ ID NO: 2623121 - RNA, 19 nt, Homo sapiens
  misc_RNA (1)...(19): siRNA sense strand
augugaggaaugugggaua

SEQ ID NO: 2623122 - RNA, 19 nt, Homo sapiens
  misc_RNA (1)...(19): siRNA sense strand
auguaacgagugugggaaa

SEQ ID NO: 2623123 - RNA, 19 nt, Homo sapiens
  misc_RNA (1)...(19): siRNA sense strand
cagauacuucccagagaaa

SEQ ID NO: 2623124 - RNA, 19 nt, Homo sapiens
  misc_RNA (1)...(19): siRNA sense strand
aaugcauacuggagaaaga

SEQ ID NO: 2623125 - RNA, 19 nt, Homo sapiens
  misc_RNA (1)...(19): siRNA sense strand
ccuucguaaacaugagaaa

SEQ ID NO: 2623126 - RNA, 19 nt, Homo sapiens
  misc_RNA (1)...(19): siRNA sense strand
cuuaauagacaccgaauca

SEQ ID NO: 2623127 - RNA, 19 nt, Homo sapiens
  misc_RNA (1)...(19): siRNA sense strand
cccuauagaugcaaugaau

SEQ ID NO: 2623128 - RNA, 19 nt, Homo sapiens
  misc_RNA (1)...(19): siRNA sense strand
cgagaugaguggagaaagc

SEQ ID NO: 2623129 - RNA, 19 nt, Homo sapiens
  misc_RNA (1)...(19): siRNA sense strand
gggagagccuucagccaga

SEQ ID NO: 2623130 - RNA, 19 nt, Homo sapiens
  misc_RNA (1)...(19): siRNA sense strand
aaggauucauacaggagaa

SEQ ID NO: 2623131 - RNA, 19 nt, Homo sapiens
  misc_RNA (1)...(19): siRNA sense strand
accacaaagucaacgcaaa

SEQ ID NO: 2623132 - RNA, 19 nt, Homo sapiens
  misc_RNA (1)...(19): siRNA sense strand
cauucauacuggagagaag

SEQ ID NO: 2623133 - RNA, 19 nt, Homo sapiens
  misc_RNA (1)...(19): siRNA sense strand
auguagugaaugugggaga

SEQ ID NO: 2623134 - RNA, 19 nt, Homo sapiens
  misc_RNA (1)...(19): siRNA sense strand
ccacaaagucaacgcaaac

SEQ ID NO: 2623135 - RNA, 19 nt, Homo sapiens
  misc_RNA (1)...(19): siRNA sense strand
acuauagaaagaagccaua

SEQ ID NO: 2623136 - RNA, 19 nt, Homo sapiens
  misc_RNA (1)...(19): siRNA sense strand
cauaaaaccacaaagucaa

SEQ ID NO: 2623137 - RNA, 19 nt, Homo sapiens
  misc_RNA (1)...(19): siRNA sense strand
uggagaaagacccuauaaa

SEQ ID NO: 2623138 - RNA, 19 nt, Homo sapiens
  misc_RNA (1)...(19): siRNA sense strand
cuauagaugcaaugaaugu

SEQ ID NO: 2623139 - RNA, 19 nt, Homo sapiens
  misc_RNA (1)...(19): siRNA sense strand
uuaguaaucaccagagaau

SEQ ID NO: 2623140 - RNA, 19 nt, Homo sapiens
  misc_RNA (1)...(19): siRNA sense strand
uggccaaaguucagcucuu

SEQ ID NO: 2623141 - RNA, 19 nt, Homo sapiens
  misc_RNA (1)...(19): siRNA sense strand
cgaauucauacuggagaaa

SEQ ID NO: 2623142 - RNA, 19 nt, Homo sapiens
  misc_RNA (1)...(19): siRNA sense strand
ucauaaaaccacaaaguca

SEQ ID NO: 2623143 - RNA, 19 nt, Homo sapiens
  misc_RNA (1)...(19): siRNA sense strand
guauugcacaucagagaau

SEQ ID NO: 2623144 - RNA, 19 nt, Homo sapiens
  misc_RNA (1)...(19): siRNA sense strand
ccucaaacagaauucacaa

SEQ ID NO: 2623145 - RNA, 19 nt, Homo sapiens
  misc_RNA (1)...(19): siRNA sense strand
agccaaaacuucagcccaa

SEQ ID NO: 2623146 - RNA, 19 nt, Homo sapiens
  misc_RNA (1)...(19): siRNA sense strand
agauguaaagaauguggua

SEQ ID NO: 2623147 - RNA, 19 nt, Homo sapiens
  misc_RNA (1)...(19): siRNA sense strand
ugaaaagauccaacaggaa

SEQ ID NO: 2623148 - RNA, 19 nt, Homo sapiens
  misc_RNA (1)...(19): siRNA sense strand
ugggauaucuuuuggccaa

SEQ ID NO: 2623149 - RNA, 19 nt, Homo sapiens
  misc_RNA (1)...(19): siRNA sense strand
uagccaaaguucagcucuu

SEQ ID NO: 2623150 - RNA, 19 nt, Homo sapiens
  misc_RNA (1)...(19): siRNA sense strand
agagaaacuuguaccggga

SEQ ID NO: 2623151 - RNA, 19 nt, Homo sapiens
  misc_RNA (1)...(19): siRNA sense strand
guggaaaagccuucagaca

SEQ ID NO: 2623152 - RNA, 19 nt, Homo sapiens
  misc_RNA (1)...(19): siRNA sense strand
cccuauaaauguaacgagu

SEQ ID NO: 2623153 - RNA, 19 nt, Homo sapiens
  misc_RNA (1)...(19): siRNA sense strand
aguaaucaccagagaauuc

SEQ ID NO: 2623154 - RNA, 19 nt, Homo sapiens
  misc_RNA (1)...(19): siRNA sense strand
acguauugcacaucagaga

SEQ ID NO: 2623155 - RNA, 19 nt, Homo sapiens
  misc_RNA (1)...(19): siRNA sense strand
gauguaaagaaugugguaa

SEQ ID NO: 2623156 - RNA, 19 nt, Homo sapiens
  misc_RNA (1)...(19): siRNA sense strand
acuuauuauucacgagcga

SEQ ID NO: 2623157 - RNA, 19 nt, Homo sapiens
  misc_RNA (1)...(19): siRNA sense strand
cgcuauaaauguagucugu

SEQ ID NO: 2623158 - RNA, 19 nt, Homo sapiens
  misc_RNA (1)...(19): siRNA sense strand
acuucuauuucacgacuua

SEQ ID NO: 2623159 - RNA, 19 nt, Homo sapiens
  misc_RNA (1)...(19): siRNA sense strand
cuggagaacuauaggaacc

SEQ ID NO: 2623160 - RNA, 19 nt, Homo sapiens
  misc_RNA (1)...(19): siRNA sense strand
uauucagcaucgaaggauu

SEQ ID NO: 2623161 - RNA, 19 nt, Homo sapiens
  misc_RNA (1)...(19): siRNA sense strand
ucaacaagcugcagggcca

SEQ ID NO: 2623162 - RNA, 19 nt, Homo sapiens
  misc_RNA (1)...(19): siRNA sense strand
cgucacugagcgagaacua

SEQ ID NO: 2623163 - RNA, 19 nt, Homo sapiens
  misc_RNA (1)...(19): siRNA sense strand
cggccaaggcugcugucaa

SEQ ID NO: 2623164 - RNA, 19 nt, Homo sapiens
  misc_RNA (1)...(19): siRNA sense strand
cggcaguaccugaggcuuc

SEQ ID NO: 2623165 - RNA, 19 nt, Homo sapiens
  misc_RNA (1)...(19): siRNA sense strand
ugauauggccacagggaag

SEQ ID NO: 2623166 - RNA, 19 nt, Homo sapiens
  misc_RNA (1)...(19): siRNA sense strand
gggugaugaccguggcagu

SEQ ID NO: 2623167 - RNA, 19 nt, Homo sapiens
  misc_RNA (1)...(19): siRNA sense strand
acaagaagcuggugcagga

SEQ ID NO: 2623168 - RNA, 19 nt, Homo sapiens
  misc_RNA (1)...(19): siRNA sense strand
cugcccagguagagacuau

SEQ ID NO: 2623169 - RNA, 19 nt, Homo sapiens
  misc_RNA (1)...(19): siRNA sense strand
ccuacacggagaaggacaa

SEQ ID NO: 2623170 - RNA, 19 nt, Homo sapiens
  misc_RNA (1)...(19): siRNA sense strand
agaaggacaagcaggcgua

SEQ ID NO: 2623171 - RNA, 19 nt, Homo sapiens
  misc_RNA (1)...(19): siRNA sense strand
augugaaguuugugugugu

SEQ ID NO: 2623172 - RNA, 19 nt, Homo sapiens
  misc_RNA (1)...(19): siRNA sense strand
ggaagcgggucauccggaa

SEQ ID NO: 2623173 - RNA, 19 nt, Homo sapiens
  misc_RNA (1)...(19): siRNA sense strand
agagaaagcugaaagucac

SEQ ID NO: 2623174 - RNA, 19 nt, Homo sapiens
  misc_RNA (1)...(19): siRNA sense strand
acaagaagcuggugcagga

SEQ ID NO: 2623175 - RNA, 19 nt, Homo sapiens
  misc_RNA (1)...(19): siRNA sense strand
cugcccagguagagacuau

SEQ ID NO: 2623176 - RNA, 19 nt, Homo sapiens
  misc_RNA (1)...(19): siRNA sense strand
ccuacacggagaaggacaa

SEQ ID NO: 2623177 - RNA, 19 nt, Homo sapiens
  misc_RNA (1)...(19): siRNA sense strand
agaaggacaagcaggcgua

SEQ ID NO: 2623178 - RNA, 19 nt, Homo sapiens
  misc_RNA (1)...(19): siRNA sense strand
augugaaguuugugugugu

SEQ ID NO: 2623179 - RNA, 19 nt, Homo sapiens
  misc_RNA (1)...(19): siRNA sense strand
ggaagcgggucauccggaa

SEQ ID NO: 2623180 - RNA, 19 nt, Homo sapiens
  misc_RNA (1)...(19): siRNA sense strand
agagaaagcugaaagucac

SEQ ID NO: 2623181 - RNA, 19 nt, Homo sapiens
  misc_RNA (1)...(19): siRNA sense strand
uugucuaccuguaccgaaa

SEQ ID NO: 2623182 - RNA, 19 nt, Homo sapiens
  misc_RNA (1)...(19): siRNA sense strand
cggacuacgaccaggaugu

SEQ ID NO: 2623183 - RNA, 19 nt, Homo sapiens
  misc_RNA (1)...(19): siRNA sense strand
ggacaauauuggauggcua

SEQ ID NO: 2623184 - RNA, 19 nt, Homo sapiens
  misc_RNA (1)...(19): siRNA sense strand
agaaguaaacagugguaaa

SEQ ID NO: 2623185 - RNA, 19 nt, Homo sapiens
  misc_RNA (1)...(19): siRNA sense strand
agacaaugcuggcgggaga

SEQ ID NO: 2623186 - RNA, 19 nt, Homo sapiens
  misc_RNA (1)...(19): siRNA sense strand
gaauguuagaggagcgaaa

SEQ ID NO: 2623187 - RNA, 19 nt, Homo sapiens
  misc_RNA (1)...(19): siRNA sense strand
guuacaagguucaaggcaa

SEQ ID NO: 2623188 - RNA, 19 nt, Homo sapiens
  misc_RNA (1)...(19): siRNA sense strand
guuguuuggaagagagaaa

SEQ ID NO: 2623189 - RNA, 19 nt, Homo sapiens
  misc_RNA (1)...(19): siRNA sense strand
agaaaggugcaguggacaa

SEQ ID NO: 2623190 - RNA, 19 nt, Homo sapiens
  misc_RNA (1)...(19): siRNA sense strand
acguugaugugaagauaaa

SEQ ID NO: 2623191 - RNA, 19 nt, Homo sapiens
  misc_RNA (1)...(19): siRNA sense strand
ccaucgagucacugaauua

SEQ ID NO: 2623192 - RNA, 19 nt, Homo sapiens
  misc_RNA (1)...(19): siRNA sense strand
cagcauaccagguggacau

SEQ ID NO: 2623193 - RNA, 19 nt, Homo sapiens
  misc_RNA (1)...(19): siRNA sense strand
gugaaaacuauguggcaaa

SEQ ID NO: 2623194 - RNA, 19 nt, Homo sapiens
  misc_RNA (1)...(19): siRNA sense strand
gcaacauauucaagugaca

SEQ ID NO: 2623195 - RNA, 19 nt, Homo sapiens
  misc_RNA (1)...(19): siRNA sense strand
ccccaaagauaguggauuu

SEQ ID NO: 2623196 - RNA, 19 nt, Homo sapiens
  misc_RNA (1)...(19): siRNA sense strand
gcugugauuucuuggacaa

SEQ ID NO: 2623197 - RNA, 19 nt, Homo sapiens
  misc_RNA (1)...(19): siRNA sense strand
caagaugugaccagagaau

SEQ ID NO: 2623198 - RNA, 19 nt, Homo sapiens
  misc_RNA (1)...(19): siRNA sense strand
gugugagagagaaggcaua

SEQ ID NO: 2623199 - RNA, 19 nt, Homo sapiens
  misc_RNA (1)...(19): siRNA sense strand
uaacuaugacuguggacaa

SEQ ID NO: 2623200 - RNA, 19 nt, Homo sapiens
  misc_RNA (1)...(19): siRNA sense strand
gauuaaagaagaagaugca

SEQ ID NO: 2623201 - RNA, 19 nt, Homo sapiens
  misc_RNA (1)...(19): siRNA sense strand
aagaaaugacccuggugaa

SEQ ID NO: 2623202 - RNA, 19 nt, Homo sapiens
  misc_RNA (1)...(19): siRNA sense strand
agagaaggucugugcaaaa

SEQ ID NO: 2623203 - RNA, 19 nt, Homo sapiens
  misc_RNA (1)...(19): siRNA sense strand
gggaaggacgugugagaag

SEQ ID NO: 2623204 - RNA, 19 nt, Homo sapiens
  misc_RNA (1)...(19): siRNA sense strand
acuggaaguucuuuguaaa

SEQ ID NO: 2623205 - RNA, 19 nt, Homo sapiens
  misc_RNA (1)...(19): siRNA sense strand
ggucaagagguguacguga

SEQ ID NO: 2623206 - RNA, 19 nt, Homo sapiens
  misc_RNA (1)...(19): siRNA sense strand
cuguuaaaguucuuccaaa

SEQ ID NO: 2623207 - RNA, 19 nt, Homo sapiens
  misc_RNA (1)...(19): siRNA sense strand
gggccuagagccugaaaca

SEQ ID NO: 2623208 - RNA, 19 nt, Homo sapiens
  misc_RNA (1)...(19): siRNA sense strand
caucauuugcccagauauu

SEQ ID NO: 2623209 - RNA, 19 nt, Homo sapiens
  misc_RNA (1)...(19): siRNA sense strand
ccuccuggguuuaugggaa

SEQ ID NO: 2623210 - RNA, 19 nt, Homo sapiens
  misc_RNA (1)...(19): siRNA sense strand
ggacaagagggaugcaagu

SEQ ID NO: 2623211 - RNA, 19 nt, Homo sapiens
  misc_RNA (1)...(19): siRNA sense strand
uggcugggaugguggaaaa

SEQ ID NO: 2623212 - RNA, 19 nt, Homo sapiens
  misc_RNA (1)...(19): siRNA sense strand
cgggagaagccuuaugaga

SEQ ID NO: 2623213 - RNA, 19 nt, Homo sapiens
  misc_RNA (1)...(19): siRNA sense strand
gaggaugaccccaaagaua

SEQ ID NO: 2623214 - RNA, 19 nt, Homo sapiens
  misc_RNA (1)...(19): siRNA sense strand
auauuaaaguuccaggcaa

SEQ ID NO: 2623215 - RNA, 19 nt, Homo sapiens
  misc_RNA (1)...(19): siRNA sense strand
ucaagugacaaaugagauu

SEQ ID NO: 2623216 - RNA, 19 nt, Homo sapiens
  misc_RNA (1)...(19): siRNA sense strand
auggaaaccuucuggacuu

SEQ ID NO: 2623217 - RNA, 19 nt, Homo sapiens
  misc_RNA (1)...(19): siRNA sense strand
aggagaggcaaucaggaua

SEQ ID NO: 2623218 - RNA, 19 nt, Homo sapiens
  misc_RNA (1)...(19): siRNA sense strand
gugcaguggacaagaggga

SEQ ID NO: 2623219 - RNA, 19 nt, Homo sapiens
  misc_RNA (1)...(19): siRNA sense strand
gcuaccuacuaaugaagaa

SEQ ID NO: 2623220 - RNA, 19 nt, Homo sapiens
  misc_RNA (1)...(19): siRNA sense strand
ccagaaaacaucaagauuu

SEQ ID NO: 2623221 - RNA, 19 nt, Homo sapiens
  misc_RNA (1)...(19): siRNA sense strand
ggugaagccggaugggaca

SEQ ID NO: 2623222 - RNA, 19 nt, Homo sapiens
  misc_RNA (1)...(19): siRNA sense strand
uauuaaaguuccaggcaac

SEQ ID NO: 2623223 - RNA, 19 nt, Homo sapiens
  misc_RNA (1)...(19): siRNA sense strand
gggcaaaugugcaaaggag

SEQ ID NO: 2623224 - RNA, 19 nt, Homo sapiens
  misc_RNA (1)...(19): siRNA sense strand
gcccuaaacaggaagguca

SEQ ID NO: 2623225 - RNA, 19 nt, Homo sapiens
  misc_RNA (1)...(19): siRNA sense strand
ugacuguggacaagggaga

SEQ ID NO: 2623226 - RNA, 19 nt, Homo sapiens
  misc_RNA (1)...(19): siRNA sense strand
gcagaauauuaaaguucca

SEQ ID NO: 2623227 - RNA, 19 nt, Homo sapiens
  misc_RNA (1)...(19): siRNA sense strand
gcuuggacccuuagugaca

SEQ ID NO: 2623228 - RNA, 19 nt, Homo sapiens
  misc_RNA (1)...(19): siRNA sense strand
gugauuucuuggacaauau

SEQ ID NO: 2623229 - RNA, 19 nt, Homo sapiens
  misc_RNA (1)...(19): siRNA sense strand
agagaacaacauaggguca

SEQ ID NO: 2623230 - RNA, 19 nt, Homo sapiens
  misc_RNA (1)...(19): siRNA sense strand
auguugaaguggagagaag

SEQ ID NO: 2623231 - RNA, 19 nt, Homo sapiens
  misc_RNA (1)...(19): siRNA sense strand
auaugaacucugugugcaa

SEQ ID NO: 2623232 - RNA, 19 nt, Homo sapiens
  misc_RNA (1)...(19): siRNA sense strand
ccagguauauaggaggaaa

SEQ ID NO: 2623233 - RNA, 19 nt, Homo sapiens
  misc_RNA (1)...(19): siRNA sense strand
gguccgagcuagagucaac

SEQ ID NO: 2623234 - RNA, 19 nt, Homo sapiens
  misc_RNA (1)...(19): siRNA sense strand
gggaauggagugaagaucu

SEQ ID NO: 2623235 - RNA, 19 nt, Homo sapiens
  misc_RNA (1)...(19): siRNA sense strand
auggacuacuugagccaaa

SEQ ID NO: 2623236 - RNA, 19 nt, Homo sapiens
  misc_RNA (1)...(19): siRNA sense strand
agagaaaaggcuaguaaga

SEQ ID NO: 2623237 - RNA, 19 nt, Homo sapiens
  misc_RNA (1)...(19): siRNA sense strand
gaggagaggcaaucaggau

SEQ ID NO: 2623238 - RNA, 19 nt, Homo sapiens
  misc_RNA (1)...(19): siRNA sense strand
agggagauaacgugaacau

SEQ ID NO: 2623239 - RNA, 19 nt, Homo sapiens
  misc_RNA (1)...(19): siRNA sense strand
gauuguaagcuuaggugca

SEQ ID NO: 2623240 - RNA, 19 nt, Homo sapiens
  misc_RNA (1)...(19): siRNA sense strand
ccaaagaugaucacaggga

SEQ ID NO: 2623241 - RNA, 19 nt, Homo sapiens
  misc_RNA (1)...(19): siRNA sense strand
uggauugucccgaggucaa

SEQ ID NO: 2623242 - RNA, 19 nt, Homo sapiens
  misc_RNA (1)...(19): siRNA sense strand
gagcgaaagaccuacguga

SEQ ID NO: 2623243 - RNA, 19 nt, Homo sapiens
  misc_RNA (1)...(19): siRNA sense strand
ggauacgaaccaugaagau

SEQ ID NO: 2623244 - RNA, 19 nt, Homo sapiens
  misc_RNA (1)...(19): siRNA sense strand
caugaagaugcgucaacaa

SEQ ID NO: 2623245 - RNA, 19 nt, Homo sapiens
  misc_RNA (1)...(19): siRNA sense strand
ggcaaaugugcaaaggaga

SEQ ID NO: 2623246 - RNA, 19 nt, Homo sapiens
  misc_RNA (1)...(19): siRNA sense strand
ggagaauggcccaagccuu

SEQ ID NO: 2623247 - RNA, 19 nt, Homo sapiens
  misc_RNA (1)...(19): siRNA sense strand
caucaaucucuuaggagca

SEQ ID NO: 2623248 - RNA, 19 nt, Homo sapiens
  misc_RNA (1)...(19): siRNA sense strand
cagcagaauauuaaaguuc

SEQ ID NO: 2623249 - RNA, 19 nt, Homo sapiens
  misc_RNA (1)...(19): siRNA sense strand
cccuaaacaggaaggucaa

SEQ ID NO: 2623250 - RNA, 19 nt, Homo sapiens
  misc_RNA (1)...(19): siRNA sense strand
guuuacuuaugcaggaauu

SEQ ID NO: 2623251 - RNA, 19 nt, Homo sapiens
  misc_RNA (1)...(19): siRNA sense strand
guaacuaguuucauggaga

SEQ ID NO: 2623252 - RNA, 19 nt, Homo sapiens
  misc_RNA (1)...(19): siRNA sense strand
cgucaugagaucaaggaca

SEQ ID NO: 2623253 - RNA, 19 nt, Homo sapiens
  misc_RNA (1)...(19): siRNA sense strand
gcaucgaggagaauggaga

SEQ ID NO: 2623254 - RNA, 19 nt, Homo sapiens
  misc_RNA (1)...(19): siRNA sense strand
cuggaguggcguuuggaau

SEQ ID NO: 2623255 - RNA, 19 nt, Homo sapiens
  misc_RNA (1)...(19): siRNA sense strand
ccuacaucuucaauagcaa

SEQ ID NO: 2623256 - RNA, 19 nt, Homo sapiens
  misc_RNA (1)...(19): siRNA sense strand
aucaagauaaggagaaaga

SEQ ID NO: 2623257 - RNA, 19 nt, Homo sapiens
  misc_RNA (1)...(19): siRNA sense strand
uggccuauuuaaagggcga

SEQ ID NO: 2623258 - RNA, 19 nt, Homo sapiens
  misc_RNA (1)...(19): siRNA sense strand
gcuauggcucagagggcaa

SEQ ID NO: 2623259 - RNA, 19 nt, Homo sapiens
  misc_RNA (1)...(19): siRNA sense strand
agaccaaagucgcucgcaa

SEQ ID NO: 2623260 - RNA, 19 nt, Homo sapiens
  misc_RNA (1)...(19): siRNA sense strand
ggaagcaguucaugggugu

SEQ ID NO: 2623261 - RNA, 19 nt, Homo sapiens
  misc_RNA (1)...(19): siRNA sense strand
aggacagcaugaacagcua

SEQ ID NO: 2623262 - RNA, 19 nt, Homo sapiens
  misc_RNA (1)...(19): siRNA sense strand
uugccaagaagaagaccaa

SEQ ID NO: 2623263 - RNA, 19 nt, Homo sapiens
  misc_RNA (1)...(19): siRNA sense strand
agacacugccagcggccua

SEQ ID NO: 2623264 - RNA, 19 nt, Homo sapiens
  misc_RNA (1)...(19): siRNA sense strand
ucaucuuaauggacagaaa

SEQ ID NO: 2623265 - RNA, 19 nt, Homo sapiens
  misc_RNA (1)...(19): siRNA sense strand
aguccaguacuuagaauaa

SEQ ID NO: 2623266 - RNA, 19 nt, Homo sapiens
  misc_RNA (1)...(19): siRNA sense strand
gugcuguauugaagauaau

SEQ ID NO: 2623267 - RNA, 19 nt, Homo sapiens
  misc_RNA (1)...(19): siRNA sense strand
gaguccaguacuuagaaua

SEQ ID NO: 2623268 - RNA, 19 nt, Homo sapiens
  misc_RNA (1)...(19): siRNA sense strand
cgaaucacaaagaacuaaa

SEQ ID NO: 2623269 - RNA, 19 nt, Homo sapiens
  misc_RNA (1)...(19): siRNA sense strand
caguauggugauccaguaa

SEQ ID NO: 2623270 - RNA, 19 nt, Homo sapiens
  misc_RNA (1)...(19): siRNA sense strand
uacagauggcugauggaaa

SEQ ID NO: 2623271 - RNA, 19 nt, Homo sapiens
  misc_RNA (1)...(19): siRNA sense strand
caucaguagcagaagagga

SEQ ID NO: 2623272 - RNA, 19 nt, Homo sapiens
  misc_RNA (1)...(19): siRNA sense strand
agcccuagauggucagaau

SEQ ID NO: 2623273 - RNA, 19 nt, Homo sapiens
  misc_RNA (1)...(19): siRNA sense strand
ucgaaaauuaccuggggaa

SEQ ID NO: 2623274 - RNA, 19 nt, Homo sapiens
  misc_RNA (1)...(19): siRNA sense strand
cggaaucgucacugaaguu

SEQ ID NO: 2623275 - RNA, 19 nt, Homo sapiens
  misc_RNA (1)...(19): siRNA sense strand
cccuagauggucagaauau

SEQ ID NO: 2623276 - RNA, 19 nt, Homo sapiens
  misc_RNA (1)...(19): siRNA sense strand
cugcuguacccuaaggauu

SEQ ID NO: 2623277 - RNA, 19 nt, Homo sapiens
  misc_RNA (1)...(19): siRNA sense strand
gggcacugugaaagcauuu

SEQ ID NO: 2623278 - RNA, 19 nt, Homo sapiens
  misc_RNA (1)...(19): siRNA sense strand
ugaucaagggcuaacaaaa

SEQ ID NO: 2623279 - RNA, 19 nt, Homo sapiens
  misc_RNA (1)...(19): siRNA sense strand
cagaagaaccagaggaaaa

SEQ ID NO: 2623280 - RNA, 19 nt, Homo sapiens
  misc_RNA (1)...(19): siRNA sense strand
gggaaaaugagcagggaaa

SEQ ID NO: 2623281 - RNA, 19 nt, Homo sapiens
  misc_RNA (1)...(19): siRNA sense strand
ggacauuugaagaagguau

SEQ ID NO: 2623282 - RNA, 19 nt, Homo sapiens
  misc_RNA (1)...(19): siRNA sense strand
uugaggaacagcaggguaa

SEQ ID NO: 2623283 - RNA, 19 nt, Homo sapiens
  misc_RNA (1)...(19): siRNA sense strand
auuaaugaagccaggaaua

SEQ ID NO: 2623284 - RNA, 19 nt, Homo sapiens
  misc_RNA (1)...(19): siRNA sense strand
agaaaauggaucagaagaa

SEQ ID NO: 2623285 - RNA, 19 nt, Homo sapiens
  misc_RNA (1)...(19): siRNA sense strand
aggcaaaccaagcuguaua

SEQ ID NO: 2623286 - RNA, 19 nt, Homo sapiens
  misc_RNA (1)...(19): siRNA sense strand
ucgaaagagacaaagagaa

SEQ ID NO: 2623287 - RNA, 19 nt, Homo sapiens
  misc_RNA (1)...(19): siRNA sense strand
cuggugauccugagacaaa

SEQ ID NO: 2623288 - RNA, 19 nt, Homo sapiens
  misc_RNA (1)...(19): siRNA sense strand
guacagaauaauuugccua

SEQ ID NO: 2623289 - RNA, 19 nt, Homo sapiens
  misc_RNA (1)...(19): siRNA sense strand
augugaaaccuuuggaaaa

SEQ ID NO: 2623290 - RNA, 19 nt, Homo sapiens
  misc_RNA (1)...(19): siRNA sense strand
uggaaaaggcacaacuaaa

SEQ ID NO: 2623291 - RNA, 19 nt, Homo sapiens
  misc_RNA (1)...(19): siRNA sense strand
caauacaauaagaggaacu

SEQ ID NO: 2623292 - RNA, 19 nt, Homo sapiens
  misc_RNA (1)...(19): siRNA sense strand
ccucaaacaaaaugaagaa

SEQ ID NO: 2623293 - RNA, 19 nt, Homo sapiens
  misc_RNA (1)...(19): siRNA sense strand
gcauugaaggagugaggca

SEQ ID NO: 2623294 - RNA, 19 nt, Homo sapiens
  misc_RNA (1)...(19): siRNA sense strand
caaagaaacccauggugca

SEQ ID NO: 2623295 - RNA, 19 nt, Homo sapiens
  misc_RNA (1)...(19): siRNA sense strand
acgaagaguaaguuuagaa

SEQ ID NO: 2623296 - RNA, 19 nt, Homo sapiens
  misc_RNA (1)...(19): siRNA sense strand
agcaaucgaaagagacaaa

SEQ ID NO: 2623297 - RNA, 19 nt, Homo sapiens
  misc_RNA (1)...(19): siRNA sense strand
gggaaaccugagagaaguu

SEQ ID NO: 2623298 - RNA, 19 nt, Homo sapiens
  misc_RNA (1)...(19): siRNA sense strand
agaacgacggcauggaaau

SEQ ID NO: 2623299 - RNA, 19 nt, Homo sapiens
  misc_RNA (1)...(19): siRNA sense strand
ggaauauaguggugaccuc

SEQ ID NO: 2623300 - RNA, 19 nt, Homo sapiens
  misc_RNA (1)...(19): siRNA sense strand
acaucaaacacuccugaaa

SEQ ID NO: 2623301 - RNA, 19 nt, Homo sapiens
  misc_RNA (1)...(19): siRNA sense strand
aagaggaacuuuugagcau

SEQ ID NO: 2623302 - RNA, 19 nt, Homo sapiens
  misc_RNA (1)...(19): siRNA sense strand
gggcagcuuuugaggaaca

SEQ ID NO: 2623303 - RNA, 19 nt, Homo sapiens
  misc_RNA (1)...(19): siRNA sense strand
ugaucguauucuugguauu

SEQ ID NO: 2623304 - RNA, 19 nt, Homo sapiens
  misc_RNA (1)...(19): siRNA sense strand
caucgggaauugaagacau

SEQ ID NO: 2623305 - RNA, 19 nt, Homo sapiens
  misc_RNA (1)...(19): siRNA sense strand
augccaaguacauggaaaa

SEQ ID NO: 2623306 - RNA, 19 nt, Homo sapiens
  misc_RNA (1)...(19): siRNA sense strand
caaucgaaagagacaaaga

SEQ ID NO: 2623307 - RNA, 19 nt, Homo sapiens
  misc_RNA (1)...(19): siRNA sense strand
auggugauuuacaggcaaa

SEQ ID NO: 2623308 - RNA, 19 nt, Homo sapiens
  misc_RNA (1)...(19): siRNA sense strand
aucagaagaaccagaggaa

SEQ ID NO: 2623309 - RNA, 19 nt, Homo sapiens
  misc_RNA (1)...(19): siRNA sense strand
acagaugauugauggugau

SEQ ID NO: 2623310 - RNA, 19 nt, Homo sapiens
  misc_RNA (1)...(19): siRNA sense strand
aauaauuugccuagagauc

SEQ ID NO: 2623311 - RNA, 19 nt, Homo sapiens
  misc_RNA (1)...(19): siRNA sense strand
uauacaucucccaaagaaa

SEQ ID NO: 2623312 - RNA, 19 nt, Homo sapiens
  misc_RNA (1)...(19): siRNA sense strand
cacagaugauugaugguga

SEQ ID NO: 2623313 - RNA, 19 nt, Homo sapiens
  misc_RNA (1)...(19): siRNA sense strand
cagcuauauaugaucguau

SEQ ID NO: 2623314 - RNA, 19 nt, Homo sapiens
  misc_RNA (1)...(19): siRNA sense strand
ggaaaagaaagcacauaca

SEQ ID NO: 2623315 - RNA, 19 nt, Homo sapiens
  misc_RNA (1)...(19): siRNA sense strand
cugagagaaguuacagcua

SEQ ID NO: 2623316 - RNA, 19 nt, Homo sapiens
  misc_RNA (1)...(19): siRNA sense strand
ccuaauaucaggaaagcca

SEQ ID NO: 2623317 - RNA, 19 nt, Homo sapiens
  misc_RNA (1)...(19): siRNA sense strand
aggaaagccagaaggacga

SEQ ID NO: 2623318 - RNA, 19 nt, Homo sapiens
  misc_RNA (1)...(19): siRNA sense strand
aggaaagccagaaggacga

SEQ ID NO: 2623319 - RNA, 19 nt, Homo sapiens
  misc_RNA (1)...(19): siRNA sense strand
aggaaagccacaaggacca

SEQ ID NO: 2623320 - RNA, 19 nt, Homo sapiens
  misc_RNA (1)...(19): siRNA sense strand
aggaaagccacaaggacca

SEQ ID NO: 2623321 - RNA, 19 nt, Homo sapiens
  misc_RNA (1)...(19): siRNA sense strand
aggaaagccagaaggacca

SEQ ID NO: 2623322 - RNA, 19 nt, Homo sapiens
  misc_RNA (1)...(19): siRNA sense strand
ccuccaggaaagccagaaa

SEQ ID NO: 2623323 - RNA, 19 nt, Homo sapiens
  misc_RNA (1)...(19): siRNA sense strand
ccuccaggaaagccagaaa

SEQ ID NO: 2623324 - RNA, 19 nt, Homo sapiens
  misc_RNA (1)...(19): siRNA sense strand
gaaggaaacaagucccgaa

SEQ ID NO: 2623325 - RNA, 19 nt, Homo sapiens
  misc_RNA (1)...(19): siRNA sense strand
cuauaaagucugugagaga

SEQ ID NO: 2623326 - RNA, 19 nt, Homo sapiens
  misc_RNA (1)...(19): siRNA sense strand
acacaaaggaagaggaagu

SEQ ID NO: 2623327 - RNA, 19 nt, Homo sapiens
  misc_RNA (1)...(19): siRNA sense strand
gggcaagagaauuagcaaa

SEQ ID NO: 2623328 - RNA, 19 nt, Homo sapiens
  misc_RNA (1)...(19): siRNA sense strand
uggaaaugauggaggaagu

SEQ ID NO: 2623329 - RNA, 19 nt, Homo sapiens
  misc_RNA (1)...(19): siRNA sense strand
gcuggaaagcuuugggaga

SEQ ID NO: 2623330 - RNA, 19 nt, Homo sapiens
  misc_RNA (1)...(19): siRNA sense strand
aauccuaggugguggccaa

SEQ ID NO: 2623331 - RNA, 19 nt, Homo sapiens
  misc_RNA (1)...(19): siRNA sense strand
caaaggaagaggaagucaa

SEQ ID NO: 2623332 - RNA, 19 nt, Homo sapiens
  misc_RNA (1)...(19): siRNA sense strand
uggaguguuugaugagaaa

SEQ ID NO: 2623333 - RNA, 19 nt, Homo sapiens
  misc_RNA (1)...(19): siRNA sense strand
gcacaaaacaauacaguca

SEQ ID NO: 2623334 - RNA, 19 nt, Homo sapiens
  misc_RNA (1)...(19): siRNA sense strand
cccaagaaccauaccguaa

SEQ ID NO: 2623335 - RNA, 19 nt, Homo sapiens
  misc_RNA (1)...(19): siRNA sense strand
agaagaucgacgagagaca

SEQ ID NO: 2623336 - RNA, 19 nt, Homo sapiens
  misc_RNA (1)...(19): siRNA sense strand
cuuucagggucauggcaua

SEQ ID NO: 2623337 - RNA, 19 nt, Homo sapiens
  misc_RNA (1)...(19): siRNA sense strand
aaggauugucaguggcaua

SEQ ID NO: 2623338 - RNA, 19 nt, Homo sapiens
  misc_RNA (1)...(19): siRNA sense strand
gggucauggcauaccaaua

SEQ ID NO: 2623339 - RNA, 19 nt, Homo sapiens
  misc_RNA (1)...(19): siRNA sense strand
agaaauacccugagaagcu

SEQ ID NO: 2623340 - RNA, 19 nt, Homo sapiens
  misc_RNA (1)...(19): siRNA sense strand
uugaauucacagagacuua

SEQ ID NO: 2623341 - RNA, 19 nt, Homo sapiens
  misc_RNA (1)...(19): siRNA sense strand
aguacaaagcagugagugu

SEQ ID NO: 2623342 - RNA, 19 nt, Homo sapiens
  misc_RNA (1)...(19): siRNA sense strand
aggaaguaacagagaagga

SEQ ID NO: 2623343 - RNA, 19 nt, Homo sapiens
  misc_RNA (1)...(19): siRNA sense strand
auaaagucugugagagauu

SEQ ID NO: 2623344 - RNA, 19 nt, Homo sapiens
  misc_RNA (1)...(19): siRNA sense strand
ccacaauggaagugcccuu

SEQ ID NO: 2623345 - RNA, 19 nt, Homo sapiens
  misc_RNA (1)...(19): siRNA sense strand
cagaauguauggaagcaca

SEQ ID NO: 2623346 - RNA, 19 nt, Homo sapiens
  misc_RNA (1)...(19): siRNA sense strand
augaagacgauuuggccaa

SEQ ID NO: 2623347 - RNA, 19 nt, Homo sapiens
  misc_RNA (1)...(19): siRNA sense strand
ggaaaguagcagcuggcuu

SEQ ID NO: 2623348 - RNA, 19 nt, Homo sapiens
  misc_RNA (1)...(19): siRNA sense strand
augaaucugcauuggauaa

SEQ ID NO: 2623349 - RNA, 19 nt, Homo sapiens
  misc_RNA (1)...(19): siRNA sense strand
aagagaaugugcagcgcuu

SEQ ID NO: 2623350 - RNA, 19 nt, Homo sapiens
  misc_RNA (1)...(19): siRNA sense strand
agagaagaucgacgagaga

SEQ ID NO: 2623351 - RNA, 19 nt, Homo sapiens
  misc_RNA (1)...(19): siRNA sense strand
ggguagagaaggccaggau

SEQ ID NO: 2623352 - RNA, 19 nt, Homo sapiens
  misc_RNA (1)...(19): siRNA sense strand
cuggaaagcuuugggagau

SEQ ID NO: 2623353 - RNA, 19 nt, Homo sapiens
  misc_RNA (1)...(19): siRNA sense strand
gguagagaaggccaggaua

SEQ ID NO: 2623354 - RNA, 19 nt, Homo sapiens
  misc_RNA (1)...(19): siRNA sense strand
cggaaaggaaugcgcuuca

SEQ ID NO: 2623355 - RNA, 19 nt, Homo sapiens
  misc_RNA (1)...(19): siRNA sense strand
ccguaauguuugacacacu

SEQ ID NO: 2623356 - RNA, 19 nt, Homo sapiens
  misc_RNA (1)...(19): siRNA sense strand
gaugaaucugcauuggaua

SEQ ID NO: 2623357 - RNA, 19 nt, Homo sapiens
  misc_RNA (1)...(19): siRNA sense strand
acguacgcccugaggaaau

SEQ ID NO: 2623358 - RNA, 19 nt, Homo sapiens
  misc_RNA (1)...(19): siRNA sense strand
gcuucaaacaucaacgaca

SEQ ID NO: 2623359 - RNA, 19 nt, Homo sapiens
  misc_RNA (1)...(19): siRNA sense strand
uggccaaacgagaagauga

SEQ ID NO: 2623360 - RNA, 19 nt, Homo sapiens
  misc_RNA (1)...(19): siRNA sense strand
aaggcaacaugaaguacaa

SEQ ID NO: 2623361 - RNA, 19 nt, Homo sapiens
  misc_RNA (1)...(19): siRNA sense strand
ggcuauaaagucugugaga

SEQ ID NO: 2623362 - RNA, 19 nt, Homo sapiens
  misc_RNA (1)...(19): siRNA sense strand
guaacagagaaggaaguaa

SEQ ID NO: 2623363 - RNA, 19 nt, Homo sapiens
  misc_RNA (1)...(19): siRNA sense strand
auggaguguuugaugagaa

SEQ ID NO: 2623364 - RNA, 19 nt, Homo sapiens
  misc_RNA (1)...(19): siRNA sense strand
acgaaaaggaaguaacaga

SEQ ID NO: 2623365 - RNA, 19 nt, Homo sapiens
  misc_RNA (1)...(19): siRNA sense strand
aagaacaggaugacggcau

SEQ ID NO: 2623366 - RNA, 19 nt, Homo sapiens
  misc_RNA (1)...(19): siRNA sense strand
gggauuggucggugcaguu

SEQ ID NO: 2623367 - RNA, 19 nt, Homo sapiens
  misc_RNA (1)...(19): siRNA sense strand
ggcaagagaauuagcaaac

SEQ ID NO: 2623368 - RNA, 19 nt, Homo sapiens
  misc_RNA (1)...(19): siRNA sense strand
caggaaauccagacugcau

SEQ ID NO: 2623369 - RNA, 19 nt, Homo sapiens
  misc_RNA (1)...(19): siRNA sense strand
guagagaaggccaggauac

SEQ ID NO: 2623370 - RNA, 19 nt, Homo sapiens
  misc_RNA (1)...(19): siRNA sense strand
ugagguacacaaaggaaga

SEQ ID NO: 2623371 - RNA, 19 nt, Homo sapiens
  misc_RNA (1)...(19): siRNA sense strand
agaguuuacaagagaagau

SEQ ID NO: 2623372 - RNA, 19 nt, Homo sapiens
  misc_RNA (1)...(19): siRNA sense strand
ugggagaugaagacgauuu

SEQ ID NO: 2623373 - RNA, 19 nt, Homo sapiens
  misc_RNA (1)...(19): siRNA sense strand
acacaaacgaaaaggaagu

SEQ ID NO: 2623374 - RNA, 19 nt, Homo sapiens
  misc_RNA (1)...(19): siRNA sense strand
aaagauacuaacaugggua

SEQ ID NO: 2623375 - RNA, 19 nt, Homo sapiens
  misc_RNA (1)...(19): siRNA sense strand
cugagcaaacucuuggaaa

SEQ ID NO: 2623376 - RNA, 19 nt, Homo sapiens
  misc_RNA (1)...(19): siRNA sense strand
aagaugaguucguggaccu

SEQ ID NO: 2623377 - RNA, 19 nt, Homo sapiens
  misc_RNA (1)...(19): siRNA sense strand
ugugagagauugccagcau

SEQ ID NO: 2623378 - RNA, 19 nt, Homo sapiens
  misc_RNA (1)...(19): siRNA sense strand
agaauguauggaagcacaa

SEQ ID NO: 2623379 - RNA, 19 nt, Homo sapiens
  misc_RNA (1)...(19): siRNA sense strand
uggaacggaccaaaggcaa

SEQ ID NO: 2623380 - RNA, 19 nt, Homo sapiens
  misc_RNA (1)...(19): siRNA sense strand
cggugcaguuugaacccaa

SEQ ID NO: 2623381 - RNA, 19 nt, Homo sapiens
  misc_RNA (1)...(19): siRNA sense strand
uggacaaaggccaacggaa

SEQ ID NO: 2623382 - RNA, 19 nt, Homo sapiens
  misc_RNA (1)...(19): siRNA sense strand
aggaaagagaagagcucaa

SEQ ID NO: 2623383 - RNA, 19 nt, Homo sapiens
  misc_RNA (1)...(19): siRNA sense strand
aguugaaggagaagacuua

SEQ ID NO: 2623384 - RNA, 19 nt, Homo sapiens
  misc_RNA (1)...(19): siRNA sense strand
ccaacagagcagcuggaaa

SEQ ID NO: 2623385 - RNA, 19 nt, Homo sapiens
  misc_RNA (1)...(19): siRNA sense strand
gagcauauccggacgacca

SEQ ID NO: 2623386 - RNA, 19 nt, Homo sapiens
  misc_RNA (1)...(19): siRNA sense strand
cuggaaaagguuaugaaaa

SEQ ID NO: 2623387 - RNA, 19 nt, Homo sapiens
  misc_RNA (1)...(19): siRNA sense strand
cugcagucuucuuggccaa

SEQ ID NO: 2623388 - RNA, 19 nt, Homo sapiens
  misc_RNA (1)...(19): siRNA sense strand
guuccaaguuccggagcaa

SEQ ID NO: 2623389 - RNA, 19 nt, Homo sapiens
  misc_RNA (1)...(19): siRNA sense strand
acaaaaugauucagaacga

SEQ ID NO: 2623390 - RNA, 19 nt, Homo sapiens
  misc_RNA (1)...(19): siRNA sense strand
ggauggugacccaaaggaa

SEQ ID NO: 2623391 - RNA, 19 nt, Homo sapiens
  misc_RNA (1)...(19): siRNA sense strand
cauuguucccagagaaaga

SEQ ID NO: 2623392 - RNA, 19 nt, Homo sapiens
  misc_RNA (1)...(19): siRNA sense strand
uggaagaccaaaagaagua

SEQ ID NO: 2623393 - RNA, 19 nt, Homo sapiens
  misc_RNA (1)...(19): siRNA sense strand
cugaggaauauaagaggau

SEQ ID NO: 2623394 - RNA, 19 nt, Homo sapiens
  misc_RNA (1)...(19): siRNA sense strand
auucaugccaguuuggaaa

SEQ ID NO: 2623395 - RNA, 19 nt, Homo sapiens
  misc_RNA (1)...(19): siRNA sense strand
gaauauaagaggaugggag

SEQ ID NO: 2623396 - RNA, 19 nt, Homo sapiens
  misc_RNA (1)...(19): siRNA sense strand
agccauuaguaaagccaau

SEQ ID NO: 2623397 - RNA, 19 nt, Homo sapiens
  misc_RNA (1)...(19): siRNA sense strand
ccaaggucgaacaaguaaa

SEQ ID NO: 2623398 - RNA, 19 nt, Homo sapiens
  misc_RNA (1)...(19): siRNA sense strand
ugucagaaggaaagagaag

SEQ ID NO: 2623399 - RNA, 19 nt, Homo sapiens
  misc_RNA (1)...(19): siRNA sense strand
agaggaugggagugccaaa

SEQ ID NO: 2623400 - RNA, 19 nt, Homo sapiens
  misc_RNA (1)...(19): siRNA sense strand
gcugaggaauauaagagga

SEQ ID NO: 2623401 - RNA, 19 nt, Homo sapiens
  misc_RNA (1)...(19): siRNA sense strand
caauggcacuaaagggcuu

SEQ ID NO: 2623402 - RNA, 19 nt, Homo sapiens
  misc_RNA (1)...(19): siRNA sense strand
gaccaaaagaaguacuuaa

SEQ ID NO: 2623403 - RNA, 19 nt, Homo sapiens
  misc_RNA (1)...(19): siRNA sense strand
cauccuaggcagucuguau

SEQ ID NO: 2623404 - RNA, 19 nt, Homo sapiens
  misc_RNA (1)...(19): siRNA sense strand
ugauacagugcaagaacuu

SEQ ID NO: 2623405 - RNA, 19 nt, Homo sapiens
  misc_RNA (1)...(19): siRNA sense strand
ucaccaaggaauuguuaca

SEQ ID NO: 2623406 - RNA, 19 nt, Homo sapiens
  misc_RNA (1)...(19): siRNA sense strand
cauugaucucgcugaggaa

SEQ ID NO: 2623407 - RNA, 19 nt, Homo sapiens
  misc_RNA (1)...(19): siRNA sense strand
agauaaggaggcugccauu

SEQ ID NO: 2623408 - RNA, 19 nt, Homo sapiens
  misc_RNA (1)...(19): siRNA sense strand
ucaaaggauucaugguuuu

SEQ ID NO: 2623409 - RNA, 19 nt, Homo sapiens
  misc_RNA (1)...(19): siRNA sense strand
gaaggaaagagaagagcuc

SEQ ID NO: 2623410 - RNA, 19 nt, Homo sapiens
  misc_RNA (1)...(19): siRNA sense strand
caguagagaaacuugcuuu

SEQ ID NO: 2623411 - RNA, 19 nt, Homo sapiens
  misc_RNA (1)...(19): siRNA sense strand
uugaucucgcugaggaaua

SEQ ID NO: 2623412 - RNA, 19 nt, Homo sapiens
  misc_RNA (1)...(19): siRNA sense strand
ccggauagcaagcaaacca

SEQ ID NO: 2623413 - RNA, 19 nt, Homo sapiens
  misc_RNA (1)...(19): siRNA sense strand
ugaaguauacagugggaaa

SEQ ID NO: 2623414 - RNA, 19 nt, Homo sapiens
  misc_RNA (1)...(19): siRNA sense strand
acuuguagauggugugaaa

SEQ ID NO: 2623415 - RNA, 19 nt, Homo sapiens
  misc_RNA (1)...(19): siRNA sense strand
acuggaaacuagaggaaaa

SEQ ID NO: 2623416 - RNA, 19 nt, Homo sapiens
  misc_RNA (1)...(19): siRNA sense strand
aaauauaaauccucggcaa

SEQ ID NO: 2623417 - RNA, 19 nt, Homo sapiens
  misc_RNA (1)...(19): siRNA sense strand
gugaaugauuugagagaac

SEQ ID NO: 2623418 - RNA, 19 nt, Homo sapiens
  misc_RNA (1)...(19): siRNA sense strand
uguagaagauggagguuca

SEQ ID NO: 2623419 - RNA, 19 nt, Homo sapiens
  misc_RNA (1)...(19): siRNA sense strand
uaaacaaggaaaugagcaa

SEQ ID NO: 2623420 - RNA, 19 nt, Homo sapiens
  misc_RNA (1)...(19): siRNA sense strand
gcagcagauuucagggauu

SEQ ID NO: 2623421 - RNA, 19 nt, Homo sapiens
  misc_RNA (1)...(19): siRNA sense strand
acugcaagauuuagaagaa

SEQ ID NO: 2623422 - RNA, 19 nt, Homo sapiens
  misc_RNA (1)...(19): siRNA sense strand
ccugaaauacagcaagaaa

SEQ ID NO: 2623423 - RNA, 19 nt, Homo sapiens
  misc_RNA (1)...(19): siRNA sense strand
ucgcaugacgcuaaagaaa

SEQ ID NO: 2623424 - RNA, 19 nt, Homo sapiens
  misc_RNA (1)...(19): siRNA sense strand
gcaggaacgaauugaagaa

SEQ ID NO: 2623425 - RNA, 19 nt, Homo sapiens
  misc_RNA (1)...(19): siRNA sense strand
cguuacacaugaagccaaa

SEQ ID NO: 2623426 - RNA, 19 nt, Homo sapiens
  misc_RNA (1)...(19): siRNA sense strand
ggucaagcaaguagaacau

SEQ ID NO: 2623427 - RNA, 19 nt, Homo sapiens
  misc_RNA (1)...(19): siRNA sense strand
ggggaaugauuuugaauau

SEQ ID NO: 2623428 - RNA, 19 nt, Homo sapiens
  misc_RNA (1)...(19): siRNA sense strand
aaggaaaugagcaaaguaa

SEQ ID NO: 2623429 - RNA, 19 nt, Homo sapiens
  misc_RNA (1)...(19): siRNA sense strand
aagaacuugaugagggaaa

SEQ ID NO: 2623430 - RNA, 19 nt, Homo sapiens
  misc_RNA (1)...(19): siRNA sense strand
caaaguaagaagacaccaa

SEQ ID NO: 2623431 - RNA, 19 nt, Homo sapiens
  misc_RNA (1)...(19): siRNA sense strand
cugaaauacagcaagaaau

SEQ ID NO: 2623432 - RNA, 19 nt, Homo sapiens
  misc_RNA (1)...(19): siRNA sense strand
ggaggaaaccuguagccua

SEQ ID NO: 2623433 - RNA, 19 nt, Homo sapiens
  misc_RNA (1)...(19): siRNA sense strand
gauuccaggugcagaguau

SEQ ID NO: 2623434 - RNA, 19 nt, Homo sapiens
  misc_RNA (1)...(19): siRNA sense strand
aauauaaauccucggcaaa

SEQ ID NO: 2623435 - RNA, 19 nt, Homo sapiens
  misc_RNA (1)...(19): siRNA sense strand
ucaaauucuuguagacaga

SEQ ID NO: 2623436 - RNA, 19 nt, Homo sapiens
  misc_RNA (1)...(19): siRNA sense strand
aggaacgaauugaagaaau

SEQ ID NO: 2623437 - RNA, 19 nt, Homo sapiens
  misc_RNA (1)...(19): siRNA sense strand
cuggugaauuugaacauaa

SEQ ID NO: 2623438 - RNA, 19 nt, Homo sapiens
  misc_RNA (1)...(19): siRNA sense strand
aguugaagauuggaagaua

SEQ ID NO: 2623439 - RNA, 19 nt, Homo sapiens
  misc_RNA (1)...(19): siRNA sense strand
uggaaauugaagugaauga

SEQ ID NO: 2623440 - RNA, 19 nt, Homo sapiens
  misc_RNA (1)...(19): siRNA sense strand
uagaagaagcauuugagaa

SEQ ID NO: 2623441 - RNA, 19 nt, Homo sapiens
  misc_RNA (1)...(19): siRNA sense strand
gcaaguagaacaugaaaau

SEQ ID NO: 2623442 - RNA, 19 nt, Homo sapiens
  misc_RNA (1)...(19): siRNA sense strand
cgucacaaccagacugcaa

SEQ ID NO: 2623443 - RNA, 19 nt, Homo sapiens
  misc_RNA (1)...(19): siRNA sense strand
cgugagaacacuugaaaau

SEQ ID NO: 2623444 - RNA, 19 nt, Homo sapiens
  misc_RNA (1)...(19): siRNA sense strand
acuggaaauugaagugaau

SEQ ID NO: 2623445 - RNA, 19 nt, Homo sapiens
  misc_RNA (1)...(19): siRNA sense strand
aguaugagucccuuggaaa

SEQ ID NO: 2623446 - RNA, 19 nt, Homo sapiens
  misc_RNA (1)...(19): siRNA sense strand
aggacaguaacguggauaa

SEQ ID NO: 2623447 - RNA, 19 nt, Homo sapiens
  misc_RNA (1)...(19): siRNA sense strand
caguaaaccagaugaaacu

SEQ ID NO: 2623448 - RNA, 19 nt, Homo sapiens
  misc_RNA (1)...(19): siRNA sense strand
aggauugacuuacuggaaa

SEQ ID NO: 2623449 - RNA, 19 nt, Homo sapiens
  misc_RNA (1)...(19): siRNA sense strand
ccuggaaguucaucaacaa

SEQ ID NO: 2623450 - RNA, 19 nt, Homo sapiens
  misc_RNA (1)...(19): siRNA sense strand
uggaaaggauuaaucgaga

SEQ ID NO: 2623451 - RNA, 19 nt, Homo sapiens
  misc_RNA (1)...(19): siRNA sense strand
guacaaaucuaaagacccu

SEQ ID NO: 2623452 - RNA, 19 nt, Homo sapiens
  misc_RNA (1)...(19): siRNA sense strand
ccucaguaaaccagaugaa

SEQ ID NO: 2623453 - RNA, 19 nt, Homo sapiens
  misc_RNA (1)...(19): siRNA sense strand
cugagaaagccaccgauaa

SEQ ID NO: 2623454 - RNA, 19 nt, Homo sapiens
  misc_RNA (1)...(19): siRNA sense strand
gcccugaaccggugccaaa

SEQ ID NO: 2623455 - RNA, 19 nt, Homo sapiens
  misc_RNA (1)...(19): siRNA sense strand
agaaaguaucugugagaac

SEQ ID NO: 2623456 - RNA, 19 nt, Homo sapiens
  misc_RNA (1)...(19): siRNA sense strand
gcacuaagcaggaugccuu

SEQ ID NO: 2623457 - RNA, 19 nt, Homo sapiens
  misc_RNA (1)...(19): siRNA sense strand
acgaaucacuuuacagaca

SEQ ID NO: 2623458 - RNA, 19 nt, Homo sapiens
  misc_RNA (1)...(19): siRNA sense strand
gccugaaacuuuagagaag

SEQ ID NO: 2623459 - RNA, 19 nt, Homo sapiens
  misc_RNA (1)...(19): siRNA sense strand
ggaagauaaccaaucaaau

SEQ ID NO: 2623460 - RNA, 19 nt, Homo sapiens
  misc_RNA (1)...(19): siRNA sense strand
acuaaaaucuagacugcaa

SEQ ID NO: 2623461 - RNA, 19 nt, Homo sapiens
  misc_RNA (1)...(19): siRNA sense strand
gaucguuuggaaaggauua

SEQ ID NO: 2623462 - RNA, 19 nt, Homo sapiens
  misc_RNA (1)...(19): siRNA sense strand
agauguggccaauuagaua

SEQ ID NO: 2623463 - RNA, 19 nt, Homo sapiens
  misc_RNA (1)...(19): siRNA sense strand
ccgguggacucuuggaaaa

SEQ ID NO: 2623464 - RNA, 19 nt, Homo sapiens
  misc_RNA (1)...(19): siRNA sense strand
aaacagaagcuggaggcaa

SEQ ID NO: 2623465 - RNA, 19 nt, Homo sapiens
  misc_RNA (1)...(19): siRNA sense strand
gaacaagcaguaaagaaaa

SEQ ID NO: 2623466 - RNA, 19 nt, Homo sapiens
  misc_RNA (1)...(19): siRNA sense strand
ccuucaaaucguaaaucaa

SEQ ID NO: 2623467 - RNA, 19 nt, Homo sapiens
  misc_RNA (1)...(19): siRNA sense strand
ugccaaauggagugaagaa

SEQ ID NO: 2623468 - RNA, 19 nt, Homo sapiens
  misc_RNA (1)...(19): siRNA sense strand
cucaguaagcaguggauau

SEQ ID NO: 2623469 - RNA, 19 nt, Homo sapiens
  misc_RNA (1)...(19): siRNA sense strand
cuaaggaguucauggagca

SEQ ID NO: 2623470 - RNA, 19 nt, Homo sapiens
  misc_RNA (1)...(19): siRNA sense strand
aagugaaugauuugagaga

SEQ ID NO: 2623471 - RNA, 19 nt, Homo sapiens
  misc_RNA (1)...(19): siRNA sense strand
gcauuaaauacaacugaga

SEQ ID NO: 2623472 - RNA, 19 nt, Homo sapiens
  misc_RNA (1)...(19): siRNA sense strand
agacagagaaagaggacac

SEQ ID NO: 2623473 - RNA, 19 nt, Homo sapiens
  misc_RNA (1)...(19): siRNA sense strand
aagaaaaggaccagauuga

SEQ ID NO: 2623474 - RNA, 19 nt, Homo sapiens
  misc_RNA (1)...(19): siRNA sense strand
gagcaaaguaagaagacac

SEQ ID NO: 2623475 - RNA, 19 nt, Homo sapiens
  misc_RNA (1)...(19): siRNA sense strand
ucgaaaugcuugaaggagu

SEQ ID NO: 2623476 - RNA, 19 nt, Homo sapiens
  misc_RNA (1)...(19): siRNA sense strand
ggaaacaaggagcaggaga

SEQ ID NO: 2623477 - RNA, 19 nt, Homo sapiens
  misc_RNA (1)...(19): siRNA sense strand
ccuuaagaagaaacugaaa

SEQ ID NO: 2623478 - RNA, 19 nt, Homo sapiens
  misc_RNA (1)...(19): siRNA sense strand
aaagauaggaugaugcaga

SEQ ID NO: 2623479 - RNA, 19 nt, Homo sapiens
  misc_RNA (1)...(19): siRNA sense strand
auguaugagacgagacuuu

SEQ ID NO: 2623480 - RNA, 19 nt, Homo sapiens
  misc_RNA (1)...(19): siRNA sense strand
cccaaaagccaacaagaaa

SEQ ID NO: 2623481 - RNA, 19 nt, Homo sapiens
  misc_RNA (1)...(19): siRNA sense strand
gcaaagaagcuuaugacag

SEQ ID NO: 2623482 - RNA, 19 nt, Homo sapiens
  misc_RNA (1)...(19): siRNA sense strand
acuccgaugcguuggacaa

SEQ ID NO: 2623483 - RNA, 19 nt, Homo sapiens
  misc_RNA (1)...(19): siRNA sense strand
ccaaaagccaacaagaaau

SEQ ID NO: 2623484 - RNA, 19 nt, Homo sapiens
  misc_RNA (1)...(19): siRNA sense strand
gaaacaaggagcaggagac

SEQ ID NO: 2623485 - RNA, 19 nt, Homo sapiens
  misc_RNA (1)...(19): siRNA sense strand
cugccauguccaaagcaaa

SEQ ID NO: 2623486 - RNA, 19 nt, Homo sapiens
  misc_RNA (1)...(19): siRNA sense strand
cgaaaugcuugaaggagug

SEQ ID NO: 2623487 - RNA, 19 nt, Homo sapiens
  misc_RNA (1)...(19): siRNA sense strand
cgcaagaagaagaagaaga

SEQ ID NO: 2623488 - RNA, 19 nt, Homo sapiens
  misc_RNA (1)...(19): siRNA sense strand
aagaagaagaagaagaagu

SEQ ID NO: 2623489 - RNA, 19 nt, Homo sapiens
  misc_RNA (1)...(19): siRNA sense strand
cugucgugcuuaugggcaa

SEQ ID NO: 2623490 - RNA, 19 nt, Homo sapiens
  misc_RNA (1)...(19): siRNA sense strand
ggucgcaagaagaagaaga

SEQ ID NO: 2623491 - RNA, 19 nt, Homo sapiens
  misc_RNA (1)...(19): siRNA sense strand
ggaaauaaccuaugcggaa

SEQ ID NO: 2623492 - RNA, 19 nt, Homo sapiens
  misc_RNA (1)...(19): siRNA sense strand
ggaaagaagaacuugggaa

SEQ ID NO: 2623493 - RNA, 19 nt, Homo sapiens
  misc_RNA (1)...(19): siRNA sense strand
acgaaaaccuaaaggcaau

SEQ ID NO: 2623494 - RNA, 19 nt, Homo sapiens
  misc_RNA (1)...(19): siRNA sense strand
gaaagaagaacuugggaag

SEQ ID NO: 2623495 - RNA, 19 nt, Homo sapiens
  misc_RNA (1)...(19): siRNA sense strand
uagcaacugaacaggaaau

SEQ ID NO: 2623496 - RNA, 19 nt, Homo sapiens
  misc_RNA (1)...(19): siRNA sense strand
agucaucauccauggguga

SEQ ID NO: 2623497 - RNA, 19 nt, Homo sapiens
  misc_RNA (1)...(19): siRNA sense strand
cggaauuaaaccuucaaaa

SEQ ID NO: 2623498 - RNA, 19 nt, Homo sapiens
  misc_RNA (1)...(19): siRNA sense strand
cugaacaggaaauaaccua

SEQ ID NO: 2623499 - RNA, 19 nt, Homo sapiens
  misc_RNA (1)...(19): siRNA sense strand
uuguugggauccugggaau

SEQ ID NO: 2623500 - RNA, 19 nt, Homo sapiens
  misc_RNA (1)...(19): siRNA sense strand
auugguaaggaaagaagaa

SEQ ID NO: 2623501 - RNA, 19 nt, Homo sapiens
  misc_RNA (1)...(19): siRNA sense strand
ggaaauaaccuaugcggaa

SEQ ID NO: 2623502 - RNA, 19 nt, Homo sapiens
  misc_RNA (1)...(19): siRNA sense strand
ggaaagaagaacuugggaa

SEQ ID NO: 2623503 - RNA, 19 nt, Homo sapiens
  misc_RNA (1)...(19): siRNA sense strand
acgaaaaccuaaaggcaau

SEQ ID NO: 2623504 - RNA, 19 nt, Homo sapiens
  misc_RNA (1)...(19): siRNA sense strand
gaaagaagaacuugggaag

SEQ ID NO: 2623505 - RNA, 19 nt, Homo sapiens
  misc_RNA (1)...(19): siRNA sense strand
uagcaacugaacaggaaau

SEQ ID NO: 2623506 - RNA, 19 nt, Homo sapiens
  misc_RNA (1)...(19): siRNA sense strand
agucaucauccauggguga

SEQ ID NO: 2623507 - RNA, 19 nt, Homo sapiens
  misc_RNA (1)...(19): siRNA sense strand
cggaauuaaaccuucaaaa

SEQ ID NO: 2623508 - RNA, 19 nt, Homo sapiens
  misc_RNA (1)...(19): siRNA sense strand
cugaacaggaaauaaccua

SEQ ID NO: 2623509 - RNA, 19 nt, Homo sapiens
  misc_RNA (1)...(19): siRNA sense strand
uuguugggauccugggaau

SEQ ID NO: 2623510 - RNA, 19 nt, Homo sapiens
  misc_RNA (1)...(19): siRNA sense strand
auugguaaggaaagaagaa

SEQ ID NO: 2623511 - RNA, 19 nt, Homo sapiens
  misc_RNA (1)...(19): siRNA sense strand
ggacagagggcuuggugga

SEQ ID NO: 2623512 - RNA, 19 nt, Homo sapiens
  misc_RNA (1)...(19): siRNA sense strand
agaacauguuugauggaga

SEQ ID NO: 2623513 - RNA, 19 nt, Homo sapiens
  misc_RNA (1)...(19): siRNA sense strand
gaggagacgcugacggaga

SEQ ID NO: 2623514 - RNA, 19 nt, Homo sapiens
  misc_RNA (1)...(19): siRNA sense strand
acaucuugcaggaguguaa

SEQ ID NO: 2623515 - RNA, 19 nt, Homo sapiens
  misc_RNA (1)...(19): siRNA sense strand
aguuaauggaugaagauga

SEQ ID NO: 2623516 - RNA, 19 nt, Homo sapiens
  misc_RNA (1)...(19): siRNA sense strand
gggagagcuucguggagga

SEQ ID NO: 2623517 - RNA, 19 nt, Homo sapiens
  misc_RNA (1)...(19): siRNA sense strand
gcuucaaugaugaggaguu

SEQ ID NO: 2623518 - RNA, 19 nt, Homo sapiens
  misc_RNA (1)...(19): siRNA sense strand
ggguugggacagagggcuu

SEQ ID NO: 2623519 - RNA, 19 nt, Homo sapiens
  misc_RNA (1)...(19): siRNA sense strand
aggaguuaauggaugaaga

SEQ ID NO: 2623520 - RNA, 19 nt, Homo sapiens
  misc_RNA (1)...(19): siRNA sense strand
cccuggacauggaggagaa

SEQ ID NO: 2623521 - RNA, 19 nt, Homo sapiens
  misc_RNA (1)...(19): siRNA sense strand
uggaggagcuggugagccu

SEQ ID NO: 2623522 - RNA, 19 nt, Homo sapiens
  misc_RNA (1)...(19): siRNA sense strand
cugaaugaagagaagguca

SEQ ID NO: 2623523 - RNA, 19 nt, Homo sapiens
  misc_RNA (1)...(19): siRNA sense strand
uggcaugagacgugggaac

SEQ ID NO: 2623524 - RNA, 19 nt, Homo sapiens
  misc_RNA (1)...(19): siRNA sense strand
gauggagaccggacggaga

SEQ ID NO: 2623525 - RNA, 19 nt, Homo sapiens
  misc_RNA (1)...(19): siRNA sense strand
augaagauaggcagucaaa

SEQ ID NO: 2623526 - RNA, 19 nt, Homo sapiens
  misc_RNA (1)...(19): siRNA sense strand
aguguaaggcucagaacca

SEQ ID NO: 2623527 - RNA, 19 nt, Homo sapiens
  misc_RNA (1)...(19): siRNA sense strand
gcuucagagaguugcucaa

SEQ ID NO: 2623528 - RNA, 19 nt, Homo sapiens
  misc_RNA (1)...(19): siRNA sense strand
gaggagaaaggcugggcca

SEQ ID NO: 2623529 - RNA, 19 nt, Homo sapiens
  misc_RNA (1)...(19): siRNA sense strand
uggacuuacugcuggacuu

SEQ ID NO: 2623530 - RNA, 19 nt, Homo sapiens
  misc_RNA (1)...(19): siRNA sense strand
agagaguugcucaaagaau

SEQ ID NO: 2623531 - RNA, 19 nt, Homo sapiens
  misc_RNA (1)...(19): siRNA sense strand
aagaagaaggacaaguuca

SEQ ID NO: 2623532 - RNA, 19 nt, Homo sapiens
  misc_RNA (1)...(19): siRNA sense strand
gaugaagauaggcagucaa

SEQ ID NO: 2623533 - RNA, 19 nt, Homo sapiens
  misc_RNA (1)...(19): siRNA sense strand
guggaggccaggaugggaa

SEQ ID NO: 2623534 - RNA, 19 nt, Homo sapiens
  misc_RNA (1)...(19): siRNA sense strand
ucaccacagcacugagcaa

SEQ ID NO: 2623535 - RNA, 19 nt, Homo sapiens
  misc_RNA (1)...(19): siRNA sense strand
ccuaaauuacagugguaua

SEQ ID NO: 2623536 - RNA, 19 nt, Homo sapiens
  misc_RNA (1)...(19): siRNA sense strand
ucaucaacacaaagagaaa

SEQ ID NO: 2623537 - RNA, 19 nt, Homo sapiens
  misc_RNA (1)...(19): siRNA sense strand
gugcuuugguacagggauu

SEQ ID NO: 2623538 - RNA, 19 nt, Homo sapiens
  misc_RNA (1)...(19): siRNA sense strand
augcaaggaacgugaagaa

SEQ ID NO: 2623539 - RNA, 19 nt, Homo sapiens
  misc_RNA (1)...(19): siRNA sense strand
gugcuuaauauaucggaaa

SEQ ID NO: 2623540 - RNA, 19 nt, Homo sapiens
  misc_RNA (1)...(19): siRNA sense strand
ggagaaaauccaagacuau

SEQ ID NO: 2623541 - RNA, 19 nt, Homo sapiens
  misc_RNA (1)...(19): siRNA sense strand
agcaaauagccauguauaa

SEQ ID NO: 2623542 - RNA, 19 nt, Homo sapiens
  misc_RNA (1)...(19): siRNA sense strand
gcugauaaaugcaaggaac

SEQ ID NO: 2623543 - RNA, 19 nt, Homo sapiens
  misc_RNA (1)...(19): siRNA sense strand
gcugaaaagcauagaggga

SEQ ID NO: 2623544 - RNA, 19 nt, Homo sapiens
  misc_RNA (1)...(19): siRNA sense strand
caguaauugaugaagauga

SEQ ID NO: 2623545 - RNA, 19 nt, Homo sapiens
  misc_RNA (1)...(19): siRNA sense strand
ugaagaugacccagugcua

SEQ ID NO: 2623546 - RNA, 19 nt, Homo sapiens
  misc_RNA (1)...(19): siRNA sense strand
uguuuaaagucuugccuga

SEQ ID NO: 2623547 - RNA, 19 nt, Homo sapiens
  misc_RNA (1)...(19): siRNA sense strand
guucauuuauggaagggau

SEQ ID NO: 2623548 - RNA, 19 nt, Homo sapiens
  misc_RNA (1)...(19): siRNA sense strand
cuucagauggaaagaccua

SEQ ID NO: 2623549 - RNA, 19 nt, Homo sapiens
  misc_RNA (1)...(19): siRNA sense strand
aagaaaagcagaagacuga

SEQ ID NO: 2623550 - RNA, 19 nt, Homo sapiens
  misc_RNA (1)...(19): siRNA sense strand
aagccauauuuaagcagaa

SEQ ID NO: 2623551 - RNA, 19 nt, Homo sapiens
  misc_RNA (1)...(19): siRNA sense strand
ugccugaggucuuggaaaa

SEQ ID NO: 2623552 - RNA, 19 nt, Homo sapiens
  misc_RNA (1)...(19): siRNA sense strand
guggaaugggucaguaauu

SEQ ID NO: 2623553 - RNA, 19 nt, Homo sapiens
  misc_RNA (1)...(19): siRNA sense strand
gggaagacauuguugaggu

SEQ ID NO: 2623554 - RNA, 19 nt, Homo sapiens
  misc_RNA (1)...(19): siRNA sense strand
uguucaggauggaauuaaa

SEQ ID NO: 2623555 - RNA, 19 nt, Homo sapiens
  misc_RNA (1)...(19): siRNA sense strand
cauuuuagucagagaaaca

SEQ ID NO: 2623556 - RNA, 19 nt, Homo sapiens
  misc_RNA (1)...(19): siRNA sense strand
ccaaaugaacacaaaggca

SEQ ID NO: 2623557 - RNA, 19 nt, Homo sapiens
  misc_RNA (1)...(19): siRNA sense strand
ggaaagaccuaugacgcau

SEQ ID NO: 2623558 - RNA, 19 nt, Homo sapiens
  misc_RNA (1)...(19): siRNA sense strand
aaguggaaugggucaguaa

SEQ ID NO: 2623559 - RNA, 19 nt, Homo sapiens
  misc_RNA (1)...(19): siRNA sense strand
ccuacacauacuugggcaa

SEQ ID NO: 2623560 - RNA, 19 nt, Homo sapiens
  misc_RNA (1)...(19): siRNA sense strand
cuaaugagacaauggaagu

SEQ ID NO: 2623561 - RNA, 19 nt, Homo sapiens
  misc_RNA (1)...(19): siRNA sense strand
acuauuacaguguggaaaa

SEQ ID NO: 2623562 - RNA, 19 nt, Homo sapiens
  misc_RNA (1)...(19): siRNA sense strand
ugaaaagcauagagggaac

SEQ ID NO: 2623563 - RNA, 19 nt, Homo sapiens
  misc_RNA (1)...(19): siRNA sense strand
aaagauaggcucaucguga

SEQ ID NO: 2623564 - RNA, 19 nt, Homo sapiens
  misc_RNA (1)...(19): siRNA sense strand
ugaugaauguggcugaaaa

SEQ ID NO: 2623565 - RNA, 19 nt, Homo sapiens
  misc_RNA (1)...(19): siRNA sense strand
agacuauuacaguguggaa

SEQ ID NO: 2623566 - RNA, 19 nt, Homo sapiens
  misc_RNA (1)...(19): siRNA sense strand
ggacauuacuauugcgugg

SEQ ID NO: 2623567 - RNA, 19 nt, Homo sapiens
  misc_RNA (1)...(19): siRNA sense strand
aagacauuguugaggucau

SEQ ID NO: 2623568 - RNA, 19 nt, Homo sapiens
  misc_RNA (1)...(19): siRNA sense strand
uauaaagaugacagcaaga

SEQ ID NO: 2623569 - RNA, 19 nt, Homo sapiens
  misc_RNA (1)...(19): siRNA sense strand
gaaacuacccguugcagga

SEQ ID NO: 2623570 - RNA, 19 nt, Homo sapiens
  misc_RNA (1)...(19): siRNA sense strand
uggaaaauccugcaaacaa

SEQ ID NO: 2623571 - RNA, 19 nt, Homo sapiens
  misc_RNA (1)...(19): siRNA sense strand
caagauugacauugugcuu

SEQ ID NO: 2623572 - RNA, 19 nt, Homo sapiens
  misc_RNA (1)...(19): siRNA sense strand
gauugugagcccagcuaau

SEQ ID NO: 2623573 - RNA, 19 nt, Homo sapiens
  misc_RNA (1)...(19): siRNA sense strand
ugcuugagcuggagaaaau

SEQ ID NO: 2623574 - RNA, 19 nt, Homo sapiens
  misc_RNA (1)...(19): siRNA sense strand
ccauauuuaagcagaaacu

SEQ ID NO: 2623575 - RNA, 19 nt, Homo sapiens
  misc_RNA (1)...(19): siRNA sense strand
gcuaaugagacaauggaag

SEQ ID NO: 2623576 - RNA, 19 nt, Homo sapiens
  misc_RNA (1)...(19): siRNA sense strand
cugaagagcaaauagccau

SEQ ID NO: 2623577 - RNA, 19 nt, Homo sapiens
  misc_RNA (1)...(19): siRNA sense strand
uggaaagaccuaugacgca

SEQ ID NO: 2623578 - RNA, 19 nt, Homo sapiens
  misc_RNA (1)...(19): siRNA sense strand
ggucuaaagaggagugcau

SEQ ID NO: 2623579 - RNA, 19 nt, Homo sapiens
  misc_RNA (1)...(19): siRNA sense strand
cugacagaacgcugggaaa

SEQ ID NO: 2623580 - RNA, 19 nt, Homo sapiens
  misc_RNA (1)...(19): siRNA sense strand
gugugaaccuagagaucca

SEQ ID NO: 2623581 - RNA, 19 nt, Homo sapiens
  misc_RNA (1)...(19): siRNA sense strand
ccucuggagaagugggaga

SEQ ID NO: 2623582 - RNA, 19 nt, Homo sapiens
  misc_RNA (1)...(19): siRNA sense strand
cuguggcauuccaggguua

SEQ ID NO: 2623583 - RNA, 19 nt, Homo sapiens
  misc_RNA (1)...(19): siRNA sense strand
cugcagugaccugggaaua

SEQ ID NO: 2623584 - RNA, 19 nt, Homo sapiens
  misc_RNA (1)...(19): siRNA sense strand
ccaggaugacaguggcauu

SEQ ID NO: 2623585 - RNA, 19 nt, Homo sapiens
  misc_RNA (1)...(19): siRNA sense strand
cuuccgagaguaugagauu

SEQ ID NO: 2623586 - RNA, 19 nt, Homo sapiens
  misc_RNA (1)...(19): siRNA sense strand
ccgggaaacuucacguuca

SEQ ID NO: 2623587 - RNA, 19 nt, Homo sapiens
  misc_RNA (1)...(19): siRNA sense strand
uggagaagugggagaguuc

SEQ ID NO: 2623588 - RNA, 19 nt, Homo sapiens
  misc_RNA (1)...(19): siRNA sense strand
gaauauuugucaaugguac

SEQ ID NO: 2623589 - RNA, 19 nt, Homo sapiens
  misc_RNA (1)...(19): siRNA sense strand
gaauauuugucaaugguac

SEQ ID NO: 2623590 - RNA, 19 nt, Homo sapiens
  misc_RNA (1)...(19): siRNA sense strand
ugacugaggugguccgcaa

SEQ ID NO: 2623591 - RNA, 19 nt, Homo sapiens
  misc_RNA (1)...(19): siRNA sense strand
cgacgaucauggugggcca

SEQ ID NO: 2623592 - RNA, 19 nt, Homo sapiens
  misc_RNA (1)...(19): siRNA sense strand
auaaugaaauggacgacuu

SEQ ID NO: 2623593 - RNA, 19 nt, Homo sapiens
  misc_RNA (1)...(19): siRNA sense strand
ucaacauccucaaagggua

SEQ ID NO: 2623594 - RNA, 19 nt, Homo sapiens
  misc_RNA (1)...(19): siRNA sense strand
agaagaaguuaguggugcu

SEQ ID NO: 2623595 - RNA, 19 nt, Homo sapiens
  misc_RNA (1)...(19): siRNA sense strand
cagcaucaccaacgaguuu

SEQ ID NO: 2623596 - RNA, 19 nt, Homo sapiens
  misc_RNA (1)...(19): siRNA sense strand
ucaauaaugaaauggacga

SEQ ID NO: 2623597 - RNA, 19 nt, Homo sapiens
  misc_RNA (1)...(19): siRNA sense strand
gcuaugagcuggcacacca

SEQ ID NO: 2623598 - RNA, 19 nt, Homo sapiens
  misc_RNA (1)...(19): siRNA sense strand
ggaccgucaucgagcagca

SEQ ID NO: 2623599 - RNA, 19 nt, Homo sapiens
  misc_RNA (1)...(19): siRNA sense strand
ccuccaaggaaccugacaa

SEQ ID NO: 2623600 - RNA, 19 nt, Homo sapiens
  misc_RNA (1)...(19): siRNA sense strand
gcccagauugugaaggaca

SEQ ID NO: 2623601 - RNA, 19 nt, Homo sapiens
  misc_RNA (1)...(19): siRNA sense strand
acaaccagcuucugcccaa

SEQ ID NO: 2623602 - RNA, 19 nt, Homo sapiens
  misc_RNA (1)...(19): siRNA sense strand
acgacaguggagagaaaca

SEQ ID NO: 2623603 - RNA, 19 nt, Homo sapiens
  misc_RNA (1)...(19): siRNA sense strand
ugacugaggugguccgcaa

SEQ ID NO: 2623604 - RNA, 19 nt, Homo sapiens
  misc_RNA (1)...(19): siRNA sense strand
cgacgaucauggugggcca

SEQ ID NO: 2623605 - RNA, 19 nt, Homo sapiens
  misc_RNA (1)...(19): siRNA sense strand
auaaugaaauggacgacuu

SEQ ID NO: 2623606 - RNA, 19 nt, Homo sapiens
  misc_RNA (1)...(19): siRNA sense strand
ucaacauccucaaagggua

SEQ ID NO: 2623607 - RNA, 19 nt, Homo sapiens
  misc_RNA (1)...(19): siRNA sense strand
agaagaaguuaguggugcu

SEQ ID NO: 2623608 - RNA, 19 nt, Homo sapiens
  misc_RNA (1)...(19): siRNA sense strand
cagcaucaccaacgaguuu

SEQ ID NO: 2623609 - RNA, 19 nt, Homo sapiens
  misc_RNA (1)...(19): siRNA sense strand
ucaauaaugaaauggacga

SEQ ID NO: 2623610 - RNA, 19 nt, Homo sapiens
  misc_RNA (1)...(19): siRNA sense strand
gcuaugagcuggcacacca

SEQ ID NO: 2623611 - RNA, 19 nt, Homo sapiens
  misc_RNA (1)...(19): siRNA sense strand
ggaccgucaucgagcagca

SEQ ID NO: 2623612 - RNA, 19 nt, Homo sapiens
  misc_RNA (1)...(19): siRNA sense strand
ccuccaaggaaccugacaa

SEQ ID NO: 2623613 - RNA, 19 nt, Homo sapiens
  misc_RNA (1)...(19): siRNA sense strand
gcccagauugugaaggaca

SEQ ID NO: 2623614 - RNA, 19 nt, Homo sapiens
  misc_RNA (1)...(19): siRNA sense strand
acaaccagcuucugcccaa

SEQ ID NO: 2623615 - RNA, 19 nt, Homo sapiens
  misc_RNA (1)...(19): siRNA sense strand
acgacaguggagagaaaca

SEQ ID NO: 2623616 - RNA, 19 nt, Homo sapiens
  misc_RNA (1)...(19): siRNA sense strand
ugacugaggugguccgcaa

SEQ ID NO: 2623617 - RNA, 19 nt, Homo sapiens
  misc_RNA (1)...(19): siRNA sense strand
cgacgaucauggugggcca

SEQ ID NO: 2623618 - RNA, 19 nt, Homo sapiens
  misc_RNA (1)...(19): siRNA sense strand
auaaugaaauggacgacuu

SEQ ID NO: 2623619 - RNA, 19 nt, Homo sapiens
  misc_RNA (1)...(19): siRNA sense strand
ucaacauccucaaagggua

SEQ ID NO: 2623620 - RNA, 19 nt, Homo sapiens
  misc_RNA (1)...(19): siRNA sense strand
agaagaaguuaguggugcu

SEQ ID NO: 2623621 - RNA, 19 nt, Homo sapiens
  misc_RNA (1)...(19): siRNA sense strand
cagcaucaccaacgaguuu

SEQ ID NO: 2623622 - RNA, 19 nt, Homo sapiens
  misc_RNA (1)...(19): siRNA sense strand
ucaauaaugaaauggacga

SEQ ID NO: 2623623 - RNA, 19 nt, Homo sapiens
  misc_RNA (1)...(19): siRNA sense strand
gcuaugagcuggcacacca

SEQ ID NO: 2623624 - RNA, 19 nt, Homo sapiens
  misc_RNA (1)...(19): siRNA sense strand
ggaccgucaucgagcagca

SEQ ID NO: 2623625 - RNA, 19 nt, Homo sapiens
  misc_RNA (1)...(19): siRNA sense strand
ccuccaaggaaccugacaa

SEQ ID NO: 2623626 - RNA, 19 nt, Homo sapiens
  misc_RNA (1)...(19): siRNA sense strand
gcccagauugugaaggaca

SEQ ID NO: 2623627 - RNA, 19 nt, Homo sapiens
  misc_RNA (1)...(19): siRNA sense strand
acaaccagcuucugcccaa

SEQ ID NO: 2623628 - RNA, 19 nt, Homo sapiens
  misc_RNA (1)...(19): siRNA sense strand
acgacaguggagagaaaca

SEQ ID NO: 2623629 - RNA, 19 nt, Homo sapiens
  misc_RNA (1)...(19): siRNA sense strand
uggacgaguuggaggacga

SEQ ID NO: 2623630 - RNA, 19 nt, Homo sapiens
  misc_RNA (1)...(19): siRNA sense strand
aguuggaggacgaggagga

SEQ ID NO: 2623631 - RNA, 19 nt, Homo sapiens
  misc_RNA (1)...(19): siRNA sense strand
uggacgaguuggaggacga

SEQ ID NO: 2623632 - RNA, 19 nt, Homo sapiens
  misc_RNA (1)...(19): siRNA sense strand
aguuggaggacgaggagga

SEQ ID NO: 2623633 - RNA, 19 nt, Homo sapiens
  misc_RNA (1)...(19): siRNA sense strand
agauauaacugguagagca

SEQ ID NO: 2623634 - RNA, 19 nt, Homo sapiens
  misc_RNA (1)...(19): siRNA sense strand
uggcagagugagaugggaa

SEQ ID NO: 2623635 - RNA, 19 nt, Homo sapiens
  misc_RNA (1)...(19): siRNA sense strand
agaaauaaccagagaaaag

SEQ ID NO: 2623636 - RNA, 19 nt, Homo sapiens
  misc_RNA (1)...(19): siRNA sense strand
ccuuugaaacacuggacua

SEQ ID NO: 2623637 - RNA, 19 nt, Homo sapiens
  misc_RNA (1)...(19): siRNA sense strand
cauuguuacaugaggugaa

SEQ ID NO: 2623638 - RNA, 19 nt, Homo sapiens
  misc_RNA (1)...(19): siRNA sense strand
caauaugaaucaaagccuu

SEQ ID NO: 2623639 - RNA, 19 nt, Homo sapiens
  misc_RNA (1)...(19): siRNA sense strand
aagaacugguggaugaaaa

SEQ ID NO: 2623640 - RNA, 19 nt, Homo sapiens
  misc_RNA (1)...(19): siRNA sense strand
cagugaagacgaugaaaau

SEQ ID NO: 2623641 - RNA, 19 nt, Homo sapiens
  misc_RNA (1)...(19): siRNA sense strand
aagccuuacccuugaacua

SEQ ID NO: 2623642 - RNA, 19 nt, Homo sapiens
  misc_RNA (1)...(19): siRNA sense strand
acacaaugaaacaagcaau

SEQ ID NO: 2623643 - RNA, 19 nt, Homo sapiens
  misc_RNA (1)...(19): siRNA sense strand
aagagaagagaaagcucaa

SEQ ID NO: 2623644 - RNA, 19 nt, Homo sapiens
  misc_RNA (1)...(19): siRNA sense strand
ggcauuuguccaaggaaga

SEQ ID NO: 2623645 - RNA, 19 nt, Homo sapiens
  misc_RNA (1)...(19): siRNA sense strand
acaagcaaugaaagaacua

SEQ ID NO: 2623646 - RNA, 19 nt, Homo sapiens
  misc_RNA (1)...(19): siRNA sense strand
gagugagaugggaagaaga

SEQ ID NO: 2623647 - RNA, 19 nt, Homo sapiens
  misc_RNA (1)...(19): siRNA sense strand
acagugaagacgaugaaaa

SEQ ID NO: 2623648 - RNA, 19 nt, Homo sapiens
  misc_RNA (1)...(19): siRNA sense strand
ggucccggucugagaguga

SEQ ID NO: 2623649 - RNA, 19 nt, Homo sapiens
  misc_RNA (1)...(19): siRNA sense strand
uguagaacucagucgauau

SEQ ID NO: 2623650 - RNA, 19 nt, Homo sapiens
  misc_RNA (1)...(19): siRNA sense strand
cauccagcggcaaggaauu

SEQ ID NO: 2623651 - RNA, 19 nt, Homo sapiens
  misc_RNA (1)...(19): siRNA sense strand
agagcacgucaaagauaua

SEQ ID NO: 2623652 - RNA, 19 nt, Homo sapiens
  misc_RNA (1)...(19): siRNA sense strand
gagaaagcucaaagaggcu

SEQ ID NO: 2623653 - RNA, 19 nt, Homo sapiens
  misc_RNA (1)...(19): siRNA sense strand
uguccaaggaagagguaac

SEQ ID NO: 2623654 - RNA, 19 nt, Homo sapiens
  misc_RNA (1)...(19): siRNA sense strand
acguaaaccuuguggagau

SEQ ID NO: 2623655 - RNA, 19 nt, Homo sapiens
  misc_RNA (1)...(19): siRNA sense strand
cauggaaaauggagaaaau

SEQ ID NO: 2623656 - RNA, 19 nt, Homo sapiens
  misc_RNA (1)...(19): siRNA sense strand
gaucuuaagcaaaggagga

SEQ ID NO: 2623657 - RNA, 19 nt, Homo sapiens
  misc_RNA (1)...(19): siRNA sense strand
acagaauacggcaggagaa

SEQ ID NO: 2623658 - RNA, 19 nt, Homo sapiens
  misc_RNA (1)...(19): siRNA sense strand
ggaaaauggagaaaaugaa

SEQ ID NO: 2623659 - RNA, 19 nt, Homo sapiens
  misc_RNA (1)...(19): siRNA sense strand
gcuguauuaaggagacaaa

SEQ ID NO: 2623660 - RNA, 19 nt, Homo sapiens
  misc_RNA (1)...(19): siRNA sense strand
uggagaaaaugaaggaaca

SEQ ID NO: 2623661 - RNA, 19 nt, Homo sapiens
  misc_RNA (1)...(19): siRNA sense strand
cuucugaggcugagcugaa

SEQ ID NO: 2623662 - RNA, 19 nt, Homo sapiens
  misc_RNA (1)...(19): siRNA sense strand
gauucagaucuuaagcaaa

SEQ ID NO: 2623663 - RNA, 19 nt, Homo sapiens
  misc_RNA (1)...(19): siRNA sense strand
cugaauuacuugaggacug

SEQ ID NO: 2623664 - RNA, 19 nt, Homo sapiens
  misc_RNA (1)...(19): siRNA sense strand
cuugaagaagccauagaaa

SEQ ID NO: 2623665 - RNA, 19 nt, Homo sapiens
  misc_RNA (1)...(19): siRNA sense strand
ccgaagaacaauuaaaaga

SEQ ID NO: 2623666 - RNA, 19 nt, Homo sapiens
  misc_RNA (1)...(19): siRNA sense strand
cagaauacggcaggagaau

SEQ ID NO: 2623667 - RNA, 19 nt, Homo sapiens
  misc_RNA (1)...(19): siRNA sense strand
ccaagcaaaagaagaguua

SEQ ID NO: 2623668 - RNA, 19 nt, Homo sapiens
  misc_RNA (1)...(19): siRNA sense strand
aggaagaacuugaagaagc

SEQ ID NO: 2623669 - RNA, 19 nt, Homo sapiens
  misc_RNA (1)...(19): siRNA sense strand
ccaaagaagcaaaucucau

SEQ ID NO: 2623670 - RNA, 19 nt, Homo sapiens
  misc_RNA (1)...(19): siRNA sense strand
cguuauaagcaccgcuaca

SEQ ID NO: 2623671 - RNA, 19 nt, Homo sapiens
  misc_RNA (1)...(19): siRNA sense strand
agaacuugaagaagccaua

SEQ ID NO: 2623672 - RNA, 19 nt, Homo sapiens
  misc_RNA (1)...(19): siRNA sense strand
ccugauacccaaagaagca

SEQ ID NO: 2623673 - RNA, 19 nt, Homo sapiens
  misc_RNA (1)...(19): siRNA sense strand
gauagauuauuuugggcua

SEQ ID NO: 2623674 - RNA, 19 nt, Homo sapiens
  misc_RNA (1)...(19): siRNA sense strand
aagcaaaggaggaggucac

SEQ ID NO: 2623675 - RNA, 19 nt, Homo sapiens
  misc_RNA (1)...(19): siRNA sense strand
cuggaagugcaguguggaa

SEQ ID NO: 2623676 - RNA, 19 nt, Homo sapiens
  misc_RNA (1)...(19): siRNA sense strand
gaagaguuauggaagcaca

SEQ ID NO: 2623677 - RNA, 19 nt, Homo sapiens
  misc_RNA (1)...(19): siRNA sense strand
ugcugaagauccauguaaa

SEQ ID NO: 2623678 - RNA, 19 nt, Homo sapiens
  misc_RNA (1)...(19): siRNA sense strand
gacaagaagucgaagcaag

SEQ ID NO: 2623679 - RNA, 19 nt, Homo sapiens
  misc_RNA (1)...(19): siRNA sense strand
auauaaacauacugcagga

SEQ ID NO: 2623680 - RNA, 19 nt, Homo sapiens
  misc_RNA (1)...(19): siRNA sense strand
gcuuggagauuaugaccca

SEQ ID NO: 2623681 - RNA, 19 nt, Homo sapiens
  misc_RNA (1)...(19): siRNA sense strand
agaaggaagaacuugaaga

SEQ ID NO: 2623682 - RNA, 19 nt, Homo sapiens
  misc_RNA (1)...(19): siRNA sense strand
cccuaagcgaauagcacaa

SEQ ID NO: 2623683 - RNA, 19 nt, Homo sapiens
  misc_RNA (1)...(19): siRNA sense strand
aggagaaugauaugguuga

SEQ ID NO: 2623684 - RNA, 19 nt, Homo sapiens
  misc_RNA (1)...(19): siRNA sense strand
cugccaaaucccuggagau

SEQ ID NO: 2623685 - RNA, 19 nt, Homo sapiens
  misc_RNA (1)...(19): siRNA sense strand
aaacaccaucaguaggaua

SEQ ID NO: 2623686 - RNA, 19 nt, Homo sapiens
  misc_RNA (1)...(19): siRNA sense strand
agugguagugaaucagaaa

SEQ ID NO: 2623687 - RNA, 19 nt, Homo sapiens
  misc_RNA (1)...(19): siRNA sense strand
ccauguaaacuuaaagaag

SEQ ID NO: 2623688 - RNA, 19 nt, Homo sapiens
  misc_RNA (1)...(19): siRNA sense strand
aaacauggaaaauggagaa

SEQ ID NO: 2623689 - RNA, 19 nt, Homo sapiens
  misc_RNA (1)...(19): siRNA sense strand
cggaagaauuuuacugcga

SEQ ID NO: 2623690 - RNA, 19 nt, Homo sapiens
  misc_RNA (1)...(19): siRNA sense strand
uggaaaauggagaaaauga

SEQ ID NO: 2623691 - RNA, 19 nt, Homo sapiens
  misc_RNA (1)...(19): siRNA sense strand
uuaaggagacaaaaggaaa

SEQ ID NO: 2623692 - RNA, 19 nt, Homo sapiens
  misc_RNA (1)...(19): siRNA sense strand
uaaggagacaaaaggaaaa

SEQ ID NO: 2623693 - RNA, 19 nt, Homo sapiens
  misc_RNA (1)...(19): siRNA sense strand
aagaagaguuauggaagca

SEQ ID NO: 2623694 - RNA, 19 nt, Homo sapiens
  misc_RNA (1)...(19): siRNA sense strand
agaaauaaccagauaucag

SEQ ID NO: 2623695 - RNA, 19 nt, Homo sapiens
  misc_RNA (1)...(19): siRNA sense strand
ggaagcuguauuaaggaga

SEQ ID NO: 2623696 - RNA, 19 nt, Homo sapiens
  misc_RNA (1)...(19): siRNA sense strand
ccacauaucuugaaggaga

SEQ ID NO: 2623697 - RNA, 19 nt, Homo sapiens
  misc_RNA (1)...(19): siRNA sense strand
gguacaggaaagaaagaaa

SEQ ID NO: 2623698 - RNA, 19 nt, Homo sapiens
  misc_RNA (1)...(19): siRNA sense strand
cuguaaagucagacaacaa

SEQ ID NO: 2623699 - RNA, 19 nt, Homo sapiens
  misc_RNA (1)...(19): siRNA sense strand
ggaugaaaucagugaccau

SEQ ID NO: 2623700 - RNA, 19 nt, Homo sapiens
  misc_RNA (1)...(19): siRNA sense strand
acagaaagggcaaagacaa

SEQ ID NO: 2623701 - RNA, 19 nt, Homo sapiens
  misc_RNA (1)...(19): siRNA sense strand
gaauagugacagugguaca

SEQ ID NO: 2623702 - RNA, 19 nt, Homo sapiens
  misc_RNA (1)...(19): siRNA sense strand
cagugguacaggaaagaaa

SEQ ID NO: 2623703 - RNA, 19 nt, Homo sapiens
  misc_RNA (1)...(19): siRNA sense strand
acaaagaaaucguugcuga

SEQ ID NO: 2623704 - RNA, 19 nt, Homo sapiens
  misc_RNA (1)...(19): siRNA sense strand
agaacuugccaaagagauu

SEQ ID NO: 2623705 - RNA, 19 nt, Homo sapiens
  misc_RNA (1)...(19): siRNA sense strand
agaagauacaacugaggaa

SEQ ID NO: 2623706 - RNA, 19 nt, Homo sapiens
  misc_RNA (1)...(19): siRNA sense strand
ggaaagaacaauugaggag

SEQ ID NO: 2623707 - RNA, 19 nt, Homo sapiens
  misc_RNA (1)...(19): siRNA sense strand
aagaugaagaugagaacau

SEQ ID NO: 2623708 - RNA, 19 nt, Homo sapiens
  misc_RNA (1)...(19): siRNA sense strand
gguugagggcaaaggcaau

SEQ ID NO: 2623709 - RNA, 19 nt, Homo sapiens
  misc_RNA (1)...(19): siRNA sense strand
cuccaaagaacuugccaaa

SEQ ID NO: 2623710 - RNA, 19 nt, Homo sapiens
  misc_RNA (1)...(19): siRNA sense strand
aagaagaugaagaugagaa

SEQ ID NO: 2623711 - RNA, 19 nt, Homo sapiens
  misc_RNA (1)...(19): siRNA sense strand
agucagacaacaaggauga

SEQ ID NO: 2623712 - RNA, 19 nt, Homo sapiens
  misc_RNA (1)...(19): siRNA sense strand
caucauaaacucugcacau

SEQ ID NO: 2623713 - RNA, 19 nt, Homo sapiens
  misc_RNA (1)...(19): siRNA sense strand
caauggaagaagaggagga

SEQ ID NO: 2623714 - RNA, 19 nt, Homo sapiens
  misc_RNA (1)...(19): siRNA sense strand
uggcgaagaagaagaugaa

SEQ ID NO: 2623715 - RNA, 19 nt, Homo sapiens
  misc_RNA (1)...(19): siRNA sense strand
ccgaaaguugagacuguaa

SEQ ID NO: 2623716 - RNA, 19 nt, Homo sapiens
  misc_RNA (1)...(19): siRNA sense strand
aagacauguuggauggauu

SEQ ID NO: 2623717 - RNA, 19 nt, Homo sapiens
  misc_RNA (1)...(19): siRNA sense strand
cggaaaaggccucuaagaa

SEQ ID NO: 2623718 - RNA, 19 nt, Homo sapiens
  misc_RNA (1)...(19): siRNA sense strand
agggcaaagacaaggaaaa

SEQ ID NO: 2623719 - RNA, 19 nt, Homo sapiens
  misc_RNA (1)...(19): siRNA sense strand
ugacagugguacaggaaag

SEQ ID NO: 2623720 - RNA, 19 nt, Homo sapiens
  misc_RNA (1)...(19): siRNA sense strand
gaugauuuggaaagaacaa

SEQ ID NO: 2623721 - RNA, 19 nt, Homo sapiens
  misc_RNA (1)...(19): siRNA sense strand
gaacaauugaggagagggu

SEQ ID NO: 2623722 - RNA, 19 nt, Homo sapiens
  misc_RNA (1)...(19): siRNA sense strand
acaacaaggaugacgacau

SEQ ID NO: 2623723 - RNA, 19 nt, Homo sapiens
  misc_RNA (1)...(19): siRNA sense strand
guacaggaaagaaagaaaa

SEQ ID NO: 2623724 - RNA, 19 nt, Homo sapiens
  misc_RNA (1)...(19): siRNA sense strand
acaauugaggagaggguca

SEQ ID NO: 2623725 - RNA, 19 nt, Homo sapiens
  misc_RNA (1)...(19): siRNA sense strand
gggcaaagacaaggaaaau

SEQ ID NO: 2623726 - RNA, 19 nt, Homo sapiens
  misc_RNA (1)...(19): siRNA sense strand
auguuaagaaugaccguua

SEQ ID NO: 2623727 - RNA, 19 nt, Homo sapiens
  misc_RNA (1)...(19): siRNA sense strand
cagaaagggcaaagacaag

SEQ ID NO: 2623728 - RNA, 19 nt, Homo sapiens
  misc_RNA (1)...(19): siRNA sense strand
agaaagacuggauguaaaa

SEQ ID NO: 2623729 - RNA, 19 nt, Homo sapiens
  misc_RNA (1)...(19): siRNA sense strand
ccaccugagaauagugaca

SEQ ID NO: 2623730 - RNA, 19 nt, Homo sapiens
  misc_RNA (1)...(19): siRNA sense strand
aaugagaagauuagagaac

SEQ ID NO: 2623731 - RNA, 19 nt, Homo sapiens
  misc_RNA (1)...(19): siRNA sense strand
agguugagggcaaaggcaa

SEQ ID NO: 2623732 - RNA, 19 nt, Homo sapiens
  misc_RNA (1)...(19): siRNA sense strand
cgaaaguugagacuguaaa

SEQ ID NO: 2623733 - RNA, 19 nt, Homo sapiens
  misc_RNA (1)...(19): siRNA sense strand
aggcaauggaaucaagaca

SEQ ID NO: 2623734 - RNA, 19 nt, Homo sapiens
  misc_RNA (1)...(19): siRNA sense strand
aauccaaagaagcaaacaa

SEQ ID NO: 2623735 - RNA, 19 nt, Homo sapiens
  misc_RNA (1)...(19): siRNA sense strand
aagaaauacaggcgccauu

SEQ ID NO: 2623736 - RNA, 19 nt, Homo sapiens
  misc_RNA (1)...(19): siRNA sense strand
gugucaaagcagaaccauu

SEQ ID NO: 2623737 - RNA, 19 nt, Homo sapiens
  misc_RNA (1)...(19): siRNA sense strand
agacaguuauagucaacau

SEQ ID NO: 2623738 - RNA, 19 nt, Homo sapiens
  misc_RNA (1)...(19): siRNA sense strand
auacaauggaagaagagga

SEQ ID NO: 2623739 - RNA, 19 nt, Homo sapiens
  misc_RNA (1)...(19): siRNA sense strand
ugagaagauuagagaacag

SEQ ID NO: 2623740 - RNA, 19 nt, Homo sapiens
  misc_RNA (1)...(19): siRNA sense strand
agaacauugagguggugua

SEQ ID NO: 2623741 - RNA, 19 nt, Homo sapiens
  misc_RNA (1)...(19): siRNA sense strand
gguaauucuuguaaagccu

SEQ ID NO: 2623742 - RNA, 19 nt, Homo sapiens
  misc_RNA (1)...(19): siRNA sense strand
augugagaauccugaaaca

SEQ ID NO: 2623743 - RNA, 19 nt, Homo sapiens
  misc_RNA (1)...(19): siRNA sense strand
gugaugauuuggaaagaac

SEQ ID NO: 2623744 - RNA, 19 nt, Homo sapiens
  misc_RNA (1)...(19): siRNA sense strand
aaaagaaagaagagggugu

SEQ ID NO: 2623745 - RNA, 19 nt, Homo sapiens
  misc_RNA (1)...(19): siRNA sense strand
aagaaagaagaggguguua

SEQ ID NO: 2623746 - RNA, 19 nt, Homo sapiens
  misc_RNA (1)...(19): siRNA sense strand
uagaagaagaggucaucau

SEQ ID NO: 2623747 - RNA, 19 nt, Homo sapiens
  misc_RNA (1)...(19): siRNA sense strand
gauucaucugacaaagaaa

SEQ ID NO: 2623748 - RNA, 19 nt, Homo sapiens
  misc_RNA (1)...(19): siRNA sense strand
cagaccaguucuaucgcua

SEQ ID NO: 2623749 - RNA, 19 nt, Homo sapiens
  misc_RNA (1)...(19): siRNA sense strand
cuaagaaauaugucuccaa

SEQ ID NO: 2623750 - RNA, 19 nt, Homo sapiens
  misc_RNA (1)...(19): siRNA sense strand
aaucagugaccaugcaaaa

SEQ ID NO: 2623751 - RNA, 19 nt, Homo sapiens
  misc_RNA (1)...(19): siRNA sense strand
uggaaucaagacaguuaua

SEQ ID NO: 2623752 - RNA, 19 nt, Homo sapiens
  misc_RNA (1)...(19): siRNA sense strand
aucaucagcuggucggaaa

SEQ ID NO: 2623753 - RNA, 19 nt, Homo sapiens
  misc_RNA (1)...(19): siRNA sense strand
cagugaugauuuggaaaga

SEQ ID NO: 2623754 - RNA, 19 nt, Homo sapiens
  misc_RNA (1)...(19): siRNA sense strand
agaaagaagaggguguuau

SEQ ID NO: 2623755 - RNA, 19 nt, Homo sapiens
  misc_RNA (1)...(19): siRNA sense strand
guggcgaagaagaagauga

SEQ ID NO: 2623756 - RNA, 19 nt, Homo sapiens
  misc_RNA (1)...(19): siRNA sense strand
ccacauaucuugaaggaga

SEQ ID NO: 2623757 - RNA, 19 nt, Homo sapiens
  misc_RNA (1)...(19): siRNA sense strand
gguacaggaaagaaagaaa

SEQ ID NO: 2623758 - RNA, 19 nt, Homo sapiens
  misc_RNA (1)...(19): siRNA sense strand
cuguaaagucagacaacaa

SEQ ID NO: 2623759 - RNA, 19 nt, Homo sapiens
  misc_RNA (1)...(19): siRNA sense strand
ggaugaaaucagugaccau

SEQ ID NO: 2623760 - RNA, 19 nt, Homo sapiens
  misc_RNA (1)...(19): siRNA sense strand
acagaaagggcaaagacaa

SEQ ID NO: 2623761 - RNA, 19 nt, Homo sapiens
  misc_RNA (1)...(19): siRNA sense strand
gaauagugacagugguaca

SEQ ID NO: 2623762 - RNA, 19 nt, Homo sapiens
  misc_RNA (1)...(19): siRNA sense strand
cagugguacaggaaagaaa

SEQ ID NO: 2623763 - RNA, 19 nt, Homo sapiens
  misc_RNA (1)...(19): siRNA sense strand
acaaagaaaucguugcuga

SEQ ID NO: 2623764 - RNA, 19 nt, Homo sapiens
  misc_RNA (1)...(19): siRNA sense strand
agaacuugccaaagagauu

SEQ ID NO: 2623765 - RNA, 19 nt, Homo sapiens
  misc_RNA (1)...(19): siRNA sense strand
agaagauacaacugaggaa

SEQ ID NO: 2623766 - RNA, 19 nt, Homo sapiens
  misc_RNA (1)...(19): siRNA sense strand
ggaaagaacaauugaggag

SEQ ID NO: 2623767 - RNA, 19 nt, Homo sapiens
  misc_RNA (1)...(19): siRNA sense strand
aagaugaagaugagaacau

SEQ ID NO: 2623768 - RNA, 19 nt, Homo sapiens
  misc_RNA (1)...(19): siRNA sense strand
gguugagggcaaaggcaau

SEQ ID NO: 2623769 - RNA, 19 nt, Homo sapiens
  misc_RNA (1)...(19): siRNA sense strand
cuccaaagaacuugccaaa

SEQ ID NO: 2623770 - RNA, 19 nt, Homo sapiens
  misc_RNA (1)...(19): siRNA sense strand
aagaagaugaagaugagaa

SEQ ID NO: 2623771 - RNA, 19 nt, Homo sapiens
  misc_RNA (1)...(19): siRNA sense strand
agucagacaacaaggauga

SEQ ID NO: 2623772 - RNA, 19 nt, Homo sapiens
  misc_RNA (1)...(19): siRNA sense strand
caucauaaacucugcacau

SEQ ID NO: 2623773 - RNA, 19 nt, Homo sapiens
  misc_RNA (1)...(19): siRNA sense strand
caauggaagaagaggagga

SEQ ID NO: 2623774 - RNA, 19 nt, Homo sapiens
  misc_RNA (1)...(19): siRNA sense strand
uggcgaagaagaagaugaa

SEQ ID NO: 2623775 - RNA, 19 nt, Homo sapiens
  misc_RNA (1)...(19): siRNA sense strand
ccgaaaguugagacuguaa

SEQ ID NO: 2623776 - RNA, 19 nt, Homo sapiens
  misc_RNA (1)...(19): siRNA sense strand
aagacauguuggauggauu

SEQ ID NO: 2623777 - RNA, 19 nt, Homo sapiens
  misc_RNA (1)...(19): siRNA sense strand
cggaaaaggccucuaagaa

SEQ ID NO: 2623778 - RNA, 19 nt, Homo sapiens
  misc_RNA (1)...(19): siRNA sense strand
agggcaaagacaaggaaaa

SEQ ID NO: 2623779 - RNA, 19 nt, Homo sapiens
  misc_RNA (1)...(19): siRNA sense strand
ugacagugguacaggaaag

SEQ ID NO: 2623780 - RNA, 19 nt, Homo sapiens
  misc_RNA (1)...(19): siRNA sense strand
gaugauuuggaaagaacaa

SEQ ID NO: 2623781 - RNA, 19 nt, Homo sapiens
  misc_RNA (1)...(19): siRNA sense strand
gaacaauugaggagagggu

SEQ ID NO: 2623782 - RNA, 19 nt, Homo sapiens
  misc_RNA (1)...(19): siRNA sense strand
acaacaaggaugacgacau

SEQ ID NO: 2623783 - RNA, 19 nt, Homo sapiens
  misc_RNA (1)...(19): siRNA sense strand
guacaggaaagaaagaaaa

SEQ ID NO: 2623784 - RNA, 19 nt, Homo sapiens
  misc_RNA (1)...(19): siRNA sense strand
acaauugaggagaggguca

SEQ ID NO: 2623785 - RNA, 19 nt, Homo sapiens
  misc_RNA (1)...(19): siRNA sense strand
gggcaaagacaaggaaaau

SEQ ID NO: 2623786 - RNA, 19 nt, Homo sapiens
  misc_RNA (1)...(19): siRNA sense strand
auguuaagaaugaccguua

SEQ ID NO: 2623787 - RNA, 19 nt, Homo sapiens
  misc_RNA (1)...(19): siRNA sense strand
cagaaagggcaaagacaag

SEQ ID NO: 2623788 - RNA, 19 nt, Homo sapiens
  misc_RNA (1)...(19): siRNA sense strand
agaaagacuggauguaaaa

SEQ ID NO: 2623789 - RNA, 19 nt, Homo sapiens
  misc_RNA (1)...(19): siRNA sense strand
ccaccugagaauagugaca

SEQ ID NO: 2623790 - RNA, 19 nt, Homo sapiens
  misc_RNA (1)...(19): siRNA sense strand
aaugagaagauuagagaac

SEQ ID NO: 2623791 - RNA, 19 nt, Homo sapiens
  misc_RNA (1)...(19): siRNA sense strand
agguugagggcaaaggcaa

SEQ ID NO: 2623792 - RNA, 19 nt, Homo sapiens
  misc_RNA (1)...(19): siRNA sense strand
cgaaaguugagacuguaaa

SEQ ID NO: 2623793 - RNA, 19 nt, Homo sapiens
  misc_RNA (1)...(19): siRNA sense strand
aggcaauggaaucaagaca

SEQ ID NO: 2623794 - RNA, 19 nt, Homo sapiens
  misc_RNA (1)...(19): siRNA sense strand
aauccaaagaagcaaacaa

SEQ ID NO: 2623795 - RNA, 19 nt, Homo sapiens
  misc_RNA (1)...(19): siRNA sense strand
aagaaauacaggcgccauu

SEQ ID NO: 2623796 - RNA, 19 nt, Homo sapiens
  misc_RNA (1)...(19): siRNA sense strand
gugucaaagcagaaccauu

SEQ ID NO: 2623797 - RNA, 19 nt, Homo sapiens
  misc_RNA (1)...(19): siRNA sense strand
agacaguuauagucaacau

SEQ ID NO: 2623798 - RNA, 19 nt, Homo sapiens
  misc_RNA (1)...(19): siRNA sense strand
auacaauggaagaagagga

SEQ ID NO: 2623799 - RNA, 19 nt, Homo sapiens
  misc_RNA (1)...(19): siRNA sense strand
ugagaagauuagagaacag

SEQ ID NO: 2623800 - RNA, 19 nt, Homo sapiens
  misc_RNA (1)...(19): siRNA sense strand
agaacauugagguggugua

SEQ ID NO: 2623801 - RNA, 19 nt, Homo sapiens
  misc_RNA (1)...(19): siRNA sense strand
gguaauucuuguaaagccu

SEQ ID NO: 2623802 - RNA, 19 nt, Homo sapiens
  misc_RNA (1)...(19): siRNA sense strand
augugagaauccugaaaca

SEQ ID NO: 2623803 - RNA, 19 nt, Homo sapiens
  misc_RNA (1)...(19): siRNA sense strand
gugaugauuuggaaagaac

SEQ ID NO: 2623804 - RNA, 19 nt, Homo sapiens
  misc_RNA (1)...(19): siRNA sense strand
aaaagaaagaagagggugu

SEQ ID NO: 2623805 - RNA, 19 nt, Homo sapiens
  misc_RNA (1)...(19): siRNA sense strand
aagaaagaagaggguguua

SEQ ID NO: 2623806 - RNA, 19 nt, Homo sapiens
  misc_RNA (1)...(19): siRNA sense strand
uagaagaagaggucaucau

SEQ ID NO: 2623807 - RNA, 19 nt, Homo sapiens
  misc_RNA (1)...(19): siRNA sense strand
gauucaucugacaaagaaa

SEQ ID NO: 2623808 - RNA, 19 nt, Homo sapiens
  misc_RNA (1)...(19): siRNA sense strand
cagaccaguucuaucgcua

SEQ ID NO: 2623809 - RNA, 19 nt, Homo sapiens
  misc_RNA (1)...(19): siRNA sense strand
cuaagaaauaugucuccaa

SEQ ID NO: 2623810 - RNA, 19 nt, Homo sapiens
  misc_RNA (1)...(19): siRNA sense strand
aaucagugaccaugcaaaa

SEQ ID NO: 2623811 - RNA, 19 nt, Homo sapiens
  misc_RNA (1)...(19): siRNA sense strand
uggaaucaagacaguuaua

SEQ ID NO: 2623812 - RNA, 19 nt, Homo sapiens
  misc_RNA (1)...(19): siRNA sense strand
aucaucagcuggucggaaa

SEQ ID NO: 2623813 - RNA, 19 nt, Homo sapiens
  misc_RNA (1)...(19): siRNA sense strand
cagugaugauuuggaaaga

SEQ ID NO: 2623814 - RNA, 19 nt, Homo sapiens
  misc_RNA (1)...(19): siRNA sense strand
agaaagaagaggguguuau

SEQ ID NO: 2623815 - RNA, 19 nt, Homo sapiens
  misc_RNA (1)...(19): siRNA sense strand
guggcgaagaagaagauga

SEQ ID NO: 2623816 - RNA, 19 nt, Homo sapiens
  misc_RNA (1)...(19): siRNA sense strand
cagugauaguagacaagaa

SEQ ID NO: 2623817 - RNA, 19 nt, Homo sapiens
  misc_RNA (1)...(19): siRNA sense strand
aagaagaugcagaagaaaa

SEQ ID NO: 2623818 - RNA, 19 nt, Homo sapiens
  misc_RNA (1)...(19): siRNA sense strand
ccacaagcauggcaagcau

SEQ ID NO: 2623819 - RNA, 19 nt, Homo sapiens
  misc_RNA (1)...(19): siRNA sense strand
ugauaguagacaagaagau

SEQ ID NO: 2623820 - RNA, 19 nt, Homo sapiens
  misc_RNA (1)...(19): siRNA sense strand
agaagaugcagaagaaaau

SEQ ID NO: 2623821 - RNA, 19 nt, Homo sapiens
  misc_RNA (1)...(19): siRNA sense strand
gggacuauauggagccuga

SEQ ID NO: 2623822 - RNA, 19 nt, Homo sapiens
  misc_RNA (1)...(19): siRNA sense strand
cugaaagaggugaagauca

SEQ ID NO: 2623823 - RNA, 19 nt, Homo sapiens
  misc_RNA (1)...(19): siRNA sense strand
augcugacaugaagggaca

SEQ ID NO: 2623824 - RNA, 19 nt, Homo sapiens
  misc_RNA (1)...(19): siRNA sense strand
cugagggaguggugcugaa

SEQ ID NO: 2623825 - RNA, 19 nt, Homo sapiens
  misc_RNA (1)...(19): siRNA sense strand
agggaguggugcugaagga

SEQ ID NO: 2623826 - RNA, 19 nt, Homo sapiens
  misc_RNA (1)...(19): siRNA sense strand
gcgugugugugcaggacga

SEQ ID NO: 2623827 - RNA, 19 nt, Homo sapiens
  misc_RNA (1)...(19): siRNA sense strand
uggcagaggaugcacucaa

SEQ ID NO: 2623828 - RNA, 19 nt, Homo sapiens
  misc_RNA (1)...(19): siRNA sense strand
uucccaaggaggaggagua

SEQ ID NO: 2623829 - RNA, 19 nt, Homo sapiens
  misc_RNA (1)...(19): siRNA sense strand
aggaggugaucucaggcaa

SEQ ID NO: 2623830 - RNA, 19 nt, Homo sapiens
  misc_RNA (1)...(19): siRNA sense strand
ggaggguguuggaagagga

SEQ ID NO: 2623831 - RNA, 19 nt, Homo sapiens
  misc_RNA (1)...(19): siRNA sense strand
gggacuauauggagccuga

SEQ ID NO: 2623832 - RNA, 19 nt, Homo sapiens
  misc_RNA (1)...(19): siRNA sense strand
cugaaagaggugaagauca

SEQ ID NO: 2623833 - RNA, 19 nt, Homo sapiens
  misc_RNA (1)...(19): siRNA sense strand
augcugacaugaagggaca

SEQ ID NO: 2623834 - RNA, 19 nt, Homo sapiens
  misc_RNA (1)...(19): siRNA sense strand
cugagggaguggugcugaa

SEQ ID NO: 2623835 - RNA, 19 nt, Homo sapiens
  misc_RNA (1)...(19): siRNA sense strand
agggaguggugcugaagga

SEQ ID NO: 2623836 - RNA, 19 nt, Homo sapiens
  misc_RNA (1)...(19): siRNA sense strand
gcgugugugugcaggacga

SEQ ID NO: 2623837 - RNA, 19 nt, Homo sapiens
  misc_RNA (1)...(19): siRNA sense strand
uggcagaggaugcacucaa

SEQ ID NO: 2623838 - RNA, 19 nt, Homo sapiens
  misc_RNA (1)...(19): siRNA sense strand
uucccaaggaggaggagua

SEQ ID NO: 2623839 - RNA, 19 nt, Homo sapiens
  misc_RNA (1)...(19): siRNA sense strand
aggaggugaucucaggcaa

SEQ ID NO: 2623840 - RNA, 19 nt, Homo sapiens
  misc_RNA (1)...(19): siRNA sense strand
ggaggguguuggaagagga

SEQ ID NO: 2623841 - RNA, 19 nt, Homo sapiens
  misc_RNA (1)...(19): siRNA sense strand
gggacuauauggagccuga

SEQ ID NO: 2623842 - RNA, 19 nt, Homo sapiens
  misc_RNA (1)...(19): siRNA sense strand
cugaaagaggugaagauca

SEQ ID NO: 2623843 - RNA, 19 nt, Homo sapiens
  misc_RNA (1)...(19): siRNA sense strand
augcugacaugaagggaca

SEQ ID NO: 2623844 - RNA, 19 nt, Homo sapiens
  misc_RNA (1)...(19): siRNA sense strand
cugagggaguggugcugaa

SEQ ID NO: 2623845 - RNA, 19 nt, Homo sapiens
  misc_RNA (1)...(19): siRNA sense strand
agggaguggugcugaagga

SEQ ID NO: 2623846 - RNA, 19 nt, Homo sapiens
  misc_RNA (1)...(19): siRNA sense strand
gcgugugugugcaggacga

SEQ ID NO: 2623847 - RNA, 19 nt, Homo sapiens
  misc_RNA (1)...(19): siRNA sense strand
uggcagaggaugcacucaa

SEQ ID NO: 2623848 - RNA, 19 nt, Homo sapiens
  misc_RNA (1)...(19): siRNA sense strand
uucccaaggaggaggagua

SEQ ID NO: 2623849 - RNA, 19 nt, Homo sapiens
  misc_RNA (1)...(19): siRNA sense strand
aggaggugaucucaggcaa

SEQ ID NO: 2623850 - RNA, 19 nt, Homo sapiens
  misc_RNA (1)...(19): siRNA sense strand
ggaggguguuggaagagga

SEQ ID NO: 2623851 - RNA, 19 nt, Homo sapiens
  misc_RNA (1)...(19): siRNA sense strand
gcgaauuggacguggagga

SEQ ID NO: 2623852 - RNA, 19 nt, Homo sapiens
  misc_RNA (1)...(19): siRNA sense strand
ggcaagaggaagcgcgaau

SEQ ID NO: 2623853 - RNA, 19 nt, Homo sapiens
  misc_RNA (1)...(19): siRNA sense strand
cgggagaugacuacaggaa

SEQ ID NO: 2623854 - RNA, 19 nt, Homo sapiens
  misc_RNA (1)...(19): siRNA sense strand
cagaaggugcugagggagu

SEQ ID NO: 2623855 - RNA, 19 nt, Homo sapiens
  misc_RNA (1)...(19): siRNA sense strand
ccguugugauccuggagaa

SEQ ID NO: 2623856 - RNA, 19 nt, Homo sapiens
  misc_RNA (1)...(19): siRNA sense strand
ccgccagcacagaggaaaa

SEQ ID NO: 2623857 - RNA, 19 nt, Homo sapiens
  misc_RNA (1)...(19): siRNA sense strand
aggccauccugcagcgcua

SEQ ID NO: 2623858 - RNA, 19 nt, Homo sapiens
  misc_RNA (1)...(19): siRNA sense strand
ggauggggauggagaggau

SEQ ID NO: 2623859 - RNA, 19 nt, Homo sapiens
  misc_RNA (1)...(19): siRNA sense strand
gcuaccggaugaagggaga

SEQ ID NO: 2623860 - RNA, 19 nt, Homo sapiens
  misc_RNA (1)...(19): siRNA sense strand
cgccauuucagguggaaca

SEQ ID NO: 2623861 - RNA, 19 nt, Homo sapiens
  misc_RNA (1)...(19): siRNA sense strand
acaagaaggcugaagcgga

SEQ ID NO: 2623862 - RNA, 19 nt, Homo sapiens
  misc_RNA (1)...(19): siRNA sense strand
agguggaacagguggcuca

SEQ ID NO: 2623863 - RNA, 19 nt, Homo sapiens
  misc_RNA (1)...(19): siRNA sense strand
guguauaacauucucgaca

SEQ ID NO: 2623864 - RNA, 19 nt, Homo sapiens
  misc_RNA (1)...(19): siRNA sense strand
ugcagaaggugcugaggga

SEQ ID NO: 2623865 - RNA, 19 nt, Homo sapiens
  misc_RNA (1)...(19): siRNA sense strand
cuccaagacaacugaauga

SEQ ID NO: 2623866 - RNA, 19 nt, Homo sapiens
  misc_RNA (1)...(19): siRNA sense strand
uuacccugccacagagaaa

SEQ ID NO: 2623867 - RNA, 19 nt, Homo sapiens
  misc_RNA (1)...(19): siRNA sense strand
caagaaggcugaagcggac

SEQ ID NO: 2623868 - RNA, 19 nt, Homo sapiens
  misc_RNA (1)...(19): siRNA sense strand
ccggaugaagggagaccau

SEQ ID NO: 2623869 - RNA, 19 nt, Homo sapiens
  misc_RNA (1)...(19): siRNA sense strand
aaucaaaguaugaggggaa

SEQ ID NO: 2623870 - RNA, 19 nt, Homo sapiens
  misc_RNA (1)...(19): siRNA sense strand
gaaaagaacaaaugggcuu

SEQ ID NO: 2623871 - RNA, 19 nt, Homo sapiens
  misc_RNA (1)...(19): siRNA sense strand
cagcgaggaaagagacaau

SEQ ID NO: 2623872 - RNA, 19 nt, Homo sapiens
  misc_RNA (1)...(19): siRNA sense strand
agaccaaacggguggagau

SEQ ID NO: 2623873 - RNA, 19 nt, Homo sapiens
  misc_RNA (1)...(19): siRNA sense strand
uagaacaugccgagggaca

SEQ ID NO: 2623874 - RNA, 19 nt, Homo sapiens
  misc_RNA (1)...(19): siRNA sense strand
uuggaugaauggaaggaau

SEQ ID NO: 2623875 - RNA, 19 nt, Homo sapiens
  misc_RNA (1)...(19): siRNA sense strand
aggaaagagacaaugcaau

SEQ ID NO: 2623876 - RNA, 19 nt, Homo sapiens
  misc_RNA (1)...(19): siRNA sense strand
ucuuugaugaagugugaaa

SEQ ID NO: 2623877 - RNA, 19 nt, Homo sapiens
  misc_RNA (1)...(19): siRNA sense strand
ccagcaaagcagcagaauu

SEQ ID NO: 2623878 - RNA, 19 nt, Homo sapiens
  misc_RNA (1)...(19): siRNA sense strand
aaggugaagauguggaaaa

SEQ ID NO: 2623879 - RNA, 19 nt, Homo sapiens
  misc_RNA (1)...(19): siRNA sense strand
gcuagaacaugccgaggga

SEQ ID NO: 2623880 - RNA, 19 nt, Homo sapiens
  misc_RNA (1)...(19): siRNA sense strand
ggaugauuacauugaacuu

SEQ ID NO: 2623881 - RNA, 19 nt, Homo sapiens
  misc_RNA (1)...(19): siRNA sense strand
agaagagaaauucggaaca

SEQ ID NO: 2623882 - RNA, 19 nt, Homo sapiens
  misc_RNA (1)...(19): siRNA sense strand
ggaugaauggaaggaauau

SEQ ID NO: 2623883 - RNA, 19 nt, Homo sapiens
  misc_RNA (1)...(19): siRNA sense strand
acggaaacuucaggauaau

SEQ ID NO: 2623884 - RNA, 19 nt, Homo sapiens
  misc_RNA (1)...(19): siRNA sense strand
agucaggguuugagggcua

SEQ ID NO: 2623885 - RNA, 19 nt, Homo sapiens
  misc_RNA (1)...(19): siRNA sense strand
ggacaggaccaaaaggaca

SEQ ID NO: 2623886 - RNA, 19 nt, Homo sapiens
  misc_RNA (1)...(19): siRNA sense strand
ggguguucccuguaggauu

SEQ ID NO: 2623887 - RNA, 19 nt, Homo sapiens
  misc_RNA (1)...(19): siRNA sense strand
gaguguggcccuugggagu

SEQ ID NO: 2623888 - RNA, 19 nt, Homo sapiens
  misc_RNA (1)...(19): siRNA sense strand
cgcagaaagugggaggaga

SEQ ID NO: 2623889 - RNA, 19 nt, Homo sapiens
  misc_RNA (1)...(19): siRNA sense strand
cuggaguggccucugguua

SEQ ID NO: 2623890 - RNA, 19 nt, Homo sapiens
  misc_RNA (1)...(19): siRNA sense strand
gaaaugagaagaagaggca

SEQ ID NO: 2623891 - RNA, 19 nt, Homo sapiens
  misc_RNA (1)...(19): siRNA sense strand
aaugagaagaagaggcaca

SEQ ID NO: 2623892 - RNA, 19 nt, Homo sapiens
  misc_RNA (1)...(19): siRNA sense strand
ccaaaagcacauugccaaa

SEQ ID NO: 2623893 - RNA, 19 nt, Homo sapiens
  misc_RNA (1)...(19): siRNA sense strand
ugucgaaaugagaagaaga

SEQ ID NO: 2623894 - RNA, 19 nt, Homo sapiens
  misc_RNA (1)...(19): siRNA sense strand
aagcuaugcaggugacaga

SEQ ID NO: 2623895 - RNA, 19 nt, Homo sapiens
  misc_RNA (1)...(19): siRNA sense strand
gcucuaacagguuggacca

SEQ ID NO: 2623896 - RNA, 19 nt, Homo sapiens
  misc_RNA (1)...(19): siRNA sense strand
ucaucauccuccugacaau

SEQ ID NO: 2623897 - RNA, 19 nt, Homo sapiens
  misc_RNA (1)...(19): siRNA sense strand
aagaagaggcacagggcug

SEQ ID NO: 2623898 - RNA, 19 nt, Homo sapiens
  misc_RNA (1)...(19): siRNA sense strand
ccacggaagaaaugggaaa

SEQ ID NO: 2623899 - RNA, 19 nt, Homo sapiens
  misc_RNA (1)...(19): siRNA sense strand
gauuguuuauagugggaaa

SEQ ID NO: 2623900 - RNA, 19 nt, Homo sapiens
  misc_RNA (1)...(19): siRNA sense strand
agaauuacgagcagaacaa

SEQ ID NO: 2623901 - RNA, 19 nt, Homo sapiens
  misc_RNA (1)...(19): siRNA sense strand
ucgacauguuugugagauu

SEQ ID NO: 2623902 - RNA, 19 nt, Homo sapiens
  misc_RNA (1)...(19): siRNA sense strand
agaacaugguccaagacaa

SEQ ID NO: 2623903 - RNA, 19 nt, Homo sapiens
  misc_RNA (1)...(19): siRNA sense strand
ucucaaacucccugaagaa

SEQ ID NO: 2623904 - RNA, 19 nt, Homo sapiens
  misc_RNA (1)...(19): siRNA sense strand
uugugagauuuaugggaaa

SEQ ID NO: 2623905 - RNA, 19 nt, Homo sapiens
  misc_RNA (1)...(19): siRNA sense strand
cagcaauaauaauggcuca

SEQ ID NO: 2623906 - RNA, 19 nt, Homo sapiens
  misc_RNA (1)...(19): siRNA sense strand
aagaguuggccaagagaau

SEQ ID NO: 2623907 - RNA, 19 nt, Homo sapiens
  misc_RNA (1)...(19): siRNA sense strand
agucaugaccgcccagaaa

SEQ ID NO: 2623908 - RNA, 19 nt, Homo sapiens
  misc_RNA (1)...(19): siRNA sense strand
guugaacugaugagagauu

SEQ ID NO: 2623909 - RNA, 19 nt, Homo sapiens
  misc_RNA (1)...(19): siRNA sense strand
gagaauuacgagcagaaca

SEQ ID NO: 2623910 - RNA, 19 nt, Homo sapiens
  misc_RNA (1)...(19): siRNA sense strand
cguauuuacagcagacuuu

SEQ ID NO: 2623911 - RNA, 19 nt, Homo sapiens
  misc_RNA (1)...(19): siRNA sense strand
augagaauuacgagcagaa

SEQ ID NO: 2623912 - RNA, 19 nt, Homo sapiens
  misc_RNA (1)...(19): siRNA sense strand
caaauacaguucugggcca

SEQ ID NO: 2623913 - RNA, 19 nt, Homo sapiens
  misc_RNA (1)...(19): siRNA sense strand
gggaagccuuggacgacau

SEQ ID NO: 2623914 - RNA, 19 nt, Homo sapiens
  misc_RNA (1)...(19): siRNA sense strand
acgucaagcucgugguucu

SEQ ID NO: 2623915 - RNA, 19 nt, Homo sapiens
  misc_RNA (1)...(19): siRNA sense strand
aguucugggccaacaaaua

SEQ ID NO: 2623916 - RNA, 19 nt, Homo sapiens
  misc_RNA (1)...(19): siRNA sense strand
gacaaguaugaaugguuua

SEQ ID NO: 2623917 - RNA, 19 nt, Homo sapiens
  misc_RNA (1)...(19): siRNA sense strand
gaguuggccaagagaauca

SEQ ID NO: 2623918 - RNA, 19 nt, Homo sapiens
  misc_RNA (1)...(19): siRNA sense strand
caguaaaagcagcaauaau

SEQ ID NO: 2623919 - RNA, 19 nt, Homo sapiens
  misc_RNA (1)...(19): siRNA sense strand
cagaauuccuucagcgaug

SEQ ID NO: 2623920 - RNA, 19 nt, Homo sapiens
  misc_RNA (1)...(19): siRNA sense strand
guuuaugagagcagaugau

SEQ ID NO: 2623921 - RNA, 19 nt, Homo sapiens
  misc_RNA (1)...(19): siRNA sense strand
augcacaagaguuggccaa

SEQ ID NO: 2623922 - RNA, 19 nt, Homo sapiens
  misc_RNA (1)...(19): siRNA sense strand
ugggaaacuuugagaagac

SEQ ID NO: 2623923 - RNA, 19 nt, Homo sapiens
  misc_RNA (1)...(19): siRNA sense strand
augaggagcuggaugcaca

SEQ ID NO: 2623924 - RNA, 19 nt, Homo sapiens
  misc_RNA (1)...(19): siRNA sense strand
augagagauuaccgcauua

SEQ ID NO: 2623925 - RNA, 19 nt, Homo sapiens
  misc_RNA (1)...(19): siRNA sense strand
aagugaggguucugacaca

SEQ ID NO: 2623926 - RNA, 19 nt, Homo sapiens
  misc_RNA (1)...(19): siRNA sense strand
cgggaggugcuucggagaa

SEQ ID NO: 2623927 - RNA, 19 nt, Homo sapiens
  misc_RNA (1)...(19): siRNA sense strand
uggagaugaucaaugccaa

SEQ ID NO: 2623928 - RNA, 19 nt, Homo sapiens
  misc_RNA (1)...(19): siRNA sense strand
cagaugaugacguguacau

SEQ ID NO: 2623929 - RNA, 19 nt, Homo sapiens
  misc_RNA (1)...(19): siRNA sense strand
caauacagcugcaccgcga

SEQ ID NO: 2623930 - RNA, 19 nt, Homo sapiens
  misc_RNA (1)...(19): siRNA sense strand
agaaauucauaaagaggac

SEQ ID NO: 2623931 - RNA, 19 nt, Homo sapiens
  misc_RNA (1)...(19): siRNA sense strand
agagggaagccuuggacga

SEQ ID NO: 2623932 - RNA, 19 nt, Homo sapiens
  misc_RNA (1)...(19): siRNA sense strand
guuuauagugggaaaguuc

SEQ ID NO: 2623933 - RNA, 19 nt, Homo sapiens
  misc_RNA (1)...(19): siRNA sense strand
caugcugagccgcaagaua

SEQ ID NO: 2623934 - RNA, 19 nt, Homo sapiens
  misc_RNA (1)...(19): siRNA sense strand
aagcacaaagggaagaaaa

SEQ ID NO: 2623935 - RNA, 19 nt, Homo sapiens
  misc_RNA (1)...(19): siRNA sense strand
ccuucaugaugcucaagua

SEQ ID NO: 2623936 - RNA, 19 nt, Homo sapiens
  misc_RNA (1)...(19): siRNA sense strand
aguacaugcacgaccacua

SEQ ID NO: 2623937 - RNA, 19 nt, Homo sapiens
  misc_RNA (1)...(19): siRNA sense strand
augcugagccgcaagauau

SEQ ID NO: 2623938 - RNA, 19 nt, Homo sapiens
  misc_RNA (1)...(19): siRNA sense strand
cugggaaaguucaguucuu

SEQ ID NO: 2623939 - RNA, 19 nt, Homo sapiens
  misc_RNA (1)...(19): siRNA sense strand
ccuucgaguucgugcucaa

SEQ ID NO: 2623940 - RNA, 19 nt, Homo sapiens
  misc_RNA (1)...(19): siRNA sense strand
acgaaaaccucacggccaa

SEQ ID NO: 2623941 - RNA, 19 nt, Homo sapiens
  misc_RNA (1)...(19): siRNA sense strand
agcagagccuggaggacau

SEQ ID NO: 2623942 - RNA, 19 nt, Homo sapiens
  misc_RNA (1)...(19): siRNA sense strand
gcagcagaugggaggcaaa

SEQ ID NO: 2623943 - RNA, 19 nt, Homo sapiens
  misc_RNA (1)...(19): siRNA sense strand
ccgacaaggcccuaggaga

SEQ ID NO: 2623944 - RNA, 19 nt, Homo sapiens
  misc_RNA (1)...(19): siRNA sense strand
ugucaaggccugaacguga

SEQ ID NO: 2623945 - RNA, 19 nt, Homo sapiens
  misc_RNA (1)...(19): siRNA sense strand
cgacaaggcccuaggagag

SEQ ID NO: 2623946 - RNA, 19 nt, Homo sapiens
  misc_RNA (1)...(19): siRNA sense strand
cgugaugggcugugaucuu

SEQ ID NO: 2623947 - RNA, 19 nt, Homo sapiens
  misc_RNA (1)...(19): siRNA sense strand
cguaugaucuuucugggaa

SEQ ID NO: 2623948 - RNA, 19 nt, Homo sapiens
  misc_RNA (1)...(19): siRNA sense strand
ggcgaauucaagaggccua

SEQ ID NO: 2623949 - RNA, 19 nt, Homo sapiens
  misc_RNA (1)...(19): siRNA sense strand
ugaaggaauuggugacaaa

SEQ ID NO: 2623950 - RNA, 19 nt, Homo sapiens
  misc_RNA (1)...(19): siRNA sense strand
gcuugauggcaaagaaaua

SEQ ID NO: 2623951 - RNA, 19 nt, Homo sapiens
  misc_RNA (1)...(19): siRNA sense strand
gcaaagaaauaaagcgacu

SEQ ID NO: 2623952 - RNA, 19 nt, Homo sapiens
  misc_RNA (1)...(19): siRNA sense strand
cacuaaaguaggagacaaa

SEQ ID NO: 2623953 - RNA, 19 nt, Homo sapiens
  misc_RNA (1)...(19): siRNA sense strand
cgaacacauuggaaggaaa

SEQ ID NO: 2623954 - RNA, 19 nt, Homo sapiens
  misc_RNA (1)...(19): siRNA sense strand
ccagauaauauuaagggaa

SEQ ID NO: 2623955 - RNA, 19 nt, Homo sapiens
  misc_RNA (1)...(19): siRNA sense strand
acagaaacucuuugaggaa

SEQ ID NO: 2623956 - RNA, 19 nt, Homo sapiens
  misc_RNA (1)...(19): siRNA sense strand
cagaaagcuuaguaccaaa

SEQ ID NO: 2623957 - RNA, 19 nt, Homo sapiens
  misc_RNA (1)...(19): siRNA sense strand
gaugaugucuccaagauua

SEQ ID NO: 2623958 - RNA, 19 nt, Homo sapiens
  misc_RNA (1)...(19): siRNA sense strand
agaaauaaagcgacugaau

SEQ ID NO: 2623959 - RNA, 19 nt, Homo sapiens
  misc_RNA (1)...(19): siRNA sense strand
gcauugaagcauuugcaaa

SEQ ID NO: 2623960 - RNA, 19 nt, Homo sapiens
  misc_RNA (1)...(19): siRNA sense strand
ggacaggauauuaggacca

SEQ ID NO: 2623961 - RNA, 19 nt, Homo sapiens
  misc_RNA (1)...(19): siRNA sense strand
guuucuagcccuuggaauu

SEQ ID NO: 2623962 - RNA, 19 nt, Homo sapiens
  misc_RNA (1)...(19): siRNA sense strand
gcuaaaagaauugggauaa

SEQ ID NO: 2623963 - RNA, 19 nt, Homo sapiens
  misc_RNA (1)...(19): siRNA sense strand
gugaaaagguuguccaaga

SEQ ID NO: 2623964 - RNA, 19 nt, Homo sapiens
  misc_RNA (1)...(19): siRNA sense strand
cuugaaagguacaacaaaa

SEQ ID NO: 2623965 - RNA, 19 nt, Homo sapiens
  misc_RNA (1)...(19): siRNA sense strand
agcuaaaagaauugggaua

SEQ ID NO: 2623966 - RNA, 19 nt, Homo sapiens
  misc_RNA (1)...(19): siRNA sense strand
gauugcauuuggaggacaa

SEQ ID NO: 2623967 - RNA, 19 nt, Homo sapiens
  misc_RNA (1)...(19): siRNA sense strand
caugaaagagaaaggcauu

SEQ ID NO: 2623968 - RNA, 19 nt, Homo sapiens
  misc_RNA (1)...(19): siRNA sense strand
gggcagcaaaggaggccaa

SEQ ID NO: 2623969 - RNA, 19 nt, Homo sapiens
  misc_RNA (1)...(19): siRNA sense strand
uggaagacaaauacacaaa

SEQ ID NO: 2623970 - RNA, 19 nt, Homo sapiens
  misc_RNA (1)...(19): siRNA sense strand
ugcaaaagcuggagcagua

SEQ ID NO: 2623971 - RNA, 19 nt, Homo sapiens
  misc_RNA (1)...(19): siRNA sense strand
aggaguuguugaaaugaaa

SEQ ID NO: 2623972 - RNA, 19 nt, Homo sapiens
  misc_RNA (1)...(19): siRNA sense strand
ugacuaugccaaagccaaa

SEQ ID NO: 2623973 - RNA, 19 nt, Homo sapiens
  misc_RNA (1)...(19): siRNA sense strand
cuggauacagaaagugaaa

SEQ ID NO: 2623974 - RNA, 19 nt, Homo sapiens
  misc_RNA (1)...(19): siRNA sense strand
ggacaaagccagagaaggc

SEQ ID NO: 2623975 - RNA, 19 nt, Homo sapiens
  misc_RNA (1)...(19): siRNA sense strand
ggcacaaaccagauaauau

SEQ ID NO: 2623976 - RNA, 19 nt, Homo sapiens
  misc_RNA (1)...(19): siRNA sense strand
caggaaaugaaguugaauu

SEQ ID NO: 2623977 - RNA, 19 nt, Homo sapiens
  misc_RNA (1)...(19): siRNA sense strand
gagccuacuugguggcaca

SEQ ID NO: 2623978 - RNA, 19 nt, Homo sapiens
  misc_RNA (1)...(19): siRNA sense strand
uggcaaagaaauaaagcga

SEQ ID NO: 2623979 - RNA, 19 nt, Homo sapiens
  misc_RNA (1)...(19): siRNA sense strand
cagcaaaggaggccaacau

SEQ ID NO: 2623980 - RNA, 19 nt, Homo sapiens
  misc_RNA (1)...(19): siRNA sense strand
caggauauuaggaccauaa

SEQ ID NO: 2623981 - RNA, 19 nt, Homo sapiens
  misc_RNA (1)...(19): siRNA sense strand
cauggaugagauugagaaa

SEQ ID NO: 2623982 - RNA, 19 nt, Homo sapiens
  misc_RNA (1)...(19): siRNA sense strand
cggaaggccuaaugccgaa

SEQ ID NO: 2623983 - RNA, 19 nt, Homo sapiens
  misc_RNA (1)...(19): siRNA sense strand
gagaaaugacagauaucuu

SEQ ID NO: 2623984 - RNA, 19 nt, Homo sapiens
  misc_RNA (1)...(19): siRNA sense strand
acuuaauagugguguuuca

SEQ ID NO: 2623985 - RNA, 19 nt, Homo sapiens
  misc_RNA (1)...(19): siRNA sense strand
gccuauuauuacaguggaa

SEQ ID NO: 2623986 - RNA, 19 nt, Homo sapiens
  misc_RNA (1)...(19): siRNA sense strand
ccaagauuaaugaaggaau

SEQ ID NO: 2623987 - RNA, 19 nt, Homo sapiens
  misc_RNA (1)...(19): siRNA sense strand
aaauugaugccuuggaaau

SEQ ID NO: 2623988 - RNA, 19 nt, Homo sapiens
  misc_RNA (1)...(19): siRNA sense strand
ucaaaugauucaagaucca

SEQ ID NO: 2623989 - RNA, 19 nt, Homo sapiens
  misc_RNA (1)...(19): siRNA sense strand
cuguaauuacccagaauau

SEQ ID NO: 2623990 - RNA, 19 nt, Homo sapiens
  misc_RNA (1)...(19): siRNA sense strand
ggagaaaggaaaucaugau

SEQ ID NO: 2623991 - RNA, 19 nt, Homo sapiens
  misc_RNA (1)...(19): siRNA sense strand
aaaucuugggacaggaaua

SEQ ID NO: 2623992 - RNA, 19 nt, Homo sapiens
  misc_RNA (1)...(19): siRNA sense strand
aaauaaagcgacugaaugu

SEQ ID NO: 2623993 - RNA, 19 nt, Homo sapiens
  misc_RNA (1)...(19): siRNA sense strand
gcuacugaagcaauagaaa

SEQ ID NO: 2623994 - RNA, 19 nt, Homo sapiens
  misc_RNA (1)...(19): siRNA sense strand
ccuacuugguggcacauaa

SEQ ID NO: 2623995 - RNA, 19 nt, Homo sapiens
  misc_RNA (1)...(19): siRNA sense strand
caggaaauuuagaagaucu

SEQ ID NO: 2623996 - RNA, 19 nt, Homo sapiens
  misc_RNA (1)...(19): siRNA sense strand
cuucaugaaucuggaggaa

SEQ ID NO: 2623997 - RNA, 19 nt, Homo sapiens
  misc_RNA (1)...(19): siRNA sense strand
ccuggcagcuggaagacaa

SEQ ID NO: 2623998 - RNA, 19 nt, Homo sapiens
  misc_RNA (1)...(19): siRNA sense strand
cuauaaugcgacaggagau

SEQ ID NO: 2623999 - RNA, 19 nt, Homo sapiens
  misc_RNA (1)...(19): siRNA sense strand
ccgcaauggaggagcaaag

SEQ ID NO: 2624000 - RNA, 19 nt, Homo sapiens
  misc_RNA (1)...(19): siRNA sense strand
cacugaaagauaagaaaga

SEQ ID NO: 2624001 - RNA, 19 nt, Homo sapiens
  misc_RNA (1)...(19): siRNA sense strand
gcucagaguuugcagguac

SEQ ID NO: 2624002 - RNA, 19 nt, Homo sapiens
  misc_RNA (1)...(19): siRNA sense strand
uguauaugguggugggaac

SEQ ID NO: 2624003 - RNA, 19 nt, Homo sapiens
  misc_RNA (1)...(19): siRNA sense strand
gaaagaacuugaaagguac

SEQ ID NO: 2624004 - RNA, 19 nt, Homo sapiens
  misc_RNA (1)...(19): siRNA sense strand
gggcagaagcagaggaucg

SEQ ID NO: 2624005 - RNA, 19 nt, Homo sapiens
  misc_RNA (1)...(19): siRNA sense strand
ggaugaaaguauaccucca

SEQ ID NO: 2624006 - RNA, 19 nt, Homo sapiens
  misc_RNA (1)...(19): siRNA sense strand
cgccaaugaugcugcucaa

SEQ ID NO: 2624007 - RNA, 19 nt, Homo sapiens
  misc_RNA (1)...(19): siRNA sense strand
agucacugccuaauaaaua

SEQ ID NO: 2624008 - RNA, 19 nt, Homo sapiens
  misc_RNA (1)...(19): siRNA sense strand
ggagcaaagaagaagaacu

SEQ ID NO: 2624009 - RNA, 19 nt, Homo sapiens
  misc_RNA (1)...(19): siRNA sense strand
uguaagguuucuacgggaa

SEQ ID NO: 2624010 - RNA, 19 nt, Homo sapiens
  misc_RNA (1)...(19): siRNA sense strand
ucauuguggagaaaggaaa

SEQ ID NO: 2624011 - RNA, 19 nt, Homo sapiens
  misc_RNA (1)...(19): siRNA sense strand
caggaguuguugaaaugaa

SEQ ID NO: 2624012 - RNA, 19 nt, Homo sapiens
  misc_RNA (1)...(19): siRNA sense strand
ggcaauaaguacuggcuca

SEQ ID NO: 2624013 - RNA, 19 nt, Homo sapiens
  misc_RNA (1)...(19): siRNA sense strand
cugugaacgagcagggcaa

SEQ ID NO: 2624014 - RNA, 19 nt, Homo sapiens
  misc_RNA (1)...(19): siRNA sense strand
gagaugaaguggcggcagu

SEQ ID NO: 2624015 - RNA, 19 nt, Homo sapiens
  misc_RNA (1)...(19): siRNA sense strand
gcaaguguauggugggaag

SEQ ID NO: 2624016 - RNA, 19 nt, Homo sapiens
  misc_RNA (1)...(19): siRNA sense strand
acauuguccgcgagggcaa

SEQ ID NO: 2624017 - RNA, 19 nt, Homo sapiens
  misc_RNA (1)...(19): siRNA sense strand
aggccaggacggaggagau

SEQ ID NO: 2624018 - RNA, 19 nt, Homo sapiens
  misc_RNA (1)...(19): siRNA sense strand
ggcaauaaguacuggcuca

SEQ ID NO: 2624019 - RNA, 19 nt, Homo sapiens
  misc_RNA (1)...(19): siRNA sense strand
cugugaacgagcagggcaa

SEQ ID NO: 2624020 - RNA, 19 nt, Homo sapiens
  misc_RNA (1)...(19): siRNA sense strand
gagaugaaguggcggcagu

SEQ ID NO: 2624021 - RNA, 19 nt, Homo sapiens
  misc_RNA (1)...(19): siRNA sense strand
gcaaguguauggugggaag

SEQ ID NO: 2624022 - RNA, 19 nt, Homo sapiens
  misc_RNA (1)...(19): siRNA sense strand
acauuguccgcgagggcaa

SEQ ID NO: 2624023 - RNA, 19 nt, Homo sapiens
  misc_RNA (1)...(19): siRNA sense strand
aggccaggacggaggagau

SEQ ID NO: 2624024 - RNA, 19 nt, Homo sapiens
  misc_RNA (1)...(19): siRNA sense strand
ggcaauaaguacuggcuca

SEQ ID NO: 2624025 - RNA, 19 nt, Homo sapiens
  misc_RNA (1)...(19): siRNA sense strand
cugugaacgagcagggcaa

SEQ ID NO: 2624026 - RNA, 19 nt, Homo sapiens
  misc_RNA (1)...(19): siRNA sense strand
gagaugaaguggcggcagu

SEQ ID NO: 2624027 - RNA, 19 nt, Homo sapiens
  misc_RNA (1)...(19): siRNA sense strand
gcaaguguauggugggaag

SEQ ID NO: 2624028 - RNA, 19 nt, Homo sapiens
  misc_RNA (1)...(19): siRNA sense strand
acauuguccgcgagggcaa

SEQ ID NO: 2624029 - RNA, 19 nt, Homo sapiens
  misc_RNA (1)...(19): siRNA sense strand
aggccaggacggaggagau

SEQ ID NO: 2624030 - RNA, 19 nt, Homo sapiens
  misc_RNA (1)...(19): siRNA sense strand
gggccguauauguggguaa

SEQ ID NO: 2624031 - RNA, 19 nt, Homo sapiens
  misc_RNA (1)...(19): siRNA sense strand
acggagaggcaguggcaca

SEQ ID NO: 2624032 - RNA, 19 nt, Homo sapiens
  misc_RNA (1)...(19): siRNA sense strand
ccaaugacgaugaggacgu

SEQ ID NO: 2624033 - RNA, 19 nt, Homo sapiens
  misc_RNA (1)...(19): siRNA sense strand
ucaacgaucuguaccgcua

SEQ ID NO: 2624034 - RNA, 19 nt, Homo sapiens
  misc_RNA (1)...(19): siRNA sense strand
uggaaugcuccguguucua

SEQ ID NO: 2624035 - RNA, 19 nt, Homo sapiens
  misc_RNA (1)...(19): siRNA sense strand
acggcaagcgcgaguucaa

SEQ ID NO: 2624036 - RNA, 19 nt, Homo sapiens
  misc_RNA (1)...(19): siRNA sense strand
uugaggaagcagagaagaa

SEQ ID NO: 2624037 - RNA, 19 nt, Homo sapiens
  misc_RNA (1)...(19): siRNA sense strand
ccaagaagauccuggugga

SEQ ID NO: 2624038 - RNA, 19 nt, Homo sapiens
  misc_RNA (1)...(19): siRNA sense strand
cgguggugguggaugggaa

SEQ ID NO: 2624039 - RNA, 19 nt, Homo sapiens
  misc_RNA (1)...(19): siRNA sense strand
ucaaaaggcucaagggcuu

SEQ ID NO: 2624040 - RNA, 19 nt, Homo sapiens
  misc_RNA (1)...(19): siRNA sense strand
aaauagacauugaaggcca

SEQ ID NO: 2624041 - RNA, 19 nt, Homo sapiens
  misc_RNA (1)...(19): siRNA sense strand
gguggugguggaugggaaa

SEQ ID NO: 2624042 - RNA, 19 nt, Homo sapiens
  misc_RNA (1)...(19): siRNA sense strand
aagaaaggccugaaggacu

SEQ ID NO: 2624043 - RNA, 19 nt, Homo sapiens
  misc_RNA (1)...(19): siRNA sense strand
aagcagagaagaaugaaaa

SEQ ID NO: 2624044 - RNA, 19 nt, Homo sapiens
  misc_RNA (1)...(19): siRNA sense strand
acguacugggugagguuaa

SEQ ID NO: 2624045 - RNA, 19 nt, Homo sapiens
  misc_RNA (1)...(19): siRNA sense strand
ggugaaagccuauaccaca

SEQ ID NO: 2624046 - RNA, 19 nt, Homo sapiens
  misc_RNA (1)...(19): siRNA sense strand
uggagaaucacgugggagu

SEQ ID NO: 2624047 - RNA, 19 nt, Homo sapiens
  misc_RNA (1)...(19): siRNA sense strand
ggaaauagacauugaaggc

SEQ ID NO: 2624048 - RNA, 19 nt, Homo sapiens
  misc_RNA (1)...(19): siRNA sense strand
agucaaauggguugguguu

SEQ ID NO: 2624049 - RNA, 19 nt, Homo sapiens
  misc_RNA (1)...(19): siRNA sense strand
ggccugaaggacugggaga

SEQ ID NO: 2624050 - RNA, 19 nt, Homo sapiens
  misc_RNA (1)...(19): siRNA sense strand
aauagacauugaaggccaa

SEQ ID NO: 2624051 - RNA, 19 nt, Homo sapiens
  misc_RNA (1)...(19): siRNA sense strand
caagaagggaaucggacca

SEQ ID NO: 2624052 - RNA, 19 nt, Homo sapiens
  misc_RNA (1)...(19): siRNA sense strand
cgagcagaucaacgagauu

SEQ ID NO: 2624053 - RNA, 19 nt, Homo sapiens
  misc_RNA (1)...(19): siRNA sense strand
cacaagaggggaagaauau

SEQ ID NO: 2624054 - RNA, 19 nt, Homo sapiens
  misc_RNA (1)...(19): siRNA sense strand
uugaggaagcagagaagaa

SEQ ID NO: 2624055 - RNA, 19 nt, Homo sapiens
  misc_RNA (1)...(19): siRNA sense strand
ccaagaagauccuggugga

SEQ ID NO: 2624056 - RNA, 19 nt, Homo sapiens
  misc_RNA (1)...(19): siRNA sense strand
cgguggugguggaugggaa

SEQ ID NO: 2624057 - RNA, 19 nt, Homo sapiens
  misc_RNA (1)...(19): siRNA sense strand
ucaaaaggcucaagggcuu

SEQ ID NO: 2624058 - RNA, 19 nt, Homo sapiens
  misc_RNA (1)...(19): siRNA sense strand
aaauagacauugaaggcca

SEQ ID NO: 2624059 - RNA, 19 nt, Homo sapiens
  misc_RNA (1)...(19): siRNA sense strand
gguggugguggaugggaaa

SEQ ID NO: 2624060 - RNA, 19 nt, Homo sapiens
  misc_RNA (1)...(19): siRNA sense strand
aagaaaggccugaaggacu

SEQ ID NO: 2624061 - RNA, 19 nt, Homo sapiens
  misc_RNA (1)...(19): siRNA sense strand
aagcagagaagaaugaaaa

SEQ ID NO: 2624062 - RNA, 19 nt, Homo sapiens
  misc_RNA (1)...(19): siRNA sense strand
acguacugggugagguuaa

SEQ ID NO: 2624063 - RNA, 19 nt, Homo sapiens
  misc_RNA (1)...(19): siRNA sense strand
ggugaaagccuauaccaca

SEQ ID NO: 2624064 - RNA, 19 nt, Homo sapiens
  misc_RNA (1)...(19): siRNA sense strand
uggagaaucacgugggagu

SEQ ID NO: 2624065 - RNA, 19 nt, Homo sapiens
  misc_RNA (1)...(19): siRNA sense strand
ggaaauagacauugaaggc

SEQ ID NO: 2624066 - RNA, 19 nt, Homo sapiens
  misc_RNA (1)...(19): siRNA sense strand
agucaaauggguugguguu

SEQ ID NO: 2624067 - RNA, 19 nt, Homo sapiens
  misc_RNA (1)...(19): siRNA sense strand
ggccugaaggacugggaga

SEQ ID NO: 2624068 - RNA, 19 nt, Homo sapiens
  misc_RNA (1)...(19): siRNA sense strand
aauagacauugaaggccaa

SEQ ID NO: 2624069 - RNA, 19 nt, Homo sapiens
  misc_RNA (1)...(19): siRNA sense strand
caagaagggaaucggacca

SEQ ID NO: 2624070 - RNA, 19 nt, Homo sapiens
  misc_RNA (1)...(19): siRNA sense strand
cgagcagaucaacgagauu

SEQ ID NO: 2624071 - RNA, 19 nt, Homo sapiens
  misc_RNA (1)...(19): siRNA sense strand
cacaagaggggaagaauau

SEQ ID NO: 2624072 - RNA, 19 nt, Homo sapiens
  misc_RNA (1)...(19): siRNA sense strand
augcagaugaagugaagaa

SEQ ID NO: 2624073 - RNA, 19 nt, Homo sapiens
  misc_RNA (1)...(19): siRNA sense strand
ucacugaagaagaugcaaa

SEQ ID NO: 2624074 - RNA, 19 nt, Homo sapiens
  misc_RNA (1)...(19): siRNA sense strand
ugccaagagaguagggaau

SEQ ID NO: 2624075 - RNA, 19 nt, Homo sapiens
  misc_RNA (1)...(19): siRNA sense strand
aguaagaggcucaagacau

SEQ ID NO: 2624076 - RNA, 19 nt, Homo sapiens
  misc_RNA (1)...(19): siRNA sense strand
aguacauguuugaugagaa

SEQ ID NO: 2624077 - RNA, 19 nt, Homo sapiens
  misc_RNA (1)...(19): siRNA sense strand
cauaacaguggaaggaaga

SEQ ID NO: 2624078 - RNA, 19 nt, Homo sapiens
  misc_RNA (1)...(19): siRNA sense strand
gcagaugaagugaagaaaa

SEQ ID NO: 2624079 - RNA, 19 nt, Homo sapiens
  misc_RNA (1)...(19): siRNA sense strand
ugggaaaaccgaugggcaa

SEQ ID NO: 2624080 - RNA, 19 nt, Homo sapiens
  misc_RNA (1)...(19): siRNA sense strand
gggcugaggaagaagcaca

SEQ ID NO: 2624081 - RNA, 19 nt, Homo sapiens
  misc_RNA (1)...(19): siRNA sense strand
augcaaaguucauggugga

SEQ ID NO: 2624082 - RNA, 19 nt, Homo sapiens
  misc_RNA (1)...(19): siRNA sense strand
uuuaauacguauggaggaa

SEQ ID NO: 2624083 - RNA, 19 nt, Homo sapiens
  misc_RNA (1)...(19): siRNA sense strand
uagaagaagcuaugggaac

SEQ ID NO: 2624084 - RNA, 19 nt, Homo sapiens
  misc_RNA (1)...(19): siRNA sense strand
acauagaacugcuuaggga

SEQ ID NO: 2624085 - RNA, 19 nt, Homo sapiens
  misc_RNA (1)...(19): siRNA sense strand
aaccaaagaaauugcagaa

SEQ ID NO: 2624086 - RNA, 19 nt, Homo sapiens
  misc_RNA (1)...(19): siRNA sense strand
aaggaaaugccaagagagu

SEQ ID NO: 2624087 - RNA, 19 nt, Homo sapiens
  misc_RNA (1)...(19): siRNA sense strand
cagaaagagaaauggaaug

SEQ ID NO: 2624088 - RNA, 19 nt, Homo sapiens
  misc_RNA (1)...(19): siRNA sense strand
gugaagacuuuguuccaga

SEQ ID NO: 2624089 - RNA, 19 nt, Homo sapiens
  misc_RNA (1)...(19): siRNA sense strand
accacugacuccaaagaaa

SEQ ID NO: 2624090 - RNA, 19 nt, Homo sapiens
  misc_RNA (1)...(19): siRNA sense strand
agugaaggaccaucugaaa

SEQ ID NO: 2624091 - RNA, 19 nt, Homo sapiens
  misc_RNA (1)...(19): siRNA sense strand
cugaagaagaugcaaaguu

SEQ ID NO: 2624092 - RNA, 19 nt, Homo sapiens
  misc_RNA (1)...(19): siRNA sense strand
aagugugaccucugagaau

SEQ ID NO: 2624093 - RNA, 19 nt, Homo sapiens
  misc_RNA (1)...(19): siRNA sense strand
ccacugacuccaaagaaaa

SEQ ID NO: 2624094 - RNA, 19 nt, Homo sapiens
  misc_RNA (1)...(19): siRNA sense strand
aaagaaaaucccagcagaa

SEQ ID NO: 2624095 - RNA, 19 nt, Homo sapiens
  misc_RNA (1)...(19): siRNA sense strand
cuuuggcagaguugggaaa

SEQ ID NO: 2624096 - RNA, 19 nt, Homo sapiens
  misc_RNA (1)...(19): siRNA sense strand
acaucgucacaaugggaaa

SEQ ID NO: 2624097 - RNA, 19 nt, Homo sapiens
  misc_RNA (1)...(19): siRNA sense strand
acaaauaauuccuccagca

SEQ ID NO: 2624098 - RNA, 19 nt, Homo sapiens
  misc_RNA (1)...(19): siRNA sense strand
agauacuuacagaggaaaa

SEQ ID NO: 2624099 - RNA, 19 nt, Homo sapiens
  misc_RNA (1)...(19): siRNA sense strand
cuguacaguaagcgggaca

SEQ ID NO: 2624100 - RNA, 19 nt, Homo sapiens
  misc_RNA (1)...(19): siRNA sense strand
caguaagaggcucaagaca

SEQ ID NO: 2624101 - RNA, 19 nt, Homo sapiens
  misc_RNA (1)...(19): siRNA sense strand
ucauaacaguggaaggaag

SEQ ID NO: 2624102 - RNA, 19 nt, Homo sapiens
  misc_RNA (1)...(19): siRNA sense strand
caaccaaagaaauugcaga

SEQ ID NO: 2624103 - RNA, 19 nt, Homo sapiens
  misc_RNA (1)...(19): siRNA sense strand
cagcagaaagagaaaugga

SEQ ID NO: 2624104 - RNA, 19 nt, Homo sapiens
  misc_RNA (1)...(19): siRNA sense strand
ucaagugggcuuuggcaga

SEQ ID NO: 2624105 - RNA, 19 nt, Homo sapiens
  misc_RNA (1)...(19): siRNA sense strand
gcuuccagauguaugguga

SEQ ID NO: 2624106 - RNA, 19 nt, Homo sapiens
  misc_RNA (1)...(19): siRNA sense strand
ccaaagaaauugcagaagc

SEQ ID NO: 2624107 - RNA, 19 nt, Homo sapiens
  misc_RNA (1)...(19): siRNA sense strand
gugaaggaccaucugaaaa

SEQ ID NO: 2624108 - RNA, 19 nt, Homo sapiens
  misc_RNA (1)...(19): siRNA sense strand
gauccgaagccaacgacuu

SEQ ID NO: 2624109 - RNA, 19 nt, Homo sapiens
  misc_RNA (1)...(19): siRNA sense strand
aggaaaauauagagaagac

SEQ ID NO: 2624110 - RNA, 19 nt, Homo sapiens
  misc_RNA (1)...(19): siRNA sense strand
agaaaguggcagaauaugu

SEQ ID NO: 2624111 - RNA, 19 nt, Homo sapiens
  misc_RNA (1)...(19): siRNA sense strand
uggcagaguugggaaacau

SEQ ID NO: 2624112 - RNA, 19 nt, Homo sapiens
  misc_RNA (1)...(19): siRNA sense strand
aagaagaugcaaaguucau

SEQ ID NO: 2624113 - RNA, 19 nt, Homo sapiens
  misc_RNA (1)...(19): siRNA sense strand
agacagaacucaaggugga

SEQ ID NO: 2624114 - RNA, 19 nt, Homo sapiens
  misc_RNA (1)...(19): siRNA sense strand
gggaaaucaucuaucggua

SEQ ID NO: 2624115 - RNA, 19 nt, Homo sapiens
  misc_RNA (1)...(19): siRNA sense strand
agguggaaguaccggagua

SEQ ID NO: 2624116 - RNA, 19 nt, Homo sapiens
  misc_RNA (1)...(19): siRNA sense strand
gcacacuguucgaagcuga

SEQ ID NO: 2624117 - RNA, 19 nt, Homo sapiens
  misc_RNA (1)...(19): siRNA sense strand
uggaugggaucaaggccaa

SEQ ID NO: 2624118 - RNA, 19 nt, Homo sapiens
  misc_RNA (1)...(19): siRNA sense strand
ggaucaaggccaacgucau

SEQ ID NO: 2624119 - RNA, 19 nt, Homo sapiens
  misc_RNA (1)...(19): siRNA sense strand
ggcccagcgugguggaaaa

SEQ ID NO: 2624120 - RNA, 19 nt, Homo sapiens
  misc_RNA (1)...(19): siRNA sense strand
agaaggagcuggagggagg

SEQ ID NO: 2624121 - RNA, 19 nt, Homo sapiens
  misc_RNA (1)...(19): siRNA sense strand
auugcagccugaugggaaa

SEQ ID NO: 2624122 - RNA, 19 nt, Homo sapiens
  misc_RNA (1)...(19): siRNA sense strand
gggccaaacuauaugaccu

SEQ ID NO: 2624123 - RNA, 19 nt, Homo sapiens
  misc_RNA (1)...(19): siRNA sense strand
aagaagagcuggaagagag

SEQ ID NO: 2624124 - RNA, 19 nt, Homo sapiens
  misc_RNA (1)...(19): siRNA sense strand
agaagagcuggaagagaga

SEQ ID NO: 2624125 - RNA, 19 nt, Homo sapiens
  misc_RNA (1)...(19): siRNA sense strand
cuggaagagagaaggaagu

SEQ ID NO: 2624126 - RNA, 19 nt, Homo sapiens
  misc_RNA (1)...(19): siRNA sense strand
uggaggaacugcaggccca

SEQ ID NO: 2624127 - RNA, 19 nt, Homo sapiens
  misc_RNA (1)...(19): siRNA sense strand
cuggaagacaagagaguug

SEQ ID NO: 2624128 - RNA, 19 nt, Homo sapiens
  misc_RNA (1)...(19): siRNA sense strand
ugucgagagaucacugaaa

SEQ ID NO: 2624129 - RNA, 19 nt, Homo sapiens
  misc_RNA (1)...(19): siRNA sense strand
uggacaugcccuacgagua

SEQ ID NO: 2624130 - RNA, 19 nt, Homo sapiens
  misc_RNA (1)...(19): siRNA sense strand
caagcaagcuggagccuuc

SEQ ID NO: 2624131 - RNA, 19 nt, Homo sapiens
  misc_RNA (1)...(19): siRNA sense strand
agcgauuucuggaagacaa

SEQ ID NO: 2624132 - RNA, 19 nt, Homo sapiens
  misc_RNA (1)...(19): siRNA sense strand
cuaucaaagacucucuaaa

SEQ ID NO: 2624133 - RNA, 19 nt, Homo sapiens
  misc_RNA (1)...(19): siRNA sense strand
acuugauggcugaggucau

SEQ ID NO: 2624134 - RNA, 19 nt, Homo sapiens
  misc_RNA (1)...(19): siRNA sense strand
cugccaccacggagguaaa

SEQ ID NO: 2624135 - RNA, 19 nt, Homo sapiens
  misc_RNA (1)...(19): siRNA sense strand
aggugaacgagguggucuu

SEQ ID NO: 2624136 - RNA, 19 nt, Homo sapiens
  misc_RNA (1)...(19): siRNA sense strand
guggagggugggaaggaga

SEQ ID NO: 2624137 - RNA, 19 nt, Homo sapiens
  misc_RNA (1)...(19): siRNA sense strand
auguaaagaaugugggaaa

SEQ ID NO: 2624138 - RNA, 19 nt, Homo sapiens
  misc_RNA (1)...(19): siRNA sense strand
guguagugacugugggaaa

SEQ ID NO: 2624139 - RNA, 19 nt, Homo sapiens
  misc_RNA (1)...(19): siRNA sense strand
aauucacaguggagagaaa

SEQ ID NO: 2624140 - RNA, 19 nt, Homo sapiens
  misc_RNA (1)...(19): siRNA sense strand
aauucauacaggagagaaa

SEQ ID NO: 2624141 - RNA, 19 nt, Homo sapiens
  misc_RNA (1)...(19): siRNA sense strand
agagaaaggacuugaacca

SEQ ID NO: 2624142 - RNA, 19 nt, Homo sapiens
  misc_RNA (1)...(19): siRNA sense strand
caggaagagccaugggaga

SEQ ID NO: 2624143 - RNA, 19 nt, Homo sapiens
  misc_RNA (1)...(19): siRNA sense strand
ggacaaaggaucauugcca

SEQ ID NO: 2624144 - RNA, 19 nt, Homo sapiens
  misc_RNA (1)...(19): siRNA sense strand
agaaaggacuugaaccaga

SEQ ID NO: 2624145 - RNA, 19 nt, Homo sapiens
  misc_RNA (1)...(19): siRNA sense strand
auguagugaaugugguaaa

SEQ ID NO: 2624146 - RNA, 19 nt, Homo sapiens
  misc_RNA (1)...(19): siRNA sense strand
aggaagagccaugggagaa

SEQ ID NO: 2624147 - RNA, 19 nt, Homo sapiens
  misc_RNA (1)...(19): siRNA sense strand
cccuauaaguguagugacu

SEQ ID NO: 2624148 - RNA, 19 nt, Homo sapiens
  misc_RNA (1)...(19): siRNA sense strand
gcucauuagacaucggaga

SEQ ID NO: 2624149 - RNA, 19 nt, Homo sapiens
  misc_RNA (1)...(19): siRNA sense strand
ccaugggagaagaaggaau

SEQ ID NO: 2624150 - RNA, 19 nt, Homo sapiens
  misc_RNA (1)...(19): siRNA sense strand
ggcugaggccagagaaaca

SEQ ID NO: 2624151 - RNA, 19 nt, Homo sapiens
  misc_RNA (1)...(19): siRNA sense strand
gggaccaaaggaagaggaa

SEQ ID NO: 2624152 - RNA, 19 nt, Homo sapiens
  misc_RNA (1)...(19): siRNA sense strand
uggaacaauucuugaccau

SEQ ID NO: 2624153 - RNA, 19 nt, Homo sapiens
  misc_RNA (1)...(19): siRNA sense strand
ugaugggaccaaaggaaga

SEQ ID NO: 2624154 - RNA, 19 nt, Homo sapiens
  misc_RNA (1)...(19): siRNA sense strand
ugggaaggccuuuagucaa

SEQ ID NO: 2624155 - RNA, 19 nt, Homo sapiens
  misc_RNA (1)...(19): siRNA sense strand
ucggagaguucaugccaga

SEQ ID NO: 2624156 - RNA, 19 nt, Homo sapiens
  misc_RNA (1)...(19): siRNA sense strand
guguaaugagugugggaag

SEQ ID NO: 2624157 - RNA, 19 nt, Homo sapiens
  misc_RNA (1)...(19): siRNA sense strand
gcggagagacugagguggu

SEQ ID NO: 2624158 - RNA, 19 nt, Homo sapiens
  misc_RNA (1)...(19): siRNA sense strand
acucaggagagaagcccua

SEQ ID NO: 2624159 - RNA, 19 nt, Homo sapiens
  misc_RNA (1)...(19): siRNA sense strand
acaaaggaucauugccaca

SEQ ID NO: 2624160 - RNA, 19 nt, Homo sapiens
  misc_RNA (1)...(19): siRNA sense strand
agaaacacacgaaggagca

SEQ ID NO: 2624161 - RNA, 19 nt, Homo sapiens
  misc_RNA (1)...(19): siRNA sense strand
guugucauccauaaggaaa

SEQ ID NO: 2624162 - RNA, 19 nt, Homo sapiens
  misc_RNA (1)...(19): siRNA sense strand
ccacagggaagaaagacca

SEQ ID NO: 2624163 - RNA, 19 nt, Homo sapiens
  misc_RNA (1)...(19): siRNA sense strand
guguagugaaugugggaaa

SEQ ID NO: 2624164 - RNA, 19 nt, Homo sapiens
  misc_RNA (1)...(19): siRNA sense strand
ccuuaugaguguagugaau

SEQ ID NO: 2624165 - RNA, 19 nt, Homo sapiens
  misc_RNA (1)...(19): siRNA sense strand
gggaaauccuuuagccaga

SEQ ID NO: 2624166 - RNA, 19 nt, Homo sapiens
  misc_RNA (1)...(19): siRNA sense strand
gggaaaucuuuuagcacaa

SEQ ID NO: 2624167 - RNA, 19 nt, Homo sapiens
  misc_RNA (1)...(19): siRNA sense strand
auguggagaaugugggaaa

SEQ ID NO: 2624168 - RNA, 19 nt, Homo sapiens
  misc_RNA (1)...(19): siRNA sense strand
gguugaacaccaaggaaca

SEQ ID NO: 2624169 - RNA, 19 nt, Homo sapiens
  misc_RNA (1)...(19): siRNA sense strand
gugcagugaauguggaaaa

SEQ ID NO: 2624170 - RNA, 19 nt, Homo sapiens
  misc_RNA (1)...(19): siRNA sense strand
ccuuauacauguggagaau

SEQ ID NO: 2624171 - RNA, 19 nt, Homo sapiens
  misc_RNA (1)...(19): siRNA sense strand
agacauaggagaagucaca

SEQ ID NO: 2624172 - RNA, 19 nt, Homo sapiens
  misc_RNA (1)...(19): siRNA sense strand
gugcagugaguguuggaaa

SEQ ID NO: 2624173 - RNA, 19 nt, Homo sapiens
  misc_RNA (1)...(19): siRNA sense strand
guguagugacuguggaaaa

SEQ ID NO: 2624174 - RNA, 19 nt, Homo sapiens
  misc_RNA (1)...(19): siRNA sense strand
cguuaaacaccgaagaguu

SEQ ID NO: 2624175 - RNA, 19 nt, Homo sapiens
  misc_RNA (1)...(19): siRNA sense strand
ggaaaauccuuuagccaga

SEQ ID NO: 2624176 - RNA, 19 nt, Homo sapiens
  misc_RNA (1)...(19): siRNA sense strand
agaacguucacaagggaua

SEQ ID NO: 2624177 - RNA, 19 nt, Homo sapiens
  misc_RNA (1)...(19): siRNA sense strand
ccuuaugaguguagugacu

SEQ ID NO: 2624178 - RNA, 19 nt, Homo sapiens
  misc_RNA (1)...(19): siRNA sense strand
ggagaaugugugaaagcuu

SEQ ID NO: 2624179 - RNA, 19 nt, Homo sapiens
  misc_RNA (1)...(19): siRNA sense strand
ccuuaugagugcagugagu

SEQ ID NO: 2624180 - RNA, 19 nt, Homo sapiens
  misc_RNA (1)...(19): siRNA sense strand
ccucauuagacauaggaga

SEQ ID NO: 2624181 - RNA, 19 nt, Homo sapiens
  misc_RNA (1)...(19): siRNA sense strand
gcgaauucacaguggggaa

SEQ ID NO: 2624182 - RNA, 19 nt, Homo sapiens
  misc_RNA (1)...(19): siRNA sense strand
augugaugcuggagaacuu

SEQ ID NO: 2624183 - RNA, 19 nt, Homo sapiens
  misc_RNA (1)...(19): siRNA sense strand
agccauagcucuagccuca

SEQ ID NO: 2624184 - RNA, 19 nt, Homo sapiens
  misc_RNA (1)...(19): siRNA sense strand
ucacuaaucaccagcgaau

SEQ ID NO: 2624185 - RNA, 19 nt, Homo sapiens
  misc_RNA (1)...(19): siRNA sense strand
acgaugugaugcuggagaa

SEQ ID NO: 2624186 - RNA, 19 nt, Homo sapiens
  misc_RNA (1)...(19): siRNA sense strand
gggaaaucuuuuauccaua

SEQ ID NO: 2624187 - RNA, 19 nt, Homo sapiens
  misc_RNA (1)...(19): siRNA sense strand
gugcaaugaaugugggaag

SEQ ID NO: 2624188 - RNA, 19 nt, Homo sapiens
  misc_RNA (1)...(19): siRNA sense strand
cucauuagacauaggagaa

SEQ ID NO: 2624189 - RNA, 19 nt, Homo sapiens
  misc_RNA (1)...(19): siRNA sense strand
gagaguucacacaggagaa

SEQ ID NO: 2624190 - RNA, 19 nt, Homo sapiens
  misc_RNA (1)...(19): siRNA sense strand
cauuugaaguaucugggaa

SEQ ID NO: 2624191 - RNA, 19 nt, Homo sapiens
  misc_RNA (1)...(19): siRNA sense strand
augcagugaauguggaaaa

SEQ ID NO: 2624192 - RNA, 19 nt, Homo sapiens
  misc_RNA (1)...(19): siRNA sense strand
gccuuauacauguggagaa

SEQ ID NO: 2624193 - RNA, 19 nt, Homo sapiens
  misc_RNA (1)...(19): siRNA sense strand
aagaauucacacuggagua

SEQ ID NO: 2624194 - RNA, 19 nt, Homo sapiens
  misc_RNA (1)...(19): siRNA sense strand
gagacuucacauuggagaa

SEQ ID NO: 2624195 - RNA, 19 nt, Homo sapiens
  misc_RNA (1)...(19): siRNA sense strand
gagaagucacaccggagaa

SEQ ID NO: 2624196 - RNA, 19 nt, Homo sapiens
  misc_RNA (1)...(19): siRNA sense strand
ucuuacaugugcagugaau

SEQ ID NO: 2624197 - RNA, 19 nt, Homo sapiens
  misc_RNA (1)...(19): siRNA sense strand
ugcagugaguguuggaaau

SEQ ID NO: 2624198 - RNA, 19 nt, Homo sapiens
  misc_RNA (1)...(19): siRNA sense strand
cggagaaaggccuuaugaa

SEQ ID NO: 2624199 - RNA, 19 nt, Homo sapiens
  misc_RNA (1)...(19): siRNA sense strand
acaccagaaagaagucaaa

SEQ ID NO: 2624200 - RNA, 19 nt, Homo sapiens
  misc_RNA (1)...(19): siRNA sense strand
gaguguagugacuguggaa

SEQ ID NO: 2624201 - RNA, 19 nt, Homo sapiens
  misc_RNA (1)...(19): siRNA sense strand
guguucagcaccagggaga

SEQ ID NO: 2624202 - RNA, 19 nt, Homo sapiens
  misc_RNA (1)...(19): siRNA sense strand
ccuuaucagcagagcacuu

SEQ ID NO: 2624203 - RNA, 19 nt, Homo sapiens
  misc_RNA (1)...(19): siRNA sense strand
cagaaagaagucaaacaga

SEQ ID NO: 2624204 - RNA, 19 nt, Homo sapiens
  misc_RNA (1)...(19): siRNA sense strand
ucauuacacaccagagaau

SEQ ID NO: 2624205 - RNA, 19 nt, Homo sapiens
  misc_RNA (1)...(19): siRNA sense strand
gaccaaccccugugagaua

SEQ ID NO: 2624206 - RNA, 19 nt, Homo sapiens
  misc_RNA (1)...(19): siRNA sense strand
cuuauuacgcaccgaagaa

SEQ ID NO: 2624207 - RNA, 19 nt, Homo sapiens
  misc_RNA (1)...(19): siRNA sense strand
agccagagcuccagccuca

SEQ ID NO: 2624208 - RNA, 19 nt, Homo sapiens
  misc_RNA (1)...(19): siRNA sense strand
cagagaauucauacuggaa

SEQ ID NO: 2624209 - RNA, 19 nt, Homo sapiens
  misc_RNA (1)...(19): siRNA sense strand
agaaaugccuguaccacga

SEQ ID NO: 2624210 - RNA, 19 nt, Homo sapiens
  misc_RNA (1)...(19): siRNA sense strand
cuucaacaccagagaguuc

SEQ ID NO: 2624211 - RNA, 19 nt, Homo sapiens
  misc_RNA (1)...(19): siRNA sense strand
agacggggcauguaggaaa

SEQ ID NO: 2624212 - RNA, 19 nt, Homo sapiens
  misc_RNA (1)...(19): siRNA sense strand
cuugcaaggagguugggaa

SEQ ID NO: 2624213 - RNA, 19 nt, Homo sapiens
  misc_RNA (1)...(19): siRNA sense strand
gaaaguucauacuggagca

SEQ ID NO: 2624214 - RNA, 19 nt, Homo sapiens
  misc_RNA (1)...(19): siRNA sense strand
ccaagagugcaguggccuu

SEQ ID NO: 2624215 - RNA, 19 nt, Homo sapiens
  misc_RNA (1)...(19): siRNA sense strand
ggaaacaaaucaagggcaa

SEQ ID NO: 2624216 - RNA, 19 nt, Homo sapiens
  misc_RNA (1)...(19): siRNA sense strand
gcgaagaauaugaggaaca

SEQ ID NO: 2624217 - RNA, 19 nt, Homo sapiens
  misc_RNA (1)...(19): siRNA sense strand
augaagaacuacaaggaaa

SEQ ID NO: 2624218 - RNA, 19 nt, Homo sapiens
  misc_RNA (1)...(19): siRNA sense strand
aaaucaagggcaagagaaa

SEQ ID NO: 2624219 - RNA, 19 nt, Homo sapiens
  misc_RNA (1)...(19): siRNA sense strand
gggaaguguaagugagaca

SEQ ID NO: 2624220 - RNA, 19 nt, Homo sapiens
  misc_RNA (1)...(19): siRNA sense strand
cagcaauugaggagcuaaa

SEQ ID NO: 2624221 - RNA, 19 nt, Homo sapiens
  misc_RNA (1)...(19): siRNA sense strand
cuaaagaacucgauggugu

SEQ ID NO: 2624222 - RNA, 19 nt, Homo sapiens
  misc_RNA (1)...(19): siRNA sense strand
uggcguaaaugcauggaaa

SEQ ID NO: 2624223 - RNA, 19 nt, Homo sapiens
  misc_RNA (1)...(19): siRNA sense strand
cuaacaaagagaugaagaa

SEQ ID NO: 2624224 - RNA, 19 nt, Homo sapiens
  misc_RNA (1)...(19): siRNA sense strand
ucucagaagggaaguguaa

SEQ ID NO: 2624225 - RNA, 19 nt, Homo sapiens
  misc_RNA (1)...(19): siRNA sense strand
ggacacaaguucaguggga

SEQ ID NO: 2624226 - RNA, 19 nt, Homo sapiens
  misc_RNA (1)...(19): siRNA sense strand
ugaagaacuacaaggaaau

SEQ ID NO: 2624227 - RNA, 19 nt, Homo sapiens
  misc_RNA (1)...(19): siRNA sense strand
ggacauggaaacaaaucaa

SEQ ID NO: 2624228 - RNA, 19 nt, Homo sapiens
  misc_RNA (1)...(19): siRNA sense strand
gaugaagaggacauggaaa

SEQ ID NO: 2624229 - RNA, 19 nt, Homo sapiens
  misc_RNA (1)...(19): siRNA sense strand
ugguaaacuaacugagauu

SEQ ID NO: 2624230 - RNA, 19 nt, Homo sapiens
  misc_RNA (1)...(19): siRNA sense strand
guguuuaggcauuggaaaa

SEQ ID NO: 2624231 - RNA, 19 nt, Homo sapiens
  misc_RNA (1)...(19): siRNA sense strand
gaaugaauguggcaggaga

SEQ ID NO: 2624232 - RNA, 19 nt, Homo sapiens
  misc_RNA (1)...(19): siRNA sense strand
cuuaaugcagccugagaaa

SEQ ID NO: 2624233 - RNA, 19 nt, Homo sapiens
  misc_RNA (1)...(19): siRNA sense strand
gcacauguacagucagaau

SEQ ID NO: 2624234 - RNA, 19 nt, Homo sapiens
  misc_RNA (1)...(19): siRNA sense strand
uggcgaagaauaugaggaa

SEQ ID NO: 2624235 - RNA, 19 nt, Homo sapiens
  misc_RNA (1)...(19): siRNA sense strand
caggaguauuuguguggaa

SEQ ID NO: 2624236 - RNA, 19 nt, Homo sapiens
  misc_RNA (1)...(19): siRNA sense strand
ggaaauaauguucugguga

SEQ ID NO: 2624237 - RNA, 19 nt, Homo sapiens
  misc_RNA (1)...(19): siRNA sense strand
ccuuuagugucuagaucua

SEQ ID NO: 2624238 - RNA, 19 nt, Homo sapiens
  misc_RNA (1)...(19): siRNA sense strand
acgaagaccuccugagacu

SEQ ID NO: 2624239 - RNA, 19 nt, Homo sapiens
  misc_RNA (1)...(19): siRNA sense strand
auguacaaucugugguaaa

SEQ ID NO: 2624240 - RNA, 19 nt, Homo sapiens
  misc_RNA (1)...(19): siRNA sense strand
gauaaaacaacuaggauca

SEQ ID NO: 2624241 - RNA, 19 nt, Homo sapiens
  misc_RNA (1)...(19): siRNA sense strand
guguaagcucugugaauga

SEQ ID NO: 2624242 - RNA, 19 nt, Homo sapiens
  misc_RNA (1)...(19): siRNA sense strand
gggagaacaaagugcauca

SEQ ID NO: 2624243 - RNA, 19 nt, Homo sapiens
  misc_RNA (1)...(19): siRNA sense strand
guucagaugacuauaagaa

SEQ ID NO: 2624244 - RNA, 19 nt, Homo sapiens
  misc_RNA (1)...(19): siRNA sense strand
acaugaagaugaugagcca

SEQ ID NO: 2624245 - RNA, 19 nt, Homo sapiens
  misc_RNA (1)...(19): siRNA sense strand
cuaugaagacaaacagaau

SEQ ID NO: 2624246 - RNA, 19 nt, Homo sapiens
  misc_RNA (1)...(19): siRNA sense strand
gagaaaggcuguaucagga

SEQ ID NO: 2624247 - RNA, 19 nt, Homo sapiens
  misc_RNA (1)...(19): siRNA sense strand
gcauggaaacacuggguca

SEQ ID NO: 2624248 - RNA, 19 nt, Homo sapiens
  misc_RNA (1)...(19): siRNA sense strand
gggcgagauaugaacuuaa

SEQ ID NO: 2624249 - RNA, 19 nt, Homo sapiens
  misc_RNA (1)...(19): siRNA sense strand
cuacaaggcugcaaggugu

SEQ ID NO: 2624250 - RNA, 19 nt, Homo sapiens
  misc_RNA (1)...(19): siRNA sense strand
ggaacaacacuuaagacuu

SEQ ID NO: 2624251 - RNA, 19 nt, Homo sapiens
  misc_RNA (1)...(19): siRNA sense strand
auuaugaacuggaugaaga

SEQ ID NO: 2624252 - RNA, 19 nt, Homo sapiens
  misc_RNA (1)...(19): siRNA sense strand
cgucaguggaagaugauga

SEQ ID NO: 2624253 - RNA, 19 nt, Homo sapiens
  misc_RNA (1)...(19): siRNA sense strand
ugaugauaguucugacaau

SEQ ID NO: 2624254 - RNA, 19 nt, Homo sapiens
  misc_RNA (1)...(19): siRNA sense strand
uggaacagauaaugaagau

SEQ ID NO: 2624255 - RNA, 19 nt, Homo sapiens
  misc_RNA (1)...(19): siRNA sense strand
gaccgaaacaccuuggaaa

SEQ ID NO: 2624256 - RNA, 19 nt, Homo sapiens
  misc_RNA (1)...(19): siRNA sense strand
cagaagggccagacagcuu

SEQ ID NO: 2624257 - RNA, 19 nt, Homo sapiens
  misc_RNA (1)...(19): siRNA sense strand
aguaaaggugcuggaaaua

SEQ ID NO: 2624258 - RNA, 19 nt, Homo sapiens
  misc_RNA (1)...(19): siRNA sense strand
ugaacagucacaagacaaa

SEQ ID NO: 2624259 - RNA, 19 nt, Homo sapiens
  misc_RNA (1)...(19): siRNA sense strand
caucaguucugcagcaaaa

SEQ ID NO: 2624260 - RNA, 19 nt, Homo sapiens
  misc_RNA (1)...(19): siRNA sense strand
uuguaaaucucaaggaacu

SEQ ID NO: 2624261 - RNA, 19 nt, Homo sapiens
  misc_RNA (1)...(19): siRNA sense strand
gauacuuggaggacagaau

SEQ ID NO: 2624262 - RNA, 19 nt, Homo sapiens
  misc_RNA (1)...(19): siRNA sense strand
gcguaaaugcauggaaaca

SEQ ID NO: 2624263 - RNA, 19 nt, Homo sapiens
  misc_RNA (1)...(19): siRNA sense strand
cugcgaagcuggcaaccaa

SEQ ID NO: 2624264 - RNA, 19 nt, Homo sapiens
  misc_RNA (1)...(19): siRNA sense strand
aaaagggagccaagagaaa

SEQ ID NO: 2624265 - RNA, 19 nt, Homo sapiens
  misc_RNA (1)...(19): siRNA sense strand
aaugauggccaauuagaaa

SEQ ID NO: 2624266 - RNA, 19 nt, Homo sapiens
  misc_RNA (1)...(19): siRNA sense strand
aggugugacuguuguaaau

SEQ ID NO: 2624267 - RNA, 19 nt, Homo sapiens
  misc_RNA (1)...(19): siRNA sense strand
uauaauugguucagaccuu

SEQ ID NO: 2624268 - RNA, 19 nt, Homo sapiens
  misc_RNA (1)...(19): siRNA sense strand
gggaguacggccauggcaa

SEQ ID NO: 2624269 - RNA, 19 nt, Homo sapiens
  misc_RNA (1)...(19): siRNA sense strand
agguguaagcucugugaau

SEQ ID NO: 2624270 - RNA, 19 nt, Homo sapiens
  misc_RNA (1)...(19): siRNA sense strand
cacaaugccugauggaaaa

SEQ ID NO: 2624271 - RNA, 19 nt, Homo sapiens
  misc_RNA (1)...(19): siRNA sense strand
cagaaauccuggaauggga

SEQ ID NO: 2624272 - RNA, 19 nt, Homo sapiens
  misc_RNA (1)...(19): siRNA sense strand
acucgaugguguugugaga

SEQ ID NO: 2624273 - RNA, 19 nt, Homo sapiens
  misc_RNA (1)...(19): siRNA sense strand
acggccaaauggagagaau

SEQ ID NO: 2624274 - RNA, 19 nt, Homo sapiens
  misc_RNA (1)...(19): siRNA sense strand
ugcucuaguucuacagaua

SEQ ID NO: 2624275 - RNA, 19 nt, Homo sapiens
  misc_RNA (1)...(19): siRNA sense strand
ucgaugguguugugagaga

SEQ ID NO: 2624276 - RNA, 19 nt, Homo sapiens
  misc_RNA (1)...(19): siRNA sense strand
gaguauuuguguggaagua

SEQ ID NO: 2624277 - RNA, 19 nt, Homo sapiens
  misc_RNA (1)...(19): siRNA sense strand
acuaaaggagcucuaaaua

SEQ ID NO: 2624278 - RNA, 19 nt, Homo sapiens
  misc_RNA (1)...(19): siRNA sense strand
ggaaacaaaucaagggcaa

SEQ ID NO: 2624279 - RNA, 19 nt, Homo sapiens
  misc_RNA (1)...(19): siRNA sense strand
gcgaagaauaugaggaaca

SEQ ID NO: 2624280 - RNA, 19 nt, Homo sapiens
  misc_RNA (1)...(19): siRNA sense strand
augaagaacuacaaggaaa

SEQ ID NO: 2624281 - RNA, 19 nt, Homo sapiens
  misc_RNA (1)...(19): siRNA sense strand
aaaucaagggcaagagaaa

SEQ ID NO: 2624282 - RNA, 19 nt, Homo sapiens
  misc_RNA (1)...(19): siRNA sense strand
gggaaguguaagugagaca

SEQ ID NO: 2624283 - RNA, 19 nt, Homo sapiens
  misc_RNA (1)...(19): siRNA sense strand
cagcaauugaggagcuaaa

SEQ ID NO: 2624284 - RNA, 19 nt, Homo sapiens
  misc_RNA (1)...(19): siRNA sense strand
cuaaagaacucgauggugu

SEQ ID NO: 2624285 - RNA, 19 nt, Homo sapiens
  misc_RNA (1)...(19): siRNA sense strand
uggcguaaaugcauggaaa

SEQ ID NO: 2624286 - RNA, 19 nt, Homo sapiens
  misc_RNA (1)...(19): siRNA sense strand
cuaacaaagagaugaagaa

SEQ ID NO: 2624287 - RNA, 19 nt, Homo sapiens
  misc_RNA (1)...(19): siRNA sense strand
ucucagaagggaaguguaa

SEQ ID NO: 2624288 - RNA, 19 nt, Homo sapiens
  misc_RNA (1)...(19): siRNA sense strand
ggacacaaguucaguggga

SEQ ID NO: 2624289 - RNA, 19 nt, Homo sapiens
  misc_RNA (1)...(19): siRNA sense strand
ugaagaacuacaaggaaau

SEQ ID NO: 2624290 - RNA, 19 nt, Homo sapiens
  misc_RNA (1)...(19): siRNA sense strand
ggacauggaaacaaaucaa

SEQ ID NO: 2624291 - RNA, 19 nt, Homo sapiens
  misc_RNA (1)...(19): siRNA sense strand
gaugaagaggacauggaaa

SEQ ID NO: 2624292 - RNA, 19 nt, Homo sapiens
  misc_RNA (1)...(19): siRNA sense strand
ugguaaacuaacugagauu

SEQ ID NO: 2624293 - RNA, 19 nt, Homo sapiens
  misc_RNA (1)...(19): siRNA sense strand
guguuuaggcauuggaaaa

SEQ ID NO: 2624294 - RNA, 19 nt, Homo sapiens
  misc_RNA (1)...(19): siRNA sense strand
gaaugaauguggcaggaga

SEQ ID NO: 2624295 - RNA, 19 nt, Homo sapiens
  misc_RNA (1)...(19): siRNA sense strand
cuuaaugcagccugagaaa

SEQ ID NO: 2624296 - RNA, 19 nt, Homo sapiens
  misc_RNA (1)...(19): siRNA sense strand
gcacauguacagucagaau

SEQ ID NO: 2624297 - RNA, 19 nt, Homo sapiens
  misc_RNA (1)...(19): siRNA sense strand
uggcgaagaauaugaggaa

SEQ ID NO: 2624298 - RNA, 19 nt, Homo sapiens
  misc_RNA (1)...(19): siRNA sense strand
caggaguauuuguguggaa

SEQ ID NO: 2624299 - RNA, 19 nt, Homo sapiens
  misc_RNA (1)...(19): siRNA sense strand
ggaaauaauguucugguga

SEQ ID NO: 2624300 - RNA, 19 nt, Homo sapiens
  misc_RNA (1)...(19): siRNA sense strand
ccuuuagugucuagaucua

SEQ ID NO: 2624301 - RNA, 19 nt, Homo sapiens
  misc_RNA (1)...(19): siRNA sense strand
acgaagaccuccugagacu

SEQ ID NO: 2624302 - RNA, 19 nt, Homo sapiens
  misc_RNA (1)...(19): siRNA sense strand
auguacaaucugugguaaa

SEQ ID NO: 2624303 - RNA, 19 nt, Homo sapiens
  misc_RNA (1)...(19): siRNA sense strand
gauaaaacaacuaggauca

SEQ ID NO: 2624304 - RNA, 19 nt, Homo sapiens
  misc_RNA (1)...(19): siRNA sense strand
guguaagcucugugaauga

SEQ ID NO: 2624305 - RNA, 19 nt, Homo sapiens
  misc_RNA (1)...(19): siRNA sense strand
gggagaacaaagugcauca

SEQ ID NO: 2624306 - RNA, 19 nt, Homo sapiens
  misc_RNA (1)...(19): siRNA sense strand
guucagaugacuauaagaa

SEQ ID NO: 2624307 - RNA, 19 nt, Homo sapiens
  misc_RNA (1)...(19): siRNA sense strand
acaugaagaugaugagcca

SEQ ID NO: 2624308 - RNA, 19 nt, Homo sapiens
  misc_RNA (1)...(19): siRNA sense strand
cuaugaagacaaacagaau

SEQ ID NO: 2624309 - RNA, 19 nt, Homo sapiens
  misc_RNA (1)...(19): siRNA sense strand
gagaaaggcuguaucagga

SEQ ID NO: 2624310 - RNA, 19 nt, Homo sapiens
  misc_RNA (1)...(19): siRNA sense strand
gcauggaaacacuggguca

SEQ ID NO: 2624311 - RNA, 19 nt, Homo sapiens
  misc_RNA (1)...(19): siRNA sense strand
gggcgagauaugaacuuaa

SEQ ID NO: 2624312 - RNA, 19 nt, Homo sapiens
  misc_RNA (1)...(19): siRNA sense strand
cuacaaggcugcaaggugu

SEQ ID NO: 2624313 - RNA, 19 nt, Homo sapiens
  misc_RNA (1)...(19): siRNA sense strand
ggaacaacacuuaagacuu

SEQ ID NO: 2624314 - RNA, 19 nt, Homo sapiens
  misc_RNA (1)...(19): siRNA sense strand
auuaugaacuggaugaaga

SEQ ID NO: 2624315 - RNA, 19 nt, Homo sapiens
  misc_RNA (1)...(19): siRNA sense strand
cgucaguggaagaugauga

SEQ ID NO: 2624316 - RNA, 19 nt, Homo sapiens
  misc_RNA (1)...(19): siRNA sense strand
ugaugauaguucugacaau

SEQ ID NO: 2624317 - RNA, 19 nt, Homo sapiens
  misc_RNA (1)...(19): siRNA sense strand
uggaacagauaaugaagau

SEQ ID NO: 2624318 - RNA, 19 nt, Homo sapiens
  misc_RNA (1)...(19): siRNA sense strand
gaccgaaacaccuuggaaa

SEQ ID NO: 2624319 - RNA, 19 nt, Homo sapiens
  misc_RNA (1)...(19): siRNA sense strand
cagaagggccagacagcuu

SEQ ID NO: 2624320 - RNA, 19 nt, Homo sapiens
  misc_RNA (1)...(19): siRNA sense strand
aguaaaggugcuggaaaua

SEQ ID NO: 2624321 - RNA, 19 nt, Homo sapiens
  misc_RNA (1)...(19): siRNA sense strand
ugaacagucacaagacaaa

SEQ ID NO: 2624322 - RNA, 19 nt, Homo sapiens
  misc_RNA (1)...(19): siRNA sense strand
caucaguucugcagcaaaa

SEQ ID NO: 2624323 - RNA, 19 nt, Homo sapiens
  misc_RNA (1)...(19): siRNA sense strand
uuguaaaucucaaggaacu

SEQ ID NO: 2624324 - RNA, 19 nt, Homo sapiens
  misc_RNA (1)...(19): siRNA sense strand
gauacuuggaggacagaau

SEQ ID NO: 2624325 - RNA, 19 nt, Homo sapiens
  misc_RNA (1)...(19): siRNA sense strand
gcguaaaugcauggaaaca

SEQ ID NO: 2624326 - RNA, 19 nt, Homo sapiens
  misc_RNA (1)...(19): siRNA sense strand
cugcgaagcuggcaaccaa

SEQ ID NO: 2624327 - RNA, 19 nt, Homo sapiens
  misc_RNA (1)...(19): siRNA sense strand
aaaagggagccaagagaaa

SEQ ID NO: 2624328 - RNA, 19 nt, Homo sapiens
  misc_RNA (1)...(19): siRNA sense strand
aaugauggccaauuagaaa

SEQ ID NO: 2624329 - RNA, 19 nt, Homo sapiens
  misc_RNA (1)...(19): siRNA sense strand
aggugugacuguuguaaau

SEQ ID NO: 2624330 - RNA, 19 nt, Homo sapiens
  misc_RNA (1)...(19): siRNA sense strand
uauaauugguucagaccuu

SEQ ID NO: 2624331 - RNA, 19 nt, Homo sapiens
  misc_RNA (1)...(19): siRNA sense strand
gggaguacggccauggcaa

SEQ ID NO: 2624332 - RNA, 19 nt, Homo sapiens
  misc_RNA (1)...(19): siRNA sense strand
agguguaagcucugugaau

SEQ ID NO: 2624333 - RNA, 19 nt, Homo sapiens
  misc_RNA (1)...(19): siRNA sense strand
cacaaugccugauggaaaa

SEQ ID NO: 2624334 - RNA, 19 nt, Homo sapiens
  misc_RNA (1)...(19): siRNA sense strand
cagaaauccuggaauggga

SEQ ID NO: 2624335 - RNA, 19 nt, Homo sapiens
  misc_RNA (1)...(19): siRNA sense strand
acucgaugguguugugaga

SEQ ID NO: 2624336 - RNA, 19 nt, Homo sapiens
  misc_RNA (1)...(19): siRNA sense strand
acggccaaauggagagaau

SEQ ID NO: 2624337 - RNA, 19 nt, Homo sapiens
  misc_RNA (1)...(19): siRNA sense strand
ugcucuaguucuacagaua

SEQ ID NO: 2624338 - RNA, 19 nt, Homo sapiens
  misc_RNA (1)...(19): siRNA sense strand
ucgaugguguugugagaga

SEQ ID NO: 2624339 - RNA, 19 nt, Homo sapiens
  misc_RNA (1)...(19): siRNA sense strand
gaguauuuguguggaagua

SEQ ID NO: 2624340 - RNA, 19 nt, Homo sapiens
  misc_RNA (1)...(19): siRNA sense strand
acuaaaggagcucuaaaua

SEQ ID NO: 2624341 - RNA, 19 nt, Homo sapiens
  misc_RNA (1)...(19): siRNA sense strand
augaguuguuguugggaaa

SEQ ID NO: 2624342 - RNA, 19 nt, Homo sapiens
  misc_RNA (1)...(19): siRNA sense strand
augaagacguggugcgaga

SEQ ID NO: 2624343 - RNA, 19 nt, Homo sapiens
  misc_RNA (1)...(19): siRNA sense strand
aggcgaggcucaaggcuga

SEQ ID NO: 2624344 - RNA, 19 nt, Homo sapiens
  misc_RNA (1)...(19): siRNA sense strand
cgaugauguaguugauuau

SEQ ID NO: 2624345 - RNA, 19 nt, Homo sapiens
  misc_RNA (1)...(19): siRNA sense strand
ccuuugaccuggaugccaa

SEQ ID NO: 2624346 - RNA, 19 nt, Homo sapiens
  misc_RNA (1)...(19): siRNA sense strand
cugaagaaccaagggaaga

SEQ ID NO: 2624347 - RNA, 19 nt, Homo sapiens
  misc_RNA (1)...(19): siRNA sense strand
gugaacuggcugaggagga

SEQ ID NO: 2624348 - RNA, 19 nt, Homo sapiens
  misc_RNA (1)...(19): siRNA sense strand
augaguuguuguugggaaa

SEQ ID NO: 2624349 - RNA, 19 nt, Homo sapiens
  misc_RNA (1)...(19): siRNA sense strand
augaagacguggugcgaga

SEQ ID NO: 2624350 - RNA, 19 nt, Homo sapiens
  misc_RNA (1)...(19): siRNA sense strand
aggcgaggcucaaggcuga

SEQ ID NO: 2624351 - RNA, 19 nt, Homo sapiens
  misc_RNA (1)...(19): siRNA sense strand
cgaugauguaguugauuau

SEQ ID NO: 2624352 - RNA, 19 nt, Homo sapiens
  misc_RNA (1)...(19): siRNA sense strand
ggccaaagcaucagcacca

SEQ ID NO: 2624353 - RNA, 19 nt, Homo sapiens
  misc_RNA (1)...(19): siRNA sense strand
ccuuugaccuggaugccaa

SEQ ID NO: 2624354 - RNA, 19 nt, Homo sapiens
  misc_RNA (1)...(19): siRNA sense strand
cugaagaaccaagggaaga

SEQ ID NO: 2624355 - RNA, 19 nt, Homo sapiens
  misc_RNA (1)...(19): siRNA sense strand
gugaacuggcugaggagga

SEQ ID NO: 2624356 - RNA, 19 nt, Homo sapiens
  misc_RNA (1)...(19): siRNA sense strand
ccaaagagaaagaagagac

SEQ ID NO: 2624357 - RNA, 19 nt, Homo sapiens
  misc_RNA (1)...(19): siRNA sense strand
gauucauacaggugagaaa

SEQ ID NO: 2624358 - RNA, 19 nt, Homo sapiens
  misc_RNA (1)...(19): siRNA sense strand
gauugaagaaauugaggaa

SEQ ID NO: 2624359 - RNA, 19 nt, Homo sapiens
  misc_RNA (1)...(19): siRNA sense strand
auguagugacugugggaaa

SEQ ID NO: 2624360 - RNA, 19 nt, Homo sapiens
  misc_RNA (1)...(19): siRNA sense strand
augucaugauggagaauua

SEQ ID NO: 2624361 - RNA, 19 nt, Homo sapiens
  misc_RNA (1)...(19): siRNA sense strand
aaacagagcuucagccaga

SEQ ID NO: 2624362 - RNA, 19 nt, Homo sapiens
  misc_RNA (1)...(19): siRNA sense strand
ugggaaauaccaagggaau

SEQ ID NO: 2624363 - RNA, 19 nt, Homo sapiens
  misc_RNA (1)...(19): siRNA sense strand
cgacaaaaguuucagucaa

SEQ ID NO: 2624364 - RNA, 19 nt, Homo sapiens
  misc_RNA (1)...(19): siRNA sense strand
aauacacacaggagagaaa

SEQ ID NO: 2624365 - RNA, 19 nt, Homo sapiens
  misc_RNA (1)...(19): siRNA sense strand
ugauggagaauuauggaaa

SEQ ID NO: 2624366 - RNA, 19 nt, Homo sapiens
  misc_RNA (1)...(19): siRNA sense strand
agauaaacaaagagggauc

SEQ ID NO: 2624367 - RNA, 19 nt, Homo sapiens
  misc_RNA (1)...(19): siRNA sense strand
gugcagacaguguggaaaa

SEQ ID NO: 2624368 - RNA, 19 nt, Homo sapiens
  misc_RNA (1)...(19): siRNA sense strand
gaccaaacucagaagagaa

SEQ ID NO: 2624369 - RNA, 19 nt, Homo sapiens
  misc_RNA (1)...(19): siRNA sense strand
augugaugaaugugggaaa

SEQ ID NO: 2624370 - RNA, 19 nt, Homo sapiens
  misc_RNA (1)...(19): siRNA sense strand
guguaauuacuguggaaaa

SEQ ID NO: 2624371 - RNA, 19 nt, Homo sapiens
  misc_RNA (1)...(19): siRNA sense strand
ccaaauguaagaagagcuu

SEQ ID NO: 2624372 - RNA, 19 nt, Homo sapiens
  misc_RNA (1)...(19): siRNA sense strand
acaccagggagaagacuua

SEQ ID NO: 2624373 - RNA, 19 nt, Homo sapiens
  misc_RNA (1)...(19): siRNA sense strand
cuguaaaacaagagauuga

SEQ ID NO: 2624374 - RNA, 19 nt, Homo sapiens
  misc_RNA (1)...(19): siRNA sense strand
gggaaaagcuucagccgga

SEQ ID NO: 2624375 - RNA, 19 nt, Homo sapiens
  misc_RNA (1)...(19): siRNA sense strand
auguacugucugugggaaa

SEQ ID NO: 2624376 - RNA, 19 nt, Homo sapiens
  misc_RNA (1)...(19): siRNA sense strand
ugaacagagauaaggauga

SEQ ID NO: 2624377 - RNA, 19 nt, Homo sapiens
  misc_RNA (1)...(19): siRNA sense strand
ucagaagagaaaugccaua

SEQ ID NO: 2624378 - RNA, 19 nt, Homo sapiens
  misc_RNA (1)...(19): siRNA sense strand
auguggugaaugugggaaa

SEQ ID NO: 2624379 - RNA, 19 nt, Homo sapiens
  misc_RNA (1)...(19): siRNA sense strand
aauccacacuggugagaga

SEQ ID NO: 2624380 - RNA, 19 nt, Homo sapiens
  misc_RNA (1)...(19): siRNA sense strand
accaaacucagaagagaaa

SEQ ID NO: 2624381 - RNA, 19 nt, Homo sapiens
  misc_RNA (1)...(19): siRNA sense strand
aagaauguggaaaggguuu

SEQ ID NO: 2624382 - RNA, 19 nt, Homo sapiens
  misc_RNA (1)...(19): siRNA sense strand
aagucuacccuaaggagaa

SEQ ID NO: 2624383 - RNA, 19 nt, Homo sapiens
  misc_RNA (1)...(19): siRNA sense strand
ugacccaggaacagagaau

SEQ ID NO: 2624384 - RNA, 19 nt, Homo sapiens
  misc_RNA (1)...(19): siRNA sense strand
uaguagaagcucaggucuu

SEQ ID NO: 2624385 - RNA, 19 nt, Homo sapiens
  misc_RNA (1)...(19): siRNA sense strand
uguugguagguuagauaaa

SEQ ID NO: 2624386 - RNA, 19 nt, Homo sapiens
  misc_RNA (1)...(19): siRNA sense strand
agaagagaaaugccauaaa

SEQ ID NO: 2624387 - RNA, 19 nt, Homo sapiens
  misc_RNA (1)...(19): siRNA sense strand
caguguaaacagagcuuca

SEQ ID NO: 2624388 - RNA, 19 nt, Homo sapiens
  misc_RNA (1)...(19): siRNA sense strand
uuagauaaacaaagaggga

SEQ ID NO: 2624389 - RNA, 19 nt, Homo sapiens
  misc_RNA (1)...(19): siRNA sense strand
agaauucacaccagggaga

SEQ ID NO: 2624390 - RNA, 19 nt, Homo sapiens
  misc_RNA (1)...(19): siRNA sense strand
gugugagaagugcgacaaa

SEQ ID NO: 2624391 - RNA, 19 nt, Homo sapiens
  misc_RNA (1)...(19): siRNA sense strand
cagaaauugcacacagcau

SEQ ID NO: 2624392 - RNA, 19 nt, Homo sapiens
  misc_RNA (1)...(19): siRNA sense strand
aagaugucaugauggagaa

SEQ ID NO: 2624393 - RNA, 19 nt, Homo sapiens
  misc_RNA (1)...(19): siRNA sense strand
cagaagagaaaugccauaa

SEQ ID NO: 2624394 - RNA, 19 nt, Homo sapiens
  misc_RNA (1)...(19): siRNA sense strand
augccauaaaugugaagaa

SEQ ID NO: 2624395 - RNA, 19 nt, Homo sapiens
  misc_RNA (1)...(19): siRNA sense strand
gagaauucacacuggggaa

SEQ ID NO: 2624396 - RNA, 19 nt, Homo sapiens
  misc_RNA (1)...(19): siRNA sense strand
ugaagaauguggaaagggu

SEQ ID NO: 2624397 - RNA, 19 nt, Homo sapiens
  misc_RNA (1)...(19): siRNA sense strand
acaaugaaacuaaggaaag

SEQ ID NO: 2624398 - RNA, 19 nt, Homo sapiens
  misc_RNA (1)...(19): siRNA sense strand
uuguauugaguguggaaaa

SEQ ID NO: 2624399 - RNA, 19 nt, Homo sapiens
  misc_RNA (1)...(19): siRNA sense strand
uuauacagcaggaagucua

SEQ ID NO: 2624400 - RNA, 19 nt, Homo sapiens
  misc_RNA (1)...(19): siRNA sense strand
ccuuaucagugcaaagagu

SEQ ID NO: 2624401 - RNA, 19 nt, Homo sapiens
  misc_RNA (1)...(19): siRNA sense strand
agcaggaagucuacccuaa

SEQ ID NO: 2624402 - RNA, 19 nt, Homo sapiens
  misc_RNA (1)...(19): siRNA sense strand
ccuuauaagugugagaagu

SEQ ID NO: 2624403 - RNA, 19 nt, Homo sapiens
  misc_RNA (1)...(19): siRNA sense strand
gaagaauguggaaaggguu

SEQ ID NO: 2624404 - RNA, 19 nt, Homo sapiens
  misc_RNA (1)...(19): siRNA sense strand
ggagccaacuguaaaacaa

SEQ ID NO: 2624405 - RNA, 19 nt, Homo sapiens
  misc_RNA (1)...(19): siRNA sense strand
gauucauacaggugagaaa

SEQ ID NO: 2624406 - RNA, 19 nt, Homo sapiens
  misc_RNA (1)...(19): siRNA sense strand
gauugaagaaauugaggaa

SEQ ID NO: 2624407 - RNA, 19 nt, Homo sapiens
  misc_RNA (1)...(19): siRNA sense strand
auguagugacugugggaaa

SEQ ID NO: 2624408 - RNA, 19 nt, Homo sapiens
  misc_RNA (1)...(19): siRNA sense strand
aaacagagcuucagccaga

SEQ ID NO: 2624409 - RNA, 19 nt, Homo sapiens
  misc_RNA (1)...(19): siRNA sense strand
ugggaaauaccaagggaau

SEQ ID NO: 2624410 - RNA, 19 nt, Homo sapiens
  misc_RNA (1)...(19): siRNA sense strand
cgacaaaaguuucagucaa

SEQ ID NO: 2624411 - RNA, 19 nt, Homo sapiens
  misc_RNA (1)...(19): siRNA sense strand
aauacacacaggagagaaa

SEQ ID NO: 2624412 - RNA, 19 nt, Homo sapiens
  misc_RNA (1)...(19): siRNA sense strand
agauaaacaaagagggauc

SEQ ID NO: 2624413 - RNA, 19 nt, Homo sapiens
  misc_RNA (1)...(19): siRNA sense strand
gugcagacaguguggaaaa

SEQ ID NO: 2624414 - RNA, 19 nt, Homo sapiens
  misc_RNA (1)...(19): siRNA sense strand
gaccaaacucagaagagaa

SEQ ID NO: 2624415 - RNA, 19 nt, Homo sapiens
  misc_RNA (1)...(19): siRNA sense strand
augugaugaaugugggaaa

SEQ ID NO: 2624416 - RNA, 19 nt, Homo sapiens
  misc_RNA (1)...(19): siRNA sense strand
guguaauuacuguggaaaa

SEQ ID NO: 2624417 - RNA, 19 nt, Homo sapiens
  misc_RNA (1)...(19): siRNA sense strand
ccaaauguaagaagagcuu

SEQ ID NO: 2624418 - RNA, 19 nt, Homo sapiens
  misc_RNA (1)...(19): siRNA sense strand
acaccagggagaagacuua

SEQ ID NO: 2624419 - RNA, 19 nt, Homo sapiens
  misc_RNA (1)...(19): siRNA sense strand
cuguaaaacaagagauuga

SEQ ID NO: 2624420 - RNA, 19 nt, Homo sapiens
  misc_RNA (1)...(19): siRNA sense strand
gggaaaagcuucagccgga

SEQ ID NO: 2624421 - RNA, 19 nt, Homo sapiens
  misc_RNA (1)...(19): siRNA sense strand
auguacugucugugggaaa

SEQ ID NO: 2624422 - RNA, 19 nt, Homo sapiens
  misc_RNA (1)...(19): siRNA sense strand
ucagaagagaaaugccaua

SEQ ID NO: 2624423 - RNA, 19 nt, Homo sapiens
  misc_RNA (1)...(19): siRNA sense strand
ugaacagagauaaggauga

SEQ ID NO: 2624424 - RNA, 19 nt, Homo sapiens
  misc_RNA (1)...(19): siRNA sense strand
auguggugaaugugggaaa

SEQ ID NO: 2624425 - RNA, 19 nt, Homo sapiens
  misc_RNA (1)...(19): siRNA sense strand
aauccacacuggugagaga

SEQ ID NO: 2624426 - RNA, 19 nt, Homo sapiens
  misc_RNA (1)...(19): siRNA sense strand
accaaacucagaagagaaa

SEQ ID NO: 2624427 - RNA, 19 nt, Homo sapiens
  misc_RNA (1)...(19): siRNA sense strand
aagaauguggaaaggguuu

SEQ ID NO: 2624428 - RNA, 19 nt, Homo sapiens
  misc_RNA (1)...(19): siRNA sense strand
aagucuacccuaaggagaa

SEQ ID NO: 2624429 - RNA, 19 nt, Homo sapiens
  misc_RNA (1)...(19): siRNA sense strand
ugacccaggaacagagaau

SEQ ID NO: 2624430 - RNA, 19 nt, Homo sapiens
  misc_RNA (1)...(19): siRNA sense strand
uaguagaagcucaggucuu

SEQ ID NO: 2624431 - RNA, 19 nt, Homo sapiens
  misc_RNA (1)...(19): siRNA sense strand
uguugguagguuagauaaa

SEQ ID NO: 2624432 - RNA, 19 nt, Homo sapiens
  misc_RNA (1)...(19): siRNA sense strand
agaagagaaaugccauaaa

SEQ ID NO: 2624433 - RNA, 19 nt, Homo sapiens
  misc_RNA (1)...(19): siRNA sense strand
caguguaaacagagcuuca

SEQ ID NO: 2624434 - RNA, 19 nt, Homo sapiens
  misc_RNA (1)...(19): siRNA sense strand
uuagauaaacaaagaggga

SEQ ID NO: 2624435 - RNA, 19 nt, Homo sapiens
  misc_RNA (1)...(19): siRNA sense strand
agaauucacaccagggaga

SEQ ID NO: 2624436 - RNA, 19 nt, Homo sapiens
  misc_RNA (1)...(19): siRNA sense strand
gugugagaagugcgacaaa

SEQ ID NO: 2624437 - RNA, 19 nt, Homo sapiens
  misc_RNA (1)...(19): siRNA sense strand
cagaaauugcacacagcau

SEQ ID NO: 2624438 - RNA, 19 nt, Homo sapiens
  misc_RNA (1)...(19): siRNA sense strand
cagaagagaaaugccauaa

SEQ ID NO: 2624439 - RNA, 19 nt, Homo sapiens
  misc_RNA (1)...(19): siRNA sense strand
augccauaaaugugaagaa

SEQ ID NO: 2624440 - RNA, 19 nt, Homo sapiens
  misc_RNA (1)...(19): siRNA sense strand
gagaauucacacuggggaa

SEQ ID NO: 2624441 - RNA, 19 nt, Homo sapiens
  misc_RNA (1)...(19): siRNA sense strand
ugaagaauguggaaagggu

SEQ ID NO: 2624442 - RNA, 19 nt, Homo sapiens
  misc_RNA (1)...(19): siRNA sense strand
acaaugaaacuaaggaaag

SEQ ID NO: 2624443 - RNA, 19 nt, Homo sapiens
  misc_RNA (1)...(19): siRNA sense strand
uuguauugaguguggaaaa

SEQ ID NO: 2624444 - RNA, 19 nt, Homo sapiens
  misc_RNA (1)...(19): siRNA sense strand
uuauacagcaggaagucua

SEQ ID NO: 2624445 - RNA, 19 nt, Homo sapiens
  misc_RNA (1)...(19): siRNA sense strand
ccuuaucagugcaaagagu

SEQ ID NO: 2624446 - RNA, 19 nt, Homo sapiens
  misc_RNA (1)...(19): siRNA sense strand
agcaggaagucuacccuaa

SEQ ID NO: 2624447 - RNA, 19 nt, Homo sapiens
  misc_RNA (1)...(19): siRNA sense strand
ccuuauaagugugagaagu

SEQ ID NO: 2624448 - RNA, 19 nt, Homo sapiens
  misc_RNA (1)...(19): siRNA sense strand
gaagaauguggaaaggguu

SEQ ID NO: 2624449 - RNA, 19 nt, Homo sapiens
  misc_RNA (1)...(19): siRNA sense strand
ggagccaacuguaaaacaa

SEQ ID NO: 2624450 - RNA, 19 nt, Homo sapiens
  misc_RNA (1)...(19): siRNA sense strand
gagaauacacacaggagag

SEQ ID NO: 2624451 - RNA, 19 nt, Homo sapiens
  misc_RNA (1)...(19): siRNA sense strand
gguagguuagauaaacaaa

SEQ ID NO: 2624452 - RNA, 19 nt, Homo sapiens
  misc_RNA (1)...(19): siRNA sense strand
uguaccaaauguaagaaga

SEQ ID NO: 2624453 - RNA, 19 nt, Homo sapiens
  misc_RNA (1)...(19): siRNA sense strand
uuauugaacaucagaggau

SEQ ID NO: 2624454 - RNA, 19 nt, Homo sapiens
  misc_RNA (1)...(19): siRNA sense strand
agauaaggaugaggagcca

SEQ ID NO: 2624455 - RNA, 19 nt, Homo sapiens
  misc_RNA (1)...(19): siRNA sense strand
ggaaagugguugagggcau

SEQ ID NO: 2624456 - RNA, 19 nt, Homo sapiens
  misc_RNA (1)...(19): siRNA sense strand
gggaagagggacaggaaaa

SEQ ID NO: 2624457 - RNA, 19 nt, Homo sapiens
  misc_RNA (1)...(19): siRNA sense strand
uugaagauaucgaaggaaa

SEQ ID NO: 2624458 - RNA, 19 nt, Homo sapiens
  misc_RNA (1)...(19): siRNA sense strand
cggaaagagcuucaggaaa

SEQ ID NO: 2624459 - RNA, 19 nt, Homo sapiens
  misc_RNA (1)...(19): siRNA sense strand
ggauaauacacaaagacaa

SEQ ID NO: 2624460 - RNA, 19 nt, Homo sapiens
  misc_RNA (1)...(19): siRNA sense strand
gaacagaacugaagccuga

SEQ ID NO: 2624461 - RNA, 19 nt, Homo sapiens
  misc_RNA (1)...(19): siRNA sense strand
uggaaauggaggaggaaaa

SEQ ID NO: 2624462 - RNA, 19 nt, Homo sapiens
  misc_RNA (1)...(19): siRNA sense strand
ccaacagaauggaguggaa

SEQ ID NO: 2624463 - RNA, 19 nt, Homo sapiens
  misc_RNA (1)...(19): siRNA sense strand
gaaaagaagaggaagacaa

SEQ ID NO: 2624464 - RNA, 19 nt, Homo sapiens
  misc_RNA (1)...(19): siRNA sense strand
gugguuaagcagagaacaa

SEQ ID NO: 2624465 - RNA, 19 nt, Homo sapiens
  misc_RNA (1)...(19): siRNA sense strand
ggaagaugaugaagagcca

SEQ ID NO: 2624466 - RNA, 19 nt, Homo sapiens
  misc_RNA (1)...(19): siRNA sense strand
ggaauauuguagagaagca

SEQ ID NO: 2624467 - RNA, 19 nt, Homo sapiens
  misc_RNA (1)...(19): siRNA sense strand
gaugaaaagaagaggaaga

SEQ ID NO: 2624468 - RNA, 19 nt, Homo sapiens
  misc_RNA (1)...(19): siRNA sense strand
caagcaugaccgagauaua

SEQ ID NO: 2624469 - RNA, 19 nt, Homo sapiens
  misc_RNA (1)...(19): siRNA sense strand
aaagcaaggcaaaggcaaa

SEQ ID NO: 2624470 - RNA, 19 nt, Homo sapiens
  misc_RNA (1)...(19): siRNA sense strand
cgaugaggauaguggagau

SEQ ID NO: 2624471 - RNA, 19 nt, Homo sapiens
  misc_RNA (1)...(19): siRNA sense strand
gaugaguauaugauggaua

SEQ ID NO: 2624472 - RNA, 19 nt, Homo sapiens
  misc_RNA (1)...(19): siRNA sense strand
gggugaagaaccugaugaa

SEQ ID NO: 2624473 - RNA, 19 nt, Homo sapiens
  misc_RNA (1)...(19): siRNA sense strand
cugcacaagagaagaaauu

SEQ ID NO: 2624474 - RNA, 19 nt, Homo sapiens
  misc_RNA (1)...(19): siRNA sense strand
gcggaaagagcuucaggaa

SEQ ID NO: 2624475 - RNA, 19 nt, Homo sapiens
  misc_RNA (1)...(19): siRNA sense strand
ugauaagcaaggugaagua

SEQ ID NO: 2624476 - RNA, 19 nt, Homo sapiens
  misc_RNA (1)...(19): siRNA sense strand
cugaagaauucgaugagga

SEQ ID NO: 2624477 - RNA, 19 nt, Homo sapiens
  misc_RNA (1)...(19): siRNA sense strand
ugaggauaguggagauuau

SEQ ID NO: 2624478 - RNA, 19 nt, Homo sapiens
  misc_RNA (1)...(19): siRNA sense strand
guguauguuuacuuggaaa

SEQ ID NO: 2624479 - RNA, 19 nt, Homo sapiens
  misc_RNA (1)...(19): siRNA sense strand
guggauagcaugugggacu

SEQ ID NO: 2624480 - RNA, 19 nt, Homo sapiens
  misc_RNA (1)...(19): siRNA sense strand
cugaugaagaugaugcaua

SEQ ID NO: 2624481 - RNA, 19 nt, Homo sapiens
  misc_RNA (1)...(19): siRNA sense strand
ggaugaagccaguaaaauu

SEQ ID NO: 2624482 - RNA, 19 nt, Homo sapiens
  misc_RNA (1)...(19): siRNA sense strand
agacaaaagaacaguguau

SEQ ID NO: 2624483 - RNA, 19 nt, Homo sapiens
  misc_RNA (1)...(19): siRNA sense strand
gaguguuuguacauagaua

SEQ ID NO: 2624484 - RNA, 19 nt, Homo sapiens
  misc_RNA (1)...(19): siRNA sense strand
ccuaauggaagaugaugaa

SEQ ID NO: 2624485 - RNA, 19 nt, Homo sapiens
  misc_RNA (1)...(19): siRNA sense strand
uuuacagaguagugaagaa

SEQ ID NO: 2624486 - RNA, 19 nt, Homo sapiens
  misc_RNA (1)...(19): siRNA sense strand
agaugaauuggcagauaaa

SEQ ID NO: 2624487 - RNA, 19 nt, Homo sapiens
  misc_RNA (1)...(19): siRNA sense strand
aaagaacagacgagagaga

SEQ ID NO: 2624488 - RNA, 19 nt, Homo sapiens
  misc_RNA (1)...(19): siRNA sense strand
ggauagaaucauacaagca

SEQ ID NO: 2624489 - RNA, 19 nt, Homo sapiens
  misc_RNA (1)...(19): siRNA sense strand
uugaacaggaugaugauaa

SEQ ID NO: 2624490 - RNA, 19 nt, Homo sapiens
  misc_RNA (1)...(19): siRNA sense strand
auacugugguggagaugaa

SEQ ID NO: 2624491 - RNA, 19 nt, Homo sapiens
  misc_RNA (1)...(19): siRNA sense strand
gucuaugacccuugacaaa

SEQ ID NO: 2624492 - RNA, 19 nt, Homo sapiens
  misc_RNA (1)...(19): siRNA sense strand
ccggaauauuguagagaag

SEQ ID NO: 2624493 - RNA, 19 nt, Homo sapiens
  misc_RNA (1)...(19): siRNA sense strand
agguggaaauggaggagga

SEQ ID NO: 2624494 - RNA, 19 nt, Homo sapiens
  misc_RNA (1)...(19): siRNA sense strand
aagacaauaugaagcagaa

SEQ ID NO: 2624495 - RNA, 19 nt, Homo sapiens
  misc_RNA (1)...(19): siRNA sense strand
gugacauguuagagccauu

SEQ ID NO: 2624496 - RNA, 19 nt, Homo sapiens
  misc_RNA (1)...(19): siRNA sense strand
acucugagauaauucgaaa

SEQ ID NO: 2624497 - RNA, 19 nt, Homo sapiens
  misc_RNA (1)...(19): siRNA sense strand
acagaguagugaagaaguu

SEQ ID NO: 2624498 - RNA, 19 nt, Homo sapiens
  misc_RNA (1)...(19): siRNA sense strand
guagagauccagaggagga

SEQ ID NO: 2624499 - RNA, 19 nt, Homo sapiens
  misc_RNA (1)...(19): siRNA sense strand
agugacaguaugugguuaa

SEQ ID NO: 2624500 - RNA, 19 nt, Homo sapiens
  misc_RNA (1)...(19): siRNA sense strand
cuguaaaggaguugucaca

SEQ ID NO: 2624501 - RNA, 19 nt, Homo sapiens
  misc_RNA (1)...(19): siRNA sense strand
ggcuagaacuccugcuaca

SEQ ID NO: 2624502 - RNA, 19 nt, Homo sapiens
  misc_RNA (1)...(19): siRNA sense strand
ugaagauaucgaaggaaaa

SEQ ID NO: 2624503 - RNA, 19 nt, Homo sapiens
  misc_RNA (1)...(19): siRNA sense strand
cauacaagcaugaccgaga

SEQ ID NO: 2624504 - RNA, 19 nt, Homo sapiens
  misc_RNA (1)...(19): siRNA sense strand
cagcaaaggagaagaagac

SEQ ID NO: 2624505 - RNA, 19 nt, Homo sapiens
  misc_RNA (1)...(19): siRNA sense strand
cuucaacagaguagauauu

SEQ ID NO: 2624506 - RNA, 19 nt, Homo sapiens
  misc_RNA (1)...(19): siRNA sense strand
cugcagauaucuucaaaca

SEQ ID NO: 2624507 - RNA, 19 nt, Homo sapiens
  misc_RNA (1)...(19): siRNA sense strand
ugaagaaaguaguaguagu

SEQ ID NO: 2624508 - RNA, 19 nt, Homo sapiens
  misc_RNA (1)...(19): siRNA sense strand
cggcguggcacaagccuaa

SEQ ID NO: 2624509 - RNA, 19 nt, Homo sapiens
  misc_RNA (1)...(19): siRNA sense strand
cggaauaaaaugauuggaa

SEQ ID NO: 2624510 - RNA, 19 nt, Homo sapiens
  misc_RNA (1)...(19): siRNA sense strand
gaguaaaacaaggcagaua

SEQ ID NO: 2624511 - RNA, 19 nt, Homo sapiens
  misc_RNA (1)...(19): siRNA sense strand
agaucauccucuacauuua

SEQ ID NO: 2624512 - RNA, 19 nt, Homo sapiens
  misc_RNA (1)...(19): siRNA sense strand
ugaccgagauauagcacuu

SEQ ID NO: 2624513 - RNA, 19 nt, Homo sapiens
  misc_RNA (1)...(19): siRNA sense strand
cuuuauugccugaacccua

SEQ ID NO: 2624514 - RNA, 19 nt, Homo sapiens
  misc_RNA (1)...(19): siRNA sense strand
augacaauguagaggauga

SEQ ID NO: 2624515 - RNA, 19 nt, Homo sapiens
  misc_RNA (1)...(19): siRNA sense strand
acgagcugaacuagagaaa

SEQ ID NO: 2624516 - RNA, 19 nt, Homo sapiens
  misc_RNA (1)...(19): siRNA sense strand
auaauugggaugaugacaa

SEQ ID NO: 2624517 - RNA, 19 nt, Homo sapiens
  misc_RNA (1)...(19): siRNA sense strand
gguuauaagauggagacuu

SEQ ID NO: 2624518 - RNA, 19 nt, Homo sapiens
  misc_RNA (1)...(19): siRNA sense strand
ggaaaagugaaaagagaaa

SEQ ID NO: 2624519 - RNA, 19 nt, Homo sapiens
  misc_RNA (1)...(19): siRNA sense strand
ggagagaaguagaagagga

SEQ ID NO: 2624520 - RNA, 19 nt, Homo sapiens
  misc_RNA (1)...(19): siRNA sense strand
gucaauaaaucaaggcaga

SEQ ID NO: 2624521 - RNA, 19 nt, Homo sapiens
  misc_RNA (1)...(19): siRNA sense strand
agaagaugcuguuaggaga

SEQ ID NO: 2624522 - RNA, 19 nt, Homo sapiens
  misc_RNA (1)...(19): siRNA sense strand
ccggaaaagugaaaagaga

SEQ ID NO: 2624523 - RNA, 19 nt, Homo sapiens
  misc_RNA (1)...(19): siRNA sense strand
caagaaugaaauagaggau

SEQ ID NO: 2624524 - RNA, 19 nt, Homo sapiens
  misc_RNA (1)...(19): siRNA sense strand
cauaauaccucauacccaa

SEQ ID NO: 2624525 - RNA, 19 nt, Homo sapiens
  misc_RNA (1)...(19): siRNA sense strand
gagaaguagaagaggaaag

SEQ ID NO: 2624526 - RNA, 19 nt, Homo sapiens
  misc_RNA (1)...(19): siRNA sense strand
cggaaaagugaaaagagaa

SEQ ID NO: 2624527 - RNA, 19 nt, Homo sapiens
  misc_RNA (1)...(19): siRNA sense strand
uauugagccuggagagaca

SEQ ID NO: 2624528 - RNA, 19 nt, Homo sapiens
  misc_RNA (1)...(19): siRNA sense strand
cuguggaaaugcaacuaaa

SEQ ID NO: 2624529 - RNA, 19 nt, Homo sapiens
  misc_RNA (1)...(19): siRNA sense strand
cgauacaaguuuugcccaa

SEQ ID NO: 2624530 - RNA, 19 nt, Homo sapiens
  misc_RNA (1)...(19): siRNA sense strand
acuuaauuaugcuggugaa

SEQ ID NO: 2624531 - RNA, 19 nt, Homo sapiens
  misc_RNA (1)...(19): siRNA sense strand
aauugaagaagguggcuau

SEQ ID NO: 2624532 - RNA, 19 nt, Homo sapiens
  misc_RNA (1)...(19): siRNA sense strand
ugccaaguuaacaggaaua

SEQ ID NO: 2624533 - RNA, 19 nt, Homo sapiens
  misc_RNA (1)...(19): siRNA sense strand
aaacacuacuggaccggaa

SEQ ID NO: 2624534 - RNA, 19 nt, Homo sapiens
  misc_RNA (1)...(19): siRNA sense strand
uccuauugcugcugaagaa

SEQ ID NO: 2624535 - RNA, 19 nt, Homo sapiens
  misc_RNA (1)...(19): siRNA sense strand
aagucugaagcaagaaaua

SEQ ID NO: 2624536 - RNA, 19 nt, Homo sapiens
  misc_RNA (1)...(19): siRNA sense strand
cuggugaagucccgagaga

SEQ ID NO: 2624537 - RNA, 19 nt, Homo sapiens
  misc_RNA (1)...(19): siRNA sense strand
uggagagacaauagaagau

SEQ ID NO: 2624538 - RNA, 19 nt, Homo sapiens
  misc_RNA (1)...(19): siRNA sense strand
uguuaggagagaaguagaa

SEQ ID NO: 2624539 - RNA, 19 nt, Homo sapiens
  misc_RNA (1)...(19): siRNA sense strand
aagccgagcuauugcacau

SEQ ID NO: 2624540 - RNA, 19 nt, Homo sapiens
  misc_RNA (1)...(19): siRNA sense strand
caagcaaagacaugaaaau

SEQ ID NO: 2624541 - RNA, 19 nt, Homo sapiens
  misc_RNA (1)...(19): siRNA sense strand
gaguugauccaguaguaau

SEQ ID NO: 2624542 - RNA, 19 nt, Homo sapiens
  misc_RNA (1)...(19): siRNA sense strand
caguaguaaucaugcaagu

SEQ ID NO: 2624543 - RNA, 19 nt, Homo sapiens
  misc_RNA (1)...(19): siRNA sense strand
cuggagagacaauagaaga

SEQ ID NO: 2624544 - RNA, 19 nt, Homo sapiens
  misc_RNA (1)...(19): siRNA sense strand
aagggaagcagcaggcauu

SEQ ID NO: 2624545 - RNA, 19 nt, Homo sapiens
  misc_RNA (1)...(19): siRNA sense strand
cuugagaaagggugugaca

SEQ ID NO: 2624546 - RNA, 19 nt, Homo sapiens
  misc_RNA (1)...(19): siRNA sense strand
cugcuaaaggugggaagaa

SEQ ID NO: 2624547 - RNA, 19 nt, Homo sapiens
  misc_RNA (1)...(19): siRNA sense strand
agaaugaaauagaggaugc

SEQ ID NO: 2624548 - RNA, 19 nt, Homo sapiens
  misc_RNA (1)...(19): siRNA sense strand
gcuuuaauguaugcggcaa

SEQ ID NO: 2624549 - RNA, 19 nt, Homo sapiens
  misc_RNA (1)...(19): siRNA sense strand
aguggaagaaugugaaaau

SEQ ID NO: 2624550 - RNA, 19 nt, Homo sapiens
  misc_RNA (1)...(19): siRNA sense strand
agaagguggcuauaagaga

SEQ ID NO: 2624551 - RNA, 19 nt, Homo sapiens
  misc_RNA (1)...(19): siRNA sense strand
agcaagaaauaguuacuca

SEQ ID NO: 2624552 - RNA, 19 nt, Homo sapiens
  misc_RNA (1)...(19): siRNA sense strand
guggcaauaaagaaaguuu

SEQ ID NO: 2624553 - RNA, 19 nt, Homo sapiens
  misc_RNA (1)...(19): siRNA sense strand
aagcaagacuaguggguga

SEQ ID NO: 2624554 - RNA, 19 nt, Homo sapiens
  misc_RNA (1)...(19): siRNA sense strand
aagccuuauuagagagcaa

SEQ ID NO: 2624555 - RNA, 19 nt, Homo sapiens
  misc_RNA (1)...(19): siRNA sense strand
cugugaagaauuaggagaa

SEQ ID NO: 2624556 - RNA, 19 nt, Homo sapiens
  misc_RNA (1)...(19): siRNA sense strand
ccucagaacuccaaggacu

SEQ ID NO: 2624557 - RNA, 19 nt, Homo sapiens
  misc_RNA (1)...(19): siRNA sense strand
aggaagaaguguucaggca

SEQ ID NO: 2624558 - RNA, 19 nt, Homo sapiens
  misc_RNA (1)...(19): siRNA sense strand
ucguacaaaugguccgaaa

SEQ ID NO: 2624559 - RNA, 19 nt, Homo sapiens
  misc_RNA (1)...(19): siRNA sense strand
auuaggagaaacuggaaua

SEQ ID NO: 2624560 - RNA, 19 nt, Homo sapiens
  misc_RNA (1)...(19): siRNA sense strand
gcacagaagcuuuccgacu

SEQ ID NO: 2624561 - RNA, 19 nt, Homo sapiens
  misc_RNA (1)...(19): siRNA sense strand
gcgggaagaacaaggcaca

SEQ ID NO: 2624562 - RNA, 19 nt, Homo sapiens
  misc_RNA (1)...(19): siRNA sense strand
agaacaaggcacacaacau

SEQ ID NO: 2624563 - RNA, 19 nt, Homo sapiens
  misc_RNA (1)...(19): siRNA sense strand
ugaagaauuaggagaaacu

SEQ ID NO: 2624564 - RNA, 19 nt, Homo sapiens
  misc_RNA (1)...(19): siRNA sense strand
ccuacccacccuagagaaa

SEQ ID NO: 2624565 - RNA, 19 nt, Homo sapiens
  misc_RNA (1)...(19): siRNA sense strand
uugcuaaccaugagacauu

SEQ ID NO: 2624566 - RNA, 19 nt, Homo sapiens
  misc_RNA (1)...(19): siRNA sense strand
acaaaugguccgaaagauc

SEQ ID NO: 2624567 - RNA, 19 nt, Homo sapiens
  misc_RNA (1)...(19): siRNA sense strand
cguucagacugcacacaau

SEQ ID NO: 2624568 - RNA, 19 nt, Homo sapiens
  misc_RNA (1)...(19): siRNA sense strand
uggcagcagucgaagcaga

SEQ ID NO: 2624569 - RNA, 19 nt, Homo sapiens
  misc_RNA (1)...(19): siRNA sense strand
cugcgagagaggagcugua

SEQ ID NO: 2624570 - RNA, 19 nt, Homo sapiens
  misc_RNA (1)...(19): siRNA sense strand
gggauauccgauuugcuaa

SEQ ID NO: 2624571 - RNA, 19 nt, Homo sapiens
  misc_RNA (1)...(19): siRNA sense strand
gggaagaacaaggcacaca

SEQ ID NO: 2624572 - RNA, 19 nt, Homo sapiens
  misc_RNA (1)...(19): siRNA sense strand
ccugugaagaauuaggaga

SEQ ID NO: 2624573 - RNA, 19 nt, Homo sapiens
  misc_RNA (1)...(19): siRNA sense strand
ucaagaaguuugcugcuga

SEQ ID NO: 2624574 - RNA, 19 nt, Homo sapiens
  misc_RNA (1)...(19): siRNA sense strand
agaucugcgggaagaacaa

SEQ ID NO: 2624575 - RNA, 19 nt, Homo sapiens
  misc_RNA (1)...(19): siRNA sense strand
gggugugacuggguggcua

SEQ ID NO: 2624576 - RNA, 19 nt, Homo sapiens
  misc_RNA (1)...(19): siRNA sense strand
aagaaauagcugagccuaa

SEQ ID NO: 2624577 - RNA, 19 nt, Homo sapiens
  misc_RNA (1)...(19): siRNA sense strand
ucgaagaggcagaaagaga

SEQ ID NO: 2624578 - RNA, 19 nt, Homo sapiens
  misc_RNA (1)...(19): siRNA sense strand
ccaagaaacuccugggucu

SEQ ID NO: 2624579 - RNA, 19 nt, Homo sapiens
  misc_RNA (1)...(19): siRNA sense strand
ccuaaaauguaccaagaaa

SEQ ID NO: 2624580 - RNA, 19 nt, Homo sapiens
  misc_RNA (1)...(19): siRNA sense strand
aggcagaaagagacaacaa

SEQ ID NO: 2624581 - RNA, 19 nt, Homo sapiens
  misc_RNA (1)...(19): siRNA sense strand
uuugagaaacagagaacua

SEQ ID NO: 2624582 - RNA, 19 nt, Homo sapiens
  misc_RNA (1)...(19): siRNA sense strand
ggaaacaucacaauggcua

SEQ ID NO: 2624583 - RNA, 19 nt, Homo sapiens
  misc_RNA (1)...(19): siRNA sense strand
acacagaauugaaggugga

SEQ ID NO: 2624584 - RNA, 19 nt, Homo sapiens
  misc_RNA (1)...(19): siRNA sense strand
aggaaaucgaagaggcaga

SEQ ID NO: 2624585 - RNA, 19 nt, Homo sapiens
  misc_RNA (1)...(19): siRNA sense strand
aagaaaagcugaagugcau

SEQ ID NO: 2624586 - RNA, 19 nt, Homo sapiens
  misc_RNA (1)...(19): siRNA sense strand
aaaaggaaauaguggagaa

SEQ ID NO: 2624587 - RNA, 19 nt, Homo sapiens
  misc_RNA (1)...(19): siRNA sense strand
acuggcaccuauagagaaa

SEQ ID NO: 2624588 - RNA, 19 nt, Homo sapiens
  misc_RNA (1)...(19): siRNA sense strand
guaacauauaucaggagaa

SEQ ID NO: 2624589 - RNA, 19 nt, Homo sapiens
  misc_RNA (1)...(19): siRNA sense strand
gagaacaggaaaaggaaau

SEQ ID NO: 2624590 - RNA, 19 nt, Homo sapiens
  misc_RNA (1)...(19): siRNA sense strand
aggaaauaguggagaaagc

SEQ ID NO: 2624591 - RNA, 19 nt, Homo sapiens
  misc_RNA (1)...(19): siRNA sense strand
aaggaauagcugagacaga

SEQ ID NO: 2624592 - RNA, 19 nt, Homo sapiens
  misc_RNA (1)...(19): siRNA sense strand
aggaauacaaugaaacaga

SEQ ID NO: 2624593 - RNA, 19 nt, Homo sapiens
  misc_RNA (1)...(19): siRNA sense strand
aauugaagguggagccuca

SEQ ID NO: 2624594 - RNA, 19 nt, Homo sapiens
  misc_RNA (1)...(19): siRNA sense strand
ccucagccacagauagaaa

SEQ ID NO: 2624595 - RNA, 19 nt, Homo sapiens
  misc_RNA (1)...(19): siRNA sense strand
ccacagauagaaaaggaaa

SEQ ID NO: 2624596 - RNA, 19 nt, Homo sapiens
  misc_RNA (1)...(19): siRNA sense strand
aaaauaaggaugugccuaa

SEQ ID NO: 2624597 - RNA, 19 nt, Homo sapiens
  misc_RNA (1)...(19): siRNA sense strand
gcagcagagaacaggaaaa

SEQ ID NO: 2624598 - RNA, 19 nt, Homo sapiens
  misc_RNA (1)...(19): siRNA sense strand
agaccaaaauccagcagaa

SEQ ID NO: 2624599 - RNA, 19 nt, Homo sapiens
  misc_RNA (1)...(19): siRNA sense strand
cacaauggcuauuuggaga

SEQ ID NO: 2624600 - RNA, 19 nt, Homo sapiens
  misc_RNA (1)...(19): siRNA sense strand
aggcuauauucuugacaca

SEQ ID NO: 2624601 - RNA, 19 nt, Homo sapiens
  misc_RNA (1)...(19): siRNA sense strand
aagcugaagugcaugaaaa

SEQ ID NO: 2624602 - RNA, 19 nt, Homo sapiens
  misc_RNA (1)...(19): siRNA sense strand
ucaagaaauaccugggcuu

SEQ ID NO: 2624603 - RNA, 19 nt, Homo sapiens
  misc_RNA (1)...(19): siRNA sense strand
aaaggaaauaguggagaaa

SEQ ID NO: 2624604 - RNA, 19 nt, Homo sapiens
  misc_RNA (1)...(19): siRNA sense strand
ucaaggaauagcugagaca

SEQ ID NO: 2624605 - RNA, 19 nt, Homo sapiens
  misc_RNA (1)...(19): siRNA sense strand
aaguugugccugaggaaca

SEQ ID NO: 2624606 - RNA, 19 nt, Homo sapiens
  misc_RNA (1)...(19): siRNA sense strand
acaccaagaaucagcugaa

SEQ ID NO: 2624607 - RNA, 19 nt, Homo sapiens
  misc_RNA (1)...(19): siRNA sense strand
cagagaacuacuuagaaaa

SEQ ID NO: 2624608 - RNA, 19 nt, Homo sapiens
  misc_RNA (1)...(19): siRNA sense strand
aggaaaaggaaaucgaaga

SEQ ID NO: 2624609 - RNA, 19 nt, Homo sapiens
  misc_RNA (1)...(19): siRNA sense strand
cugaaacguaucaagaaau

SEQ ID NO: 2624610 - RNA, 19 nt, Homo sapiens
  misc_RNA (1)...(19): siRNA sense strand
acaccaggaagaugcuaaa

SEQ ID NO: 2624611 - RNA, 19 nt, Homo sapiens
  misc_RNA (1)...(19): siRNA sense strand
agaggaauacaaugaaaca

SEQ ID NO: 2624612 - RNA, 19 nt, Homo sapiens
  misc_RNA (1)...(19): siRNA sense strand
augaaacagaucaaggaau

SEQ ID NO: 2624613 - RNA, 19 nt, Homo sapiens
  misc_RNA (1)...(19): siRNA sense strand
gggaaaggaccaaucucau

SEQ ID NO: 2624614 - RNA, 19 nt, Homo sapiens
  misc_RNA (1)...(19): siRNA sense strand
gaaacaucacaauggcuau

SEQ ID NO: 2624615 - RNA, 19 nt, Homo sapiens
  misc_RNA (1)...(19): siRNA sense strand
aaauaugccaagacaugaa

SEQ ID NO: 2624616 - RNA, 19 nt, Homo sapiens
  misc_RNA (1)...(19): siRNA sense strand
caucaagaagagaaccauu

SEQ ID NO: 2624617 - RNA, 19 nt, Homo sapiens
  misc_RNA (1)...(19): siRNA sense strand
aaggaugugccuaaagaau

SEQ ID NO: 2624618 - RNA, 19 nt, Homo sapiens
  misc_RNA (1)...(19): siRNA sense strand
gccaggaauaccagcaauu

SEQ ID NO: 2624619 - RNA, 19 nt, Homo sapiens
  misc_RNA (1)...(19): siRNA sense strand
gugccaagaagcugcugua

SEQ ID NO: 2624620 - RNA, 19 nt, Homo sapiens
  misc_RNA (1)...(19): siRNA sense strand
aaaggaaaucgaagaggca

SEQ ID NO: 2624621 - RNA, 19 nt, Homo sapiens
  misc_RNA (1)...(19): siRNA sense strand
gagccaccugggagcauaa

SEQ ID NO: 2624622 - RNA, 19 nt, Homo sapiens
  misc_RNA (1)...(19): siRNA sense strand
ggagcauaaccaaaguauu

SEQ ID NO: 2624623 - RNA, 19 nt, Homo sapiens
  misc_RNA (1)...(19): siRNA sense strand
uguaccaagauauggcuaa

SEQ ID NO: 2624624 - RNA, 19 nt, Homo sapiens
  misc_RNA (1)...(19): siRNA sense strand
aagaaauagcugagccuaa

SEQ ID NO: 2624625 - RNA, 19 nt, Homo sapiens
  misc_RNA (1)...(19): siRNA sense strand
ucgaagaggcagaaagaga

SEQ ID NO: 2624626 - RNA, 19 nt, Homo sapiens
  misc_RNA (1)...(19): siRNA sense strand
ccaagaaacuccugggucu

SEQ ID NO: 2624627 - RNA, 19 nt, Homo sapiens
  misc_RNA (1)...(19): siRNA sense strand
ccuaaaauguaccaagaaa

SEQ ID NO: 2624628 - RNA, 19 nt, Homo sapiens
  misc_RNA (1)...(19): siRNA sense strand
aggcagaaagagacaacaa

SEQ ID NO: 2624629 - RNA, 19 nt, Homo sapiens
  misc_RNA (1)...(19): siRNA sense strand
uuugagaaacagagaacua

SEQ ID NO: 2624630 - RNA, 19 nt, Homo sapiens
  misc_RNA (1)...(19): siRNA sense strand
ggaaacaucacaauggcua

SEQ ID NO: 2624631 - RNA, 19 nt, Homo sapiens
  misc_RNA (1)...(19): siRNA sense strand
acacagaauugaaggugga

SEQ ID NO: 2624632 - RNA, 19 nt, Homo sapiens
  misc_RNA (1)...(19): siRNA sense strand
aggaaaucgaagaggcaga

SEQ ID NO: 2624633 - RNA, 19 nt, Homo sapiens
  misc_RNA (1)...(19): siRNA sense strand
aagaaaagcugaagugcau

SEQ ID NO: 2624634 - RNA, 19 nt, Homo sapiens
  misc_RNA (1)...(19): siRNA sense strand
aaaaggaaauaguggagaa

SEQ ID NO: 2624635 - RNA, 19 nt, Homo sapiens
  misc_RNA (1)...(19): siRNA sense strand
acuggcaccuauagagaaa

SEQ ID NO: 2624636 - RNA, 19 nt, Homo sapiens
  misc_RNA (1)...(19): siRNA sense strand
guaacauauaucaggagaa

SEQ ID NO: 2624637 - RNA, 19 nt, Homo sapiens
  misc_RNA (1)...(19): siRNA sense strand
gagaacaggaaaaggaaau

SEQ ID NO: 2624638 - RNA, 19 nt, Homo sapiens
  misc_RNA (1)...(19): siRNA sense strand
aggaaauaguggagaaagc

SEQ ID NO: 2624639 - RNA, 19 nt, Homo sapiens
  misc_RNA (1)...(19): siRNA sense strand
aaggaauagcugagacaga

SEQ ID NO: 2624640 - RNA, 19 nt, Homo sapiens
  misc_RNA (1)...(19): siRNA sense strand
aggaauacaaugaaacaga

SEQ ID NO: 2624641 - RNA, 19 nt, Homo sapiens
  misc_RNA (1)...(19): siRNA sense strand
aauugaagguggagccuca

SEQ ID NO: 2624642 - RNA, 19 nt, Homo sapiens
  misc_RNA (1)...(19): siRNA sense strand
ccucagccacagauagaaa

SEQ ID NO: 2624643 - RNA, 19 nt, Homo sapiens
  misc_RNA (1)...(19): siRNA sense strand
ccacagauagaaaaggaaa

SEQ ID NO: 2624644 - RNA, 19 nt, Homo sapiens
  misc_RNA (1)...(19): siRNA sense strand
aaaauaaggaugugccuaa

SEQ ID NO: 2624645 - RNA, 19 nt, Homo sapiens
  misc_RNA (1)...(19): siRNA sense strand
gcagcagagaacaggaaaa

SEQ ID NO: 2624646 - RNA, 19 nt, Homo sapiens
  misc_RNA (1)...(19): siRNA sense strand
agaccaaaauccagcagaa

SEQ ID NO: 2624647 - RNA, 19 nt, Homo sapiens
  misc_RNA (1)...(19): siRNA sense strand
cacaauggcuauuuggaga

SEQ ID NO: 2624648 - RNA, 19 nt, Homo sapiens
  misc_RNA (1)...(19): siRNA sense strand
aggcuauauucuugacaca

SEQ ID NO: 2624649 - RNA, 19 nt, Homo sapiens
  misc_RNA (1)...(19): siRNA sense strand
aagcugaagugcaugaaaa

SEQ ID NO: 2624650 - RNA, 19 nt, Homo sapiens
  misc_RNA (1)...(19): siRNA sense strand
ucaagaaauaccugggcuu

SEQ ID NO: 2624651 - RNA, 19 nt, Homo sapiens
  misc_RNA (1)...(19): siRNA sense strand
aaaggaaauaguggagaaa

SEQ ID NO: 2624652 - RNA, 19 nt, Homo sapiens
  misc_RNA (1)...(19): siRNA sense strand
ucaaggaauagcugagaca

SEQ ID NO: 2624653 - RNA, 19 nt, Homo sapiens
  misc_RNA (1)...(19): siRNA sense strand
aaguugugccugaggaaca

SEQ ID NO: 2624654 - RNA, 19 nt, Homo sapiens
  misc_RNA (1)...(19): siRNA sense strand
acaccaagaaucagcugaa

SEQ ID NO: 2624655 - RNA, 19 nt, Homo sapiens
  misc_RNA (1)...(19): siRNA sense strand
cagagaacuacuuagaaaa

SEQ ID NO: 2624656 - RNA, 19 nt, Homo sapiens
  misc_RNA (1)...(19): siRNA sense strand
aggaaaaggaaaucgaaga

SEQ ID NO: 2624657 - RNA, 19 nt, Homo sapiens
  misc_RNA (1)...(19): siRNA sense strand
cugaaacguaucaagaaau

SEQ ID NO: 2624658 - RNA, 19 nt, Homo sapiens
  misc_RNA (1)...(19): siRNA sense strand
acaccaggaagaugcuaaa

SEQ ID NO: 2624659 - RNA, 19 nt, Homo sapiens
  misc_RNA (1)...(19): siRNA sense strand
agaggaauacaaugaaaca

SEQ ID NO: 2624660 - RNA, 19 nt, Homo sapiens
  misc_RNA (1)...(19): siRNA sense strand
augaaacagaucaaggaau

SEQ ID NO: 2624661 - RNA, 19 nt, Homo sapiens
  misc_RNA (1)...(19): siRNA sense strand
gggaaaggaccaaucucau

SEQ ID NO: 2624662 - RNA, 19 nt, Homo sapiens
  misc_RNA (1)...(19): siRNA sense strand
gaaacaucacaauggcuau

SEQ ID NO: 2624663 - RNA, 19 nt, Homo sapiens
  misc_RNA (1)...(19): siRNA sense strand
aaauaugccaagacaugaa

SEQ ID NO: 2624664 - RNA, 19 nt, Homo sapiens
  misc_RNA (1)...(19): siRNA sense strand
caucaagaagagaaccauu

SEQ ID NO: 2624665 - RNA, 19 nt, Homo sapiens
  misc_RNA (1)...(19): siRNA sense strand
aaggaugugccuaaagaau

SEQ ID NO: 2624666 - RNA, 19 nt, Homo sapiens
  misc_RNA (1)...(19): siRNA sense strand
gccaggaauaccagcaauu

SEQ ID NO: 2624667 - RNA, 19 nt, Homo sapiens
  misc_RNA (1)...(19): siRNA sense strand
gugccaagaagcugcugua

SEQ ID NO: 2624668 - RNA, 19 nt, Homo sapiens
  misc_RNA (1)...(19): siRNA sense strand
aaaggaaaucgaagaggca

SEQ ID NO: 2624669 - RNA, 19 nt, Homo sapiens
  misc_RNA (1)...(19): siRNA sense strand
gagccaccugggagcauaa

SEQ ID NO: 2624670 - RNA, 19 nt, Homo sapiens
  misc_RNA (1)...(19): siRNA sense strand
ggagcauaaccaaaguauu

SEQ ID NO: 2624671 - RNA, 19 nt, Homo sapiens
  misc_RNA (1)...(19): siRNA sense strand
uguaccaagauauggcuaa

SEQ ID NO: 2624672 - RNA, 19 nt, Homo sapiens
  misc_RNA (1)...(19): siRNA sense strand
gagagaugguaccgggcua

SEQ ID NO: 2624673 - RNA, 19 nt, Homo sapiens
  misc_RNA (1)...(19): siRNA sense strand
aguacuacaccaagggcaa

SEQ ID NO: 2624674 - RNA, 19 nt, Homo sapiens
  misc_RNA (1)...(19): siRNA sense strand
cgauguaugacgaggaaaa

SEQ ID NO: 2624675 - RNA, 19 nt, Homo sapiens
  misc_RNA (1)...(19): siRNA sense strand
ggagaagaaagcacggaca

SEQ ID NO: 2624676 - RNA, 19 nt, Homo sapiens
  misc_RNA (1)...(19): siRNA sense strand
cuguaugggugcugguuca

SEQ ID NO: 2624677 - RNA, 19 nt, Homo sapiens
  misc_RNA (1)...(19): siRNA sense strand
gccacaguaucgagggaga

SEQ ID NO: 2624678 - RNA, 19 nt, Homo sapiens
  misc_RNA (1)...(19): siRNA sense strand
gcaaguuuguccaggccuu

SEQ ID NO: 2624679 - RNA, 19 nt, Homo sapiens
  misc_RNA (1)...(19): siRNA sense strand
ggaaacacgcaguggaggu

SEQ ID NO: 2624680 - RNA, 19 nt, Homo sapiens
  misc_RNA (1)...(19): siRNA sense strand
agaccagugcagaggcuau

SEQ ID NO: 2624681 - RNA, 19 nt, Homo sapiens
  misc_RNA (1)...(19): siRNA sense strand
ucuucaaauccaaagggaa

SEQ ID NO: 2624682 - RNA, 19 nt, Homo sapiens
  misc_RNA (1)...(19): siRNA sense strand
cagacugacaacagaacau

SEQ ID NO: 2624683 - RNA, 19 nt, Homo sapiens
  misc_RNA (1)...(19): siRNA sense strand
gcgugucucucuaaggcua

SEQ ID NO: 2624684 - RNA, 19 nt, Homo sapiens
  misc_RNA (1)...(19): siRNA sense strand
gaagagauuuacaaggaag

SEQ ID NO: 2624685 - RNA, 19 nt, Homo sapiens
  misc_RNA (1)...(19): siRNA sense strand
ccacaguaucgagggagaa

SEQ ID NO: 2624686 - RNA, 19 nt, Homo sapiens
  misc_RNA (1)...(19): siRNA sense strand
cgauguaugacgaggaaaa

SEQ ID NO: 2624687 - RNA, 19 nt, Homo sapiens
  misc_RNA (1)...(19): siRNA sense strand
ggagaagaaagcacggaca

SEQ ID NO: 2624688 - RNA, 19 nt, Homo sapiens
  misc_RNA (1)...(19): siRNA sense strand
cuguaugggugcugguuca

SEQ ID NO: 2624689 - RNA, 19 nt, Homo sapiens
  misc_RNA (1)...(19): siRNA sense strand
gccacaguaucgagggaga

SEQ ID NO: 2624690 - RNA, 19 nt, Homo sapiens
  misc_RNA (1)...(19): siRNA sense strand
gcaaguuuguccaggccuu

SEQ ID NO: 2624691 - RNA, 19 nt, Homo sapiens
  misc_RNA (1)...(19): siRNA sense strand
ggaaacacgcaguggaggu

SEQ ID NO: 2624692 - RNA, 19 nt, Homo sapiens
  misc_RNA (1)...(19): siRNA sense strand
agaccagugcagaggcuau

SEQ ID NO: 2624693 - RNA, 19 nt, Homo sapiens
  misc_RNA (1)...(19): siRNA sense strand
ucuucaaauccaaagggaa

SEQ ID NO: 2624694 - RNA, 19 nt, Homo sapiens
  misc_RNA (1)...(19): siRNA sense strand
cagacugacaacagaacau

SEQ ID NO: 2624695 - RNA, 19 nt, Homo sapiens
  misc_RNA (1)...(19): siRNA sense strand
gcgugucucucuaaggcua

SEQ ID NO: 2624696 - RNA, 19 nt, Homo sapiens
  misc_RNA (1)...(19): siRNA sense strand
gaagagauuuacaaggaag

SEQ ID NO: 2624697 - RNA, 19 nt, Homo sapiens
  misc_RNA (1)...(19): siRNA sense strand
ccacaguaucgagggagaa

SEQ ID NO: 2624698 - RNA, 19 nt, Homo sapiens
  misc_RNA (1)...(19): siRNA sense strand
gggcaagaagauggagaaa

SEQ ID NO: 2624699 - RNA, 19 nt, Homo sapiens
  misc_RNA (1)...(19): siRNA sense strand
gguagaguggauagagaau

SEQ ID NO: 2624700 - RNA, 19 nt, Homo sapiens
  misc_RNA (1)...(19): siRNA sense strand
gaaacaagcuugcugcuca

SEQ ID NO: 2624701 - RNA, 19 nt, Homo sapiens
  misc_RNA (1)...(19): siRNA sense strand
gcagauacucagugccaga

SEQ ID NO: 2624702 - RNA, 19 nt, Homo sapiens
  misc_RNA (1)...(19): siRNA sense strand
gcacagagcauggagguga

SEQ ID NO: 2624703 - RNA, 19 nt, Homo sapiens
  misc_RNA (1)...(19): siRNA sense strand
gagagaagcugcuggccgu

SEQ ID NO: 2624704 - RNA, 19 nt, Homo sapiens
  misc_RNA (1)...(19): siRNA sense strand
cuggagagcagauggcaga

SEQ ID NO: 2624705 - RNA, 19 nt, Homo sapiens
  misc_RNA (1)...(19): siRNA sense strand
gcacagggauggaguggag

SEQ ID NO: 2624706 - RNA, 19 nt, Homo sapiens
  misc_RNA (1)...(19): siRNA sense strand
cagacauugcuaaggguca

SEQ ID NO: 2624707 - RNA, 19 nt, Homo sapiens
  misc_RNA (1)...(19): siRNA sense strand
ccauguggcuggagagcag

SEQ ID NO: 2624708 - RNA, 19 nt, Homo sapiens
  misc_RNA (1)...(19): siRNA sense strand
ggcaagaagauggagaaau

SEQ ID NO: 2624709 - RNA, 19 nt, Homo sapiens
  misc_RNA (1)...(19): siRNA sense strand
auggcauugcaaagggaaa

SEQ ID NO: 2624710 - RNA, 19 nt, Homo sapiens
  misc_RNA (1)...(19): siRNA sense strand
gggaagacauccggggaga

SEQ ID NO: 2624711 - RNA, 19 nt, Homo sapiens
  misc_RNA (1)...(19): siRNA sense strand
gcucaaaguagcaggucug

SEQ ID NO: 2624712 - RNA, 19 nt, Homo sapiens
  misc_RNA (1)...(19): siRNA sense strand
ucagagugggagaagauau

SEQ ID NO: 2624713 - RNA, 19 nt, Homo sapiens
  misc_RNA (1)...(19): siRNA sense strand
ggggcaagaagauggagaa

SEQ ID NO: 2624714 - RNA, 19 nt, Homo sapiens
  misc_RNA (1)...(19): siRNA sense strand
aggaaagacgauaccauca

SEQ ID NO: 2624715 - RNA, 19 nt, Homo sapiens
  misc_RNA (1)...(19): siRNA sense strand
gggauggaguggaggugac

SEQ ID NO: 2624716 - RNA, 19 nt, Homo sapiens
  misc_RNA (1)...(19): siRNA sense strand
caaauaaaguggagcgaca

SEQ ID NO: 2624717 - RNA, 19 nt, Homo sapiens
  misc_RNA (1)...(19): siRNA sense strand
agaugaaagaaaugggaua

SEQ ID NO: 2624718 - RNA, 19 nt, Homo sapiens
  misc_RNA (1)...(19): siRNA sense strand
agacagaaagagagcgaga

SEQ ID NO: 2624719 - RNA, 19 nt, Homo sapiens
  misc_RNA (1)...(19): siRNA sense strand
gagagaagucuuuggccua

SEQ ID NO: 2624720 - RNA, 19 nt, Homo sapiens
  misc_RNA (1)...(19): siRNA sense strand
auggaaaggaaguggaaga

SEQ ID NO: 2624721 - RNA, 19 nt, Homo sapiens
  misc_RNA (1)...(19): siRNA sense strand
gggaauaaguaucgggcuc

SEQ ID NO: 2624722 - RNA, 19 nt, Homo sapiens
  misc_RNA (1)...(19): siRNA sense strand
ggagacagaaagagagcga

SEQ ID NO: 2624723 - RNA, 19 nt, Homo sapiens
  misc_RNA (1)...(19): siRNA sense strand
acaccaagggagagaacau

SEQ ID NO: 2624724 - RNA, 19 nt, Homo sapiens
  misc_RNA (1)...(19): siRNA sense strand
acagaaagagagcgagaga

SEQ ID NO: 2624725 - RNA, 19 nt, Homo sapiens
  misc_RNA (1)...(19): siRNA sense strand
acguguaugcagauggaaa

SEQ ID NO: 2624726 - RNA, 19 nt, Homo sapiens
  misc_RNA (1)...(19): siRNA sense strand
uggagacaacagaaggaaa

SEQ ID NO: 2624727 - RNA, 19 nt, Homo sapiens
  misc_RNA (1)...(19): siRNA sense strand
ggagcgacaccaagggaga

SEQ ID NO: 2624728 - RNA, 19 nt, Homo sapiens
  misc_RNA (1)...(19): siRNA sense strand
guacauggcucguggagag

SEQ ID NO: 2624729 - RNA, 19 nt, Homo sapiens
  misc_RNA (1)...(19): siRNA sense strand
ggagagaagucuuuggccu

SEQ ID NO: 2624730 - RNA, 19 nt, Homo sapiens
  misc_RNA (1)...(19): siRNA sense strand
gaaaggaaguggaagacag

SEQ ID NO: 2624731 - RNA, 19 nt, Homo sapiens
  misc_RNA (1)...(19): siRNA sense strand
cuauaaugccacagaugga

SEQ ID NO: 2624732 - RNA, 19 nt, Homo sapiens
  misc_RNA (1)...(19): siRNA sense strand
cugcaacagagcaagaaau

SEQ ID NO: 2624733 - RNA, 19 nt, Homo sapiens
  misc_RNA (1)...(19): siRNA sense strand
agauggaaaggaaguggaa

SEQ ID NO: 2624734 - RNA, 19 nt, Homo sapiens
  misc_RNA (1)...(19): siRNA sense strand
gcugcaacagagcaagaaa

SEQ ID NO: 2624735 - RNA, 19 nt, Homo sapiens
  misc_RNA (1)...(19): siRNA sense strand
agaaauaagccuaagagag

SEQ ID NO: 2624736 - RNA, 19 nt, Homo sapiens
  misc_RNA (1)...(19): siRNA sense strand
ccguaucgagggagaacuu

SEQ ID NO: 2624737 - RNA, 19 nt, Homo sapiens
  misc_RNA (1)...(19): siRNA sense strand
aagaaauaagccuaagaga

SEQ ID NO: 2624738 - RNA, 19 nt, Homo sapiens
  misc_RNA (1)...(19): siRNA sense strand
ccugaaacuuccugagccu

SEQ ID NO: 2624739 - RNA, 19 nt, Homo sapiens
  misc_RNA (1)...(19): siRNA sense strand
cccaauaccaaaagaagua

SEQ ID NO: 2624740 - RNA, 19 nt, Homo sapiens
  misc_RNA (1)...(19): siRNA sense strand
ccaugagugcagagaccau

SEQ ID NO: 2624741 - RNA, 19 nt, Homo sapiens
  misc_RNA (1)...(19): siRNA sense strand
uggugaacguguaugcaga

SEQ ID NO: 2624742 - RNA, 19 nt, Homo sapiens
  misc_RNA (1)...(19): siRNA sense strand
aggaaguggaagacaggca

SEQ ID NO: 2624743 - RNA, 19 nt, Homo sapiens
  misc_RNA (1)...(19): siRNA sense strand
uggcaucacugcagggaag

SEQ ID NO: 2624744 - RNA, 19 nt, Homo sapiens
  misc_RNA (1)...(19): siRNA sense strand
uuaugaggauggagggauc

SEQ ID NO: 2624745 - RNA, 19 nt, Homo sapiens
  misc_RNA (1)...(19): siRNA sense strand
agagcaagaaauaagccua

SEQ ID NO: 2624746 - RNA, 19 nt, Homo sapiens
  misc_RNA (1)...(19): siRNA sense strand
gacagaaaagaguggcaua

SEQ ID NO: 2624747 - RNA, 19 nt, Homo sapiens
  misc_RNA (1)...(19): siRNA sense strand
gugcagagaccauggagcu

SEQ ID NO: 2624748 - RNA, 19 nt, Homo sapiens
  misc_RNA (1)...(19): siRNA sense strand
caaauaaaguggagcgaca

SEQ ID NO: 2624749 - RNA, 19 nt, Homo sapiens
  misc_RNA (1)...(19): siRNA sense strand
agaugaaagaaaugggaua

SEQ ID NO: 2624750 - RNA, 19 nt, Homo sapiens
  misc_RNA (1)...(19): siRNA sense strand
agacagaaagagagcgaga

SEQ ID NO: 2624751 - RNA, 19 nt, Homo sapiens
  misc_RNA (1)...(19): siRNA sense strand
gagagaagucuuuggccua

SEQ ID NO: 2624752 - RNA, 19 nt, Homo sapiens
  misc_RNA (1)...(19): siRNA sense strand
auggaaaggaaguggaaga

SEQ ID NO: 2624753 - RNA, 19 nt, Homo sapiens
  misc_RNA (1)...(19): siRNA sense strand
gggaauaaguaucgggcuc

SEQ ID NO: 2624754 - RNA, 19 nt, Homo sapiens
  misc_RNA (1)...(19): siRNA sense strand
ggagacagaaagagagcga

SEQ ID NO: 2624755 - RNA, 19 nt, Homo sapiens
  misc_RNA (1)...(19): siRNA sense strand
acaccaagggagagaacau

SEQ ID NO: 2624756 - RNA, 19 nt, Homo sapiens
  misc_RNA (1)...(19): siRNA sense strand
acagaaagagagcgagaga

SEQ ID NO: 2624757 - RNA, 19 nt, Homo sapiens
  misc_RNA (1)...(19): siRNA sense strand
acguguaugcagauggaaa

SEQ ID NO: 2624758 - RNA, 19 nt, Homo sapiens
  misc_RNA (1)...(19): siRNA sense strand
uggagacaacagaaggaaa

SEQ ID NO: 2624759 - RNA, 19 nt, Homo sapiens
  misc_RNA (1)...(19): siRNA sense strand
ggagcgacaccaagggaga

SEQ ID NO: 2624760 - RNA, 19 nt, Homo sapiens
  misc_RNA (1)...(19): siRNA sense strand
guacauggcucguggagag

SEQ ID NO: 2624761 - RNA, 19 nt, Homo sapiens
  misc_RNA (1)...(19): siRNA sense strand
ggagagaagucuuuggccu

SEQ ID NO: 2624762 - RNA, 19 nt, Homo sapiens
  misc_RNA (1)...(19): siRNA sense strand
gaaaggaaguggaagacag

SEQ ID NO: 2624763 - RNA, 19 nt, Homo sapiens
  misc_RNA (1)...(19): siRNA sense strand
cuauaaugccacagaugga

SEQ ID NO: 2624764 - RNA, 19 nt, Homo sapiens
  misc_RNA (1)...(19): siRNA sense strand
cugcaacagagcaagaaau

SEQ ID NO: 2624765 - RNA, 19 nt, Homo sapiens
  misc_RNA (1)...(19): siRNA sense strand
agauggaaaggaaguggaa

SEQ ID NO: 2624766 - RNA, 19 nt, Homo sapiens
  misc_RNA (1)...(19): siRNA sense strand
gcugcaacagagcaagaaa

SEQ ID NO: 2624767 - RNA, 19 nt, Homo sapiens
  misc_RNA (1)...(19): siRNA sense strand
agaaauaagccuaagagag

SEQ ID NO: 2624768 - RNA, 19 nt, Homo sapiens
  misc_RNA (1)...(19): siRNA sense strand
ccguaucgagggagaacuu

SEQ ID NO: 2624769 - RNA, 19 nt, Homo sapiens
  misc_RNA (1)...(19): siRNA sense strand
aagaaauaagccuaagaga

SEQ ID NO: 2624770 - RNA, 19 nt, Homo sapiens
  misc_RNA (1)...(19): siRNA sense strand
ccugaaacuuccugagccu

SEQ ID NO: 2624771 - RNA, 19 nt, Homo sapiens
  misc_RNA (1)...(19): siRNA sense strand
cccaauaccaaaagaagua

SEQ ID NO: 2624772 - RNA, 19 nt, Homo sapiens
  misc_RNA (1)...(19): siRNA sense strand
uggugaacguguaugcaga

SEQ ID NO: 2624773 - RNA, 19 nt, Homo sapiens
  misc_RNA (1)...(19): siRNA sense strand
ccaugagugcagagaccau

SEQ ID NO: 2624774 - RNA, 19 nt, Homo sapiens
  misc_RNA (1)...(19): siRNA sense strand
aggaaguggaagacaggca

SEQ ID NO: 2624775 - RNA, 19 nt, Homo sapiens
  misc_RNA (1)...(19): siRNA sense strand
uggcaucacugcagggaag

SEQ ID NO: 2624776 - RNA, 19 nt, Homo sapiens
  misc_RNA (1)...(19): siRNA sense strand
uuaugaggauggagggauc

SEQ ID NO: 2624777 - RNA, 19 nt, Homo sapiens
  misc_RNA (1)...(19): siRNA sense strand
agagcaagaaauaagccua

SEQ ID NO: 2624778 - RNA, 19 nt, Homo sapiens
  misc_RNA (1)...(19): siRNA sense strand
gacagaaaagaguggcaua

SEQ ID NO: 2624779 - RNA, 19 nt, Homo sapiens
  misc_RNA (1)...(19): siRNA sense strand
gugcagagaccauggagcu

SEQ ID NO: 2624780 - RNA, 19 nt, Homo sapiens
  misc_RNA (1)...(19): siRNA sense strand
gcuggagguuggagccuga

SEQ ID NO: 2624781 - RNA, 19 nt, Homo sapiens
  misc_RNA (1)...(19): siRNA sense strand
ggacaaaagaagugugaca

SEQ ID NO: 2624782 - RNA, 19 nt, Homo sapiens
  misc_RNA (1)...(19): siRNA sense strand
cgggcaacccagagagauu

SEQ ID NO: 2624783 - RNA, 19 nt, Homo sapiens
  misc_RNA (1)...(19): siRNA sense strand
gggagagcauuccgggcaa

SEQ ID NO: 2624784 - RNA, 19 nt, Homo sapiens
  misc_RNA (1)...(19): siRNA sense strand
ggaaacaagcccuggccau

SEQ ID NO: 2624785 - RNA, 19 nt, Homo sapiens
  misc_RNA (1)...(19): siRNA sense strand
aggaaaaugcugaggacau

SEQ ID NO: 2624786 - RNA, 19 nt, Homo sapiens
  misc_RNA (1)...(19): siRNA sense strand
ggaggaguaccgagggaga

SEQ ID NO: 2624787 - RNA, 19 nt, Homo sapiens
  misc_RNA (1)...(19): siRNA sense strand
gcacaaugccucuggugga

SEQ ID NO: 2624788 - RNA, 19 nt, Homo sapiens
  misc_RNA (1)...(19): siRNA sense strand
ccucauuagguguggcuuu

SEQ ID NO: 2624789 - RNA, 19 nt, Homo sapiens
  misc_RNA (1)...(19): siRNA sense strand
agagaacagaggagcagaa

SEQ ID NO: 2624790 - RNA, 19 nt, Homo sapiens
  misc_RNA (1)...(19): siRNA sense strand
gagagagaacagaggagca

SEQ ID NO: 2624791 - RNA, 19 nt, Homo sapiens
  misc_RNA (1)...(19): siRNA sense strand
aggagcagaaggaggagua

SEQ ID NO: 2624792 - RNA, 19 nt, Homo sapiens
  misc_RNA (1)...(19): siRNA sense strand
augucacagccgaggauaa

SEQ ID NO: 2624793 - RNA, 19 nt, Homo sapiens
  misc_RNA (1)...(19): siRNA sense strand
cagaggagcagaaggagga

SEQ ID NO: 2624794 - RNA, 19 nt, Homo sapiens
  misc_RNA (1)...(19): siRNA sense strand
gacaauguugagaggaaau

SEQ ID NO: 2624795 - RNA, 19 nt, Homo sapiens
  misc_RNA (1)...(19): siRNA sense strand
gugcauaucuggagggugg

SEQ ID NO: 2624796 - RNA, 19 nt, Homo sapiens
  misc_RNA (1)...(19): siRNA sense strand
uggagguagauguggaaaa

SEQ ID NO: 2624797 - RNA, 19 nt, Homo sapiens
  misc_RNA (1)...(19): siRNA sense strand
acaaaagaagugugacauu

SEQ ID NO: 2624798 - RNA, 19 nt, Homo sapiens
  misc_RNA (1)...(19): siRNA sense strand
cuaugaagcuggagacguc

SEQ ID NO: 2624799 - RNA, 19 nt, Homo sapiens
  misc_RNA (1)...(19): siRNA sense strand
gggucuuaugacagccaaa

SEQ ID NO: 2624800 - RNA, 19 nt, Homo sapiens
  misc_RNA (1)...(19): siRNA sense strand
caacaaucuccaaaaggaa

SEQ ID NO: 2624801 - RNA, 19 nt, Homo sapiens
  misc_RNA (1)...(19): siRNA sense strand
ggggaucuguagagacaau

SEQ ID NO: 2624802 - RNA, 19 nt, Homo sapiens
  misc_RNA (1)...(19): siRNA sense strand
ccaccacagcccacagaau

SEQ ID NO: 2624803 - RNA, 19 nt, Homo sapiens
  misc_RNA (1)...(19): siRNA sense strand
gaauccaggcauagggaac

SEQ ID NO: 2624804 - RNA, 19 nt, Homo sapiens
  misc_RNA (1)...(19): siRNA sense strand
ugggaagaauagaggcaga

SEQ ID NO: 2624805 - RNA, 19 nt, Homo sapiens
  misc_RNA (1)...(19): siRNA sense strand
gcagagagcuggacgcacu

SEQ ID NO: 2624806 - RNA, 19 nt, Homo sapiens
  misc_RNA (1)...(19): siRNA sense strand
aagaagacaucauccggaa

SEQ ID NO: 2624807 - RNA, 19 nt, Homo sapiens
  misc_RNA (1)...(19): siRNA sense strand
uggagaaggagaagaccau

SEQ ID NO: 2624808 - RNA, 19 nt, Homo sapiens
  misc_RNA (1)...(19): siRNA sense strand
cugaaagucaagaagacau

SEQ ID NO: 2624809 - RNA, 19 nt, Homo sapiens
  misc_RNA (1)...(19): siRNA sense strand
cgugaggagcuuagccaga

SEQ ID NO: 2624810 - RNA, 19 nt, Homo sapiens
  misc_RNA (1)...(19): siRNA sense strand
ugggaagaauagaggcaga

SEQ ID NO: 2624811 - RNA, 19 nt, Homo sapiens
  misc_RNA (1)...(19): siRNA sense strand
gcagagagcuggacgcacu

SEQ ID NO: 2624812 - RNA, 19 nt, Homo sapiens
  misc_RNA (1)...(19): siRNA sense strand
aagaagacaucauccggaa

SEQ ID NO: 2624813 - RNA, 19 nt, Homo sapiens
  misc_RNA (1)...(19): siRNA sense strand
uggagaaggagaagaccau

SEQ ID NO: 2624814 - RNA, 19 nt, Homo sapiens
  misc_RNA (1)...(19): siRNA sense strand
cugaaagucaagaagacau

SEQ ID NO: 2624815 - RNA, 19 nt, Homo sapiens
  misc_RNA (1)...(19): siRNA sense strand
cgugaggagcuuagccaga

SEQ ID NO: 2624816 - RNA, 19 nt, Homo sapiens
  misc_RNA (1)...(19): siRNA sense strand
uggagaaggagaagaccau

SEQ ID NO: 2624817 - RNA, 19 nt, Homo sapiens
  misc_RNA (1)...(19): siRNA sense strand
cgugaggagcuuagccaga

SEQ ID NO: 2624818 - RNA, 19 nt, Homo sapiens
  misc_RNA (1)...(19): siRNA sense strand
caucuuuguaggaggaauu

SEQ ID NO: 2624819 - RNA, 19 nt, Homo sapiens
  misc_RNA (1)...(19): siRNA sense strand
ccacugucucugauggaaa

SEQ ID NO: 2624820 - RNA, 19 nt, Homo sapiens
  misc_RNA (1)...(19): siRNA sense strand
cugugaaagaagugaagau

SEQ ID NO: 2624821 - RNA, 19 nt, Homo sapiens
  misc_RNA (1)...(19): siRNA sense strand
aggauaagaagcugaacau

SEQ ID NO: 2624822 - RNA, 19 nt, Homo sapiens
  misc_RNA (1)...(19): siRNA sense strand
aguaugggucugugaaaga

SEQ ID NO: 2624823 - RNA, 19 nt, Homo sapiens
  misc_RNA (1)...(19): siRNA sense strand
ggacaguggcaguggagug

SEQ ID NO: 2624824 - RNA, 19 nt, Homo sapiens
  misc_RNA (1)...(19): siRNA sense strand
ggucugugaaagaagugaa

SEQ ID NO: 2624825 - RNA, 19 nt, Homo sapiens
  misc_RNA (1)...(19): siRNA sense strand
uuuaucaaccaguggaaau

SEQ ID NO: 2624826 - RNA, 19 nt, Homo sapiens
  misc_RNA (1)...(19): siRNA sense strand
uguaaaugacagagcugga

SEQ ID NO: 2624827 - RNA, 19 nt, Homo sapiens
  misc_RNA (1)...(19): siRNA sense strand
aaacacaagaagaugcaca

SEQ ID NO: 2624828 - RNA, 19 nt, Homo sapiens
  misc_RNA (1)...(19): siRNA sense strand
caucuuuguaggaggaauu

SEQ ID NO: 2624829 - RNA, 19 nt, Homo sapiens
  misc_RNA (1)...(19): siRNA sense strand
ccacugucucugauggaaa

SEQ ID NO: 2624830 - RNA, 19 nt, Homo sapiens
  misc_RNA (1)...(19): siRNA sense strand
cugugaaagaagugaagau

SEQ ID NO: 2624831 - RNA, 19 nt, Homo sapiens
  misc_RNA (1)...(19): siRNA sense strand
aggauaagaagcugaacau

SEQ ID NO: 2624832 - RNA, 19 nt, Homo sapiens
  misc_RNA (1)...(19): siRNA sense strand
aguaugggucugugaaaga

SEQ ID NO: 2624833 - RNA, 19 nt, Homo sapiens
  misc_RNA (1)...(19): siRNA sense strand
ggacaguggcaguggagug

SEQ ID NO: 2624834 - RNA, 19 nt, Homo sapiens
  misc_RNA (1)...(19): siRNA sense strand
ggucugugaaagaagugaa

SEQ ID NO: 2624835 - RNA, 19 nt, Homo sapiens
  misc_RNA (1)...(19): siRNA sense strand
uuuaucaaccaguggaaau

SEQ ID NO: 2624836 - RNA, 19 nt, Homo sapiens
  misc_RNA (1)...(19): siRNA sense strand
uguaaaugacagagcugga

SEQ ID NO: 2624837 - RNA, 19 nt, Homo sapiens
  misc_RNA (1)...(19): siRNA sense strand
aaacacaagaagaugcaca

SEQ ID NO: 2624838 - RNA, 19 nt, Homo sapiens
  misc_RNA (1)...(19): siRNA sense strand
aggagaaagaggugauaaa

SEQ ID NO: 2624839 - RNA, 19 nt, Homo sapiens
  misc_RNA (1)...(19): siRNA sense strand
ccuggaagggcaagagaaa

SEQ ID NO: 2624840 - RNA, 19 nt, Homo sapiens
  misc_RNA (1)...(19): siRNA sense strand
gguuggagauccugggcua

SEQ ID NO: 2624841 - RNA, 19 nt, Homo sapiens
  misc_RNA (1)...(19): siRNA sense strand
gaggagagcugggaagaua

SEQ ID NO: 2624842 - RNA, 19 nt, Homo sapiens
  misc_RNA (1)...(19): siRNA sense strand
ugaaggaccuccagggcua

SEQ ID NO: 2624843 - RNA, 19 nt, Homo sapiens
  misc_RNA (1)...(19): siRNA sense strand
cguuaaagguauucaggga

SEQ ID NO: 2624844 - RNA, 19 nt, Homo sapiens
  misc_RNA (1)...(19): siRNA sense strand
aggauuaaagggagaacua

SEQ ID NO: 2624845 - RNA, 19 nt, Homo sapiens
  misc_RNA (1)...(19): siRNA sense strand
gugaauggucagaaaggaa

SEQ ID NO: 2624846 - RNA, 19 nt, Homo sapiens
  misc_RNA (1)...(19): siRNA sense strand
auaugggaguggaaagaaa

SEQ ID NO: 2624847 - RNA, 19 nt, Homo sapiens
  misc_RNA (1)...(19): siRNA sense strand
gggugagguuggucagcaa

SEQ ID NO: 2624848 - RNA, 19 nt, Homo sapiens
  misc_RNA (1)...(19): siRNA sense strand
ggaaaggacagccgggaga

SEQ ID NO: 2624849 - RNA, 19 nt, Homo sapiens
  misc_RNA (1)...(19): siRNA sense strand
cguccagguuugaagggaa

SEQ ID NO: 2624850 - RNA, 19 nt, Homo sapiens
  misc_RNA (1)...(19): siRNA sense strand
aggggaaccuggugagaaa

SEQ ID NO: 2624851 - RNA, 19 nt, Homo sapiens
  misc_RNA (1)...(19): siRNA sense strand
gccacuaugcccagagaaa

SEQ ID NO: 2624852 - RNA, 19 nt, Homo sapiens
  misc_RNA (1)...(19): siRNA sense strand
agaaaggaaucccgggaga

SEQ ID NO: 2624853 - RNA, 19 nt, Homo sapiens
  misc_RNA (1)...(19): siRNA sense strand
aaguauagcuucuggcuca

SEQ ID NO: 2624854 - RNA, 19 nt, Homo sapiens
  misc_RNA (1)...(19): siRNA sense strand
cuuuggagaugaugggcua

SEQ ID NO: 2624855 - RNA, 19 nt, Homo sapiens
  misc_RNA (1)...(19): siRNA sense strand
ccaaaggcagagagggaca

SEQ ID NO: 2624856 - RNA, 19 nt, Homo sapiens
  misc_RNA (1)...(19): siRNA sense strand
acacaggagaagacggcua

SEQ ID NO: 2624857 - RNA, 19 nt, Homo sapiens
  misc_RNA (1)...(19): siRNA sense strand
uggcuuaaagggucagaaa

SEQ ID NO: 2624858 - RNA, 19 nt, Homo sapiens
  misc_RNA (1)...(19): siRNA sense strand
uugaaaggucagaaaggaa

SEQ ID NO: 2624859 - RNA, 19 nt, Homo sapiens
  misc_RNA (1)...(19): siRNA sense strand
ggacaaaggagauaagggu

SEQ ID NO: 2624860 - RNA, 19 nt, Homo sapiens
  misc_RNA (1)...(19): siRNA sense strand
gcacaaaggagaaagaggu

SEQ ID NO: 2624861 - RNA, 19 nt, Homo sapiens
  misc_RNA (1)...(19): siRNA sense strand
uuaaagguauucagggaga

SEQ ID NO: 2624862 - RNA, 19 nt, Homo sapiens
  misc_RNA (1)...(19): siRNA sense strand
uggauugaaaggucagaaa

SEQ ID NO: 2624863 - RNA, 19 nt, Homo sapiens
  misc_RNA (1)...(19): siRNA sense strand
uguuauaccuggaagggca

SEQ ID NO: 2624864 - RNA, 19 nt, Homo sapiens
  misc_RNA (1)...(19): siRNA sense strand
auucaagggcccagaggau

SEQ ID NO: 2624865 - RNA, 19 nt, Homo sapiens
  misc_RNA (1)...(19): siRNA sense strand
aggcaugagaggaccagaa

SEQ ID NO: 2624866 - RNA, 19 nt, Homo sapiens
  misc_RNA (1)...(19): siRNA sense strand
cuaaaggaaacaaagguga

SEQ ID NO: 2624867 - RNA, 19 nt, Homo sapiens
  misc_RNA (1)...(19): siRNA sense strand
gaaaggaacuaaaggugcu

SEQ ID NO: 2624868 - RNA, 19 nt, Homo sapiens
  misc_RNA (1)...(19): siRNA sense strand
agaaaaggguauaaaagga

SEQ ID NO: 2624869 - RNA, 19 nt, Homo sapiens
  misc_RNA (1)...(19): siRNA sense strand
acaaggaauaaaaggcaaa

SEQ ID NO: 2624870 - RNA, 19 nt, Homo sapiens
  misc_RNA (1)...(19): siRNA sense strand
cccaggugguaaaggauuu

SEQ ID NO: 2624871 - RNA, 19 nt, Homo sapiens
  misc_RNA (1)...(19): siRNA sense strand
caggagugccagggauaaa

SEQ ID NO: 2624872 - RNA, 19 nt, Homo sapiens
  misc_RNA (1)...(19): siRNA sense strand
gggaguggaaagaaauaca

SEQ ID NO: 2624873 - RNA, 19 nt, Homo sapiens
  misc_RNA (1)...(19): siRNA sense strand
cggagaaagaggaaagccu

SEQ ID NO: 2624874 - RNA, 19 nt, Homo sapiens
  misc_RNA (1)...(19): siRNA sense strand
caaaggagccauaggaccu

SEQ ID NO: 2624875 - RNA, 19 nt, Homo sapiens
  misc_RNA (1)...(19): siRNA sense strand
gaugaaggagaaauggcua

SEQ ID NO: 2624876 - RNA, 19 nt, Homo sapiens
  misc_RNA (1)...(19): siRNA sense strand
acaaaggggcgaaggguga

SEQ ID NO: 2624877 - RNA, 19 nt, Homo sapiens
  misc_RNA (1)...(19): siRNA sense strand
uaucaagaguuaaagggca

SEQ ID NO: 2624878 - RNA, 19 nt, Homo sapiens
  misc_RNA (1)...(19): siRNA sense strand
uuaaagggcacaaaggaga

SEQ ID NO: 2624879 - RNA, 19 nt, Homo sapiens
  misc_RNA (1)...(19): siRNA sense strand
cggagaugaaggagaaaug

SEQ ID NO: 2624880 - RNA, 19 nt, Homo sapiens
  misc_RNA (1)...(19): siRNA sense strand
ugauggauucccaggagaa

SEQ ID NO: 2624881 - RNA, 19 nt, Homo sapiens
  misc_RNA (1)...(19): siRNA sense strand
ccuuguggaggaagagauu

SEQ ID NO: 2624882 - RNA, 19 nt, Homo sapiens
  misc_RNA (1)...(19): siRNA sense strand
guauaugggaguggaaaga

SEQ ID NO: 2624883 - RNA, 19 nt, Homo sapiens
  misc_RNA (1)...(19): siRNA sense strand
cuccagggcuaccaggaaa

SEQ ID NO: 2624884 - RNA, 19 nt, Homo sapiens
  misc_RNA (1)...(19): siRNA sense strand
agguccucguggaaagaaa

SEQ ID NO: 2624885 - RNA, 19 nt, Homo sapiens
  misc_RNA (1)...(19): siRNA sense strand
uaaaggugacacaggagaa

SEQ ID NO: 2624886 - RNA, 19 nt, Homo sapiens
  misc_RNA (1)...(19): siRNA sense strand
ccauugggcuuucaggaga

SEQ ID NO: 2624887 - RNA, 19 nt, Homo sapiens
  misc_RNA (1)...(19): siRNA sense strand
ugguaugaguggccacaau

SEQ ID NO: 2624888 - RNA, 19 nt, Homo sapiens
  misc_RNA (1)...(19): siRNA sense strand
auaaaggagaaaaggguau

SEQ ID NO: 2624889 - RNA, 19 nt, Homo sapiens
  misc_RNA (1)...(19): siRNA sense strand
ggaaagaaauacauugguc

SEQ ID NO: 2624890 - RNA, 19 nt, Homo sapiens
  misc_RNA (1)...(19): siRNA sense strand
aagaggaccuaaaggaaac

SEQ ID NO: 2624891 - RNA, 19 nt, Homo sapiens
  misc_RNA (1)...(19): siRNA sense strand
ucgcaaauaaguauagcuu

SEQ ID NO: 2624892 - RNA, 19 nt, Homo sapiens
  misc_RNA (1)...(19): siRNA sense strand
caccaggacgcaagggaga

SEQ ID NO: 2624893 - RNA, 19 nt, Homo sapiens
  misc_RNA (1)...(19): siRNA sense strand
cugauggcuuaaaggguca

SEQ ID NO: 2624894 - RNA, 19 nt, Homo sapiens
  misc_RNA (1)...(19): siRNA sense strand
gcuuaaagggucagaaagg

SEQ ID NO: 2624895 - RNA, 19 nt, Homo sapiens
  misc_RNA (1)...(19): siRNA sense strand
uggccauuccugugaaaga

SEQ ID NO: 2624896 - RNA, 19 nt, Homo sapiens
  misc_RNA (1)...(19): siRNA sense strand
gggacagccaggagaaaug

SEQ ID NO: 2624897 - RNA, 19 nt, Homo sapiens
  misc_RNA (1)...(19): siRNA sense strand
agugggaauaccugggcua

SEQ ID NO: 2624898 - RNA, 19 nt, Homo sapiens
  misc_RNA (1)...(19): siRNA sense strand
ugauucugcuccaggaaaa

SEQ ID NO: 2624899 - RNA, 19 nt, Homo sapiens
  misc_RNA (1)...(19): siRNA sense strand
caccaggaacagcggaaau

SEQ ID NO: 2624900 - RNA, 19 nt, Homo sapiens
  misc_RNA (1)...(19): siRNA sense strand
uuaugaagagagagugaaa

SEQ ID NO: 2624901 - RNA, 19 nt, Homo sapiens
  misc_RNA (1)...(19): siRNA sense strand
aguuaugaagagagaguga

SEQ ID NO: 2624902 - RNA, 19 nt, Homo sapiens
  misc_RNA (1)...(19): siRNA sense strand
augaaggaggacagugaaa

SEQ ID NO: 2624903 - RNA, 19 nt, Homo sapiens
  misc_RNA (1)...(19): siRNA sense strand
ugacagauaauuaugggaa

SEQ ID NO: 2624904 - RNA, 19 nt, Homo sapiens
  misc_RNA (1)...(19): siRNA sense strand
gggaagaaugagagaaguc

SEQ ID NO: 2624905 - RNA, 19 nt, Homo sapiens
  misc_RNA (1)...(19): siRNA sense strand
augaugaagagcugagaga

SEQ ID NO: 2624906 - RNA, 19 nt, Homo sapiens
  misc_RNA (1)...(19): siRNA sense strand
cugagagaacagcuggaua

SEQ ID NO: 2624907 - RNA, 19 nt, Homo sapiens
  misc_RNA (1)...(19): siRNA sense strand
gaggagaagcugagccugu

SEQ ID NO: 2624908 - RNA, 19 nt, Homo sapiens
  misc_RNA (1)...(19): siRNA sense strand
guuugaaaaggaagugaaa

SEQ ID NO: 2624909 - RNA, 19 nt, Homo sapiens
  misc_RNA (1)...(19): siRNA sense strand
uugaagaaaugaugcagga

SEQ ID NO: 2624910 - RNA, 19 nt, Homo sapiens
  misc_RNA (1)...(19): siRNA sense strand
cugaaaguucuguguccua

SEQ ID NO: 2624911 - RNA, 19 nt, Homo sapiens
  misc_RNA (1)...(19): siRNA sense strand
uguucuuauugaagugcaa

SEQ ID NO: 2624912 - RNA, 19 nt, Homo sapiens
  misc_RNA (1)...(19): siRNA sense strand
cggccaucacggagcucaa

SEQ ID NO: 2624913 - RNA, 19 nt, Homo sapiens
  misc_RNA (1)...(19): siRNA sense strand
aaaugaaauccuggaagaa

SEQ ID NO: 2624914 - RNA, 19 nt, Homo sapiens
  misc_RNA (1)...(19): siRNA sense strand
ccuggaagaaauugagacu

SEQ ID NO: 2624915 - RNA, 19 nt, Homo sapiens
  misc_RNA (1)...(19): siRNA sense strand
uggaagaaauugagacugc

SEQ ID NO: 2624916 - RNA, 19 nt, Homo sapiens
  misc_RNA (1)...(19): siRNA sense strand
agaaauugagacugccauu

SEQ ID NO: 2624917 - RNA, 19 nt, Homo sapiens
  misc_RNA (1)...(19): siRNA sense strand
gaauuuauuuggaagggaa

SEQ ID NO: 2624918 - RNA, 19 nt, Homo sapiens
  misc_RNA (1)...(19): siRNA sense strand
acaacauggcacagaauau

SEQ ID NO: 2624919 - RNA, 19 nt, Homo sapiens
  misc_RNA (1)...(19): siRNA sense strand
gagacagguggaaggaaaa

SEQ ID NO: 2624920 - RNA, 19 nt, Homo sapiens
  misc_RNA (1)...(19): siRNA sense strand
gccucagagacguggcaua

SEQ ID NO: 2624921 - RNA, 19 nt, Homo sapiens
  misc_RNA (1)...(19): siRNA sense strand
auggugaauacauggauaa

SEQ ID NO: 2624922 - RNA, 19 nt, Homo sapiens
  misc_RNA (1)...(19): siRNA sense strand
acuaaugagauguggcgau

SEQ ID NO: 2624923 - RNA, 19 nt, Homo sapiens
  misc_RNA (1)...(19): siRNA sense strand
caacaacaaucauagcuga

SEQ ID NO: 2624924 - RNA, 19 nt, Homo sapiens
  misc_RNA (1)...(19): siRNA sense strand
agacaacauggcacagaau

SEQ ID NO: 2624925 - RNA, 19 nt, Homo sapiens
  misc_RNA (1)...(19): siRNA sense strand
guaagacaugaguccgaaa

SEQ ID NO: 2624926 - RNA, 19 nt, Homo sapiens
  misc_RNA (1)...(19): siRNA sense strand
aggaagaagacgaggagga

SEQ ID NO: 2624927 - RNA, 19 nt, Homo sapiens
  misc_RNA (1)...(19): siRNA sense strand
gaugcugagucuagggcua

SEQ ID NO: 2624928 - RNA, 19 nt, Homo sapiens
  misc_RNA (1)...(19): siRNA sense strand
uggagaagauugacggcuu

SEQ ID NO: 2624929 - RNA, 19 nt, Homo sapiens
  misc_RNA (1)...(19): siRNA sense strand
aagaagacgaggaggagga

SEQ ID NO: 2624930 - RNA, 19 nt, Homo sapiens
  misc_RNA (1)...(19): siRNA sense strand
aaauggaaccggagcccaa

SEQ ID NO: 2624931 - RNA, 19 nt, Homo sapiens
  misc_RNA (1)...(19): siRNA sense strand
uggcagaaguuccggacca

SEQ ID NO: 2624932 - RNA, 19 nt, Homo sapiens
  misc_RNA (1)...(19): siRNA sense strand
uggugagaaagaagagcaa

SEQ ID NO: 2624933 - RNA, 19 nt, Homo sapiens
  misc_RNA (1)...(19): siRNA sense strand
augaagaagucccagguga

SEQ ID NO: 2624934 - RNA, 19 nt, Homo sapiens
  misc_RNA (1)...(19): siRNA sense strand
agugaugcccgcagaggaa

SEQ ID NO: 2624935 - RNA, 19 nt, Homo sapiens
  misc_RNA (1)...(19): siRNA sense strand
cggugaacgaaguggucau

SEQ ID NO: 2624936 - RNA, 19 nt, Homo sapiens
  misc_RNA (1)...(19): siRNA sense strand
ggcagaugcugaaggagga

SEQ ID NO: 2624937 - RNA, 19 nt, Homo sapiens
  misc_RNA (1)...(19): siRNA sense strand
ugcugaaggaggagcgauu

SEQ ID NO: 2624938 - RNA, 19 nt, Homo sapiens
  misc_RNA (1)...(19): siRNA sense strand
uggagggcuuccugagcaa

SEQ ID NO: 2624939 - RNA, 19 nt, Homo sapiens
  misc_RNA (1)...(19): siRNA sense strand
aagacgaggaggaggagga

SEQ ID NO: 2624940 - RNA, 19 nt, Homo sapiens
  misc_RNA (1)...(19): siRNA sense strand
agugcaaacaccugaucaa

SEQ ID NO: 2624941 - RNA, 19 nt, Homo sapiens
  misc_RNA (1)...(19): siRNA sense strand
gccaggagcgucaggaaaa

SEQ ID NO: 2624942 - RNA, 19 nt, Homo sapiens
  misc_RNA (1)...(19): siRNA sense strand
agaagagcaagcugggaga

SEQ ID NO: 2624943 - RNA, 19 nt, Homo sapiens
  misc_RNA (1)...(19): siRNA sense strand
aggaagggaagcugguuga

SEQ ID NO: 2624944 - RNA, 19 nt, Homo sapiens
  misc_RNA (1)...(19): siRNA sense strand
ccuucaaccucuacaacca

SEQ ID NO: 2624945 - RNA, 19 nt, Homo sapiens
  misc_RNA (1)...(19): siRNA sense strand
cuggaaggacucagcucua

SEQ ID NO: 2624946 - RNA, 19 nt, Homo sapiens
  misc_RNA (1)...(19): siRNA sense strand
gcaucuugaaggacaugaa

SEQ ID NO: 2624947 - RNA, 19 nt, Homo sapiens
  misc_RNA (1)...(19): siRNA sense strand
cggccacgcaggaagaaga

SEQ ID NO: 2624948 - RNA, 19 nt, Homo sapiens
  misc_RNA (1)...(19): siRNA sense strand
ggguuggcuaccugaagaa

SEQ ID NO: 2624949 - RNA, 19 nt, Homo sapiens
  misc_RNA (1)...(19): siRNA sense strand
caucaggacccucacgcua

SEQ ID NO: 2624950 - RNA, 19 nt, Homo sapiens
  misc_RNA (1)...(19): siRNA sense strand
uauuacaagcaguggcuga

SEQ ID NO: 2624951 - RNA, 19 nt, Homo sapiens
  misc_RNA (1)...(19): siRNA sense strand
cguaaaagauggagggcca

SEQ ID NO: 2624952 - RNA, 19 nt, Homo sapiens
  misc_RNA (1)...(19): siRNA sense strand
ccaaagucacgaagaggaa

SEQ ID NO: 2624953 - RNA, 19 nt, Homo sapiens
  misc_RNA (1)...(19): siRNA sense strand
ucuacagccuggaaagaaa

SEQ ID NO: 2624954 - RNA, 19 nt, Homo sapiens
  misc_RNA (1)...(19): siRNA sense strand
ucaccaaggaaguggaaca

SEQ ID NO: 2624955 - RNA, 19 nt, Homo sapiens
  misc_RNA (1)...(19): siRNA sense strand
caguagaagaugauguuau

SEQ ID NO: 2624956 - RNA, 19 nt, Homo sapiens
  misc_RNA (1)...(19): siRNA sense strand
auggaaaggcagagacuca

SEQ ID NO: 2624957 - RNA, 19 nt, Homo sapiens
  misc_RNA (1)...(19): siRNA sense strand
cggacugugaggagaauau

SEQ ID NO: 2624958 - RNA, 19 nt, Homo sapiens
  misc_RNA (1)...(19): siRNA sense strand
cguaaauccuggagaggug

SEQ ID NO: 2624959 - RNA, 19 nt, Homo sapiens
  misc_RNA (1)...(19): siRNA sense strand
cuauacuccuccagaaauu

SEQ ID NO: 2624960 - RNA, 19 nt, Homo sapiens
  misc_RNA (1)...(19): siRNA sense strand
agagaagaaaggagacuca

SEQ ID NO: 2624961 - RNA, 19 nt, Homo sapiens
  misc_RNA (1)...(19): siRNA sense strand
aaacagaacagcugggugu

SEQ ID NO: 2624962 - RNA, 19 nt, Homo sapiens
  misc_RNA (1)...(19): siRNA sense strand
ucauguuugugaagaggaa

SEQ ID NO: 2624963 - RNA, 19 nt, Homo sapiens
  misc_RNA (1)...(19): siRNA sense strand
aagaaaacgcauuggaaca

SEQ ID NO: 2624964 - RNA, 19 nt, Homo sapiens
  misc_RNA (1)...(19): siRNA sense strand
cagcauaagaguuccugaa

SEQ ID NO: 2624965 - RNA, 19 nt, Homo sapiens
  misc_RNA (1)...(19): siRNA sense strand
caacacuggacuauggaau

SEQ ID NO: 2624966 - RNA, 19 nt, Homo sapiens
  misc_RNA (1)...(19): siRNA sense strand
cauuggaacagucggaauu

SEQ ID NO: 2624967 - RNA, 19 nt, Homo sapiens
  misc_RNA (1)...(19): siRNA sense strand
uaaaacagguacagcaaau

SEQ ID NO: 2624968 - RNA, 19 nt, Homo sapiens
  misc_RNA (1)...(19): siRNA sense strand
gcauuggaacagucggaau

SEQ ID NO: 2624969 - RNA, 19 nt, Homo sapiens
  misc_RNA (1)...(19): siRNA sense strand
gacuauacuccuccagaaa

SEQ ID NO: 2624970 - RNA, 19 nt, Homo sapiens
  misc_RNA (1)...(19): siRNA sense strand
cugaaucgggagaacauua

SEQ ID NO: 2624971 - RNA, 19 nt, Homo sapiens
  misc_RNA (1)...(19): siRNA sense strand
ccagaaaauaucauggcua

SEQ ID NO: 2624972 - RNA, 19 nt, Homo sapiens
  misc_RNA (1)...(19): siRNA sense strand
ccacaaggauuuacgcaac

SEQ ID NO: 2624973 - RNA, 19 nt, Homo sapiens
  misc_RNA (1)...(19): siRNA sense strand
cugcggacugugaggagaa

SEQ ID NO: 2624974 - RNA, 19 nt, Homo sapiens
  misc_RNA (1)...(19): siRNA sense strand
gaauauugaaucacaggau

SEQ ID NO: 2624975 - RNA, 19 nt, Homo sapiens
  misc_RNA (1)...(19): siRNA sense strand
ccuaaaacagguacagcaa

SEQ ID NO: 2624976 - RNA, 19 nt, Homo sapiens
  misc_RNA (1)...(19): siRNA sense strand
ggaucauagaugucauaga

SEQ ID NO: 2624977 - RNA, 19 nt, Homo sapiens
  misc_RNA (1)...(19): siRNA sense strand
accuguacguagucaguua

SEQ ID NO: 2624978 - RNA, 19 nt, Homo sapiens
  misc_RNA (1)...(19): siRNA sense strand
ggagaggugacaaggcuga

SEQ ID NO: 2624979 - RNA, 19 nt, Homo sapiens
  misc_RNA (1)...(19): siRNA sense strand
aguauaguaaccagaagaa

SEQ ID NO: 2624980 - RNA, 19 nt, Homo sapiens
  misc_RNA (1)...(19): siRNA sense strand
cgggagaacauuaugaacu

SEQ ID NO: 2624981 - RNA, 19 nt, Homo sapiens
  misc_RNA (1)...(19): siRNA sense strand
ggcccaaucuaguggaaac

SEQ ID NO: 2624982 - RNA, 19 nt, Homo sapiens
  misc_RNA (1)...(19): siRNA sense strand
cagcaauggaaacagaaca

SEQ ID NO: 2624983 - RNA, 19 nt, Homo sapiens
  misc_RNA (1)...(19): siRNA sense strand
guucauauauggugguccu

SEQ ID NO: 2624984 - RNA, 19 nt, Homo sapiens
  misc_RNA (1)...(19): siRNA sense strand
gccacaaggauuuacgcaa

SEQ ID NO: 2624985 - RNA, 19 nt, Homo sapiens
  misc_RNA (1)...(19): siRNA sense strand
augaaucugagguggaaau

SEQ ID NO: 2624986 - RNA, 19 nt, Homo sapiens
  misc_RNA (1)...(19): siRNA sense strand
acagcaaauccuaaaguca

SEQ ID NO: 2624987 - RNA, 19 nt, Homo sapiens
  misc_RNA (1)...(19): siRNA sense strand
acgaagaggaaauugaguu

SEQ ID NO: 2624988 - RNA, 19 nt, Homo sapiens
  misc_RNA (1)...(19): siRNA sense strand
ucacauucuugcugcauca

SEQ ID NO: 2624989 - RNA, 19 nt, Homo sapiens
  misc_RNA (1)...(19): siRNA sense strand
ccucugaaccaaaucguuu

SEQ ID NO: 2624990 - RNA, 19 nt, Homo sapiens
  misc_RNA (1)...(19): siRNA sense strand
aggagaauauugaaucaca

SEQ ID NO: 2624991 - RNA, 19 nt, Homo sapiens
  misc_RNA (1)...(19): siRNA sense strand
gguguugagauauuugaaa

SEQ ID NO: 2624992 - RNA, 19 nt, Homo sapiens
  misc_RNA (1)...(19): siRNA sense strand
accagaaugaacagggcua

SEQ ID NO: 2624993 - RNA, 19 nt, Homo sapiens
  misc_RNA (1)...(19): siRNA sense strand
cgagaagaagaacuauuaa

SEQ ID NO: 2624994 - RNA, 19 nt, Homo sapiens
  misc_RNA (1)...(19): siRNA sense strand
aguugaauauauugccaga

SEQ ID NO: 2624995 - RNA, 19 nt, Homo sapiens
  misc_RNA (1)...(19): siRNA sense strand
ugaagaaacaacagacauc

SEQ ID NO: 2624996 - RNA, 19 nt, Homo sapiens
  misc_RNA (1)...(19): siRNA sense strand
cgauuaucaccaaggaagu

SEQ ID NO: 2624997 - RNA, 19 nt, Homo sapiens
  misc_RNA (1)...(19): siRNA sense strand
gcacaaugagcuagccaac

SEQ ID NO: 2624998 - RNA, 19 nt, Homo sapiens
  misc_RNA (1)...(19): siRNA sense strand
ggagauagcaauuaccagu

SEQ ID NO: 2624999 - RNA, 19 nt, Homo sapiens
  misc_RNA (1)...(19): siRNA sense strand
auggcuacaugauggcuaa

SEQ ID NO: 2625000 - RNA, 19 nt, Homo sapiens
  misc_RNA (1)...(19): siRNA sense strand
cguaaaagauggagggcca

SEQ ID NO: 2625001 - RNA, 19 nt, Homo sapiens
  misc_RNA (1)...(19): siRNA sense strand
ccaaagucacgaagaggaa

SEQ ID NO: 2625002 - RNA, 19 nt, Homo sapiens
  misc_RNA (1)...(19): siRNA sense strand
ucuacagccuggaaagaaa

SEQ ID NO: 2625003 - RNA, 19 nt, Homo sapiens
  misc_RNA (1)...(19): siRNA sense strand
ucaccaaggaaguggaaca

SEQ ID NO: 2625004 - RNA, 19 nt, Homo sapiens
  misc_RNA (1)...(19): siRNA sense strand
caguagaagaugauguuau

SEQ ID NO: 2625005 - RNA, 19 nt, Homo sapiens
  misc_RNA (1)...(19): siRNA sense strand
auggaaaggcagagacuca

SEQ ID NO: 2625006 - RNA, 19 nt, Homo sapiens
  misc_RNA (1)...(19): siRNA sense strand
cggacugugaggagaauau

SEQ ID NO: 2625007 - RNA, 19 nt, Homo sapiens
  misc_RNA (1)...(19): siRNA sense strand
cguaaauccuggagaggug

SEQ ID NO: 2625008 - RNA, 19 nt, Homo sapiens
  misc_RNA (1)...(19): siRNA sense strand
cuauacuccuccagaaauu

SEQ ID NO: 2625009 - RNA, 19 nt, Homo sapiens
  misc_RNA (1)...(19): siRNA sense strand
agagaagaaaggagacuca

SEQ ID NO: 2625010 - RNA, 19 nt, Homo sapiens
  misc_RNA (1)...(19): siRNA sense strand
aaacagaacagcugggugu

SEQ ID NO: 2625011 - RNA, 19 nt, Homo sapiens
  misc_RNA (1)...(19): siRNA sense strand
ucauguuugugaagaggaa

SEQ ID NO: 2625012 - RNA, 19 nt, Homo sapiens
  misc_RNA (1)...(19): siRNA sense strand
aagaaaacgcauuggaaca

SEQ ID NO: 2625013 - RNA, 19 nt, Homo sapiens
  misc_RNA (1)...(19): siRNA sense strand
cagcauaagaguuccugaa

SEQ ID NO: 2625014 - RNA, 19 nt, Homo sapiens
  misc_RNA (1)...(19): siRNA sense strand
caacacuggacuauggaau

SEQ ID NO: 2625015 - RNA, 19 nt, Homo sapiens
  misc_RNA (1)...(19): siRNA sense strand
cauuggaacagucggaauu

SEQ ID NO: 2625016 - RNA, 19 nt, Homo sapiens
  misc_RNA (1)...(19): siRNA sense strand
uaaaacagguacagcaaau

SEQ ID NO: 2625017 - RNA, 19 nt, Homo sapiens
  misc_RNA (1)...(19): siRNA sense strand
gcauuggaacagucggaau

SEQ ID NO: 2625018 - RNA, 19 nt, Homo sapiens
  misc_RNA (1)...(19): siRNA sense strand
gacuauacuccuccagaaa

SEQ ID NO: 2625019 - RNA, 19 nt, Homo sapiens
  misc_RNA (1)...(19): siRNA sense strand
cugaaucgggagaacauua

SEQ ID NO: 2625020 - RNA, 19 nt, Homo sapiens
  misc_RNA (1)...(19): siRNA sense strand
ccagaaaauaucauggcua

SEQ ID NO: 2625021 - RNA, 19 nt, Homo sapiens
  misc_RNA (1)...(19): siRNA sense strand
ccacaaggauuuacgcaac

SEQ ID NO: 2625022 - RNA, 19 nt, Homo sapiens
  misc_RNA (1)...(19): siRNA sense strand
cugcggacugugaggagaa

SEQ ID NO: 2625023 - RNA, 19 nt, Homo sapiens
  misc_RNA (1)...(19): siRNA sense strand
gaauauugaaucacaggau

SEQ ID NO: 2625024 - RNA, 19 nt, Homo sapiens
  misc_RNA (1)...(19): siRNA sense strand
ccuaaaacagguacagcaa

SEQ ID NO: 2625025 - RNA, 19 nt, Homo sapiens
  misc_RNA (1)...(19): siRNA sense strand
ggaucauagaugucauaga

SEQ ID NO: 2625026 - RNA, 19 nt, Homo sapiens
  misc_RNA (1)...(19): siRNA sense strand
accuguacguagucaguua

SEQ ID NO: 2625027 - RNA, 19 nt, Homo sapiens
  misc_RNA (1)...(19): siRNA sense strand
ggagaggugacaaggcuga

SEQ ID NO: 2625028 - RNA, 19 nt, Homo sapiens
  misc_RNA (1)...(19): siRNA sense strand
aguauaguaaccagaagaa

SEQ ID NO: 2625029 - RNA, 19 nt, Homo sapiens
  misc_RNA (1)...(19): siRNA sense strand
cgggagaacauuaugaacu

SEQ ID NO: 2625030 - RNA, 19 nt, Homo sapiens
  misc_RNA (1)...(19): siRNA sense strand
ggcccaaucuaguggaaac

SEQ ID NO: 2625031 - RNA, 19 nt, Homo sapiens
  misc_RNA (1)...(19): siRNA sense strand
cagcaauggaaacagaaca

SEQ ID NO: 2625032 - RNA, 19 nt, Homo sapiens
  misc_RNA (1)...(19): siRNA sense strand
guucauauauggugguccu

SEQ ID NO: 2625033 - RNA, 19 nt, Homo sapiens
  misc_RNA (1)...(19): siRNA sense strand
gccacaaggauuuacgcaa

SEQ ID NO: 2625034 - RNA, 19 nt, Homo sapiens
  misc_RNA (1)...(19): siRNA sense strand
augaaucugagguggaaau

SEQ ID NO: 2625035 - RNA, 19 nt, Homo sapiens
  misc_RNA (1)...(19): siRNA sense strand
acagcaaauccuaaaguca

SEQ ID NO: 2625036 - RNA, 19 nt, Homo sapiens
  misc_RNA (1)...(19): siRNA sense strand
acgaagaggaaauugaguu

SEQ ID NO: 2625037 - RNA, 19 nt, Homo sapiens
  misc_RNA (1)...(19): siRNA sense strand
ucacauucuugcugcauca

SEQ ID NO: 2625038 - RNA, 19 nt, Homo sapiens
  misc_RNA (1)...(19): siRNA sense strand
ccucugaaccaaaucguuu

SEQ ID NO: 2625039 - RNA, 19 nt, Homo sapiens
  misc_RNA (1)...(19): siRNA sense strand
aggagaauauugaaucaca

SEQ ID NO: 2625040 - RNA, 19 nt, Homo sapiens
  misc_RNA (1)...(19): siRNA sense strand
gguguugagauauuugaaa

SEQ ID NO: 2625041 - RNA, 19 nt, Homo sapiens
  misc_RNA (1)...(19): siRNA sense strand
accagaaugaacagggcua

SEQ ID NO: 2625042 - RNA, 19 nt, Homo sapiens
  misc_RNA (1)...(19): siRNA sense strand
cgagaagaagaacuauuaa

SEQ ID NO: 2625043 - RNA, 19 nt, Homo sapiens
  misc_RNA (1)...(19): siRNA sense strand
aguugaauauauugccaga

SEQ ID NO: 2625044 - RNA, 19 nt, Homo sapiens
  misc_RNA (1)...(19): siRNA sense strand
ugaagaaacaacagacauc

SEQ ID NO: 2625045 - RNA, 19 nt, Homo sapiens
  misc_RNA (1)...(19): siRNA sense strand
cgauuaucaccaaggaagu

SEQ ID NO: 2625046 - RNA, 19 nt, Homo sapiens
  misc_RNA (1)...(19): siRNA sense strand
gcacaaugagcuagccaac

SEQ ID NO: 2625047 - RNA, 19 nt, Homo sapiens
  misc_RNA (1)...(19): siRNA sense strand
ggagauagcaauuaccagu

SEQ ID NO: 2625048 - RNA, 19 nt, Homo sapiens
  misc_RNA (1)...(19): siRNA sense strand
auggcuacaugauggcuaa

SEQ ID NO: 2625049 - RNA, 19 nt, Homo sapiens
  misc_RNA (1)...(19): siRNA sense strand
cguaaaagauggagggcca

SEQ ID NO: 2625050 - RNA, 19 nt, Homo sapiens
  misc_RNA (1)...(19): siRNA sense strand
ccaaagucacgaagaggaa

SEQ ID NO: 2625051 - RNA, 19 nt, Homo sapiens
  misc_RNA (1)...(19): siRNA sense strand
ucuacagccuggaaagaaa

SEQ ID NO: 2625052 - RNA, 19 nt, Homo sapiens
  misc_RNA (1)...(19): siRNA sense strand
ucaccaaggaaguggaaca

SEQ ID NO: 2625053 - RNA, 19 nt, Homo sapiens
  misc_RNA (1)...(19): siRNA sense strand
caguagaagaugauguuau

SEQ ID NO: 2625054 - RNA, 19 nt, Homo sapiens
  misc_RNA (1)...(19): siRNA sense strand
auggaaaggcagagacuca

SEQ ID NO: 2625055 - RNA, 19 nt, Homo sapiens
  misc_RNA (1)...(19): siRNA sense strand
cggacugugaggagaauau

SEQ ID NO: 2625056 - RNA, 19 nt, Homo sapiens
  misc_RNA (1)...(19): siRNA sense strand
cguaaauccuggagaggug

SEQ ID NO: 2625057 - RNA, 19 nt, Homo sapiens
  misc_RNA (1)...(19): siRNA sense strand
cuauacuccuccagaaauu

SEQ ID NO: 2625058 - RNA, 19 nt, Homo sapiens
  misc_RNA (1)...(19): siRNA sense strand
agagaagaaaggagacuca

SEQ ID NO: 2625059 - RNA, 19 nt, Homo sapiens
  misc_RNA (1)...(19): siRNA sense strand
aaacagaacagcugggugu

SEQ ID NO: 2625060 - RNA, 19 nt, Homo sapiens
  misc_RNA (1)...(19): siRNA sense strand
ucauguuugugaagaggaa

SEQ ID NO: 2625061 - RNA, 19 nt, Homo sapiens
  misc_RNA (1)...(19): siRNA sense strand
aagaaaacgcauuggaaca

SEQ ID NO: 2625062 - RNA, 19 nt, Homo sapiens
  misc_RNA (1)...(19): siRNA sense strand
cagcauaagaguuccugaa

SEQ ID NO: 2625063 - RNA, 19 nt, Homo sapiens
  misc_RNA (1)...(19): siRNA sense strand
caacacuggacuauggaau

SEQ ID NO: 2625064 - RNA, 19 nt, Homo sapiens
  misc_RNA (1)...(19): siRNA sense strand
cauuggaacagucggaauu

SEQ ID NO: 2625065 - RNA, 19 nt, Homo sapiens
  misc_RNA (1)...(19): siRNA sense strand
uaaaacagguacagcaaau

SEQ ID NO: 2625066 - RNA, 19 nt, Homo sapiens
  misc_RNA (1)...(19): siRNA sense strand
gcauuggaacagucggaau

SEQ ID NO: 2625067 - RNA, 19 nt, Homo sapiens
  misc_RNA (1)...(19): siRNA sense strand
gacuauacuccuccagaaa

SEQ ID NO: 2625068 - RNA, 19 nt, Homo sapiens
  misc_RNA (1)...(19): siRNA sense strand
cugaaucgggagaacauua

SEQ ID NO: 2625069 - RNA, 19 nt, Homo sapiens
  misc_RNA (1)...(19): siRNA sense strand
cugcggacugugaggagaa

SEQ ID NO: 2625070 - RNA, 19 nt, Homo sapiens
  misc_RNA (1)...(19): siRNA sense strand
ccagaaaauaucauggcua

SEQ ID NO: 2625071 - RNA, 19 nt, Homo sapiens
  misc_RNA (1)...(19): siRNA sense strand
ccacaaggauuuacgcaac

SEQ ID NO: 2625072 - RNA, 19 nt, Homo sapiens
  misc_RNA (1)...(19): siRNA sense strand
ccagacucgccuacagaua

SEQ ID NO: 2625073 - RNA, 19 nt, Homo sapiens
  misc_RNA (1)...(19): siRNA sense strand
gaauauugaaucacaggau

SEQ ID NO: 2625074 - RNA, 19 nt, Homo sapiens
  misc_RNA (1)...(19): siRNA sense strand
ccuaaaacagguacagcaa

SEQ ID NO: 2625075 - RNA, 19 nt, Homo sapiens
  misc_RNA (1)...(19): siRNA sense strand
ggaucauagaugucauaga

SEQ ID NO: 2625076 - RNA, 19 nt, Homo sapiens
  misc_RNA (1)...(19): siRNA sense strand
accuguacguagucaguua

SEQ ID NO: 2625077 - RNA, 19 nt, Homo sapiens
  misc_RNA (1)...(19): siRNA sense strand
ggagaggugacaaggcuga

SEQ ID NO: 2625078 - RNA, 19 nt, Homo sapiens
  misc_RNA (1)...(19): siRNA sense strand
aguauaguaaccagaagaa

SEQ ID NO: 2625079 - RNA, 19 nt, Homo sapiens
  misc_RNA (1)...(19): siRNA sense strand
cgggagaacauuaugaacu

SEQ ID NO: 2625080 - RNA, 19 nt, Homo sapiens
  misc_RNA (1)...(19): siRNA sense strand
ggcccaaucuaguggaaac

SEQ ID NO: 2625081 - RNA, 19 nt, Homo sapiens
  misc_RNA (1)...(19): siRNA sense strand
cagcaauggaaacagaaca

SEQ ID NO: 2625082 - RNA, 19 nt, Homo sapiens
  misc_RNA (1)...(19): siRNA sense strand
gcaacauggcagcagcaau

SEQ ID NO: 2625083 - RNA, 19 nt, Homo sapiens
  misc_RNA (1)...(19): siRNA sense strand
guucauauauggugguccu

SEQ ID NO: 2625084 - RNA, 19 nt, Homo sapiens
  misc_RNA (1)...(19): siRNA sense strand
gccacaaggauuuacgcaa

SEQ ID NO: 2625085 - RNA, 19 nt, Homo sapiens
  misc_RNA (1)...(19): siRNA sense strand
augaaucugagguggaaau

SEQ ID NO: 2625086 - RNA, 19 nt, Homo sapiens
  misc_RNA (1)...(19): siRNA sense strand
acagcaaauccuaaaguca

SEQ ID NO: 2625087 - RNA, 19 nt, Homo sapiens
  misc_RNA (1)...(19): siRNA sense strand
acgaagaggaaauugaguu

SEQ ID NO: 2625088 - RNA, 19 nt, Homo sapiens
  misc_RNA (1)...(19): siRNA sense strand
ucacauucuugcugcauca

SEQ ID NO: 2625089 - RNA, 19 nt, Homo sapiens
  misc_RNA (1)...(19): siRNA sense strand
ccucugaaccaaaucguuu

SEQ ID NO: 2625090 - RNA, 19 nt, Homo sapiens
  misc_RNA (1)...(19): siRNA sense strand
aggagaauauugaaucaca

SEQ ID NO: 2625091 - RNA, 19 nt, Homo sapiens
  misc_RNA (1)...(19): siRNA sense strand
gguguugagauauuugaaa

SEQ ID NO: 2625092 - RNA, 19 nt, Homo sapiens
  misc_RNA (1)...(19): siRNA sense strand
accagaaugaacagggcua

SEQ ID NO: 2625093 - RNA, 19 nt, Homo sapiens
  misc_RNA (1)...(19): siRNA sense strand
cgagaagaagaacuauuaa

SEQ ID NO: 2625094 - RNA, 19 nt, Homo sapiens
  misc_RNA (1)...(19): siRNA sense strand
aguugaauauauugccaga

SEQ ID NO: 2625095 - RNA, 19 nt, Homo sapiens
  misc_RNA (1)...(19): siRNA sense strand
ugaagaaacaacagacauc

SEQ ID NO: 2625096 - RNA, 19 nt, Homo sapiens
  misc_RNA (1)...(19): siRNA sense strand
cgauuaucaccaaggaagu

SEQ ID NO: 2625097 - RNA, 19 nt, Homo sapiens
  misc_RNA (1)...(19): siRNA sense strand
cguaaaagauggagggcca

SEQ ID NO: 2625098 - RNA, 19 nt, Homo sapiens
  misc_RNA (1)...(19): siRNA sense strand
ccaaagucacgaagaggaa

SEQ ID NO: 2625099 - RNA, 19 nt, Homo sapiens
  misc_RNA (1)...(19): siRNA sense strand
ucuacagccuggaaagaaa

SEQ ID NO: 2625100 - RNA, 19 nt, Homo sapiens
  misc_RNA (1)...(19): siRNA sense strand
ucaccaaggaaguggaaca

SEQ ID NO: 2625101 - RNA, 19 nt, Homo sapiens
  misc_RNA (1)...(19): siRNA sense strand
caguagaagaugauguuau

SEQ ID NO: 2625102 - RNA, 19 nt, Homo sapiens
  misc_RNA (1)...(19): siRNA sense strand
auggaaaggcagagacuca

SEQ ID NO: 2625103 - RNA, 19 nt, Homo sapiens
  misc_RNA (1)...(19): siRNA sense strand
cggacugugaggagaauau

SEQ ID NO: 2625104 - RNA, 19 nt, Homo sapiens
  misc_RNA (1)...(19): siRNA sense strand
cguaaauccuggagaggug

SEQ ID NO: 2625105 - RNA, 19 nt, Homo sapiens
  misc_RNA (1)...(19): siRNA sense strand
cuauacuccuccagaaauu

SEQ ID NO: 2625106 - RNA, 19 nt, Homo sapiens
  misc_RNA (1)...(19): siRNA sense strand
agagaagaaaggagacuca

SEQ ID NO: 2625107 - RNA, 19 nt, Homo sapiens
  misc_RNA (1)...(19): siRNA sense strand
aaacagaacagcugggugu

SEQ ID NO: 2625108 - RNA, 19 nt, Homo sapiens
  misc_RNA (1)...(19): siRNA sense strand
ucauguuugugaagaggaa

SEQ ID NO: 2625109 - RNA, 19 nt, Homo sapiens
  misc_RNA (1)...(19): siRNA sense strand
aagaaaacgcauuggaaca

SEQ ID NO: 2625110 - RNA, 19 nt, Homo sapiens
  misc_RNA (1)...(19): siRNA sense strand
cagcauaagaguuccugaa

SEQ ID NO: 2625111 - RNA, 19 nt, Homo sapiens
  misc_RNA (1)...(19): siRNA sense strand
caacacuggacuauggaau

SEQ ID NO: 2625112 - RNA, 19 nt, Homo sapiens
  misc_RNA (1)...(19): siRNA sense strand
cauuggaacagucggaauu

SEQ ID NO: 2625113 - RNA, 19 nt, Homo sapiens
  misc_RNA (1)...(19): siRNA sense strand
uaaaacagguacagcaaau

SEQ ID NO: 2625114 - RNA, 19 nt, Homo sapiens
  misc_RNA (1)...(19): siRNA sense strand
gcauuggaacagucggaau

SEQ ID NO: 2625115 - RNA, 19 nt, Homo sapiens
  misc_RNA (1)...(19): siRNA sense strand
gacuauacuccuccagaaa

SEQ ID NO: 2625116 - RNA, 19 nt, Homo sapiens
  misc_RNA (1)...(19): siRNA sense strand
cugaaucgggagaacauua

SEQ ID NO: 2625117 - RNA, 19 nt, Homo sapiens
  misc_RNA (1)...(19): siRNA sense strand
cugcggacugugaggagaa

SEQ ID NO: 2625118 - RNA, 19 nt, Homo sapiens
  misc_RNA (1)...(19): siRNA sense strand
ccagaaaauaucauggcua

SEQ ID NO: 2625119 - RNA, 19 nt, Homo sapiens
  misc_RNA (1)...(19): siRNA sense strand
ccacaaggauuuacgcaac

SEQ ID NO: 2625120 - RNA, 19 nt, Homo sapiens
  misc_RNA (1)...(19): siRNA sense strand
gaauauugaaucacaggau

SEQ ID NO: 2625121 - RNA, 19 nt, Homo sapiens
  misc_RNA (1)...(19): siRNA sense strand
ccuaaaacagguacagcaa

SEQ ID NO: 2625122 - RNA, 19 nt, Homo sapiens
  misc_RNA (1)...(19): siRNA sense strand
ggaucauagaugucauaga

SEQ ID NO: 2625123 - RNA, 19 nt, Homo sapiens
  misc_RNA (1)...(19): siRNA sense strand
accuguacguagucaguua

SEQ ID NO: 2625124 - RNA, 19 nt, Homo sapiens
  misc_RNA (1)...(19): siRNA sense strand
ggagaggugacaaggcuga

SEQ ID NO: 2625125 - RNA, 19 nt, Homo sapiens
  misc_RNA (1)...(19): siRNA sense strand
aguauaguaaccagaagaa

SEQ ID NO: 2625126 - RNA, 19 nt, Homo sapiens
  misc_RNA (1)...(19): siRNA sense strand
cgggagaacauuaugaacu

SEQ ID NO: 2625127 - RNA, 19 nt, Homo sapiens
  misc_RNA (1)...(19): siRNA sense strand
ggcccaaucuaguggaaac

SEQ ID NO: 2625128 - RNA, 19 nt, Homo sapiens
  misc_RNA (1)...(19): siRNA sense strand
cagcaauggaaacagaaca

SEQ ID NO: 2625129 - RNA, 19 nt, Homo sapiens
  misc_RNA (1)...(19): siRNA sense strand
gcaacauggcagcagcaau

SEQ ID NO: 2625130 - RNA, 19 nt, Homo sapiens
  misc_RNA (1)...(19): siRNA sense strand
guucauauauggugguccu

SEQ ID NO: 2625131 - RNA, 19 nt, Homo sapiens
  misc_RNA (1)...(19): siRNA sense strand
gccacaaggauuuacgcaa

SEQ ID NO: 2625132 - RNA, 19 nt, Homo sapiens
  misc_RNA (1)...(19): siRNA sense strand
augaaucugagguggaaau

SEQ ID NO: 2625133 - RNA, 19 nt, Homo sapiens
  misc_RNA (1)...(19): siRNA sense strand
aggagaauauugaaucaca

SEQ ID NO: 2625134 - RNA, 19 nt, Homo sapiens
  misc_RNA (1)...(19): siRNA sense strand
acagcaaauccuaaaguca

SEQ ID NO: 2625135 - RNA, 19 nt, Homo sapiens
  misc_RNA (1)...(19): siRNA sense strand
acgaagaggaaauugaguu

SEQ ID NO: 2625136 - RNA, 19 nt, Homo sapiens
  misc_RNA (1)...(19): siRNA sense strand
ucacauucuugcugcauca

SEQ ID NO: 2625137 - RNA, 19 nt, Homo sapiens
  misc_RNA (1)...(19): siRNA sense strand
ccucugaaccaaaucguuu

SEQ ID NO: 2625138 - RNA, 19 nt, Homo sapiens
  misc_RNA (1)...(19): siRNA sense strand
gguguugagauauuugaaa

SEQ ID NO: 2625139 - RNA, 19 nt, Homo sapiens
  misc_RNA (1)...(19): siRNA sense strand
accagaaugaacagggcua

SEQ ID NO: 2625140 - RNA, 19 nt, Homo sapiens
  misc_RNA (1)...(19): siRNA sense strand
cgagaagaagaacuauuaa

SEQ ID NO: 2625141 - RNA, 19 nt, Homo sapiens
  misc_RNA (1)...(19): siRNA sense strand
aguugaauauauugccaga

SEQ ID NO: 2625142 - RNA, 19 nt, Homo sapiens
  misc_RNA (1)...(19): siRNA sense strand
ugaagaaacaacagacauc

SEQ ID NO: 2625143 - RNA, 19 nt, Homo sapiens
  misc_RNA (1)...(19): siRNA sense strand
cgauuaucaccaaggaagu

SEQ ID NO: 2625144 - RNA, 19 nt, Homo sapiens
  misc_RNA (1)...(19): siRNA sense strand
gcacaaugagcuagccaac

SEQ ID NO: 2625145 - RNA, 19 nt, Homo sapiens
  misc_RNA (1)...(19): siRNA sense strand
cugagaaggcacagcagaa

SEQ ID NO: 2625146 - RNA, 19 nt, Homo sapiens
  misc_RNA (1)...(19): siRNA sense strand
gcaaagaagcugagccaug

SEQ ID NO: 2625147 - RNA, 19 nt, Homo sapiens
  misc_RNA (1)...(19): siRNA sense strand
gcuuuaacuuugaugccaa

SEQ ID NO: 2625148 - RNA, 19 nt, Homo sapiens
  misc_RNA (1)...(19): siRNA sense strand
gggaacaagcggaagacca

SEQ ID NO: 2625149 - RNA, 19 nt, Homo sapiens
  misc_RNA (1)...(19): siRNA sense strand
cugcaaagaagcugagcca

SEQ ID NO: 2625150 - RNA, 19 nt, Homo sapiens
  misc_RNA (1)...(19): siRNA sense strand
ggaacaugauugaagccuu

SEQ ID NO: 2625151 - RNA, 19 nt, Homo sapiens
  misc_RNA (1)...(19): siRNA sense strand
ucuacuaucaguugaacaa

SEQ ID NO: 2625152 - RNA, 19 nt, Homo sapiens
  misc_RNA (1)...(19): siRNA sense strand
caaacaacaaagacagcuu

SEQ ID NO: 2625153 - RNA, 19 nt, Homo sapiens
  misc_RNA (1)...(19): siRNA sense strand
ggaaggaugaacuggagca

SEQ ID NO: 2625154 - RNA, 19 nt, Homo sapiens
  misc_RNA (1)...(19): siRNA sense strand
cggaagaccauggcagaga

SEQ ID NO: 2625155 - RNA, 19 nt, Homo sapiens
  misc_RNA (1)...(19): siRNA sense strand
aagacagcuuauugcagaa

SEQ ID NO: 2625156 - RNA, 19 nt, Homo sapiens
  misc_RNA (1)...(19): siRNA sense strand
uuccaauggcuuaaugaua

SEQ ID NO: 2625157 - RNA, 19 nt, Homo sapiens
  misc_RNA (1)...(19): siRNA sense strand
cugacuaauaugaaugaca

SEQ ID NO: 2625158 - RNA, 19 nt, Homo sapiens
  misc_RNA (1)...(19): siRNA sense strand
gagacgugcaggaggccuu

SEQ ID NO: 2625159 - RNA, 19 nt, Homo sapiens
  misc_RNA (1)...(19): siRNA sense strand
ugcuggacaaauugagaua

SEQ ID NO: 2625160 - RNA, 19 nt, Homo sapiens
  misc_RNA (1)...(19): siRNA sense strand
cugagaaggcacagcagaa

SEQ ID NO: 2625161 - RNA, 19 nt, Homo sapiens
  misc_RNA (1)...(19): siRNA sense strand
gcaaagaagcugagccaug

SEQ ID NO: 2625162 - RNA, 19 nt, Homo sapiens
  misc_RNA (1)...(19): siRNA sense strand
gcuuuaacuuugaugccaa

SEQ ID NO: 2625163 - RNA, 19 nt, Homo sapiens
  misc_RNA (1)...(19): siRNA sense strand
gggaacaagcggaagacca

SEQ ID NO: 2625164 - RNA, 19 nt, Homo sapiens
  misc_RNA (1)...(19): siRNA sense strand
cugcaaagaagcugagcca

SEQ ID NO: 2625165 - RNA, 19 nt, Homo sapiens
  misc_RNA (1)...(19): siRNA sense strand
ggaacaugauugaagccuu

SEQ ID NO: 2625166 - RNA, 19 nt, Homo sapiens
  misc_RNA (1)...(19): siRNA sense strand
ucuacuaucaguugaacaa

SEQ ID NO: 2625167 - RNA, 19 nt, Homo sapiens
  misc_RNA (1)...(19): siRNA sense strand
caaacaacaaagacagcuu

SEQ ID NO: 2625168 - RNA, 19 nt, Homo sapiens
  misc_RNA (1)...(19): siRNA sense strand
ggaaggaugaacuggagca

SEQ ID NO: 2625169 - RNA, 19 nt, Homo sapiens
  misc_RNA (1)...(19): siRNA sense strand
cggaagaccauggcagaga

SEQ ID NO: 2625170 - RNA, 19 nt, Homo sapiens
  misc_RNA (1)...(19): siRNA sense strand
aagacagcuuauugcagaa

SEQ ID NO: 2625171 - RNA, 19 nt, Homo sapiens
  misc_RNA (1)...(19): siRNA sense strand
uuccaauggcuuaaugaua

SEQ ID NO: 2625172 - RNA, 19 nt, Homo sapiens
  misc_RNA (1)...(19): siRNA sense strand
cugacuaauaugaaugaca

SEQ ID NO: 2625173 - RNA, 19 nt, Homo sapiens
  misc_RNA (1)...(19): siRNA sense strand
gagacgugcaggaggccuu

SEQ ID NO: 2625174 - RNA, 19 nt, Homo sapiens
  misc_RNA (1)...(19): siRNA sense strand
ugcuggacaaauugagaua

SEQ ID NO: 2625175 - RNA, 19 nt, Homo sapiens
  misc_RNA (1)...(19): siRNA sense strand
cugagaaggcacagcagaa

SEQ ID NO: 2625176 - RNA, 19 nt, Homo sapiens
  misc_RNA (1)...(19): siRNA sense strand
gcaaagaagcugagccaug

SEQ ID NO: 2625177 - RNA, 19 nt, Homo sapiens
  misc_RNA (1)...(19): siRNA sense strand
gcuuuaacuuugaugccaa

SEQ ID NO: 2625178 - RNA, 19 nt, Homo sapiens
  misc_RNA (1)...(19): siRNA sense strand
gggaacaagcggaagacca

SEQ ID NO: 2625179 - RNA, 19 nt, Homo sapiens
  misc_RNA (1)...(19): siRNA sense strand
cugcaaagaagcugagcca

SEQ ID NO: 2625180 - RNA, 19 nt, Homo sapiens
  misc_RNA (1)...(19): siRNA sense strand
ggaacaugauugaagccuu

SEQ ID NO: 2625181 - RNA, 19 nt, Homo sapiens
  misc_RNA (1)...(19): siRNA sense strand
ucuacuaucaguugaacaa

SEQ ID NO: 2625182 - RNA, 19 nt, Homo sapiens
  misc_RNA (1)...(19): siRNA sense strand
caaacaacaaagacagcuu

SEQ ID NO: 2625183 - RNA, 19 nt, Homo sapiens
  misc_RNA (1)...(19): siRNA sense strand
ggaaggaugaacuggagca

SEQ ID NO: 2625184 - RNA, 19 nt, Homo sapiens
  misc_RNA (1)...(19): siRNA sense strand
cggaagaccauggcagaga

SEQ ID NO: 2625185 - RNA, 19 nt, Homo sapiens
  misc_RNA (1)...(19): siRNA sense strand
aagacagcuuauugcagaa

SEQ ID NO: 2625186 - RNA, 19 nt, Homo sapiens
  misc_RNA (1)...(19): siRNA sense strand
uuccaauggcuuaaugaua

SEQ ID NO: 2625187 - RNA, 19 nt, Homo sapiens
  misc_RNA (1)...(19): siRNA sense strand
cugacuaauaugaaugaca

SEQ ID NO: 2625188 - RNA, 19 nt, Homo sapiens
  misc_RNA (1)...(19): siRNA sense strand
gagacgugcaggaggccuu

SEQ ID NO: 2625189 - RNA, 19 nt, Homo sapiens
  misc_RNA (1)...(19): siRNA sense strand
ugcuggacaaauugagaua

SEQ ID NO: 2625190 - RNA, 19 nt, Homo sapiens
  misc_RNA (1)...(19): siRNA sense strand
cugagaaggcacagcagaa

SEQ ID NO: 2625191 - RNA, 19 nt, Homo sapiens
  misc_RNA (1)...(19): siRNA sense strand
gcaaagaagcugagccaug

SEQ ID NO: 2625192 - RNA, 19 nt, Homo sapiens
  misc_RNA (1)...(19): siRNA sense strand
gcuuuaacuuugaugccaa

SEQ ID NO: 2625193 - RNA, 19 nt, Homo sapiens
  misc_RNA (1)...(19): siRNA sense strand
gggaacaagcggaagacca

SEQ ID NO: 2625194 - RNA, 19 nt, Homo sapiens
  misc_RNA (1)...(19): siRNA sense strand
cugcaaagaagcugagcca

SEQ ID NO: 2625195 - RNA, 19 nt, Homo sapiens
  misc_RNA (1)...(19): siRNA sense strand
ggaacaugauugaagccuu

SEQ ID NO: 2625196 - RNA, 19 nt, Homo sapiens
  misc_RNA (1)...(19): siRNA sense strand
ucuacuaucaguugaacaa

SEQ ID NO: 2625197 - RNA, 19 nt, Homo sapiens
  misc_RNA (1)...(19): siRNA sense strand
caaacaacaaagacagcuu

SEQ ID NO: 2625198 - RNA, 19 nt, Homo sapiens
  misc_RNA (1)...(19): siRNA sense strand
ggaaggaugaacuggagca

SEQ ID NO: 2625199 - RNA, 19 nt, Homo sapiens
  misc_RNA (1)...(19): siRNA sense strand
cggaagaccauggcagaga

SEQ ID NO: 2625200 - RNA, 19 nt, Homo sapiens
  misc_RNA (1)...(19): siRNA sense strand
aagacagcuuauugcagaa

SEQ ID NO: 2625201 - RNA, 19 nt, Homo sapiens
  misc_RNA (1)...(19): siRNA sense strand
uuccaauggcuuaaugaua

SEQ ID NO: 2625202 - RNA, 19 nt, Homo sapiens
  misc_RNA (1)...(19): siRNA sense strand
cugacuaauaugaaugaca

SEQ ID NO: 2625203 - RNA, 19 nt, Homo sapiens
  misc_RNA (1)...(19): siRNA sense strand
gagacgugcaggaggccuu

SEQ ID NO: 2625204 - RNA, 19 nt, Homo sapiens
  misc_RNA (1)...(19): siRNA sense strand
ugcuggacaaauugagaua

SEQ ID NO: 2625205 - RNA, 19 nt, Homo sapiens
  misc_RNA (1)...(19): siRNA sense strand
cugagaaggcacagcagaa

SEQ ID NO: 2625206 - RNA, 19 nt, Homo sapiens
  misc_RNA (1)...(19): siRNA sense strand
gcaaagaagcugagccaug

SEQ ID NO: 2625207 - RNA, 19 nt, Homo sapiens
  misc_RNA (1)...(19): siRNA sense strand
gcuuuaacuuugaugccaa

SEQ ID NO: 2625208 - RNA, 19 nt, Homo sapiens
  misc_RNA (1)...(19): siRNA sense strand
gggaacaagcggaagacca

SEQ ID NO: 2625209 - RNA, 19 nt, Homo sapiens
  misc_RNA (1)...(19): siRNA sense strand
cugcaaagaagcugagcca

SEQ ID NO: 2625210 - RNA, 19 nt, Homo sapiens
  misc_RNA (1)...(19): siRNA sense strand
ggaacaugauugaagccuu

SEQ ID NO: 2625211 - RNA, 19 nt, Homo sapiens
  misc_RNA (1)...(19): siRNA sense strand
ucuacuaucaguugaacaa

SEQ ID NO: 2625212 - RNA, 19 nt, Homo sapiens
  misc_RNA (1)...(19): siRNA sense strand
caaacaacaaagacagcuu

SEQ ID NO: 2625213 - RNA, 19 nt, Homo sapiens
  misc_RNA (1)...(19): siRNA sense strand
ggaaggaugaacuggagca

SEQ ID NO: 2625214 - RNA, 19 nt, Homo sapiens
  misc_RNA (1)...(19): siRNA sense strand
cggaagaccauggcagaga

SEQ ID NO: 2625215 - RNA, 19 nt, Homo sapiens
  misc_RNA (1)...(19): siRNA sense strand
aagacagcuuauugcagaa

SEQ ID NO: 2625216 - RNA, 19 nt, Homo sapiens
  misc_RNA (1)...(19): siRNA sense strand
uuccaauggcuuaaugaua

SEQ ID NO: 2625217 - RNA, 19 nt, Homo sapiens
  misc_RNA (1)...(19): siRNA sense strand
cugacuaauaugaaugaca

SEQ ID NO: 2625218 - RNA, 19 nt, Homo sapiens
  misc_RNA (1)...(19): siRNA sense strand
gagacgugcaggaggccuu

SEQ ID NO: 2625219 - RNA, 19 nt, Homo sapiens
  misc_RNA (1)...(19): siRNA sense strand
ugcuggacaaauugagaua

SEQ ID NO: 2625220 - RNA, 19 nt, Homo sapiens
  misc_RNA (1)...(19): siRNA sense strand
gcaaagaauugaagcguug

SEQ ID NO: 2625221 - RNA, 19 nt, Homo sapiens
  misc_RNA (1)...(19): siRNA sense strand
uaacaaagcuggagcacac

SEQ ID NO: 2625222 - RNA, 19 nt, Homo sapiens
  misc_RNA (1)...(19): siRNA sense strand
caggaauggugaagccaga

SEQ ID NO: 2625223 - RNA, 19 nt, Homo sapiens
  misc_RNA (1)...(19): siRNA sense strand
gcguugugucugugagaga

SEQ ID NO: 2625224 - RNA, 19 nt, Homo sapiens
  misc_RNA (1)...(19): siRNA sense strand
gaauauaaagcuugcagga

SEQ ID NO: 2625225 - RNA, 19 nt, Homo sapiens
  misc_RNA (1)...(19): siRNA sense strand
cucaaauggaagaaagauu

SEQ ID NO: 2625226 - RNA, 19 nt, Homo sapiens
  misc_RNA (1)...(19): siRNA sense strand
aaacauuaggcgaagguga

SEQ ID NO: 2625227 - RNA, 19 nt, Homo sapiens
  misc_RNA (1)...(19): siRNA sense strand
auauaaagcuugcaggaag

SEQ ID NO: 2625228 - RNA, 19 nt, Homo sapiens
  misc_RNA (1)...(19): siRNA sense strand
uguacagaacaauggaaau

SEQ ID NO: 2625229 - RNA, 19 nt, Homo sapiens
  misc_RNA (1)...(19): siRNA sense strand
cccaagaagcagagacugu

SEQ ID NO: 2625230 - RNA, 19 nt, Homo sapiens
  misc_RNA (1)...(19): siRNA sense strand
cccugaaacauuaggcgaa

SEQ ID NO: 2625231 - RNA, 19 nt, Homo sapiens
  misc_RNA (1)...(19): siRNA sense strand
uggaaauggcauggagaca

SEQ ID NO: 2625232 - RNA, 19 nt, Homo sapiens
  misc_RNA (1)...(19): siRNA sense strand
gaacaauggaaauggcaug

SEQ ID NO: 2625233 - RNA, 19 nt, Homo sapiens
  misc_RNA (1)...(19): siRNA sense strand
gcagagacuguguggccau

SEQ ID NO: 2625234 - RNA, 19 nt, Homo sapiens
  misc_RNA (1)...(19): siRNA sense strand
uggugaagccagagagccu

SEQ ID NO: 2625235 - RNA, 19 nt, Homo sapiens
  misc_RNA (1)...(19): siRNA sense strand
gcugaagauaaacaaacaa

SEQ ID NO: 2625236 - RNA, 19 nt, Homo sapiens
  misc_RNA (1)...(19): siRNA sense strand
aguccagaauauaaagcuu

SEQ ID NO: 2625237 - RNA, 19 nt, Homo sapiens
  misc_RNA (1)...(19): siRNA sense strand
aguucuauaaagacagcaa

SEQ ID NO: 2625238 - RNA, 19 nt, Homo sapiens
  misc_RNA (1)...(19): siRNA sense strand
aggagauggauuuggcaua

SEQ ID NO: 2625239 - RNA, 19 nt, Homo sapiens
  misc_RNA (1)...(19): siRNA sense strand
caaagaaugauaugugaga

SEQ ID NO: 2625240 - RNA, 19 nt, Homo sapiens
  misc_RNA (1)...(19): siRNA sense strand
gugguaugagaguggauaa

SEQ ID NO: 2625241 - RNA, 19 nt, Homo sapiens
  misc_RNA (1)...(19): siRNA sense strand
gaaugauaugugagaagau

SEQ ID NO: 2625242 - RNA, 19 nt, Homo sapiens
  misc_RNA (1)...(19): siRNA sense strand
gagcacaaauguaagccuu

SEQ ID NO: 2625243 - RNA, 19 nt, Homo sapiens
  misc_RNA (1)...(19): siRNA sense strand
guccaaacauggcaggaga

SEQ ID NO: 2625244 - RNA, 19 nt, Homo sapiens
  misc_RNA (1)...(19): siRNA sense strand
caauauuaucacugcacuu

SEQ ID NO: 2625245 - RNA, 19 nt, Homo sapiens
  misc_RNA (1)...(19): siRNA sense strand
aagaaugauaugugagaag

SEQ ID NO: 2625246 - RNA, 19 nt, Homo sapiens
  misc_RNA (1)...(19): siRNA sense strand
uagcaaagaacaagagcac

SEQ ID NO: 2625247 - RNA, 19 nt, Homo sapiens
  misc_RNA (1)...(19): siRNA sense strand
acguaacuuugaagauaga

SEQ ID NO: 2625248 - RNA, 19 nt, Homo sapiens
  misc_RNA (1)...(19): siRNA sense strand
uggauuuggcauaaggaca

SEQ ID NO: 2625249 - RNA, 19 nt, Homo sapiens
  misc_RNA (1)...(19): siRNA sense strand
aggagauggauuuggcaua

SEQ ID NO: 2625250 - RNA, 19 nt, Homo sapiens
  misc_RNA (1)...(19): siRNA sense strand
caaagaaugauaugugaga

SEQ ID NO: 2625251 - RNA, 19 nt, Homo sapiens
  misc_RNA (1)...(19): siRNA sense strand
gugguaugagaguggauaa

SEQ ID NO: 2625252 - RNA, 19 nt, Homo sapiens
  misc_RNA (1)...(19): siRNA sense strand
gaaugauaugugagaagau

SEQ ID NO: 2625253 - RNA, 19 nt, Homo sapiens
  misc_RNA (1)...(19): siRNA sense strand
gagcacaaauguaagccuu

SEQ ID NO: 2625254 - RNA, 19 nt, Homo sapiens
  misc_RNA (1)...(19): siRNA sense strand
guccaaacauggcaggaga

SEQ ID NO: 2625255 - RNA, 19 nt, Homo sapiens
  misc_RNA (1)...(19): siRNA sense strand
caauauuaucacugcacuu

SEQ ID NO: 2625256 - RNA, 19 nt, Homo sapiens
  misc_RNA (1)...(19): siRNA sense strand
aagaaugauaugugagaag

SEQ ID NO: 2625257 - RNA, 19 nt, Homo sapiens
  misc_RNA (1)...(19): siRNA sense strand
uagcaaagaacaagagcac

SEQ ID NO: 2625258 - RNA, 19 nt, Homo sapiens
  misc_RNA (1)...(19): siRNA sense strand
acguaacuuugaagauaga

SEQ ID NO: 2625259 - RNA, 19 nt, Homo sapiens
  misc_RNA (1)...(19): siRNA sense strand
uggauuuggcauaaggaca

SEQ ID NO: 2625260 - RNA, 19 nt, Homo sapiens
  misc_RNA (1)...(19): siRNA sense strand
caggaaaagaauacacuaa

SEQ ID NO: 2625261 - RNA, 19 nt, Homo sapiens
  misc_RNA (1)...(19): siRNA sense strand
cucuaaagaagaaggagau

SEQ ID NO: 2625262 - RNA, 19 nt, Homo sapiens
  misc_RNA (1)...(19): siRNA sense strand
ucgaacaggacaaugggua

SEQ ID NO: 2625263 - RNA, 19 nt, Homo sapiens
  misc_RNA (1)...(19): siRNA sense strand
cagcgaugauggugcagca

SEQ ID NO: 2625264 - RNA, 19 nt, Homo sapiens
  misc_RNA (1)...(19): siRNA sense strand
gguguaaggcccugcgaca

SEQ ID NO: 2625265 - RNA, 19 nt, Homo sapiens
  misc_RNA (1)...(19): siRNA sense strand
ccgacuaagcauugacuca

SEQ ID NO: 2625266 - RNA, 19 nt, Homo sapiens
  misc_RNA (1)...(19): siRNA sense strand
ucaaugggcuccugggcau

SEQ ID NO: 2625267 - RNA, 19 nt, Homo sapiens
  misc_RNA (1)...(19): siRNA sense strand
ccauauuauuacaguucca

SEQ ID NO: 2625268 - RNA, 19 nt, Homo sapiens
  misc_RNA (1)...(19): siRNA sense strand
ggaccaaagugcagcaacc

SEQ ID NO: 2625269 - RNA, 19 nt, Homo sapiens
  misc_RNA (1)...(19): siRNA sense strand
uggagaagauuggggacua

SEQ ID NO: 2625270 - RNA, 19 nt, Homo sapiens
  misc_RNA (1)...(19): siRNA sense strand
gguguaaggcccugcgaca

SEQ ID NO: 2625271 - RNA, 19 nt, Homo sapiens
  misc_RNA (1)...(19): siRNA sense strand
ccgacuaagcauugacuca

SEQ ID NO: 2625272 - RNA, 19 nt, Homo sapiens
  misc_RNA (1)...(19): siRNA sense strand
ucaaugggcuccugggcau

SEQ ID NO: 2625273 - RNA, 19 nt, Homo sapiens
  misc_RNA (1)...(19): siRNA sense strand
ccauauuauuacaguucca

SEQ ID NO: 2625274 - RNA, 19 nt, Homo sapiens
  misc_RNA (1)...(19): siRNA sense strand
ggaccaaagugcagcaacc

SEQ ID NO: 2625275 - RNA, 19 nt, Homo sapiens
  misc_RNA (1)...(19): siRNA sense strand
uggagaagauuggggacua

SEQ ID NO: 2625276 - RNA, 19 nt, Homo sapiens
  misc_RNA (1)...(19): siRNA sense strand
gguguaaggcccugcgaca

SEQ ID NO: 2625277 - RNA, 19 nt, Homo sapiens
  misc_RNA (1)...(19): siRNA sense strand
ccgacuaagcauugacuca

SEQ ID NO: 2625278 - RNA, 19 nt, Homo sapiens
  misc_RNA (1)...(19): siRNA sense strand
ucaaugggcuccugggcau

SEQ ID NO: 2625279 - RNA, 19 nt, Homo sapiens
  misc_RNA (1)...(19): siRNA sense strand
ggaccaaagugcagcaacc

SEQ ID NO: 2625280 - RNA, 19 nt, Homo sapiens
  misc_RNA (1)...(19): siRNA sense strand
uggagaagauuggggacua

SEQ ID NO: 2625281 - RNA, 19 nt, Homo sapiens
  misc_RNA (1)...(19): siRNA sense strand
gguguaaggcccugcgaca

SEQ ID NO: 2625282 - RNA, 19 nt, Homo sapiens
  misc_RNA (1)...(19): siRNA sense strand
ccgacuaagcauugacuca

SEQ ID NO: 2625283 - RNA, 19 nt, Homo sapiens
  misc_RNA (1)...(19): siRNA sense strand
ucaaugggcuccugggcau

SEQ ID NO: 2625284 - RNA, 19 nt, Homo sapiens
  misc_RNA (1)...(19): siRNA sense strand
ggaccaaagugcagcaacc

SEQ ID NO: 2625285 - RNA, 19 nt, Homo sapiens
  misc_RNA (1)...(19): siRNA sense strand
uggagaagauuggggacua

SEQ ID NO: 2625286 - RNA, 19 nt, Homo sapiens
  misc_RNA (1)...(19): siRNA sense strand
gguguaaggcccugcgaca

SEQ ID NO: 2625287 - RNA, 19 nt, Homo sapiens
  misc_RNA (1)...(19): siRNA sense strand
ccgacuaagcauugacuca

SEQ ID NO: 2625288 - RNA, 19 nt, Homo sapiens
  misc_RNA (1)...(19): siRNA sense strand
ucaaugggcuccugggcau

SEQ ID NO: 2625289 - RNA, 19 nt, Homo sapiens
  misc_RNA (1)...(19): siRNA sense strand
ggaccaaagugcagcaacc

SEQ ID NO: 2625290 - RNA, 19 nt, Homo sapiens
  misc_RNA (1)...(19): siRNA sense strand
uggagaagauuggggacua

SEQ ID NO: 2625291 - RNA, 19 nt, Homo sapiens
  misc_RNA (1)...(19): siRNA sense strand
ggacauaacugaugcugag

SEQ ID NO: 2625292 - RNA, 19 nt, Homo sapiens
  misc_RNA (1)...(19): siRNA sense strand
ugcuuaaaguuguuggaau

SEQ ID NO: 2625293 - RNA, 19 nt, Homo sapiens
  misc_RNA (1)...(19): siRNA sense strand
ccgcaggaucugugagaag

SEQ ID NO: 2625294 - RNA, 19 nt, Homo sapiens
  misc_RNA (1)...(19): siRNA sense strand
cacaaggagcuauggaaca

SEQ ID NO: 2625295 - RNA, 19 nt, Homo sapiens
  misc_RNA (1)...(19): siRNA sense strand
gcuuauugugguagugcuu

SEQ ID NO: 2625296 - RNA, 19 nt, Homo sapiens
  misc_RNA (1)...(19): siRNA sense strand
uggaaugaaagcagggacu

SEQ ID NO: 2625297 - RNA, 19 nt, Homo sapiens
  misc_RNA (1)...(19): siRNA sense strand
caccaggagcuauggaaca

SEQ ID NO: 2625298 - RNA, 19 nt, Homo sapiens
  misc_RNA (1)...(19): siRNA sense strand
acucuguguucaauggcaa

SEQ ID NO: 2625299 - RNA, 19 nt, Homo sapiens
  misc_RNA (1)...(19): siRNA sense strand
ccacaaggagcuauggaac

SEQ ID NO: 2625300 - RNA, 19 nt, Homo sapiens
  misc_RNA (1)...(19): siRNA sense strand
gugcuagaauggaggcuca

SEQ ID NO: 2625301 - RNA, 19 nt, Homo sapiens
  misc_RNA (1)...(19): siRNA sense strand
ucucagauccagaagguca

SEQ ID NO: 2625302 - RNA, 19 nt, Homo sapiens
  misc_RNA (1)...(19): siRNA sense strand
agugagaaggacugugcua

SEQ ID NO: 2625303 - RNA, 19 nt, Homo sapiens
  misc_RNA (1)...(19): siRNA sense strand
gccuggagcuguugcccaa

SEQ ID NO: 2625304 - RNA, 19 nt, Homo sapiens
  misc_RNA (1)...(19): siRNA sense strand
cggaaaucacuuaugcuga

SEQ ID NO: 2625305 - RNA, 19 nt, Homo sapiens
  misc_RNA (1)...(19): siRNA sense strand
ggucaguuugugagaugau

SEQ ID NO: 2625306 - RNA, 19 nt, Homo sapiens
  misc_RNA (1)...(19): siRNA sense strand
acucaagaagagcaggauu

SEQ ID NO: 2625307 - RNA, 19 nt, Homo sapiens
  misc_RNA (1)...(19): siRNA sense strand
gugcuagaauggaggcuca

SEQ ID NO: 2625308 - RNA, 19 nt, Homo sapiens
  misc_RNA (1)...(19): siRNA sense strand
ucucagauccagaagguca

SEQ ID NO: 2625309 - RNA, 19 nt, Homo sapiens
  misc_RNA (1)...(19): siRNA sense strand
agugagaaggacugugcua

SEQ ID NO: 2625310 - RNA, 19 nt, Homo sapiens
  misc_RNA (1)...(19): siRNA sense strand
gccuggagcuguugcccaa

SEQ ID NO: 2625311 - RNA, 19 nt, Homo sapiens
  misc_RNA (1)...(19): siRNA sense strand
cggaaaucacuuaugcuga

SEQ ID NO: 2625312 - RNA, 19 nt, Homo sapiens
  misc_RNA (1)...(19): siRNA sense strand
ggucaguuugugagaugau

SEQ ID NO: 2625313 - RNA, 19 nt, Homo sapiens
  misc_RNA (1)...(19): siRNA sense strand
acucaagaagagcaggauu

SEQ ID NO: 2625314 - RNA, 19 nt, Homo sapiens
  misc_RNA (1)...(19): siRNA sense strand
gugcuagaauggaggcuca

SEQ ID NO: 2625315 - RNA, 19 nt, Homo sapiens
  misc_RNA (1)...(19): siRNA sense strand
ucucagauccagaagguca

SEQ ID NO: 2625316 - RNA, 19 nt, Homo sapiens
  misc_RNA (1)...(19): siRNA sense strand
agugagaaggacugugcua

SEQ ID NO: 2625317 - RNA, 19 nt, Homo sapiens
  misc_RNA (1)...(19): siRNA sense strand
gccuggagcuguugcccaa

SEQ ID NO: 2625318 - RNA, 19 nt, Homo sapiens
  misc_RNA (1)...(19): siRNA sense strand
cggaaaucacuuaugcuga

SEQ ID NO: 2625319 - RNA, 19 nt, Homo sapiens
  misc_RNA (1)...(19): siRNA sense strand
ggucaguuugugagaugau

SEQ ID NO: 2625320 - RNA, 19 nt, Homo sapiens
  misc_RNA (1)...(19): siRNA sense strand
acucaagaagagcaggauu

SEQ ID NO: 2625321 - RNA, 19 nt, Homo sapiens
  misc_RNA (1)...(19): siRNA sense strand
gugcuagaauggaggcuca

SEQ ID NO: 2625322 - RNA, 19 nt, Homo sapiens
  misc_RNA (1)...(19): siRNA sense strand
ucucagauccagaagguca

SEQ ID NO: 2625323 - RNA, 19 nt, Homo sapiens
  misc_RNA (1)...(19): siRNA sense strand
agugagaaggacugugcua

SEQ ID NO: 2625324 - RNA, 19 nt, Homo sapiens
  misc_RNA (1)...(19): siRNA sense strand
gccuggagcuguugcccaa

SEQ ID NO: 2625325 - RNA, 19 nt, Homo sapiens
  misc_RNA (1)...(19): siRNA sense strand
cggaaaucacuuaugcuga

SEQ ID NO: 2625326 - RNA, 19 nt, Homo sapiens
  misc_RNA (1)...(19): siRNA sense strand
ggucaguuugugagaugau

SEQ ID NO: 2625327 - RNA, 19 nt, Homo sapiens
  misc_RNA (1)...(19): siRNA sense strand
acucaagaagagcaggauu

SEQ ID NO: 2625328 - RNA, 19 nt, Homo sapiens
  misc_RNA (1)...(19): siRNA sense strand
cuuugaagcaaguaggauu

SEQ ID NO: 2625329 - RNA, 19 nt, Homo sapiens
  misc_RNA (1)...(19): siRNA sense strand
ccuauugacuggagagccu

SEQ ID NO: 2625330 - RNA, 19 nt, Homo sapiens
  misc_RNA (1)...(19): siRNA sense strand
uggacuuagagaugagaau

SEQ ID NO: 2625331 - RNA, 19 nt, Homo sapiens
  misc_RNA (1)...(19): siRNA sense strand
cuggaacaacauugaacua

SEQ ID NO: 2625332 - RNA, 19 nt, Homo sapiens
  misc_RNA (1)...(19): siRNA sense strand
gcugagagugaaaggaacu

SEQ ID NO: 2625333 - RNA, 19 nt, Homo sapiens
  misc_RNA (1)...(19): siRNA sense strand
agauaaaugggccuggaau

SEQ ID NO: 2625334 - RNA, 19 nt, Homo sapiens
  misc_RNA (1)...(19): siRNA sense strand
cucaaaugcaucaaagaga

SEQ ID NO: 2625335 - RNA, 19 nt, Homo sapiens
  misc_RNA (1)...(19): siRNA sense strand
ucuucaaacccaaggcaaa

SEQ ID NO: 2625336 - RNA, 19 nt, Homo sapiens
  misc_RNA (1)...(19): siRNA sense strand
uugugaaaugguaggaaua

SEQ ID NO: 2625337 - RNA, 19 nt, Homo sapiens
  misc_RNA (1)...(19): siRNA sense strand
uuaaagaacugcucagcca

SEQ ID NO: 2625338 - RNA, 19 nt, Homo sapiens
  misc_RNA (1)...(19): siRNA sense strand
caauuauggaucagguuca

SEQ ID NO: 2625339 - RNA, 19 nt, Homo sapiens
  misc_RNA (1)...(19): siRNA sense strand
agucaagaauuguugucca

SEQ ID NO: 2625340 - RNA, 19 nt, Homo sapiens
  misc_RNA (1)...(19): siRNA sense strand
gcaaaauuggaaugaugua

SEQ ID NO: 2625341 - RNA, 19 nt, Homo sapiens
  misc_RNA (1)...(19): siRNA sense strand
ucacaggaggagcaggaau

SEQ ID NO: 2625342 - RNA, 19 nt, Homo sapiens
  misc_RNA (1)...(19): siRNA sense strand
ccucaauuauuuucggauu

SEQ ID NO: 2625343 - RNA, 19 nt, Homo sapiens
  misc_RNA (1)...(19): siRNA sense strand
cugaagucguggaggagau

SEQ ID NO: 2625344 - RNA, 19 nt, Homo sapiens
  misc_RNA (1)...(19): siRNA sense strand
aagucguggaggagauuaa

SEQ ID NO: 2625345 - RNA, 19 nt, Homo sapiens
  misc_RNA (1)...(19): siRNA sense strand
acgggagguuuaagugcaa

SEQ ID NO: 2625346 - RNA, 19 nt, Homo sapiens
  misc_RNA (1)...(19): siRNA sense strand
uggcuauuaucauggaaaa

SEQ ID NO: 2625347 - RNA, 19 nt, Homo sapiens
  misc_RNA (1)...(19): siRNA sense strand
agacgaacucaguagcaga

SEQ ID NO: 2625348 - RNA, 19 nt, Homo sapiens
  misc_RNA (1)...(19): siRNA sense strand
guggcuauuaucauggaaa

SEQ ID NO: 2625349 - RNA, 19 nt, Homo sapiens
  misc_RNA (1)...(19): siRNA sense strand
cugaagucguggaggagau

SEQ ID NO: 2625350 - RNA, 19 nt, Homo sapiens
  misc_RNA (1)...(19): siRNA sense strand
aagucguggaggagauuaa

SEQ ID NO: 2625351 - RNA, 19 nt, Homo sapiens
  misc_RNA (1)...(19): siRNA sense strand
acgggagguuuaagugcaa

SEQ ID NO: 2625352 - RNA, 19 nt, Homo sapiens
  misc_RNA (1)...(19): siRNA sense strand
uggcuauuaucauggaaaa

SEQ ID NO: 2625353 - RNA, 19 nt, Homo sapiens
  misc_RNA (1)...(19): siRNA sense strand
agacgaacucaguagcaga

SEQ ID NO: 2625354 - RNA, 19 nt, Homo sapiens
  misc_RNA (1)...(19): siRNA sense strand
guggcuauuaucauggaaa

SEQ ID NO: 2625355 - RNA, 19 nt, Homo sapiens
  misc_RNA (1)...(19): siRNA sense strand
uggcuauuaucauggaaaa

SEQ ID NO: 2625356 - RNA, 19 nt, Homo sapiens
  misc_RNA (1)...(19): siRNA sense strand
guggcuauuaucauggaaa

SEQ ID NO: 2625357 - RNA, 19 nt, Homo sapiens
  misc_RNA (1)...(19): siRNA sense strand
cugaagucguggaggagau

SEQ ID NO: 2625358 - RNA, 19 nt, Homo sapiens
  misc_RNA (1)...(19): siRNA sense strand
aagucguggaggagauuaa

SEQ ID NO: 2625359 - RNA, 19 nt, Homo sapiens
  misc_RNA (1)...(19): siRNA sense strand
acgggagguuuaagugcaa

SEQ ID NO: 2625360 - RNA, 19 nt, Homo sapiens
  misc_RNA (1)...(19): siRNA sense strand
uggcuauuaucauggaaaa

SEQ ID NO: 2625361 - RNA, 19 nt, Homo sapiens
  misc_RNA (1)...(19): siRNA sense strand
agacgaacucaguagcaga

SEQ ID NO: 2625362 - RNA, 19 nt, Homo sapiens
  misc_RNA (1)...(19): siRNA sense strand
guggcuauuaucauggaaa

SEQ ID NO: 2625363 - RNA, 19 nt, Homo sapiens
  misc_RNA (1)...(19): siRNA sense strand
cugaagucguggaggagau

SEQ ID NO: 2625364 - RNA, 19 nt, Homo sapiens
  misc_RNA (1)...(19): siRNA sense strand
aagucguggaggagauuaa

SEQ ID NO: 2625365 - RNA, 19 nt, Homo sapiens
  misc_RNA (1)...(19): siRNA sense strand
acgggagguuuaagugcaa

SEQ ID NO: 2625366 - RNA, 19 nt, Homo sapiens
  misc_RNA (1)...(19): siRNA sense strand
uggcuauuaucauggaaaa

SEQ ID NO: 2625367 - RNA, 19 nt, Homo sapiens
  misc_RNA (1)...(19): siRNA sense strand
agacgaacucaguagcaga

SEQ ID NO: 2625368 - RNA, 19 nt, Homo sapiens
  misc_RNA (1)...(19): siRNA sense strand
guggcuauuaucauggaaa

SEQ ID NO: 2625369 - RNA, 19 nt, Homo sapiens
  misc_RNA (1)...(19): siRNA sense strand
acauugaccucgagggcaa

SEQ ID NO: 2625370 - RNA, 19 nt, Homo sapiens
  misc_RNA (1)...(19): siRNA sense strand
aggugaagugugagacaau

SEQ ID NO: 2625371 - RNA, 19 nt, Homo sapiens
  misc_RNA (1)...(19): siRNA sense strand
cugcccaagacgugugaua

SEQ ID NO: 2625372 - RNA, 19 nt, Homo sapiens
  misc_RNA (1)...(19): siRNA sense strand
agaagaaggaggaggaguc

SEQ ID NO: 2625373 - RNA, 19 nt, Homo sapiens
  misc_RNA (1)...(19): siRNA sense strand
aggacauaaacgagcugaa

SEQ ID NO: 2625374 - RNA, 19 nt, Homo sapiens
  misc_RNA (1)...(19): siRNA sense strand
cugcggauccagaaggaca

SEQ ID NO: 2625375 - RNA, 19 nt, Homo sapiens
  misc_RNA (1)...(19): siRNA sense strand
ccgaaccagaugagagcaa

SEQ ID NO: 2625376 - RNA, 19 nt, Homo sapiens
  misc_RNA (1)...(19): siRNA sense strand
gcaucaaagccgaaccaga

SEQ ID NO: 2625377 - RNA, 19 nt, Homo sapiens
  misc_RNA (1)...(19): siRNA sense strand
ggacuaggcuauaugccau

SEQ ID NO: 2625378 - RNA, 19 nt, Homo sapiens
  misc_RNA (1)...(19): siRNA sense strand
agcccaagccauagaaaca

SEQ ID NO: 2625379 - RNA, 19 nt, Homo sapiens
  misc_RNA (1)...(19): siRNA sense strand
caaaugauguagcggagca

SEQ ID NO: 2625380 - RNA, 19 nt, Homo sapiens
  misc_RNA (1)...(19): siRNA sense strand
auagaaacagcuagagcau

SEQ ID NO: 2625381 - RNA, 19 nt, Homo sapiens
  misc_RNA (1)...(19): siRNA sense strand
agaugauccauuagcaaau

SEQ ID NO: 2625382 - RNA, 19 nt, Homo sapiens
  misc_RNA (1)...(19): siRNA sense strand
ccgcaggaucaucaaggaa

SEQ ID NO: 2625383 - RNA, 19 nt, Homo sapiens
  misc_RNA (1)...(19): siRNA sense strand
aggcuauaugccaugaaua

SEQ ID NO: 2625384 - RNA, 19 nt, Homo sapiens
  misc_RNA (1)...(19): siRNA sense strand
guagcggagcaguggaaga

SEQ ID NO: 2625385 - RNA, 19 nt, Homo sapiens
  misc_RNA (1)...(19): siRNA sense strand
gcggagcaguggaagacca

SEQ ID NO: 2625386 - RNA, 19 nt, Homo sapiens
  misc_RNA (1)...(19): siRNA sense strand
cggagcaguggaagaccaa

SEQ ID NO: 2625387 - RNA, 19 nt, Homo sapiens
  misc_RNA (1)...(19): siRNA sense strand
agagcauggacuaggcuau

SEQ ID NO: 2625388 - RNA, 19 nt, Homo sapiens
  misc_RNA (1)...(19): siRNA sense strand
aggaagaagccuacagcaa

SEQ ID NO: 2625389 - RNA, 19 nt, Homo sapiens
  misc_RNA (1)...(19): siRNA sense strand
agagauugcaauagaacaa

SEQ ID NO: 2625390 - RNA, 19 nt, Homo sapiens
  misc_RNA (1)...(19): siRNA sense strand
gggaggaaguccaggagca

SEQ ID NO: 2625391 - RNA, 19 nt, Homo sapiens
  misc_RNA (1)...(19): siRNA sense strand
aggagaacacugagaaaga

SEQ ID NO: 2625392 - RNA, 19 nt, Homo sapiens
  misc_RNA (1)...(19): siRNA sense strand
aaacugaggaagaggaaaa

SEQ ID NO: 2625393 - RNA, 19 nt, Homo sapiens
  misc_RNA (1)...(19): siRNA sense strand
aggccaggauggaggaaga

SEQ ID NO: 2625394 - RNA, 19 nt, Homo sapiens
  misc_RNA (1)...(19): siRNA sense strand
ggauggaggaagaagccua

SEQ ID NO: 2625395 - RNA, 19 nt, Homo sapiens
  misc_RNA (1)...(19): siRNA sense strand
agaggagaacacugagaaa

SEQ ID NO: 2625396 - RNA, 19 nt, Homo sapiens
  misc_RNA (1)...(19): siRNA sense strand
cugagaaagaacuggaaaa

SEQ ID NO: 2625397 - RNA, 19 nt, Homo sapiens
  misc_RNA (1)...(19): siRNA sense strand
cagaaugaccagaggaaag

SEQ ID NO: 2625398 - RNA, 19 nt, Homo sapiens
  misc_RNA (1)...(19): siRNA sense strand
uacaaacagcagugggaaa

SEQ ID NO: 2625399 - RNA, 19 nt, Homo sapiens
  misc_RNA (1)...(19): siRNA sense strand
gcaauagaacaaaaggaaa

SEQ ID NO: 2625400 - RNA, 19 nt, Homo sapiens
  misc_RNA (1)...(19): siRNA sense strand
ccaaagaacuucaagaccu

SEQ ID NO: 2625401 - RNA, 19 nt, Homo sapiens
  misc_RNA (1)...(19): siRNA sense strand
gcaucucagaggaggacaa

SEQ ID NO: 2625402 - RNA, 19 nt, Homo sapiens
  misc_RNA (1)...(19): siRNA sense strand
uggaaaauggaaagacaaa

SEQ ID NO: 2625403 - RNA, 19 nt, Homo sapiens
  misc_RNA (1)...(19): siRNA sense strand
cugaaaaggaaguugagaa

SEQ ID NO: 2625404 - RNA, 19 nt, Homo sapiens
  misc_RNA (1)...(19): siRNA sense strand
aggaggaggaggaagaaca

SEQ ID NO: 2625405 - RNA, 19 nt, Homo sapiens
  misc_RNA (1)...(19): siRNA sense strand
gaggaggacaagaagaaaa

SEQ ID NO: 2625406 - RNA, 19 nt, Homo sapiens
  misc_RNA (1)...(19): siRNA sense strand
ggacguaugagaaggacca

SEQ ID NO: 2625407 - RNA, 19 nt, Homo sapiens
  misc_RNA (1)...(19): siRNA sense strand
uaaccaggcugaaagggaa

SEQ ID NO: 2625408 - RNA, 19 nt, Homo sapiens
  misc_RNA (1)...(19): siRNA sense strand
gcaaccugacagaggagaa

SEQ ID NO: 2625409 - RNA, 19 nt, Homo sapiens
  misc_RNA (1)...(19): siRNA sense strand
cugaugugcugcugcgcaa

SEQ ID NO: 2625410 - RNA, 19 nt, Homo sapiens
  misc_RNA (1)...(19): siRNA sense strand
cuaaagaagaccaaagaac

SEQ ID NO: 2625411 - RNA, 19 nt, Homo sapiens
  misc_RNA (1)...(19): siRNA sense strand
aggaggaggaagaacagaa

SEQ ID NO: 2625412 - RNA, 19 nt, Homo sapiens
  misc_RNA (1)...(19): siRNA sense strand
agaaacugaggaagaggaa

SEQ ID NO: 2625413 - RNA, 19 nt, Homo sapiens
  misc_RNA (1)...(19): siRNA sense strand
ccuuuagaaaugacagcua

SEQ ID NO: 2625414 - RNA, 19 nt, Homo sapiens
  misc_RNA (1)...(19): siRNA sense strand
uguccuuggccuuuagaaa

SEQ ID NO: 2625415 - RNA, 19 nt, Homo sapiens
  misc_RNA (1)...(19): siRNA sense strand
gggaaaccuaccagaaguu

SEQ ID NO: 2625416 - RNA, 19 nt, Homo sapiens
  misc_RNA (1)...(19): siRNA sense strand
aagcgcaugucgaaagcaa

SEQ ID NO: 2625417 - RNA, 19 nt, Homo sapiens
  misc_RNA (1)...(19): siRNA sense strand
cggagcucauggaguuuaa

SEQ ID NO: 2625418 - RNA, 19 nt, Homo sapiens
  misc_RNA (1)...(19): siRNA sense strand
uggcaagugaucuggauga

SEQ ID NO: 2625419 - RNA, 19 nt, Homo sapiens
  misc_RNA (1)...(19): siRNA sense strand
agcagaaugaccagaggaa

SEQ ID NO: 2625420 - RNA, 19 nt, Homo sapiens
  misc_RNA (1)...(19): siRNA sense strand
ggaaagugucucagggcag

SEQ ID NO: 2625421 - RNA, 19 nt, Homo sapiens
  misc_RNA (1)...(19): siRNA sense strand
ggaugcagaaacugaccaa

SEQ ID NO: 2625422 - RNA, 19 nt, Homo sapiens
  misc_RNA (1)...(19): siRNA sense strand
cuggaaaacuucaaagcuu

SEQ ID NO: 2625423 - RNA, 19 nt, Homo sapiens
  misc_RNA (1)...(19): siRNA sense strand
ugaugcaguauguggagaa

SEQ ID NO: 2625424 - RNA, 19 nt, Homo sapiens
  misc_RNA (1)...(19): siRNA sense strand
aagcagcaaacuugaagaa

SEQ ID NO: 2625425 - RNA, 19 nt, Homo sapiens
  misc_RNA (1)...(19): siRNA sense strand
cugcagugaugcuggucuu

SEQ ID NO: 2625426 - RNA, 19 nt, Homo sapiens
  misc_RNA (1)...(19): siRNA sense strand
gggaagcagcucuugaaaa

SEQ ID NO: 2625427 - RNA, 19 nt, Homo sapiens
  misc_RNA (1)...(19): siRNA sense strand
aggcugaaagggaacgcaa

SEQ ID NO: 2625428 - RNA, 19 nt, Homo sapiens
  misc_RNA (1)...(19): siRNA sense strand
cugacaggaagcagaauga

SEQ ID NO: 2625429 - RNA, 19 nt, Homo sapiens
  misc_RNA (1)...(19): siRNA sense strand
cagcuauugaggaagaaga

SEQ ID NO: 2625430 - RNA, 19 nt, Homo sapiens
  misc_RNA (1)...(19): siRNA sense strand
cagaaggagaaaccgacaa

SEQ ID NO: 2625431 - RNA, 19 nt, Homo sapiens
  misc_RNA (1)...(19): siRNA sense strand
guuacaaacagcaguggga

SEQ ID NO: 2625432 - RNA, 19 nt, Homo sapiens
  misc_RNA (1)...(19): siRNA sense strand
aaucagaauucaagccgca

SEQ ID NO: 2625433 - RNA, 19 nt, Homo sapiens
  misc_RNA (1)...(19): siRNA sense strand
aagccuacagcaagggauu

SEQ ID NO: 2625434 - RNA, 19 nt, Homo sapiens
  misc_RNA (1)...(19): siRNA sense strand
gggcccaagaagcagcaaa

SEQ ID NO: 2625435 - RNA, 19 nt, Homo sapiens
  misc_RNA (1)...(19): siRNA sense strand
caguauguggagaaucuaa

SEQ ID NO: 2625436 - RNA, 19 nt, Homo sapiens
  misc_RNA (1)...(19): siRNA sense strand
gugaagcagcugagcagga

SEQ ID NO: 2625437 - RNA, 19 nt, Homo sapiens
  misc_RNA (1)...(19): siRNA sense strand
acugagaaagaacuggaaa

SEQ ID NO: 2625438 - RNA, 19 nt, Homo sapiens
  misc_RNA (1)...(19): siRNA sense strand
aggaaaagcgcaugucgaa

SEQ ID NO: 2625439 - RNA, 19 nt, Homo sapiens
  misc_RNA (1)...(19): siRNA sense strand
cgaaagcaacggaagugau

SEQ ID NO: 2625440 - RNA, 19 nt, Homo sapiens
  misc_RNA (1)...(19): siRNA sense strand
ggccaaacucccagcucau

SEQ ID NO: 2625441 - RNA, 19 nt, Homo sapiens
  misc_RNA (1)...(19): siRNA sense strand
uuaccagccuugucggaau

SEQ ID NO: 2625442 - RNA, 19 nt, Homo sapiens
  misc_RNA (1)...(19): siRNA sense strand
agaacagaagagugagagu

SEQ ID NO: 2625443 - RNA, 19 nt, Homo sapiens
  misc_RNA (1)...(19): siRNA sense strand
aggaagaagccuacagcaa

SEQ ID NO: 2625444 - RNA, 19 nt, Homo sapiens
  misc_RNA (1)...(19): siRNA sense strand
agagauugcaauagaacaa

SEQ ID NO: 2625445 - RNA, 19 nt, Homo sapiens
  misc_RNA (1)...(19): siRNA sense strand
gggaggaaguccaggagca

SEQ ID NO: 2625446 - RNA, 19 nt, Homo sapiens
  misc_RNA (1)...(19): siRNA sense strand
aggagaacacugagaaaga

SEQ ID NO: 2625447 - RNA, 19 nt, Homo sapiens
  misc_RNA (1)...(19): siRNA sense strand
aaacugaggaagaggaaaa

SEQ ID NO: 2625448 - RNA, 19 nt, Homo sapiens
  misc_RNA (1)...(19): siRNA sense strand
aggccaggauggaggaaga

SEQ ID NO: 2625449 - RNA, 19 nt, Homo sapiens
  misc_RNA (1)...(19): siRNA sense strand
ggauggaggaagaagccua

SEQ ID NO: 2625450 - RNA, 19 nt, Homo sapiens
  misc_RNA (1)...(19): siRNA sense strand
agaggagaacacugagaaa

SEQ ID NO: 2625451 - RNA, 19 nt, Homo sapiens
  misc_RNA (1)...(19): siRNA sense strand
cugagaaagaacuggaaaa

SEQ ID NO: 2625452 - RNA, 19 nt, Homo sapiens
  misc_RNA (1)...(19): siRNA sense strand
cagaaugaccagaggaaag

SEQ ID NO: 2625453 - RNA, 19 nt, Homo sapiens
  misc_RNA (1)...(19): siRNA sense strand
uacaaacagcagugggaaa

SEQ ID NO: 2625454 - RNA, 19 nt, Homo sapiens
  misc_RNA (1)...(19): siRNA sense strand
gcaauagaacaaaaggaaa

SEQ ID NO: 2625455 - RNA, 19 nt, Homo sapiens
  misc_RNA (1)...(19): siRNA sense strand
ccaaagaacuucaagaccu

SEQ ID NO: 2625456 - RNA, 19 nt, Homo sapiens
  misc_RNA (1)...(19): siRNA sense strand
gcaucucagaggaggacaa

SEQ ID NO: 2625457 - RNA, 19 nt, Homo sapiens
  misc_RNA (1)...(19): siRNA sense strand
uggaaaauggaaagacaaa

SEQ ID NO: 2625458 - RNA, 19 nt, Homo sapiens
  misc_RNA (1)...(19): siRNA sense strand
cugaaaaggaaguugagaa

SEQ ID NO: 2625459 - RNA, 19 nt, Homo sapiens
  misc_RNA (1)...(19): siRNA sense strand
aggaggaggaggaagaaca

SEQ ID NO: 2625460 - RNA, 19 nt, Homo sapiens
  misc_RNA (1)...(19): siRNA sense strand
gaggaggacaagaagaaaa

SEQ ID NO: 2625461 - RNA, 19 nt, Homo sapiens
  misc_RNA (1)...(19): siRNA sense strand
ggacguaugagaaggacca

SEQ ID NO: 2625462 - RNA, 19 nt, Homo sapiens
  misc_RNA (1)...(19): siRNA sense strand
uaaccaggcugaaagggaa

SEQ ID NO: 2625463 - RNA, 19 nt, Homo sapiens
  misc_RNA (1)...(19): siRNA sense strand
gcaaccugacagaggagaa

SEQ ID NO: 2625464 - RNA, 19 nt, Homo sapiens
  misc_RNA (1)...(19): siRNA sense strand
cugaugugcugcugcgcaa

SEQ ID NO: 2625465 - RNA, 19 nt, Homo sapiens
  misc_RNA (1)...(19): siRNA sense strand
cuaaagaagaccaaagaac

SEQ ID NO: 2625466 - RNA, 19 nt, Homo sapiens
  misc_RNA (1)...(19): siRNA sense strand
aggaggaggaagaacagaa

SEQ ID NO: 2625467 - RNA, 19 nt, Homo sapiens
  misc_RNA (1)...(19): siRNA sense strand
agaaacugaggaagaggaa

SEQ ID NO: 2625468 - RNA, 19 nt, Homo sapiens
  misc_RNA (1)...(19): siRNA sense strand
ccuuuagaaaugacagcua

SEQ ID NO: 2625469 - RNA, 19 nt, Homo sapiens
  misc_RNA (1)...(19): siRNA sense strand
uguccuuggccuuuagaaa

SEQ ID NO: 2625470 - RNA, 19 nt, Homo sapiens
  misc_RNA (1)...(19): siRNA sense strand
gggaaaccuaccagaaguu

SEQ ID NO: 2625471 - RNA, 19 nt, Homo sapiens
  misc_RNA (1)...(19): siRNA sense strand
aagcgcaugucgaaagcaa

SEQ ID NO: 2625472 - RNA, 19 nt, Homo sapiens
  misc_RNA (1)...(19): siRNA sense strand
cggagcucauggaguuuaa

SEQ ID NO: 2625473 - RNA, 19 nt, Homo sapiens
  misc_RNA (1)...(19): siRNA sense strand
uggcaagugaucuggauga

SEQ ID NO: 2625474 - RNA, 19 nt, Homo sapiens
  misc_RNA (1)...(19): siRNA sense strand
agcagaaugaccagaggaa

SEQ ID NO: 2625475 - RNA, 19 nt, Homo sapiens
  misc_RNA (1)...(19): siRNA sense strand
ggaaagugucucagggcag

SEQ ID NO: 2625476 - RNA, 19 nt, Homo sapiens
  misc_RNA (1)...(19): siRNA sense strand
ggaugcagaaacugaccaa

SEQ ID NO: 2625477 - RNA, 19 nt, Homo sapiens
  misc_RNA (1)...(19): siRNA sense strand
cuggaaaacuucaaagcuu

SEQ ID NO: 2625478 - RNA, 19 nt, Homo sapiens
  misc_RNA (1)...(19): siRNA sense strand
ugaugcaguauguggagaa

SEQ ID NO: 2625479 - RNA, 19 nt, Homo sapiens
  misc_RNA (1)...(19): siRNA sense strand
aagcagcaaacuugaagaa

SEQ ID NO: 2625480 - RNA, 19 nt, Homo sapiens
  misc_RNA (1)...(19): siRNA sense strand
cugcagugaugcuggucuu

SEQ ID NO: 2625481 - RNA, 19 nt, Homo sapiens
  misc_RNA (1)...(19): siRNA sense strand
gggaagcagcucuugaaaa

SEQ ID NO: 2625482 - RNA, 19 nt, Homo sapiens
  misc_RNA (1)...(19): siRNA sense strand
aggcugaaagggaacgcaa

SEQ ID NO: 2625483 - RNA, 19 nt, Homo sapiens
  misc_RNA (1)...(19): siRNA sense strand
cugacaggaagcagaauga

SEQ ID NO: 2625484 - RNA, 19 nt, Homo sapiens
  misc_RNA (1)...(19): siRNA sense strand
cagcuauugaggaagaaga

SEQ ID NO: 2625485 - RNA, 19 nt, Homo sapiens
  misc_RNA (1)...(19): siRNA sense strand
cagaaggagaaaccgacaa

SEQ ID NO: 2625486 - RNA, 19 nt, Homo sapiens
  misc_RNA (1)...(19): siRNA sense strand
guuacaaacagcaguggga

SEQ ID NO: 2625487 - RNA, 19 nt, Homo sapiens
  misc_RNA (1)...(19): siRNA sense strand
aaucagaauucaagccgca

SEQ ID NO: 2625488 - RNA, 19 nt, Homo sapiens
  misc_RNA (1)...(19): siRNA sense strand
aagccuacagcaagggauu

SEQ ID NO: 2625489 - RNA, 19 nt, Homo sapiens
  misc_RNA (1)...(19): siRNA sense strand
gggcccaagaagcagcaaa

SEQ ID NO: 2625490 - RNA, 19 nt, Homo sapiens
  misc_RNA (1)...(19): siRNA sense strand
caguauguggagaaucuaa

SEQ ID NO: 2625491 - RNA, 19 nt, Homo sapiens
  misc_RNA (1)...(19): siRNA sense strand
gugaagcagcugagcagga

SEQ ID NO: 2625492 - RNA, 19 nt, Homo sapiens
  misc_RNA (1)...(19): siRNA sense strand
acugagaaagaacuggaaa

SEQ ID NO: 2625493 - RNA, 19 nt, Homo sapiens
  misc_RNA (1)...(19): siRNA sense strand
aggaaaagcgcaugucgaa

SEQ ID NO: 2625494 - RNA, 19 nt, Homo sapiens
  misc_RNA (1)...(19): siRNA sense strand
cgaaagcaacggaagugau

SEQ ID NO: 2625495 - RNA, 19 nt, Homo sapiens
  misc_RNA (1)...(19): siRNA sense strand
ggccaaacucccagcucau

SEQ ID NO: 2625496 - RNA, 19 nt, Homo sapiens
  misc_RNA (1)...(19): siRNA sense strand
uuaccagccuugucggaau

SEQ ID NO: 2625497 - RNA, 19 nt, Homo sapiens
  misc_RNA (1)...(19): siRNA sense strand
agaacagaagagugagagu

SEQ ID NO: 2625498 - RNA, 19 nt, Homo sapiens
  misc_RNA (1)...(19): siRNA sense strand
agaaaaugugcaagagaaa

SEQ ID NO: 2625499 - RNA, 19 nt, Homo sapiens
  misc_RNA (1)...(19): siRNA sense strand
cuguagagcuggcgaggga

SEQ ID NO: 2625500 - RNA, 19 nt, Homo sapiens
  misc_RNA (1)...(19): siRNA sense strand
gggcacuauaugaggauga

SEQ ID NO: 2625501 - RNA, 19 nt, Homo sapiens
  misc_RNA (1)...(19): siRNA sense strand
ucucacucguagagggcaa

SEQ ID NO: 2625502 - RNA, 19 nt, Homo sapiens
  misc_RNA (1)...(19): siRNA sense strand
gggaugacccugugcgcau

SEQ ID NO: 2625503 - RNA, 19 nt, Homo sapiens
  misc_RNA (1)...(19): siRNA sense strand
cagaagaagaaguggcaac

SEQ ID NO: 2625504 - RNA, 19 nt, Homo sapiens
  misc_RNA (1)...(19): siRNA sense strand
ccuauuaccaaauggaaca

SEQ ID NO: 2625505 - RNA, 19 nt, Homo sapiens
  misc_RNA (1)...(19): siRNA sense strand
ccaucgaggcuguacacaa

SEQ ID NO: 2625506 - RNA, 19 nt, Homo sapiens
  misc_RNA (1)...(19): siRNA sense strand
agacagacacgcaggacca

SEQ ID NO: 2625507 - RNA, 19 nt, Homo sapiens
  misc_RNA (1)...(19): siRNA sense strand
uauaugaggaugagggugu

SEQ ID NO: 2625508 - RNA, 19 nt, Homo sapiens
  misc_RNA (1)...(19): siRNA sense strand
ccugaaguuugcaagaaaa

SEQ ID NO: 2625509 - RNA, 19 nt, Homo sapiens
  misc_RNA (1)...(19): siRNA sense strand
caugauuguccgagagaug

SEQ ID NO: 2625510 - RNA, 19 nt, Homo sapiens
  misc_RNA (1)...(19): siRNA sense strand
acacagacaugauggcucu

SEQ ID NO: 2625511 - RNA, 19 nt, Homo sapiens
  misc_RNA (1)...(19): siRNA sense strand
ccugauggccucugggagu

SEQ ID NO: 2625512 - RNA, 19 nt, Homo sapiens
  misc_RNA (1)...(19): siRNA sense strand
agaaguggcaacugguaca

SEQ ID NO: 2625513 - RNA, 19 nt, Homo sapiens
  misc_RNA (1)...(19): siRNA sense strand
agcagaggcuggaggugau

SEQ ID NO: 2625514 - RNA, 19 nt, Homo sapiens
  misc_RNA (1)...(19): siRNA sense strand
ucuucaaacaugagccaca

SEQ ID NO: 2625515 - RNA, 19 nt, Homo sapiens
  misc_RNA (1)...(19): siRNA sense strand
agaaaaugugcaagagaaa

SEQ ID NO: 2625516 - RNA, 19 nt, Homo sapiens
  misc_RNA (1)...(19): siRNA sense strand
cuguagagcuggcgaggga

SEQ ID NO: 2625517 - RNA, 19 nt, Homo sapiens
  misc_RNA (1)...(19): siRNA sense strand
gggcacuauaugaggauga

SEQ ID NO: 2625518 - RNA, 19 nt, Homo sapiens
  misc_RNA (1)...(19): siRNA sense strand
ucucacucguagagggcaa

SEQ ID NO: 2625519 - RNA, 19 nt, Homo sapiens
  misc_RNA (1)...(19): siRNA sense strand
gggaugacccugugcgcau

SEQ ID NO: 2625520 - RNA, 19 nt, Homo sapiens
  misc_RNA (1)...(19): siRNA sense strand
cagaagaagaaguggcaac

SEQ ID NO: 2625521 - RNA, 19 nt, Homo sapiens
  misc_RNA (1)...(19): siRNA sense strand
ccuauuaccaaauggaaca

SEQ ID NO: 2625522 - RNA, 19 nt, Homo sapiens
  misc_RNA (1)...(19): siRNA sense strand
ccaucgaggcuguacacaa

SEQ ID NO: 2625523 - RNA, 19 nt, Homo sapiens
  misc_RNA (1)...(19): siRNA sense strand
agacagacacgcaggacca

SEQ ID NO: 2625524 - RNA, 19 nt, Homo sapiens
  misc_RNA (1)...(19): siRNA sense strand
uauaugaggaugagggugu

SEQ ID NO: 2625525 - RNA, 19 nt, Homo sapiens
  misc_RNA (1)...(19): siRNA sense strand
ccugaaguuugcaagaaaa

SEQ ID NO: 2625526 - RNA, 19 nt, Homo sapiens
  misc_RNA (1)...(19): siRNA sense strand
caugauuguccgagagaug

SEQ ID NO: 2625527 - RNA, 19 nt, Homo sapiens
  misc_RNA (1)...(19): siRNA sense strand
acacagacaugauggcucu

SEQ ID NO: 2625528 - RNA, 19 nt, Homo sapiens
  misc_RNA (1)...(19): siRNA sense strand
ccugauggccucugggagu

SEQ ID NO: 2625529 - RNA, 19 nt, Homo sapiens
  misc_RNA (1)...(19): siRNA sense strand
agaaguggcaacugguaca

SEQ ID NO: 2625530 - RNA, 19 nt, Homo sapiens
  misc_RNA (1)...(19): siRNA sense strand
agcagaggcuggaggugau

SEQ ID NO: 2625531 - RNA, 19 nt, Homo sapiens
  misc_RNA (1)...(19): siRNA sense strand
ucuucaaacaugagccaca

SEQ ID NO: 2625532 - RNA, 19 nt, Homo sapiens
  misc_RNA (1)...(19): siRNA sense strand
gcaaagcggucaaugagua

SEQ ID NO: 2625533 - RNA, 19 nt, Homo sapiens
  misc_RNA (1)...(19): siRNA sense strand
cuuauggaccagucaguaa

SEQ ID NO: 2625534 - RNA, 19 nt, Homo sapiens
  misc_RNA (1)...(19): siRNA sense strand
ggaccagucaguaagagaa

SEQ ID NO: 2625535 - RNA, 19 nt, Homo sapiens
  misc_RNA (1)...(19): siRNA sense strand
gucaguaagagaaggccaa

SEQ ID NO: 2625536 - RNA, 19 nt, Homo sapiens
  misc_RNA (1)...(19): siRNA sense strand
aguaagagaaggccaagau

SEQ ID NO: 2625537 - RNA, 19 nt, Homo sapiens
  misc_RNA (1)...(19): siRNA sense strand
caaagcggucaaugaguau

SEQ ID NO: 2625538 - RNA, 19 nt, Homo sapiens
  misc_RNA (1)...(19): siRNA sense strand
acaaauuaaccuuggaaga

SEQ ID NO: 2625539 - RNA, 19 nt, Homo sapiens
  misc_RNA (1)...(19): siRNA sense strand
cugaagaacagacuggaaa

SEQ ID NO: 2625540 - RNA, 19 nt, Homo sapiens
  misc_RNA (1)...(19): siRNA sense strand
cggaagaacugccugguga

SEQ ID NO: 2625541 - RNA, 19 nt, Homo sapiens
  misc_RNA (1)...(19): siRNA sense strand
ccuauuaucaggaggccaa

SEQ ID NO: 2625542 - RNA, 19 nt, Homo sapiens
  misc_RNA (1)...(19): siRNA sense strand
aaucaaggguggagaccga

SEQ ID NO: 2625543 - RNA, 19 nt, Homo sapiens
  misc_RNA (1)...(19): siRNA sense strand
ggaggagagaagaugcaaa

SEQ ID NO: 2625544 - RNA, 19 nt, Homo sapiens
  misc_RNA (1)...(19): siRNA sense strand
ccaccaaagggcaaaggaa

SEQ ID NO: 2625545 - RNA, 19 nt, Homo sapiens
  misc_RNA (1)...(19): siRNA sense strand
ugaagaaggaaguggucau

SEQ ID NO: 2625546 - RNA, 19 nt, Homo sapiens
  misc_RNA (1)...(19): siRNA sense strand
accaaagggcaaaggaaau

SEQ ID NO: 2625547 - RNA, 19 nt, Homo sapiens
  misc_RNA (1)...(19): siRNA sense strand
acucaaugaacgaugaaau

SEQ ID NO: 2625548 - RNA, 19 nt, Homo sapiens
  misc_RNA (1)...(19): siRNA sense strand
ggguggaaagggagacgua

SEQ ID NO: 2625549 - RNA, 19 nt, Homo sapiens
  misc_RNA (1)...(19): siRNA sense strand
aagaggugguguugggaga

SEQ ID NO: 2625550 - RNA, 19 nt, Homo sapiens
  misc_RNA (1)...(19): siRNA sense strand
aguccaagacgaagaccua

SEQ ID NO: 2625551 - RNA, 19 nt, Homo sapiens
  misc_RNA (1)...(19): siRNA sense strand
ggcggagaugagagagaaa

SEQ ID NO: 2625552 - RNA, 19 nt, Homo sapiens
  misc_RNA (1)...(19): siRNA sense strand
gugcaggaauuaaggugau

SEQ ID NO: 2625553 - RNA, 19 nt, Homo sapiens
  misc_RNA (1)...(19): siRNA sense strand
gaucaugguaacaggagau

SEQ ID NO: 2625554 - RNA, 19 nt, Homo sapiens
  misc_RNA (1)...(19): siRNA sense strand
cgggcugacuuuaaggcua

SEQ ID NO: 2625555 - RNA, 19 nt, Homo sapiens
  misc_RNA (1)...(19): siRNA sense strand
gguuuaugcuggcccgaau

SEQ ID NO: 2625556 - RNA, 19 nt, Homo sapiens
  misc_RNA (1)...(19): siRNA sense strand
ugacaaagggccauagcca

SEQ ID NO: 2625557 - RNA, 19 nt, Homo sapiens
  misc_RNA (1)...(19): siRNA sense strand
cagcuaaggccauugccaa

SEQ ID NO: 2625558 - RNA, 19 nt, Homo sapiens
  misc_RNA (1)...(19): siRNA sense strand
guucaucauccucgguaua

SEQ ID NO: 2625559 - RNA, 19 nt, Homo sapiens
  misc_RNA (1)...(19): siRNA sense strand
auauggaggaacugaagaa

SEQ ID NO: 2625560 - RNA, 19 nt, Homo sapiens
  misc_RNA (1)...(19): siRNA sense strand
uggaaagggagacguacua

SEQ ID NO: 2625561 - RNA, 19 nt, Homo sapiens
  misc_RNA (1)...(19): siRNA sense strand
caugguaacaggagaucau

SEQ ID NO: 2625562 - RNA, 19 nt, Homo sapiens
  misc_RNA (1)...(19): siRNA sense strand
aaaauggugaagagggaaa

SEQ ID NO: 2625563 - RNA, 19 nt, Homo sapiens
  misc_RNA (1)...(19): siRNA sense strand
gagaccugguggaaaucaa

SEQ ID NO: 2625564 - RNA, 19 nt, Homo sapiens
  misc_RNA (1)...(19): siRNA sense strand
ucucacuucucuugggcua

SEQ ID NO: 2625565 - RNA, 19 nt, Homo sapiens
  misc_RNA (1)...(19): siRNA sense strand
ugaagaacagacuggaaaa

SEQ ID NO: 2625566 - RNA, 19 nt, Homo sapiens
  misc_RNA (1)...(19): siRNA sense strand
gcugaagaaggcugacauu

SEQ ID NO: 2625567 - RNA, 19 nt, Homo sapiens
  misc_RNA (1)...(19): siRNA sense strand
ucugguaauucgaggagga

SEQ ID NO: 2625568 - RNA, 19 nt, Homo sapiens
  misc_RNA (1)...(19): siRNA sense strand
aaggauguaagguggacaa

SEQ ID NO: 2625569 - RNA, 19 nt, Homo sapiens
  misc_RNA (1)...(19): siRNA sense strand
aggugaugcuuccgaguca

SEQ ID NO: 2625570 - RNA, 19 nt, Homo sapiens
  misc_RNA (1)...(19): siRNA sense strand
guggcggagaugagagaga

SEQ ID NO: 2625571 - RNA, 19 nt, Homo sapiens
  misc_RNA (1)...(19): siRNA sense strand
ggugcagaacugaaggaca

SEQ ID NO: 2625572 - RNA, 19 nt, Homo sapiens
  misc_RNA (1)...(19): siRNA sense strand
cuguugaucugcugggcau

SEQ ID NO: 2625573 - RNA, 19 nt, Homo sapiens
  misc_RNA (1)...(19): siRNA sense strand
aagauaaccugguggcucu

SEQ ID NO: 2625574 - RNA, 19 nt, Homo sapiens
  misc_RNA (1)...(19): siRNA sense strand
caugagaacccucuggaga

SEQ ID NO: 2625575 - RNA, 19 nt, Homo sapiens
  misc_RNA (1)...(19): siRNA sense strand
gcagcuucuccaagggauu

SEQ ID NO: 2625576 - RNA, 19 nt, Homo sapiens
  misc_RNA (1)...(19): siRNA sense strand
gugucgcagugcaggaauu

SEQ ID NO: 2625577 - RNA, 19 nt, Homo sapiens
  misc_RNA (1)...(19): siRNA sense strand
gcucaucauugucgaggga

SEQ ID NO: 2625578 - RNA, 19 nt, Homo sapiens
  misc_RNA (1)...(19): siRNA sense strand
ugaagaaccuggaggcggu

SEQ ID NO: 2625579 - RNA, 19 nt, Homo sapiens
  misc_RNA (1)...(19): siRNA sense strand
ccagaguccaagacgaaga

SEQ ID NO: 2625580 - RNA, 19 nt, Homo sapiens
  misc_RNA (1)...(19): siRNA sense strand
cccauuuaauacagaugaa

SEQ ID NO: 2625581 - RNA, 19 nt, Homo sapiens
  misc_RNA (1)...(19): siRNA sense strand
gcacaaggauguaaggugg

SEQ ID NO: 2625582 - RNA, 19 nt, Homo sapiens
  misc_RNA (1)...(19): siRNA sense strand
auuaaggugaucaugguaa

SEQ ID NO: 2625583 - RNA, 19 nt, Homo sapiens
  misc_RNA (1)...(19): siRNA sense strand
augguuggcuggaggcuau

SEQ ID NO: 2625584 - RNA, 19 nt, Homo sapiens
  misc_RNA (1)...(19): siRNA sense strand
ugaaugaccuggaggacag

SEQ ID NO: 2625585 - RNA, 19 nt, Homo sapiens
  misc_RNA (1)...(19): siRNA sense strand
gauaaauacuugaaugacc

SEQ ID NO: 2625586 - RNA, 19 nt, Homo sapiens
  misc_RNA (1)...(19): siRNA sense strand
ccaagagcuccaagaucau

SEQ ID NO: 2625587 - RNA, 19 nt, Homo sapiens
  misc_RNA (1)...(19): siRNA sense strand
uuaagaacauggugccuca

SEQ ID NO: 2625588 - RNA, 19 nt, Homo sapiens
  misc_RNA (1)...(19): siRNA sense strand
gguaauucgaggaggagag

SEQ ID NO: 2625589 - RNA, 19 nt, Homo sapiens
  misc_RNA (1)...(19): siRNA sense strand
cuaccaaagacaaccucua

SEQ ID NO: 2625590 - RNA, 19 nt, Homo sapiens
  misc_RNA (1)...(19): siRNA sense strand
gggaaguccucacaggcaa

SEQ ID NO: 2625591 - RNA, 19 nt, Homo sapiens
  misc_RNA (1)...(19): siRNA sense strand
cguacaaggaccaguggga

SEQ ID NO: 2625592 - RNA, 19 nt, Homo sapiens
  misc_RNA (1)...(19): siRNA sense strand
gccucgaaguccacagcaa

SEQ ID NO: 2625593 - RNA, 19 nt, Homo sapiens
  misc_RNA (1)...(19): siRNA sense strand
agcugagcauugaggauuu

SEQ ID NO: 2625594 - RNA, 19 nt, Homo sapiens
  misc_RNA (1)...(19): siRNA sense strand
aguccgaagaugucccaua

SEQ ID NO: 2625595 - RNA, 19 nt, Homo sapiens
  misc_RNA (1)...(19): siRNA sense strand
ucaaguucauucuggccaa

SEQ ID NO: 2625596 - RNA, 19 nt, Homo sapiens
  misc_RNA (1)...(19): siRNA sense strand
gcugaauguacaagcgaaa

SEQ ID NO: 2625597 - RNA, 19 nt, Homo sapiens
  misc_RNA (1)...(19): siRNA sense strand
augaacagccugaggguca

SEQ ID NO: 2625598 - RNA, 19 nt, Homo sapiens
  misc_RNA (1)...(19): siRNA sense strand
gggagaaagagaaaagaau

SEQ ID NO: 2625599 - RNA, 19 nt, Homo sapiens
  misc_RNA (1)...(19): siRNA sense strand
cgaaggggagaaagagaaa

SEQ ID NO: 2625600 - RNA, 19 nt, Homo sapiens
  misc_RNA (1)...(19): siRNA sense strand
cgguggagggacaguguuu

SEQ ID NO: 2625601 - RNA, 19 nt, Homo sapiens
  misc_RNA (1)...(19): siRNA sense strand
ggggagaaagagaaaagaa

SEQ ID NO: 2625602 - RNA, 19 nt, Homo sapiens
  misc_RNA (1)...(19): siRNA sense strand
gcuuaaaaccacugaccau

SEQ ID NO: 2625603 - RNA, 19 nt, Homo sapiens
  misc_RNA (1)...(19): siRNA sense strand
augcagcacuggaagaaaa

SEQ ID NO: 2625604 - RNA, 19 nt, Homo sapiens
  misc_RNA (1)...(19): siRNA sense strand
gcuacagaaauuaguggau

SEQ ID NO: 2625605 - RNA, 19 nt, Homo sapiens
  misc_RNA (1)...(19): siRNA sense strand
ccuuguggaauuuggguca

SEQ ID NO: 2625606 - RNA, 19 nt, Homo sapiens
  misc_RNA (1)...(19): siRNA sense strand
ccgaaggggagaaagagaa

SEQ ID NO: 2625607 - RNA, 19 nt, Homo sapiens
  misc_RNA (1)...(19): siRNA sense strand
cgggagucgcuguggcaaa

SEQ ID NO: 2625608 - RNA, 19 nt, Homo sapiens
  misc_RNA (1)...(19): siRNA sense strand
agucagagaaguuggacau

SEQ ID NO: 2625609 - RNA, 19 nt, Homo sapiens
  misc_RNA (1)...(19): siRNA sense strand
ucaucaagugugagggaga

SEQ ID NO: 2625610 - RNA, 19 nt, Homo sapiens
  misc_RNA (1)...(19): siRNA sense strand
uugccaacgaugagacuaa

SEQ ID NO: 2625611 - RNA, 19 nt, Homo sapiens
  misc_RNA (1)...(19): siRNA sense strand
ccgaaaagcccaacgccua

SEQ ID NO: 2625612 - RNA, 19 nt, Homo sapiens
  misc_RNA (1)...(19): siRNA sense strand
uggagaaggccuaugccaa

SEQ ID NO: 2625613 - RNA, 19 nt, Homo sapiens
  misc_RNA (1)...(19): siRNA sense strand
aggaugaauuucugggcca

SEQ ID NO: 2625614 - RNA, 19 nt, Homo sapiens
  misc_RNA (1)...(19): siRNA sense strand
cgaaauagccggcagccca

SEQ ID NO: 2625615 - RNA, 19 nt, Homo sapiens
  misc_RNA (1)...(19): siRNA sense strand
ggaaggagcaggaauggga

SEQ ID NO: 2625616 - RNA, 19 nt, Homo sapiens
  misc_RNA (1)...(19): siRNA sense strand
aguacaaugugaaaggcau

SEQ ID NO: 2625617 - RNA, 19 nt, Homo sapiens
  misc_RNA (1)...(19): siRNA sense strand
gggaauggguggacguggu

SEQ ID NO: 2625618 - RNA, 19 nt, Homo sapiens
  misc_RNA (1)...(19): siRNA sense strand
agucaagaagccagaagau

SEQ ID NO: 2625619 - RNA, 19 nt, Homo sapiens
  misc_RNA (1)...(19): siRNA sense strand
ggaagcgacccaagggcau

SEQ ID NO: 2625620 - RNA, 19 nt, Homo sapiens
  misc_RNA (1)...(19): siRNA sense strand
ccuccacaccagaguacaa

SEQ ID NO: 2625621 - RNA, 19 nt, Homo sapiens
  misc_RNA (1)...(19): siRNA sense strand
aguacaucuucgaagucaa

SEQ ID NO: 2625622 - RNA, 19 nt, Homo sapiens
  misc_RNA (1)...(19): siRNA sense strand
cggaggaguggcagaaagu

SEQ ID NO: 2625623 - RNA, 19 nt, Homo sapiens
  misc_RNA (1)...(19): siRNA sense strand
agcaagagugagcgggaga

SEQ ID NO: 2625624 - RNA, 19 nt, Homo sapiens
  misc_RNA (1)...(19): siRNA sense strand
cagcagacgcacuggugga

SEQ ID NO: 2625625 - RNA, 19 nt, Homo sapiens
  misc_RNA (1)...(19): siRNA sense strand
gugugaagcccuaugagga

SEQ ID NO: 2625626 - RNA, 19 nt, Homo sapiens
  misc_RNA (1)...(19): siRNA sense strand
aguggcagaaagugagcaa

SEQ ID NO: 2625627 - RNA, 19 nt, Homo sapiens
  misc_RNA (1)...(19): siRNA sense strand
cgggagaagauggguguga

SEQ ID NO: 2625628 - RNA, 19 nt, Homo sapiens
  misc_RNA (1)...(19): siRNA sense strand
gaucaucaagugugaggga

SEQ ID NO: 2625629 - RNA, 19 nt, Homo sapiens
  misc_RNA (1)...(19): siRNA sense strand
acaaggaggauguggggaa

SEQ ID NO: 2625630 - RNA, 19 nt, Homo sapiens
  misc_RNA (1)...(19): siRNA sense strand
gcaugaaugaccuuggaga

SEQ ID NO: 2625631 - RNA, 19 nt, Homo sapiens
  misc_RNA (1)...(19): siRNA sense strand
cagccuuggugguggccuu

SEQ ID NO: 2625632 - RNA, 19 nt, Homo sapiens
  misc_RNA (1)...(19): siRNA sense strand
uggacaaguaccuggagau

SEQ ID NO: 2625633 - RNA, 19 nt, Homo sapiens
  misc_RNA (1)...(19): siRNA sense strand
cugauauggucuuuguaca

SEQ ID NO: 2625634 - RNA, 19 nt, Homo sapiens
  misc_RNA (1)...(19): siRNA sense strand
gcuucuauuacuaugacua

SEQ ID NO: 2625635 - RNA, 19 nt, Homo sapiens
  misc_RNA (1)...(19): siRNA sense strand
cgccaguaccugaaggcuu

SEQ ID NO: 2625636 - RNA, 19 nt, Homo sapiens
  misc_RNA (1)...(19): siRNA sense strand
aggaggauguggggaauaa

SEQ ID NO: 2625637 - RNA, 19 nt, Homo sapiens
  misc_RNA (1)...(19): siRNA sense strand
auucagguguggugagaaa

SEQ ID NO: 2625638 - RNA, 19 nt, Homo sapiens
  misc_RNA (1)...(19): siRNA sense strand
acaagaaaccccagagaua

SEQ ID NO: 2625639 - RNA, 19 nt, Homo sapiens
  misc_RNA (1)...(19): siRNA sense strand
uuagagaaucugaggcaaa

SEQ ID NO: 2625640 - RNA, 19 nt, Homo sapiens
  misc_RNA (1)...(19): siRNA sense strand
gugcauagaaccagaacau

SEQ ID NO: 2625641 - RNA, 19 nt, Homo sapiens
  misc_RNA (1)...(19): siRNA sense strand
uggcagaagagaagauuau

SEQ ID NO: 2625642 - RNA, 19 nt, Homo sapiens
  misc_RNA (1)...(19): siRNA sense strand
cgagagaacauuugggaac

SEQ ID NO: 2625643 - RNA, 19 nt, Homo sapiens
  misc_RNA (1)...(19): siRNA sense strand
uggcauaaucgacaauaaa

SEQ ID NO: 2625644 - RNA, 19 nt, Homo sapiens
  misc_RNA (1)...(19): siRNA sense strand
ggguugaagaauuguuaau

SEQ ID NO: 2625645 - RNA, 19 nt, Homo sapiens
  misc_RNA (1)...(19): siRNA sense strand
caggaucagauguggaaau

SEQ ID NO: 2625646 - RNA, 19 nt, Homo sapiens
  misc_RNA (1)...(19): siRNA sense strand
gguacaaaggagaaccaau

SEQ ID NO: 2625647 - RNA, 19 nt, Homo sapiens
  misc_RNA (1)...(19): siRNA sense strand
aauuuaauccugaguggua

SEQ ID NO: 2625648 - RNA, 19 nt, Homo sapiens
  misc_RNA (1)...(19): siRNA sense strand
cgaaaguaugcugaagaaa

SEQ ID NO: 2625649 - RNA, 19 nt, Homo sapiens
  misc_RNA (1)...(19): siRNA sense strand
cugaugucccagauaaaua

SEQ ID NO: 2625650 - RNA, 19 nt, Homo sapiens
  misc_RNA (1)...(19): siRNA sense strand
ccuuagagaaucugaggca

SEQ ID NO: 2625651 - RNA, 19 nt, Homo sapiens
  misc_RNA (1)...(19): siRNA sense strand
gaaaaguuggguagaagaa

SEQ ID NO: 2625652 - RNA, 19 nt, Homo sapiens
  misc_RNA (1)...(19): siRNA sense strand
cauauauggacuugcaaca

SEQ ID NO: 2625653 - RNA, 19 nt, Homo sapiens
  misc_RNA (1)...(19): siRNA sense strand
gugauagaauugagcccuu

SEQ ID NO: 2625654 - RNA, 19 nt, Homo sapiens
  misc_RNA (1)...(19): siRNA sense strand
auggcauaaucgacaauaa

SEQ ID NO: 2625655 - RNA, 19 nt, Homo sapiens
  misc_RNA (1)...(19): siRNA sense strand
ugacuguggcagaagagaa

SEQ ID NO: 2625656 - RNA, 19 nt, Homo sapiens
  misc_RNA (1)...(19): siRNA sense strand
ccauuugaagaaaggauuu

SEQ ID NO: 2625657 - RNA, 19 nt, Homo sapiens
  misc_RNA (1)...(19): siRNA sense strand
cauccguaaccaagaaauu

SEQ ID NO: 2625658 - RNA, 19 nt, Homo sapiens
  misc_RNA (1)...(19): siRNA sense strand
auguggaaauuaacggaau

SEQ ID NO: 2625659 - RNA, 19 nt, Homo sapiens
  misc_RNA (1)...(19): siRNA sense strand
gugaaaaccuagacaccuu

SEQ ID NO: 2625660 - RNA, 19 nt, Homo sapiens
  misc_RNA (1)...(19): siRNA sense strand
gaucacagauguugagcac

SEQ ID NO: 2625661 - RNA, 19 nt, Homo sapiens
  misc_RNA (1)...(19): siRNA sense strand
ugcuaagagugauagaauu

SEQ ID NO: 2625662 - RNA, 19 nt, Homo sapiens
  misc_RNA (1)...(19): siRNA sense strand
gaaauauuguggaagugga

SEQ ID NO: 2625663 - RNA, 19 nt, Homo sapiens
  misc_RNA (1)...(19): siRNA sense strand
uugcuaagagugauagaau

SEQ ID NO: 2625664 - RNA, 19 nt, Homo sapiens
  misc_RNA (1)...(19): siRNA sense strand
ugccaauguaccagaguuu

SEQ ID NO: 2625665 - RNA, 19 nt, Homo sapiens
  misc_RNA (1)...(19): siRNA sense strand
ggguagaagaaccauguga

SEQ ID NO: 2625666 - RNA, 19 nt, Homo sapiens
  misc_RNA (1)...(19): siRNA sense strand
cauuuaacuaugaaggcau

SEQ ID NO: 2625667 - RNA, 19 nt, Homo sapiens
  misc_RNA (1)...(19): siRNA sense strand
ugcagaggguugaugguau

SEQ ID NO: 2625668 - RNA, 19 nt, Homo sapiens
  misc_RNA (1)...(19): siRNA sense strand
ugugugucaaggugagaaa

SEQ ID NO: 2625669 - RNA, 19 nt, Homo sapiens
  misc_RNA (1)...(19): siRNA sense strand
guggcagaagagaagauua

SEQ ID NO: 2625670 - RNA, 19 nt, Homo sapiens
  misc_RNA (1)...(19): siRNA sense strand
auauuguggaaguggauuu

SEQ ID NO: 2625671 - RNA, 19 nt, Homo sapiens
  misc_RNA (1)...(19): siRNA sense strand
ccaaagugaguuacggguu

SEQ ID NO: 2625672 - RNA, 19 nt, Homo sapiens
  misc_RNA (1)...(19): siRNA sense strand
aguaugcugaagaaagaaa

SEQ ID NO: 2625673 - RNA, 19 nt, Homo sapiens
  misc_RNA (1)...(19): siRNA sense strand
cguugugauuccuuagaga

SEQ ID NO: 2625674 - RNA, 19 nt, Homo sapiens
  misc_RNA (1)...(19): siRNA sense strand
ugagaaaaguuggguagaa

SEQ ID NO: 2625675 - RNA, 19 nt, Homo sapiens
  misc_RNA (1)...(19): siRNA sense strand
cauccuuauuucagaucau

SEQ ID NO: 2625676 - RNA, 19 nt, Homo sapiens
  misc_RNA (1)...(19): siRNA sense strand
ccagaguuuucaaguuaua

SEQ ID NO: 2625677 - RNA, 19 nt, Homo sapiens
  misc_RNA (1)...(19): siRNA sense strand
ggaagaaugaugauggaga

SEQ ID NO: 2625678 - RNA, 19 nt, Homo sapiens
  misc_RNA (1)...(19): siRNA sense strand
acgcuaaagaagaaacaaa

SEQ ID NO: 2625679 - RNA, 19 nt, Homo sapiens
  misc_RNA (1)...(19): siRNA sense strand
cuaucaaauaucagagcaa

SEQ ID NO: 2625680 - RNA, 19 nt, Homo sapiens
  misc_RNA (1)...(19): siRNA sense strand
aguuaaaggcuauugaaca

SEQ ID NO: 2625681 - RNA, 19 nt, Homo sapiens
  misc_RNA (1)...(19): siRNA sense strand
agguggaggagauuagaaa

SEQ ID NO: 2625682 - RNA, 19 nt, Homo sapiens
  misc_RNA (1)...(19): siRNA sense strand
guggaggagauuagaaaca

SEQ ID NO: 2625683 - RNA, 19 nt, Homo sapiens
  misc_RNA (1)...(19): siRNA sense strand
cggaguacaaugaggcaca

SEQ ID NO: 2625684 - RNA, 19 nt, Homo sapiens
  misc_RNA (1)...(19): siRNA sense strand
uggaauuauccuagcaaca

SEQ ID NO: 2625685 - RNA, 19 nt, Homo sapiens
  misc_RNA (1)...(19): siRNA sense strand
aguuguugugguugagaaa

SEQ ID NO: 2625686 - RNA, 19 nt, Homo sapiens
  misc_RNA (1)...(19): siRNA sense strand
gcuugugauccuuggaauu

SEQ ID NO: 2625687 - RNA, 19 nt, Homo sapiens
  misc_RNA (1)...(19): siRNA sense strand
uuguugugguugagaaaga

SEQ ID NO: 2625688 - RNA, 19 nt, Homo sapiens
  misc_RNA (1)...(19): siRNA sense strand
aagccauggcggaguacaa

SEQ ID NO: 2625689 - RNA, 19 nt, Homo sapiens
  misc_RNA (1)...(19): siRNA sense strand
cugacggcguguaggaaga

SEQ ID NO: 2625690 - RNA, 19 nt, Homo sapiens
  misc_RNA (1)...(19): siRNA sense strand
ggaaguuuguggaagccau

SEQ ID NO: 2625691 - RNA, 19 nt, Homo sapiens
  misc_RNA (1)...(19): siRNA sense strand
cgcuaaagaagaaacaaaa

SEQ ID NO: 2625692 - RNA, 19 nt, Homo sapiens
  misc_RNA (1)...(19): siRNA sense strand
cuauguuuguggagacuca

SEQ ID NO: 2625693 - RNA, 19 nt, Homo sapiens
  misc_RNA (1)...(19): siRNA sense strand
guggagacucagggugaaa

SEQ ID NO: 2625694 - RNA, 19 nt, Homo sapiens
  misc_RNA (1)...(19): siRNA sense strand
aaauaucagagcaaggcaa

SEQ ID NO: 2625695 - RNA, 19 nt, Homo sapiens
  misc_RNA (1)...(19): siRNA sense strand
gaagaaugaugauggagac

SEQ ID NO: 2625696 - RNA, 19 nt, Homo sapiens
  misc_RNA (1)...(19): siRNA sense strand
ucucaaugaaaucgaguca

SEQ ID NO: 2625697 - RNA, 19 nt, Homo sapiens
  misc_RNA (1)...(19): siRNA sense strand
gcuggagauaacugggaga

SEQ ID NO: 2625698 - RNA, 19 nt, Homo sapiens
  misc_RNA (1)...(19): siRNA sense strand
cuagaagagaugcuggaga

SEQ ID NO: 2625699 - RNA, 19 nt, Homo sapiens
  misc_RNA (1)...(19): siRNA sense strand
gaucaggaugagaguggga

SEQ ID NO: 2625700 - RNA, 19 nt, Homo sapiens
  misc_RNA (1)...(19): siRNA sense strand
auguagaacacgcuaaaga

SEQ ID NO: 2625701 - RNA, 19 nt, Homo sapiens
  misc_RNA (1)...(19): siRNA sense strand
agcuugaagaucugaacaa

SEQ ID NO: 2625702 - RNA, 19 nt, Homo sapiens
  misc_RNA (1)...(19): siRNA sense strand
ggaagaaugaugauggaga

SEQ ID NO: 2625703 - RNA, 19 nt, Homo sapiens
  misc_RNA (1)...(19): siRNA sense strand
acgcuaaagaagaaacaaa

SEQ ID NO: 2625704 - RNA, 19 nt, Homo sapiens
  misc_RNA (1)...(19): siRNA sense strand
cuaucaaauaucagagcaa

SEQ ID NO: 2625705 - RNA, 19 nt, Homo sapiens
  misc_RNA (1)...(19): siRNA sense strand
aguuaaaggcuauugaaca

SEQ ID NO: 2625706 - RNA, 19 nt, Homo sapiens
  misc_RNA (1)...(19): siRNA sense strand
agguggaggagauuagaaa

SEQ ID NO: 2625707 - RNA, 19 nt, Homo sapiens
  misc_RNA (1)...(19): siRNA sense strand
guggaggagauuagaaaca

SEQ ID NO: 2625708 - RNA, 19 nt, Homo sapiens
  misc_RNA (1)...(19): siRNA sense strand
cggaguacaaugaggcaca

SEQ ID NO: 2625709 - RNA, 19 nt, Homo sapiens
  misc_RNA (1)...(19): siRNA sense strand
aguuguugugguugagaaa

SEQ ID NO: 2625710 - RNA, 19 nt, Homo sapiens
  misc_RNA (1)...(19): siRNA sense strand
uuguugugguugagaaaga

SEQ ID NO: 2625711 - RNA, 19 nt, Homo sapiens
  misc_RNA (1)...(19): siRNA sense strand
aagccauggcggaguacaa

SEQ ID NO: 2625712 - RNA, 19 nt, Homo sapiens
  misc_RNA (1)...(19): siRNA sense strand
cugacggcguguaggaaga

SEQ ID NO: 2625713 - RNA, 19 nt, Homo sapiens
  misc_RNA (1)...(19): siRNA sense strand
ggaaguuuguggaagccau

SEQ ID NO: 2625714 - RNA, 19 nt, Homo sapiens
  misc_RNA (1)...(19): siRNA sense strand
cgcuaaagaagaaacaaaa

SEQ ID NO: 2625715 - RNA, 19 nt, Homo sapiens
  misc_RNA (1)...(19): siRNA sense strand
cuauguuuguggagacuca

SEQ ID NO: 2625716 - RNA, 19 nt, Homo sapiens
  misc_RNA (1)...(19): siRNA sense strand
guggagacucagggugaaa

SEQ ID NO: 2625717 - RNA, 19 nt, Homo sapiens
  misc_RNA (1)...(19): siRNA sense strand
aaauaucagagcaaggcaa

SEQ ID NO: 2625718 - RNA, 19 nt, Homo sapiens
  misc_RNA (1)...(19): siRNA sense strand
gaagaaugaugauggagac

SEQ ID NO: 2625719 - RNA, 19 nt, Homo sapiens
  misc_RNA (1)...(19): siRNA sense strand
ucucaaugaaaucgaguca

SEQ ID NO: 2625720 - RNA, 19 nt, Homo sapiens
  misc_RNA (1)...(19): siRNA sense strand
gcuggagauaacugggaga

SEQ ID NO: 2625721 - RNA, 19 nt, Homo sapiens
  misc_RNA (1)...(19): siRNA sense strand
cuagaagagaugcuggaga

SEQ ID NO: 2625722 - RNA, 19 nt, Homo sapiens
  misc_RNA (1)...(19): siRNA sense strand
gaucaggaugagaguggga

SEQ ID NO: 2625723 - RNA, 19 nt, Homo sapiens
  misc_RNA (1)...(19): siRNA sense strand
auguagaacacgcuaaaga

SEQ ID NO: 2625724 - RNA, 19 nt, Homo sapiens
  misc_RNA (1)...(19): siRNA sense strand
agcuugaagaucugaacaa

SEQ ID NO: 2625725 - RNA, 19 nt, Homo sapiens
  misc_RNA (1)...(19): siRNA sense strand
aggcgagaaugaugagcaa

SEQ ID NO: 2625726 - RNA, 19 nt, Homo sapiens
  misc_RNA (1)...(19): siRNA sense strand
aggagaaagguuaagacua

SEQ ID NO: 2625727 - RNA, 19 nt, Homo sapiens
  misc_RNA (1)...(19): siRNA sense strand
ggacaauauaugcagccaa

SEQ ID NO: 2625728 - RNA, 19 nt, Homo sapiens
  misc_RNA (1)...(19): siRNA sense strand
cuacaauacugcaaaggca

SEQ ID NO: 2625729 - RNA, 19 nt, Homo sapiens
  misc_RNA (1)...(19): siRNA sense strand
gaguaagguucgugauccu

SEQ ID NO: 2625730 - RNA, 19 nt, Homo sapiens
  misc_RNA (1)...(19): siRNA sense strand
aagacuaccuccauggcua

SEQ ID NO: 2625731 - RNA, 19 nt, Homo sapiens
  misc_RNA (1)...(19): siRNA sense strand
gaaagcacuucgugaggca

SEQ ID NO: 2625732 - RNA, 19 nt, Homo sapiens
  misc_RNA (1)...(19): siRNA sense strand
aggugaucucaaagcaaua

SEQ ID NO: 2625733 - RNA, 19 nt, Homo sapiens
  misc_RNA (1)...(19): siRNA sense strand
cgaggugaucucaaagcaa

SEQ ID NO: 2625734 - RNA, 19 nt, Homo sapiens
  misc_RNA (1)...(19): siRNA sense strand
caaugaaagcacuucguga

SEQ ID NO: 2625735 - RNA, 19 nt, Homo sapiens
  misc_RNA (1)...(19): siRNA sense strand
acagaauggaccagaccuu

SEQ ID NO: 2625736 - RNA, 19 nt, Homo sapiens
  misc_RNA (1)...(19): siRNA sense strand
cguuaagcuccuugccaga

SEQ ID NO: 2625737 - RNA, 19 nt, Homo sapiens
  misc_RNA (1)...(19): siRNA sense strand
gccagaaaggagaaagguu

SEQ ID NO: 2625738 - RNA, 19 nt, Homo sapiens
  misc_RNA (1)...(19): siRNA sense strand
ugacaucuguggaucgaga

SEQ ID NO: 2625739 - RNA, 19 nt, Homo sapiens
  misc_RNA (1)...(19): siRNA sense strand
cagcccagucagaccguua

SEQ ID NO: 2625740 - RNA, 19 nt, Homo sapiens
  misc_RNA (1)...(19): siRNA sense strand
aggcgagaaugaugagcaa

SEQ ID NO: 2625741 - RNA, 19 nt, Homo sapiens
  misc_RNA (1)...(19): siRNA sense strand
aggagaaagguuaagacua

SEQ ID NO: 2625742 - RNA, 19 nt, Homo sapiens
  misc_RNA (1)...(19): siRNA sense strand
ggacaauauaugcagccaa

SEQ ID NO: 2625743 - RNA, 19 nt, Homo sapiens
  misc_RNA (1)...(19): siRNA sense strand
cuacaauacugcaaaggca

SEQ ID NO: 2625744 - RNA, 19 nt, Homo sapiens
  misc_RNA (1)...(19): siRNA sense strand
gaguaagguucgugauccu

SEQ ID NO: 2625745 - RNA, 19 nt, Homo sapiens
  misc_RNA (1)...(19): siRNA sense strand
aagacuaccuccauggcua

SEQ ID NO: 2625746 - RNA, 19 nt, Homo sapiens
  misc_RNA (1)...(19): siRNA sense strand
gaaagcacuucgugaggca

SEQ ID NO: 2625747 - RNA, 19 nt, Homo sapiens
  misc_RNA (1)...(19): siRNA sense strand
aggugaucucaaagcaaua

SEQ ID NO: 2625748 - RNA, 19 nt, Homo sapiens
  misc_RNA (1)...(19): siRNA sense strand
cgaggugaucucaaagcaa

SEQ ID NO: 2625749 - RNA, 19 nt, Homo sapiens
  misc_RNA (1)...(19): siRNA sense strand
caaugaaagcacuucguga

SEQ ID NO: 2625750 - RNA, 19 nt, Homo sapiens
  misc_RNA (1)...(19): siRNA sense strand
acagaauggaccagaccuu

SEQ ID NO: 2625751 - RNA, 19 nt, Homo sapiens
  misc_RNA (1)...(19): siRNA sense strand
cguuaagcuccuugccaga

SEQ ID NO: 2625752 - RNA, 19 nt, Homo sapiens
  misc_RNA (1)...(19): siRNA sense strand
gccagaaaggagaaagguu

SEQ ID NO: 2625753 - RNA, 19 nt, Homo sapiens
  misc_RNA (1)...(19): siRNA sense strand
ugacaucuguggaucgaga

SEQ ID NO: 2625754 - RNA, 19 nt, Homo sapiens
  misc_RNA (1)...(19): siRNA sense strand
cagcccagucagaccguua

SEQ ID NO: 2625755 - RNA, 19 nt, Homo sapiens
  misc_RNA (1)...(19): siRNA sense strand
agugcaaagaugugaauaa

SEQ ID NO: 2625756 - RNA, 19 nt, Homo sapiens
  misc_RNA (1)...(19): siRNA sense strand
aguuaaagguguccaaaga

SEQ ID NO: 2625757 - RNA, 19 nt, Homo sapiens
  misc_RNA (1)...(19): siRNA sense strand
cuacaggauuuaaguguca

SEQ ID NO: 2625758 - RNA, 19 nt, Homo sapiens
  misc_RNA (1)...(19): siRNA sense strand
gugcaagagcagugaccuu

SEQ ID NO: 2625759 - RNA, 19 nt, Homo sapiens
  misc_RNA (1)...(19): siRNA sense strand
ucaugagcuugguggauuu

SEQ ID NO: 2625760 - RNA, 19 nt, Homo sapiens
  misc_RNA (1)...(19): siRNA sense strand
cagcagugugaaagcaaau

SEQ ID NO: 2625761 - RNA, 19 nt, Homo sapiens
  misc_RNA (1)...(19): siRNA sense strand
auuuaagugucaugagcuu

SEQ ID NO: 2625762 - RNA, 19 nt, Homo sapiens
  misc_RNA (1)...(19): siRNA sense strand
augugaauaaaguggcuua

SEQ ID NO: 2625763 - RNA, 19 nt, Homo sapiens
  misc_RNA (1)...(19): siRNA sense strand
caguaagccaccugaaaau

SEQ ID NO: 2625764 - RNA, 19 nt, Homo sapiens
  misc_RNA (1)...(19): siRNA sense strand
cggauuguucugugcaaga

SEQ ID NO: 2625765 - RNA, 19 nt, Homo sapiens
  misc_RNA (1)...(19): siRNA sense strand
cuaauacugaagagugcaa

SEQ ID NO: 2625766 - RNA, 19 nt, Homo sapiens
  misc_RNA (1)...(19): siRNA sense strand
gggcuuaguuaaagguguc

SEQ ID NO: 2625767 - RNA, 19 nt, Homo sapiens
  misc_RNA (1)...(19): siRNA sense strand
caugaagauaucuggaaca

SEQ ID NO: 2625768 - RNA, 19 nt, Homo sapiens
  misc_RNA (1)...(19): siRNA sense strand
cguaguaucugcagcacca

SEQ ID NO: 2625769 - RNA, 19 nt, Homo sapiens
  misc_RNA (1)...(19): siRNA sense strand
cugugcacuuugacgguua

SEQ ID NO: 2625770 - RNA, 19 nt, Homo sapiens
  misc_RNA (1)...(19): siRNA sense strand
gucacagauugcagggaca

SEQ ID NO: 2625771 - RNA, 19 nt, Homo sapiens
  misc_RNA (1)...(19): siRNA sense strand
caugaagauaucuggaaca

SEQ ID NO: 2625772 - RNA, 19 nt, Homo sapiens
  misc_RNA (1)...(19): siRNA sense strand
cguaguaucugcagcacca

SEQ ID NO: 2625773 - RNA, 19 nt, Homo sapiens
  misc_RNA (1)...(19): siRNA sense strand
cugugcacuuugacgguua

SEQ ID NO: 2625774 - RNA, 19 nt, Homo sapiens
  misc_RNA (1)...(19): siRNA sense strand
gucacagauugcagggaca

SEQ ID NO: 2625775 - RNA, 19 nt, Homo sapiens
  misc_RNA (1)...(19): siRNA sense strand
caugaagauaucuggaaca

SEQ ID NO: 2625776 - RNA, 19 nt, Homo sapiens
  misc_RNA (1)...(19): siRNA sense strand
cguaguaucugcagcacca

SEQ ID NO: 2625777 - RNA, 19 nt, Homo sapiens
  misc_RNA (1)...(19): siRNA sense strand
cugugcacuuugacgguua

SEQ ID NO: 2625778 - RNA, 19 nt, Homo sapiens
  misc_RNA (1)...(19): siRNA sense strand
gucacagauugcagggaca

SEQ ID NO: 2625779 - RNA, 19 nt, Homo sapiens
  misc_RNA (1)...(19): siRNA sense strand
gacaaauggcuuaaggcaa

SEQ ID NO: 2625780 - RNA, 19 nt, Homo sapiens
  misc_RNA (1)...(19): siRNA sense strand
ccagagaggaagaagggau

SEQ ID NO: 2625781 - RNA, 19 nt, Homo sapiens
  misc_RNA (1)...(19): siRNA sense strand
uggcagagcgacugggaga

SEQ ID NO: 2625782 - RNA, 19 nt, Homo sapiens
  misc_RNA (1)...(19): siRNA sense strand
aaguggaacucuuaggaga

SEQ ID NO: 2625783 - RNA, 19 nt, Homo sapiens
  misc_RNA (1)...(19): siRNA sense strand
aguggaacucuuaggagaa

SEQ ID NO: 2625784 - RNA, 19 nt, Homo sapiens
  misc_RNA (1)...(19): siRNA sense strand
ccuuauuucuagugaucca

SEQ ID NO: 2625785 - RNA, 19 nt, Homo sapiens
  misc_RNA (1)...(19): siRNA sense strand
gcuuacaggacguaguaga

SEQ ID NO: 2625786 - RNA, 19 nt, Homo sapiens
  misc_RNA (1)...(19): siRNA sense strand
agauggagaaguagaaaau

SEQ ID NO: 2625787 - RNA, 19 nt, Homo sapiens
  misc_RNA (1)...(19): siRNA sense strand
guccaaguccuaagagaca

SEQ ID NO: 2625788 - RNA, 19 nt, Homo sapiens
  misc_RNA (1)...(19): siRNA sense strand
ccucugcaaaggauagaaa

SEQ ID NO: 2625789 - RNA, 19 nt, Homo sapiens
  misc_RNA (1)...(19): siRNA sense strand
auuacgaggcccuguuaaa

SEQ ID NO: 2625790 - RNA, 19 nt, Homo sapiens
  misc_RNA (1)...(19): siRNA sense strand
ucagaagugcaucgggauu

SEQ ID NO: 2625791 - RNA, 19 nt, Homo sapiens
  misc_RNA (1)...(19): siRNA sense strand
ccaaugcgaccaugggaga

SEQ ID NO: 2625792 - RNA, 19 nt, Homo sapiens
  misc_RNA (1)...(19): siRNA sense strand
uagaagauggagaaguaga

SEQ ID NO: 2625793 - RNA, 19 nt, Homo sapiens
  misc_RNA (1)...(19): siRNA sense strand
ugacaaauggcuuaaggca

SEQ ID NO: 2625794 - RNA, 19 nt, Homo sapiens
  misc_RNA (1)...(19): siRNA sense strand
cgaccaugggagaugacau

SEQ ID NO: 2625795 - RNA, 19 nt, Homo sapiens
  misc_RNA (1)...(19): siRNA sense strand
gacaaauggcuuaaggcaa

SEQ ID NO: 2625796 - RNA, 19 nt, Homo sapiens
  misc_RNA (1)...(19): siRNA sense strand
ccagagaggaagaagggau

SEQ ID NO: 2625797 - RNA, 19 nt, Homo sapiens
  misc_RNA (1)...(19): siRNA sense strand
uggcagagcgacugggaga

SEQ ID NO: 2625798 - RNA, 19 nt, Homo sapiens
  misc_RNA (1)...(19): siRNA sense strand
aaguggaacucuuaggaga

SEQ ID NO: 2625799 - RNA, 19 nt, Homo sapiens
  misc_RNA (1)...(19): siRNA sense strand
aguggaacucuuaggagaa

SEQ ID NO: 2625800 - RNA, 19 nt, Homo sapiens
  misc_RNA (1)...(19): siRNA sense strand
ccuuauuucuagugaucca

SEQ ID NO: 2625801 - RNA, 19 nt, Homo sapiens
  misc_RNA (1)...(19): siRNA sense strand
gcuuacaggacguaguaga

SEQ ID NO: 2625802 - RNA, 19 nt, Homo sapiens
  misc_RNA (1)...(19): siRNA sense strand
agauggagaaguagaaaau

SEQ ID NO: 2625803 - RNA, 19 nt, Homo sapiens
  misc_RNA (1)...(19): siRNA sense strand
ccucugcaaaggauagaaa

SEQ ID NO: 2625804 - RNA, 19 nt, Homo sapiens
  misc_RNA (1)...(19): siRNA sense strand
auuacgaggcccuguuaaa

SEQ ID NO: 2625805 - RNA, 19 nt, Homo sapiens
  misc_RNA (1)...(19): siRNA sense strand
ucagaagugcaucgggauu

SEQ ID NO: 2625806 - RNA, 19 nt, Homo sapiens
  misc_RNA (1)...(19): siRNA sense strand
uagaagauggagaaguaga

SEQ ID NO: 2625807 - RNA, 19 nt, Homo sapiens
  misc_RNA (1)...(19): siRNA sense strand
ugacaaauggcuuaaggca

SEQ ID NO: 2625808 - RNA, 19 nt, Homo sapiens
  misc_RNA (1)...(19): siRNA sense strand
cgaccaugggagaugacau

SEQ ID NO: 2625809 - RNA, 19 nt, Homo sapiens
  misc_RNA (1)...(19): siRNA sense strand
gacaaauggcuuaaggcaa

SEQ ID NO: 2625810 - RNA, 19 nt, Homo sapiens
  misc_RNA (1)...(19): siRNA sense strand
ccagagaggaagaagggau

SEQ ID NO: 2625811 - RNA, 19 nt, Homo sapiens
  misc_RNA (1)...(19): siRNA sense strand
uggcagagcgacugggaga

SEQ ID NO: 2625812 - RNA, 19 nt, Homo sapiens
  misc_RNA (1)...(19): siRNA sense strand
aaguggaacucuuaggaga

SEQ ID NO: 2625813 - RNA, 19 nt, Homo sapiens
  misc_RNA (1)...(19): siRNA sense strand
aguggaacucuuaggagaa

SEQ ID NO: 2625814 - RNA, 19 nt, Homo sapiens
  misc_RNA (1)...(19): siRNA sense strand
ccuuauuucuagugaucca

SEQ ID NO: 2625815 - RNA, 19 nt, Homo sapiens
  misc_RNA (1)...(19): siRNA sense strand
gcuuacaggacguaguaga

SEQ ID NO: 2625816 - RNA, 19 nt, Homo sapiens
  misc_RNA (1)...(19): siRNA sense strand
agauggagaaguagaaaau

SEQ ID NO: 2625817 - RNA, 19 nt, Homo sapiens
  misc_RNA (1)...(19): siRNA sense strand
guccaaguccuaagagaca

SEQ ID NO: 2625818 - RNA, 19 nt, Homo sapiens
  misc_RNA (1)...(19): siRNA sense strand
ccucugcaaaggauagaaa

SEQ ID NO: 2625819 - RNA, 19 nt, Homo sapiens
  misc_RNA (1)...(19): siRNA sense strand
auuacgaggcccuguuaaa

SEQ ID NO: 2625820 - RNA, 19 nt, Homo sapiens
  misc_RNA (1)...(19): siRNA sense strand
ucagaagugcaucgggauu

SEQ ID NO: 2625821 - RNA, 19 nt, Homo sapiens
  misc_RNA (1)...(19): siRNA sense strand
ccaaugcgaccaugggaga

SEQ ID NO: 2625822 - RNA, 19 nt, Homo sapiens
  misc_RNA (1)...(19): siRNA sense strand
uagaagauggagaaguaga

SEQ ID NO: 2625823 - RNA, 19 nt, Homo sapiens
  misc_RNA (1)...(19): siRNA sense strand
ugacaaauggcuuaaggca

SEQ ID NO: 2625824 - RNA, 19 nt, Homo sapiens
  misc_RNA (1)...(19): siRNA sense strand
cgaccaugggagaugacau

SEQ ID NO: 2625825 - RNA, 19 nt, Homo sapiens
  misc_RNA (1)...(19): siRNA sense strand
gacaaauggcuuaaggcaa

SEQ ID NO: 2625826 - RNA, 19 nt, Homo sapiens
  misc_RNA (1)...(19): siRNA sense strand
ccagagaggaagaagggau

SEQ ID NO: 2625827 - RNA, 19 nt, Homo sapiens
  misc_RNA (1)...(19): siRNA sense strand
uggcagagcgacugggaga

SEQ ID NO: 2625828 - RNA, 19 nt, Homo sapiens
  misc_RNA (1)...(19): siRNA sense strand
aaguggaacucuuaggaga

SEQ ID NO: 2625829 - RNA, 19 nt, Homo sapiens
  misc_RNA (1)...(19): siRNA sense strand
aguggaacucuuaggagaa

SEQ ID NO: 2625830 - RNA, 19 nt, Homo sapiens
  misc_RNA (1)...(19): siRNA sense strand
ccuuauuucuagugaucca

SEQ ID NO: 2625831 - RNA, 19 nt, Homo sapiens
  misc_RNA (1)...(19): siRNA sense strand
gcuuacaggacguaguaga

SEQ ID NO: 2625832 - RNA, 19 nt, Homo sapiens
  misc_RNA (1)...(19): siRNA sense strand
agauggagaaguagaaaau

SEQ ID NO: 2625833 - RNA, 19 nt, Homo sapiens
  misc_RNA (1)...(19): siRNA sense strand
ccucugcaaaggauagaaa

SEQ ID NO: 2625834 - RNA, 19 nt, Homo sapiens
  misc_RNA (1)...(19): siRNA sense strand
auuacgaggcccuguuaaa

SEQ ID NO: 2625835 - RNA, 19 nt, Homo sapiens
  misc_RNA (1)...(19): siRNA sense strand
ucagaagugcaucgggauu

SEQ ID NO: 2625836 - RNA, 19 nt, Homo sapiens
  misc_RNA (1)...(19): siRNA sense strand
uagaagauggagaaguaga

SEQ ID NO: 2625837 - RNA, 19 nt, Homo sapiens
  misc_RNA (1)...(19): siRNA sense strand
ugacaaauggcuuaaggca

SEQ ID NO: 2625838 - RNA, 19 nt, Homo sapiens
  misc_RNA (1)...(19): siRNA sense strand
cgaccaugggagaugacau

SEQ ID NO: 2625839 - RNA, 19 nt, Homo sapiens
  misc_RNA (1)...(19): siRNA sense strand
gacaaauggcuuaaggcaa

SEQ ID NO: 2625840 - RNA, 19 nt, Homo sapiens
  misc_RNA (1)...(19): siRNA sense strand
ccagagaggaagaagggau

SEQ ID NO: 2625841 - RNA, 19 nt, Homo sapiens
  misc_RNA (1)...(19): siRNA sense strand
uggcagagcgacugggaga

SEQ ID NO: 2625842 - RNA, 19 nt, Homo sapiens
  misc_RNA (1)...(19): siRNA sense strand
aaguggaacucuuaggaga

SEQ ID NO: 2625843 - RNA, 19 nt, Homo sapiens
  misc_RNA (1)...(19): siRNA sense strand
aguggaacucuuaggagaa

SEQ ID NO: 2625844 - RNA, 19 nt, Homo sapiens
  misc_RNA (1)...(19): siRNA sense strand
ccuuauuucuagugaucca

SEQ ID NO: 2625845 - RNA, 19 nt, Homo sapiens
  misc_RNA (1)...(19): siRNA sense strand
gcuuacaggacguaguaga

SEQ ID NO: 2625846 - RNA, 19 nt, Homo sapiens
  misc_RNA (1)...(19): siRNA sense strand
agauggagaaguagaaaau

SEQ ID NO: 2625847 - RNA, 19 nt, Homo sapiens
  misc_RNA (1)...(19): siRNA sense strand
ccucugcaaaggauagaaa

SEQ ID NO: 2625848 - RNA, 19 nt, Homo sapiens
  misc_RNA (1)...(19): siRNA sense strand
auuacgaggcccuguuaaa

SEQ ID NO: 2625849 - RNA, 19 nt, Homo sapiens
  misc_RNA (1)...(19): siRNA sense strand
ucagaagugcaucgggauu

SEQ ID NO: 2625850 - RNA, 19 nt, Homo sapiens
  misc_RNA (1)...(19): siRNA sense strand
uagaagauggagaaguaga

SEQ ID NO: 2625851 - RNA, 19 nt, Homo sapiens
  misc_RNA (1)...(19): siRNA sense strand
ugacaaauggcuuaaggca

SEQ ID NO: 2625852 - RNA, 19 nt, Homo sapiens
  misc_RNA (1)...(19): siRNA sense strand
cgaccaugggagaugacau

SEQ ID NO: 2625853 - RNA, 19 nt, Homo sapiens
  misc_RNA (1)...(19): siRNA sense strand
gacaaauggcuuaaggcaa

SEQ ID NO: 2625854 - RNA, 19 nt, Homo sapiens
  misc_RNA (1)...(19): siRNA sense strand
ccagagaggaagaagggau

SEQ ID NO: 2625855 - RNA, 19 nt, Homo sapiens
  misc_RNA (1)...(19): siRNA sense strand
uggcagagcgacugggaga

SEQ ID NO: 2625856 - RNA, 19 nt, Homo sapiens
  misc_RNA (1)...(19): siRNA sense strand
aaguggaacucuuaggaga

SEQ ID NO: 2625857 - RNA, 19 nt, Homo sapiens
  misc_RNA (1)...(19): siRNA sense strand
aguggaacucuuaggagaa

SEQ ID NO: 2625858 - RNA, 19 nt, Homo sapiens
  misc_RNA (1)...(19): siRNA sense strand
ccuuauuucuagugaucca

SEQ ID NO: 2625859 - RNA, 19 nt, Homo sapiens
  misc_RNA (1)...(19): siRNA sense strand
gcuuacaggacguaguaga

SEQ ID NO: 2625860 - RNA, 19 nt, Homo sapiens
  misc_RNA (1)...(19): siRNA sense strand
agauggagaaguagaaaau

SEQ ID NO: 2625861 - RNA, 19 nt, Homo sapiens
  misc_RNA (1)...(19): siRNA sense strand
ccucugcaaaggauagaaa

SEQ ID NO: 2625862 - RNA, 19 nt, Homo sapiens
  misc_RNA (1)...(19): siRNA sense strand
auuacgaggcccuguuaaa

SEQ ID NO: 2625863 - RNA, 19 nt, Homo sapiens
  misc_RNA (1)...(19): siRNA sense strand
ucagaagugcaucgggauu

SEQ ID NO: 2625864 - RNA, 19 nt, Homo sapiens
  misc_RNA (1)...(19): siRNA sense strand
uagaagauggagaaguaga

SEQ ID NO: 2625865 - RNA, 19 nt, Homo sapiens
  misc_RNA (1)...(19): siRNA sense strand
ugacaaauggcuuaaggca

SEQ ID NO: 2625866 - RNA, 19 nt, Homo sapiens
  misc_RNA (1)...(19): siRNA sense strand
cgaccaugggagaugacau

SEQ ID NO: 2625867 - RNA, 19 nt, Homo sapiens
  misc_RNA (1)...(19): siRNA sense strand
guaaaagacuucagggaga

SEQ ID NO: 2625868 - RNA, 19 nt, Homo sapiens
  misc_RNA (1)...(19): siRNA sense strand
aggcaaaaccugaugaauu

SEQ ID NO: 2625869 - RNA, 19 nt, Homo sapiens
  misc_RNA (1)...(19): siRNA sense strand
gaugaagguuuaaggcuca

SEQ ID NO: 2625870 - RNA, 19 nt, Homo sapiens
  misc_RNA (1)...(19): siRNA sense strand
aacuaauggaagaguguaa

SEQ ID NO: 2625871 - RNA, 19 nt, Homo sapiens
  misc_RNA (1)...(19): siRNA sense strand
aguuuaugguacagacaau

SEQ ID NO: 2625872 - RNA, 19 nt, Homo sapiens
  misc_RNA (1)...(19): siRNA sense strand
cuguguggaaagaggcaaa

SEQ ID NO: 2625873 - RNA, 19 nt, Homo sapiens
  misc_RNA (1)...(19): siRNA sense strand
caguaaugcuacagcccuu

SEQ ID NO: 2625874 - RNA, 19 nt, Homo sapiens
  misc_RNA (1)...(19): siRNA sense strand
auauggaagcuguguggaa

SEQ ID NO: 2625875 - RNA, 19 nt, Homo sapiens
  misc_RNA (1)...(19): siRNA sense strand
agguagcacauucggauaa

SEQ ID NO: 2625876 - RNA, 19 nt, Homo sapiens
  misc_RNA (1)...(19): siRNA sense strand
uugaaaugcccaaugaaaa

SEQ ID NO: 2625877 - RNA, 19 nt, Homo sapiens
  misc_RNA (1)...(19): siRNA sense strand
acugaaugcaucuaagcaa

SEQ ID NO: 2625878 - RNA, 19 nt, Homo sapiens
  misc_RNA (1)...(19): siRNA sense strand
ggauaaaccuggaucaacc

SEQ ID NO: 2625879 - RNA, 19 nt, Homo sapiens
  misc_RNA (1)...(19): siRNA sense strand
gcccaaugaaaaugauaaa

SEQ ID NO: 2625880 - RNA, 19 nt, Homo sapiens
  misc_RNA (1)...(19): siRNA sense strand
ggaaagaggcaaaaccuga

SEQ ID NO: 2625881 - RNA, 19 nt, Homo sapiens
  misc_RNA (1)...(19): siRNA sense strand
agaugaagguuuaaggcuc

SEQ ID NO: 2625882 - RNA, 19 nt, Homo sapiens
  misc_RNA (1)...(19): siRNA sense strand
caguggaauuauugaccca

SEQ ID NO: 2625883 - RNA, 19 nt, Homo sapiens
  misc_RNA (1)...(19): siRNA sense strand
gggagaaaugaugaagcua

SEQ ID NO: 2625884 - RNA, 19 nt, Homo sapiens
  misc_RNA (1)...(19): siRNA sense strand
guaaaagacuucagggaga

SEQ ID NO: 2625885 - RNA, 19 nt, Homo sapiens
  misc_RNA (1)...(19): siRNA sense strand
aggcaaaaccugaugaauu

SEQ ID NO: 2625886 - RNA, 19 nt, Homo sapiens
  misc_RNA (1)...(19): siRNA sense strand
gaugaagguuuaaggcuca

SEQ ID NO: 2625887 - RNA, 19 nt, Homo sapiens
  misc_RNA (1)...(19): siRNA sense strand
aacuaauggaagaguguaa

SEQ ID NO: 2625888 - RNA, 19 nt, Homo sapiens
  misc_RNA (1)...(19): siRNA sense strand
aguuuaugguacagacaau

SEQ ID NO: 2625889 - RNA, 19 nt, Homo sapiens
  misc_RNA (1)...(19): siRNA sense strand
cuguguggaaagaggcaaa

SEQ ID NO: 2625890 - RNA, 19 nt, Homo sapiens
  misc_RNA (1)...(19): siRNA sense strand
caguaaugcuacagcccuu

SEQ ID NO: 2625891 - RNA, 19 nt, Homo sapiens
  misc_RNA (1)...(19): siRNA sense strand
auauggaagcuguguggaa

SEQ ID NO: 2625892 - RNA, 19 nt, Homo sapiens
  misc_RNA (1)...(19): siRNA sense strand
agguagcacauucggauaa

SEQ ID NO: 2625893 - RNA, 19 nt, Homo sapiens
  misc_RNA (1)...(19): siRNA sense strand
uugaaaugcccaaugaaaa

SEQ ID NO: 2625894 - RNA, 19 nt, Homo sapiens
  misc_RNA (1)...(19): siRNA sense strand
acugaaugcaucuaagcaa

SEQ ID NO: 2625895 - RNA, 19 nt, Homo sapiens
  misc_RNA (1)...(19): siRNA sense strand
ggauaaaccuggaucaacc

SEQ ID NO: 2625896 - RNA, 19 nt, Homo sapiens
  misc_RNA (1)...(19): siRNA sense strand
gcccaaugaaaaugauaaa

SEQ ID NO: 2625897 - RNA, 19 nt, Homo sapiens
  misc_RNA (1)...(19): siRNA sense strand
ggaaagaggcaaaaccuga

SEQ ID NO: 2625898 - RNA, 19 nt, Homo sapiens
  misc_RNA (1)...(19): siRNA sense strand
agaugaagguuuaaggcuc

SEQ ID NO: 2625899 - RNA, 19 nt, Homo sapiens
  misc_RNA (1)...(19): siRNA sense strand
caguggaauuauugaccca

SEQ ID NO: 2625900 - RNA, 19 nt, Homo sapiens
  misc_RNA (1)...(19): siRNA sense strand
gggagaaaugaugaagcua

SEQ ID NO: 2625901 - RNA, 19 nt, Homo sapiens
  misc_RNA (1)...(19): siRNA sense strand
ucaguaaacucuuggguca

SEQ ID NO: 2625902 - RNA, 19 nt, Homo sapiens
  misc_RNA (1)...(19): siRNA sense strand
cugaauggaaagaggagca

SEQ ID NO: 2625903 - RNA, 19 nt, Homo sapiens
  misc_RNA (1)...(19): siRNA sense strand
caguaaacucuugggucaa

SEQ ID NO: 2625904 - RNA, 19 nt, Homo sapiens
  misc_RNA (1)...(19): siRNA sense strand
ggaaagaggagcagugagg

SEQ ID NO: 2625905 - RNA, 19 nt, Homo sapiens
  misc_RNA (1)...(19): siRNA sense strand
agcaaaugaaccugaucaa

SEQ ID NO: 2625906 - RNA, 19 nt, Homo sapiens
  misc_RNA (1)...(19): siRNA sense strand
aaagaggagcagugaggga

SEQ ID NO: 2625907 - RNA, 19 nt, Homo sapiens
  misc_RNA (1)...(19): siRNA sense strand
gaaauaaggcccagcuccu

SEQ ID NO: 2625908 - RNA, 19 nt, Homo sapiens
  misc_RNA (1)...(19): siRNA sense strand
ucaguaaacucuuggguca

SEQ ID NO: 2625909 - RNA, 19 nt, Homo sapiens
  misc_RNA (1)...(19): siRNA sense strand
cugaauggaaagaggagca

SEQ ID NO: 2625910 - RNA, 19 nt, Homo sapiens
  misc_RNA (1)...(19): siRNA sense strand
caguaaacucuugggucaa

SEQ ID NO: 2625911 - RNA, 19 nt, Homo sapiens
  misc_RNA (1)...(19): siRNA sense strand
ggaaagaggagcagugagg

SEQ ID NO: 2625912 - RNA, 19 nt, Homo sapiens
  misc_RNA (1)...(19): siRNA sense strand
agcaaaugaaccugaucaa

SEQ ID NO: 2625913 - RNA, 19 nt, Homo sapiens
  misc_RNA (1)...(19): siRNA sense strand
aaagaggagcagugaggga

SEQ ID NO: 2625914 - RNA, 19 nt, Homo sapiens
  misc_RNA (1)...(19): siRNA sense strand
gaaauaaggcccagcuccu

SEQ ID NO: 2625915 - RNA, 19 nt, Homo sapiens
  misc_RNA (1)...(19): siRNA sense strand
augcagaguuagaggaaaa

SEQ ID NO: 2625916 - RNA, 19 nt, Homo sapiens
  misc_RNA (1)...(19): siRNA sense strand
gggaauuggaggagaggga

SEQ ID NO: 2625917 - RNA, 19 nt, Homo sapiens
  misc_RNA (1)...(19): siRNA sense strand
uggaagaaaccaagcggaa

SEQ ID NO: 2625918 - RNA, 19 nt, Homo sapiens
  misc_RNA (1)...(19): siRNA sense strand
caggagagccagaaggaga

SEQ ID NO: 2625919 - RNA, 19 nt, Homo sapiens
  misc_RNA (1)...(19): siRNA sense strand
aggcuaaggccgagguuga

SEQ ID NO: 2625920 - RNA, 19 nt, Homo sapiens
  misc_RNA (1)...(19): siRNA sense strand
gggaaaaggaugaugccaa

SEQ ID NO: 2625921 - RNA, 19 nt, Homo sapiens
  misc_RNA (1)...(19): siRNA sense strand
aggcagaggagcagauaga

SEQ ID NO: 2625922 - RNA, 19 nt, Homo sapiens
  misc_RNA (1)...(19): siRNA sense strand
ccaccaagcaggaggagga

SEQ ID NO: 2625923 - RNA, 19 nt, Homo sapiens
  misc_RNA (1)...(19): siRNA sense strand
cccaaggagcagcgggaua

SEQ ID NO: 2625924 - RNA, 19 nt, Homo sapiens
  misc_RNA (1)...(19): siRNA sense strand
gggagaaggccaaggugga

SEQ ID NO: 2625925 - RNA, 19 nt, Homo sapiens
  misc_RNA (1)...(19): siRNA sense strand
acgcagaugccgacgaaau

SEQ ID NO: 2625926 - RNA, 19 nt, Homo sapiens
  misc_RNA (1)...(19): siRNA sense strand
uagaacaccugcagcgcaa

SEQ ID NO: 2625927 - RNA, 19 nt, Homo sapiens
  misc_RNA (1)...(19): siRNA sense strand
gagagggaucgaagggaga

SEQ ID NO: 2625928 - RNA, 19 nt, Homo sapiens
  misc_RNA (1)...(19): siRNA sense strand
cgaauugagaaguuggaga

SEQ ID NO: 2625929 - RNA, 19 nt, Homo sapiens
  misc_RNA (1)...(19): siRNA sense strand
uggagaaacugcaggccga

SEQ ID NO: 2625930 - RNA, 19 nt, Homo sapiens
  misc_RNA (1)...(19): siRNA sense strand
agaugaacuccgagaacga

SEQ ID NO: 2625931 - RNA, 19 nt, Homo sapiens
  misc_RNA (1)...(19): siRNA sense strand
ucaauaagcaccuggcaga

SEQ ID NO: 2625932 - RNA, 19 nt, Homo sapiens
  misc_RNA (1)...(19): siRNA sense strand
aggccaagguggaagaaac

SEQ ID NO: 2625933 - RNA, 19 nt, Homo sapiens
  misc_RNA (1)...(19): siRNA sense strand
gggaucgaagggagagcaa

SEQ ID NO: 2625934 - RNA, 19 nt, Homo sapiens
  misc_RNA (1)...(19): siRNA sense strand
gugaggagguggagcugga

SEQ ID NO: 2625935 - RNA, 19 nt, Homo sapiens
  misc_RNA (1)...(19): siRNA sense strand
cugaggagguagugcggga

SEQ ID NO: 2625936 - RNA, 19 nt, Homo sapiens
  misc_RNA (1)...(19): siRNA sense strand
agaacaagaaacuggcaga

SEQ ID NO: 2625937 - RNA, 19 nt, Homo sapiens
  misc_RNA (1)...(19): siRNA sense strand
ccaagguggaagaaaccaa

SEQ ID NO: 2625938 - RNA, 19 nt, Homo sapiens
  misc_RNA (1)...(19): siRNA sense strand
gaaagaggagggugggcca

SEQ ID NO: 2625939 - RNA, 19 nt, Homo sapiens
  misc_RNA (1)...(19): siRNA sense strand
cgugagaaagagagcuuca

SEQ ID NO: 2625940 - RNA, 19 nt, Homo sapiens
  misc_RNA (1)...(19): siRNA sense strand
ccugauuaguagucuucaa

SEQ ID NO: 2625941 - RNA, 19 nt, Homo sapiens
  misc_RNA (1)...(19): siRNA sense strand
agguggaggucuacgcaga

SEQ ID NO: 2625942 - RNA, 19 nt, Homo sapiens
  misc_RNA (1)...(19): siRNA sense strand
aggagaucaaggaguacaa

SEQ ID NO: 2625943 - RNA, 19 nt, Homo sapiens
  misc_RNA (1)...(19): siRNA sense strand
ccgagaacgaauugagaag

SEQ ID NO: 2625944 - RNA, 19 nt, Homo sapiens
  misc_RNA (1)...(19): siRNA sense strand
gcugcggaagcgagagcaa

SEQ ID NO: 2625945 - RNA, 19 nt, Homo sapiens
  misc_RNA (1)...(19): siRNA sense strand
ggauaaagugacaucggca

SEQ ID NO: 2625946 - RNA, 19 nt, Homo sapiens
  misc_RNA (1)...(19): siRNA sense strand
acggcaggcuugugaagau

SEQ ID NO: 2625947 - RNA, 19 nt, Homo sapiens
  misc_RNA (1)...(19): siRNA sense strand
agaugaaacugcugcugga

SEQ ID NO: 2625948 - RNA, 19 nt, Homo sapiens
  misc_RNA (1)...(19): siRNA sense strand
uggcagaggccuuagagca

SEQ ID NO: 2625949 - RNA, 19 nt, Homo sapiens
  misc_RNA (1)...(19): siRNA sense strand
aggacaugcaggaacagaa

SEQ ID NO: 2625950 - RNA, 19 nt, Homo sapiens
  misc_RNA (1)...(19): siRNA sense strand
aggccuuagagcagcuuaa

SEQ ID NO: 2625951 - RNA, 19 nt, Homo sapiens
  misc_RNA (1)...(19): siRNA sense strand
gcacagaggucauucagcu

SEQ ID NO: 2625952 - RNA, 19 nt, Homo sapiens
  misc_RNA (1)...(19): siRNA sense strand
augccaacuuuaagcuaau

SEQ ID NO: 2625953 - RNA, 19 nt, Homo sapiens
  misc_RNA (1)...(19): siRNA sense strand
cagagcggaucaaggccaa

SEQ ID NO: 2625954 - RNA, 19 nt, Homo sapiens
  misc_RNA (1)...(19): siRNA sense strand
cggcagagaccaaggugcu

SEQ ID NO: 2625955 - RNA, 19 nt, Homo sapiens
  misc_RNA (1)...(19): siRNA sense strand
ccgacaacagaaaggagau

SEQ ID NO: 2625956 - RNA, 19 nt, Homo sapiens
  misc_RNA (1)...(19): siRNA sense strand
gccagaaggagaugaaacu

SEQ ID NO: 2625957 - RNA, 19 nt, Homo sapiens
  misc_RNA (1)...(19): siRNA sense strand
aaagagagcuucaaccuca

SEQ ID NO: 2625958 - RNA, 19 nt, Homo sapiens
  misc_RNA (1)...(19): siRNA sense strand
cugcaaggccgaauggagu

SEQ ID NO: 2625959 - RNA, 19 nt, Homo sapiens
  misc_RNA (1)...(19): siRNA sense strand
ccucaagggucuccgagca

SEQ ID NO: 2625960 - RNA, 19 nt, Homo sapiens
  misc_RNA (1)...(19): siRNA sense strand
gugaagaugaacuccgaga

SEQ ID NO: 2625961 - RNA, 19 nt, Homo sapiens
  misc_RNA (1)...(19): siRNA sense strand
aagugaagacccagcuaga

SEQ ID NO: 2625962 - RNA, 19 nt, Homo sapiens
  misc_RNA (1)...(19): siRNA sense strand
cagaacuccucaagggucu

SEQ ID NO: 2625963 - RNA, 19 nt, Homo sapiens
  misc_RNA (1)...(19): siRNA sense strand
ggaagugccccaagugcaa

SEQ ID NO: 2625964 - RNA, 19 nt, Homo sapiens
  misc_RNA (1)...(19): siRNA sense strand
ggaggaacucugucagcga

SEQ ID NO: 2625965 - RNA, 19 nt, Homo sapiens
  misc_RNA (1)...(19): siRNA sense strand
acaucgagaagcugcggaa

SEQ ID NO: 2625966 - RNA, 19 nt, Homo sapiens
  misc_RNA (1)...(19): siRNA sense strand
gcagaagaagcuacgcaca

SEQ ID NO: 2625967 - RNA, 19 nt, Homo sapiens
  misc_RNA (1)...(19): siRNA sense strand
cagugaagaaggaggagcu

SEQ ID NO: 2625968 - RNA, 19 nt, Homo sapiens
  misc_RNA (1)...(19): siRNA sense strand
gaauuggaggagagggauc

SEQ ID NO: 2625969 - RNA, 19 nt, Homo sapiens
  misc_RNA (1)...(19): siRNA sense strand
ucaagagggcucaggagga

SEQ ID NO: 2625970 - RNA, 19 nt, Homo sapiens
  misc_RNA (1)...(19): siRNA sense strand
augcagaguuagaggaaaa

SEQ ID NO: 2625971 - RNA, 19 nt, Homo sapiens
  misc_RNA (1)...(19): siRNA sense strand
gggaauuggaggagaggga

SEQ ID NO: 2625972 - RNA, 19 nt, Homo sapiens
  misc_RNA (1)...(19): siRNA sense strand
uggaagaaaccaagcggaa

SEQ ID NO: 2625973 - RNA, 19 nt, Homo sapiens
  misc_RNA (1)...(19): siRNA sense strand
caggagagccagaaggaga

SEQ ID NO: 2625974 - RNA, 19 nt, Homo sapiens
  misc_RNA (1)...(19): siRNA sense strand
aggcuaaggccgagguuga

SEQ ID NO: 2625975 - RNA, 19 nt, Homo sapiens
  misc_RNA (1)...(19): siRNA sense strand
gggaaaaggaugaugccaa

SEQ ID NO: 2625976 - RNA, 19 nt, Homo sapiens
  misc_RNA (1)...(19): siRNA sense strand
aggcagaggagcagauaga

SEQ ID NO: 2625977 - RNA, 19 nt, Homo sapiens
  misc_RNA (1)...(19): siRNA sense strand
ccaccaagcaggaggagga

SEQ ID NO: 2625978 - RNA, 19 nt, Homo sapiens
  misc_RNA (1)...(19): siRNA sense strand
cccaaggagcagcgggaua

SEQ ID NO: 2625979 - RNA, 19 nt, Homo sapiens
  misc_RNA (1)...(19): siRNA sense strand
gggagaaggccaaggugga

SEQ ID NO: 2625980 - RNA, 19 nt, Homo sapiens
  misc_RNA (1)...(19): siRNA sense strand
uagaacaccugcagcgcaa

SEQ ID NO: 2625981 - RNA, 19 nt, Homo sapiens
  misc_RNA (1)...(19): siRNA sense strand
gagagggaucgaagggaga

SEQ ID NO: 2625982 - RNA, 19 nt, Homo sapiens
  misc_RNA (1)...(19): siRNA sense strand
cgaauugagaaguuggaga

SEQ ID NO: 2625983 - RNA, 19 nt, Homo sapiens
  misc_RNA (1)...(19): siRNA sense strand
uggagaaacugcaggccga

SEQ ID NO: 2625984 - RNA, 19 nt, Homo sapiens
  misc_RNA (1)...(19): siRNA sense strand
agaugaacuccgagaacga

SEQ ID NO: 2625985 - RNA, 19 nt, Homo sapiens
  misc_RNA (1)...(19): siRNA sense strand
ucaauaagcaccuggcaga

SEQ ID NO: 2625986 - RNA, 19 nt, Homo sapiens
  misc_RNA (1)...(19): siRNA sense strand
aggccaagguggaagaaac

SEQ ID NO: 2625987 - RNA, 19 nt, Homo sapiens
  misc_RNA (1)...(19): siRNA sense strand
gggaucgaagggagagcaa

SEQ ID NO: 2625988 - RNA, 19 nt, Homo sapiens
  misc_RNA (1)...(19): siRNA sense strand
gugaggagguggagcugga

SEQ ID NO: 2625989 - RNA, 19 nt, Homo sapiens
  misc_RNA (1)...(19): siRNA sense strand
cugaggagguagugcggga

SEQ ID NO: 2625990 - RNA, 19 nt, Homo sapiens
  misc_RNA (1)...(19): siRNA sense strand
agaacaagaaacuggcaga

SEQ ID NO: 2625991 - RNA, 19 nt, Homo sapiens
  misc_RNA (1)...(19): siRNA sense strand
ccaagguggaagaaaccaa

SEQ ID NO: 2625992 - RNA, 19 nt, Homo sapiens
  misc_RNA (1)...(19): siRNA sense strand
gaaagaggagggugggcca

SEQ ID NO: 2625993 - RNA, 19 nt, Homo sapiens
  misc_RNA (1)...(19): siRNA sense strand
ccugauuaguagucuucaa

SEQ ID NO: 2625994 - RNA, 19 nt, Homo sapiens
  misc_RNA (1)...(19): siRNA sense strand
ccgagaacgaauugagaag

SEQ ID NO: 2625995 - RNA, 19 nt, Homo sapiens
  misc_RNA (1)...(19): siRNA sense strand
gcugcggaagcgagagcaa

SEQ ID NO: 2625996 - RNA, 19 nt, Homo sapiens
  misc_RNA (1)...(19): siRNA sense strand
ggauaaagugacaucggca

SEQ ID NO: 2625997 - RNA, 19 nt, Homo sapiens
  misc_RNA (1)...(19): siRNA sense strand
acggcaggcuugugaagau

SEQ ID NO: 2625998 - RNA, 19 nt, Homo sapiens
  misc_RNA (1)...(19): siRNA sense strand
agaugaaacugcugcugga

SEQ ID NO: 2625999 - RNA, 19 nt, Homo sapiens
  misc_RNA (1)...(19): siRNA sense strand
uggcagaggccuuagagca

SEQ ID NO: 2626000 - RNA, 19 nt, Homo sapiens
  misc_RNA (1)...(19): siRNA sense strand
aggacaugcaggaacagaa

SEQ ID NO: 2626001 - RNA, 19 nt, Homo sapiens
  misc_RNA (1)...(19): siRNA sense strand
aggccuuagagcagcuuaa

SEQ ID NO: 2626002 - RNA, 19 nt, Homo sapiens
  misc_RNA (1)...(19): siRNA sense strand
gcacagaggucauucagcu

SEQ ID NO: 2626003 - RNA, 19 nt, Homo sapiens
  misc_RNA (1)...(19): siRNA sense strand
augccaacuuuaagcuaau

SEQ ID NO: 2626004 - RNA, 19 nt, Homo sapiens
  misc_RNA (1)...(19): siRNA sense strand
cagagcggaucaaggccaa

SEQ ID NO: 2626005 - RNA, 19 nt, Homo sapiens
  misc_RNA (1)...(19): siRNA sense strand
cggcagagaccaaggugcu

SEQ ID NO: 2626006 - RNA, 19 nt, Homo sapiens
  misc_RNA (1)...(19): siRNA sense strand
ccgacaacagaaaggagau

SEQ ID NO: 2626007 - RNA, 19 nt, Homo sapiens
  misc_RNA (1)...(19): siRNA sense strand
gccagaaggagaugaaacu

SEQ ID NO: 2626008 - RNA, 19 nt, Homo sapiens
  misc_RNA (1)...(19): siRNA sense strand
cugcaaggccgaauggagu

SEQ ID NO: 2626009 - RNA, 19 nt, Homo sapiens
  misc_RNA (1)...(19): siRNA sense strand
ccucaagggucuccgagca

SEQ ID NO: 2626010 - RNA, 19 nt, Homo sapiens
  misc_RNA (1)...(19): siRNA sense strand
gugaagaugaacuccgaga

SEQ ID NO: 2626011 - RNA, 19 nt, Homo sapiens
  misc_RNA (1)...(19): siRNA sense strand
aagugaagacccagcuaga

SEQ ID NO: 2626012 - RNA, 19 nt, Homo sapiens
  misc_RNA (1)...(19): siRNA sense strand
cagaacuccucaagggucu

SEQ ID NO: 2626013 - RNA, 19 nt, Homo sapiens
  misc_RNA (1)...(19): siRNA sense strand
ggaggaacucugucagcga

SEQ ID NO: 2626014 - RNA, 19 nt, Homo sapiens
  misc_RNA (1)...(19): siRNA sense strand
acaucgagaagcugcggaa

SEQ ID NO: 2626015 - RNA, 19 nt, Homo sapiens
  misc_RNA (1)...(19): siRNA sense strand
gcagaagaagcuacgcaca

SEQ ID NO: 2626016 - RNA, 19 nt, Homo sapiens
  misc_RNA (1)...(19): siRNA sense strand
cagugaagaaggaggagcu

SEQ ID NO: 2626017 - RNA, 19 nt, Homo sapiens
  misc_RNA (1)...(19): siRNA sense strand
gaauuggaggagagggauc

SEQ ID NO: 2626018 - RNA, 19 nt, Homo sapiens
  misc_RNA (1)...(19): siRNA sense strand
ccaaagaugagcugcccaa

SEQ ID NO: 2626019 - RNA, 19 nt, Homo sapiens
  misc_RNA (1)...(19): siRNA sense strand
gcucagugguacagcagca

SEQ ID NO: 2626020 - RNA, 19 nt, Homo sapiens
  misc_RNA (1)...(19): siRNA sense strand
cgugauggccugugagaac

SEQ ID NO: 2626021 - RNA, 19 nt, Homo sapiens
  misc_RNA (1)...(19): siRNA sense strand
uggcggagcagaagcgaga

SEQ ID NO: 2626022 - RNA, 19 nt, Homo sapiens
  misc_RNA (1)...(19): siRNA sense strand
gcaguggagucuuggagga

SEQ ID NO: 2626023 - RNA, 19 nt, Homo sapiens
  misc_RNA (1)...(19): siRNA sense strand
augagaacuacguggccaa

SEQ ID NO: 2626024 - RNA, 19 nt, Homo sapiens
  misc_RNA (1)...(19): siRNA sense strand
ugacauggugcaagagcca

SEQ ID NO: 2626025 - RNA, 19 nt, Homo sapiens
  misc_RNA (1)...(19): siRNA sense strand
acaauugaauacaacgaga

SEQ ID NO: 2626026 - RNA, 19 nt, Homo sapiens
  misc_RNA (1)...(19): siRNA sense strand
ccucggaucaugcggaaca

SEQ ID NO: 2626027 - RNA, 19 nt, Homo sapiens
  misc_RNA (1)...(19): siRNA sense strand
cuucagaaccuggaggaga

SEQ ID NO: 2626028 - RNA, 19 nt, Homo sapiens
  misc_RNA (1)...(19): siRNA sense strand
gcggagcagaagcgagaca

SEQ ID NO: 2626029 - RNA, 19 nt, Homo sapiens
  misc_RNA (1)...(19): siRNA sense strand
agacaauugaauacaacga

SEQ ID NO: 2626030 - RNA, 19 nt, Homo sapiens
  misc_RNA (1)...(19): siRNA sense strand
ugucaugauauuugcgcau

SEQ ID NO: 2626031 - RNA, 19 nt, Homo sapiens
  misc_RNA (1)...(19): siRNA sense strand
auggcguggaagagauaua

SEQ ID NO: 2626032 - RNA, 19 nt, Homo sapiens
  misc_RNA (1)...(19): siRNA sense strand
ccaaagaugagcugcccaa

SEQ ID NO: 2626033 - RNA, 19 nt, Homo sapiens
  misc_RNA (1)...(19): siRNA sense strand
gcucagugguacagcagca

SEQ ID NO: 2626034 - RNA, 19 nt, Homo sapiens
  misc_RNA (1)...(19): siRNA sense strand
cgugauggccugugagaac

SEQ ID NO: 2626035 - RNA, 19 nt, Homo sapiens
  misc_RNA (1)...(19): siRNA sense strand
uggcggagcagaagcgaga

SEQ ID NO: 2626036 - RNA, 19 nt, Homo sapiens
  misc_RNA (1)...(19): siRNA sense strand
augagaacuacguggccaa

SEQ ID NO: 2626037 - RNA, 19 nt, Homo sapiens
  misc_RNA (1)...(19): siRNA sense strand
ugacauggugcaagagcca

SEQ ID NO: 2626038 - RNA, 19 nt, Homo sapiens
  misc_RNA (1)...(19): siRNA sense strand
acaauugaauacaacgaga

SEQ ID NO: 2626039 - RNA, 19 nt, Homo sapiens
  misc_RNA (1)...(19): siRNA sense strand
cuucagaaccuggaggaga

SEQ ID NO: 2626040 - RNA, 19 nt, Homo sapiens
  misc_RNA (1)...(19): siRNA sense strand
gcggagcagaagcgagaca

SEQ ID NO: 2626041 - RNA, 19 nt, Homo sapiens
  misc_RNA (1)...(19): siRNA sense strand
agacaauugaauacaacga

SEQ ID NO: 2626042 - RNA, 19 nt, Homo sapiens
  misc_RNA (1)...(19): siRNA sense strand
ugucaugauauuugcgcau

SEQ ID NO: 2626043 - RNA, 19 nt, Homo sapiens
  misc_RNA (1)...(19): siRNA sense strand
auggcguggaagagauaua

SEQ ID NO: 2626044 - RNA, 19 nt, Homo sapiens
  misc_RNA (1)...(19): siRNA sense strand
ccaaagaugagcugcccaa

SEQ ID NO: 2626045 - RNA, 19 nt, Homo sapiens
  misc_RNA (1)...(19): siRNA sense strand
gcucagugguacagcagca

SEQ ID NO: 2626046 - RNA, 19 nt, Homo sapiens
  misc_RNA (1)...(19): siRNA sense strand
cgugauggccugugagaac

SEQ ID NO: 2626047 - RNA, 19 nt, Homo sapiens
  misc_RNA (1)...(19): siRNA sense strand
uggcggagcagaagcgaga

SEQ ID NO: 2626048 - RNA, 19 nt, Homo sapiens
  misc_RNA (1)...(19): siRNA sense strand
gcaguggagucuuggagga

SEQ ID NO: 2626049 - RNA, 19 nt, Homo sapiens
  misc_RNA (1)...(19): siRNA sense strand
augagaacuacguggccaa

SEQ ID NO: 2626050 - RNA, 19 nt, Homo sapiens
  misc_RNA (1)...(19): siRNA sense strand
ugacauggugcaagagcca

SEQ ID NO: 2626051 - RNA, 19 nt, Homo sapiens
  misc_RNA (1)...(19): siRNA sense strand
acaauugaauacaacgaga

SEQ ID NO: 2626052 - RNA, 19 nt, Homo sapiens
  misc_RNA (1)...(19): siRNA sense strand
ccucggaucaugcggaaca

SEQ ID NO: 2626053 - RNA, 19 nt, Homo sapiens
  misc_RNA (1)...(19): siRNA sense strand
cuucagaaccuggaggaga

SEQ ID NO: 2626054 - RNA, 19 nt, Homo sapiens
  misc_RNA (1)...(19): siRNA sense strand
gcggagcagaagcgagaca

SEQ ID NO: 2626055 - RNA, 19 nt, Homo sapiens
  misc_RNA (1)...(19): siRNA sense strand
agacaauugaauacaacga

SEQ ID NO: 2626056 - RNA, 19 nt, Homo sapiens
  misc_RNA (1)...(19): siRNA sense strand
ugucaugauauuugcgcau

SEQ ID NO: 2626057 - RNA, 19 nt, Homo sapiens
  misc_RNA (1)...(19): siRNA sense strand
auggcguggaagagauaua

SEQ ID NO: 2626058 - RNA, 19 nt, Homo sapiens
  misc_RNA (1)...(19): siRNA sense strand
acaagugguugaaggccaa

SEQ ID NO: 2626059 - RNA, 19 nt, Homo sapiens
  misc_RNA (1)...(19): siRNA sense strand
gacaagugguugaaggcca

SEQ ID NO: 2626060 - RNA, 19 nt, Homo sapiens
  misc_RNA (1)...(19): siRNA sense strand
gcuuuaacccggacagcca

SEQ ID NO: 2626061 - RNA, 19 nt, Homo sapiens
  misc_RNA (1)...(19): siRNA sense strand
ccaaugucaccaacagcaa

SEQ ID NO: 2626062 - RNA, 19 nt, Homo sapiens
  misc_RNA (1)...(19): siRNA sense strand
ccauaggguucuacagcga

SEQ ID NO: 2626063 - RNA, 19 nt, Homo sapiens
  misc_RNA (1)...(19): siRNA sense strand
gagaacacguauaggcugu

SEQ ID NO: 2626064 - RNA, 19 nt, Homo sapiens
  misc_RNA (1)...(19): siRNA sense strand
caaccuuggugguggccca

SEQ ID NO: 2626065 - RNA, 19 nt, Homo sapiens
  misc_RNA (1)...(19): siRNA sense strand
acugcaaagagaagguaga

SEQ ID NO: 2626066 - RNA, 19 nt, Homo sapiens
  misc_RNA (1)...(19): siRNA sense strand
gggaaagaagcaaacgugu

SEQ ID NO: 2626067 - RNA, 19 nt, Homo sapiens
  misc_RNA (1)...(19): siRNA sense strand
ccauaggguucuacagcga

SEQ ID NO: 2626068 - RNA, 19 nt, Homo sapiens
  misc_RNA (1)...(19): siRNA sense strand
gagaacacguauaggcugu

SEQ ID NO: 2626069 - RNA, 19 nt, Homo sapiens
  misc_RNA (1)...(19): siRNA sense strand
caaccuuggugguggccca

SEQ ID NO: 2626070 - RNA, 19 nt, Homo sapiens
  misc_RNA (1)...(19): siRNA sense strand
acugcaaagagaagguaga

SEQ ID NO: 2626071 - RNA, 19 nt, Homo sapiens
  misc_RNA (1)...(19): siRNA sense strand
gggaaagaagcaaacgugu

SEQ ID NO: 2626072 - RNA, 19 nt, Homo sapiens
  misc_RNA (1)...(19): siRNA sense strand
ccauaggguucuacagcga

SEQ ID NO: 2626073 - RNA, 19 nt, Homo sapiens
  misc_RNA (1)...(19): siRNA sense strand
gagaacacguauaggcugu

SEQ ID NO: 2626074 - RNA, 19 nt, Homo sapiens
  misc_RNA (1)...(19): siRNA sense strand
caaccuuggugguggccca

SEQ ID NO: 2626075 - RNA, 19 nt, Homo sapiens
  misc_RNA (1)...(19): siRNA sense strand
acugcaaagagaagguaga

SEQ ID NO: 2626076 - RNA, 19 nt, Homo sapiens
  misc_RNA (1)...(19): siRNA sense strand
gggaaagaagcaaacgugu

SEQ ID NO: 2626077 - RNA, 19 nt, Homo sapiens
  misc_RNA (1)...(19): siRNA sense strand
gcugagaaauccaggguca

SEQ ID NO: 2626078 - RNA, 19 nt, Homo sapiens
  misc_RNA (1)...(19): siRNA sense strand
cgcaagagcuauaggcuga

SEQ ID NO: 2626079 - RNA, 19 nt, Homo sapiens
  misc_RNA (1)...(19): siRNA sense strand
gcacggagaugaaggagga

SEQ ID NO: 2626080 - RNA, 19 nt, Homo sapiens
  misc_RNA (1)...(19): siRNA sense strand
gggugacagcugagaggaa

SEQ ID NO: 2626081 - RNA, 19 nt, Homo sapiens
  misc_RNA (1)...(19): siRNA sense strand
aggagaagaugcuggacau

SEQ ID NO: 2626082 - RNA, 19 nt, Homo sapiens
  misc_RNA (1)...(19): siRNA sense strand
caucagugcuccuggcaga

SEQ ID NO: 2626083 - RNA, 19 nt, Homo sapiens
  misc_RNA (1)...(19): siRNA sense strand
gguauaucuuccugaccaa

SEQ ID NO: 2626084 - RNA, 19 nt, Homo sapiens
  misc_RNA (1)...(19): siRNA sense strand
cccaagaggaggaaggaca

SEQ ID NO: 2626085 - RNA, 19 nt, Homo sapiens
  misc_RNA (1)...(19): siRNA sense strand
ccacaacgaauuauggcaa

SEQ ID NO: 2626086 - RNA, 19 nt, Homo sapiens
  misc_RNA (1)...(19): siRNA sense strand
ggaaauggcucuacgaggu

SEQ ID NO: 2626087 - RNA, 19 nt, Homo sapiens
  misc_RNA (1)...(19): siRNA sense strand
accaagagccagaagguuu

SEQ ID NO: 2626088 - RNA, 19 nt, Homo sapiens
  misc_RNA (1)...(19): siRNA sense strand
gcuauggcucugagggaca

SEQ ID NO: 2626089 - RNA, 19 nt, Homo sapiens
  misc_RNA (1)...(19): siRNA sense strand
ugagggacacagaggacaa

SEQ ID NO: 2626090 - RNA, 19 nt, Homo sapiens
  misc_RNA (1)...(19): siRNA sense strand
acaaugaggaggaggaaag

SEQ ID NO: 2626091 - RNA, 19 nt, Homo sapiens
  misc_RNA (1)...(19): siRNA sense strand
ggcaaagagagcacggaga

SEQ ID NO: 2626092 - RNA, 19 nt, Homo sapiens
  misc_RNA (1)...(19): siRNA sense strand
ucgaagugguggaagaacu

SEQ ID NO: 2626093 - RNA, 19 nt, Homo sapiens
  misc_RNA (1)...(19): siRNA sense strand
aggaggaaagccagggaca

SEQ ID NO: 2626094 - RNA, 19 nt, Homo sapiens
  misc_RNA (1)...(19): siRNA sense strand
gcacagagguugcugggcu

SEQ ID NO: 2626095 - RNA, 19 nt, Homo sapiens
  misc_RNA (1)...(19): siRNA sense strand
ggcucuucauggaggacua

SEQ ID NO: 2626096 - RNA, 19 nt, Homo sapiens
  misc_RNA (1)...(19): siRNA sense strand
ccaagaggaggaaggacau

SEQ ID NO: 2626097 - RNA, 19 nt, Homo sapiens
  misc_RNA (1)...(19): siRNA sense strand
cuguagaggacugggagaa

SEQ ID NO: 2626098 - RNA, 19 nt, Homo sapiens
  misc_RNA (1)...(19): siRNA sense strand
caggcauugugcaggagaa

SEQ ID NO: 2626099 - RNA, 19 nt, Homo sapiens
  misc_RNA (1)...(19): siRNA sense strand
ccuucaugcccgaguucua

SEQ ID NO: 2626100 - RNA, 19 nt, Homo sapiens
  misc_RNA (1)...(19): siRNA sense strand
augcguguacaaagggaaa

SEQ ID NO: 2626101 - RNA, 19 nt, Homo sapiens
  misc_RNA (1)...(19): siRNA sense strand
uggacaauaaagaugacaa

SEQ ID NO: 2626102 - RNA, 19 nt, Homo sapiens
  misc_RNA (1)...(19): siRNA sense strand
ugggcaagauggugggugu

SEQ ID NO: 2626103 - RNA, 19 nt, Homo sapiens
  misc_RNA (1)...(19): siRNA sense strand
ggagccaauacgaguacua

SEQ ID NO: 2626104 - RNA, 19 nt, Homo sapiens
  misc_RNA (1)...(19): siRNA sense strand
aagagagcacggagaugaa

SEQ ID NO: 2626105 - RNA, 19 nt, Homo sapiens
  misc_RNA (1)...(19): siRNA sense strand
caggagaagaugcuggaca

SEQ ID NO: 2626106 - RNA, 19 nt, Homo sapiens
  misc_RNA (1)...(19): siRNA sense strand
uggacaaugaggaggagga

SEQ ID NO: 2626107 - RNA, 19 nt, Homo sapiens
  misc_RNA (1)...(19): siRNA sense strand
gaguugaccaagagccaga

SEQ ID NO: 2626108 - RNA, 19 nt, Homo sapiens
  misc_RNA (1)...(19): siRNA sense strand
aagccaacauugugaucga

SEQ ID NO: 2626109 - RNA, 19 nt, Homo sapiens
  misc_RNA (1)...(19): siRNA sense strand
uggaggacuacgagguaca

SEQ ID NO: 2626110 - RNA, 19 nt, Homo sapiens
  misc_RNA (1)...(19): siRNA sense strand
ccucugagcaccucggaga

SEQ ID NO: 2626111 - RNA, 19 nt, Homo sapiens
  misc_RNA (1)...(19): siRNA sense strand
guaucgccauggugaggaa

SEQ ID NO: 2626112 - RNA, 19 nt, Homo sapiens
  misc_RNA (1)...(19): siRNA sense strand
cagaguugaccaagagcca

SEQ ID NO: 2626113 - RNA, 19 nt, Homo sapiens
  misc_RNA (1)...(19): siRNA sense strand
ccuucagugaggaggccua

SEQ ID NO: 2626114 - RNA, 19 nt, Homo sapiens
  misc_RNA (1)...(19): siRNA sense strand
agucaaccgccauggauga

SEQ ID NO: 2626115 - RNA, 19 nt, Homo sapiens
  misc_RNA (1)...(19): siRNA sense strand
gccuagagagcguggacca

SEQ ID NO: 2626116 - RNA, 19 nt, Homo sapiens
  misc_RNA (1)...(19): siRNA sense strand
ggagaagggcacacccaca

SEQ ID NO: 2626117 - RNA, 19 nt, Homo sapiens
  misc_RNA (1)...(19): siRNA sense strand
uggcccagccucagagaga

SEQ ID NO: 2626118 - RNA, 19 nt, Homo sapiens
  misc_RNA (1)...(19): siRNA sense strand
agagagagagcaagccaca

SEQ ID NO: 2626119 - RNA, 19 nt, Homo sapiens
  misc_RNA (1)...(19): siRNA sense strand
ggauuauaucagugccgau

SEQ ID NO: 2626120 - RNA, 19 nt, Homo sapiens
  misc_RNA (1)...(19): siRNA sense strand
gcucaaagcaggaagcaga

SEQ ID NO: 2626121 - RNA, 19 nt, Homo sapiens
  misc_RNA (1)...(19): siRNA sense strand
aaacauggcccuuggguga

SEQ ID NO: 2626122 - RNA, 19 nt, Homo sapiens
  misc_RNA (1)...(19): siRNA sense strand
acggaaugcaagagcucaa

SEQ ID NO: 2626123 - RNA, 19 nt, Homo sapiens
  misc_RNA (1)...(19): siRNA sense strand
aacaaggagacaaggaaau

SEQ ID NO: 2626124 - RNA, 19 nt, Homo sapiens
  misc_RNA (1)...(19): siRNA sense strand
gaggcauacaagugacaau

SEQ ID NO: 2626125 - RNA, 19 nt, Homo sapiens
  misc_RNA (1)...(19): siRNA sense strand
agcaggaagcagaggcaau

SEQ ID NO: 2626126 - RNA, 19 nt, Homo sapiens
  misc_RNA (1)...(19): siRNA sense strand
aguacagggaacagaugaa

SEQ ID NO: 2626127 - RNA, 19 nt, Homo sapiens
  misc_RNA (1)...(19): siRNA sense strand
cggcaaucugaaaggcaca

SEQ ID NO: 2626128 - RNA, 19 nt, Homo sapiens
  misc_RNA (1)...(19): siRNA sense strand
aagcaaauucuguggcagu

SEQ ID NO: 2626129 - RNA, 19 nt, Homo sapiens
  misc_RNA (1)...(19): siRNA sense strand
gcacacugaaacaaggaga

SEQ ID NO: 2626130 - RNA, 19 nt, Homo sapiens
  misc_RNA (1)...(19): siRNA sense strand
gcucaaagcaggaagcaga

SEQ ID NO: 2626131 - RNA, 19 nt, Homo sapiens
  misc_RNA (1)...(19): siRNA sense strand
aaacauggcccuuggguga

SEQ ID NO: 2626132 - RNA, 19 nt, Homo sapiens
  misc_RNA (1)...(19): siRNA sense strand
acggaaugcaagagcucaa

SEQ ID NO: 2626133 - RNA, 19 nt, Homo sapiens
  misc_RNA (1)...(19): siRNA sense strand
aacaaggagacaaggaaau

SEQ ID NO: 2626134 - RNA, 19 nt, Homo sapiens
  misc_RNA (1)...(19): siRNA sense strand
gaggcauacaagugacaau

SEQ ID NO: 2626135 - RNA, 19 nt, Homo sapiens
  misc_RNA (1)...(19): siRNA sense strand
agcaggaagcagaggcaau

SEQ ID NO: 2626136 - RNA, 19 nt, Homo sapiens
  misc_RNA (1)...(19): siRNA sense strand
aguacagggaacagaugaa

SEQ ID NO: 2626137 - RNA, 19 nt, Homo sapiens
  misc_RNA (1)...(19): siRNA sense strand
cggcaaucugaaaggcaca

SEQ ID NO: 2626138 - RNA, 19 nt, Homo sapiens
  misc_RNA (1)...(19): siRNA sense strand
aagcaaauucuguggcagu

SEQ ID NO: 2626139 - RNA, 19 nt, Homo sapiens
  misc_RNA (1)...(19): siRNA sense strand
gcacacugaaacaaggaga

SEQ ID NO: 2626140 - RNA, 19 nt, Homo sapiens
  misc_RNA (1)...(19): siRNA sense strand
agagauggauacagggaau

SEQ ID NO: 2626141 - RNA, 19 nt, Homo sapiens
  misc_RNA (1)...(19): siRNA sense strand
gaguguaagucaagggaug

SEQ ID NO: 2626142 - RNA, 19 nt, Homo sapiens
  misc_RNA (1)...(19): siRNA sense strand
cuguuuacauugaugacaa

SEQ ID NO: 2626143 - RNA, 19 nt, Homo sapiens
  misc_RNA (1)...(19): siRNA sense strand
acugaagagaggaaacuua

SEQ ID NO: 2626144 - RNA, 19 nt, Homo sapiens
  misc_RNA (1)...(19): siRNA sense strand
augaggagucagagcacaa

SEQ ID NO: 2626145 - RNA, 19 nt, Homo sapiens
  misc_RNA (1)...(19): siRNA sense strand
aggaguuggaagaguggua

SEQ ID NO: 2626146 - RNA, 19 nt, Homo sapiens
  misc_RNA (1)...(19): siRNA sense strand
gugaccaccacgagaacaa

SEQ ID NO: 2626147 - RNA, 19 nt, Homo sapiens
  misc_RNA (1)...(19): siRNA sense strand
ucgaaaggugucagaguca

SEQ ID NO: 2626148 - RNA, 19 nt, Homo sapiens
  misc_RNA (1)...(19): siRNA sense strand
gaaugauugcagaguucaa

SEQ ID NO: 2626149 - RNA, 19 nt, Homo sapiens
  misc_RNA (1)...(19): siRNA sense strand
auacagggaaugaugacaa

SEQ ID NO: 2626150 - RNA, 19 nt, Homo sapiens
  misc_RNA (1)...(19): siRNA sense strand
ucaacaaccaggagcugaa

SEQ ID NO: 2626151 - RNA, 19 nt, Homo sapiens
  misc_RNA (1)...(19): siRNA sense strand
uugaaaaccagguggauau

SEQ ID NO: 2626152 - RNA, 19 nt, Homo sapiens
  misc_RNA (1)...(19): siRNA sense strand
cggauggagcacagcaaga

SEQ ID NO: 2626153 - RNA, 19 nt, Homo sapiens
  misc_RNA (1)...(19): siRNA sense strand
agguauuccugaagcagau

SEQ ID NO: 2626154 - RNA, 19 nt, Homo sapiens
  misc_RNA (1)...(19): siRNA sense strand
auaucaacaccgaugcaaa

SEQ ID NO: 2626155 - RNA, 19 nt, Homo sapiens
  misc_RNA (1)...(19): siRNA sense strand
gcuucuggcagcagcacua

SEQ ID NO: 2626156 - RNA, 19 nt, Homo sapiens
  misc_RNA (1)...(19): siRNA sense strand
gggaaugaugacaagcaca

SEQ ID NO: 2626157 - RNA, 19 nt, Homo sapiens
  misc_RNA (1)...(19): siRNA sense strand
uugcagaguucaagcugau

SEQ ID NO: 2626158 - RNA, 19 nt, Homo sapiens
  misc_RNA (1)...(19): siRNA sense strand
gcuacauugaggagcccua

SEQ ID NO: 2626159 - RNA, 19 nt, Homo sapiens
  misc_RNA (1)...(19): siRNA sense strand
acaaacuggaagugcucua

SEQ ID NO: 2626160 - RNA, 19 nt, Homo sapiens
  misc_RNA (1)...(19): siRNA sense strand
ugaaaguugccgagguacu

SEQ ID NO: 2626161 - RNA, 19 nt, Homo sapiens
  misc_RNA (1)...(19): siRNA sense strand
gaaauucuuaugaggccua

SEQ ID NO: 2626162 - RNA, 19 nt, Homo sapiens
  misc_RNA (1)...(19): siRNA sense strand
augacaaguaagaagacau

SEQ ID NO: 2626163 - RNA, 19 nt, Homo sapiens
  misc_RNA (1)...(19): siRNA sense strand
cugauuuggaggaagcauu

SEQ ID NO: 2626164 - RNA, 19 nt, Homo sapiens
  misc_RNA (1)...(19): siRNA sense strand
cggacaucaccuugaagau

SEQ ID NO: 2626165 - RNA, 19 nt, Homo sapiens
  misc_RNA (1)...(19): siRNA sense strand
ccaacaucccugaggugga

SEQ ID NO: 2626166 - RNA, 19 nt, Homo sapiens
  misc_RNA (1)...(19): siRNA sense strand
agucaagggaugugcucca

SEQ ID NO: 2626167 - RNA, 19 nt, Homo sapiens
  misc_RNA (1)...(19): siRNA sense strand
agagauggauacagggaau

SEQ ID NO: 2626168 - RNA, 19 nt, Homo sapiens
  misc_RNA (1)...(19): siRNA sense strand
gaguguaagucaagggaug

SEQ ID NO: 2626169 - RNA, 19 nt, Homo sapiens
  misc_RNA (1)...(19): siRNA sense strand
cuguuuacauugaugacaa

SEQ ID NO: 2626170 - RNA, 19 nt, Homo sapiens
  misc_RNA (1)...(19): siRNA sense strand
acugaagagaggaaacuua

SEQ ID NO: 2626171 - RNA, 19 nt, Homo sapiens
  misc_RNA (1)...(19): siRNA sense strand
augaggagucagagcacaa

SEQ ID NO: 2626172 - RNA, 19 nt, Homo sapiens
  misc_RNA (1)...(19): siRNA sense strand
aggaguuggaagaguggua

SEQ ID NO: 2626173 - RNA, 19 nt, Homo sapiens
  misc_RNA (1)...(19): siRNA sense strand
gugaccaccacgagaacaa

SEQ ID NO: 2626174 - RNA, 19 nt, Homo sapiens
  misc_RNA (1)...(19): siRNA sense strand
ucgaaaggugucagaguca

SEQ ID NO: 2626175 - RNA, 19 nt, Homo sapiens
  misc_RNA (1)...(19): siRNA sense strand
gaaugauugcagaguucaa

SEQ ID NO: 2626176 - RNA, 19 nt, Homo sapiens
  misc_RNA (1)...(19): siRNA sense strand
auacagggaaugaugacaa

SEQ ID NO: 2626177 - RNA, 19 nt, Homo sapiens
  misc_RNA (1)...(19): siRNA sense strand
ucaacaaccaggagcugaa

SEQ ID NO: 2626178 - RNA, 19 nt, Homo sapiens
  misc_RNA (1)...(19): siRNA sense strand
uugaaaaccagguggauau

SEQ ID NO: 2626179 - RNA, 19 nt, Homo sapiens
  misc_RNA (1)...(19): siRNA sense strand
cggauggagcacagcaaga

SEQ ID NO: 2626180 - RNA, 19 nt, Homo sapiens
  misc_RNA (1)...(19): siRNA sense strand
agguauuccugaagcagau

SEQ ID NO: 2626181 - RNA, 19 nt, Homo sapiens
  misc_RNA (1)...(19): siRNA sense strand
auaucaacaccgaugcaaa

SEQ ID NO: 2626182 - RNA, 19 nt, Homo sapiens
  misc_RNA (1)...(19): siRNA sense strand
gcuucuggcagcagcacua

SEQ ID NO: 2626183 - RNA, 19 nt, Homo sapiens
  misc_RNA (1)...(19): siRNA sense strand
gggaaugaugacaagcaca

SEQ ID NO: 2626184 - RNA, 19 nt, Homo sapiens
  misc_RNA (1)...(19): siRNA sense strand
uugcagaguucaagcugau

SEQ ID NO: 2626185 - RNA, 19 nt, Homo sapiens
  misc_RNA (1)...(19): siRNA sense strand
gcuacauugaggagcccua

SEQ ID NO: 2626186 - RNA, 19 nt, Homo sapiens
  misc_RNA (1)...(19): siRNA sense strand
acaaacuggaagugcucua

SEQ ID NO: 2626187 - RNA, 19 nt, Homo sapiens
  misc_RNA (1)...(19): siRNA sense strand
ugaaaguugccgagguacu

SEQ ID NO: 2626188 - RNA, 19 nt, Homo sapiens
  misc_RNA (1)...(19): siRNA sense strand
gaaauucuuaugaggccua

SEQ ID NO: 2626189 - RNA, 19 nt, Homo sapiens
  misc_RNA (1)...(19): siRNA sense strand
augacaaguaagaagacau

SEQ ID NO: 2626190 - RNA, 19 nt, Homo sapiens
  misc_RNA (1)...(19): siRNA sense strand
cugauuuggaggaagcauu

SEQ ID NO: 2626191 - RNA, 19 nt, Homo sapiens
  misc_RNA (1)...(19): siRNA sense strand
cggacaucaccuugaagau

SEQ ID NO: 2626192 - RNA, 19 nt, Homo sapiens
  misc_RNA (1)...(19): siRNA sense strand
ccaacaucccugaggugga

SEQ ID NO: 2626193 - RNA, 19 nt, Homo sapiens
  misc_RNA (1)...(19): siRNA sense strand
agucaagggaugugcucca

SEQ ID NO: 2626194 - RNA, 19 nt, Homo sapiens
  misc_RNA (1)...(19): siRNA sense strand
caaagaaccugaaaggaca

SEQ ID NO: 2626195 - RNA, 19 nt, Homo sapiens
  misc_RNA (1)...(19): siRNA sense strand
guaagaagaggguggaaaa

SEQ ID NO: 2626196 - RNA, 19 nt, Homo sapiens
  misc_RNA (1)...(19): siRNA sense strand
ccaugaaacuggagcagga

SEQ ID NO: 2626197 - RNA, 19 nt, Homo sapiens
  misc_RNA (1)...(19): siRNA sense strand
ccugaaaggacaagaggau

SEQ ID NO: 2626198 - RNA, 19 nt, Homo sapiens
  misc_RNA (1)...(19): siRNA sense strand
gaaaugaaccgaaggcaga

SEQ ID NO: 2626199 - RNA, 19 nt, Homo sapiens
  misc_RNA (1)...(19): siRNA sense strand
aguacagaccugaagaaua

SEQ ID NO: 2626200 - RNA, 19 nt, Homo sapiens
  misc_RNA (1)...(19): siRNA sense strand
caucguaggaggagaggau

SEQ ID NO: 2626201 - RNA, 19 nt, Homo sapiens
  misc_RNA (1)...(19): siRNA sense strand
auaaugagguggauggaca

SEQ ID NO: 2626202 - RNA, 19 nt, Homo sapiens
  misc_RNA (1)...(19): siRNA sense strand
cgguggaggcgcugaaaga

SEQ ID NO: 2626203 - RNA, 19 nt, Homo sapiens
  misc_RNA (1)...(19): siRNA sense strand
aguaagaagaggguggaaa

SEQ ID NO: 2626204 - RNA, 19 nt, Homo sapiens
  misc_RNA (1)...(19): siRNA sense strand
gaugagugguggcaggcaa

SEQ ID NO: 2626205 - RNA, 19 nt, Homo sapiens
  misc_RNA (1)...(19): siRNA sense strand
gcaaagaaccugaaaggac

SEQ ID NO: 2626206 - RNA, 19 nt, Homo sapiens
  misc_RNA (1)...(19): siRNA sense strand
ccgagaacaaauggagaaa

SEQ ID NO: 2626207 - RNA, 19 nt, Homo sapiens
  misc_RNA (1)...(19): siRNA sense strand
ggagaguacuuuacagcca

SEQ ID NO: 2626208 - RNA, 19 nt, Homo sapiens
  misc_RNA (1)...(19): siRNA sense strand
acucacuggaagagauuua

SEQ ID NO: 2626209 - RNA, 19 nt, Homo sapiens
  misc_RNA (1)...(19): siRNA sense strand
gcaccaaggccaagcucau

SEQ ID NO: 2626210 - RNA, 19 nt, Homo sapiens
  misc_RNA (1)...(19): siRNA sense strand
gaacaaaugaugaacagca

SEQ ID NO: 2626211 - RNA, 19 nt, Homo sapiens
  misc_RNA (1)...(19): siRNA sense strand
gggugaaugagguggaagu

SEQ ID NO: 2626212 - RNA, 19 nt, Homo sapiens
  misc_RNA (1)...(19): siRNA sense strand
agaagaggguggaaaagaa

SEQ ID NO: 2626213 - RNA, 19 nt, Homo sapiens
  misc_RNA (1)...(19): siRNA sense strand
gcuuugaaucgaagauaca

SEQ ID NO: 2626214 - RNA, 19 nt, Homo sapiens
  misc_RNA (1)...(19): siRNA sense strand
ugaaacuggagcaggaauu

SEQ ID NO: 2626215 - RNA, 19 nt, Homo sapiens
  misc_RNA (1)...(19): siRNA sense strand
ucagaaggauggacgccua

SEQ ID NO: 2626216 - RNA, 19 nt, Homo sapiens
  misc_RNA (1)...(19): siRNA sense strand
gagaaagauauucaggaca

SEQ ID NO: 2626217 - RNA, 19 nt, Homo sapiens
  misc_RNA (1)...(19): siRNA sense strand
cagccauuguacaggguga

SEQ ID NO: 2626218 - RNA, 19 nt, Homo sapiens
  misc_RNA (1)...(19): siRNA sense strand
ggagaaagauauucaggac

SEQ ID NO: 2626219 - RNA, 19 nt, Homo sapiens
  misc_RNA (1)...(19): siRNA sense strand
aggaggagaggauggagaa

SEQ ID NO: 2626220 - RNA, 19 nt, Homo sapiens
  misc_RNA (1)...(19): siRNA sense strand
augcaaggccugugaucau

SEQ ID NO: 2626221 - RNA, 19 nt, Homo sapiens
  misc_RNA (1)...(19): siRNA sense strand
cccgagaacaaauggagaa

SEQ ID NO: 2626222 - RNA, 19 nt, Homo sapiens
  misc_RNA (1)...(19): siRNA sense strand
auugaagcccuuauggaaa

SEQ ID NO: 2626223 - RNA, 19 nt, Homo sapiens
  misc_RNA (1)...(19): siRNA sense strand
ggaugugaggcacgaggaa

SEQ ID NO: 2626224 - RNA, 19 nt, Homo sapiens
  misc_RNA (1)...(19): siRNA sense strand
cauuaaugccucugaugau

SEQ ID NO: 2626225 - RNA, 19 nt, Homo sapiens
  misc_RNA (1)...(19): siRNA sense strand
aaagaaagaaagagcucga

SEQ ID NO: 2626226 - RNA, 19 nt, Homo sapiens
  misc_RNA (1)...(19): siRNA sense strand
cgggccaauuuaaugauaa

SEQ ID NO: 2626227 - RNA, 19 nt, Homo sapiens
  misc_RNA (1)...(19): siRNA sense strand
cagcaugagcucugggucu

SEQ ID NO: 2626228 - RNA, 19 nt, Homo sapiens
  misc_RNA (1)...(19): siRNA sense strand
ccaaugaaggaccgaguca

SEQ ID NO: 2626229 - RNA, 19 nt, Homo sapiens
  misc_RNA (1)...(19): siRNA sense strand
ucuuagauguuuccggcaa

SEQ ID NO: 2626230 - RNA, 19 nt, Homo sapiens
  misc_RNA (1)...(19): siRNA sense strand
ggaaaugaaccgaaggcag

SEQ ID NO: 2626231 - RNA, 19 nt, Homo sapiens
  misc_RNA (1)...(19): siRNA sense strand
cgagaacaaaugaugaaca

SEQ ID NO: 2626232 - RNA, 19 nt, Homo sapiens
  misc_RNA (1)...(19): siRNA sense strand
agaaagaaagagcucgauu

SEQ ID NO: 2626233 - RNA, 19 nt, Homo sapiens
  misc_RNA (1)...(19): siRNA sense strand
gauuaucccugguggagca

SEQ ID NO: 2626234 - RNA, 19 nt, Homo sapiens
  misc_RNA (1)...(19): siRNA sense strand
aaugaaggaccgagucaau

SEQ ID NO: 2626235 - RNA, 19 nt, Homo sapiens
  misc_RNA (1)...(19): siRNA sense strand
gaagaggguggaaaagaaa

SEQ ID NO: 2626236 - RNA, 19 nt, Homo sapiens
  misc_RNA (1)...(19): siRNA sense strand
gggccaauuuaaugauaac

SEQ ID NO: 2626237 - RNA, 19 nt, Homo sapiens
  misc_RNA (1)...(19): siRNA sense strand
cggggaugauugagucuaa

SEQ ID NO: 2626238 - RNA, 19 nt, Homo sapiens
  misc_RNA (1)...(19): siRNA sense strand
aacaaaucauugaggacca

SEQ ID NO: 2626239 - RNA, 19 nt, Homo sapiens
  misc_RNA (1)...(19): siRNA sense strand
uguauuugaagguggccaa

SEQ ID NO: 2626240 - RNA, 19 nt, Homo sapiens
  misc_RNA (1)...(19): siRNA sense strand
gagaggauggagaaggcau

SEQ ID NO: 2626241 - RNA, 19 nt, Homo sapiens
  misc_RNA (1)...(19): siRNA sense strand
cugauaugguguauuugaa

SEQ ID NO: 2626242 - RNA, 19 nt, Homo sapiens
  misc_RNA (1)...(19): siRNA sense strand
agaggauggagaaggcauu

SEQ ID NO: 2626243 - RNA, 19 nt, Homo sapiens
  misc_RNA (1)...(19): siRNA sense strand
aagauauucaggacaacaa

SEQ ID NO: 2626244 - RNA, 19 nt, Homo sapiens
  misc_RNA (1)...(19): siRNA sense strand
cgauuauuauggagcaaag

SEQ ID NO: 2626245 - RNA, 19 nt, Homo sapiens
  misc_RNA (1)...(19): siRNA sense strand
gacauaugaacaagcaaau

SEQ ID NO: 2626246 - RNA, 19 nt, Homo sapiens
  misc_RNA (1)...(19): siRNA sense strand
cggugaauggagugaaucu

SEQ ID NO: 2626247 - RNA, 19 nt, Homo sapiens
  misc_RNA (1)...(19): siRNA sense strand
gugaaucugaggaaugcaa

SEQ ID NO: 2626248 - RNA, 19 nt, Homo sapiens
  misc_RNA (1)...(19): siRNA sense strand
ccaguacagaccugaagaa

SEQ ID NO: 2626249 - RNA, 19 nt, Homo sapiens
  misc_RNA (1)...(19): siRNA sense strand
acggagaaagugagcagau

SEQ ID NO: 2626250 - RNA, 19 nt, Homo sapiens
  misc_RNA (1)...(19): siRNA sense strand
uguggugucccgagaacaa

SEQ ID NO: 2626251 - RNA, 19 nt, Homo sapiens
  misc_RNA (1)...(19): siRNA sense strand
augacaaagccaugaaacu

SEQ ID NO: 2626252 - RNA, 19 nt, Homo sapiens
  misc_RNA (1)...(19): siRNA sense strand
caaacaaaucauugaggac

SEQ ID NO: 2626253 - RNA, 19 nt, Homo sapiens
  misc_RNA (1)...(19): siRNA sense strand
acaugacuuacgagaacaa

SEQ ID NO: 2626254 - RNA, 19 nt, Homo sapiens
  misc_RNA (1)...(19): siRNA sense strand
gguggaaaagaaagaaaga

SEQ ID NO: 2626255 - RNA, 19 nt, Homo sapiens
  misc_RNA (1)...(19): siRNA sense strand
gggguuaagugacgauuau

SEQ ID NO: 2626256 - RNA, 19 nt, Homo sapiens
  misc_RNA (1)...(19): siRNA sense strand
aggacaagaggaugcuauu

SEQ ID NO: 2626257 - RNA, 19 nt, Homo sapiens
  misc_RNA (1)...(19): siRNA sense strand
agugacacggcaagaaauu

SEQ ID NO: 2626258 - RNA, 19 nt, Homo sapiens
  misc_RNA (1)...(19): siRNA sense strand
cuccgaauuuccacauaaa

SEQ ID NO: 2626259 - RNA, 19 nt, Homo sapiens
  misc_RNA (1)...(19): siRNA sense strand
cuuagauguuuccggcaau

SEQ ID NO: 2626260 - RNA, 19 nt, Homo sapiens
  misc_RNA (1)...(19): siRNA sense strand
aggaauuuggagaguacuu

SEQ ID NO: 2626261 - RNA, 19 nt, Homo sapiens
  misc_RNA (1)...(19): siRNA sense strand
augaauuguuggaguuaga

SEQ ID NO: 2626262 - RNA, 19 nt, Homo sapiens
  misc_RNA (1)...(19): siRNA sense strand
uggcaaagcuucaaggccu

SEQ ID NO: 2626263 - RNA, 19 nt, Homo sapiens
  misc_RNA (1)...(19): siRNA sense strand
agaggagagaagccggaaa

SEQ ID NO: 2626264 - RNA, 19 nt, Homo sapiens
  misc_RNA (1)...(19): siRNA sense strand
agagugaagaggagagaag

SEQ ID NO: 2626265 - RNA, 19 nt, Homo sapiens
  misc_RNA (1)...(19): siRNA sense strand
aguuagagagugaagagga

SEQ ID NO: 2626266 - RNA, 19 nt, Homo sapiens
  misc_RNA (1)...(19): siRNA sense strand
cagacaugcccgaugagau

SEQ ID NO: 2626267 - RNA, 19 nt, Homo sapiens
  misc_RNA (1)...(19): siRNA sense strand
gcaaauaugugauggacca

SEQ ID NO: 2626268 - RNA, 19 nt, Homo sapiens
  misc_RNA (1)...(19): siRNA sense strand
ggaacaagacaguggagga

SEQ ID NO: 2626269 - RNA, 19 nt, Homo sapiens
  misc_RNA (1)...(19): siRNA sense strand
gggcagauucccagcaaau

SEQ ID NO: 2626270 - RNA, 19 nt, Homo sapiens
  misc_RNA (1)...(19): siRNA sense strand
uggcagaaggugugaauga

SEQ ID NO: 2626271 - RNA, 19 nt, Homo sapiens
  misc_RNA (1)...(19): siRNA sense strand
auaaaggagaucacagaaa

SEQ ID NO: 2626272 - RNA, 19 nt, Homo sapiens
  misc_RNA (1)...(19): siRNA sense strand
acaucaaggagcagagaga

SEQ ID NO: 2626273 - RNA, 19 nt, Homo sapiens
  misc_RNA (1)...(19): siRNA sense strand
gacaauggaugcugggaga

SEQ ID NO: 2626274 - RNA, 19 nt, Homo sapiens
  misc_RNA (1)...(19): siRNA sense strand
uuguagaguucgagaggga

SEQ ID NO: 2626275 - RNA, 19 nt, Homo sapiens
  misc_RNA (1)...(19): siRNA sense strand
gcuacuacccugaaggaga

SEQ ID NO: 2626276 - RNA, 19 nt, Homo sapiens
  misc_RNA (1)...(19): siRNA sense strand
ggugugaggagguggccaa

SEQ ID NO: 2626277 - RNA, 19 nt, Homo sapiens
  misc_RNA (1)...(19): siRNA sense strand
aguuggagguggucaagaa

SEQ ID NO: 2626278 - RNA, 19 nt, Homo sapiens
  misc_RNA (1)...(19): siRNA sense strand
gaggaggaccagaaggaga

SEQ ID NO: 2626279 - RNA, 19 nt, Homo sapiens
  misc_RNA (1)...(19): siRNA sense strand
agacagagaugcugaccca

SEQ ID NO: 2626280 - RNA, 19 nt, Homo sapiens
  misc_RNA (1)...(19): siRNA sense strand
ggaaagaccugcucgccuu

SEQ ID NO: 2626281 - RNA, 19 nt, Homo sapiens
  misc_RNA (1)...(19): siRNA sense strand
agguugaaauccuucgaaa

SEQ ID NO: 2626282 - RNA, 19 nt, Homo sapiens
  misc_RNA (1)...(19): siRNA sense strand
cgcagaagcuugagcagga

SEQ ID NO: 2626283 - RNA, 19 nt, Homo sapiens
  misc_RNA (1)...(19): siRNA sense strand
gcucauaacaaacggaacu

SEQ ID NO: 2626284 - RNA, 19 nt, Homo sapiens
  misc_RNA (1)...(19): siRNA sense strand
acaaguuggagguggucaa

SEQ ID NO: 2626285 - RNA, 19 nt, Homo sapiens
  misc_RNA (1)...(19): siRNA sense strand
ggacagaaagacaguggca

SEQ ID NO: 2626286 - RNA, 19 nt, Homo sapiens
  misc_RNA (1)...(19): siRNA sense strand
ugaugacccgggagagaaa

SEQ ID NO: 2626287 - RNA, 19 nt, Homo sapiens
  misc_RNA (1)...(19): siRNA sense strand
cgggagaugccaacaagaa

SEQ ID NO: 2626288 - RNA, 19 nt, Homo sapiens
  misc_RNA (1)...(19): siRNA sense strand
augacuggcugcugagaau

SEQ ID NO: 2626289 - RNA, 19 nt, Homo sapiens
  misc_RNA (1)...(19): siRNA sense strand
cacaauaacuccacgcaga

SEQ ID NO: 2626290 - RNA, 19 nt, Homo sapiens
  misc_RNA (1)...(19): siRNA sense strand
caucgugaguggagagaag

SEQ ID NO: 2626291 - RNA, 19 nt, Homo sapiens
  misc_RNA (1)...(19): siRNA sense strand
uggacaagcugcagaccga

SEQ ID NO: 2626292 - RNA, 19 nt, Homo sapiens
  misc_RNA (1)...(19): siRNA sense strand
gcacuuguguggugggaac

SEQ ID NO: 2626293 - RNA, 19 nt, Homo sapiens
  misc_RNA (1)...(19): siRNA sense strand
acaagacaguggaggaagu

SEQ ID NO: 2626294 - RNA, 19 nt, Homo sapiens
  misc_RNA (1)...(19): siRNA sense strand
gcagcacaucugagaagaa

SEQ ID NO: 2626295 - RNA, 19 nt, Homo sapiens
  misc_RNA (1)...(19): siRNA sense strand
gggaaacggaaguuguaga

SEQ ID NO: 2626296 - RNA, 19 nt, Homo sapiens
  misc_RNA (1)...(19): siRNA sense strand
cagcagguguugaagcaca

SEQ ID NO: 2626297 - RNA, 19 nt, Homo sapiens
  misc_RNA (1)...(19): siRNA sense strand
cggaaguuguagaguucga

SEQ ID NO: 2626298 - RNA, 19 nt, Homo sapiens
  misc_RNA (1)...(19): siRNA sense strand
guagaguucgagagggaga

SEQ ID NO: 2626299 - RNA, 19 nt, Homo sapiens
  misc_RNA (1)...(19): siRNA sense strand
auggaaucccaguuggaaa

SEQ ID NO: 2626300 - RNA, 19 nt, Homo sapiens
  misc_RNA (1)...(19): siRNA sense strand
ucaacaaggacaagaagca

SEQ ID NO: 2626301 - RNA, 19 nt, Homo sapiens
  misc_RNA (1)...(19): siRNA sense strand
aagccaaagcaaagaaagu

SEQ ID NO: 2626302 - RNA, 19 nt, Homo sapiens
  misc_RNA (1)...(19): siRNA sense strand
ugaaggaugacguggacau

SEQ ID NO: 2626303 - RNA, 19 nt, Homo sapiens
  misc_RNA (1)...(19): siRNA sense strand
uagcagagcgugacagcau

SEQ ID NO: 2626304 - RNA, 19 nt, Homo sapiens
  misc_RNA (1)...(19): siRNA sense strand
acaagaagcaggccaucaa

SEQ ID NO: 2626305 - RNA, 19 nt, Homo sapiens
  misc_RNA (1)...(19): siRNA sense strand
acgagaaugcccagaagau

SEQ ID NO: 2626306 - RNA, 19 nt, Homo sapiens
  misc_RNA (1)...(19): siRNA sense strand
acgcaggugaagacagcaa

SEQ ID NO: 2626307 - RNA, 19 nt, Homo sapiens
  misc_RNA (1)...(19): siRNA sense strand
gaucaaagacacggugaca

SEQ ID NO: 2626308 - RNA, 19 nt, Homo sapiens
  misc_RNA (1)...(19): siRNA sense strand
agauuguagcagagcguga

SEQ ID NO: 2626309 - RNA, 19 nt, Homo sapiens
  misc_RNA (1)...(19): siRNA sense strand
ccaucuaccugagggacaa

SEQ ID NO: 2626310 - RNA, 19 nt, Homo sapiens
  misc_RNA (1)...(19): siRNA sense strand
gcugaugacccgggagaga

SEQ ID NO: 2626311 - RNA, 19 nt, Homo sapiens
  misc_RNA (1)...(19): siRNA sense strand
cggccaaugaggagaugga

SEQ ID NO: 2626312 - RNA, 19 nt, Homo sapiens
  misc_RNA (1)...(19): siRNA sense strand
agagaaacgagcuccgcaa

SEQ ID NO: 2626313 - RNA, 19 nt, Homo sapiens
  misc_RNA (1)...(19): siRNA sense strand
acagaaagacaguggcauc

SEQ ID NO: 2626314 - RNA, 19 nt, Homo sapiens
  misc_RNA (1)...(19): siRNA sense strand
ccucagagcuccucgugga

SEQ ID NO: 2626315 - RNA, 19 nt, Homo sapiens
  misc_RNA (1)...(19): siRNA sense strand
guggcauauuugucacuaa

SEQ ID NO: 2626316 - RNA, 19 nt, Homo sapiens
  misc_RNA (1)...(19): siRNA sense strand
uggcaucagucuggagaau

SEQ ID NO: 2626317 - RNA, 19 nt, Homo sapiens
  misc_RNA (1)...(19): siRNA sense strand
ucuggagaauggaguguau

SEQ ID NO: 2626318 - RNA, 19 nt, Homo sapiens
  misc_RNA (1)...(19): siRNA sense strand
acuugauacagcacaauaa

SEQ ID NO: 2626319 - RNA, 19 nt, Homo sapiens
  misc_RNA (1)...(19): siRNA sense strand
aggccacggcgcagaacaa

SEQ ID NO: 2626320 - RNA, 19 nt, Homo sapiens
  misc_RNA (1)...(19): siRNA sense strand
uggagguggucaagaagga

SEQ ID NO: 2626321 - RNA, 19 nt, Homo sapiens
  misc_RNA (1)...(19): siRNA sense strand
acuaaaguggacaaaggaa

SEQ ID NO: 2626322 - RNA, 19 nt, Homo sapiens
  misc_RNA (1)...(19): siRNA sense strand
uggacguggugaaggagau

SEQ ID NO: 2626323 - RNA, 19 nt, Homo sapiens
  misc_RNA (1)...(19): siRNA sense strand
ggcaauggucaaucaagaa

SEQ ID NO: 2626324 - RNA, 19 nt, Homo sapiens
  misc_RNA (1)...(19): siRNA sense strand
aaauaaaguccuguggauu

SEQ ID NO: 2626325 - RNA, 19 nt, Homo sapiens
  misc_RNA (1)...(19): siRNA sense strand
aggaagucuauguggagau

SEQ ID NO: 2626326 - RNA, 19 nt, Homo sapiens
  misc_RNA (1)...(19): siRNA sense strand
agaucuuggcaauggucaa

SEQ ID NO: 2626327 - RNA, 19 nt, Homo sapiens
  misc_RNA (1)...(19): siRNA sense strand
acgaggaggaccagaagga

SEQ ID NO: 2626328 - RNA, 19 nt, Homo sapiens
  misc_RNA (1)...(19): siRNA sense strand
ucaucaacaaggacaagaa

SEQ ID NO: 2626329 - RNA, 19 nt, Homo sapiens
  misc_RNA (1)...(19): siRNA sense strand
acgugaugcuggagaacua

SEQ ID NO: 2626330 - RNA, 19 nt, Homo sapiens
  misc_RNA (1)...(19): siRNA sense strand
ucgugaaacaugagagaau

SEQ ID NO: 2626331 - RNA, 19 nt, Homo sapiens
  misc_RNA (1)...(19): siRNA sense strand
ccguauaaauguaaggagu

SEQ ID NO: 2626332 - RNA, 19 nt, Homo sapiens
  misc_RNA (1)...(19): siRNA sense strand
ccguacaagugcacagaau

SEQ ID NO: 2626333 - RNA, 19 nt, Homo sapiens
  misc_RNA (1)...(19): siRNA sense strand
guguaaagacugugggaag

SEQ ID NO: 2626334 - RNA, 19 nt, Homo sapiens
  misc_RNA (1)...(19): siRNA sense strand
agaaagacuacgaaugcaa

SEQ ID NO: 2626335 - RNA, 19 nt, Homo sapiens
  misc_RNA (1)...(19): siRNA sense strand
aggaauucagauagaagaa

SEQ ID NO: 2626336 - RNA, 19 nt, Homo sapiens
  misc_RNA (1)...(19): siRNA sense strand
cccuauggguguacagaau

SEQ ID NO: 2626337 - RNA, 19 nt, Homo sapiens
  misc_RNA (1)...(19): siRNA sense strand
augcaaagacugugggaag

SEQ ID NO: 2626338 - RNA, 19 nt, Homo sapiens
  misc_RNA (1)...(19): siRNA sense strand
auguaaagacugugggaag

SEQ ID NO: 2626339 - RNA, 19 nt, Homo sapiens
  misc_RNA (1)...(19): siRNA sense strand
ggccuuuagucguggcuau

SEQ ID NO: 2626340 - RNA, 19 nt, Homo sapiens
  misc_RNA (1)...(19): siRNA sense strand
auguaaagacuguggaaag

SEQ ID NO: 2626341 - RNA, 19 nt, Homo sapiens
  misc_RNA (1)...(19): siRNA sense strand
cuagaacacaucagagaca

SEQ ID NO: 2626342 - RNA, 19 nt, Homo sapiens
  misc_RNA (1)...(19): siRNA sense strand
ccuuuagccguguguauaa

SEQ ID NO: 2626343 - RNA, 19 nt, Homo sapiens
  misc_RNA (1)...(19): siRNA sense strand
cagaaugugggaagagcuu

SEQ ID NO: 2626344 - RNA, 19 nt, Homo sapiens
  misc_RNA (1)...(19): siRNA sense strand
gcauaaaagaauucacaca

SEQ ID NO: 2626345 - RNA, 19 nt, Homo sapiens
  misc_RNA (1)...(19): siRNA sense strand
gaauguaaggagugcggga

SEQ ID NO: 2626346 - RNA, 19 nt, Homo sapiens
  misc_RNA (1)...(19): siRNA sense strand
ccucgugaaacaugagaga

SEQ ID NO: 2626347 - RNA, 19 nt, Homo sapiens
  misc_RNA (1)...(19): siRNA sense strand
gaauguaaggaguguggga

SEQ ID NO: 2626348 - RNA, 19 nt, Homo sapiens
  misc_RNA (1)...(19): siRNA sense strand
uccaaaaggaauucagaua

SEQ ID NO: 2626349 - RNA, 19 nt, Homo sapiens
  misc_RNA (1)...(19): siRNA sense strand
gggaagagcuuuagucacg

SEQ ID NO: 2626350 - RNA, 19 nt, Homo sapiens
  misc_RNA (1)...(19): siRNA sense strand
cuaucaacuuagucaacau

SEQ ID NO: 2626351 - RNA, 19 nt, Homo sapiens
  misc_RNA (1)...(19): siRNA sense strand
gagaauccacacaggcgaa

SEQ ID NO: 2626352 - RNA, 19 nt, Homo sapiens
  misc_RNA (1)...(19): siRNA sense strand
auucaugaaauaagggcuu

SEQ ID NO: 2626353 - RNA, 19 nt, Homo sapiens
  misc_RNA (1)...(19): siRNA sense strand
acuuagucaacaucagaaa

SEQ ID NO: 2626354 - RNA, 19 nt, Homo sapiens
  misc_RNA (1)...(19): siRNA sense strand
aagcacgagaggauacaua

SEQ ID NO: 2626355 - RNA, 19 nt, Homo sapiens
  misc_RNA (1)...(19): siRNA sense strand
gggaagaccuuuagccgug

SEQ ID NO: 2626356 - RNA, 19 nt, Homo sapiens
  misc_RNA (1)...(19): siRNA sense strand
gagacaucauaaggagaau

SEQ ID NO: 2626357 - RNA, 19 nt, Homo sapiens
  misc_RNA (1)...(19): siRNA sense strand
cguuaagcacgagaggaua

SEQ ID NO: 2626358 - RNA, 19 nt, Homo sapiens
  misc_RNA (1)...(19): siRNA sense strand
uagaagaaguaaaucccuu

SEQ ID NO: 2626359 - RNA, 19 nt, Homo sapiens
  misc_RNA (1)...(19): siRNA sense strand
gggcaaucagcuuacucaa

SEQ ID NO: 2626360 - RNA, 19 nt, Homo sapiens
  misc_RNA (1)...(19): siRNA sense strand
ggggagaagcccuacgaau

SEQ ID NO: 2626361 - RNA, 19 nt, Homo sapiens
  misc_RNA (1)...(19): siRNA sense strand
guguacagaaugugggaag

SEQ ID NO: 2626362 - RNA, 19 nt, Homo sapiens
  misc_RNA (1)...(19): siRNA sense strand
uggacuggugugagagcaa

SEQ ID NO: 2626363 - RNA, 19 nt, Homo sapiens
  misc_RNA (1)...(19): siRNA sense strand
ugccaggaguacaggaaga

SEQ ID NO: 2626364 - RNA, 19 nt, Homo sapiens
  misc_RNA (1)...(19): siRNA sense strand
gcuccugggcaguggcuau

SEQ ID NO: 2626365 - RNA, 19 nt, Homo sapiens
  misc_RNA (1)...(19): siRNA sense strand
uggcaugaaauaaggacua

SEQ ID NO: 2626366 - RNA, 19 nt, Homo sapiens
  misc_RNA (1)...(19): siRNA sense strand
cggacaaugaucagauauu

SEQ ID NO: 2626367 - RNA, 19 nt, Homo sapiens
  misc_RNA (1)...(19): siRNA sense strand
gggaaugcccugaaagcca

SEQ ID NO: 2626368 - RNA, 19 nt, Homo sapiens
  misc_RNA (1)...(19): siRNA sense strand
acuucagaaaggagauuaa

SEQ ID NO: 2626369 - RNA, 19 nt, Homo sapiens
  misc_RNA (1)...(19): siRNA sense strand
gagauuaacaaguggugga

SEQ ID NO: 2626370 - RNA, 19 nt, Homo sapiens
  misc_RNA (1)...(19): siRNA sense strand
aggagguggcucuaaguaa

SEQ ID NO: 2626371 - RNA, 19 nt, Homo sapiens
  misc_RNA (1)...(19): siRNA sense strand
agggacaaguggugaagca

SEQ ID NO: 2626372 - RNA, 19 nt, Homo sapiens
  misc_RNA (1)...(19): siRNA sense strand
ggguaaaguugccacagga

SEQ ID NO: 2626373 - RNA, 19 nt, Homo sapiens
  misc_RNA (1)...(19): siRNA sense strand
ggauagcauaagaccacaa

SEQ ID NO: 2626374 - RNA, 19 nt, Homo sapiens
  misc_RNA (1)...(19): siRNA sense strand
agguauuauagcugcaaau

SEQ ID NO: 2626375 - RNA, 19 nt, Homo sapiens
  misc_RNA (1)...(19): siRNA sense strand
uagugaacauucuggguca

SEQ ID NO: 2626376 - RNA, 19 nt, Homo sapiens
  misc_RNA (1)...(19): siRNA sense strand
cugauugguuggauagcau

SEQ ID NO: 2626377 - RNA, 19 nt, Homo sapiens
  misc_RNA (1)...(19): siRNA sense strand
gauugguuggauagcauaa

SEQ ID NO: 2626378 - RNA, 19 nt, Homo sapiens
  misc_RNA (1)...(19): siRNA sense strand
guauaaaagcugauugguu

SEQ ID NO: 2626379 - RNA, 19 nt, Homo sapiens
  misc_RNA (1)...(19): siRNA sense strand
cuuccagcauagugaacau

SEQ ID NO: 2626380 - RNA, 19 nt, Homo sapiens
  misc_RNA (1)...(19): siRNA sense strand
aagaucagacccagggaca

SEQ ID NO: 2626381 - RNA, 19 nt, Homo sapiens
  misc_RNA (1)...(19): siRNA sense strand
aggcugugcauuuggauca

SEQ ID NO: 2626382 - RNA, 19 nt, Homo sapiens
  misc_RNA (1)...(19): siRNA sense strand
ccauggauacagcaggaau

SEQ ID NO: 2626383 - RNA, 19 nt, Homo sapiens
  misc_RNA (1)...(19): siRNA sense strand
gggaagaagauguggacga

SEQ ID NO: 2626384 - RNA, 19 nt, Homo sapiens
  misc_RNA (1)...(19): siRNA sense strand
gcaaugaggaugaggacga

SEQ ID NO: 2626385 - RNA, 19 nt, Homo sapiens
  misc_RNA (1)...(19): siRNA sense strand
cggcaguggcaaugaggau

SEQ ID NO: 2626386 - RNA, 19 nt, Homo sapiens
  misc_RNA (1)...(19): siRNA sense strand
gcuagagccaaaugggaau

SEQ ID NO: 2626387 - RNA, 19 nt, Homo sapiens
  misc_RNA (1)...(19): siRNA sense strand
gcaaggaggcugaagagca

SEQ ID NO: 2626388 - RNA, 19 nt, Homo sapiens
  misc_RNA (1)...(19): siRNA sense strand
aagaagauguggacgacga

SEQ ID NO: 2626389 - RNA, 19 nt, Homo sapiens
  misc_RNA (1)...(19): siRNA sense strand
uuucagagacggagcucaa

SEQ ID NO: 2626390 - RNA, 19 nt, Homo sapiens
  misc_RNA (1)...(19): siRNA sense strand
gggccauagacgaggagga

SEQ ID NO: 2626391 - RNA, 19 nt, Homo sapiens
  misc_RNA (1)...(19): siRNA sense strand
agaacaaugacuucagcaa

SEQ ID NO: 2626392 - RNA, 19 nt, Homo sapiens
  misc_RNA (1)...(19): siRNA sense strand
cgcuagagccaaaugggaa

SEQ ID NO: 2626393 - RNA, 19 nt, Homo sapiens
  misc_RNA (1)...(19): siRNA sense strand
ugcagaaggaggaguacaa

SEQ ID NO: 2626394 - RNA, 19 nt, Homo sapiens
  misc_RNA (1)...(19): siRNA sense strand
cgaugaggcagguggggaa

SEQ ID NO: 2626395 - RNA, 19 nt, Homo sapiens
  misc_RNA (1)...(19): siRNA sense strand
ucgaugaggugcuggcuga

SEQ ID NO: 2626396 - RNA, 19 nt, Homo sapiens
  misc_RNA (1)...(19): siRNA sense strand
cagagaaucgcuagagcca

SEQ ID NO: 2626397 - RNA, 19 nt, Homo sapiens
  misc_RNA (1)...(19): siRNA sense strand
ccauagacgaggaggagcu

SEQ ID NO: 2626398 - RNA, 19 nt, Homo sapiens
  misc_RNA (1)...(19): siRNA sense strand
agcgauacuuccagugcaa

SEQ ID NO: 2626399 - RNA, 19 nt, Homo sapiens
  misc_RNA (1)...(19): siRNA sense strand
ccaucaagaaugagaagcu

SEQ ID NO: 2626400 - RNA, 19 nt, Homo sapiens
  misc_RNA (1)...(19): siRNA sense strand
gugaggagcuggaugcagu

SEQ ID NO: 2626401 - RNA, 19 nt, Homo sapiens
  misc_RNA (1)...(19): siRNA sense strand
ccaagaggcuguaccgacu

SEQ ID NO: 2626402 - RNA, 19 nt, Homo sapiens
  misc_RNA (1)...(19): siRNA sense strand
gagaagcugcagugggcca

SEQ ID NO: 2626403 - RNA, 19 nt, Homo sapiens
  misc_RNA (1)...(19): siRNA sense strand
ccaaggucaucaagcggau

SEQ ID NO: 2626404 - RNA, 19 nt, Homo sapiens
  misc_RNA (1)...(19): siRNA sense strand
aagcugaaggccauggcaa

SEQ ID NO: 2626405 - RNA, 19 nt, Homo sapiens
  misc_RNA (1)...(19): siRNA sense strand
cugaagagcagcggcagaa

SEQ ID NO: 2626406 - RNA, 19 nt, Homo sapiens
  misc_RNA (1)...(19): siRNA sense strand
ucuuaauggcagauagaau

SEQ ID NO: 2626407 - RNA, 19 nt, Homo sapiens
  misc_RNA (1)...(19): siRNA sense strand
uggaagaugcaaugaacau

SEQ ID NO: 2626408 - RNA, 19 nt, Homo sapiens
  misc_RNA (1)...(19): siRNA sense strand
ggggaauacuucagagagu

SEQ ID NO: 2626409 - RNA, 19 nt, Homo sapiens
  misc_RNA (1)...(19): siRNA sense strand
gagucagaguugugccaga

SEQ ID NO: 2626410 - RNA, 19 nt, Homo sapiens
  misc_RNA (1)...(19): siRNA sense strand
gaauaaggcugaaccugga

SEQ ID NO: 2626411 - RNA, 19 nt, Homo sapiens
  misc_RNA (1)...(19): siRNA sense strand
ugcuggagguggaggacuu

SEQ ID NO: 2626412 - RNA, 19 nt, Homo sapiens
  misc_RNA (1)...(19): siRNA sense strand
gcaaacucauucugcccaa

SEQ ID NO: 2626413 - RNA, 19 nt, Homo sapiens
  misc_RNA (1)...(19): siRNA sense strand
uggcagauagaaugcaaau

SEQ ID NO: 2626414 - RNA, 19 nt, Homo sapiens
  misc_RNA (1)...(19): siRNA sense strand
aacaaacaacagugaagaa

SEQ ID NO: 2626415 - RNA, 19 nt, Homo sapiens
  misc_RNA (1)...(19): siRNA sense strand
ugcaaauaguugugauucu

SEQ ID NO: 2626416 - RNA, 19 nt, Homo sapiens
  misc_RNA (1)...(19): siRNA sense strand
uuaucaaacagcacaguau

SEQ ID NO: 2626417 - RNA, 19 nt, Homo sapiens
  misc_RNA (1)...(19): siRNA sense strand
ccugugugcugaugggcaa

SEQ ID NO: 2626418 - RNA, 19 nt, Homo sapiens
  misc_RNA (1)...(19): siRNA sense strand
guggagaagcccaagguga

SEQ ID NO: 2626419 - RNA, 19 nt, Homo sapiens
  misc_RNA (1)...(19): siRNA sense strand
cggaggaggugguaccaga

SEQ ID NO: 2626420 - RNA, 19 nt, Homo sapiens
  misc_RNA (1)...(19): siRNA sense strand
agguaggcguggaggagga

SEQ ID NO: 2626421 - RNA, 19 nt, Homo sapiens
  misc_RNA (1)...(19): siRNA sense strand
aggccaagccgaagcccaa

SEQ ID NO: 2626422 - RNA, 19 nt, Homo sapiens
  misc_RNA (1)...(19): siRNA sense strand
cagugaggaggaagaggua

SEQ ID NO: 2626423 - RNA, 19 nt, Homo sapiens
  misc_RNA (1)...(19): siRNA sense strand
aaucagaacccaccggcaa

SEQ ID NO: 2626424 - RNA, 19 nt, Homo sapiens
  misc_RNA (1)...(19): siRNA sense strand
uggccagugaggaggaaga

SEQ ID NO: 2626425 - RNA, 19 nt, Homo sapiens
  misc_RNA (1)...(19): siRNA sense strand
gggcuaagucuccaggcau

SEQ ID NO: 2626426 - RNA, 19 nt, Homo sapiens
  misc_RNA (1)...(19): siRNA sense strand
ucauugacauccagcccaa

SEQ ID NO: 2626427 - RNA, 19 nt, Homo sapiens
  misc_RNA (1)...(19): siRNA sense strand
ugguacagacagcggauga

SEQ ID NO: 2626428 - RNA, 19 nt, Homo sapiens
  misc_RNA (1)...(19): siRNA sense strand
ggauggagaaauaugucau

SEQ ID NO: 2626429 - RNA, 19 nt, Homo sapiens
  misc_RNA (1)...(19): siRNA sense strand
ccucuggcuuccuggguga

SEQ ID NO: 2626430 - RNA, 19 nt, Homo sapiens
  misc_RNA (1)...(19): siRNA sense strand
ccuccaacuuccagcagga

SEQ ID NO: 2626431 - RNA, 19 nt, Homo sapiens
  misc_RNA (1)...(19): siRNA sense strand
acucagaggaggcuagcuu

SEQ ID NO: 2626432 - RNA, 19 nt, Homo sapiens
  misc_RNA (1)...(19): siRNA sense strand
gaauggaacuggagggcuu

SEQ ID NO: 2626433 - RNA, 19 nt, Homo sapiens
  misc_RNA (1)...(19): siRNA sense strand
aggcaagaacuguggaaau

SEQ ID NO: 2626434 - RNA, 19 nt, Homo sapiens
  misc_RNA (1)...(19): siRNA sense strand
auucaugguuugaggagaa

SEQ ID NO: 2626435 - RNA, 19 nt, Homo sapiens
  misc_RNA (1)...(19): siRNA sense strand
uggaagaagaacugagaca

SEQ ID NO: 2626436 - RNA, 19 nt, Homo sapiens
  misc_RNA (1)...(19): siRNA sense strand
ggaagaaggcagugcucau

SEQ ID NO: 2626437 - RNA, 19 nt, Homo sapiens
  misc_RNA (1)...(19): siRNA sense strand
agagaauggcugagguaga

SEQ ID NO: 2626438 - RNA, 19 nt, Homo sapiens
  misc_RNA (1)...(19): siRNA sense strand
caccaaagaagaugaggaa

SEQ ID NO: 2626439 - RNA, 19 nt, Homo sapiens
  misc_RNA (1)...(19): siRNA sense strand
gauuuggaacagaaagaaa

SEQ ID NO: 2626440 - RNA, 19 nt, Homo sapiens
  misc_RNA (1)...(19): siRNA sense strand
agcaagaggugguggagau

SEQ ID NO: 2626441 - RNA, 19 nt, Homo sapiens
  misc_RNA (1)...(19): siRNA sense strand
uggaagauguugugggugu

SEQ ID NO: 2626442 - RNA, 19 nt, Homo sapiens
  misc_RNA (1)...(19): siRNA sense strand
aguuacagaaggagaagaa

SEQ ID NO: 2626443 - RNA, 19 nt, Homo sapiens
  misc_RNA (1)...(19): siRNA sense strand
gguuugaggagaaggccaa

SEQ ID NO: 2626444 - RNA, 19 nt, Homo sapiens
  misc_RNA (1)...(19): siRNA sense strand
agaauaaguuacuggggaa

SEQ ID NO: 2626445 - RNA, 19 nt, Homo sapiens
  misc_RNA (1)...(19): siRNA sense strand
acgaaccgguagugauaaa

SEQ ID NO: 2626446 - RNA, 19 nt, Homo sapiens
  misc_RNA (1)...(19): siRNA sense strand
aaaagaagccagaggaaga

SEQ ID NO: 2626447 - RNA, 19 nt, Homo sapiens
  misc_RNA (1)...(19): siRNA sense strand
cagaaggagaagaaaauaa

SEQ ID NO: 2626448 - RNA, 19 nt, Homo sapiens
  misc_RNA (1)...(19): siRNA sense strand
cugccagagaagaagguaa

SEQ ID NO: 2626449 - RNA, 19 nt, Homo sapiens
  misc_RNA (1)...(19): siRNA sense strand
ugccagagaagaagguaaa

SEQ ID NO: 2626450 - RNA, 19 nt, Homo sapiens
  misc_RNA (1)...(19): siRNA sense strand
ugaagaaaucagugagcca

SEQ ID NO: 2626451 - RNA, 19 nt, Homo sapiens
  misc_RNA (1)...(19): siRNA sense strand
aggaauauaaggaagugaa

SEQ ID NO: 2626452 - RNA, 19 nt, Homo sapiens
  misc_RNA (1)...(19): siRNA sense strand
agaagaaaacagaggauga

SEQ ID NO: 2626453 - RNA, 19 nt, Homo sapiens
  misc_RNA (1)...(19): siRNA sense strand
aggcaaauccaauacgcaa

SEQ ID NO: 2626454 - RNA, 19 nt, Homo sapiens
  misc_RNA (1)...(19): siRNA sense strand
ccuaagaaccaggaggaau

SEQ ID NO: 2626455 - RNA, 19 nt, Homo sapiens
  misc_RNA (1)...(19): siRNA sense strand
cuuugaaaccaguugacaa

SEQ ID NO: 2626456 - RNA, 19 nt, Homo sapiens
  misc_RNA (1)...(19): siRNA sense strand
uuacagaaggagaagaaaa

SEQ ID NO: 2626457 - RNA, 19 nt, Homo sapiens
  misc_RNA (1)...(19): siRNA sense strand
agguaaagaaugugaccca

SEQ ID NO: 2626458 - RNA, 19 nt, Homo sapiens
  misc_RNA (1)...(19): siRNA sense strand
ccagagaaagccaagggua

SEQ ID NO: 2626459 - RNA, 19 nt, Homo sapiens
  misc_RNA (1)...(19): siRNA sense strand
cccaagaaagagaagaaau

SEQ ID NO: 2626460 - RNA, 19 nt, Homo sapiens
  misc_RNA (1)...(19): siRNA sense strand
cgagaaucaaagaagaaaa

SEQ ID NO: 2626461 - RNA, 19 nt, Homo sapiens
  misc_RNA (1)...(19): siRNA sense strand
agagaagaagguaaagaau

SEQ ID NO: 2626462 - RNA, 19 nt, Homo sapiens
  misc_RNA (1)...(19): siRNA sense strand
cagagaaagccaaggguag

SEQ ID NO: 2626463 - RNA, 19 nt, Homo sapiens
  misc_RNA (1)...(19): siRNA sense strand
agauaucauuugaggagca

SEQ ID NO: 2626464 - RNA, 19 nt, Homo sapiens
  misc_RNA (1)...(19): siRNA sense strand
ccagacuacaggaggaaga

SEQ ID NO: 2626465 - RNA, 19 nt, Homo sapiens
  misc_RNA (1)...(19): siRNA sense strand
aagaugaggaagaggacga

SEQ ID NO: 2626466 - RNA, 19 nt, Homo sapiens
  misc_RNA (1)...(19): siRNA sense strand
aggauuuggaacagaaaga

SEQ ID NO: 2626467 - RNA, 19 nt, Homo sapiens
  misc_RNA (1)...(19): siRNA sense strand
ccaaaucuucugugaccaa

SEQ ID NO: 2626468 - RNA, 19 nt, Homo sapiens
  misc_RNA (1)...(19): siRNA sense strand
aaagaauccaggagcgaga

SEQ ID NO: 2626469 - RNA, 19 nt, Homo sapiens
  misc_RNA (1)...(19): siRNA sense strand
cgucaguuacagaaggaga

SEQ ID NO: 2626470 - RNA, 19 nt, Homo sapiens
  misc_RNA (1)...(19): siRNA sense strand
guaugaaaaugcagcaaga

SEQ ID NO: 2626471 - RNA, 19 nt, Homo sapiens
  misc_RNA (1)...(19): siRNA sense strand
gggcaaccugugaagaaau

SEQ ID NO: 2626472 - RNA, 19 nt, Homo sapiens
  misc_RNA (1)...(19): siRNA sense strand
ggaagaggacgaaccggua

SEQ ID NO: 2626473 - RNA, 19 nt, Homo sapiens
  misc_RNA (1)...(19): siRNA sense strand
gggaggugcccaaguucaa

SEQ ID NO: 2626474 - RNA, 19 nt, Homo sapiens
  misc_RNA (1)...(19): siRNA sense strand
gcuacugagaagagagcca

SEQ ID NO: 2626475 - RNA, 19 nt, Homo sapiens
  misc_RNA (1)...(19): siRNA sense strand
aggaugaacacuuugaauu

SEQ ID NO: 2626476 - RNA, 19 nt, Homo sapiens
  misc_RNA (1)...(19): siRNA sense strand
cuggagaagaguaugaaaa

SEQ ID NO: 2626477 - RNA, 19 nt, Homo sapiens
  misc_RNA (1)...(19): siRNA sense strand
gcgagaaucaaagaagaaa

SEQ ID NO: 2626478 - RNA, 19 nt, Homo sapiens
  misc_RNA (1)...(19): siRNA sense strand
gaacuggugcauaaggcaa

SEQ ID NO: 2626479 - RNA, 19 nt, Homo sapiens
  misc_RNA (1)...(19): siRNA sense strand
gugcauaaggcaaauccaa

SEQ ID NO: 2626480 - RNA, 19 nt, Homo sapiens
  misc_RNA (1)...(19): siRNA sense strand
ggaugaugaaggagauacu

SEQ ID NO: 2626481 - RNA, 19 nt, Homo sapiens
  misc_RNA (1)...(19): siRNA sense strand
ucaucaagauacugcugaa

SEQ ID NO: 2626482 - RNA, 19 nt, Homo sapiens
  misc_RNA (1)...(19): siRNA sense strand
ccaccaaagaagaugagga

SEQ ID NO: 2626483 - RNA, 19 nt, Homo sapiens
  misc_RNA (1)...(19): siRNA sense strand
gcaccagcuggaagaagaa

SEQ ID NO: 2626484 - RNA, 19 nt, Homo sapiens
  misc_RNA (1)...(19): siRNA sense strand
aaaugaaagccaagagaug

SEQ ID NO: 2626485 - RNA, 19 nt, Homo sapiens
  misc_RNA (1)...(19): siRNA sense strand
gagcuggagaagaguauga

SEQ ID NO: 2626486 - RNA, 19 nt, Homo sapiens
  misc_RNA (1)...(19): siRNA sense strand
agcgagaaucaaagaagaa

SEQ ID NO: 2626487 - RNA, 19 nt, Homo sapiens
  misc_RNA (1)...(19): siRNA sense strand
guaaagaaugugacccaga

SEQ ID NO: 2626488 - RNA, 19 nt, Homo sapiens
  misc_RNA (1)...(19): siRNA sense strand
ccaaagagcggcaggagcu

SEQ ID NO: 2626489 - RNA, 19 nt, Homo sapiens
  misc_RNA (1)...(19): siRNA sense strand
gcauugaagaacagaauuc

SEQ ID NO: 2626490 - RNA, 19 nt, Homo sapiens
  misc_RNA (1)...(19): siRNA sense strand
cucagaaggauuuggaaca

SEQ ID NO: 2626491 - RNA, 19 nt, Homo sapiens
  misc_RNA (1)...(19): siRNA sense strand
gagcaagagcuggagaaga

SEQ ID NO: 2626492 - RNA, 19 nt, Homo sapiens
  misc_RNA (1)...(19): siRNA sense strand
aggagauacucaaaacaua

SEQ ID NO: 2626493 - RNA, 19 nt, Homo sapiens
  misc_RNA (1)...(19): siRNA sense strand
aggcagccauaucaagaaa

SEQ ID NO: 2626494 - RNA, 19 nt, Homo sapiens
  misc_RNA (1)...(19): siRNA sense strand
aggcagugcucaucaagau

SEQ ID NO: 2626495 - RNA, 19 nt, Homo sapiens
  misc_RNA (1)...(19): siRNA sense strand
ggcugaggagcucgagaaa

SEQ ID NO: 2626496 - RNA, 19 nt, Homo sapiens
  misc_RNA (1)...(19): siRNA sense strand
aggccagacuacaggagga

SEQ ID NO: 2626497 - RNA, 19 nt, Homo sapiens
  misc_RNA (1)...(19): siRNA sense strand
uaucauuugaggagcaaga

SEQ ID NO: 2626498 - RNA, 19 nt, Homo sapiens
  misc_RNA (1)...(19): siRNA sense strand
ccaagaacaucguggccaa

SEQ ID NO: 2626499 - RNA, 19 nt, Homo sapiens
  misc_RNA (1)...(19): siRNA sense strand
gcggauacuugguggagga

SEQ ID NO: 2626500 - RNA, 19 nt, Homo sapiens
  misc_RNA (1)...(19): siRNA sense strand
ccgcuaauguucaaggaca

SEQ ID NO: 2626501 - RNA, 19 nt, Homo sapiens
  misc_RNA (1)...(19): siRNA sense strand
ccuuggaggagaugggcaa

SEQ ID NO: 2626502 - RNA, 19 nt, Homo sapiens
  misc_RNA (1)...(19): siRNA sense strand
gcaagaacuucgaucagga

SEQ ID NO: 2626503 - RNA, 19 nt, Homo sapiens
  misc_RNA (1)...(19): siRNA sense strand
aggagaugggcaagaguga

SEQ ID NO: 2626504 - RNA, 19 nt, Homo sapiens
  misc_RNA (1)...(19): siRNA sense strand
ggcacauacccuagcgauu

SEQ ID NO: 2626505 - RNA, 19 nt, Homo sapiens
  misc_RNA (1)...(19): siRNA sense strand
cgccagaagauaugcaaca

SEQ ID NO: 2626506 - RNA, 19 nt, Homo sapiens
  misc_RNA (1)...(19): siRNA sense strand
gugagaugcugguggcugu

SEQ ID NO: 2626507 - RNA, 19 nt, Homo sapiens
  misc_RNA (1)...(19): siRNA sense strand
agaacaagccuguggagcu

SEQ ID NO: 2626508 - RNA, 19 nt, Homo sapiens
  misc_RNA (1)...(19): siRNA sense strand
cugcaggacuccaccgaca

SEQ ID NO: 2626509 - RNA, 19 nt, Homo sapiens
  misc_RNA (1)...(19): siRNA sense strand
uggccaaauaccaggagau

SEQ ID NO: 2626510 - RNA, 19 nt, Homo sapiens
  misc_RNA (1)...(19): siRNA sense strand
ucuucguggucguggcaau

SEQ ID NO: 2626511 - RNA, 19 nt, Homo sapiens
  misc_RNA (1)...(19): siRNA sense strand
gaagauaugcaacagccua

SEQ ID NO: 2626512 - RNA, 19 nt, Homo sapiens
  misc_RNA (1)...(19): siRNA sense strand
acaaaauccccaugaccaa

SEQ ID NO: 2626513 - RNA, 19 nt, Homo sapiens
  misc_RNA (1)...(19): siRNA sense strand
gugcaugcaaaauaagaaa

SEQ ID NO: 2626514 - RNA, 19 nt, Homo sapiens
  misc_RNA (1)...(19): siRNA sense strand
agggcaaguucuacgagau

SEQ ID NO: 2626515 - RNA, 19 nt, Homo sapiens
  misc_RNA (1)...(19): siRNA sense strand
gggaaagaguacagagacu

SEQ ID NO: 2626516 - RNA, 19 nt, Homo sapiens
  misc_RNA (1)...(19): siRNA sense strand
ggauuaugguuuauggcaa

SEQ ID NO: 2626517 - RNA, 19 nt, Homo sapiens
  misc_RNA (1)...(19): siRNA sense strand
agacuauggaagugauaaa

SEQ ID NO: 2626518 - RNA, 19 nt, Homo sapiens
  misc_RNA (1)...(19): siRNA sense strand
gggcacaagcagagcgaca

SEQ ID NO: 2626519 - RNA, 19 nt, Homo sapiens
  misc_RNA (1)...(19): siRNA sense strand
caucaugggcagaaggaga

SEQ ID NO: 2626520 - RNA, 19 nt, Homo sapiens
  misc_RNA (1)...(19): siRNA sense strand
uugcagaaguacaagaaaa

SEQ ID NO: 2626521 - RNA, 19 nt, Homo sapiens
  misc_RNA (1)...(19): siRNA sense strand
ccauggaguccuuggaaca

SEQ ID NO: 2626522 - RNA, 19 nt, Homo sapiens
  misc_RNA (1)...(19): siRNA sense strand
cagaauugcugcauggcuu

SEQ ID NO: 2626523 - RNA, 19 nt, Homo sapiens
  misc_RNA (1)...(19): siRNA sense strand
acacgcagacagagagcaa

SEQ ID NO: 2626524 - RNA, 19 nt, Homo sapiens
  misc_RNA (1)...(19): siRNA sense strand
cugaaagagaugauguauu

SEQ ID NO: 2626525 - RNA, 19 nt, Homo sapiens
  misc_RNA (1)...(19): siRNA sense strand
gugauaacugugauguaua

SEQ ID NO: 2626526 - RNA, 19 nt, Homo sapiens
  misc_RNA (1)...(19): siRNA sense strand
agguaaagaagacaagauu

SEQ ID NO: 2626527 - RNA, 19 nt, Homo sapiens
  misc_RNA (1)...(19): siRNA sense strand
cugaugacgccgaaggcua

SEQ ID NO: 2626528 - RNA, 19 nt, Homo sapiens
  misc_RNA (1)...(19): siRNA sense strand
cuaaggauuuugugagaau

SEQ ID NO: 2626529 - RNA, 19 nt, Homo sapiens
  misc_RNA (1)...(19): siRNA sense strand
uguuaaaugcucugcgaga

SEQ ID NO: 2626530 - RNA, 19 nt, Homo sapiens
  misc_RNA (1)...(19): siRNA sense strand
ugaacaaagaggagaugga

SEQ ID NO: 2626531 - RNA, 19 nt, Homo sapiens
  misc_RNA (1)...(19): siRNA sense strand
cugcugagucaaaggaaca

SEQ ID NO: 2626532 - RNA, 19 nt, Homo sapiens
  misc_RNA (1)...(19): siRNA sense strand
acaagaaaaucaaggacuu

SEQ ID NO: 2626533 - RNA, 19 nt, Homo sapiens
  misc_RNA (1)...(19): siRNA sense strand
aggaugugcccguggaaca

SEQ ID NO: 2626534 - RNA, 19 nt, Homo sapiens
  misc_RNA (1)...(19): siRNA sense strand
ugaacagcacauauggaaa

SEQ ID NO: 2626535 - RNA, 19 nt, Homo sapiens
  misc_RNA (1)...(19): siRNA sense strand
ccguggaacaggugacaca

SEQ ID NO: 2626536 - RNA, 19 nt, Homo sapiens
  misc_RNA (1)...(19): siRNA sense strand
accaagaacaggaggcaca

SEQ ID NO: 2626537 - RNA, 19 nt, Homo sapiens
  misc_RNA (1)...(19): siRNA sense strand
uuaagaagucagacaucaa

SEQ ID NO: 2626538 - RNA, 19 nt, Homo sapiens
  misc_RNA (1)...(19): siRNA sense strand
gggcauaaaagaaagcauu

SEQ ID NO: 2626539 - RNA, 19 nt, Homo sapiens
  misc_RNA (1)...(19): siRNA sense strand
ugacacacgcagacagaga

SEQ ID NO: 2626540 - RNA, 19 nt, Homo sapiens
  misc_RNA (1)...(19): siRNA sense strand
cuaccuaaauucugggaac

SEQ ID NO: 2626541 - RNA, 19 nt, Homo sapiens
  misc_RNA (1)...(19): siRNA sense strand
cagaaauacccgucuacau

SEQ ID NO: 2626542 - RNA, 19 nt, Homo sapiens
  misc_RNA (1)...(19): siRNA sense strand
ugguguacgcgguggucua

SEQ ID NO: 2626543 - RNA, 19 nt, Homo sapiens
  misc_RNA (1)...(19): siRNA sense strand
gauucuaagacuuggggaa

SEQ ID NO: 2626544 - RNA, 19 nt, Homo sapiens
  misc_RNA (1)...(19): siRNA sense strand
aggugaacaaagaggagau

SEQ ID NO: 2626545 - RNA, 19 nt, Homo sapiens
  misc_RNA (1)...(19): siRNA sense strand
caacuugaagacaggaaga

SEQ ID NO: 2626546 - RNA, 19 nt, Homo sapiens
  misc_RNA (1)...(19): siRNA sense strand
gcaauaaccagcuucgaga

SEQ ID NO: 2626547 - RNA, 19 nt, Homo sapiens
  misc_RNA (1)...(19): siRNA sense strand
guucacaagaucaagucaa

SEQ ID NO: 2626548 - RNA, 19 nt, Homo sapiens
  misc_RNA (1)...(19): siRNA sense strand
guuaaagugaacagcacau

SEQ ID NO: 2626549 - RNA, 19 nt, Homo sapiens
  misc_RNA (1)...(19): siRNA sense strand
gauuaugguuuauggcaac

SEQ ID NO: 2626550 - RNA, 19 nt, Homo sapiens
  misc_RNA (1)...(19): siRNA sense strand
cagugaacuucguggugca

SEQ ID NO: 2626551 - RNA, 19 nt, Homo sapiens
  misc_RNA (1)...(19): siRNA sense strand
ccucaagaaauauugugaa

SEQ ID NO: 2626552 - RNA, 19 nt, Homo sapiens
  misc_RNA (1)...(19): siRNA sense strand
uggaauacaggcagguuca

SEQ ID NO: 2626553 - RNA, 19 nt, Homo sapiens
  misc_RNA (1)...(19): siRNA sense strand
uggugauaacugugaugua

SEQ ID NO: 2626554 - RNA, 19 nt, Homo sapiens
  misc_RNA (1)...(19): siRNA sense strand
ggucuauggagcagggaag

SEQ ID NO: 2626555 - RNA, 19 nt, Homo sapiens
  misc_RNA (1)...(19): siRNA sense strand
acaaguaaacaaauggcau

SEQ ID NO: 2626556 - RNA, 19 nt, Homo sapiens
  misc_RNA (1)...(19): siRNA sense strand
auauuaggcauuuggauga

SEQ ID NO: 2626557 - RNA, 19 nt, Homo sapiens
  misc_RNA (1)...(19): siRNA sense strand
cuggaagacuuucagccaa

SEQ ID NO: 2626558 - RNA, 19 nt, Homo sapiens
  misc_RNA (1)...(19): siRNA sense strand
cauccauuacccaagauaa

SEQ ID NO: 2626559 - RNA, 19 nt, Homo sapiens
  misc_RNA (1)...(19): siRNA sense strand
cuuucuagcagcagacuuu

SEQ ID NO: 2626560 - RNA, 19 nt, Homo sapiens
  misc_RNA (1)...(19): siRNA sense strand
cauuacaguuaaagugaac

SEQ ID NO: 2626561 - RNA, 19 nt, Homo sapiens
  misc_RNA (1)...(19): siRNA sense strand
uggaagaagauacugauga

SEQ ID NO: 2626562 - RNA, 19 nt, Homo sapiens
  misc_RNA (1)...(19): siRNA sense strand
cauuuggaugauugggcaa

SEQ ID NO: 2626563 - RNA, 19 nt, Homo sapiens
  misc_RNA (1)...(19): siRNA sense strand
ucagaauguacgugagaac

SEQ ID NO: 2626564 - RNA, 19 nt, Homo sapiens
  misc_RNA (1)...(19): siRNA sense strand
aagaggagauggagaagac

SEQ ID NO: 2626565 - RNA, 19 nt, Homo sapiens
  misc_RNA (1)...(19): siRNA sense strand
ucucaaggaauuggagcaa

SEQ ID NO: 2626566 - RNA, 19 nt, Homo sapiens
  misc_RNA (1)...(19): siRNA sense strand
acauggaaucagacuggaa

SEQ ID NO: 2626567 - RNA, 19 nt, Homo sapiens
  misc_RNA (1)...(19): siRNA sense strand
gauuacuacaccuaagaau

SEQ ID NO: 2626568 - RNA, 19 nt, Homo sapiens
  misc_RNA (1)...(19): siRNA sense strand
agagacuauggaagugaua

SEQ ID NO: 2626569 - RNA, 19 nt, Homo sapiens
  misc_RNA (1)...(19): siRNA sense strand
acaauggaccuuugcucua

SEQ ID NO: 2626570 - RNA, 19 nt, Homo sapiens
  misc_RNA (1)...(19): siRNA sense strand
ggcuuugaucucuguaaua

SEQ ID NO: 2626571 - RNA, 19 nt, Homo sapiens
  misc_RNA (1)...(19): siRNA sense strand
aaaaggggcauaaaagaaa

SEQ ID NO: 2626572 - RNA, 19 nt, Homo sapiens
  misc_RNA (1)...(19): siRNA sense strand
cagacagagagcaaaccaa

SEQ ID NO: 2626573 - RNA, 19 nt, Homo sapiens
  misc_RNA (1)...(19): siRNA sense strand
cagaaguacaagaaaauca

SEQ ID NO: 2626574 - RNA, 19 nt, Homo sapiens
  misc_RNA (1)...(19): siRNA sense strand
caacauuguaggaggagaa

SEQ ID NO: 2626575 - RNA, 19 nt, Homo sapiens
  misc_RNA (1)...(19): siRNA sense strand
cagaagaacaagccagaaa

SEQ ID NO: 2626576 - RNA, 19 nt, Homo sapiens
  misc_RNA (1)...(19): siRNA sense strand
agaagauggagaaggaaua

SEQ ID NO: 2626577 - RNA, 19 nt, Homo sapiens
  misc_RNA (1)...(19): siRNA sense strand
caagauacccagagagcau

SEQ ID NO: 2626578 - RNA, 19 nt, Homo sapiens
  misc_RNA (1)...(19): siRNA sense strand
gcgucuaacagaagaacaa

SEQ ID NO: 2626579 - RNA, 19 nt, Homo sapiens
  misc_RNA (1)...(19): siRNA sense strand
aggagaagauggagaagga

SEQ ID NO: 2626580 - RNA, 19 nt, Homo sapiens
  misc_RNA (1)...(19): siRNA sense strand
gagaagauggagaaggaau

SEQ ID NO: 2626581 - RNA, 19 nt, Homo sapiens
  misc_RNA (1)...(19): siRNA sense strand
gaaacagaucauagaagaa

SEQ ID NO: 2626582 - RNA, 19 nt, Homo sapiens
  misc_RNA (1)...(19): siRNA sense strand
acuucagauuggagauaaa

SEQ ID NO: 2626583 - RNA, 19 nt, Homo sapiens
  misc_RNA (1)...(19): siRNA sense strand
uccuaaaggucuuggguuu

SEQ ID NO: 2626584 - RNA, 19 nt, Homo sapiens
  misc_RNA (1)...(19): siRNA sense strand
agaacaaggaccagaguga

SEQ ID NO: 2626585 - RNA, 19 nt, Homo sapiens
  misc_RNA (1)...(19): siRNA sense strand
ccuaugaaagacaggauaa

SEQ ID NO: 2626586 - RNA, 19 nt, Homo sapiens
  misc_RNA (1)...(19): siRNA sense strand
gguagauggaagagauuau

SEQ ID NO: 2626587 - RNA, 19 nt, Homo sapiens
  misc_RNA (1)...(19): siRNA sense strand
ccucauacaacuagaccaa

SEQ ID NO: 2626588 - RNA, 19 nt, Homo sapiens
  misc_RNA (1)...(19): siRNA sense strand
ucaagagagcagauggaaa

SEQ ID NO: 2626589 - RNA, 19 nt, Homo sapiens
  misc_RNA (1)...(19): siRNA sense strand
caagagagcagauggaaaa

SEQ ID NO: 2626590 - RNA, 19 nt, Homo sapiens
  misc_RNA (1)...(19): siRNA sense strand
ccaccauaccacaggcaaa

SEQ ID NO: 2626591 - RNA, 19 nt, Homo sapiens
  misc_RNA (1)...(19): siRNA sense strand
ugaugaaauuacaagggaa

SEQ ID NO: 2626592 - RNA, 19 nt, Homo sapiens
  misc_RNA (1)...(19): siRNA sense strand
uggaaaugccauaaagaga

SEQ ID NO: 2626593 - RNA, 19 nt, Homo sapiens
  misc_RNA (1)...(19): siRNA sense strand
aagccaaacugaagacaga

SEQ ID NO: 2626594 - RNA, 19 nt, Homo sapiens
  misc_RNA (1)...(19): siRNA sense strand
gacuaaagacagugggcuu

SEQ ID NO: 2626595 - RNA, 19 nt, Homo sapiens
  misc_RNA (1)...(19): siRNA sense strand
cgaugaggucggagugauu

SEQ ID NO: 2626596 - RNA, 19 nt, Homo sapiens
  misc_RNA (1)...(19): siRNA sense strand
caguugaagcguugaaaga

SEQ ID NO: 2626597 - RNA, 19 nt, Homo sapiens
  misc_RNA (1)...(19): siRNA sense strand
uaguauuaguucaggguca

SEQ ID NO: 2626598 - RNA, 19 nt, Homo sapiens
  misc_RNA (1)...(19): siRNA sense strand
gauggaagauugcggguca

SEQ ID NO: 2626599 - RNA, 19 nt, Homo sapiens
  misc_RNA (1)...(19): siRNA sense strand
aguagauguucgugaugua

SEQ ID NO: 2626600 - RNA, 19 nt, Homo sapiens
  misc_RNA (1)...(19): siRNA sense strand
acuuggagaugaugaaauu

SEQ ID NO: 2626601 - RNA, 19 nt, Homo sapiens
  misc_RNA (1)...(19): siRNA sense strand
acgcagaguugagaagaaa

SEQ ID NO: 2626602 - RNA, 19 nt, Homo sapiens
  misc_RNA (1)...(19): siRNA sense strand
cauuguaggaggagaagau

SEQ ID NO: 2626603 - RNA, 19 nt, Homo sapiens
  misc_RNA (1)...(19): siRNA sense strand
cuuaugaaccagugaauca

SEQ ID NO: 2626604 - RNA, 19 nt, Homo sapiens
  misc_RNA (1)...(19): siRNA sense strand
cuucaaauuuggagauauc

SEQ ID NO: 2626605 - RNA, 19 nt, Homo sapiens
  misc_RNA (1)...(19): siRNA sense strand
gaagaaagaacgagcccga

SEQ ID NO: 2626606 - RNA, 19 nt, Homo sapiens
  misc_RNA (1)...(19): siRNA sense strand
gcucauuaaagguccuaaa

SEQ ID NO: 2626607 - RNA, 19 nt, Homo sapiens
  misc_RNA (1)...(19): siRNA sense strand
ccaugaaacuggaacagga

SEQ ID NO: 2626608 - RNA, 19 nt, Homo sapiens
  misc_RNA (1)...(19): siRNA sense strand
uagcccuaguguagagaaa

SEQ ID NO: 2626609 - RNA, 19 nt, Homo sapiens
  misc_RNA (1)...(19): siRNA sense strand
aggaggagaagauggagaa

SEQ ID NO: 2626610 - RNA, 19 nt, Homo sapiens
  misc_RNA (1)...(19): siRNA sense strand
cgggagcagaugaugaaua

SEQ ID NO: 2626611 - RNA, 19 nt, Homo sapiens
  misc_RNA (1)...(19): siRNA sense strand
gcagaguugagaagaaaga

SEQ ID NO: 2626612 - RNA, 19 nt, Homo sapiens
  misc_RNA (1)...(19): siRNA sense strand
ugagaauguccauggauuu

SEQ ID NO: 2626613 - RNA, 19 nt, Homo sapiens
  misc_RNA (1)...(19): siRNA sense strand
ugugaauacuugggagauu

SEQ ID NO: 2626614 - RNA, 19 nt, Homo sapiens
  misc_RNA (1)...(19): siRNA sense strand
gcaaagcaguugaagcguu

SEQ ID NO: 2626615 - RNA, 19 nt, Homo sapiens
  misc_RNA (1)...(19): siRNA sense strand
uacgagaaguagcaggaaa

SEQ ID NO: 2626616 - RNA, 19 nt, Homo sapiens
  misc_RNA (1)...(19): siRNA sense strand
cagaugaugaauaguagua

SEQ ID NO: 2626617 - RNA, 19 nt, Homo sapiens
  misc_RNA (1)...(19): siRNA sense strand
cgaacuagccagaagcgau

SEQ ID NO: 2626618 - RNA, 19 nt, Homo sapiens
  misc_RNA (1)...(19): siRNA sense strand
uuaccguggucaagaagaa

SEQ ID NO: 2626619 - RNA, 19 nt, Homo sapiens
  misc_RNA (1)...(19): siRNA sense strand
cuaugaaagacaggauaaa

SEQ ID NO: 2626620 - RNA, 19 nt, Homo sapiens
  misc_RNA (1)...(19): siRNA sense strand
ggauaaaugaugacuugau

SEQ ID NO: 2626621 - RNA, 19 nt, Homo sapiens
  misc_RNA (1)...(19): siRNA sense strand
ucauacaacuagaccaaaa

SEQ ID NO: 2626622 - RNA, 19 nt, Homo sapiens
  misc_RNA (1)...(19): siRNA sense strand
guugaaagaagcagggucu

SEQ ID NO: 2626623 - RNA, 19 nt, Homo sapiens
  misc_RNA (1)...(19): siRNA sense strand
ugcuggagguguuggaaau

SEQ ID NO: 2626624 - RNA, 19 nt, Homo sapiens
  misc_RNA (1)...(19): siRNA sense strand
cggagugauucccaguaaa

SEQ ID NO: 2626625 - RNA, 19 nt, Homo sapiens
  misc_RNA (1)...(19): siRNA sense strand
cauuuacaaccaagugaaa

SEQ ID NO: 2626626 - RNA, 19 nt, Homo sapiens
  misc_RNA (1)...(19): siRNA sense strand
aggaaaccagugucagaaa

SEQ ID NO: 2626627 - RNA, 19 nt, Homo sapiens
  misc_RNA (1)...(19): siRNA sense strand
caaaauaauugaaggaggu

SEQ ID NO: 2626628 - RNA, 19 nt, Homo sapiens
  misc_RNA (1)...(19): siRNA sense strand
acauaaggauggcaaacuu

SEQ ID NO: 2626629 - RNA, 19 nt, Homo sapiens
  misc_RNA (1)...(19): siRNA sense strand
uuacaagggaaccuagaaa

SEQ ID NO: 2626630 - RNA, 19 nt, Homo sapiens
  misc_RNA (1)...(19): siRNA sense strand
agaaagaacgagcccgauu

SEQ ID NO: 2626631 - RNA, 19 nt, Homo sapiens
  misc_RNA (1)...(19): siRNA sense strand
acuucuaaugccagcgaua

SEQ ID NO: 2626632 - RNA, 19 nt, Homo sapiens
  misc_RNA (1)...(19): siRNA sense strand
ccaauaaagccaacagaag

SEQ ID NO: 2626633 - RNA, 19 nt, Homo sapiens
  misc_RNA (1)...(19): siRNA sense strand
aggaagaggaggaagcaau

SEQ ID NO: 2626634 - RNA, 19 nt, Homo sapiens
  misc_RNA (1)...(19): siRNA sense strand
gcauuggaacagaaggaau

SEQ ID NO: 2626635 - RNA, 19 nt, Homo sapiens
  misc_RNA (1)...(19): siRNA sense strand
uagagauggaugaggaaga

SEQ ID NO: 2626636 - RNA, 19 nt, Homo sapiens
  misc_RNA (1)...(19): siRNA sense strand
gggaugaagucuuggagcu

SEQ ID NO: 2626637 - RNA, 19 nt, Homo sapiens
  misc_RNA (1)...(19): siRNA sense strand
uaacaaaggcugugggcag

SEQ ID NO: 2626638 - RNA, 19 nt, Homo sapiens
  misc_RNA (1)...(19): siRNA sense strand
aggaggaggaagaggagga

SEQ ID NO: 2626639 - RNA, 19 nt, Homo sapiens
  misc_RNA (1)...(19): siRNA sense strand
uguuagagauggaugagga

SEQ ID NO: 2626640 - RNA, 19 nt, Homo sapiens
  misc_RNA (1)...(19): siRNA sense strand
ccuuaguaguggugacugu

SEQ ID NO: 2626641 - RNA, 19 nt, Homo sapiens
  misc_RNA (1)...(19): siRNA sense strand
gcuaagaaggcuagggcag

SEQ ID NO: 2626642 - RNA, 19 nt, Homo sapiens
  misc_RNA (1)...(19): siRNA sense strand
ggguuguguuagagaugga

SEQ ID NO: 2626643 - RNA, 19 nt, Homo sapiens
  misc_RNA (1)...(19): siRNA sense strand
guuagagauggaugaggaa

SEQ ID NO: 2626644 - RNA, 19 nt, Homo sapiens
  misc_RNA (1)...(19): siRNA sense strand
uggcauuggaacagaagga

SEQ ID NO: 2626645 - RNA, 19 nt, Homo sapiens
  misc_RNA (1)...(19): siRNA sense strand
ucauaaacguggagcagag

SEQ ID NO: 2626646 - RNA, 19 nt, Homo sapiens
  misc_RNA (1)...(19): siRNA sense strand
cagaggaggaggaagagga

SEQ ID NO: 2626647 - RNA, 19 nt, Homo sapiens
  misc_RNA (1)...(19): siRNA sense strand
agaaggaauuagaccagga

SEQ ID NO: 2626648 - RNA, 19 nt, Homo sapiens
  misc_RNA (1)...(19): siRNA sense strand
accaaggcccugagaguga

SEQ ID NO: 2626649 - RNA, 19 nt, Homo sapiens
  misc_RNA (1)...(19): siRNA sense strand
ccgaaagcgaacuguagau

SEQ ID NO: 2626650 - RNA, 19 nt, Homo sapiens
  misc_RNA (1)...(19): siRNA sense strand
gggucauaaacguggagca

SEQ ID NO: 2626651 - RNA, 19 nt, Homo sapiens
  misc_RNA (1)...(19): siRNA sense strand
guugaaaucucccugguca

SEQ ID NO: 2626652 - RNA, 19 nt, Homo sapiens
  misc_RNA (1)...(19): siRNA sense strand
uuaccaaggcccugagagu

SEQ ID NO: 2626653 - RNA, 19 nt, Homo sapiens
  misc_RNA (1)...(19): siRNA sense strand
gcaaugaaggagaaggaga

SEQ ID NO: 2626654 - RNA, 19 nt, Homo sapiens
  misc_RNA (1)...(19): siRNA sense strand
cgauaaggguccugggaag

SEQ ID NO: 2626655 - RNA, 19 nt, Homo sapiens
  misc_RNA (1)...(19): siRNA sense strand
ugauaggagauguggaaga

SEQ ID NO: 2626656 - RNA, 19 nt, Homo sapiens
  misc_RNA (1)...(19): siRNA sense strand
cugcaaugaaggagaagga

SEQ ID NO: 2626657 - RNA, 19 nt, Homo sapiens
  misc_RNA (1)...(19): siRNA sense strand
acagaagaccggauggaga

SEQ ID NO: 2626658 - RNA, 19 nt, Homo sapiens
  misc_RNA (1)...(19): siRNA sense strand
gcauguucgucuuuggcua

SEQ ID NO: 2626659 - RNA, 19 nt, Homo sapiens
  misc_RNA (1)...(19): siRNA sense strand
auacaggauuacuaggcaa

SEQ ID NO: 2626660 - RNA, 19 nt, Homo sapiens
  misc_RNA (1)...(19): siRNA sense strand
acgaguacgagaagcgcua

SEQ ID NO: 2626661 - RNA, 19 nt, Homo sapiens
  misc_RNA (1)...(19): siRNA sense strand
ucaaugauguacuagggaa

SEQ ID NO: 2626662 - RNA, 19 nt, Homo sapiens
  misc_RNA (1)...(19): siRNA sense strand
gugcccucccugagagaua

SEQ ID NO: 2626663 - RNA, 19 nt, Homo sapiens
  misc_RNA (1)...(19): siRNA sense strand
cccacugagaccagaguua

SEQ ID NO: 2626664 - RNA, 19 nt, Homo sapiens
  misc_RNA (1)...(19): siRNA sense strand
ccucaugaguuaaaaguca

SEQ ID NO: 2626665 - RNA, 19 nt, Homo sapiens
  misc_RNA (1)...(19): siRNA sense strand
ccugguggaauuugggauu

SEQ ID NO: 2626666 - RNA, 19 nt, Homo sapiens
  misc_RNA (1)...(19): siRNA sense strand
aagacaauccaguacacaa

SEQ ID NO: 2626667 - RNA, 19 nt, Homo sapiens
  misc_RNA (1)...(19): siRNA sense strand
acauuguaucuguggauga

SEQ ID NO: 2626668 - RNA, 19 nt, Homo sapiens
  misc_RNA (1)...(19): siRNA sense strand
gggaauugccauggaagga

SEQ ID NO: 2626669 - RNA, 19 nt, Homo sapiens
  misc_RNA (1)...(19): siRNA sense strand
caaugauguacuagggaac

SEQ ID NO: 2626670 - RNA, 19 nt, Homo sapiens
  misc_RNA (1)...(19): siRNA sense strand
ccugaugagaggagguacu

SEQ ID NO: 2626671 - RNA, 19 nt, Homo sapiens
  misc_RNA (1)...(19): siRNA sense strand
cacuugcaauaaugggaaa

SEQ ID NO: 2626672 - RNA, 19 nt, Homo sapiens
  misc_RNA (1)...(19): siRNA sense strand
ugaaggaauuccaggguca

SEQ ID NO: 2626673 - RNA, 19 nt, Homo sapiens
  misc_RNA (1)...(19): siRNA sense strand
agaaaauaguugugcaaga

SEQ ID NO: 2626674 - RNA, 19 nt, Homo sapiens
  misc_RNA (1)...(19): siRNA sense strand
cuuuagugcacuugaacaa

SEQ ID NO: 2626675 - RNA, 19 nt, Homo sapiens
  misc_RNA (1)...(19): siRNA sense strand
gcuucgagacugugguaau

SEQ ID NO: 2626676 - RNA, 19 nt, Homo sapiens
  misc_RNA (1)...(19): siRNA sense strand
caagaaaauaguugugcaa

SEQ ID NO: 2626677 - RNA, 19 nt, Homo sapiens
  misc_RNA (1)...(19): siRNA sense strand
ggucauaaaccuaacagca

SEQ ID NO: 2626678 - RNA, 19 nt, Homo sapiens
  misc_RNA (1)...(19): siRNA sense strand
gguccagugccaagagaca

SEQ ID NO: 2626679 - RNA, 19 nt, Homo sapiens
  misc_RNA (1)...(19): siRNA sense strand
uguugaagagauaggaaga

SEQ ID NO: 2626680 - RNA, 19 nt, Homo sapiens
  misc_RNA (1)...(19): siRNA sense strand
gagacauuuaucagagaau

SEQ ID NO: 2626681 - RNA, 19 nt, Homo sapiens
  misc_RNA (1)...(19): siRNA sense strand
gaagcagaauccauggcaa

SEQ ID NO: 2626682 - RNA, 19 nt, Homo sapiens
  misc_RNA (1)...(19): siRNA sense strand
cagaaaaucaagagaagca

SEQ ID NO: 2626683 - RNA, 19 nt, Homo sapiens
  misc_RNA (1)...(19): siRNA sense strand
ucagauaaaggcuggaaaa

SEQ ID NO: 2626684 - RNA, 19 nt, Homo sapiens
  misc_RNA (1)...(19): siRNA sense strand
ugaagagauaggaagaaca

SEQ ID NO: 2626685 - RNA, 19 nt, Homo sapiens
  misc_RNA (1)...(19): siRNA sense strand
gcgaccuacaagaggaaga

SEQ ID NO: 2626686 - RNA, 19 nt, Homo sapiens
  misc_RNA (1)...(19): siRNA sense strand
acagaaauggggaacaaaa

SEQ ID NO: 2626687 - RNA, 19 nt, Homo sapiens
  misc_RNA (1)...(19): siRNA sense strand
ccucagaaaaucaagagaa

SEQ ID NO: 2626688 - RNA, 19 nt, Homo sapiens
  misc_RNA (1)...(19): siRNA sense strand
aagcacaaagaaagugauu

SEQ ID NO: 2626689 - RNA, 19 nt, Homo sapiens
  misc_RNA (1)...(19): siRNA sense strand
gaagaacagaaauggggaa

SEQ ID NO: 2626690 - RNA, 19 nt, Homo sapiens
  misc_RNA (1)...(19): siRNA sense strand
gugcaagaacugaugcgau

SEQ ID NO: 2626691 - RNA, 19 nt, Homo sapiens
  misc_RNA (1)...(19): siRNA sense strand
agaagaacgacuacaaaau

SEQ ID NO: 2626692 - RNA, 19 nt, Homo sapiens
  misc_RNA (1)...(19): siRNA sense strand
ugacaaucucagugggaaa

SEQ ID NO: 2626693 - RNA, 19 nt, Homo sapiens
  misc_RNA (1)...(19): siRNA sense strand
aagcgauacuauugagcaa

SEQ ID NO: 2626694 - RNA, 19 nt, Homo sapiens
  misc_RNA (1)...(19): siRNA sense strand
uggaugaaucuguggaaau

SEQ ID NO: 2626695 - RNA, 19 nt, Homo sapiens
  misc_RNA (1)...(19): siRNA sense strand
aagaagucacagauagaaa

SEQ ID NO: 2626696 - RNA, 19 nt, Homo sapiens
  misc_RNA (1)...(19): siRNA sense strand
cagucagaguaaaggugaa

SEQ ID NO: 2626697 - RNA, 19 nt, Homo sapiens
  misc_RNA (1)...(19): siRNA sense strand
gugaagaagaagaagaugu

SEQ ID NO: 2626698 - RNA, 19 nt, Homo sapiens
  misc_RNA (1)...(19): siRNA sense strand
aagaagaagaagauguaga

SEQ ID NO: 2626699 - RNA, 19 nt, Homo sapiens
  misc_RNA (1)...(19): siRNA sense strand
agagaagcauuauaggcaa

SEQ ID NO: 2626700 - RNA, 19 nt, Homo sapiens
  misc_RNA (1)...(19): siRNA sense strand
cccaaauaaccuugaucaa

SEQ ID NO: 2626701 - RNA, 19 nt, Homo sapiens
  misc_RNA (1)...(19): siRNA sense strand
agaguaaaggugaagaaga

SEQ ID NO: 2626702 - RNA, 19 nt, Homo sapiens
  misc_RNA (1)...(19): siRNA sense strand
ccgaauacugaucgauaau

SEQ ID NO: 2626703 - RNA, 19 nt, Homo sapiens
  misc_RNA (1)...(19): siRNA sense strand
cugaaaagaaacaguggaa

SEQ ID NO: 2626704 - RNA, 19 nt, Homo sapiens
  misc_RNA (1)...(19): siRNA sense strand
ucagaguaaaggugaagaa

SEQ ID NO: 2626705 - RNA, 19 nt, Homo sapiens
  misc_RNA (1)...(19): siRNA sense strand
ccugaaaucaagaaagguu

SEQ ID NO: 2626706 - RNA, 19 nt, Homo sapiens
  misc_RNA (1)...(19): siRNA sense strand
gagagaagcauuauaggca

SEQ ID NO: 2626707 - RNA, 19 nt, Homo sapiens
  misc_RNA (1)...(19): siRNA sense strand
cugauaaaggcuacaguga

SEQ ID NO: 2626708 - RNA, 19 nt, Homo sapiens
  misc_RNA (1)...(19): siRNA sense strand
aggugaagaagaagaagau

SEQ ID NO: 2626709 - RNA, 19 nt, Homo sapiens
  misc_RNA (1)...(19): siRNA sense strand
uucaagaauccauggcaaa

SEQ ID NO: 2626710 - RNA, 19 nt, Homo sapiens
  misc_RNA (1)...(19): siRNA sense strand
acaaaagaagucacagaua

SEQ ID NO: 2626711 - RNA, 19 nt, Homo sapiens
  misc_RNA (1)...(19): siRNA sense strand
agaauggauccuuaagcaa

SEQ ID NO: 2626712 - RNA, 19 nt, Homo sapiens
  misc_RNA (1)...(19): siRNA sense strand
aggaaauaagcgauacuau

SEQ ID NO: 2626713 - RNA, 19 nt, Homo sapiens
  misc_RNA (1)...(19): siRNA sense strand
cugaaaucaagaaagguuu

SEQ ID NO: 2626714 - RNA, 19 nt, Homo sapiens
  misc_RNA (1)...(19): siRNA sense strand
ucucagugggaaaggaaaa

SEQ ID NO: 2626715 - RNA, 19 nt, Homo sapiens
  misc_RNA (1)...(19): siRNA sense strand
ccauuuugaugcucagaaa

SEQ ID NO: 2626716 - RNA, 19 nt, Homo sapiens
  misc_RNA (1)...(19): siRNA sense strand
uuugaugcucagaaagaaa

SEQ ID NO: 2626717 - RNA, 19 nt, Homo sapiens
  misc_RNA (1)...(19): siRNA sense strand
agaaagaaauugucagagc

SEQ ID NO: 2626718 - RNA, 19 nt, Homo sapiens
  misc_RNA (1)...(19): siRNA sense strand
aauauaagacagagcaaac

SEQ ID NO: 2626719 - RNA, 19 nt, Homo sapiens
  misc_RNA (1)...(19): siRNA sense strand
gcugaacaagugauggaau

SEQ ID NO: 2626720 - RNA, 19 nt, Homo sapiens
  misc_RNA (1)...(19): siRNA sense strand
aagacagagcaaacagcaa

SEQ ID NO: 2626721 - RNA, 19 nt, Homo sapiens
  misc_RNA (1)...(19): siRNA sense strand
gggaauccaaugacaccaa

SEQ ID NO: 2626722 - RNA, 19 nt, Homo sapiens
  misc_RNA (1)...(19): siRNA sense strand
gaaccauguuugugagcag

SEQ ID NO: 2626723 - RNA, 19 nt, Homo sapiens
  misc_RNA (1)...(19): siRNA sense strand
uggaauaucaaaagcagaa

SEQ ID NO: 2626724 - RNA, 19 nt, Homo sapiens
  misc_RNA (1)...(19): siRNA sense strand
agaaaacaccugaaaucaa

SEQ ID NO: 2626725 - RNA, 19 nt, Homo sapiens
  misc_RNA (1)...(19): siRNA sense strand
aaacaaaagaagucacaga

SEQ ID NO: 2626726 - RNA, 19 nt, Homo sapiens
  misc_RNA (1)...(19): siRNA sense strand
cuggaugaaucuguggaaa

SEQ ID NO: 2626727 - RNA, 19 nt, Homo sapiens
  misc_RNA (1)...(19): siRNA sense strand
aaggugaagaagaagaaga

SEQ ID NO: 2626728 - RNA, 19 nt, Homo sapiens
  misc_RNA (1)...(19): siRNA sense strand
agguauugguuuugggacu

SEQ ID NO: 2626729 - RNA, 19 nt, Homo sapiens
  misc_RNA (1)...(19): siRNA sense strand
aaaagaagucacagauaga

SEQ ID NO: 2626730 - RNA, 19 nt, Homo sapiens
  misc_RNA (1)...(19): siRNA sense strand
cugcaacauuuauaaggau

SEQ ID NO: 2626731 - RNA, 19 nt, Homo sapiens
  misc_RNA (1)...(19): siRNA sense strand
cguuauugcaacaggcuaa

SEQ ID NO: 2626732 - RNA, 19 nt, Homo sapiens
  misc_RNA (1)...(19): siRNA sense strand
gcgaccaguacgugaaaga

SEQ ID NO: 2626733 - RNA, 19 nt, Homo sapiens
  misc_RNA (1)...(19): siRNA sense strand
cugacgaggcacagcguuu

SEQ ID NO: 2626734 - RNA, 19 nt, Homo sapiens
  misc_RNA (1)...(19): siRNA sense strand
ugcaagaaugggaggugua

SEQ ID NO: 2626735 - RNA, 19 nt, Homo sapiens
  misc_RNA (1)...(19): siRNA sense strand
gugaugaacaaauuggaca

SEQ ID NO: 2626736 - RNA, 19 nt, Homo sapiens
  misc_RNA (1)...(19): siRNA sense strand
gaaagacgaauuuaggaga

SEQ ID NO: 2626737 - RNA, 19 nt, Homo sapiens
  misc_RNA (1)...(19): siRNA sense strand
acauaagaccguugguucu

SEQ ID NO: 2626738 - RNA, 19 nt, Homo sapiens
  misc_RNA (1)...(19): siRNA sense strand
uugcaacaggcuaacgaaa

SEQ ID NO: 2626739 - RNA, 19 nt, Homo sapiens
  misc_RNA (1)...(19): siRNA sense strand
gcuaacgaaaacagacaaa

SEQ ID NO: 2626740 - RNA, 19 nt, Homo sapiens
  misc_RNA (1)...(19): siRNA sense strand
caaagaaagaugagcaaaa

SEQ ID NO: 2626741 - RNA, 19 nt, Homo sapiens
  misc_RNA (1)...(19): siRNA sense strand
auauaaggacccugggaaa

SEQ ID NO: 2626742 - RNA, 19 nt, Homo sapiens
  misc_RNA (1)...(19): siRNA sense strand
acagaaagcaauugugaau

SEQ ID NO: 2626743 - RNA, 19 nt, Homo sapiens
  misc_RNA (1)...(19): siRNA sense strand
augcagugaaugugggaaa

SEQ ID NO: 2626744 - RNA, 19 nt, Homo sapiens
  misc_RNA (1)...(19): siRNA sense strand
gcacaaagaaagaugagca

SEQ ID NO: 2626745 - RNA, 19 nt, Homo sapiens
  misc_RNA (1)...(19): siRNA sense strand
acagaaaguuugaagcuga

SEQ ID NO: 2626746 - RNA, 19 nt, Homo sapiens
  misc_RNA (1)...(19): siRNA sense strand
agaacucacaguagagaaa

SEQ ID NO: 2626747 - RNA, 19 nt, Homo sapiens
  misc_RNA (1)...(19): siRNA sense strand
ccucauuauacaucagaaa

SEQ ID NO: 2626748 - RNA, 19 nt, Homo sapiens
  misc_RNA (1)...(19): siRNA sense strand
ccuuacaaaugcagugaau

SEQ ID NO: 2626749 - RNA, 19 nt, Homo sapiens
  misc_RNA (1)...(19): siRNA sense strand
gaaugaaagcaaugacaca

SEQ ID NO: 2626750 - RNA, 19 nt, Homo sapiens
  misc_RNA (1)...(19): siRNA sense strand
aauucauacuggagaaaga

SEQ ID NO: 2626751 - RNA, 19 nt, Homo sapiens
  misc_RNA (1)...(19): siRNA sense strand
acagaaacaaccucagaaa

SEQ ID NO: 2626752 - RNA, 19 nt, Homo sapiens
  misc_RNA (1)...(19): siRNA sense strand
ccuccaugaauguggcaaa

SEQ ID NO: 2626753 - RNA, 19 nt, Homo sapiens
  misc_RNA (1)...(19): siRNA sense strand
aauucauacuggugagaga

SEQ ID NO: 2626754 - RNA, 19 nt, Homo sapiens
  misc_RNA (1)...(19): siRNA sense strand
augcagugaaugcgggaaa

SEQ ID NO: 2626755 - RNA, 19 nt, Homo sapiens
  misc_RNA (1)...(19): siRNA sense strand
cauugaacacagaaagcaa

SEQ ID NO: 2626756 - RNA, 19 nt, Homo sapiens
  misc_RNA (1)...(19): siRNA sense strand
augcagugaauguggcaaa

SEQ ID NO: 2626757 - RNA, 19 nt, Homo sapiens
  misc_RNA (1)...(19): siRNA sense strand
cacaaagaaagaugagcaa

SEQ ID NO: 2626758 - RNA, 19 nt, Homo sapiens
  misc_RNA (1)...(19): siRNA sense strand
gugggaaaucguucaguaa

SEQ ID NO: 2626759 - RNA, 19 nt, Homo sapiens
  misc_RNA (1)...(19): siRNA sense strand
ggauaugguaggugaguuc

SEQ ID NO: 2626760 - RNA, 19 nt, Homo sapiens
  misc_RNA (1)...(19): siRNA sense strand
gggaaagccuucaaccaga

SEQ ID NO: 2626761 - RNA, 19 nt, Homo sapiens
  misc_RNA (1)...(19): siRNA sense strand
augccuugacugugggaaa

SEQ ID NO: 2626762 - RNA, 19 nt, Homo sapiens
  misc_RNA (1)...(19): siRNA sense strand
gugaacggucagaaugaaa

SEQ ID NO: 2626763 - RNA, 19 nt, Homo sapiens
  misc_RNA (1)...(19): siRNA sense strand
cgaauucacacgggagaaa

SEQ ID NO: 2626764 - RNA, 19 nt, Homo sapiens
  misc_RNA (1)...(19): siRNA sense strand
augcaguuauucugugaaa

SEQ ID NO: 2626765 - RNA, 19 nt, Homo sapiens
  misc_RNA (1)...(19): siRNA sense strand
ggauggaucuugcgaggca

SEQ ID NO: 2626766 - RNA, 19 nt, Homo sapiens
  misc_RNA (1)...(19): siRNA sense strand
ccaaacaacucauaccaga

SEQ ID NO: 2626767 - RNA, 19 nt, Homo sapiens
  misc_RNA (1)...(19): siRNA sense strand
agaaagggaguuugggcuu

SEQ ID NO: 2626768 - RNA, 19 nt, Homo sapiens
  misc_RNA (1)...(19): siRNA sense strand
agaagugaacggucagaau

SEQ ID NO: 2626769 - RNA, 19 nt, Homo sapiens
  misc_RNA (1)...(19): siRNA sense strand
ccugaauauacaccagaaa

SEQ ID NO: 2626770 - RNA, 19 nt, Homo sapiens
  misc_RNA (1)...(19): siRNA sense strand
augugaugcuggagcucua

SEQ ID NO: 2626771 - RNA, 19 nt, Homo sapiens
  misc_RNA (1)...(19): siRNA sense strand
ggugagagacaguaugcau

SEQ ID NO: 2626772 - RNA, 19 nt, Homo sapiens
  misc_RNA (1)...(19): siRNA sense strand
ccuuaugaaugcagugacu

SEQ ID NO: 2626773 - RNA, 19 nt, Homo sapiens
  misc_RNA (1)...(19): siRNA sense strand
agaagaaaccagauggaug

SEQ ID NO: 2626774 - RNA, 19 nt, Homo sapiens
  misc_RNA (1)...(19): siRNA sense strand
caacuaaaacucaguguau

SEQ ID NO: 2626775 - RNA, 19 nt, Homo sapiens
  misc_RNA (1)...(19): siRNA sense strand
ccuuauguguguucugaau

SEQ ID NO: 2626776 - RNA, 19 nt, Homo sapiens
  misc_RNA (1)...(19): siRNA sense strand
cagagaagcaggauggauc

SEQ ID NO: 2626777 - RNA, 19 nt, Homo sapiens
  misc_RNA (1)...(19): siRNA sense strand
cggucagaaugaaagcaau

SEQ ID NO: 2626778 - RNA, 19 nt, Homo sapiens
  misc_RNA (1)...(19): siRNA sense strand
cagaauugcuuacgcacca

SEQ ID NO: 2626779 - RNA, 19 nt, Homo sapiens
  misc_RNA (1)...(19): siRNA sense strand
uauucauacaggagagaca

SEQ ID NO: 2626780 - RNA, 19 nt, Homo sapiens
  misc_RNA (1)...(19): siRNA sense strand
ccacaaaaggagauuucua

SEQ ID NO: 2626781 - RNA, 19 nt, Homo sapiens
  misc_RNA (1)...(19): siRNA sense strand
cagaacagcuugaugacgu

SEQ ID NO: 2626782 - RNA, 19 nt, Homo sapiens
  misc_RNA (1)...(19): siRNA sense strand
cucuaugaaugcagugaau

SEQ ID NO: 2626783 - RNA, 19 nt, Homo sapiens
  misc_RNA (1)...(19): siRNA sense strand
cuaugaaugcagugaaugu

SEQ ID NO: 2626784 - RNA, 19 nt, Homo sapiens
  misc_RNA (1)...(19): siRNA sense strand
agagaugguucaugguguu

SEQ ID NO: 2626785 - RNA, 19 nt, Homo sapiens
  misc_RNA (1)...(19): siRNA sense strand
cuauaaaugccaugacugu

SEQ ID NO: 2626786 - RNA, 19 nt, Homo sapiens
  misc_RNA (1)...(19): siRNA sense strand
ucagcaugcaucagagaau

SEQ ID NO: 2626787 - RNA, 19 nt, Homo sapiens
  misc_RNA (1)...(19): siRNA sense strand
cagaaacaaccucagaaau

SEQ ID NO: 2626788 - RNA, 19 nt, Homo sapiens
  misc_RNA (1)...(19): siRNA sense strand
ggucagaaugaaagcaaug

SEQ ID NO: 2626789 - RNA, 19 nt, Homo sapiens
  misc_RNA (1)...(19): siRNA sense strand
guucacaagagaugguuca

SEQ ID NO: 2626790 - RNA, 19 nt, Homo sapiens
  misc_RNA (1)...(19): siRNA sense strand
accuagaagugaacgguca

SEQ ID NO: 2626791 - RNA, 19 nt, Homo sapiens
  misc_RNA (1)...(19): siRNA sense strand
cagaaugaaagcaaugaca

SEQ ID NO: 2626792 - RNA, 19 nt, Homo sapiens
  misc_RNA (1)...(19): siRNA sense strand
gagcagaacuugagugugg

SEQ ID NO: 2626793 - RNA, 19 nt, Homo sapiens
  misc_RNA (1)...(19): siRNA sense strand
augacaacuuccaggauga

SEQ ID NO: 2626794 - RNA, 19 nt, Homo sapiens
  misc_RNA (1)...(19): siRNA sense strand
uguuggaggagcagaacuu

SEQ ID NO: 2626795 - RNA, 19 nt, Homo sapiens
  misc_RNA (1)...(19): siRNA sense strand
uauaaaugcaugugggaaa

SEQ ID NO: 2626796 - RNA, 19 nt, Homo sapiens
  misc_RNA (1)...(19): siRNA sense strand
cuacaaacaccgagggaga

SEQ ID NO: 2626797 - RNA, 19 nt, Homo sapiens
  misc_RNA (1)...(19): siRNA sense strand
guguaagcaaugugggaaa

SEQ ID NO: 2626798 - RNA, 19 nt, Homo sapiens
  misc_RNA (1)...(19): siRNA sense strand
auguaagguaugugggaaa

SEQ ID NO: 2626799 - RNA, 19 nt, Homo sapiens
  misc_RNA (1)...(19): siRNA sense strand
auguaagguaugugggaaa

SEQ ID NO: 2626800 - RNA, 19 nt, Homo sapiens
  misc_RNA (1)...(19): siRNA sense strand
uugcaaggaaugugggaaa

SEQ ID NO: 2626801 - RNA, 19 nt, Homo sapiens
  misc_RNA (1)...(19): siRNA sense strand
agagaugugaugugggaaa

SEQ ID NO: 2626802 - RNA, 19 nt, Homo sapiens
  misc_RNA (1)...(19): siRNA sense strand
aagucacacuggagagaaa

SEQ ID NO: 2626803 - RNA, 19 nt, Homo sapiens
  misc_RNA (1)...(19): siRNA sense strand
ccauauaaauguaaggugu

SEQ ID NO: 2626804 - RNA, 19 nt, Homo sapiens
  misc_RNA (1)...(19): siRNA sense strand
auguaaggugugugggaaa

SEQ ID NO: 2626805 - RNA, 19 nt, Homo sapiens
  misc_RNA (1)...(19): siRNA sense strand
aacccauacuggagagaaa

SEQ ID NO: 2626806 - RNA, 19 nt, Homo sapiens
  misc_RNA (1)...(19): siRNA sense strand
aacucauacuggagagaaa

SEQ ID NO: 2626807 - RNA, 19 nt, Homo sapiens
  misc_RNA (1)...(19): siRNA sense strand
cuuucgaacacaugagaua

SEQ ID NO: 2626808 - RNA, 19 nt, Homo sapiens
  misc_RNA (1)...(19): siRNA sense strand
auguaagcgaugugguaaa

SEQ ID NO: 2626809 - RNA, 19 nt, Homo sapiens
  misc_RNA (1)...(19): siRNA sense strand
auguaagcaaugugguaaa

SEQ ID NO: 2626810 - RNA, 19 nt, Homo sapiens
  misc_RNA (1)...(19): siRNA sense strand
acucuaugauuguaaggaa

SEQ ID NO: 2626811 - RNA, 19 nt, Homo sapiens
  misc_RNA (1)...(19): siRNA sense strand
caucacacacaguggauau

SEQ ID NO: 2626812 - RNA, 19 nt, Homo sapiens
  misc_RNA (1)...(19): siRNA sense strand
ccaaguaugcgaagacaca

SEQ ID NO: 2626813 - RNA, 19 nt, Homo sapiens
  misc_RNA (1)...(19): siRNA sense strand
uagucagcguggaggaauu

SEQ ID NO: 2626814 - RNA, 19 nt, Homo sapiens
  misc_RNA (1)...(19): siRNA sense strand
ucaaauacaugaaaggacu

SEQ ID NO: 2626815 - RNA, 19 nt, Homo sapiens
  misc_RNA (1)...(19): siRNA sense strand
aacucacacuggagagaaa

SEQ ID NO: 2626816 - RNA, 19 nt, Homo sapiens
  misc_RNA (1)...(19): siRNA sense strand
caguagauuucgaacacau

SEQ ID NO: 2626817 - RNA, 19 nt, Homo sapiens
  misc_RNA (1)...(19): siRNA sense strand
ugauaaagcacacuggaga

SEQ ID NO: 2626818 - RNA, 19 nt, Homo sapiens
  misc_RNA (1)...(19): siRNA sense strand
augcgaagacacaugauaa

SEQ ID NO: 2626819 - RNA, 19 nt, Homo sapiens
  misc_RNA (1)...(19): siRNA sense strand
agggagaaaucuaagaagu

SEQ ID NO: 2626820 - RNA, 19 nt, Homo sapiens
  misc_RNA (1)...(19): siRNA sense strand
uuguaaggaauguggaaaa

SEQ ID NO: 2626821 - RNA, 19 nt, Homo sapiens
  misc_RNA (1)...(19): siRNA sense strand
gauaaagcacacuggagau

SEQ ID NO: 2626822 - RNA, 19 nt, Homo sapiens
  misc_RNA (1)...(19): siRNA sense strand
aaauguaagcaauguggua

SEQ ID NO: 2626823 - RNA, 19 nt, Homo sapiens
  misc_RNA (1)...(19): siRNA sense strand
gauuguaaggaauguggaa

SEQ ID NO: 2626824 - RNA, 19 nt, Homo sapiens
  misc_RNA (1)...(19): siRNA sense strand
gugccagcuuucagagaca

SEQ ID NO: 2626825 - RNA, 19 nt, Homo sapiens
  misc_RNA (1)...(19): siRNA sense strand
acaaacaccgagggagaaa

SEQ ID NO: 2626826 - RNA, 19 nt, Homo sapiens
  misc_RNA (1)...(19): siRNA sense strand
aagaauucacacuggagaa

SEQ ID NO: 2626827 - RNA, 19 nt, Homo sapiens
  misc_RNA (1)...(19): siRNA sense strand
ugggaaaccaugaggaauc

SEQ ID NO: 2626828 - RNA, 19 nt, Homo sapiens
  misc_RNA (1)...(19): siRNA sense strand
caaagaucacaguggacau

SEQ ID NO: 2626829 - RNA, 19 nt, Homo sapiens
  misc_RNA (1)...(19): siRNA sense strand
cucuaugauuguaaggaau

SEQ ID NO: 2626830 - RNA, 19 nt, Homo sapiens
  misc_RNA (1)...(19): siRNA sense strand
uuucagagacacauguuaa

SEQ ID NO: 2626831 - RNA, 19 nt, Homo sapiens
  misc_RNA (1)...(19): siRNA sense strand
cuuacgaauacaugaaaga

SEQ ID NO: 2626832 - RNA, 19 nt, Homo sapiens
  misc_RNA (1)...(19): siRNA sense strand
cccuaugaguguaagcaau

SEQ ID NO: 2626833 - RNA, 19 nt, Homo sapiens
  misc_RNA (1)...(19): siRNA sense strand
gagaaaucuaagaagucau

SEQ ID NO: 2626834 - RNA, 19 nt, Homo sapiens
  misc_RNA (1)...(19): siRNA sense strand
gggagaaaucuaagaaguc

SEQ ID NO: 2626835 - RNA, 19 nt, Homo sapiens
  misc_RNA (1)...(19): siRNA sense strand
ugcgaagacacaugauaaa

SEQ ID NO: 2626836 - RNA, 19 nt, Homo sapiens
  misc_RNA (1)...(19): siRNA sense strand
gagaagucagcauggguca

SEQ ID NO: 2626837 - RNA, 19 nt, Homo sapiens
  misc_RNA (1)...(19): siRNA sense strand
caucaaagaucacagugga

SEQ ID NO: 2626838 - RNA, 19 nt, Homo sapiens
  misc_RNA (1)...(19): siRNA sense strand
ugaaagaacucauacugga

SEQ ID NO: 2626839 - RNA, 19 nt, Homo sapiens
  misc_RNA (1)...(19): siRNA sense strand
acaccgagggagaaaucua

SEQ ID NO: 2626840 - RNA, 19 nt, Homo sapiens
  misc_RNA (1)...(19): siRNA sense strand
aggauguagaugugaacuu

SEQ ID NO: 2626841 - RNA, 19 nt, Homo sapiens
  misc_RNA (1)...(19): siRNA sense strand
aauggaaggaccagaacau

SEQ ID NO: 2626842 - RNA, 19 nt, Homo sapiens
  misc_RNA (1)...(19): siRNA sense strand
ugugggaaaccaugaggaa

SEQ ID NO: 2626843 - RNA, 19 nt, Homo sapiens
  misc_RNA (1)...(19): siRNA sense strand
uggagauggaccuuauaaa

SEQ ID NO: 2626844 - RNA, 19 nt, Homo sapiens
  misc_RNA (1)...(19): siRNA sense strand
ugccaguaccuuucaaaua

SEQ ID NO: 2626845 - RNA, 19 nt, Homo sapiens
  misc_RNA (1)...(19): siRNA sense strand
agaaacccuaugaguguaa

SEQ ID NO: 2626846 - RNA, 19 nt, Homo sapiens
  misc_RNA (1)...(19): siRNA sense strand
ggaaugugggaaagccuau

SEQ ID NO: 2626847 - RNA, 19 nt, Homo sapiens
  misc_RNA (1)...(19): siRNA sense strand
ggaccagaacauuaaagau

SEQ ID NO: 2626848 - RNA, 19 nt, Homo sapiens
  misc_RNA (1)...(19): siRNA sense strand
ccuuaauagacacaucaaa

SEQ ID NO: 2626849 - RNA, 19 nt, Homo sapiens
  misc_RNA (1)...(19): siRNA sense strand
cccuuuaaauguaagcaau

SEQ ID NO: 2626850 - RNA, 19 nt, Homo sapiens
  misc_RNA (1)...(19): siRNA sense strand
ggggaaaagggaagugaaa

SEQ ID NO: 2626851 - RNA, 19 nt, Homo sapiens
  misc_RNA (1)...(19): siRNA sense strand
uacacauacuggagagaaa

SEQ ID NO: 2626852 - RNA, 19 nt, Homo sapiens
  misc_RNA (1)...(19): siRNA sense strand
aacucauacuggagagaaa

SEQ ID NO: 2626853 - RNA, 19 nt, Homo sapiens
  misc_RNA (1)...(19): siRNA sense strand
auguaaggaauguggcaaa

SEQ ID NO: 2626854 - RNA, 19 nt, Homo sapiens
  misc_RNA (1)...(19): siRNA sense strand
ccguaugaauguaaugaau

SEQ ID NO: 2626855 - RNA, 19 nt, Homo sapiens
  misc_RNA (1)...(19): siRNA sense strand
cuuauuggagcaagggaaa

SEQ ID NO: 2626856 - RNA, 19 nt, Homo sapiens
  misc_RNA (1)...(19): siRNA sense strand
agucaaguggugagaucaa

SEQ ID NO: 2626857 - RNA, 19 nt, Homo sapiens
  misc_RNA (1)...(19): siRNA sense strand
caguauuugaucauggaaa

SEQ ID NO: 2626858 - RNA, 19 nt, Homo sapiens
  misc_RNA (1)...(19): siRNA sense strand
auguaggaaaugugguaaa

SEQ ID NO: 2626859 - RNA, 19 nt, Homo sapiens
  misc_RNA (1)...(19): siRNA sense strand
gcucuaugaaugugaugaa

SEQ ID NO: 2626860 - RNA, 19 nt, Homo sapiens
  misc_RNA (1)...(19): siRNA sense strand
acugagaugcugcaagaaa

SEQ ID NO: 2626861 - RNA, 19 nt, Homo sapiens
  misc_RNA (1)...(19): siRNA sense strand
ggaaaagggaagugaaaag

SEQ ID NO: 2626862 - RNA, 19 nt, Homo sapiens
  misc_RNA (1)...(19): siRNA sense strand
gcucagaacucauucgcca

SEQ ID NO: 2626863 - RNA, 19 nt, Homo sapiens
  misc_RNA (1)...(19): siRNA sense strand
ccuuaugaaugcauugaau

SEQ ID NO: 2626864 - RNA, 19 nt, Homo sapiens
  misc_RNA (1)...(19): siRNA sense strand
cugagaugcugcaagaaaa

SEQ ID NO: 2626865 - RNA, 19 nt, Homo sapiens
  misc_RNA (1)...(19): siRNA sense strand
ggagaaaagcucuaugaau

SEQ ID NO: 2626866 - RNA, 19 nt, Homo sapiens
  misc_RNA (1)...(19): siRNA sense strand
gaauguacugaguguggaa

SEQ ID NO: 2626867 - RNA, 19 nt, Homo sapiens
  misc_RNA (1)...(19): siRNA sense strand
augugaugaaugugguaaa

SEQ ID NO: 2626868 - RNA, 19 nt, Homo sapiens
  misc_RNA (1)...(19): siRNA sense strand
gcuggaaaugcaaggauca

SEQ ID NO: 2626869 - RNA, 19 nt, Homo sapiens
  misc_RNA (1)...(19): siRNA sense strand
ggcaaaaccuuuagccaga

SEQ ID NO: 2626870 - RNA, 19 nt, Homo sapiens
  misc_RNA (1)...(19): siRNA sense strand
aggaaaugugguaaagcau

SEQ ID NO: 2626871 - RNA, 19 nt, Homo sapiens
  misc_RNA (1)...(19): siRNA sense strand
gggaaaagggaagugaaaa

SEQ ID NO: 2626872 - RNA, 19 nt, Homo sapiens
  misc_RNA (1)...(19): siRNA sense strand
gauaaagccuucagccgga

SEQ ID NO: 2626873 - RNA, 19 nt, Homo sapiens
  misc_RNA (1)...(19): siRNA sense strand
uuuaaaggaggcuggaaau

SEQ ID NO: 2626874 - RNA, 19 nt, Homo sapiens
  misc_RNA (1)...(19): siRNA sense strand
guauguaagguaugcaaca

SEQ ID NO: 2626875 - RNA, 19 nt, Homo sapiens
  misc_RNA (1)...(19): siRNA sense strand
aagucaaggcccuguguau

SEQ ID NO: 2626876 - RNA, 19 nt, Homo sapiens
  misc_RNA (1)...(19): siRNA sense strand
ccuuauuaaacaucagaga

SEQ ID NO: 2626877 - RNA, 19 nt, Homo sapiens
  misc_RNA (1)...(19): siRNA sense strand
cagccugcucaaagagauu

SEQ ID NO: 2626878 - RNA, 19 nt, Homo sapiens
  misc_RNA (1)...(19): siRNA sense strand
ucacauaggaaagaaacaa

SEQ ID NO: 2626879 - RNA, 19 nt, Homo sapiens
  misc_RNA (1)...(19): siRNA sense strand
auauguaggaaauguggua

SEQ ID NO: 2626880 - RNA, 19 nt, Homo sapiens
  misc_RNA (1)...(19): siRNA sense strand
uuuuaaaggaggcuggaaa

SEQ ID NO: 2626881 - RNA, 19 nt, Homo sapiens
  misc_RNA (1)...(19): siRNA sense strand
ugaaacaccaaaugauaca

SEQ ID NO: 2626882 - RNA, 19 nt, Homo sapiens
  misc_RNA (1)...(19): siRNA sense strand
auguaagguaugcaacaaa

SEQ ID NO: 2626883 - RNA, 19 nt, Homo sapiens
  misc_RNA (1)...(19): siRNA sense strand
gugugcugaaugugauaaa

SEQ ID NO: 2626884 - RNA, 19 nt, Homo sapiens
  misc_RNA (1)...(19): siRNA sense strand
cccuauguauguaagguau

SEQ ID NO: 2626885 - RNA, 19 nt, Homo sapiens
  misc_RNA (1)...(19): siRNA sense strand
gcuaaacaucagaggacac

SEQ ID NO: 2626886 - RNA, 19 nt, Homo sapiens
  misc_RNA (1)...(19): siRNA sense strand
gggauguauuaggaaagua

SEQ ID NO: 2626887 - RNA, 19 nt, Homo sapiens
  misc_RNA (1)...(19): siRNA sense strand
ggggagaaaccuuaugaau

SEQ ID NO: 2626888 - RNA, 19 nt, Homo sapiens
  misc_RNA (1)...(19): siRNA sense strand
ccuuaugaauguacugagu

SEQ ID NO: 2626889 - RNA, 19 nt, Homo sapiens
  misc_RNA (1)...(19): siRNA sense strand
ugguauugcugcagggagu

SEQ ID NO: 2626890 - RNA, 19 nt, Homo sapiens
  misc_RNA (1)...(19): siRNA sense strand
guggagauguggaagcaga

SEQ ID NO: 2626891 - RNA, 19 nt, Homo sapiens
  misc_RNA (1)...(19): siRNA sense strand
ccagggugacagagccaaa

SEQ ID NO: 2626892 - RNA, 19 nt, Homo sapiens
  misc_RNA (1)...(19): siRNA sense strand
gagcaaguuggacgggcaa

SEQ ID NO: 2626893 - RNA, 19 nt, Homo sapiens
  misc_RNA (1)...(19): siRNA sense strand
caacacugguggaggagcu

SEQ ID NO: 2626894 - RNA, 19 nt, Homo sapiens
  misc_RNA (1)...(19): siRNA sense strand
ucgcaguggagauguggaa

SEQ ID NO: 2626895 - RNA, 19 nt, Homo sapiens
  misc_RNA (1)...(19): siRNA sense strand
caggcagagcugauggaau

SEQ ID NO: 2626896 - RNA, 19 nt, Homo sapiens
  misc_RNA (1)...(19): siRNA sense strand
gaggcaaguggcaggcaau

SEQ ID NO: 2626897 - RNA, 19 nt, Homo sapiens
  misc_RNA (1)...(19): siRNA sense strand
ucugcaggguggaggacuu

SEQ ID NO: 2626898 - RNA, 19 nt, Homo sapiens
  misc_RNA (1)...(19): siRNA sense strand
uggaugugcuagaggcagu

SEQ ID NO: 2626899 - RNA, 19 nt, Homo sapiens
  misc_RNA (1)...(19): siRNA sense strand
augagaaccuggagaagcu

SEQ ID NO: 2626900 - RNA, 19 nt, Homo sapiens
  misc_RNA (1)...(19): siRNA sense strand
ugccagaaugagugguauu

SEQ ID NO: 2626901 - RNA, 19 nt, Homo sapiens
  misc_RNA (1)...(19): siRNA sense strand
cuguacaaccugcugcuaa

SEQ ID NO: 2626902 - RNA, 19 nt, Homo sapiens
  misc_RNA (1)...(19): siRNA sense strand
agaggcaaguggcaggcaa

SEQ ID NO: 2626903 - RNA, 19 nt, Homo sapiens
  misc_RNA (1)...(19): siRNA sense strand
gaauggaaguggaugcaga

SEQ ID NO: 2626904 - RNA, 19 nt, Homo sapiens
  misc_RNA (1)...(19): siRNA sense strand
uaguggaagaggaggagaa

SEQ ID NO: 2626905 - RNA, 19 nt, Homo sapiens
  misc_RNA (1)...(19): siRNA sense strand
gugcuaagauauuugccua

SEQ ID NO: 2626906 - RNA, 19 nt, Homo sapiens
  misc_RNA (1)...(19): siRNA sense strand
aaguggaugcagauggaaa

SEQ ID NO: 2626907 - RNA, 19 nt, Homo sapiens
  misc_RNA (1)...(19): siRNA sense strand
gggauguaguggaagagga

SEQ ID NO: 2626908 - RNA, 19 nt, Homo sapiens
  misc_RNA (1)...(19): siRNA sense strand
uggaagaggaggagaacuc

SEQ ID NO: 2626909 - RNA, 19 nt, Homo sapiens
  misc_RNA (1)...(19): siRNA sense strand
aagaagcacugucgggaga

SEQ ID NO: 2626910 - RNA, 19 nt, Homo sapiens
  misc_RNA (1)...(19): siRNA sense strand
gaggagaacucuugcaccu

SEQ ID NO: 2626911 - RNA, 19 nt, Homo sapiens
  misc_RNA (1)...(19): siRNA sense strand
uggacaaucgccuggacaa

SEQ ID NO: 2626912 - RNA, 19 nt, Homo sapiens
  misc_RNA (1)...(19): siRNA sense strand
agcaugagcuugagccaga

SEQ ID NO: 2626913 - RNA, 19 nt, Homo sapiens
  misc_RNA (1)...(19): siRNA sense strand
aguggaugcagauggaaau

SEQ ID NO: 2626914 - RNA, 19 nt, Homo sapiens
  misc_RNA (1)...(19): siRNA sense strand
ccgacuucaaauuggguau

SEQ ID NO: 2626915 - RNA, 19 nt, Homo sapiens
  misc_RNA (1)...(19): siRNA sense strand
aggaaggggcucugggaga

SEQ ID NO: 2626916 - RNA, 19 nt, Homo sapiens
  misc_RNA (1)...(19): siRNA sense strand
cagcaagcagagggagcaa

SEQ ID NO: 2626917 - RNA, 19 nt, Homo sapiens
  misc_RNA (1)...(19): siRNA sense strand
cuuugaggcccgaauggaa

SEQ ID NO: 2626918 - RNA, 19 nt, Homo sapiens
  misc_RNA (1)...(19): siRNA sense strand
auguaguggaagaggagga

SEQ ID NO: 2626919 - RNA, 19 nt, Homo sapiens
  misc_RNA (1)...(19): siRNA sense strand
gaaggagagacgucggcua

SEQ ID NO: 2626920 - RNA, 19 nt, Homo sapiens
  misc_RNA (1)...(19): siRNA sense strand
agggcagaguauuuaggaa

SEQ ID NO: 2626921 - RNA, 19 nt, Homo sapiens
  misc_RNA (1)...(19): siRNA sense strand
agacuagcaucgaaaggca

SEQ ID NO: 2626922 - RNA, 19 nt, Homo sapiens
  misc_RNA (1)...(19): siRNA sense strand
uggacaacuggaagguauu

SEQ ID NO: 2626923 - RNA, 19 nt, Homo sapiens
  misc_RNA (1)...(19): siRNA sense strand
gaaggagagacgucggcua

SEQ ID NO: 2626924 - RNA, 19 nt, Homo sapiens
  misc_RNA (1)...(19): siRNA sense strand
agggcagaguauuuaggaa

SEQ ID NO: 2626925 - RNA, 19 nt, Homo sapiens
  misc_RNA (1)...(19): siRNA sense strand
agacuagcaucgaaaggca

SEQ ID NO: 2626926 - RNA, 19 nt, Homo sapiens
  misc_RNA (1)...(19): siRNA sense strand
uggacaacuggaagguauu

SEQ ID NO: 2626927 - RNA, 19 nt, Homo sapiens
  misc_RNA (1)...(19): siRNA sense strand
gaaggagagacgucggcua

SEQ ID NO: 2626928 - RNA, 19 nt, Homo sapiens
  misc_RNA (1)...(19): siRNA sense strand
agggcagaguauuuaggaa

SEQ ID NO: 2626929 - RNA, 19 nt, Homo sapiens
  misc_RNA (1)...(19): siRNA sense strand
agacuagcaucgaaaggca

SEQ ID NO: 2626930 - RNA, 19 nt, Homo sapiens
  misc_RNA (1)...(19): siRNA sense strand
uggacaacuggaagguauu

SEQ ID NO: 2626931 - RNA, 19 nt, Homo sapiens
  misc_RNA (1)...(19): siRNA sense strand
gaaggagagacgucggcua

SEQ ID NO: 2626932 - RNA, 19 nt, Homo sapiens
  misc_RNA (1)...(19): siRNA sense strand
agggcagaguauuuaggaa

SEQ ID NO: 2626933 - RNA, 19 nt, Homo sapiens
  misc_RNA (1)...(19): siRNA sense strand
agacuagcaucgaaaggca

SEQ ID NO: 2626934 - RNA, 19 nt, Homo sapiens
  misc_RNA (1)...(19): siRNA sense strand
uggacaacuggaagguauu

SEQ ID NO: 2626935 - RNA, 19 nt, Homo sapiens
  misc_RNA (1)...(19): siRNA sense strand
gaaggagagacgucggcua

SEQ ID NO: 2626936 - RNA, 19 nt, Homo sapiens
  misc_RNA (1)...(19): siRNA sense strand
agggcagaguauuuaggaa

SEQ ID NO: 2626937 - RNA, 19 nt, Homo sapiens
  misc_RNA (1)...(19): siRNA sense strand
agacuagcaucgaaaggca

SEQ ID NO: 2626938 - RNA, 19 nt, Homo sapiens
  misc_RNA (1)...(19): siRNA sense strand
uggacaacuggaagguauu

SEQ ID NO: 2626939 - RNA, 19 nt, Homo sapiens
  misc_RNA (1)...(19): siRNA sense strand
cgugaggauauuaaagaaa

SEQ ID NO: 2626940 - RNA, 19 nt, Homo sapiens
  misc_RNA (1)...(19): siRNA sense strand
uuggagaagaugaaggaua

SEQ ID NO: 2626941 - RNA, 19 nt, Homo sapiens
  misc_RNA (1)...(19): siRNA sense strand
ugaagaagaggaugagaau

SEQ ID NO: 2626942 - RNA, 19 nt, Homo sapiens
  misc_RNA (1)...(19): siRNA sense strand
ucgaaaacauucugacaaa

SEQ ID NO: 2626943 - RNA, 19 nt, Homo sapiens
  misc_RNA (1)...(19): siRNA sense strand
ugacaaaauaggugaaaca

SEQ ID NO: 2626944 - RNA, 19 nt, Homo sapiens
  misc_RNA (1)...(19): siRNA sense strand
ccagaggaaaggaaugaaa

SEQ ID NO: 2626945 - RNA, 19 nt, Homo sapiens
  misc_RNA (1)...(19): siRNA sense strand
gugaaacagcugagaaguu

SEQ ID NO: 2626946 - RNA, 19 nt, Homo sapiens
  misc_RNA (1)...(19): siRNA sense strand
augaaacaguugauggcua

SEQ ID NO: 2626947 - RNA, 19 nt, Homo sapiens
  misc_RNA (1)...(19): siRNA sense strand
aggugaaacagcaaugaaa

SEQ ID NO: 2626948 - RNA, 19 nt, Homo sapiens
  misc_RNA (1)...(19): siRNA sense strand
caaagaaagaaacaagcaa

SEQ ID NO: 2626949 - RNA, 19 nt, Homo sapiens
  misc_RNA (1)...(19): siRNA sense strand
uggaacaauuagagaaugu

SEQ ID NO: 2626950 - RNA, 19 nt, Homo sapiens
  misc_RNA (1)...(19): siRNA sense strand
ggaaaguauucgaaaacau

SEQ ID NO: 2626951 - RNA, 19 nt, Homo sapiens
  misc_RNA (1)...(19): siRNA sense strand
gugaaacagcaaugaaaca

SEQ ID NO: 2626952 - RNA, 19 nt, Homo sapiens
  misc_RNA (1)...(19): siRNA sense strand
uugaagaagaggaugagaa

SEQ ID NO: 2626953 - RNA, 19 nt, Homo sapiens
  misc_RNA (1)...(19): siRNA sense strand
cuacaagacuuuauggacu

SEQ ID NO: 2626954 - RNA, 19 nt, Homo sapiens
  misc_RNA (1)...(19): siRNA sense strand
cguaaucaugacaaggaaa

SEQ ID NO: 2626955 - RNA, 19 nt, Homo sapiens
  misc_RNA (1)...(19): siRNA sense strand
ccuuaaauuuucagaguca

SEQ ID NO: 2626956 - RNA, 19 nt, Homo sapiens
  misc_RNA (1)...(19): siRNA sense strand
aagaaagaaacaagcaaga

SEQ ID NO: 2626957 - RNA, 19 nt, Homo sapiens
  misc_RNA (1)...(19): siRNA sense strand
ugggaaaguugcucagaca

SEQ ID NO: 2626958 - RNA, 19 nt, Homo sapiens
  misc_RNA (1)...(19): siRNA sense strand
gggcauacacugaugaacu

SEQ ID NO: 2626959 - RNA, 19 nt, Homo sapiens
  misc_RNA (1)...(19): siRNA sense strand
aggaagaaugaucgagaca

SEQ ID NO: 2626960 - RNA, 19 nt, Homo sapiens
  misc_RNA (1)...(19): siRNA sense strand
ccgugaggauauuaaagaa

SEQ ID NO: 2626961 - RNA, 19 nt, Homo sapiens
  misc_RNA (1)...(19): siRNA sense strand
acaaugaaacacugcuuaa

SEQ ID NO: 2626962 - RNA, 19 nt, Homo sapiens
  misc_RNA (1)...(19): siRNA sense strand
cagcaaugaaacaggcaca

SEQ ID NO: 2626963 - RNA, 19 nt, Homo sapiens
  misc_RNA (1)...(19): siRNA sense strand
aggaugagaaugaagaaga

SEQ ID NO: 2626964 - RNA, 19 nt, Homo sapiens
  misc_RNA (1)...(19): siRNA sense strand
ugaaacacugcuuaagaaa

SEQ ID NO: 2626965 - RNA, 19 nt, Homo sapiens
  misc_RNA (1)...(19): siRNA sense strand
gagccagauggaagagcua

SEQ ID NO: 2626966 - RNA, 19 nt, Homo sapiens
  misc_RNA (1)...(19): siRNA sense strand
ccaaacuccgugaggauau

SEQ ID NO: 2626967 - RNA, 19 nt, Homo sapiens
  misc_RNA (1)...(19): siRNA sense strand
uggagaagaugaaggauac

SEQ ID NO: 2626968 - RNA, 19 nt, Homo sapiens
  misc_RNA (1)...(19): siRNA sense strand
ugauagagacagucgugaa

SEQ ID NO: 2626969 - RNA, 19 nt, Homo sapiens
  misc_RNA (1)...(19): siRNA sense strand
acaaacagaaguugauaga

SEQ ID NO: 2626970 - RNA, 19 nt, Homo sapiens
  misc_RNA (1)...(19): siRNA sense strand
uagagacagucgugaaaca

SEQ ID NO: 2626971 - RNA, 19 nt, Homo sapiens
  misc_RNA (1)...(19): siRNA sense strand
ugaaacaggcacagcauca

SEQ ID NO: 2626972 - RNA, 19 nt, Homo sapiens
  misc_RNA (1)...(19): siRNA sense strand
guaaucaugacaaggaaau

SEQ ID NO: 2626973 - RNA, 19 nt, Homo sapiens
  misc_RNA (1)...(19): siRNA sense strand
gcugauuaugacuggacaa

SEQ ID NO: 2626974 - RNA, 19 nt, Homo sapiens
  misc_RNA (1)...(19): siRNA sense strand
agaccaauacaaugaaaca

SEQ ID NO: 2626975 - RNA, 19 nt, Homo sapiens
  misc_RNA (1)...(19): siRNA sense strand
agaacagaugagugccaaa

SEQ ID NO: 2626976 - RNA, 19 nt, Homo sapiens
  misc_RNA (1)...(19): siRNA sense strand
ccguaaucaugacaaggaa

SEQ ID NO: 2626977 - RNA, 19 nt, Homo sapiens
  misc_RNA (1)...(19): siRNA sense strand
agaaguugauagagacagu

SEQ ID NO: 2626978 - RNA, 19 nt, Homo sapiens
  misc_RNA (1)...(19): siRNA sense strand
ggaacauggcccucucaaa

SEQ ID NO: 2626979 - RNA, 19 nt, Homo sapiens
  misc_RNA (1)...(19): siRNA sense strand
ccggagcucaacagaaaua

SEQ ID NO: 2626980 - RNA, 19 nt, Homo sapiens
  misc_RNA (1)...(19): siRNA sense strand
cuauggaacaauuagagaa

SEQ ID NO: 2626981 - RNA, 19 nt, Homo sapiens
  misc_RNA (1)...(19): siRNA sense strand
ggacagugaguuaaaacaa

SEQ ID NO: 2626982 - RNA, 19 nt, Homo sapiens
  misc_RNA (1)...(19): siRNA sense strand
agauaucauucgauguaga

SEQ ID NO: 2626983 - RNA, 19 nt, Homo sapiens
  misc_RNA (1)...(19): siRNA sense strand
ugcagcagaaggagaaaua

SEQ ID NO: 2626984 - RNA, 19 nt, Homo sapiens
  misc_RNA (1)...(19): siRNA sense strand
agaugaaggauacuagcaa

SEQ ID NO: 2626985 - RNA, 19 nt, Homo sapiens
  misc_RNA (1)...(19): siRNA sense strand
ugucagcucaugauagaaa

SEQ ID NO: 2626986 - RNA, 19 nt, Homo sapiens
  misc_RNA (1)...(19): siRNA sense strand
ggauuaguaaccagggcau

SEQ ID NO: 2626987 - RNA, 19 nt, Homo sapiens
  misc_RNA (1)...(19): siRNA sense strand
cuuucaagauccagaccuu

SEQ ID NO: 2626988 - RNA, 19 nt, Homo sapiens
  misc_RNA (1)...(19): siRNA sense strand
cuguuuaugguuugggauu

SEQ ID NO: 2626989 - RNA, 19 nt, Homo sapiens
  misc_RNA (1)...(19): siRNA sense strand
gagacaaacagaaguugau

SEQ ID NO: 2626990 - RNA, 19 nt, Homo sapiens
  misc_RNA (1)...(19): siRNA sense strand
caaaauaggugaaacagca

SEQ ID NO: 2626991 - RNA, 19 nt, Homo sapiens
  misc_RNA (1)...(19): siRNA sense strand
cacuugaagaagaggauga

SEQ ID NO: 2626992 - RNA, 19 nt, Homo sapiens
  misc_RNA (1)...(19): siRNA sense strand
cgauaugcuuagaaaauca

SEQ ID NO: 2626993 - RNA, 19 nt, Homo sapiens
  misc_RNA (1)...(19): siRNA sense strand
acaugcagcagaaggagaa

SEQ ID NO: 2626994 - RNA, 19 nt, Homo sapiens
  misc_RNA (1)...(19): siRNA sense strand
ggaaaaugcuugaggccaa

SEQ ID NO: 2626995 - RNA, 19 nt, Homo sapiens
  misc_RNA (1)...(19): siRNA sense strand
gggacaaagcccagcucaa

SEQ ID NO: 2626996 - RNA, 19 nt, Homo sapiens
  misc_RNA (1)...(19): siRNA sense strand
ggcuggagguugugcgcaa

SEQ ID NO: 2626997 - RNA, 19 nt, Homo sapiens
  misc_RNA (1)...(19): siRNA sense strand
ugaaggugcuggagggcau

SEQ ID NO: 2626998 - RNA, 19 nt, Homo sapiens
  misc_RNA (1)...(19): siRNA sense strand
cgaccagaguaguggcuca

SEQ ID NO: 2626999 - RNA, 19 nt, Homo sapiens
  misc_RNA (1)...(19): siRNA sense strand
agaaggacugggaggacaa

SEQ ID NO: 2627000 - RNA, 19 nt, Homo sapiens
  misc_RNA (1)...(19): siRNA sense strand
uggagaacgugauugggaa

SEQ ID NO: 2627001 - RNA, 19 nt, Homo sapiens
  misc_RNA (1)...(19): siRNA sense strand
gcugagcgcuggaaggaca

SEQ ID NO: 2627002 - RNA, 19 nt, Homo sapiens
  misc_RNA (1)...(19): siRNA sense strand
gagaaggacugggaggaca

SEQ ID NO: 2627003 - RNA, 19 nt, Homo sapiens
  misc_RNA (1)...(19): siRNA sense strand
ugaccaaggagaagcgcau

SEQ ID NO: 2627004 - RNA, 19 nt, Homo sapiens
  misc_RNA (1)...(19): siRNA sense strand
gcugguucgugcuggacaa

SEQ ID NO: 2627005 - RNA, 19 nt, Homo sapiens
  misc_RNA (1)...(19): siRNA sense strand
cugcagagucagacgcaca

SEQ ID NO: 2627006 - RNA, 19 nt, Homo sapiens
  misc_RNA (1)...(19): siRNA sense strand
ccuacguguuugaggggaa

SEQ ID NO: 2627007 - RNA, 19 nt, Homo sapiens
  misc_RNA (1)...(19): siRNA sense strand
gcugaaagcauguguccca

SEQ ID NO: 2627008 - RNA, 19 nt, Homo sapiens
  misc_RNA (1)...(19): siRNA sense strand
ucgaugagcugguggccca

SEQ ID NO: 2627009 - RNA, 19 nt, Homo sapiens
  misc_RNA (1)...(19): siRNA sense strand
agaaguaccugcaggcugu

SEQ ID NO: 2627010 - RNA, 19 nt, Homo sapiens
  misc_RNA (1)...(19): siRNA sense strand
gcucaagggugugcgguca

SEQ ID NO: 2627011 - RNA, 19 nt, Homo sapiens
  misc_RNA (1)...(19): siRNA sense strand
cugaggaccaggaggacga

SEQ ID NO: 2627012 - RNA, 19 nt, Homo sapiens
  misc_RNA (1)...(19): siRNA sense strand
gugaaggccgagaggagga

SEQ ID NO: 2627013 - RNA, 19 nt, Homo sapiens
  misc_RNA (1)...(19): siRNA sense strand
cuggaggccugcauggcaa

SEQ ID NO: 2627014 - RNA, 19 nt, Homo sapiens
  misc_RNA (1)...(19): siRNA sense strand
gcacggcaggugaaggcua

SEQ ID NO: 2627015 - RNA, 19 nt, Homo sapiens
  misc_RNA (1)...(19): siRNA sense strand
gcaaaggugucgucggccu

SEQ ID NO: 2627016 - RNA, 19 nt, Homo sapiens
  misc_RNA (1)...(19): siRNA sense strand
uggcgaugcacaagguaca

SEQ ID NO: 2627017 - RNA, 19 nt, Homo sapiens
  misc_RNA (1)...(19): siRNA sense strand
gacaaggucugcacggaga

SEQ ID NO: 2627018 - RNA, 19 nt, Homo sapiens
  misc_RNA (1)...(19): siRNA sense strand
uggaggagcugcagaggcu

SEQ ID NO: 2627019 - RNA, 19 nt, Homo sapiens
  misc_RNA (1)...(19): siRNA sense strand
aggcagagacccaggagcu

SEQ ID NO: 2627020 - RNA, 19 nt, Homo sapiens
  misc_RNA (1)...(19): siRNA sense strand
cagccguggcgaugcacaa

SEQ ID NO: 2627021 - RNA, 19 nt, Homo sapiens
  misc_RNA (1)...(19): siRNA sense strand
gauaaugcauggauggaga

SEQ ID NO: 2627022 - RNA, 19 nt, Homo sapiens
  misc_RNA (1)...(19): siRNA sense strand
ggagagaagauuagugcca

SEQ ID NO: 2627023 - RNA, 19 nt, Homo sapiens
  misc_RNA (1)...(19): siRNA sense strand
agugcugagaagagagaaa

SEQ ID NO: 2627024 - RNA, 19 nt, Homo sapiens
  misc_RNA (1)...(19): siRNA sense strand
ucaucaaacuuguggcuga

SEQ ID NO: 2627025 - RNA, 19 nt, Homo sapiens
  misc_RNA (1)...(19): siRNA sense strand
gcacaaacucuucagccaa

SEQ ID NO: 2627026 - RNA, 19 nt, Homo sapiens
  misc_RNA (1)...(19): siRNA sense strand
acgaaacaggugagauaau

SEQ ID NO: 2627027 - RNA, 19 nt, Homo sapiens
  misc_RNA (1)...(19): siRNA sense strand
augggcauguugagagaaa

SEQ ID NO: 2627028 - RNA, 19 nt, Homo sapiens
  misc_RNA (1)...(19): siRNA sense strand
agagaagauuagugccaca

SEQ ID NO: 2627029 - RNA, 19 nt, Homo sapiens
  misc_RNA (1)...(19): siRNA sense strand
uggagaugaugcuggaaaa

SEQ ID NO: 2627030 - RNA, 19 nt, Homo sapiens
  misc_RNA (1)...(19): siRNA sense strand
cuggagaugaugcuggaaa

SEQ ID NO: 2627031 - RNA, 19 nt, Homo sapiens
  misc_RNA (1)...(19): siRNA sense strand
aagggauagcaguggaaau

SEQ ID NO: 2627032 - RNA, 19 nt, Homo sapiens
  misc_RNA (1)...(19): siRNA sense strand
cugagaagagagaaauaga

SEQ ID NO: 2627033 - RNA, 19 nt, Homo sapiens
  misc_RNA (1)...(19): siRNA sense strand
gagaaauagaggaaaaguu

SEQ ID NO: 2627034 - RNA, 19 nt, Homo sapiens
  misc_RNA (1)...(19): siRNA sense strand
auguugagagaaagagcaa

SEQ ID NO: 2627035 - RNA, 19 nt, Homo sapiens
  misc_RNA (1)...(19): siRNA sense strand
ugcugagaagagagaaaua

SEQ ID NO: 2627036 - RNA, 19 nt, Homo sapiens
  misc_RNA (1)...(19): siRNA sense strand
aagugaaauggguggacau

SEQ ID NO: 2627037 - RNA, 19 nt, Homo sapiens
  misc_RNA (1)...(19): siRNA sense strand
guugaugauccucgaaaca

SEQ ID NO: 2627038 - RNA, 19 nt, Homo sapiens
  misc_RNA (1)...(19): siRNA sense strand
cugagaaacgagaugcaca

SEQ ID NO: 2627039 - RNA, 19 nt, Homo sapiens
  misc_RNA (1)...(19): siRNA sense strand
gcgaggacucugaagcuga

SEQ ID NO: 2627040 - RNA, 19 nt, Homo sapiens
  misc_RNA (1)...(19): siRNA sense strand
gauaaugcauggauggaga

SEQ ID NO: 2627041 - RNA, 19 nt, Homo sapiens
  misc_RNA (1)...(19): siRNA sense strand
ggagagaagauuagugcca

SEQ ID NO: 2627042 - RNA, 19 nt, Homo sapiens
  misc_RNA (1)...(19): siRNA sense strand
agugcugagaagagagaaa

SEQ ID NO: 2627043 - RNA, 19 nt, Homo sapiens
  misc_RNA (1)...(19): siRNA sense strand
ucaucaaacuuguggcuga

SEQ ID NO: 2627044 - RNA, 19 nt, Homo sapiens
  misc_RNA (1)...(19): siRNA sense strand
gcacaaacucuucagccaa

SEQ ID NO: 2627045 - RNA, 19 nt, Homo sapiens
  misc_RNA (1)...(19): siRNA sense strand
acgaaacaggugagauaau

SEQ ID NO: 2627046 - RNA, 19 nt, Homo sapiens
  misc_RNA (1)...(19): siRNA sense strand
augggcauguugagagaaa

SEQ ID NO: 2627047 - RNA, 19 nt, Homo sapiens
  misc_RNA (1)...(19): siRNA sense strand
agagaagauuagugccaca

SEQ ID NO: 2627048 - RNA, 19 nt, Homo sapiens
  misc_RNA (1)...(19): siRNA sense strand
uggagaugaugcuggaaaa

SEQ ID NO: 2627049 - RNA, 19 nt, Homo sapiens
  misc_RNA (1)...(19): siRNA sense strand
cuggagaugaugcuggaaa

SEQ ID NO: 2627050 - RNA, 19 nt, Homo sapiens
  misc_RNA (1)...(19): siRNA sense strand
aagggauagcaguggaaau

SEQ ID NO: 2627051 - RNA, 19 nt, Homo sapiens
  misc_RNA (1)...(19): siRNA sense strand
cugagaagagagaaauaga

SEQ ID NO: 2627052 - RNA, 19 nt, Homo sapiens
  misc_RNA (1)...(19): siRNA sense strand
gagaaauagaggaaaaguu

SEQ ID NO: 2627053 - RNA, 19 nt, Homo sapiens
  misc_RNA (1)...(19): siRNA sense strand
auguugagagaaagagcaa

SEQ ID NO: 2627054 - RNA, 19 nt, Homo sapiens
  misc_RNA (1)...(19): siRNA sense strand
ugcugagaagagagaaaua

SEQ ID NO: 2627055 - RNA, 19 nt, Homo sapiens
  misc_RNA (1)...(19): siRNA sense strand
aagugaaauggguggacau

SEQ ID NO: 2627056 - RNA, 19 nt, Homo sapiens
  misc_RNA (1)...(19): siRNA sense strand
guugaugauccucgaaaca

SEQ ID NO: 2627057 - RNA, 19 nt, Homo sapiens
  misc_RNA (1)...(19): siRNA sense strand
cugagaaacgagaugcaca

SEQ ID NO: 2627058 - RNA, 19 nt, Homo sapiens
  misc_RNA (1)...(19): siRNA sense strand
gcgaggacucugaagcuga

SEQ ID NO: 2627059 - RNA, 19 nt, Homo sapiens
  misc_RNA (1)...(19): siRNA sense strand
gauaaugcauggauggaga

SEQ ID NO: 2627060 - RNA, 19 nt, Homo sapiens
  misc_RNA (1)...(19): siRNA sense strand
ggagagaagauuagugcca

SEQ ID NO: 2627061 - RNA, 19 nt, Homo sapiens
  misc_RNA (1)...(19): siRNA sense strand
agugcugagaagagagaaa

SEQ ID NO: 2627062 - RNA, 19 nt, Homo sapiens
  misc_RNA (1)...(19): siRNA sense strand
ucaucaaacuuguggcuga

SEQ ID NO: 2627063 - RNA, 19 nt, Homo sapiens
  misc_RNA (1)...(19): siRNA sense strand
gcacaaacucuucagccaa

SEQ ID NO: 2627064 - RNA, 19 nt, Homo sapiens
  misc_RNA (1)...(19): siRNA sense strand
acgaaacaggugagauaau

SEQ ID NO: 2627065 - RNA, 19 nt, Homo sapiens
  misc_RNA (1)...(19): siRNA sense strand
augggcauguugagagaaa

SEQ ID NO: 2627066 - RNA, 19 nt, Homo sapiens
  misc_RNA (1)...(19): siRNA sense strand
agagaagauuagugccaca

SEQ ID NO: 2627067 - RNA, 19 nt, Homo sapiens
  misc_RNA (1)...(19): siRNA sense strand
uggagaugaugcuggaaaa

SEQ ID NO: 2627068 - RNA, 19 nt, Homo sapiens
  misc_RNA (1)...(19): siRNA sense strand
cuggagaugaugcuggaaa

SEQ ID NO: 2627069 - RNA, 19 nt, Homo sapiens
  misc_RNA (1)...(19): siRNA sense strand
aagggauagcaguggaaau

SEQ ID NO: 2627070 - RNA, 19 nt, Homo sapiens
  misc_RNA (1)...(19): siRNA sense strand
cugagaagagagaaauaga

SEQ ID NO: 2627071 - RNA, 19 nt, Homo sapiens
  misc_RNA (1)...(19): siRNA sense strand
gagaaauagaggaaaaguu

SEQ ID NO: 2627072 - RNA, 19 nt, Homo sapiens
  misc_RNA (1)...(19): siRNA sense strand
auguugagagaaagagcaa

SEQ ID NO: 2627073 - RNA, 19 nt, Homo sapiens
  misc_RNA (1)...(19): siRNA sense strand
ugcugagaagagagaaaua

SEQ ID NO: 2627074 - RNA, 19 nt, Homo sapiens
  misc_RNA (1)...(19): siRNA sense strand
aagugaaauggguggacau

SEQ ID NO: 2627075 - RNA, 19 nt, Homo sapiens
  misc_RNA (1)...(19): siRNA sense strand
guugaugauccucgaaaca

SEQ ID NO: 2627076 - RNA, 19 nt, Homo sapiens
  misc_RNA (1)...(19): siRNA sense strand
cugagaaacgagaugcaca

SEQ ID NO: 2627077 - RNA, 19 nt, Homo sapiens
  misc_RNA (1)...(19): siRNA sense strand
gcgaggacucugaagcuga

SEQ ID NO: 2627078 - RNA, 19 nt, Homo sapiens
  misc_RNA (1)...(19): siRNA sense strand
cugaagaagauauuggaga

SEQ ID NO: 2627079 - RNA, 19 nt, Homo sapiens
  misc_RNA (1)...(19): siRNA sense strand
cguccugaguauucggcaa

SEQ ID NO: 2627080 - RNA, 19 nt, Homo sapiens
  misc_RNA (1)...(19): siRNA sense strand
gcuuaagaugugaguggau

SEQ ID NO: 2627081 - RNA, 19 nt, Homo sapiens
  misc_RNA (1)...(19): siRNA sense strand
agagaagggcccagcagau

SEQ ID NO: 2627082 - RNA, 19 nt, Homo sapiens
  misc_RNA (1)...(19): siRNA sense strand
gcacacaaauccuggagcu

SEQ ID NO: 2627083 - RNA, 19 nt, Homo sapiens
  misc_RNA (1)...(19): siRNA sense strand
ugaagaagauauuggagac

SEQ ID NO: 2627084 - RNA, 19 nt, Homo sapiens
  misc_RNA (1)...(19): siRNA sense strand
aggaguugcaggagcugua

SEQ ID NO: 2627085 - RNA, 19 nt, Homo sapiens
  misc_RNA (1)...(19): siRNA sense strand
ugguuguacaagaucgaaa

SEQ ID NO: 2627086 - RNA, 19 nt, Homo sapiens
  misc_RNA (1)...(19): siRNA sense strand
gguuguacaagaucgaaau

SEQ ID NO: 2627087 - RNA, 19 nt, Homo sapiens
  misc_RNA (1)...(19): siRNA sense strand
gcuuuugggaagucagaua

SEQ ID NO: 2627088 - RNA, 19 nt, Homo sapiens
  misc_RNA (1)...(19): siRNA sense strand
cugaagaagauauuggaga

SEQ ID NO: 2627089 - RNA, 19 nt, Homo sapiens
  misc_RNA (1)...(19): siRNA sense strand
cguccugaguauucggcaa

SEQ ID NO: 2627090 - RNA, 19 nt, Homo sapiens
  misc_RNA (1)...(19): siRNA sense strand
gcuuaagaugugaguggau

SEQ ID NO: 2627091 - RNA, 19 nt, Homo sapiens
  misc_RNA (1)...(19): siRNA sense strand
gcacacaaauccuggagcu

SEQ ID NO: 2627092 - RNA, 19 nt, Homo sapiens
  misc_RNA (1)...(19): siRNA sense strand
ugaagaagauauuggagac

SEQ ID NO: 2627093 - RNA, 19 nt, Homo sapiens
  misc_RNA (1)...(19): siRNA sense strand
gcuuuugggaagucagaua

SEQ ID NO: 2627094 - RNA, 19 nt, Homo sapiens
  misc_RNA (1)...(19): siRNA sense strand
auggagaguuuguggaagu

SEQ ID NO: 2627095 - RNA, 19 nt, Homo sapiens
  misc_RNA (1)...(19): siRNA sense strand
gagccaagaaccaacggaa

SEQ ID NO: 2627096 - RNA, 19 nt, Homo sapiens
  misc_RNA (1)...(19): siRNA sense strand
aaaacuagaacuugggaau

SEQ ID NO: 2627097 - RNA, 19 nt, Homo sapiens
  misc_RNA (1)...(19): siRNA sense strand
uaacggagaugaugccgaa

SEQ ID NO: 2627098 - RNA, 19 nt, Homo sapiens
  misc_RNA (1)...(19): siRNA sense strand
gggaaucagugaaacguac

SEQ ID NO: 2627099 - RNA, 19 nt, Homo sapiens
  misc_RNA (1)...(19): siRNA sense strand
agccaagaaccaacggaau

SEQ ID NO: 2627100 - RNA, 19 nt, Homo sapiens
  misc_RNA (1)...(19): siRNA sense strand
uugaagaagaaacuggcua

SEQ ID NO: 2627101 - RNA, 19 nt, Homo sapiens
  misc_RNA (1)...(19): siRNA sense strand
ggaaagauccugauggcua

SEQ ID NO: 2627102 - RNA, 19 nt, Homo sapiens
  misc_RNA (1)...(19): siRNA sense strand
cuacaaagacauuucgaga

SEQ ID NO: 2627103 - RNA, 19 nt, Homo sapiens
  misc_RNA (1)...(19): siRNA sense strand
cagagcaaucuuugguaaa

SEQ ID NO: 2627104 - RNA, 19 nt, Homo sapiens
  misc_RNA (1)...(19): siRNA sense strand
ccagcugggcaguaggaaa

SEQ ID NO: 2627105 - RNA, 19 nt, Homo sapiens
  misc_RNA (1)...(19): siRNA sense strand
cuuuggaacagauggcaua

SEQ ID NO: 2627106 - RNA, 19 nt, Homo sapiens
  misc_RNA (1)...(19): siRNA sense strand
auaaaggaguagugaccga

SEQ ID NO: 2627107 - RNA, 19 nt, Homo sapiens
  misc_RNA (1)...(19): siRNA sense strand
gggauggaucuguugaaau

SEQ ID NO: 2627108 - RNA, 19 nt, Homo sapiens
  misc_RNA (1)...(19): siRNA sense strand
agaugaugcuauaugugaa

SEQ ID NO: 2627109 - RNA, 19 nt, Homo sapiens
  misc_RNA (1)...(19): siRNA sense strand
gcuauaugugaauggaaaa

SEQ ID NO: 2627110 - RNA, 19 nt, Homo sapiens
  misc_RNA (1)...(19): siRNA sense strand
aggaaagaagcauuggauu

SEQ ID NO: 2627111 - RNA, 19 nt, Homo sapiens
  misc_RNA (1)...(19): siRNA sense strand
agugaaggacuguugggaa

SEQ ID NO: 2627112 - RNA, 19 nt, Homo sapiens
  misc_RNA (1)...(19): siRNA sense strand
auaucaaaggcuggagaaa

SEQ ID NO: 2627113 - RNA, 19 nt, Homo sapiens
  misc_RNA (1)...(19): siRNA sense strand
gcauuuacgcccuggaacu

SEQ ID NO: 2627114 - RNA, 19 nt, Homo sapiens
  misc_RNA (1)...(19): siRNA sense strand
ucggguuaauguugaggaa

SEQ ID NO: 2627115 - RNA, 19 nt, Homo sapiens
  misc_RNA (1)...(19): siRNA sense strand
cugggcaguaggaaagaaa

SEQ ID NO: 2627116 - RNA, 19 nt, Homo sapiens
  misc_RNA (1)...(19): siRNA sense strand
ccuaauuaaaccagaugca

SEQ ID NO: 2627117 - RNA, 19 nt, Homo sapiens
  misc_RNA (1)...(19): siRNA sense strand
cagcuaugcagauguucaa

SEQ ID NO: 2627118 - RNA, 19 nt, Homo sapiens
  misc_RNA (1)...(19): siRNA sense strand
ggaccaaauaugauaaccu

SEQ ID NO: 2627119 - RNA, 19 nt, Homo sapiens
  misc_RNA (1)...(19): siRNA sense strand
cggccagagaaauggaguu

SEQ ID NO: 2627120 - RNA, 19 nt, Homo sapiens
  misc_RNA (1)...(19): siRNA sense strand
aggaguagugaccgaauau

SEQ ID NO: 2627121 - RNA, 19 nt, Homo sapiens
  misc_RNA (1)...(19): siRNA sense strand
uguugaaaugcaugaugua

SEQ ID NO: 2627122 - RNA, 19 nt, Homo sapiens
  misc_RNA (1)...(19): siRNA sense strand
ggaaagauccugauggcua

SEQ ID NO: 2627123 - RNA, 19 nt, Homo sapiens
  misc_RNA (1)...(19): siRNA sense strand
cuacaaagacauuucgaga

SEQ ID NO: 2627124 - RNA, 19 nt, Homo sapiens
  misc_RNA (1)...(19): siRNA sense strand
cagagcaaucuuugguaaa

SEQ ID NO: 2627125 - RNA, 19 nt, Homo sapiens
  misc_RNA (1)...(19): siRNA sense strand
ccagcugggcaguaggaaa

SEQ ID NO: 2627126 - RNA, 19 nt, Homo sapiens
  misc_RNA (1)...(19): siRNA sense strand
cuuuggaacagauggcaua

SEQ ID NO: 2627127 - RNA, 19 nt, Homo sapiens
  misc_RNA (1)...(19): siRNA sense strand
auaaaggaguagugaccga

SEQ ID NO: 2627128 - RNA, 19 nt, Homo sapiens
  misc_RNA (1)...(19): siRNA sense strand
agaugaugcuauaugugaa

SEQ ID NO: 2627129 - RNA, 19 nt, Homo sapiens
  misc_RNA (1)...(19): siRNA sense strand
gcuauaugugaauggaaaa

SEQ ID NO: 2627130 - RNA, 19 nt, Homo sapiens
  misc_RNA (1)...(19): siRNA sense strand
aggaaagaagcauuggauu

SEQ ID NO: 2627131 - RNA, 19 nt, Homo sapiens
  misc_RNA (1)...(19): siRNA sense strand
agugaaggacuguugggaa

SEQ ID NO: 2627132 - RNA, 19 nt, Homo sapiens
  misc_RNA (1)...(19): siRNA sense strand
auaucaaaggcuggagaaa

SEQ ID NO: 2627133 - RNA, 19 nt, Homo sapiens
  misc_RNA (1)...(19): siRNA sense strand
gcauuuacgcccuggaacu

SEQ ID NO: 2627134 - RNA, 19 nt, Homo sapiens
  misc_RNA (1)...(19): siRNA sense strand
ucggguuaauguugaggaa

SEQ ID NO: 2627135 - RNA, 19 nt, Homo sapiens
  misc_RNA (1)...(19): siRNA sense strand
cugggcaguaggaaagaaa

SEQ ID NO: 2627136 - RNA, 19 nt, Homo sapiens
  misc_RNA (1)...(19): siRNA sense strand
ccuaauuaaaccagaugca

SEQ ID NO: 2627137 - RNA, 19 nt, Homo sapiens
  misc_RNA (1)...(19): siRNA sense strand
cagcuaugcagauguucaa

SEQ ID NO: 2627138 - RNA, 19 nt, Homo sapiens
  misc_RNA (1)...(19): siRNA sense strand
cggccagagaaauggaguu

SEQ ID NO: 2627139 - RNA, 19 nt, Homo sapiens
  misc_RNA (1)...(19): siRNA sense strand
aggaguagugaccgaauau

SEQ ID NO: 2627140 - RNA, 19 nt, Homo sapiens
  misc_RNA (1)...(19): siRNA sense strand
ggaccaaauaugauaaccu

SEQ ID NO: 2627141 - RNA, 19 nt, Homo sapiens
  misc_RNA (1)...(19): siRNA sense strand
uggccauguuagaggaaga

SEQ ID NO: 2627142 - RNA, 19 nt, Homo sapiens
  misc_RNA (1)...(19): siRNA sense strand
agucuaagauugaucgaga

SEQ ID NO: 2627143 - RNA, 19 nt, Homo sapiens
  misc_RNA (1)...(19): siRNA sense strand
cagcuaaagaagugggaac

SEQ ID NO: 2627144 - RNA, 19 nt, Homo sapiens
  misc_RNA (1)...(19): siRNA sense strand
aagaaguuacugaggaaga

SEQ ID NO: 2627145 - RNA, 19 nt, Homo sapiens
  misc_RNA (1)...(19): siRNA sense strand
aagaggugcuauuggaaaa

SEQ ID NO: 2627146 - RNA, 19 nt, Homo sapiens
  misc_RNA (1)...(19): siRNA sense strand
cauuauaaagggagcagga

SEQ ID NO: 2627147 - RNA, 19 nt, Homo sapiens
  misc_RNA (1)...(19): siRNA sense strand
ccauguuagaggaagauuu

SEQ ID NO: 2627148 - RNA, 19 nt, Homo sapiens
  misc_RNA (1)...(19): siRNA sense strand
uugaggaacacauggacaa

SEQ ID NO: 2627149 - RNA, 19 nt, Homo sapiens
  misc_RNA (1)...(19): siRNA sense strand
cugaaaaggcaaaacagaa

SEQ ID NO: 2627150 - RNA, 19 nt, Homo sapiens
  misc_RNA (1)...(19): siRNA sense strand
cgcgagauguggaggcuca

SEQ ID NO: 2627151 - RNA, 19 nt, Homo sapiens
  misc_RNA (1)...(19): siRNA sense strand
agagaagaauauaugcuga

SEQ ID NO: 2627152 - RNA, 19 nt, Homo sapiens
  misc_RNA (1)...(19): siRNA sense strand
cuuuuauacuugaggaaca

SEQ ID NO: 2627153 - RNA, 19 nt, Homo sapiens
  misc_RNA (1)...(19): siRNA sense strand
cuuaauaugauucggcaga

SEQ ID NO: 2627154 - RNA, 19 nt, Homo sapiens
  misc_RNA (1)...(19): siRNA sense strand
uauaaagggagcaggagga

SEQ ID NO: 2627155 - RNA, 19 nt, Homo sapiens
  misc_RNA (1)...(19): siRNA sense strand
auggaaaccagcugaucua

SEQ ID NO: 2627156 - RNA, 19 nt, Homo sapiens
  misc_RNA (1)...(19): siRNA sense strand
aggaagauuuguuagccuu

SEQ ID NO: 2627157 - RNA, 19 nt, Homo sapiens
  misc_RNA (1)...(19): siRNA sense strand
agccaauacuguggaagaa

SEQ ID NO: 2627158 - RNA, 19 nt, Homo sapiens
  misc_RNA (1)...(19): siRNA sense strand
aaagaucacacuaaggcaa

SEQ ID NO: 2627159 - RNA, 19 nt, Homo sapiens
  misc_RNA (1)...(19): siRNA sense strand
uugaaaacuuacagcaaga

SEQ ID NO: 2627160 - RNA, 19 nt, Homo sapiens
  misc_RNA (1)...(19): siRNA sense strand
aggaacacauggacaaaau

SEQ ID NO: 2627161 - RNA, 19 nt, Homo sapiens
  misc_RNA (1)...(19): siRNA sense strand
caauaggacuguucccuga

SEQ ID NO: 2627162 - RNA, 19 nt, Homo sapiens
  misc_RNA (1)...(19): siRNA sense strand
uggccauguuagaggaaga

SEQ ID NO: 2627163 - RNA, 19 nt, Homo sapiens
  misc_RNA (1)...(19): siRNA sense strand
agucuaagauugaucgaga

SEQ ID NO: 2627164 - RNA, 19 nt, Homo sapiens
  misc_RNA (1)...(19): siRNA sense strand
cagcuaaagaagugggaac

SEQ ID NO: 2627165 - RNA, 19 nt, Homo sapiens
  misc_RNA (1)...(19): siRNA sense strand
aagaggugcuauuggaaaa

SEQ ID NO: 2627166 - RNA, 19 nt, Homo sapiens
  misc_RNA (1)...(19): siRNA sense strand
cauuauaaagggagcagga

SEQ ID NO: 2627167 - RNA, 19 nt, Homo sapiens
  misc_RNA (1)...(19): siRNA sense strand
ccauguuagaggaagauuu

SEQ ID NO: 2627168 - RNA, 19 nt, Homo sapiens
  misc_RNA (1)...(19): siRNA sense strand
uugaggaacacauggacaa

SEQ ID NO: 2627169 - RNA, 19 nt, Homo sapiens
  misc_RNA (1)...(19): siRNA sense strand
cugaaaaggcaaaacagaa

SEQ ID NO: 2627170 - RNA, 19 nt, Homo sapiens
  misc_RNA (1)...(19): siRNA sense strand
cgcgagauguggaggcuca

SEQ ID NO: 2627171 - RNA, 19 nt, Homo sapiens
  misc_RNA (1)...(19): siRNA sense strand
agagaagaauauaugcuga

SEQ ID NO: 2627172 - RNA, 19 nt, Homo sapiens
  misc_RNA (1)...(19): siRNA sense strand
cuuuuauacuugaggaaca

SEQ ID NO: 2627173 - RNA, 19 nt, Homo sapiens
  misc_RNA (1)...(19): siRNA sense strand
cuuaauaugauucggcaga

SEQ ID NO: 2627174 - RNA, 19 nt, Homo sapiens
  misc_RNA (1)...(19): siRNA sense strand
uauaaagggagcaggagga

SEQ ID NO: 2627175 - RNA, 19 nt, Homo sapiens
  misc_RNA (1)...(19): siRNA sense strand
aggaagauuuguuagccuu

SEQ ID NO: 2627176 - RNA, 19 nt, Homo sapiens
  misc_RNA (1)...(19): siRNA sense strand
agccaauacuguggaagaa

SEQ ID NO: 2627177 - RNA, 19 nt, Homo sapiens
  misc_RNA (1)...(19): siRNA sense strand
aaagaucacacuaaggcaa

SEQ ID NO: 2627178 - RNA, 19 nt, Homo sapiens
  misc_RNA (1)...(19): siRNA sense strand
uugaaaacuuacagcaaga

SEQ ID NO: 2627179 - RNA, 19 nt, Homo sapiens
  misc_RNA (1)...(19): siRNA sense strand
aggaacacauggacaaaau

SEQ ID NO: 2627180 - RNA, 19 nt, Homo sapiens
  misc_RNA (1)...(19): siRNA sense strand
caauaggacuguucccuga

SEQ ID NO: 2627181 - RNA, 19 nt, Homo sapiens
  misc_RNA (1)...(19): siRNA sense strand
ccagaaagaugcagcgaca

SEQ ID NO: 2627182 - RNA, 19 nt, Homo sapiens
  misc_RNA (1)...(19): siRNA sense strand
aagaauuggagaagaguuu

SEQ ID NO: 2627183 - RNA, 19 nt, Homo sapiens
  misc_RNA (1)...(19): siRNA sense strand
ugggaugaggagugggaua

SEQ ID NO: 2627184 - RNA, 19 nt, Homo sapiens
  misc_RNA (1)...(19): siRNA sense strand
gcacaaugggaaugggcau

SEQ ID NO: 2627185 - RNA, 19 nt, Homo sapiens
  misc_RNA (1)...(19): siRNA sense strand
ccucauaaggaauggauca

SEQ ID NO: 2627186 - RNA, 19 nt, Homo sapiens
  misc_RNA (1)...(19): siRNA sense strand
ucgugaagagcgaaagaaa

SEQ ID NO: 2627187 - RNA, 19 nt, Homo sapiens
  misc_RNA (1)...(19): siRNA sense strand
agaaagcaaagaagaacaa

SEQ ID NO: 2627188 - RNA, 19 nt, Homo sapiens
  misc_RNA (1)...(19): siRNA sense strand
gcgacagcgaugaggaaaa

SEQ ID NO: 2627189 - RNA, 19 nt, Homo sapiens
  misc_RNA (1)...(19): siRNA sense strand
gcacuaacacugugggacu

SEQ ID NO: 2627190 - RNA, 19 nt, Homo sapiens
  misc_RNA (1)...(19): siRNA sense strand
acacaagcgcacagcaaau

SEQ ID NO: 2627191 - RNA, 19 nt, Homo sapiens
  misc_RNA (1)...(19): siRNA sense strand
gaacaugaacauagggaug

SEQ ID NO: 2627192 - RNA, 19 nt, Homo sapiens
  misc_RNA (1)...(19): siRNA sense strand
agacacaagcgcacagcaa

SEQ ID NO: 2627193 - RNA, 19 nt, Homo sapiens
  misc_RNA (1)...(19): siRNA sense strand
gauaugauccugagcccaa

SEQ ID NO: 2627194 - RNA, 19 nt, Homo sapiens
  misc_RNA (1)...(19): siRNA sense strand
ggagagauugccaaggcua

SEQ ID NO: 2627195 - RNA, 19 nt, Homo sapiens
  misc_RNA (1)...(19): siRNA sense strand
ugauaaaauuggaagcaca

SEQ ID NO: 2627196 - RNA, 19 nt, Homo sapiens
  misc_RNA (1)...(19): siRNA sense strand
gcaacucaugggagagauu

SEQ ID NO: 2627197 - RNA, 19 nt, Homo sapiens
  misc_RNA (1)...(19): siRNA sense strand
ugacaggcacaaugggaau

SEQ ID NO: 2627198 - RNA, 19 nt, Homo sapiens
  misc_RNA (1)...(19): siRNA sense strand
cgaugaugaaccagagcau

SEQ ID NO: 2627199 - RNA, 19 nt, Homo sapiens
  misc_RNA (1)...(19): siRNA sense strand
gucuaagguucgagaggca

SEQ ID NO: 2627200 - RNA, 19 nt, Homo sapiens
  misc_RNA (1)...(19): siRNA sense strand
aggugaaggaauugguuga

SEQ ID NO: 2627201 - RNA, 19 nt, Homo sapiens
  misc_RNA (1)...(19): siRNA sense strand
gaggagacugugacgacaa

SEQ ID NO: 2627202 - RNA, 19 nt, Homo sapiens
  misc_RNA (1)...(19): siRNA sense strand
augucaagaucacagaaua

SEQ ID NO: 2627203 - RNA, 19 nt, Homo sapiens
  misc_RNA (1)...(19): siRNA sense strand
cagaauaugcagcagccua

SEQ ID NO: 2627204 - RNA, 19 nt, Homo sapiens
  misc_RNA (1)...(19): siRNA sense strand
gggaugggcuugacaggca

SEQ ID NO: 2627205 - RNA, 19 nt, Homo sapiens
  misc_RNA (1)...(19): siRNA sense strand
gauaaaauuggaagcacaa

SEQ ID NO: 2627206 - RNA, 19 nt, Homo sapiens
  misc_RNA (1)...(19): siRNA sense strand
acgacaaagcauauucaua

SEQ ID NO: 2627207 - RNA, 19 nt, Homo sapiens
  misc_RNA (1)...(19): siRNA sense strand
augaugaaccagagcauga

SEQ ID NO: 2627208 - RNA, 19 nt, Homo sapiens
  misc_RNA (1)...(19): siRNA sense strand
ggaugaggagugggauaaa

SEQ ID NO: 2627209 - RNA, 19 nt, Homo sapiens
  misc_RNA (1)...(19): siRNA sense strand
uuaggugagcugagugaua

SEQ ID NO: 2627210 - RNA, 19 nt, Homo sapiens
  misc_RNA (1)...(19): siRNA sense strand
ccucacagccagcgguaga

SEQ ID NO: 2627211 - RNA, 19 nt, Homo sapiens
  misc_RNA (1)...(19): siRNA sense strand
aagaaagcaaagaagaaca

SEQ ID NO: 2627212 - RNA, 19 nt, Homo sapiens
  misc_RNA (1)...(19): siRNA sense strand
agaacuuguuaguggcuca

SEQ ID NO: 2627213 - RNA, 19 nt, Homo sapiens
  misc_RNA (1)...(19): siRNA sense strand
gcacaauugaugacaccau

SEQ ID NO: 2627214 - RNA, 19 nt, Homo sapiens
  misc_RNA (1)...(19): siRNA sense strand
ggaauggagacuuugguga

SEQ ID NO: 2627215 - RNA, 19 nt, Homo sapiens
  misc_RNA (1)...(19): siRNA sense strand
uuguagaugagcaugguaa

SEQ ID NO: 2627216 - RNA, 19 nt, Homo sapiens
  misc_RNA (1)...(19): siRNA sense strand
cagcgacagcgaugaggaa

SEQ ID NO: 2627217 - RNA, 19 nt, Homo sapiens
  misc_RNA (1)...(19): siRNA sense strand
caacaagugggaauggaga

SEQ ID NO: 2627218 - RNA, 19 nt, Homo sapiens
  misc_RNA (1)...(19): siRNA sense strand
agaucacagaauacagaua

SEQ ID NO: 2627219 - RNA, 19 nt, Homo sapiens
  misc_RNA (1)...(19): siRNA sense strand
ggaauggaucagagcgugu

SEQ ID NO: 2627220 - RNA, 19 nt, Homo sapiens
  misc_RNA (1)...(19): siRNA sense strand
ccagucaacaggaggauca

SEQ ID NO: 2627221 - RNA, 19 nt, Homo sapiens
  misc_RNA (1)...(19): siRNA sense strand
cagaaaucagucagcaaaa

SEQ ID NO: 2627222 - RNA, 19 nt, Homo sapiens
  misc_RNA (1)...(19): siRNA sense strand
gcgaaagaaagcaaagaag

SEQ ID NO: 2627223 - RNA, 19 nt, Homo sapiens
  misc_RNA (1)...(19): siRNA sense strand
agaacaaagacaaguaugu

SEQ ID NO: 2627224 - RNA, 19 nt, Homo sapiens
  misc_RNA (1)...(19): siRNA sense strand
aggugagcugagugauaaa

SEQ ID NO: 2627225 - RNA, 19 nt, Homo sapiens
  misc_RNA (1)...(19): siRNA sense strand
ccacuuuguagaugagcau

SEQ ID NO: 2627226 - RNA, 19 nt, Homo sapiens
  misc_RNA (1)...(19): siRNA sense strand
ugcgcgagcugguggacaa

SEQ ID NO: 2627227 - RNA, 19 nt, Homo sapiens
  misc_RNA (1)...(19): siRNA sense strand
cggaggaaagauagagaag

SEQ ID NO: 2627228 - RNA, 19 nt, Homo sapiens
  misc_RNA (1)...(19): siRNA sense strand
aagaaagcgagaagaggca

SEQ ID NO: 2627229 - RNA, 19 nt, Homo sapiens
  misc_RNA (1)...(19): siRNA sense strand
gaaagcgagaagaggcaga

SEQ ID NO: 2627230 - RNA, 19 nt, Homo sapiens
  misc_RNA (1)...(19): siRNA sense strand
agaauaugcagcagccuau

SEQ ID NO: 2627231 - RNA, 19 nt, Homo sapiens
  misc_RNA (1)...(19): siRNA sense strand
guguuggaggauucagaua

SEQ ID NO: 2627232 - RNA, 19 nt, Homo sapiens
  misc_RNA (1)...(19): siRNA sense strand
aagcaaguccagaucagaa

SEQ ID NO: 2627233 - RNA, 19 nt, Homo sapiens
  misc_RNA (1)...(19): siRNA sense strand
gugccagagaacacauuua

SEQ ID NO: 2627234 - RNA, 19 nt, Homo sapiens
  misc_RNA (1)...(19): siRNA sense strand
cugggcaacucaugggaga

SEQ ID NO: 2627235 - RNA, 19 nt, Homo sapiens
  misc_RNA (1)...(19): siRNA sense strand
uugaauuugcccaggauga

SEQ ID NO: 2627236 - RNA, 19 nt, Homo sapiens
  misc_RNA (1)...(19): siRNA sense strand
agacaaguauguugggguu

SEQ ID NO: 2627237 - RNA, 19 nt, Homo sapiens
  misc_RNA (1)...(19): siRNA sense strand
cagcaaaaugcgagagaaa

SEQ ID NO: 2627238 - RNA, 19 nt, Homo sapiens
  misc_RNA (1)...(19): siRNA sense strand
agauaaagcaguagauaca

SEQ ID NO: 2627239 - RNA, 19 nt, Homo sapiens
  misc_RNA (1)...(19): siRNA sense strand
auccaaaccuagagaacaa

SEQ ID NO: 2627240 - RNA, 19 nt, Homo sapiens
  misc_RNA (1)...(19): siRNA sense strand
ggugaauuguguuggaaaa

SEQ ID NO: 2627241 - RNA, 19 nt, Homo sapiens
  misc_RNA (1)...(19): siRNA sense strand
ggaaauucaucauggcaga

SEQ ID NO: 2627242 - RNA, 19 nt, Homo sapiens
  misc_RNA (1)...(19): siRNA sense strand
uuguaaagcugaugagcau

SEQ ID NO: 2627243 - RNA, 19 nt, Homo sapiens
  misc_RNA (1)...(19): siRNA sense strand
cagaaauaccacaugcuaa

SEQ ID NO: 2627244 - RNA, 19 nt, Homo sapiens
  misc_RNA (1)...(19): siRNA sense strand
uggcagaccacuugaagaa

SEQ ID NO: 2627245 - RNA, 19 nt, Homo sapiens
  misc_RNA (1)...(19): siRNA sense strand
gcagcacaacuuagggaaa

SEQ ID NO: 2627246 - RNA, 19 nt, Homo sapiens
  misc_RNA (1)...(19): siRNA sense strand
agaaauaccacaugcuaau

SEQ ID NO: 2627247 - RNA, 19 nt, Homo sapiens
  misc_RNA (1)...(19): siRNA sense strand
ccgaaauaaaguugcugaa

SEQ ID NO: 2627248 - RNA, 19 nt, Homo sapiens
  misc_RNA (1)...(19): siRNA sense strand
gucaaaagcaacugauaaa

SEQ ID NO: 2627249 - RNA, 19 nt, Homo sapiens
  misc_RNA (1)...(19): siRNA sense strand
ucuaauucauguuggucua

SEQ ID NO: 2627250 - RNA, 19 nt, Homo sapiens
  misc_RNA (1)...(19): siRNA sense strand
ggaauggaaucgauggcca

SEQ ID NO: 2627251 - RNA, 19 nt, Homo sapiens
  misc_RNA (1)...(19): siRNA sense strand
aauacaaggagcaaagauu

SEQ ID NO: 2627252 - RNA, 19 nt, Homo sapiens
  misc_RNA (1)...(19): siRNA sense strand
cuuuguguguggacaguua

SEQ ID NO: 2627253 - RNA, 19 nt, Homo sapiens
  misc_RNA (1)...(19): siRNA sense strand
uugaagaaaugcaguuaca

SEQ ID NO: 2627254 - RNA, 19 nt, Homo sapiens
  misc_RNA (1)...(19): siRNA sense strand
gccagaugaugaaggugaa

SEQ ID NO: 2627255 - RNA, 19 nt, Homo sapiens
  misc_RNA (1)...(19): siRNA sense strand
aucaagugucccagaaaua

SEQ ID NO: 2627256 - RNA, 19 nt, Homo sapiens
  misc_RNA (1)...(19): siRNA sense strand
aggugaauuguguuggaaa

SEQ ID NO: 2627257 - RNA, 19 nt, Homo sapiens
  misc_RNA (1)...(19): siRNA sense strand
gcagcauauugcaggcuuu

SEQ ID NO: 2627258 - RNA, 19 nt, Homo sapiens
  misc_RNA (1)...(19): siRNA sense strand
ccggaaaucauaugaaaau

SEQ ID NO: 2627259 - RNA, 19 nt, Homo sapiens
  misc_RNA (1)...(19): siRNA sense strand
cuuaacaaauggagacugu

SEQ ID NO: 2627260 - RNA, 19 nt, Homo sapiens
  misc_RNA (1)...(19): siRNA sense strand
ccugaauacugcuacaaga

SEQ ID NO: 2627261 - RNA, 19 nt, Homo sapiens
  misc_RNA (1)...(19): siRNA sense strand
aggagcaguagguggaauu

SEQ ID NO: 2627262 - RNA, 19 nt, Homo sapiens
  misc_RNA (1)...(19): siRNA sense strand
uaguggagccugcuagaaa

SEQ ID NO: 2627263 - RNA, 19 nt, Homo sapiens
  misc_RNA (1)...(19): siRNA sense strand
cagcauucccauuguguga

SEQ ID NO: 2627264 - RNA, 19 nt, Homo sapiens
  misc_RNA (1)...(19): siRNA sense strand
cuaaaccaaaggaagauaa

SEQ ID NO: 2627265 - RNA, 19 nt, Homo sapiens
  misc_RNA (1)...(19): siRNA sense strand
ggaagauaaagcaguagau

SEQ ID NO: 2627266 - RNA, 19 nt, Homo sapiens
  misc_RNA (1)...(19): siRNA sense strand
caucaauacaaggagcaaa

SEQ ID NO: 2627267 - RNA, 19 nt, Homo sapiens
  misc_RNA (1)...(19): siRNA sense strand
aagaaaagguauggcgauu

SEQ ID NO: 2627268 - RNA, 19 nt, Homo sapiens
  misc_RNA (1)...(19): siRNA sense strand
cuacaagagacauuggcau

SEQ ID NO: 2627269 - RNA, 19 nt, Homo sapiens
  misc_RNA (1)...(19): siRNA sense strand
ugucaaaagcaacugauaa

SEQ ID NO: 2627270 - RNA, 19 nt, Homo sapiens
  misc_RNA (1)...(19): siRNA sense strand
ucacauugacguugggacu

SEQ ID NO: 2627271 - RNA, 19 nt, Homo sapiens
  misc_RNA (1)...(19): siRNA sense strand
uauccaaguuaaugaggga

SEQ ID NO: 2627272 - RNA, 19 nt, Homo sapiens
  misc_RNA (1)...(19): siRNA sense strand
agcacaacuuagggaaaua

SEQ ID NO: 2627273 - RNA, 19 nt, Homo sapiens
  misc_RNA (1)...(19): siRNA sense strand
ggaaauaauaccauccagu

SEQ ID NO: 2627274 - RNA, 19 nt, Homo sapiens
  misc_RNA (1)...(19): siRNA sense strand
uuaagaaugugcaugguga

SEQ ID NO: 2627275 - RNA, 19 nt, Homo sapiens
  misc_RNA (1)...(19): siRNA sense strand
agaaacgggaggaagcaau

SEQ ID NO: 2627276 - RNA, 19 nt, Homo sapiens
  misc_RNA (1)...(19): siRNA sense strand
acgugaagaauguggaugu

SEQ ID NO: 2627277 - RNA, 19 nt, Homo sapiens
  misc_RNA (1)...(19): siRNA sense strand
cuaugggccuccaaggaau

SEQ ID NO: 2627278 - RNA, 19 nt, Homo sapiens
  misc_RNA (1)...(19): siRNA sense strand
acuuaggggacgugaagaa

SEQ ID NO: 2627279 - RNA, 19 nt, Homo sapiens
  misc_RNA (1)...(19): siRNA sense strand
agauuuggaaguugcagaa

SEQ ID NO: 2627280 - RNA, 19 nt, Homo sapiens
  misc_RNA (1)...(19): siRNA sense strand
cagaagauccuaugggccu

SEQ ID NO: 2627281 - RNA, 19 nt, Homo sapiens
  misc_RNA (1)...(19): siRNA sense strand
aaaucaagugucccagaaa

SEQ ID NO: 2627282 - RNA, 19 nt, Homo sapiens
  misc_RNA (1)...(19): siRNA sense strand
guuuagugucuguugauga

SEQ ID NO: 2627283 - RNA, 19 nt, Homo sapiens
  misc_RNA (1)...(19): siRNA sense strand
guuaaauacaaguguccca

SEQ ID NO: 2627284 - RNA, 19 nt, Homo sapiens
  misc_RNA (1)...(19): siRNA sense strand
augaugaaggugaagguga

SEQ ID NO: 2627285 - RNA, 19 nt, Homo sapiens
  misc_RNA (1)...(19): siRNA sense strand
gcaguagauacaucagauu

SEQ ID NO: 2627286 - RNA, 19 nt, Homo sapiens
  misc_RNA (1)...(19): siRNA sense strand
guguguggacaguuauuua

SEQ ID NO: 2627287 - RNA, 19 nt, Homo sapiens
  misc_RNA (1)...(19): siRNA sense strand
auucaucauggcagauaaa

SEQ ID NO: 2627288 - RNA, 19 nt, Homo sapiens
  misc_RNA (1)...(19): siRNA sense strand
acgagaacucacuaaagaa

SEQ ID NO: 2627289 - RNA, 19 nt, Homo sapiens
  misc_RNA (1)...(19): siRNA sense strand
ucccaaaugacauggauga

SEQ ID NO: 2627290 - RNA, 19 nt, Homo sapiens
  misc_RNA (1)...(19): siRNA sense strand
ucauagaccagaaucagaa

SEQ ID NO: 2627291 - RNA, 19 nt, Homo sapiens
  misc_RNA (1)...(19): siRNA sense strand
aggaggagggcgaggacaa

SEQ ID NO: 2627292 - RNA, 19 nt, Homo sapiens
  misc_RNA (1)...(19): siRNA sense strand
ccggaguagcccagagcaa

SEQ ID NO: 2627293 - RNA, 19 nt, Homo sapiens
  misc_RNA (1)...(19): siRNA sense strand
aggggaaauccaaggguaa

SEQ ID NO: 2627294 - RNA, 19 nt, Homo sapiens
  misc_RNA (1)...(19): siRNA sense strand
ccaacagucgagcgcgaaa

SEQ ID NO: 2627295 - RNA, 19 nt, Homo sapiens
  misc_RNA (1)...(19): siRNA sense strand
augaagacuaugaagaaga

SEQ ID NO: 2627296 - RNA, 19 nt, Homo sapiens
  misc_RNA (1)...(19): siRNA sense strand
acaaagaugccauggagca

SEQ ID NO: 2627297 - RNA, 19 nt, Homo sapiens
  misc_RNA (1)...(19): siRNA sense strand
gaccaacagucgagcgcga

SEQ ID NO: 2627298 - RNA, 19 nt, Homo sapiens
  misc_RNA (1)...(19): siRNA sense strand
cugugacauuuguggaaaa

SEQ ID NO: 2627299 - RNA, 19 nt, Homo sapiens
  misc_RNA (1)...(19): siRNA sense strand
uggcaguaguuuagaggcu

SEQ ID NO: 2627300 - RNA, 19 nt, Homo sapiens
  misc_RNA (1)...(19): siRNA sense strand
agggcgaggacaaggaaga

SEQ ID NO: 2627301 - RNA, 19 nt, Homo sapiens
  misc_RNA (1)...(19): siRNA sense strand
guggaaaacguuacaagaa

SEQ ID NO: 2627302 - RNA, 19 nt, Homo sapiens
  misc_RNA (1)...(19): siRNA sense strand
ggguaagggugugggcagu

SEQ ID NO: 2627303 - RNA, 19 nt, Homo sapiens
  misc_RNA (1)...(19): siRNA sense strand
uggagaauguagugaagcu

SEQ ID NO: 2627304 - RNA, 19 nt, Homo sapiens
  misc_RNA (1)...(19): siRNA sense strand
augaugaagacuaugaaga

SEQ ID NO: 2627305 - RNA, 19 nt, Homo sapiens
  misc_RNA (1)...(19): siRNA sense strand
cuacaguaucucugagcuu

SEQ ID NO: 2627306 - RNA, 19 nt, Homo sapiens
  misc_RNA (1)...(19): siRNA sense strand
gcgcagauaugcuaggugu

SEQ ID NO: 2627307 - RNA, 19 nt, Homo sapiens
  misc_RNA (1)...(19): siRNA sense strand
accacuauguccaggagaa

SEQ ID NO: 2627308 - RNA, 19 nt, Homo sapiens
  misc_RNA (1)...(19): siRNA sense strand
ccuaagaaaucucagucca

SEQ ID NO: 2627309 - RNA, 19 nt, Homo sapiens
  misc_RNA (1)...(19): siRNA sense strand
gaacugugauugugaggcu

SEQ ID NO: 2627310 - RNA, 19 nt, Homo sapiens
  misc_RNA (1)...(19): siRNA sense strand
cuacaguaucucugagcuu

SEQ ID NO: 2627311 - RNA, 19 nt, Homo sapiens
  misc_RNA (1)...(19): siRNA sense strand
gcgcagauaugcuaggugu

SEQ ID NO: 2627312 - RNA, 19 nt, Homo sapiens
  misc_RNA (1)...(19): siRNA sense strand
accacuauguccaggagaa

SEQ ID NO: 2627313 - RNA, 19 nt, Homo sapiens
  misc_RNA (1)...(19): siRNA sense strand
ccuaagaaaucucagucca

SEQ ID NO: 2627314 - RNA, 19 nt, Homo sapiens
  misc_RNA (1)...(19): siRNA sense strand
gaacugugauugugaggcu

SEQ ID NO: 2627315 - RNA, 19 nt, Homo sapiens
  misc_RNA (1)...(19): siRNA sense strand
ccuaagaaaucucagucca

SEQ ID NO: 2627316 - RNA, 19 nt, Homo sapiens
  misc_RNA (1)...(19): siRNA sense strand
ggucaagguuaaaggccaa

SEQ ID NO: 2627317 - RNA, 19 nt, Homo sapiens
  misc_RNA (1)...(19): siRNA sense strand
ggauaugaguugcagguga

SEQ ID NO: 2627318 - RNA, 19 nt, Homo sapiens
  misc_RNA (1)...(19): siRNA sense strand
agauggaauacgaggaaau

SEQ ID NO: 2627319 - RNA, 19 nt, Homo sapiens
  misc_RNA (1)...(19): siRNA sense strand
ccaccaagcuggagcagga

SEQ ID NO: 2627320 - RNA, 19 nt, Homo sapiens
  misc_RNA (1)...(19): siRNA sense strand
cagccaucguggaggguga

SEQ ID NO: 2627321 - RNA, 19 nt, Homo sapiens
  misc_RNA (1)...(19): siRNA sense strand
gguuccagcccgagagaga

SEQ ID NO: 2627322 - RNA, 19 nt, Homo sapiens
  misc_RNA (1)...(19): siRNA sense strand
gguuaaaggccaaggacug

SEQ ID NO: 2627323 - RNA, 19 nt, Homo sapiens
  misc_RNA (1)...(19): siRNA sense strand
ccuagaagccccaggauau

SEQ ID NO: 2627324 - RNA, 19 nt, Homo sapiens
  misc_RNA (1)...(19): siRNA sense strand
gagaaaauggagaaggaca

SEQ ID NO: 2627325 - RNA, 19 nt, Homo sapiens
  misc_RNA (1)...(19): siRNA sense strand
gugacagcuuugaggagau

SEQ ID NO: 2627326 - RNA, 19 nt, Homo sapiens
  misc_RNA (1)...(19): siRNA sense strand
gcugagaaggucauggaga

SEQ ID NO: 2627327 - RNA, 19 nt, Homo sapiens
  misc_RNA (1)...(19): siRNA sense strand
ccagaagaguacagccgau

SEQ ID NO: 2627328 - RNA, 19 nt, Homo sapiens
  misc_RNA (1)...(19): siRNA sense strand
gccuaaaggucuuggcuuc

SEQ ID NO: 2627329 - RNA, 19 nt, Homo sapiens
  misc_RNA (1)...(19): siRNA sense strand
agaaaauggagaaggacau

SEQ ID NO: 2627330 - RNA, 19 nt, Homo sapiens
  misc_RNA (1)...(19): siRNA sense strand
agaucuaccacaaggugaa

SEQ ID NO: 2627331 - RNA, 19 nt, Homo sapiens
  misc_RNA (1)...(19): siRNA sense strand
gcguagggaaccagcacau

SEQ ID NO: 2627332 - RNA, 19 nt, Homo sapiens
  misc_RNA (1)...(19): siRNA sense strand
uggucaagguuaaaggcca

SEQ ID NO: 2627333 - RNA, 19 nt, Homo sapiens
  misc_RNA (1)...(19): siRNA sense strand
cgguggaagcccucaaaga

SEQ ID NO: 2627334 - RNA, 19 nt, Homo sapiens
  misc_RNA (1)...(19): siRNA sense strand
gcgaggacggugaaggcau

SEQ ID NO: 2627335 - RNA, 19 nt, Homo sapiens
  misc_RNA (1)...(19): siRNA sense strand
ucacagugcugcauagcga

SEQ ID NO: 2627336 - RNA, 19 nt, Homo sapiens
  misc_RNA (1)...(19): siRNA sense strand
cgcagauggaagugcacua

SEQ ID NO: 2627337 - RNA, 19 nt, Homo sapiens
  misc_RNA (1)...(19): siRNA sense strand
ggucaacaguguggggcua

SEQ ID NO: 2627338 - RNA, 19 nt, Homo sapiens
  misc_RNA (1)...(19): siRNA sense strand
uugauuacgacaagaccaa

SEQ ID NO: 2627339 - RNA, 19 nt, Homo sapiens
  misc_RNA (1)...(19): siRNA sense strand
gguucugagcuacgagaca

SEQ ID NO: 2627340 - RNA, 19 nt, Homo sapiens
  misc_RNA (1)...(19): siRNA sense strand
gggagauggaauacgagga

SEQ ID NO: 2627341 - RNA, 19 nt, Homo sapiens
  misc_RNA (1)...(19): siRNA sense strand
gauucgaggccaagaucca

SEQ ID NO: 2627342 - RNA, 19 nt, Homo sapiens
  misc_RNA (1)...(19): siRNA sense strand
cagaggagcaagcccgcaa

SEQ ID NO: 2627343 - RNA, 19 nt, Homo sapiens
  misc_RNA (1)...(19): siRNA sense strand
gagcgacgagaguggucaa

SEQ ID NO: 2627344 - RNA, 19 nt, Homo sapiens
  misc_RNA (1)...(19): siRNA sense strand
gcuacgagacagugacgca

SEQ ID NO: 2627345 - RNA, 19 nt, Homo sapiens
  misc_RNA (1)...(19): siRNA sense strand
agacagugacgcagaugga

SEQ ID NO: 2627346 - RNA, 19 nt, Homo sapiens
  misc_RNA (1)...(19): siRNA sense strand
uugaugaaccggaggaagu

SEQ ID NO: 2627347 - RNA, 19 nt, Homo sapiens
  misc_RNA (1)...(19): siRNA sense strand
cuggaauacuuuuguagaa

SEQ ID NO: 2627348 - RNA, 19 nt, Homo sapiens
  misc_RNA (1)...(19): siRNA sense strand
uguagaaaaccaugaaaga

SEQ ID NO: 2627349 - RNA, 19 nt, Homo sapiens
  misc_RNA (1)...(19): siRNA sense strand
ccaucaugaccuucaaaga

SEQ ID NO: 2627350 - RNA, 19 nt, Homo sapiens
  misc_RNA (1)...(19): siRNA sense strand
guauaauuuccguggguuu

SEQ ID NO: 2627351 - RNA, 19 nt, Homo sapiens
  misc_RNA (1)...(19): siRNA sense strand
guggaauguaucagguaua

SEQ ID NO: 2627352 - RNA, 19 nt, Homo sapiens
  misc_RNA (1)...(19): siRNA sense strand
uugccauagaggagauaaa

SEQ ID NO: 2627353 - RNA, 19 nt, Homo sapiens
  misc_RNA (1)...(19): siRNA sense strand
ccgagaggaagcugaggaa

SEQ ID NO: 2627354 - RNA, 19 nt, Homo sapiens
  misc_RNA (1)...(19): siRNA sense strand
ccuccaagaaggugcaaaa

SEQ ID NO: 2627355 - RNA, 19 nt, Homo sapiens
  misc_RNA (1)...(19): siRNA sense strand
ccaagaagggagaaagacu

SEQ ID NO: 2627356 - RNA, 19 nt, Homo sapiens
  misc_RNA (1)...(19): siRNA sense strand
guuuaaggaagucggguau

SEQ ID NO: 2627357 - RNA, 19 nt, Homo sapiens
  misc_RNA (1)...(19): siRNA sense strand
ugguagaggugauucaaaa

SEQ ID NO: 2627358 - RNA, 19 nt, Homo sapiens
  misc_RNA (1)...(19): siRNA sense strand
ggacggagcccuuugggau

SEQ ID NO: 2627359 - RNA, 19 nt, Homo sapiens
  misc_RNA (1)...(19): siRNA sense strand
acgcugggauacaggauau

SEQ ID NO: 2627360 - RNA, 19 nt, Homo sapiens
  misc_RNA (1)...(19): siRNA sense strand
uguuuaaggaagucgggua

SEQ ID NO: 2627361 - RNA, 19 nt, Homo sapiens
  misc_RNA (1)...(19): siRNA sense strand
ccguagaggugauugccau

SEQ ID NO: 2627362 - RNA, 19 nt, Homo sapiens
  misc_RNA (1)...(19): siRNA sense strand
ccaaagucaucgugguuuu

SEQ ID NO: 2627363 - RNA, 19 nt, Homo sapiens
  misc_RNA (1)...(19): siRNA sense strand
guacaggggaugagaacau

SEQ ID NO: 2627364 - RNA, 19 nt, Homo sapiens
  misc_RNA (1)...(19): siRNA sense strand
gcccagaaaagcagcgaua

SEQ ID NO: 2627365 - RNA, 19 nt, Homo sapiens
  misc_RNA (1)...(19): siRNA sense strand
ccaggaagucuguccacaa

SEQ ID NO: 2627366 - RNA, 19 nt, Homo sapiens
  misc_RNA (1)...(19): siRNA sense strand
ccaucagcagcaagagcaa

SEQ ID NO: 2627367 - RNA, 19 nt, Homo sapiens
  misc_RNA (1)...(19): siRNA sense strand
ggauugagaaauuccgaga

SEQ ID NO: 2627368 - RNA, 19 nt, Homo sapiens
  misc_RNA (1)...(19): siRNA sense strand
cugaugaggaagagaucca

SEQ ID NO: 2627369 - RNA, 19 nt, Homo sapiens
  misc_RNA (1)...(19): siRNA sense strand
ugccaagaagggagaaaga

SEQ ID NO: 2627370 - RNA, 19 nt, Homo sapiens
  misc_RNA (1)...(19): siRNA sense strand
gaugcaagcagaaggucau

SEQ ID NO: 2627371 - RNA, 19 nt, Homo sapiens
  misc_RNA (1)...(19): siRNA sense strand
acgccuugcaagauauaua

SEQ ID NO: 2627372 - RNA, 19 nt, Homo sapiens
  misc_RNA (1)...(19): siRNA sense strand
ucaucaacgaggagaaaau

SEQ ID NO: 2627373 - RNA, 19 nt, Homo sapiens
  misc_RNA (1)...(19): siRNA sense strand
aguauagugaugagacaga

SEQ ID NO: 2627374 - RNA, 19 nt, Homo sapiens
  misc_RNA (1)...(19): siRNA sense strand
guggugaccugguggggaa

SEQ ID NO: 2627375 - RNA, 19 nt, Homo sapiens
  misc_RNA (1)...(19): siRNA sense strand
ccaucguguuuaaggaagu

SEQ ID NO: 2627376 - RNA, 19 nt, Homo sapiens
  misc_RNA (1)...(19): siRNA sense strand
gcagcaacgucucccgcaa

SEQ ID NO: 2627377 - RNA, 19 nt, Homo sapiens
  misc_RNA (1)...(19): siRNA sense strand
auuacaacgucuaugccaa

SEQ ID NO: 2627378 - RNA, 19 nt, Homo sapiens
  misc_RNA (1)...(19): siRNA sense strand
gagcaacagcgaagaccca

SEQ ID NO: 2627379 - RNA, 19 nt, Homo sapiens
  misc_RNA (1)...(19): siRNA sense strand
ggccaaagucaucgugguu

SEQ ID NO: 2627380 - RNA, 19 nt, Homo sapiens
  misc_RNA (1)...(19): siRNA sense strand
gcgaagacccauucccaca

SEQ ID NO: 2627381 - RNA, 19 nt, Homo sapiens
  misc_RNA (1)...(19): siRNA sense strand
cagcaagagcaacagcgaa

SEQ ID NO: 2627382 - RNA, 19 nt, Homo sapiens
  misc_RNA (1)...(19): siRNA sense strand
gggaaacggacuuagaucu

SEQ ID NO: 2627383 - RNA, 19 nt, Homo sapiens
  misc_RNA (1)...(19): siRNA sense strand
ccaccagcuuccaccgcaa

SEQ ID NO: 2627384 - RNA, 19 nt, Homo sapiens
  misc_RNA (1)...(19): siRNA sense strand
cuucaucaacgaggagaaa

SEQ ID NO: 2627385 - RNA, 19 nt, Homo sapiens
  misc_RNA (1)...(19): siRNA sense strand
agaugcaagcagaagguca

SEQ ID NO: 2627386 - RNA, 19 nt, Homo sapiens
  misc_RNA (1)...(19): siRNA sense strand
aggagauagcagaggaauu

SEQ ID NO: 2627387 - RNA, 19 nt, Homo sapiens
  misc_RNA (1)...(19): siRNA sense strand
cggagauggaggagcccua

SEQ ID NO: 2627388 - RNA, 19 nt, Homo sapiens
  misc_RNA (1)...(19): siRNA sense strand
ccuauaaguucaagcguuc

SEQ ID NO: 2627389 - RNA, 19 nt, Homo sapiens
  misc_RNA (1)...(19): siRNA sense strand
cagcaaagccagucugcca

SEQ ID NO: 2627390 - RNA, 19 nt, Homo sapiens
  misc_RNA (1)...(19): siRNA sense strand
ccaggagauagcagaggaa

SEQ ID NO: 2627391 - RNA, 19 nt, Homo sapiens
  misc_RNA (1)...(19): siRNA sense strand
ucgaaggguuugugaucca

SEQ ID NO: 2627392 - RNA, 19 nt, Homo sapiens
  misc_RNA (1)...(19): siRNA sense strand
gccuauaaguucaagcguu

SEQ ID NO: 2627393 - RNA, 19 nt, Homo sapiens
  misc_RNA (1)...(19): siRNA sense strand
caggaagacuccagccguu

SEQ ID NO: 2627394 - RNA, 19 nt, Homo sapiens
  misc_RNA (1)...(19): siRNA sense strand
uggcuugugcaaagaggua

SEQ ID NO: 2627395 - RNA, 19 nt, Homo sapiens
  misc_RNA (1)...(19): siRNA sense strand
gcaagaauccaaagaggag

SEQ ID NO: 2627396 - RNA, 19 nt, Homo sapiens
  misc_RNA (1)...(19): siRNA sense strand
gcaaagagguacaacgugg

SEQ ID NO: 2627397 - RNA, 19 nt, Homo sapiens
  misc_RNA (1)...(19): siRNA sense strand
ucaagaagaaguaugcaca

SEQ ID NO: 2627398 - RNA, 19 nt, Homo sapiens
  misc_RNA (1)...(19): siRNA sense strand
aggagauagcagaggaauu

SEQ ID NO: 2627399 - RNA, 19 nt, Homo sapiens
  misc_RNA (1)...(19): siRNA sense strand
cggagauggaggagcccua

SEQ ID NO: 2627400 - RNA, 19 nt, Homo sapiens
  misc_RNA (1)...(19): siRNA sense strand
cggcaugaccucagggaac

SEQ ID NO: 2627401 - RNA, 19 nt, Homo sapiens
  misc_RNA (1)...(19): siRNA sense strand
ccuauaaguucaagcguuc

SEQ ID NO: 2627402 - RNA, 19 nt, Homo sapiens
  misc_RNA (1)...(19): siRNA sense strand
cagcaaagccagucugcca

SEQ ID NO: 2627403 - RNA, 19 nt, Homo sapiens
  misc_RNA (1)...(19): siRNA sense strand
ccaggagauagcagaggaa

SEQ ID NO: 2627404 - RNA, 19 nt, Homo sapiens
  misc_RNA (1)...(19): siRNA sense strand
ucgaaggguuugugaucca

SEQ ID NO: 2627405 - RNA, 19 nt, Homo sapiens
  misc_RNA (1)...(19): siRNA sense strand
gccuauaaguucaagcguu

SEQ ID NO: 2627406 - RNA, 19 nt, Homo sapiens
  misc_RNA (1)...(19): siRNA sense strand
caggaagacuccagccguu

SEQ ID NO: 2627407 - RNA, 19 nt, Homo sapiens
  misc_RNA (1)...(19): siRNA sense strand
uggcuugugcaaagaggua

SEQ ID NO: 2627408 - RNA, 19 nt, Homo sapiens
  misc_RNA (1)...(19): siRNA sense strand
gcaagaauccaaagaggag

SEQ ID NO: 2627409 - RNA, 19 nt, Homo sapiens
  misc_RNA (1)...(19): siRNA sense strand
gcaaagagguacaacgugg

SEQ ID NO: 2627410 - RNA, 19 nt, Homo sapiens
  misc_RNA (1)...(19): siRNA sense strand
ucaagaagaaguaugcaca

SEQ ID NO: 2627411 - RNA, 19 nt, Homo sapiens
  misc_RNA (1)...(19): siRNA sense strand
ccaagaggaugcucgggua

SEQ ID NO: 2627412 - RNA, 19 nt, Homo sapiens
  misc_RNA (1)...(19): siRNA sense strand
ccaagaggaugcucgggua

SEQ ID NO: 2627413 - RNA, 19 nt, Homo sapiens
  misc_RNA (1)...(19): siRNA sense strand
cauaagcacuuuagggaca

SEQ ID NO: 2627414 - RNA, 19 nt, Homo sapiens
  misc_RNA (1)...(19): siRNA sense strand
uggaauacguacaggcaca

SEQ ID NO: 2627415 - RNA, 19 nt, Homo sapiens
  misc_RNA (1)...(19): siRNA sense strand
agauugaaguagagcacau

SEQ ID NO: 2627416 - RNA, 19 nt, Homo sapiens
  misc_RNA (1)...(19): siRNA sense strand
gugacuugauggaggguga

SEQ ID NO: 2627417 - RNA, 19 nt, Homo sapiens
  misc_RNA (1)...(19): siRNA sense strand
ggugucaagauuuggaaua

SEQ ID NO: 2627418 - RNA, 19 nt, Homo sapiens
  misc_RNA (1)...(19): siRNA sense strand
cuggaagaguugaguuuau

SEQ ID NO: 2627419 - RNA, 19 nt, Homo sapiens
  misc_RNA (1)...(19): siRNA sense strand
agugaucaguauugguuaa

SEQ ID NO: 2627420 - RNA, 19 nt, Homo sapiens
  misc_RNA (1)...(19): siRNA sense strand
gagaagaagagaaggcgca

SEQ ID NO: 2627421 - RNA, 19 nt, Homo sapiens
  misc_RNA (1)...(19): siRNA sense strand
caggguugcccgagaagaa

SEQ ID NO: 2627422 - RNA, 19 nt, Homo sapiens
  misc_RNA (1)...(19): siRNA sense strand
cuugaaagaagaauggaau

SEQ ID NO: 2627423 - RNA, 19 nt, Homo sapiens
  misc_RNA (1)...(19): siRNA sense strand
aguccagucugaagaggaa

SEQ ID NO: 2627424 - RNA, 19 nt, Homo sapiens
  misc_RNA (1)...(19): siRNA sense strand
cagaccagcccaugugaaa

SEQ ID NO: 2627425 - RNA, 19 nt, Homo sapiens
  misc_RNA (1)...(19): siRNA sense strand
gguucaggucauagcaaau

SEQ ID NO: 2627426 - RNA, 19 nt, Homo sapiens
  misc_RNA (1)...(19): siRNA sense strand
gaagauaagcaaagcguac

SEQ ID NO: 2627427 - RNA, 19 nt, Homo sapiens
  misc_RNA (1)...(19): siRNA sense strand
ugggacaacaagaguuaua

SEQ ID NO: 2627428 - RNA, 19 nt, Homo sapiens
  misc_RNA (1)...(19): siRNA sense strand
ggguaagggcagacuggau

SEQ ID NO: 2627429 - RNA, 19 nt, Homo sapiens
  misc_RNA (1)...(19): siRNA sense strand
cccagauauugcaggagaa

SEQ ID NO: 2627430 - RNA, 19 nt, Homo sapiens
  misc_RNA (1)...(19): siRNA sense strand
acaacaaugaugaagucaa

SEQ ID NO: 2627431 - RNA, 19 nt, Homo sapiens
  misc_RNA (1)...(19): siRNA sense strand
aagaagagaaggcgcaaca

SEQ ID NO: 2627432 - RNA, 19 nt, Homo sapiens
  misc_RNA (1)...(19): siRNA sense strand
agagaaggcgcaacaacaa

SEQ ID NO: 2627433 - RNA, 19 nt, Homo sapiens
  misc_RNA (1)...(19): siRNA sense strand
ggaagaagaagcauccgaa

SEQ ID NO: 2627434 - RNA, 19 nt, Homo sapiens
  misc_RNA (1)...(19): siRNA sense strand
augcugaacacuugaaaga

SEQ ID NO: 2627435 - RNA, 19 nt, Homo sapiens
  misc_RNA (1)...(19): siRNA sense strand
acuugaaagaagaauggaa

SEQ ID NO: 2627436 - RNA, 19 nt, Homo sapiens
  misc_RNA (1)...(19): siRNA sense strand
cugaacacuugaaagaaga

SEQ ID NO: 2627437 - RNA, 19 nt, Homo sapiens
  misc_RNA (1)...(19): siRNA sense strand
gaaagugagaacacagaca

SEQ ID NO: 2627438 - RNA, 19 nt, Homo sapiens
  misc_RNA (1)...(19): siRNA sense strand
ugauggagggugagcucua

SEQ ID NO: 2627439 - RNA, 19 nt, Homo sapiens
  misc_RNA (1)...(19): siRNA sense strand
acuuauucuuggagcgcuu

SEQ ID NO: 2627440 - RNA, 19 nt, Homo sapiens
  misc_RNA (1)...(19): siRNA sense strand
caaaauucacugggagaaa

SEQ ID NO: 2627441 - RNA, 19 nt, Homo sapiens
  misc_RNA (1)...(19): siRNA sense strand
uuguuugccuagagaauuu

SEQ ID NO: 2627442 - RNA, 19 nt, Homo sapiens
  misc_RNA (1)...(19): siRNA sense strand
augaugaagucaaugccaa

SEQ ID NO: 2627443 - RNA, 19 nt, Homo sapiens
  misc_RNA (1)...(19): siRNA sense strand
ugguucaggucauagcaaa

SEQ ID NO: 2627444 - RNA, 19 nt, Homo sapiens
  misc_RNA (1)...(19): siRNA sense strand
cauaaagcgauuugugguu

SEQ ID NO: 2627445 - RNA, 19 nt, Homo sapiens
  misc_RNA (1)...(19): siRNA sense strand
ugaugaagucaaugccaau

SEQ ID NO: 2627446 - RNA, 19 nt, Homo sapiens
  misc_RNA (1)...(19): siRNA sense strand
cggaaagugagaacacaga

SEQ ID NO: 2627447 - RNA, 19 nt, Homo sapiens
  misc_RNA (1)...(19): siRNA sense strand
gugagaacacagacacuuu

SEQ ID NO: 2627448 - RNA, 19 nt, Homo sapiens
  misc_RNA (1)...(19): siRNA sense strand
cuucacaauucuccaggaa

SEQ ID NO: 2627449 - RNA, 19 nt, Homo sapiens
  misc_RNA (1)...(19): siRNA sense strand
uguuguuugccuagagaau

SEQ ID NO: 2627450 - RNA, 19 nt, Homo sapiens
  misc_RNA (1)...(19): siRNA sense strand
auacaguggacgcaagauu

SEQ ID NO: 2627451 - RNA, 19 nt, Homo sapiens
  misc_RNA (1)...(19): siRNA sense strand
aagagaaggcgcaacaaca

SEQ ID NO: 2627452 - RNA, 19 nt, Homo sapiens
  misc_RNA (1)...(19): siRNA sense strand
ggcaaaauucacugggaga

SEQ ID NO: 2627453 - RNA, 19 nt, Homo sapiens
  misc_RNA (1)...(19): siRNA sense strand
agucaugcuuaaagaauac

SEQ ID NO: 2627454 - RNA, 19 nt, Homo sapiens
  misc_RNA (1)...(19): siRNA sense strand
gugagaaggaaguauuuga

SEQ ID NO: 2627455 - RNA, 19 nt, Homo sapiens
  misc_RNA (1)...(19): siRNA sense strand
auugggacaacaagaguua

SEQ ID NO: 2627456 - RNA, 19 nt, Homo sapiens
  misc_RNA (1)...(19): siRNA sense strand
ucucaaggaagaagaagca

SEQ ID NO: 2627457 - RNA, 19 nt, Homo sapiens
  misc_RNA (1)...(19): siRNA sense strand
gaaaggaaggggaggucau

SEQ ID NO: 2627458 - RNA, 19 nt, Homo sapiens
  misc_RNA (1)...(19): siRNA sense strand
ugagcuugguucuaguuaa

SEQ ID NO: 2627459 - RNA, 19 nt, Homo sapiens
  misc_RNA (1)...(19): siRNA sense strand
ucugauaccaacugauuau

SEQ ID NO: 2627460 - RNA, 19 nt, Homo sapiens
  misc_RNA (1)...(19): siRNA sense strand
agaagaaggauguccggga

SEQ ID NO: 2627461 - RNA, 19 nt, Homo sapiens
  misc_RNA (1)...(19): siRNA sense strand
gggcagacuggauguuuua

SEQ ID NO: 2627462 - RNA, 19 nt, Homo sapiens
  misc_RNA (1)...(19): siRNA sense strand
augaagauauggaaccuga

SEQ ID NO: 2627463 - RNA, 19 nt, Homo sapiens
  misc_RNA (1)...(19): siRNA sense strand
gguacagaaaccugaggaa

SEQ ID NO: 2627464 - RNA, 19 nt, Homo sapiens
  misc_RNA (1)...(19): siRNA sense strand
gcacagaaguugggccuca

SEQ ID NO: 2627465 - RNA, 19 nt, Homo sapiens
  misc_RNA (1)...(19): siRNA sense strand
gaugaaugggagaagguga

SEQ ID NO: 2627466 - RNA, 19 nt, Homo sapiens
  misc_RNA (1)...(19): siRNA sense strand
augaaugggagaaggugaa

SEQ ID NO: 2627467 - RNA, 19 nt, Homo sapiens
  misc_RNA (1)...(19): siRNA sense strand
uacagaaaccugaggaaaa

SEQ ID NO: 2627468 - RNA, 19 nt, Homo sapiens
  misc_RNA (1)...(19): siRNA sense strand
acagaagaggaaugggaga

SEQ ID NO: 2627469 - RNA, 19 nt, Homo sapiens
  misc_RNA (1)...(19): siRNA sense strand
cagaaaucgaucagugcuu

SEQ ID NO: 2627470 - RNA, 19 nt, Homo sapiens
  misc_RNA (1)...(19): siRNA sense strand
ucacagaagaggaauggga

SEQ ID NO: 2627471 - RNA, 19 nt, Homo sapiens
  misc_RNA (1)...(19): siRNA sense strand
agaaagauaacuuggcagu

SEQ ID NO: 2627472 - RNA, 19 nt, Homo sapiens
  misc_RNA (1)...(19): siRNA sense strand
guuguuagaaagugguaca

SEQ ID NO: 2627473 - RNA, 19 nt, Homo sapiens
  misc_RNA (1)...(19): siRNA sense strand
gacacaaguacaaaagaaa

SEQ ID NO: 2627474 - RNA, 19 nt, Homo sapiens
  misc_RNA (1)...(19): siRNA sense strand
agaaagugguacagaaacc

SEQ ID NO: 2627475 - RNA, 19 nt, Homo sapiens
  misc_RNA (1)...(19): siRNA sense strand
gcuccugcuaccagaagaa

SEQ ID NO: 2627476 - RNA, 19 nt, Homo sapiens
  misc_RNA (1)...(19): siRNA sense strand
ugaccagaauccaagccua

SEQ ID NO: 2627477 - RNA, 19 nt, Homo sapiens
  misc_RNA (1)...(19): siRNA sense strand
cauaaaucgaaguguucuu

SEQ ID NO: 2627478 - RNA, 19 nt, Homo sapiens
  misc_RNA (1)...(19): siRNA sense strand
aaugggagaaggugaaaca

SEQ ID NO: 2627479 - RNA, 19 nt, Homo sapiens
  misc_RNA (1)...(19): siRNA sense strand
aagaggaaugggagaaaau

SEQ ID NO: 2627480 - RNA, 19 nt, Homo sapiens
  misc_RNA (1)...(19): siRNA sense strand
gggucacucaucuaagaaa

SEQ ID NO: 2627481 - RNA, 19 nt, Homo sapiens
  misc_RNA (1)...(19): siRNA sense strand
agaaagaagacuuggugga

SEQ ID NO: 2627482 - RNA, 19 nt, Homo sapiens
  misc_RNA (1)...(19): siRNA sense strand
ccgguuauacaaagagaau

SEQ ID NO: 2627483 - RNA, 19 nt, Homo sapiens
  misc_RNA (1)...(19): siRNA sense strand
aaggagagagugagagcuu

SEQ ID NO: 2627484 - RNA, 19 nt, Homo sapiens
  misc_RNA (1)...(19): siRNA sense strand
augggaacugguagagaaa

SEQ ID NO: 2627485 - RNA, 19 nt, Homo sapiens
  misc_RNA (1)...(19): siRNA sense strand
cagaagaugaugaugacga

SEQ ID NO: 2627486 - RNA, 19 nt, Homo sapiens
  misc_RNA (1)...(19): siRNA sense strand
acgacgaugaugaggauga

SEQ ID NO: 2627487 - RNA, 19 nt, Homo sapiens
  misc_RNA (1)...(19): siRNA sense strand
aggaaauucuggcucggaa

SEQ ID NO: 2627488 - RNA, 19 nt, Homo sapiens
  misc_RNA (1)...(19): siRNA sense strand
aggaugaugaugaugaaga

SEQ ID NO: 2627489 - RNA, 19 nt, Homo sapiens
  misc_RNA (1)...(19): siRNA sense strand
agaagaaaacgcagaggau

SEQ ID NO: 2627490 - RNA, 19 nt, Homo sapiens
  misc_RNA (1)...(19): siRNA sense strand
augaugaggaugaugauga

SEQ ID NO: 2627491 - RNA, 19 nt, Homo sapiens
  misc_RNA (1)...(19): siRNA sense strand
ugucuucguuucagggaga

SEQ ID NO: 2627492 - RNA, 19 nt, Homo sapiens
  misc_RNA (1)...(19): siRNA sense strand
uagagaaaguaaaccgguu

SEQ ID NO: 2627493 - RNA, 19 nt, Homo sapiens
  misc_RNA (1)...(19): siRNA sense strand
gagccgugcacguguucaa

SEQ ID NO: 2627494 - RNA, 19 nt, Homo sapiens
  misc_RNA (1)...(19): siRNA sense strand
agaaagaagacuuggugga

SEQ ID NO: 2627495 - RNA, 19 nt, Homo sapiens
  misc_RNA (1)...(19): siRNA sense strand
ccgguuauacaaagagaau

SEQ ID NO: 2627496 - RNA, 19 nt, Homo sapiens
  misc_RNA (1)...(19): siRNA sense strand
aaggagagagugagagcuu

SEQ ID NO: 2627497 - RNA, 19 nt, Homo sapiens
  misc_RNA (1)...(19): siRNA sense strand
augggaacugguagagaaa

SEQ ID NO: 2627498 - RNA, 19 nt, Homo sapiens
  misc_RNA (1)...(19): siRNA sense strand
cagaagaugaugaugacga

SEQ ID NO: 2627499 - RNA, 19 nt, Homo sapiens
  misc_RNA (1)...(19): siRNA sense strand
acgacgaugaugaggauga

SEQ ID NO: 2627500 - RNA, 19 nt, Homo sapiens
  misc_RNA (1)...(19): siRNA sense strand
aggaaauucuggcucggaa

SEQ ID NO: 2627501 - RNA, 19 nt, Homo sapiens
  misc_RNA (1)...(19): siRNA sense strand
aggaugaugaugaugaaga

SEQ ID NO: 2627502 - RNA, 19 nt, Homo sapiens
  misc_RNA (1)...(19): siRNA sense strand
agaagaaaacgcagaggau

SEQ ID NO: 2627503 - RNA, 19 nt, Homo sapiens
  misc_RNA (1)...(19): siRNA sense strand
augaugaggaugaugauga

SEQ ID NO: 2627504 - RNA, 19 nt, Homo sapiens
  misc_RNA (1)...(19): siRNA sense strand
ugucuucguuucagggaga

SEQ ID NO: 2627505 - RNA, 19 nt, Homo sapiens
  misc_RNA (1)...(19): siRNA sense strand
uagagaaaguaaaccgguu

SEQ ID NO: 2627506 - RNA, 19 nt, Homo sapiens
  misc_RNA (1)...(19): siRNA sense strand
gagccgugcacguguucaa

SEQ ID NO: 2627507 - RNA, 19 nt, Homo sapiens
  misc_RNA (1)...(19): siRNA sense strand
gggaaguagaaguagcaaa

SEQ ID NO: 2627508 - RNA, 19 nt, Homo sapiens
  misc_RNA (1)...(19): siRNA sense strand
ggaaagugguacugggaag

SEQ ID NO: 2627509 - RNA, 19 nt, Homo sapiens
  misc_RNA (1)...(19): siRNA sense strand
aggauauguuggugagcau

SEQ ID NO: 2627510 - RNA, 19 nt, Homo sapiens
  misc_RNA (1)...(19): siRNA sense strand
ggaaugaaggugcuggcaa

SEQ ID NO: 2627511 - RNA, 19 nt, Homo sapiens
  misc_RNA (1)...(19): siRNA sense strand
gaaugaaggugcuggcaac

SEQ ID NO: 2627512 - RNA, 19 nt, Homo sapiens
  misc_RNA (1)...(19): siRNA sense strand
uggugagcauucaggcaaa

SEQ ID NO: 2627513 - RNA, 19 nt, Homo sapiens
  misc_RNA (1)...(19): siRNA sense strand
uggagaaacuuuaucccua

SEQ ID NO: 2627514 - RNA, 19 nt, Homo sapiens
  misc_RNA (1)...(19): siRNA sense strand
caacagaacuccuucgacu

SEQ ID NO: 2627515 - RNA, 19 nt, Homo sapiens
  misc_RNA (1)...(19): siRNA sense strand
aucuaaaggcucuggauuu

SEQ ID NO: 2627516 - RNA, 19 nt, Homo sapiens
  misc_RNA (1)...(19): siRNA sense strand
uggagagaauaaagaacca

SEQ ID NO: 2627517 - RNA, 19 nt, Homo sapiens
  misc_RNA (1)...(19): siRNA sense strand
aaguagcaaagaagacaaa

SEQ ID NO: 2627518 - RNA, 19 nt, Homo sapiens
  misc_RNA (1)...(19): siRNA sense strand
uccucuaacuccugagcaa

SEQ ID NO: 2627519 - RNA, 19 nt, Homo sapiens
  misc_RNA (1)...(19): siRNA sense strand
augaugguggagagaauaa

SEQ ID NO: 2627520 - RNA, 19 nt, Homo sapiens
  misc_RNA (1)...(19): siRNA sense strand
aguaacacuuucauggaga

SEQ ID NO: 2627521 - RNA, 19 nt, Homo sapiens
  misc_RNA (1)...(19): siRNA sense strand
ccuuaaugaugguggagag

SEQ ID NO: 2627522 - RNA, 19 nt, Homo sapiens
  misc_RNA (1)...(19): siRNA sense strand
uuaagaagauaaugccuga

SEQ ID NO: 2627523 - RNA, 19 nt, Homo sapiens
  misc_RNA (1)...(19): siRNA sense strand
aguuggaguugucagagaa

SEQ ID NO: 2627524 - RNA, 19 nt, Homo sapiens
  misc_RNA (1)...(19): siRNA sense strand
ccuugaaugaggagaugga

SEQ ID NO: 2627525 - RNA, 19 nt, Homo sapiens
  misc_RNA (1)...(19): siRNA sense strand
ggagggaaaugcaggacac

SEQ ID NO: 2627526 - RNA, 19 nt, Homo sapiens
  misc_RNA (1)...(19): siRNA sense strand
gagcaaugucucuuagcca

SEQ ID NO: 2627527 - RNA, 19 nt, Homo sapiens
  misc_RNA (1)...(19): siRNA sense strand
ugggcauauaccuggauua

SEQ ID NO: 2627528 - RNA, 19 nt, Homo sapiens
  misc_RNA (1)...(19): siRNA sense strand
guacaugguauggagggaa

SEQ ID NO: 2627529 - RNA, 19 nt, Homo sapiens
  misc_RNA (1)...(19): siRNA sense strand
guagcaaagaagacaaaau

SEQ ID NO: 2627530 - RNA, 19 nt, Homo sapiens
  misc_RNA (1)...(19): siRNA sense strand
gggaaguagaaguagcaaa

SEQ ID NO: 2627531 - RNA, 19 nt, Homo sapiens
  misc_RNA (1)...(19): siRNA sense strand
ggaaagugguacugggaag

SEQ ID NO: 2627532 - RNA, 19 nt, Homo sapiens
  misc_RNA (1)...(19): siRNA sense strand
aggauauguuggugagcau

SEQ ID NO: 2627533 - RNA, 19 nt, Homo sapiens
  misc_RNA (1)...(19): siRNA sense strand
ggaaugaaggugcuggcaa

SEQ ID NO: 2627534 - RNA, 19 nt, Homo sapiens
  misc_RNA (1)...(19): siRNA sense strand
gaaugaaggugcuggcaac

SEQ ID NO: 2627535 - RNA, 19 nt, Homo sapiens
  misc_RNA (1)...(19): siRNA sense strand
uggugagcauucaggcaaa

SEQ ID NO: 2627536 - RNA, 19 nt, Homo sapiens
  misc_RNA (1)...(19): siRNA sense strand
uggagaaacuuuaucccua

SEQ ID NO: 2627537 - RNA, 19 nt, Homo sapiens
  misc_RNA (1)...(19): siRNA sense strand
caacagaacuccuucgacu

SEQ ID NO: 2627538 - RNA, 19 nt, Homo sapiens
  misc_RNA (1)...(19): siRNA sense strand
aucuaaaggcucuggauuu

SEQ ID NO: 2627539 - RNA, 19 nt, Homo sapiens
  misc_RNA (1)...(19): siRNA sense strand
uggagagaauaaagaacca

SEQ ID NO: 2627540 - RNA, 19 nt, Homo sapiens
  misc_RNA (1)...(19): siRNA sense strand
aaguagcaaagaagacaaa

SEQ ID NO: 2627541 - RNA, 19 nt, Homo sapiens
  misc_RNA (1)...(19): siRNA sense strand
uccucuaacuccugagcaa

SEQ ID NO: 2627542 - RNA, 19 nt, Homo sapiens
  misc_RNA (1)...(19): siRNA sense strand
augaugguggagagaauaa

SEQ ID NO: 2627543 - RNA, 19 nt, Homo sapiens
  misc_RNA (1)...(19): siRNA sense strand
aguaacacuuucauggaga

SEQ ID NO: 2627544 - RNA, 19 nt, Homo sapiens
  misc_RNA (1)...(19): siRNA sense strand
ccuuaaugaugguggagag

SEQ ID NO: 2627545 - RNA, 19 nt, Homo sapiens
  misc_RNA (1)...(19): siRNA sense strand
uuaagaagauaaugccuga

SEQ ID NO: 2627546 - RNA, 19 nt, Homo sapiens
  misc_RNA (1)...(19): siRNA sense strand
aguuggaguugucagagaa

SEQ ID NO: 2627547 - RNA, 19 nt, Homo sapiens
  misc_RNA (1)...(19): siRNA sense strand
ccuugaaugaggagaugga

SEQ ID NO: 2627548 - RNA, 19 nt, Homo sapiens
  misc_RNA (1)...(19): siRNA sense strand
ggagggaaaugcaggacac

SEQ ID NO: 2627549 - RNA, 19 nt, Homo sapiens
  misc_RNA (1)...(19): siRNA sense strand
gagcaaugucucuuagcca

SEQ ID NO: 2627550 - RNA, 19 nt, Homo sapiens
  misc_RNA (1)...(19): siRNA sense strand
ugggcauauaccuggauua

SEQ ID NO: 2627551 - RNA, 19 nt, Homo sapiens
  misc_RNA (1)...(19): siRNA sense strand
guacaugguauggagggaa

SEQ ID NO: 2627552 - RNA, 19 nt, Homo sapiens
  misc_RNA (1)...(19): siRNA sense strand
guagcaaagaagacaaaau

SEQ ID NO: 2627553 - RNA, 19 nt, Homo sapiens
  misc_RNA (1)...(19): siRNA sense strand
agaaauuggcuuuggaaaa

SEQ ID NO: 2627554 - RNA, 19 nt, Homo sapiens
  misc_RNA (1)...(19): siRNA sense strand
gguuagacucugaaggaau

SEQ ID NO: 2627555 - RNA, 19 nt, Homo sapiens
  misc_RNA (1)...(19): siRNA sense strand
cugaagaggccaugaaaca

SEQ ID NO: 2627556 - RNA, 19 nt, Homo sapiens
  misc_RNA (1)...(19): siRNA sense strand
ugaccaagcuucugggaca

SEQ ID NO: 2627557 - RNA, 19 nt, Homo sapiens
  misc_RNA (1)...(19): siRNA sense strand
aggaagaaguaaauugaca

SEQ ID NO: 2627558 - RNA, 19 nt, Homo sapiens
  misc_RNA (1)...(19): siRNA sense strand
cuucaaaugaggaguucaa

SEQ ID NO: 2627559 - RNA, 19 nt, Homo sapiens
  misc_RNA (1)...(19): siRNA sense strand
cagaaauuggcuuuggaaa

SEQ ID NO: 2627560 - RNA, 19 nt, Homo sapiens
  misc_RNA (1)...(19): siRNA sense strand
cauuaaugagaaaggagaa

SEQ ID NO: 2627561 - RNA, 19 nt, Homo sapiens
  misc_RNA (1)...(19): siRNA sense strand
cagaaaucguauacauaga

SEQ ID NO: 2627562 - RNA, 19 nt, Homo sapiens
  misc_RNA (1)...(19): siRNA sense strand
uggauaaagaccugaaaca

SEQ ID NO: 2627563 - RNA, 19 nt, Homo sapiens
  misc_RNA (1)...(19): siRNA sense strand
cugaauuggcugaacaaau

SEQ ID NO: 2627564 - RNA, 19 nt, Homo sapiens
  misc_RNA (1)...(19): siRNA sense strand
cuugaaaaguugcagauaa

SEQ ID NO: 2627565 - RNA, 19 nt, Homo sapiens
  misc_RNA (1)...(19): siRNA sense strand
gcccagaaauggaagcaga

SEQ ID NO: 2627566 - RNA, 19 nt, Homo sapiens
  misc_RNA (1)...(19): siRNA sense strand
ucucaauggaggauuuaaa

SEQ ID NO: 2627567 - RNA, 19 nt, Homo sapiens
  misc_RNA (1)...(19): siRNA sense strand
ccgauuggaacaugaagaa

SEQ ID NO: 2627568 - RNA, 19 nt, Homo sapiens
  misc_RNA (1)...(19): siRNA sense strand
auacauagacggaucucaa

SEQ ID NO: 2627569 - RNA, 19 nt, Homo sapiens
  misc_RNA (1)...(19): siRNA sense strand
gaaucuaagaaaaggguuu

SEQ ID NO: 2627570 - RNA, 19 nt, Homo sapiens
  misc_RNA (1)...(19): siRNA sense strand
cagcaaggauaaugagccu

SEQ ID NO: 2627571 - RNA, 19 nt, Homo sapiens
  misc_RNA (1)...(19): siRNA sense strand
cugaaggaauugaguugau

SEQ ID NO: 2627572 - RNA, 19 nt, Homo sapiens
  misc_RNA (1)...(19): siRNA sense strand
ggaaaagcuuggagagggu

SEQ ID NO: 2627573 - RNA, 19 nt, Homo sapiens
  misc_RNA (1)...(19): siRNA sense strand
uggaagcagauuagauauu

SEQ ID NO: 2627574 - RNA, 19 nt, Homo sapiens
  misc_RNA (1)...(19): siRNA sense strand
agacaggacaugggaagaa

SEQ ID NO: 2627575 - RNA, 19 nt, Homo sapiens
  misc_RNA (1)...(19): siRNA sense strand
gcuagcagauuuuggacua

SEQ ID NO: 2627576 - RNA, 19 nt, Homo sapiens
  misc_RNA (1)...(19): siRNA sense strand
aaagagauucaguugcaaa

SEQ ID NO: 2627577 - RNA, 19 nt, Homo sapiens
  misc_RNA (1)...(19): siRNA sense strand
cauuguucacacagauaaa

SEQ ID NO: 2627578 - RNA, 19 nt, Homo sapiens
  misc_RNA (1)...(19): siRNA sense strand
caggaucaaccguggaaga

SEQ ID NO: 2627579 - RNA, 19 nt, Homo sapiens
  misc_RNA (1)...(19): siRNA sense strand
agaauuaaagcuagcagau

SEQ ID NO: 2627580 - RNA, 19 nt, Homo sapiens
  misc_RNA (1)...(19): siRNA sense strand
agagcuuccuuaucagaaa

SEQ ID NO: 2627581 - RNA, 19 nt, Homo sapiens
  misc_RNA (1)...(19): siRNA sense strand
auggaaaccuacaucaaau

SEQ ID NO: 2627582 - RNA, 19 nt, Homo sapiens
  misc_RNA (1)...(19): siRNA sense strand
cgaaggucucguagagcuu

SEQ ID NO: 2627583 - RNA, 19 nt, Homo sapiens
  misc_RNA (1)...(19): siRNA sense strand
ggagaggguacauaugcaa

SEQ ID NO: 2627584 - RNA, 19 nt, Homo sapiens
  misc_RNA (1)...(19): siRNA sense strand
ggaaacuuggccagguauu

SEQ ID NO: 2627585 - RNA, 19 nt, Homo sapiens
  misc_RNA (1)...(19): siRNA sense strand
accaagaauacaugcuuua

SEQ ID NO: 2627586 - RNA, 19 nt, Homo sapiens
  misc_RNA (1)...(19): siRNA sense strand
gaagaaagguauugcaucg

SEQ ID NO: 2627587 - RNA, 19 nt, Homo sapiens
  misc_RNA (1)...(19): siRNA sense strand
gaaagguauugcaucgaga

SEQ ID NO: 2627588 - RNA, 19 nt, Homo sapiens
  misc_RNA (1)...(19): siRNA sense strand
gcagauaaacaguccacca

SEQ ID NO: 2627589 - RNA, 19 nt, Homo sapiens
  misc_RNA (1)...(19): siRNA sense strand
ugccauagaagaaagguau

SEQ ID NO: 2627590 - RNA, 19 nt, Homo sapiens
  misc_RNA (1)...(19): siRNA sense strand
uggcugaacaaaugacuau

SEQ ID NO: 2627591 - RNA, 19 nt, Homo sapiens
  misc_RNA (1)...(19): siRNA sense strand
gagaauuaaagcuagcaga

SEQ ID NO: 2627592 - RNA, 19 nt, Homo sapiens
  misc_RNA (1)...(19): siRNA sense strand
cucagaaaucguauacaua

SEQ ID NO: 2627593 - RNA, 19 nt, Homo sapiens
  misc_RNA (1)...(19): siRNA sense strand
gguacauaugcaacaguau

SEQ ID NO: 2627594 - RNA, 19 nt, Homo sapiens
  misc_RNA (1)...(19): siRNA sense strand
aagucugggaccaagaaua

SEQ ID NO: 2627595 - RNA, 19 nt, Homo sapiens
  misc_RNA (1)...(19): siRNA sense strand
ucguauacauagacggauc

SEQ ID NO: 2627596 - RNA, 19 nt, Homo sapiens
  misc_RNA (1)...(19): siRNA sense strand
aaauggaaaccuacaucaa

SEQ ID NO: 2627597 - RNA, 19 nt, Homo sapiens
  misc_RNA (1)...(19): siRNA sense strand
ugaguaugcacaacguaaa

SEQ ID NO: 2627598 - RNA, 19 nt, Homo sapiens
  misc_RNA (1)...(19): siRNA sense strand
augaguaugcacaacguaa

SEQ ID NO: 2627599 - RNA, 19 nt, Homo sapiens
  misc_RNA (1)...(19): siRNA sense strand
ccacaauggcccagggugu

SEQ ID NO: 2627600 - RNA, 19 nt, Homo sapiens
  misc_RNA (1)...(19): siRNA sense strand
agccaauacaagugguuua

SEQ ID NO: 2627601 - RNA, 19 nt, Homo sapiens
  misc_RNA (1)...(19): siRNA sense strand
ccuagaggguuacgggaca

SEQ ID NO: 2627602 - RNA, 19 nt, Homo sapiens
  misc_RNA (1)...(19): siRNA sense strand
uugaauacaaggagagcuu

SEQ ID NO: 2627603 - RNA, 19 nt, Homo sapiens
  misc_RNA (1)...(19): siRNA sense strand
cacaauacuuccaaggaga

SEQ ID NO: 2627604 - RNA, 19 nt, Homo sapiens
  misc_RNA (1)...(19): siRNA sense strand
gugauugaauacaaggaga

SEQ ID NO: 2627605 - RNA, 19 nt, Homo sapiens
  misc_RNA (1)...(19): siRNA sense strand
uggaaaaggcaaaggaagu

SEQ ID NO: 2627606 - RNA, 19 nt, Homo sapiens
  misc_RNA (1)...(19): siRNA sense strand
cuuuauuguuugguggaaa

SEQ ID NO: 2627607 - RNA, 19 nt, Homo sapiens
  misc_RNA (1)...(19): siRNA sense strand
acaccaaccacgaggcuga

SEQ ID NO: 2627608 - RNA, 19 nt, Homo sapiens
  misc_RNA (1)...(19): siRNA sense strand
ucagugaaugcuugugaaa

SEQ ID NO: 2627609 - RNA, 19 nt, Homo sapiens
  misc_RNA (1)...(19): siRNA sense strand
gcugaggaugcuaaagcua

SEQ ID NO: 2627610 - RNA, 19 nt, Homo sapiens
  misc_RNA (1)...(19): siRNA sense strand
aagaaugcaaugagagcca

SEQ ID NO: 2627611 - RNA, 19 nt, Homo sapiens
  misc_RNA (1)...(19): siRNA sense strand
aggauuugacugugaagau

SEQ ID NO: 2627612 - RNA, 19 nt, Homo sapiens
  misc_RNA (1)...(19): siRNA sense strand
aacuagaacuugaagaacu

SEQ ID NO: 2627613 - RNA, 19 nt, Homo sapiens
  misc_RNA (1)...(19): siRNA sense strand
aggcaaaggaaguccaucu

SEQ ID NO: 2627614 - RNA, 19 nt, Homo sapiens
  misc_RNA (1)...(19): siRNA sense strand
acacauuggaagcauaaau

SEQ ID NO: 2627615 - RNA, 19 nt, Homo sapiens
  misc_RNA (1)...(19): siRNA sense strand
cugucagacuggcaaauau

SEQ ID NO: 2627616 - RNA, 19 nt, Homo sapiens
  misc_RNA (1)...(19): siRNA sense strand
uaacaaagcugccuggaag

SEQ ID NO: 2627617 - RNA, 19 nt, Homo sapiens
  misc_RNA (1)...(19): siRNA sense strand
cuugaagaacuaaaugcaa

SEQ ID NO: 2627618 - RNA, 19 nt, Homo sapiens
  misc_RNA (1)...(19): siRNA sense strand
ggcaagagguagaggcaga

SEQ ID NO: 2627619 - RNA, 19 nt, Homo sapiens
  misc_RNA (1)...(19): siRNA sense strand
agaacaagguggugaggga

SEQ ID NO: 2627620 - RNA, 19 nt, Homo sapiens
  misc_RNA (1)...(19): siRNA sense strand
augagaaggaagagaguau

SEQ ID NO: 2627621 - RNA, 19 nt, Homo sapiens
  misc_RNA (1)...(19): siRNA sense strand
agguagaggcagagaagca

SEQ ID NO: 2627622 - RNA, 19 nt, Homo sapiens
  misc_RNA (1)...(19): siRNA sense strand
ccugaggaguugaaggaga

SEQ ID NO: 2627623 - RNA, 19 nt, Homo sapiens
  misc_RNA (1)...(19): siRNA sense strand
gugagaaggcagagagaag

SEQ ID NO: 2627624 - RNA, 19 nt, Homo sapiens
  misc_RNA (1)...(19): siRNA sense strand
acuauaaagaugagaagga

SEQ ID NO: 2627625 - RNA, 19 nt, Homo sapiens
  misc_RNA (1)...(19): siRNA sense strand
ggguuaagcaguggaacaa

SEQ ID NO: 2627626 - RNA, 19 nt, Homo sapiens
  misc_RNA (1)...(19): siRNA sense strand
ccaccaggcaagagguaga

SEQ ID NO: 2627627 - RNA, 19 nt, Homo sapiens
  misc_RNA (1)...(19): siRNA sense strand
aguugaaggagaagcagaa

SEQ ID NO: 2627628 - RNA, 19 nt, Homo sapiens
  misc_RNA (1)...(19): siRNA sense strand
agacaacaucagccggaaa

SEQ ID NO: 2627629 - RNA, 19 nt, Homo sapiens
  misc_RNA (1)...(19): siRNA sense strand
cuaugaacaaagcaagaaa

SEQ ID NO: 2627630 - RNA, 19 nt, Homo sapiens
  misc_RNA (1)...(19): siRNA sense strand
gaacaaagcaagaaagacc

SEQ ID NO: 2627631 - RNA, 19 nt, Homo sapiens
  misc_RNA (1)...(19): siRNA sense strand
ccagaaguguuccgggaca

SEQ ID NO: 2627632 - RNA, 19 nt, Homo sapiens
  misc_RNA (1)...(19): siRNA sense strand
acagauaagcugcugggaa

SEQ ID NO: 2627633 - RNA, 19 nt, Homo sapiens
  misc_RNA (1)...(19): siRNA sense strand
cggcaaauccaaaaggaga

SEQ ID NO: 2627634 - RNA, 19 nt, Homo sapiens
  misc_RNA (1)...(19): siRNA sense strand
cuacaaguuaaacgagcaa

SEQ ID NO: 2627635 - RNA, 19 nt, Homo sapiens
  misc_RNA (1)...(19): siRNA sense strand
cugagaggccagaagucaa

SEQ ID NO: 2627636 - RNA, 19 nt, Homo sapiens
  misc_RNA (1)...(19): siRNA sense strand
gggguuaagcaguggaaca

SEQ ID NO: 2627637 - RNA, 19 nt, Homo sapiens
  misc_RNA (1)...(19): siRNA sense strand
acaaguuaaacgagcaaga

SEQ ID NO: 2627638 - RNA, 19 nt, Homo sapiens
  misc_RNA (1)...(19): siRNA sense strand
agaugagcguggaggagca

SEQ ID NO: 2627639 - RNA, 19 nt, Homo sapiens
  misc_RNA (1)...(19): siRNA sense strand
acauugaccuggagccuga

SEQ ID NO: 2627640 - RNA, 19 nt, Homo sapiens
  misc_RNA (1)...(19): siRNA sense strand
ccagaaaagcugcgacaca

SEQ ID NO: 2627641 - RNA, 19 nt, Homo sapiens
  misc_RNA (1)...(19): siRNA sense strand
auuaugacguggacaucaa

SEQ ID NO: 2627642 - RNA, 19 nt, Homo sapiens
  misc_RNA (1)...(19): siRNA sense strand
augaacaaagcaagaaaga

SEQ ID NO: 2627643 - RNA, 19 nt, Homo sapiens
  misc_RNA (1)...(19): siRNA sense strand
gguaagaaggaaugccagu

SEQ ID NO: 2627644 - RNA, 19 nt, Homo sapiens
  misc_RNA (1)...(19): siRNA sense strand
aagaagguggagaggauca

SEQ ID NO: 2627645 - RNA, 19 nt, Homo sapiens
  misc_RNA (1)...(19): siRNA sense strand
ccuacaaguuaaacgagca

SEQ ID NO: 2627646 - RNA, 19 nt, Homo sapiens
  misc_RNA (1)...(19): siRNA sense strand
gagcugagaaggagagccu

SEQ ID NO: 2627647 - RNA, 19 nt, Homo sapiens
  misc_RNA (1)...(19): siRNA sense strand
gaguugaaggagaagcaga

SEQ ID NO: 2627648 - RNA, 19 nt, Homo sapiens
  misc_RNA (1)...(19): siRNA sense strand
cagcuucagcaguggguga

SEQ ID NO: 2627649 - RNA, 19 nt, Homo sapiens
  misc_RNA (1)...(19): siRNA sense strand
gagcagaacaaggugguga

SEQ ID NO: 2627650 - RNA, 19 nt, Homo sapiens
  misc_RNA (1)...(19): siRNA sense strand
aagaaagagccuccgguga

SEQ ID NO: 2627651 - RNA, 19 nt, Homo sapiens
  misc_RNA (1)...(19): siRNA sense strand
aggagaagcagaagaaggu

SEQ ID NO: 2627652 - RNA, 19 nt, Homo sapiens
  misc_RNA (1)...(19): siRNA sense strand
ccgcaugcugucugugcaa

SEQ ID NO: 2627653 - RNA, 19 nt, Homo sapiens
  misc_RNA (1)...(19): siRNA sense strand
agaaaagcugcgacacaaa

SEQ ID NO: 2627654 - RNA, 19 nt, Homo sapiens
  misc_RNA (1)...(19): siRNA sense strand
agcuagagccccagcauua

SEQ ID NO: 2627655 - RNA, 19 nt, Homo sapiens
  misc_RNA (1)...(19): siRNA sense strand
gugacauacccaaccacaa

SEQ ID NO: 2627656 - RNA, 19 nt, Homo sapiens
  misc_RNA (1)...(19): siRNA sense strand
aguuaaagacagaacaaga

SEQ ID NO: 2627657 - RNA, 19 nt, Homo sapiens
  misc_RNA (1)...(19): siRNA sense strand
caucaaugccagaagacga

SEQ ID NO: 2627658 - RNA, 19 nt, Homo sapiens
  misc_RNA (1)...(19): siRNA sense strand
agcaagagaaggaagggaa

SEQ ID NO: 2627659 - RNA, 19 nt, Homo sapiens
  misc_RNA (1)...(19): siRNA sense strand
agaguuaaagacagaacaa

SEQ ID NO: 2627660 - RNA, 19 nt, Homo sapiens
  misc_RNA (1)...(19): siRNA sense strand
cagcuaucaagaugggcaa

SEQ ID NO: 2627661 - RNA, 19 nt, Homo sapiens
  misc_RNA (1)...(19): siRNA sense strand
uguaagaaagcaagagaag

SEQ ID NO: 2627662 - RNA, 19 nt, Homo sapiens
  misc_RNA (1)...(19): siRNA sense strand
uggaaaagguuaacgaacu

SEQ ID NO: 2627663 - RNA, 19 nt, Homo sapiens
  misc_RNA (1)...(19): siRNA sense strand
cagcagauucaaagugcca

SEQ ID NO: 2627664 - RNA, 19 nt, Homo sapiens
  misc_RNA (1)...(19): siRNA sense strand
ccaaguggucacacagaca

SEQ ID NO: 2627665 - RNA, 19 nt, Homo sapiens
  misc_RNA (1)...(19): siRNA sense strand
aguuacaguuaaaccaaga

SEQ ID NO: 2627666 - RNA, 19 nt, Homo sapiens
  misc_RNA (1)...(19): siRNA sense strand
aguuaaagacagaacaaga

SEQ ID NO: 2627667 - RNA, 19 nt, Homo sapiens
  misc_RNA (1)...(19): siRNA sense strand
caucaaugccagaagacga

SEQ ID NO: 2627668 - RNA, 19 nt, Homo sapiens
  misc_RNA (1)...(19): siRNA sense strand
agcaagagaaggaagggaa

SEQ ID NO: 2627669 - RNA, 19 nt, Homo sapiens
  misc_RNA (1)...(19): siRNA sense strand
agaguuaaagacagaacaa

SEQ ID NO: 2627670 - RNA, 19 nt, Homo sapiens
  misc_RNA (1)...(19): siRNA sense strand
cagcuaucaagaugggcaa

SEQ ID NO: 2627671 - RNA, 19 nt, Homo sapiens
  misc_RNA (1)...(19): siRNA sense strand
uguaagaaagcaagagaag

SEQ ID NO: 2627672 - RNA, 19 nt, Homo sapiens
  misc_RNA (1)...(19): siRNA sense strand
uggaaaagguuaacgaacu

SEQ ID NO: 2627673 - RNA, 19 nt, Homo sapiens
  misc_RNA (1)...(19): siRNA sense strand
uugugaagauccagaaacu

SEQ ID NO: 2627674 - RNA, 19 nt, Homo sapiens
  misc_RNA (1)...(19): siRNA sense strand
cagcagauucaaagugcca

SEQ ID NO: 2627675 - RNA, 19 nt, Homo sapiens
  misc_RNA (1)...(19): siRNA sense strand
ccaaguggucacacagaca

SEQ ID NO: 2627676 - RNA, 19 nt, Homo sapiens
  misc_RNA (1)...(19): siRNA sense strand
aguuacaguuaaaccaaga

SEQ ID NO: 2627677 - RNA, 19 nt, Homo sapiens
  misc_RNA (1)...(19): siRNA sense strand
ggauaugaagagugagauu

SEQ ID NO: 2627678 - RNA, 19 nt, Homo sapiens
  misc_RNA (1)...(19): siRNA sense strand
aggaagacacagaggaaaa

SEQ ID NO: 2627679 - RNA, 19 nt, Homo sapiens
  misc_RNA (1)...(19): siRNA sense strand
gcuaaaaguagaagccaua

SEQ ID NO: 2627680 - RNA, 19 nt, Homo sapiens
  misc_RNA (1)...(19): siRNA sense strand
cagcagaaguuguggaccu

SEQ ID NO: 2627681 - RNA, 19 nt, Homo sapiens
  misc_RNA (1)...(19): siRNA sense strand
aagaagggacugaggaaga

SEQ ID NO: 2627682 - RNA, 19 nt, Homo sapiens
  misc_RNA (1)...(19): siRNA sense strand
ccuuaaaaguggauaugaa

SEQ ID NO: 2627683 - RNA, 19 nt, Homo sapiens
  misc_RNA (1)...(19): siRNA sense strand
cugcaggaguugagaugau

SEQ ID NO: 2627684 - RNA, 19 nt, Homo sapiens
  misc_RNA (1)...(19): siRNA sense strand
ugacuucagaugaggauaa

SEQ ID NO: 2627685 - RNA, 19 nt, Homo sapiens
  misc_RNA (1)...(19): siRNA sense strand
aguguuagcucgaagaaaa

SEQ ID NO: 2627686 - RNA, 19 nt, Homo sapiens
  misc_RNA (1)...(19): siRNA sense strand
ugaggaagacacagaggaa

SEQ ID NO: 2627687 - RNA, 19 nt, Homo sapiens
  misc_RNA (1)...(19): siRNA sense strand
ggaccuuaccguugaugaa

SEQ ID NO: 2627688 - RNA, 19 nt, Homo sapiens
  misc_RNA (1)...(19): siRNA sense strand
cagaggacacagaaacaaa

SEQ ID NO: 2627689 - RNA, 19 nt, Homo sapiens
  misc_RNA (1)...(19): siRNA sense strand
auauuaaugcagaggaaga

SEQ ID NO: 2627690 - RNA, 19 nt, Homo sapiens
  misc_RNA (1)...(19): siRNA sense strand
guggauaugaagagugaga

SEQ ID NO: 2627691 - RNA, 19 nt, Homo sapiens
  misc_RNA (1)...(19): siRNA sense strand
aggaaguauugaugaagau

SEQ ID NO: 2627692 - RNA, 19 nt, Homo sapiens
  misc_RNA (1)...(19): siRNA sense strand
ccuuaugccucuuugacaa

SEQ ID NO: 2627693 - RNA, 19 nt, Homo sapiens
  misc_RNA (1)...(19): siRNA sense strand
uggaagaaagauuaggcaa

SEQ ID NO: 2627694 - RNA, 19 nt, Homo sapiens
  misc_RNA (1)...(19): siRNA sense strand
caacugaaggagaagaaga

SEQ ID NO: 2627695 - RNA, 19 nt, Homo sapiens
  misc_RNA (1)...(19): siRNA sense strand
cugaaggagaagaagauuu

SEQ ID NO: 2627696 - RNA, 19 nt, Homo sapiens
  misc_RNA (1)...(19): siRNA sense strand
aaacuauggucaugggcau

SEQ ID NO: 2627697 - RNA, 19 nt, Homo sapiens
  misc_RNA (1)...(19): siRNA sense strand
gguuacugccaaugaagaa

SEQ ID NO: 2627698 - RNA, 19 nt, Homo sapiens
  misc_RNA (1)...(19): siRNA sense strand
caccaagugaugaagauaa

SEQ ID NO: 2627699 - RNA, 19 nt, Homo sapiens
  misc_RNA (1)...(19): siRNA sense strand
ccacauaggaugcacccaa

SEQ ID NO: 2627700 - RNA, 19 nt, Homo sapiens
  misc_RNA (1)...(19): siRNA sense strand
gcucaucaacugaaggaga

SEQ ID NO: 2627701 - RNA, 19 nt, Homo sapiens
  misc_RNA (1)...(19): siRNA sense strand
augaagauguuguggugau

SEQ ID NO: 2627702 - RNA, 19 nt, Homo sapiens
  misc_RNA (1)...(19): siRNA sense strand
cugccaaugaagaaauuaa

SEQ ID NO: 2627703 - RNA, 19 nt, Homo sapiens
  misc_RNA (1)...(19): siRNA sense strand
ccaccaugcauuaggacau

SEQ ID NO: 2627704 - RNA, 19 nt, Homo sapiens
  misc_RNA (1)...(19): siRNA sense strand
aauugaagcuggagugacu

SEQ ID NO: 2627705 - RNA, 19 nt, Homo sapiens
  misc_RNA (1)...(19): siRNA sense strand
gaggcaacaccuagggaca

SEQ ID NO: 2627706 - RNA, 19 nt, Homo sapiens
  misc_RNA (1)...(19): siRNA sense strand
gugaaaaccaccaaaacaa

SEQ ID NO: 2627707 - RNA, 19 nt, Homo sapiens
  misc_RNA (1)...(19): siRNA sense strand
cuucagaugaggauaaaga

SEQ ID NO: 2627708 - RNA, 19 nt, Homo sapiens
  misc_RNA (1)...(19): siRNA sense strand
augaagugaugcagaggau

SEQ ID NO: 2627709 - RNA, 19 nt, Homo sapiens
  misc_RNA (1)...(19): siRNA sense strand
gggacaauugaaagaugua

SEQ ID NO: 2627710 - RNA, 19 nt, Homo sapiens
  misc_RNA (1)...(19): siRNA sense strand
uaguaguuccagugagaau

SEQ ID NO: 2627711 - RNA, 19 nt, Homo sapiens
  misc_RNA (1)...(19): siRNA sense strand
gcaccaaagacacaggaga

SEQ ID NO: 2627712 - RNA, 19 nt, Homo sapiens
  misc_RNA (1)...(19): siRNA sense strand
uuaaagaaaaccagggaau

SEQ ID NO: 2627713 - RNA, 19 nt, Homo sapiens
  misc_RNA (1)...(19): siRNA sense strand
accaagugaugaagauaau

SEQ ID NO: 2627714 - RNA, 19 nt, Homo sapiens
  misc_RNA (1)...(19): siRNA sense strand
gaggcagaaugcagcagaa

SEQ ID NO: 2627715 - RNA, 19 nt, Homo sapiens
  misc_RNA (1)...(19): siRNA sense strand
gcaccauauuccagccaca

SEQ ID NO: 2627716 - RNA, 19 nt, Homo sapiens
  misc_RNA (1)...(19): siRNA sense strand
cucaggaaguauugaugaa

SEQ ID NO: 2627717 - RNA, 19 nt, Homo sapiens
  misc_RNA (1)...(19): siRNA sense strand
cugcaagaauggaaucaca

SEQ ID NO: 2627718 - RNA, 19 nt, Homo sapiens
  misc_RNA (1)...(19): siRNA sense strand
aaguggauaugaagaguga

SEQ ID NO: 2627719 - RNA, 19 nt, Homo sapiens
  misc_RNA (1)...(19): siRNA sense strand
caggaguugagaugauuaa

SEQ ID NO: 2627720 - RNA, 19 nt, Homo sapiens
  misc_RNA (1)...(19): siRNA sense strand
ugugcagaauuguguuaaa

SEQ ID NO: 2627721 - RNA, 19 nt, Homo sapiens
  misc_RNA (1)...(19): siRNA sense strand
caggagagucugaaaggga

SEQ ID NO: 2627722 - RNA, 19 nt, Homo sapiens
  misc_RNA (1)...(19): siRNA sense strand
cggaaccgcaguaggauuu

SEQ ID NO: 2627723 - RNA, 19 nt, Homo sapiens
  misc_RNA (1)...(19): siRNA sense strand
ccucaaguggauuauguua

SEQ ID NO: 2627724 - RNA, 19 nt, Homo sapiens
  misc_RNA (1)...(19): siRNA sense strand
gaauauuaggacugaggca

SEQ ID NO: 2627725 - RNA, 19 nt, Homo sapiens
  misc_RNA (1)...(19): siRNA sense strand
cugcaaacaagauggggaa

SEQ ID NO: 2627726 - RNA, 19 nt, Homo sapiens
  misc_RNA (1)...(19): siRNA sense strand
caaacaagauggggaagaa

SEQ ID NO: 2627727 - RNA, 19 nt, Homo sapiens
  misc_RNA (1)...(19): siRNA sense strand
gaggaagacacagaggaaa

SEQ ID NO: 2627728 - RNA, 19 nt, Homo sapiens
  misc_RNA (1)...(19): siRNA sense strand
ggaaggugaagaugugaga

SEQ ID NO: 2627729 - RNA, 19 nt, Homo sapiens
  misc_RNA (1)...(19): siRNA sense strand
agcaagagaaggaaaugaa

SEQ ID NO: 2627730 - RNA, 19 nt, Homo sapiens
  misc_RNA (1)...(19): siRNA sense strand
ccauaugcagaguggacau

SEQ ID NO: 2627731 - RNA, 19 nt, Homo sapiens
  misc_RNA (1)...(19): siRNA sense strand
caaaagcaagagaaggaaa

SEQ ID NO: 2627732 - RNA, 19 nt, Homo sapiens
  misc_RNA (1)...(19): siRNA sense strand
agacauucccagaccauuu

SEQ ID NO: 2627733 - RNA, 19 nt, Homo sapiens
  misc_RNA (1)...(19): siRNA sense strand
cuuuaaugguuccugauau

SEQ ID NO: 2627734 - RNA, 19 nt, Homo sapiens
  misc_RNA (1)...(19): siRNA sense strand
gaguggacauugaggccca

SEQ ID NO: 2627735 - RNA, 19 nt, Homo sapiens
  misc_RNA (1)...(19): siRNA sense strand
uaacaguuggagaaagcua

SEQ ID NO: 2627736 - RNA, 19 nt, Homo sapiens
  misc_RNA (1)...(19): siRNA sense strand
auacagcccuugaggcaga

SEQ ID NO: 2627737 - RNA, 19 nt, Homo sapiens
  misc_RNA (1)...(19): siRNA sense strand
aagauuaggcaaugucaau

SEQ ID NO: 2627738 - RNA, 19 nt, Homo sapiens
  misc_RNA (1)...(19): siRNA sense strand
cucaucaacugaaggagaa

SEQ ID NO: 2627739 - RNA, 19 nt, Homo sapiens
  misc_RNA (1)...(19): siRNA sense strand
aagauguuguggugauaga

SEQ ID NO: 2627740 - RNA, 19 nt, Homo sapiens
  misc_RNA (1)...(19): siRNA sense strand
gaugacucaaggagaacua

SEQ ID NO: 2627741 - RNA, 19 nt, Homo sapiens
  misc_RNA (1)...(19): siRNA sense strand
gagaggauauuaaugcaga

SEQ ID NO: 2627742 - RNA, 19 nt, Homo sapiens
  misc_RNA (1)...(19): siRNA sense strand
gcagaggaagaaacgagaa

SEQ ID NO: 2627743 - RNA, 19 nt, Homo sapiens
  misc_RNA (1)...(19): siRNA sense strand
gcauagaguguaaggcgua

SEQ ID NO: 2627744 - RNA, 19 nt, Homo sapiens
  misc_RNA (1)...(19): siRNA sense strand
cuggaaaaguacaaagauu

SEQ ID NO: 2627745 - RNA, 19 nt, Homo sapiens
  misc_RNA (1)...(19): siRNA sense strand
aagaaugaguccuuggaga

SEQ ID NO: 2627746 - RNA, 19 nt, Homo sapiens
  misc_RNA (1)...(19): siRNA sense strand
gugaugaaguauaacccaa

SEQ ID NO: 2627747 - RNA, 19 nt, Homo sapiens
  misc_RNA (1)...(19): siRNA sense strand
cauuggguacagugagaaa

SEQ ID NO: 2627748 - RNA, 19 nt, Homo sapiens
  misc_RNA (1)...(19): siRNA sense strand
augaacgaggagagcgaaa

SEQ ID NO: 2627749 - RNA, 19 nt, Homo sapiens
  misc_RNA (1)...(19): siRNA sense strand
gcgggaaagccaaggagga

SEQ ID NO: 2627750 - RNA, 19 nt, Homo sapiens
  misc_RNA (1)...(19): siRNA sense strand
gcaaacuccugcagcccaa

SEQ ID NO: 2627751 - RNA, 19 nt, Homo sapiens
  misc_RNA (1)...(19): siRNA sense strand
ugaaauucgcauagagugu

SEQ ID NO: 2627752 - RNA, 19 nt, Homo sapiens
  misc_RNA (1)...(19): siRNA sense strand
ucaugaacgaggagagcga

SEQ ID NO: 2627753 - RNA, 19 nt, Homo sapiens
  misc_RNA (1)...(19): siRNA sense strand
uuauaaagcucaaccgagu

SEQ ID NO: 2627754 - RNA, 19 nt, Homo sapiens
  misc_RNA (1)...(19): siRNA sense strand
ccacauaucaggaccgagu

SEQ ID NO: 2627755 - RNA, 19 nt, Homo sapiens
  misc_RNA (1)...(19): siRNA sense strand
aggcguacggugagaacau

SEQ ID NO: 2627756 - RNA, 19 nt, Homo sapiens
  misc_RNA (1)...(19): siRNA sense strand
guacaaagauucagcccag

SEQ ID NO: 2627757 - RNA, 19 nt, Homo sapiens
  misc_RNA (1)...(19): siRNA sense strand
augaugaaacuuauggcua

SEQ ID NO: 2627758 - RNA, 19 nt, Homo sapiens
  misc_RNA (1)...(19): siRNA sense strand
aguguaaggcguacgguga

SEQ ID NO: 2627759 - RNA, 19 nt, Homo sapiens
  misc_RNA (1)...(19): siRNA sense strand
ugaugaaacuuauggcuac

SEQ ID NO: 2627760 - RNA, 19 nt, Homo sapiens
  misc_RNA (1)...(19): siRNA sense strand
caaccgaguucuaggcuuc

SEQ ID NO: 2627761 - RNA, 19 nt, Homo sapiens
  misc_RNA (1)...(19): siRNA sense strand
uggcaagcgagaugaagau

SEQ ID NO: 2627762 - RNA, 19 nt, Homo sapiens
  misc_RNA (1)...(19): siRNA sense strand
cuugaauggcugggaaauu

SEQ ID NO: 2627763 - RNA, 19 nt, Homo sapiens
  misc_RNA (1)...(19): siRNA sense strand
aguuggaaauguggaguau

SEQ ID NO: 2627764 - RNA, 19 nt, Homo sapiens
  misc_RNA (1)...(19): siRNA sense strand
agcuugaauggcugggaaa

SEQ ID NO: 2627765 - RNA, 19 nt, Homo sapiens
  misc_RNA (1)...(19): siRNA sense strand
cagugaaccgaaagaacga

SEQ ID NO: 2627766 - RNA, 19 nt, Homo sapiens
  misc_RNA (1)...(19): siRNA sense strand
ggugagaacauuggguaca

SEQ ID NO: 2627767 - RNA, 19 nt, Homo sapiens
  misc_RNA (1)...(19): siRNA sense strand
auggcuacaaagagggcaa

SEQ ID NO: 2627768 - RNA, 19 nt, Homo sapiens
  misc_RNA (1)...(19): siRNA sense strand
aaguuggaaauguggagua

SEQ ID NO: 2627769 - RNA, 19 nt, Homo sapiens
  misc_RNA (1)...(19): siRNA sense strand
agagagaccuggagaggca

SEQ ID NO: 2627770 - RNA, 19 nt, Homo sapiens
  misc_RNA (1)...(19): siRNA sense strand
ucgcagaauuggagacgga

SEQ ID NO: 2627771 - RNA, 19 nt, Homo sapiens
  misc_RNA (1)...(19): siRNA sense strand
cugagaagcgggagagcga

SEQ ID NO: 2627772 - RNA, 19 nt, Homo sapiens
  misc_RNA (1)...(19): siRNA sense strand
ggcaagugaacgagcagaa

SEQ ID NO: 2627773 - RNA, 19 nt, Homo sapiens
  misc_RNA (1)...(19): siRNA sense strand
gugaacgagcagaaggcaa

SEQ ID NO: 2627774 - RNA, 19 nt, Homo sapiens
  misc_RNA (1)...(19): siRNA sense strand
ccgcagacucuuugcucaa

SEQ ID NO: 2627775 - RNA, 19 nt, Homo sapiens
  misc_RNA (1)...(19): siRNA sense strand
cagaauuggagacggaaaa

SEQ ID NO: 2627776 - RNA, 19 nt, Homo sapiens
  misc_RNA (1)...(19): siRNA sense strand
gagaagcgggagagcgaga

SEQ ID NO: 2627777 - RNA, 19 nt, Homo sapiens
  misc_RNA (1)...(19): siRNA sense strand
ggcagguggaggagaagaa

SEQ ID NO: 2627778 - RNA, 19 nt, Homo sapiens
  misc_RNA (1)...(19): siRNA sense strand
uggaggagaagaagcacaa

SEQ ID NO: 2627779 - RNA, 19 nt, Homo sapiens
  misc_RNA (1)...(19): siRNA sense strand
ggaaggcacugcaggcuga

SEQ ID NO: 2627780 - RNA, 19 nt, Homo sapiens
  misc_RNA (1)...(19): siRNA sense strand
agaagaagcacaaugagga

SEQ ID NO: 2627781 - RNA, 19 nt, Homo sapiens
  misc_RNA (1)...(19): siRNA sense strand
uggagaggcaagugaacga

SEQ ID NO: 2627782 - RNA, 19 nt, Homo sapiens
  misc_RNA (1)...(19): siRNA sense strand
ggauggacguggugcaccu

SEQ ID NO: 2627783 - RNA, 19 nt, Homo sapiens
  misc_RNA (1)...(19): siRNA sense strand
aggcccaacuggaaggcau

SEQ ID NO: 2627784 - RNA, 19 nt, Homo sapiens
  misc_RNA (1)...(19): siRNA sense strand
gggaguggguggaagacac

SEQ ID NO: 2627785 - RNA, 19 nt, Homo sapiens
  misc_RNA (1)...(19): siRNA sense strand
gggaagucagacauggaga

SEQ ID NO: 2627786 - RNA, 19 nt, Homo sapiens
  misc_RNA (1)...(19): siRNA sense strand
agguggagucugagcuaaa

SEQ ID NO: 2627787 - RNA, 19 nt, Homo sapiens
  misc_RNA (1)...(19): siRNA sense strand
ggaaggagguggcuggcau

SEQ ID NO: 2627788 - RNA, 19 nt, Homo sapiens
  misc_RNA (1)...(19): siRNA sense strand
ugugagaggaggcgaggaa

SEQ ID NO: 2627789 - RNA, 19 nt, Homo sapiens
  misc_RNA (1)...(19): siRNA sense strand
uagucaagcuccuaggcua

SEQ ID NO: 2627790 - RNA, 19 nt, Homo sapiens
  misc_RNA (1)...(19): siRNA sense strand
cggaagggugagacggaca

SEQ ID NO: 2627791 - RNA, 19 nt, Homo sapiens
  misc_RNA (1)...(19): siRNA sense strand
acuccaaggugguguucau

SEQ ID NO: 2627792 - RNA, 19 nt, Homo sapiens
  misc_RNA (1)...(19): siRNA sense strand
aggaagugagugagaucau

SEQ ID NO: 2627793 - RNA, 19 nt, Homo sapiens
  misc_RNA (1)...(19): siRNA sense strand
cgcuggaggaagugaguga

SEQ ID NO: 2627794 - RNA, 19 nt, Homo sapiens
  misc_RNA (1)...(19): siRNA sense strand
gcuccaacuuccugccaga

SEQ ID NO: 2627795 - RNA, 19 nt, Homo sapiens
  misc_RNA (1)...(19): siRNA sense strand
auacaauaagguagggcca

SEQ ID NO: 2627796 - RNA, 19 nt, Homo sapiens
  misc_RNA (1)...(19): siRNA sense strand
agaacuggacucagaggau

SEQ ID NO: 2627797 - RNA, 19 nt, Homo sapiens
  misc_RNA (1)...(19): siRNA sense strand
gaggaugaggagcuggaau

SEQ ID NO: 2627798 - RNA, 19 nt, Homo sapiens
  misc_RNA (1)...(19): siRNA sense strand
ccuccuaacacaagagcaa

SEQ ID NO: 2627799 - RNA, 19 nt, Homo sapiens
  misc_RNA (1)...(19): siRNA sense strand
aaaagaaacuggagggaca

SEQ ID NO: 2627800 - RNA, 19 nt, Homo sapiens
  misc_RNA (1)...(19): siRNA sense strand
augagaagucaaauggaaa

SEQ ID NO: 2627801 - RNA, 19 nt, Homo sapiens
  misc_RNA (1)...(19): siRNA sense strand
acugaagagaguagcaaau

SEQ ID NO: 2627802 - RNA, 19 nt, Homo sapiens
  misc_RNA (1)...(19): siRNA sense strand
cucaaggaaaugauagaaa

SEQ ID NO: 2627803 - RNA, 19 nt, Homo sapiens
  misc_RNA (1)...(19): siRNA sense strand
agaaauccaaagagcaaau

SEQ ID NO: 2627804 - RNA, 19 nt, Homo sapiens
  misc_RNA (1)...(19): siRNA sense strand
ugggauuaguagugaccau

SEQ ID NO: 2627805 - RNA, 19 nt, Homo sapiens
  misc_RNA (1)...(19): siRNA sense strand
ucggaagcugaaugagaaa

SEQ ID NO: 2627806 - RNA, 19 nt, Homo sapiens
  misc_RNA (1)...(19): siRNA sense strand
ccggcaacaagcagaagaa

SEQ ID NO: 2627807 - RNA, 19 nt, Homo sapiens
  misc_RNA (1)...(19): siRNA sense strand
ugagaagucaaauggaaaa

SEQ ID NO: 2627808 - RNA, 19 nt, Homo sapiens
  misc_RNA (1)...(19): siRNA sense strand
gcuucacaggagucagaaa

SEQ ID NO: 2627809 - RNA, 19 nt, Homo sapiens
  misc_RNA (1)...(19): siRNA sense strand
ccacuuauuuagaguccga

SEQ ID NO: 2627810 - RNA, 19 nt, Homo sapiens
  misc_RNA (1)...(19): siRNA sense strand
augccaaguugcugaaaau

SEQ ID NO: 2627811 - RNA, 19 nt, Homo sapiens
  misc_RNA (1)...(19): siRNA sense strand
ggaaaugauagaaacccuu

SEQ ID NO: 2627812 - RNA, 19 nt, Homo sapiens
  misc_RNA (1)...(19): siRNA sense strand
aggaccagccugaugagaa

SEQ ID NO: 2627813 - RNA, 19 nt, Homo sapiens
  misc_RNA (1)...(19): siRNA sense strand
gcugaaaauuaauagcaca

SEQ ID NO: 2627814 - RNA, 19 nt, Homo sapiens
  misc_RNA (1)...(19): siRNA sense strand
ucugaaucuccaagaaaca

SEQ ID NO: 2627815 - RNA, 19 nt, Homo sapiens
  misc_RNA (1)...(19): siRNA sense strand
ggcucauuuaacugggaaa

SEQ ID NO: 2627816 - RNA, 19 nt, Homo sapiens
  misc_RNA (1)...(19): siRNA sense strand
gcucaaucuaggacgaaga

SEQ ID NO: 2627817 - RNA, 19 nt, Homo sapiens
  misc_RNA (1)...(19): siRNA sense strand
auaagauggcggaggccua

SEQ ID NO: 2627818 - RNA, 19 nt, Homo sapiens
  misc_RNA (1)...(19): siRNA sense strand
aguacgauguuuuggacaa

SEQ ID NO: 2627819 - RNA, 19 nt, Homo sapiens
  misc_RNA (1)...(19): siRNA sense strand
augaacugcagaaagauaa

SEQ ID NO: 2627820 - RNA, 19 nt, Homo sapiens
  misc_RNA (1)...(19): siRNA sense strand
uguacaaugaacugcagaa

SEQ ID NO: 2627821 - RNA, 19 nt, Homo sapiens
  misc_RNA (1)...(19): siRNA sense strand
cagugagauugggaugaaa

SEQ ID NO: 2627822 - RNA, 19 nt, Homo sapiens
  misc_RNA (1)...(19): siRNA sense strand
gcucaaucuaggacgaaga

SEQ ID NO: 2627823 - RNA, 19 nt, Homo sapiens
  misc_RNA (1)...(19): siRNA sense strand
auaagauggcggaggccua

SEQ ID NO: 2627824 - RNA, 19 nt, Homo sapiens
  misc_RNA (1)...(19): siRNA sense strand
aguacgauguuuuggacaa

SEQ ID NO: 2627825 - RNA, 19 nt, Homo sapiens
  misc_RNA (1)...(19): siRNA sense strand
augaacugcagaaagauaa

SEQ ID NO: 2627826 - RNA, 19 nt, Homo sapiens
  misc_RNA (1)...(19): siRNA sense strand
uguacaaugaacugcagaa

SEQ ID NO: 2627827 - RNA, 19 nt, Homo sapiens
  misc_RNA (1)...(19): siRNA sense strand
cagugagauugggaugaaa

SEQ ID NO: 2627828 - RNA, 19 nt, Homo sapiens
  misc_RNA (1)...(19): siRNA sense strand
ggauggggacaaagagaaa

SEQ ID NO: 2627829 - RNA, 19 nt, Homo sapiens
  misc_RNA (1)...(19): siRNA sense strand
aguacaagguggagguucu

SEQ ID NO: 2627830 - RNA, 19 nt, Homo sapiens
  misc_RNA (1)...(19): siRNA sense strand
gggaccgggacgagaagaa

SEQ ID NO: 2627831 - RNA, 19 nt, Homo sapiens
  misc_RNA (1)...(19): siRNA sense strand
aaaccugcaucgugcgcua

SEQ ID NO: 2627832 - RNA, 19 nt, Homo sapiens
  misc_RNA (1)...(19): siRNA sense strand
caaauuggucccugggcuu

SEQ ID NO: 2627833 - RNA, 19 nt, Homo sapiens
  misc_RNA (1)...(19): siRNA sense strand
aggucuuggagcaggagaa

SEQ ID NO: 2627834 - RNA, 19 nt, Homo sapiens
  misc_RNA (1)...(19): siRNA sense strand
cggacuacacggaucaaaa

SEQ ID NO: 2627835 - RNA, 19 nt, Homo sapiens
  misc_RNA (1)...(19): siRNA sense strand
gcaaguacaagguggaggu

SEQ ID NO: 2627836 - RNA, 19 nt, Homo sapiens
  misc_RNA (1)...(19): siRNA sense strand
agguggagguucuguacga

SEQ ID NO: 2627837 - RNA, 19 nt, Homo sapiens
  misc_RNA (1)...(19): siRNA sense strand
cgccagggcagcagagaaa

SEQ ID NO: 2627838 - RNA, 19 nt, Homo sapiens
  misc_RNA (1)...(19): siRNA sense strand
gguugaaguuccuggcaca

SEQ ID NO: 2627839 - RNA, 19 nt, Homo sapiens
  misc_RNA (1)...(19): siRNA sense strand
ggccaauagucaagccgaa

SEQ ID NO: 2627840 - RNA, 19 nt, Homo sapiens
  misc_RNA (1)...(19): siRNA sense strand
gugcaacauuugugggcga

SEQ ID NO: 2627841 - RNA, 19 nt, Homo sapiens
  misc_RNA (1)...(19): siRNA sense strand
ccaaaggcaaaguggccaa

SEQ ID NO: 2627842 - RNA, 19 nt, Homo sapiens
  misc_RNA (1)...(19): siRNA sense strand
ccaagaaagggaaggggaa

SEQ ID NO: 2627843 - RNA, 19 nt, Homo sapiens
  misc_RNA (1)...(19): siRNA sense strand
guaccuaaagacagagaca

SEQ ID NO: 2627844 - RNA, 19 nt, Homo sapiens
  misc_RNA (1)...(19): siRNA sense strand
uugccgaguuccaggacaa

SEQ ID NO: 2627845 - RNA, 19 nt, Homo sapiens
  misc_RNA (1)...(19): siRNA sense strand
cuuagaugccccagggaaa

SEQ ID NO: 2627846 - RNA, 19 nt, Homo sapiens
  misc_RNA (1)...(19): siRNA sense strand
caacauauucggaugcaca

SEQ ID NO: 2627847 - RNA, 19 nt, Homo sapiens
  misc_RNA (1)...(19): siRNA sense strand
augacgagguggcgaguga

SEQ ID NO: 2627848 - RNA, 19 nt, Homo sapiens
  misc_RNA (1)...(19): siRNA sense strand
uguuagguacggacggaaa

SEQ ID NO: 2627849 - RNA, 19 nt, Homo sapiens
  misc_RNA (1)...(19): siRNA sense strand
ugguguaccuaaagacaga

SEQ ID NO: 2627850 - RNA, 19 nt, Homo sapiens
  misc_RNA (1)...(19): siRNA sense strand
agccaaugaccguggguga

SEQ ID NO: 2627851 - RNA, 19 nt, Homo sapiens
  misc_RNA (1)...(19): siRNA sense strand
aggaugaagccacaguaaa

SEQ ID NO: 2627852 - RNA, 19 nt, Homo sapiens
  misc_RNA (1)...(19): siRNA sense strand
ggacuaaucccaaggaccu

SEQ ID NO: 2627853 - RNA, 19 nt, Homo sapiens
  misc_RNA (1)...(19): siRNA sense strand
agucugugguguaccuaaa

SEQ ID NO: 2627854 - RNA, 19 nt, Homo sapiens
  misc_RNA (1)...(19): siRNA sense strand
gagugaggaugaagccaca

SEQ ID NO: 2627855 - RNA, 19 nt, Homo sapiens
  misc_RNA (1)...(19): siRNA sense strand
ucagaggacaugaaggaga

SEQ ID NO: 2627856 - RNA, 19 nt, Homo sapiens
  misc_RNA (1)...(19): siRNA sense strand
agcaguugguggagaacau

SEQ ID NO: 2627857 - RNA, 19 nt, Homo sapiens
  misc_RNA (1)...(19): siRNA sense strand
guguaagaucuguggccga

SEQ ID NO: 2627858 - RNA, 19 nt, Homo sapiens
  misc_RNA (1)...(19): siRNA sense strand
cgugaagaccaaugagauc

SEQ ID NO: 2627859 - RNA, 19 nt, Homo sapiens
  misc_RNA (1)...(19): siRNA sense strand
acugauagcuccuugcaga

SEQ ID NO: 2627860 - RNA, 19 nt, Homo sapiens
  misc_RNA (1)...(19): siRNA sense strand
ugaugggagaccaggagua

SEQ ID NO: 2627861 - RNA, 19 nt, Homo sapiens
  misc_RNA (1)...(19): siRNA sense strand
ugggagaccaggaguauca

SEQ ID NO: 2627862 - RNA, 19 nt, Homo sapiens
  misc_RNA (1)...(19): siRNA sense strand
ggagaauggcggcagcuca

SEQ ID NO: 2627863 - RNA, 19 nt, Homo sapiens
  misc_RNA (1)...(19): siRNA sense strand
caggaguaucagagccgaa

SEQ ID NO: 2627864 - RNA, 19 nt, Homo sapiens
  misc_RNA (1)...(19): siRNA sense strand
acaagauugcggucagcua

SEQ ID NO: 2627865 - RNA, 19 nt, Homo sapiens
  misc_RNA (1)...(19): siRNA sense strand
augcggagucuguggugua

SEQ ID NO: 2627866 - RNA, 19 nt, Homo sapiens
  misc_RNA (1)...(19): siRNA sense strand
acaucaacucggaggagga

SEQ ID NO: 2627867 - RNA, 19 nt, Homo sapiens
  misc_RNA (1)...(19): siRNA sense strand
cgguggaugucaaacccaa

SEQ ID NO: 2627868 - RNA, 19 nt, Homo sapiens
  misc_RNA (1)...(19): siRNA sense strand
ccaccaagggcaaccucaa

SEQ ID NO: 2627869 - RNA, 19 nt, Homo sapiens
  misc_RNA (1)...(19): siRNA sense strand
ccagagaaucccugugacu

SEQ ID NO: 2627870 - RNA, 19 nt, Homo sapiens
  misc_RNA (1)...(19): siRNA sense strand
ccgugaagaccaaugagau

SEQ ID NO: 2627871 - RNA, 19 nt, Homo sapiens
  misc_RNA (1)...(19): siRNA sense strand
cgagguggcgagugaggau

SEQ ID NO: 2627872 - RNA, 19 nt, Homo sapiens
  misc_RNA (1)...(19): siRNA sense strand
gagaaaugcugugcggagu

SEQ ID NO: 2627873 - RNA, 19 nt, Homo sapiens
  misc_RNA (1)...(19): siRNA sense strand
agugaaccacccagggaau

SEQ ID NO: 2627874 - RNA, 19 nt, Homo sapiens
  misc_RNA (1)...(19): siRNA sense strand
ugcagcaguugguggagaa

SEQ ID NO: 2627875 - RNA, 19 nt, Homo sapiens
  misc_RNA (1)...(19): siRNA sense strand
gggaggaagaggaggagga

SEQ ID NO: 2627876 - RNA, 19 nt, Homo sapiens
  misc_RNA (1)...(19): siRNA sense strand
gggagauggaggaggacca

SEQ ID NO: 2627877 - RNA, 19 nt, Homo sapiens
  misc_RNA (1)...(19): siRNA sense strand
ggaaaagaggacugggaga

SEQ ID NO: 2627878 - RNA, 19 nt, Homo sapiens
  misc_RNA (1)...(19): siRNA sense strand
gagcagagagggaguggga

SEQ ID NO: 2627879 - RNA, 19 nt, Homo sapiens
  misc_RNA (1)...(19): siRNA sense strand
aggaagaggaggaggaagc

SEQ ID NO: 2627880 - RNA, 19 nt, Homo sapiens
  misc_RNA (1)...(19): siRNA sense strand
acugggagauggaggagga

SEQ ID NO: 2627881 - RNA, 19 nt, Homo sapiens
  misc_RNA (1)...(19): siRNA sense strand
gcaggaagcccuaggacug

SEQ ID NO: 2627882 - RNA, 19 nt, Homo sapiens
  misc_RNA (1)...(19): siRNA sense strand
gcucuugggcuuuggccau

SEQ ID NO: 2627883 - RNA, 19 nt, Homo sapiens
  misc_RNA (1)...(19): siRNA sense strand
aggagauaguccagcagaa

SEQ ID NO: 2627884 - RNA, 19 nt, Homo sapiens
  misc_RNA (1)...(19): siRNA sense strand
cccagaaggcaaagggaga

SEQ ID NO: 2627885 - RNA, 19 nt, Homo sapiens
  misc_RNA (1)...(19): siRNA sense strand
gcacagaggagauagucca

SEQ ID NO: 2627886 - RNA, 19 nt, Homo sapiens
  misc_RNA (1)...(19): siRNA sense strand
ggaagagugcagccggcua

SEQ ID NO: 2627887 - RNA, 19 nt, Homo sapiens
  misc_RNA (1)...(19): siRNA sense strand
agaccaaggaggaucugaa

SEQ ID NO: 2627888 - RNA, 19 nt, Homo sapiens
  misc_RNA (1)...(19): siRNA sense strand
cugaugacgccgaggaacu

SEQ ID NO: 2627889 - RNA, 19 nt, Homo sapiens
  misc_RNA (1)...(19): siRNA sense strand
ggagagcucugcagggacu

SEQ ID NO: 2627890 - RNA, 19 nt, Homo sapiens
  misc_RNA (1)...(19): siRNA sense strand
aggaagcauugucgggcau

SEQ ID NO: 2627891 - RNA, 19 nt, Homo sapiens
  misc_RNA (1)...(19): siRNA sense strand
aggagauaguccagcagaa

SEQ ID NO: 2627892 - RNA, 19 nt, Homo sapiens
  misc_RNA (1)...(19): siRNA sense strand
cccagaaggcaaagggaga

SEQ ID NO: 2627893 - RNA, 19 nt, Homo sapiens
  misc_RNA (1)...(19): siRNA sense strand
gcacagaggagauagucca

SEQ ID NO: 2627894 - RNA, 19 nt, Homo sapiens
  misc_RNA (1)...(19): siRNA sense strand
ggaagagugcagccggcua

SEQ ID NO: 2627895 - RNA, 19 nt, Homo sapiens
  misc_RNA (1)...(19): siRNA sense strand
agaccaaggaggaucugaa

SEQ ID NO: 2627896 - RNA, 19 nt, Homo sapiens
  misc_RNA (1)...(19): siRNA sense strand
cugaugacgccgaggaacu

SEQ ID NO: 2627897 - RNA, 19 nt, Homo sapiens
  misc_RNA (1)...(19): siRNA sense strand
ggagagcucugcagggacu

SEQ ID NO: 2627898 - RNA, 19 nt, Homo sapiens
  misc_RNA (1)...(19): siRNA sense strand
aggaagcauugucgggcau

SEQ ID NO: 2627899 - RNA, 19 nt, Homo sapiens
  misc_RNA (1)...(19): siRNA sense strand
cagcaaguguuuagcacga

SEQ ID NO: 2627900 - RNA, 19 nt, Homo sapiens
  misc_RNA (1)...(19): siRNA sense strand
gggaaauccgaaugcucaa

SEQ ID NO: 2627901 - RNA, 19 nt, Homo sapiens
  misc_RNA (1)...(19): siRNA sense strand
aaauguagaaacagggaca

SEQ ID NO: 2627902 - RNA, 19 nt, Homo sapiens
  misc_RNA (1)...(19): siRNA sense strand
gaaaauugcccuucgggaa

SEQ ID NO: 2627903 - RNA, 19 nt, Homo sapiens
  misc_RNA (1)...(19): siRNA sense strand
ugggaaaauuggagaagga

SEQ ID NO: 2627904 - RNA, 19 nt, Homo sapiens
  misc_RNA (1)...(19): siRNA sense strand
uggcaaaagaacacaacaa

SEQ ID NO: 2627905 - RNA, 19 nt, Homo sapiens
  misc_RNA (1)...(19): siRNA sense strand
caacaaaccaacaaggaag

SEQ ID NO: 2627906 - RNA, 19 nt, Homo sapiens
  misc_RNA (1)...(19): siRNA sense strand
gaaacagggacacggguca

SEQ ID NO: 2627907 - RNA, 19 nt, Homo sapiens
  misc_RNA (1)...(19): siRNA sense strand
gagaaggauccuauggagu

SEQ ID NO: 2627908 - RNA, 19 nt, Homo sapiens
  misc_RNA (1)...(19): siRNA sense strand
auagagacgugaagccaga

SEQ ID NO: 2627909 - RNA, 19 nt, Homo sapiens
  misc_RNA (1)...(19): siRNA sense strand
acacaauugcauacauaga

SEQ ID NO: 2627910 - RNA, 19 nt, Homo sapiens
  misc_RNA (1)...(19): siRNA sense strand
acgugaagccagaaaauau

SEQ ID NO: 2627911 - RNA, 19 nt, Homo sapiens
  misc_RNA (1)...(19): siRNA sense strand
cgggaaauccgaaugcuca

SEQ ID NO: 2627912 - RNA, 19 nt, Homo sapiens
  misc_RNA (1)...(19): siRNA sense strand
cggauguggaucagcugua

SEQ ID NO: 2627913 - RNA, 19 nt, Homo sapiens
  misc_RNA (1)...(19): siRNA sense strand
cuguaucugauuaggaaga

SEQ ID NO: 2627914 - RNA, 19 nt, Homo sapiens
  misc_RNA (1)...(19): siRNA sense strand
ccgagaaaguagaggagga

SEQ ID NO: 2627915 - RNA, 19 nt, Homo sapiens
  misc_RNA (1)...(19): siRNA sense strand
ccaaaacagcgaagggaaa

SEQ ID NO: 2627916 - RNA, 19 nt, Homo sapiens
  misc_RNA (1)...(19): siRNA sense strand
ggaugaagcacaagaggca

SEQ ID NO: 2627917 - RNA, 19 nt, Homo sapiens
  misc_RNA (1)...(19): siRNA sense strand
agaaaguagaggaggacga

SEQ ID NO: 2627918 - RNA, 19 nt, Homo sapiens
  misc_RNA (1)...(19): siRNA sense strand
ccuugaggacuccgagaaa

SEQ ID NO: 2627919 - RNA, 19 nt, Homo sapiens
  misc_RNA (1)...(19): siRNA sense strand
uggauuugacugagagaca

SEQ ID NO: 2627920 - RNA, 19 nt, Homo sapiens
  misc_RNA (1)...(19): siRNA sense strand
auuacgaauuugagcgaga

SEQ ID NO: 2627921 - RNA, 19 nt, Homo sapiens
  misc_RNA (1)...(19): siRNA sense strand
ccuggaugaaggagaagaa

SEQ ID NO: 2627922 - RNA, 19 nt, Homo sapiens
  misc_RNA (1)...(19): siRNA sense strand
gacugagagacaagugaaa

SEQ ID NO: 2627923 - RNA, 19 nt, Homo sapiens
  misc_RNA (1)...(19): siRNA sense strand
aggaggacgaggaagagaa

SEQ ID NO: 2627924 - RNA, 19 nt, Homo sapiens
  misc_RNA (1)...(19): siRNA sense strand
gagcaagcccuuagcgucu

SEQ ID NO: 2627925 - RNA, 19 nt, Homo sapiens
  misc_RNA (1)...(19): siRNA sense strand
gaacuguggagcuggccua

SEQ ID NO: 2627926 - RNA, 19 nt, Homo sapiens
  misc_RNA (1)...(19): siRNA sense strand
cugagagacaagugaaagu

SEQ ID NO: 2627927 - RNA, 19 nt, Homo sapiens
  misc_RNA (1)...(19): siRNA sense strand
aaguagaggaggacgagga

SEQ ID NO: 2627928 - RNA, 19 nt, Homo sapiens
  misc_RNA (1)...(19): siRNA sense strand
ccacaaucgacuugcagca

SEQ ID NO: 2627929 - RNA, 19 nt, Homo sapiens
  misc_RNA (1)...(19): siRNA sense strand
uuuaaccagcaaugagaaa

SEQ ID NO: 2627930 - RNA, 19 nt, Homo sapiens
  misc_RNA (1)...(19): siRNA sense strand
guaaaagccuugaggacuc

SEQ ID NO: 2627931 - RNA, 19 nt, Homo sapiens
  misc_RNA (1)...(19): siRNA sense strand
ugaacaacaaagagggaaa

SEQ ID NO: 2627932 - RNA, 19 nt, Homo sapiens
  misc_RNA (1)...(19): siRNA sense strand
ugugaaggagcgagggaaa

SEQ ID NO: 2627933 - RNA, 19 nt, Homo sapiens
  misc_RNA (1)...(19): siRNA sense strand
gggaaugugcagaccaaua

SEQ ID NO: 2627934 - RNA, 19 nt, Homo sapiens
  misc_RNA (1)...(19): siRNA sense strand
ccacagauggagagugcaa

SEQ ID NO: 2627935 - RNA, 19 nt, Homo sapiens
  misc_RNA (1)...(19): siRNA sense strand
ugagauacacagaggacua

SEQ ID NO: 2627936 - RNA, 19 nt, Homo sapiens
  misc_RNA (1)...(19): siRNA sense strand
acaaauacaaagaggcauu

SEQ ID NO: 2627937 - RNA, 19 nt, Homo sapiens
  misc_RNA (1)...(19): siRNA sense strand
ccuacaaagcugauuauaa

SEQ ID NO: 2627938 - RNA, 19 nt, Homo sapiens
  misc_RNA (1)...(19): siRNA sense strand
gcagaagaccugaggcuga

SEQ ID NO: 2627939 - RNA, 19 nt, Homo sapiens
  misc_RNA (1)...(19): siRNA sense strand
aggaauauacagaagacua

SEQ ID NO: 2627940 - RNA, 19 nt, Homo sapiens
  misc_RNA (1)...(19): siRNA sense strand
caaaagauguacagggaga

SEQ ID NO: 2627941 - RNA, 19 nt, Homo sapiens
  misc_RNA (1)...(19): siRNA sense strand
gcuucaaagugaugugaga

SEQ ID NO: 2627942 - RNA, 19 nt, Homo sapiens
  misc_RNA (1)...(19): siRNA sense strand
gcguaaucuucgugcucaa

SEQ ID NO: 2627943 - RNA, 19 nt, Homo sapiens
  misc_RNA (1)...(19): siRNA sense strand
gggaaaaccagaaagcaaa

SEQ ID NO: 2627944 - RNA, 19 nt, Homo sapiens
  misc_RNA (1)...(19): siRNA sense strand
acagauuguucaagccaaa

SEQ ID NO: 2627945 - RNA, 19 nt, Homo sapiens
  misc_RNA (1)...(19): siRNA sense strand
gggagaagacaaaggggaa

SEQ ID NO: 2627946 - RNA, 19 nt, Homo sapiens
  misc_RNA (1)...(19): siRNA sense strand
ccagaaagcaaaaggguuu

SEQ ID NO: 2627947 - RNA, 19 nt, Homo sapiens
  misc_RNA (1)...(19): siRNA sense strand
uggcaagugaugugaggua

SEQ ID NO: 2627948 - RNA, 19 nt, Homo sapiens
  misc_RNA (1)...(19): siRNA sense strand
ugaaaagacaaaaggcaaa

SEQ ID NO: 2627949 - RNA, 19 nt, Homo sapiens
  misc_RNA (1)...(19): siRNA sense strand
ggacauuuccagaggccau

SEQ ID NO: 2627950 - RNA, 19 nt, Homo sapiens
  misc_RNA (1)...(19): siRNA sense strand
acacagaggacuaugaaca

SEQ ID NO: 2627951 - RNA, 19 nt, Homo sapiens
  misc_RNA (1)...(19): siRNA sense strand
caacaaagagggaaaggca

SEQ ID NO: 2627952 - RNA, 19 nt, Homo sapiens
  misc_RNA (1)...(19): siRNA sense strand
gcuacaagacagcggaaca

SEQ ID NO: 2627953 - RNA, 19 nt, Homo sapiens
  misc_RNA (1)...(19): siRNA sense strand
gcucaaggcuacaagcuga

SEQ ID NO: 2627954 - RNA, 19 nt, Homo sapiens
  misc_RNA (1)...(19): siRNA sense strand
ccaagaaggcuuauggcuu

SEQ ID NO: 2627955 - RNA, 19 nt, Homo sapiens
  misc_RNA (1)...(19): siRNA sense strand
ggaagaaagcaucggaacu

SEQ ID NO: 2627956 - RNA, 19 nt, Homo sapiens
  misc_RNA (1)...(19): siRNA sense strand
gcccauaacccuaagaaca

SEQ ID NO: 2627957 - RNA, 19 nt, Homo sapiens
  misc_RNA (1)...(19): siRNA sense strand
ggaacaaggagaaaacaua

SEQ ID NO: 2627958 - RNA, 19 nt, Homo sapiens
  misc_RNA (1)...(19): siRNA sense strand
gagaaaacauaaagcauca

SEQ ID NO: 2627959 - RNA, 19 nt, Homo sapiens
  misc_RNA (1)...(19): siRNA sense strand
gcuccuacaaaguggaaau

SEQ ID NO: 2627960 - RNA, 19 nt, Homo sapiens
  misc_RNA (1)...(19): siRNA sense strand
acaaagaguccuggcguaa

SEQ ID NO: 2627961 - RNA, 19 nt, Homo sapiens
  misc_RNA (1)...(19): siRNA sense strand
ccuugaaagaugccaauua

SEQ ID NO: 2627962 - RNA, 19 nt, Homo sapiens
  misc_RNA (1)...(19): siRNA sense strand
cagcaaaggcuucugguga

SEQ ID NO: 2627963 - RNA, 19 nt, Homo sapiens
  misc_RNA (1)...(19): siRNA sense strand
agauauagccagugauuuu

SEQ ID NO: 2627964 - RNA, 19 nt, Homo sapiens
  misc_RNA (1)...(19): siRNA sense strand
gaugaaaggcgcugcacau

SEQ ID NO: 2627965 - RNA, 19 nt, Homo sapiens
  misc_RNA (1)...(19): siRNA sense strand
gaacaucacuuuacggcuu

SEQ ID NO: 2627966 - RNA, 19 nt, Homo sapiens
  misc_RNA (1)...(19): siRNA sense strand
gugcaaagaaggcuggaga

SEQ ID NO: 2627967 - RNA, 19 nt, Homo sapiens
  misc_RNA (1)...(19): siRNA sense strand
gagauugaagggaggaaga

SEQ ID NO: 2627968 - RNA, 19 nt, Homo sapiens
  misc_RNA (1)...(19): siRNA sense strand
cccauaacccuaagaacaa

SEQ ID NO: 2627969 - RNA, 19 nt, Homo sapiens
  misc_RNA (1)...(19): siRNA sense strand
accaauauggccaggguua

SEQ ID NO: 2627970 - RNA, 19 nt, Homo sapiens
  misc_RNA (1)...(19): siRNA sense strand
uggcauggaugaagggagu

SEQ ID NO: 2627971 - RNA, 19 nt, Homo sapiens
  misc_RNA (1)...(19): siRNA sense strand
gcagaugugaaguggauga

SEQ ID NO: 2627972 - RNA, 19 nt, Homo sapiens
  misc_RNA (1)...(19): siRNA sense strand
aggcaaagccaugggaaca

SEQ ID NO: 2627973 - RNA, 19 nt, Homo sapiens
  misc_RNA (1)...(19): siRNA sense strand
guauaagagcagcugggaa

SEQ ID NO: 2627974 - RNA, 19 nt, Homo sapiens
  misc_RNA (1)...(19): siRNA sense strand
cuagcgaggugaaguacaa

SEQ ID NO: 2627975 - RNA, 19 nt, Homo sapiens
  misc_RNA (1)...(19): siRNA sense strand
cagccaaagccaagaggga

SEQ ID NO: 2627976 - RNA, 19 nt, Homo sapiens
  misc_RNA (1)...(19): siRNA sense strand
agcaaaggcuucuggugaa

SEQ ID NO: 2627977 - RNA, 19 nt, Homo sapiens
  misc_RNA (1)...(19): siRNA sense strand
ccauuggagcugagggcau

SEQ ID NO: 2627978 - RNA, 19 nt, Homo sapiens
  misc_RNA (1)...(19): siRNA sense strand
cuaucaaacagcuaugaaa

SEQ ID NO: 2627979 - RNA, 19 nt, Homo sapiens
  misc_RNA (1)...(19): siRNA sense strand
agacaaaggggaaaggauu

SEQ ID NO: 2627980 - RNA, 19 nt, Homo sapiens
  misc_RNA (1)...(19): siRNA sense strand
ugggaaaaccagaaagcaa

SEQ ID NO: 2627981 - RNA, 19 nt, Homo sapiens
  misc_RNA (1)...(19): siRNA sense strand
cagaauuaguuauacccaa

SEQ ID NO: 2627982 - RNA, 19 nt, Homo sapiens
  misc_RNA (1)...(19): siRNA sense strand
auacagggaacaaggagaa

SEQ ID NO: 2627983 - RNA, 19 nt, Homo sapiens
  misc_RNA (1)...(19): siRNA sense strand
cgagaagaucagcuguaua

SEQ ID NO: 2627984 - RNA, 19 nt, Homo sapiens
  misc_RNA (1)...(19): siRNA sense strand
gcaucgacaaguugaagua

SEQ ID NO: 2627985 - RNA, 19 nt, Homo sapiens
  misc_RNA (1)...(19): siRNA sense strand
gcagcugagucaugugaau

SEQ ID NO: 2627986 - RNA, 19 nt, Homo sapiens
  misc_RNA (1)...(19): siRNA sense strand
agaugaagcuggaugccau

SEQ ID NO: 2627987 - RNA, 19 nt, Homo sapiens
  misc_RNA (1)...(19): siRNA sense strand
cggaggaguaugaggagca

SEQ ID NO: 2627988 - RNA, 19 nt, Homo sapiens
  misc_RNA (1)...(19): siRNA sense strand
gcuaugaaggaguugguau

SEQ ID NO: 2627989 - RNA, 19 nt, Homo sapiens
  misc_RNA (1)...(19): siRNA sense strand
cuaugaaacuggugcccuu

SEQ ID NO: 2627990 - RNA, 19 nt, Homo sapiens
  misc_RNA (1)...(19): siRNA sense strand
ggccaaaaccaaugccaaa

SEQ ID NO: 2627991 - RNA, 19 nt, Homo sapiens
  misc_RNA (1)...(19): siRNA sense strand
cugaaguccugcuggccaa

SEQ ID NO: 2627992 - RNA, 19 nt, Homo sapiens
  misc_RNA (1)...(19): siRNA sense strand
ggaugaagcauuuccucaa

SEQ ID NO: 2627993 - RNA, 19 nt, Homo sapiens
  misc_RNA (1)...(19): siRNA sense strand
gguugaggcucgaaagucu

SEQ ID NO: 2627994 - RNA, 19 nt, Homo sapiens
  misc_RNA (1)...(19): siRNA sense strand
uucaaagugaugugagaua

SEQ ID NO: 2627995 - RNA, 19 nt, Homo sapiens
  misc_RNA (1)...(19): siRNA sense strand
uggaguacaagaagggauu

SEQ ID NO: 2627996 - RNA, 19 nt, Homo sapiens
  misc_RNA (1)...(19): siRNA sense strand
ugaacaacaaagagggaaa

SEQ ID NO: 2627997 - RNA, 19 nt, Homo sapiens
  misc_RNA (1)...(19): siRNA sense strand
ugugaaggagcgagggaaa

SEQ ID NO: 2627998 - RNA, 19 nt, Homo sapiens
  misc_RNA (1)...(19): siRNA sense strand
gggaaugugcagaccaaua

SEQ ID NO: 2627999 - RNA, 19 nt, Homo sapiens
  misc_RNA (1)...(19): siRNA sense strand
ccacagauggagagugcaa

SEQ ID NO: 2628000 - RNA, 19 nt, Homo sapiens
  misc_RNA (1)...(19): siRNA sense strand
ugagauacacagaggacua

SEQ ID NO: 2628001 - RNA, 19 nt, Homo sapiens
  misc_RNA (1)...(19): siRNA sense strand
acaaauacaaagaggcauu

SEQ ID NO: 2628002 - RNA, 19 nt, Homo sapiens
  misc_RNA (1)...(19): siRNA sense strand
ccuacaaagcugauuauaa

SEQ ID NO: 2628003 - RNA, 19 nt, Homo sapiens
  misc_RNA (1)...(19): siRNA sense strand
gcagaagaccugaggcuga

SEQ ID NO: 2628004 - RNA, 19 nt, Homo sapiens
  misc_RNA (1)...(19): siRNA sense strand
aggaauauacagaagacua

SEQ ID NO: 2628005 - RNA, 19 nt, Homo sapiens
  misc_RNA (1)...(19): siRNA sense strand
caaaagauguacagggaga

SEQ ID NO: 2628006 - RNA, 19 nt, Homo sapiens
  misc_RNA (1)...(19): siRNA sense strand
gcuucaaagugaugugaga

SEQ ID NO: 2628007 - RNA, 19 nt, Homo sapiens
  misc_RNA (1)...(19): siRNA sense strand
gcguaaucuucgugcucaa

SEQ ID NO: 2628008 - RNA, 19 nt, Homo sapiens
  misc_RNA (1)...(19): siRNA sense strand
gggaaaaccagaaagcaaa

SEQ ID NO: 2628009 - RNA, 19 nt, Homo sapiens
  misc_RNA (1)...(19): siRNA sense strand
acagauuguucaagccaaa

SEQ ID NO: 2628010 - RNA, 19 nt, Homo sapiens
  misc_RNA (1)...(19): siRNA sense strand
gggagaagacaaaggggaa

SEQ ID NO: 2628011 - RNA, 19 nt, Homo sapiens
  misc_RNA (1)...(19): siRNA sense strand
ccagaaagcaaaaggguuu

SEQ ID NO: 2628012 - RNA, 19 nt, Homo sapiens
  misc_RNA (1)...(19): siRNA sense strand
uggcaagugaugugaggua

SEQ ID NO: 2628013 - RNA, 19 nt, Homo sapiens
  misc_RNA (1)...(19): siRNA sense strand
ugaaaagacaaaaggcaaa

SEQ ID NO: 2628014 - RNA, 19 nt, Homo sapiens
  misc_RNA (1)...(19): siRNA sense strand
ggacauuuccagaggccau

SEQ ID NO: 2628015 - RNA, 19 nt, Homo sapiens
  misc_RNA (1)...(19): siRNA sense strand
acacagaggacuaugaaca

SEQ ID NO: 2628016 - RNA, 19 nt, Homo sapiens
  misc_RNA (1)...(19): siRNA sense strand
caacaaagagggaaaggca

SEQ ID NO: 2628017 - RNA, 19 nt, Homo sapiens
  misc_RNA (1)...(19): siRNA sense strand
gcuacaagacagcggaaca

SEQ ID NO: 2628018 - RNA, 19 nt, Homo sapiens
  misc_RNA (1)...(19): siRNA sense strand
gcucaaggcuacaagcuga

SEQ ID NO: 2628019 - RNA, 19 nt, Homo sapiens
  misc_RNA (1)...(19): siRNA sense strand
ccaagaaggcuuauggcuu

SEQ ID NO: 2628020 - RNA, 19 nt, Homo sapiens
  misc_RNA (1)...(19): siRNA sense strand
ggaagaaagcaucggaacu

SEQ ID NO: 2628021 - RNA, 19 nt, Homo sapiens
  misc_RNA (1)...(19): siRNA sense strand
gcccauaacccuaagaaca

SEQ ID NO: 2628022 - RNA, 19 nt, Homo sapiens
  misc_RNA (1)...(19): siRNA sense strand
ggaacaaggagaaaacaua

SEQ ID NO: 2628023 - RNA, 19 nt, Homo sapiens
  misc_RNA (1)...(19): siRNA sense strand
gagaaaacauaaagcauca

SEQ ID NO: 2628024 - RNA, 19 nt, Homo sapiens
  misc_RNA (1)...(19): siRNA sense strand
gcuccuacaaaguggaaau

SEQ ID NO: 2628025 - RNA, 19 nt, Homo sapiens
  misc_RNA (1)...(19): siRNA sense strand
acaaagaguccuggcguaa

SEQ ID NO: 2628026 - RNA, 19 nt, Homo sapiens
  misc_RNA (1)...(19): siRNA sense strand
ccuugaaagaugccaauua

SEQ ID NO: 2628027 - RNA, 19 nt, Homo sapiens
  misc_RNA (1)...(19): siRNA sense strand
cagcaaaggcuucugguga

SEQ ID NO: 2628028 - RNA, 19 nt, Homo sapiens
  misc_RNA (1)...(19): siRNA sense strand
agauauagccagugauuuu

SEQ ID NO: 2628029 - RNA, 19 nt, Homo sapiens
  misc_RNA (1)...(19): siRNA sense strand
gaugaaaggcgcugcacau

SEQ ID NO: 2628030 - RNA, 19 nt, Homo sapiens
  misc_RNA (1)...(19): siRNA sense strand
gaacaucacuuuacggcuu

SEQ ID NO: 2628031 - RNA, 19 nt, Homo sapiens
  misc_RNA (1)...(19): siRNA sense strand
gugcaaagaaggcuggaga

SEQ ID NO: 2628032 - RNA, 19 nt, Homo sapiens
  misc_RNA (1)...(19): siRNA sense strand
gagauugaagggaggaaga

SEQ ID NO: 2628033 - RNA, 19 nt, Homo sapiens
  misc_RNA (1)...(19): siRNA sense strand
cccauaacccuaagaacaa

SEQ ID NO: 2628034 - RNA, 19 nt, Homo sapiens
  misc_RNA (1)...(19): siRNA sense strand
accaauauggccaggguua

SEQ ID NO: 2628035 - RNA, 19 nt, Homo sapiens
  misc_RNA (1)...(19): siRNA sense strand
uggcauggaugaagggagu

SEQ ID NO: 2628036 - RNA, 19 nt, Homo sapiens
  misc_RNA (1)...(19): siRNA sense strand
gcagaugugaaguggauga

SEQ ID NO: 2628037 - RNA, 19 nt, Homo sapiens
  misc_RNA (1)...(19): siRNA sense strand
aggcaaagccaugggaaca

SEQ ID NO: 2628038 - RNA, 19 nt, Homo sapiens
  misc_RNA (1)...(19): siRNA sense strand
guauaagagcagcugggaa

SEQ ID NO: 2628039 - RNA, 19 nt, Homo sapiens
  misc_RNA (1)...(19): siRNA sense strand
cuagcgaggugaaguacaa

SEQ ID NO: 2628040 - RNA, 19 nt, Homo sapiens
  misc_RNA (1)...(19): siRNA sense strand
cagccaaagccaagaggga

SEQ ID NO: 2628041 - RNA, 19 nt, Homo sapiens
  misc_RNA (1)...(19): siRNA sense strand
agcaaaggcuucuggugaa

SEQ ID NO: 2628042 - RNA, 19 nt, Homo sapiens
  misc_RNA (1)...(19): siRNA sense strand
ccauuggagcugagggcau

SEQ ID NO: 2628043 - RNA, 19 nt, Homo sapiens
  misc_RNA (1)...(19): siRNA sense strand
cuaucaaacagcuaugaaa

SEQ ID NO: 2628044 - RNA, 19 nt, Homo sapiens
  misc_RNA (1)...(19): siRNA sense strand
agacaaaggggaaaggauu

SEQ ID NO: 2628045 - RNA, 19 nt, Homo sapiens
  misc_RNA (1)...(19): siRNA sense strand
ugggaaaaccagaaagcaa

SEQ ID NO: 2628046 - RNA, 19 nt, Homo sapiens
  misc_RNA (1)...(19): siRNA sense strand
cagaauuaguuauacccaa

SEQ ID NO: 2628047 - RNA, 19 nt, Homo sapiens
  misc_RNA (1)...(19): siRNA sense strand
auacagggaacaaggagaa

SEQ ID NO: 2628048 - RNA, 19 nt, Homo sapiens
  misc_RNA (1)...(19): siRNA sense strand
cgagaagaucagcuguaua

SEQ ID NO: 2628049 - RNA, 19 nt, Homo sapiens
  misc_RNA (1)...(19): siRNA sense strand
gcaucgacaaguugaagua

SEQ ID NO: 2628050 - RNA, 19 nt, Homo sapiens
  misc_RNA (1)...(19): siRNA sense strand
gcagcugagucaugugaau

SEQ ID NO: 2628051 - RNA, 19 nt, Homo sapiens
  misc_RNA (1)...(19): siRNA sense strand
agaugaagcuggaugccau

SEQ ID NO: 2628052 - RNA, 19 nt, Homo sapiens
  misc_RNA (1)...(19): siRNA sense strand
cggaggaguaugaggagca

SEQ ID NO: 2628053 - RNA, 19 nt, Homo sapiens
  misc_RNA (1)...(19): siRNA sense strand
gcuaugaaggaguugguau

SEQ ID NO: 2628054 - RNA, 19 nt, Homo sapiens
  misc_RNA (1)...(19): siRNA sense strand
cuaugaaacuggugcccuu

SEQ ID NO: 2628055 - RNA, 19 nt, Homo sapiens
  misc_RNA (1)...(19): siRNA sense strand
ggccaaaaccaaugccaaa

SEQ ID NO: 2628056 - RNA, 19 nt, Homo sapiens
  misc_RNA (1)...(19): siRNA sense strand
cugaaguccugcuggccaa

SEQ ID NO: 2628057 - RNA, 19 nt, Homo sapiens
  misc_RNA (1)...(19): siRNA sense strand
ggaugaagcauuuccucaa

SEQ ID NO: 2628058 - RNA, 19 nt, Homo sapiens
  misc_RNA (1)...(19): siRNA sense strand
gguugaggcucgaaagucu

SEQ ID NO: 2628059 - RNA, 19 nt, Homo sapiens
  misc_RNA (1)...(19): siRNA sense strand
uucaaagugaugugagaua

SEQ ID NO: 2628060 - RNA, 19 nt, Homo sapiens
  misc_RNA (1)...(19): siRNA sense strand
uggaguacaagaagggauu

SEQ ID NO: 2628061 - RNA, 19 nt, Homo sapiens
  misc_RNA (1)...(19): siRNA sense strand
gccaagcuguccugggcua

SEQ ID NO: 2628062 - RNA, 19 nt, Homo sapiens
  misc_RNA (1)...(19): siRNA sense strand
cccaagaggcugcuggaga

SEQ ID NO: 2628063 - RNA, 19 nt, Homo sapiens
  misc_RNA (1)...(19): siRNA sense strand
cuuaaaagcaagagcgcua

SEQ ID NO: 2628064 - RNA, 19 nt, Homo sapiens
  misc_RNA (1)...(19): siRNA sense strand
caagaaucuaugaggaaau

SEQ ID NO: 2628065 - RNA, 19 nt, Homo sapiens
  misc_RNA (1)...(19): siRNA sense strand
ugaaaaugcuauagcucaa

SEQ ID NO: 2628066 - RNA, 19 nt, Homo sapiens
  misc_RNA (1)...(19): siRNA sense strand
gcacuauggaacaggcuau

SEQ ID NO: 2628067 - RNA, 19 nt, Homo sapiens
  misc_RNA (1)...(19): siRNA sense strand
ucuaugaggaaaugaacaa

SEQ ID NO: 2628068 - RNA, 19 nt, Homo sapiens
  misc_RNA (1)...(19): siRNA sense strand
aaaugaugcuggaugaaaa

SEQ ID NO: 2628069 - RNA, 19 nt, Homo sapiens
  misc_RNA (1)...(19): siRNA sense strand
ugcaagaaucuaugaggaa

SEQ ID NO: 2628070 - RNA, 19 nt, Homo sapiens
  misc_RNA (1)...(19): siRNA sense strand
auguagaucaggaaggaau

SEQ ID NO: 2628071 - RNA, 19 nt, Homo sapiens
  misc_RNA (1)...(19): siRNA sense strand
ugggaauaggagauacaaa

SEQ ID NO: 2628072 - RNA, 19 nt, Homo sapiens
  misc_RNA (1)...(19): siRNA sense strand
gacauguagcugugggaau

SEQ ID NO: 2628073 - RNA, 19 nt, Homo sapiens
  misc_RNA (1)...(19): siRNA sense strand
guuacuacagguugggaau

SEQ ID NO: 2628074 - RNA, 19 nt, Homo sapiens
  misc_RNA (1)...(19): siRNA sense strand
cgcuaacagaaaugguaua

SEQ ID NO: 2628075 - RNA, 19 nt, Homo sapiens
  misc_RNA (1)...(19): siRNA sense strand
ucaggaaggaauugcagaa

SEQ ID NO: 2628076 - RNA, 19 nt, Homo sapiens
  misc_RNA (1)...(19): siRNA sense strand
acgccgaggccuacaacaa

SEQ ID NO: 2628077 - RNA, 19 nt, Homo sapiens
  misc_RNA (1)...(19): siRNA sense strand
gcuucuaugcccagcagua

SEQ ID NO: 2628078 - RNA, 19 nt, Homo sapiens
  misc_RNA (1)...(19): siRNA sense strand
gcgcuaacagaaaugguau

SEQ ID NO: 2628079 - RNA, 19 nt, Homo sapiens
  misc_RNA (1)...(19): siRNA sense strand
uagauaaguuuccaggaga

SEQ ID NO: 2628080 - RNA, 19 nt, Homo sapiens
  misc_RNA (1)...(19): siRNA sense strand
gcucuguggaauugcaaga

SEQ ID NO: 2628081 - RNA, 19 nt, Homo sapiens
  misc_RNA (1)...(19): siRNA sense strand
uggaaaguacagauuggaa

SEQ ID NO: 2628082 - RNA, 19 nt, Homo sapiens
  misc_RNA (1)...(19): siRNA sense strand
gaauguaucgugaagcaga

SEQ ID NO: 2628083 - RNA, 19 nt, Homo sapiens
  misc_RNA (1)...(19): siRNA sense strand
uggaauugcaagaaucuau

SEQ ID NO: 2628084 - RNA, 19 nt, Homo sapiens
  misc_RNA (1)...(19): siRNA sense strand
agcaagagcgcuaacagaa

SEQ ID NO: 2628085 - RNA, 19 nt, Homo sapiens
  misc_RNA (1)...(19): siRNA sense strand
caggaaggaauugcagaaa

SEQ ID NO: 2628086 - RNA, 19 nt, Homo sapiens
  misc_RNA (1)...(19): siRNA sense strand
acaaccacgccgaggccua

SEQ ID NO: 2628087 - RNA, 19 nt, Homo sapiens
  misc_RNA (1)...(19): siRNA sense strand
aagcaagagcgcuaacaga

SEQ ID NO: 2628088 - RNA, 19 nt, Homo sapiens
  misc_RNA (1)...(19): siRNA sense strand
cuuaaaagcaagagcgcua

SEQ ID NO: 2628089 - RNA, 19 nt, Homo sapiens
  misc_RNA (1)...(19): siRNA sense strand
caagaaucuaugaggaaau

SEQ ID NO: 2628090 - RNA, 19 nt, Homo sapiens
  misc_RNA (1)...(19): siRNA sense strand
ugaaaaugcuauagcucaa

SEQ ID NO: 2628091 - RNA, 19 nt, Homo sapiens
  misc_RNA (1)...(19): siRNA sense strand
gcacuauggaacaggcuau

SEQ ID NO: 2628092 - RNA, 19 nt, Homo sapiens
  misc_RNA (1)...(19): siRNA sense strand
ucuaugaggaaaugaacaa

SEQ ID NO: 2628093 - RNA, 19 nt, Homo sapiens
  misc_RNA (1)...(19): siRNA sense strand
aaaugaugcuggaugaaaa

SEQ ID NO: 2628094 - RNA, 19 nt, Homo sapiens
  misc_RNA (1)...(19): siRNA sense strand
ugcaagaaucuaugaggaa

SEQ ID NO: 2628095 - RNA, 19 nt, Homo sapiens
  misc_RNA (1)...(19): siRNA sense strand
auguagaucaggaaggaau

SEQ ID NO: 2628096 - RNA, 19 nt, Homo sapiens
  misc_RNA (1)...(19): siRNA sense strand
ugggaauaggagauacaaa

SEQ ID NO: 2628097 - RNA, 19 nt, Homo sapiens
  misc_RNA (1)...(19): siRNA sense strand
gacauguagcugugggaau

SEQ ID NO: 2628098 - RNA, 19 nt, Homo sapiens
  misc_RNA (1)...(19): siRNA sense strand
guuacuacagguugggaau

SEQ ID NO: 2628099 - RNA, 19 nt, Homo sapiens
  misc_RNA (1)...(19): siRNA sense strand
cgcuaacagaaaugguaua

SEQ ID NO: 2628100 - RNA, 19 nt, Homo sapiens
  misc_RNA (1)...(19): siRNA sense strand
ucaggaaggaauugcagaa

SEQ ID NO: 2628101 - RNA, 19 nt, Homo sapiens
  misc_RNA (1)...(19): siRNA sense strand
acgccgaggccuacaacaa

SEQ ID NO: 2628102 - RNA, 19 nt, Homo sapiens
  misc_RNA (1)...(19): siRNA sense strand
gcuucuaugcccagcagua

SEQ ID NO: 2628103 - RNA, 19 nt, Homo sapiens
  misc_RNA (1)...(19): siRNA sense strand
gcgcuaacagaaaugguau

SEQ ID NO: 2628104 - RNA, 19 nt, Homo sapiens
  misc_RNA (1)...(19): siRNA sense strand
uagauaaguuuccaggaga

SEQ ID NO: 2628105 - RNA, 19 nt, Homo sapiens
  misc_RNA (1)...(19): siRNA sense strand
gcucuguggaauugcaaga

SEQ ID NO: 2628106 - RNA, 19 nt, Homo sapiens
  misc_RNA (1)...(19): siRNA sense strand
uggaaaguacagauuggaa

SEQ ID NO: 2628107 - RNA, 19 nt, Homo sapiens
  misc_RNA (1)...(19): siRNA sense strand
gaauguaucgugaagcaga

SEQ ID NO: 2628108 - RNA, 19 nt, Homo sapiens
  misc_RNA (1)...(19): siRNA sense strand
uggaauugcaagaaucuau

SEQ ID NO: 2628109 - RNA, 19 nt, Homo sapiens
  misc_RNA (1)...(19): siRNA sense strand
agcaagagcgcuaacagaa

SEQ ID NO: 2628110 - RNA, 19 nt, Homo sapiens
  misc_RNA (1)...(19): siRNA sense strand
caggaaggaauugcagaaa

SEQ ID NO: 2628111 - RNA, 19 nt, Homo sapiens
  misc_RNA (1)...(19): siRNA sense strand
acaaccacgccgaggccua

SEQ ID NO: 2628112 - RNA, 19 nt, Homo sapiens
  misc_RNA (1)...(19): siRNA sense strand
aagcaagagcgcuaacaga

SEQ ID NO: 2628113 - RNA, 19 nt, Homo sapiens
  misc_RNA (1)...(19): siRNA sense strand
cuuaaaagcaagagcgcua

SEQ ID NO: 2628114 - RNA, 19 nt, Homo sapiens
  misc_RNA (1)...(19): siRNA sense strand
caagaaucuaugaggaaau

SEQ ID NO: 2628115 - RNA, 19 nt, Homo sapiens
  misc_RNA (1)...(19): siRNA sense strand
ugaaaaugcuauagcucaa

SEQ ID NO: 2628116 - RNA, 19 nt, Homo sapiens
  misc_RNA (1)...(19): siRNA sense strand
gcacuauggaacaggcuau

SEQ ID NO: 2628117 - RNA, 19 nt, Homo sapiens
  misc_RNA (1)...(19): siRNA sense strand
ucuaugaggaaaugaacaa

SEQ ID NO: 2628118 - RNA, 19 nt, Homo sapiens
  misc_RNA (1)...(19): siRNA sense strand
aaaugaugcuggaugaaaa

SEQ ID NO: 2628119 - RNA, 19 nt, Homo sapiens
  misc_RNA (1)...(19): siRNA sense strand
ugcaagaaucuaugaggaa

SEQ ID NO: 2628120 - RNA, 19 nt, Homo sapiens
  misc_RNA (1)...(19): siRNA sense strand
auguagaucaggaaggaau

SEQ ID NO: 2628121 - RNA, 19 nt, Homo sapiens
  misc_RNA (1)...(19): siRNA sense strand
ugggaauaggagauacaaa

SEQ ID NO: 2628122 - RNA, 19 nt, Homo sapiens
  misc_RNA (1)...(19): siRNA sense strand
gacauguagcugugggaau

SEQ ID NO: 2628123 - RNA, 19 nt, Homo sapiens
  misc_RNA (1)...(19): siRNA sense strand
guuacuacagguugggaau

SEQ ID NO: 2628124 - RNA, 19 nt, Homo sapiens
  misc_RNA (1)...(19): siRNA sense strand
cgcuaacagaaaugguaua

SEQ ID NO: 2628125 - RNA, 19 nt, Homo sapiens
  misc_RNA (1)...(19): siRNA sense strand
ucaggaaggaauugcagaa

SEQ ID NO: 2628126 - RNA, 19 nt, Homo sapiens
  misc_RNA (1)...(19): siRNA sense strand
acgccgaggccuacaacaa

SEQ ID NO: 2628127 - RNA, 19 nt, Homo sapiens
  misc_RNA (1)...(19): siRNA sense strand
gcuucuaugcccagcagua

SEQ ID NO: 2628128 - RNA, 19 nt, Homo sapiens
  misc_RNA (1)...(19): siRNA sense strand
gcgcuaacagaaaugguau

SEQ ID NO: 2628129 - RNA, 19 nt, Homo sapiens
  misc_RNA (1)...(19): siRNA sense strand
uagauaaguuuccaggaga

SEQ ID NO: 2628130 - RNA, 19 nt, Homo sapiens
  misc_RNA (1)...(19): siRNA sense strand
gcucuguggaauugcaaga

SEQ ID NO: 2628131 - RNA, 19 nt, Homo sapiens
  misc_RNA (1)...(19): siRNA sense strand
uggaaaguacagauuggaa

SEQ ID NO: 2628132 - RNA, 19 nt, Homo sapiens
  misc_RNA (1)...(19): siRNA sense strand
gaauguaucgugaagcaga

SEQ ID NO: 2628133 - RNA, 19 nt, Homo sapiens
  misc_RNA (1)...(19): siRNA sense strand
uggaauugcaagaaucuau

SEQ ID NO: 2628134 - RNA, 19 nt, Homo sapiens
  misc_RNA (1)...(19): siRNA sense strand
agcaagagcgcuaacagaa

SEQ ID NO: 2628135 - RNA, 19 nt, Homo sapiens
  misc_RNA (1)...(19): siRNA sense strand
caggaaggaauugcagaaa

SEQ ID NO: 2628136 - RNA, 19 nt, Homo sapiens
  misc_RNA (1)...(19): siRNA sense strand
acaaccacgccgaggccua

SEQ ID NO: 2628137 - RNA, 19 nt, Homo sapiens
  misc_RNA (1)...(19): siRNA sense strand
aagcaagagcgcuaacaga

SEQ ID NO: 2628138 - RNA, 19 nt, Homo sapiens
  misc_RNA (1)...(19): siRNA sense strand
aaugcaaacaugugggaau

SEQ ID NO: 2628139 - RNA, 19 nt, Homo sapiens
  misc_RNA (1)...(19): siRNA sense strand
auggaauagcccggagaua

SEQ ID NO: 2628140 - RNA, 19 nt, Homo sapiens
  misc_RNA (1)...(19): siRNA sense strand
uggaagaaugugggcgcua

SEQ ID NO: 2628141 - RNA, 19 nt, Homo sapiens
  misc_RNA (1)...(19): siRNA sense strand
gcgagaaccuggagaccga

SEQ ID NO: 2628142 - RNA, 19 nt, Homo sapiens
  misc_RNA (1)...(19): siRNA sense strand
cugcaaagcugaagcggac

SEQ ID NO: 2628143 - RNA, 19 nt, Homo sapiens
  misc_RNA (1)...(19): siRNA sense strand
ccuacaaagcaucguguga

SEQ ID NO: 2628144 - RNA, 19 nt, Homo sapiens
  misc_RNA (1)...(19): siRNA sense strand
cugaagagccugugccgga

SEQ ID NO: 2628145 - RNA, 19 nt, Homo sapiens
  misc_RNA (1)...(19): siRNA sense strand
gcaacuuugucaacggcau

SEQ ID NO: 2628146 - RNA, 19 nt, Homo sapiens
  misc_RNA (1)...(19): siRNA sense strand
ggaucauggacaauggcuu

SEQ ID NO: 2628147 - RNA, 19 nt, Homo sapiens
  misc_RNA (1)...(19): siRNA sense strand
gcaacagcaacgagggaug

SEQ ID NO: 2628148 - RNA, 19 nt, Homo sapiens
  misc_RNA (1)...(19): siRNA sense strand
ccaaggaacuggaggccua

SEQ ID NO: 2628149 - RNA, 19 nt, Homo sapiens
  misc_RNA (1)...(19): siRNA sense strand
agacaagaugcgggaagaa

SEQ ID NO: 2628150 - RNA, 19 nt, Homo sapiens
  misc_RNA (1)...(19): siRNA sense strand
uggcugagcuggcuggaca

SEQ ID NO: 2628151 - RNA, 19 nt, Homo sapiens
  misc_RNA (1)...(19): siRNA sense strand
acacagaggagcaaccaga

SEQ ID NO: 2628152 - RNA, 19 nt, Homo sapiens
  misc_RNA (1)...(19): siRNA sense strand
cucugaacauccuggagaa

SEQ ID NO: 2628153 - RNA, 19 nt, Homo sapiens
  misc_RNA (1)...(19): siRNA sense strand
uguuggaagacaagguuga

SEQ ID NO: 2628154 - RNA, 19 nt, Homo sapiens
  misc_RNA (1)...(19): siRNA sense strand
cuaaaugagccuugggcag

SEQ ID NO: 2628155 - RNA, 19 nt, Homo sapiens
  misc_RNA (1)...(19): siRNA sense strand
ccacaaagcaagagaugaa

SEQ ID NO: 2628156 - RNA, 19 nt, Homo sapiens
  misc_RNA (1)...(19): siRNA sense strand
aguucaagauggugagaaa

SEQ ID NO: 2628157 - RNA, 19 nt, Homo sapiens
  misc_RNA (1)...(19): siRNA sense strand
ugauaagaauggagaacaa

SEQ ID NO: 2628158 - RNA, 19 nt, Homo sapiens
  misc_RNA (1)...(19): siRNA sense strand
gggaugugacagaggaaua

SEQ ID NO: 2628159 - RNA, 19 nt, Homo sapiens
  misc_RNA (1)...(19): siRNA sense strand
agucaugcguaaugggaaa

SEQ ID NO: 2628160 - RNA, 19 nt, Homo sapiens
  misc_RNA (1)...(19): siRNA sense strand
aggaaacuguggagauaua

SEQ ID NO: 2628161 - RNA, 19 nt, Homo sapiens
  misc_RNA (1)...(19): siRNA sense strand
cggcagaaggauuguguua

SEQ ID NO: 2628162 - RNA, 19 nt, Homo sapiens
  misc_RNA (1)...(19): siRNA sense strand
cuauagaaggugacaauaa

SEQ ID NO: 2628163 - RNA, 19 nt, Homo sapiens
  misc_RNA (1)...(19): siRNA sense strand
cagcagugaugcagaggaa

SEQ ID NO: 2628164 - RNA, 19 nt, Homo sapiens
  misc_RNA (1)...(19): siRNA sense strand
ugacagagaaccagaggaa

SEQ ID NO: 2628165 - RNA, 19 nt, Homo sapiens
  misc_RNA (1)...(19): siRNA sense strand
uggagaugaugaugaguua

SEQ ID NO: 2628166 - RNA, 19 nt, Homo sapiens
  misc_RNA (1)...(19): siRNA sense strand
aauccugagucuugagaaa

SEQ ID NO: 2628167 - RNA, 19 nt, Homo sapiens
  misc_RNA (1)...(19): siRNA sense strand
uggcaaaacuguuggagua

SEQ ID NO: 2628168 - RNA, 19 nt, Homo sapiens
  misc_RNA (1)...(19): siRNA sense strand
cuacaacaucugagagaau

SEQ ID NO: 2628169 - RNA, 19 nt, Homo sapiens
  misc_RNA (1)...(19): siRNA sense strand
uauuaagaccugugacaaa

SEQ ID NO: 2628170 - RNA, 19 nt, Homo sapiens
  misc_RNA (1)...(19): siRNA sense strand
agacaauaauggagagaug

SEQ ID NO: 2628171 - RNA, 19 nt, Homo sapiens
  misc_RNA (1)...(19): siRNA sense strand
agacagagaccuucacaaa

SEQ ID NO: 2628172 - RNA, 19 nt, Homo sapiens
  misc_RNA (1)...(19): siRNA sense strand
ggcaagaauuagaugaaaa

SEQ ID NO: 2628173 - RNA, 19 nt, Homo sapiens
  misc_RNA (1)...(19): siRNA sense strand
caguugagguugaagaaga

SEQ ID NO: 2628174 - RNA, 19 nt, Homo sapiens
  misc_RNA (1)...(19): siRNA sense strand
cuaugaaagcacaggagua

SEQ ID NO: 2628175 - RNA, 19 nt, Homo sapiens
  misc_RNA (1)...(19): siRNA sense strand
agauacaggaguucagaaa

SEQ ID NO: 2628176 - RNA, 19 nt, Homo sapiens
  misc_RNA (1)...(19): siRNA sense strand
caaaggaaguugaaagcca

SEQ ID NO: 2628177 - RNA, 19 nt, Homo sapiens
  misc_RNA (1)...(19): siRNA sense strand
agugaaagcagcagaugaa

SEQ ID NO: 2628178 - RNA, 19 nt, Homo sapiens
  misc_RNA (1)...(19): siRNA sense strand
cuaaagaaccaaugaaagu

SEQ ID NO: 2628179 - RNA, 19 nt, Homo sapiens
  misc_RNA (1)...(19): siRNA sense strand
uggagaugguucagaaaga

SEQ ID NO: 2628180 - RNA, 19 nt, Homo sapiens
  misc_RNA (1)...(19): siRNA sense strand
guuaauaguaaggaggaaa

SEQ ID NO: 2628181 - RNA, 19 nt, Homo sapiens
  misc_RNA (1)...(19): siRNA sense strand
gagaagaaagauacaaaga

SEQ ID NO: 2628182 - RNA, 19 nt, Homo sapiens
  misc_RNA (1)...(19): siRNA sense strand
ggcaagacuuugaaaauaa

SEQ ID NO: 2628183 - RNA, 19 nt, Homo sapiens
  misc_RNA (1)...(19): siRNA sense strand
cuacaaaagcuauugguua

SEQ ID NO: 2628184 - RNA, 19 nt, Homo sapiens
  misc_RNA (1)...(19): siRNA sense strand
aaggaaagauacaggaguu

SEQ ID NO: 2628185 - RNA, 19 nt, Homo sapiens
  misc_RNA (1)...(19): siRNA sense strand
gugugauucuguaguguua

SEQ ID NO: 2628186 - RNA, 19 nt, Homo sapiens
  misc_RNA (1)...(19): siRNA sense strand
aguuagaaccggaguccua

SEQ ID NO: 2628187 - RNA, 19 nt, Homo sapiens
  misc_RNA (1)...(19): siRNA sense strand
ugagaaaucaucuggaaau

SEQ ID NO: 2628188 - RNA, 19 nt, Homo sapiens
  misc_RNA (1)...(19): siRNA sense strand
gcacugaugcuuuggaaaa

SEQ ID NO: 2628189 - RNA, 19 nt, Homo sapiens
  misc_RNA (1)...(19): siRNA sense strand
uugcauuugcuguggguaa

SEQ ID NO: 2628190 - RNA, 19 nt, Homo sapiens
  misc_RNA (1)...(19): siRNA sense strand
cugaaagagcugaagauca

SEQ ID NO: 2628191 - RNA, 19 nt, Homo sapiens
  misc_RNA (1)...(19): siRNA sense strand
agacagaauagaaguucaa

SEQ ID NO: 2628192 - RNA, 19 nt, Homo sapiens
  misc_RNA (1)...(19): siRNA sense strand
ggcagaaauuggagaugau

SEQ ID NO: 2628193 - RNA, 19 nt, Homo sapiens
  misc_RNA (1)...(19): siRNA sense strand
aguaauaguaccaguguga

SEQ ID NO: 2628194 - RNA, 19 nt, Homo sapiens
  misc_RNA (1)...(19): siRNA sense strand
gcagugaugcagaggaaga

SEQ ID NO: 2628195 - RNA, 19 nt, Homo sapiens
  misc_RNA (1)...(19): siRNA sense strand
aaauaugccuugagaggga

SEQ ID NO: 2628196 - RNA, 19 nt, Homo sapiens
  misc_RNA (1)...(19): siRNA sense strand
gugaaaguacagauguuaa

SEQ ID NO: 2628197 - RNA, 19 nt, Homo sapiens
  misc_RNA (1)...(19): siRNA sense strand
gcuaaaaccucaaaacgaa

SEQ ID NO: 2628198 - RNA, 19 nt, Homo sapiens
  misc_RNA (1)...(19): siRNA sense strand
aaucaagagaugaggagau

SEQ ID NO: 2628199 - RNA, 19 nt, Homo sapiens
  misc_RNA (1)...(19): siRNA sense strand
ugagaaacuuggccugaaa

SEQ ID NO: 2628200 - RNA, 19 nt, Homo sapiens
  misc_RNA (1)...(19): siRNA sense strand
gcuggacagucuugugaaa

SEQ ID NO: 2628201 - RNA, 19 nt, Homo sapiens
  misc_RNA (1)...(19): siRNA sense strand
aagagaauguagaacacaa

SEQ ID NO: 2628202 - RNA, 19 nt, Homo sapiens
  misc_RNA (1)...(19): siRNA sense strand
ucaggaaacccaugagcua

SEQ ID NO: 2628203 - RNA, 19 nt, Homo sapiens
  misc_RNA (1)...(19): siRNA sense strand
uggacagucuugugaaauu

SEQ ID NO: 2628204 - RNA, 19 nt, Homo sapiens
  misc_RNA (1)...(19): siRNA sense strand
ugaccauucuugaggaaca

SEQ ID NO: 2628205 - RNA, 19 nt, Homo sapiens
  misc_RNA (1)...(19): siRNA sense strand
ccuuugaaccagugugauu

SEQ ID NO: 2628206 - RNA, 19 nt, Homo sapiens
  misc_RNA (1)...(19): siRNA sense strand
uggaagagaauguagaaca

SEQ ID NO: 2628207 - RNA, 19 nt, Homo sapiens
  misc_RNA (1)...(19): siRNA sense strand
cagaaagacgggauaauga

SEQ ID NO: 2628208 - RNA, 19 nt, Homo sapiens
  misc_RNA (1)...(19): siRNA sense strand
augugaaacuagaggacca

SEQ ID NO: 2628209 - RNA, 19 nt, Homo sapiens
  misc_RNA (1)...(19): siRNA sense strand
gaacugagguacuugccaa

SEQ ID NO: 2628210 - RNA, 19 nt, Homo sapiens
  misc_RNA (1)...(19): siRNA sense strand
caagcuagacaguggauuu

SEQ ID NO: 2628211 - RNA, 19 nt, Homo sapiens
  misc_RNA (1)...(19): siRNA sense strand
gggaagacgucuagaaaag

SEQ ID NO: 2628212 - RNA, 19 nt, Homo sapiens
  misc_RNA (1)...(19): siRNA sense strand
ugaaagaaggagagccuga

SEQ ID NO: 2628213 - RNA, 19 nt, Homo sapiens
  misc_RNA (1)...(19): siRNA sense strand
ggcuagagcuguucugaau

SEQ ID NO: 2628214 - RNA, 19 nt, Homo sapiens
  misc_RNA (1)...(19): siRNA sense strand
gaggcaagaauuagaugaa

SEQ ID NO: 2628215 - RNA, 19 nt, Homo sapiens
  misc_RNA (1)...(19): siRNA sense strand
cugagaaaucaucuggaaa

SEQ ID NO: 2628216 - RNA, 19 nt, Homo sapiens
  misc_RNA (1)...(19): siRNA sense strand
ugaugaugaugaugaaaga

SEQ ID NO: 2628217 - RNA, 19 nt, Homo sapiens
  misc_RNA (1)...(19): siRNA sense strand
ggauuauguagcucaauua

SEQ ID NO: 2628218 - RNA, 19 nt, Homo sapiens
  misc_RNA (1)...(19): siRNA sense strand
gagaagaaguguuaaggaa

SEQ ID NO: 2628219 - RNA, 19 nt, Homo sapiens
  misc_RNA (1)...(19): siRNA sense strand
guacauugcucuaguuaaa

SEQ ID NO: 2628220 - RNA, 19 nt, Homo sapiens
  misc_RNA (1)...(19): siRNA sense strand
acaaugaagucuauggaaa

SEQ ID NO: 2628221 - RNA, 19 nt, Homo sapiens
  misc_RNA (1)...(19): siRNA sense strand
aggaauagccacacagaua

SEQ ID NO: 2628222 - RNA, 19 nt, Homo sapiens
  misc_RNA (1)...(19): siRNA sense strand
agguaaaaguacagagcaa

SEQ ID NO: 2628223 - RNA, 19 nt, Homo sapiens
  misc_RNA (1)...(19): siRNA sense strand
gagaaauugcgaagggauu

SEQ ID NO: 2628224 - RNA, 19 nt, Homo sapiens
  misc_RNA (1)...(19): siRNA sense strand
gaauuuaaguccagaagau

SEQ ID NO: 2628225 - RNA, 19 nt, Homo sapiens
  misc_RNA (1)...(19): siRNA sense strand
acaaaggaaugauggaauu

SEQ ID NO: 2628226 - RNA, 19 nt, Homo sapiens
  misc_RNA (1)...(19): siRNA sense strand
gauucaagauccagucaua

SEQ ID NO: 2628227 - RNA, 19 nt, Homo sapiens
  misc_RNA (1)...(19): siRNA sense strand
gaaaguuaugggaaagaaa

SEQ ID NO: 2628228 - RNA, 19 nt, Homo sapiens
  misc_RNA (1)...(19): siRNA sense strand
gaaggagaauguucagaaa

SEQ ID NO: 2628229 - RNA, 19 nt, Homo sapiens
  misc_RNA (1)...(19): siRNA sense strand
ggucaaaagaauugugaau

SEQ ID NO: 2628230 - RNA, 19 nt, Homo sapiens
  misc_RNA (1)...(19): siRNA sense strand
ccugagagaagaaguguua

SEQ ID NO: 2628231 - RNA, 19 nt, Homo sapiens
  misc_RNA (1)...(19): siRNA sense strand
ccuucaagauagaccuaaa

SEQ ID NO: 2628232 - RNA, 19 nt, Homo sapiens
  misc_RNA (1)...(19): siRNA sense strand
gcucaacucuaaugaauau

SEQ ID NO: 2628233 - RNA, 19 nt, Homo sapiens
  misc_RNA (1)...(19): siRNA sense strand
cagcaacucuccugacaua

SEQ ID NO: 2628234 - RNA, 19 nt, Homo sapiens
  misc_RNA (1)...(19): siRNA sense strand
caaugaagucuauggaaaa

SEQ ID NO: 2628235 - RNA, 19 nt, Homo sapiens
  misc_RNA (1)...(19): siRNA sense strand
ccguagugauucagaacau

SEQ ID NO: 2628236 - RNA, 19 nt, Homo sapiens
  misc_RNA (1)...(19): siRNA sense strand
gaacuuaaccucagccaau

SEQ ID NO: 2628237 - RNA, 19 nt, Homo sapiens
  misc_RNA (1)...(19): siRNA sense strand
gaaggauccuguucaaaua

SEQ ID NO: 2628238 - RNA, 19 nt, Homo sapiens
  misc_RNA (1)...(19): siRNA sense strand
gugcaguauuggaaacauu

SEQ ID NO: 2628239 - RNA, 19 nt, Homo sapiens
  misc_RNA (1)...(19): siRNA sense strand
aagaagugccucacaguua

SEQ ID NO: 2628240 - RNA, 19 nt, Homo sapiens
  misc_RNA (1)...(19): siRNA sense strand
ggaaauuguuguugggcuc

SEQ ID NO: 2628241 - RNA, 19 nt, Homo sapiens
  misc_RNA (1)...(19): siRNA sense strand
gcuguaaugugaaagggaa

SEQ ID NO: 2628242 - RNA, 19 nt, Homo sapiens
  misc_RNA (1)...(19): siRNA sense strand
ugauauaacacuuggcuca

SEQ ID NO: 2628243 - RNA, 19 nt, Homo sapiens
  misc_RNA (1)...(19): siRNA sense strand
cuguaaugugaaagggaau

SEQ ID NO: 2628244 - RNA, 19 nt, Homo sapiens
  misc_RNA (1)...(19): siRNA sense strand
acacagagauucagaugca

SEQ ID NO: 2628245 - RNA, 19 nt, Homo sapiens
  misc_RNA (1)...(19): siRNA sense strand
gaaacaacaaugaagucua

SEQ ID NO: 2628246 - RNA, 19 nt, Homo sapiens
  misc_RNA (1)...(19): siRNA sense strand
gcugaugggcagaacuuaa

SEQ ID NO: 2628247 - RNA, 19 nt, Homo sapiens
  misc_RNA (1)...(19): siRNA sense strand
aggaauggcaagagaagca

SEQ ID NO: 2628248 - RNA, 19 nt, Homo sapiens
  misc_RNA (1)...(19): siRNA sense strand
cuaacagaaucgauaaaca

SEQ ID NO: 2628249 - RNA, 19 nt, Homo sapiens
  misc_RNA (1)...(19): siRNA sense strand
uuaccaacauuguggaaca

SEQ ID NO: 2628250 - RNA, 19 nt, Homo sapiens
  misc_RNA (1)...(19): siRNA sense strand
gauuggaguaagacagcua

SEQ ID NO: 2628251 - RNA, 19 nt, Homo sapiens
  misc_RNA (1)...(19): siRNA sense strand
auacagugaaugugagaca

SEQ ID NO: 2628252 - RNA, 19 nt, Homo sapiens
  misc_RNA (1)...(19): siRNA sense strand
aguuagaagagcacaguuu

SEQ ID NO: 2628253 - RNA, 19 nt, Homo sapiens
  misc_RNA (1)...(19): siRNA sense strand
ccauguucauugugguaau

SEQ ID NO: 2628254 - RNA, 19 nt, Homo sapiens
  misc_RNA (1)...(19): siRNA sense strand
gaugaaggcuugaggcuac

SEQ ID NO: 2628255 - RNA, 19 nt, Homo sapiens
  misc_RNA (1)...(19): siRNA sense strand
ggaauagccacacagauaa

SEQ ID NO: 2628256 - RNA, 19 nt, Homo sapiens
  misc_RNA (1)...(19): siRNA sense strand
uggaggaacccaaaggcua

SEQ ID NO: 2628257 - RNA, 19 nt, Homo sapiens
  misc_RNA (1)...(19): siRNA sense strand
gaaaagaaaguuaugggaa

SEQ ID NO: 2628258 - RNA, 19 nt, Homo sapiens
  misc_RNA (1)...(19): siRNA sense strand
aguaagacagcuaccaaua

SEQ ID NO: 2628259 - RNA, 19 nt, Homo sapiens
  misc_RNA (1)...(19): siRNA sense strand
gagcauuccuucaacaaaa

SEQ ID NO: 2628260 - RNA, 19 nt, Homo sapiens
  misc_RNA (1)...(19): siRNA sense strand
gauaauggagagagccaga

SEQ ID NO: 2628261 - RNA, 19 nt, Homo sapiens
  misc_RNA (1)...(19): siRNA sense strand
aaaucuaaauccagcucua

SEQ ID NO: 2628262 - RNA, 19 nt, Homo sapiens
  misc_RNA (1)...(19): siRNA sense strand
ggaugaaggcuugaggcua

SEQ ID NO: 2628263 - RNA, 19 nt, Homo sapiens
  misc_RNA (1)...(19): siRNA sense strand
ggauggaacacgucaggau

SEQ ID NO: 2628264 - RNA, 19 nt, Homo sapiens
  misc_RNA (1)...(19): siRNA sense strand
agaaauugcgaagggauua

SEQ ID NO: 2628265 - RNA, 19 nt, Homo sapiens
  misc_RNA (1)...(19): siRNA sense strand
gggaggaauggcaagagaa

SEQ ID NO: 2628266 - RNA, 19 nt, Homo sapiens
  misc_RNA (1)...(19): siRNA sense strand
ccuccaaaaucuugaugaa

SEQ ID NO: 2628267 - RNA, 19 nt, Homo sapiens
  misc_RNA (1)...(19): siRNA sense strand
ucauuuaacucaagugcga

SEQ ID NO: 2628268 - RNA, 19 nt, Homo sapiens
  misc_RNA (1)...(19): siRNA sense strand
gagcagaaacaacaaugaa

SEQ ID NO: 2628269 - RNA, 19 nt, Homo sapiens
  misc_RNA (1)...(19): siRNA sense strand
auggagagagccagacuaa

SEQ ID NO: 2628270 - RNA, 19 nt, Homo sapiens
  misc_RNA (1)...(19): siRNA sense strand
acuuuagcauccagaagaa

SEQ ID NO: 2628271 - RNA, 19 nt, Homo sapiens
  misc_RNA (1)...(19): siRNA sense strand
gggcucuauugguguaaau

SEQ ID NO: 2628272 - RNA, 19 nt, Homo sapiens
  misc_RNA (1)...(19): siRNA sense strand
cucugaaagcugaaagcaa

SEQ ID NO: 2628273 - RNA, 19 nt, Homo sapiens
  misc_RNA (1)...(19): siRNA sense strand
caaaggaaugauggaauua

SEQ ID NO: 2628274 - RNA, 19 nt, Homo sapiens
  misc_RNA (1)...(19): siRNA sense strand
uggaacaggucaaaagaau

SEQ ID NO: 2628275 - RNA, 19 nt, Homo sapiens
  misc_RNA (1)...(19): siRNA sense strand
cuaccaauaucaucaagaa

SEQ ID NO: 2628276 - RNA, 19 nt, Homo sapiens
  misc_RNA (1)...(19): siRNA sense strand
guucugauaaucuaggaaa

SEQ ID NO: 2628277 - RNA, 19 nt, Homo sapiens
  misc_RNA (1)...(19): siRNA sense strand
caaaugaaguugcuaacca

SEQ ID NO: 2628278 - RNA, 19 nt, Homo sapiens
  misc_RNA (1)...(19): siRNA sense strand
cuuccaagcaauaaugaau

SEQ ID NO: 2628279 - RNA, 19 nt, Homo sapiens
  misc_RNA (1)...(19): siRNA sense strand
uguauuaguuagaagagca

SEQ ID NO: 2628280 - RNA, 19 nt, Homo sapiens
  misc_RNA (1)...(19): siRNA sense strand
auacaagaacucaggaagu

SEQ ID NO: 2628281 - RNA, 19 nt, Homo sapiens
  misc_RNA (1)...(19): siRNA sense strand
gaacucaggaagugcauca

SEQ ID NO: 2628282 - RNA, 19 nt, Homo sapiens
  misc_RNA (1)...(19): siRNA sense strand
gaauguagucgacuggcaa

SEQ ID NO: 2628283 - RNA, 19 nt, Homo sapiens
  misc_RNA (1)...(19): siRNA sense strand
ccuucugggaucugaacaa

SEQ ID NO: 2628284 - RNA, 19 nt, Homo sapiens
  misc_RNA (1)...(19): siRNA sense strand
ggaguaagacagcuaccaa

SEQ ID NO: 2628285 - RNA, 19 nt, Homo sapiens
  misc_RNA (1)...(19): siRNA sense strand
augcauuaccugucaaaga

SEQ ID NO: 2628286 - RNA, 19 nt, Homo sapiens
  misc_RNA (1)...(19): siRNA sense strand
ggaauguagucgacuggca

SEQ ID NO: 2628287 - RNA, 19 nt, Homo sapiens
  misc_RNA (1)...(19): siRNA sense strand
ggcucaacucuaaugaaua

SEQ ID NO: 2628288 - RNA, 19 nt, Homo sapiens
  misc_RNA (1)...(19): siRNA sense strand
gcagaaacaacaaugaagu

SEQ ID NO: 2628289 - RNA, 19 nt, Homo sapiens
  misc_RNA (1)...(19): siRNA sense strand
ugaugaauucuguuggauu

SEQ ID NO: 2628290 - RNA, 19 nt, Homo sapiens
  misc_RNA (1)...(19): siRNA sense strand
ggaaaaucuuugucuucaa

SEQ ID NO: 2628291 - RNA, 19 nt, Homo sapiens
  misc_RNA (1)...(19): siRNA sense strand
gggaaauuguuguugggcu

SEQ ID NO: 2628292 - RNA, 19 nt, Homo sapiens
  misc_RNA (1)...(19): siRNA sense strand
gcaaaaugacuucuggaau

SEQ ID NO: 2628293 - RNA, 19 nt, Homo sapiens
  misc_RNA (1)...(19): siRNA sense strand
aacaaaggaaugauggaau

SEQ ID NO: 2628294 - RNA, 19 nt, Homo sapiens
  misc_RNA (1)...(19): siRNA sense strand
acacuuggcucaacucuaa

SEQ ID NO: 2628295 - RNA, 19 nt, Homo sapiens
  misc_RNA (1)...(19): siRNA sense strand
gaacuuggcucucagcgua

SEQ ID NO: 2628296 - RNA, 19 nt, Homo sapiens
  misc_RNA (1)...(19): siRNA sense strand
gagaagaggcugaagcaga

SEQ ID NO: 2628297 - RNA, 19 nt, Homo sapiens
  misc_RNA (1)...(19): siRNA sense strand
aggaggaggaggaggaaga

SEQ ID NO: 2628298 - RNA, 19 nt, Homo sapiens
  misc_RNA (1)...(19): siRNA sense strand
aggaagaaggagaggagga

SEQ ID NO: 2628299 - RNA, 19 nt, Homo sapiens
  misc_RNA (1)...(19): siRNA sense strand
ggacaugacugaagaggag

SEQ ID NO: 2628300 - RNA, 19 nt, Homo sapiens
  misc_RNA (1)...(19): siRNA sense strand
gagaggaggaggaggagga

SEQ ID NO: 2628301 - RNA, 19 nt, Homo sapiens
  misc_RNA (1)...(19): siRNA sense strand
gcuuggaaggccauggaaa

SEQ ID NO: 2628302 - RNA, 19 nt, Homo sapiens
  misc_RNA (1)...(19): siRNA sense strand
aggaggaggaagaaggaga

SEQ ID NO: 2628303 - RNA, 19 nt, Homo sapiens
  misc_RNA (1)...(19): siRNA sense strand
agcuggaggcagagauaua

SEQ ID NO: 2628304 - RNA, 19 nt, Homo sapiens
  misc_RNA (1)...(19): siRNA sense strand
caggagagacuucgggaga

SEQ ID NO: 2628305 - RNA, 19 nt, Homo sapiens
  misc_RNA (1)...(19): siRNA sense strand
ggacugugguaucuggcaa

SEQ ID NO: 2628306 - RNA, 19 nt, Homo sapiens
  misc_RNA (1)...(19): siRNA sense strand
gcuguugagcaguggagaa

SEQ ID NO: 2628307 - RNA, 19 nt, Homo sapiens
  misc_RNA (1)...(19): siRNA sense strand
ucccagaagccaugagaau

SEQ ID NO: 2628308 - RNA, 19 nt, Homo sapiens
  misc_RNA (1)...(19): siRNA sense strand
cugaacauuccgaggucaa

SEQ ID NO: 2628309 - RNA, 19 nt, Homo sapiens
  misc_RNA (1)...(19): siRNA sense strand
gagaagagcaagaccacca

SEQ ID NO: 2628310 - RNA, 19 nt, Homo sapiens
  misc_RNA (1)...(19): siRNA sense strand
cagacaaagacgucaccua

SEQ ID NO: 2628311 - RNA, 19 nt, Homo sapiens
  misc_RNA (1)...(19): siRNA sense strand
uggugagccuagaggugaa

SEQ ID NO: 2628312 - RNA, 19 nt, Homo sapiens
  misc_RNA (1)...(19): siRNA sense strand
ugagaauggaggaggagga

SEQ ID NO: 2628313 - RNA, 19 nt, Homo sapiens
  misc_RNA (1)...(19): siRNA sense strand
ccaaguacgcugaggccga

SEQ ID NO: 2628314 - RNA, 19 nt, Homo sapiens
  misc_RNA (1)...(19): siRNA sense strand
aaggagaggaggaggagga

SEQ ID NO: 2628315 - RNA, 19 nt, Homo sapiens
  misc_RNA (1)...(19): siRNA sense strand
aggcugaagcagaggaugu

SEQ ID NO: 2628316 - RNA, 19 nt, Homo sapiens
  misc_RNA (1)...(19): siRNA sense strand
cagcugagauugugcagga

SEQ ID NO: 2628317 - RNA, 19 nt, Homo sapiens
  misc_RNA (1)...(19): siRNA sense strand
aagaaggagaggaggagga

SEQ ID NO: 2628318 - RNA, 19 nt, Homo sapiens
  misc_RNA (1)...(19): siRNA sense strand
gaacauuagcccagcccuu

SEQ ID NO: 2628319 - RNA, 19 nt, Homo sapiens
  misc_RNA (1)...(19): siRNA sense strand
gcugggaagaagagagacu

SEQ ID NO: 2628320 - RNA, 19 nt, Homo sapiens
  misc_RNA (1)...(19): siRNA sense strand
acagauagauggaggagag

SEQ ID NO: 2628321 - RNA, 19 nt, Homo sapiens
  misc_RNA (1)...(19): siRNA sense strand
ugacugaagaggagccaga

SEQ ID NO: 2628322 - RNA, 19 nt, Homo sapiens
  misc_RNA (1)...(19): siRNA sense strand
aggaccaagucaagggcuu

SEQ ID NO: 2628323 - RNA, 19 nt, Homo sapiens
  misc_RNA (1)...(19): siRNA sense strand
gaggaguaccugaaggcuu

SEQ ID NO: 2628324 - RNA, 19 nt, Homo sapiens
  misc_RNA (1)...(19): siRNA sense strand
uggaggaggccacggagaa

SEQ ID NO: 2628325 - RNA, 19 nt, Homo sapiens
  misc_RNA (1)...(19): siRNA sense strand
gggacaucucugaggacca

SEQ ID NO: 2628326 - RNA, 19 nt, Homo sapiens
  misc_RNA (1)...(19): siRNA sense strand
ggcagaugguccaggcuca

SEQ ID NO: 2628327 - RNA, 19 nt, Homo sapiens
  misc_RNA (1)...(19): siRNA sense strand
ccgcagcaugccacagaua

SEQ ID NO: 2628328 - RNA, 19 nt, Homo sapiens
  misc_RNA (1)...(19): siRNA sense strand
aggcagagauauaccgucu

SEQ ID NO: 2628329 - RNA, 19 nt, Homo sapiens
  misc_RNA (1)...(19): siRNA sense strand
gagauauaccgucugggaa

SEQ ID NO: 2628330 - RNA, 19 nt, Homo sapiens
  misc_RNA (1)...(19): siRNA sense strand
agggauguggauagaagua

SEQ ID NO: 2628331 - RNA, 19 nt, Homo sapiens
  misc_RNA (1)...(19): siRNA sense strand
gccuagaggugaagagcag

SEQ ID NO: 2628332 - RNA, 19 nt, Homo sapiens
  misc_RNA (1)...(19): siRNA sense strand
cggcccuagaggaggagua

SEQ ID NO: 2628333 - RNA, 19 nt, Homo sapiens
  misc_RNA (1)...(19): siRNA sense strand
gcaacagugagguggagga

SEQ ID NO: 2628334 - RNA, 19 nt, Homo sapiens
  misc_RNA (1)...(19): siRNA sense strand
ggaggaagaaggagaggag

SEQ ID NO: 2628335 - RNA, 19 nt, Homo sapiens
  misc_RNA (1)...(19): siRNA sense strand
aggcagcucgggauggaaa

SEQ ID NO: 2628336 - RNA, 19 nt, Homo sapiens
  misc_RNA (1)...(19): siRNA sense strand
gaggagaccuggauggcgu

SEQ ID NO: 2628337 - RNA, 19 nt, Homo sapiens
  misc_RNA (1)...(19): siRNA sense strand
aggagagacuucgggagaa

SEQ ID NO: 2628338 - RNA, 19 nt, Homo sapiens
  misc_RNA (1)...(19): siRNA sense strand
acguaaauguggaggugag

SEQ ID NO: 2628339 - RNA, 19 nt, Homo sapiens
  misc_RNA (1)...(19): siRNA sense strand
cuuugugggcucagaaaca

SEQ ID NO: 2628340 - RNA, 19 nt, Homo sapiens
  misc_RNA (1)...(19): siRNA sense strand
gagauugccuggugagccu

SEQ ID NO: 2628341 - RNA, 19 nt, Homo sapiens
  misc_RNA (1)...(19): siRNA sense strand
aagcugggaagaagagaga

SEQ ID NO: 2628342 - RNA, 19 nt, Homo sapiens
  misc_RNA (1)...(19): siRNA sense strand
agauauaccgucugggaag

SEQ ID NO: 2628343 - RNA, 19 nt, Homo sapiens
  misc_RNA (1)...(19): siRNA sense strand
aagcagaggauguggacag

SEQ ID NO: 2628344 - RNA, 19 nt, Homo sapiens
  misc_RNA (1)...(19): siRNA sense strand
ccuaagaagauguggaaaa

SEQ ID NO: 2628345 - RNA, 19 nt, Homo sapiens
  misc_RNA (1)...(19): siRNA sense strand
gcugaagcguauugcgaaa

SEQ ID NO: 2628346 - RNA, 19 nt, Homo sapiens
  misc_RNA (1)...(19): siRNA sense strand
gagaaauugcugaaagaau

SEQ ID NO: 2628347 - RNA, 19 nt, Homo sapiens
  misc_RNA (1)...(19): siRNA sense strand
ccuaauagcaaaagugaaa

SEQ ID NO: 2628348 - RNA, 19 nt, Homo sapiens
  misc_RNA (1)...(19): siRNA sense strand
aggaagaguuaaagaggca

SEQ ID NO: 2628349 - RNA, 19 nt, Homo sapiens
  misc_RNA (1)...(19): siRNA sense strand
aaauauagcaaucggacaa

SEQ ID NO: 2628350 - RNA, 19 nt, Homo sapiens
  misc_RNA (1)...(19): siRNA sense strand
gagaaauagcagacgcaau

SEQ ID NO: 2628351 - RNA, 19 nt, Homo sapiens
  misc_RNA (1)...(19): siRNA sense strand
gcugcaaagcuuaugaaua

SEQ ID NO: 2628352 - RNA, 19 nt, Homo sapiens
  misc_RNA (1)...(19): siRNA sense strand
caugauaaagcaagggaau

SEQ ID NO: 2628353 - RNA, 19 nt, Homo sapiens
  misc_RNA (1)...(19): siRNA sense strand
cagcagaacuuguggacgu

SEQ ID NO: 2628354 - RNA, 19 nt, Homo sapiens
  misc_RNA (1)...(19): siRNA sense strand
gagugaaggaacaacguaa

SEQ ID NO: 2628355 - RNA, 19 nt, Homo sapiens
  misc_RNA (1)...(19): siRNA sense strand
ggaccagacaguugagaca

SEQ ID NO: 2628356 - RNA, 19 nt, Homo sapiens
  misc_RNA (1)...(19): siRNA sense strand
uggcagaagaccuguuaaa

SEQ ID NO: 2628357 - RNA, 19 nt, Homo sapiens
  misc_RNA (1)...(19): siRNA sense strand
gaguuuaccaggaaugaaa

SEQ ID NO: 2628358 - RNA, 19 nt, Homo sapiens
  misc_RNA (1)...(19): siRNA sense strand
acuauugucaagagagaua

SEQ ID NO: 2628359 - RNA, 19 nt, Homo sapiens
  misc_RNA (1)...(19): siRNA sense strand
ugauaaagcaagggaauau

SEQ ID NO: 2628360 - RNA, 19 nt, Homo sapiens
  misc_RNA (1)...(19): siRNA sense strand
caaaagaaaaugggagaaa

SEQ ID NO: 2628361 - RNA, 19 nt, Homo sapiens
  misc_RNA (1)...(19): siRNA sense strand
ugaaacuguuggaggugaa

SEQ ID NO: 2628362 - RNA, 19 nt, Homo sapiens
  misc_RNA (1)...(19): siRNA sense strand
agaauuugcuacagaacuu

SEQ ID NO: 2628363 - RNA, 19 nt, Homo sapiens
  misc_RNA (1)...(19): siRNA sense strand
ugggauacauuauggaaaa

SEQ ID NO: 2628364 - RNA, 19 nt, Homo sapiens
  misc_RNA (1)...(19): siRNA sense strand
guggaaaacucgaggaugu

SEQ ID NO: 2628365 - RNA, 19 nt, Homo sapiens
  misc_RNA (1)...(19): siRNA sense strand
caucugagaaggagcauau

SEQ ID NO: 2628366 - RNA, 19 nt, Homo sapiens
  misc_RNA (1)...(19): siRNA sense strand
cauaauagaucuugcugca

SEQ ID NO: 2628367 - RNA, 19 nt, Homo sapiens
  misc_RNA (1)...(19): siRNA sense strand
uuuauagaggccagagaaa

SEQ ID NO: 2628368 - RNA, 19 nt, Homo sapiens
  misc_RNA (1)...(19): siRNA sense strand
cauaacuacucaauggcaa

SEQ ID NO: 2628369 - RNA, 19 nt, Homo sapiens
  misc_RNA (1)...(19): siRNA sense strand
gcuuaugaauauaugggau

SEQ ID NO: 2628370 - RNA, 19 nt, Homo sapiens
  misc_RNA (1)...(19): siRNA sense strand
ggaacaacguaaaggagcu

SEQ ID NO: 2628371 - RNA, 19 nt, Homo sapiens
  misc_RNA (1)...(19): siRNA sense strand
uggauggagaccuggguaa

SEQ ID NO: 2628372 - RNA, 19 nt, Homo sapiens
  misc_RNA (1)...(19): siRNA sense strand
cugaagaguuugagaagag

SEQ ID NO: 2628373 - RNA, 19 nt, Homo sapiens
  misc_RNA (1)...(19): siRNA sense strand
ggaaaagagccuuacacua

SEQ ID NO: 2628374 - RNA, 19 nt, Homo sapiens
  misc_RNA (1)...(19): siRNA sense strand
ugaaauauuugucagguga

SEQ ID NO: 2628375 - RNA, 19 nt, Homo sapiens
  misc_RNA (1)...(19): siRNA sense strand
gaagcaagaaucugugcaa

SEQ ID NO: 2628376 - RNA, 19 nt, Homo sapiens
  misc_RNA (1)...(19): siRNA sense strand
ccaccaagcuggaaaacuu

SEQ ID NO: 2628377 - RNA, 19 nt, Homo sapiens
  misc_RNA (1)...(19): siRNA sense strand
agaccuugcucuagcccaa

SEQ ID NO: 2628378 - RNA, 19 nt, Homo sapiens
  misc_RNA (1)...(19): siRNA sense strand
gaggugaaguauuugaaaa

SEQ ID NO: 2628379 - RNA, 19 nt, Homo sapiens
  misc_RNA (1)...(19): siRNA sense strand
uggcauggaaauauagcaa

SEQ ID NO: 2628380 - RNA, 19 nt, Homo sapiens
  misc_RNA (1)...(19): siRNA sense strand
cacauuaauggaagguaaa

SEQ ID NO: 2628381 - RNA, 19 nt, Homo sapiens
  misc_RNA (1)...(19): siRNA sense strand
agacuaugaaccagauaau

SEQ ID NO: 2628382 - RNA, 19 nt, Homo sapiens
  misc_RNA (1)...(19): siRNA sense strand
ccuggagacuguaguaaga

SEQ ID NO: 2628383 - RNA, 19 nt, Homo sapiens
  misc_RNA (1)...(19): siRNA sense strand
ccgcuuaaauggagagcag

SEQ ID NO: 2628384 - RNA, 19 nt, Homo sapiens
  misc_RNA (1)...(19): siRNA sense strand
gcuuaaauggagagcagca

SEQ ID NO: 2628385 - RNA, 19 nt, Homo sapiens
  misc_RNA (1)...(19): siRNA sense strand
augauaaagcaagggaaua

SEQ ID NO: 2628386 - RNA, 19 nt, Homo sapiens
  misc_RNA (1)...(19): siRNA sense strand
uuacuauugucaagagaga

SEQ ID NO: 2628387 - RNA, 19 nt, Homo sapiens
  misc_RNA (1)...(19): siRNA sense strand
ggcaguaagaacagcagaa

SEQ ID NO: 2628388 - RNA, 19 nt, Homo sapiens
  misc_RNA (1)...(19): siRNA sense strand
gaaauauagcaaucggaca

SEQ ID NO: 2628389 - RNA, 19 nt, Homo sapiens
  misc_RNA (1)...(19): siRNA sense strand
agagaaagccuuauaccau

SEQ ID NO: 2628390 - RNA, 19 nt, Homo sapiens
  misc_RNA (1)...(19): siRNA sense strand
uugagaugcgccagaauua

SEQ ID NO: 2628391 - RNA, 19 nt, Homo sapiens
  misc_RNA (1)...(19): siRNA sense strand
acucaauggcaaucacuua

SEQ ID NO: 2628392 - RNA, 19 nt, Homo sapiens
  misc_RNA (1)...(19): siRNA sense strand
cuguuugaauccagauaau

SEQ ID NO: 2628393 - RNA, 19 nt, Homo sapiens
  misc_RNA (1)...(19): siRNA sense strand
augccagagugaaggaaca

SEQ ID NO: 2628394 - RNA, 19 nt, Homo sapiens
  misc_RNA (1)...(19): siRNA sense strand
cuucagagugaccaggaua

SEQ ID NO: 2628395 - RNA, 19 nt, Homo sapiens
  misc_RNA (1)...(19): siRNA sense strand
cgcaggaauugaagacuuu

SEQ ID NO: 2628396 - RNA, 19 nt, Homo sapiens
  misc_RNA (1)...(19): siRNA sense strand
agugaaggaacaacguaaa

SEQ ID NO: 2628397 - RNA, 19 nt, Homo sapiens
  misc_RNA (1)...(19): siRNA sense strand
ucugaagaagugcggguua

SEQ ID NO: 2628398 - RNA, 19 nt, Homo sapiens
  misc_RNA (1)...(19): siRNA sense strand
ucgcaggaauugaagacuu

SEQ ID NO: 2628399 - RNA, 19 nt, Homo sapiens
  misc_RNA (1)...(19): siRNA sense strand
uugaaaaccuggauggaga

SEQ ID NO: 2628400 - RNA, 19 nt, Homo sapiens
  misc_RNA (1)...(19): siRNA sense strand
ugaagaagccauaguagca

SEQ ID NO: 2628401 - RNA, 19 nt, Homo sapiens
  misc_RNA (1)...(19): siRNA sense strand
ggaaccaggauuucaguau

SEQ ID NO: 2628402 - RNA, 19 nt, Homo sapiens
  misc_RNA (1)...(19): siRNA sense strand
accagauaaucgugaauuu

SEQ ID NO: 2628403 - RNA, 19 nt, Homo sapiens
  misc_RNA (1)...(19): siRNA sense strand
auguggaagcacugagaau

SEQ ID NO: 2628404 - RNA, 19 nt, Homo sapiens
  misc_RNA (1)...(19): siRNA sense strand
gggagaaauagcagacgca

SEQ ID NO: 2628405 - RNA, 19 nt, Homo sapiens
  misc_RNA (1)...(19): siRNA sense strand
ucagaauguuacagccgaa

SEQ ID NO: 2628406 - RNA, 19 nt, Homo sapiens
  misc_RNA (1)...(19): siRNA sense strand
gaaucagaugccagaguga

SEQ ID NO: 2628407 - RNA, 19 nt, Homo sapiens
  misc_RNA (1)...(19): siRNA sense strand
ugauacaagccaucguuua

SEQ ID NO: 2628408 - RNA, 19 nt, Homo sapiens
  misc_RNA (1)...(19): siRNA sense strand
acauaggguaaaugagaaa

SEQ ID NO: 2628409 - RNA, 19 nt, Homo sapiens
  misc_RNA (1)...(19): siRNA sense strand
agaagaugacauagaggaa

SEQ ID NO: 2628410 - RNA, 19 nt, Homo sapiens
  misc_RNA (1)...(19): siRNA sense strand
gagaaaauauuguaggaga

SEQ ID NO: 2628411 - RNA, 19 nt, Homo sapiens
  misc_RNA (1)...(19): siRNA sense strand
ugaaagaacuaaugccuga

SEQ ID NO: 2628412 - RNA, 19 nt, Homo sapiens
  misc_RNA (1)...(19): siRNA sense strand
ucuaaauggugcagacaca

SEQ ID NO: 2628413 - RNA, 19 nt, Homo sapiens
  misc_RNA (1)...(19): siRNA sense strand
acgaauuaccauuggaaaa

SEQ ID NO: 2628414 - RNA, 19 nt, Homo sapiens
  misc_RNA (1)...(19): siRNA sense strand
gcaucagaguacccagaaa

SEQ ID NO: 2628415 - RNA, 19 nt, Homo sapiens
  misc_RNA (1)...(19): siRNA sense strand
ccucaagauaguagaacuu

SEQ ID NO: 2628416 - RNA, 19 nt, Homo sapiens
  misc_RNA (1)...(19): siRNA sense strand
gugcaacagaagugaaaga

SEQ ID NO: 2628417 - RNA, 19 nt, Homo sapiens
  misc_RNA (1)...(19): siRNA sense strand
ucaacaagcaacaggaaaa

SEQ ID NO: 2628418 - RNA, 19 nt, Homo sapiens
  misc_RNA (1)...(19): siRNA sense strand
gguaaugggcagcugggaa

SEQ ID NO: 2628419 - RNA, 19 nt, Homo sapiens
  misc_RNA (1)...(19): siRNA sense strand
gggcagugucuaccagaua

SEQ ID NO: 2628420 - RNA, 19 nt, Homo sapiens
  misc_RNA (1)...(19): siRNA sense strand
agaaauacuacauagggua

SEQ ID NO: 2628421 - RNA, 19 nt, Homo sapiens
  misc_RNA (1)...(19): siRNA sense strand
ccugguaggaucagaggaa

SEQ ID NO: 2628422 - RNA, 19 nt, Homo sapiens
  misc_RNA (1)...(19): siRNA sense strand
uuaaggaaguugugguaca

SEQ ID NO: 2628423 - RNA, 19 nt, Homo sapiens
  misc_RNA (1)...(19): siRNA sense strand
aagcauugucacugagauu

SEQ ID NO: 2628424 - RNA, 19 nt, Homo sapiens
  misc_RNA (1)...(19): siRNA sense strand
ggaaaagaauacagaauac

SEQ ID NO: 2628425 - RNA, 19 nt, Homo sapiens
  misc_RNA (1)...(19): siRNA sense strand
ccaauuggguuuagguacu

SEQ ID NO: 2628426 - RNA, 19 nt, Homo sapiens
  misc_RNA (1)...(19): siRNA sense strand
ccaaugagauagauggaac

SEQ ID NO: 2628427 - RNA, 19 nt, Homo sapiens
  misc_RNA (1)...(19): siRNA sense strand
ggucauuggaaauacaaau

SEQ ID NO: 2628428 - RNA, 19 nt, Homo sapiens
  misc_RNA (1)...(19): siRNA sense strand
cagaauaaauauggccaau

SEQ ID NO: 2628429 - RNA, 19 nt, Homo sapiens
  misc_RNA (1)...(19): siRNA sense strand
uuacagaugcagauggcua

SEQ ID NO: 2628430 - RNA, 19 nt, Homo sapiens
  misc_RNA (1)...(19): siRNA sense strand
cuaguggugcguagagaaa

SEQ ID NO: 2628431 - RNA, 19 nt, Homo sapiens
  misc_RNA (1)...(19): siRNA sense strand
gaaagaaaccagagcaggu

SEQ ID NO: 2628432 - RNA, 19 nt, Homo sapiens
  misc_RNA (1)...(19): siRNA sense strand
ggguuuagguacugacugu

SEQ ID NO: 2628433 - RNA, 19 nt, Homo sapiens
  misc_RNA (1)...(19): siRNA sense strand
caacagaagugaaagagcu

SEQ ID NO: 2628434 - RNA, 19 nt, Homo sapiens
  misc_RNA (1)...(19): siRNA sense strand
ggaugauuugaaagaacua

SEQ ID NO: 2628435 - RNA, 19 nt, Homo sapiens
  misc_RNA (1)...(19): siRNA sense strand
guggaauugaugaagaaau

SEQ ID NO: 2628436 - RNA, 19 nt, Homo sapiens
  misc_RNA (1)...(19): siRNA sense strand
ugacaaaggccagguguau

SEQ ID NO: 2628437 - RNA, 19 nt, Homo sapiens
  misc_RNA (1)...(19): siRNA sense strand
ccacaaacuuauacaaccu

SEQ ID NO: 2628438 - RNA, 19 nt, Homo sapiens
  misc_RNA (1)...(19): siRNA sense strand
agaaaaggcaccacugaaa

SEQ ID NO: 2628439 - RNA, 19 nt, Homo sapiens
  misc_RNA (1)...(19): siRNA sense strand
ccuaaugaacuacaagcaa

SEQ ID NO: 2628440 - RNA, 19 nt, Homo sapiens
  misc_RNA (1)...(19): siRNA sense strand
gggaauauugggcagaaca

SEQ ID NO: 2628441 - RNA, 19 nt, Homo sapiens
  misc_RNA (1)...(19): siRNA sense strand
cuaccagucaugaaauaaa

SEQ ID NO: 2628442 - RNA, 19 nt, Homo sapiens
  misc_RNA (1)...(19): siRNA sense strand
cagaaauggcugagcuauc

SEQ ID NO: 2628443 - RNA, 19 nt, Homo sapiens
  misc_RNA (1)...(19): siRNA sense strand
uggagaagaugcuguggau

SEQ ID NO: 2628444 - RNA, 19 nt, Homo sapiens
  misc_RNA (1)...(19): siRNA sense strand
cugauaagacauuugaaga

SEQ ID NO: 2628445 - RNA, 19 nt, Homo sapiens
  misc_RNA (1)...(19): siRNA sense strand
agacauuugaagacaguga

SEQ ID NO: 2628446 - RNA, 19 nt, Homo sapiens
  misc_RNA (1)...(19): siRNA sense strand
gugcagacacagcuguuaa

SEQ ID NO: 2628447 - RNA, 19 nt, Homo sapiens
  misc_RNA (1)...(19): siRNA sense strand
ucauaaggucuguggagga

SEQ ID NO: 2628448 - RNA, 19 nt, Homo sapiens
  misc_RNA (1)...(19): siRNA sense strand
ggaauauugggcagaacau

SEQ ID NO: 2628449 - RNA, 19 nt, Homo sapiens
  misc_RNA (1)...(19): siRNA sense strand
caucagaguacccagaaau

SEQ ID NO: 2628450 - RNA, 19 nt, Homo sapiens
  misc_RNA (1)...(19): siRNA sense strand
ccuauggaauguuggcaga

SEQ ID NO: 2628451 - RNA, 19 nt, Homo sapiens
  misc_RNA (1)...(19): siRNA sense strand
acagaauaaauauggccaa

SEQ ID NO: 2628452 - RNA, 19 nt, Homo sapiens
  misc_RNA (1)...(19): siRNA sense strand
agguuauauuuguuggaga

SEQ ID NO: 2628453 - RNA, 19 nt, Homo sapiens
  misc_RNA (1)...(19): siRNA sense strand
ccuuggaugauuugaaaga

SEQ ID NO: 2628454 - RNA, 19 nt, Homo sapiens
  misc_RNA (1)...(19): siRNA sense strand
cagaauacaaaggggaaua

SEQ ID NO: 2628455 - RNA, 19 nt, Homo sapiens
  misc_RNA (1)...(19): siRNA sense strand
gaucaggcccacaggcaga

SEQ ID NO: 2628456 - RNA, 19 nt, Homo sapiens
  misc_RNA (1)...(19): siRNA sense strand
uggugcaacagaagugaaa

SEQ ID NO: 2628457 - RNA, 19 nt, Homo sapiens
  misc_RNA (1)...(19): siRNA sense strand
caggagguggugaggagua

SEQ ID NO: 2628458 - RNA, 19 nt, Homo sapiens
  misc_RNA (1)...(19): siRNA sense strand
gaggaaugcaucagaguac

SEQ ID NO: 2628459 - RNA, 19 nt, Homo sapiens
  misc_RNA (1)...(19): siRNA sense strand
aagaugacauagaggaaac

SEQ ID NO: 2628460 - RNA, 19 nt, Homo sapiens
  misc_RNA (1)...(19): siRNA sense strand
gcuaggucuuaaugaugaa

SEQ ID NO: 2628461 - RNA, 19 nt, Homo sapiens
  misc_RNA (1)...(19): siRNA sense strand
agaucauacugcugcucua

SEQ ID NO: 2628462 - RNA, 19 nt, Homo sapiens
  misc_RNA (1)...(19): siRNA sense strand
cuauagaacagguaccaga

SEQ ID NO: 2628463 - RNA, 19 nt, Homo sapiens
  misc_RNA (1)...(19): siRNA sense strand
ugguguuaucuguggcuua

SEQ ID NO: 2628464 - RNA, 19 nt, Homo sapiens
  misc_RNA (1)...(19): siRNA sense strand
cuggaaaagaauacagaau

SEQ ID NO: 2628465 - RNA, 19 nt, Homo sapiens
  misc_RNA (1)...(19): siRNA sense strand
ccaaaauauuguagcuguu

SEQ ID NO: 2628466 - RNA, 19 nt, Homo sapiens
  misc_RNA (1)...(19): siRNA sense strand
guuuagguacugacuguaa

SEQ ID NO: 2628467 - RNA, 19 nt, Homo sapiens
  misc_RNA (1)...(19): siRNA sense strand
gucacuaagaucucagaaa

SEQ ID NO: 2628468 - RNA, 19 nt, Homo sapiens
  misc_RNA (1)...(19): siRNA sense strand
agaucuggacagugaauga

SEQ ID NO: 2628469 - RNA, 19 nt, Homo sapiens
  misc_RNA (1)...(19): siRNA sense strand
uguuguuguuagugaugaa

SEQ ID NO: 2628470 - RNA, 19 nt, Homo sapiens
  misc_RNA (1)...(19): siRNA sense strand
gagucagaauacagcuaca

SEQ ID NO: 2628471 - RNA, 19 nt, Homo sapiens
  misc_RNA (1)...(19): siRNA sense strand
ugaugaaugcagaggaaag

SEQ ID NO: 2628472 - RNA, 19 nt, Homo sapiens
  misc_RNA (1)...(19): siRNA sense strand
ugcuaagagaggaagagua

SEQ ID NO: 2628473 - RNA, 19 nt, Homo sapiens
  misc_RNA (1)...(19): siRNA sense strand
ugguaucgaucuugggcaa

SEQ ID NO: 2628474 - RNA, 19 nt, Homo sapiens
  misc_RNA (1)...(19): siRNA sense strand
gcacgacccucacuagaaa

SEQ ID NO: 2628475 - RNA, 19 nt, Homo sapiens
  misc_RNA (1)...(19): siRNA sense strand
auuuacacccugaggaaca

SEQ ID NO: 2628476 - RNA, 19 nt, Homo sapiens
  misc_RNA (1)...(19): siRNA sense strand
cggagaaaggcauucaaca

SEQ ID NO: 2628477 - RNA, 19 nt, Homo sapiens
  misc_RNA (1)...(19): siRNA sense strand
uuauuuacacccugaggaa

SEQ ID NO: 2628478 - RNA, 19 nt, Homo sapiens
  misc_RNA (1)...(19): siRNA sense strand
acagaaaaccauaagcuau

SEQ ID NO: 2628479 - RNA, 19 nt, Homo sapiens
  misc_RNA (1)...(19): siRNA sense strand
cuaacauauaugaggacaa

SEQ ID NO: 2628480 - RNA, 19 nt, Homo sapiens
  misc_RNA (1)...(19): siRNA sense strand
cagaaugcuaagaaagcua

SEQ ID NO: 2628481 - RNA, 19 nt, Homo sapiens
  misc_RNA (1)...(19): siRNA sense strand
cggacgaggaggauaacau

SEQ ID NO: 2628482 - RNA, 19 nt, Homo sapiens
  misc_RNA (1)...(19): siRNA sense strand
ggucuaacauauaugagga

SEQ ID NO: 2628483 - RNA, 19 nt, Homo sapiens
  misc_RNA (1)...(19): siRNA sense strand
gcaaaguagagccaggaga

SEQ ID NO: 2628484 - RNA, 19 nt, Homo sapiens
  misc_RNA (1)...(19): siRNA sense strand
aaacagauagacugggaga

SEQ ID NO: 2628485 - RNA, 19 nt, Homo sapiens
  misc_RNA (1)...(19): siRNA sense strand
agauagacugggagaggca

SEQ ID NO: 2628486 - RNA, 19 nt, Homo sapiens
  misc_RNA (1)...(19): siRNA sense strand
ccuacaccacugagaagaa

SEQ ID NO: 2628487 - RNA, 19 nt, Homo sapiens
  misc_RNA (1)...(19): siRNA sense strand
gaaccagcaaagaagaaaa

SEQ ID NO: 2628488 - RNA, 19 nt, Homo sapiens
  misc_RNA (1)...(19): siRNA sense strand
aggauaacaucgagccgga

SEQ ID NO: 2628489 - RNA, 19 nt, Homo sapiens
  misc_RNA (1)...(19): siRNA sense strand
acaaacagauagacuggga

SEQ ID NO: 2628490 - RNA, 19 nt, Homo sapiens
  misc_RNA (1)...(19): siRNA sense strand
ccuuaagcuccuaggauuu

SEQ ID NO: 2628491 - RNA, 19 nt, Homo sapiens
  misc_RNA (1)...(19): siRNA sense strand
uguuggaguaggaggguuu

SEQ ID NO: 2628492 - RNA, 19 nt, Homo sapiens
  misc_RNA (1)...(19): siRNA sense strand
ccucgauccugaaagaaaa

SEQ ID NO: 2628493 - RNA, 19 nt, Homo sapiens
  misc_RNA (1)...(19): siRNA sense strand
ccaggaaagaauugccaga

SEQ ID NO: 2628494 - RNA, 19 nt, Homo sapiens
  misc_RNA (1)...(19): siRNA sense strand
agcaaagaauccaggaaag

SEQ ID NO: 2628495 - RNA, 19 nt, Homo sapiens
  misc_RNA (1)...(19): siRNA sense strand
uugccagagaagaaauuaa

SEQ ID NO: 2628496 - RNA, 19 nt, Homo sapiens
  misc_RNA (1)...(19): siRNA sense strand
accucgauccugaaagaaa

SEQ ID NO: 2628497 - RNA, 19 nt, Homo sapiens
  misc_RNA (1)...(19): siRNA sense strand
ccagagaacagcuuggaua

SEQ ID NO: 2628498 - RNA, 19 nt, Homo sapiens
  misc_RNA (1)...(19): siRNA sense strand
ccgaagaguaccuggugaa

SEQ ID NO: 2628499 - RNA, 19 nt, Homo sapiens
  misc_RNA (1)...(19): siRNA sense strand
aaacagaugugguaaugua

SEQ ID NO: 2628500 - RNA, 19 nt, Homo sapiens
  misc_RNA (1)...(19): siRNA sense strand
aggaaacagaugugguaau

SEQ ID NO: 2628501 - RNA, 19 nt, Homo sapiens
  misc_RNA (1)...(19): siRNA sense strand
gaaggaaacagauguggua

SEQ ID NO: 2628502 - RNA, 19 nt, Homo sapiens
  misc_RNA (1)...(19): siRNA sense strand
ggaagaaggugcagcagcu

SEQ ID NO: 2628503 - RNA, 19 nt, Homo sapiens
  misc_RNA (1)...(19): siRNA sense strand
agaaagaggaagggaggau

SEQ ID NO: 2628504 - RNA, 19 nt, Homo sapiens
  misc_RNA (1)...(19): siRNA sense strand
uggugaacccugugggcau

SEQ ID NO: 2628505 - RNA, 19 nt, Homo sapiens
  misc_RNA (1)...(19): siRNA sense strand
ccuccagccccaagagaaa

SEQ ID NO: 2628506 - RNA, 19 nt, Homo sapiens
  misc_RNA (1)...(19): siRNA sense strand
gcgaugaccucuucagcca

SEQ ID NO: 2628507 - RNA, 19 nt, Homo sapiens
  misc_RNA (1)...(19): siRNA sense strand
aguccaggagaaagaggaa

SEQ ID NO: 2628508 - RNA, 19 nt, Homo sapiens
  misc_RNA (1)...(19): siRNA sense strand
cggcuuccuuugauggcaa

SEQ ID NO: 2628509 - RNA, 19 nt, Homo sapiens
  misc_RNA (1)...(19): siRNA sense strand
acaucaacaagcaggccaa

SEQ ID NO: 2628510 - RNA, 19 nt, Homo sapiens
  misc_RNA (1)...(19): siRNA sense strand
ggagaaagaggaagggagg

SEQ ID NO: 2628511 - RNA, 19 nt, Homo sapiens
  misc_RNA (1)...(19): siRNA sense strand
agaacagcuuggauagguu

SEQ ID NO: 2628512 - RNA, 19 nt, Homo sapiens
  misc_RNA (1)...(19): siRNA sense strand
ggugaacagcaucggcuau

SEQ ID NO: 2628513 - RNA, 19 nt, Homo sapiens
  misc_RNA (1)...(19): siRNA sense strand
cuugagaucuuaugggugu

SEQ ID NO: 2628514 - RNA, 19 nt, Homo sapiens
  misc_RNA (1)...(19): siRNA sense strand
gcugugacuuggagccuca

SEQ ID NO: 2628515 - RNA, 19 nt, Homo sapiens
  misc_RNA (1)...(19): siRNA sense strand
ugaucaauucugaggcaau

SEQ ID NO: 2628516 - RNA, 19 nt, Homo sapiens
  misc_RNA (1)...(19): siRNA sense strand
ccauuguuuaagucagaaa

SEQ ID NO: 2628517 - RNA, 19 nt, Homo sapiens
  misc_RNA (1)...(19): siRNA sense strand
ggaaagaaauggaggcucu

SEQ ID NO: 2628518 - RNA, 19 nt, Homo sapiens
  misc_RNA (1)...(19): siRNA sense strand
agguuaaacuacugcacaa

SEQ ID NO: 2628519 - RNA, 19 nt, Homo sapiens
  misc_RNA (1)...(19): siRNA sense strand
aggugaagcucaaggcaca

SEQ ID NO: 2628520 - RNA, 19 nt, Homo sapiens
  misc_RNA (1)...(19): siRNA sense strand
caggaagaaggaagaggaa

SEQ ID NO: 2628521 - RNA, 19 nt, Homo sapiens
  misc_RNA (1)...(19): siRNA sense strand
cggaagagggagcacgaau

SEQ ID NO: 2628522 - RNA, 19 nt, Homo sapiens
  misc_RNA (1)...(19): siRNA sense strand
gaggaaacauuuaagagga

SEQ ID NO: 2628523 - RNA, 19 nt, Homo sapiens
  misc_RNA (1)...(19): siRNA sense strand
gcucaacuaucuaaggaga

SEQ ID NO: 2628524 - RNA, 19 nt, Homo sapiens
  misc_RNA (1)...(19): siRNA sense strand
ccaggaagguggaggagcu

SEQ ID NO: 2628525 - RNA, 19 nt, Homo sapiens
  misc_RNA (1)...(19): siRNA sense strand
uugaggagcucgacgguga

SEQ ID NO: 2628526 - RNA, 19 nt, Homo sapiens
  misc_RNA (1)...(19): siRNA sense strand
aggaagaaggaagaggaaa

SEQ ID NO: 2628527 - RNA, 19 nt, Homo sapiens
  misc_RNA (1)...(19): siRNA sense strand
aggcugacaacaugagcaa

SEQ ID NO: 2628528 - RNA, 19 nt, Homo sapiens
  misc_RNA (1)...(19): siRNA sense strand
aggaagaagaggugaagcu

SEQ ID NO: 2628529 - RNA, 19 nt, Homo sapiens
  misc_RNA (1)...(19): siRNA sense strand
cagagagcacagaugcaaa

SEQ ID NO: 2628530 - RNA, 19 nt, Homo sapiens
  misc_RNA (1)...(19): siRNA sense strand
uggucaagccggagggucu

SEQ ID NO: 2628531 - RNA, 19 nt, Homo sapiens
  misc_RNA (1)...(19): siRNA sense strand
accucgagcuggagcgcua

SEQ ID NO: 2628532 - RNA, 19 nt, Homo sapiens
  misc_RNA (1)...(19): siRNA sense strand
agagaaaacuugaggagcu

SEQ ID NO: 2628533 - RNA, 19 nt, Homo sapiens
  misc_RNA (1)...(19): siRNA sense strand
gugaugacauugaaaggga

SEQ ID NO: 2628534 - RNA, 19 nt, Homo sapiens
  misc_RNA (1)...(19): siRNA sense strand
gaagaagaggugaagcuca

SEQ ID NO: 2628535 - RNA, 19 nt, Homo sapiens
  misc_RNA (1)...(19): siRNA sense strand
cgaaaaugcggaagaggga

SEQ ID NO: 2628536 - RNA, 19 nt, Homo sapiens
  misc_RNA (1)...(19): siRNA sense strand
gguuaaacuacugcacaaa

SEQ ID NO: 2628537 - RNA, 19 nt, Homo sapiens
  misc_RNA (1)...(19): siRNA sense strand
agaacacgagcuugcgaaa

SEQ ID NO: 2628538 - RNA, 19 nt, Homo sapiens
  misc_RNA (1)...(19): siRNA sense strand
uggaaaagcaucuagaaga

SEQ ID NO: 2628539 - RNA, 19 nt, Homo sapiens
  misc_RNA (1)...(19): siRNA sense strand
uggucaagcaggaggaucu

SEQ ID NO: 2628540 - RNA, 19 nt, Homo sapiens
  misc_RNA (1)...(19): siRNA sense strand
uugaaagguacaagcaaca

SEQ ID NO: 2628541 - RNA, 19 nt, Homo sapiens
  misc_RNA (1)...(19): siRNA sense strand
gacagaaggugcugcggga

SEQ ID NO: 2628542 - RNA, 19 nt, Homo sapiens
  misc_RNA (1)...(19): siRNA sense strand
cauugaaagguacaagcaa

SEQ ID NO: 2628543 - RNA, 19 nt, Homo sapiens
  misc_RNA (1)...(19): siRNA sense strand
ccaggaagaaggaagagga

SEQ ID NO: 2628544 - RNA, 19 nt, Homo sapiens
  misc_RNA (1)...(19): siRNA sense strand
ugcaggaagaagaggugaa

SEQ ID NO: 2628545 - RNA, 19 nt, Homo sapiens
  misc_RNA (1)...(19): siRNA sense strand
gggcaaaggcugcagagag

SEQ ID NO: 2628546 - RNA, 19 nt, Homo sapiens
  misc_RNA (1)...(19): siRNA sense strand
ccaagcugcaggagacaga

SEQ ID NO: 2628547 - RNA, 19 nt, Homo sapiens
  misc_RNA (1)...(19): siRNA sense strand
ucaagauagaggcagcuaa

SEQ ID NO: 2628548 - RNA, 19 nt, Homo sapiens
  misc_RNA (1)...(19): siRNA sense strand
ggagaaggaugcagugcug

SEQ ID NO: 2628549 - RNA, 19 nt, Homo sapiens
  misc_RNA (1)...(19): siRNA sense strand
ccaugacccuggaacgaga

SEQ ID NO: 2628550 - RNA, 19 nt, Homo sapiens
  misc_RNA (1)...(19): siRNA sense strand
acucugaggaggaggguga

SEQ ID NO: 2628551 - RNA, 19 nt, Homo sapiens
  misc_RNA (1)...(19): siRNA sense strand
cguacacacgggcgagaaa

SEQ ID NO: 2628552 - RNA, 19 nt, Homo sapiens
  misc_RNA (1)...(19): siRNA sense strand
aggugaaagaggagucaga

SEQ ID NO: 2628553 - RNA, 19 nt, Homo sapiens
  misc_RNA (1)...(19): siRNA sense strand
uggugaagcuagaggacuc

SEQ ID NO: 2628554 - RNA, 19 nt, Homo sapiens
  misc_RNA (1)...(19): siRNA sense strand
cgaagguggcuuugcgcau

SEQ ID NO: 2628555 - RNA, 19 nt, Homo sapiens
  misc_RNA (1)...(19): siRNA sense strand
gcaccaagcucauucagca

SEQ ID NO: 2628556 - RNA, 19 nt, Homo sapiens
  misc_RNA (1)...(19): siRNA sense strand
agucagagguuacagagga

SEQ ID NO: 2628557 - RNA, 19 nt, Homo sapiens
  misc_RNA (1)...(19): siRNA sense strand
cugucauggugaagcuaga

SEQ ID NO: 2628558 - RNA, 19 nt, Homo sapiens
  misc_RNA (1)...(19): siRNA sense strand
cugaggaggcccagagaug

SEQ ID NO: 2628559 - RNA, 19 nt, Homo sapiens
  misc_RNA (1)...(19): siRNA sense strand
acucugaggaggaggguga

SEQ ID NO: 2628560 - RNA, 19 nt, Homo sapiens
  misc_RNA (1)...(19): siRNA sense strand
cguacacacgggcgagaaa

SEQ ID NO: 2628561 - RNA, 19 nt, Homo sapiens
  misc_RNA (1)...(19): siRNA sense strand
aggugaaagaggagucaga

SEQ ID NO: 2628562 - RNA, 19 nt, Homo sapiens
  misc_RNA (1)...(19): siRNA sense strand
uggugaagcuagaggacuc

SEQ ID NO: 2628563 - RNA, 19 nt, Homo sapiens
  misc_RNA (1)...(19): siRNA sense strand
cgaagguggcuuugcgcau

SEQ ID NO: 2628564 - RNA, 19 nt, Homo sapiens
  misc_RNA (1)...(19): siRNA sense strand
gcaccaagcucauucagca

SEQ ID NO: 2628565 - RNA, 19 nt, Homo sapiens
  misc_RNA (1)...(19): siRNA sense strand
agucagagguuacagagga

SEQ ID NO: 2628566 - RNA, 19 nt, Homo sapiens
  misc_RNA (1)...(19): siRNA sense strand
cugucauggugaagcuaga

SEQ ID NO: 2628567 - RNA, 19 nt, Homo sapiens
  misc_RNA (1)...(19): siRNA sense strand
cugaggaggcccagagaug

SEQ ID NO: 2628568 - RNA, 19 nt, Homo sapiens
  misc_RNA (1)...(19): siRNA sense strand
auguaaggauugugggaaa

SEQ ID NO: 2628569 - RNA, 19 nt, Homo sapiens
  misc_RNA (1)...(19): siRNA sense strand
guguaaggagugugggaaa

SEQ ID NO: 2628570 - RNA, 19 nt, Homo sapiens
  misc_RNA (1)...(19): siRNA sense strand
augcaaggaaugugggaua

SEQ ID NO: 2628571 - RNA, 19 nt, Homo sapiens
  misc_RNA (1)...(19): siRNA sense strand
auguaaacagugugggaaa

SEQ ID NO: 2628572 - RNA, 19 nt, Homo sapiens
  misc_RNA (1)...(19): siRNA sense strand
guguauggaauguggcaaa

SEQ ID NO: 2628573 - RNA, 19 nt, Homo sapiens
  misc_RNA (1)...(19): siRNA sense strand
auguaaggauugugggaga

SEQ ID NO: 2628574 - RNA, 19 nt, Homo sapiens
  misc_RNA (1)...(19): siRNA sense strand
guauuuagucaguguggaa

SEQ ID NO: 2628575 - RNA, 19 nt, Homo sapiens
  misc_RNA (1)...(19): siRNA sense strand
uugcagugacucugggaaa

SEQ ID NO: 2628576 - RNA, 19 nt, Homo sapiens
  misc_RNA (1)...(19): siRNA sense strand
auguaaggagugcgggaaa

SEQ ID NO: 2628577 - RNA, 19 nt, Homo sapiens
  misc_RNA (1)...(19): siRNA sense strand
guggaaaauccuuuagaaa

SEQ ID NO: 2628578 - RNA, 19 nt, Homo sapiens
  misc_RNA (1)...(19): siRNA sense strand
ggaaugugggagaggcuuu

SEQ ID NO: 2628579 - RNA, 19 nt, Homo sapiens
  misc_RNA (1)...(19): siRNA sense strand
gugccuggaaugugguaaa

SEQ ID NO: 2628580 - RNA, 19 nt, Homo sapiens
  misc_RNA (1)...(19): siRNA sense strand
ccuuaagacacaugugaga

SEQ ID NO: 2628581 - RNA, 19 nt, Homo sapiens
  misc_RNA (1)...(19): siRNA sense strand
auguaaggaauguggaaaa

SEQ ID NO: 2628582 - RNA, 19 nt, Homo sapiens
  misc_RNA (1)...(19): siRNA sense strand
uggagaacuacaagaauuu

SEQ ID NO: 2628583 - RNA, 19 nt, Homo sapiens
  misc_RNA (1)...(19): siRNA sense strand
cccuaugaauguaaggaau

SEQ ID NO: 2628584 - RNA, 19 nt, Homo sapiens
  misc_RNA (1)...(19): siRNA sense strand
aacucacacuggagagaaa

SEQ ID NO: 2628585 - RNA, 19 nt, Homo sapiens
  misc_RNA (1)...(19): siRNA sense strand
aacucacacuggagagaaa

SEQ ID NO: 2628586 - RNA, 19 nt, Homo sapiens
  misc_RNA (1)...(19): siRNA sense strand
guggaaaaggauuuagaua

SEQ ID NO: 2628587 - RNA, 19 nt, Homo sapiens
  misc_RNA (1)...(19): siRNA sense strand
cuuaauauucacaugggaa

SEQ ID NO: 2628588 - RNA, 19 nt, Homo sapiens
  misc_RNA (1)...(19): siRNA sense strand
ugaaagaaggcaugcggau

SEQ ID NO: 2628589 - RNA, 19 nt, Homo sapiens
  misc_RNA (1)...(19): siRNA sense strand
caagaagagucuaggacag

SEQ ID NO: 2628590 - RNA, 19 nt, Homo sapiens
  misc_RNA (1)...(19): siRNA sense strand
auucacaccuucagggaca

SEQ ID NO: 2628591 - RNA, 19 nt, Homo sapiens
  misc_RNA (1)...(19): siRNA sense strand
gagccaaccuccaguggga

SEQ ID NO: 2628592 - RNA, 19 nt, Homo sapiens
  misc_RNA (1)...(19): siRNA sense strand
auggaaggaaugugggaga

SEQ ID NO: 2628593 - RNA, 19 nt, Homo sapiens
  misc_RNA (1)...(19): siRNA sense strand
agacaaucccuaugagugu

SEQ ID NO: 2628594 - RNA, 19 nt, Homo sapiens
  misc_RNA (1)...(19): siRNA sense strand
agaaauuccucaugccuca

SEQ ID NO: 2628595 - RNA, 19 nt, Homo sapiens
  misc_RNA (1)...(19): siRNA sense strand
uguaaacagugugggaaau

SEQ ID NO: 2628596 - RNA, 19 nt, Homo sapiens
  misc_RNA (1)...(19): siRNA sense strand
ggaauguggaaaaggauuu

SEQ ID NO: 2628597 - RNA, 19 nt, Homo sapiens
  misc_RNA (1)...(19): siRNA sense strand
gggauucaaaugauaggaa

SEQ ID NO: 2628598 - RNA, 19 nt, Homo sapiens
  misc_RNA (1)...(19): siRNA sense strand
ugaaaauccauguggguga

SEQ ID NO: 2628599 - RNA, 19 nt, Homo sapiens
  misc_RNA (1)...(19): siRNA sense strand
gaauguaaggagugcggga

SEQ ID NO: 2628600 - RNA, 19 nt, Homo sapiens
  misc_RNA (1)...(19): siRNA sense strand
cagaauggaaagugcaacu

SEQ ID NO: 2628601 - RNA, 19 nt, Homo sapiens
  misc_RNA (1)...(19): siRNA sense strand
cugggaaauccuucauuaa

SEQ ID NO: 2628602 - RNA, 19 nt, Homo sapiens
  misc_RNA (1)...(19): siRNA sense strand
aaauguaaggaauguggaa

SEQ ID NO: 2628603 - RNA, 19 nt, Homo sapiens
  misc_RNA (1)...(19): siRNA sense strand
ggagagaagccuuuugaau

SEQ ID NO: 2628604 - RNA, 19 nt, Homo sapiens
  misc_RNA (1)...(19): siRNA sense strand
acaagaagagucuaggaca

SEQ ID NO: 2628605 - RNA, 19 nt, Homo sapiens
  misc_RNA (1)...(19): siRNA sense strand
cuucagggacauuuaagaa

SEQ ID NO: 2628606 - RNA, 19 nt, Homo sapiens
  misc_RNA (1)...(19): siRNA sense strand
gcuuaagucaacauaugaa

SEQ ID NO: 2628607 - RNA, 19 nt, Homo sapiens
  misc_RNA (1)...(19): siRNA sense strand
augugucaaaugugggaaa

SEQ ID NO: 2628608 - RNA, 19 nt, Homo sapiens
  misc_RNA (1)...(19): siRNA sense strand
gggaggucagugauguuaa

SEQ ID NO: 2628609 - RNA, 19 nt, Homo sapiens
  misc_RNA (1)...(19): siRNA sense strand
uauacaaacucacagguca

SEQ ID NO: 2628610 - RNA, 19 nt, Homo sapiens
  misc_RNA (1)...(19): siRNA sense strand
cccuaugaguguaaggagu

SEQ ID NO: 2628611 - RNA, 19 nt, Homo sapiens
  misc_RNA (1)...(19): siRNA sense strand
gaguguaaggaguguggga

SEQ ID NO: 2628612 - RNA, 19 nt, Homo sapiens
  misc_RNA (1)...(19): siRNA sense strand
caaaauagugagaacacau

SEQ ID NO: 2628613 - RNA, 19 nt, Homo sapiens
  misc_RNA (1)...(19): siRNA sense strand
uggagagaaaccuuauaaa

SEQ ID NO: 2628614 - RNA, 19 nt, Homo sapiens
  misc_RNA (1)...(19): siRNA sense strand
auguaaggauugugggaaa

SEQ ID NO: 2628615 - RNA, 19 nt, Homo sapiens
  misc_RNA (1)...(19): siRNA sense strand
guguaaggagugugggaaa

SEQ ID NO: 2628616 - RNA, 19 nt, Homo sapiens
  misc_RNA (1)...(19): siRNA sense strand
augcaaggaaugugggaua

SEQ ID NO: 2628617 - RNA, 19 nt, Homo sapiens
  misc_RNA (1)...(19): siRNA sense strand
auguaaacagugugggaaa

SEQ ID NO: 2628618 - RNA, 19 nt, Homo sapiens
  misc_RNA (1)...(19): siRNA sense strand
guguauggaauguggcaaa

SEQ ID NO: 2628619 - RNA, 19 nt, Homo sapiens
  misc_RNA (1)...(19): siRNA sense strand
auguaaggauugugggaga

SEQ ID NO: 2628620 - RNA, 19 nt, Homo sapiens
  misc_RNA (1)...(19): siRNA sense strand
guauuuagucaguguggaa

SEQ ID NO: 2628621 - RNA, 19 nt, Homo sapiens
  misc_RNA (1)...(19): siRNA sense strand
uugcagugacucugggaaa

SEQ ID NO: 2628622 - RNA, 19 nt, Homo sapiens
  misc_RNA (1)...(19): siRNA sense strand
auguaaggagugcgggaaa

SEQ ID NO: 2628623 - RNA, 19 nt, Homo sapiens
  misc_RNA (1)...(19): siRNA sense strand
guggaaaauccuuuagaaa

SEQ ID NO: 2628624 - RNA, 19 nt, Homo sapiens
  misc_RNA (1)...(19): siRNA sense strand
ggaaugugggagaggcuuu

SEQ ID NO: 2628625 - RNA, 19 nt, Homo sapiens
  misc_RNA (1)...(19): siRNA sense strand
gugccuggaaugugguaaa

SEQ ID NO: 2628626 - RNA, 19 nt, Homo sapiens
  misc_RNA (1)...(19): siRNA sense strand
ccuuaagacacaugugaga

SEQ ID NO: 2628627 - RNA, 19 nt, Homo sapiens
  misc_RNA (1)...(19): siRNA sense strand
auguaaggaauguggaaaa

SEQ ID NO: 2628628 - RNA, 19 nt, Homo sapiens
  misc_RNA (1)...(19): siRNA sense strand
uggagaacuacaagaauuu

SEQ ID NO: 2628629 - RNA, 19 nt, Homo sapiens
  misc_RNA (1)...(19): siRNA sense strand
cccuaugaauguaaggaau

SEQ ID NO: 2628630 - RNA, 19 nt, Homo sapiens
  misc_RNA (1)...(19): siRNA sense strand
aacucacacuggagagaaa

SEQ ID NO: 2628631 - RNA, 19 nt, Homo sapiens
  misc_RNA (1)...(19): siRNA sense strand
aacucacacuggagagaaa

SEQ ID NO: 2628632 - RNA, 19 nt, Homo sapiens
  misc_RNA (1)...(19): siRNA sense strand
guggaaaaggauuuagaua

SEQ ID NO: 2628633 - RNA, 19 nt, Homo sapiens
  misc_RNA (1)...(19): siRNA sense strand
cuuaauauucacaugggaa

SEQ ID NO: 2628634 - RNA, 19 nt, Homo sapiens
  misc_RNA (1)...(19): siRNA sense strand
ugaaagaaggcaugcggau

SEQ ID NO: 2628635 - RNA, 19 nt, Homo sapiens
  misc_RNA (1)...(19): siRNA sense strand
caagaagagucuaggacag

SEQ ID NO: 2628636 - RNA, 19 nt, Homo sapiens
  misc_RNA (1)...(19): siRNA sense strand
auucacaccuucagggaca

SEQ ID NO: 2628637 - RNA, 19 nt, Homo sapiens
  misc_RNA (1)...(19): siRNA sense strand
gagccaaccuccaguggga

SEQ ID NO: 2628638 - RNA, 19 nt, Homo sapiens
  misc_RNA (1)...(19): siRNA sense strand
auggaaggaaugugggaga

SEQ ID NO: 2628639 - RNA, 19 nt, Homo sapiens
  misc_RNA (1)...(19): siRNA sense strand
agacaaucccuaugagugu

SEQ ID NO: 2628640 - RNA, 19 nt, Homo sapiens
  misc_RNA (1)...(19): siRNA sense strand
agaaauuccucaugccuca

SEQ ID NO: 2628641 - RNA, 19 nt, Homo sapiens
  misc_RNA (1)...(19): siRNA sense strand
uguaaacagugugggaaau

SEQ ID NO: 2628642 - RNA, 19 nt, Homo sapiens
  misc_RNA (1)...(19): siRNA sense strand
ggaauguggaaaaggauuu

SEQ ID NO: 2628643 - RNA, 19 nt, Homo sapiens
  misc_RNA (1)...(19): siRNA sense strand
gggauucaaaugauaggaa

SEQ ID NO: 2628644 - RNA, 19 nt, Homo sapiens
  misc_RNA (1)...(19): siRNA sense strand
ugaaaauccauguggguga

SEQ ID NO: 2628645 - RNA, 19 nt, Homo sapiens
  misc_RNA (1)...(19): siRNA sense strand
gaauguaaggagugcggga

SEQ ID NO: 2628646 - RNA, 19 nt, Homo sapiens
  misc_RNA (1)...(19): siRNA sense strand
cagaauggaaagugcaacu

SEQ ID NO: 2628647 - RNA, 19 nt, Homo sapiens
  misc_RNA (1)...(19): siRNA sense strand
cugggaaauccuucauuaa

SEQ ID NO: 2628648 - RNA, 19 nt, Homo sapiens
  misc_RNA (1)...(19): siRNA sense strand
aaauguaaggaauguggaa

SEQ ID NO: 2628649 - RNA, 19 nt, Homo sapiens
  misc_RNA (1)...(19): siRNA sense strand
ggagagaagccuuuugaau

SEQ ID NO: 2628650 - RNA, 19 nt, Homo sapiens
  misc_RNA (1)...(19): siRNA sense strand
acaagaagagucuaggaca

SEQ ID NO: 2628651 - RNA, 19 nt, Homo sapiens
  misc_RNA (1)...(19): siRNA sense strand
cuucagggacauuuaagaa

SEQ ID NO: 2628652 - RNA, 19 nt, Homo sapiens
  misc_RNA (1)...(19): siRNA sense strand
gcuuaagucaacauaugaa

SEQ ID NO: 2628653 - RNA, 19 nt, Homo sapiens
  misc_RNA (1)...(19): siRNA sense strand
augugucaaaugugggaaa

SEQ ID NO: 2628654 - RNA, 19 nt, Homo sapiens
  misc_RNA (1)...(19): siRNA sense strand
gggaggucagugauguuaa

SEQ ID NO: 2628655 - RNA, 19 nt, Homo sapiens
  misc_RNA (1)...(19): siRNA sense strand
uauacaaacucacagguca

SEQ ID NO: 2628656 - RNA, 19 nt, Homo sapiens
  misc_RNA (1)...(19): siRNA sense strand
cccuaugaguguaaggagu

SEQ ID NO: 2628657 - RNA, 19 nt, Homo sapiens
  misc_RNA (1)...(19): siRNA sense strand
gaguguaaggaguguggga

SEQ ID NO: 2628658 - RNA, 19 nt, Homo sapiens
  misc_RNA (1)...(19): siRNA sense strand
caaaauagugagaacacau

SEQ ID NO: 2628659 - RNA, 19 nt, Homo sapiens
  misc_RNA (1)...(19): siRNA sense strand
uggagagaaaccuuauaaa

SEQ ID NO: 2628660 - RNA, 19 nt, Homo sapiens
  misc_RNA (1)...(19): siRNA sense strand
uugagaaccaggagaggaa

SEQ ID NO: 2628661 - RNA, 19 nt, Homo sapiens
  misc_RNA (1)...(19): siRNA sense strand
auuggaaggaagagggaau

SEQ ID NO: 2628662 - RNA, 19 nt, Homo sapiens
  misc_RNA (1)...(19): siRNA sense strand
ugggaagauuaguuggaau

SEQ ID NO: 2628663 - RNA, 19 nt, Homo sapiens
  misc_RNA (1)...(19): siRNA sense strand
aaacauugaggcaaggcua

SEQ ID NO: 2628664 - RNA, 19 nt, Homo sapiens
  misc_RNA (1)...(19): siRNA sense strand
guaaaagggacauugggaa

SEQ ID NO: 2628665 - RNA, 19 nt, Homo sapiens
  misc_RNA (1)...(19): siRNA sense strand
gagaggaagcacaggacgu

SEQ ID NO: 2628666 - RNA, 19 nt, Homo sapiens
  misc_RNA (1)...(19): siRNA sense strand
gcgaggaggaggugcuacu

SEQ ID NO: 2628667 - RNA, 19 nt, Homo sapiens
  misc_RNA (1)...(19): siRNA sense strand
gcaaagaaaucaaggaacg

SEQ ID NO: 2628668 - RNA, 19 nt, Homo sapiens
  misc_RNA (1)...(19): siRNA sense strand
ggaagugcacgguggguga

SEQ ID NO: 2628669 - RNA, 19 nt, Homo sapiens
  misc_RNA (1)...(19): siRNA sense strand
gguccagucagcagggcaa

SEQ ID NO: 2628670 - RNA, 19 nt, Homo sapiens
  misc_RNA (1)...(19): siRNA sense strand
cagccauaccuguggucua

SEQ ID NO: 2628671 - RNA, 19 nt, Homo sapiens
  misc_RNA (1)...(19): siRNA sense strand
ggacauaaucuguuuggca

SEQ ID NO: 2628672 - RNA, 19 nt, Homo sapiens
  misc_RNA (1)...(19): siRNA sense strand
gguucuucccacagggcaa

SEQ ID NO: 2628673 - RNA, 19 nt, Homo sapiens
  misc_RNA (1)...(19): siRNA sense strand
aggccaaggaccugggcau

SEQ ID NO: 2628674 - RNA, 19 nt, Homo sapiens
  misc_RNA (1)...(19): siRNA sense strand
ccuuugacugggauggaua

SEQ ID NO: 2628675 - RNA, 19 nt, Homo sapiens
  misc_RNA (1)...(19): siRNA sense strand
cgcccuuugugcugggaua

SEQ ID NO: 2628676 - RNA, 19 nt, Homo sapiens
  misc_RNA (1)...(19): siRNA sense strand
gauaaaaguuacuggcugu

SEQ ID NO: 2628677 - RNA, 19 nt, Homo sapiens
  misc_RNA (1)...(19): siRNA sense strand
acuacgacauccaggccaa

SEQ ID NO: 2628678 - RNA, 19 nt, Homo sapiens
  misc_RNA (1)...(19): siRNA sense strand
ugaaauacagaucagggaa

SEQ ID NO: 2628679 - RNA, 19 nt, Homo sapiens
  misc_RNA (1)...(19): siRNA sense strand
gagaaugacaugcguggga

SEQ ID NO: 2628680 - RNA, 19 nt, Homo sapiens
  misc_RNA (1)...(19): siRNA sense strand
ggucuaugacuuuggugau

SEQ ID NO: 2628681 - RNA, 19 nt, Homo sapiens
  misc_RNA (1)...(19): siRNA sense strand
gugaaauacagaucaggga

SEQ ID NO: 2628682 - RNA, 19 nt, Homo sapiens
  misc_RNA (1)...(19): siRNA sense strand
gacauaaucuguuuggcau

SEQ ID NO: 2628683 - RNA, 19 nt, Homo sapiens
  misc_RNA (1)...(19): siRNA sense strand
ugacuuugcugcugcggaa

SEQ ID NO: 2628684 - RNA, 19 nt, Homo sapiens
  misc_RNA (1)...(19): siRNA sense strand
uugacaaagaggaggagau

SEQ ID NO: 2628685 - RNA, 19 nt, Homo sapiens
  misc_RNA (1)...(19): siRNA sense strand
gcugcugcggaaagagaaa

SEQ ID NO: 2628686 - RNA, 19 nt, Homo sapiens
  misc_RNA (1)...(19): siRNA sense strand
uuacaugaguucuggacca

SEQ ID NO: 2628687 - RNA, 19 nt, Homo sapiens
  misc_RNA (1)...(19): siRNA sense strand
ccaugauauuagcuagaca

SEQ ID NO: 2628688 - RNA, 19 nt, Homo sapiens
  misc_RNA (1)...(19): siRNA sense strand
ggacaagcugcuaaggacu

SEQ ID NO: 2628689 - RNA, 19 nt, Homo sapiens
  misc_RNA (1)...(19): siRNA sense strand
ugaaggacucacagagcuu

SEQ ID NO: 2628690 - RNA, 19 nt, Homo sapiens
  misc_RNA (1)...(19): siRNA sense strand
gcugauuggcugcugaaaa

SEQ ID NO: 2628691 - RNA, 19 nt, Homo sapiens
  misc_RNA (1)...(19): siRNA sense strand
gcuuaagauccgagccaau

SEQ ID NO: 2628692 - RNA, 19 nt, Homo sapiens
  misc_RNA (1)...(19): siRNA sense strand
gcaauguggucaagacgga

SEQ ID NO: 2628693 - RNA, 19 nt, Homo sapiens
  misc_RNA (1)...(19): siRNA sense strand
cagaauaacucauccucca

SEQ ID NO: 2628694 - RNA, 19 nt, Homo sapiens
  misc_RNA (1)...(19): siRNA sense strand
gaacugggauggcgggacu

SEQ ID NO: 2628695 - RNA, 19 nt, Homo sapiens
  misc_RNA (1)...(19): siRNA sense strand
ggucaagacggaugugcca

SEQ ID NO: 2628696 - RNA, 19 nt, Homo sapiens
  misc_RNA (1)...(19): siRNA sense strand
gagcuuaagauccgagcca

SEQ ID NO: 2628697 - RNA, 19 nt, Homo sapiens
  misc_RNA (1)...(19): siRNA sense strand
acgucuagcccgugagaaa

SEQ ID NO: 2628698 - RNA, 19 nt, Homo sapiens
  misc_RNA (1)...(19): siRNA sense strand
guguacagacagagguaaa

SEQ ID NO: 2628699 - RNA, 19 nt, Homo sapiens
  misc_RNA (1)...(19): siRNA sense strand
agguaaaucgugaguuaaa

SEQ ID NO: 2628700 - RNA, 19 nt, Homo sapiens
  misc_RNA (1)...(19): siRNA sense strand
cgucaagaaaugauagcua

SEQ ID NO: 2628701 - RNA, 19 nt, Homo sapiens
  misc_RNA (1)...(19): siRNA sense strand
gggacaucauaaaggagaa

SEQ ID NO: 2628702 - RNA, 19 nt, Homo sapiens
  misc_RNA (1)...(19): siRNA sense strand
agacagagguaaaucguga

SEQ ID NO: 2628703 - RNA, 19 nt, Homo sapiens
  misc_RNA (1)...(19): siRNA sense strand
ggguaauggcagaugaguu

SEQ ID NO: 2628704 - RNA, 19 nt, Homo sapiens
  misc_RNA (1)...(19): siRNA sense strand
uggaauggaaacugaggaa

SEQ ID NO: 2628705 - RNA, 19 nt, Homo sapiens
  misc_RNA (1)...(19): siRNA sense strand
cugaacaguuagaacguau

SEQ ID NO: 2628706 - RNA, 19 nt, Homo sapiens
  misc_RNA (1)...(19): siRNA sense strand
gcaauggggaagagagcaa

SEQ ID NO: 2628707 - RNA, 19 nt, Homo sapiens
  misc_RNA (1)...(19): siRNA sense strand
agaaauuauuggaggagcu

SEQ ID NO: 2628708 - RNA, 19 nt, Homo sapiens
  misc_RNA (1)...(19): siRNA sense strand
agguuaagucucugggaca

SEQ ID NO: 2628709 - RNA, 19 nt, Homo sapiens
  misc_RNA (1)...(19): siRNA sense strand
aguccaaucuagaaagcau

SEQ ID NO: 2628710 - RNA, 19 nt, Homo sapiens
  misc_RNA (1)...(19): siRNA sense strand
ucuccuaagugaacgggaa

SEQ ID NO: 2628711 - RNA, 19 nt, Homo sapiens
  misc_RNA (1)...(19): siRNA sense strand
ugauguauggcgaaguaaa

SEQ ID NO: 2628712 - RNA, 19 nt, Homo sapiens
  misc_RNA (1)...(19): siRNA sense strand
gcaggagauggaauggaaa

SEQ ID NO: 2628713 - RNA, 19 nt, Homo sapiens
  misc_RNA (1)...(19): siRNA sense strand
acaaaucacaaguuggcaa

SEQ ID NO: 2628714 - RNA, 19 nt, Homo sapiens
  misc_RNA (1)...(19): siRNA sense strand
ccgaggagcaggagaugga

SEQ ID NO: 2628715 - RNA, 19 nt, Homo sapiens
  misc_RNA (1)...(19): siRNA sense strand
ggucagucagagggaguua

SEQ ID NO: 2628716 - RNA, 19 nt, Homo sapiens
  misc_RNA (1)...(19): siRNA sense strand
gguuaagucucugggacau

SEQ ID NO: 2628717 - RNA, 19 nt, Homo sapiens
  misc_RNA (1)...(19): siRNA sense strand
agucagagggaguuauaga

SEQ ID NO: 2628718 - RNA, 19 nt, Homo sapiens
  misc_RNA (1)...(19): siRNA sense strand
gguuacuacaggacaaaga

SEQ ID NO: 2628719 - RNA, 19 nt, Homo sapiens
  misc_RNA (1)...(19): siRNA sense strand
ccguguacagacagaggua

SEQ ID NO: 2628720 - RNA, 19 nt, Homo sapiens
  misc_RNA (1)...(19): siRNA sense strand
cccagaaauuauuggagga

SEQ ID NO: 2628721 - RNA, 19 nt, Homo sapiens
  misc_RNA (1)...(19): siRNA sense strand
gcaucauagucuucagagu

SEQ ID NO: 2628722 - RNA, 19 nt, Homo sapiens
  misc_RNA (1)...(19): siRNA sense strand
caagcaggguaauggcaga

SEQ ID NO: 2628723 - RNA, 19 nt, Homo sapiens
  misc_RNA (1)...(19): siRNA sense strand
aguucuucagcuagggaaa

SEQ ID NO: 2628724 - RNA, 19 nt, Homo sapiens
  misc_RNA (1)...(19): siRNA sense strand
aguuagaacguaugucaau

SEQ ID NO: 2628725 - RNA, 19 nt, Homo sapiens
  misc_RNA (1)...(19): siRNA sense strand
ggacaucauaaaggagaau

SEQ ID NO: 2628726 - RNA, 19 nt, Homo sapiens
  misc_RNA (1)...(19): siRNA sense strand
uggcagaugaguuaaccaa

SEQ ID NO: 2628727 - RNA, 19 nt, Homo sapiens
  misc_RNA (1)...(19): siRNA sense strand
gaaaauggcugaaacgguu

SEQ ID NO: 2628728 - RNA, 19 nt, Homo sapiens
  misc_RNA (1)...(19): siRNA sense strand
ggggaagagagcaaacuua

SEQ ID NO: 2628729 - RNA, 19 nt, Homo sapiens
  misc_RNA (1)...(19): siRNA sense strand
agggaguuauagaaccuaa

SEQ ID NO: 2628730 - RNA, 19 nt, Homo sapiens
  misc_RNA (1)...(19): siRNA sense strand
ccggaguccaaucuagaaa

SEQ ID NO: 2628731 - RNA, 19 nt, Homo sapiens
  misc_RNA (1)...(19): siRNA sense strand
caugauauccccaacaaaa

SEQ ID NO: 2628732 - RNA, 19 nt, Homo sapiens
  misc_RNA (1)...(19): siRNA sense strand
gagcagcuuuacagcguca

SEQ ID NO: 2628733 - RNA, 19 nt, Homo sapiens
  misc_RNA (1)...(19): siRNA sense strand
gggcaagaguaaagaggag

SEQ ID NO: 2628734 - RNA, 19 nt, Homo sapiens
  misc_RNA (1)...(19): siRNA sense strand
ucgaccaggaggagcaaua

SEQ ID NO: 2628735 - RNA, 19 nt, Homo sapiens
  misc_RNA (1)...(19): siRNA sense strand
agaacguggugguggucau

SEQ ID NO: 2628736 - RNA, 19 nt, Homo sapiens
  misc_RNA (1)...(19): siRNA sense strand
agucagaguuucuuagcca

SEQ ID NO: 2628737 - RNA, 19 nt, Homo sapiens
  misc_RNA (1)...(19): siRNA sense strand
ucacugaggaagaggagca

SEQ ID NO: 2628738 - RNA, 19 nt, Homo sapiens
  misc_RNA (1)...(19): siRNA sense strand
gagcaauaccugcagcuga

SEQ ID NO: 2628739 - RNA, 19 nt, Homo sapiens
  misc_RNA (1)...(19): siRNA sense strand
augaugaaguacugggcca

SEQ ID NO: 2628740 - RNA, 19 nt, Homo sapiens
  misc_RNA (1)...(19): siRNA sense strand
agaguaaagaggagauucu

SEQ ID NO: 2628741 - RNA, 19 nt, Homo sapiens
  misc_RNA (1)...(19): siRNA sense strand
aggaagaugaugaaguacu

SEQ ID NO: 2628742 - RNA, 19 nt, Homo sapiens
  misc_RNA (1)...(19): siRNA sense strand
gagccugaagagagacaca

SEQ ID NO: 2628743 - RNA, 19 nt, Homo sapiens
  misc_RNA (1)...(19): siRNA sense strand
gggcaagaguaaagaggag

SEQ ID NO: 2628744 - RNA, 19 nt, Homo sapiens
  misc_RNA (1)...(19): siRNA sense strand
ucgaccaggaggagcaaua

SEQ ID NO: 2628745 - RNA, 19 nt, Homo sapiens
  misc_RNA (1)...(19): siRNA sense strand
agaacguggugguggucau

SEQ ID NO: 2628746 - RNA, 19 nt, Homo sapiens
  misc_RNA (1)...(19): siRNA sense strand
agucagaguuucuuagcca

SEQ ID NO: 2628747 - RNA, 19 nt, Homo sapiens
  misc_RNA (1)...(19): siRNA sense strand
ucacugaggaagaggagca

SEQ ID NO: 2628748 - RNA, 19 nt, Homo sapiens
  misc_RNA (1)...(19): siRNA sense strand
gagcaauaccugcagcuga

SEQ ID NO: 2628749 - RNA, 19 nt, Homo sapiens
  misc_RNA (1)...(19): siRNA sense strand
augaugaaguacugggcca

SEQ ID NO: 2628750 - RNA, 19 nt, Homo sapiens
  misc_RNA (1)...(19): siRNA sense strand
agaguaaagaggagauucu

SEQ ID NO: 2628751 - RNA, 19 nt, Homo sapiens
  misc_RNA (1)...(19): siRNA sense strand
aggaagaugaugaaguacu

SEQ ID NO: 2628752 - RNA, 19 nt, Homo sapiens
  misc_RNA (1)...(19): siRNA sense strand
gagccugaagagagacaca

SEQ ID NO: 2628753 - RNA, 19 nt, Homo sapiens
  misc_RNA (1)...(19): siRNA sense strand
agggagaggaccagguaaa

SEQ ID NO: 2628754 - RNA, 19 nt, Homo sapiens
  misc_RNA (1)...(19): siRNA sense strand
gaggagaucaagaaggaga

SEQ ID NO: 2628755 - RNA, 19 nt, Homo sapiens
  misc_RNA (1)...(19): siRNA sense strand
cgacuauaugauuuggaua

SEQ ID NO: 2628756 - RNA, 19 nt, Homo sapiens
  misc_RNA (1)...(19): siRNA sense strand
gguggauguagaacagaaa

SEQ ID NO: 2628757 - RNA, 19 nt, Homo sapiens
  misc_RNA (1)...(19): siRNA sense strand
aggauaaugaaaagagcaa

SEQ ID NO: 2628758 - RNA, 19 nt, Homo sapiens
  misc_RNA (1)...(19): siRNA sense strand
uuguuaagguuuuggagaa

SEQ ID NO: 2628759 - RNA, 19 nt, Homo sapiens
  misc_RNA (1)...(19): siRNA sense strand
agguggauguagaacagaa

SEQ ID NO: 2628760 - RNA, 19 nt, Homo sapiens
  misc_RNA (1)...(19): siRNA sense strand
ccuucuuuccagagggaga

SEQ ID NO: 2628761 - RNA, 19 nt, Homo sapiens
  misc_RNA (1)...(19): siRNA sense strand
ccuggacaaaggagagaau

SEQ ID NO: 2628762 - RNA, 19 nt, Homo sapiens
  misc_RNA (1)...(19): siRNA sense strand
agaagguggauguagaaca

SEQ ID NO: 2628763 - RNA, 19 nt, Homo sapiens
  misc_RNA (1)...(19): siRNA sense strand
caaaggagagaaugggacu

SEQ ID NO: 2628764 - RNA, 19 nt, Homo sapiens
  misc_RNA (1)...(19): siRNA sense strand
gcaaagaugugaauggacc

SEQ ID NO: 2628765 - RNA, 19 nt, Homo sapiens
  misc_RNA (1)...(19): siRNA sense strand
acgcaugauggucggagua

SEQ ID NO: 2628766 - RNA, 19 nt, Homo sapiens
  misc_RNA (1)...(19): siRNA sense strand
ccucaaagcccaugcggaa

SEQ ID NO: 2628767 - RNA, 19 nt, Homo sapiens
  misc_RNA (1)...(19): siRNA sense strand
gggaagaaguacaacacca

SEQ ID NO: 2628768 - RNA, 19 nt, Homo sapiens
  misc_RNA (1)...(19): siRNA sense strand
cggaaagaccaccugaaaa

SEQ ID NO: 2628769 - RNA, 19 nt, Homo sapiens
  misc_RNA (1)...(19): siRNA sense strand
guaaaguaaaccugcccaa

SEQ ID NO: 2628770 - RNA, 19 nt, Homo sapiens
  misc_RNA (1)...(19): siRNA sense strand
cccucaaagcagauacuaa

SEQ ID NO: 2628771 - RNA, 19 nt, Homo sapiens
  misc_RNA (1)...(19): siRNA sense strand
acucacaggagcugaugaa

SEQ ID NO: 2628772 - RNA, 19 nt, Homo sapiens
  misc_RNA (1)...(19): siRNA sense strand
uugaucuggcuaagggaaa

SEQ ID NO: 2628773 - RNA, 19 nt, Homo sapiens
  misc_RNA (1)...(19): siRNA sense strand
ccgaggugcuacuggacca

SEQ ID NO: 2628774 - RNA, 19 nt, Homo sapiens
  misc_RNA (1)...(19): siRNA sense strand
acacaggaugcaaggacuu

SEQ ID NO: 2628775 - RNA, 19 nt, Homo sapiens
  misc_RNA (1)...(19): siRNA sense strand
gagaagacguucaaccgga

SEQ ID NO: 2628776 - RNA, 19 nt, Homo sapiens
  misc_RNA (1)...(19): siRNA sense strand
acaacaccaugcugggcua

SEQ ID NO: 2628777 - RNA, 19 nt, Homo sapiens
  misc_RNA (1)...(19): siRNA sense strand
gaaccaaggaaaagaagca

SEQ ID NO: 2628778 - RNA, 19 nt, Homo sapiens
  misc_RNA (1)...(19): siRNA sense strand
gagugugggaagaaguaca

SEQ ID NO: 2628779 - RNA, 19 nt, Homo sapiens
  misc_RNA (1)...(19): siRNA sense strand
ccuagcggaaccaaggaaa

SEQ ID NO: 2628780 - RNA, 19 nt, Homo sapiens
  misc_RNA (1)...(19): siRNA sense strand
cugcagaugcugugaaccu

SEQ ID NO: 2628781 - RNA, 19 nt, Homo sapiens
  misc_RNA (1)...(19): siRNA sense strand
ccucaaagcccaugcggaa

SEQ ID NO: 2628782 - RNA, 19 nt, Homo sapiens
  misc_RNA (1)...(19): siRNA sense strand
gggaagaaguacaacacca

SEQ ID NO: 2628783 - RNA, 19 nt, Homo sapiens
  misc_RNA (1)...(19): siRNA sense strand
cggaaagaccaccugaaaa

SEQ ID NO: 2628784 - RNA, 19 nt, Homo sapiens
  misc_RNA (1)...(19): siRNA sense strand
guaaaguaaaccugcccaa

SEQ ID NO: 2628785 - RNA, 19 nt, Homo sapiens
  misc_RNA (1)...(19): siRNA sense strand
cccucaaagcagauacuaa

SEQ ID NO: 2628786 - RNA, 19 nt, Homo sapiens
  misc_RNA (1)...(19): siRNA sense strand
acucacaggagcugaugaa

SEQ ID NO: 2628787 - RNA, 19 nt, Homo sapiens
  misc_RNA (1)...(19): siRNA sense strand
uugaucuggcuaagggaaa

SEQ ID NO: 2628788 - RNA, 19 nt, Homo sapiens
  misc_RNA (1)...(19): siRNA sense strand
ccgaggugcuacuggacca

SEQ ID NO: 2628789 - RNA, 19 nt, Homo sapiens
  misc_RNA (1)...(19): siRNA sense strand
acacaggaugcaaggacuu

SEQ ID NO: 2628790 - RNA, 19 nt, Homo sapiens
  misc_RNA (1)...(19): siRNA sense strand
gagaagacguucaaccgga

SEQ ID NO: 2628791 - RNA, 19 nt, Homo sapiens
  misc_RNA (1)...(19): siRNA sense strand
acaacaccaugcugggcua

SEQ ID NO: 2628792 - RNA, 19 nt, Homo sapiens
  misc_RNA (1)...(19): siRNA sense strand
gaaccaaggaaaagaagca

SEQ ID NO: 2628793 - RNA, 19 nt, Homo sapiens
  misc_RNA (1)...(19): siRNA sense strand
gagugugggaagaaguaca

SEQ ID NO: 2628794 - RNA, 19 nt, Homo sapiens
  misc_RNA (1)...(19): siRNA sense strand
ccuagcggaaccaaggaaa

SEQ ID NO: 2628795 - RNA, 19 nt, Homo sapiens
  misc_RNA (1)...(19): siRNA sense strand
cugcagaugcugugaaccu

SEQ ID NO: 2628796 - RNA, 19 nt, Homo sapiens
  misc_RNA (1)...(19): siRNA sense strand
cggcagauaaagagaaaau

SEQ ID NO: 2628797 - RNA, 19 nt, Homo sapiens
  misc_RNA (1)...(19): siRNA sense strand
cguuggagcacguggacca

SEQ ID NO: 2628798 - RNA, 19 nt, Homo sapiens
  misc_RNA (1)...(19): siRNA sense strand
ccggaagagaccaggagca

SEQ ID NO: 2628799 - RNA, 19 nt, Homo sapiens
  misc_RNA (1)...(19): siRNA sense strand
accggcagauaaagagaaa

SEQ ID NO: 2628800 - RNA, 19 nt, Homo sapiens
  misc_RNA (1)...(19): siRNA sense strand
acgacuacgcgcuggguga

SEQ ID NO: 2628801 - RNA, 19 nt, Homo sapiens
  misc_RNA (1)...(19): siRNA sense strand
cggcagauaaagagaaaau

SEQ ID NO: 2628802 - RNA, 19 nt, Homo sapiens
  misc_RNA (1)...(19): siRNA sense strand
cguuggagcacguggacca

SEQ ID NO: 2628803 - RNA, 19 nt, Homo sapiens
  misc_RNA (1)...(19): siRNA sense strand
ccggaagagaccaggagca

SEQ ID NO: 2628804 - RNA, 19 nt, Homo sapiens
  misc_RNA (1)...(19): siRNA sense strand
accggcagauaaagagaaa

SEQ ID NO: 2628805 - RNA, 19 nt, Homo sapiens
  misc_RNA (1)...(19): siRNA sense strand
acgacuacgcgcuggguga

SEQ ID NO: 2628806 - RNA, 19 nt, Homo sapiens
  misc_RNA (1)...(19): siRNA sense strand
aggaagaagaggaggagaa

SEQ ID NO: 2628807 - RNA, 19 nt, Homo sapiens
  misc_RNA (1)...(19): siRNA sense strand
acaugaaagaccaggaaga

SEQ ID NO: 2628808 - RNA, 19 nt, Homo sapiens
  misc_RNA (1)...(19): siRNA sense strand
augaagaggaaauggaaga

SEQ ID NO: 2628809 - RNA, 19 nt, Homo sapiens
  misc_RNA (1)...(19): siRNA sense strand
gcucuauguaugagauuau

SEQ ID NO: 2628810 - RNA, 19 nt, Homo sapiens
  misc_RNA (1)...(19): siRNA sense strand
cuuaaaaugccuagaaaga

SEQ ID NO: 2628811 - RNA, 19 nt, Homo sapiens
  misc_RNA (1)...(19): siRNA sense strand
accaaaagguucagggaga

SEQ ID NO: 2628812 - RNA, 19 nt, Homo sapiens
  misc_RNA (1)...(19): siRNA sense strand
ucguagaugcauugagaca

SEQ ID NO: 2628813 - RNA, 19 nt, Homo sapiens
  misc_RNA (1)...(19): siRNA sense strand
cuuaaaggacagacugaau

SEQ ID NO: 2628814 - RNA, 19 nt, Homo sapiens
  misc_RNA (1)...(19): siRNA sense strand
aggacagacugaaugguau

SEQ ID NO: 2628815 - RNA, 19 nt, Homo sapiens
  misc_RNA (1)...(19): siRNA sense strand
cagaagaacugaaggaacg

SEQ ID NO: 2628816 - RNA, 19 nt, Homo sapiens
  misc_RNA (1)...(19): siRNA sense strand
uugaauacauugaagacca

SEQ ID NO: 2628817 - RNA, 19 nt, Homo sapiens
  misc_RNA (1)...(19): siRNA sense strand
agaaauagcauguaagcuc

SEQ ID NO: 2628818 - RNA, 19 nt, Homo sapiens
  misc_RNA (1)...(19): siRNA sense strand
uaauaauggaggagcucau

SEQ ID NO: 2628819 - RNA, 19 nt, Homo sapiens
  misc_RNA (1)...(19): siRNA sense strand
ucugauggacccagcuaaa

SEQ ID NO: 2628820 - RNA, 19 nt, Homo sapiens
  misc_RNA (1)...(19): siRNA sense strand
ccagaagaacugaaggaac

SEQ ID NO: 2628821 - RNA, 19 nt, Homo sapiens
  misc_RNA (1)...(19): siRNA sense strand
aagaggaaauggaagaacu

SEQ ID NO: 2628822 - RNA, 19 nt, Homo sapiens
  misc_RNA (1)...(19): siRNA sense strand
gagacaggcacgagacagu

SEQ ID NO: 2628823 - RNA, 19 nt, Homo sapiens
  misc_RNA (1)...(19): siRNA sense strand
ccaggaaaagaaaaggaaa

SEQ ID NO: 2628824 - RNA, 19 nt, Homo sapiens
  misc_RNA (1)...(19): siRNA sense strand
gagauuauucuaugagcca

SEQ ID NO: 2628825 - RNA, 19 nt, Homo sapiens
  misc_RNA (1)...(19): siRNA sense strand
gccuagaucacaacgcaaa

SEQ ID NO: 2628826 - RNA, 19 nt, Homo sapiens
  misc_RNA (1)...(19): siRNA sense strand
aguacaacgaggcaguuaa

SEQ ID NO: 2628827 - RNA, 19 nt, Homo sapiens
  misc_RNA (1)...(19): siRNA sense strand
caucaagaaaauacagcaa

SEQ ID NO: 2628828 - RNA, 19 nt, Homo sapiens
  misc_RNA (1)...(19): siRNA sense strand
agcuuuaugaagaggaaau

SEQ ID NO: 2628829 - RNA, 19 nt, Homo sapiens
  misc_RNA (1)...(19): siRNA sense strand
gucccaugccggagaaaga

SEQ ID NO: 2628830 - RNA, 19 nt, Homo sapiens
  misc_RNA (1)...(19): siRNA sense strand
agaggaaauggaagaacuu

SEQ ID NO: 2628831 - RNA, 19 nt, Homo sapiens
  misc_RNA (1)...(19): siRNA sense strand
gcacgagacaguuuggcau

SEQ ID NO: 2628832 - RNA, 19 nt, Homo sapiens
  misc_RNA (1)...(19): siRNA sense strand
agaaagacgccgauccuca

SEQ ID NO: 2628833 - RNA, 19 nt, Homo sapiens
  misc_RNA (1)...(19): siRNA sense strand
auguaauaauggaggagcu

SEQ ID NO: 2628834 - RNA, 19 nt, Homo sapiens
  misc_RNA (1)...(19): siRNA sense strand
gaggaggagaagugggaug

SEQ ID NO: 2628835 - RNA, 19 nt, Homo sapiens
  misc_RNA (1)...(19): siRNA sense strand
acccaaagguggcugcaga

SEQ ID NO: 2628836 - RNA, 19 nt, Homo sapiens
  misc_RNA (1)...(19): siRNA sense strand
ggaaaaugccaggaaaaga

SEQ ID NO: 2628837 - RNA, 19 nt, Homo sapiens
  misc_RNA (1)...(19): siRNA sense strand
agaaagaugccuagaucac

SEQ ID NO: 2628838 - RNA, 19 nt, Homo sapiens
  misc_RNA (1)...(19): siRNA sense strand
cccucgagguguauagaca

SEQ ID NO: 2628839 - RNA, 19 nt, Homo sapiens
  misc_RNA (1)...(19): siRNA sense strand
gggucaagcucuccgccuu

SEQ ID NO: 2628840 - RNA, 19 nt, Homo sapiens
  misc_RNA (1)...(19): siRNA sense strand
cgauggguuuuaaggacaa

SEQ ID NO: 2628841 - RNA, 19 nt, Homo sapiens
  misc_RNA (1)...(19): siRNA sense strand
gcauccuagagaucagaaa

SEQ ID NO: 2628842 - RNA, 19 nt, Homo sapiens
  misc_RNA (1)...(19): siRNA sense strand
gggaaguagaagugggaaa

SEQ ID NO: 2628843 - RNA, 19 nt, Homo sapiens
  misc_RNA (1)...(19): siRNA sense strand
ugagggagguagagggcaa

SEQ ID NO: 2628844 - RNA, 19 nt, Homo sapiens
  misc_RNA (1)...(19): siRNA sense strand
aggaggagcaagagaaaga

SEQ ID NO: 2628845 - RNA, 19 nt, Homo sapiens
  misc_RNA (1)...(19): siRNA sense strand
ggacagaauuaucaagcca

SEQ ID NO: 2628846 - RNA, 19 nt, Homo sapiens
  misc_RNA (1)...(19): siRNA sense strand
auagaaaagcugugcgaua

SEQ ID NO: 2628847 - RNA, 19 nt, Homo sapiens
  misc_RNA (1)...(19): siRNA sense strand
aguagaagugggaaacaaa

SEQ ID NO: 2628848 - RNA, 19 nt, Homo sapiens
  misc_RNA (1)...(19): siRNA sense strand
cuaaauggauauugggugu

SEQ ID NO: 2628849 - RNA, 19 nt, Homo sapiens
  misc_RNA (1)...(19): siRNA sense strand
ggauauuggguguguguca

SEQ ID NO: 2628850 - RNA, 19 nt, Homo sapiens
  misc_RNA (1)...(19): siRNA sense strand
ggaauaauauagaacgagu

SEQ ID NO: 2628851 - RNA, 19 nt, Homo sapiens
  misc_RNA (1)...(19): siRNA sense strand
agaaugaacaagagaugau

SEQ ID NO: 2628852 - RNA, 19 nt, Homo sapiens
  misc_RNA (1)...(19): siRNA sense strand
agguagaauauaagaggga

SEQ ID NO: 2628853 - RNA, 19 nt, Homo sapiens
  misc_RNA (1)...(19): siRNA sense strand
aaguagaagugggaaacaa

SEQ ID NO: 2628854 - RNA, 19 nt, Homo sapiens
  misc_RNA (1)...(19): siRNA sense strand
cuggaaggaucuagaugau

SEQ ID NO: 2628855 - RNA, 19 nt, Homo sapiens
  misc_RNA (1)...(19): siRNA sense strand
agcaagagaaagaggcaga

SEQ ID NO: 2628856 - RNA, 19 nt, Homo sapiens
  misc_RNA (1)...(19): siRNA sense strand
gagaugauucuuaggcaga

SEQ ID NO: 2628857 - RNA, 19 nt, Homo sapiens
  misc_RNA (1)...(19): siRNA sense strand
gcgucagguccuaagacaa

SEQ ID NO: 2628858 - RNA, 19 nt, Homo sapiens
  misc_RNA (1)...(19): siRNA sense strand
guagaauauaagagggaag

SEQ ID NO: 2628859 - RNA, 19 nt, Homo sapiens
  misc_RNA (1)...(19): siRNA sense strand
ccuuauuucuauacuggaa

SEQ ID NO: 2628860 - RNA, 19 nt, Homo sapiens
  misc_RNA (1)...(19): siRNA sense strand
uguuaugacccaaggagau

SEQ ID NO: 2628861 - RNA, 19 nt, Homo sapiens
  misc_RNA (1)...(19): siRNA sense strand
cuucuguguuaaagaucua

SEQ ID NO: 2628862 - RNA, 19 nt, Homo sapiens
  misc_RNA (1)...(19): siRNA sense strand
uacaagagcuucaggagga

SEQ ID NO: 2628863 - RNA, 19 nt, Homo sapiens
  misc_RNA (1)...(19): siRNA sense strand
agauacaagaugaagagau

SEQ ID NO: 2628864 - RNA, 19 nt, Homo sapiens
  misc_RNA (1)...(19): siRNA sense strand
uuaggaggagcaagagaaa

SEQ ID NO: 2628865 - RNA, 19 nt, Homo sapiens
  misc_RNA (1)...(19): siRNA sense strand
aagaugaagagaugaacau

SEQ ID NO: 2628866 - RNA, 19 nt, Homo sapiens
  misc_RNA (1)...(19): siRNA sense strand
cgauacaugaagagugguu

SEQ ID NO: 2628867 - RNA, 19 nt, Homo sapiens
  misc_RNA (1)...(19): siRNA sense strand
auacaugaagagugguuau

SEQ ID NO: 2628868 - RNA, 19 nt, Homo sapiens
  misc_RNA (1)...(19): siRNA sense strand
ggagcaagagaaagaggca

SEQ ID NO: 2628869 - RNA, 19 nt, Homo sapiens
  misc_RNA (1)...(19): siRNA sense strand
uacaagaugaagagaugaa

SEQ ID NO: 2628870 - RNA, 19 nt, Homo sapiens
  misc_RNA (1)...(19): siRNA sense strand
gagauuuaguucuggccga

SEQ ID NO: 2628871 - RNA, 19 nt, Homo sapiens
  misc_RNA (1)...(19): siRNA sense strand
uggacuaugaauuggguga

SEQ ID NO: 2628872 - RNA, 19 nt, Homo sapiens
  misc_RNA (1)...(19): siRNA sense strand
gguagaauauaagagggaa

SEQ ID NO: 2628873 - RNA, 19 nt, Homo sapiens
  misc_RNA (1)...(19): siRNA sense strand
caagaugaagagaugaaca

SEQ ID NO: 2628874 - RNA, 19 nt, Homo sapiens
  misc_RNA (1)...(19): siRNA sense strand
gagaugaacauuuuagcaa

SEQ ID NO: 2628875 - RNA, 19 nt, Homo sapiens
  misc_RNA (1)...(19): siRNA sense strand
gauuaggaggagcaagaga

SEQ ID NO: 2628876 - RNA, 19 nt, Homo sapiens
  misc_RNA (1)...(19): siRNA sense strand
ggcagauacaagaugaaga

SEQ ID NO: 2628877 - RNA, 19 nt, Homo sapiens
  misc_RNA (1)...(19): siRNA sense strand
aaagaggcagaaagagaau

SEQ ID NO: 2628878 - RNA, 19 nt, Homo sapiens
  misc_RNA (1)...(19): siRNA sense strand
gcuaagaguaugcaccaca

SEQ ID NO: 2628879 - RNA, 19 nt, Homo sapiens
  misc_RNA (1)...(19): siRNA sense strand
auuaggaggagcaagagaa

SEQ ID NO: 2628880 - RNA, 19 nt, Homo sapiens
  misc_RNA (1)...(19): siRNA sense strand
ccaaggaaccugcggccua

SEQ ID NO: 2628881 - RNA, 19 nt, Homo sapiens
  misc_RNA (1)...(19): siRNA sense strand
uggccaauguuguagaaaa

SEQ ID NO: 2628882 - RNA, 19 nt, Homo sapiens
  misc_RNA (1)...(19): siRNA sense strand
ggaugauugcagaguugaa

SEQ ID NO: 2628883 - RNA, 19 nt, Homo sapiens
  misc_RNA (1)...(19): siRNA sense strand
gggugauaaggcugaggaa

SEQ ID NO: 2628884 - RNA, 19 nt, Homo sapiens
  misc_RNA (1)...(19): siRNA sense strand
ggaaaugaguaccgagcag

SEQ ID NO: 2628885 - RNA, 19 nt, Homo sapiens
  misc_RNA (1)...(19): siRNA sense strand
acagaaaacgugugcacua

SEQ ID NO: 2628886 - RNA, 19 nt, Homo sapiens
  misc_RNA (1)...(19): siRNA sense strand
cacuauggauucuggguga

SEQ ID NO: 2628887 - RNA, 19 nt, Homo sapiens
  misc_RNA (1)...(19): siRNA sense strand
gaguauuguaugggaguuu

SEQ ID NO: 2628888 - RNA, 19 nt, Homo sapiens
  misc_RNA (1)...(19): siRNA sense strand
gaauggggcugaaggguga

SEQ ID NO: 2628889 - RNA, 19 nt, Homo sapiens
  misc_RNA (1)...(19): siRNA sense strand
ggggaaaagcugaagaugu

SEQ ID NO: 2628890 - RNA, 19 nt, Homo sapiens
  misc_RNA (1)...(19): siRNA sense strand
ccugggaguauguaagcaa

SEQ ID NO: 2628891 - RNA, 19 nt, Homo sapiens
  misc_RNA (1)...(19): siRNA sense strand
uggaagauacagguggaaa

SEQ ID NO: 2628892 - RNA, 19 nt, Homo sapiens
  misc_RNA (1)...(19): siRNA sense strand
gugauaaggcugaggaagg

SEQ ID NO: 2628893 - RNA, 19 nt, Homo sapiens
  misc_RNA (1)...(19): siRNA sense strand
acaucugaagaaagagcaa

SEQ ID NO: 2628894 - RNA, 19 nt, Homo sapiens
  misc_RNA (1)...(19): siRNA sense strand
cccuggaguugaagacaga

SEQ ID NO: 2628895 - RNA, 19 nt, Homo sapiens
  misc_RNA (1)...(19): siRNA sense strand
ggccacagcuucugccaca

SEQ ID NO: 2628896 - RNA, 19 nt, Homo sapiens
  misc_RNA (1)...(19): siRNA sense strand
auugcagaguugaaagaga

SEQ ID NO: 2628897 - RNA, 19 nt, Homo sapiens
  misc_RNA (1)...(19): siRNA sense strand
gggcuaagagagauccuga

SEQ ID NO: 2628898 - RNA, 19 nt, Homo sapiens
  misc_RNA (1)...(19): siRNA sense strand
ccauagacaacaagaucga

SEQ ID NO: 2628899 - RNA, 19 nt, Homo sapiens
  misc_RNA (1)...(19): siRNA sense strand
agaagaacucccagcuaga

SEQ ID NO: 2628900 - RNA, 19 nt, Homo sapiens
  misc_RNA (1)...(19): siRNA sense strand
acucccagcuagagcguga

SEQ ID NO: 2628901 - RNA, 19 nt, Homo sapiens
  misc_RNA (1)...(19): siRNA sense strand
gcgugguggccauagacaa

SEQ ID NO: 2628902 - RNA, 19 nt, Homo sapiens
  misc_RNA (1)...(19): siRNA sense strand
ccauagacaacaagaucga

SEQ ID NO: 2628903 - RNA, 19 nt, Homo sapiens
  misc_RNA (1)...(19): siRNA sense strand
agaagaacucccagcuaga

SEQ ID NO: 2628904 - RNA, 19 nt, Homo sapiens
  misc_RNA (1)...(19): siRNA sense strand
acucccagcuagagcguga

SEQ ID NO: 2628905 - RNA, 19 nt, Homo sapiens
  misc_RNA (1)...(19): siRNA sense strand
gcgugguggccauagacaa

SEQ ID NO: 2628906 - RNA, 19 nt, Homo sapiens
  misc_RNA (1)...(19): siRNA sense strand
ccgaguacugggacaacaa

SEQ ID NO: 2628907 - RNA, 19 nt, Homo sapiens
  misc_RNA (1)...(19): siRNA sense strand
gaagagagcuggauccacu

SEQ ID NO: 2628908 - RNA, 19 nt, Homo sapiens
  misc_RNA (1)...(19): siRNA sense strand
aagcaaucccagugagcau

SEQ ID NO: 2628909 - RNA, 19 nt, Homo sapiens
  misc_RNA (1)...(19): siRNA sense strand
cagccuucuucauguacaa

SEQ ID NO: 2628910 - RNA, 19 nt, Homo sapiens
  misc_RNA (1)...(19): siRNA sense strand
aagcaaucccagugagcau

SEQ ID NO: 2628911 - RNA, 19 nt, Homo sapiens
  misc_RNA (1)...(19): siRNA sense strand
cagccuucuucauguacaa

SEQ ID NO: 2628912 - RNA, 19 nt, Homo sapiens
  misc_RNA (1)...(19): siRNA sense strand
aagaagaggaagaggacga

SEQ ID NO: 2628913 - RNA, 19 nt, Homo sapiens
  misc_RNA (1)...(19): siRNA sense strand
cuggaaggaagaagaggaa

SEQ ID NO: 2628914 - RNA, 19 nt, Homo sapiens
  misc_RNA (1)...(19): siRNA sense strand
aggaagaagaggaagagga

SEQ ID NO: 2628915 - RNA, 19 nt, Homo sapiens
  misc_RNA (1)...(19): siRNA sense strand
ggacagugcuagcugggca

SEQ ID NO: 2628916 - RNA, 19 nt, Homo sapiens
  misc_RNA (1)...(19): siRNA sense strand
aggucaacacggagcucaa

SEQ ID NO: 2628917 - RNA, 19 nt, Homo sapiens
  misc_RNA (1)...(19): siRNA sense strand
ggaagaagaggaagaggac

SEQ ID NO: 2628918 - RNA, 19 nt, Homo sapiens
  misc_RNA (1)...(19): siRNA sense strand
cgacuaagaaagggcguga

SEQ ID NO: 2628919 - RNA, 19 nt, Homo sapiens
  misc_RNA (1)...(19): siRNA sense strand
agcucaagacagucaauaa

SEQ ID NO: 2628920 - RNA, 19 nt, Homo sapiens
  misc_RNA (1)...(19): siRNA sense strand
gcuggaaggaagaagagga

SEQ ID NO: 2628921 - RNA, 19 nt, Homo sapiens
  misc_RNA (1)...(19): siRNA sense strand
caucaucaccuuuggcaca

SEQ ID NO: 2628922 - RNA, 19 nt, Homo sapiens
  misc_RNA (1)...(19): siRNA sense strand
gcaacaaagccuuccggga

SEQ ID NO: 2628923 - RNA, 19 nt, Homo sapiens
  misc_RNA (1)...(19): siRNA sense strand
aggaagaggacgaaggcuc

SEQ ID NO: 2628924 - RNA, 19 nt, Homo sapiens
  misc_RNA (1)...(19): siRNA sense strand
cugcuuugccgcugggaca

SEQ ID NO: 2628925 - RNA, 19 nt, Homo sapiens
  misc_RNA (1)...(19): siRNA sense strand
cuuuaacggcugcaggaaa

SEQ ID NO: 2628926 - RNA, 19 nt, Homo sapiens
  misc_RNA (1)...(19): siRNA sense strand
agccaggugacaagggaaa

SEQ ID NO: 2628927 - RNA, 19 nt, Homo sapiens
  misc_RNA (1)...(19): siRNA sense strand
caggaagaucuguggacca

SEQ ID NO: 2628928 - RNA, 19 nt, Homo sapiens
  misc_RNA (1)...(19): siRNA sense strand
ugacaagggaaauggcgau

SEQ ID NO: 2628929 - RNA, 19 nt, Homo sapiens
  misc_RNA (1)...(19): siRNA sense strand
uuacagaugcucaugggaa

SEQ ID NO: 2628930 - RNA, 19 nt, Homo sapiens
  misc_RNA (1)...(19): siRNA sense strand
aggaaaguuuacaccaaaa

SEQ ID NO: 2628931 - RNA, 19 nt, Homo sapiens
  misc_RNA (1)...(19): siRNA sense strand
aggaggaauccgaacugaa

SEQ ID NO: 2628932 - RNA, 19 nt, Homo sapiens
  misc_RNA (1)...(19): siRNA sense strand
aguuauucuugguggagua

SEQ ID NO: 2628933 - RNA, 19 nt, Homo sapiens
  misc_RNA (1)...(19): siRNA sense strand
aggaaugggaagcagaauu

SEQ ID NO: 2628934 - RNA, 19 nt, Homo sapiens
  misc_RNA (1)...(19): siRNA sense strand
ggaccaagauggcagcagu

SEQ ID NO: 2628935 - RNA, 19 nt, Homo sapiens
  misc_RNA (1)...(19): siRNA sense strand
gugauuuggaugaaggcau

SEQ ID NO: 2628936 - RNA, 19 nt, Homo sapiens
  misc_RNA (1)...(19): siRNA sense strand
accuacaagccaagaggaa

SEQ ID NO: 2628937 - RNA, 19 nt, Homo sapiens
  misc_RNA (1)...(19): siRNA sense strand
agggcuagaugcugggcuu

SEQ ID NO: 2628938 - RNA, 19 nt, Homo sapiens
  misc_RNA (1)...(19): siRNA sense strand
agaggaaugggaagcagaa

SEQ ID NO: 2628939 - RNA, 19 nt, Homo sapiens
  misc_RNA (1)...(19): siRNA sense strand
aguuauucuugguggagua

SEQ ID NO: 2628940 - RNA, 19 nt, Homo sapiens
  misc_RNA (1)...(19): siRNA sense strand
aggaaugggaagcagaauu

SEQ ID NO: 2628941 - RNA, 19 nt, Homo sapiens
  misc_RNA (1)...(19): siRNA sense strand
ggaccaagauggcagcagu

SEQ ID NO: 2628942 - RNA, 19 nt, Homo sapiens
  misc_RNA (1)...(19): siRNA sense strand
accuacaagccaagaggaa

SEQ ID NO: 2628943 - RNA, 19 nt, Homo sapiens
  misc_RNA (1)...(19): siRNA sense strand
agggcuagaugcugggcuu

SEQ ID NO: 2628944 - RNA, 19 nt, Homo sapiens
  misc_RNA (1)...(19): siRNA sense strand
agaggaaugggaagcagaa

SEQ ID NO: 2628945 - RNA, 19 nt, Homo sapiens
  misc_RNA (1)...(19): siRNA sense strand
cggagauggcagcgauuaa

SEQ ID NO: 2628946 - RNA, 19 nt, Homo sapiens
  misc_RNA (1)...(19): siRNA sense strand
agugaagaggagacaaaua

SEQ ID NO: 2628947 - RNA, 19 nt, Homo sapiens
  misc_RNA (1)...(19): siRNA sense strand
cgcuauaagccuaaugaca

SEQ ID NO: 2628948 - RNA, 19 nt, Homo sapiens
  misc_RNA (1)...(19): siRNA sense strand
ugguugagguggggagaaa

SEQ ID NO: 2628949 - RNA, 19 nt, Homo sapiens
  misc_RNA (1)...(19): siRNA sense strand
guucaguguucuuuggcuu

SEQ ID NO: 2628950 - RNA, 19 nt, Homo sapiens
  misc_RNA (1)...(19): siRNA sense strand
aagaugucguugugguuau

SEQ ID NO: 2628951 - RNA, 19 nt, Homo sapiens
  misc_RNA (1)...(19): siRNA sense strand
ccaacuucgaguaguaaaa

SEQ ID NO: 2628952 - RNA, 19 nt, Homo sapiens
  misc_RNA (1)...(19): siRNA sense strand
ucuuaaaguuuuggggauu

SEQ ID NO: 2628953 - RNA, 19 nt, Homo sapiens
  misc_RNA (1)...(19): siRNA sense strand
cuauaacguuccagguacu

SEQ ID NO: 2628954 - RNA, 19 nt, Homo sapiens
  misc_RNA (1)...(19): siRNA sense strand
acuuaaaaggcacggaaau

SEQ ID NO: 2628955 - RNA, 19 nt, Homo sapiens
  misc_RNA (1)...(19): siRNA sense strand
guuggcacuuggagaaaca

SEQ ID NO: 2628956 - RNA, 19 nt, Homo sapiens
  misc_RNA (1)...(19): siRNA sense strand
auucaguaguggaagaugu

SEQ ID NO: 2628957 - RNA, 19 nt, Homo sapiens
  misc_RNA (1)...(19): siRNA sense strand
caguaguggaagauguuca

SEQ ID NO: 2628958 - RNA, 19 nt, Homo sapiens
  misc_RNA (1)...(19): siRNA sense strand
agucagaacuguugcagag

SEQ ID NO: 2628959 - RNA, 19 nt, Homo sapiens
  misc_RNA (1)...(19): siRNA sense strand
cuuaaaaggcacggaaauu

SEQ ID NO: 2628960 - RNA, 19 nt, Homo sapiens
  misc_RNA (1)...(19): siRNA sense strand
guaucaaacucuaagggaa

SEQ ID NO: 2628961 - RNA, 19 nt, Homo sapiens
  misc_RNA (1)...(19): siRNA sense strand
aggaagaagaggaggagga

SEQ ID NO: 2628962 - RNA, 19 nt, Homo sapiens
  misc_RNA (1)...(19): siRNA sense strand
aagaagaggaggaggagga

SEQ ID NO: 2628963 - RNA, 19 nt, Homo sapiens
  misc_RNA (1)...(19): siRNA sense strand
aagaggagcuggaggagga

SEQ ID NO: 2628964 - RNA, 19 nt, Homo sapiens
  misc_RNA (1)...(19): siRNA sense strand
aggaggaggaggaggacau

SEQ ID NO: 2628965 - RNA, 19 nt, Homo sapiens
  misc_RNA (1)...(19): siRNA sense strand
uguucgaguuucaggagaa

SEQ ID NO: 2628966 - RNA, 19 nt, Homo sapiens
  misc_RNA (1)...(19): siRNA sense strand
aggacgaggaguuggaaga

SEQ ID NO: 2628967 - RNA, 19 nt, Homo sapiens
  misc_RNA (1)...(19): siRNA sense strand
gcuucgaggacgaggacga

SEQ ID NO: 2628968 - RNA, 19 nt, Homo sapiens
  misc_RNA (1)...(19): siRNA sense strand
aggaggaggacaugaguca

SEQ ID NO: 2628969 - RNA, 19 nt, Homo sapiens
  misc_RNA (1)...(19): siRNA sense strand
aggacgaggacgaggaguu

SEQ ID NO: 2628970 - RNA, 19 nt, Homo sapiens
  misc_RNA (1)...(19): siRNA sense strand
aggaggaagaagaggagga

SEQ ID NO: 2628971 - RNA, 19 nt, Homo sapiens
  misc_RNA (1)...(19): siRNA sense strand
aagaagaggagcuggagga

SEQ ID NO: 2628972 - RNA, 19 nt, Homo sapiens
  misc_RNA (1)...(19): siRNA sense strand
uggaagaagaagaggagcu

SEQ ID NO: 2628973 - RNA, 19 nt, Homo sapiens
  misc_RNA (1)...(19): siRNA sense strand
aagaagaagaggagcugga

SEQ ID NO: 2628974 - RNA, 19 nt, Homo sapiens
  misc_RNA (1)...(19): siRNA sense strand
aagaggaggaggaggagga

SEQ ID NO: 2628975 - RNA, 19 nt, Homo sapiens
  misc_RNA (1)...(19): siRNA sense strand
aggaguuggaagaagaaga

SEQ ID NO: 2628976 - RNA, 19 nt, Homo sapiens
  misc_RNA (1)...(19): siRNA sense strand
agggaaauccgacgugcaa

SEQ ID NO: 2628977 - RNA, 19 nt, Homo sapiens
  misc_RNA (1)...(19): siRNA sense strand
cagcaaugcaggauggucu

SEQ ID NO: 2628978 - RNA, 19 nt, Homo sapiens
  misc_RNA (1)...(19): siRNA sense strand
cauuuuaagccauuggaaa

SEQ ID NO: 2628979 - RNA, 19 nt, Homo sapiens
  misc_RNA (1)...(19): siRNA sense strand
cuaaugaaggcacgggaca

SEQ ID NO: 2628980 - RNA, 19 nt, Homo sapiens
  misc_RNA (1)...(19): siRNA sense strand
aggagcuggaggaggaaga

SEQ ID NO: 2628981 - RNA, 19 nt, Homo sapiens
  misc_RNA (1)...(19): siRNA sense strand
cgaggaguuggaagaagaa

SEQ ID NO: 2628982 - RNA, 19 nt, Homo sapiens
  misc_RNA (1)...(19): siRNA sense strand
ccuucuauucaguggacaa

SEQ ID NO: 2628983 - RNA, 19 nt, Homo sapiens
  misc_RNA (1)...(19): siRNA sense strand
uggcaguagagaagagcau

SEQ ID NO: 2628984 - RNA, 19 nt, Homo sapiens
  misc_RNA (1)...(19): siRNA sense strand
ggaaagcauuacugggaag

SEQ ID NO: 2628985 - RNA, 19 nt, Homo sapiens
  misc_RNA (1)...(19): siRNA sense strand
cagacaacgaacugagcau

SEQ ID NO: 2628986 - RNA, 19 nt, Homo sapiens
  misc_RNA (1)...(19): siRNA sense strand
ugaaccuugaggagggaaa

SEQ ID NO: 2628987 - RNA, 19 nt, Homo sapiens
  misc_RNA (1)...(19): siRNA sense strand
ggaaacuguccuuggcuca

SEQ ID NO: 2628988 - RNA, 19 nt, Homo sapiens
  misc_RNA (1)...(19): siRNA sense strand
caguggacaaucaggagaa

SEQ ID NO: 2628989 - RNA, 19 nt, Homo sapiens
  misc_RNA (1)...(19): siRNA sense strand
uggcacauggucaaggaaa

SEQ ID NO: 2628990 - RNA, 19 nt, Homo sapiens
  misc_RNA (1)...(19): siRNA sense strand
uggaaagcauuacugggaa

SEQ ID NO: 2628991 - RNA, 19 nt, Homo sapiens
  misc_RNA (1)...(19): siRNA sense strand
ggcacauggucaaggaaac

SEQ ID NO: 2628992 - RNA, 19 nt, Homo sapiens
  misc_RNA (1)...(19): siRNA sense strand
ccuuuaacuugaagagccu

SEQ ID NO: 2628993 - RNA, 19 nt, Homo sapiens
  misc_RNA (1)...(19): siRNA sense strand
uggcaguagagaagagcau

SEQ ID NO: 2628994 - RNA, 19 nt, Homo sapiens
  misc_RNA (1)...(19): siRNA sense strand
cagacaacgaacugagcau

SEQ ID NO: 2628995 - RNA, 19 nt, Homo sapiens
  misc_RNA (1)...(19): siRNA sense strand
ggucaagacuuaagagcca

SEQ ID NO: 2628996 - RNA, 19 nt, Homo sapiens
  misc_RNA (1)...(19): siRNA sense strand
gguccacacaggagagaaa

SEQ ID NO: 2628997 - RNA, 19 nt, Homo sapiens
  misc_RNA (1)...(19): siRNA sense strand
aguuauacucagaagagaa

SEQ ID NO: 2628998 - RNA, 19 nt, Homo sapiens
  misc_RNA (1)...(19): siRNA sense strand
auuacacacaggagagaaa

SEQ ID NO: 2628999 - RNA, 19 nt, Homo sapiens
  misc_RNA (1)...(19): siRNA sense strand
ggaauuuagucaaagcuca

SEQ ID NO: 2629000 - RNA, 19 nt, Homo sapiens
  misc_RNA (1)...(19): siRNA sense strand
ugaagaauguggaaaggga

SEQ ID NO: 2629001 - RNA, 19 nt, Homo sapiens
  misc_RNA (1)...(19): siRNA sense strand
agaggaagcuguaccgaga

SEQ ID NO: 2629002 - RNA, 19 nt, Homo sapiens
  misc_RNA (1)...(19): siRNA sense strand
aauucauacaggacagaaa

SEQ ID NO: 2629003 - RNA, 19 nt, Homo sapiens
  misc_RNA (1)...(19): siRNA sense strand
aggcuuuauugguaggcua

SEQ ID NO: 2629004 - RNA, 19 nt, Homo sapiens
  misc_RNA (1)...(19): siRNA sense strand
ggacauaccguaaagacca

SEQ ID NO: 2629005 - RNA, 19 nt, Homo sapiens
  misc_RNA (1)...(19): siRNA sense strand
aguccacgugggagagaaa

SEQ ID NO: 2629006 - RNA, 19 nt, Homo sapiens
  misc_RNA (1)...(19): siRNA sense strand
augugaggauugugggaga

SEQ ID NO: 2629007 - RNA, 19 nt, Homo sapiens
  misc_RNA (1)...(19): siRNA sense strand
gagcaaugugggaaagguu

SEQ ID NO: 2629008 - RNA, 19 nt, Homo sapiens
  misc_RNA (1)...(19): siRNA sense strand
aagaauguggaaagggauu

SEQ ID NO: 2629009 - RNA, 19 nt, Homo sapiens
  misc_RNA (1)...(19): siRNA sense strand
gguccacacgggagagaga

SEQ ID NO: 2629010 - RNA, 19 nt, Homo sapiens
  misc_RNA (1)...(19): siRNA sense strand
agagaguccacgugggaga

SEQ ID NO: 2629011 - RNA, 19 nt, Homo sapiens
  misc_RNA (1)...(19): siRNA sense strand
augugagcaaugugggaaa

SEQ ID NO: 2629012 - RNA, 19 nt, Homo sapiens
  misc_RNA (1)...(19): siRNA sense strand
agaugugagcaguguggaa

SEQ ID NO: 2629013 - RNA, 19 nt, Homo sapiens
  misc_RNA (1)...(19): siRNA sense strand
aacccaaagagaagggaau

SEQ ID NO: 2629014 - RNA, 19 nt, Homo sapiens
  misc_RNA (1)...(19): siRNA sense strand
uggcaaggaauuuagucaa

SEQ ID NO: 2629015 - RNA, 19 nt, Homo sapiens
  misc_RNA (1)...(19): siRNA sense strand
aaaccauuuaggugugaua

SEQ ID NO: 2629016 - RNA, 19 nt, Homo sapiens
  misc_RNA (1)...(19): siRNA sense strand
ccagguugaagcaggacua

SEQ ID NO: 2629017 - RNA, 19 nt, Homo sapiens
  misc_RNA (1)...(19): siRNA sense strand
uuguaaagaaugugggaag

SEQ ID NO: 2629018 - RNA, 19 nt, Homo sapiens
  misc_RNA (1)...(19): siRNA sense strand
aggugugauacaugugaua

SEQ ID NO: 2629019 - RNA, 19 nt, Homo sapiens
  misc_RNA (1)...(19): siRNA sense strand
ggugaaaagccauauaaau

SEQ ID NO: 2629020 - RNA, 19 nt, Homo sapiens
  misc_RNA (1)...(19): siRNA sense strand
gggagagagaccuuauaau

SEQ ID NO: 2629021 - RNA, 19 nt, Homo sapiens
  misc_RNA (1)...(19): siRNA sense strand
ccauauaaaugugaggagu

SEQ ID NO: 2629022 - RNA, 19 nt, Homo sapiens
  misc_RNA (1)...(19): siRNA sense strand
ggggaaaacccauccaaau

SEQ ID NO: 2629023 - RNA, 19 nt, Homo sapiens
  misc_RNA (1)...(19): siRNA sense strand
ccacauucaaggaggcagu

SEQ ID NO: 2629024 - RNA, 19 nt, Homo sapiens
  misc_RNA (1)...(19): siRNA sense strand
auacaugugauaagagcuu

SEQ ID NO: 2629025 - RNA, 19 nt, Homo sapiens
  misc_RNA (1)...(19): siRNA sense strand
aggaaugugggaagaacuu

SEQ ID NO: 2629026 - RNA, 19 nt, Homo sapiens
  misc_RNA (1)...(19): siRNA sense strand
uguaaggaaugugggaaga

SEQ ID NO: 2629027 - RNA, 19 nt, Homo sapiens
  misc_RNA (1)...(19): siRNA sense strand
guaaggaaugugggaagaa

SEQ ID NO: 2629028 - RNA, 19 nt, Homo sapiens
  misc_RNA (1)...(19): siRNA sense strand
ccacaauucauacaggaca

SEQ ID NO: 2629029 - RNA, 19 nt, Homo sapiens
  misc_RNA (1)...(19): siRNA sense strand
gaagaauguggaaagggau

SEQ ID NO: 2629030 - RNA, 19 nt, Homo sapiens
  misc_RNA (1)...(19): siRNA sense strand
aagcaggagcacaugaaga

SEQ ID NO: 2629031 - RNA, 19 nt, Homo sapiens
  misc_RNA (1)...(19): siRNA sense strand
aagaaugugggaagagcuu

SEQ ID NO: 2629032 - RNA, 19 nt, Homo sapiens
  misc_RNA (1)...(19): siRNA sense strand
aggagugugggaagggcua

SEQ ID NO: 2629033 - RNA, 19 nt, Homo sapiens
  misc_RNA (1)...(19): siRNA sense strand
caacccaaagagaagggaa

SEQ ID NO: 2629034 - RNA, 19 nt, Homo sapiens
  misc_RNA (1)...(19): siRNA sense strand
ggcuauguuacuaaguuua

SEQ ID NO: 2629035 - RNA, 19 nt, Homo sapiens
  misc_RNA (1)...(19): siRNA sense strand
agaccagccgagagacuau

SEQ ID NO: 2629036 - RNA, 19 nt, Homo sapiens
  misc_RNA (1)...(19): siRNA sense strand
ggucaagacuuaagagcca

SEQ ID NO: 2629037 - RNA, 19 nt, Homo sapiens
  misc_RNA (1)...(19): siRNA sense strand
gguccacacaggagagaaa

SEQ ID NO: 2629038 - RNA, 19 nt, Homo sapiens
  misc_RNA (1)...(19): siRNA sense strand
aguuauacucagaagagaa

SEQ ID NO: 2629039 - RNA, 19 nt, Homo sapiens
  misc_RNA (1)...(19): siRNA sense strand
auuacacacaggagagaaa

SEQ ID NO: 2629040 - RNA, 19 nt, Homo sapiens
  misc_RNA (1)...(19): siRNA sense strand
ggaauuuagucaaagcuca

SEQ ID NO: 2629041 - RNA, 19 nt, Homo sapiens
  misc_RNA (1)...(19): siRNA sense strand
ugaagaauguggaaaggga

SEQ ID NO: 2629042 - RNA, 19 nt, Homo sapiens
  misc_RNA (1)...(19): siRNA sense strand
agaggaagcuguaccgaga

SEQ ID NO: 2629043 - RNA, 19 nt, Homo sapiens
  misc_RNA (1)...(19): siRNA sense strand
aauucauacaggacagaaa

SEQ ID NO: 2629044 - RNA, 19 nt, Homo sapiens
  misc_RNA (1)...(19): siRNA sense strand
aggcuuuauugguaggcua

SEQ ID NO: 2629045 - RNA, 19 nt, Homo sapiens
  misc_RNA (1)...(19): siRNA sense strand
ggacauaccguaaagacca

SEQ ID NO: 2629046 - RNA, 19 nt, Homo sapiens
  misc_RNA (1)...(19): siRNA sense strand
aguccacgugggagagaaa

SEQ ID NO: 2629047 - RNA, 19 nt, Homo sapiens
  misc_RNA (1)...(19): siRNA sense strand
augugaggauugugggaga

SEQ ID NO: 2629048 - RNA, 19 nt, Homo sapiens
  misc_RNA (1)...(19): siRNA sense strand
gagcaaugugggaaagguu

SEQ ID NO: 2629049 - RNA, 19 nt, Homo sapiens
  misc_RNA (1)...(19): siRNA sense strand
aagaauguggaaagggauu

SEQ ID NO: 2629050 - RNA, 19 nt, Homo sapiens
  misc_RNA (1)...(19): siRNA sense strand
gguccacacgggagagaga

SEQ ID NO: 2629051 - RNA, 19 nt, Homo sapiens
  misc_RNA (1)...(19): siRNA sense strand
agagaguccacgugggaga

SEQ ID NO: 2629052 - RNA, 19 nt, Homo sapiens
  misc_RNA (1)...(19): siRNA sense strand
augugagcaaugugggaaa

SEQ ID NO: 2629053 - RNA, 19 nt, Homo sapiens
  misc_RNA (1)...(19): siRNA sense strand
agaugugagcaguguggaa

SEQ ID NO: 2629054 - RNA, 19 nt, Homo sapiens
  misc_RNA (1)...(19): siRNA sense strand
aacccaaagagaagggaau

SEQ ID NO: 2629055 - RNA, 19 nt, Homo sapiens
  misc_RNA (1)...(19): siRNA sense strand
uggcaaggaauuuagucaa

SEQ ID NO: 2629056 - RNA, 19 nt, Homo sapiens
  misc_RNA (1)...(19): siRNA sense strand
aaaccauuuaggugugaua

SEQ ID NO: 2629057 - RNA, 19 nt, Homo sapiens
  misc_RNA (1)...(19): siRNA sense strand
ccagguugaagcaggacua

SEQ ID NO: 2629058 - RNA, 19 nt, Homo sapiens
  misc_RNA (1)...(19): siRNA sense strand
uuguaaagaaugugggaag

SEQ ID NO: 2629059 - RNA, 19 nt, Homo sapiens
  misc_RNA (1)...(19): siRNA sense strand
aggugugauacaugugaua

SEQ ID NO: 2629060 - RNA, 19 nt, Homo sapiens
  misc_RNA (1)...(19): siRNA sense strand
ggugaaaagccauauaaau

SEQ ID NO: 2629061 - RNA, 19 nt, Homo sapiens
  misc_RNA (1)...(19): siRNA sense strand
gggagagagaccuuauaau

SEQ ID NO: 2629062 - RNA, 19 nt, Homo sapiens
  misc_RNA (1)...(19): siRNA sense strand
ccauauaaaugugaggagu

SEQ ID NO: 2629063 - RNA, 19 nt, Homo sapiens
  misc_RNA (1)...(19): siRNA sense strand
ggggaaaacccauccaaau

SEQ ID NO: 2629064 - RNA, 19 nt, Homo sapiens
  misc_RNA (1)...(19): siRNA sense strand
ccacauucaaggaggcagu

SEQ ID NO: 2629065 - RNA, 19 nt, Homo sapiens
  misc_RNA (1)...(19): siRNA sense strand
auacaugugauaagagcuu

SEQ ID NO: 2629066 - RNA, 19 nt, Homo sapiens
  misc_RNA (1)...(19): siRNA sense strand
aggaaugugggaagaacuu

SEQ ID NO: 2629067 - RNA, 19 nt, Homo sapiens
  misc_RNA (1)...(19): siRNA sense strand
uguaaggaaugugggaaga

SEQ ID NO: 2629068 - RNA, 19 nt, Homo sapiens
  misc_RNA (1)...(19): siRNA sense strand
guaaggaaugugggaagaa

SEQ ID NO: 2629069 - RNA, 19 nt, Homo sapiens
  misc_RNA (1)...(19): siRNA sense strand
ccacaauucauacaggaca

SEQ ID NO: 2629070 - RNA, 19 nt, Homo sapiens
  misc_RNA (1)...(19): siRNA sense strand
gaagaauguggaaagggau

SEQ ID NO: 2629071 - RNA, 19 nt, Homo sapiens
  misc_RNA (1)...(19): siRNA sense strand
aagcaggagcacaugaaga

SEQ ID NO: 2629072 - RNA, 19 nt, Homo sapiens
  misc_RNA (1)...(19): siRNA sense strand
aagaaugugggaagagcuu

SEQ ID NO: 2629073 - RNA, 19 nt, Homo sapiens
  misc_RNA (1)...(19): siRNA sense strand
aggagugugggaagggcua

SEQ ID NO: 2629074 - RNA, 19 nt, Homo sapiens
  misc_RNA (1)...(19): siRNA sense strand
caacccaaagagaagggaa

SEQ ID NO: 2629075 - RNA, 19 nt, Homo sapiens
  misc_RNA (1)...(19): siRNA sense strand
ggcuauguuacuaaguuua

SEQ ID NO: 2629076 - RNA, 19 nt, Homo sapiens
  misc_RNA (1)...(19): siRNA sense strand
agaccagccgagagacuau

SEQ ID NO: 2629077 - RNA, 19 nt, Homo sapiens
  misc_RNA (1)...(19): siRNA sense strand
augcagugauugugggaaa

SEQ ID NO: 2629078 - RNA, 19 nt, Homo sapiens
  misc_RNA (1)...(19): siRNA sense strand
guguagugaaugugggaaa

SEQ ID NO: 2629079 - RNA, 19 nt, Homo sapiens
  misc_RNA (1)...(19): siRNA sense strand
cugcagugaaugugggaaa

SEQ ID NO: 2629080 - RNA, 19 nt, Homo sapiens
  misc_RNA (1)...(19): siRNA sense strand
ccguaugaaugcagcgaau

SEQ ID NO: 2629081 - RNA, 19 nt, Homo sapiens
  misc_RNA (1)...(19): siRNA sense strand
augcagugaaugugggaaa

SEQ ID NO: 2629082 - RNA, 19 nt, Homo sapiens
  misc_RNA (1)...(19): siRNA sense strand
aagaaugguaccagaacaa

SEQ ID NO: 2629083 - RNA, 19 nt, Homo sapiens
  misc_RNA (1)...(19): siRNA sense strand
gagaugugauauuggaaaa

SEQ ID NO: 2629084 - RNA, 19 nt, Homo sapiens
  misc_RNA (1)...(19): siRNA sense strand
agacuuaaucugagcaaaa

SEQ ID NO: 2629085 - RNA, 19 nt, Homo sapiens
  misc_RNA (1)...(19): siRNA sense strand
aguucacaccggagagaaa

SEQ ID NO: 2629086 - RNA, 19 nt, Homo sapiens
  misc_RNA (1)...(19): siRNA sense strand
cggagagaaaccauggaaa

SEQ ID NO: 2629087 - RNA, 19 nt, Homo sapiens
  misc_RNA (1)...(19): siRNA sense strand
ggaacaaggagaagaucca

SEQ ID NO: 2629088 - RNA, 19 nt, Homo sapiens
  misc_RNA (1)...(19): siRNA sense strand
cuauaacacacguggaaaa

SEQ ID NO: 2629089 - RNA, 19 nt, Homo sapiens
  misc_RNA (1)...(19): siRNA sense strand
augcagcgaaugugggaaa

SEQ ID NO: 2629090 - RNA, 19 nt, Homo sapiens
  misc_RNA (1)...(19): siRNA sense strand
aauucacacaggagggaaa

SEQ ID NO: 2629091 - RNA, 19 nt, Homo sapiens
  misc_RNA (1)...(19): siRNA sense strand
gcucauuguccaucaggaa

SEQ ID NO: 2629092 - RNA, 19 nt, Homo sapiens
  misc_RNA (1)...(19): siRNA sense strand
gggaguucacacaggaaau

SEQ ID NO: 2629093 - RNA, 19 nt, Homo sapiens
  misc_RNA (1)...(19): siRNA sense strand
agucaaaccuuaaugcuca

SEQ ID NO: 2629094 - RNA, 19 nt, Homo sapiens
  misc_RNA (1)...(19): siRNA sense strand
augcggugaaugugggaaa

SEQ ID NO: 2629095 - RNA, 19 nt, Homo sapiens
  misc_RNA (1)...(19): siRNA sense strand
gaguauugaaagaagcuau

SEQ ID NO: 2629096 - RNA, 19 nt, Homo sapiens
  misc_RNA (1)...(19): siRNA sense strand
cccuauggaugcagugaau

SEQ ID NO: 2629097 - RNA, 19 nt, Homo sapiens
  misc_RNA (1)...(19): siRNA sense strand
aauucauacaggagagaga

SEQ ID NO: 2629098 - RNA, 19 nt, Homo sapiens
  misc_RNA (1)...(19): siRNA sense strand
augcaguaaaugugaaaga

SEQ ID NO: 2629099 - RNA, 19 nt, Homo sapiens
  misc_RNA (1)...(19): siRNA sense strand
agagaugugauauuggaaa

SEQ ID NO: 2629100 - RNA, 19 nt, Homo sapiens
  misc_RNA (1)...(19): siRNA sense strand
gaaugcaaugaaugugaaa

SEQ ID NO: 2629101 - RNA, 19 nt, Homo sapiens
  misc_RNA (1)...(19): siRNA sense strand
augcagugaauguggaaaa

SEQ ID NO: 2629102 - RNA, 19 nt, Homo sapiens
  misc_RNA (1)...(19): siRNA sense strand
uguacagagaugugauauu

SEQ ID NO: 2629103 - RNA, 19 nt, Homo sapiens
  misc_RNA (1)...(19): siRNA sense strand
gcuuguaguguguugggaa

SEQ ID NO: 2629104 - RNA, 19 nt, Homo sapiens
  misc_RNA (1)...(19): siRNA sense strand
gaaagagccuucagugcca

SEQ ID NO: 2629105 - RNA, 19 nt, Homo sapiens
  misc_RNA (1)...(19): siRNA sense strand
ccccauaaaugcagugaau

SEQ ID NO: 2629106 - RNA, 19 nt, Homo sapiens
  misc_RNA (1)...(19): siRNA sense strand
gggaaggcuuucagcagca

SEQ ID NO: 2629107 - RNA, 19 nt, Homo sapiens
  misc_RNA (1)...(19): siRNA sense strand
ccuuuuaaaugcagugaau

SEQ ID NO: 2629108 - RNA, 19 nt, Homo sapiens
  misc_RNA (1)...(19): siRNA sense strand
ccagagaacucauacagga

SEQ ID NO: 2629109 - RNA, 19 nt, Homo sapiens
  misc_RNA (1)...(19): siRNA sense strand
gagagaagcccuauggaug

SEQ ID NO: 2629110 - RNA, 19 nt, Homo sapiens
  misc_RNA (1)...(19): siRNA sense strand
gugccaagucaaaccuuaa

SEQ ID NO: 2629111 - RNA, 19 nt, Homo sapiens
  misc_RNA (1)...(19): siRNA sense strand
acacaggagugaaaccgua

SEQ ID NO: 2629112 - RNA, 19 nt, Homo sapiens
  misc_RNA (1)...(19): siRNA sense strand
auacauaggagaacacaca

SEQ ID NO: 2629113 - RNA, 19 nt, Homo sapiens
  misc_RNA (1)...(19): siRNA sense strand
gagcaaaacccaugauucu

SEQ ID NO: 2629114 - RNA, 19 nt, Homo sapiens
  misc_RNA (1)...(19): siRNA sense strand
gugaaugugggaaggcuuu

SEQ ID NO: 2629115 - RNA, 19 nt, Homo sapiens
  misc_RNA (1)...(19): siRNA sense strand
cuuguuauacauaggagaa

SEQ ID NO: 2629116 - RNA, 19 nt, Homo sapiens
  misc_RNA (1)...(19): siRNA sense strand
gccaaaauuuccaggcaga

SEQ ID NO: 2629117 - RNA, 19 nt, Homo sapiens
  misc_RNA (1)...(19): siRNA sense strand
guuggaacaaggagaagau

SEQ ID NO: 2629118 - RNA, 19 nt, Homo sapiens
  misc_RNA (1)...(19): siRNA sense strand
ucauguagugagugcgaga

SEQ ID NO: 2629119 - RNA, 19 nt, Homo sapiens
  misc_RNA (1)...(19): siRNA sense strand
ggucacagcucauugucca

SEQ ID NO: 2629120 - RNA, 19 nt, Homo sapiens
  misc_RNA (1)...(19): siRNA sense strand
ccuucagugccaagucaaa

SEQ ID NO: 2629121 - RNA, 19 nt, Homo sapiens
  misc_RNA (1)...(19): siRNA sense strand
acugagaagcccuaugaau

SEQ ID NO: 2629122 - RNA, 19 nt, Homo sapiens
  misc_RNA (1)...(19): siRNA sense strand
augcucugaaugugggaaa

SEQ ID NO: 2629123 - RNA, 19 nt, Homo sapiens
  misc_RNA (1)...(19): siRNA sense strand
cuguuggaauucagggcuu

SEQ ID NO: 2629124 - RNA, 19 nt, Homo sapiens
  misc_RNA (1)...(19): siRNA sense strand
guaugaaugcagcgaaugu

SEQ ID NO: 2629125 - RNA, 19 nt, Homo sapiens
  misc_RNA (1)...(19): siRNA sense strand
ccuguacagagaugugaua

SEQ ID NO: 2629126 - RNA, 19 nt, Homo sapiens
  misc_RNA (1)...(19): siRNA sense strand
aguucauacuggagagaaa

SEQ ID NO: 2629127 - RNA, 19 nt, Homo sapiens
  misc_RNA (1)...(19): siRNA sense strand
aguucauacuggagagaaa

SEQ ID NO: 2629128 - RNA, 19 nt, Homo sapiens
  misc_RNA (1)...(19): siRNA sense strand
guguaaugagugugggaaa

SEQ ID NO: 2629129 - RNA, 19 nt, Homo sapiens
  misc_RNA (1)...(19): siRNA sense strand
guguaaugaaugugguaaa

SEQ ID NO: 2629130 - RNA, 19 nt, Homo sapiens
  misc_RNA (1)...(19): siRNA sense strand
aguucacacuggagagaaa

SEQ ID NO: 2629131 - RNA, 19 nt, Homo sapiens
  misc_RNA (1)...(19): siRNA sense strand
gcgacaaagccuugaauca

SEQ ID NO: 2629132 - RNA, 19 nt, Homo sapiens
  misc_RNA (1)...(19): siRNA sense strand
aaaucaugcauuagggaaa

SEQ ID NO: 2629133 - RNA, 19 nt, Homo sapiens
  misc_RNA (1)...(19): siRNA sense strand
auguaaagaguguggcaaa

SEQ ID NO: 2629134 - RNA, 19 nt, Homo sapiens
  misc_RNA (1)...(19): siRNA sense strand
gaguuuugcuucagggaaa

SEQ ID NO: 2629135 - RNA, 19 nt, Homo sapiens
  misc_RNA (1)...(19): siRNA sense strand
acgcgauagaagagguaua

SEQ ID NO: 2629136 - RNA, 19 nt, Homo sapiens
  misc_RNA (1)...(19): siRNA sense strand
augugauguuggagaacua

SEQ ID NO: 2629137 - RNA, 19 nt, Homo sapiens
  misc_RNA (1)...(19): siRNA sense strand
aaucaaaccuugcgcguca

SEQ ID NO: 2629138 - RNA, 19 nt, Homo sapiens
  misc_RNA (1)...(19): siRNA sense strand
aacucauauuggagagaaa

SEQ ID NO: 2629139 - RNA, 19 nt, Homo sapiens
  misc_RNA (1)...(19): siRNA sense strand
agaaauugcaacaaaguga

SEQ ID NO: 2629140 - RNA, 19 nt, Homo sapiens
  misc_RNA (1)...(19): siRNA sense strand
auguaaugaguguggcaaa

SEQ ID NO: 2629141 - RNA, 19 nt, Homo sapiens
  misc_RNA (1)...(19): siRNA sense strand
caccacaacaggaagguaa

SEQ ID NO: 2629142 - RNA, 19 nt, Homo sapiens
  misc_RNA (1)...(19): siRNA sense strand
acacagugacauuggaaca

SEQ ID NO: 2629143 - RNA, 19 nt, Homo sapiens
  misc_RNA (1)...(19): siRNA sense strand
aauucauaguggcaagaaa

SEQ ID NO: 2629144 - RNA, 19 nt, Homo sapiens
  misc_RNA (1)...(19): siRNA sense strand
uggaaaugccugaacucua

SEQ ID NO: 2629145 - RNA, 19 nt, Homo sapiens
  misc_RNA (1)...(19): siRNA sense strand
agguaacccaggagaagua

SEQ ID NO: 2629146 - RNA, 19 nt, Homo sapiens
  misc_RNA (1)...(19): siRNA sense strand
acagauauauugagugcga

SEQ ID NO: 2629147 - RNA, 19 nt, Homo sapiens
  misc_RNA (1)...(19): siRNA sense strand
auguaaucaauguggcaaa

SEQ ID NO: 2629148 - RNA, 19 nt, Homo sapiens
  misc_RNA (1)...(19): siRNA sense strand
cuugcaaggcauuggagaa

SEQ ID NO: 2629149 - RNA, 19 nt, Homo sapiens
  misc_RNA (1)...(19): siRNA sense strand
aggagagaccaacgcgaua

SEQ ID NO: 2629150 - RNA, 19 nt, Homo sapiens
  misc_RNA (1)...(19): siRNA sense strand
auagaagagguauaggaaa

SEQ ID NO: 2629151 - RNA, 19 nt, Homo sapiens
  misc_RNA (1)...(19): siRNA sense strand
agauauauugagugcgaca

SEQ ID NO: 2629152 - RNA, 19 nt, Homo sapiens
  misc_RNA (1)...(19): siRNA sense strand
uggaaagaaaccuuacaaa

SEQ ID NO: 2629153 - RNA, 19 nt, Homo sapiens
  misc_RNA (1)...(19): siRNA sense strand
uggagagaaaggauauaaa

SEQ ID NO: 2629154 - RNA, 19 nt, Homo sapiens
  misc_RNA (1)...(19): siRNA sense strand
ccuuacaaaugcaaugaau

SEQ ID NO: 2629155 - RNA, 19 nt, Homo sapiens
  misc_RNA (1)...(19): siRNA sense strand
ccuuacaaaugcaaugaau

SEQ ID NO: 2629156 - RNA, 19 nt, Homo sapiens
  misc_RNA (1)...(19): siRNA sense strand
acaugacauugaagaguuu

SEQ ID NO: 2629157 - RNA, 19 nt, Homo sapiens
  misc_RNA (1)...(19): siRNA sense strand
cuucagggaaaucaagaaa

SEQ ID NO: 2629158 - RNA, 19 nt, Homo sapiens
  misc_RNA (1)...(19): siRNA sense strand
acaaauguuaugaguguga

SEQ ID NO: 2629159 - RNA, 19 nt, Homo sapiens
  misc_RNA (1)...(19): siRNA sense strand
cgauagaagagguauagga

SEQ ID NO: 2629160 - RNA, 19 nt, Homo sapiens
  misc_RNA (1)...(19): siRNA sense strand
acacaagaacagaaaucau

SEQ ID NO: 2629161 - RNA, 19 nt, Homo sapiens
  misc_RNA (1)...(19): siRNA sense strand
auauauugagugcgacaaa

SEQ ID NO: 2629162 - RNA, 19 nt, Homo sapiens
  misc_RNA (1)...(19): siRNA sense strand
gguaauucauaguggcaag

SEQ ID NO: 2629163 - RNA, 19 nt, Homo sapiens
  misc_RNA (1)...(19): siRNA sense strand
uggcaagaaaccuuacaaa

SEQ ID NO: 2629164 - RNA, 19 nt, Homo sapiens
  misc_RNA (1)...(19): siRNA sense strand
ccucacuagacaucagaua

SEQ ID NO: 2629165 - RNA, 19 nt, Homo sapiens
  misc_RNA (1)...(19): siRNA sense strand
ucacuagacaucagauaau

SEQ ID NO: 2629166 - RNA, 19 nt, Homo sapiens
  misc_RNA (1)...(19): siRNA sense strand
aaaucuuacuuguaggaga

SEQ ID NO: 2629167 - RNA, 19 nt, Homo sapiens
  misc_RNA (1)...(19): siRNA sense strand
guggcaagguguucaguca

SEQ ID NO: 2629168 - RNA, 19 nt, Homo sapiens
  misc_RNA (1)...(19): siRNA sense strand
uggcaaggucuuuagucaa

SEQ ID NO: 2629169 - RNA, 19 nt, Homo sapiens
  misc_RNA (1)...(19): siRNA sense strand
acucacacaagaacagaaa

SEQ ID NO: 2629170 - RNA, 19 nt, Homo sapiens
  misc_RNA (1)...(19): siRNA sense strand
gguauaggaaacaagucua

SEQ ID NO: 2629171 - RNA, 19 nt, Homo sapiens
  misc_RNA (1)...(19): siRNA sense strand
uguaaugaguguggcaaau

SEQ ID NO: 2629172 - RNA, 19 nt, Homo sapiens
  misc_RNA (1)...(19): siRNA sense strand
auguaaugaaugugacaga

SEQ ID NO: 2629173 - RNA, 19 nt, Homo sapiens
  misc_RNA (1)...(19): siRNA sense strand
gccuuuagugugaggucaa

SEQ ID NO: 2629174 - RNA, 19 nt, Homo sapiens
  misc_RNA (1)...(19): siRNA sense strand
uauccauacuaaggagaaa

SEQ ID NO: 2629175 - RNA, 19 nt, Homo sapiens
  misc_RNA (1)...(19): siRNA sense strand
aggcauuggagaauucaua

SEQ ID NO: 2629176 - RNA, 19 nt, Homo sapiens
  misc_RNA (1)...(19): siRNA sense strand
agaccaacgcgauagaaga

SEQ ID NO: 2629177 - RNA, 19 nt, Homo sapiens
  misc_RNA (1)...(19): siRNA sense strand
gaaaucaugcauuagggaa

SEQ ID NO: 2629178 - RNA, 19 nt, Homo sapiens
  misc_RNA (1)...(19): siRNA sense strand
gggacguggccaucgaauu

SEQ ID NO: 2629179 - RNA, 19 nt, Homo sapiens
  misc_RNA (1)...(19): siRNA sense strand
auucacaccuugcgaguca

SEQ ID NO: 2629180 - RNA, 19 nt, Homo sapiens
  misc_RNA (1)...(19): siRNA sense strand
uggagagaaaccauacaaa

SEQ ID NO: 2629181 - RNA, 19 nt, Homo sapiens
  misc_RNA (1)...(19): siRNA sense strand
gugcauucgaacuuaacua

SEQ ID NO: 2629182 - RNA, 19 nt, Homo sapiens
  misc_RNA (1)...(19): siRNA sense strand
ugacauuggaacaacauga

SEQ ID NO: 2629183 - RNA, 19 nt, Homo sapiens
  misc_RNA (1)...(19): siRNA sense strand
uguuggagaacuacaggaa

SEQ ID NO: 2629184 - RNA, 19 nt, Homo sapiens
  misc_RNA (1)...(19): siRNA sense strand
agaaggugccagagagaaa

SEQ ID NO: 2629185 - RNA, 19 nt, Homo sapiens
  misc_RNA (1)...(19): siRNA sense strand
uuaagaaggaacagggaaa

SEQ ID NO: 2629186 - RNA, 19 nt, Homo sapiens
  misc_RNA (1)...(19): siRNA sense strand
agagaaaggagaaggaaaa

SEQ ID NO: 2629187 - RNA, 19 nt, Homo sapiens
  misc_RNA (1)...(19): siRNA sense strand
aagagaaaggagaaggaaa

SEQ ID NO: 2629188 - RNA, 19 nt, Homo sapiens
  misc_RNA (1)...(19): siRNA sense strand
agggaaagcugaugggcau

SEQ ID NO: 2629189 - RNA, 19 nt, Homo sapiens
  misc_RNA (1)...(19): siRNA sense strand
aggaugaggaugaggagaa

SEQ ID NO: 2629190 - RNA, 19 nt, Homo sapiens
  misc_RNA (1)...(19): siRNA sense strand
ugguaaaggaugugauaca

SEQ ID NO: 2629191 - RNA, 19 nt, Homo sapiens
  misc_RNA (1)...(19): siRNA sense strand
cagaggaggacgaggccaa

SEQ ID NO: 2629192 - RNA, 19 nt, Homo sapiens
  misc_RNA (1)...(19): siRNA sense strand
ggagaaagggagaggcagu

SEQ ID NO: 2629193 - RNA, 19 nt, Homo sapiens
  misc_RNA (1)...(19): siRNA sense strand
ucaucaaacacuuggcaaa

SEQ ID NO: 2629194 - RNA, 19 nt, Homo sapiens
  misc_RNA (1)...(19): siRNA sense strand
gaggaugguaagaggaaga

SEQ ID NO: 2629195 - RNA, 19 nt, Homo sapiens
  misc_RNA (1)...(19): siRNA sense strand
agaacauagaggugaagaa

SEQ ID NO: 2629196 - RNA, 19 nt, Homo sapiens
  misc_RNA (1)...(19): siRNA sense strand
gagaaaaggagaagcguca

SEQ ID NO: 2629197 - RNA, 19 nt, Homo sapiens
  misc_RNA (1)...(19): siRNA sense strand
cgggagaagagaaaggaga

SEQ ID NO: 2629198 - RNA, 19 nt, Homo sapiens
  misc_RNA (1)...(19): siRNA sense strand
ggaugaggagaaagggaga

SEQ ID NO: 2629199 - RNA, 19 nt, Homo sapiens
  misc_RNA (1)...(19): siRNA sense strand
caaagaagaaggugccaga

SEQ ID NO: 2629200 - RNA, 19 nt, Homo sapiens
  misc_RNA (1)...(19): siRNA sense strand
agggagaggcagugagagu

SEQ ID NO: 2629201 - RNA, 19 nt, Homo sapiens
  misc_RNA (1)...(19): siRNA sense strand
aggagaugcuggacaccaa

SEQ ID NO: 2629202 - RNA, 19 nt, Homo sapiens
  misc_RNA (1)...(19): siRNA sense strand
gcuugugguugcagaguca

SEQ ID NO: 2629203 - RNA, 19 nt, Homo sapiens
  misc_RNA (1)...(19): siRNA sense strand
caugaugaccugaaggaga

SEQ ID NO: 2629204 - RNA, 19 nt, Homo sapiens
  misc_RNA (1)...(19): siRNA sense strand
ucacagcagaggaggauau

SEQ ID NO: 2629205 - RNA, 19 nt, Homo sapiens
  misc_RNA (1)...(19): siRNA sense strand
gaggagaaagggagaggca

SEQ ID NO: 2629206 - RNA, 19 nt, Homo sapiens
  misc_RNA (1)...(19): siRNA sense strand
gaauggaccaagugcucaa

SEQ ID NO: 2629207 - RNA, 19 nt, Homo sapiens
  misc_RNA (1)...(19): siRNA sense strand
cgggaauuccagaccuaua

SEQ ID NO: 2629208 - RNA, 19 nt, Homo sapiens
  misc_RNA (1)...(19): siRNA sense strand
aggaggaugguaagaggaa

SEQ ID NO: 2629209 - RNA, 19 nt, Homo sapiens
  misc_RNA (1)...(19): siRNA sense strand
agaccaagcugcugaccca

SEQ ID NO: 2629210 - RNA, 19 nt, Homo sapiens
  misc_RNA (1)...(19): siRNA sense strand
agaagagaaaggagaagga

SEQ ID NO: 2629211 - RNA, 19 nt, Homo sapiens
  misc_RNA (1)...(19): siRNA sense strand
ugaagaggauuguggcgau

SEQ ID NO: 2629212 - RNA, 19 nt, Homo sapiens
  misc_RNA (1)...(19): siRNA sense strand
cggagaguacugugagcau

SEQ ID NO: 2629213 - RNA, 19 nt, Homo sapiens
  misc_RNA (1)...(19): siRNA sense strand
gugaacagagugaggagga

SEQ ID NO: 2629214 - RNA, 19 nt, Homo sapiens
  misc_RNA (1)...(19): siRNA sense strand
augguaagaggaagacaaa

SEQ ID NO: 2629215 - RNA, 19 nt, Homo sapiens
  misc_RNA (1)...(19): siRNA sense strand
aagaagaaggugccagaga

SEQ ID NO: 2629216 - RNA, 19 nt, Homo sapiens
  misc_RNA (1)...(19): siRNA sense strand
augaugaccugaaggagau

SEQ ID NO: 2629217 - RNA, 19 nt, Homo sapiens
  misc_RNA (1)...(19): siRNA sense strand
aagaggaagacaaagaaga

SEQ ID NO: 2629218 - RNA, 19 nt, Homo sapiens
  misc_RNA (1)...(19): siRNA sense strand
ccgccuacagcgaagacaa

SEQ ID NO: 2629219 - RNA, 19 nt, Homo sapiens
  misc_RNA (1)...(19): siRNA sense strand
ccgaggaggagcaguuaga

SEQ ID NO: 2629220 - RNA, 19 nt, Homo sapiens
  misc_RNA (1)...(19): siRNA sense strand
gcagcauggacaaggacuu

SEQ ID NO: 2629221 - RNA, 19 nt, Homo sapiens
  misc_RNA (1)...(19): siRNA sense strand
gugagagugaacagaguga

SEQ ID NO: 2629222 - RNA, 19 nt, Homo sapiens
  misc_RNA (1)...(19): siRNA sense strand
ucguguuccuugugggaca

SEQ ID NO: 2629223 - RNA, 19 nt, Homo sapiens
  misc_RNA (1)...(19): siRNA sense strand
aaucccuacuagaggagaa

SEQ ID NO: 2629224 - RNA, 19 nt, Homo sapiens
  misc_RNA (1)...(19): siRNA sense strand
cauuaauuucugugacuca

SEQ ID NO: 2629225 - RNA, 19 nt, Homo sapiens
  misc_RNA (1)...(19): siRNA sense strand
aagaccaggaugaggauga

SEQ ID NO: 2629226 - RNA, 19 nt, Homo sapiens
  misc_RNA (1)...(19): siRNA sense strand
agauuaagauccugaagcu

SEQ ID NO: 2629227 - RNA, 19 nt, Homo sapiens
  misc_RNA (1)...(19): siRNA sense strand
cagaggaggauauugucaa

SEQ ID NO: 2629228 - RNA, 19 nt, Homo sapiens
  misc_RNA (1)...(19): siRNA sense strand
ccugcuugaucuagaggau

SEQ ID NO: 2629229 - RNA, 19 nt, Homo sapiens
  misc_RNA (1)...(19): siRNA sense strand
augaaugagaucacagaga

SEQ ID NO: 2629230 - RNA, 19 nt, Homo sapiens
  misc_RNA (1)...(19): siRNA sense strand
acauuguggugcagaaagu

SEQ ID NO: 2629231 - RNA, 19 nt, Homo sapiens
  misc_RNA (1)...(19): siRNA sense strand
uugucaagcugcaggucau

SEQ ID NO: 2629232 - RNA, 19 nt, Homo sapiens
  misc_RNA (1)...(19): siRNA sense strand
uagaggagaacgcggaaaa

SEQ ID NO: 2629233 - RNA, 19 nt, Homo sapiens
  misc_RNA (1)...(19): siRNA sense strand
uggccaaauaugaccagaa

SEQ ID NO: 2629234 - RNA, 19 nt, Homo sapiens
  misc_RNA (1)...(19): siRNA sense strand
acccugagucugagaguga

SEQ ID NO: 2629235 - RNA, 19 nt, Homo sapiens
  misc_RNA (1)...(19): siRNA sense strand
cucucaagcuggaggccau

SEQ ID NO: 2629236 - RNA, 19 nt, Homo sapiens
  misc_RNA (1)...(19): siRNA sense strand
ggugaagaagcuugucuau

SEQ ID NO: 2629237 - RNA, 19 nt, Homo sapiens
  misc_RNA (1)...(19): siRNA sense strand
cgucauuaagaaauugcua

SEQ ID NO: 2629238 - RNA, 19 nt, Homo sapiens
  misc_RNA (1)...(19): siRNA sense strand
uggucgucauuaagaaauu

SEQ ID NO: 2629239 - RNA, 19 nt, Homo sapiens
  misc_RNA (1)...(19): siRNA sense strand
gcgaugauugcccgaggaa

SEQ ID NO: 2629240 - RNA, 19 nt, Homo sapiens
  misc_RNA (1)...(19): siRNA sense strand
ccaacguggccuaaaggau

SEQ ID NO: 2629241 - RNA, 19 nt, Homo sapiens
  misc_RNA (1)...(19): siRNA sense strand
agcuggaagugcugaccaa

SEQ ID NO: 2629242 - RNA, 19 nt, Homo sapiens
  misc_RNA (1)...(19): siRNA sense strand
cgucuguggcucaggacau

SEQ ID NO: 2629243 - RNA, 19 nt, Homo sapiens
  misc_RNA (1)...(19): siRNA sense strand
aggacaagaccaaggacaa

SEQ ID NO: 2629244 - RNA, 19 nt, Homo sapiens
  misc_RNA (1)...(19): siRNA sense strand
ggaagcuaguggagcggaa

SEQ ID NO: 2629245 - RNA, 19 nt, Homo sapiens
  misc_RNA (1)...(19): siRNA sense strand
agggaaaacccaagaagaa

SEQ ID NO: 2629246 - RNA, 19 nt, Homo sapiens
  misc_RNA (1)...(19): siRNA sense strand
gagaagaggcccaaggacu

SEQ ID NO: 2629247 - RNA, 19 nt, Homo sapiens
  misc_RNA (1)...(19): siRNA sense strand
uggagaaggagguggacuu

SEQ ID NO: 2629248 - RNA, 19 nt, Homo sapiens
  misc_RNA (1)...(19): siRNA sense strand
gggacgagagugaggacga

SEQ ID NO: 2629249 - RNA, 19 nt, Homo sapiens
  misc_RNA (1)...(19): siRNA sense strand
aggcacugaacgaggagaa

SEQ ID NO: 2629250 - RNA, 19 nt, Homo sapiens
  misc_RNA (1)...(19): siRNA sense strand
cugccaagucgcaaagcaa

SEQ ID NO: 2629251 - RNA, 19 nt, Homo sapiens
  misc_RNA (1)...(19): siRNA sense strand
gggaaaacccaagaagaaa

SEQ ID NO: 2629252 - RNA, 19 nt, Homo sapiens
  misc_RNA (1)...(19): siRNA sense strand
gcagugagguggagcugga

SEQ ID NO: 2629253 - RNA, 19 nt, Homo sapiens
  misc_RNA (1)...(19): siRNA sense strand
ccggaagggaccaagaaga

SEQ ID NO: 2629254 - RNA, 19 nt, Homo sapiens
  misc_RNA (1)...(19): siRNA sense strand
acgaggagaagguggccua

SEQ ID NO: 2629255 - RNA, 19 nt, Homo sapiens
  misc_RNA (1)...(19): siRNA sense strand
ccaucaucccuaagcgaau

SEQ ID NO: 2629256 - RNA, 19 nt, Homo sapiens
  misc_RNA (1)...(19): siRNA sense strand
gcgcagagggagaauggca

SEQ ID NO: 2629257 - RNA, 19 nt, Homo sapiens
  misc_RNA (1)...(19): siRNA sense strand
aggacaauguggaugggca

SEQ ID NO: 2629258 - RNA, 19 nt, Homo sapiens
  misc_RNA (1)...(19): siRNA sense strand
gacacagccuggagagcga

SEQ ID NO: 2629259 - RNA, 19 nt, Homo sapiens
  misc_RNA (1)...(19): siRNA sense strand
gaagagaagagugaggaga

SEQ ID NO: 2629260 - RNA, 19 nt, Homo sapiens
  misc_RNA (1)...(19): siRNA sense strand
ucgugaagaccuuugagaa

SEQ ID NO: 2629261 - RNA, 19 nt, Homo sapiens
  misc_RNA (1)...(19): siRNA sense strand
ggacaauguggaugggcac

SEQ ID NO: 2629262 - RNA, 19 nt, Homo sapiens
  misc_RNA (1)...(19): siRNA sense strand
cuggaagguucgagaagac

SEQ ID NO: 2629263 - RNA, 19 nt, Homo sapiens
  misc_RNA (1)...(19): siRNA sense strand
ccgugaacacccucaagaa

SEQ ID NO: 2629264 - RNA, 19 nt, Homo sapiens
  misc_RNA (1)...(19): siRNA sense strand
gcugaggagaagaggccca

SEQ ID NO: 2629265 - RNA, 19 nt, Homo sapiens
  misc_RNA (1)...(19): siRNA sense strand
agacagaucauccaggaca

SEQ ID NO: 2629266 - RNA, 19 nt, Homo sapiens
  misc_RNA (1)...(19): siRNA sense strand
uggaguuggagcuggucaa

SEQ ID NO: 2629267 - RNA, 19 nt, Homo sapiens
  misc_RNA (1)...(19): siRNA sense strand
ucuucacagcugaggagaa

SEQ ID NO: 2629268 - RNA, 19 nt, Homo sapiens
  misc_RNA (1)...(19): siRNA sense strand
ggauacaugcccucggcua

SEQ ID NO: 2629269 - RNA, 19 nt, Homo sapiens
  misc_RNA (1)...(19): siRNA sense strand
augccgugguggagugcaa

SEQ ID NO: 2629270 - RNA, 19 nt, Homo sapiens
  misc_RNA (1)...(19): siRNA sense strand
cugagaugguggagggccu

SEQ ID NO: 2629271 - RNA, 19 nt, Homo sapiens
  misc_RNA (1)...(19): siRNA sense strand
ucgugcagggcaugggaua

SEQ ID NO: 2629272 - RNA, 19 nt, Homo sapiens
  misc_RNA (1)...(19): siRNA sense strand
aguacuucgugcagggcau

SEQ ID NO: 2629273 - RNA, 19 nt, Homo sapiens
  misc_RNA (1)...(19): siRNA sense strand
aggugaagccuuuggugga

SEQ ID NO: 2629274 - RNA, 19 nt, Homo sapiens
  misc_RNA (1)...(19): siRNA sense strand
uggcaugggaacaggagca

SEQ ID NO: 2629275 - RNA, 19 nt, Homo sapiens
  misc_RNA (1)...(19): siRNA sense strand
gggaaggaagaaaugcaga

SEQ ID NO: 2629276 - RNA, 19 nt, Homo sapiens
  misc_RNA (1)...(19): siRNA sense strand
agaucuaagcggugcggua

SEQ ID NO: 2629277 - RNA, 19 nt, Homo sapiens
  misc_RNA (1)...(19): siRNA sense strand
ccuggaaagaaaagggaua

SEQ ID NO: 2629278 - RNA, 19 nt, Homo sapiens
  misc_RNA (1)...(19): siRNA sense strand
agcaggagcaagagagaga

SEQ ID NO: 2629279 - RNA, 19 nt, Homo sapiens
  misc_RNA (1)...(19): siRNA sense strand
agggauauguccagcgacu

SEQ ID NO: 2629280 - RNA, 19 nt, Homo sapiens
  misc_RNA (1)...(19): siRNA sense strand
ggguuggagcaccuggaaa

SEQ ID NO: 2629281 - RNA, 19 nt, Homo sapiens
  misc_RNA (1)...(19): siRNA sense strand
cgacuuggagagagaccau

SEQ ID NO: 2629282 - RNA, 19 nt, Homo sapiens
  misc_RNA (1)...(19): siRNA sense strand
gguaaagauccuagaaaca

SEQ ID NO: 2629283 - RNA, 19 nt, Homo sapiens
  misc_RNA (1)...(19): siRNA sense strand
uggaauggcaacaggaauu

SEQ ID NO: 2629284 - RNA, 19 nt, Homo sapiens
  misc_RNA (1)...(19): siRNA sense strand
uggaagaagaagaggucau

SEQ ID NO: 2629285 - RNA, 19 nt, Homo sapiens
  misc_RNA (1)...(19): siRNA sense strand
aggagaaaguagauacaga

SEQ ID NO: 2629286 - RNA, 19 nt, Homo sapiens
  misc_RNA (1)...(19): siRNA sense strand
ccggcuggcugguaggaaa

SEQ ID NO: 2629287 - RNA, 19 nt, Homo sapiens
  misc_RNA (1)...(19): siRNA sense strand
ggauggugauaauggguga

SEQ ID NO: 2629288 - RNA, 19 nt, Homo sapiens
  misc_RNA (1)...(19): siRNA sense strand
aggcuuaucaagugguuua

SEQ ID NO: 2629289 - RNA, 19 nt, Homo sapiens
  misc_RNA (1)...(19): siRNA sense strand
cucagauaguucagguaaa

SEQ ID NO: 2629290 - RNA, 19 nt, Homo sapiens
  misc_RNA (1)...(19): siRNA sense strand
cagcgauggccuagcaauu

SEQ ID NO: 2629291 - RNA, 19 nt, Homo sapiens
  misc_RNA (1)...(19): siRNA sense strand
caaugaugcuagugaccau

SEQ ID NO: 2629292 - RNA, 19 nt, Homo sapiens
  misc_RNA (1)...(19): siRNA sense strand
ccagaaacacaaaugaaaa

SEQ ID NO: 2629293 - RNA, 19 nt, Homo sapiens
  misc_RNA (1)...(19): siRNA sense strand
acucagaccacgagcauca

SEQ ID NO: 2629294 - RNA, 19 nt, Homo sapiens
  misc_RNA (1)...(19): siRNA sense strand
acucagaccacgagcauca

SEQ ID NO: 2629295 - RNA, 19 nt, Homo sapiens
  misc_RNA (1)...(19): siRNA sense strand
agaacaugccagugguaga

SEQ ID NO: 2629296 - RNA, 19 nt, Homo sapiens
  misc_RNA (1)...(19): siRNA sense strand
ugccagugguagaaggaau

SEQ ID NO: 2629297 - RNA, 19 nt, Homo sapiens
  misc_RNA (1)...(19): siRNA sense strand
ggaaaugaaaagaggacca

SEQ ID NO: 2629298 - RNA, 19 nt, Homo sapiens
  misc_RNA (1)...(19): siRNA sense strand
agguaaagauccuagaaac

SEQ ID NO: 2629299 - RNA, 19 nt, Homo sapiens
  misc_RNA (1)...(19): siRNA sense strand
aggaagucuacaaugaaua

SEQ ID NO: 2629300 - RNA, 19 nt, Homo sapiens
  misc_RNA (1)...(19): siRNA sense strand
uggccuggauggugauaau

SEQ ID NO: 2629301 - RNA, 19 nt, Homo sapiens
  misc_RNA (1)...(19): siRNA sense strand
cagguaaagauccuagaaa

SEQ ID NO: 2629302 - RNA, 19 nt, Homo sapiens
  misc_RNA (1)...(19): siRNA sense strand
agaagaaaccugaaaauga

SEQ ID NO: 2629303 - RNA, 19 nt, Homo sapiens
  misc_RNA (1)...(19): siRNA sense strand
gcuuuuggguuuuggaauu

SEQ ID NO: 2629304 - RNA, 19 nt, Homo sapiens
  misc_RNA (1)...(19): siRNA sense strand
gcuuuauguauuccagaaa

SEQ ID NO: 2629305 - RNA, 19 nt, Homo sapiens
  misc_RNA (1)...(19): siRNA sense strand
uuucaacaaaugaggagaa

SEQ ID NO: 2629306 - RNA, 19 nt, Homo sapiens
  misc_RNA (1)...(19): siRNA sense strand
ugagaaaauuaguccgaau

SEQ ID NO: 2629307 - RNA, 19 nt, Homo sapiens
  misc_RNA (1)...(19): siRNA sense strand
uuucaaugcaucaaagcua

SEQ ID NO: 2629308 - RNA, 19 nt, Homo sapiens
  misc_RNA (1)...(19): siRNA sense strand
gugaaaagaaggcugaaau

SEQ ID NO: 2629309 - RNA, 19 nt, Homo sapiens
  misc_RNA (1)...(19): siRNA sense strand
gugcaagaauaaaugccau

SEQ ID NO: 2629310 - RNA, 19 nt, Homo sapiens
  misc_RNA (1)...(19): siRNA sense strand
gcugaaugcaacagaguuc

SEQ ID NO: 2629311 - RNA, 19 nt, Homo sapiens
  misc_RNA (1)...(19): siRNA sense strand
ucaugcugcuucugguaaa

SEQ ID NO: 2629312 - RNA, 19 nt, Homo sapiens
  misc_RNA (1)...(19): siRNA sense strand
uccagaaacacaaaugaaa

SEQ ID NO: 2629313 - RNA, 19 nt, Homo sapiens
  misc_RNA (1)...(19): siRNA sense strand
acucagauaguucagguaa

SEQ ID NO: 2629314 - RNA, 19 nt, Homo sapiens
  misc_RNA (1)...(19): siRNA sense strand
acaucaaagagccggguga

SEQ ID NO: 2629315 - RNA, 19 nt, Homo sapiens
  misc_RNA (1)...(19): siRNA sense strand
aagaagaagaggucaugau

SEQ ID NO: 2629316 - RNA, 19 nt, Homo sapiens
  misc_RNA (1)...(19): siRNA sense strand
ggcaauuuccacacggcaa

SEQ ID NO: 2629317 - RNA, 19 nt, Homo sapiens
  misc_RNA (1)...(19): siRNA sense strand
gaaaggagcucaccgacca

SEQ ID NO: 2629318 - RNA, 19 nt, Homo sapiens
  misc_RNA (1)...(19): siRNA sense strand
ugaugaugauguggagauu

SEQ ID NO: 2629319 - RNA, 19 nt, Homo sapiens
  misc_RNA (1)...(19): siRNA sense strand
ggaaguuaucuguaaucuu

SEQ ID NO: 2629320 - RNA, 19 nt, Homo sapiens
  misc_RNA (1)...(19): siRNA sense strand
ucaugaauuaggugacuuu

SEQ ID NO: 2629321 - RNA, 19 nt, Homo sapiens
  misc_RNA (1)...(19): siRNA sense strand
cuagaaacagccaggggaa

SEQ ID NO: 2629322 - RNA, 19 nt, Homo sapiens
  misc_RNA (1)...(19): siRNA sense strand
caaugaauauguacccaga

SEQ ID NO: 2629323 - RNA, 19 nt, Homo sapiens
  misc_RNA (1)...(19): siRNA sense strand
caguguuagugcuagugaa

SEQ ID NO: 2629324 - RNA, 19 nt, Homo sapiens
  misc_RNA (1)...(19): siRNA sense strand
caaauugaugcuagaucuu

SEQ ID NO: 2629325 - RNA, 19 nt, Homo sapiens
  misc_RNA (1)...(19): siRNA sense strand
agaaaguagauacagauga

SEQ ID NO: 2629326 - RNA, 19 nt, Homo sapiens
  misc_RNA (1)...(19): siRNA sense strand
ucuguaaagugcugggcaa

SEQ ID NO: 2629327 - RNA, 19 nt, Homo sapiens
  misc_RNA (1)...(19): siRNA sense strand
gugcacaagcagacggaga

SEQ ID NO: 2629328 - RNA, 19 nt, Homo sapiens
  misc_RNA (1)...(19): siRNA sense strand
aggacaagcugaagcagga

SEQ ID NO: 2629329 - RNA, 19 nt, Homo sapiens
  misc_RNA (1)...(19): siRNA sense strand
cggacaaggaguacaacau

SEQ ID NO: 2629330 - RNA, 19 nt, Homo sapiens
  misc_RNA (1)...(19): siRNA sense strand
agucaagcggccagggaga

SEQ ID NO: 2629331 - RNA, 19 nt, Homo sapiens
  misc_RNA (1)...(19): siRNA sense strand
gacacagagcagagggaca

SEQ ID NO: 2629332 - RNA, 19 nt, Homo sapiens
  misc_RNA (1)...(19): siRNA sense strand
ccaucaucccugugcacaa

SEQ ID NO: 2629333 - RNA, 19 nt, Homo sapiens
  misc_RNA (1)...(19): siRNA sense strand
agauugaggacaagcugaa

SEQ ID NO: 2629334 - RNA, 19 nt, Homo sapiens
  misc_RNA (1)...(19): siRNA sense strand
gcgccaucuuccugcacaa

SEQ ID NO: 2629335 - RNA, 19 nt, Homo sapiens
  misc_RNA (1)...(19): siRNA sense strand
ccaucaaaggacagaagga

SEQ ID NO: 2629336 - RNA, 19 nt, Homo sapiens
  misc_RNA (1)...(19): siRNA sense strand
aggagaauguugagaagac

SEQ ID NO: 2629337 - RNA, 19 nt, Homo sapiens
  misc_RNA (1)...(19): siRNA sense strand
ucaagaaugacccggacaa

SEQ ID NO: 2629338 - RNA, 19 nt, Homo sapiens
  misc_RNA (1)...(19): siRNA sense strand
ugagcaaguccaaggugua

SEQ ID NO: 2629339 - RNA, 19 nt, Homo sapiens
  misc_RNA (1)...(19): siRNA sense strand
ggaaggccauugugcgaca

SEQ ID NO: 2629340 - RNA, 19 nt, Homo sapiens
  misc_RNA (1)...(19): siRNA sense strand
aguccaagguguacgagga

SEQ ID NO: 2629341 - RNA, 19 nt, Homo sapiens
  misc_RNA (1)...(19): siRNA sense strand
auuacaucgcagagaagaa

SEQ ID NO: 2629342 - RNA, 19 nt, Homo sapiens
  misc_RNA (1)...(19): siRNA sense strand
cccaacaagaggaaagaca

SEQ ID NO: 2629343 - RNA, 19 nt, Homo sapiens
  misc_RNA (1)...(19): siRNA sense strand
ccgagcaccaccagaagaa

SEQ ID NO: 2629344 - RNA, 19 nt, Homo sapiens
  misc_RNA (1)...(19): siRNA sense strand
gugccaaagcgcuggagga

SEQ ID NO: 2629345 - RNA, 19 nt, Homo sapiens
  misc_RNA (1)...(19): siRNA sense strand
ccaucuuccugcacaacaa

SEQ ID NO: 2629346 - RNA, 19 nt, Homo sapiens
  misc_RNA (1)...(19): siRNA sense strand
uucagaaggcaguggagua

SEQ ID NO: 2629347 - RNA, 19 nt, Homo sapiens
  misc_RNA (1)...(19): siRNA sense strand
ucaaaggacagaaggagca

SEQ ID NO: 2629348 - RNA, 19 nt, Homo sapiens
  misc_RNA (1)...(19): siRNA sense strand
uggaagaguaccugggaag

SEQ ID NO: 2629349 - RNA, 19 nt, Homo sapiens
  misc_RNA (1)...(19): siRNA sense strand
uggaggacuucgcagacaa

SEQ ID NO: 2629350 - RNA, 19 nt, Homo sapiens
  misc_RNA (1)...(19): siRNA sense strand
agauuaucaaggagcguuu

SEQ ID NO: 2629351 - RNA, 19 nt, Homo sapiens
  misc_RNA (1)...(19): siRNA sense strand
acgaugaucuggaggccca

SEQ ID NO: 2629352 - RNA, 19 nt, Homo sapiens
  misc_RNA (1)...(19): siRNA sense strand
cugccagcacaaagaacaa

SEQ ID NO: 2629353 - RNA, 19 nt, Homo sapiens
  misc_RNA (1)...(19): siRNA sense strand
ugguuaaaggugacugauu

SEQ ID NO: 2629354 - RNA, 19 nt, Homo sapiens
  misc_RNA (1)...(19): siRNA sense strand
ccggaaggccauugugcga

SEQ ID NO: 2629355 - RNA, 19 nt, Homo sapiens
  misc_RNA (1)...(19): siRNA sense strand
cuggaagaguaccugggaa

SEQ ID NO: 2629356 - RNA, 19 nt, Homo sapiens
  misc_RNA (1)...(19): siRNA sense strand
ccauugucaaggagaccua

SEQ ID NO: 2629357 - RNA, 19 nt, Homo sapiens
  misc_RNA (1)...(19): siRNA sense strand
gcacaagcagacggagaau

SEQ ID NO: 2629358 - RNA, 19 nt, Homo sapiens
  misc_RNA (1)...(19): siRNA sense strand
ugcuggacguggagaccaa

SEQ ID NO: 2629359 - RNA, 19 nt, Homo sapiens
  misc_RNA (1)...(19): siRNA sense strand
ggagaccaucggugccaaa

SEQ ID NO: 2629360 - RNA, 19 nt, Homo sapiens
  misc_RNA (1)...(19): siRNA sense strand
gggcaaggagcggcagauu

SEQ ID NO: 2629361 - RNA, 19 nt, Homo sapiens
  misc_RNA (1)...(19): siRNA sense strand
gggagcacauugagcagca

SEQ ID NO: 2629362 - RNA, 19 nt, Homo sapiens
  misc_RNA (1)...(19): siRNA sense strand
gggcuauuccagacacaga

SEQ ID NO: 2629363 - RNA, 19 nt, Homo sapiens
  misc_RNA (1)...(19): siRNA sense strand
cggagaaucugcagcggcu

SEQ ID NO: 2629364 - RNA, 19 nt, Homo sapiens
  misc_RNA (1)...(19): siRNA sense strand
cgggaaaacccaagggcua

SEQ ID NO: 2629365 - RNA, 19 nt, Homo sapiens
  misc_RNA (1)...(19): siRNA sense strand
cgaguuuggcggugagaga

SEQ ID NO: 2629366 - RNA, 19 nt, Homo sapiens
  misc_RNA (1)...(19): siRNA sense strand
acgauagagagacgggaaa

SEQ ID NO: 2629367 - RNA, 19 nt, Homo sapiens
  misc_RNA (1)...(19): siRNA sense strand
cauacaaggaggagggaug

SEQ ID NO: 2629368 - RNA, 19 nt, Homo sapiens
  misc_RNA (1)...(19): siRNA sense strand
ggaugguagaggugguaga

SEQ ID NO: 2629369 - RNA, 19 nt, Homo sapiens
  misc_RNA (1)...(19): siRNA sense strand
ccauggaaacugaggucuu

SEQ ID NO: 2629370 - RNA, 19 nt, Homo sapiens
  misc_RNA (1)...(19): siRNA sense strand
gauggaaaccagagggaug

SEQ ID NO: 2629371 - RNA, 19 nt, Homo sapiens
  misc_RNA (1)...(19): siRNA sense strand
gaacauuccauaugaggca

SEQ ID NO: 2629372 - RNA, 19 nt, Homo sapiens
  misc_RNA (1)...(19): siRNA sense strand
gugaaaagaauaaggagga

SEQ ID NO: 2629373 - RNA, 19 nt, Homo sapiens
  misc_RNA (1)...(19): siRNA sense strand
gcgaauaccaagaccagga

SEQ ID NO: 2629374 - RNA, 19 nt, Homo sapiens
  misc_RNA (1)...(19): siRNA sense strand
gaggagcaguuaaaggaca

SEQ ID NO: 2629375 - RNA, 19 nt, Homo sapiens
  misc_RNA (1)...(19): siRNA sense strand
aggagcaguuaaaggacau

SEQ ID NO: 2629376 - RNA, 19 nt, Homo sapiens
  misc_RNA (1)...(19): siRNA sense strand
guuaaagagccuugggccu

SEQ ID NO: 2629377 - RNA, 19 nt, Homo sapiens
  misc_RNA (1)...(19): siRNA sense strand
guucagugggagagcgcuu

SEQ ID NO: 2629378 - RNA, 19 nt, Homo sapiens
  misc_RNA (1)...(19): siRNA sense strand
gggcaggcauacaaggagu

SEQ ID NO: 2629379 - RNA, 19 nt, Homo sapiens
  misc_RNA (1)...(19): siRNA sense strand
aagaauaaggaggaguuaa

SEQ ID NO: 2629380 - RNA, 19 nt, Homo sapiens
  misc_RNA (1)...(19): siRNA sense strand
cagacaggucccaggcauu

SEQ ID NO: 2629381 - RNA, 19 nt, Homo sapiens
  misc_RNA (1)...(19): siRNA sense strand
gagaggagaggaauggaga

SEQ ID NO: 2629382 - RNA, 19 nt, Homo sapiens
  misc_RNA (1)...(19): siRNA sense strand
ggguacaggcauacaagga

SEQ ID NO: 2629383 - RNA, 19 nt, Homo sapiens
  misc_RNA (1)...(19): siRNA sense strand
gggagggccauuaggagau

SEQ ID NO: 2629384 - RNA, 19 nt, Homo sapiens
  misc_RNA (1)...(19): siRNA sense strand
caguauacaaggaggaggu

SEQ ID NO: 2629385 - RNA, 19 nt, Homo sapiens
  misc_RNA (1)...(19): siRNA sense strand
cgauagagagacgggaaaa

SEQ ID NO: 2629386 - RNA, 19 nt, Homo sapiens
  misc_RNA (1)...(19): siRNA sense strand
aggaggaguuaaagagccu

SEQ ID NO: 2629387 - RNA, 19 nt, Homo sapiens
  misc_RNA (1)...(19): siRNA sense strand
gcgggaguucagugggaga

SEQ ID NO: 2629388 - RNA, 19 nt, Homo sapiens
  misc_RNA (1)...(19): siRNA sense strand
cugguauacgauagagaga

SEQ ID NO: 2629389 - RNA, 19 nt, Homo sapiens
  misc_RNA (1)...(19): siRNA sense strand
augcaagaggauuggagau

SEQ ID NO: 2629390 - RNA, 19 nt, Homo sapiens
  misc_RNA (1)...(19): siRNA sense strand
aauaaggaggaguuaaaga

SEQ ID NO: 2629391 - RNA, 19 nt, Homo sapiens
  misc_RNA (1)...(19): siRNA sense strand
gcauuuggcuagaagaccu

SEQ ID NO: 2629392 - RNA, 19 nt, Homo sapiens
  misc_RNA (1)...(19): siRNA sense strand
ccagacugcuaauuggaga

SEQ ID NO: 2629393 - RNA, 19 nt, Homo sapiens
  misc_RNA (1)...(19): siRNA sense strand
ggagaggaauggagaccug

SEQ ID NO: 2629394 - RNA, 19 nt, Homo sapiens
  misc_RNA (1)...(19): siRNA sense strand
gagaccugugcgauggaaa

SEQ ID NO: 2629395 - RNA, 19 nt, Homo sapiens
  misc_RNA (1)...(19): siRNA sense strand
agguauacaaggaggaggu

SEQ ID NO: 2629396 - RNA, 19 nt, Homo sapiens
  misc_RNA (1)...(19): siRNA sense strand
gcgauggaaaccagaggga

SEQ ID NO: 2629397 - RNA, 19 nt, Homo sapiens
  misc_RNA (1)...(19): siRNA sense strand
agucaguauacaaggagga

SEQ ID NO: 2629398 - RNA, 19 nt, Homo sapiens
  misc_RNA (1)...(19): siRNA sense strand
caucaggaauguugggcuu

SEQ ID NO: 2629399 - RNA, 19 nt, Homo sapiens
  misc_RNA (1)...(19): siRNA sense strand
agagugaggaagaggaaga

SEQ ID NO: 2629400 - RNA, 19 nt, Homo sapiens
  misc_RNA (1)...(19): siRNA sense strand
cuacaaagucagugcagca

SEQ ID NO: 2629401 - RNA, 19 nt, Homo sapiens
  misc_RNA (1)...(19): siRNA sense strand
caugaugaauggagggaug

SEQ ID NO: 2629402 - RNA, 19 nt, Homo sapiens
  misc_RNA (1)...(19): siRNA sense strand
cuuuagggagugagaguga

SEQ ID NO: 2629403 - RNA, 19 nt, Homo sapiens
  misc_RNA (1)...(19): siRNA sense strand
aacaggagcugcagggaga

SEQ ID NO: 2629404 - RNA, 19 nt, Homo sapiens
  misc_RNA (1)...(19): siRNA sense strand
ggagagcucuuuagggagu

SEQ ID NO: 2629405 - RNA, 19 nt, Homo sapiens
  misc_RNA (1)...(19): siRNA sense strand
aggaagaggaagaauuuua

SEQ ID NO: 2629406 - RNA, 19 nt, Homo sapiens
  misc_RNA (1)...(19): siRNA sense strand
agggagugagagugaggaa

SEQ ID NO: 2629407 - RNA, 19 nt, Homo sapiens
  misc_RNA (1)...(19): siRNA sense strand
ugagagugaggaagaggaa

SEQ ID NO: 2629408 - RNA, 19 nt, Homo sapiens
  misc_RNA (1)...(19): siRNA sense strand
cccaacaguguguggacaa

SEQ ID NO: 2629409 - RNA, 19 nt, Homo sapiens
  misc_RNA (1)...(19): siRNA sense strand
augaagagacucagaugau

SEQ ID NO: 2629410 - RNA, 19 nt, Homo sapiens
  misc_RNA (1)...(19): siRNA sense strand
ggaugucgcugguggccuu

SEQ ID NO: 2629411 - RNA, 19 nt, Homo sapiens
  misc_RNA (1)...(19): siRNA sense strand
ugguuaaccugcagggaac

SEQ ID NO: 2629412 - RNA, 19 nt, Homo sapiens
  misc_RNA (1)...(19): siRNA sense strand
ggacacacuuugauccuga

SEQ ID NO: 2629413 - RNA, 19 nt, Homo sapiens
  misc_RNA (1)...(19): siRNA sense strand
augcagaugaagagacuca

SEQ ID NO: 2629414 - RNA, 19 nt, Homo sapiens
  misc_RNA (1)...(19): siRNA sense strand
ucgcaggcugggagaagaa

SEQ ID NO: 2629415 - RNA, 19 nt, Homo sapiens
  misc_RNA (1)...(19): siRNA sense strand
guggaaguauuuaugccaa

SEQ ID NO: 2629416 - RNA, 19 nt, Homo sapiens
  misc_RNA (1)...(19): siRNA sense strand
aaggagagcucuuuaggga

SEQ ID NO: 2629417 - RNA, 19 nt, Homo sapiens
  misc_RNA (1)...(19): siRNA sense strand
uggccuuugucuugcuuaa

SEQ ID NO: 2629418 - RNA, 19 nt, Homo sapiens
  misc_RNA (1)...(19): siRNA sense strand
ugguguauuuguuggaguu

SEQ ID NO: 2629419 - RNA, 19 nt, Homo sapiens
  misc_RNA (1)...(19): siRNA sense strand
cuggaggacccuagccauu

SEQ ID NO: 2629420 - RNA, 19 nt, Homo sapiens
  misc_RNA (1)...(19): siRNA sense strand
gagaagacgugaagcccau

SEQ ID NO: 2629421 - RNA, 19 nt, Homo sapiens
  misc_RNA (1)...(19): siRNA sense strand
cugaaugagcagcgggaca

SEQ ID NO: 2629422 - RNA, 19 nt, Homo sapiens
  misc_RNA (1)...(19): siRNA sense strand
ugaagaugaaagagaugaa

SEQ ID NO: 2629423 - RNA, 19 nt, Homo sapiens
  misc_RNA (1)...(19): siRNA sense strand
ccgcaagaccuacacggua

SEQ ID NO: 2629424 - RNA, 19 nt, Homo sapiens
  misc_RNA (1)...(19): siRNA sense strand
ugaaagagaugaaaggcag

SEQ ID NO: 2629425 - RNA, 19 nt, Homo sapiens
  misc_RNA (1)...(19): siRNA sense strand
augaaagagaugaaaggca

SEQ ID NO: 2629426 - RNA, 19 nt, Homo sapiens
  misc_RNA (1)...(19): siRNA sense strand
ccacuggagaagacgugaa

SEQ ID NO: 2629427 - RNA, 19 nt, Homo sapiens
  misc_RNA (1)...(19): siRNA sense strand
ggagaagacgugaagccca

SEQ ID NO: 2629428 - RNA, 19 nt, Homo sapiens
  misc_RNA (1)...(19): siRNA sense strand
ggccaagcugcgcgaagaa

SEQ ID NO: 2629429 - RNA, 19 nt, Homo sapiens
  misc_RNA (1)...(19): siRNA sense strand
ugacggagcuggaggacga

SEQ ID NO: 2629430 - RNA, 19 nt, Homo sapiens
  misc_RNA (1)...(19): siRNA sense strand
ggacagagggagaggagcu

SEQ ID NO: 2629431 - RNA, 19 nt, Homo sapiens
  misc_RNA (1)...(19): siRNA sense strand
uggaggacgaggugcgcaa

SEQ ID NO: 2629432 - RNA, 19 nt, Homo sapiens
  misc_RNA (1)...(19): siRNA sense strand
gggcacaggaaccagguga

SEQ ID NO: 2629433 - RNA, 19 nt, Homo sapiens
  misc_RNA (1)...(19): siRNA sense strand
gcaccauggagaagagcgu

SEQ ID NO: 2629434 - RNA, 19 nt, Homo sapiens
  misc_RNA (1)...(19): siRNA sense strand
cggaagugaauguggacua

SEQ ID NO: 2629435 - RNA, 19 nt, Homo sapiens
  misc_RNA (1)...(19): siRNA sense strand
cugcuaaacucaaaggcuu

SEQ ID NO: 2629436 - RNA, 19 nt, Homo sapiens
  misc_RNA (1)...(19): siRNA sense strand
gggauaucaaagugacaga

SEQ ID NO: 2629437 - RNA, 19 nt, Homo sapiens
  misc_RNA (1)...(19): siRNA sense strand
cuuugguauuucagggaga

SEQ ID NO: 2629438 - RNA, 19 nt, Homo sapiens
  misc_RNA (1)...(19): siRNA sense strand
guauaaaacuggagccuuc

SEQ ID NO: 2629439 - RNA, 19 nt, Homo sapiens
  misc_RNA (1)...(19): siRNA sense strand
cuucuaaaggcaaggggaa

SEQ ID NO: 2629440 - RNA, 19 nt, Homo sapiens
  misc_RNA (1)...(19): siRNA sense strand
auacaauggcugaaggaag

SEQ ID NO: 2629441 - RNA, 19 nt, Homo sapiens
  misc_RNA (1)...(19): siRNA sense strand
aagaugagcugucggagca

SEQ ID NO: 2629442 - RNA, 19 nt, Homo sapiens
  misc_RNA (1)...(19): siRNA sense strand
caaccaagaccaaaggaca

SEQ ID NO: 2629443 - RNA, 19 nt, Homo sapiens
  misc_RNA (1)...(19): siRNA sense strand
aguggauaucacaggcuaa

SEQ ID NO: 2629444 - RNA, 19 nt, Homo sapiens
  misc_RNA (1)...(19): siRNA sense strand
ugaaggagcaugugcagga

SEQ ID NO: 2629445 - RNA, 19 nt, Homo sapiens
  misc_RNA (1)...(19): siRNA sense strand
ggaugaucaagaagagaaa

SEQ ID NO: 2629446 - RNA, 19 nt, Homo sapiens
  misc_RNA (1)...(19): siRNA sense strand
cauaaauauuugugagcga

SEQ ID NO: 2629447 - RNA, 19 nt, Homo sapiens
  misc_RNA (1)...(19): siRNA sense strand
guaacaaguucuagcccua

SEQ ID NO: 2629448 - RNA, 19 nt, Homo sapiens
  misc_RNA (1)...(19): siRNA sense strand
uguuaauggcaguggguau

SEQ ID NO: 2629449 - RNA, 19 nt, Homo sapiens
  misc_RNA (1)...(19): siRNA sense strand
ugguaaacugagugacaua

SEQ ID NO: 2629450 - RNA, 19 nt, Homo sapiens
  misc_RNA (1)...(19): siRNA sense strand
ucaacgaagaguagagaau

SEQ ID NO: 2629451 - RNA, 19 nt, Homo sapiens
  misc_RNA (1)...(19): siRNA sense strand
ggauacauauugauggaga

SEQ ID NO: 2629452 - RNA, 19 nt, Homo sapiens
  misc_RNA (1)...(19): siRNA sense strand
gcuaaguaacgauggauau

SEQ ID NO: 2629453 - RNA, 19 nt, Homo sapiens
  misc_RNA (1)...(19): siRNA sense strand
uucaauugcucgaaggaaa

SEQ ID NO: 2629454 - RNA, 19 nt, Homo sapiens
  misc_RNA (1)...(19): siRNA sense strand
ccguaaagaacuacaggau

SEQ ID NO: 2629455 - RNA, 19 nt, Homo sapiens
  misc_RNA (1)...(19): siRNA sense strand
caguauggugucagcguua

SEQ ID NO: 2629456 - RNA, 19 nt, Homo sapiens
  misc_RNA (1)...(19): siRNA sense strand
ucgucugacuauugguaaa

SEQ ID NO: 2629457 - RNA, 19 nt, Homo sapiens
  misc_RNA (1)...(19): siRNA sense strand
gcauaagaagaaagcugaa

SEQ ID NO: 2629458 - RNA, 19 nt, Homo sapiens
  misc_RNA (1)...(19): siRNA sense strand
cugcauggcauuccagaaa

SEQ ID NO: 2629459 - RNA, 19 nt, Homo sapiens
  misc_RNA (1)...(19): siRNA sense strand
agagaaaggguuuacgauu

SEQ ID NO: 2629460 - RNA, 19 nt, Homo sapiens
  misc_RNA (1)...(19): siRNA sense strand
uaguagcacuggaggaaca

SEQ ID NO: 2629461 - RNA, 19 nt, Homo sapiens
  misc_RNA (1)...(19): siRNA sense strand
caucuuaaagguaaagcaa

SEQ ID NO: 2629462 - RNA, 19 nt, Homo sapiens
  misc_RNA (1)...(19): siRNA sense strand
cgauaggugcagagaaacu

SEQ ID NO: 2629463 - RNA, 19 nt, Homo sapiens
  misc_RNA (1)...(19): siRNA sense strand
ggcaaaagcauuggggaua

SEQ ID NO: 2629464 - RNA, 19 nt, Homo sapiens
  misc_RNA (1)...(19): siRNA sense strand
aaagguaaagcaagacaaa

SEQ ID NO: 2629465 - RNA, 19 nt, Homo sapiens
  misc_RNA (1)...(19): siRNA sense strand
cugaagaaacagagugucu

SEQ ID NO: 2629466 - RNA, 19 nt, Homo sapiens
  misc_RNA (1)...(19): siRNA sense strand
guaggaacuguuauggaaa

SEQ ID NO: 2629467 - RNA, 19 nt, Homo sapiens
  misc_RNA (1)...(19): siRNA sense strand
gugcagagaaacuggcuga

SEQ ID NO: 2629468 - RNA, 19 nt, Homo sapiens
  misc_RNA (1)...(19): siRNA sense strand
uggcaaaagcauuggggau

SEQ ID NO: 2629469 - RNA, 19 nt, Homo sapiens
  misc_RNA (1)...(19): siRNA sense strand
aggaugaucaagaagagaa

SEQ ID NO: 2629470 - RNA, 19 nt, Homo sapiens
  misc_RNA (1)...(19): siRNA sense strand
ggaguuauauaauuggaga

SEQ ID NO: 2629471 - RNA, 19 nt, Homo sapiens
  misc_RNA (1)...(19): siRNA sense strand
gaagaguagagaauggaga

SEQ ID NO: 2629472 - RNA, 19 nt, Homo sapiens
  misc_RNA (1)...(19): siRNA sense strand
uaauugaagccaagacuau

SEQ ID NO: 2629473 - RNA, 19 nt, Homo sapiens
  misc_RNA (1)...(19): siRNA sense strand
acgauuaauugaugcacuu

SEQ ID NO: 2629474 - RNA, 19 nt, Homo sapiens
  misc_RNA (1)...(19): siRNA sense strand
agccagugcauuagaauau

SEQ ID NO: 2629475 - RNA, 19 nt, Homo sapiens
  misc_RNA (1)...(19): siRNA sense strand
aggaacaggaauuaucaaa

SEQ ID NO: 2629476 - RNA, 19 nt, Homo sapiens
  misc_RNA (1)...(19): siRNA sense strand
ugcuaauaccaguaguaaa

SEQ ID NO: 2629477 - RNA, 19 nt, Homo sapiens
  misc_RNA (1)...(19): siRNA sense strand
guuaguagcacuggaggaa

SEQ ID NO: 2629478 - RNA, 19 nt, Homo sapiens
  misc_RNA (1)...(19): siRNA sense strand
uuaucugacacuagcaaua

SEQ ID NO: 2629479 - RNA, 19 nt, Homo sapiens
  misc_RNA (1)...(19): siRNA sense strand
gucaaguugcuaaaggaua

SEQ ID NO: 2629480 - RNA, 19 nt, Homo sapiens
  misc_RNA (1)...(19): siRNA sense strand
gugcaguagcaaagucuau

SEQ ID NO: 2629481 - RNA, 19 nt, Homo sapiens
  misc_RNA (1)...(19): siRNA sense strand
cuggauauuugcaggcuca

SEQ ID NO: 2629482 - RNA, 19 nt, Homo sapiens
  misc_RNA (1)...(19): siRNA sense strand
cagagagaacugauaugaa

SEQ ID NO: 2629483 - RNA, 19 nt, Homo sapiens
  misc_RNA (1)...(19): siRNA sense strand
cauaagaagaaagcugaaa

SEQ ID NO: 2629484 - RNA, 19 nt, Homo sapiens
  misc_RNA (1)...(19): siRNA sense strand
caagaagagaaaggguuua

SEQ ID NO: 2629485 - RNA, 19 nt, Homo sapiens
  misc_RNA (1)...(19): siRNA sense strand
gagagaacugauaugaaaa

SEQ ID NO: 2629486 - RNA, 19 nt, Homo sapiens
  misc_RNA (1)...(19): siRNA sense strand
ccacuugcuaagauuaaua

SEQ ID NO: 2629487 - RNA, 19 nt, Homo sapiens
  misc_RNA (1)...(19): siRNA sense strand
ucucaaagccucuaaaauu

SEQ ID NO: 2629488 - RNA, 19 nt, Homo sapiens
  misc_RNA (1)...(19): siRNA sense strand
uggcauuccagaaagcuua

SEQ ID NO: 2629489 - RNA, 19 nt, Homo sapiens
  misc_RNA (1)...(19): siRNA sense strand
ugcacuuguagaagagaaa

SEQ ID NO: 2629490 - RNA, 19 nt, Homo sapiens
  misc_RNA (1)...(19): siRNA sense strand
guuuauggacuuuggucuu

SEQ ID NO: 2629491 - RNA, 19 nt, Homo sapiens
  misc_RNA (1)...(19): siRNA sense strand
gggaauuguaucuucaaca

SEQ ID NO: 2629492 - RNA, 19 nt, Homo sapiens
  misc_RNA (1)...(19): siRNA sense strand
agaacuacaggaugaucaa

SEQ ID NO: 2629493 - RNA, 19 nt, Homo sapiens
  misc_RNA (1)...(19): siRNA sense strand
cacuggaggaacaggaauu

SEQ ID NO: 2629494 - RNA, 19 nt, Homo sapiens
  misc_RNA (1)...(19): siRNA sense strand
acguguuaauugaagccaa

SEQ ID NO: 2629495 - RNA, 19 nt, Homo sapiens
  misc_RNA (1)...(19): siRNA sense strand
ugucagaucauaggcgaaa

SEQ ID NO: 2629496 - RNA, 19 nt, Homo sapiens
  misc_RNA (1)...(19): siRNA sense strand
aaucauguacugaaaguga

SEQ ID NO: 2629497 - RNA, 19 nt, Homo sapiens
  misc_RNA (1)...(19): siRNA sense strand
acuacaggaugaucaagaa

SEQ ID NO: 2629498 - RNA, 19 nt, Homo sapiens
  misc_RNA (1)...(19): siRNA sense strand
aguaagcaucuuugacauu

SEQ ID NO: 2629499 - RNA, 19 nt, Homo sapiens
  misc_RNA (1)...(19): siRNA sense strand
ccaucaaucacuuugucaa

SEQ ID NO: 2629500 - RNA, 19 nt, Homo sapiens
  misc_RNA (1)...(19): siRNA sense strand
ugcuaaguaacgauggaua

SEQ ID NO: 2629501 - RNA, 19 nt, Homo sapiens
  misc_RNA (1)...(19): siRNA sense strand
acugaggaccauaacuaua

SEQ ID NO: 2629502 - RNA, 19 nt, Homo sapiens
  misc_RNA (1)...(19): siRNA sense strand
agaauggagaucagcucua

SEQ ID NO: 2629503 - RNA, 19 nt, Homo sapiens
  misc_RNA (1)...(19): siRNA sense strand
uccagaaagcuuacuauaa

SEQ ID NO: 2629504 - RNA, 19 nt, Homo sapiens
  misc_RNA (1)...(19): siRNA sense strand
gcaaacaaguuaucagcuc

SEQ ID NO: 2629505 - RNA, 19 nt, Homo sapiens
  misc_RNA (1)...(19): siRNA sense strand
gaacuguuauggaaaggga

SEQ ID NO: 2629506 - RNA, 19 nt, Homo sapiens
  misc_RNA (1)...(19): siRNA sense strand
guaauauguuuaugggagu

SEQ ID NO: 2629507 - RNA, 19 nt, Homo sapiens
  misc_RNA (1)...(19): siRNA sense strand
gcagcgaagaggagaggca

SEQ ID NO: 2629508 - RNA, 19 nt, Homo sapiens
  misc_RNA (1)...(19): siRNA sense strand
aagauuaauucauggagga

SEQ ID NO: 2629509 - RNA, 19 nt, Homo sapiens
  misc_RNA (1)...(19): siRNA sense strand
uguaaugaaugcagcacca

SEQ ID NO: 2629510 - RNA, 19 nt, Homo sapiens
  misc_RNA (1)...(19): siRNA sense strand
gaugaaagggccacagcca

SEQ ID NO: 2629511 - RNA, 19 nt, Homo sapiens
  misc_RNA (1)...(19): siRNA sense strand
ugaaagggccacagccaca

SEQ ID NO: 2629512 - RNA, 19 nt, Homo sapiens
  misc_RNA (1)...(19): siRNA sense strand
cauggaggacagauguuaa

SEQ ID NO: 2629513 - RNA, 19 nt, Homo sapiens
  misc_RNA (1)...(19): siRNA sense strand
aguuaucggagaagcguuu

SEQ ID NO: 2629514 - RNA, 19 nt, Homo sapiens
  misc_RNA (1)...(19): siRNA sense strand
gagaaugaaugaaggccaa

SEQ ID NO: 2629515 - RNA, 19 nt, Homo sapiens
  misc_RNA (1)...(19): siRNA sense strand
gcuacauggccaaggacaa

SEQ ID NO: 2629516 - RNA, 19 nt, Homo sapiens
  misc_RNA (1)...(19): siRNA sense strand
ggaaaggagacgucgguca

SEQ ID NO: 2629517 - RNA, 19 nt, Homo sapiens
  misc_RNA (1)...(19): siRNA sense strand
gcggcaagcaggauggcua

SEQ ID NO: 2629518 - RNA, 19 nt, Homo sapiens
  misc_RNA (1)...(19): siRNA sense strand
ggagaaugaaugaaggcca

SEQ ID NO: 2629519 - RNA, 19 nt, Homo sapiens
  misc_RNA (1)...(19): siRNA sense strand
ggagagguguacaggacca

SEQ ID NO: 2629520 - RNA, 19 nt, Homo sapiens
  misc_RNA (1)...(19): siRNA sense strand
aggacaaguuucggagaau

SEQ ID NO: 2629521 - RNA, 19 nt, Homo sapiens
  misc_RNA (1)...(19): siRNA sense strand
aaaugauauccgaguggaa

SEQ ID NO: 2629522 - RNA, 19 nt, Homo sapiens
  misc_RNA (1)...(19): siRNA sense strand
ugaaacagcuggagguccu

SEQ ID NO: 2629523 - RNA, 19 nt, Homo sapiens
  misc_RNA (1)...(19): siRNA sense strand
gggccgacuuccagaccau

SEQ ID NO: 2629524 - RNA, 19 nt, Homo sapiens
  misc_RNA (1)...(19): siRNA sense strand
ccaucaucugguugcgaaa

SEQ ID NO: 2629525 - RNA, 19 nt, Homo sapiens
  misc_RNA (1)...(19): siRNA sense strand
gagaagacccugacccuca

SEQ ID NO: 2629526 - RNA, 19 nt, Homo sapiens
  misc_RNA (1)...(19): siRNA sense strand
acggcaagcgggagagcau

SEQ ID NO: 2629527 - RNA, 19 nt, Homo sapiens
  misc_RNA (1)...(19): siRNA sense strand
gcuccgacacugagaucau

SEQ ID NO: 2629528 - RNA, 19 nt, Homo sapiens
  misc_RNA (1)...(19): siRNA sense strand
cggcaagcaggauggcuau

SEQ ID NO: 2629529 - RNA, 19 nt, Homo sapiens
  misc_RNA (1)...(19): siRNA sense strand
uggagaauggccagagcau

SEQ ID NO: 2629530 - RNA, 19 nt, Homo sapiens
  misc_RNA (1)...(19): siRNA sense strand
gcugucuggugcugggcua

SEQ ID NO: 2629531 - RNA, 19 nt, Homo sapiens
  misc_RNA (1)...(19): siRNA sense strand
ggggugaauuccagcaaga

SEQ ID NO: 2629532 - RNA, 19 nt, Homo sapiens
  misc_RNA (1)...(19): siRNA sense strand
augauauccgaguggaaau

SEQ ID NO: 2629533 - RNA, 19 nt, Homo sapiens
  misc_RNA (1)...(19): siRNA sense strand
agaaaugagcaaaggcaaa

SEQ ID NO: 2629534 - RNA, 19 nt, Homo sapiens
  misc_RNA (1)...(19): siRNA sense strand
gaguuuacuucuagggaau

SEQ ID NO: 2629535 - RNA, 19 nt, Homo sapiens
  misc_RNA (1)...(19): siRNA sense strand
ugagaagagcggagagcaa

SEQ ID NO: 2629536 - RNA, 19 nt, Homo sapiens
  misc_RNA (1)...(19): siRNA sense strand
gaaagaaagacgaacggua

SEQ ID NO: 2629537 - RNA, 19 nt, Homo sapiens
  misc_RNA (1)...(19): siRNA sense strand
ggaaagugaacauggaaaa

SEQ ID NO: 2629538 - RNA, 19 nt, Homo sapiens
  misc_RNA (1)...(19): siRNA sense strand
cuucaauggaugaggaaca

SEQ ID NO: 2629539 - RNA, 19 nt, Homo sapiens
  misc_RNA (1)...(19): siRNA sense strand
uggaagauuuggagacaga

SEQ ID NO: 2629540 - RNA, 19 nt, Homo sapiens
  misc_RNA (1)...(19): siRNA sense strand
ggucaaauggauagcccua

SEQ ID NO: 2629541 - RNA, 19 nt, Homo sapiens
  misc_RNA (1)...(19): siRNA sense strand
gagcaagggcugaggaaag

SEQ ID NO: 2629542 - RNA, 19 nt, Homo sapiens
  misc_RNA (1)...(19): siRNA sense strand
ggugaaggagcgugcuaaa

SEQ ID NO: 2629543 - RNA, 19 nt, Homo sapiens
  misc_RNA (1)...(19): siRNA sense strand
gaggaacagucaaaggcaa

SEQ ID NO: 2629544 - RNA, 19 nt, Homo sapiens
  misc_RNA (1)...(19): siRNA sense strand
aggaaagugaacauggaaa

SEQ ID NO: 2629545 - RNA, 19 nt, Homo sapiens
  misc_RNA (1)...(19): siRNA sense strand
gguauaugaugaagaggca

SEQ ID NO: 2629546 - RNA, 19 nt, Homo sapiens
  misc_RNA (1)...(19): siRNA sense strand
cagaaaugagcaaaggcaa

SEQ ID NO: 2629547 - RNA, 19 nt, Homo sapiens
  misc_RNA (1)...(19): siRNA sense strand
uaucauaacauucggguau

SEQ ID NO: 2629548 - RNA, 19 nt, Homo sapiens
  misc_RNA (1)...(19): siRNA sense strand
cuggacagauugaggauga

SEQ ID NO: 2629549 - RNA, 19 nt, Homo sapiens
  misc_RNA (1)...(19): siRNA sense strand
ucucuaaagcaaagaaaca

SEQ ID NO: 2629550 - RNA, 19 nt, Homo sapiens
  misc_RNA (1)...(19): siRNA sense strand
ccaaauuaagggagaucau

SEQ ID NO: 2629551 - RNA, 19 nt, Homo sapiens
  misc_RNA (1)...(19): siRNA sense strand
gaacaagcaugcaggcgau

SEQ ID NO: 2629552 - RNA, 19 nt, Homo sapiens
  misc_RNA (1)...(19): siRNA sense strand
gagacaacuggaagaguau

SEQ ID NO: 2629553 - RNA, 19 nt, Homo sapiens
  misc_RNA (1)...(19): siRNA sense strand
ccaagaggguagaaaucau

SEQ ID NO: 2629554 - RNA, 19 nt, Homo sapiens
  misc_RNA (1)...(19): siRNA sense strand
agacaagacacugaagaaa

SEQ ID NO: 2629555 - RNA, 19 nt, Homo sapiens
  misc_RNA (1)...(19): siRNA sense strand
acaagaugcaaaucagaaa

SEQ ID NO: 2629556 - RNA, 19 nt, Homo sapiens
  misc_RNA (1)...(19): siRNA sense strand
gggagaucaugaugcagaa

SEQ ID NO: 2629557 - RNA, 19 nt, Homo sapiens
  misc_RNA (1)...(19): siRNA sense strand
acuuaacaguggaagauuu

SEQ ID NO: 2629558 - RNA, 19 nt, Homo sapiens
  misc_RNA (1)...(19): siRNA sense strand
auucaaggauggaggaacu

SEQ ID NO: 2629559 - RNA, 19 nt, Homo sapiens
  misc_RNA (1)...(19): siRNA sense strand
gggaguuacaggagaaaau

SEQ ID NO: 2629560 - RNA, 19 nt, Homo sapiens
  misc_RNA (1)...(19): siRNA sense strand
ggaguuuacuucuagggaa

SEQ ID NO: 2629561 - RNA, 19 nt, Homo sapiens
  misc_RNA (1)...(19): siRNA sense strand
ccuaugacuaugugaaaga

SEQ ID NO: 2629562 - RNA, 19 nt, Homo sapiens
  misc_RNA (1)...(19): siRNA sense strand
cagaaaggccuguguacca

SEQ ID NO: 2629563 - RNA, 19 nt, Homo sapiens
  misc_RNA (1)...(19): siRNA sense strand
gaacacagcaggaaggagu

SEQ ID NO: 2629564 - RNA, 19 nt, Homo sapiens
  misc_RNA (1)...(19): siRNA sense strand
uggaugaggaacagucaaa

SEQ ID NO: 2629565 - RNA, 19 nt, Homo sapiens
  misc_RNA (1)...(19): siRNA sense strand
uagacaagacacugaagaa

SEQ ID NO: 2629566 - RNA, 19 nt, Homo sapiens
  misc_RNA (1)...(19): siRNA sense strand
ccauaucaacucagaucaa

SEQ ID NO: 2629567 - RNA, 19 nt, Homo sapiens
  misc_RNA (1)...(19): siRNA sense strand
caacggaucuccuggcgua

SEQ ID NO: 2629568 - RNA, 19 nt, Homo sapiens
  misc_RNA (1)...(19): siRNA sense strand
gcugaugaccagagaagca

SEQ ID NO: 2629569 - RNA, 19 nt, Homo sapiens
  misc_RNA (1)...(19): siRNA sense strand
aggaacagucaaaggcaau

SEQ ID NO: 2629570 - RNA, 19 nt, Homo sapiens
  misc_RNA (1)...(19): siRNA sense strand
uggcagaccuagcaccaaa

SEQ ID NO: 2629571 - RNA, 19 nt, Homo sapiens
  misc_RNA (1)...(19): siRNA sense strand
cuguaagacuggaaaguac

SEQ ID NO: 2629572 - RNA, 19 nt, Homo sapiens
  misc_RNA (1)...(19): siRNA sense strand
gguuucaacuaaugguaga

SEQ ID NO: 2629573 - RNA, 19 nt, Homo sapiens
  misc_RNA (1)...(19): siRNA sense strand
gucaaugaauggaaugcaa

SEQ ID NO: 2629574 - RNA, 19 nt, Homo sapiens
  misc_RNA (1)...(19): siRNA sense strand
ugaacgaacagaaaggcua

SEQ ID NO: 2629575 - RNA, 19 nt, Homo sapiens
  misc_RNA (1)...(19): siRNA sense strand
ucacaacaacagaguguau

SEQ ID NO: 2629576 - RNA, 19 nt, Homo sapiens
  misc_RNA (1)...(19): siRNA sense strand
ggaacaagcaugcaggcga

SEQ ID NO: 2629577 - RNA, 19 nt, Homo sapiens
  misc_RNA (1)...(19): siRNA sense strand
auaagaacagaguuggaaa

SEQ ID NO: 2629578 - RNA, 19 nt, Homo sapiens
  misc_RNA (1)...(19): siRNA sense strand
gauagugauccuuggucaa

SEQ ID NO: 2629579 - RNA, 19 nt, Homo sapiens
  misc_RNA (1)...(19): siRNA sense strand
cagaaauggccaacaaguu

SEQ ID NO: 2629580 - RNA, 19 nt, Homo sapiens
  misc_RNA (1)...(19): siRNA sense strand
cagacuuaacaguggaaga

SEQ ID NO: 2629581 - RNA, 19 nt, Homo sapiens
  misc_RNA (1)...(19): siRNA sense strand
caacagacccacugaccau

SEQ ID NO: 2629582 - RNA, 19 nt, Homo sapiens
  misc_RNA (1)...(19): siRNA sense strand
gugaaaacauaaagagucu

SEQ ID NO: 2629583 - RNA, 19 nt, Homo sapiens
  misc_RNA (1)...(19): siRNA sense strand
aguguauugugcagagcaa

SEQ ID NO: 2629584 - RNA, 19 nt, Homo sapiens
  misc_RNA (1)...(19): siRNA sense strand
ugaacuagccaaagacuca

SEQ ID NO: 2629585 - RNA, 19 nt, Homo sapiens
  misc_RNA (1)...(19): siRNA sense strand
ugcagaaggauuuggagaa

SEQ ID NO: 2629586 - RNA, 19 nt, Homo sapiens
  misc_RNA (1)...(19): siRNA sense strand
gcuauaugguagugguuuc

SEQ ID NO: 2629587 - RNA, 19 nt, Homo sapiens
  misc_RNA (1)...(19): siRNA sense strand
aggaagacaaucagggaau

SEQ ID NO: 2629588 - RNA, 19 nt, Homo sapiens
  misc_RNA (1)...(19): siRNA sense strand
cuacaggggaaaagagaaa

SEQ ID NO: 2629589 - RNA, 19 nt, Homo sapiens
  misc_RNA (1)...(19): siRNA sense strand
cuagaggauacaaaggaaa

SEQ ID NO: 2629590 - RNA, 19 nt, Homo sapiens
  misc_RNA (1)...(19): siRNA sense strand
cagccaagaaacagcaaau

SEQ ID NO: 2629591 - RNA, 19 nt, Homo sapiens
  misc_RNA (1)...(19): siRNA sense strand
aggaaauggguauuagcaa

SEQ ID NO: 2629592 - RNA, 19 nt, Homo sapiens
  misc_RNA (1)...(19): siRNA sense strand
gaggaagacaaucagggaa

SEQ ID NO: 2629593 - RNA, 19 nt, Homo sapiens
  misc_RNA (1)...(19): siRNA sense strand
caucaaaaggaaaugggua

SEQ ID NO: 2629594 - RNA, 19 nt, Homo sapiens
  misc_RNA (1)...(19): siRNA sense strand
agagcauagaacaggacua

SEQ ID NO: 2629595 - RNA, 19 nt, Homo sapiens
  misc_RNA (1)...(19): siRNA sense strand
cacuuuaagaagacagauu

SEQ ID NO: 2629596 - RNA, 19 nt, Homo sapiens
  misc_RNA (1)...(19): siRNA sense strand
gcgagcuagaggauacaaa

SEQ ID NO: 2629597 - RNA, 19 nt, Homo sapiens
  misc_RNA (1)...(19): siRNA sense strand
gugaaaugcugcuccgcca

SEQ ID NO: 2629598 - RNA, 19 nt, Homo sapiens
  misc_RNA (1)...(19): siRNA sense strand
aguuaaaaggacugacauu

SEQ ID NO: 2629599 - RNA, 19 nt, Homo sapiens
  misc_RNA (1)...(19): siRNA sense strand
ucaugugaucggcgagcua

SEQ ID NO: 2629600 - RNA, 19 nt, Homo sapiens
  misc_RNA (1)...(19): siRNA sense strand
uucagaaaucauugaggaa

SEQ ID NO: 2629601 - RNA, 19 nt, Homo sapiens
  misc_RNA (1)...(19): siRNA sense strand
ccaaaauaccucagacaua

SEQ ID NO: 2629602 - RNA, 19 nt, Homo sapiens
  misc_RNA (1)...(19): siRNA sense strand
uuucauaagggaagcaaua

SEQ ID NO: 2629603 - RNA, 19 nt, Homo sapiens
  misc_RNA (1)...(19): siRNA sense strand
gccuaaugcaguacagaaa

SEQ ID NO: 2629604 - RNA, 19 nt, Homo sapiens
  misc_RNA (1)...(19): siRNA sense strand
gggaaagauaacagagcca

SEQ ID NO: 2629605 - RNA, 19 nt, Homo sapiens
  misc_RNA (1)...(19): siRNA sense strand
aagaaugaagagagaagaa

SEQ ID NO: 2629606 - RNA, 19 nt, Homo sapiens
  misc_RNA (1)...(19): siRNA sense strand
guacaguagaagaugguuu

SEQ ID NO: 2629607 - RNA, 19 nt, Homo sapiens
  misc_RNA (1)...(19): siRNA sense strand
caagaauacccaagaucau

SEQ ID NO: 2629608 - RNA, 19 nt, Homo sapiens
  misc_RNA (1)...(19): siRNA sense strand
aggcugugauaaugaggaa

SEQ ID NO: 2629609 - RNA, 19 nt, Homo sapiens
  misc_RNA (1)...(19): siRNA sense strand
ggcuaacagaauuggcaaa

SEQ ID NO: 2629610 - RNA, 19 nt, Homo sapiens
  misc_RNA (1)...(19): siRNA sense strand
gcugcaguguaaugagaau

SEQ ID NO: 2629611 - RNA, 19 nt, Homo sapiens
  misc_RNA (1)...(19): siRNA sense strand
aggaaacaccaguaagaca

SEQ ID NO: 2629612 - RNA, 19 nt, Homo sapiens
  misc_RNA (1)...(19): siRNA sense strand
aagggaagcaauaaggaau

SEQ ID NO: 2629613 - RNA, 19 nt, Homo sapiens
  misc_RNA (1)...(19): siRNA sense strand
gcugugauaaugaggaaga

SEQ ID NO: 2629614 - RNA, 19 nt, Homo sapiens
  misc_RNA (1)...(19): siRNA sense strand
ugaagaaugaagagagaag

SEQ ID NO: 2629615 - RNA, 19 nt, Homo sapiens
  misc_RNA (1)...(19): siRNA sense strand
agcugaaggcugugauaau

SEQ ID NO: 2629616 - RNA, 19 nt, Homo sapiens
  misc_RNA (1)...(19): siRNA sense strand
acaugaagaaaguguauca

SEQ ID NO: 2629617 - RNA, 19 nt, Homo sapiens
  misc_RNA (1)...(19): siRNA sense strand
gugcaaaagaccaaugaau

SEQ ID NO: 2629618 - RNA, 19 nt, Homo sapiens
  misc_RNA (1)...(19): siRNA sense strand
aggaauggcaagauguuga

SEQ ID NO: 2629619 - RNA, 19 nt, Homo sapiens
  misc_RNA (1)...(19): siRNA sense strand
aauaaagguuggucaucau

SEQ ID NO: 2629620 - RNA, 19 nt, Homo sapiens
  misc_RNA (1)...(19): siRNA sense strand
uguacacauuagaagcaaa

SEQ ID NO: 2629621 - RNA, 19 nt, Homo sapiens
  misc_RNA (1)...(19): siRNA sense strand
aagcaauaaggaauggcaa

SEQ ID NO: 2629622 - RNA, 19 nt, Homo sapiens
  misc_RNA (1)...(19): siRNA sense strand
ucacaugaagaaaguguau

SEQ ID NO: 2629623 - RNA, 19 nt, Homo sapiens
  misc_RNA (1)...(19): siRNA sense strand
uggucaagacuuugcaaga

SEQ ID NO: 2629624 - RNA, 19 nt, Homo sapiens
  misc_RNA (1)...(19): siRNA sense strand
aagacaaaucagaugccua

SEQ ID NO: 2629625 - RNA, 19 nt, Homo sapiens
  misc_RNA (1)...(19): siRNA sense strand
aggcuuuggcugaagaaca

SEQ ID NO: 2629626 - RNA, 19 nt, Homo sapiens
  misc_RNA (1)...(19): siRNA sense strand
agaucuggauucaguaaaa

SEQ ID NO: 2629627 - RNA, 19 nt, Homo sapiens
  misc_RNA (1)...(19): siRNA sense strand
gguggaagaaaaugaagaa

SEQ ID NO: 2629628 - RNA, 19 nt, Homo sapiens
  misc_RNA (1)...(19): siRNA sense strand
acaagagagccucaggaau

SEQ ID NO: 2629629 - RNA, 19 nt, Homo sapiens
  misc_RNA (1)...(19): siRNA sense strand
ugauaaugaggaagaucuu

SEQ ID NO: 2629630 - RNA, 19 nt, Homo sapiens
  misc_RNA (1)...(19): siRNA sense strand
auggcaagauguugaagau

SEQ ID NO: 2629631 - RNA, 19 nt, Homo sapiens
  misc_RNA (1)...(19): siRNA sense strand
gacuguuggaagaggaaaa

SEQ ID NO: 2629632 - RNA, 19 nt, Homo sapiens
  misc_RNA (1)...(19): siRNA sense strand
aguucauauuggcgaugua

SEQ ID NO: 2629633 - RNA, 19 nt, Homo sapiens
  misc_RNA (1)...(19): siRNA sense strand
auauaacuccugugaugaa

SEQ ID NO: 2629634 - RNA, 19 nt, Homo sapiens
  misc_RNA (1)...(19): siRNA sense strand
augaacacauggagcuuga

SEQ ID NO: 2629635 - RNA, 19 nt, Homo sapiens
  misc_RNA (1)...(19): siRNA sense strand
ucaaagugauccuacccaa

SEQ ID NO: 2629636 - RNA, 19 nt, Homo sapiens
  misc_RNA (1)...(19): siRNA sense strand
cagaaacuccuguugguga

SEQ ID NO: 2629637 - RNA, 19 nt, Homo sapiens
  misc_RNA (1)...(19): siRNA sense strand
uggaagaggaaaagaacca

SEQ ID NO: 2629638 - RNA, 19 nt, Homo sapiens
  misc_RNA (1)...(19): siRNA sense strand
agauuuugcuagagcugaa

SEQ ID NO: 2629639 - RNA, 19 nt, Homo sapiens
  misc_RNA (1)...(19): siRNA sense strand
gugauaaugaggaagaucu

SEQ ID NO: 2629640 - RNA, 19 nt, Homo sapiens
  misc_RNA (1)...(19): siRNA sense strand
cuaugguucugauggucua

SEQ ID NO: 2629641 - RNA, 19 nt, Homo sapiens
  misc_RNA (1)...(19): siRNA sense strand
ucuccuaauaagugcaaaa

SEQ ID NO: 2629642 - RNA, 19 nt, Homo sapiens
  misc_RNA (1)...(19): siRNA sense strand
gcugaagaacagaaacguu

SEQ ID NO: 2629643 - RNA, 19 nt, Homo sapiens
  misc_RNA (1)...(19): siRNA sense strand
ggauguugaugauggccua

SEQ ID NO: 2629644 - RNA, 19 nt, Homo sapiens
  misc_RNA (1)...(19): siRNA sense strand
ugauaaugugagaguggaa

SEQ ID NO: 2629645 - RNA, 19 nt, Homo sapiens
  misc_RNA (1)...(19): siRNA sense strand
gguuuagugaagauguaua

SEQ ID NO: 2629646 - RNA, 19 nt, Homo sapiens
  misc_RNA (1)...(19): siRNA sense strand
ccuggagauggcagaaaua

SEQ ID NO: 2629647 - RNA, 19 nt, Homo sapiens
  misc_RNA (1)...(19): siRNA sense strand
aggauuacaauguggauca

SEQ ID NO: 2629648 - RNA, 19 nt, Homo sapiens
  misc_RNA (1)...(19): siRNA sense strand
ccagauguuuccagagcga

SEQ ID NO: 2629649 - RNA, 19 nt, Homo sapiens
  misc_RNA (1)...(19): siRNA sense strand
gagugaaacuacugggguu

SEQ ID NO: 2629650 - RNA, 19 nt, Homo sapiens
  misc_RNA (1)...(19): siRNA sense strand
ucucauaugcacuuggcaa

SEQ ID NO: 2629651 - RNA, 19 nt, Homo sapiens
  misc_RNA (1)...(19): siRNA sense strand
gauccaagaugcagggcug

SEQ ID NO: 2629652 - RNA, 19 nt, Homo sapiens
  misc_RNA (1)...(19): siRNA sense strand
uauuagauauggagcagca

SEQ ID NO: 2629653 - RNA, 19 nt, Homo sapiens
  misc_RNA (1)...(19): siRNA sense strand
ccucaggaaccgggaguga

SEQ ID NO: 2629654 - RNA, 19 nt, Homo sapiens
  misc_RNA (1)...(19): siRNA sense strand
agauguuuccagagcgaca

SEQ ID NO: 2629655 - RNA, 19 nt, Homo sapiens
  misc_RNA (1)...(19): siRNA sense strand
aggaagcaguggaggaaca

SEQ ID NO: 2629656 - RNA, 19 nt, Homo sapiens
  misc_RNA (1)...(19): siRNA sense strand
gcgaaagauaugaauggaa

SEQ ID NO: 2629657 - RNA, 19 nt, Homo sapiens
  misc_RNA (1)...(19): siRNA sense strand
agcaauaguuggaugggaa

SEQ ID NO: 2629658 - RNA, 19 nt, Homo sapiens
  misc_RNA (1)...(19): siRNA sense strand
gucacaaagaagagagaau

SEQ ID NO: 2629659 - RNA, 19 nt, Homo sapiens
  misc_RNA (1)...(19): siRNA sense strand
cagaaaagaccaaaggaau

SEQ ID NO: 2629660 - RNA, 19 nt, Homo sapiens
  misc_RNA (1)...(19): siRNA sense strand
aagaaugcugcgaaagaua

SEQ ID NO: 2629661 - RNA, 19 nt, Homo sapiens
  misc_RNA (1)...(19): siRNA sense strand
uaguaauacacgagauaga

SEQ ID NO: 2629662 - RNA, 19 nt, Homo sapiens
  misc_RNA (1)...(19): siRNA sense strand
gcagaaaagaccaaaggaa

SEQ ID NO: 2629663 - RNA, 19 nt, Homo sapiens
  misc_RNA (1)...(19): siRNA sense strand
ugcuaagaaugcugcgaaa

SEQ ID NO: 2629664 - RNA, 19 nt, Homo sapiens
  misc_RNA (1)...(19): siRNA sense strand
cgaaagauaugaauggaac

SEQ ID NO: 2629665 - RNA, 19 nt, Homo sapiens
  misc_RNA (1)...(19): siRNA sense strand
ugccaagaaacgagggauu

SEQ ID NO: 2629666 - RNA, 19 nt, Homo sapiens
  misc_RNA (1)...(19): siRNA sense strand
acaauaucuuccuggagaa

SEQ ID NO: 2629667 - RNA, 19 nt, Homo sapiens
  misc_RNA (1)...(19): siRNA sense strand
caucuagaggccauggaua

SEQ ID NO: 2629668 - RNA, 19 nt, Homo sapiens
  misc_RNA (1)...(19): siRNA sense strand
uggcagaaguugggagagu

SEQ ID NO: 2629669 - RNA, 19 nt, Homo sapiens
  misc_RNA (1)...(19): siRNA sense strand
cggugaggcccuugguaga

SEQ ID NO: 2629670 - RNA, 19 nt, Homo sapiens
  misc_RNA (1)...(19): siRNA sense strand
agaaaugaucgcaugucaa

SEQ ID NO: 2629671 - RNA, 19 nt, Homo sapiens
  misc_RNA (1)...(19): siRNA sense strand
gaagagagaauuauggagu

SEQ ID NO: 2629672 - RNA, 19 nt, Homo sapiens
  misc_RNA (1)...(19): siRNA sense strand
ccgagaaaccagggauuau

SEQ ID NO: 2629673 - RNA, 19 nt, Homo sapiens
  misc_RNA (1)...(19): siRNA sense strand
aaguagaacaagccaagaa

SEQ ID NO: 2629674 - RNA, 19 nt, Homo sapiens
  misc_RNA (1)...(19): siRNA sense strand
aguagaacaagccaagaaa

SEQ ID NO: 2629675 - RNA, 19 nt, Homo sapiens
  misc_RNA (1)...(19): siRNA sense strand
ggaugaugguggauacacu

SEQ ID NO: 2629676 - RNA, 19 nt, Homo sapiens
  misc_RNA (1)...(19): siRNA sense strand
ccaagaaacgagggauuau

SEQ ID NO: 2629677 - RNA, 19 nt, Homo sapiens
  misc_RNA (1)...(19): siRNA sense strand
ccucaauagagaaaccaau

SEQ ID NO: 2629678 - RNA, 19 nt, Homo sapiens
  misc_RNA (1)...(19): siRNA sense strand
aagaggaagcaguggagga

SEQ ID NO: 2629679 - RNA, 19 nt, Homo sapiens
  misc_RNA (1)...(19): siRNA sense strand
agauaugaauggaacgucu

SEQ ID NO: 2629680 - RNA, 19 nt, Homo sapiens
  misc_RNA (1)...(19): siRNA sense strand
augaagggcaccuggauga

SEQ ID NO: 2629681 - RNA, 19 nt, Homo sapiens
  misc_RNA (1)...(19): siRNA sense strand
augcaacuaacgauggaaa

SEQ ID NO: 2629682 - RNA, 19 nt, Homo sapiens
  misc_RNA (1)...(19): siRNA sense strand
ggcccuugguagagaucau

SEQ ID NO: 2629683 - RNA, 19 nt, Homo sapiens
  misc_RNA (1)...(19): siRNA sense strand
ggggagagucgaucugaaa

SEQ ID NO: 2629684 - RNA, 19 nt, Homo sapiens
  misc_RNA (1)...(19): siRNA sense strand
uuaaagcaguauuugggaa

SEQ ID NO: 2629685 - RNA, 19 nt, Homo sapiens
  misc_RNA (1)...(19): siRNA sense strand
aagcaguauuugggaaaca

SEQ ID NO: 2629686 - RNA, 19 nt, Homo sapiens
  misc_RNA (1)...(19): siRNA sense strand
aagcaguggaggaacaaga

SEQ ID NO: 2629687 - RNA, 19 nt, Homo sapiens
  misc_RNA (1)...(19): siRNA sense strand
ggaacaagaggguggcuuc

SEQ ID NO: 2629688 - RNA, 19 nt, Homo sapiens
  misc_RNA (1)...(19): siRNA sense strand
gacaauaucuuccuggaga

SEQ ID NO: 2629689 - RNA, 19 nt, Homo sapiens
  misc_RNA (1)...(19): siRNA sense strand
agacaugaugguuaugcaa

SEQ ID NO: 2629690 - RNA, 19 nt, Homo sapiens
  misc_RNA (1)...(19): siRNA sense strand
agaggaagcaguggaggaa

SEQ ID NO: 2629691 - RNA, 19 nt, Homo sapiens
  misc_RNA (1)...(19): siRNA sense strand
caauaucuuccuggagaaa

SEQ ID NO: 2629692 - RNA, 19 nt, Homo sapiens
  misc_RNA (1)...(19): siRNA sense strand
uuauugugaucgugagcau

SEQ ID NO: 2629693 - RNA, 19 nt, Homo sapiens
  misc_RNA (1)...(19): siRNA sense strand
gcauggaaaagcaauaaaa

SEQ ID NO: 2629694 - RNA, 19 nt, Homo sapiens
  misc_RNA (1)...(19): siRNA sense strand
accaaugagaagaugcuua

SEQ ID NO: 2629695 - RNA, 19 nt, Homo sapiens
  misc_RNA (1)...(19): siRNA sense strand
uagagaaaccaaugagaag

SEQ ID NO: 2629696 - RNA, 19 nt, Homo sapiens
  misc_RNA (1)...(19): siRNA sense strand
cugagaucugcaagaggaa

SEQ ID NO: 2629697 - RNA, 19 nt, Homo sapiens
  misc_RNA (1)...(19): siRNA sense strand
caucuagaggccaugcaua

SEQ ID NO: 2629698 - RNA, 19 nt, Homo sapiens
  misc_RNA (1)...(19): siRNA sense strand
gauagauauggcagaaguu

SEQ ID NO: 2629699 - RNA, 19 nt, Homo sapiens
  misc_RNA (1)...(19): siRNA sense strand
agaaaagaccaaaggaauc

SEQ ID NO: 2629700 - RNA, 19 nt, Homo sapiens
  misc_RNA (1)...(19): siRNA sense strand
ggagacucgagcagauauu

SEQ ID NO: 2629701 - RNA, 19 nt, Homo sapiens
  misc_RNA (1)...(19): siRNA sense strand
ggucauucuaguugggaug

SEQ ID NO: 2629702 - RNA, 19 nt, Homo sapiens
  misc_RNA (1)...(19): siRNA sense strand
acaucuaaguggaaguucu

SEQ ID NO: 2629703 - RNA, 19 nt, Homo sapiens
  misc_RNA (1)...(19): siRNA sense strand
guggaaguucuuauagaga

SEQ ID NO: 2629704 - RNA, 19 nt, Homo sapiens
  misc_RNA (1)...(19): siRNA sense strand
auccagaggcuuugcauuu

SEQ ID NO: 2629705 - RNA, 19 nt, Homo sapiens
  misc_RNA (1)...(19): siRNA sense strand
cuguggagggccugacaua

SEQ ID NO: 2629706 - RNA, 19 nt, Homo sapiens
  misc_RNA (1)...(19): siRNA sense strand
gccaagagucagcggagga

SEQ ID NO: 2629707 - RNA, 19 nt, Homo sapiens
  misc_RNA (1)...(19): siRNA sense strand
aggccuggcugcagcacau

SEQ ID NO: 2629708 - RNA, 19 nt, Homo sapiens
  misc_RNA (1)...(19): siRNA sense strand
ugucagacuucgugggcaa

SEQ ID NO: 2629709 - RNA, 19 nt, Homo sapiens
  misc_RNA (1)...(19): siRNA sense strand
cuacauuggacgagccagu

SEQ ID NO: 2629710 - RNA, 19 nt, Homo sapiens
  misc_RNA (1)...(19): siRNA sense strand
ugaacaacguccuggugga

SEQ ID NO: 2629711 - RNA, 19 nt, Homo sapiens
  misc_RNA (1)...(19): siRNA sense strand
ucucacugcucaugggcau

SEQ ID NO: 2629712 - RNA, 19 nt, Homo sapiens
  misc_RNA (1)...(19): siRNA sense strand
aaucuuugcucuaggcaca

SEQ ID NO: 2629713 - RNA, 19 nt, Homo sapiens
  misc_RNA (1)...(19): siRNA sense strand
cuuccuaagggaugagaca

SEQ ID NO: 2629714 - RNA, 19 nt, Homo sapiens
  misc_RNA (1)...(19): siRNA sense strand
gagcugaccaggaggcacu

SEQ ID NO: 2629715 - RNA, 19 nt, Homo sapiens
  misc_RNA (1)...(19): siRNA sense strand
aagugaaagcguuuggaaa

SEQ ID NO: 2629716 - RNA, 19 nt, Homo sapiens
  misc_RNA (1)...(19): siRNA sense strand
agugaaagcguuuggaaaa

SEQ ID NO: 2629717 - RNA, 19 nt, Homo sapiens
  misc_RNA (1)...(19): siRNA sense strand
gugcauaaaaguacacaaa

SEQ ID NO: 2629718 - RNA, 19 nt, Homo sapiens
  misc_RNA (1)...(19): siRNA sense strand
aagagugaacagagugauu

SEQ ID NO: 2629719 - RNA, 19 nt, Homo sapiens
  misc_RNA (1)...(19): siRNA sense strand
ugaaaaugaacuugugcaa

SEQ ID NO: 2629720 - RNA, 19 nt, Homo sapiens
  misc_RNA (1)...(19): siRNA sense strand
agccaaagugaaagcguuu

SEQ ID NO: 2629721 - RNA, 19 nt, Homo sapiens
  misc_RNA (1)...(19): siRNA sense strand
uggcuguacaggugaaaga

SEQ ID NO: 2629722 - RNA, 19 nt, Homo sapiens
  misc_RNA (1)...(19): siRNA sense strand
auucagaaacagauacaga

SEQ ID NO: 2629723 - RNA, 19 nt, Homo sapiens
  misc_RNA (1)...(19): siRNA sense strand
uguacaggugaaagaagaa

SEQ ID NO: 2629724 - RNA, 19 nt, Homo sapiens
  misc_RNA (1)...(19): siRNA sense strand
acagauuacgugugaaaau

SEQ ID NO: 2629725 - RNA, 19 nt, Homo sapiens
  misc_RNA (1)...(19): siRNA sense strand
auacagacugggauaucaa

SEQ ID NO: 2629726 - RNA, 19 nt, Homo sapiens
  misc_RNA (1)...(19): siRNA sense strand
ccaagaggcuggaggacca

SEQ ID NO: 2629727 - RNA, 19 nt, Homo sapiens
  misc_RNA (1)...(19): siRNA sense strand
gaaccaagcugcaguggga

SEQ ID NO: 2629728 - RNA, 19 nt, Homo sapiens
  misc_RNA (1)...(19): siRNA sense strand
guggaaacccgauggccaa

SEQ ID NO: 2629729 - RNA, 19 nt, Homo sapiens
  misc_RNA (1)...(19): siRNA sense strand
uggcaggcagucagggaaa

SEQ ID NO: 2629730 - RNA, 19 nt, Homo sapiens
  misc_RNA (1)...(19): siRNA sense strand
ggagaaaagaugccagcaa

SEQ ID NO: 2629731 - RNA, 19 nt, Homo sapiens
  misc_RNA (1)...(19): siRNA sense strand
gugcaaauuuaucggcuca

SEQ ID NO: 2629732 - RNA, 19 nt, Homo sapiens
  misc_RNA (1)...(19): siRNA sense strand
uggaaguggaggagggcga

SEQ ID NO: 2629733 - RNA, 19 nt, Homo sapiens
  misc_RNA (1)...(19): siRNA sense strand
uggaggagggcgaggugaa

SEQ ID NO: 2629734 - RNA, 19 nt, Homo sapiens
  misc_RNA (1)...(19): siRNA sense strand
agaagaacggcgagcugaa

SEQ ID NO: 2629735 - RNA, 19 nt, Homo sapiens
  misc_RNA (1)...(19): siRNA sense strand
gggaaaagcagaagcgucu

SEQ ID NO: 2629736 - RNA, 19 nt, Homo sapiens
  misc_RNA (1)...(19): siRNA sense strand
ccgcaagaggcugaagaaa

SEQ ID NO: 2629737 - RNA, 19 nt, Homo sapiens
  misc_RNA (1)...(19): siRNA sense strand
acgucuaauccaaugguua

SEQ ID NO: 2629738 - RNA, 19 nt, Homo sapiens
  misc_RNA (1)...(19): siRNA sense strand
aaagcuguucagagggaua

SEQ ID NO: 2629739 - RNA, 19 nt, Homo sapiens
  misc_RNA (1)...(19): siRNA sense strand
ggcugaauucugaaggcaa

SEQ ID NO: 2629740 - RNA, 19 nt, Homo sapiens
  misc_RNA (1)...(19): siRNA sense strand
gccucaagcccgacaccaa

SEQ ID NO: 2629741 - RNA, 19 nt, Homo sapiens
  misc_RNA (1)...(19): siRNA sense strand
agaaagauguggaaccaag

SEQ ID NO: 2629742 - RNA, 19 nt, Homo sapiens
  misc_RNA (1)...(19): siRNA sense strand
agaugaacccaguggugga

SEQ ID NO: 2629743 - RNA, 19 nt, Homo sapiens
  misc_RNA (1)...(19): siRNA sense strand
ggauguagacuaugggaca

SEQ ID NO: 2629744 - RNA, 19 nt, Homo sapiens
  misc_RNA (1)...(19): siRNA sense strand
cggaaauggaagacacaga

SEQ ID NO: 2629745 - RNA, 19 nt, Homo sapiens
  misc_RNA (1)...(19): siRNA sense strand
ccagaaucuaccuuggaaa

SEQ ID NO: 2629746 - RNA, 19 nt, Homo sapiens
  misc_RNA (1)...(19): siRNA sense strand
cgucaagauuauagaaaac

SEQ ID NO: 2629747 - RNA, 19 nt, Homo sapiens
  misc_RNA (1)...(19): siRNA sense strand
agauacagguagagguggu

SEQ ID NO: 2629748 - RNA, 19 nt, Homo sapiens
  misc_RNA (1)...(19): siRNA sense strand
ggaaauaaagucagcacag

SEQ ID NO: 2629749 - RNA, 19 nt, Homo sapiens
  misc_RNA (1)...(19): siRNA sense strand
ccuuggaaacaucaguuaa

SEQ ID NO: 2629750 - RNA, 19 nt, Homo sapiens
  misc_RNA (1)...(19): siRNA sense strand
ccacggaaauggaagacac

SEQ ID NO: 2629751 - RNA, 19 nt, Homo sapiens
  misc_RNA (1)...(19): siRNA sense strand
agacuaugggacagaaguu

SEQ ID NO: 2629752 - RNA, 19 nt, Homo sapiens
  misc_RNA (1)...(19): siRNA sense strand
acacagacauugaagacuc

SEQ ID NO: 2629753 - RNA, 19 nt, Homo sapiens
  misc_RNA (1)...(19): siRNA sense strand
agaaagucucuaagcuaca

SEQ ID NO: 2629754 - RNA, 19 nt, Homo sapiens
  misc_RNA (1)...(19): siRNA sense strand
ggagcagcacugugggcaa

SEQ ID NO: 2629755 - RNA, 19 nt, Homo sapiens
  misc_RNA (1)...(19): siRNA sense strand
gcaugagggagaugaggga

SEQ ID NO: 2629756 - RNA, 19 nt, Homo sapiens
  misc_RNA (1)...(19): siRNA sense strand
cugcaggccuggaaaggga

SEQ ID NO: 2629757 - RNA, 19 nt, Homo sapiens
  misc_RNA (1)...(19): siRNA sense strand
ggaccaaagauguguggac

SEQ ID NO: 2629758 - RNA, 19 nt, Homo sapiens
  misc_RNA (1)...(19): siRNA sense strand
agucugggcugcaggcuca

SEQ ID NO: 2629759 - RNA, 19 nt, Homo sapiens
  misc_RNA (1)...(19): siRNA sense strand
ggacuuaggugaaggcaag

SEQ ID NO: 2629760 - RNA, 19 nt, Homo sapiens
  misc_RNA (1)...(19): siRNA sense strand
agccaagugcacagacaaa

SEQ ID NO: 2629761 - RNA, 19 nt, Homo sapiens
  misc_RNA (1)...(19): siRNA sense strand
ccucuuaaaucuagcugga

SEQ ID NO: 2629762 - RNA, 19 nt, Homo sapiens
  misc_RNA (1)...(19): siRNA sense strand
gugcacagacaaagaaaau

SEQ ID NO: 2629763 - RNA, 19 nt, Homo sapiens
  misc_RNA (1)...(19): siRNA sense strand
uggacuuaggugaaggcaa

SEQ ID NO: 2629764 - RNA, 19 nt, Homo sapiens
  misc_RNA (1)...(19): siRNA sense strand
ucgaaucaaagguguggaa

SEQ ID NO: 2629765 - RNA, 19 nt, Homo sapiens
  misc_RNA (1)...(19): siRNA sense strand
cauccaugaacuuguagaa

SEQ ID NO: 2629766 - RNA, 19 nt, Homo sapiens
  misc_RNA (1)...(19): siRNA sense strand
ccaugaacuuguagaaaac

SEQ ID NO: 2629767 - RNA, 19 nt, Homo sapiens
  misc_RNA (1)...(19): siRNA sense strand
gggcaacauaagugugaaa

SEQ ID NO: 2629768 - RNA, 19 nt, Homo sapiens
  misc_RNA (1)...(19): siRNA sense strand
ccaagaguuaguagacaaa

SEQ ID NO: 2629769 - RNA, 19 nt, Homo sapiens
  misc_RNA (1)...(19): siRNA sense strand
ugugaaacuaaguguguua

SEQ ID NO: 2629770 - RNA, 19 nt, Homo sapiens
  misc_RNA (1)...(19): siRNA sense strand
auacaaacgaucugaaaca

SEQ ID NO: 2629771 - RNA, 19 nt, Homo sapiens
  misc_RNA (1)...(19): siRNA sense strand
cugaagaaggagaugaaga

SEQ ID NO: 2629772 - RNA, 19 nt, Homo sapiens
  misc_RNA (1)...(19): siRNA sense strand
ugaucaaguauguggaaaa

SEQ ID NO: 2629773 - RNA, 19 nt, Homo sapiens
  misc_RNA (1)...(19): siRNA sense strand
guagacaagaaguggaaaa

SEQ ID NO: 2629774 - RNA, 19 nt, Homo sapiens
  misc_RNA (1)...(19): siRNA sense strand
cugugaaacauguagacaa

SEQ ID NO: 2629775 - RNA, 19 nt, Homo sapiens
  misc_RNA (1)...(19): siRNA sense strand
uccaagaguuaguagacaa

SEQ ID NO: 2629776 - RNA, 19 nt, Homo sapiens
  misc_RNA (1)...(19): siRNA sense strand
gggaaaagguucuguccau

SEQ ID NO: 2629777 - RNA, 19 nt, Homo sapiens
  misc_RNA (1)...(19): siRNA sense strand
aaaccuuaucugugugaaa

SEQ ID NO: 2629778 - RNA, 19 nt, Homo sapiens
  misc_RNA (1)...(19): siRNA sense strand
aagaaggagaugaagauuu

SEQ ID NO: 2629779 - RNA, 19 nt, Homo sapiens
  misc_RNA (1)...(19): siRNA sense strand
uguuggugcuuguggagaa

SEQ ID NO: 2629780 - RNA, 19 nt, Homo sapiens
  misc_RNA (1)...(19): siRNA sense strand
gcaacaggagaguagcaaa

SEQ ID NO: 2629781 - RNA, 19 nt, Homo sapiens
  misc_RNA (1)...(19): siRNA sense strand
ggaacagccuucugagcca

SEQ ID NO: 2629782 - RNA, 19 nt, Homo sapiens
  misc_RNA (1)...(19): siRNA sense strand
cagaagugggcuaaagaca

SEQ ID NO: 2629783 - RNA, 19 nt, Homo sapiens
  misc_RNA (1)...(19): siRNA sense strand
caucaauguagaagaaagu

SEQ ID NO: 2629784 - RNA, 19 nt, Homo sapiens
  misc_RNA (1)...(19): siRNA sense strand
uaaccaagcugcagccaga

SEQ ID NO: 2629785 - RNA, 19 nt, Homo sapiens
  misc_RNA (1)...(19): siRNA sense strand
ccucguaggugcagugcca

SEQ ID NO: 2629786 - RNA, 19 nt, Homo sapiens
  misc_RNA (1)...(19): siRNA sense strand
cgagcuaaugucucagaaa

SEQ ID NO: 2629787 - RNA, 19 nt, Homo sapiens
  misc_RNA (1)...(19): siRNA sense strand
ggagaguagcaaaucagaa

SEQ ID NO: 2629788 - RNA, 19 nt, Homo sapiens
  misc_RNA (1)...(19): siRNA sense strand
agauggagauacacgugaa

SEQ ID NO: 2629789 - RNA, 19 nt, Homo sapiens
  misc_RNA (1)...(19): siRNA sense strand
gcaacauaagugugaaaau

SEQ ID NO: 2629790 - RNA, 19 nt, Homo sapiens
  misc_RNA (1)...(19): siRNA sense strand
ccgaggucccugugaaaca

SEQ ID NO: 2629791 - RNA, 19 nt, Homo sapiens
  misc_RNA (1)...(19): siRNA sense strand
aaagugugucuguggcaaa

SEQ ID NO: 2629792 - RNA, 19 nt, Homo sapiens
  misc_RNA (1)...(19): siRNA sense strand
aagcauugucgcuguggaa

SEQ ID NO: 2629793 - RNA, 19 nt, Homo sapiens
  misc_RNA (1)...(19): siRNA sense strand
ggacccuacucuuguaaaa

SEQ ID NO: 2629794 - RNA, 19 nt, Homo sapiens
  misc_RNA (1)...(19): siRNA sense strand
uguaaaagaguuuguggaa

SEQ ID NO: 2629795 - RNA, 19 nt, Homo sapiens
  misc_RNA (1)...(19): siRNA sense strand
uugaaggaaaacagggaaa

SEQ ID NO: 2629796 - RNA, 19 nt, Homo sapiens
  misc_RNA (1)...(19): siRNA sense strand
acucagacagauggagaua

SEQ ID NO: 2629797 - RNA, 19 nt, Homo sapiens
  misc_RNA (1)...(19): siRNA sense strand
ugaauuagagcgaacaaaa

SEQ ID NO: 2629798 - RNA, 19 nt, Homo sapiens
  misc_RNA (1)...(19): siRNA sense strand
guaccaacuuguggagaca

SEQ ID NO: 2629799 - RNA, 19 nt, Homo sapiens
  misc_RNA (1)...(19): siRNA sense strand
cgugaauuagagcgaacaa

SEQ ID NO: 2629800 - RNA, 19 nt, Homo sapiens
  misc_RNA (1)...(19): siRNA sense strand
ugucaucaaccuugccaaa

SEQ ID NO: 2629801 - RNA, 19 nt, Homo sapiens
  misc_RNA (1)...(19): siRNA sense strand
ugucagaaucacacaugua

SEQ ID NO: 2629802 - RNA, 19 nt, Homo sapiens
  misc_RNA (1)...(19): siRNA sense strand
cagaaaguacugugccuga

SEQ ID NO: 2629803 - RNA, 19 nt, Homo sapiens
  misc_RNA (1)...(19): siRNA sense strand
agaugaagauuuugaagga

SEQ ID NO: 2629804 - RNA, 19 nt, Homo sapiens
  misc_RNA (1)...(19): siRNA sense strand
guuuggagcuguucgggau

SEQ ID NO: 2629805 - RNA, 19 nt, Homo sapiens
  misc_RNA (1)...(19): siRNA sense strand
auguagacaagaaguggaa

SEQ ID NO: 2629806 - RNA, 19 nt, Homo sapiens
  misc_RNA (1)...(19): siRNA sense strand
ugucagaagcaucaaugua

SEQ ID NO: 2629807 - RNA, 19 nt, Homo sapiens
  misc_RNA (1)...(19): siRNA sense strand
uacuauugcuauuguggaa

SEQ ID NO: 2629808 - RNA, 19 nt, Homo sapiens
  misc_RNA (1)...(19): siRNA sense strand
aguaugugagcgugaauuu

SEQ ID NO: 2629809 - RNA, 19 nt, Homo sapiens
  misc_RNA (1)...(19): siRNA sense strand
gugaucaaguauguggaaa

SEQ ID NO: 2629810 - RNA, 19 nt, Homo sapiens
  misc_RNA (1)...(19): siRNA sense strand
ccauagauguucacagcgu

SEQ ID NO: 2629811 - RNA, 19 nt, Homo sapiens
  misc_RNA (1)...(19): siRNA sense strand
cuguccaccuugugaucaa

SEQ ID NO: 2629812 - RNA, 19 nt, Homo sapiens
  misc_RNA (1)...(19): siRNA sense strand
gccaaguaugugagcguga

SEQ ID NO: 2629813 - RNA, 19 nt, Homo sapiens
  misc_RNA (1)...(19): siRNA sense strand
cggaauccauagauguuca

SEQ ID NO: 2629814 - RNA, 19 nt, Homo sapiens
  misc_RNA (1)...(19): siRNA sense strand
cagaagcaucaauguagaa

SEQ ID NO: 2629815 - RNA, 19 nt, Homo sapiens
  misc_RNA (1)...(19): siRNA sense strand
ggacuuuaggauguagaaa

SEQ ID NO: 2629816 - RNA, 19 nt, Homo sapiens
  misc_RNA (1)...(19): siRNA sense strand
uggacggacuuuaggaugu

SEQ ID NO: 2629817 - RNA, 19 nt, Homo sapiens
  misc_RNA (1)...(19): siRNA sense strand
ccgagaacguaccacaaga

SEQ ID NO: 2629818 - RNA, 19 nt, Homo sapiens
  misc_RNA (1)...(19): siRNA sense strand
ugacaaaguacuugaaugc

SEQ ID NO: 2629819 - RNA, 19 nt, Homo sapiens
  misc_RNA (1)...(19): siRNA sense strand
caccgaggucccugugaaa

SEQ ID NO: 2629820 - RNA, 19 nt, Homo sapiens
  misc_RNA (1)...(19): siRNA sense strand
gacaagaaguggaaaagca

SEQ ID NO: 2629821 - RNA, 19 nt, Homo sapiens
  misc_RNA (1)...(19): siRNA sense strand
ccuacaggcccuugggaac

SEQ ID NO: 2629822 - RNA, 19 nt, Homo sapiens
  misc_RNA (1)...(19): siRNA sense strand
ugaaagaaugccacaaagu

SEQ ID NO: 2629823 - RNA, 19 nt, Homo sapiens
  misc_RNA (1)...(19): siRNA sense strand
cgagauagauauagcagaa

SEQ ID NO: 2629824 - RNA, 19 nt, Homo sapiens
  misc_RNA (1)...(19): siRNA sense strand
agcagaagucggagaguua

SEQ ID NO: 2629825 - RNA, 19 nt, Homo sapiens
  misc_RNA (1)...(19): siRNA sense strand
uaacaauacacgagauaga

SEQ ID NO: 2629826 - RNA, 19 nt, Homo sapiens
  misc_RNA (1)...(19): siRNA sense strand
gugauuggauugaggcuga

SEQ ID NO: 2629827 - RNA, 19 nt, Homo sapiens
  misc_RNA (1)...(19): siRNA sense strand
gcacaagggccucggaugu

SEQ ID NO: 2629828 - RNA, 19 nt, Homo sapiens
  misc_RNA (1)...(19): siRNA sense strand
acaauacacgagauagaua

SEQ ID NO: 2629829 - RNA, 19 nt, Homo sapiens
  misc_RNA (1)...(19): siRNA sense strand
cuaaaagcuccuagaagua

SEQ ID NO: 2629830 - RNA, 19 nt, Homo sapiens
  misc_RNA (1)...(19): siRNA sense strand
aggccaagaucgacgaagu

SEQ ID NO: 2629831 - RNA, 19 nt, Homo sapiens
  misc_RNA (1)...(19): siRNA sense strand
ucgacgaagugauuggauu

SEQ ID NO: 2629832 - RNA, 19 nt, Homo sapiens
  misc_RNA (1)...(19): siRNA sense strand
ccugugacaagaagcaaua

SEQ ID NO: 2629833 - RNA, 19 nt, Homo sapiens
  misc_RNA (1)...(19): siRNA sense strand
uggaagaagccgccauuau

SEQ ID NO: 2629834 - RNA, 19 nt, Homo sapiens
  misc_RNA (1)...(19): siRNA sense strand
ggaagaagccgccauuauu

SEQ ID NO: 2629835 - RNA, 19 nt, Homo sapiens
  misc_RNA (1)...(19): siRNA sense strand
gaagaagccgccauuauua

SEQ ID NO: 2629836 - RNA, 19 nt, Homo sapiens
  misc_RNA (1)...(19): siRNA sense strand
caagaucgacgaagugauu

SEQ ID NO: 2629837 - RNA, 19 nt, Homo sapiens
  misc_RNA (1)...(19): siRNA sense strand
agauauagcagaagucgga

SEQ ID NO: 2629838 - RNA, 19 nt, Homo sapiens
  misc_RNA (1)...(19): siRNA sense strand
caauacacgagauagauau

SEQ ID NO: 2629839 - RNA, 19 nt, Homo sapiens
  misc_RNA (1)...(19): siRNA sense strand
cgacgaagugauuggauug

SEQ ID NO: 2629840 - RNA, 19 nt, Homo sapiens
  misc_RNA (1)...(19): siRNA sense strand
agauagauauagcagaagu

SEQ ID NO: 2629841 - RNA, 19 nt, Homo sapiens
  misc_RNA (1)...(19): siRNA sense strand
gcacgugccuuaagggcua

SEQ ID NO: 2629842 - RNA, 19 nt, Homo sapiens
  misc_RNA (1)...(19): siRNA sense strand
cgaaaugugucgagccacu

SEQ ID NO: 2629843 - RNA, 19 nt, Homo sapiens
  misc_RNA (1)...(19): siRNA sense strand
cgaaggaggugacaggcau

SEQ ID NO: 2629844 - RNA, 19 nt, Homo sapiens
  misc_RNA (1)...(19): siRNA sense strand
caguaaugacagugcgaac

SEQ ID NO: 2629845 - RNA, 19 nt, Homo sapiens
  misc_RNA (1)...(19): siRNA sense strand
ccuacagccuuaauggaca

SEQ ID NO: 2629846 - RNA, 19 nt, Homo sapiens
  misc_RNA (1)...(19): siRNA sense strand
cgaacuggacugaguacca

SEQ ID NO: 2629847 - RNA, 19 nt, Homo sapiens
  misc_RNA (1)...(19): siRNA sense strand
gacgaaaugugucgagcca

SEQ ID NO: 2629848 - RNA, 19 nt, Homo sapiens
  misc_RNA (1)...(19): siRNA sense strand
ggcuggacaagcagggcaa

SEQ ID NO: 2629849 - RNA, 19 nt, Homo sapiens
  misc_RNA (1)...(19): siRNA sense strand
augaguaccugaaggccuu

SEQ ID NO: 2629850 - RNA, 19 nt, Homo sapiens
  misc_RNA (1)...(19): siRNA sense strand
gggugaagaaagaggagga

SEQ ID NO: 2629851 - RNA, 19 nt, Homo sapiens
  misc_RNA (1)...(19): siRNA sense strand
gaaacaggauccaaggaca

SEQ ID NO: 2629852 - RNA, 19 nt, Homo sapiens
  misc_RNA (1)...(19): siRNA sense strand
gauccaaggacaaggacca

SEQ ID NO: 2629853 - RNA, 19 nt, Homo sapiens
  misc_RNA (1)...(19): siRNA sense strand
uagagaagguggagggguu

SEQ ID NO: 2629854 - RNA, 19 nt, Homo sapiens
  misc_RNA (1)...(19): siRNA sense strand
cuguauaagccgcuggaca

SEQ ID NO: 2629855 - RNA, 19 nt, Homo sapiens
  misc_RNA (1)...(19): siRNA sense strand
ccaucuacgcugaggacca

SEQ ID NO: 2629856 - RNA, 19 nt, Homo sapiens
  misc_RNA (1)...(19): siRNA sense strand
cggaggacuuggaggacac

SEQ ID NO: 2629857 - RNA, 19 nt, Homo sapiens
  misc_RNA (1)...(19): siRNA sense strand
agacgagggccuggaggaa

SEQ ID NO: 2629858 - RNA, 19 nt, Homo sapiens
  misc_RNA (1)...(19): siRNA sense strand
acgcacagaucgugagcac

SEQ ID NO: 2629859 - RNA, 19 nt, Homo sapiens
  misc_RNA (1)...(19): siRNA sense strand
gcacagaucgugagcacac

SEQ ID NO: 2629860 - RNA, 19 nt, Homo sapiens
  misc_RNA (1)...(19): siRNA sense strand
gcggaggacuuggaggaca

SEQ ID NO: 2629861 - RNA, 19 nt, Homo sapiens
  misc_RNA (1)...(19): siRNA sense strand
ucauuuaccacguggcuga

SEQ ID NO: 2629862 - RNA, 19 nt, Homo sapiens
  misc_RNA (1)...(19): siRNA sense strand
ccaagaacuuccagagcca

SEQ ID NO: 2629863 - RNA, 19 nt, Homo sapiens
  misc_RNA (1)...(19): siRNA sense strand
agucaauggcuuugcaaca

SEQ ID NO: 2629864 - RNA, 19 nt, Homo sapiens
  misc_RNA (1)...(19): siRNA sense strand
ccacccaggaagagaucaa

SEQ ID NO: 2629865 - RNA, 19 nt, Homo sapiens
  misc_RNA (1)...(19): siRNA sense strand
ugaaggaggcuguggacca

SEQ ID NO: 2629866 - RNA, 19 nt, Homo sapiens
  misc_RNA (1)...(19): siRNA sense strand
ggacagagaccagggcaga

SEQ ID NO: 2629867 - RNA, 19 nt, Homo sapiens
  misc_RNA (1)...(19): siRNA sense strand
cagcagagcuuaaagacag

SEQ ID NO: 2629868 - RNA, 19 nt, Homo sapiens
  misc_RNA (1)...(19): siRNA sense strand
aggcuguggaccagaguga

SEQ ID NO: 2629869 - RNA, 19 nt, Homo sapiens
  misc_RNA (1)...(19): siRNA sense strand
ccgggacagcagagcuuaa

SEQ ID NO: 2629870 - RNA, 19 nt, Homo sapiens
  misc_RNA (1)...(19): siRNA sense strand
aggaagaagagacugugaa

SEQ ID NO: 2629871 - RNA, 19 nt, Homo sapiens
  misc_RNA (1)...(19): siRNA sense strand
ccgucgagaggaaguggaa

SEQ ID NO: 2629872 - RNA, 19 nt, Homo sapiens
  misc_RNA (1)...(19): siRNA sense strand
aaguggaagucaauggcuu

SEQ ID NO: 2629873 - RNA, 19 nt, Homo sapiens
  misc_RNA (1)...(19): siRNA sense strand
cagaaguggaacagccaaa

SEQ ID NO: 2629874 - RNA, 19 nt, Homo sapiens
  misc_RNA (1)...(19): siRNA sense strand
ucuagaaucaggaggaaaa

SEQ ID NO: 2629875 - RNA, 19 nt, Homo sapiens
  misc_RNA (1)...(19): siRNA sense strand
uggaaaaccaacugagaau

SEQ ID NO: 2629876 - RNA, 19 nt, Homo sapiens
  misc_RNA (1)...(19): siRNA sense strand
ccuaaaguggaguugcaaa

SEQ ID NO: 2629877 - RNA, 19 nt, Homo sapiens
  misc_RNA (1)...(19): siRNA sense strand
uggcaguacagaaguggaa

SEQ ID NO: 2629878 - RNA, 19 nt, Homo sapiens
  misc_RNA (1)...(19): siRNA sense strand
aagcauuugaccuggcaua

SEQ ID NO: 2629879 - RNA, 19 nt, Homo sapiens
  misc_RNA (1)...(19): siRNA sense strand
aggaacagaaguugugaga

SEQ ID NO: 2629880 - RNA, 19 nt, Homo sapiens
  misc_RNA (1)...(19): siRNA sense strand
ucaagaaaucugaaggcca

SEQ ID NO: 2629881 - RNA, 19 nt, Homo sapiens
  misc_RNA (1)...(19): siRNA sense strand
gcaguacagaaguggaaca

SEQ ID NO: 2629882 - RNA, 19 nt, Homo sapiens
  misc_RNA (1)...(19): siRNA sense strand
gcuauguauuugacagcga

SEQ ID NO: 2629883 - RNA, 19 nt, Homo sapiens
  misc_RNA (1)...(19): siRNA sense strand
aaaacagaucgcaggguua

SEQ ID NO: 2629884 - RNA, 19 nt, Homo sapiens
  misc_RNA (1)...(19): siRNA sense strand
gccaaaaggaacagaaguu

SEQ ID NO: 2629885 - RNA, 19 nt, Homo sapiens
  misc_RNA (1)...(19): siRNA sense strand
acuaaaguuugcaagacau

SEQ ID NO: 2629886 - RNA, 19 nt, Homo sapiens
  misc_RNA (1)...(19): siRNA sense strand
gcgaaaagugugcugaaga

SEQ ID NO: 2629887 - RNA, 19 nt, Homo sapiens
  misc_RNA (1)...(19): siRNA sense strand
caaaauuagaugagaugca

SEQ ID NO: 2629888 - RNA, 19 nt, Homo sapiens
  misc_RNA (1)...(19): siRNA sense strand
caagaaaucugaaggccag

SEQ ID NO: 2629889 - RNA, 19 nt, Homo sapiens
  misc_RNA (1)...(19): siRNA sense strand
cacuuuaacaauuggccaa

SEQ ID NO: 2629890 - RNA, 19 nt, Homo sapiens
  misc_RNA (1)...(19): siRNA sense strand
ggaacagccaaaaggaaca

SEQ ID NO: 2629891 - RNA, 19 nt, Homo sapiens
  misc_RNA (1)...(19): siRNA sense strand
cggagguaguggaggccuu

SEQ ID NO: 2629892 - RNA, 19 nt, Homo sapiens
  misc_RNA (1)...(19): siRNA sense strand
gcagaagaaaccagccgaa

SEQ ID NO: 2629893 - RNA, 19 nt, Homo sapiens
  misc_RNA (1)...(19): siRNA sense strand
agagcauccaggagggcaa

SEQ ID NO: 2629894 - RNA, 19 nt, Homo sapiens
  misc_RNA (1)...(19): siRNA sense strand
aggcuagcaucuacgacaa

SEQ ID NO: 2629895 - RNA, 19 nt, Homo sapiens
  misc_RNA (1)...(19): siRNA sense strand
agaagaggggcaagaagaa

SEQ ID NO: 2629896 - RNA, 19 nt, Homo sapiens
  misc_RNA (1)...(19): siRNA sense strand
cggagguaguggaggccuu

SEQ ID NO: 2629897 - RNA, 19 nt, Homo sapiens
  misc_RNA (1)...(19): siRNA sense strand
gcagaagaaaccagccgaa

SEQ ID NO: 2629898 - RNA, 19 nt, Homo sapiens
  misc_RNA (1)...(19): siRNA sense strand
agagcauccaggagggcaa

SEQ ID NO: 2629899 - RNA, 19 nt, Homo sapiens
  misc_RNA (1)...(19): siRNA sense strand
aggcuagcaucuacgacaa

SEQ ID NO: 2629900 - RNA, 19 nt, Homo sapiens
  misc_RNA (1)...(19): siRNA sense strand
agaagaggggcaagaagaa

SEQ ID NO: 2629901 - RNA, 19 nt, Homo sapiens
  misc_RNA (1)...(19): siRNA sense strand
cuguaaucacugugggaaa

SEQ ID NO: 2629902 - RNA, 19 nt, Homo sapiens
  misc_RNA (1)...(19): siRNA sense strand
acucgaaaucggaggacaa

SEQ ID NO: 2629903 - RNA, 19 nt, Homo sapiens
  misc_RNA (1)...(19): siRNA sense strand
aauucauacaggagagaaa

SEQ ID NO: 2629904 - RNA, 19 nt, Homo sapiens
  misc_RNA (1)...(19): siRNA sense strand
gugaagauccugagaggga

SEQ ID NO: 2629905 - RNA, 19 nt, Homo sapiens
  misc_RNA (1)...(19): siRNA sense strand
aggaagaaugugugagcuu

SEQ ID NO: 2629906 - RNA, 19 nt, Homo sapiens
  misc_RNA (1)...(19): siRNA sense strand
guuaguuaccauugagaau

SEQ ID NO: 2629907 - RNA, 19 nt, Homo sapiens
  misc_RNA (1)...(19): siRNA sense strand
ccaaaaggaacaagagaca

SEQ ID NO: 2629908 - RNA, 19 nt, Homo sapiens
  misc_RNA (1)...(19): siRNA sense strand
guguccagaaugugggaaa

SEQ ID NO: 2629909 - RNA, 19 nt, Homo sapiens
  misc_RNA (1)...(19): siRNA sense strand
gcaguaauccugaagguga

SEQ ID NO: 2629910 - RNA, 19 nt, Homo sapiens
  misc_RNA (1)...(19): siRNA sense strand
uggugaagcuucugcccaa

SEQ ID NO: 2629911 - RNA, 19 nt, Homo sapiens
  misc_RNA (1)...(19): siRNA sense strand
aggacaaggagaugguaca

SEQ ID NO: 2629912 - RNA, 19 nt, Homo sapiens
  misc_RNA (1)...(19): siRNA sense strand
agucagaaagucaaggaga

SEQ ID NO: 2629913 - RNA, 19 nt, Homo sapiens
  misc_RNA (1)...(19): siRNA sense strand
ucccaaagaaugaggaguu

SEQ ID NO: 2629914 - RNA, 19 nt, Homo sapiens
  misc_RNA (1)...(19): siRNA sense strand
augaaagaugugagcucaa

SEQ ID NO: 2629915 - RNA, 19 nt, Homo sapiens
  misc_RNA (1)...(19): siRNA sense strand
ucucuguauuugaaagcua

SEQ ID NO: 2629916 - RNA, 19 nt, Homo sapiens
  misc_RNA (1)...(19): siRNA sense strand
ugguggucuuugaggauuu

SEQ ID NO: 2629917 - RNA, 19 nt, Homo sapiens
  misc_RNA (1)...(19): siRNA sense strand
agagggaaccuguagaaaa

SEQ ID NO: 2629918 - RNA, 19 nt, Homo sapiens
  misc_RNA (1)...(19): siRNA sense strand
cugcaaaagugguuccuau

SEQ ID NO: 2629919 - RNA, 19 nt, Homo sapiens
  misc_RNA (1)...(19): siRNA sense strand
uguaagacccgaaagcaga

SEQ ID NO: 2629920 - RNA, 19 nt, Homo sapiens
  misc_RNA (1)...(19): siRNA sense strand
gccaagaccuacuucgaga

SEQ ID NO: 2629921 - RNA, 19 nt, Homo sapiens
  misc_RNA (1)...(19): siRNA sense strand
caggaaaaggaacgacuaa

SEQ ID NO: 2629922 - RNA, 19 nt, Homo sapiens
  misc_RNA (1)...(19): siRNA sense strand
aaucggaggacaaggagau

SEQ ID NO: 2629923 - RNA, 19 nt, Homo sapiens
  misc_RNA (1)...(19): siRNA sense strand
caucaguauuauugcccuu

SEQ ID NO: 2629924 - RNA, 19 nt, Homo sapiens
  misc_RNA (1)...(19): siRNA sense strand
augaggaguuugugcuuca

SEQ ID NO: 2629925 - RNA, 19 nt, Homo sapiens
  misc_RNA (1)...(19): siRNA sense strand
gagucaugaggcugagaga

SEQ ID NO: 2629926 - RNA, 19 nt, Homo sapiens
  misc_RNA (1)...(19): siRNA sense strand
auuuaaguguccagaaugu

SEQ ID NO: 2629927 - RNA, 19 nt, Homo sapiens
  misc_RNA (1)...(19): siRNA sense strand
aaugaaaguucuuaccuca

SEQ ID NO: 2629928 - RNA, 19 nt, Homo sapiens
  misc_RNA (1)...(19): siRNA sense strand
cuguaaucacugugggaaa

SEQ ID NO: 2629929 - RNA, 19 nt, Homo sapiens
  misc_RNA (1)...(19): siRNA sense strand
acucgaaaucggaggacaa

SEQ ID NO: 2629930 - RNA, 19 nt, Homo sapiens
  misc_RNA (1)...(19): siRNA sense strand
aauucauacaggagagaaa

SEQ ID NO: 2629931 - RNA, 19 nt, Homo sapiens
  misc_RNA (1)...(19): siRNA sense strand
gugaagauccugagaggga

SEQ ID NO: 2629932 - RNA, 19 nt, Homo sapiens
  misc_RNA (1)...(19): siRNA sense strand
aggaagaaugugugagcuu

SEQ ID NO: 2629933 - RNA, 19 nt, Homo sapiens
  misc_RNA (1)...(19): siRNA sense strand
guuaguuaccauugagaau

SEQ ID NO: 2629934 - RNA, 19 nt, Homo sapiens
  misc_RNA (1)...(19): siRNA sense strand
ccaaaaggaacaagagaca

SEQ ID NO: 2629935 - RNA, 19 nt, Homo sapiens
  misc_RNA (1)...(19): siRNA sense strand
guguccagaaugugggaaa

SEQ ID NO: 2629936 - RNA, 19 nt, Homo sapiens
  misc_RNA (1)...(19): siRNA sense strand
gcaguaauccugaagguga

SEQ ID NO: 2629937 - RNA, 19 nt, Homo sapiens
  misc_RNA (1)...(19): siRNA sense strand
uggugaagcuucugcccaa

SEQ ID NO: 2629938 - RNA, 19 nt, Homo sapiens
  misc_RNA (1)...(19): siRNA sense strand
aggacaaggagaugguaca

SEQ ID NO: 2629939 - RNA, 19 nt, Homo sapiens
  misc_RNA (1)...(19): siRNA sense strand
agucagaaagucaaggaga

SEQ ID NO: 2629940 - RNA, 19 nt, Homo sapiens
  misc_RNA (1)...(19): siRNA sense strand
ucccaaagaaugaggaguu

SEQ ID NO: 2629941 - RNA, 19 nt, Homo sapiens
  misc_RNA (1)...(19): siRNA sense strand
augaaagaugugagcucaa

SEQ ID NO: 2629942 - RNA, 19 nt, Homo sapiens
  misc_RNA (1)...(19): siRNA sense strand
ucucuguauuugaaagcua

SEQ ID NO: 2629943 - RNA, 19 nt, Homo sapiens
  misc_RNA (1)...(19): siRNA sense strand
ugguggucuuugaggauuu

SEQ ID NO: 2629944 - RNA, 19 nt, Homo sapiens
  misc_RNA (1)...(19): siRNA sense strand
agagggaaccuguagaaaa

SEQ ID NO: 2629945 - RNA, 19 nt, Homo sapiens
  misc_RNA (1)...(19): siRNA sense strand
cugcaaaagugguuccuau

SEQ ID NO: 2629946 - RNA, 19 nt, Homo sapiens
  misc_RNA (1)...(19): siRNA sense strand
uguaagacccgaaagcaga

SEQ ID NO: 2629947 - RNA, 19 nt, Homo sapiens
  misc_RNA (1)...(19): siRNA sense strand
gccaagaccuacuucgaga

SEQ ID NO: 2629948 - RNA, 19 nt, Homo sapiens
  misc_RNA (1)...(19): siRNA sense strand
caggaaaaggaacgacuaa

SEQ ID NO: 2629949 - RNA, 19 nt, Homo sapiens
  misc_RNA (1)...(19): siRNA sense strand
aaucggaggacaaggagau

SEQ ID NO: 2629950 - RNA, 19 nt, Homo sapiens
  misc_RNA (1)...(19): siRNA sense strand
caucaguauuauugcccuu

SEQ ID NO: 2629951 - RNA, 19 nt, Homo sapiens
  misc_RNA (1)...(19): siRNA sense strand
augaggaguuugugcuuca

SEQ ID NO: 2629952 - RNA, 19 nt, Homo sapiens
  misc_RNA (1)...(19): siRNA sense strand
gagucaugaggcugagaga

SEQ ID NO: 2629953 - RNA, 19 nt, Homo sapiens
  misc_RNA (1)...(19): siRNA sense strand
auuuaaguguccagaaugu

SEQ ID NO: 2629954 - RNA, 19 nt, Homo sapiens
  misc_RNA (1)...(19): siRNA sense strand
aaugaaaguucuuaccuca

SEQ ID NO: 2629955 - RNA, 19 nt, Homo sapiens
  misc_RNA (1)...(19): siRNA sense strand
cuguaaucacugugggaaa

SEQ ID NO: 2629956 - RNA, 19 nt, Homo sapiens
  misc_RNA (1)...(19): siRNA sense strand
acucgaaaucggaggacaa

SEQ ID NO: 2629957 - RNA, 19 nt, Homo sapiens
  misc_RNA (1)...(19): siRNA sense strand
aauucauacaggagagaaa

SEQ ID NO: 2629958 - RNA, 19 nt, Homo sapiens
  misc_RNA (1)...(19): siRNA sense strand
gugaagauccugagaggga

SEQ ID NO: 2629959 - RNA, 19 nt, Homo sapiens
  misc_RNA (1)...(19): siRNA sense strand
aggaagaaugugugagcuu

SEQ ID NO: 2629960 - RNA, 19 nt, Homo sapiens
  misc_RNA (1)...(19): siRNA sense strand
guuaguuaccauugagaau

SEQ ID NO: 2629961 - RNA, 19 nt, Homo sapiens
  misc_RNA (1)...(19): siRNA sense strand
ccaaaaggaacaagagaca

SEQ ID NO: 2629962 - RNA, 19 nt, Homo sapiens
  misc_RNA (1)...(19): siRNA sense strand
guguccagaaugugggaaa

SEQ ID NO: 2629963 - RNA, 19 nt, Homo sapiens
  misc_RNA (1)...(19): siRNA sense strand
gcaguaauccugaagguga

SEQ ID NO: 2629964 - RNA, 19 nt, Homo sapiens
  misc_RNA (1)...(19): siRNA sense strand
uggugaagcuucugcccaa

SEQ ID NO: 2629965 - RNA, 19 nt, Homo sapiens
  misc_RNA (1)...(19): siRNA sense strand
aggacaaggagaugguaca

SEQ ID NO: 2629966 - RNA, 19 nt, Homo sapiens
  misc_RNA (1)...(19): siRNA sense strand
agucagaaagucaaggaga

SEQ ID NO: 2629967 - RNA, 19 nt, Homo sapiens
  misc_RNA (1)...(19): siRNA sense strand
ucccaaagaaugaggaguu

SEQ ID NO: 2629968 - RNA, 19 nt, Homo sapiens
  misc_RNA (1)...(19): siRNA sense strand
augaaagaugugagcucaa

SEQ ID NO: 2629969 - RNA, 19 nt, Homo sapiens
  misc_RNA (1)...(19): siRNA sense strand
ucucuguauuugaaagcua

SEQ ID NO: 2629970 - RNA, 19 nt, Homo sapiens
  misc_RNA (1)...(19): siRNA sense strand
ugguggucuuugaggauuu

SEQ ID NO: 2629971 - RNA, 19 nt, Homo sapiens
  misc_RNA (1)...(19): siRNA sense strand
agagggaaccuguagaaaa

SEQ ID NO: 2629972 - RNA, 19 nt, Homo sapiens
  misc_RNA (1)...(19): siRNA sense strand
cugcaaaagugguuccuau

SEQ ID NO: 2629973 - RNA, 19 nt, Homo sapiens
  misc_RNA (1)...(19): siRNA sense strand
uguaagacccgaaagcaga

SEQ ID NO: 2629974 - RNA, 19 nt, Homo sapiens
  misc_RNA (1)...(19): siRNA sense strand
gccaagaccuacuucgaga

SEQ ID NO: 2629975 - RNA, 19 nt, Homo sapiens
  misc_RNA (1)...(19): siRNA sense strand
caggaaaaggaacgacuaa

SEQ ID NO: 2629976 - RNA, 19 nt, Homo sapiens
  misc_RNA (1)...(19): siRNA sense strand
aaucggaggacaaggagau

SEQ ID NO: 2629977 - RNA, 19 nt, Homo sapiens
  misc_RNA (1)...(19): siRNA sense strand
caucaguauuauugcccuu

SEQ ID NO: 2629978 - RNA, 19 nt, Homo sapiens
  misc_RNA (1)...(19): siRNA sense strand
augaggaguuugugcuuca

SEQ ID NO: 2629979 - RNA, 19 nt, Homo sapiens
  misc_RNA (1)...(19): siRNA sense strand
gagucaugaggcugagaga

SEQ ID NO: 2629980 - RNA, 19 nt, Homo sapiens
  misc_RNA (1)...(19): siRNA sense strand
auuuaaguguccagaaugu

SEQ ID NO: 2629981 - RNA, 19 nt, Homo sapiens
  misc_RNA (1)...(19): siRNA sense strand
aaugaaaguucuuaccuca

SEQ ID NO: 2629982 - RNA, 19 nt, Homo sapiens
  misc_RNA (1)...(19): siRNA sense strand
cucaagaggaagauagaca

SEQ ID NO: 2629983 - RNA, 19 nt, Homo sapiens
  misc_RNA (1)...(19): siRNA sense strand
guggaagacuugacccaga

SEQ ID NO: 2629984 - RNA, 19 nt, Homo sapiens
  misc_RNA (1)...(19): siRNA sense strand
aagauagacaggaggagga

SEQ ID NO: 2629985 - RNA, 19 nt, Homo sapiens
  misc_RNA (1)...(19): siRNA sense strand
ccaugcugccaaaggaaau

SEQ ID NO: 2629986 - RNA, 19 nt, Homo sapiens
  misc_RNA (1)...(19): siRNA sense strand
ggcugagaccagagguaca

SEQ ID NO: 2629987 - RNA, 19 nt, Homo sapiens
  misc_RNA (1)...(19): siRNA sense strand
accaaggagcagauguuaa

SEQ ID NO: 2629988 - RNA, 19 nt, Homo sapiens
  misc_RNA (1)...(19): siRNA sense strand
caaaggaaauucaggcuug

SEQ ID NO: 2629989 - RNA, 19 nt, Homo sapiens
  misc_RNA (1)...(19): siRNA sense strand
aggaagauagacaggagga

SEQ ID NO: 2629990 - RNA, 19 nt, Homo sapiens
  misc_RNA (1)...(19): siRNA sense strand
cucaagaggaagauagaca

SEQ ID NO: 2629991 - RNA, 19 nt, Homo sapiens
  misc_RNA (1)...(19): siRNA sense strand
guggaagacuugacccaga

SEQ ID NO: 2629992 - RNA, 19 nt, Homo sapiens
  misc_RNA (1)...(19): siRNA sense strand
aagauagacaggaggagga

SEQ ID NO: 2629993 - RNA, 19 nt, Homo sapiens
  misc_RNA (1)...(19): siRNA sense strand
ccaugcugccaaaggaaau

SEQ ID NO: 2629994 - RNA, 19 nt, Homo sapiens
  misc_RNA (1)...(19): siRNA sense strand
ggcugagaccagagguaca

SEQ ID NO: 2629995 - RNA, 19 nt, Homo sapiens
  misc_RNA (1)...(19): siRNA sense strand
accaaggagcagauguuaa

SEQ ID NO: 2629996 - RNA, 19 nt, Homo sapiens
  misc_RNA (1)...(19): siRNA sense strand
caaaggaaauucaggcuug

SEQ ID NO: 2629997 - RNA, 19 nt, Homo sapiens
  misc_RNA (1)...(19): siRNA sense strand
aggaagauagacaggagga

SEQ ID NO: 2629998 - RNA, 19 nt, Homo sapiens
  misc_RNA (1)...(19): siRNA sense strand
aguucaacguggagggcuu

SEQ ID NO: 2629999 - RNA, 19 nt, Homo sapiens
  misc_RNA (1)...(19): siRNA sense strand
guucagugcuccagccaca

SEQ ID NO: 2630000 - RNA, 19 nt, Homo sapiens
  misc_RNA (1)...(19): siRNA sense strand
gugacaaugaggaggagga

SEQ ID NO: 2630001 - RNA, 19 nt, Homo sapiens
  misc_RNA (1)...(19): siRNA sense strand
gcgggaggaaggugacaau

SEQ ID NO: 2630002 - RNA, 19 nt, Homo sapiens
  misc_RNA (1)...(19): siRNA sense strand
aggaguacuuuguggccca

SEQ ID NO: 2630003 - RNA, 19 nt, Homo sapiens
  misc_RNA (1)...(19): siRNA sense strand
augaggaggaggaguacuu

SEQ ID NO: 2630004 - RNA, 19 nt, Homo sapiens
  misc_RNA (1)...(19): siRNA sense strand
aguucaacguggagggcuu

SEQ ID NO: 2630005 - RNA, 19 nt, Homo sapiens
  misc_RNA (1)...(19): siRNA sense strand
guucagugcuccagccaca

SEQ ID NO: 2630006 - RNA, 19 nt, Homo sapiens
  misc_RNA (1)...(19): siRNA sense strand
gugacaaugaggaggagga

SEQ ID NO: 2630007 - RNA, 19 nt, Homo sapiens
  misc_RNA (1)...(19): siRNA sense strand
gcgggaggaaggugacaau

SEQ ID NO: 2630008 - RNA, 19 nt, Homo sapiens
  misc_RNA (1)...(19): siRNA sense strand
aggaguacuuuguggccca

SEQ ID NO: 2630009 - RNA, 19 nt, Homo sapiens
  misc_RNA (1)...(19): siRNA sense strand
augaggaggaggaguacuu

SEQ ID NO: 2630010 - RNA, 19 nt, Homo sapiens
  misc_RNA (1)...(19): siRNA sense strand
aguucaacguggagggcuu

SEQ ID NO: 2630011 - RNA, 19 nt, Homo sapiens
  misc_RNA (1)...(19): siRNA sense strand
guucagugcuccagccaca

SEQ ID NO: 2630012 - RNA, 19 nt, Homo sapiens
  misc_RNA (1)...(19): siRNA sense strand
gugacaaugaggaggagga

SEQ ID NO: 2630013 - RNA, 19 nt, Homo sapiens
  misc_RNA (1)...(19): siRNA sense strand
gcgggaggaaggugacaau

SEQ ID NO: 2630014 - RNA, 19 nt, Homo sapiens
  misc_RNA (1)...(19): siRNA sense strand
aggaguacuuuguggccca

SEQ ID NO: 2630015 - RNA, 19 nt, Homo sapiens
  misc_RNA (1)...(19): siRNA sense strand
augaggaggaggaguacuu

SEQ ID NO: 2630016 - RNA, 19 nt, Homo sapiens
  misc_RNA (1)...(19): siRNA sense strand
gggcacuguuuguggccua

SEQ ID NO: 2630017 - RNA, 19 nt, Homo sapiens
  misc_RNA (1)...(19): siRNA sense strand
ggaauggacaagcaggcaa

SEQ ID NO: 2630018 - RNA, 19 nt, Homo sapiens
  misc_RNA (1)...(19): siRNA sense strand
aaauggagaugucagggaa

SEQ ID NO: 2630019 - RNA, 19 nt, Homo sapiens
  misc_RNA (1)...(19): siRNA sense strand
uguuuguggccuacgaaua

SEQ ID NO: 2630020 - RNA, 19 nt, Homo sapiens
  misc_RNA (1)...(19): siRNA sense strand
ccauaauacaauuuggucu

SEQ ID NO: 2630021 - RNA, 19 nt, Homo sapiens
  misc_RNA (1)...(19): siRNA sense strand
aggaagaugaugaugaaac

SEQ ID NO: 2630022 - RNA, 19 nt, Homo sapiens
  misc_RNA (1)...(19): siRNA sense strand
agaagaagcaagaggagaa

SEQ ID NO: 2630023 - RNA, 19 nt, Homo sapiens
  misc_RNA (1)...(19): siRNA sense strand
aagaagaagaugaggagaa

SEQ ID NO: 2630024 - RNA, 19 nt, Homo sapiens
  misc_RNA (1)...(19): siRNA sense strand
gagugaaguugguggucau

SEQ ID NO: 2630025 - RNA, 19 nt, Homo sapiens
  misc_RNA (1)...(19): siRNA sense strand
gggagaaauuugacccaga

SEQ ID NO: 2630026 - RNA, 19 nt, Homo sapiens
  misc_RNA (1)...(19): siRNA sense strand
cggacaucauccagaagua

SEQ ID NO: 2630027 - RNA, 19 nt, Homo sapiens
  misc_RNA (1)...(19): siRNA sense strand
ucgcugagaccgaggagaa

SEQ ID NO: 2630028 - RNA, 19 nt, Homo sapiens
  misc_RNA (1)...(19): siRNA sense strand
uuuaaaggcuggauggaca

SEQ ID NO: 2630029 - RNA, 19 nt, Homo sapiens
  misc_RNA (1)...(19): siRNA sense strand
gagcacagcugguucgaga

SEQ ID NO: 2630030 - RNA, 19 nt, Homo sapiens
  misc_RNA (1)...(19): siRNA sense strand
ccaucauccuggagaacuu

SEQ ID NO: 2630031 - RNA, 19 nt, Homo sapiens
  misc_RNA (1)...(19): siRNA sense strand
agaccgaggagaaggaaaa

SEQ ID NO: 2630032 - RNA, 19 nt, Homo sapiens
  misc_RNA (1)...(19): siRNA sense strand
aguaaacagccaugagaga

SEQ ID NO: 2630033 - RNA, 19 nt, Homo sapiens
  misc_RNA (1)...(19): siRNA sense strand
gcaugcagcucuuuggcaa

SEQ ID NO: 2630034 - RNA, 19 nt, Homo sapiens
  misc_RNA (1)...(19): siRNA sense strand
cccaagagcucaucggaga

SEQ ID NO: 2630035 - RNA, 19 nt, Homo sapiens
  misc_RNA (1)...(19): siRNA sense strand
ccucagugauccagaaaau

SEQ ID NO: 2630036 - RNA, 19 nt, Homo sapiens
  misc_RNA (1)...(19): siRNA sense strand
ggagaauuguacuggacca

SEQ ID NO: 2630037 - RNA, 19 nt, Homo sapiens
  misc_RNA (1)...(19): siRNA sense strand
acgaagaggugucggccau

SEQ ID NO: 2630038 - RNA, 19 nt, Homo sapiens
  misc_RNA (1)...(19): siRNA sense strand
ggaacaucuucgacagcau

SEQ ID NO: 2630039 - RNA, 19 nt, Homo sapiens
  misc_RNA (1)...(19): siRNA sense strand
aaaucaacaucuuggccaa

SEQ ID NO: 2630040 - RNA, 19 nt, Homo sapiens
  misc_RNA (1)...(19): siRNA sense strand
aggacagagagaugaacaa

SEQ ID NO: 2630041 - RNA, 19 nt, Homo sapiens
  misc_RNA (1)...(19): siRNA sense strand
gagcagaagaaguacuaca

SEQ ID NO: 2630042 - RNA, 19 nt, Homo sapiens
  misc_RNA (1)...(19): siRNA sense strand
uggaagaguuagaggaguc

SEQ ID NO: 2630043 - RNA, 19 nt, Homo sapiens
  misc_RNA (1)...(19): siRNA sense strand
ugaacaaguaccagggcuu

SEQ ID NO: 2630044 - RNA, 19 nt, Homo sapiens
  misc_RNA (1)...(19): siRNA sense strand
gagcagccucagugggaau

SEQ ID NO: 2630045 - RNA, 19 nt, Homo sapiens
  misc_RNA (1)...(19): siRNA sense strand
acuacaaugccaugaagaa

SEQ ID NO: 2630046 - RNA, 19 nt, Homo sapiens
  misc_RNA (1)...(19): siRNA sense strand
ucaucaagaucaucgggaa

SEQ ID NO: 2630047 - RNA, 19 nt, Homo sapiens
  misc_RNA (1)...(19): siRNA sense strand
ccugaugaggacagagaga

SEQ ID NO: 2630048 - RNA, 19 nt, Homo sapiens
  misc_RNA (1)...(19): siRNA sense strand
acacagaugaccaagaaga

SEQ ID NO: 2630049 - RNA, 19 nt, Homo sapiens
  misc_RNA (1)...(19): siRNA sense strand
cagaugaccaagaagaaga

SEQ ID NO: 2630050 - RNA, 19 nt, Homo sapiens
  misc_RNA (1)...(19): siRNA sense strand
ccuaaaggcaggcgagaac

SEQ ID NO: 2630051 - RNA, 19 nt, Homo sapiens
  misc_RNA (1)...(19): siRNA sense strand
caacugaauuuguggaccu

SEQ ID NO: 2630052 - RNA, 19 nt, Homo sapiens
  misc_RNA (1)...(19): siRNA sense strand
agaaagaacacgaggcccu

SEQ ID NO: 2630053 - RNA, 19 nt, Homo sapiens
  misc_RNA (1)...(19): siRNA sense strand
ugucacgauuugagggcau

SEQ ID NO: 2630054 - RNA, 19 nt, Homo sapiens
  misc_RNA (1)...(19): siRNA sense strand
cuaugagaucugggagaaa

SEQ ID NO: 2630055 - RNA, 19 nt, Homo sapiens
  misc_RNA (1)...(19): siRNA sense strand
acuagagccaccagcgaua

SEQ ID NO: 2630056 - RNA, 19 nt, Homo sapiens
  misc_RNA (1)...(19): siRNA sense strand
ugaauaaaggcaagaccau

SEQ ID NO: 2630057 - RNA, 19 nt, Homo sapiens
  misc_RNA (1)...(19): siRNA sense strand
ucgccuacgugaugaguga

SEQ ID NO: 2630058 - RNA, 19 nt, Homo sapiens
  misc_RNA (1)...(19): siRNA sense strand
cggaggaggaguccagcaa

SEQ ID NO: 2630059 - RNA, 19 nt, Homo sapiens
  misc_RNA (1)...(19): siRNA sense strand
agauaagccucaucaacau

SEQ ID NO: 2630060 - RNA, 19 nt, Homo sapiens
  misc_RNA (1)...(19): siRNA sense strand
gagaagaagcaagaggaga

SEQ ID NO: 2630061 - RNA, 19 nt, Homo sapiens
  misc_RNA (1)...(19): siRNA sense strand
ucaaccagacagagggaga

SEQ ID NO: 2630062 - RNA, 19 nt, Homo sapiens
  misc_RNA (1)...(19): siRNA sense strand
gagaccgaggagaaggaaa

SEQ ID NO: 2630063 - RNA, 19 nt, Homo sapiens
  misc_RNA (1)...(19): siRNA sense strand
guuugaggaaggcgagcaa

SEQ ID NO: 2630064 - RNA, 19 nt, Homo sapiens
  misc_RNA (1)...(19): siRNA sense strand
acagcugguucgagacauu

SEQ ID NO: 2630065 - RNA, 19 nt, Homo sapiens
  misc_RNA (1)...(19): siRNA sense strand
cauggaaaugcucaagaaa

SEQ ID NO: 2630066 - RNA, 19 nt, Homo sapiens
  misc_RNA (1)...(19): siRNA sense strand
gguaugaagagcagccuca

SEQ ID NO: 2630067 - RNA, 19 nt, Homo sapiens
  misc_RNA (1)...(19): siRNA sense strand
acaccaucgugaacaacaa

SEQ ID NO: 2630068 - RNA, 19 nt, Homo sapiens
  misc_RNA (1)...(19): siRNA sense strand
acuacaccaucgugaacaa

SEQ ID NO: 2630069 - RNA, 19 nt, Homo sapiens
  misc_RNA (1)...(19): siRNA sense strand
gguggagacagaugaccaa

SEQ ID NO: 2630070 - RNA, 19 nt, Homo sapiens
  misc_RNA (1)...(19): siRNA sense strand
uggucagccugguggccaa

SEQ ID NO: 2630071 - RNA, 19 nt, Homo sapiens
  misc_RNA (1)...(19): siRNA sense strand
acaacaagagccaguguga

SEQ ID NO: 2630072 - RNA, 19 nt, Homo sapiens
  misc_RNA (1)...(19): siRNA sense strand
ugauccagucugugaagaa

SEQ ID NO: 2630073 - RNA, 19 nt, Homo sapiens
  misc_RNA (1)...(19): siRNA sense strand
gagagaagaagcaagagga

SEQ ID NO: 2630074 - RNA, 19 nt, Homo sapiens
  misc_RNA (1)...(19): siRNA sense strand
cagcgcacuggaagaguua

SEQ ID NO: 2630075 - RNA, 19 nt, Homo sapiens
  misc_RNA (1)...(19): siRNA sense strand
gcgcacuggaagaguuaga

SEQ ID NO: 2630076 - RNA, 19 nt, Homo sapiens
  misc_RNA (1)...(19): siRNA sense strand
cauuaugccugcuggucuu

SEQ ID NO: 2630077 - RNA, 19 nt, Homo sapiens
  misc_RNA (1)...(19): siRNA sense strand
cacagaugaccaagaagaa

SEQ ID NO: 2630078 - RNA, 19 nt, Homo sapiens
  misc_RNA (1)...(19): siRNA sense strand
gggucugacuacagccaca

SEQ ID NO: 2630079 - RNA, 19 nt, Homo sapiens
  misc_RNA (1)...(19): siRNA sense strand
aagcggaccaccugggauu

SEQ ID NO: 2630080 - RNA, 19 nt, Homo sapiens
  misc_RNA (1)...(19): siRNA sense strand
gagaauuguacuggaccaa

SEQ ID NO: 2630081 - RNA, 19 nt, Homo sapiens
  misc_RNA (1)...(19): siRNA sense strand
uauucgacauugugaccaa

SEQ ID NO: 2630082 - RNA, 19 nt, Homo sapiens
  misc_RNA (1)...(19): siRNA sense strand
uggccuaugaggagcaaaa

SEQ ID NO: 2630083 - RNA, 19 nt, Homo sapiens
  misc_RNA (1)...(19): siRNA sense strand
gagcacuacaacaugacaa

SEQ ID NO: 2630084 - RNA, 19 nt, Homo sapiens
  misc_RNA (1)...(19): siRNA sense strand
ccucccacccgcaaggaaa

SEQ ID NO: 2630085 - RNA, 19 nt, Homo sapiens
  misc_RNA (1)...(19): siRNA sense strand
ggccaugguuauccagaga

SEQ ID NO: 2630086 - RNA, 19 nt, Homo sapiens
  misc_RNA (1)...(19): siRNA sense strand
cggaagaccaucaagguuc

SEQ ID NO: 2630087 - RNA, 19 nt, Homo sapiens
  misc_RNA (1)...(19): siRNA sense strand
gggaauacaaccucuacau

SEQ ID NO: 2630088 - RNA, 19 nt, Homo sapiens
  misc_RNA (1)...(19): siRNA sense strand
agaagaagcaagaggagaa

SEQ ID NO: 2630089 - RNA, 19 nt, Homo sapiens
  misc_RNA (1)...(19): siRNA sense strand
aagaagaagaugaggagaa

SEQ ID NO: 2630090 - RNA, 19 nt, Homo sapiens
  misc_RNA (1)...(19): siRNA sense strand
gagugaaguugguggucau

SEQ ID NO: 2630091 - RNA, 19 nt, Homo sapiens
  misc_RNA (1)...(19): siRNA sense strand
gggagaaauuugacccaga

SEQ ID NO: 2630092 - RNA, 19 nt, Homo sapiens
  misc_RNA (1)...(19): siRNA sense strand
cggacaucauccagaagua

SEQ ID NO: 2630093 - RNA, 19 nt, Homo sapiens
  misc_RNA (1)...(19): siRNA sense strand
ucgcugagaccgaggagaa

SEQ ID NO: 2630094 - RNA, 19 nt, Homo sapiens
  misc_RNA (1)...(19): siRNA sense strand
uuuaaaggcuggauggaca

SEQ ID NO: 2630095 - RNA, 19 nt, Homo sapiens
  misc_RNA (1)...(19): siRNA sense strand
gagcacagcugguucgaga

SEQ ID NO: 2630096 - RNA, 19 nt, Homo sapiens
  misc_RNA (1)...(19): siRNA sense strand
ccaucauccuggagaacuu

SEQ ID NO: 2630097 - RNA, 19 nt, Homo sapiens
  misc_RNA (1)...(19): siRNA sense strand
agaccgaggagaaggaaaa

SEQ ID NO: 2630098 - RNA, 19 nt, Homo sapiens
  misc_RNA (1)...(19): siRNA sense strand
aguaaacagccaugagaga

SEQ ID NO: 2630099 - RNA, 19 nt, Homo sapiens
  misc_RNA (1)...(19): siRNA sense strand
gcaugcagcucuuuggcaa

SEQ ID NO: 2630100 - RNA, 19 nt, Homo sapiens
  misc_RNA (1)...(19): siRNA sense strand
cccaagagcucaucggaga

SEQ ID NO: 2630101 - RNA, 19 nt, Homo sapiens
  misc_RNA (1)...(19): siRNA sense strand
ccucagugauccagaaaau

SEQ ID NO: 2630102 - RNA, 19 nt, Homo sapiens
  misc_RNA (1)...(19): siRNA sense strand
ggagaauuguacuggacca

SEQ ID NO: 2630103 - RNA, 19 nt, Homo sapiens
  misc_RNA (1)...(19): siRNA sense strand
acgaagaggugucggccau

SEQ ID NO: 2630104 - RNA, 19 nt, Homo sapiens
  misc_RNA (1)...(19): siRNA sense strand
ggaacaucuucgacagcau

SEQ ID NO: 2630105 - RNA, 19 nt, Homo sapiens
  misc_RNA (1)...(19): siRNA sense strand
aaaucaacaucuuggccaa

SEQ ID NO: 2630106 - RNA, 19 nt, Homo sapiens
  misc_RNA (1)...(19): siRNA sense strand
aggacagagagaugaacaa

SEQ ID NO: 2630107 - RNA, 19 nt, Homo sapiens
  misc_RNA (1)...(19): siRNA sense strand
gagcagaagaaguacuaca

SEQ ID NO: 2630108 - RNA, 19 nt, Homo sapiens
  misc_RNA (1)...(19): siRNA sense strand
uggaagaguuagaggaguc

SEQ ID NO: 2630109 - RNA, 19 nt, Homo sapiens
  misc_RNA (1)...(19): siRNA sense strand
ugaacaaguaccagggcuu

SEQ ID NO: 2630110 - RNA, 19 nt, Homo sapiens
  misc_RNA (1)...(19): siRNA sense strand
gagcagccucagugggaau

SEQ ID NO: 2630111 - RNA, 19 nt, Homo sapiens
  misc_RNA (1)...(19): siRNA sense strand
acuacaaugccaugaagaa

SEQ ID NO: 2630112 - RNA, 19 nt, Homo sapiens
  misc_RNA (1)...(19): siRNA sense strand
ucaucaagaucaucgggaa

SEQ ID NO: 2630113 - RNA, 19 nt, Homo sapiens
  misc_RNA (1)...(19): siRNA sense strand
ccugaugaggacagagaga

SEQ ID NO: 2630114 - RNA, 19 nt, Homo sapiens
  misc_RNA (1)...(19): siRNA sense strand
acacagaugaccaagaaga

SEQ ID NO: 2630115 - RNA, 19 nt, Homo sapiens
  misc_RNA (1)...(19): siRNA sense strand
cagaugaccaagaagaaga

SEQ ID NO: 2630116 - RNA, 19 nt, Homo sapiens
  misc_RNA (1)...(19): siRNA sense strand
ccuaaaggcaggcgagaac

SEQ ID NO: 2630117 - RNA, 19 nt, Homo sapiens
  misc_RNA (1)...(19): siRNA sense strand
caacugaauuuguggaccu

SEQ ID NO: 2630118 - RNA, 19 nt, Homo sapiens
  misc_RNA (1)...(19): siRNA sense strand
agaaagaacacgaggcccu

SEQ ID NO: 2630119 - RNA, 19 nt, Homo sapiens
  misc_RNA (1)...(19): siRNA sense strand
ugucacgauuugagggcau

SEQ ID NO: 2630120 - RNA, 19 nt, Homo sapiens
  misc_RNA (1)...(19): siRNA sense strand
cuaugagaucugggagaaa

SEQ ID NO: 2630121 - RNA, 19 nt, Homo sapiens
  misc_RNA (1)...(19): siRNA sense strand
acuagagccaccagcgaua

SEQ ID NO: 2630122 - RNA, 19 nt, Homo sapiens
  misc_RNA (1)...(19): siRNA sense strand
ugaauaaaggcaagaccau

SEQ ID NO: 2630123 - RNA, 19 nt, Homo sapiens
  misc_RNA (1)...(19): siRNA sense strand
ucgccuacgugaugaguga

SEQ ID NO: 2630124 - RNA, 19 nt, Homo sapiens
  misc_RNA (1)...(19): siRNA sense strand
cggaggaggaguccagcaa

SEQ ID NO: 2630125 - RNA, 19 nt, Homo sapiens
  misc_RNA (1)...(19): siRNA sense strand
agauaagccucaucaacau

SEQ ID NO: 2630126 - RNA, 19 nt, Homo sapiens
  misc_RNA (1)...(19): siRNA sense strand
gagaagaagcaagaggaga

SEQ ID NO: 2630127 - RNA, 19 nt, Homo sapiens
  misc_RNA (1)...(19): siRNA sense strand
ucaaccagacagagggaga

SEQ ID NO: 2630128 - RNA, 19 nt, Homo sapiens
  misc_RNA (1)...(19): siRNA sense strand
gagaccgaggagaaggaaa

SEQ ID NO: 2630129 - RNA, 19 nt, Homo sapiens
  misc_RNA (1)...(19): siRNA sense strand
guuugaggaaggcgagcaa

SEQ ID NO: 2630130 - RNA, 19 nt, Homo sapiens
  misc_RNA (1)...(19): siRNA sense strand
acagcugguucgagacauu

SEQ ID NO: 2630131 - RNA, 19 nt, Homo sapiens
  misc_RNA (1)...(19): siRNA sense strand
cauggaaaugcucaagaaa

SEQ ID NO: 2630132 - RNA, 19 nt, Homo sapiens
  misc_RNA (1)...(19): siRNA sense strand
gguaugaagagcagccuca

SEQ ID NO: 2630133 - RNA, 19 nt, Homo sapiens
  misc_RNA (1)...(19): siRNA sense strand
acaccaucgugaacaacaa

SEQ ID NO: 2630134 - RNA, 19 nt, Homo sapiens
  misc_RNA (1)...(19): siRNA sense strand
acuacaccaucgugaacaa

SEQ ID NO: 2630135 - RNA, 19 nt, Homo sapiens
  misc_RNA (1)...(19): siRNA sense strand
gguggagacagaugaccaa

SEQ ID NO: 2630136 - RNA, 19 nt, Homo sapiens
  misc_RNA (1)...(19): siRNA sense strand
uggucagccugguggccaa

SEQ ID NO: 2630137 - RNA, 19 nt, Homo sapiens
  misc_RNA (1)...(19): siRNA sense strand
acaacaagagccaguguga

SEQ ID NO: 2630138 - RNA, 19 nt, Homo sapiens
  misc_RNA (1)...(19): siRNA sense strand
ugauccagucugugaagaa

SEQ ID NO: 2630139 - RNA, 19 nt, Homo sapiens
  misc_RNA (1)...(19): siRNA sense strand
gagagaagaagcaagagga

SEQ ID NO: 2630140 - RNA, 19 nt, Homo sapiens
  misc_RNA (1)...(19): siRNA sense strand
cagcgcacuggaagaguua

SEQ ID NO: 2630141 - RNA, 19 nt, Homo sapiens
  misc_RNA (1)...(19): siRNA sense strand
gcgcacuggaagaguuaga

SEQ ID NO: 2630142 - RNA, 19 nt, Homo sapiens
  misc_RNA (1)...(19): siRNA sense strand
cauuaugccugcuggucuu

SEQ ID NO: 2630143 - RNA, 19 nt, Homo sapiens
  misc_RNA (1)...(19): siRNA sense strand
cacagaugaccaagaagaa

SEQ ID NO: 2630144 - RNA, 19 nt, Homo sapiens
  misc_RNA (1)...(19): siRNA sense strand
gggucugacuacagccaca

SEQ ID NO: 2630145 - RNA, 19 nt, Homo sapiens
  misc_RNA (1)...(19): siRNA sense strand
aagcggaccaccugggauu

SEQ ID NO: 2630146 - RNA, 19 nt, Homo sapiens
  misc_RNA (1)...(19): siRNA sense strand
gagaauuguacuggaccaa

SEQ ID NO: 2630147 - RNA, 19 nt, Homo sapiens
  misc_RNA (1)...(19): siRNA sense strand
uauucgacauugugaccaa

SEQ ID NO: 2630148 - RNA, 19 nt, Homo sapiens
  misc_RNA (1)...(19): siRNA sense strand
uggccuaugaggagcaaaa

SEQ ID NO: 2630149 - RNA, 19 nt, Homo sapiens
  misc_RNA (1)...(19): siRNA sense strand
gagcacuacaacaugacaa

SEQ ID NO: 2630150 - RNA, 19 nt, Homo sapiens
  misc_RNA (1)...(19): siRNA sense strand
ccucccacccgcaaggaaa

SEQ ID NO: 2630151 - RNA, 19 nt, Homo sapiens
  misc_RNA (1)...(19): siRNA sense strand
ggccaugguuauccagaga

SEQ ID NO: 2630152 - RNA, 19 nt, Homo sapiens
  misc_RNA (1)...(19): siRNA sense strand
cggaagaccaucaagguuc

SEQ ID NO: 2630153 - RNA, 19 nt, Homo sapiens
  misc_RNA (1)...(19): siRNA sense strand
gggaauacaaccucuacau

SEQ ID NO: 2630154 - RNA, 19 nt, Homo sapiens
  misc_RNA (1)...(19): siRNA sense strand
cggacagacugcuggguga

SEQ ID NO: 2630155 - RNA, 19 nt, Homo sapiens
  misc_RNA (1)...(19): siRNA sense strand
gcaaggacaucuuuggaga

SEQ ID NO: 2630156 - RNA, 19 nt, Homo sapiens
  misc_RNA (1)...(19): siRNA sense strand
ucaaagaggaugaggcacu

SEQ ID NO: 2630157 - RNA, 19 nt, Homo sapiens
  misc_RNA (1)...(19): siRNA sense strand
caucguggguggagaggac

SEQ ID NO: 2630158 - RNA, 19 nt, Homo sapiens
  misc_RNA (1)...(19): siRNA sense strand
cggacagacugcuggguga

SEQ ID NO: 2630159 - RNA, 19 nt, Homo sapiens
  misc_RNA (1)...(19): siRNA sense strand
gcaaggacaucuuuggaga

SEQ ID NO: 2630160 - RNA, 19 nt, Homo sapiens
  misc_RNA (1)...(19): siRNA sense strand
ucaaagaggaugaggcacu

SEQ ID NO: 2630161 - RNA, 19 nt, Homo sapiens
  misc_RNA (1)...(19): siRNA sense strand
caucguggguggagaggac

SEQ ID NO: 2630162 - RNA, 19 nt, Homo sapiens
  misc_RNA (1)...(19): siRNA sense strand
cggacagacugcuggguga

SEQ ID NO: 2630163 - RNA, 19 nt, Homo sapiens
  misc_RNA (1)...(19): siRNA sense strand
gcaaggacaucuuuggaga

SEQ ID NO: 2630164 - RNA, 19 nt, Homo sapiens
  misc_RNA (1)...(19): siRNA sense strand
ucaaagaggaugaggcacu

SEQ ID NO: 2630165 - RNA, 19 nt, Homo sapiens
  misc_RNA (1)...(19): siRNA sense strand
caucguggguggagaggac

SEQ ID NO: 2630166 - RNA, 19 nt, Homo sapiens
  misc_RNA (1)...(19): siRNA sense strand
guuuaauacccgaugagaa

SEQ ID NO: 2630167 - RNA, 19 nt, Homo sapiens
  misc_RNA (1)...(19): siRNA sense strand
cugguuugccucagugaaa

SEQ ID NO: 2630168 - RNA, 19 nt, Homo sapiens
  misc_RNA (1)...(19): siRNA sense strand
cuaaagaacaacaagugga

SEQ ID NO: 2630169 - RNA, 19 nt, Homo sapiens
  misc_RNA (1)...(19): siRNA sense strand
agcaacugauguagccaaa

SEQ ID NO: 2630170 - RNA, 19 nt, Homo sapiens
  misc_RNA (1)...(19): siRNA sense strand
ccgugugccuugagguguu

SEQ ID NO: 2630171 - RNA, 19 nt, Homo sapiens
  misc_RNA (1)...(19): siRNA sense strand
agaacugcgcugaguguga

SEQ ID NO: 2630172 - RNA, 19 nt, Homo sapiens
  misc_RNA (1)...(19): siRNA sense strand
cuguauugcuaccagucua

SEQ ID NO: 2630173 - RNA, 19 nt, Homo sapiens
  misc_RNA (1)...(19): siRNA sense strand
cugaagaagcuccgagaaa

SEQ ID NO: 2630174 - RNA, 19 nt, Homo sapiens
  misc_RNA (1)...(19): siRNA sense strand
augaauacuucgagaacau

SEQ ID NO: 2630175 - RNA, 19 nt, Homo sapiens
  misc_RNA (1)...(19): siRNA sense strand
gacaaagaugaguggauaa

SEQ ID NO: 2630176 - RNA, 19 nt, Homo sapiens
  misc_RNA (1)...(19): siRNA sense strand
cuccaaagccaaagaagaa

SEQ ID NO: 2630177 - RNA, 19 nt, Homo sapiens
  misc_RNA (1)...(19): siRNA sense strand
cagaaaacugggagcaaaa

SEQ ID NO: 2630178 - RNA, 19 nt, Homo sapiens
  misc_RNA (1)...(19): siRNA sense strand
ccuacaaggaguccagaaa

SEQ ID NO: 2630179 - RNA, 19 nt, Homo sapiens
  misc_RNA (1)...(19): siRNA sense strand
caaacuaugucaaugggaa

SEQ ID NO: 2630180 - RNA, 19 nt, Homo sapiens
  misc_RNA (1)...(19): siRNA sense strand
gaauuaauacacugggaga

SEQ ID NO: 2630181 - RNA, 19 nt, Homo sapiens
  misc_RNA (1)...(19): siRNA sense strand
gucaaugggaauauggaaa

SEQ ID NO: 2630182 - RNA, 19 nt, Homo sapiens
  misc_RNA (1)...(19): siRNA sense strand
ggaagaaaucagauagucu

SEQ ID NO: 2630183 - RNA, 19 nt, Homo sapiens
  misc_RNA (1)...(19): siRNA sense strand
auuaauacacugggagaaa

SEQ ID NO: 2630184 - RNA, 19 nt, Homo sapiens
  misc_RNA (1)...(19): siRNA sense strand
agaaaaggccuuagcaauu

SEQ ID NO: 2630185 - RNA, 19 nt, Homo sapiens
  misc_RNA (1)...(19): siRNA sense strand
cacuagagaucaaugggaa

SEQ ID NO: 2630186 - RNA, 19 nt, Homo sapiens
  misc_RNA (1)...(19): siRNA sense strand
uaacaaagauggagaccuc

SEQ ID NO: 2630187 - RNA, 19 nt, Homo sapiens
  misc_RNA (1)...(19): siRNA sense strand
aaacuaugucaaugggaau

SEQ ID NO: 2630188 - RNA, 19 nt, Homo sapiens
  misc_RNA (1)...(19): siRNA sense strand
aaaagagagcugaagaaaa

SEQ ID NO: 2630189 - RNA, 19 nt, Homo sapiens
  misc_RNA (1)...(19): siRNA sense strand
aguccaacucauugaacua

SEQ ID NO: 2630190 - RNA, 19 nt, Homo sapiens
  misc_RNA (1)...(19): siRNA sense strand
ccuaaaucacaaacaacua

SEQ ID NO: 2630191 - RNA, 19 nt, Homo sapiens
  misc_RNA (1)...(19): siRNA sense strand
caaccuacgaugaugguau

SEQ ID NO: 2630192 - RNA, 19 nt, Homo sapiens
  misc_RNA (1)...(19): siRNA sense strand
ugguacaaccucagaaaca

SEQ ID NO: 2630193 - RNA, 19 nt, Homo sapiens
  misc_RNA (1)...(19): siRNA sense strand
ugauagcagagguggagaa

SEQ ID NO: 2630194 - RNA, 19 nt, Homo sapiens
  misc_RNA (1)...(19): siRNA sense strand
ugguguaucaguauggaaa

SEQ ID NO: 2630195 - RNA, 19 nt, Homo sapiens
  misc_RNA (1)...(19): siRNA sense strand
auauaguagcagugcagaa

SEQ ID NO: 2630196 - RNA, 19 nt, Homo sapiens
  misc_RNA (1)...(19): siRNA sense strand
uggacaaagaugaguggau

SEQ ID NO: 2630197 - RNA, 19 nt, Homo sapiens
  misc_RNA (1)...(19): siRNA sense strand
ggucaagcauacagagccu

SEQ ID NO: 2630198 - RNA, 19 nt, Homo sapiens
  misc_RNA (1)...(19): siRNA sense strand
guggauaaguggagcagcu

SEQ ID NO: 2630199 - RNA, 19 nt, Homo sapiens
  misc_RNA (1)...(19): siRNA sense strand
guauuacaaaugaggaaga

SEQ ID NO: 2630200 - RNA, 19 nt, Homo sapiens
  misc_RNA (1)...(19): siRNA sense strand
uagcagugcagaaagcaaa

SEQ ID NO: 2630201 - RNA, 19 nt, Homo sapiens
  misc_RNA (1)...(19): siRNA sense strand
aaaagaauggcgaagaaaa

SEQ ID NO: 2630202 - RNA, 19 nt, Homo sapiens
  misc_RNA (1)...(19): siRNA sense strand
acuccaaagccaaagaaga

SEQ ID NO: 2630203 - RNA, 19 nt, Homo sapiens
  misc_RNA (1)...(19): siRNA sense strand
uaaccaaacuuaagcccau

SEQ ID NO: 2630204 - RNA, 19 nt, Homo sapiens
  misc_RNA (1)...(19): siRNA sense strand
aacauguggucgaggauuu

SEQ ID NO: 2630205 - RNA, 19 nt, Homo sapiens
  misc_RNA (1)...(19): siRNA sense strand
gaagaaaaggccuuagcaa

SEQ ID NO: 2630206 - RNA, 19 nt, Homo sapiens
  misc_RNA (1)...(19): siRNA sense strand
agaaacagcaacuuggaga

SEQ ID NO: 2630207 - RNA, 19 nt, Homo sapiens
  misc_RNA (1)...(19): siRNA sense strand
aagaaaaggccuuagcaau

SEQ ID NO: 2630208 - RNA, 19 nt, Homo sapiens
  misc_RNA (1)...(19): siRNA sense strand
aauuuaauguccuggagau

SEQ ID NO: 2630209 - RNA, 19 nt, Homo sapiens
  misc_RNA (1)...(19): siRNA sense strand
agaguaaacauguggucga

SEQ ID NO: 2630210 - RNA, 19 nt, Homo sapiens
  misc_RNA (1)...(19): siRNA sense strand
uuaaagaaaggaucggcua

SEQ ID NO: 2630211 - RNA, 19 nt, Homo sapiens
  misc_RNA (1)...(19): siRNA sense strand
gaagaaacagcgauggacu

SEQ ID NO: 2630212 - RNA, 19 nt, Homo sapiens
  misc_RNA (1)...(19): siRNA sense strand
gagaugaacuagaagucgu

SEQ ID NO: 2630213 - RNA, 19 nt, Homo sapiens
  misc_RNA (1)...(19): siRNA sense strand
acuuggagacguugugcaa

SEQ ID NO: 2630214 - RNA, 19 nt, Homo sapiens
  misc_RNA (1)...(19): siRNA sense strand
guaaacauguggucgagga

SEQ ID NO: 2630215 - RNA, 19 nt, Homo sapiens
  misc_RNA (1)...(19): siRNA sense strand
ucgaaaugauccaaugcuu

SEQ ID NO: 2630216 - RNA, 19 nt, Homo sapiens
  misc_RNA (1)...(19): siRNA sense strand
gcauuuuacucuucaggaa

SEQ ID NO: 2630217 - RNA, 19 nt, Homo sapiens
  misc_RNA (1)...(19): siRNA sense strand
acagaaaacugggagcaaa

SEQ ID NO: 2630218 - RNA, 19 nt, Homo sapiens
  misc_RNA (1)...(19): siRNA sense strand
uggcacugaugauaagaau

SEQ ID NO: 2630219 - RNA, 19 nt, Homo sapiens
  misc_RNA (1)...(19): siRNA sense strand
caaagaagaaacagcgaug

SEQ ID NO: 2630220 - RNA, 19 nt, Homo sapiens
  misc_RNA (1)...(19): siRNA sense strand
guagcagugcagaaagcaa

SEQ ID NO: 2630221 - RNA, 19 nt, Homo sapiens
  misc_RNA (1)...(19): siRNA sense strand
uuacaaaugaggaagaugu

SEQ ID NO: 2630222 - RNA, 19 nt, Homo sapiens
  misc_RNA (1)...(19): siRNA sense strand
gccuuagcaauuaaagaaa

SEQ ID NO: 2630223 - RNA, 19 nt, Homo sapiens
  misc_RNA (1)...(19): siRNA sense strand
ugaacuacaaagaagauga

SEQ ID NO: 2630224 - RNA, 19 nt, Homo sapiens
  misc_RNA (1)...(19): siRNA sense strand
cauuugcuggagagaguaa

SEQ ID NO: 2630225 - RNA, 19 nt, Homo sapiens
  misc_RNA (1)...(19): siRNA sense strand
cagauggauauaacugaua

SEQ ID NO: 2630226 - RNA, 19 nt, Homo sapiens
  misc_RNA (1)...(19): siRNA sense strand
cugaagaagcuccgagaaa

SEQ ID NO: 2630227 - RNA, 19 nt, Homo sapiens
  misc_RNA (1)...(19): siRNA sense strand
augaauacuucgagaacau

SEQ ID NO: 2630228 - RNA, 19 nt, Homo sapiens
  misc_RNA (1)...(19): siRNA sense strand
gacaaagaugaguggauaa

SEQ ID NO: 2630229 - RNA, 19 nt, Homo sapiens
  misc_RNA (1)...(19): siRNA sense strand
cuccaaagccaaagaagaa

SEQ ID NO: 2630230 - RNA, 19 nt, Homo sapiens
  misc_RNA (1)...(19): siRNA sense strand
cagaaaacugggagcaaaa

SEQ ID NO: 2630231 - RNA, 19 nt, Homo sapiens
  misc_RNA (1)...(19): siRNA sense strand
ccuacaaggaguccagaaa

SEQ ID NO: 2630232 - RNA, 19 nt, Homo sapiens
  misc_RNA (1)...(19): siRNA sense strand
caaacuaugucaaugggaa

SEQ ID NO: 2630233 - RNA, 19 nt, Homo sapiens
  misc_RNA (1)...(19): siRNA sense strand
gaauuaauacacugggaga

SEQ ID NO: 2630234 - RNA, 19 nt, Homo sapiens
  misc_RNA (1)...(19): siRNA sense strand
gucaaugggaauauggaaa

SEQ ID NO: 2630235 - RNA, 19 nt, Homo sapiens
  misc_RNA (1)...(19): siRNA sense strand
ggaagaaaucagauagucu

SEQ ID NO: 2630236 - RNA, 19 nt, Homo sapiens
  misc_RNA (1)...(19): siRNA sense strand
auuaauacacugggagaaa

SEQ ID NO: 2630237 - RNA, 19 nt, Homo sapiens
  misc_RNA (1)...(19): siRNA sense strand
agaaaaggccuuagcaauu

SEQ ID NO: 2630238 - RNA, 19 nt, Homo sapiens
  misc_RNA (1)...(19): siRNA sense strand
cacuagagaucaaugggaa

SEQ ID NO: 2630239 - RNA, 19 nt, Homo sapiens
  misc_RNA (1)...(19): siRNA sense strand
uaacaaagauggagaccuc

SEQ ID NO: 2630240 - RNA, 19 nt, Homo sapiens
  misc_RNA (1)...(19): siRNA sense strand
aaacuaugucaaugggaau

SEQ ID NO: 2630241 - RNA, 19 nt, Homo sapiens
  misc_RNA (1)...(19): siRNA sense strand
aaaagagagcugaagaaaa

SEQ ID NO: 2630242 - RNA, 19 nt, Homo sapiens
  misc_RNA (1)...(19): siRNA sense strand
aguccaacucauugaacua

SEQ ID NO: 2630243 - RNA, 19 nt, Homo sapiens
  misc_RNA (1)...(19): siRNA sense strand
ccuaaaucacaaacaacua

SEQ ID NO: 2630244 - RNA, 19 nt, Homo sapiens
  misc_RNA (1)...(19): siRNA sense strand
caaccuacgaugaugguau

SEQ ID NO: 2630245 - RNA, 19 nt, Homo sapiens
  misc_RNA (1)...(19): siRNA sense strand
ugguacaaccucagaaaca

SEQ ID NO: 2630246 - RNA, 19 nt, Homo sapiens
  misc_RNA (1)...(19): siRNA sense strand
ugauagcagagguggagaa

SEQ ID NO: 2630247 - RNA, 19 nt, Homo sapiens
  misc_RNA (1)...(19): siRNA sense strand
ugguguaucaguauggaaa

SEQ ID NO: 2630248 - RNA, 19 nt, Homo sapiens
  misc_RNA (1)...(19): siRNA sense strand
auauaguagcagugcagaa

SEQ ID NO: 2630249 - RNA, 19 nt, Homo sapiens
  misc_RNA (1)...(19): siRNA sense strand
uggacaaagaugaguggau

SEQ ID NO: 2630250 - RNA, 19 nt, Homo sapiens
  misc_RNA (1)...(19): siRNA sense strand
ggucaagcauacagagccu

SEQ ID NO: 2630251 - RNA, 19 nt, Homo sapiens
  misc_RNA (1)...(19): siRNA sense strand
guggauaaguggagcagcu

SEQ ID NO: 2630252 - RNA, 19 nt, Homo sapiens
  misc_RNA (1)...(19): siRNA sense strand
guauuacaaaugaggaaga

SEQ ID NO: 2630253 - RNA, 19 nt, Homo sapiens
  misc_RNA (1)...(19): siRNA sense strand
uagcagugcagaaagcaaa

SEQ ID NO: 2630254 - RNA, 19 nt, Homo sapiens
  misc_RNA (1)...(19): siRNA sense strand
aaaagaauggcgaagaaaa

SEQ ID NO: 2630255 - RNA, 19 nt, Homo sapiens
  misc_RNA (1)...(19): siRNA sense strand
acuccaaagccaaagaaga

SEQ ID NO: 2630256 - RNA, 19 nt, Homo sapiens
  misc_RNA (1)...(19): siRNA sense strand
uaaccaaacuuaagcccau

SEQ ID NO: 2630257 - RNA, 19 nt, Homo sapiens
  misc_RNA (1)...(19): siRNA sense strand
aacauguggucgaggauuu

SEQ ID NO: 2630258 - RNA, 19 nt, Homo sapiens
  misc_RNA (1)...(19): siRNA sense strand
gaagaaaaggccuuagcaa

SEQ ID NO: 2630259 - RNA, 19 nt, Homo sapiens
  misc_RNA (1)...(19): siRNA sense strand
agaaacagcaacuuggaga

SEQ ID NO: 2630260 - RNA, 19 nt, Homo sapiens
  misc_RNA (1)...(19): siRNA sense strand
aagaaaaggccuuagcaau

SEQ ID NO: 2630261 - RNA, 19 nt, Homo sapiens
  misc_RNA (1)...(19): siRNA sense strand
aauuuaauguccuggagau

SEQ ID NO: 2630262 - RNA, 19 nt, Homo sapiens
  misc_RNA (1)...(19): siRNA sense strand
agaguaaacauguggucga

SEQ ID NO: 2630263 - RNA, 19 nt, Homo sapiens
  misc_RNA (1)...(19): siRNA sense strand
uuaaagaaaggaucggcua

SEQ ID NO: 2630264 - RNA, 19 nt, Homo sapiens
  misc_RNA (1)...(19): siRNA sense strand
gaagaaacagcgauggacu

SEQ ID NO: 2630265 - RNA, 19 nt, Homo sapiens
  misc_RNA (1)...(19): siRNA sense strand
gagaugaacuagaagucgu

SEQ ID NO: 2630266 - RNA, 19 nt, Homo sapiens
  misc_RNA (1)...(19): siRNA sense strand
acuuggagacguugugcaa

SEQ ID NO: 2630267 - RNA, 19 nt, Homo sapiens
  misc_RNA (1)...(19): siRNA sense strand
guaaacauguggucgagga

SEQ ID NO: 2630268 - RNA, 19 nt, Homo sapiens
  misc_RNA (1)...(19): siRNA sense strand
ucgaaaugauccaaugcuu

SEQ ID NO: 2630269 - RNA, 19 nt, Homo sapiens
  misc_RNA (1)...(19): siRNA sense strand
gcauuuuacucuucaggaa

SEQ ID NO: 2630270 - RNA, 19 nt, Homo sapiens
  misc_RNA (1)...(19): siRNA sense strand
acagaaaacugggagcaaa

SEQ ID NO: 2630271 - RNA, 19 nt, Homo sapiens
  misc_RNA (1)...(19): siRNA sense strand
uggcacugaugauaagaau

SEQ ID NO: 2630272 - RNA, 19 nt, Homo sapiens
  misc_RNA (1)...(19): siRNA sense strand
caaagaagaaacagcgaug

SEQ ID NO: 2630273 - RNA, 19 nt, Homo sapiens
  misc_RNA (1)...(19): siRNA sense strand
guagcagugcagaaagcaa

SEQ ID NO: 2630274 - RNA, 19 nt, Homo sapiens
  misc_RNA (1)...(19): siRNA sense strand
uuacaaaugaggaagaugu

SEQ ID NO: 2630275 - RNA, 19 nt, Homo sapiens
  misc_RNA (1)...(19): siRNA sense strand
gccuuagcaauuaaagaaa

SEQ ID NO: 2630276 - RNA, 19 nt, Homo sapiens
  misc_RNA (1)...(19): siRNA sense strand
ugaacuacaaagaagauga

SEQ ID NO: 2630277 - RNA, 19 nt, Homo sapiens
  misc_RNA (1)...(19): siRNA sense strand
cauuugcuggagagaguaa

SEQ ID NO: 2630278 - RNA, 19 nt, Homo sapiens
  misc_RNA (1)...(19): siRNA sense strand
cagauggauauaacugaua

SEQ ID NO: 2630279 - RNA, 19 nt, Homo sapiens
  misc_RNA (1)...(19): siRNA sense strand
cugaagaagcuccgagaaa

SEQ ID NO: 2630280 - RNA, 19 nt, Homo sapiens
  misc_RNA (1)...(19): siRNA sense strand
augaauacuucgagaacau

SEQ ID NO: 2630281 - RNA, 19 nt, Homo sapiens
  misc_RNA (1)...(19): siRNA sense strand
gacaaagaugaguggauaa

SEQ ID NO: 2630282 - RNA, 19 nt, Homo sapiens
  misc_RNA (1)...(19): siRNA sense strand
cuccaaagccaaagaagaa

SEQ ID NO: 2630283 - RNA, 19 nt, Homo sapiens
  misc_RNA (1)...(19): siRNA sense strand
cagaaaacugggagcaaaa

SEQ ID NO: 2630284 - RNA, 19 nt, Homo sapiens
  misc_RNA (1)...(19): siRNA sense strand
ccuacaaggaguccagaaa

SEQ ID NO: 2630285 - RNA, 19 nt, Homo sapiens
  misc_RNA (1)...(19): siRNA sense strand
caaacuaugucaaugggaa

SEQ ID NO: 2630286 - RNA, 19 nt, Homo sapiens
  misc_RNA (1)...(19): siRNA sense strand
gaauuaauacacugggaga

SEQ ID NO: 2630287 - RNA, 19 nt, Homo sapiens
  misc_RNA (1)...(19): siRNA sense strand
gucaaugggaauauggaaa

SEQ ID NO: 2630288 - RNA, 19 nt, Homo sapiens
  misc_RNA (1)...(19): siRNA sense strand
ggaagaaaucagauagucu

SEQ ID NO: 2630289 - RNA, 19 nt, Homo sapiens
  misc_RNA (1)...(19): siRNA sense strand
auuaauacacugggagaaa

SEQ ID NO: 2630290 - RNA, 19 nt, Homo sapiens
  misc_RNA (1)...(19): siRNA sense strand
agaaaaggccuuagcaauu

SEQ ID NO: 2630291 - RNA, 19 nt, Homo sapiens
  misc_RNA (1)...(19): siRNA sense strand
cacuagagaucaaugggaa

SEQ ID NO: 2630292 - RNA, 19 nt, Homo sapiens
  misc_RNA (1)...(19): siRNA sense strand
uaacaaagauggagaccuc

SEQ ID NO: 2630293 - RNA, 19 nt, Homo sapiens
  misc_RNA (1)...(19): siRNA sense strand
aaacuaugucaaugggaau

SEQ ID NO: 2630294 - RNA, 19 nt, Homo sapiens
  misc_RNA (1)...(19): siRNA sense strand
aaaagagagcugaagaaaa

SEQ ID NO: 2630295 - RNA, 19 nt, Homo sapiens
  misc_RNA (1)...(19): siRNA sense strand
aguccaacucauugaacua

SEQ ID NO: 2630296 - RNA, 19 nt, Homo sapiens
  misc_RNA (1)...(19): siRNA sense strand
ccuaaaucacaaacaacua

SEQ ID NO: 2630297 - RNA, 19 nt, Homo sapiens
  misc_RNA (1)...(19): siRNA sense strand
caaccuacgaugaugguau

SEQ ID NO: 2630298 - RNA, 19 nt, Homo sapiens
  misc_RNA (1)...(19): siRNA sense strand
ugguacaaccucagaaaca

SEQ ID NO: 2630299 - RNA, 19 nt, Homo sapiens
  misc_RNA (1)...(19): siRNA sense strand
ugauagcagagguggagaa

SEQ ID NO: 2630300 - RNA, 19 nt, Homo sapiens
  misc_RNA (1)...(19): siRNA sense strand
ugguguaucaguauggaaa

SEQ ID NO: 2630301 - RNA, 19 nt, Homo sapiens
  misc_RNA (1)...(19): siRNA sense strand
auauaguagcagugcagaa

SEQ ID NO: 2630302 - RNA, 19 nt, Homo sapiens
  misc_RNA (1)...(19): siRNA sense strand
uggacaaagaugaguggau

SEQ ID NO: 2630303 - RNA, 19 nt, Homo sapiens
  misc_RNA (1)...(19): siRNA sense strand
ggucaagcauacagagccu

SEQ ID NO: 2630304 - RNA, 19 nt, Homo sapiens
  misc_RNA (1)...(19): siRNA sense strand
guggauaaguggagcagcu

SEQ ID NO: 2630305 - RNA, 19 nt, Homo sapiens
  misc_RNA (1)...(19): siRNA sense strand
guauuacaaaugaggaaga

SEQ ID NO: 2630306 - RNA, 19 nt, Homo sapiens
  misc_RNA (1)...(19): siRNA sense strand
uagcagugcagaaagcaaa

SEQ ID NO: 2630307 - RNA, 19 nt, Homo sapiens
  misc_RNA (1)...(19): siRNA sense strand
aaaagaauggcgaagaaaa

SEQ ID NO: 2630308 - RNA, 19 nt, Homo sapiens
  misc_RNA (1)...(19): siRNA sense strand
acuccaaagccaaagaaga

SEQ ID NO: 2630309 - RNA, 19 nt, Homo sapiens
  misc_RNA (1)...(19): siRNA sense strand
uaaccaaacuuaagcccau

SEQ ID NO: 2630310 - RNA, 19 nt, Homo sapiens
  misc_RNA (1)...(19): siRNA sense strand
aacauguggucgaggauuu

SEQ ID NO: 2630311 - RNA, 19 nt, Homo sapiens
  misc_RNA (1)...(19): siRNA sense strand
gaagaaaaggccuuagcaa

SEQ ID NO: 2630312 - RNA, 19 nt, Homo sapiens
  misc_RNA (1)...(19): siRNA sense strand
agaaacagcaacuuggaga

SEQ ID NO: 2630313 - RNA, 19 nt, Homo sapiens
  misc_RNA (1)...(19): siRNA sense strand
aagaaaaggccuuagcaau

SEQ ID NO: 2630314 - RNA, 19 nt, Homo sapiens
  misc_RNA (1)...(19): siRNA sense strand
aauuuaauguccuggagau

SEQ ID NO: 2630315 - RNA, 19 nt, Homo sapiens
  misc_RNA (1)...(19): siRNA sense strand
agaguaaacauguggucga

SEQ ID NO: 2630316 - RNA, 19 nt, Homo sapiens
  misc_RNA (1)...(19): siRNA sense strand
uuaaagaaaggaucggcua

SEQ ID NO: 2630317 - RNA, 19 nt, Homo sapiens
  misc_RNA (1)...(19): siRNA sense strand
gaagaaacagcgauggacu

SEQ ID NO: 2630318 - RNA, 19 nt, Homo sapiens
  misc_RNA (1)...(19): siRNA sense strand
gagaugaacuagaagucgu

SEQ ID NO: 2630319 - RNA, 19 nt, Homo sapiens
  misc_RNA (1)...(19): siRNA sense strand
acuuggagacguugugcaa

SEQ ID NO: 2630320 - RNA, 19 nt, Homo sapiens
  misc_RNA (1)...(19): siRNA sense strand
guaaacauguggucgagga

SEQ ID NO: 2630321 - RNA, 19 nt, Homo sapiens
  misc_RNA (1)...(19): siRNA sense strand
ucgaaaugauccaaugcuu

SEQ ID NO: 2630322 - RNA, 19 nt, Homo sapiens
  misc_RNA (1)...(19): siRNA sense strand
gcauuuuacucuucaggaa

SEQ ID NO: 2630323 - RNA, 19 nt, Homo sapiens
  misc_RNA (1)...(19): siRNA sense strand
acagaaaacugggagcaaa

SEQ ID NO: 2630324 - RNA, 19 nt, Homo sapiens
  misc_RNA (1)...(19): siRNA sense strand
uggcacugaugauaagaau

SEQ ID NO: 2630325 - RNA, 19 nt, Homo sapiens
  misc_RNA (1)...(19): siRNA sense strand
caaagaagaaacagcgaug

SEQ ID NO: 2630326 - RNA, 19 nt, Homo sapiens
  misc_RNA (1)...(19): siRNA sense strand
guagcagugcagaaagcaa

SEQ ID NO: 2630327 - RNA, 19 nt, Homo sapiens
  misc_RNA (1)...(19): siRNA sense strand
uuacaaaugaggaagaugu

SEQ ID NO: 2630328 - RNA, 19 nt, Homo sapiens
  misc_RNA (1)...(19): siRNA sense strand
gccuuagcaauuaaagaaa

SEQ ID NO: 2630329 - RNA, 19 nt, Homo sapiens
  misc_RNA (1)...(19): siRNA sense strand
ugaacuacaaagaagauga

SEQ ID NO: 2630330 - RNA, 19 nt, Homo sapiens
  misc_RNA (1)...(19): siRNA sense strand
cauuugcuggagagaguaa

SEQ ID NO: 2630331 - RNA, 19 nt, Homo sapiens
  misc_RNA (1)...(19): siRNA sense strand
cagauggauauaacugaua

SEQ ID NO: 2630332 - RNA, 19 nt, Homo sapiens
  misc_RNA (1)...(19): siRNA sense strand
cugaagaagcuccgagaaa

SEQ ID NO: 2630333 - RNA, 19 nt, Homo sapiens
  misc_RNA (1)...(19): siRNA sense strand
augaauacuucgagaacau

SEQ ID NO: 2630334 - RNA, 19 nt, Homo sapiens
  misc_RNA (1)...(19): siRNA sense strand
gacaaagaugaguggauaa

SEQ ID NO: 2630335 - RNA, 19 nt, Homo sapiens
  misc_RNA (1)...(19): siRNA sense strand
cuccaaagccaaagaagaa

SEQ ID NO: 2630336 - RNA, 19 nt, Homo sapiens
  misc_RNA (1)...(19): siRNA sense strand
cagaaaacugggagcaaaa

SEQ ID NO: 2630337 - RNA, 19 nt, Homo sapiens
  misc_RNA (1)...(19): siRNA sense strand
ccuacaaggaguccagaaa

SEQ ID NO: 2630338 - RNA, 19 nt, Homo sapiens
  misc_RNA (1)...(19): siRNA sense strand
caaacuaugucaaugggaa

SEQ ID NO: 2630339 - RNA, 19 nt, Homo sapiens
  misc_RNA (1)...(19): siRNA sense strand
gaauuaauacacugggaga

SEQ ID NO: 2630340 - RNA, 19 nt, Homo sapiens
  misc_RNA (1)...(19): siRNA sense strand
gucaaugggaauauggaaa

SEQ ID NO: 2630341 - RNA, 19 nt, Homo sapiens
  misc_RNA (1)...(19): siRNA sense strand
ggaagaaaucagauagucu

SEQ ID NO: 2630342 - RNA, 19 nt, Homo sapiens
  misc_RNA (1)...(19): siRNA sense strand
auuaauacacugggagaaa

SEQ ID NO: 2630343 - RNA, 19 nt, Homo sapiens
  misc_RNA (1)...(19): siRNA sense strand
agaaaaggccuuagcaauu

SEQ ID NO: 2630344 - RNA, 19 nt, Homo sapiens
  misc_RNA (1)...(19): siRNA sense strand
cacuagagaucaaugggaa

SEQ ID NO: 2630345 - RNA, 19 nt, Homo sapiens
  misc_RNA (1)...(19): siRNA sense strand
uaacaaagauggagaccuc

SEQ ID NO: 2630346 - RNA, 19 nt, Homo sapiens
  misc_RNA (1)...(19): siRNA sense strand
aaacuaugucaaugggaau

SEQ ID NO: 2630347 - RNA, 19 nt, Homo sapiens
  misc_RNA (1)...(19): siRNA sense strand
aaaagagagcugaagaaaa

SEQ ID NO: 2630348 - RNA, 19 nt, Homo sapiens
  misc_RNA (1)...(19): siRNA sense strand
aguccaacucauugaacua

SEQ ID NO: 2630349 - RNA, 19 nt, Homo sapiens
  misc_RNA (1)...(19): siRNA sense strand
ccuaaaucacaaacaacua

SEQ ID NO: 2630350 - RNA, 19 nt, Homo sapiens
  misc_RNA (1)...(19): siRNA sense strand
caaccuacgaugaugguau

SEQ ID NO: 2630351 - RNA, 19 nt, Homo sapiens
  misc_RNA (1)...(19): siRNA sense strand
ugguacaaccucagaaaca

SEQ ID NO: 2630352 - RNA, 19 nt, Homo sapiens
  misc_RNA (1)...(19): siRNA sense strand
ugauagcagagguggagaa

SEQ ID NO: 2630353 - RNA, 19 nt, Homo sapiens
  misc_RNA (1)...(19): siRNA sense strand
ugguguaucaguauggaaa

SEQ ID NO: 2630354 - RNA, 19 nt, Homo sapiens
  misc_RNA (1)...(19): siRNA sense strand
auauaguagcagugcagaa

SEQ ID NO: 2630355 - RNA, 19 nt, Homo sapiens
  misc_RNA (1)...(19): siRNA sense strand
uggacaaagaugaguggau

SEQ ID NO: 2630356 - RNA, 19 nt, Homo sapiens
  misc_RNA (1)...(19): siRNA sense strand
ggucaagcauacagagccu

SEQ ID NO: 2630357 - RNA, 19 nt, Homo sapiens
  misc_RNA (1)...(19): siRNA sense strand
guggauaaguggagcagcu

SEQ ID NO: 2630358 - RNA, 19 nt, Homo sapiens
  misc_RNA (1)...(19): siRNA sense strand
guauuacaaaugaggaaga

SEQ ID NO: 2630359 - RNA, 19 nt, Homo sapiens
  misc_RNA (1)...(19): siRNA sense strand
uagcagugcagaaagcaaa

SEQ ID NO: 2630360 - RNA, 19 nt, Homo sapiens
  misc_RNA (1)...(19): siRNA sense strand
aaaagaauggcgaagaaaa

SEQ ID NO: 2630361 - RNA, 19 nt, Homo sapiens
  misc_RNA (1)...(19): siRNA sense strand
acuccaaagccaaagaaga

SEQ ID NO: 2630362 - RNA, 19 nt, Homo sapiens
  misc_RNA (1)...(19): siRNA sense strand
uaaccaaacuuaagcccau

SEQ ID NO: 2630363 - RNA, 19 nt, Homo sapiens
  misc_RNA (1)...(19): siRNA sense strand
aacauguggucgaggauuu

SEQ ID NO: 2630364 - RNA, 19 nt, Homo sapiens
  misc_RNA (1)...(19): siRNA sense strand
gaagaaaaggccuuagcaa

SEQ ID NO: 2630365 - RNA, 19 nt, Homo sapiens
  misc_RNA (1)...(19): siRNA sense strand
agaaacagcaacuuggaga

SEQ ID NO: 2630366 - RNA, 19 nt, Homo sapiens
  misc_RNA (1)...(19): siRNA sense strand
aagaaaaggccuuagcaau

SEQ ID NO: 2630367 - RNA, 19 nt, Homo sapiens
  misc_RNA (1)...(19): siRNA sense strand
aauuuaauguccuggagau

SEQ ID NO: 2630368 - RNA, 19 nt, Homo sapiens
  misc_RNA (1)...(19): siRNA sense strand
agaguaaacauguggucga

SEQ ID NO: 2630369 - RNA, 19 nt, Homo sapiens
  misc_RNA (1)...(19): siRNA sense strand
uuaaagaaaggaucggcua

SEQ ID NO: 2630370 - RNA, 19 nt, Homo sapiens
  misc_RNA (1)...(19): siRNA sense strand
gaagaaacagcgauggacu

SEQ ID NO: 2630371 - RNA, 19 nt, Homo sapiens
  misc_RNA (1)...(19): siRNA sense strand
gagaugaacuagaagucgu

SEQ ID NO: 2630372 - RNA, 19 nt, Homo sapiens
  misc_RNA (1)...(19): siRNA sense strand
acuuggagacguugugcaa

SEQ ID NO: 2630373 - RNA, 19 nt, Homo sapiens
  misc_RNA (1)...(19): siRNA sense strand
guaaacauguggucgagga

SEQ ID NO: 2630374 - RNA, 19 nt, Homo sapiens
  misc_RNA (1)...(19): siRNA sense strand
ucgaaaugauccaaugcuu

SEQ ID NO: 2630375 - RNA, 19 nt, Homo sapiens
  misc_RNA (1)...(19): siRNA sense strand
gcauuuuacucuucaggaa

SEQ ID NO: 2630376 - RNA, 19 nt, Homo sapiens
  misc_RNA (1)...(19): siRNA sense strand
acagaaaacugggagcaaa

SEQ ID NO: 2630377 - RNA, 19 nt, Homo sapiens
  misc_RNA (1)...(19): siRNA sense strand
uggcacugaugauaagaau

SEQ ID NO: 2630378 - RNA, 19 nt, Homo sapiens
  misc_RNA (1)...(19): siRNA sense strand
caaagaagaaacagcgaug

SEQ ID NO: 2630379 - RNA, 19 nt, Homo sapiens
  misc_RNA (1)...(19): siRNA sense strand
guagcagugcagaaagcaa

SEQ ID NO: 2630380 - RNA, 19 nt, Homo sapiens
  misc_RNA (1)...(19): siRNA sense strand
uuacaaaugaggaagaugu

SEQ ID NO: 2630381 - RNA, 19 nt, Homo sapiens
  misc_RNA (1)...(19): siRNA sense strand
gccuuagcaauuaaagaaa

SEQ ID NO: 2630382 - RNA, 19 nt, Homo sapiens
  misc_RNA (1)...(19): siRNA sense strand
ugaacuacaaagaagauga

SEQ ID NO: 2630383 - RNA, 19 nt, Homo sapiens
  misc_RNA (1)...(19): siRNA sense strand
cauuugcuggagagaguaa

SEQ ID NO: 2630384 - RNA, 19 nt, Homo sapiens
  misc_RNA (1)...(19): siRNA sense strand
cagauggauauaacugaua

SEQ ID NO: 2630385 - RNA, 19 nt, Homo sapiens
  misc_RNA (1)...(19): siRNA sense strand
cggaaaagccauuuggaca

SEQ ID NO: 2630386 - RNA, 19 nt, Homo sapiens
  misc_RNA (1)...(19): siRNA sense strand
gaagaaagcuauugaccag

SEQ ID NO: 2630387 - RNA, 19 nt, Homo sapiens
  misc_RNA (1)...(19): siRNA sense strand
caucgaacguggaggcugu

SEQ ID NO: 2630388 - RNA, 19 nt, Homo sapiens
  misc_RNA (1)...(19): siRNA sense strand
gcgaagucaaauaaagaca

SEQ ID NO: 2630389 - RNA, 19 nt, Homo sapiens
  misc_RNA (1)...(19): siRNA sense strand
aagaaggggaugaggaauu

SEQ ID NO: 2630390 - RNA, 19 nt, Homo sapiens
  misc_RNA (1)...(19): siRNA sense strand
aggcgaagucaaauaaaga

SEQ ID NO: 2630391 - RNA, 19 nt, Homo sapiens
  misc_RNA (1)...(19): siRNA sense strand
gaguggaguguucgggaau

SEQ ID NO: 2630392 - RNA, 19 nt, Homo sapiens
  misc_RNA (1)...(19): siRNA sense strand
acagaugugaagaaagcua

SEQ ID NO: 2630393 - RNA, 19 nt, Homo sapiens
  misc_RNA (1)...(19): siRNA sense strand
gagcaaauggggugaucau

SEQ ID NO: 2630394 - RNA, 19 nt, Homo sapiens
  misc_RNA (1)...(19): siRNA sense strand
cccaagauguaguacgcau

SEQ ID NO: 2630395 - RNA, 19 nt, Homo sapiens
  misc_RNA (1)...(19): siRNA sense strand
ccaagauguaguacgcauu

SEQ ID NO: 2630396 - RNA, 19 nt, Homo sapiens
  misc_RNA (1)...(19): siRNA sense strand
agaguggaguguucgggaa

SEQ ID NO: 2630397 - RNA, 19 nt, Homo sapiens
  misc_RNA (1)...(19): siRNA sense strand
gcaguaaaguauuucccau

SEQ ID NO: 2630398 - RNA, 19 nt, Homo sapiens
  misc_RNA (1)...(19): siRNA sense strand
aaucauucuccucuggaaa

SEQ ID NO: 2630399 - RNA, 19 nt, Homo sapiens
  misc_RNA (1)...(19): siRNA sense strand
gcagcagagaagggagcaa

SEQ ID NO: 2630400 - RNA, 19 nt, Homo sapiens
  misc_RNA (1)...(19): siRNA sense strand
accaggaggcgaagucaaa

SEQ ID NO: 2630401 - RNA, 19 nt, Homo sapiens
  misc_RNA (1)...(19): siRNA sense strand
agguacgggcaguaaagua

SEQ ID NO: 2630402 - RNA, 19 nt, Homo sapiens
  misc_RNA (1)...(19): siRNA sense strand
aggaaagagcugagugaaa

SEQ ID NO: 2630403 - RNA, 19 nt, Homo sapiens
  misc_RNA (1)...(19): siRNA sense strand
acugaaaggcagagaaaga

SEQ ID NO: 2630404 - RNA, 19 nt, Homo sapiens
  misc_RNA (1)...(19): siRNA sense strand
aggcagagaaagagcaagu

SEQ ID NO: 2630405 - RNA, 19 nt, Homo sapiens
  misc_RNA (1)...(19): siRNA sense strand
acacagaagaccaggaaag

SEQ ID NO: 2630406 - RNA, 19 nt, Homo sapiens
  misc_RNA (1)...(19): siRNA sense strand
cuggaauauccuggagaaa

SEQ ID NO: 2630407 - RNA, 19 nt, Homo sapiens
  misc_RNA (1)...(19): siRNA sense strand
guagagagccuaaguggga

SEQ ID NO: 2630408 - RNA, 19 nt, Homo sapiens
  misc_RNA (1)...(19): siRNA sense strand
cuaugacuacugugggaua

SEQ ID NO: 2630409 - RNA, 19 nt, Homo sapiens
  misc_RNA (1)...(19): siRNA sense strand
cuggaguaugugugcauua

SEQ ID NO: 2630410 - RNA, 19 nt, Homo sapiens
  misc_RNA (1)...(19): siRNA sense strand
agacaccaccacaggcaaa

SEQ ID NO: 2630411 - RNA, 19 nt, Homo sapiens
  misc_RNA (1)...(19): siRNA sense strand
gggacugcuucacggucaa

SEQ ID NO: 2630412 - RNA, 19 nt, Homo sapiens
  misc_RNA (1)...(19): siRNA sense strand
uguguauauuaucgggaau

SEQ ID NO: 2630413 - RNA, 19 nt, Homo sapiens
  misc_RNA (1)...(19): siRNA sense strand
gcuggaaauccuggaguau

SEQ ID NO: 2630414 - RNA, 19 nt, Homo sapiens
  misc_RNA (1)...(19): siRNA sense strand
aggaagcagcuguuagaca

SEQ ID NO: 2630415 - RNA, 19 nt, Homo sapiens
  misc_RNA (1)...(19): siRNA sense strand
uccuaagaaaggugccaaa

SEQ ID NO: 2630416 - RNA, 19 nt, Homo sapiens
  misc_RNA (1)...(19): siRNA sense strand
agagcaaguacuaggagca

SEQ ID NO: 2630417 - RNA, 19 nt, Homo sapiens
  misc_RNA (1)...(19): siRNA sense strand
cugugaguuucgaggauuu

SEQ ID NO: 2630418 - RNA, 19 nt, Homo sapiens
  misc_RNA (1)...(19): siRNA sense strand
ugguguuguuaaugaagaa

SEQ ID NO: 2630419 - RNA, 19 nt, Homo sapiens
  misc_RNA (1)...(19): siRNA sense strand
uggaagaugaacuggagau

SEQ ID NO: 2630420 - RNA, 19 nt, Homo sapiens
  misc_RNA (1)...(19): siRNA sense strand
caaagaagaugcucccaga

SEQ ID NO: 2630421 - RNA, 19 nt, Homo sapiens
  misc_RNA (1)...(19): siRNA sense strand
ggguaaauguacauauccu

SEQ ID NO: 2630422 - RNA, 19 nt, Homo sapiens
  misc_RNA (1)...(19): siRNA sense strand
cgauaugauggguaaaugu

SEQ ID NO: 2630423 - RNA, 19 nt, Homo sapiens
  misc_RNA (1)...(19): siRNA sense strand
cugugaguuucgaggauuu

SEQ ID NO: 2630424 - RNA, 19 nt, Homo sapiens
  misc_RNA (1)...(19): siRNA sense strand
ugguguuguuaaugaagaa

SEQ ID NO: 2630425 - RNA, 19 nt, Homo sapiens
  misc_RNA (1)...(19): siRNA sense strand
uggaagaugaacuggagau

SEQ ID NO: 2630426 - RNA, 19 nt, Homo sapiens
  misc_RNA (1)...(19): siRNA sense strand
caaagaagaugcucccaga

SEQ ID NO: 2630427 - RNA, 19 nt, Homo sapiens
  misc_RNA (1)...(19): siRNA sense strand
ggguaaauguacauauccu

SEQ ID NO: 2630428 - RNA, 19 nt, Homo sapiens
  misc_RNA (1)...(19): siRNA sense strand
cgauaugauggguaaaugu

SEQ ID NO: 2630429 - RNA, 19 nt, Homo sapiens
  misc_RNA (1)...(19): siRNA sense strand
cugugaguuucgaggauuu

SEQ ID NO: 2630430 - RNA, 19 nt, Homo sapiens
  misc_RNA (1)...(19): siRNA sense strand
ugguguuguuaaugaagaa

SEQ ID NO: 2630431 - RNA, 19 nt, Homo sapiens
  misc_RNA (1)...(19): siRNA sense strand
caaagaagaugcucccaga

SEQ ID NO: 2630432 - RNA, 19 nt, Homo sapiens
  misc_RNA (1)...(19): siRNA sense strand
ggguaaauguacauauccu

SEQ ID NO: 2630433 - RNA, 19 nt, Homo sapiens
  misc_RNA (1)...(19): siRNA sense strand
cgauaugauggguaaaugu

SEQ ID NO: 2630434 - RNA, 19 nt, Homo sapiens
  misc_RNA (1)...(19): siRNA sense strand
cugugaguuucgaggauuu

SEQ ID NO: 2630435 - RNA, 19 nt, Homo sapiens
  misc_RNA (1)...(19): siRNA sense strand
ugguguuguuaaugaagaa

SEQ ID NO: 2630436 - RNA, 19 nt, Homo sapiens
  misc_RNA (1)...(19): siRNA sense strand
uggaagaugaacuggagau

SEQ ID NO: 2630437 - RNA, 19 nt, Homo sapiens
  misc_RNA (1)...(19): siRNA sense strand
caaagaagaugcucccaga

SEQ ID NO: 2630438 - RNA, 19 nt, Homo sapiens
  misc_RNA (1)...(19): siRNA sense strand
ggguaaauguacauauccu

SEQ ID NO: 2630439 - RNA, 19 nt, Homo sapiens
  misc_RNA (1)...(19): siRNA sense strand
cgauaugauggguaaaugu

SEQ ID NO: 2630440 - RNA, 19 nt, Homo sapiens
  misc_RNA (1)...(19): siRNA sense strand
gaggacaucgugaggguga

SEQ ID NO: 2630441 - RNA, 19 nt, Homo sapiens
  misc_RNA (1)...(19): siRNA sense strand
cuguguacugugaggaaga

SEQ ID NO: 2630442 - RNA, 19 nt, Homo sapiens
  misc_RNA (1)...(19): siRNA sense strand
gugugcagccuguggccaa

SEQ ID NO: 2630443 - RNA, 19 nt, Homo sapiens
  misc_RNA (1)...(19): siRNA sense strand
gugaggacaucgugagggu

SEQ ID NO: 2630444 - RNA, 19 nt, Homo sapiens
  misc_RNA (1)...(19): siRNA sense strand
gaggacaucgugaggguga

SEQ ID NO: 2630445 - RNA, 19 nt, Homo sapiens
  misc_RNA (1)...(19): siRNA sense strand
gugugcagccuguggccaa

SEQ ID NO: 2630446 - RNA, 19 nt, Homo sapiens
  misc_RNA (1)...(19): siRNA sense strand
gugaggacaucgugagggu

SEQ ID NO: 2630447 - RNA, 19 nt, Homo sapiens
  misc_RNA (1)...(19): siRNA sense strand
cuggaaucccugagauaaa

SEQ ID NO: 2630448 - RNA, 19 nt, Homo sapiens
  misc_RNA (1)...(19): siRNA sense strand
caauaaaagcaaagaguca

SEQ ID NO: 2630449 - RNA, 19 nt, Homo sapiens
  misc_RNA (1)...(19): siRNA sense strand
uggaagauguagagaccau

SEQ ID NO: 2630450 - RNA, 19 nt, Homo sapiens
  misc_RNA (1)...(19): siRNA sense strand
uggcaauggaugugaugaa

SEQ ID NO: 2630451 - RNA, 19 nt, Homo sapiens
  misc_RNA (1)...(19): siRNA sense strand
cgggauaggcaccgagaga

SEQ ID NO: 2630452 - RNA, 19 nt, Homo sapiens
  misc_RNA (1)...(19): siRNA sense strand
gcucauaagacccuggcaa

SEQ ID NO: 2630453 - RNA, 19 nt, Homo sapiens
  misc_RNA (1)...(19): siRNA sense strand
uggagaucguaguggauau

SEQ ID NO: 2630454 - RNA, 19 nt, Homo sapiens
  misc_RNA (1)...(19): siRNA sense strand
aggucgacuucuaggagua

SEQ ID NO: 2630455 - RNA, 19 nt, Homo sapiens
  misc_RNA (1)...(19): siRNA sense strand
ccgagagauuaccaauaaa

SEQ ID NO: 2630456 - RNA, 19 nt, Homo sapiens
  misc_RNA (1)...(19): siRNA sense strand
acucuaaagcuucggaaca

SEQ ID NO: 2630457 - RNA, 19 nt, Homo sapiens
  misc_RNA (1)...(19): siRNA sense strand
aggauguguuaaagcauau

SEQ ID NO: 2630458 - RNA, 19 nt, Homo sapiens
  misc_RNA (1)...(19): siRNA sense strand
ccaucaauccauuugggaa

SEQ ID NO: 2630459 - RNA, 19 nt, Homo sapiens
  misc_RNA (1)...(19): siRNA sense strand
guuuaaugacuguggccuu

SEQ ID NO: 2630460 - RNA, 19 nt, Homo sapiens
  misc_RNA (1)...(19): siRNA sense strand
gcuuauuaccaccaggaau

SEQ ID NO: 2630461 - RNA, 19 nt, Homo sapiens
  misc_RNA (1)...(19): siRNA sense strand
gcuucaacaaauacaggaa

SEQ ID NO: 2630462 - RNA, 19 nt, Homo sapiens
  misc_RNA (1)...(19): siRNA sense strand
gggcauauuugguggucug

SEQ ID NO: 2630463 - RNA, 19 nt, Homo sapiens
  misc_RNA (1)...(19): siRNA sense strand
guauccuguuauagaggua

SEQ ID NO: 2630464 - RNA, 19 nt, Homo sapiens
  misc_RNA (1)...(19): siRNA sense strand
auugauugggugagagaga

SEQ ID NO: 2630465 - RNA, 19 nt, Homo sapiens
  misc_RNA (1)...(19): siRNA sense strand
uguuaaagcauauagcaca

SEQ ID NO: 2630466 - RNA, 19 nt, Homo sapiens
  misc_RNA (1)...(19): siRNA sense strand
cucuggaaucccugagaua

SEQ ID NO: 2630467 - RNA, 19 nt, Homo sapiens
  misc_RNA (1)...(19): siRNA sense strand
acaggaagaaugaagccaa

SEQ ID NO: 2630468 - RNA, 19 nt, Homo sapiens
  misc_RNA (1)...(19): siRNA sense strand
caucaauccauuugggaac

SEQ ID NO: 2630469 - RNA, 19 nt, Homo sapiens
  misc_RNA (1)...(19): siRNA sense strand
caagcaaguggguggcaga

SEQ ID NO: 2630470 - RNA, 19 nt, Homo sapiens
  misc_RNA (1)...(19): siRNA sense strand
gugggagucuacagugcaa

SEQ ID NO: 2630471 - RNA, 19 nt, Homo sapiens
  misc_RNA (1)...(19): siRNA sense strand
ucaccuuugaagagagaga

SEQ ID NO: 2630472 - RNA, 19 nt, Homo sapiens
  misc_RNA (1)...(19): siRNA sense strand
agaaaugauccuuuguuga

SEQ ID NO: 2630473 - RNA, 19 nt, Homo sapiens
  misc_RNA (1)...(19): siRNA sense strand
ccauggagaucguagugga

SEQ ID NO: 2630474 - RNA, 19 nt, Homo sapiens
  misc_RNA (1)...(19): siRNA sense strand
gccuugaagaggucagcua

SEQ ID NO: 2630475 - RNA, 19 nt, Homo sapiens
  misc_RNA (1)...(19): siRNA sense strand
gggugaacugccugacaga

SEQ ID NO: 2630476 - RNA, 19 nt, Homo sapiens
  misc_RNA (1)...(19): siRNA sense strand
aggaauggaccgucuucaa

SEQ ID NO: 2630477 - RNA, 19 nt, Homo sapiens
  misc_RNA (1)...(19): siRNA sense strand
aaaagaagguauaugcaca

SEQ ID NO: 2630478 - RNA, 19 nt, Homo sapiens
  misc_RNA (1)...(19): siRNA sense strand
aaugaauacacucggauga

SEQ ID NO: 2630479 - RNA, 19 nt, Homo sapiens
  misc_RNA (1)...(19): siRNA sense strand
uagaauacaucgugccucu

SEQ ID NO: 2630480 - RNA, 19 nt, Homo sapiens
  misc_RNA (1)...(19): siRNA sense strand
ugaugaaaccccggagaaa

SEQ ID NO: 2630481 - RNA, 19 nt, Homo sapiens
  misc_RNA (1)...(19): siRNA sense strand
ccuucaagaccgugaugga

SEQ ID NO: 2630482 - RNA, 19 nt, Homo sapiens
  misc_RNA (1)...(19): siRNA sense strand
ucuaaagaggagaaagaaa

SEQ ID NO: 2630483 - RNA, 19 nt, Homo sapiens
  misc_RNA (1)...(19): siRNA sense strand
gugaagacuuggugguaga

SEQ ID NO: 2630484 - RNA, 19 nt, Homo sapiens
  misc_RNA (1)...(19): siRNA sense strand
aagcaaaacuggugaugaa

SEQ ID NO: 2630485 - RNA, 19 nt, Homo sapiens
  misc_RNA (1)...(19): siRNA sense strand
aaucuaaagaggagaaaga

SEQ ID NO: 2630486 - RNA, 19 nt, Homo sapiens
  misc_RNA (1)...(19): siRNA sense strand
ucacaaguucagaaggaaa

SEQ ID NO: 2630487 - RNA, 19 nt, Homo sapiens
  misc_RNA (1)...(19): siRNA sense strand
uggcauaugaagaugauua

SEQ ID NO: 2630488 - RNA, 19 nt, Homo sapiens
  misc_RNA (1)...(19): siRNA sense strand
cuaaagaggagaaagaaaa

SEQ ID NO: 2630489 - RNA, 19 nt, Homo sapiens
  misc_RNA (1)...(19): siRNA sense strand
ucgcaaaugaugugaaaca

SEQ ID NO: 2630490 - RNA, 19 nt, Homo sapiens
  misc_RNA (1)...(19): siRNA sense strand
gagacaaggaauuaaagaa

SEQ ID NO: 2630491 - RNA, 19 nt, Homo sapiens
  misc_RNA (1)...(19): siRNA sense strand
cagagcuggcugagaaaua

SEQ ID NO: 2630492 - RNA, 19 nt, Homo sapiens
  misc_RNA (1)...(19): siRNA sense strand
cuuacgaagagcugaguua

SEQ ID NO: 2630493 - RNA, 19 nt, Homo sapiens
  misc_RNA (1)...(19): siRNA sense strand
gcaaagaagaguaugucau

SEQ ID NO: 2630494 - RNA, 19 nt, Homo sapiens
  misc_RNA (1)...(19): siRNA sense strand
ccugauaaugcaugguuua

SEQ ID NO: 2630495 - RNA, 19 nt, Homo sapiens
  misc_RNA (1)...(19): siRNA sense strand
ggagauuguacgaagaaaa

SEQ ID NO: 2630496 - RNA, 19 nt, Homo sapiens
  misc_RNA (1)...(19): siRNA sense strand
ugggaauagugcugagaca

SEQ ID NO: 2630497 - RNA, 19 nt, Homo sapiens
  misc_RNA (1)...(19): siRNA sense strand
ccuccaagcacgaagaaga

SEQ ID NO: 2630498 - RNA, 19 nt, Homo sapiens
  misc_RNA (1)...(19): siRNA sense strand
guaugauguucuugaugaa

SEQ ID NO: 2630499 - RNA, 19 nt, Homo sapiens
  misc_RNA (1)...(19): siRNA sense strand
ccaauaacuuucugagacu

SEQ ID NO: 2630500 - RNA, 19 nt, Homo sapiens
  misc_RNA (1)...(19): siRNA sense strand
auacaggagacaaggaauu

SEQ ID NO: 2630501 - RNA, 19 nt, Homo sapiens
  misc_RNA (1)...(19): siRNA sense strand
aaggaaaccucuuagaaaa

SEQ ID NO: 2630502 - RNA, 19 nt, Homo sapiens
  misc_RNA (1)...(19): siRNA sense strand
aaagaugaucaaaggacaa

SEQ ID NO: 2630503 - RNA, 19 nt, Homo sapiens
  misc_RNA (1)...(19): siRNA sense strand
gagacaggacugaaagaga

SEQ ID NO: 2630504 - RNA, 19 nt, Homo sapiens
  misc_RNA (1)...(19): siRNA sense strand
aguuaugaguuggguauua

SEQ ID NO: 2630505 - RNA, 19 nt, Homo sapiens
  misc_RNA (1)...(19): siRNA sense strand
cugaaaaugaugaaggaau

SEQ ID NO: 2630506 - RNA, 19 nt, Homo sapiens
  misc_RNA (1)...(19): siRNA sense strand
aggaauguauggugagacu

SEQ ID NO: 2630507 - RNA, 19 nt, Homo sapiens
  misc_RNA (1)...(19): siRNA sense strand
cuucaacauucuaaggaga

SEQ ID NO: 2630508 - RNA, 19 nt, Homo sapiens
  misc_RNA (1)...(19): siRNA sense strand
ccagaaaaugcuugaauau

SEQ ID NO: 2630509 - RNA, 19 nt, Homo sapiens
  misc_RNA (1)...(19): siRNA sense strand
aggaaacgccagaggaagu

SEQ ID NO: 2630510 - RNA, 19 nt, Homo sapiens
  misc_RNA (1)...(19): siRNA sense strand
ugaaagagacaaauagcuu

SEQ ID NO: 2630511 - RNA, 19 nt, Homo sapiens
  misc_RNA (1)...(19): siRNA sense strand
caagagaguauaauggaga

SEQ ID NO: 2630512 - RNA, 19 nt, Homo sapiens
  misc_RNA (1)...(19): siRNA sense strand
cuucgcaaaugaugugaaa

SEQ ID NO: 2630513 - RNA, 19 nt, Homo sapiens
  misc_RNA (1)...(19): siRNA sense strand
auuccuaccucuuagauaa

SEQ ID NO: 2630514 - RNA, 19 nt, Homo sapiens
  misc_RNA (1)...(19): siRNA sense strand
caaguuaugaguuggguau

SEQ ID NO: 2630515 - RNA, 19 nt, Homo sapiens
  misc_RNA (1)...(19): siRNA sense strand
uaaggaaacgccagaggaa

SEQ ID NO: 2630516 - RNA, 19 nt, Homo sapiens
  misc_RNA (1)...(19): siRNA sense strand
caggacugaaagagacaaa

SEQ ID NO: 2630517 - RNA, 19 nt, Homo sapiens
  misc_RNA (1)...(19): siRNA sense strand
aggaaagcucccaguagaa

SEQ ID NO: 2630518 - RNA, 19 nt, Homo sapiens
  misc_RNA (1)...(19): siRNA sense strand
cuucaacaccagaugacaa

SEQ ID NO: 2630519 - RNA, 19 nt, Homo sapiens
  misc_RNA (1)...(19): siRNA sense strand
gagaaauaugcuccugaua

SEQ ID NO: 2630520 - RNA, 19 nt, Homo sapiens
  misc_RNA (1)...(19): siRNA sense strand
gaaacaaaagccugguuaa

SEQ ID NO: 2630521 - RNA, 19 nt, Homo sapiens
  misc_RNA (1)...(19): siRNA sense strand
caggagacaaggaauuaaa

SEQ ID NO: 2630522 - RNA, 19 nt, Homo sapiens
  misc_RNA (1)...(19): siRNA sense strand
acucaaaugcuauggaagu

SEQ ID NO: 2630523 - RNA, 19 nt, Homo sapiens
  misc_RNA (1)...(19): siRNA sense strand
ucucauugcuccuaaucaa

SEQ ID NO: 2630524 - RNA, 19 nt, Homo sapiens
  misc_RNA (1)...(19): siRNA sense strand
aauaagagugguuuggaau

SEQ ID NO: 2630525 - RNA, 19 nt, Homo sapiens
  misc_RNA (1)...(19): siRNA sense strand
gguuacaaauucagcucuu

SEQ ID NO: 2630526 - RNA, 19 nt, Homo sapiens
  misc_RNA (1)...(19): siRNA sense strand
guauaauggagaauguaga

SEQ ID NO: 2630527 - RNA, 19 nt, Homo sapiens
  misc_RNA (1)...(19): siRNA sense strand
uggcauuucucuugguuca

SEQ ID NO: 2630528 - RNA, 19 nt, Homo sapiens
  misc_RNA (1)...(19): siRNA sense strand
agaguauaauggagaaugu

SEQ ID NO: 2630529 - RNA, 19 nt, Homo sapiens
  misc_RNA (1)...(19): siRNA sense strand
gcgacauaguggagaagac

SEQ ID NO: 2630530 - RNA, 19 nt, Homo sapiens
  misc_RNA (1)...(19): siRNA sense strand
ugaaacagaagaucagcaa

SEQ ID NO: 2630531 - RNA, 19 nt, Homo sapiens
  misc_RNA (1)...(19): siRNA sense strand
aagagaguauaauggagaa

SEQ ID NO: 2630532 - RNA, 19 nt, Homo sapiens
  misc_RNA (1)...(19): siRNA sense strand
aauggagaauguagaucaa

SEQ ID NO: 2630533 - RNA, 19 nt, Homo sapiens
  misc_RNA (1)...(19): siRNA sense strand
ucucacaaguucagaagga

SEQ ID NO: 2630534 - RNA, 19 nt, Homo sapiens
  misc_RNA (1)...(19): siRNA sense strand
cgauacaggagacaaggaa

SEQ ID NO: 2630535 - RNA, 19 nt, Homo sapiens
  misc_RNA (1)...(19): siRNA sense strand
ugcccuugguugagaaauu

SEQ ID NO: 2630536 - RNA, 19 nt, Homo sapiens
  misc_RNA (1)...(19): siRNA sense strand
ccgaguucaugcagaugua

SEQ ID NO: 2630537 - RNA, 19 nt, Homo sapiens
  misc_RNA (1)...(19): siRNA sense strand
augaaggaauguaugguga

SEQ ID NO: 2630538 - RNA, 19 nt, Homo sapiens
  misc_RNA (1)...(19): siRNA sense strand
cccaagaaggaaagcaaaa

SEQ ID NO: 2630539 - RNA, 19 nt, Homo sapiens
  misc_RNA (1)...(19): siRNA sense strand
aggagaauucaucuggaua

SEQ ID NO: 2630540 - RNA, 19 nt, Homo sapiens
  misc_RNA (1)...(19): siRNA sense strand
acagaagaucagcaauuaa

SEQ ID NO: 2630541 - RNA, 19 nt, Homo sapiens
  misc_RNA (1)...(19): siRNA sense strand
caucaacgccaggaggaaa

SEQ ID NO: 2630542 - RNA, 19 nt, Homo sapiens
  misc_RNA (1)...(19): siRNA sense strand
uguucuauccacagagauu

SEQ ID NO: 2630543 - RNA, 19 nt, Homo sapiens
  misc_RNA (1)...(19): siRNA sense strand
cgggagaugcagaaggaga

SEQ ID NO: 2630544 - RNA, 19 nt, Homo sapiens
  misc_RNA (1)...(19): siRNA sense strand
caacuaagcuaaaugccau

SEQ ID NO: 2630545 - RNA, 19 nt, Homo sapiens
  misc_RNA (1)...(19): siRNA sense strand
ggcucaagacgcaggagaa

SEQ ID NO: 2630546 - RNA, 19 nt, Homo sapiens
  misc_RNA (1)...(19): siRNA sense strand
acgcaggagaagcgggaga

SEQ ID NO: 2630547 - RNA, 19 nt, Homo sapiens
  misc_RNA (1)...(19): siRNA sense strand
ccaauuacugugauggaga

SEQ ID NO: 2630548 - RNA, 19 nt, Homo sapiens
  misc_RNA (1)...(19): siRNA sense strand
uguaagagcuuguggaugc

SEQ ID NO: 2630549 - RNA, 19 nt, Homo sapiens
  misc_RNA (1)...(19): siRNA sense strand
gagcaucagcacagagacu

SEQ ID NO: 2630550 - RNA, 19 nt, Homo sapiens
  misc_RNA (1)...(19): siRNA sense strand
aggagaagcgggagaugca

SEQ ID NO: 2630551 - RNA, 19 nt, Homo sapiens
  misc_RNA (1)...(19): siRNA sense strand
ggaauaugguuguaagagc

SEQ ID NO: 2630552 - RNA, 19 nt, Homo sapiens
  misc_RNA (1)...(19): siRNA sense strand
gaauaugguuguaagagcu

SEQ ID NO: 2630553 - RNA, 19 nt, Homo sapiens
  misc_RNA (1)...(19): siRNA sense strand
uggaguacgacaaggaguu

SEQ ID NO: 2630554 - RNA, 19 nt, Homo sapiens
  misc_RNA (1)...(19): siRNA sense strand
caggaauaugguuguaaga

SEQ ID NO: 2630555 - RNA, 19 nt, Homo sapiens
  misc_RNA (1)...(19): siRNA sense strand
cccagauuccugaggguga

SEQ ID NO: 2630556 - RNA, 19 nt, Homo sapiens
  misc_RNA (1)...(19): siRNA sense strand
auuuggaugaagauggaua

SEQ ID NO: 2630557 - RNA, 19 nt, Homo sapiens
  misc_RNA (1)...(19): siRNA sense strand
auuuggaugaagauggaua

SEQ ID NO: 2630558 - RNA, 19 nt, Homo sapiens
  misc_RNA (1)...(19): siRNA sense strand
auuuggaugaagauggaua

SEQ ID NO: 2630559 - RNA, 19 nt, Homo sapiens
  misc_RNA (1)...(19): siRNA sense strand
auuuggaugaagauggaua

SEQ ID NO: 2630560 - RNA, 19 nt, Homo sapiens
  misc_RNA (1)...(19): siRNA sense strand
auuuggaugaagauggaua

SEQ ID NO: 2630561 - RNA, 19 nt, Homo sapiens
  misc_RNA (1)...(19): siRNA sense strand
auuuggaugaagauggaua

SEQ ID NO: 2630562 - RNA, 19 nt, Homo sapiens
  misc_RNA (1)...(19): siRNA sense strand
auuuggaugaagauggaua

SEQ ID NO: 2630563 - RNA, 19 nt, Homo sapiens
  misc_RNA (1)...(19): siRNA sense strand
auuuggaugaagauggaua

SEQ ID NO: 2630564 - RNA, 19 nt, Homo sapiens
  misc_RNA (1)...(19): siRNA sense strand
auuuggaugaagauggaua

SEQ ID NO: 2630565 - RNA, 19 nt, Homo sapiens
  misc_RNA (1)...(19): siRNA sense strand
agauagaagcugaggugaa

SEQ ID NO: 2630566 - RNA, 19 nt, Homo sapiens
  misc_RNA (1)...(19): siRNA sense strand
ugauagaggugaugcccaa

SEQ ID NO: 2630567 - RNA, 19 nt, Homo sapiens
  misc_RNA (1)...(19): siRNA sense strand
uggauuacuacgagaacaa

SEQ ID NO: 2630568 - RNA, 19 nt, Homo sapiens
  misc_RNA (1)...(19): siRNA sense strand
ccauagaggacuuucacaa

SEQ ID NO: 2630569 - RNA, 19 nt, Homo sapiens
  misc_RNA (1)...(19): siRNA sense strand
caauuacaccagugaggaa

SEQ ID NO: 2630570 - RNA, 19 nt, Homo sapiens
  misc_RNA (1)...(19): siRNA sense strand
ccugacucccagugagaaa

SEQ ID NO: 2630571 - RNA, 19 nt, Homo sapiens
  misc_RNA (1)...(19): siRNA sense strand
aagaagacccugaggagca

SEQ ID NO: 2630572 - RNA, 19 nt, Homo sapiens
  misc_RNA (1)...(19): siRNA sense strand
ccaucauguaccaggcuaa

SEQ ID NO: 2630573 - RNA, 19 nt, Homo sapiens
  misc_RNA (1)...(19): siRNA sense strand
agaagucagacgaggagua

SEQ ID NO: 2630574 - RNA, 19 nt, Homo sapiens
  misc_RNA (1)...(19): siRNA sense strand
agaaccacaacgagacaaa

SEQ ID NO: 2630575 - RNA, 19 nt, Homo sapiens
  misc_RNA (1)...(19): siRNA sense strand
cuaccuaauggauggaaau

SEQ ID NO: 2630576 - RNA, 19 nt, Homo sapiens
  misc_RNA (1)...(19): siRNA sense strand
uuuacaaacuggaugccaa

SEQ ID NO: 2630577 - RNA, 19 nt, Homo sapiens
  misc_RNA (1)...(19): siRNA sense strand
gaggaauaugagagagcca

SEQ ID NO: 2630578 - RNA, 19 nt, Homo sapiens
  misc_RNA (1)...(19): siRNA sense strand
cgguacggaagaagaagaa

SEQ ID NO: 2630579 - RNA, 19 nt, Homo sapiens
  misc_RNA (1)...(19): siRNA sense strand
ugaaugagaugcuggagga

SEQ ID NO: 2630580 - RNA, 19 nt, Homo sapiens
  misc_RNA (1)...(19): siRNA sense strand
cuaaagaacaugaagugca

SEQ ID NO: 2630581 - RNA, 19 nt, Homo sapiens
  misc_RNA (1)...(19): siRNA sense strand
ggaauaugagagagccaca

SEQ ID NO: 2630582 - RNA, 19 nt, Homo sapiens
  misc_RNA (1)...(19): siRNA sense strand
cgaaagaccaucugugacu

SEQ ID NO: 2630583 - RNA, 19 nt, Homo sapiens
  misc_RNA (1)...(19): siRNA sense strand
gccugagggaagugggcaa

SEQ ID NO: 2630584 - RNA, 19 nt, Homo sapiens
  misc_RNA (1)...(19): siRNA sense strand
ggacaugaguaugcgguca

SEQ ID NO: 2630585 - RNA, 19 nt, Homo sapiens
  misc_RNA (1)...(19): siRNA sense strand
augaagagaacaaguccaa

SEQ ID NO: 2630586 - RNA, 19 nt, Homo sapiens
  misc_RNA (1)...(19): siRNA sense strand
acgaugagauagaagcuga

SEQ ID NO: 2630587 - RNA, 19 nt, Homo sapiens
  misc_RNA (1)...(19): siRNA sense strand
ucauggaggaacugcuaaa

SEQ ID NO: 2630588 - RNA, 19 nt, Homo sapiens
  misc_RNA (1)...(19): siRNA sense strand
ucaacaucuguguggauua

SEQ ID NO: 2630589 - RNA, 19 nt, Homo sapiens
  misc_RNA (1)...(19): siRNA sense strand
guuccuguacgaugagaua

SEQ ID NO: 2630590 - RNA, 19 nt, Homo sapiens
  misc_RNA (1)...(19): siRNA sense strand
gcuaugaaacacugcugaa

SEQ ID NO: 2630591 - RNA, 19 nt, Homo sapiens
  misc_RNA (1)...(19): siRNA sense strand
uguauaaauccuuggacca

SEQ ID NO: 2630592 - RNA, 19 nt, Homo sapiens
  misc_RNA (1)...(19): siRNA sense strand
aguggcugcuggagauuaa

SEQ ID NO: 2630593 - RNA, 19 nt, Homo sapiens
  misc_RNA (1)...(19): siRNA sense strand
uggauggaaaugucaguaa

SEQ ID NO: 2630594 - RNA, 19 nt, Homo sapiens
  misc_RNA (1)...(19): siRNA sense strand
ccuacuaugcucugaccaa

SEQ ID NO: 2630595 - RNA, 19 nt, Homo sapiens
  misc_RNA (1)...(19): siRNA sense strand
acuacgagaacaagaugua

SEQ ID NO: 2630596 - RNA, 19 nt, Homo sapiens
  misc_RNA (1)...(19): siRNA sense strand
cucacuaugaagagaacaa

SEQ ID NO: 2630597 - RNA, 19 nt, Homo sapiens
  misc_RNA (1)...(19): siRNA sense strand
aaacacugauagaggugau

SEQ ID NO: 2630598 - RNA, 19 nt, Homo sapiens
  misc_RNA (1)...(19): siRNA sense strand
uguccauguucgaggucau

SEQ ID NO: 2630599 - RNA, 19 nt, Homo sapiens
  misc_RNA (1)...(19): siRNA sense strand
gagcuaaagaacaugaagu

SEQ ID NO: 2630600 - RNA, 19 nt, Homo sapiens
  misc_RNA (1)...(19): siRNA sense strand
cccaagaaccacaacgaga

SEQ ID NO: 2630601 - RNA, 19 nt, Homo sapiens
  misc_RNA (1)...(19): siRNA sense strand
ugaaacgucuggaagccaa

SEQ ID NO: 2630602 - RNA, 19 nt, Homo sapiens
  misc_RNA (1)...(19): siRNA sense strand
augaggagcugcuggcuga

SEQ ID NO: 2630603 - RNA, 19 nt, Homo sapiens
  misc_RNA (1)...(19): siRNA sense strand
uggaguggcugcuggagau

SEQ ID NO: 2630604 - RNA, 19 nt, Homo sapiens
  misc_RNA (1)...(19): siRNA sense strand
acgcagagcucaaaacaga

SEQ ID NO: 2630605 - RNA, 19 nt, Homo sapiens
  misc_RNA (1)...(19): siRNA sense strand
agggugaccuccugaccaa

SEQ ID NO: 2630606 - RNA, 19 nt, Homo sapiens
  misc_RNA (1)...(19): siRNA sense strand
uguaagaauuauggcguca

SEQ ID NO: 2630607 - RNA, 19 nt, Homo sapiens
  misc_RNA (1)...(19): siRNA sense strand
uugccauccugaacaaaua

SEQ ID NO: 2630608 - RNA, 19 nt, Homo sapiens
  misc_RNA (1)...(19): siRNA sense strand
ucuaccuaauggauggaaa

SEQ ID NO: 2630609 - RNA, 19 nt, Homo sapiens
  misc_RNA (1)...(19): siRNA sense strand
cuggcaccgcggaggaaua

SEQ ID NO: 2630610 - RNA, 19 nt, Homo sapiens
  misc_RNA (1)...(19): siRNA sense strand
aggcgguacggaagaagaa

SEQ ID NO: 2630611 - RNA, 19 nt, Homo sapiens
  misc_RNA (1)...(19): siRNA sense strand
ccauguuccgagaggccaa

SEQ ID NO: 2630612 - RNA, 19 nt, Homo sapiens
  misc_RNA (1)...(19): siRNA sense strand
cuggaugccaagaagagaa

SEQ ID NO: 2630613 - RNA, 19 nt, Homo sapiens
  misc_RNA (1)...(19): siRNA sense strand
cugcaugucuucugggaac

SEQ ID NO: 2630614 - RNA, 19 nt, Homo sapiens
  misc_RNA (1)...(19): siRNA sense strand
cuggaugagcuaaagaaca

SEQ ID NO: 2630615 - RNA, 19 nt, Homo sapiens
  misc_RNA (1)...(19): siRNA sense strand
guccaaucgcuaugaaaca

SEQ ID NO: 2630616 - RNA, 19 nt, Homo sapiens
  misc_RNA (1)...(19): siRNA sense strand
agugcagcgucaagaauga

SEQ ID NO: 2630617 - RNA, 19 nt, Homo sapiens
  misc_RNA (1)...(19): siRNA sense strand
ugaagugaucccaggcuau

SEQ ID NO: 2630618 - RNA, 19 nt, Homo sapiens
  misc_RNA (1)...(19): siRNA sense strand
gagaacaagauguaccuga

SEQ ID NO: 2630619 - RNA, 19 nt, Homo sapiens
  misc_RNA (1)...(19): siRNA sense strand
cuacaggcaauucgaaaga

SEQ ID NO: 2630620 - RNA, 19 nt, Homo sapiens
  misc_RNA (1)...(19): siRNA sense strand
gaucuugaacaaugagguu

SEQ ID NO: 2630621 - RNA, 19 nt, Homo sapiens
  misc_RNA (1)...(19): siRNA sense strand
gauggaaaugucaguaaca

SEQ ID NO: 2630622 - RNA, 19 nt, Homo sapiens
  misc_RNA (1)...(19): siRNA sense strand
aagcauaugacgcuggaca

SEQ ID NO: 2630623 - RNA, 19 nt, Homo sapiens
  misc_RNA (1)...(19): siRNA sense strand
cagcucugguuccgagaau

SEQ ID NO: 2630624 - RNA, 19 nt, Homo sapiens
  misc_RNA (1)...(19): siRNA sense strand
caggaggaggucugcgauu

SEQ ID NO: 2630625 - RNA, 19 nt, Homo sapiens
  misc_RNA (1)...(19): siRNA sense strand
ggagaagcucaaugggaca

SEQ ID NO: 2630626 - RNA, 19 nt, Homo sapiens
  misc_RNA (1)...(19): siRNA sense strand
ccaugcugcaagagggcaa

SEQ ID NO: 2630627 - RNA, 19 nt, Homo sapiens
  misc_RNA (1)...(19): siRNA sense strand
acuacaagucacugugcua

SEQ ID NO: 2630628 - RNA, 19 nt, Homo sapiens
  misc_RNA (1)...(19): siRNA sense strand
aggaggagcuggacgccau

SEQ ID NO: 2630629 - RNA, 19 nt, Homo sapiens
  misc_RNA (1)...(19): siRNA sense strand
gggagaagcucaaugggac

SEQ ID NO: 2630630 - RNA, 19 nt, Homo sapiens
  misc_RNA (1)...(19): siRNA sense strand
ggguggugaacaaggauga

SEQ ID NO: 2630631 - RNA, 19 nt, Homo sapiens
  misc_RNA (1)...(19): siRNA sense strand
aaggcagaccugagggaga

SEQ ID NO: 2630632 - RNA, 19 nt, Homo sapiens
  misc_RNA (1)...(19): siRNA sense strand
cccauggagacgagaaaga

SEQ ID NO: 2630633 - RNA, 19 nt, Homo sapiens
  misc_RNA (1)...(19): siRNA sense strand
uugaacaagcccagauaca

SEQ ID NO: 2630634 - RNA, 19 nt, Homo sapiens
  misc_RNA (1)...(19): siRNA sense strand
cacccauggagacgagaaa

SEQ ID NO: 2630635 - RNA, 19 nt, Homo sapiens
  misc_RNA (1)...(19): siRNA sense strand
gugccaaagaugaagaaau

SEQ ID NO: 2630636 - RNA, 19 nt, Homo sapiens
  misc_RNA (1)...(19): siRNA sense strand
ccacaaagaaguugcgaag

SEQ ID NO: 2630637 - RNA, 19 nt, Homo sapiens
  misc_RNA (1)...(19): siRNA sense strand
augaugaugaugaggacaa

SEQ ID NO: 2630638 - RNA, 19 nt, Homo sapiens
  misc_RNA (1)...(19): siRNA sense strand
ccacaaucaacuaagugaa

SEQ ID NO: 2630639 - RNA, 19 nt, Homo sapiens
  misc_RNA (1)...(19): siRNA sense strand
caggauuaccagaguugaa

SEQ ID NO: 2630640 - RNA, 19 nt, Homo sapiens
  misc_RNA (1)...(19): siRNA sense strand
cugaacaacaacaagcuaa

SEQ ID NO: 2630641 - RNA, 19 nt, Homo sapiens
  misc_RNA (1)...(19): siRNA sense strand
ccauaucagaauugcagaa

SEQ ID NO: 2630642 - RNA, 19 nt, Homo sapiens
  misc_RNA (1)...(19): siRNA sense strand
auaccacgugugagagaaa

SEQ ID NO: 2630643 - RNA, 19 nt, Homo sapiens
  misc_RNA (1)...(19): siRNA sense strand
acaaagaacuacaaaggcu

SEQ ID NO: 2630644 - RNA, 19 nt, Homo sapiens
  misc_RNA (1)...(19): siRNA sense strand
cugaagaauaugaugcuga

SEQ ID NO: 2630645 - RNA, 19 nt, Homo sapiens
  misc_RNA (1)...(19): siRNA sense strand
uaauaaugggauagagcca

SEQ ID NO: 2630646 - RNA, 19 nt, Homo sapiens
  misc_RNA (1)...(19): siRNA sense strand
ugcaagagugggaguaaau

SEQ ID NO: 2630647 - RNA, 19 nt, Homo sapiens
  misc_RNA (1)...(19): siRNA sense strand
cggugaaauacugggaaau

SEQ ID NO: 2630648 - RNA, 19 nt, Homo sapiens
  misc_RNA (1)...(19): siRNA sense strand
ggaaaugagugcaaacccu

SEQ ID NO: 2630649 - RNA, 19 nt, Homo sapiens
  misc_RNA (1)...(19): siRNA sense strand
uugcaagagugggaguaaa

SEQ ID NO: 2630650 - RNA, 19 nt, Homo sapiens
  misc_RNA (1)...(19): siRNA sense strand
uguacauugcucagauuua

SEQ ID NO: 2630651 - RNA, 19 nt, Homo sapiens
  misc_RNA (1)...(19): siRNA sense strand
ggauagagccaggggcauu

SEQ ID NO: 2630652 - RNA, 19 nt, Homo sapiens
  misc_RNA (1)...(19): siRNA sense strand
cuuuacacguuuuggaaau

SEQ ID NO: 2630653 - RNA, 19 nt, Homo sapiens
  misc_RNA (1)...(19): siRNA sense strand
caacaaaaucacagauauc

SEQ ID NO: 2630654 - RNA, 19 nt, Homo sapiens
  misc_RNA (1)...(19): siRNA sense strand
aggauauggaagacacaga

SEQ ID NO: 2630655 - RNA, 19 nt, Homo sapiens
  misc_RNA (1)...(19): siRNA sense strand
cgauacaaagaacuacaaa

SEQ ID NO: 2630656 - RNA, 19 nt, Homo sapiens
  misc_RNA (1)...(19): siRNA sense strand
gggccuuauuuguggucaa

SEQ ID NO: 2630657 - RNA, 19 nt, Homo sapiens
  misc_RNA (1)...(19): siRNA sense strand
uguaauuaccagugcguuu

SEQ ID NO: 2630658 - RNA, 19 nt, Homo sapiens
  misc_RNA (1)...(19): siRNA sense strand
aguaaauguagaagcagua

SEQ ID NO: 2630659 - RNA, 19 nt, Homo sapiens
  misc_RNA (1)...(19): siRNA sense strand
ggaacauuuaacagaguau

SEQ ID NO: 2630660 - RNA, 19 nt, Homo sapiens
  misc_RNA (1)...(19): siRNA sense strand
gcauaagaaccgaucacau

SEQ ID NO: 2630661 - RNA, 19 nt, Homo sapiens
  misc_RNA (1)...(19): siRNA sense strand
cuagaggucaggaggagaa

SEQ ID NO: 2630662 - RNA, 19 nt, Homo sapiens
  misc_RNA (1)...(19): siRNA sense strand
caaauauaccgaaggagga

SEQ ID NO: 2630663 - RNA, 19 nt, Homo sapiens
  misc_RNA (1)...(19): siRNA sense strand
ucuaauuaaaggagcucua

SEQ ID NO: 2630664 - RNA, 19 nt, Homo sapiens
  misc_RNA (1)...(19): siRNA sense strand
aaguaaauguagaagcagu

SEQ ID NO: 2630665 - RNA, 19 nt, Homo sapiens
  misc_RNA (1)...(19): siRNA sense strand
gcaagauaagacuguacaa

SEQ ID NO: 2630666 - RNA, 19 nt, Homo sapiens
  misc_RNA (1)...(19): siRNA sense strand
guaguuuauuacuggguga

SEQ ID NO: 2630667 - RNA, 19 nt, Homo sapiens
  misc_RNA (1)...(19): siRNA sense strand
guaccauguucuuggaaac

SEQ ID NO: 2630668 - RNA, 19 nt, Homo sapiens
  misc_RNA (1)...(19): siRNA sense strand
gggacaggagcaauggauu

SEQ ID NO: 2630669 - RNA, 19 nt, Homo sapiens
  misc_RNA (1)...(19): siRNA sense strand
cugaaaagcagaugaagga

SEQ ID NO: 2630670 - RNA, 19 nt, Homo sapiens
  misc_RNA (1)...(19): siRNA sense strand
ugccaaccgcgaaggaaua

SEQ ID NO: 2630671 - RNA, 19 nt, Homo sapiens
  misc_RNA (1)...(19): siRNA sense strand
ggucaggaggagaaaauau

SEQ ID NO: 2630672 - RNA, 19 nt, Homo sapiens
  misc_RNA (1)...(19): siRNA sense strand
guuuacugcuauugcuauu

SEQ ID NO: 2630673 - RNA, 19 nt, Homo sapiens
  misc_RNA (1)...(19): siRNA sense strand
ugauaaaaguagccuguuu

SEQ ID NO: 2630674 - RNA, 19 nt, Homo sapiens
  misc_RNA (1)...(19): siRNA sense strand
aguaccauguucuuggaaa

SEQ ID NO: 2630675 - RNA, 19 nt, Homo sapiens
  misc_RNA (1)...(19): siRNA sense strand
uggugugcaaacaggguua

SEQ ID NO: 2630676 - RNA, 19 nt, Homo sapiens
  misc_RNA (1)...(19): siRNA sense strand
augccaaccgcgaaggaau

SEQ ID NO: 2630677 - RNA, 19 nt, Homo sapiens
  misc_RNA (1)...(19): siRNA sense strand
guuuauuacugggugauau

SEQ ID NO: 2630678 - RNA, 19 nt, Homo sapiens
  misc_RNA (1)...(19): siRNA sense strand
agcaauggauuuuggagua

SEQ ID NO: 2630679 - RNA, 19 nt, Homo sapiens
  misc_RNA (1)...(19): siRNA sense strand
ucccugaagccgaaagaau

SEQ ID NO: 2630680 - RNA, 19 nt, Homo sapiens
  misc_RNA (1)...(19): siRNA sense strand
gccaugaucaauagggaaa

SEQ ID NO: 2630681 - RNA, 19 nt, Homo sapiens
  misc_RNA (1)...(19): siRNA sense strand
caggagaacgugauggaau

SEQ ID NO: 2630682 - RNA, 19 nt, Homo sapiens
  misc_RNA (1)...(19): siRNA sense strand
cagaagaaguacaaggaug

SEQ ID NO: 2630683 - RNA, 19 nt, Homo sapiens
  misc_RNA (1)...(19): siRNA sense strand
ccgagacaaucgagagcau

SEQ ID NO: 2630684 - RNA, 19 nt, Homo sapiens
  misc_RNA (1)...(19): siRNA sense strand
cugaacacgugguggacau

SEQ ID NO: 2630685 - RNA, 19 nt, Homo sapiens
  misc_RNA (1)...(19): siRNA sense strand
aggccuacauggacagcaa

SEQ ID NO: 2630686 - RNA, 19 nt, Homo sapiens
  misc_RNA (1)...(19): siRNA sense strand
ggaaguucucagaggacau

SEQ ID NO: 2630687 - RNA, 19 nt, Homo sapiens
  misc_RNA (1)...(19): siRNA sense strand
auauaaugccucugucaaa

SEQ ID NO: 2630688 - RNA, 19 nt, Homo sapiens
  misc_RNA (1)...(19): siRNA sense strand
ggaagaaacuaaaacccaa

SEQ ID NO: 2630689 - RNA, 19 nt, Homo sapiens
  misc_RNA (1)...(19): siRNA sense strand
uguauaacacugugaccaa

SEQ ID NO: 2630690 - RNA, 19 nt, Homo sapiens
  misc_RNA (1)...(19): siRNA sense strand
ggaggaaagucgaggcggu

SEQ ID NO: 2630691 - RNA, 19 nt, Homo sapiens
  misc_RNA (1)...(19): siRNA sense strand
guggaggaguugaugguca

SEQ ID NO: 2630692 - RNA, 19 nt, Homo sapiens
  misc_RNA (1)...(19): siRNA sense strand
agaagaaguacaaggaugu

SEQ ID NO: 2630693 - RNA, 19 nt, Homo sapiens
  misc_RNA (1)...(19): siRNA sense strand
ucgaggagguggauggcuu

SEQ ID NO: 2630694 - RNA, 19 nt, Homo sapiens
  misc_RNA (1)...(19): siRNA sense strand
agagggacgagaagggcaa

SEQ ID NO: 2630695 - RNA, 19 nt, Homo sapiens
  misc_RNA (1)...(19): siRNA sense strand
cagauguggcccugagaga

SEQ ID NO: 2630696 - RNA, 19 nt, Homo sapiens
  misc_RNA (1)...(19): siRNA sense strand
uggaagaaggccugcauga

SEQ ID NO: 2630697 - RNA, 19 nt, Homo sapiens
  misc_RNA (1)...(19): siRNA sense strand
ggcagaaggaccagaaagu

SEQ ID NO: 2630698 - RNA, 19 nt, Homo sapiens
  misc_RNA (1)...(19): siRNA sense strand
cgguguuugagaaguauaa

SEQ ID NO: 2630699 - RNA, 19 nt, Homo sapiens
  misc_RNA (1)...(19): siRNA sense strand
ucaaacugcugguggagga

SEQ ID NO: 2630700 - RNA, 19 nt, Homo sapiens
  misc_RNA (1)...(19): siRNA sense strand
aaguauaacuggccagacu

SEQ ID NO: 2630701 - RNA, 19 nt, Homo sapiens
  misc_RNA (1)...(19): siRNA sense strand
auggacaccugaugagaau

SEQ ID NO: 2630702 - RNA, 19 nt, Homo sapiens
  misc_RNA (1)...(19): siRNA sense strand
agaacaugcugcggaggaa

SEQ ID NO: 2630703 - RNA, 19 nt, Homo sapiens
  misc_RNA (1)...(19): siRNA sense strand
ugagaacagccaugaucaa

SEQ ID NO: 2630704 - RNA, 19 nt, Homo sapiens
  misc_RNA (1)...(19): siRNA sense strand
caucacagauauugaccca

SEQ ID NO: 2630705 - RNA, 19 nt, Homo sapiens
  misc_RNA (1)...(19): siRNA sense strand
acacagagcugcgaggaca

SEQ ID NO: 2630706 - RNA, 19 nt, Homo sapiens
  misc_RNA (1)...(19): siRNA sense strand
aggcgacagaagucaaaua

SEQ ID NO: 2630707 - RNA, 19 nt, Homo sapiens
  misc_RNA (1)...(19): siRNA sense strand
agccgguguuugagaagua

SEQ ID NO: 2630708 - RNA, 19 nt, Homo sapiens
  misc_RNA (1)...(19): siRNA sense strand
uggcggacacccaggagaa

SEQ ID NO: 2630709 - RNA, 19 nt, Homo sapiens
  misc_RNA (1)...(19): siRNA sense strand
gaccagaaagugcggguga

SEQ ID NO: 2630710 - RNA, 19 nt, Homo sapiens
  misc_RNA (1)...(19): siRNA sense strand
gcuucgucaucgacaacaa

SEQ ID NO: 2630711 - RNA, 19 nt, Homo sapiens
  misc_RNA (1)...(19): siRNA sense strand
cguuaauaucauagcguac

SEQ ID NO: 2630712 - RNA, 19 nt, Homo sapiens
  misc_RNA (1)...(19): siRNA sense strand
ucacagauauugacccaga

SEQ ID NO: 2630713 - RNA, 19 nt, Homo sapiens
  misc_RNA (1)...(19): siRNA sense strand
auaacuggccagacuguaa

SEQ ID NO: 2630714 - RNA, 19 nt, Homo sapiens
  misc_RNA (1)...(19): siRNA sense strand
cugucuucguggagaacuu

SEQ ID NO: 2630715 - RNA, 19 nt, Homo sapiens
  misc_RNA (1)...(19): siRNA sense strand
guacaagcuuggagugcac

SEQ ID NO: 2630716 - RNA, 19 nt, Homo sapiens
  misc_RNA (1)...(19): siRNA sense strand
ccgaaguggagugggaaga

SEQ ID NO: 2630717 - RNA, 19 nt, Homo sapiens
  misc_RNA (1)...(19): siRNA sense strand
ccuuccauccagaggagaa

SEQ ID NO: 2630718 - RNA, 19 nt, Homo sapiens
  misc_RNA (1)...(19): siRNA sense strand
acaacaaagacccagauau

SEQ ID NO: 2630719 - RNA, 19 nt, Homo sapiens
  misc_RNA (1)...(19): siRNA sense strand
cagugaagcuaugggcuga

SEQ ID NO: 2630720 - RNA, 19 nt, Homo sapiens
  misc_RNA (1)...(19): siRNA sense strand
ggaaagucgaggcggucca

SEQ ID NO: 2630721 - RNA, 19 nt, Homo sapiens
  misc_RNA (1)...(19): siRNA sense strand
ucaacgagagggacgagaa

SEQ ID NO: 2630722 - RNA, 19 nt, Homo sapiens
  misc_RNA (1)...(19): siRNA sense strand
augcugucuucguggagaa

SEQ ID NO: 2630723 - RNA, 19 nt, Homo sapiens
  misc_RNA (1)...(19): siRNA sense strand
ucccaaggacauagugauu

SEQ ID NO: 2630724 - RNA, 19 nt, Homo sapiens
  misc_RNA (1)...(19): siRNA sense strand
augaaggggcugaggauga

SEQ ID NO: 2630725 - RNA, 19 nt, Homo sapiens
  misc_RNA (1)...(19): siRNA sense strand
guacagagaggggaagaaa

SEQ ID NO: 2630726 - RNA, 19 nt, Homo sapiens
  misc_RNA (1)...(19): siRNA sense strand
uggauaaagggaagcgagu

SEQ ID NO: 2630727 - RNA, 19 nt, Homo sapiens
  misc_RNA (1)...(19): siRNA sense strand
agguauuuguggugcagca

SEQ ID NO: 2630728 - RNA, 19 nt, Homo sapiens
  misc_RNA (1)...(19): siRNA sense strand
gagaacaugcugcggagga

SEQ ID NO: 2630729 - RNA, 19 nt, Homo sapiens
  misc_RNA (1)...(19): siRNA sense strand
cgcaugaaguggauugcau

SEQ ID NO: 2630730 - RNA, 19 nt, Homo sapiens
  misc_RNA (1)...(19): siRNA sense strand
cuggaaacagugaagcuau

SEQ ID NO: 2630731 - RNA, 19 nt, Homo sapiens
  misc_RNA (1)...(19): siRNA sense strand
ccaucaugcucaucagcga

SEQ ID NO: 2630732 - RNA, 19 nt, Homo sapiens
  misc_RNA (1)...(19): siRNA sense strand
gaacgaaacgcgaucccau

SEQ ID NO: 2630733 - RNA, 19 nt, Homo sapiens
  misc_RNA (1)...(19): siRNA sense strand
gcgaaggacaggaggaaaa

SEQ ID NO: 2630734 - RNA, 19 nt, Homo sapiens
  misc_RNA (1)...(19): siRNA sense strand
aaguaaaugaagaggucaa

SEQ ID NO: 2630735 - RNA, 19 nt, Homo sapiens
  misc_RNA (1)...(19): siRNA sense strand
gauuagaacaagaugacau

SEQ ID NO: 2630736 - RNA, 19 nt, Homo sapiens
  misc_RNA (1)...(19): siRNA sense strand
gaguaaagauggaaaacca

SEQ ID NO: 2630737 - RNA, 19 nt, Homo sapiens
  misc_RNA (1)...(19): siRNA sense strand
cuggaguggauuagaacaa

SEQ ID NO: 2630738 - RNA, 19 nt, Homo sapiens
  misc_RNA (1)...(19): siRNA sense strand
gaggaggaguuguuggaca

SEQ ID NO: 2630739 - RNA, 19 nt, Homo sapiens
  misc_RNA (1)...(19): siRNA sense strand
ucaaugaaccagaagaaaa

SEQ ID NO: 2630740 - RNA, 19 nt, Homo sapiens
  misc_RNA (1)...(19): siRNA sense strand
auuacuggguuguuggaaa

SEQ ID NO: 2630741 - RNA, 19 nt, Homo sapiens
  misc_RNA (1)...(19): siRNA sense strand
gcuucuucccguuggauaa

SEQ ID NO: 2630742 - RNA, 19 nt, Homo sapiens
  misc_RNA (1)...(19): siRNA sense strand
uggaugaagaugaggagau

SEQ ID NO: 2630743 - RNA, 19 nt, Homo sapiens
  misc_RNA (1)...(19): siRNA sense strand
ccucaaugauccagaugca

SEQ ID NO: 2630744 - RNA, 19 nt, Homo sapiens
  misc_RNA (1)...(19): siRNA sense strand
gcgcgaaggacaggaggaa

SEQ ID NO: 2630745 - RNA, 19 nt, Homo sapiens
  misc_RNA (1)...(19): siRNA sense strand
uuacauacacagaagaaca

SEQ ID NO: 2630746 - RNA, 19 nt, Homo sapiens
  misc_RNA (1)...(19): siRNA sense strand
aagccugaauauagucaaa

SEQ ID NO: 2630747 - RNA, 19 nt, Homo sapiens
  misc_RNA (1)...(19): siRNA sense strand
acacagaagaacagacagu

SEQ ID NO: 2630748 - RNA, 19 nt, Homo sapiens
  misc_RNA (1)...(19): siRNA sense strand
ggucaugguuguucggugu

SEQ ID NO: 2630749 - RNA, 19 nt, Homo sapiens
  misc_RNA (1)...(19): siRNA sense strand
caaugaaccagaagaaaau

SEQ ID NO: 2630750 - RNA, 19 nt, Homo sapiens
  misc_RNA (1)...(19): siRNA sense strand
aggaaaucuucaacacuau

SEQ ID NO: 2630751 - RNA, 19 nt, Homo sapiens
  misc_RNA (1)...(19): siRNA sense strand
cugaaagaaagauuagaga

SEQ ID NO: 2630752 - RNA, 19 nt, Homo sapiens
  misc_RNA (1)...(19): siRNA sense strand
aacaagaugacaugagaau

SEQ ID NO: 2630753 - RNA, 19 nt, Homo sapiens
  misc_RNA (1)...(19): siRNA sense strand
uugugaaggccaugaguga

SEQ ID NO: 2630754 - RNA, 19 nt, Homo sapiens
  misc_RNA (1)...(19): siRNA sense strand
uaaugaagauucucgguga

SEQ ID NO: 2630755 - RNA, 19 nt, Homo sapiens
  misc_RNA (1)...(19): siRNA sense strand
gaguuagcaggaagggauu

SEQ ID NO: 2630756 - RNA, 19 nt, Homo sapiens
  misc_RNA (1)...(19): siRNA sense strand
uggaggaaagccugaauau

SEQ ID NO: 2630757 - RNA, 19 nt, Homo sapiens
  misc_RNA (1)...(19): siRNA sense strand
agauuagaaaugucggauu

SEQ ID NO: 2630758 - RNA, 19 nt, Homo sapiens
  misc_RNA (1)...(19): siRNA sense strand
agcagaaaugccaggaaau

SEQ ID NO: 2630759 - RNA, 19 nt, Homo sapiens
  misc_RNA (1)...(19): siRNA sense strand
cuuuacauacacagaagaa

SEQ ID NO: 2630760 - RNA, 19 nt, Homo sapiens
  misc_RNA (1)...(19): siRNA sense strand
cggauuuaaugaagauucu

SEQ ID NO: 2630761 - RNA, 19 nt, Homo sapiens
  misc_RNA (1)...(19): siRNA sense strand
acagaguaaagauggaaaa

SEQ ID NO: 2630762 - RNA, 19 nt, Homo sapiens
  misc_RNA (1)...(19): siRNA sense strand
ugaaguaaaugaagagguc

SEQ ID NO: 2630763 - RNA, 19 nt, Homo sapiens
  misc_RNA (1)...(19): siRNA sense strand
uguccgggucugagaaaga

SEQ ID NO: 2630764 - RNA, 19 nt, Homo sapiens
  misc_RNA (1)...(19): siRNA sense strand
ccugauugaaguaaaugaa

SEQ ID NO: 2630765 - RNA, 19 nt, Homo sapiens
  misc_RNA (1)...(19): siRNA sense strand
ugaguuagcaggaagggau

SEQ ID NO: 2630766 - RNA, 19 nt, Homo sapiens
  misc_RNA (1)...(19): siRNA sense strand
ugacuuuaccagaguggau

SEQ ID NO: 2630767 - RNA, 19 nt, Homo sapiens
  misc_RNA (1)...(19): siRNA sense strand
guggauuagaacaagauga

SEQ ID NO: 2630768 - RNA, 19 nt, Homo sapiens
  misc_RNA (1)...(19): siRNA sense strand
cauccaaaugagguagaaa

SEQ ID NO: 2630769 - RNA, 19 nt, Homo sapiens
  misc_RNA (1)...(19): siRNA sense strand
gcgaaggacaggaggaaaa

SEQ ID NO: 2630770 - RNA, 19 nt, Homo sapiens
  misc_RNA (1)...(19): siRNA sense strand
aaguaaaugaagaggucaa

SEQ ID NO: 2630771 - RNA, 19 nt, Homo sapiens
  misc_RNA (1)...(19): siRNA sense strand
gauuagaacaagaugacau

SEQ ID NO: 2630772 - RNA, 19 nt, Homo sapiens
  misc_RNA (1)...(19): siRNA sense strand
gaguaaagauggaaaacca

SEQ ID NO: 2630773 - RNA, 19 nt, Homo sapiens
  misc_RNA (1)...(19): siRNA sense strand
cuggaguggauuagaacaa

SEQ ID NO: 2630774 - RNA, 19 nt, Homo sapiens
  misc_RNA (1)...(19): siRNA sense strand
gaggaggaguuguuggaca

SEQ ID NO: 2630775 - RNA, 19 nt, Homo sapiens
  misc_RNA (1)...(19): siRNA sense strand
ucaaugaaccagaagaaaa

SEQ ID NO: 2630776 - RNA, 19 nt, Homo sapiens
  misc_RNA (1)...(19): siRNA sense strand
auuacuggguuguuggaaa

SEQ ID NO: 2630777 - RNA, 19 nt, Homo sapiens
  misc_RNA (1)...(19): siRNA sense strand
gcuucuucccguuggauaa

SEQ ID NO: 2630778 - RNA, 19 nt, Homo sapiens
  misc_RNA (1)...(19): siRNA sense strand
uggaugaagaugaggagau

SEQ ID NO: 2630779 - RNA, 19 nt, Homo sapiens
  misc_RNA (1)...(19): siRNA sense strand
ccucaaugauccagaugca

SEQ ID NO: 2630780 - RNA, 19 nt, Homo sapiens
  misc_RNA (1)...(19): siRNA sense strand
gcgcgaaggacaggaggaa

SEQ ID NO: 2630781 - RNA, 19 nt, Homo sapiens
  misc_RNA (1)...(19): siRNA sense strand
uuacauacacagaagaaca

SEQ ID NO: 2630782 - RNA, 19 nt, Homo sapiens
  misc_RNA (1)...(19): siRNA sense strand
aagccugaauauagucaaa

SEQ ID NO: 2630783 - RNA, 19 nt, Homo sapiens
  misc_RNA (1)...(19): siRNA sense strand
acacagaagaacagacagu

SEQ ID NO: 2630784 - RNA, 19 nt, Homo sapiens
  misc_RNA (1)...(19): siRNA sense strand
caaugaaccagaagaaaau

SEQ ID NO: 2630785 - RNA, 19 nt, Homo sapiens
  misc_RNA (1)...(19): siRNA sense strand
aggaaaucuucaacacuau

SEQ ID NO: 2630786 - RNA, 19 nt, Homo sapiens
  misc_RNA (1)...(19): siRNA sense strand
cugaaagaaagauuagaga

SEQ ID NO: 2630787 - RNA, 19 nt, Homo sapiens
  misc_RNA (1)...(19): siRNA sense strand
aacaagaugacaugagaau

SEQ ID NO: 2630788 - RNA, 19 nt, Homo sapiens
  misc_RNA (1)...(19): siRNA sense strand
uugugaaggccaugaguga

SEQ ID NO: 2630789 - RNA, 19 nt, Homo sapiens
  misc_RNA (1)...(19): siRNA sense strand
uaaugaagauucucgguga

SEQ ID NO: 2630790 - RNA, 19 nt, Homo sapiens
  misc_RNA (1)...(19): siRNA sense strand
guacaguuuacaaggacau

SEQ ID NO: 2630791 - RNA, 19 nt, Homo sapiens
  misc_RNA (1)...(19): siRNA sense strand
gaguuagcaggaagggauu

SEQ ID NO: 2630792 - RNA, 19 nt, Homo sapiens
  misc_RNA (1)...(19): siRNA sense strand
uggaggaaagccugaauau

SEQ ID NO: 2630793 - RNA, 19 nt, Homo sapiens
  misc_RNA (1)...(19): siRNA sense strand
agauuagaaaugucggauu

SEQ ID NO: 2630794 - RNA, 19 nt, Homo sapiens
  misc_RNA (1)...(19): siRNA sense strand
cggaauccuauaauugaaa

SEQ ID NO: 2630795 - RNA, 19 nt, Homo sapiens
  misc_RNA (1)...(19): siRNA sense strand
agcagaaaugccaggaaau

SEQ ID NO: 2630796 - RNA, 19 nt, Homo sapiens
  misc_RNA (1)...(19): siRNA sense strand
cuuuacauacacagaagaa

SEQ ID NO: 2630797 - RNA, 19 nt, Homo sapiens
  misc_RNA (1)...(19): siRNA sense strand
cggauuuaaugaagauucu

SEQ ID NO: 2630798 - RNA, 19 nt, Homo sapiens
  misc_RNA (1)...(19): siRNA sense strand
acagaguaaagauggaaaa

SEQ ID NO: 2630799 - RNA, 19 nt, Homo sapiens
  misc_RNA (1)...(19): siRNA sense strand
ugaaguaaaugaagagguc

SEQ ID NO: 2630800 - RNA, 19 nt, Homo sapiens
  misc_RNA (1)...(19): siRNA sense strand
ccugauugaaguaaaugaa

SEQ ID NO: 2630801 - RNA, 19 nt, Homo sapiens
  misc_RNA (1)...(19): siRNA sense strand
ugaguuagcaggaagggau

SEQ ID NO: 2630802 - RNA, 19 nt, Homo sapiens
  misc_RNA (1)...(19): siRNA sense strand
ugacuuuaccagaguggau

SEQ ID NO: 2630803 - RNA, 19 nt, Homo sapiens
  misc_RNA (1)...(19): siRNA sense strand
acaaggacauuuagcccau

SEQ ID NO: 2630804 - RNA, 19 nt, Homo sapiens
  misc_RNA (1)...(19): siRNA sense strand
uggucaugguuguucggaa

SEQ ID NO: 2630805 - RNA, 19 nt, Homo sapiens
  misc_RNA (1)...(19): siRNA sense strand
guggauuagaacaagauga

SEQ ID NO: 2630806 - RNA, 19 nt, Homo sapiens
  misc_RNA (1)...(19): siRNA sense strand
cauccaaaugagguagaaa

SEQ ID NO: 2630807 - RNA, 19 nt, Homo sapiens
  misc_RNA (1)...(19): siRNA sense strand
agauaugaauggagagaaa

SEQ ID NO: 2630808 - RNA, 19 nt, Homo sapiens
  misc_RNA (1)...(19): siRNA sense strand
gggcagaagucaagaaagu

SEQ ID NO: 2630809 - RNA, 19 nt, Homo sapiens
  misc_RNA (1)...(19): siRNA sense strand
gcagaagucaagaaaguua

SEQ ID NO: 2630810 - RNA, 19 nt, Homo sapiens
  misc_RNA (1)...(19): siRNA sense strand
caagaaaguuacucaagaa

SEQ ID NO: 2630811 - RNA, 19 nt, Homo sapiens
  misc_RNA (1)...(19): siRNA sense strand
aagcaguauuugagaaaca

SEQ ID NO: 2630812 - RNA, 19 nt, Homo sapiens
  misc_RNA (1)...(19): siRNA sense strand
ccaaagauaugaauggaga

SEQ ID NO: 2630813 - RNA, 19 nt, Homo sapiens
  misc_RNA (1)...(19): siRNA sense strand
uguuaagaaugcugccaaa

SEQ ID NO: 2630814 - RNA, 19 nt, Homo sapiens
  misc_RNA (1)...(19): siRNA sense strand
uauaacaauacgcgagaua

SEQ ID NO: 2630815 - RNA, 19 nt, Homo sapiens
  misc_RNA (1)...(19): siRNA sense strand
uaacaauacgcgagauaca

SEQ ID NO: 2630816 - RNA, 19 nt, Homo sapiens
  misc_RNA (1)...(19): siRNA sense strand
cgagauacauagggcagaa

SEQ ID NO: 2630817 - RNA, 19 nt, Homo sapiens
  misc_RNA (1)...(19): siRNA sense strand
aagaaugcugccaaagaua

SEQ ID NO: 2630818 - RNA, 19 nt, Homo sapiens
  misc_RNA (1)...(19): siRNA sense strand
gaaaguuacucaagaagcu

SEQ ID NO: 2630819 - RNA, 19 nt, Homo sapiens
  misc_RNA (1)...(19): siRNA sense strand
ggaagagccacccugauua

SEQ ID NO: 2630820 - RNA, 19 nt, Homo sapiens
  misc_RNA (1)...(19): siRNA sense strand
ucaagaagcugcggugauu

SEQ ID NO: 2630821 - RNA, 19 nt, Homo sapiens
  misc_RNA (1)...(19): siRNA sense strand
ccaaugaaaagaugcuuaa

SEQ ID NO: 2630822 - RNA, 19 nt, Homo sapiens
  misc_RNA (1)...(19): siRNA sense strand
ucaagaaaguuacucaaga

SEQ ID NO: 2630823 - RNA, 19 nt, Homo sapiens
  misc_RNA (1)...(19): siRNA sense strand
aguggaaguucuuacaaaa

SEQ ID NO: 2630824 - RNA, 19 nt, Homo sapiens
  misc_RNA (1)...(19): siRNA sense strand
ccucaauagggaaaccaau

SEQ ID NO: 2630825 - RNA, 19 nt, Homo sapiens
  misc_RNA (1)...(19): siRNA sense strand
acaauacgcgagauacaua

SEQ ID NO: 2630826 - RNA, 19 nt, Homo sapiens
  misc_RNA (1)...(19): siRNA sense strand
agucaagaaaguuacucaa

SEQ ID NO: 2630827 - RNA, 19 nt, Homo sapiens
  misc_RNA (1)...(19): siRNA sense strand
auccagaggcuuugcauuu

SEQ ID NO: 2630828 - RNA, 19 nt, Homo sapiens
  misc_RNA (1)...(19): siRNA sense strand
ggauauagugauaguggug

SEQ ID NO: 2630829 - RNA, 19 nt, Homo sapiens
  misc_RNA (1)...(19): siRNA sense strand
ccgaagaauaugaaaggga

SEQ ID NO: 2630830 - RNA, 19 nt, Homo sapiens
  misc_RNA (1)...(19): siRNA sense strand
caauacuggaagagaaaca

SEQ ID NO: 2630831 - RNA, 19 nt, Homo sapiens
  misc_RNA (1)...(19): siRNA sense strand
ggguacuggauuagaugaa

SEQ ID NO: 2630832 - RNA, 19 nt, Homo sapiens
  misc_RNA (1)...(19): siRNA sense strand
ggaaagccaugaagagcca

SEQ ID NO: 2630833 - RNA, 19 nt, Homo sapiens
  misc_RNA (1)...(19): siRNA sense strand
agaugaacucuuugugcaa

SEQ ID NO: 2630834 - RNA, 19 nt, Homo sapiens
  misc_RNA (1)...(19): siRNA sense strand
ccuuggaugaagaggauga

SEQ ID NO: 2630835 - RNA, 19 nt, Homo sapiens
  misc_RNA (1)...(19): siRNA sense strand
uugagaaggcccagaacau

SEQ ID NO: 2630836 - RNA, 19 nt, Homo sapiens
  misc_RNA (1)...(19): siRNA sense strand
gaagaauaugaaagggagu

SEQ ID NO: 2630837 - RNA, 19 nt, Homo sapiens
  misc_RNA (1)...(19): siRNA sense strand
guggaauggaugcaggauu

SEQ ID NO: 2630838 - RNA, 19 nt, Homo sapiens
  misc_RNA (1)...(19): siRNA sense strand
gucuguugguguugggaau

SEQ ID NO: 2630839 - RNA, 19 nt, Homo sapiens
  misc_RNA (1)...(19): siRNA sense strand
gcagagagccaacagcaga

SEQ ID NO: 2630840 - RNA, 19 nt, Homo sapiens
  misc_RNA (1)...(19): siRNA sense strand
cuggaagagaaacaauaaa

SEQ ID NO: 2630841 - RNA, 19 nt, Homo sapiens
  misc_RNA (1)...(19): siRNA sense strand
cugcagcaucuuauacaaa

SEQ ID NO: 2630842 - RNA, 19 nt, Homo sapiens
  misc_RNA (1)...(19): siRNA sense strand
agaauaugaaagggaguau

SEQ ID NO: 2630843 - RNA, 19 nt, Homo sapiens
  misc_RNA (1)...(19): siRNA sense strand
aagaauaugaaagggagua

SEQ ID NO: 2630844 - RNA, 19 nt, Homo sapiens
  misc_RNA (1)...(19): siRNA sense strand
cuggucagcuucugggaca

SEQ ID NO: 2630845 - RNA, 19 nt, Homo sapiens
  misc_RNA (1)...(19): siRNA sense strand
gguaaagaauucuccggaa

SEQ ID NO: 2630846 - RNA, 19 nt, Homo sapiens
  misc_RNA (1)...(19): siRNA sense strand
cuggcaagcugaagggaga

SEQ ID NO: 2630847 - RNA, 19 nt, Homo sapiens
  misc_RNA (1)...(19): siRNA sense strand
agacaggaucgcagggaga

SEQ ID NO: 2630848 - RNA, 19 nt, Homo sapiens
  misc_RNA (1)...(19): siRNA sense strand
gaguaguggugguggcagu

SEQ ID NO: 2630849 - RNA, 19 nt, Homo sapiens
  misc_RNA (1)...(19): siRNA sense strand
aggauaauucagacaacaa

SEQ ID NO: 2630850 - RNA, 19 nt, Homo sapiens
  misc_RNA (1)...(19): siRNA sense strand
caauugagucuguggcuga

SEQ ID NO: 2630851 - RNA, 19 nt, Homo sapiens
  misc_RNA (1)...(19): siRNA sense strand
agguggagguggaggugga

SEQ ID NO: 2630852 - RNA, 19 nt, Homo sapiens
  misc_RNA (1)...(19): siRNA sense strand
gcugauuacuucaagcaga

SEQ ID NO: 2630853 - RNA, 19 nt, Homo sapiens
  misc_RNA (1)...(19): siRNA sense strand
cagcaguggugguggaggu

SEQ ID NO: 2630854 - RNA, 19 nt, Homo sapiens
  misc_RNA (1)...(19): siRNA sense strand
caauaaauuugguggcccu

SEQ ID NO: 2630855 - RNA, 19 nt, Homo sapiens
  misc_RNA (1)...(19): siRNA sense strand
augaaugcaaccaguguaa

SEQ ID NO: 2630856 - RNA, 19 nt, Homo sapiens
  misc_RNA (1)...(19): siRNA sense strand
cuauggaggugguggcagu

SEQ ID NO: 2630857 - RNA, 19 nt, Homo sapiens
  misc_RNA (1)...(19): siRNA sense strand
agguggagguggagguaac

SEQ ID NO: 2630858 - RNA, 19 nt, Homo sapiens
  misc_RNA (1)...(19): siRNA sense strand
ugguggagguggaggugga

SEQ ID NO: 2630859 - RNA, 19 nt, Homo sapiens
  misc_RNA (1)...(19): siRNA sense strand
cagcagcagugguggugga

SEQ ID NO: 2630860 - RNA, 19 nt, Homo sapiens
  misc_RNA (1)...(19): siRNA sense strand
uuguacacagacagggaaa

SEQ ID NO: 2630861 - RNA, 19 nt, Homo sapiens
  misc_RNA (1)...(19): siRNA sense strand
caguggugguggaggugga

SEQ ID NO: 2630862 - RNA, 19 nt, Homo sapiens
  misc_RNA (1)...(19): siRNA sense strand
gaauguuacaauugagucu

SEQ ID NO: 2630863 - RNA, 19 nt, Homo sapiens
  misc_RNA (1)...(19): siRNA sense strand
cuucaagcagauugguauu

SEQ ID NO: 2630864 - RNA, 19 nt, Homo sapiens
  misc_RNA (1)...(19): siRNA sense strand
gcuauggacagcagaacca

SEQ ID NO: 2630865 - RNA, 19 nt, Homo sapiens
  misc_RNA (1)...(19): siRNA sense strand
ccucaaacgauuauaccca

SEQ ID NO: 2630866 - RNA, 19 nt, Homo sapiens
  misc_RNA (1)...(19): siRNA sense strand
acccagaggucguggaggu

SEQ ID NO: 2630867 - RNA, 19 nt, Homo sapiens
  misc_RNA (1)...(19): siRNA sense strand
ggagagaaaucuuggugca

SEQ ID NO: 2630868 - RNA, 19 nt, Homo sapiens
  misc_RNA (1)...(19): siRNA sense strand
ugucuaagcugcaggagga

SEQ ID NO: 2630869 - RNA, 19 nt, Homo sapiens
  misc_RNA (1)...(19): siRNA sense strand
cuacaagagcuuagaccga

SEQ ID NO: 2630870 - RNA, 19 nt, Homo sapiens
  misc_RNA (1)...(19): siRNA sense strand
gaguucauguggaggcaga

SEQ ID NO: 2630871 - RNA, 19 nt, Homo sapiens
  misc_RNA (1)...(19): siRNA sense strand
gaucauuacuggacaggcu

SEQ ID NO: 2630872 - RNA, 19 nt, Homo sapiens
  misc_RNA (1)...(19): siRNA sense strand
gcauugagcagcuggagca

SEQ ID NO: 2630873 - RNA, 19 nt, Homo sapiens
  misc_RNA (1)...(19): siRNA sense strand
ggaaacgggcagcuggaga

SEQ ID NO: 2630874 - RNA, 19 nt, Homo sapiens
  misc_RNA (1)...(19): siRNA sense strand
cacuggaacaggagcgauu

SEQ ID NO: 2630875 - RNA, 19 nt, Homo sapiens
  misc_RNA (1)...(19): siRNA sense strand
cggaagaagucccagcugu

SEQ ID NO: 2630876 - RNA, 19 nt, Homo sapiens
  misc_RNA (1)...(19): siRNA sense strand
caucaauguccaaaagaga

SEQ ID NO: 2630877 - RNA, 19 nt, Homo sapiens
  misc_RNA (1)...(19): siRNA sense strand
ggaauuaagcugagcagga

SEQ ID NO: 2630878 - RNA, 19 nt, Homo sapiens
  misc_RNA (1)...(19): siRNA sense strand
cugaagaaugcaagauuau

SEQ ID NO: 2630879 - RNA, 19 nt, Homo sapiens
  misc_RNA (1)...(19): siRNA sense strand
ugguaaaaccccugggaau

SEQ ID NO: 2630880 - RNA, 19 nt, Homo sapiens
  misc_RNA (1)...(19): siRNA sense strand
agaauagacaagagcugua

SEQ ID NO: 2630881 - RNA, 19 nt, Homo sapiens
  misc_RNA (1)...(19): siRNA sense strand
ccauauuguaguaagccaa

SEQ ID NO: 2630882 - RNA, 19 nt, Homo sapiens
  misc_RNA (1)...(19): siRNA sense strand
cagcaauagaaucacuaaa

SEQ ID NO: 2630883 - RNA, 19 nt, Homo sapiens
  misc_RNA (1)...(19): siRNA sense strand
aaaccguguaugagggauu

SEQ ID NO: 2630884 - RNA, 19 nt, Homo sapiens
  misc_RNA (1)...(19): siRNA sense strand
gguaaaaccccugggaauu

SEQ ID NO: 2630885 - RNA, 19 nt, Homo sapiens
  misc_RNA (1)...(19): siRNA sense strand
ccccagaaccggucgaaaa

SEQ ID NO: 2630886 - RNA, 19 nt, Homo sapiens
  misc_RNA (1)...(19): siRNA sense strand
gaugagaagaccuggguac

SEQ ID NO: 2630887 - RNA, 19 nt, Homo sapiens
  misc_RNA (1)...(19): siRNA sense strand
ggaacauacauuuguggga

SEQ ID NO: 2630888 - RNA, 19 nt, Homo sapiens
  misc_RNA (1)...(19): siRNA sense strand
aguuggcagcugagaacaa

SEQ ID NO: 2630889 - RNA, 19 nt, Homo sapiens
  misc_RNA (1)...(19): siRNA sense strand
agaacaauacuuaguggau

SEQ ID NO: 2630890 - RNA, 19 nt, Homo sapiens
  misc_RNA (1)...(19): siRNA sense strand
uggaaguugccuuaaagaa

SEQ ID NO: 2630891 - RNA, 19 nt, Homo sapiens
  misc_RNA (1)...(19): siRNA sense strand
gcaaaguauccugcagaau

SEQ ID NO: 2630892 - RNA, 19 nt, Homo sapiens
  misc_RNA (1)...(19): siRNA sense strand
uccagaaaauaguguguua

SEQ ID NO: 2630893 - RNA, 19 nt, Homo sapiens
  misc_RNA (1)...(19): siRNA sense strand
acuaguagacagaguuuua

SEQ ID NO: 2630894 - RNA, 19 nt, Homo sapiens
  misc_RNA (1)...(19): siRNA sense strand
gacaagagcuguaugcacu

SEQ ID NO: 2630895 - RNA, 19 nt, Homo sapiens
  misc_RNA (1)...(19): siRNA sense strand
gaacauacauuugugggau

SEQ ID NO: 2630896 - RNA, 19 nt, Homo sapiens
  misc_RNA (1)...(19): siRNA sense strand
cgguaccauuccugaucaa

SEQ ID NO: 2630897 - RNA, 19 nt, Homo sapiens
  misc_RNA (1)...(19): siRNA sense strand
cuaaaggcauucugggaug

SEQ ID NO: 2630898 - RNA, 19 nt, Homo sapiens
  misc_RNA (1)...(19): siRNA sense strand
aacaauacuuaguggauac

SEQ ID NO: 2630899 - RNA, 19 nt, Homo sapiens
  misc_RNA (1)...(19): siRNA sense strand
aggaggaaaucaugcggaa

SEQ ID NO: 2630900 - RNA, 19 nt, Homo sapiens
  misc_RNA (1)...(19): siRNA sense strand
acgcacagcuggaggagga

SEQ ID NO: 2630901 - RNA, 19 nt, Homo sapiens
  misc_RNA (1)...(19): siRNA sense strand
agauggaccuggagcccaa

SEQ ID NO: 2630902 - RNA, 19 nt, Homo sapiens
  misc_RNA (1)...(19): siRNA sense strand
cguacaacacgcaggucaa

SEQ ID NO: 2630903 - RNA, 19 nt, Homo sapiens
  misc_RNA (1)...(19): siRNA sense strand
uggcagacguggaaggacu

SEQ ID NO: 2630904 - RNA, 19 nt, Homo sapiens
  misc_RNA (1)...(19): siRNA sense strand
cugagagugcagaggagua

SEQ ID NO: 2630905 - RNA, 19 nt, Homo sapiens
  misc_RNA (1)...(19): siRNA sense strand
aggacgaggacgaggacga

SEQ ID NO: 2630906 - RNA, 19 nt, Homo sapiens
  misc_RNA (1)...(19): siRNA sense strand
ccaaauucauugcccgcua

SEQ ID NO: 2630907 - RNA, 19 nt, Homo sapiens
  misc_RNA (1)...(19): siRNA sense strand
cgaaguacuuugaugguuc

SEQ ID NO: 2630908 - RNA, 19 nt, Homo sapiens
  misc_RNA (1)...(19): siRNA sense strand
gaggagagcuucaaggcgu

SEQ ID NO: 2630909 - RNA, 19 nt, Homo sapiens
  misc_RNA (1)...(19): siRNA sense strand
aggagagcuucaaggcgua

SEQ ID NO: 2630910 - RNA, 19 nt, Homo sapiens
  misc_RNA (1)...(19): siRNA sense strand
agaacuacgaugaggccuu

SEQ ID NO: 2630911 - RNA, 19 nt, Homo sapiens
  misc_RNA (1)...(19): siRNA sense strand
aggacaccaucaaggaaau

SEQ ID NO: 2630912 - RNA, 19 nt, Homo sapiens
  misc_RNA (1)...(19): siRNA sense strand
ucaccgaccagcugggcaa

SEQ ID NO: 2630913 - RNA, 19 nt, Homo sapiens
  misc_RNA (1)...(19): siRNA sense strand
aggacgaggacgagaugga

SEQ ID NO: 2630914 - RNA, 19 nt, Homo sapiens
  misc_RNA (1)...(19): siRNA sense strand
gcaucuaccagaaggccau

SEQ ID NO: 2630915 - RNA, 19 nt, Homo sapiens
  misc_RNA (1)...(19): siRNA sense strand
ccaaguuuuaugaggacaa

SEQ ID NO: 2630916 - RNA, 19 nt, Homo sapiens
  misc_RNA (1)...(19): siRNA sense strand
cgcccaagaagauggcaaa

SEQ ID NO: 2630917 - RNA, 19 nt, Homo sapiens
  misc_RNA (1)...(19): siRNA sense strand
auggcaaagucuacaucaa

SEQ ID NO: 2630918 - RNA, 19 nt, Homo sapiens
  misc_RNA (1)...(19): siRNA sense strand
ccgcccaagaagauggcaa

SEQ ID NO: 2630919 - RNA, 19 nt, Homo sapiens
  misc_RNA (1)...(19): siRNA sense strand
cuucagaggcuggaggaaa

SEQ ID NO: 2630920 - RNA, 19 nt, Homo sapiens
  misc_RNA (1)...(19): siRNA sense strand
cagaagaacucaagccucu

SEQ ID NO: 2630921 - RNA, 19 nt, Homo sapiens
  misc_RNA (1)...(19): siRNA sense strand
ucaccgugcaggauggaaa

SEQ ID NO: 2630922 - RNA, 19 nt, Homo sapiens
  misc_RNA (1)...(19): siRNA sense strand
agucagugaagaagcucaa

SEQ ID NO: 2630923 - RNA, 19 nt, Homo sapiens
  misc_RNA (1)...(19): siRNA sense strand
ugaagaagcucaaagaccu

SEQ ID NO: 2630924 - RNA, 19 nt, Homo sapiens
  misc_RNA (1)...(19): siRNA sense strand
cucuggagucagugaagaa

SEQ ID NO: 2630925 - RNA, 19 nt, Homo sapiens
  misc_RNA (1)...(19): siRNA sense strand
cuuaauugguggagaugga

SEQ ID NO: 2630926 - RNA, 19 nt, Homo sapiens
  misc_RNA (1)...(19): siRNA sense strand
gggaggaauuucagccaga

SEQ ID NO: 2630927 - RNA, 19 nt, Homo sapiens
  misc_RNA (1)...(19): siRNA sense strand
gugacauguaagagagaga

SEQ ID NO: 2630928 - RNA, 19 nt, Homo sapiens
  misc_RNA (1)...(19): siRNA sense strand
agagaaagccagugccuga

SEQ ID NO: 2630929 - RNA, 19 nt, Homo sapiens
  misc_RNA (1)...(19): siRNA sense strand
gggcaagcucuguggucuu

SEQ ID NO: 2630930 - RNA, 19 nt, Homo sapiens
  misc_RNA (1)...(19): siRNA sense strand
gugacagacaugugugaau

SEQ ID NO: 2630931 - RNA, 19 nt, Homo sapiens
  misc_RNA (1)...(19): siRNA sense strand
ggaaauaccuauaacagcu

SEQ ID NO: 2630932 - RNA, 19 nt, Homo sapiens
  misc_RNA (1)...(19): siRNA sense strand
gcuuguaccugcagggacu

SEQ ID NO: 2630933 - RNA, 19 nt, Homo sapiens
  misc_RNA (1)...(19): siRNA sense strand
aggacggagugucgcaaua

SEQ ID NO: 2630934 - RNA, 19 nt, Homo sapiens
  misc_RNA (1)...(19): siRNA sense strand
gugaaaggcaggacggagu

SEQ ID NO: 2630935 - RNA, 19 nt, Homo sapiens
  misc_RNA (1)...(19): siRNA sense strand
cuuuggagcaucugggaau

SEQ ID NO: 2630936 - RNA, 19 nt, Homo sapiens
  misc_RNA (1)...(19): siRNA sense strand
aagggacagucaagguaaa

SEQ ID NO: 2630937 - RNA, 19 nt, Homo sapiens
  misc_RNA (1)...(19): siRNA sense strand
gggauuacgugcugcgucu

SEQ ID NO: 2630938 - RNA, 19 nt, Homo sapiens
  misc_RNA (1)...(19): siRNA sense strand
ggaccaagucgguggagcu

SEQ ID NO: 2630939 - RNA, 19 nt, Homo sapiens
  misc_RNA (1)...(19): siRNA sense strand
gcaucaaaguccacuggga

SEQ ID NO: 2630940 - RNA, 19 nt, Homo sapiens
  misc_RNA (1)...(19): siRNA sense strand
gggucagaggaaaguguuu

SEQ ID NO: 2630941 - RNA, 19 nt, Homo sapiens
  misc_RNA (1)...(19): siRNA sense strand
gcuguguguuugagggugu

SEQ ID NO: 2630942 - RNA, 19 nt, Homo sapiens
  misc_RNA (1)...(19): siRNA sense strand
cgcaauaagcagugcauuc

SEQ ID NO: 2630943 - RNA, 19 nt, Homo sapiens
  misc_RNA (1)...(19): siRNA sense strand
cuguguuguucauuguaaa

SEQ ID NO: 2630944 - RNA, 19 nt, Homo sapiens
  misc_RNA (1)...(19): siRNA sense strand
cgccgcaucucaagggcaa

SEQ ID NO: 2630945 - RNA, 19 nt, Homo sapiens
  misc_RNA (1)...(19): siRNA sense strand
uguuugagggugugcagua

SEQ ID NO: 2630946 - RNA, 19 nt, Homo sapiens
  misc_RNA (1)...(19): siRNA sense strand
cuuucgaagugauguuuau

SEQ ID NO: 2630947 - RNA, 19 nt, Homo sapiens
  misc_RNA (1)...(19): siRNA sense strand
aggugaaguccuccagauu

SEQ ID NO: 2630948 - RNA, 19 nt, Homo sapiens
  misc_RNA (1)...(19): siRNA sense strand
gcauaaugugugucugcuu

SEQ ID NO: 2630949 - RNA, 19 nt, Homo sapiens
  misc_RNA (1)...(19): siRNA sense strand
cagccagaaggaagcaaau

SEQ ID NO: 2630950 - RNA, 19 nt, Homo sapiens
  misc_RNA (1)...(19): siRNA sense strand
aguuugauguggaugacuu

SEQ ID NO: 2630951 - RNA, 19 nt, Homo sapiens
  misc_RNA (1)...(19): siRNA sense strand
ugaacaaggaagugacaug

SEQ ID NO: 2630952 - RNA, 19 nt, Homo sapiens
  misc_RNA (1)...(19): siRNA sense strand
ccuaugaaggaaauaccua

SEQ ID NO: 2630953 - RNA, 19 nt, Homo sapiens
  misc_RNA (1)...(19): siRNA sense strand
uccaaugaguucugcaaca

SEQ ID NO: 2630954 - RNA, 19 nt, Homo sapiens
  misc_RNA (1)...(19): siRNA sense strand
gugugaauguccaguccau

SEQ ID NO: 2630955 - RNA, 19 nt, Homo sapiens
  misc_RNA (1)...(19): siRNA sense strand
ccaaggaacauuaggguga

SEQ ID NO: 2630956 - RNA, 19 nt, Homo sapiens
  misc_RNA (1)...(19): siRNA sense strand
aagacuagcuucagcagga

SEQ ID NO: 2630957 - RNA, 19 nt, Homo sapiens
  misc_RNA (1)...(19): siRNA sense strand
caagagaggaagaggaaga

SEQ ID NO: 2630958 - RNA, 19 nt, Homo sapiens
  misc_RNA (1)...(19): siRNA sense strand
ggagaaaguaccagcggaa

SEQ ID NO: 2630959 - RNA, 19 nt, Homo sapiens
  misc_RNA (1)...(19): siRNA sense strand
aggaagaggaagaugaaau

SEQ ID NO: 2630960 - RNA, 19 nt, Homo sapiens
  misc_RNA (1)...(19): siRNA sense strand
gcacuuagguguagggaug

SEQ ID NO: 2630961 - RNA, 19 nt, Homo sapiens
  misc_RNA (1)...(19): siRNA sense strand
aggaagaggaagaaaguga

SEQ ID NO: 2630962 - RNA, 19 nt, Homo sapiens
  misc_RNA (1)...(19): siRNA sense strand
ugaaagaacaccugcgaau

SEQ ID NO: 2630963 - RNA, 19 nt, Homo sapiens
  misc_RNA (1)...(19): siRNA sense strand
gugucagauuuguaagaaa

SEQ ID NO: 2630964 - RNA, 19 nt, Homo sapiens
  misc_RNA (1)...(19): siRNA sense strand
cggaggagagggagaguau

SEQ ID NO: 2630965 - RNA, 19 nt, Homo sapiens
  misc_RNA (1)...(19): siRNA sense strand
cgagaaggagcacgagaaa

SEQ ID NO: 2630966 - RNA, 19 nt, Homo sapiens
  misc_RNA (1)...(19): siRNA sense strand
uguagaugguccagaagaa

SEQ ID NO: 2630967 - RNA, 19 nt, Homo sapiens
  misc_RNA (1)...(19): siRNA sense strand
ccacaaagaacaaaacaaa

SEQ ID NO: 2630968 - RNA, 19 nt, Homo sapiens
  misc_RNA (1)...(19): siRNA sense strand
gggcuuacuugcagagcau

SEQ ID NO: 2630969 - RNA, 19 nt, Homo sapiens
  misc_RNA (1)...(19): siRNA sense strand
aaacagaugaggaagacaa

SEQ ID NO: 2630970 - RNA, 19 nt, Homo sapiens
  misc_RNA (1)...(19): siRNA sense strand
cgagaaagaaggcgaggau

SEQ ID NO: 2630971 - RNA, 19 nt, Homo sapiens
  misc_RNA (1)...(19): siRNA sense strand
cugaaacagaugaggaaga

SEQ ID NO: 2630972 - RNA, 19 nt, Homo sapiens
  misc_RNA (1)...(19): siRNA sense strand
cgagaagaaugaagagaac

SEQ ID NO: 2630973 - RNA, 19 nt, Homo sapiens
  misc_RNA (1)...(19): siRNA sense strand
agaugaaugaagagaucaa

SEQ ID NO: 2630974 - RNA, 19 nt, Homo sapiens
  misc_RNA (1)...(19): siRNA sense strand
gccaagagaggaagaggaa

SEQ ID NO: 2630975 - RNA, 19 nt, Homo sapiens
  misc_RNA (1)...(19): siRNA sense strand
aagaaaugaaggaagacua

SEQ ID NO: 2630976 - RNA, 19 nt, Homo sapiens
  misc_RNA (1)...(19): siRNA sense strand
gcgagaaggagcacgagaa

SEQ ID NO: 2630977 - RNA, 19 nt, Homo sapiens
  misc_RNA (1)...(19): siRNA sense strand
agaagaaugaagagaacuu

SEQ ID NO: 2630978 - RNA, 19 nt, Homo sapiens
  misc_RNA (1)...(19): siRNA sense strand
ggccaaugggcaagaagaa

SEQ ID NO: 2630979 - RNA, 19 nt, Homo sapiens
  misc_RNA (1)...(19): siRNA sense strand
cuuuaugaauggugggcuu

SEQ ID NO: 2630980 - RNA, 19 nt, Homo sapiens
  misc_RNA (1)...(19): siRNA sense strand
cgaaacgauacgagaugaa

SEQ ID NO: 2630981 - RNA, 19 nt, Homo sapiens
  misc_RNA (1)...(19): siRNA sense strand
acgagaagaaugaagagaa

SEQ ID NO: 2630982 - RNA, 19 nt, Homo sapiens
  misc_RNA (1)...(19): siRNA sense strand
ucgaggaggaagaggaaga

SEQ ID NO: 2630983 - RNA, 19 nt, Homo sapiens
  misc_RNA (1)...(19): siRNA sense strand
cuaugaacauggagcccaa

SEQ ID NO: 2630984 - RNA, 19 nt, Homo sapiens
  misc_RNA (1)...(19): siRNA sense strand
cagucagcaucgaggagua

SEQ ID NO: 2630985 - RNA, 19 nt, Homo sapiens
  misc_RNA (1)...(19): siRNA sense strand
gagacagaucaguaauaua

SEQ ID NO: 2630986 - RNA, 19 nt, Homo sapiens
  misc_RNA (1)...(19): siRNA sense strand
ccgaugaacugcugaaaau

SEQ ID NO: 2630987 - RNA, 19 nt, Homo sapiens
  misc_RNA (1)...(19): siRNA sense strand
aggaagacaauauggaaga

SEQ ID NO: 2630988 - RNA, 19 nt, Homo sapiens
  misc_RNA (1)...(19): siRNA sense strand
guucaaaugcacagagugu

SEQ ID NO: 2630989 - RNA, 19 nt, Homo sapiens
  misc_RNA (1)...(19): siRNA sense strand
acgaggaguucgaggagga

SEQ ID NO: 2630990 - RNA, 19 nt, Homo sapiens
  misc_RNA (1)...(19): siRNA sense strand
acaaguuggagaauggaaa

SEQ ID NO: 2630991 - RNA, 19 nt, Homo sapiens
  misc_RNA (1)...(19): siRNA sense strand
acaaaagguucuacagauu

SEQ ID NO: 2630992 - RNA, 19 nt, Homo sapiens
  misc_RNA (1)...(19): siRNA sense strand
acaaaaugauugagaacca

SEQ ID NO: 2630993 - RNA, 19 nt, Homo sapiens
  misc_RNA (1)...(19): siRNA sense strand
guacagugaagaaugcaaa

SEQ ID NO: 2630994 - RNA, 19 nt, Homo sapiens
  misc_RNA (1)...(19): siRNA sense strand
uguaaauggccgaaugaga

SEQ ID NO: 2630995 - RNA, 19 nt, Homo sapiens
  misc_RNA (1)...(19): siRNA sense strand
cugaggagcuccaggcuga

SEQ ID NO: 2630996 - RNA, 19 nt, Homo sapiens
  misc_RNA (1)...(19): siRNA sense strand
agaaaugaaggaagacuau

SEQ ID NO: 2630997 - RNA, 19 nt, Homo sapiens
  misc_RNA (1)...(19): siRNA sense strand
gcuuacuugcagagcauua

SEQ ID NO: 2630998 - RNA, 19 nt, Homo sapiens
  misc_RNA (1)...(19): siRNA sense strand
ugaaagaacccaaaaguau

SEQ ID NO: 2630999 - RNA, 19 nt, Homo sapiens
  misc_RNA (1)...(19): siRNA sense strand
gugcaagaggcgcaaacaa

SEQ ID NO: 2631000 - RNA, 19 nt, Homo sapiens
  misc_RNA (1)...(19): siRNA sense strand
aagggaggguggaguggaa

SEQ ID NO: 2631001 - RNA, 19 nt, Homo sapiens
  misc_RNA (1)...(19): siRNA sense strand
ccaaugggcaagaagaaaa

SEQ ID NO: 2631002 - RNA, 19 nt, Homo sapiens
  misc_RNA (1)...(19): siRNA sense strand
ugucaggccuagaugauau

SEQ ID NO: 2631003 - RNA, 19 nt, Homo sapiens
  misc_RNA (1)...(19): siRNA sense strand
gaucaagaagacagagagu

SEQ ID NO: 2631004 - RNA, 19 nt, Homo sapiens
  misc_RNA (1)...(19): siRNA sense strand
aagaaagcguuuaaacaca

SEQ ID NO: 2631005 - RNA, 19 nt, Homo sapiens
  misc_RNA (1)...(19): siRNA sense strand
cgauacgagaugaagaaga

SEQ ID NO: 2631006 - RNA, 19 nt, Homo sapiens
  misc_RNA (1)...(19): siRNA sense strand
acugcaaggcugaagaaau

SEQ ID NO: 2631007 - RNA, 19 nt, Homo sapiens
  misc_RNA (1)...(19): siRNA sense strand
ucauaauggugccacuaaa

SEQ ID NO: 2631008 - RNA, 19 nt, Homo sapiens
  misc_RNA (1)...(19): siRNA sense strand
gagaguaugccgagggaug

SEQ ID NO: 2631009 - RNA, 19 nt, Homo sapiens
  misc_RNA (1)...(19): siRNA sense strand
gccagaggccaaugggcaa

SEQ ID NO: 2631010 - RNA, 19 nt, Homo sapiens
  misc_RNA (1)...(19): siRNA sense strand
gcgcagugacacagccauu

SEQ ID NO: 2631011 - RNA, 19 nt, Homo sapiens
  misc_RNA (1)...(19): siRNA sense strand
cggcauauggugacacaca

SEQ ID NO: 2631012 - RNA, 19 nt, Homo sapiens
  misc_RNA (1)...(19): siRNA sense strand
gguaaucgcaaguucaaau

SEQ ID NO: 2631013 - RNA, 19 nt, Homo sapiens
  misc_RNA (1)...(19): siRNA sense strand
uuaagaaacaaguuggaga

SEQ ID NO: 2631014 - RNA, 19 nt, Homo sapiens
  misc_RNA (1)...(19): siRNA sense strand
aggagacagaucaguaaua

SEQ ID NO: 2631015 - RNA, 19 nt, Homo sapiens
  misc_RNA (1)...(19): siRNA sense strand
acaaaugaaagaacccaaa

SEQ ID NO: 2631016 - RNA, 19 nt, Homo sapiens
  misc_RNA (1)...(19): siRNA sense strand
aacaaggauuucagggaga

SEQ ID NO: 2631017 - RNA, 19 nt, Homo sapiens
  misc_RNA (1)...(19): siRNA sense strand
guucgaggaggaagaggaa

SEQ ID NO: 2631018 - RNA, 19 nt, Homo sapiens
  misc_RNA (1)...(19): siRNA sense strand
ugacaucacugaaggagca

SEQ ID NO: 2631019 - RNA, 19 nt, Homo sapiens
  misc_RNA (1)...(19): siRNA sense strand
aggaguucgaggaggaaga

SEQ ID NO: 2631020 - RNA, 19 nt, Homo sapiens
  misc_RNA (1)...(19): siRNA sense strand
cagcacuguccgaggcaaa

SEQ ID NO: 2631021 - RNA, 19 nt, Homo sapiens
  misc_RNA (1)...(19): siRNA sense strand
ccuuaagacaagacaaaga

SEQ ID NO: 2631022 - RNA, 19 nt, Homo sapiens
  misc_RNA (1)...(19): siRNA sense strand
uggaaauaccaaugaacuu

SEQ ID NO: 2631023 - RNA, 19 nt, Homo sapiens
  misc_RNA (1)...(19): siRNA sense strand
cuacaguggcaaggagaaa

SEQ ID NO: 2631024 - RNA, 19 nt, Homo sapiens
  misc_RNA (1)...(19): siRNA sense strand
ggacaaaaucuggagcaaa

SEQ ID NO: 2631025 - RNA, 19 nt, Homo sapiens
  misc_RNA (1)...(19): siRNA sense strand
augagaaaugugugcuaua

SEQ ID NO: 2631026 - RNA, 19 nt, Homo sapiens
  misc_RNA (1)...(19): siRNA sense strand
cggaaaagagagggauaua

SEQ ID NO: 2631027 - RNA, 19 nt, Homo sapiens
  misc_RNA (1)...(19): siRNA sense strand
agaagguagcaauggagua

SEQ ID NO: 2631028 - RNA, 19 nt, Homo sapiens
  misc_RNA (1)...(19): siRNA sense strand
ugaucaacaccguggauga

SEQ ID NO: 2631029 - RNA, 19 nt, Homo sapiens
  misc_RNA (1)...(19): siRNA sense strand
ggauagagguggaauggug

SEQ ID NO: 2631030 - RNA, 19 nt, Homo sapiens
  misc_RNA (1)...(19): siRNA sense strand
aguaugaauuugugcacca

SEQ ID NO: 2631031 - RNA, 19 nt, Homo sapiens
  misc_RNA (1)...(19): siRNA sense strand
cuguaugagagcagacuuu

SEQ ID NO: 2631032 - RNA, 19 nt, Homo sapiens
  misc_RNA (1)...(19): siRNA sense strand
gcuacaguggcaaggagaa

SEQ ID NO: 2631033 - RNA, 19 nt, Homo sapiens
  misc_RNA (1)...(19): siRNA sense strand
ucguauggauagaggugga

SEQ ID NO: 2631034 - RNA, 19 nt, Homo sapiens
  misc_RNA (1)...(19): siRNA sense strand
cggacaaaaucuggagcaa

SEQ ID NO: 2631035 - RNA, 19 nt, Homo sapiens
  misc_RNA (1)...(19): siRNA sense strand
aaaugagaaaugugugcua

SEQ ID NO: 2631036 - RNA, 19 nt, Homo sapiens
  misc_RNA (1)...(19): siRNA sense strand
gagagggauauauggaaaa

SEQ ID NO: 2631037 - RNA, 19 nt, Homo sapiens
  misc_RNA (1)...(19): siRNA sense strand
gugaagcauuacugguaca

SEQ ID NO: 2631038 - RNA, 19 nt, Homo sapiens
  misc_RNA (1)...(19): siRNA sense strand
ggaaauaccaaugaacuuu

SEQ ID NO: 2631039 - RNA, 19 nt, Homo sapiens
  misc_RNA (1)...(19): siRNA sense strand
gagaaagccuucauugcca

SEQ ID NO: 2631040 - RNA, 19 nt, Homo sapiens
  misc_RNA (1)...(19): siRNA sense strand
gccggaaaagagagggaua

SEQ ID NO: 2631041 - RNA, 19 nt, Homo sapiens
  misc_RNA (1)...(19): siRNA sense strand
aaaccuugucuuaaagcaa

SEQ ID NO: 2631042 - RNA, 19 nt, Homo sapiens
  misc_RNA (1)...(19): siRNA sense strand
uuccuuaagacaagacaaa

SEQ ID NO: 2631043 - RNA, 19 nt, Homo sapiens
  misc_RNA (1)...(19): siRNA sense strand
aaugaagcccauaggacuu

SEQ ID NO: 2631044 - RNA, 19 nt, Homo sapiens
  misc_RNA (1)...(19): siRNA sense strand
ccccaaagguacugaaugu

SEQ ID NO: 2631045 - RNA, 19 nt, Homo sapiens
  misc_RNA (1)...(19): siRNA sense strand
auguagaagaagacagacu

SEQ ID NO: 2631046 - RNA, 19 nt, Homo sapiens
  misc_RNA (1)...(19): siRNA sense strand
cagugcaggaauagguaga

SEQ ID NO: 2631047 - RNA, 19 nt, Homo sapiens
  misc_RNA (1)...(19): siRNA sense strand
cagcacuguccgaggcaaa

SEQ ID NO: 2631048 - RNA, 19 nt, Homo sapiens
  misc_RNA (1)...(19): siRNA sense strand
ccuuaagacaagacaaaga

SEQ ID NO: 2631049 - RNA, 19 nt, Homo sapiens
  misc_RNA (1)...(19): siRNA sense strand
uggaaauaccaaugaacuu

SEQ ID NO: 2631050 - RNA, 19 nt, Homo sapiens
  misc_RNA (1)...(19): siRNA sense strand
cuacaguggcaaggagaaa

SEQ ID NO: 2631051 - RNA, 19 nt, Homo sapiens
  misc_RNA (1)...(19): siRNA sense strand
augagaaaugugugcuaua

SEQ ID NO: 2631052 - RNA, 19 nt, Homo sapiens
  misc_RNA (1)...(19): siRNA sense strand
cggaaaagagagggauaua

SEQ ID NO: 2631053 - RNA, 19 nt, Homo sapiens
  misc_RNA (1)...(19): siRNA sense strand
agaagguagcaauggagua

SEQ ID NO: 2631054 - RNA, 19 nt, Homo sapiens
  misc_RNA (1)...(19): siRNA sense strand
ugaucaacaccguggauga

SEQ ID NO: 2631055 - RNA, 19 nt, Homo sapiens
  misc_RNA (1)...(19): siRNA sense strand
ggauagagguggaauggug

SEQ ID NO: 2631056 - RNA, 19 nt, Homo sapiens
  misc_RNA (1)...(19): siRNA sense strand
aguaugaauuugugcacca

SEQ ID NO: 2631057 - RNA, 19 nt, Homo sapiens
  misc_RNA (1)...(19): siRNA sense strand
cuguaugagagcagacuuu

SEQ ID NO: 2631058 - RNA, 19 nt, Homo sapiens
  misc_RNA (1)...(19): siRNA sense strand
gcuacaguggcaaggagaa

SEQ ID NO: 2631059 - RNA, 19 nt, Homo sapiens
  misc_RNA (1)...(19): siRNA sense strand
ucguauggauagaggugga

SEQ ID NO: 2631060 - RNA, 19 nt, Homo sapiens
  misc_RNA (1)...(19): siRNA sense strand
aaaugagaaaugugugcua

SEQ ID NO: 2631061 - RNA, 19 nt, Homo sapiens
  misc_RNA (1)...(19): siRNA sense strand
gagagggauauauggaaaa

SEQ ID NO: 2631062 - RNA, 19 nt, Homo sapiens
  misc_RNA (1)...(19): siRNA sense strand
gugaagcauuacugguaca

SEQ ID NO: 2631063 - RNA, 19 nt, Homo sapiens
  misc_RNA (1)...(19): siRNA sense strand
ggaaauaccaaugaacuuu

SEQ ID NO: 2631064 - RNA, 19 nt, Homo sapiens
  misc_RNA (1)...(19): siRNA sense strand
gagaaagccuucauugcca

SEQ ID NO: 2631065 - RNA, 19 nt, Homo sapiens
  misc_RNA (1)...(19): siRNA sense strand
gccggaaaagagagggaua

SEQ ID NO: 2631066 - RNA, 19 nt, Homo sapiens
  misc_RNA (1)...(19): siRNA sense strand
aaaccuugucuuaaagcaa

SEQ ID NO: 2631067 - RNA, 19 nt, Homo sapiens
  misc_RNA (1)...(19): siRNA sense strand
uuccuuaagacaagacaaa

SEQ ID NO: 2631068 - RNA, 19 nt, Homo sapiens
  misc_RNA (1)...(19): siRNA sense strand
aaugaagcccauaggacuu

SEQ ID NO: 2631069 - RNA, 19 nt, Homo sapiens
  misc_RNA (1)...(19): siRNA sense strand
ccccaaagguacugaaugu

SEQ ID NO: 2631070 - RNA, 19 nt, Homo sapiens
  misc_RNA (1)...(19): siRNA sense strand
auguagaagaagacagacu

SEQ ID NO: 2631071 - RNA, 19 nt, Homo sapiens
  misc_RNA (1)...(19): siRNA sense strand
cagugcaggaauagguaga

SEQ ID NO: 2631072 - RNA, 19 nt, Homo sapiens
  misc_RNA (1)...(19): siRNA sense strand
gggacgugauccagcgcuu

SEQ ID NO: 2631073 - RNA, 19 nt, Homo sapiens
  misc_RNA (1)...(19): siRNA sense strand
acaacaagugugagagcaa

SEQ ID NO: 2631074 - RNA, 19 nt, Homo sapiens
  misc_RNA (1)...(19): siRNA sense strand
gcuacaugauucagcgcaa

SEQ ID NO: 2631075 - RNA, 19 nt, Homo sapiens
  misc_RNA (1)...(19): siRNA sense strand
cguuugaaggcuugggcaa

SEQ ID NO: 2631076 - RNA, 19 nt, Homo sapiens
  misc_RNA (1)...(19): siRNA sense strand
acccagaggaccaaggaaa

SEQ ID NO: 2631077 - RNA, 19 nt, Homo sapiens
  misc_RNA (1)...(19): siRNA sense strand
aggcacaggcucuggagaa

SEQ ID NO: 2631078 - RNA, 19 nt, Homo sapiens
  misc_RNA (1)...(19): siRNA sense strand
ccuacaacuggaaaggaaa

SEQ ID NO: 2631079 - RNA, 19 nt, Homo sapiens
  misc_RNA (1)...(19): siRNA sense strand
gcaaugaccuagagcugga

SEQ ID NO: 2631080 - RNA, 19 nt, Homo sapiens
  misc_RNA (1)...(19): siRNA sense strand
cggguaaauggcugggcua

SEQ ID NO: 2631081 - RNA, 19 nt, Homo sapiens
  misc_RNA (1)...(19): siRNA sense strand
cgucgagucaccaggacaa

SEQ ID NO: 2631082 - RNA, 19 nt, Homo sapiens
  misc_RNA (1)...(19): siRNA sense strand
acucggagcugguggagga

SEQ ID NO: 2631083 - RNA, 19 nt, Homo sapiens
  misc_RNA (1)...(19): siRNA sense strand
ggcagauggauguggauga

SEQ ID NO: 2631084 - RNA, 19 nt, Homo sapiens
  misc_RNA (1)...(19): siRNA sense strand
cuucgagaggaaagaggaa

SEQ ID NO: 2631085 - RNA, 19 nt, Homo sapiens
  misc_RNA (1)...(19): siRNA sense strand
acaaggacccagaggacca

SEQ ID NO: 2631086 - RNA, 19 nt, Homo sapiens
  misc_RNA (1)...(19): siRNA sense strand
ccugacaacaagugugaga

SEQ ID NO: 2631087 - RNA, 19 nt, Homo sapiens
  misc_RNA (1)...(19): siRNA sense strand
gcauggugggcaagugcua

SEQ ID NO: 2631088 - RNA, 19 nt, Homo sapiens
  misc_RNA (1)...(19): siRNA sense strand
uggauguggaugagaacuu

SEQ ID NO: 2631089 - RNA, 19 nt, Homo sapiens
  misc_RNA (1)...(19): siRNA sense strand
uggaaaggaaacagcuaca

SEQ ID NO: 2631090 - RNA, 19 nt, Homo sapiens
  misc_RNA (1)...(19): siRNA sense strand
cgugcgaggcaaugaccua

SEQ ID NO: 2631091 - RNA, 19 nt, Homo sapiens
  misc_RNA (1)...(19): siRNA sense strand
gcaugaaaacuguggagga

SEQ ID NO: 2631092 - RNA, 19 nt, Homo sapiens
  misc_RNA (1)...(19): siRNA sense strand
gaaacaucacccuggccua

SEQ ID NO: 2631093 - RNA, 19 nt, Homo sapiens
  misc_RNA (1)...(19): siRNA sense strand
ucaucgaggauuacagaga

SEQ ID NO: 2631094 - RNA, 19 nt, Homo sapiens
  misc_RNA (1)...(19): siRNA sense strand
uuacagagacuuugaccga

SEQ ID NO: 2631095 - RNA, 19 nt, Homo sapiens
  misc_RNA (1)...(19): siRNA sense strand
gaguauaguuacaaggacc

SEQ ID NO: 2631096 - RNA, 19 nt, Homo sapiens
  misc_RNA (1)...(19): siRNA sense strand
ccgaccaccuggagaccuu

SEQ ID NO: 2631097 - RNA, 19 nt, Homo sapiens
  misc_RNA (1)...(19): siRNA sense strand
ccuacacucuggaggcuga

SEQ ID NO: 2631098 - RNA, 19 nt, Homo sapiens
  misc_RNA (1)...(19): siRNA sense strand
caugguaaaucaccggcua

SEQ ID NO: 2631099 - RNA, 19 nt, Homo sapiens
  misc_RNA (1)...(19): siRNA sense strand
acaacaagugugagagcaa

SEQ ID NO: 2631100 - RNA, 19 nt, Homo sapiens
  misc_RNA (1)...(19): siRNA sense strand
gcuacaugauucagcgcaa

SEQ ID NO: 2631101 - RNA, 19 nt, Homo sapiens
  misc_RNA (1)...(19): siRNA sense strand
cguuugaaggcuugggcaa

SEQ ID NO: 2631102 - RNA, 19 nt, Homo sapiens
  misc_RNA (1)...(19): siRNA sense strand
acccagaggaccaaggaaa

SEQ ID NO: 2631103 - RNA, 19 nt, Homo sapiens
  misc_RNA (1)...(19): siRNA sense strand
aggcacaggcucuggagaa

SEQ ID NO: 2631104 - RNA, 19 nt, Homo sapiens
  misc_RNA (1)...(19): siRNA sense strand
ccuacaacuggaaaggaaa

SEQ ID NO: 2631105 - RNA, 19 nt, Homo sapiens
  misc_RNA (1)...(19): siRNA sense strand
gcaaugaccuagagcugga

SEQ ID NO: 2631106 - RNA, 19 nt, Homo sapiens
  misc_RNA (1)...(19): siRNA sense strand
cggguaaauggcugggcua

SEQ ID NO: 2631107 - RNA, 19 nt, Homo sapiens
  misc_RNA (1)...(19): siRNA sense strand
cgucgagucaccaggacaa

SEQ ID NO: 2631108 - RNA, 19 nt, Homo sapiens
  misc_RNA (1)...(19): siRNA sense strand
acucggagcugguggagga

SEQ ID NO: 2631109 - RNA, 19 nt, Homo sapiens
  misc_RNA (1)...(19): siRNA sense strand
ggcagauggauguggauga

SEQ ID NO: 2631110 - RNA, 19 nt, Homo sapiens
  misc_RNA (1)...(19): siRNA sense strand
cuucgagaggaaagaggaa

SEQ ID NO: 2631111 - RNA, 19 nt, Homo sapiens
  misc_RNA (1)...(19): siRNA sense strand
accaagaagcacuggguga

SEQ ID NO: 2631112 - RNA, 19 nt, Homo sapiens
  misc_RNA (1)...(19): siRNA sense strand
acaaggacccagaggacca

SEQ ID NO: 2631113 - RNA, 19 nt, Homo sapiens
  misc_RNA (1)...(19): siRNA sense strand
ccugacaacaagugugaga

SEQ ID NO: 2631114 - RNA, 19 nt, Homo sapiens
  misc_RNA (1)...(19): siRNA sense strand
gcauggugggcaagugcua

SEQ ID NO: 2631115 - RNA, 19 nt, Homo sapiens
  misc_RNA (1)...(19): siRNA sense strand
uggauguggaugagaacuu

SEQ ID NO: 2631116 - RNA, 19 nt, Homo sapiens
  misc_RNA (1)...(19): siRNA sense strand
uggaaaggaaacagcuaca

SEQ ID NO: 2631117 - RNA, 19 nt, Homo sapiens
  misc_RNA (1)...(19): siRNA sense strand
cgugcgaggcaaugaccua

SEQ ID NO: 2631118 - RNA, 19 nt, Homo sapiens
  misc_RNA (1)...(19): siRNA sense strand
gcaugaaaacuguggagga

SEQ ID NO: 2631119 - RNA, 19 nt, Homo sapiens
  misc_RNA (1)...(19): siRNA sense strand
gaaacaucacccuggccua

SEQ ID NO: 2631120 - RNA, 19 nt, Homo sapiens
  misc_RNA (1)...(19): siRNA sense strand
ucaucgaggauuacagaga

SEQ ID NO: 2631121 - RNA, 19 nt, Homo sapiens
  misc_RNA (1)...(19): siRNA sense strand
uuacagagacuuugaccga

SEQ ID NO: 2631122 - RNA, 19 nt, Homo sapiens
  misc_RNA (1)...(19): siRNA sense strand
gaguauaguuacaaggacc

SEQ ID NO: 2631123 - RNA, 19 nt, Homo sapiens
  misc_RNA (1)...(19): siRNA sense strand
ccgaccaccuggagaccuu

SEQ ID NO: 2631124 - RNA, 19 nt, Homo sapiens
  misc_RNA (1)...(19): siRNA sense strand
ccuacacucuggaggcuga

SEQ ID NO: 2631125 - RNA, 19 nt, Homo sapiens
  misc_RNA (1)...(19): siRNA sense strand
caugguaaaucaccggcua

SEQ ID NO: 2631126 - RNA, 19 nt, Homo sapiens
  misc_RNA (1)...(19): siRNA sense strand
gcgagaaaguuuacgggaa

SEQ ID NO: 2631127 - RNA, 19 nt, Homo sapiens
  misc_RNA (1)...(19): siRNA sense strand
gggaaaucuucgcaccuca

SEQ ID NO: 2631128 - RNA, 19 nt, Homo sapiens
  misc_RNA (1)...(19): siRNA sense strand
guuucaacagagaggcuua

SEQ ID NO: 2631129 - RNA, 19 nt, Homo sapiens
  misc_RNA (1)...(19): siRNA sense strand
gcacaaguuuccugggcug

SEQ ID NO: 2631130 - RNA, 19 nt, Homo sapiens
  misc_RNA (1)...(19): siRNA sense strand
cauucaacucggaaacuau

SEQ ID NO: 2631131 - RNA, 19 nt, Homo sapiens
  misc_RNA (1)...(19): siRNA sense strand
guuucaacagagaggcuua

SEQ ID NO: 2631132 - RNA, 19 nt, Homo sapiens
  misc_RNA (1)...(19): siRNA sense strand
gcacaaguuuccugggcug

SEQ ID NO: 2631133 - RNA, 19 nt, Homo sapiens
  misc_RNA (1)...(19): siRNA sense strand
cauucaacucggaaacuau

SEQ ID NO: 2631134 - RNA, 19 nt, Homo sapiens
  misc_RNA (1)...(19): siRNA sense strand
guuucaacagagaggcuua

SEQ ID NO: 2631135 - RNA, 19 nt, Homo sapiens
  misc_RNA (1)...(19): siRNA sense strand
gcacaaguuuccugggcug

SEQ ID NO: 2631136 - RNA, 19 nt, Homo sapiens
  misc_RNA (1)...(19): siRNA sense strand
cauucaacucggaaacuau

SEQ ID NO: 2631137 - RNA, 19 nt, Homo sapiens
  misc_RNA (1)...(19): siRNA sense strand
guuucaacagagaggcuua

SEQ ID NO: 2631138 - RNA, 19 nt, Homo sapiens
  misc_RNA (1)...(19): siRNA sense strand
gcacaaguuuccugggcug

SEQ ID NO: 2631139 - RNA, 19 nt, Homo sapiens
  misc_RNA (1)...(19): siRNA sense strand
cauucaacucggaaacuau

SEQ ID NO: 2631140 - RNA, 19 nt, Homo sapiens
  misc_RNA (1)...(19): siRNA sense strand
guuucaacagagaggcuua

SEQ ID NO: 2631141 - RNA, 19 nt, Homo sapiens
  misc_RNA (1)...(19): siRNA sense strand
gcacaaguuuccugggcug

SEQ ID NO: 2631142 - RNA, 19 nt, Homo sapiens
  misc_RNA (1)...(19): siRNA sense strand
cauucaacucggaaacuau

SEQ ID NO: 2631143 - RNA, 19 nt, Homo sapiens
  misc_RNA (1)...(19): siRNA sense strand
guuucaacagagaggcuua

SEQ ID NO: 2631144 - RNA, 19 nt, Homo sapiens
  misc_RNA (1)...(19): siRNA sense strand
gcacaaguuuccugggcug

SEQ ID NO: 2631145 - RNA, 19 nt, Homo sapiens
  misc_RNA (1)...(19): siRNA sense strand
cuguaaagaccuugaauua

SEQ ID NO: 2631146 - RNA, 19 nt, Homo sapiens
  misc_RNA (1)...(19): siRNA sense strand
gagcaagguacuagugaaa

SEQ ID NO: 2631147 - RNA, 19 nt, Homo sapiens
  misc_RNA (1)...(19): siRNA sense strand
aguuaagagccuugaauaa

SEQ ID NO: 2631148 - RNA, 19 nt, Homo sapiens
  misc_RNA (1)...(19): siRNA sense strand
ucauacagcuagcgggaaa

SEQ ID NO: 2631149 - RNA, 19 nt, Homo sapiens
  misc_RNA (1)...(19): siRNA sense strand
cuucagaaugccagagaua

SEQ ID NO: 2631150 - RNA, 19 nt, Homo sapiens
  misc_RNA (1)...(19): siRNA sense strand
ggaaauugauagaagcaga

SEQ ID NO: 2631151 - RNA, 19 nt, Homo sapiens
  misc_RNA (1)...(19): siRNA sense strand
gggacaauucugaggaaau

SEQ ID NO: 2631152 - RNA, 19 nt, Homo sapiens
  misc_RNA (1)...(19): siRNA sense strand
ugagaauauuagugaggaa

SEQ ID NO: 2631153 - RNA, 19 nt, Homo sapiens
  misc_RNA (1)...(19): siRNA sense strand
ucugaaacuucuagcaaua

SEQ ID NO: 2631154 - RNA, 19 nt, Homo sapiens
  misc_RNA (1)...(19): siRNA sense strand
uaggauagccagugguaaa

SEQ ID NO: 2631155 - RNA, 19 nt, Homo sapiens
  misc_RNA (1)...(19): siRNA sense strand
ucaccuacgucuagacaaa

SEQ ID NO: 2631156 - RNA, 19 nt, Homo sapiens
  misc_RNA (1)...(19): siRNA sense strand
gcaagauggugcagagcuu

SEQ ID NO: 2631157 - RNA, 19 nt, Homo sapiens
  misc_RNA (1)...(19): siRNA sense strand
ggcaaauguugaaugauaa

SEQ ID NO: 2631158 - RNA, 19 nt, Homo sapiens
  misc_RNA (1)...(19): siRNA sense strand
caggaaggacagugugaaa

SEQ ID NO: 2631159 - RNA, 19 nt, Homo sapiens
  misc_RNA (1)...(19): siRNA sense strand
gcaaugaaagagaggaaga

SEQ ID NO: 2631160 - RNA, 19 nt, Homo sapiens
  misc_RNA (1)...(19): siRNA sense strand
aguuuaugaaggagggaaa

SEQ ID NO: 2631161 - RNA, 19 nt, Homo sapiens
  misc_RNA (1)...(19): siRNA sense strand
cauucuaaguuaugaggaa

SEQ ID NO: 2631162 - RNA, 19 nt, Homo sapiens
  misc_RNA (1)...(19): siRNA sense strand
aaacagaagcaguagaaau

SEQ ID NO: 2631163 - RNA, 19 nt, Homo sapiens
  misc_RNA (1)...(19): siRNA sense strand
gaugaaagucugaagaaaa

SEQ ID NO: 2631164 - RNA, 19 nt, Homo sapiens
  misc_RNA (1)...(19): siRNA sense strand
ugcaaauacuugugggauu

SEQ ID NO: 2631165 - RNA, 19 nt, Homo sapiens
  misc_RNA (1)...(19): siRNA sense strand
uugaauaaucacaggcaaa

SEQ ID NO: 2631166 - RNA, 19 nt, Homo sapiens
  misc_RNA (1)...(19): siRNA sense strand
ccugauaugucuuggucaa

SEQ ID NO: 2631167 - RNA, 19 nt, Homo sapiens
  misc_RNA (1)...(19): siRNA sense strand
aggcaaagaaucauacaaa

SEQ ID NO: 2631168 - RNA, 19 nt, Homo sapiens
  misc_RNA (1)...(19): siRNA sense strand
ucgcaaugaaagagaggaa

SEQ ID NO: 2631169 - RNA, 19 nt, Homo sapiens
  misc_RNA (1)...(19): siRNA sense strand
agggaguguuagaggaauu

SEQ ID NO: 2631170 - RNA, 19 nt, Homo sapiens
  misc_RNA (1)...(19): siRNA sense strand
agggaaacacucagauuaa

SEQ ID NO: 2631171 - RNA, 19 nt, Homo sapiens
  misc_RNA (1)...(19): siRNA sense strand
cugcagauuauguaggaaa

SEQ ID NO: 2631172 - RNA, 19 nt, Homo sapiens
  misc_RNA (1)...(19): siRNA sense strand
agaaagagauugaugacca

SEQ ID NO: 2631173 - RNA, 19 nt, Homo sapiens
  misc_RNA (1)...(19): siRNA sense strand
cuacuaaaacggagcaaaa

SEQ ID NO: 2631174 - RNA, 19 nt, Homo sapiens
  misc_RNA (1)...(19): siRNA sense strand
uauuagacacagagaacaa

SEQ ID NO: 2631175 - RNA, 19 nt, Homo sapiens
  misc_RNA (1)...(19): siRNA sense strand
agagaagagccuuggauuu

SEQ ID NO: 2631176 - RNA, 19 nt, Homo sapiens
  misc_RNA (1)...(19): siRNA sense strand
agucagaaaugaagaagca

SEQ ID NO: 2631177 - RNA, 19 nt, Homo sapiens
  misc_RNA (1)...(19): siRNA sense strand
ggucaaccagaaagaauaa

SEQ ID NO: 2631178 - RNA, 19 nt, Homo sapiens
  misc_RNA (1)...(19): siRNA sense strand
ggaggaauuugaagaacau

SEQ ID NO: 2631179 - RNA, 19 nt, Homo sapiens
  misc_RNA (1)...(19): siRNA sense strand
ugagaguggaagugacaaa

SEQ ID NO: 2631180 - RNA, 19 nt, Homo sapiens
  misc_RNA (1)...(19): siRNA sense strand
aaacaguacuauagcugaa

SEQ ID NO: 2631181 - RNA, 19 nt, Homo sapiens
  misc_RNA (1)...(19): siRNA sense strand
uggcagugauucaaguaaa

SEQ ID NO: 2631182 - RNA, 19 nt, Homo sapiens
  misc_RNA (1)...(19): siRNA sense strand
aaauauuagugucgccaaa

SEQ ID NO: 2631183 - RNA, 19 nt, Homo sapiens
  misc_RNA (1)...(19): siRNA sense strand
cagaagaauugcauaacuu

SEQ ID NO: 2631184 - RNA, 19 nt, Homo sapiens
  misc_RNA (1)...(19): siRNA sense strand
ugaugaaagucugaagaaa

SEQ ID NO: 2631185 - RNA, 19 nt, Homo sapiens
  misc_RNA (1)...(19): siRNA sense strand
aggaaauguucuagaaaug

SEQ ID NO: 2631186 - RNA, 19 nt, Homo sapiens
  misc_RNA (1)...(19): siRNA sense strand
guagcuaaugaaaggaaua

SEQ ID NO: 2631187 - RNA, 19 nt, Homo sapiens
  misc_RNA (1)...(19): siRNA sense strand
caaaguuaagggaguguua

SEQ ID NO: 2631188 - RNA, 19 nt, Homo sapiens
  misc_RNA (1)...(19): siRNA sense strand
aggaggaauuugaagaaca

SEQ ID NO: 2631189 - RNA, 19 nt, Homo sapiens
  misc_RNA (1)...(19): siRNA sense strand
acacagagaacaaaagaaa

SEQ ID NO: 2631190 - RNA, 19 nt, Homo sapiens
  misc_RNA (1)...(19): siRNA sense strand
agauauuugcguugaggaa

SEQ ID NO: 2631191 - RNA, 19 nt, Homo sapiens
  misc_RNA (1)...(19): siRNA sense strand
ggcagaaauuacagaacuu

SEQ ID NO: 2631192 - RNA, 19 nt, Homo sapiens
  misc_RNA (1)...(19): siRNA sense strand
uggaaaggcuggaaaagaa

SEQ ID NO: 2631193 - RNA, 19 nt, Homo sapiens
  misc_RNA (1)...(19): siRNA sense strand
agaaaaggaagcagcaaaa

SEQ ID NO: 2631194 - RNA, 19 nt, Homo sapiens
  misc_RNA (1)...(19): siRNA sense strand
cauggaaucugcugaacaa

SEQ ID NO: 2631195 - RNA, 19 nt, Homo sapiens
  misc_RNA (1)...(19): siRNA sense strand
ggauagaccuuaaugagga

SEQ ID NO: 2631196 - RNA, 19 nt, Homo sapiens
  misc_RNA (1)...(19): siRNA sense strand
gaggaaacagacauaguua

SEQ ID NO: 2631197 - RNA, 19 nt, Homo sapiens
  misc_RNA (1)...(19): siRNA sense strand
gcuuagagaaggaauauuu

SEQ ID NO: 2631198 - RNA, 19 nt, Homo sapiens
  misc_RNA (1)...(19): siRNA sense strand
gcaaugaagcagaaaacaa

SEQ ID NO: 2631199 - RNA, 19 nt, Homo sapiens
  misc_RNA (1)...(19): siRNA sense strand
ucccaauaguagacauaaa

SEQ ID NO: 2631200 - RNA, 19 nt, Homo sapiens
  misc_RNA (1)...(19): siRNA sense strand
gccccaaaguguaaagaaa

SEQ ID NO: 2631201 - RNA, 19 nt, Homo sapiens
  misc_RNA (1)...(19): siRNA sense strand
gggagaacccucaaucaaa

SEQ ID NO: 2631202 - RNA, 19 nt, Homo sapiens
  misc_RNA (1)...(19): siRNA sense strand
ugaaaguggacuggaaaua

SEQ ID NO: 2631203 - RNA, 19 nt, Homo sapiens
  misc_RNA (1)...(19): siRNA sense strand
gcagaagaucggcuauaaa

SEQ ID NO: 2631204 - RNA, 19 nt, Homo sapiens
  misc_RNA (1)...(19): siRNA sense strand
uaucugaaguggaaccaaa

SEQ ID NO: 2631205 - RNA, 19 nt, Homo sapiens
  misc_RNA (1)...(19): siRNA sense strand
gcaagguacuagugaaauc

SEQ ID NO: 2631206 - RNA, 19 nt, Homo sapiens
  misc_RNA (1)...(19): siRNA sense strand
cugaugagguauauaauga

SEQ ID NO: 2631207 - RNA, 19 nt, Homo sapiens
  misc_RNA (1)...(19): siRNA sense strand
uuugaagaaugcagguuua

SEQ ID NO: 2631208 - RNA, 19 nt, Homo sapiens
  misc_RNA (1)...(19): siRNA sense strand
agaaaguuccuuacacaaa

SEQ ID NO: 2631209 - RNA, 19 nt, Homo sapiens
  misc_RNA (1)...(19): siRNA sense strand
gaugaugaacugacagauu

SEQ ID NO: 2631210 - RNA, 19 nt, Homo sapiens
  misc_RNA (1)...(19): siRNA sense strand
guuaacagaaggaaagaga

SEQ ID NO: 2631211 - RNA, 19 nt, Homo sapiens
  misc_RNA (1)...(19): siRNA sense strand
gggagaaagagauugauga

SEQ ID NO: 2631212 - RNA, 19 nt, Homo sapiens
  misc_RNA (1)...(19): siRNA sense strand
gagaauauuagugaggaaa

SEQ ID NO: 2631213 - RNA, 19 nt, Homo sapiens
  misc_RNA (1)...(19): siRNA sense strand
ucagacugcaagugggaaa

SEQ ID NO: 2631214 - RNA, 19 nt, Homo sapiens
  misc_RNA (1)...(19): siRNA sense strand
gcaaauaccugaagcgaga

SEQ ID NO: 2631215 - RNA, 19 nt, Homo sapiens
  misc_RNA (1)...(19): siRNA sense strand
accaagaagaagagaguca

SEQ ID NO: 2631216 - RNA, 19 nt, Homo sapiens
  misc_RNA (1)...(19): siRNA sense strand
cuaccaagaagaagagagu

SEQ ID NO: 2631217 - RNA, 19 nt, Homo sapiens
  misc_RNA (1)...(19): siRNA sense strand
gcacaaugacucagagcag

SEQ ID NO: 2631218 - RNA, 19 nt, Homo sapiens
  misc_RNA (1)...(19): siRNA sense strand
aagcagugucguugcauau

SEQ ID NO: 2631219 - RNA, 19 nt, Homo sapiens
  misc_RNA (1)...(19): siRNA sense strand
ccaaagggcuagaaggcga

SEQ ID NO: 2631220 - RNA, 19 nt, Homo sapiens
  misc_RNA (1)...(19): siRNA sense strand
acgccaaggaguuguguaa

SEQ ID NO: 2631221 - RNA, 19 nt, Homo sapiens
  misc_RNA (1)...(19): siRNA sense strand
caaugaacugggagagaga

SEQ ID NO: 2631222 - RNA, 19 nt, Homo sapiens
  misc_RNA (1)...(19): siRNA sense strand
agaugaagcuucugggugu

SEQ ID NO: 2631223 - RNA, 19 nt, Homo sapiens
  misc_RNA (1)...(19): siRNA sense strand
gcugaagaaacuugguaau

SEQ ID NO: 2631224 - RNA, 19 nt, Homo sapiens
  misc_RNA (1)...(19): siRNA sense strand
aggcaagagcacugaagau

SEQ ID NO: 2631225 - RNA, 19 nt, Homo sapiens
  misc_RNA (1)...(19): siRNA sense strand
uuaaagacauccugagcga

SEQ ID NO: 2631226 - RNA, 19 nt, Homo sapiens
  misc_RNA (1)...(19): siRNA sense strand
gcaucugaguccaggggaa

SEQ ID NO: 2631227 - RNA, 19 nt, Homo sapiens
  misc_RNA (1)...(19): siRNA sense strand
gcaacuuacacguggacga

SEQ ID NO: 2631228 - RNA, 19 nt, Homo sapiens
  misc_RNA (1)...(19): siRNA sense strand
cagaaguaccugugcgcca

SEQ ID NO: 2631229 - RNA, 19 nt, Homo sapiens
  misc_RNA (1)...(19): siRNA sense strand
gagacaacccagaagcuga

SEQ ID NO: 2631230 - RNA, 19 nt, Homo sapiens
  misc_RNA (1)...(19): siRNA sense strand
cgagagagguugcguccca

SEQ ID NO: 2631231 - RNA, 19 nt, Homo sapiens
  misc_RNA (1)...(19): siRNA sense strand
ccuggaagccauugagcca

SEQ ID NO: 2631232 - RNA, 19 nt, Homo sapiens
  misc_RNA (1)...(19): siRNA sense strand
ccaagauccuuucugggaa

SEQ ID NO: 2631233 - RNA, 19 nt, Homo sapiens
  misc_RNA (1)...(19): siRNA sense strand
agguuacaccaaagggcua

SEQ ID NO: 2631234 - RNA, 19 nt, Homo sapiens
  misc_RNA (1)...(19): siRNA sense strand
cugacaacgccaaggaguu

SEQ ID NO: 2631235 - RNA, 19 nt, Homo sapiens
  misc_RNA (1)...(19): siRNA sense strand
gcugcaaggucuucuucaa

SEQ ID NO: 2631236 - RNA, 19 nt, Homo sapiens
  misc_RNA (1)...(19): siRNA sense strand
gcaucaagcuggagaaccc

SEQ ID NO: 2631237 - RNA, 19 nt, Homo sapiens
  misc_RNA (1)...(19): siRNA sense strand
gcaggaagcaguauccgaa

SEQ ID NO: 2631238 - RNA, 19 nt, Homo sapiens
  misc_RNA (1)...(19): siRNA sense strand
augaacugggagagagaca

SEQ ID NO: 2631239 - RNA, 19 nt, Homo sapiens
  misc_RNA (1)...(19): siRNA sense strand
cgugcagccuauugcgaga

SEQ ID NO: 2631240 - RNA, 19 nt, Homo sapiens
  misc_RNA (1)...(19): siRNA sense strand
guguggaggcguuggagca

SEQ ID NO: 2631241 - RNA, 19 nt, Homo sapiens
  misc_RNA (1)...(19): siRNA sense strand
ccgcugaagggaaacagaa

SEQ ID NO: 2631242 - RNA, 19 nt, Homo sapiens
  misc_RNA (1)...(19): siRNA sense strand
cagcagaaaugauugcacu

SEQ ID NO: 2631243 - RNA, 19 nt, Homo sapiens
  misc_RNA (1)...(19): siRNA sense strand
ccaucgaacuggaggaccu

SEQ ID NO: 2631244 - RNA, 19 nt, Homo sapiens
  misc_RNA (1)...(19): siRNA sense strand
gcaaggugcccaagggagu

SEQ ID NO: 2631245 - RNA, 19 nt, Homo sapiens
  misc_RNA (1)...(19): siRNA sense strand
aggaugacuucaagggucu

SEQ ID NO: 2631246 - RNA, 19 nt, Homo sapiens
  misc_RNA (1)...(19): siRNA sense strand
ggguggagaugaagcccaa

SEQ ID NO: 2631247 - RNA, 19 nt, Homo sapiens
  misc_RNA (1)...(19): siRNA sense strand
ucaaauacccgguggggaa

SEQ ID NO: 2631248 - RNA, 19 nt, Homo sapiens
  misc_RNA (1)...(19): siRNA sense strand
cuacacuggcugugggauu

SEQ ID NO: 2631249 - RNA, 19 nt, Homo sapiens
  misc_RNA (1)...(19): siRNA sense strand
ggguggagaugaagcccaa

SEQ ID NO: 2631250 - RNA, 19 nt, Homo sapiens
  misc_RNA (1)...(19): siRNA sense strand
ucaaauacccgguggggaa

SEQ ID NO: 2631251 - RNA, 19 nt, Homo sapiens
  misc_RNA (1)...(19): siRNA sense strand
cuacacuggcugugggauu

SEQ ID NO: 2631252 - RNA, 19 nt, Homo sapiens
  misc_RNA (1)...(19): siRNA sense strand
guuauuaagaagagagaac

SEQ ID NO: 2631253 - RNA, 19 nt, Homo sapiens
  misc_RNA (1)...(19): siRNA sense strand
caaaggaagaaaauggaaa

SEQ ID NO: 2631254 - RNA, 19 nt, Homo sapiens
  misc_RNA (1)...(19): siRNA sense strand
acaccaacuauuaggaaaa

SEQ ID NO: 2631255 - RNA, 19 nt, Homo sapiens
  misc_RNA (1)...(19): siRNA sense strand
cgaacaacaaaggaagaaa

SEQ ID NO: 2631256 - RNA, 19 nt, Homo sapiens
  misc_RNA (1)...(19): siRNA sense strand
ggcuaaugaagaaggaaca

SEQ ID NO: 2631257 - RNA, 19 nt, Homo sapiens
  misc_RNA (1)...(19): siRNA sense strand
agaaacuagcagacagaga

SEQ ID NO: 2631258 - RNA, 19 nt, Homo sapiens
  misc_RNA (1)...(19): siRNA sense strand
augcaugggaagaagaaga

SEQ ID NO: 2631259 - RNA, 19 nt, Homo sapiens
  misc_RNA (1)...(19): siRNA sense strand
guguaaagaucgaaggagg

SEQ ID NO: 2631260 - RNA, 19 nt, Homo sapiens
  misc_RNA (1)...(19): siRNA sense strand
aaaggaagcacaacggcua

SEQ ID NO: 2631261 - RNA, 19 nt, Homo sapiens
  misc_RNA (1)...(19): siRNA sense strand
gggaaugggaauguggcaa

SEQ ID NO: 2631262 - RNA, 19 nt, Homo sapiens
  misc_RNA (1)...(19): siRNA sense strand
uggaacaacuggaaccuga

SEQ ID NO: 2631263 - RNA, 19 nt, Homo sapiens
  misc_RNA (1)...(19): siRNA sense strand
caugggaagaagaagaaga

SEQ ID NO: 2631264 - RNA, 19 nt, Homo sapiens
  misc_RNA (1)...(19): siRNA sense strand
ugaagaaggaacaaaacaa

SEQ ID NO: 2631265 - RNA, 19 nt, Homo sapiens
  misc_RNA (1)...(19): siRNA sense strand
gggaagaagaagaagaugc

SEQ ID NO: 2631266 - RNA, 19 nt, Homo sapiens
  misc_RNA (1)...(19): siRNA sense strand
gcuaaugaagaaggaacaa

SEQ ID NO: 2631267 - RNA, 19 nt, Homo sapiens
  misc_RNA (1)...(19): siRNA sense strand
ccgaacaacaaaggaagaa

SEQ ID NO: 2631268 - RNA, 19 nt, Homo sapiens
  misc_RNA (1)...(19): siRNA sense strand
cggcuaaugaagaaggaac

SEQ ID NO: 2631269 - RNA, 19 nt, Homo sapiens
  misc_RNA (1)...(19): siRNA sense strand
cuaaugaagaaggaacaaa

SEQ ID NO: 2631270 - RNA, 19 nt, Homo sapiens
  misc_RNA (1)...(19): siRNA sense strand
uauuaagaagagagaacca

SEQ ID NO: 2631271 - RNA, 19 nt, Homo sapiens
  misc_RNA (1)...(19): siRNA sense strand
cuggcaagcagaagaaguu

SEQ ID NO: 2631272 - RNA, 19 nt, Homo sapiens
  misc_RNA (1)...(19): siRNA sense strand
ggacggaaauuaaguggag

SEQ ID NO: 2631273 - RNA, 19 nt, Homo sapiens
  misc_RNA (1)...(19): siRNA sense strand
agacagauguugaagagug

SEQ ID NO: 2631274 - RNA, 19 nt, Homo sapiens
  misc_RNA (1)...(19): siRNA sense strand
ucgaaggagggaaugggaa

SEQ ID NO: 2631275 - RNA, 19 nt, Homo sapiens
  misc_RNA (1)...(19): siRNA sense strand
agaaaagagagcagccgaa

SEQ ID NO: 2631276 - RNA, 19 nt, Homo sapiens
  misc_RNA (1)...(19): siRNA sense strand
caguauucucauuccuaaa

SEQ ID NO: 2631277 - RNA, 19 nt, Homo sapiens
  misc_RNA (1)...(19): siRNA sense strand
guuauuaagaagagagaac

SEQ ID NO: 2631278 - RNA, 19 nt, Homo sapiens
  misc_RNA (1)...(19): siRNA sense strand
caaaggaagaaaauggaaa

SEQ ID NO: 2631279 - RNA, 19 nt, Homo sapiens
  misc_RNA (1)...(19): siRNA sense strand
acaccaacuauuaggaaaa

SEQ ID NO: 2631280 - RNA, 19 nt, Homo sapiens
  misc_RNA (1)...(19): siRNA sense strand
cgaacaacaaaggaagaaa

SEQ ID NO: 2631281 - RNA, 19 nt, Homo sapiens
  misc_RNA (1)...(19): siRNA sense strand
ggcuaaugaagaaggaaca

SEQ ID NO: 2631282 - RNA, 19 nt, Homo sapiens
  misc_RNA (1)...(19): siRNA sense strand
agaaacuagcagacagaga

SEQ ID NO: 2631283 - RNA, 19 nt, Homo sapiens
  misc_RNA (1)...(19): siRNA sense strand
augcaugggaagaagaaga

SEQ ID NO: 2631284 - RNA, 19 nt, Homo sapiens
  misc_RNA (1)...(19): siRNA sense strand
guguaaagaucgaaggagg

SEQ ID NO: 2631285 - RNA, 19 nt, Homo sapiens
  misc_RNA (1)...(19): siRNA sense strand
aaaggaagcacaacggcua

SEQ ID NO: 2631286 - RNA, 19 nt, Homo sapiens
  misc_RNA (1)...(19): siRNA sense strand
gggaaugggaauguggcaa

SEQ ID NO: 2631287 - RNA, 19 nt, Homo sapiens
  misc_RNA (1)...(19): siRNA sense strand
uggaacaacuggaaccuga

SEQ ID NO: 2631288 - RNA, 19 nt, Homo sapiens
  misc_RNA (1)...(19): siRNA sense strand
caugggaagaagaagaaga

SEQ ID NO: 2631289 - RNA, 19 nt, Homo sapiens
  misc_RNA (1)...(19): siRNA sense strand
ugaagaaggaacaaaacaa

SEQ ID NO: 2631290 - RNA, 19 nt, Homo sapiens
  misc_RNA (1)...(19): siRNA sense strand
gggaagaagaagaagaugc

SEQ ID NO: 2631291 - RNA, 19 nt, Homo sapiens
  misc_RNA (1)...(19): siRNA sense strand
gcuaaugaagaaggaacaa

SEQ ID NO: 2631292 - RNA, 19 nt, Homo sapiens
  misc_RNA (1)...(19): siRNA sense strand
ccgaacaacaaaggaagaa

SEQ ID NO: 2631293 - RNA, 19 nt, Homo sapiens
  misc_RNA (1)...(19): siRNA sense strand
cggcuaaugaagaaggaac

SEQ ID NO: 2631294 - RNA, 19 nt, Homo sapiens
  misc_RNA (1)...(19): siRNA sense strand
cuaaugaagaaggaacaaa

SEQ ID NO: 2631295 - RNA, 19 nt, Homo sapiens
  misc_RNA (1)...(19): siRNA sense strand
uauuaagaagagagaacca

SEQ ID NO: 2631296 - RNA, 19 nt, Homo sapiens
  misc_RNA (1)...(19): siRNA sense strand
cuggcaagcagaagaaguu

SEQ ID NO: 2631297 - RNA, 19 nt, Homo sapiens
  misc_RNA (1)...(19): siRNA sense strand
ggacggaaauuaaguggag

SEQ ID NO: 2631298 - RNA, 19 nt, Homo sapiens
  misc_RNA (1)...(19): siRNA sense strand
agacagauguugaagagug

SEQ ID NO: 2631299 - RNA, 19 nt, Homo sapiens
  misc_RNA (1)...(19): siRNA sense strand
ucgaaggagggaaugggaa

SEQ ID NO: 2631300 - RNA, 19 nt, Homo sapiens
  misc_RNA (1)...(19): siRNA sense strand
agaaaagagagcagccgaa

SEQ ID NO: 2631301 - RNA, 19 nt, Homo sapiens
  misc_RNA (1)...(19): siRNA sense strand
caguauucucauuccuaaa

SEQ ID NO: 2631302 - RNA, 19 nt, Homo sapiens
  misc_RNA (1)...(19): siRNA sense strand
ccucaaaagcuuauaacaa

SEQ ID NO: 2631303 - RNA, 19 nt, Homo sapiens
  misc_RNA (1)...(19): siRNA sense strand
aauccagaaccuugggaaa

SEQ ID NO: 2631304 - RNA, 19 nt, Homo sapiens
  misc_RNA (1)...(19): siRNA sense strand
ccauugaagaguugcaaaa

SEQ ID NO: 2631305 - RNA, 19 nt, Homo sapiens
  misc_RNA (1)...(19): siRNA sense strand
guguauucucuuuggaaaa

SEQ ID NO: 2631306 - RNA, 19 nt, Homo sapiens
  misc_RNA (1)...(19): siRNA sense strand
caaaauguccaaaggguga

SEQ ID NO: 2631307 - RNA, 19 nt, Homo sapiens
  misc_RNA (1)...(19): siRNA sense strand
ccucaaaagcuuauaacaa

SEQ ID NO: 2631308 - RNA, 19 nt, Homo sapiens
  misc_RNA (1)...(19): siRNA sense strand
aauccagaaccuugggaaa

SEQ ID NO: 2631309 - RNA, 19 nt, Homo sapiens
  misc_RNA (1)...(19): siRNA sense strand
ccauugaagaguugcaaaa

SEQ ID NO: 2631310 - RNA, 19 nt, Homo sapiens
  misc_RNA (1)...(19): siRNA sense strand
guguauucucuuuggaaaa

SEQ ID NO: 2631311 - RNA, 19 nt, Homo sapiens
  misc_RNA (1)...(19): siRNA sense strand
caaaauguccaaaggguga

SEQ ID NO: 2631312 - RNA, 19 nt, Homo sapiens
  misc_RNA (1)...(19): siRNA sense strand
auguaagaccagagauuaa

SEQ ID NO: 2631313 - RNA, 19 nt, Homo sapiens
  misc_RNA (1)...(19): siRNA sense strand
ccacuugugaagaaggaaa

SEQ ID NO: 2631314 - RNA, 19 nt, Homo sapiens
  misc_RNA (1)...(19): siRNA sense strand
aaggaagaacucagagcua

SEQ ID NO: 2631315 - RNA, 19 nt, Homo sapiens
  misc_RNA (1)...(19): siRNA sense strand
ucuaaagaagagacugaaa

SEQ ID NO: 2631316 - RNA, 19 nt, Homo sapiens
  misc_RNA (1)...(19): siRNA sense strand
acuccgaaucaacgagaaa

SEQ ID NO: 2631317 - RNA, 19 nt, Homo sapiens
  misc_RNA (1)...(19): siRNA sense strand
uauaagaagcagaagcuga

SEQ ID NO: 2631318 - RNA, 19 nt, Homo sapiens
  misc_RNA (1)...(19): siRNA sense strand
cuaaagaagagacugaaaa

SEQ ID NO: 2631319 - RNA, 19 nt, Homo sapiens
  misc_RNA (1)...(19): siRNA sense strand
agagauugccauuacgaau

SEQ ID NO: 2631320 - RNA, 19 nt, Homo sapiens
  misc_RNA (1)...(19): siRNA sense strand
auugaaggaauuaggaaca

SEQ ID NO: 2631321 - RNA, 19 nt, Homo sapiens
  misc_RNA (1)...(19): siRNA sense strand
auagaaugaguaaggaaga

SEQ ID NO: 2631322 - RNA, 19 nt, Homo sapiens
  misc_RNA (1)...(19): siRNA sense strand
cuugaaacuagaggaguaa

SEQ ID NO: 2631323 - RNA, 19 nt, Homo sapiens
  misc_RNA (1)...(19): siRNA sense strand
uugauggccaggagacaaa

SEQ ID NO: 2631324 - RNA, 19 nt, Homo sapiens
  misc_RNA (1)...(19): siRNA sense strand
aguguaaauuugauggcca

SEQ ID NO: 2631325 - RNA, 19 nt, Homo sapiens
  misc_RNA (1)...(19): siRNA sense strand
ucggaagucauauggaaau

SEQ ID NO: 2631326 - RNA, 19 nt, Homo sapiens
  misc_RNA (1)...(19): siRNA sense strand
aguaauugacuggaugaaa

SEQ ID NO: 2631327 - RNA, 19 nt, Homo sapiens
  misc_RNA (1)...(19): siRNA sense strand
caagguuccuagaagccaa

SEQ ID NO: 2631328 - RNA, 19 nt, Homo sapiens
  misc_RNA (1)...(19): siRNA sense strand
cuuuagaaauagaagacac

SEQ ID NO: 2631329 - RNA, 19 nt, Homo sapiens
  misc_RNA (1)...(19): siRNA sense strand
ggcuguauuaauagaauga

SEQ ID NO: 2631330 - RNA, 19 nt, Homo sapiens
  misc_RNA (1)...(19): siRNA sense strand
aggaagauuacuugagaga

SEQ ID NO: 2631331 - RNA, 19 nt, Homo sapiens
  misc_RNA (1)...(19): siRNA sense strand
gaagauuacuugagagagc

SEQ ID NO: 2631332 - RNA, 19 nt, Homo sapiens
  misc_RNA (1)...(19): siRNA sense strand
ggugagaaguuaaauggca

SEQ ID NO: 2631333 - RNA, 19 nt, Homo sapiens
  misc_RNA (1)...(19): siRNA sense strand
gguuuacagaugaggaagu

SEQ ID NO: 2631334 - RNA, 19 nt, Homo sapiens
  misc_RNA (1)...(19): siRNA sense strand
agaacaaagaccaagacca

SEQ ID NO: 2631335 - RNA, 19 nt, Homo sapiens
  misc_RNA (1)...(19): siRNA sense strand
guuucaucgacaaggaaga

SEQ ID NO: 2631336 - RNA, 19 nt, Homo sapiens
  misc_RNA (1)...(19): siRNA sense strand
aggucaacauucagggaaa

SEQ ID NO: 2631337 - RNA, 19 nt, Homo sapiens
  misc_RNA (1)...(19): siRNA sense strand
caacauaaccggcaggcaa

SEQ ID NO: 2631338 - RNA, 19 nt, Homo sapiens
  misc_RNA (1)...(19): siRNA sense strand
agugaaauggaaagugaua

SEQ ID NO: 2631339 - RNA, 19 nt, Homo sapiens
  misc_RNA (1)...(19): siRNA sense strand
ucacaaagccaguggugca

SEQ ID NO: 2631340 - RNA, 19 nt, Homo sapiens
  misc_RNA (1)...(19): siRNA sense strand
gaauucugauaaagggcua

SEQ ID NO: 2631341 - RNA, 19 nt, Homo sapiens
  misc_RNA (1)...(19): siRNA sense strand
cagaaacagaauacaggaa

SEQ ID NO: 2631342 - RNA, 19 nt, Homo sapiens
  misc_RNA (1)...(19): siRNA sense strand
cccagaagacaauggacua

SEQ ID NO: 2631343 - RNA, 19 nt, Homo sapiens
  misc_RNA (1)...(19): siRNA sense strand
ccaaauacuuacugggcuc

SEQ ID NO: 2631344 - RNA, 19 nt, Homo sapiens
  misc_RNA (1)...(19): siRNA sense strand
ccguaggacuggagaagcu

SEQ ID NO: 2631345 - RNA, 19 nt, Homo sapiens
  misc_RNA (1)...(19): siRNA sense strand
ugauaaagggcuaaaagua

SEQ ID NO: 2631346 - RNA, 19 nt, Homo sapiens
  misc_RNA (1)...(19): siRNA sense strand
cugagaaaguagcccagaa

SEQ ID NO: 2631347 - RNA, 19 nt, Homo sapiens
  misc_RNA (1)...(19): siRNA sense strand
agcaaguauaacuggaaua

SEQ ID NO: 2631348 - RNA, 19 nt, Homo sapiens
  misc_RNA (1)...(19): siRNA sense strand
augaagaugcucuggauga

SEQ ID NO: 2631349 - RNA, 19 nt, Homo sapiens
  misc_RNA (1)...(19): siRNA sense strand
gauuaggaggacugacaau

SEQ ID NO: 2631350 - RNA, 19 nt, Homo sapiens
  misc_RNA (1)...(19): siRNA sense strand
cuucauauugcuccaguaa

SEQ ID NO: 2631351 - RNA, 19 nt, Homo sapiens
  misc_RNA (1)...(19): siRNA sense strand
agucagaagauacaaguca

SEQ ID NO: 2631352 - RNA, 19 nt, Homo sapiens
  misc_RNA (1)...(19): siRNA sense strand
uggauuaggaggacugaca

SEQ ID NO: 2631353 - RNA, 19 nt, Homo sapiens
  misc_RNA (1)...(19): siRNA sense strand
auuacaucgugaaggucaa

SEQ ID NO: 2631354 - RNA, 19 nt, Homo sapiens
  misc_RNA (1)...(19): siRNA sense strand
cauccagaucauauggcua

SEQ ID NO: 2631355 - RNA, 19 nt, Homo sapiens
  misc_RNA (1)...(19): siRNA sense strand
gguugaugauccugucaca

SEQ ID NO: 2631356 - RNA, 19 nt, Homo sapiens
  misc_RNA (1)...(19): siRNA sense strand
agccaguggugcagauuca

SEQ ID NO: 2631357 - RNA, 19 nt, Homo sapiens
  misc_RNA (1)...(19): siRNA sense strand
cauauggcuauuugagaga

SEQ ID NO: 2631358 - RNA, 19 nt, Homo sapiens
  misc_RNA (1)...(19): siRNA sense strand
aaaguagcccagaagacaa

SEQ ID NO: 2631359 - RNA, 19 nt, Homo sapiens
  misc_RNA (1)...(19): siRNA sense strand
ucuggaugacuucggaaua

SEQ ID NO: 2631360 - RNA, 19 nt, Homo sapiens
  misc_RNA (1)...(19): siRNA sense strand
aagaacagcuaguggagga

SEQ ID NO: 2631361 - RNA, 19 nt, Homo sapiens
  misc_RNA (1)...(19): siRNA sense strand
acaaacuggaagaacuuaa

SEQ ID NO: 2631362 - RNA, 19 nt, Homo sapiens
  misc_RNA (1)...(19): siRNA sense strand
cgagcuugcuuuuggaaau

SEQ ID NO: 2631363 - RNA, 19 nt, Homo sapiens
  misc_RNA (1)...(19): siRNA sense strand
auaucuuacccaaggaaau

SEQ ID NO: 2631364 - RNA, 19 nt, Homo sapiens
  misc_RNA (1)...(19): siRNA sense strand
cagaagucucauuacacaa

SEQ ID NO: 2631365 - RNA, 19 nt, Homo sapiens
  misc_RNA (1)...(19): siRNA sense strand
cauuacacaaucugggaca

SEQ ID NO: 2631366 - RNA, 19 nt, Homo sapiens
  misc_RNA (1)...(19): siRNA sense strand
gaggccaggcagaaggaau

SEQ ID NO: 2631367 - RNA, 19 nt, Homo sapiens
  misc_RNA (1)...(19): siRNA sense strand
gggucauggaaaucaaaga

SEQ ID NO: 2631368 - RNA, 19 nt, Homo sapiens
  misc_RNA (1)...(19): siRNA sense strand
uggaguuggcuucgaaaga

SEQ ID NO: 2631369 - RNA, 19 nt, Homo sapiens
  misc_RNA (1)...(19): siRNA sense strand
aagucaggaucuuugggaa

SEQ ID NO: 2631370 - RNA, 19 nt, Homo sapiens
  misc_RNA (1)...(19): siRNA sense strand
uccugagggucauggaaau

SEQ ID NO: 2631371 - RNA, 19 nt, Homo sapiens
  misc_RNA (1)...(19): siRNA sense strand
gaaaucagccuaugguuua

SEQ ID NO: 2631372 - RNA, 19 nt, Homo sapiens
  misc_RNA (1)...(19): siRNA sense strand
agaaaucagccuaugguuu

SEQ ID NO: 2631373 - RNA, 19 nt, Homo sapiens
  misc_RNA (1)...(19): siRNA sense strand
gcgagaucaucaagcgcuu

SEQ ID NO: 2631374 - RNA, 19 nt, Homo sapiens
  misc_RNA (1)...(19): siRNA sense strand
gaacaucauucauggcagu

SEQ ID NO: 2631375 - RNA, 19 nt, Homo sapiens
  misc_RNA (1)...(19): siRNA sense strand
cauucauggcagugauuca

SEQ ID NO: 2631376 - RNA, 19 nt, Homo sapiens
  misc_RNA (1)...(19): siRNA sense strand
gccuaugguuuaagccuga

SEQ ID NO: 2631377 - RNA, 19 nt, Homo sapiens
  misc_RNA (1)...(19): siRNA sense strand
cugccaaagauguugcaaa

SEQ ID NO: 2631378 - RNA, 19 nt, Homo sapiens
  misc_RNA (1)...(19): siRNA sense strand
uucagaagccagagaggaa

SEQ ID NO: 2631379 - RNA, 19 nt, Homo sapiens
  misc_RNA (1)...(19): siRNA sense strand
caaagcagcugaaggagca

SEQ ID NO: 2631380 - RNA, 19 nt, Homo sapiens
  misc_RNA (1)...(19): siRNA sense strand
cggaaauucagaagccaga

SEQ ID NO: 2631381 - RNA, 19 nt, Homo sapiens
  misc_RNA (1)...(19): siRNA sense strand
cugaaaugggugcuggaau

SEQ ID NO: 2631382 - RNA, 19 nt, Homo sapiens
  misc_RNA (1)...(19): siRNA sense strand
agauaauugaaguugguga

SEQ ID NO: 2631383 - RNA, 19 nt, Homo sapiens
  misc_RNA (1)...(19): siRNA sense strand
gauucaguuuaaggagaaa

SEQ ID NO: 2631384 - RNA, 19 nt, Homo sapiens
  misc_RNA (1)...(19): siRNA sense strand
cagaagccagagaggaaga

SEQ ID NO: 2631385 - RNA, 19 nt, Homo sapiens
  misc_RNA (1)...(19): siRNA sense strand
ucaucuauuuccagggcuu

SEQ ID NO: 2631386 - RNA, 19 nt, Homo sapiens
  misc_RNA (1)...(19): siRNA sense strand
aagauucaguuuaaggaga

SEQ ID NO: 2631387 - RNA, 19 nt, Homo sapiens
  misc_RNA (1)...(19): siRNA sense strand
cgccaagauaauugaaguu

SEQ ID NO: 2631388 - RNA, 19 nt, Homo sapiens
  misc_RNA (1)...(19): siRNA sense strand
gugucauccugccggaaau

SEQ ID NO: 2631389 - RNA, 19 nt, Homo sapiens
  misc_RNA (1)...(19): siRNA sense strand
guucaucgcuucuguauuu

SEQ ID NO: 2631390 - RNA, 19 nt, Homo sapiens
  misc_RNA (1)...(19): siRNA sense strand
uuguaugaguuaugggaaa

SEQ ID NO: 2631391 - RNA, 19 nt, Homo sapiens
  misc_RNA (1)...(19): siRNA sense strand
ggaaauuugccgaugguga

SEQ ID NO: 2631392 - RNA, 19 nt, Homo sapiens
  misc_RNA (1)...(19): siRNA sense strand
gguaagaggucgauggccu

SEQ ID NO: 2631393 - RNA, 19 nt, Homo sapiens
  misc_RNA (1)...(19): siRNA sense strand
caagaagagaagaagucaa

SEQ ID NO: 2631394 - RNA, 19 nt, Homo sapiens
  misc_RNA (1)...(19): siRNA sense strand
gcaaaggaaagguggcuca

SEQ ID NO: 2631395 - RNA, 19 nt, Homo sapiens
  misc_RNA (1)...(19): siRNA sense strand
gcuugaauugaaagagaau

SEQ ID NO: 2631396 - RNA, 19 nt, Homo sapiens
  misc_RNA (1)...(19): siRNA sense strand
uggaagaagacucaaguau

SEQ ID NO: 2631397 - RNA, 19 nt, Homo sapiens
  misc_RNA (1)...(19): siRNA sense strand
auucauacuucaacgggaa

SEQ ID NO: 2631398 - RNA, 19 nt, Homo sapiens
  misc_RNA (1)...(19): siRNA sense strand
cuuccagggcguagaguuu

SEQ ID NO: 2631399 - RNA, 19 nt, Homo sapiens
  misc_RNA (1)...(19): siRNA sense strand
aaugaagugucuuggccaa

SEQ ID NO: 2631400 - RNA, 19 nt, Homo sapiens
  misc_RNA (1)...(19): siRNA sense strand
guauaaagauggaacagag

SEQ ID NO: 2631401 - RNA, 19 nt, Homo sapiens
  misc_RNA (1)...(19): siRNA sense strand
cuuggaguuuggaggagua

SEQ ID NO: 2631402 - RNA, 19 nt, Homo sapiens
  misc_RNA (1)...(19): siRNA sense strand
augggaaaccagaguauuu

SEQ ID NO: 2631403 - RNA, 19 nt, Homo sapiens
  misc_RNA (1)...(19): siRNA sense strand
gaggaagcguuguugacga

SEQ ID NO: 2631404 - RNA, 19 nt, Homo sapiens
  misc_RNA (1)...(19): siRNA sense strand
gugacgaguaccacuguaa

SEQ ID NO: 2631405 - RNA, 19 nt, Homo sapiens
  misc_RNA (1)...(19): siRNA sense strand
uaaagauggaacagagcuu

SEQ ID NO: 2631406 - RNA, 19 nt, Homo sapiens
  misc_RNA (1)...(19): siRNA sense strand
aguuaauaguuuccagcuu

SEQ ID NO: 2631407 - RNA, 19 nt, Homo sapiens
  misc_RNA (1)...(19): siRNA sense strand
gagaaugauauuaagccuu

SEQ ID NO: 2631408 - RNA, 19 nt, Homo sapiens
  misc_RNA (1)...(19): siRNA sense strand
ucguccaagaagagaagaa

SEQ ID NO: 2631409 - RNA, 19 nt, Homo sapiens
  misc_RNA (1)...(19): siRNA sense strand
gccugagcauauugagaga

SEQ ID NO: 2631410 - RNA, 19 nt, Homo sapiens
  misc_RNA (1)...(19): siRNA sense strand
ucacaagaaagcaguuaca

SEQ ID NO: 2631411 - RNA, 19 nt, Homo sapiens
  misc_RNA (1)...(19): siRNA sense strand
gaaagguuguagaaggaac

SEQ ID NO: 2631412 - RNA, 19 nt, Homo sapiens
  misc_RNA (1)...(19): siRNA sense strand
caaggagggaaguggaagu

SEQ ID NO: 2631413 - RNA, 19 nt, Homo sapiens
  misc_RNA (1)...(19): siRNA sense strand
ggacuuggaguuuggagga

SEQ ID NO: 2631414 - RNA, 19 nt, Homo sapiens
  misc_RNA (1)...(19): siRNA sense strand
uuguaugaguuaugggaaa

SEQ ID NO: 2631415 - RNA, 19 nt, Homo sapiens
  misc_RNA (1)...(19): siRNA sense strand
ggaaauuugccgaugguga

SEQ ID NO: 2631416 - RNA, 19 nt, Homo sapiens
  misc_RNA (1)...(19): siRNA sense strand
gguaagaggucgauggccu

SEQ ID NO: 2631417 - RNA, 19 nt, Homo sapiens
  misc_RNA (1)...(19): siRNA sense strand
caagaagagaagaagucaa

SEQ ID NO: 2631418 - RNA, 19 nt, Homo sapiens
  misc_RNA (1)...(19): siRNA sense strand
gcaaaggaaagguggcuca

SEQ ID NO: 2631419 - RNA, 19 nt, Homo sapiens
  misc_RNA (1)...(19): siRNA sense strand
gcuugaauugaaagagaau

SEQ ID NO: 2631420 - RNA, 19 nt, Homo sapiens
  misc_RNA (1)...(19): siRNA sense strand
uggaagaagacucaaguau

SEQ ID NO: 2631421 - RNA, 19 nt, Homo sapiens
  misc_RNA (1)...(19): siRNA sense strand
auucauacuucaacgggaa

SEQ ID NO: 2631422 - RNA, 19 nt, Homo sapiens
  misc_RNA (1)...(19): siRNA sense strand
cuuccagggcguagaguuu

SEQ ID NO: 2631423 - RNA, 19 nt, Homo sapiens
  misc_RNA (1)...(19): siRNA sense strand
aaugaagugucuuggccaa

SEQ ID NO: 2631424 - RNA, 19 nt, Homo sapiens
  misc_RNA (1)...(19): siRNA sense strand
guauaaagauggaacagag

SEQ ID NO: 2631425 - RNA, 19 nt, Homo sapiens
  misc_RNA (1)...(19): siRNA sense strand
cuuggaguuuggaggagua

SEQ ID NO: 2631426 - RNA, 19 nt, Homo sapiens
  misc_RNA (1)...(19): siRNA sense strand
augggaaaccagaguauuu

SEQ ID NO: 2631427 - RNA, 19 nt, Homo sapiens
  misc_RNA (1)...(19): siRNA sense strand
gaggaagcguuguugacga

SEQ ID NO: 2631428 - RNA, 19 nt, Homo sapiens
  misc_RNA (1)...(19): siRNA sense strand
gugacgaguaccacuguaa

SEQ ID NO: 2631429 - RNA, 19 nt, Homo sapiens
  misc_RNA (1)...(19): siRNA sense strand
uaaagauggaacagagcuu

SEQ ID NO: 2631430 - RNA, 19 nt, Homo sapiens
  misc_RNA (1)...(19): siRNA sense strand
aguuaauaguuuccagcuu

SEQ ID NO: 2631431 - RNA, 19 nt, Homo sapiens
  misc_RNA (1)...(19): siRNA sense strand
gagaaugauauuaagccuu

SEQ ID NO: 2631432 - RNA, 19 nt, Homo sapiens
  misc_RNA (1)...(19): siRNA sense strand
ucguccaagaagagaagaa

SEQ ID NO: 2631433 - RNA, 19 nt, Homo sapiens
  misc_RNA (1)...(19): siRNA sense strand
gccugagcauauugagaga

SEQ ID NO: 2631434 - RNA, 19 nt, Homo sapiens
  misc_RNA (1)...(19): siRNA sense strand
ucacaagaaagcaguuaca

SEQ ID NO: 2631435 - RNA, 19 nt, Homo sapiens
  misc_RNA (1)...(19): siRNA sense strand
gaaagguuguagaaggaac

SEQ ID NO: 2631436 - RNA, 19 nt, Homo sapiens
  misc_RNA (1)...(19): siRNA sense strand
caaggagggaaguggaagu

SEQ ID NO: 2631437 - RNA, 19 nt, Homo sapiens
  misc_RNA (1)...(19): siRNA sense strand
ggacuuggaguuuggagga

SEQ ID NO: 2631438 - RNA, 19 nt, Homo sapiens
  misc_RNA (1)...(19): siRNA sense strand
ccucaaugacagagaagaa

SEQ ID NO: 2631439 - RNA, 19 nt, Homo sapiens
  misc_RNA (1)...(19): siRNA sense strand
gaacauauuuagagaccga

SEQ ID NO: 2631440 - RNA, 19 nt, Homo sapiens
  misc_RNA (1)...(19): siRNA sense strand
ucggaaauuugaagggcaa

SEQ ID NO: 2631441 - RNA, 19 nt, Homo sapiens
  misc_RNA (1)...(19): siRNA sense strand
gguccaugauauagaagga

SEQ ID NO: 2631442 - RNA, 19 nt, Homo sapiens
  misc_RNA (1)...(19): siRNA sense strand
aggacagcaaauugggaaa

SEQ ID NO: 2631443 - RNA, 19 nt, Homo sapiens
  misc_RNA (1)...(19): siRNA sense strand
gguuaaagaucgaacacac

SEQ ID NO: 2631444 - RNA, 19 nt, Homo sapiens
  misc_RNA (1)...(19): siRNA sense strand
cugaagcagaugacacaaa

SEQ ID NO: 2631445 - RNA, 19 nt, Homo sapiens
  misc_RNA (1)...(19): siRNA sense strand
ggaccauccauuaaagaca

SEQ ID NO: 2631446 - RNA, 19 nt, Homo sapiens
  misc_RNA (1)...(19): siRNA sense strand
uguaguauacggagagcau

SEQ ID NO: 2631447 - RNA, 19 nt, Homo sapiens
  misc_RNA (1)...(19): siRNA sense strand
acacgaauucggagaaaau

SEQ ID NO: 2631448 - RNA, 19 nt, Homo sapiens
  misc_RNA (1)...(19): siRNA sense strand
guagaaaggccuuaccuga

SEQ ID NO: 2631449 - RNA, 19 nt, Homo sapiens
  misc_RNA (1)...(19): siRNA sense strand
ggacuuacaccaauggcau

SEQ ID NO: 2631450 - RNA, 19 nt, Homo sapiens
  misc_RNA (1)...(19): siRNA sense strand
gggaaagcuuauguaguau

SEQ ID NO: 2631451 - RNA, 19 nt, Homo sapiens
  misc_RNA (1)...(19): siRNA sense strand
cuuauguaguauacggaga

SEQ ID NO: 2631452 - RNA, 19 nt, Homo sapiens
  misc_RNA (1)...(19): siRNA sense strand
agucaagccuccugggauc

SEQ ID NO: 2631453 - RNA, 19 nt, Homo sapiens
  misc_RNA (1)...(19): siRNA sense strand
acagaaaagacgagaaugu

SEQ ID NO: 2631454 - RNA, 19 nt, Homo sapiens
  misc_RNA (1)...(19): siRNA sense strand
ucagaaugaagaaguggua

SEQ ID NO: 2631455 - RNA, 19 nt, Homo sapiens
  misc_RNA (1)...(19): siRNA sense strand
uuacaaugacagugacuca

SEQ ID NO: 2631456 - RNA, 19 nt, Homo sapiens
  misc_RNA (1)...(19): siRNA sense strand
uuugaauaugugacggaua

SEQ ID NO: 2631457 - RNA, 19 nt, Homo sapiens
  misc_RNA (1)...(19): siRNA sense strand
agaucaagggaaagcuuau

SEQ ID NO: 2631458 - RNA, 19 nt, Homo sapiens
  misc_RNA (1)...(19): siRNA sense strand
gagcagauguccuaccuga

SEQ ID NO: 2631459 - RNA, 19 nt, Homo sapiens
  misc_RNA (1)...(19): siRNA sense strand
accaagagggcguggcuau

SEQ ID NO: 2631460 - RNA, 19 nt, Homo sapiens
  misc_RNA (1)...(19): siRNA sense strand
aagacgagaauguggcuau

SEQ ID NO: 2631461 - RNA, 19 nt, Homo sapiens
  misc_RNA (1)...(19): siRNA sense strand
cuuugaaugugguagacuu

SEQ ID NO: 2631462 - RNA, 19 nt, Homo sapiens
  misc_RNA (1)...(19): siRNA sense strand
ggucagaagagaggaaagu

SEQ ID NO: 2631463 - RNA, 19 nt, Homo sapiens
  misc_RNA (1)...(19): siRNA sense strand
guuaaagaucgaacacaca

SEQ ID NO: 2631464 - RNA, 19 nt, Homo sapiens
  misc_RNA (1)...(19): siRNA sense strand
acaaugugacugagaaagu

SEQ ID NO: 2631465 - RNA, 19 nt, Homo sapiens
  misc_RNA (1)...(19): siRNA sense strand
ccaaaauagcaauacacua

SEQ ID NO: 2631466 - RNA, 19 nt, Homo sapiens
  misc_RNA (1)...(19): siRNA sense strand
acgcauggacuuacaccaa

SEQ ID NO: 2631467 - RNA, 19 nt, Homo sapiens
  misc_RNA (1)...(19): siRNA sense strand
caguuuaaccaguguagga

SEQ ID NO: 2631468 - RNA, 19 nt, Homo sapiens
  misc_RNA (1)...(19): siRNA sense strand
agaccaagaggcaugauau

SEQ ID NO: 2631469 - RNA, 19 nt, Homo sapiens
  misc_RNA (1)...(19): siRNA sense strand
agaggaaaguggaggucac

SEQ ID NO: 2631470 - RNA, 19 nt, Homo sapiens
  misc_RNA (1)...(19): siRNA sense strand
gcgauugggaauguagaaa

SEQ ID NO: 2631471 - RNA, 19 nt, Homo sapiens
  misc_RNA (1)...(19): siRNA sense strand
aguuuacgauauugcacua

SEQ ID NO: 2631472 - RNA, 19 nt, Homo sapiens
  misc_RNA (1)...(19): siRNA sense strand
agaaugaagaagugguaag

SEQ ID NO: 2631473 - RNA, 19 nt, Homo sapiens
  misc_RNA (1)...(19): siRNA sense strand
gguucugaugagacaacaa

SEQ ID NO: 2631474 - RNA, 19 nt, Homo sapiens
  misc_RNA (1)...(19): siRNA sense strand
ccuaacacgaauucggaga

SEQ ID NO: 2631475 - RNA, 19 nt, Homo sapiens
  misc_RNA (1)...(19): siRNA sense strand
ugggaauguaucugcaauu

SEQ ID NO: 2631476 - RNA, 19 nt, Homo sapiens
  misc_RNA (1)...(19): siRNA sense strand
gggaauguagaaaggccuu

SEQ ID NO: 2631477 - RNA, 19 nt, Homo sapiens
  misc_RNA (1)...(19): siRNA sense strand
cagcaaauugggaaacguu

SEQ ID NO: 2631478 - RNA, 19 nt, Homo sapiens
  misc_RNA (1)...(19): siRNA sense strand
gggaccaucauucggaaau

SEQ ID NO: 2631479 - RNA, 19 nt, Homo sapiens
  misc_RNA (1)...(19): siRNA sense strand
cugcaauuauccaaagacu

SEQ ID NO: 2631480 - RNA, 19 nt, Homo sapiens
  misc_RNA (1)...(19): siRNA sense strand
ccucaaugacagagaagaa

SEQ ID NO: 2631481 - RNA, 19 nt, Homo sapiens
  misc_RNA (1)...(19): siRNA sense strand
gaacauauuuagagaccga

SEQ ID NO: 2631482 - RNA, 19 nt, Homo sapiens
  misc_RNA (1)...(19): siRNA sense strand
ucggaaauuugaagggcaa

SEQ ID NO: 2631483 - RNA, 19 nt, Homo sapiens
  misc_RNA (1)...(19): siRNA sense strand
gguccaugauauagaagga

SEQ ID NO: 2631484 - RNA, 19 nt, Homo sapiens
  misc_RNA (1)...(19): siRNA sense strand
aggacagcaaauugggaaa

SEQ ID NO: 2631485 - RNA, 19 nt, Homo sapiens
  misc_RNA (1)...(19): siRNA sense strand
gguuaaagaucgaacacac

SEQ ID NO: 2631486 - RNA, 19 nt, Homo sapiens
  misc_RNA (1)...(19): siRNA sense strand
cugaagcagaugacacaaa

SEQ ID NO: 2631487 - RNA, 19 nt, Homo sapiens
  misc_RNA (1)...(19): siRNA sense strand
ggaccauccauuaaagaca

SEQ ID NO: 2631488 - RNA, 19 nt, Homo sapiens
  misc_RNA (1)...(19): siRNA sense strand
uguaguauacggagagcau

SEQ ID NO: 2631489 - RNA, 19 nt, Homo sapiens
  misc_RNA (1)...(19): siRNA sense strand
acacgaauucggagaaaau

SEQ ID NO: 2631490 - RNA, 19 nt, Homo sapiens
  misc_RNA (1)...(19): siRNA sense strand
guagaaaggccuuaccuga

SEQ ID NO: 2631491 - RNA, 19 nt, Homo sapiens
  misc_RNA (1)...(19): siRNA sense strand
ggacuuacaccaauggcau

SEQ ID NO: 2631492 - RNA, 19 nt, Homo sapiens
  misc_RNA (1)...(19): siRNA sense strand
gggaaagcuuauguaguau

SEQ ID NO: 2631493 - RNA, 19 nt, Homo sapiens
  misc_RNA (1)...(19): siRNA sense strand
cuuauguaguauacggaga

SEQ ID NO: 2631494 - RNA, 19 nt, Homo sapiens
  misc_RNA (1)...(19): siRNA sense strand
agucaagccuccugggauc

SEQ ID NO: 2631495 - RNA, 19 nt, Homo sapiens
  misc_RNA (1)...(19): siRNA sense strand
acagaaaagacgagaaugu

SEQ ID NO: 2631496 - RNA, 19 nt, Homo sapiens
  misc_RNA (1)...(19): siRNA sense strand
ucagaaugaagaaguggua

SEQ ID NO: 2631497 - RNA, 19 nt, Homo sapiens
  misc_RNA (1)...(19): siRNA sense strand
uuacaaugacagugacuca

SEQ ID NO: 2631498 - RNA, 19 nt, Homo sapiens
  misc_RNA (1)...(19): siRNA sense strand
uuugaauaugugacggaua

SEQ ID NO: 2631499 - RNA, 19 nt, Homo sapiens
  misc_RNA (1)...(19): siRNA sense strand
agaucaagggaaagcuuau

SEQ ID NO: 2631500 - RNA, 19 nt, Homo sapiens
  misc_RNA (1)...(19): siRNA sense strand
gagcagauguccuaccuga

SEQ ID NO: 2631501 - RNA, 19 nt, Homo sapiens
  misc_RNA (1)...(19): siRNA sense strand
accaagagggcguggcuau

SEQ ID NO: 2631502 - RNA, 19 nt, Homo sapiens
  misc_RNA (1)...(19): siRNA sense strand
aagacgagaauguggcuau

SEQ ID NO: 2631503 - RNA, 19 nt, Homo sapiens
  misc_RNA (1)...(19): siRNA sense strand
cuuugaaugugguagacuu

SEQ ID NO: 2631504 - RNA, 19 nt, Homo sapiens
  misc_RNA (1)...(19): siRNA sense strand
ggucagaagagaggaaagu

SEQ ID NO: 2631505 - RNA, 19 nt, Homo sapiens
  misc_RNA (1)...(19): siRNA sense strand
guuaaagaucgaacacaca

SEQ ID NO: 2631506 - RNA, 19 nt, Homo sapiens
  misc_RNA (1)...(19): siRNA sense strand
acaaugugacugagaaagu

SEQ ID NO: 2631507 - RNA, 19 nt, Homo sapiens
  misc_RNA (1)...(19): siRNA sense strand
ccaaaauagcaauacacua

SEQ ID NO: 2631508 - RNA, 19 nt, Homo sapiens
  misc_RNA (1)...(19): siRNA sense strand
acgcauggacuuacaccaa

SEQ ID NO: 2631509 - RNA, 19 nt, Homo sapiens
  misc_RNA (1)...(19): siRNA sense strand
caguuuaaccaguguagga

SEQ ID NO: 2631510 - RNA, 19 nt, Homo sapiens
  misc_RNA (1)...(19): siRNA sense strand
agaccaagaggcaugauau

SEQ ID NO: 2631511 - RNA, 19 nt, Homo sapiens
  misc_RNA (1)...(19): siRNA sense strand
agaggaaaguggaggucac

SEQ ID NO: 2631512 - RNA, 19 nt, Homo sapiens
  misc_RNA (1)...(19): siRNA sense strand
gcgauugggaauguagaaa

SEQ ID NO: 2631513 - RNA, 19 nt, Homo sapiens
  misc_RNA (1)...(19): siRNA sense strand
aguuuacgauauugcacua

SEQ ID NO: 2631514 - RNA, 19 nt, Homo sapiens
  misc_RNA (1)...(19): siRNA sense strand
agaaugaagaagugguaag

SEQ ID NO: 2631515 - RNA, 19 nt, Homo sapiens
  misc_RNA (1)...(19): siRNA sense strand
gguucugaugagacaacaa

SEQ ID NO: 2631516 - RNA, 19 nt, Homo sapiens
  misc_RNA (1)...(19): siRNA sense strand
ccuaacacgaauucggaga

SEQ ID NO: 2631517 - RNA, 19 nt, Homo sapiens
  misc_RNA (1)...(19): siRNA sense strand
ugggaauguaucugcaauu

SEQ ID NO: 2631518 - RNA, 19 nt, Homo sapiens
  misc_RNA (1)...(19): siRNA sense strand
gggaauguagaaaggccuu

SEQ ID NO: 2631519 - RNA, 19 nt, Homo sapiens
  misc_RNA (1)...(19): siRNA sense strand
cagcaaauugggaaacguu

SEQ ID NO: 2631520 - RNA, 19 nt, Homo sapiens
  misc_RNA (1)...(19): siRNA sense strand
gggaccaucauucggaaau

SEQ ID NO: 2631521 - RNA, 19 nt, Homo sapiens
  misc_RNA (1)...(19): siRNA sense strand
cugcaauuauccaaagacu

SEQ ID NO: 2631522 - RNA, 19 nt, Homo sapiens
  misc_RNA (1)...(19): siRNA sense strand
ggaguaagcuggaggucac

SEQ ID NO: 2631523 - RNA, 19 nt, Homo sapiens
  misc_RNA (1)...(19): siRNA sense strand
acaugaacgcggugcugaa

SEQ ID NO: 2631524 - RNA, 19 nt, Homo sapiens
  misc_RNA (1)...(19): siRNA sense strand
cugagcuacugcaggaaau

SEQ ID NO: 2631525 - RNA, 19 nt, Homo sapiens
  misc_RNA (1)...(19): siRNA sense strand
gaguggaggugaugcagca

SEQ ID NO: 2631526 - RNA, 19 nt, Homo sapiens
  misc_RNA (1)...(19): siRNA sense strand
acgcggugcugaagggcuu

SEQ ID NO: 2631527 - RNA, 19 nt, Homo sapiens
  misc_RNA (1)...(19): siRNA sense strand
aguccaaagcacaggaacu

SEQ ID NO: 2631528 - RNA, 19 nt, Homo sapiens
  misc_RNA (1)...(19): siRNA sense strand
ggacaaaacucuggcacca

SEQ ID NO: 2631529 - RNA, 19 nt, Homo sapiens
  misc_RNA (1)...(19): siRNA sense strand
ccaucgagauccugcgcga

SEQ ID NO: 2631530 - RNA, 19 nt, Homo sapiens
  misc_RNA (1)...(19): siRNA sense strand
cggccuuugcggagagcuu

SEQ ID NO: 2631531 - RNA, 19 nt, Homo sapiens
  misc_RNA (1)...(19): siRNA sense strand
cacggaagcuggaccgcua

SEQ ID NO: 2631532 - RNA, 19 nt, Homo sapiens
  misc_RNA (1)...(19): siRNA sense strand
auguggugcccgugaagaa

SEQ ID NO: 2631533 - RNA, 19 nt, Homo sapiens
  misc_RNA (1)...(19): siRNA sense strand
augaugagguggucagcca

SEQ ID NO: 2631534 - RNA, 19 nt, Homo sapiens
  misc_RNA (1)...(19): siRNA sense strand
gccaaugcucagauggaga

SEQ ID NO: 2631535 - RNA, 19 nt, Homo sapiens
  misc_RNA (1)...(19): siRNA sense strand
ggaguaagcuggaggucac

SEQ ID NO: 2631536 - RNA, 19 nt, Homo sapiens
  misc_RNA (1)...(19): siRNA sense strand
acaugaacgcggugcugaa

SEQ ID NO: 2631537 - RNA, 19 nt, Homo sapiens
  misc_RNA (1)...(19): siRNA sense strand
cugagcuacugcaggaaau

SEQ ID NO: 2631538 - RNA, 19 nt, Homo sapiens
  misc_RNA (1)...(19): siRNA sense strand
gaguggaggugaugcagca

SEQ ID NO: 2631539 - RNA, 19 nt, Homo sapiens
  misc_RNA (1)...(19): siRNA sense strand
acgcggugcugaagggcuu

SEQ ID NO: 2631540 - RNA, 19 nt, Homo sapiens
  misc_RNA (1)...(19): siRNA sense strand
aguccaaagcacaggaacu

SEQ ID NO: 2631541 - RNA, 19 nt, Homo sapiens
  misc_RNA (1)...(19): siRNA sense strand
ggacaaaacucuggcacca

SEQ ID NO: 2631542 - RNA, 19 nt, Homo sapiens
  misc_RNA (1)...(19): siRNA sense strand
ccaucgagauccugcgcga

SEQ ID NO: 2631543 - RNA, 19 nt, Homo sapiens
  misc_RNA (1)...(19): siRNA sense strand
cggccuuugcggagagcuu

SEQ ID NO: 2631544 - RNA, 19 nt, Homo sapiens
  misc_RNA (1)...(19): siRNA sense strand
cacggaagcuggaccgcua

SEQ ID NO: 2631545 - RNA, 19 nt, Homo sapiens
  misc_RNA (1)...(19): siRNA sense strand
auguggugcccgugaagaa

SEQ ID NO: 2631546 - RNA, 19 nt, Homo sapiens
  misc_RNA (1)...(19): siRNA sense strand
augaugagguggucagcca

SEQ ID NO: 2631547 - RNA, 19 nt, Homo sapiens
  misc_RNA (1)...(19): siRNA sense strand
gccaaugcucagauggaga

SEQ ID NO: 2631548 - RNA, 19 nt, Homo sapiens
  misc_RNA (1)...(19): siRNA sense strand
gugaaagagcagauggaga

SEQ ID NO: 2631549 - RNA, 19 nt, Homo sapiens
  misc_RNA (1)...(19): siRNA sense strand
gagcaugucugaagagcga

SEQ ID NO: 2631550 - RNA, 19 nt, Homo sapiens
  misc_RNA (1)...(19): siRNA sense strand
aggcauuccgggagggcaa

SEQ ID NO: 2631551 - RNA, 19 nt, Homo sapiens
  misc_RNA (1)...(19): siRNA sense strand
uagaauaugugaaggagga

SEQ ID NO: 2631552 - RNA, 19 nt, Homo sapiens
  misc_RNA (1)...(19): siRNA sense strand
cugcagaagaagaugguca

SEQ ID NO: 2631553 - RNA, 19 nt, Homo sapiens
  misc_RNA (1)...(19): siRNA sense strand
augugaaggaggaggccaa

SEQ ID NO: 2631554 - RNA, 19 nt, Homo sapiens
  misc_RNA (1)...(19): siRNA sense strand
agguagaauaugugaagga

SEQ ID NO: 2631555 - RNA, 19 nt, Homo sapiens
  misc_RNA (1)...(19): siRNA sense strand
uuguaaagccugugaccau

SEQ ID NO: 2631556 - RNA, 19 nt, Homo sapiens
  misc_RNA (1)...(19): siRNA sense strand
augaggacgacgaggacua

SEQ ID NO: 2631557 - RNA, 19 nt, Homo sapiens
  misc_RNA (1)...(19): siRNA sense strand
cggaagaugaggacgacga

SEQ ID NO: 2631558 - RNA, 19 nt, Homo sapiens
  misc_RNA (1)...(19): siRNA sense strand
ccauucagauccagggcau

SEQ ID NO: 2631559 - RNA, 19 nt, Homo sapiens
  misc_RNA (1)...(19): siRNA sense strand
aggcggaagaugaggacga

SEQ ID NO: 2631560 - RNA, 19 nt, Homo sapiens
  misc_RNA (1)...(19): siRNA sense strand
aggagauggcuaagggcau

SEQ ID NO: 2631561 - RNA, 19 nt, Homo sapiens
  misc_RNA (1)...(19): siRNA sense strand
aggcagacguggacgccau

SEQ ID NO: 2631562 - RNA, 19 nt, Homo sapiens
  misc_RNA (1)...(19): siRNA sense strand
uggaacaagagaagagguu

SEQ ID NO: 2631563 - RNA, 19 nt, Homo sapiens
  misc_RNA (1)...(19): siRNA sense strand
gaggaagagcagcaggaca

SEQ ID NO: 2631564 - RNA, 19 nt, Homo sapiens
  misc_RNA (1)...(19): siRNA sense strand
acaugggcuucgaggguga

SEQ ID NO: 2631565 - RNA, 19 nt, Homo sapiens
  misc_RNA (1)...(19): siRNA sense strand
gcaaagaccaggaggaacg

SEQ ID NO: 2631566 - RNA, 19 nt, Homo sapiens
  misc_RNA (1)...(19): siRNA sense strand
gaagagaagauccuggaga

SEQ ID NO: 2631567 - RNA, 19 nt, Homo sapiens
  misc_RNA (1)...(19): siRNA sense strand
acauccugguggagggaga

SEQ ID NO: 2631568 - RNA, 19 nt, Homo sapiens
  misc_RNA (1)...(19): siRNA sense strand
uugcagagaagaaggcaga

SEQ ID NO: 2631569 - RNA, 19 nt, Homo sapiens
  misc_RNA (1)...(19): siRNA sense strand
gccccaaacucgaggcuau

SEQ ID NO: 2631570 - RNA, 19 nt, Homo sapiens
  misc_RNA (1)...(19): siRNA sense strand
gacaugagcgcgugcggaa

SEQ ID NO: 2631571 - RNA, 19 nt, Homo sapiens
  misc_RNA (1)...(19): siRNA sense strand
ccugaagaagaaaggcauu

SEQ ID NO: 2631572 - RNA, 19 nt, Homo sapiens
  misc_RNA (1)...(19): siRNA sense strand
agaagaagauggucagccu

SEQ ID NO: 2631573 - RNA, 19 nt, Homo sapiens
  misc_RNA (1)...(19): siRNA sense strand
agaagaaggcagacgugga

SEQ ID NO: 2631574 - RNA, 19 nt, Homo sapiens
  misc_RNA (1)...(19): siRNA sense strand
agcugaaggaagaagagaa

SEQ ID NO: 2631575 - RNA, 19 nt, Homo sapiens
  misc_RNA (1)...(19): siRNA sense strand
ggcuaagggcauuacguau

SEQ ID NO: 2631576 - RNA, 19 nt, Homo sapiens
  misc_RNA (1)...(19): siRNA sense strand
ccgugaaagagcagaugga

SEQ ID NO: 2631577 - RNA, 19 nt, Homo sapiens
  misc_RNA (1)...(19): siRNA sense strand
ggguugaggccguagccau

SEQ ID NO: 2631578 - RNA, 19 nt, Homo sapiens
  misc_RNA (1)...(19): siRNA sense strand
ccgaagaagauucagaacu

SEQ ID NO: 2631579 - RNA, 19 nt, Homo sapiens
  misc_RNA (1)...(19): siRNA sense strand
cggaggaagagcagcagga

SEQ ID NO: 2631580 - RNA, 19 nt, Homo sapiens
  misc_RNA (1)...(19): siRNA sense strand
aggaagagcagcaggacag

SEQ ID NO: 2631581 - RNA, 19 nt, Homo sapiens
  misc_RNA (1)...(19): siRNA sense strand
cgacaugggcuucgagggu

SEQ ID NO: 2631582 - RNA, 19 nt, Homo sapiens
  misc_RNA (1)...(19): siRNA sense strand
augacaugccagaggagau

SEQ ID NO: 2631583 - RNA, 19 nt, Homo sapiens
  misc_RNA (1)...(19): siRNA sense strand
ggacauuggaggagagcgc

SEQ ID NO: 2631584 - RNA, 19 nt, Homo sapiens
  misc_RNA (1)...(19): siRNA sense strand
ugguggagggagacgguau

SEQ ID NO: 2631585 - RNA, 19 nt, Homo sapiens
  misc_RNA (1)...(19): siRNA sense strand
ugaaagagcagauggagac

SEQ ID NO: 2631586 - RNA, 19 nt, Homo sapiens
  misc_RNA (1)...(19): siRNA sense strand
ucagugaaggagauggcua

SEQ ID NO: 2631587 - RNA, 19 nt, Homo sapiens
  misc_RNA (1)...(19): siRNA sense strand
acuucaagggccagcgaca

SEQ ID NO: 2631588 - RNA, 19 nt, Homo sapiens
  misc_RNA (1)...(19): siRNA sense strand
ggaaugaacuauuggcuua

SEQ ID NO: 2631589 - RNA, 19 nt, Homo sapiens
  misc_RNA (1)...(19): siRNA sense strand
ggagcaagguugaagauaa

SEQ ID NO: 2631590 - RNA, 19 nt, Homo sapiens
  misc_RNA (1)...(19): siRNA sense strand
gaauauaggagaaagguua

SEQ ID NO: 2631591 - RNA, 19 nt, Homo sapiens
  misc_RNA (1)...(19): siRNA sense strand
cuacagaaguaaaggagua

SEQ ID NO: 2631592 - RNA, 19 nt, Homo sapiens
  misc_RNA (1)...(19): siRNA sense strand
ggacauuauuggacauuaa

SEQ ID NO: 2631593 - RNA, 19 nt, Homo sapiens
  misc_RNA (1)...(19): siRNA sense strand
gagaagaauuagacaagaa

SEQ ID NO: 2631594 - RNA, 19 nt, Homo sapiens
  misc_RNA (1)...(19): siRNA sense strand
gggaauggauuauuggaaa

SEQ ID NO: 2631595 - RNA, 19 nt, Homo sapiens
  misc_RNA (1)...(19): siRNA sense strand
ggagaaggaaauagauaaa

SEQ ID NO: 2631596 - RNA, 19 nt, Homo sapiens
  misc_RNA (1)...(19): siRNA sense strand
ucuuaaagcugaagccaaa

SEQ ID NO: 2631597 - RNA, 19 nt, Homo sapiens
  misc_RNA (1)...(19): siRNA sense strand
gagcaagguugaagauaau

SEQ ID NO: 2631598 - RNA, 19 nt, Homo sapiens
  misc_RNA (1)...(19): siRNA sense strand
guacaagggacuaguuaaa

SEQ ID NO: 2631599 - RNA, 19 nt, Homo sapiens
  misc_RNA (1)...(19): siRNA sense strand
gugcaaauaaaguaggaaa

SEQ ID NO: 2631600 - RNA, 19 nt, Homo sapiens
  misc_RNA (1)...(19): siRNA sense strand
cuuaagugcugaugauaaa

SEQ ID NO: 2631601 - RNA, 19 nt, Homo sapiens
  misc_RNA (1)...(19): siRNA sense strand
caaucaaggugcacaauua

SEQ ID NO: 2631602 - RNA, 19 nt, Homo sapiens
  misc_RNA (1)...(19): siRNA sense strand
ggaggaagagugaaggaaa

SEQ ID NO: 2631603 - RNA, 19 nt, Homo sapiens
  misc_RNA (1)...(19): siRNA sense strand
ggagaaagguuacuguuua

SEQ ID NO: 2631604 - RNA, 19 nt, Homo sapiens
  misc_RNA (1)...(19): siRNA sense strand
gaggaagagugaaggaaaa

SEQ ID NO: 2631605 - RNA, 19 nt, Homo sapiens
  misc_RNA (1)...(19): siRNA sense strand
uguuaaagauggcggguuu

SEQ ID NO: 2631606 - RNA, 19 nt, Homo sapiens
  misc_RNA (1)...(19): siRNA sense strand
gcuuaaaugcgcauaauua

SEQ ID NO: 2631607 - RNA, 19 nt, Homo sapiens
  misc_RNA (1)...(19): siRNA sense strand
gaucauuacauuuggacaa

SEQ ID NO: 2631608 - RNA, 19 nt, Homo sapiens
  misc_RNA (1)...(19): siRNA sense strand
ggacaaauggacuaauaua

SEQ ID NO: 2631609 - RNA, 19 nt, Homo sapiens
  misc_RNA (1)...(19): siRNA sense strand
gaauaauaucaguggauga

SEQ ID NO: 2631610 - RNA, 19 nt, Homo sapiens
  misc_RNA (1)...(19): siRNA sense strand
agacuaaggugcagggcuu

SEQ ID NO: 2631611 - RNA, 19 nt, Homo sapiens
  misc_RNA (1)...(19): siRNA sense strand
ggacagucaaggugcguaa

SEQ ID NO: 2631612 - RNA, 19 nt, Homo sapiens
  misc_RNA (1)...(19): siRNA sense strand
ucagaaaggugcauauuaa

SEQ ID NO: 2631613 - RNA, 19 nt, Homo sapiens
  misc_RNA (1)...(19): siRNA sense strand
ccauaaguggagaaggaaa

SEQ ID NO: 2631614 - RNA, 19 nt, Homo sapiens
  misc_RNA (1)...(19): siRNA sense strand
caacagagaucuaugugua

SEQ ID NO: 2631615 - RNA, 19 nt, Homo sapiens
  misc_RNA (1)...(19): siRNA sense strand
aaguauaagcauuggagua

SEQ ID NO: 2631616 - RNA, 19 nt, Homo sapiens
  misc_RNA (1)...(19): siRNA sense strand
cuacaguucuauacagaua

SEQ ID NO: 2631617 - RNA, 19 nt, Homo sapiens
  misc_RNA (1)...(19): siRNA sense strand
ggccaaaauugaaaggaaa

SEQ ID NO: 2631618 - RNA, 19 nt, Homo sapiens
  misc_RNA (1)...(19): siRNA sense strand
ggacaaucaaggugcacaa

SEQ ID NO: 2631619 - RNA, 19 nt, Homo sapiens
  misc_RNA (1)...(19): siRNA sense strand
ggacaaucaaggugcacaa

SEQ ID NO: 2631620 - RNA, 19 nt, Homo sapiens
  misc_RNA (1)...(19): siRNA sense strand
ggacaaucaaggugcacaa

SEQ ID NO: 2631621 - RNA, 19 nt, Homo sapiens
  misc_RNA (1)...(19): siRNA sense strand
uaagcugaguagagagaua

SEQ ID NO: 2631622 - RNA, 19 nt, Homo sapiens
  misc_RNA (1)...(19): siRNA sense strand
ggaagacauaugagcaaua

SEQ ID NO: 2631623 - RNA, 19 nt, Homo sapiens
  misc_RNA (1)...(19): siRNA sense strand
ggaauggauuauuggaaaa

SEQ ID NO: 2631624 - RNA, 19 nt, Homo sapiens
  misc_RNA (1)...(19): siRNA sense strand
guagauagucaaagucaaa

SEQ ID NO: 2631625 - RNA, 19 nt, Homo sapiens
  misc_RNA (1)...(19): siRNA sense strand
gcacaauggcaguuaucaa

SEQ ID NO: 2631626 - RNA, 19 nt, Homo sapiens
  misc_RNA (1)...(19): siRNA sense strand
ccucauuggcuuaguuuaa

SEQ ID NO: 2631627 - RNA, 19 nt, Homo sapiens
  misc_RNA (1)...(19): siRNA sense strand
cagaaacaauccucagaua

SEQ ID NO: 2631628 - RNA, 19 nt, Homo sapiens
  misc_RNA (1)...(19): siRNA sense strand
cauaaguggagaaggaaau

SEQ ID NO: 2631629 - RNA, 19 nt, Homo sapiens
  misc_RNA (1)...(19): siRNA sense strand
auuugaaagugcaguguaa

SEQ ID NO: 2631630 - RNA, 19 nt, Homo sapiens
  misc_RNA (1)...(19): siRNA sense strand
ggaaauaauuggccaaaau

SEQ ID NO: 2631631 - RNA, 19 nt, Homo sapiens
  misc_RNA (1)...(19): siRNA sense strand
gauagaaggcccaaaguau

SEQ ID NO: 2631632 - RNA, 19 nt, Homo sapiens
  misc_RNA (1)...(19): siRNA sense strand
caucaaaucugcucaagaa

SEQ ID NO: 2631633 - RNA, 19 nt, Homo sapiens
  misc_RNA (1)...(19): siRNA sense strand
ccuuagacuaguaaaguua

SEQ ID NO: 2631634 - RNA, 19 nt, Homo sapiens
  misc_RNA (1)...(19): siRNA sense strand
ucgcauugcuucugaguau

SEQ ID NO: 2631635 - RNA, 19 nt, Homo sapiens
  misc_RNA (1)...(19): siRNA sense strand
ucaagaagauugcaguaaa

SEQ ID NO: 2631636 - RNA, 19 nt, Homo sapiens
  misc_RNA (1)...(19): siRNA sense strand
cagcaagggauauuaauua

SEQ ID NO: 2631637 - RNA, 19 nt, Homo sapiens
  misc_RNA (1)...(19): siRNA sense strand
aagccuaccuagauggaua

SEQ ID NO: 2631638 - RNA, 19 nt, Homo sapiens
  misc_RNA (1)...(19): siRNA sense strand
gggcacugaucauuagaua

SEQ ID NO: 2631639 - RNA, 19 nt, Homo sapiens
  misc_RNA (1)...(19): siRNA sense strand
aggccaaugagaagaauua

SEQ ID NO: 2631640 - RNA, 19 nt, Homo sapiens
  misc_RNA (1)...(19): siRNA sense strand
aaagaaaggagcaagcaua

SEQ ID NO: 2631641 - RNA, 19 nt, Homo sapiens
  misc_RNA (1)...(19): siRNA sense strand
caggaagacauaugagcaa

SEQ ID NO: 2631642 - RNA, 19 nt, Homo sapiens
  misc_RNA (1)...(19): siRNA sense strand
ccuucuaccucaaagauaa

SEQ ID NO: 2631643 - RNA, 19 nt, Homo sapiens
  misc_RNA (1)...(19): siRNA sense strand
acagaaggguugcugauaa

SEQ ID NO: 2631644 - RNA, 19 nt, Homo sapiens
  misc_RNA (1)...(19): siRNA sense strand
gugauauguucgauacuaa

SEQ ID NO: 2631645 - RNA, 19 nt, Homo sapiens
  misc_RNA (1)...(19): siRNA sense strand
gagaaagguuacuguuuau

SEQ ID NO: 2631646 - RNA, 19 nt, Homo sapiens
  misc_RNA (1)...(19): siRNA sense strand
guaagugaccacaggcaua

SEQ ID NO: 2631647 - RNA, 19 nt, Homo sapiens
  misc_RNA (1)...(19): siRNA sense strand
aagaaaggagcaagcauaa

SEQ ID NO: 2631648 - RNA, 19 nt, Homo sapiens
  misc_RNA (1)...(19): siRNA sense strand
gagaaugacucugcaguua

SEQ ID NO: 2631649 - RNA, 19 nt, Homo sapiens
  misc_RNA (1)...(19): siRNA sense strand
gguacuugguauaagguuu

SEQ ID NO: 2631650 - RNA, 19 nt, Homo sapiens
  misc_RNA (1)...(19): siRNA sense strand
guggagaaggaaauagaua

SEQ ID NO: 2631651 - RNA, 19 nt, Homo sapiens
  misc_RNA (1)...(19): siRNA sense strand
uggagaaggaaauagauaa

SEQ ID NO: 2631652 - RNA, 19 nt, Homo sapiens
  misc_RNA (1)...(19): siRNA sense strand
ccauuaaucaugaagacua

SEQ ID NO: 2631653 - RNA, 19 nt, Homo sapiens
  misc_RNA (1)...(19): siRNA sense strand
agucaagaccuuugcacua

SEQ ID NO: 2631654 - RNA, 19 nt, Homo sapiens
  misc_RNA (1)...(19): siRNA sense strand
ggacagucaaggugcacaa

SEQ ID NO: 2631655 - RNA, 19 nt, Homo sapiens
  misc_RNA (1)...(19): siRNA sense strand
ggacagucaaggugcacaa

SEQ ID NO: 2631656 - RNA, 19 nt, Homo sapiens
  misc_RNA (1)...(19): siRNA sense strand
ucauaguaguggccaaaua

SEQ ID NO: 2631657 - RNA, 19 nt, Homo sapiens
  misc_RNA (1)...(19): siRNA sense strand
ggugugagauccagaccaa

SEQ ID NO: 2631658 - RNA, 19 nt, Homo sapiens
  misc_RNA (1)...(19): siRNA sense strand
aauauaaggcaguguacua

SEQ ID NO: 2631659 - RNA, 19 nt, Homo sapiens
  misc_RNA (1)...(19): siRNA sense strand
cuugugaacugaugugaaa

SEQ ID NO: 2631660 - RNA, 19 nt, Homo sapiens
  misc_RNA (1)...(19): siRNA sense strand
caagaagauugcaguaaaa

SEQ ID NO: 2631661 - RNA, 19 nt, Homo sapiens
  misc_RNA (1)...(19): siRNA sense strand
gcuaacgagugcagauuau

SEQ ID NO: 2631662 - RNA, 19 nt, Homo sapiens
  misc_RNA (1)...(19): siRNA sense strand
ggacaguuuaugugcacaa

SEQ ID NO: 2631663 - RNA, 19 nt, Homo sapiens
  misc_RNA (1)...(19): siRNA sense strand
gagcagauugccugguuaa

SEQ ID NO: 2631664 - RNA, 19 nt, Homo sapiens
  misc_RNA (1)...(19): siRNA sense strand
ccgaggacuaagauggaaa

SEQ ID NO: 2631665 - RNA, 19 nt, Homo sapiens
  misc_RNA (1)...(19): siRNA sense strand
ucaacuaaaccuuguguua

SEQ ID NO: 2631666 - RNA, 19 nt, Homo sapiens
  misc_RNA (1)...(19): siRNA sense strand
aaagguaucucaagacuaa

SEQ ID NO: 2631667 - RNA, 19 nt, Homo sapiens
  misc_RNA (1)...(19): siRNA sense strand
gaauuagacugaugacaca

SEQ ID NO: 2631668 - RNA, 19 nt, Homo sapiens
  misc_RNA (1)...(19): siRNA sense strand
uagaaagggaugcuggaaa

SEQ ID NO: 2631669 - RNA, 19 nt, Homo sapiens
  misc_RNA (1)...(19): siRNA sense strand
gugcauaaucuuagguguu

SEQ ID NO: 2631670 - RNA, 19 nt, Homo sapiens
  misc_RNA (1)...(19): siRNA sense strand
agagcuaguaugaggaaau

SEQ ID NO: 2631671 - RNA, 19 nt, Homo sapiens
  misc_RNA (1)...(19): siRNA sense strand
gcucaggguuuguucuuua

SEQ ID NO: 2631672 - RNA, 19 nt, Homo sapiens
  misc_RNA (1)...(19): siRNA sense strand
gaguauugaugaagaugau

SEQ ID NO: 2631673 - RNA, 19 nt, Homo sapiens
  misc_RNA (1)...(19): siRNA sense strand
gcugacuaccugagauuua

SEQ ID NO: 2631674 - RNA, 19 nt, Homo sapiens
  misc_RNA (1)...(19): siRNA sense strand
ggacuaugaaugugcaaaa

SEQ ID NO: 2631675 - RNA, 19 nt, Homo sapiens
  misc_RNA (1)...(19): siRNA sense strand
guaaaguuagcgugcauaa

SEQ ID NO: 2631676 - RNA, 19 nt, Homo sapiens
  misc_RNA (1)...(19): siRNA sense strand
gcucaaccuaucugaauaa

SEQ ID NO: 2631677 - RNA, 19 nt, Homo sapiens
  misc_RNA (1)...(19): siRNA sense strand
ccagaacccaggaaggaua

SEQ ID NO: 2631678 - RNA, 19 nt, Homo sapiens
  misc_RNA (1)...(19): siRNA sense strand
cagauaacgcauagcaaaa

SEQ ID NO: 2631679 - RNA, 19 nt, Homo sapiens
  misc_RNA (1)...(19): siRNA sense strand
ccgcuuuggcagagaauga

SEQ ID NO: 2631680 - RNA, 19 nt, Homo sapiens
  misc_RNA (1)...(19): siRNA sense strand
gccuaguggaaaugaauaa

SEQ ID NO: 2631681 - RNA, 19 nt, Homo sapiens
  misc_RNA (1)...(19): siRNA sense strand
aguauaagacagaugguuu

SEQ ID NO: 2631682 - RNA, 19 nt, Homo sapiens
  misc_RNA (1)...(19): siRNA sense strand
agacuuuacuggugagguu

SEQ ID NO: 2631683 - RNA, 19 nt, Homo sapiens
  misc_RNA (1)...(19): siRNA sense strand
gggugggacaggaggaaga

SEQ ID NO: 2631684 - RNA, 19 nt, Homo sapiens
  misc_RNA (1)...(19): siRNA sense strand
guucauacauucaaagcau

SEQ ID NO: 2631685 - RNA, 19 nt, Homo sapiens
  misc_RNA (1)...(19): siRNA sense strand
ggaaguacccgcuccauaa

SEQ ID NO: 2631686 - RNA, 19 nt, Homo sapiens
  misc_RNA (1)...(19): siRNA sense strand
auaagaggcuccaaauuaa

SEQ ID NO: 2631687 - RNA, 19 nt, Homo sapiens
  misc_RNA (1)...(19): siRNA sense strand
gcccaaaguauaagacaga

SEQ ID NO: 2631688 - RNA, 19 nt, Homo sapiens
  misc_RNA (1)...(19): siRNA sense strand
ccaagauaguuaaguggga

SEQ ID NO: 2631689 - RNA, 19 nt, Homo sapiens
  misc_RNA (1)...(19): siRNA sense strand
guuaagugggaucgagaca

SEQ ID NO: 2631690 - RNA, 19 nt, Homo sapiens
  misc_RNA (1)...(19): siRNA sense strand
agcagagaauggaaaguca

SEQ ID NO: 2631691 - RNA, 19 nt, Homo sapiens
  misc_RNA (1)...(19): siRNA sense strand
ggauaagcauuucuggcaa

SEQ ID NO: 2631692 - RNA, 19 nt, Homo sapiens
  misc_RNA (1)...(19): siRNA sense strand
uaugagaagcaguggccaa

SEQ ID NO: 2631693 - RNA, 19 nt, Homo sapiens
  misc_RNA (1)...(19): siRNA sense strand
cauggguaacaguggaauu

SEQ ID NO: 2631694 - RNA, 19 nt, Homo sapiens
  misc_RNA (1)...(19): siRNA sense strand
ccgacuggucuuaugagaa

SEQ ID NO: 2631695 - RNA, 19 nt, Homo sapiens
  misc_RNA (1)...(19): siRNA sense strand
ggauagaaacagaggagua

SEQ ID NO: 2631696 - RNA, 19 nt, Homo sapiens
  misc_RNA (1)...(19): siRNA sense strand
ccuaauaacuacugggaca

SEQ ID NO: 2631697 - RNA, 19 nt, Homo sapiens
  misc_RNA (1)...(19): siRNA sense strand
caaaugaagcagaaggaaa

SEQ ID NO: 2631698 - RNA, 19 nt, Homo sapiens
  misc_RNA (1)...(19): siRNA sense strand
aguaaagucuggaggacaa

SEQ ID NO: 2631699 - RNA, 19 nt, Homo sapiens
  misc_RNA (1)...(19): siRNA sense strand
cggagaaggagaaggaaau

SEQ ID NO: 2631700 - RNA, 19 nt, Homo sapiens
  misc_RNA (1)...(19): siRNA sense strand
aggcaaugcuggugugcaa

SEQ ID NO: 2631701 - RNA, 19 nt, Homo sapiens
  misc_RNA (1)...(19): siRNA sense strand
gggcaaagucagacaccaa

SEQ ID NO: 2631702 - RNA, 19 nt, Homo sapiens
  misc_RNA (1)...(19): siRNA sense strand
gcaucaaggaaguggguau

SEQ ID NO: 2631703 - RNA, 19 nt, Homo sapiens
  misc_RNA (1)...(19): siRNA sense strand
gagucagaguggauggaaa

SEQ ID NO: 2631704 - RNA, 19 nt, Homo sapiens
  misc_RNA (1)...(19): siRNA sense strand
guugaaagccgauggcaaa

SEQ ID NO: 2631705 - RNA, 19 nt, Homo sapiens
  misc_RNA (1)...(19): siRNA sense strand
cugcaaaugucaacugaaa

SEQ ID NO: 2631706 - RNA, 19 nt, Homo sapiens
  misc_RNA (1)...(19): siRNA sense strand
cguguuggguacagagaaa

SEQ ID NO: 2631707 - RNA, 19 nt, Homo sapiens
  misc_RNA (1)...(19): siRNA sense strand
ggaacaaguacgagaagau

SEQ ID NO: 2631708 - RNA, 19 nt, Homo sapiens
  misc_RNA (1)...(19): siRNA sense strand
aagaagaagaugaagacaa

SEQ ID NO: 2631709 - RNA, 19 nt, Homo sapiens
  misc_RNA (1)...(19): siRNA sense strand
ggccagaagaggaggaaga

SEQ ID NO: 2631710 - RNA, 19 nt, Homo sapiens
  misc_RNA (1)...(19): siRNA sense strand
agacagaggauguugcaaa

SEQ ID NO: 2631711 - RNA, 19 nt, Homo sapiens
  misc_RNA (1)...(19): siRNA sense strand
acauagaggucaugaggau

SEQ ID NO: 2631712 - RNA, 19 nt, Homo sapiens
  misc_RNA (1)...(19): siRNA sense strand
ucuccaagcugcaggcaaa

SEQ ID NO: 2631713 - RNA, 19 nt, Homo sapiens
  misc_RNA (1)...(19): siRNA sense strand
cugcagaagauuuggagaa

SEQ ID NO: 2631714 - RNA, 19 nt, Homo sapiens
  misc_RNA (1)...(19): siRNA sense strand
cgauacagccauagggaca

SEQ ID NO: 2631715 - RNA, 19 nt, Homo sapiens
  misc_RNA (1)...(19): siRNA sense strand
uggcauuggugaugaaauu

SEQ ID NO: 2631716 - RNA, 19 nt, Homo sapiens
  misc_RNA (1)...(19): siRNA sense strand
ggaugaagaagaagaugaa

SEQ ID NO: 2631717 - RNA, 19 nt, Homo sapiens
  misc_RNA (1)...(19): siRNA sense strand
gugcagaagcugaugagaa

SEQ ID NO: 2631718 - RNA, 19 nt, Homo sapiens
  misc_RNA (1)...(19): siRNA sense strand
ggaacaugccacaggagaa

SEQ ID NO: 2631719 - RNA, 19 nt, Homo sapiens
  misc_RNA (1)...(19): siRNA sense strand
cggauaagcuggaguggca

SEQ ID NO: 2631720 - RNA, 19 nt, Homo sapiens
  misc_RNA (1)...(19): siRNA sense strand
caacaggauuugaagaaca

SEQ ID NO: 2631721 - RNA, 19 nt, Homo sapiens
  misc_RNA (1)...(19): siRNA sense strand
ccaagaagauugagcgugu

SEQ ID NO: 2631722 - RNA, 19 nt, Homo sapiens
  misc_RNA (1)...(19): siRNA sense strand
cgaugaagaggaagaagaa

SEQ ID NO: 2631723 - RNA, 19 nt, Homo sapiens
  misc_RNA (1)...(19): siRNA sense strand
ccaccagauuauuuagaua

SEQ ID NO: 2631724 - RNA, 19 nt, Homo sapiens
  misc_RNA (1)...(19): siRNA sense strand
acggagaaggagaaggaaa

SEQ ID NO: 2631725 - RNA, 19 nt, Homo sapiens
  misc_RNA (1)...(19): siRNA sense strand
uggaagggaaugugguaaa

SEQ ID NO: 2631726 - RNA, 19 nt, Homo sapiens
  misc_RNA (1)...(19): siRNA sense strand
gagagaaggaagacaaaga

SEQ ID NO: 2631727 - RNA, 19 nt, Homo sapiens
  misc_RNA (1)...(19): siRNA sense strand
aggaagaagcgaugguauu

SEQ ID NO: 2631728 - RNA, 19 nt, Homo sapiens
  misc_RNA (1)...(19): siRNA sense strand
gcacacaauguuugggcaa

SEQ ID NO: 2631729 - RNA, 19 nt, Homo sapiens
  misc_RNA (1)...(19): siRNA sense strand
gagaagggagauacagaua

SEQ ID NO: 2631730 - RNA, 19 nt, Homo sapiens
  misc_RNA (1)...(19): siRNA sense strand
gguccaugaaagugugaaa

SEQ ID NO: 2631731 - RNA, 19 nt, Homo sapiens
  misc_RNA (1)...(19): siRNA sense strand
uggaagauguaccaagaaa

SEQ ID NO: 2631732 - RNA, 19 nt, Homo sapiens
  misc_RNA (1)...(19): siRNA sense strand
aggaagaggaggaggagga

SEQ ID NO: 2631733 - RNA, 19 nt, Homo sapiens
  misc_RNA (1)...(19): siRNA sense strand
ggauaagcuugcagaaaau

SEQ ID NO: 2631734 - RNA, 19 nt, Homo sapiens
  misc_RNA (1)...(19): siRNA sense strand
gcuaccagguggagccuaa

SEQ ID NO: 2631735 - RNA, 19 nt, Homo sapiens
  misc_RNA (1)...(19): siRNA sense strand
augaagaggaagaagaaau

SEQ ID NO: 2631736 - RNA, 19 nt, Homo sapiens
  misc_RNA (1)...(19): siRNA sense strand
guacagaagaagaggaaag

SEQ ID NO: 2631737 - RNA, 19 nt, Homo sapiens
  misc_RNA (1)...(19): siRNA sense strand
gcauaagacauuuggcaca

SEQ ID NO: 2631738 - RNA, 19 nt, Homo sapiens
  misc_RNA (1)...(19): siRNA sense strand
gaugauaagcgcuagcaaa

SEQ ID NO: 2631739 - RNA, 19 nt, Homo sapiens
  misc_RNA (1)...(19): siRNA sense strand
uguuagaaauugcggguga

SEQ ID NO: 2631740 - RNA, 19 nt, Homo sapiens
  misc_RNA (1)...(19): siRNA sense strand
ccgcaugaaucucgggaca

SEQ ID NO: 2631741 - RNA, 19 nt, Homo sapiens
  misc_RNA (1)...(19): siRNA sense strand
agaaacuaguacaggauuu

SEQ ID NO: 2631742 - RNA, 19 nt, Homo sapiens
  misc_RNA (1)...(19): siRNA sense strand
uagauuaccuaaaggagaa

SEQ ID NO: 2631743 - RNA, 19 nt, Homo sapiens
  misc_RNA (1)...(19): siRNA sense strand
ugaccaagauccuggguga

SEQ ID NO: 2631744 - RNA, 19 nt, Homo sapiens
  misc_RNA (1)...(19): siRNA sense strand
cuuuagaagaagagacaga

SEQ ID NO: 2631745 - RNA, 19 nt, Homo sapiens
  misc_RNA (1)...(19): siRNA sense strand
ugacccagguggaggagaa

SEQ ID NO: 2631746 - RNA, 19 nt, Homo sapiens
  misc_RNA (1)...(19): siRNA sense strand
uggaagaggaggaggagga

SEQ ID NO: 2631747 - RNA, 19 nt, Homo sapiens
  misc_RNA (1)...(19): siRNA sense strand
ccuuuaaugacgaggaaga

SEQ ID NO: 2631748 - RNA, 19 nt, Homo sapiens
  misc_RNA (1)...(19): siRNA sense strand
caaaagagaagaugagauu

SEQ ID NO: 2631749 - RNA, 19 nt, Homo sapiens
  misc_RNA (1)...(19): siRNA sense strand
aagaagaggaagaggagga

SEQ ID NO: 2631750 - RNA, 19 nt, Homo sapiens
  misc_RNA (1)...(19): siRNA sense strand
gaauagcaguguuggccua

SEQ ID NO: 2631751 - RNA, 19 nt, Homo sapiens
  misc_RNA (1)...(19): siRNA sense strand
gaagaugaagacaaggaaa

SEQ ID NO: 2631752 - RNA, 19 nt, Homo sapiens
  misc_RNA (1)...(19): siRNA sense strand
cugaagaaccuuuagaaga

SEQ ID NO: 2631753 - RNA, 19 nt, Homo sapiens
  misc_RNA (1)...(19): siRNA sense strand
ucccauaaggagaaagaaa

SEQ ID NO: 2631754 - RNA, 19 nt, Homo sapiens
  misc_RNA (1)...(19): siRNA sense strand
aagagaaagagauggagaa

SEQ ID NO: 2631755 - RNA, 19 nt, Homo sapiens
  misc_RNA (1)...(19): siRNA sense strand
cauuugagaggcagaauaa

SEQ ID NO: 2631756 - RNA, 19 nt, Homo sapiens
  misc_RNA (1)...(19): siRNA sense strand
ugcagaagcugaugagaau

SEQ ID NO: 2631757 - RNA, 19 nt, Homo sapiens
  misc_RNA (1)...(19): siRNA sense strand
aaaugaagcagaaggaaaa

SEQ ID NO: 2631758 - RNA, 19 nt, Homo sapiens
  misc_RNA (1)...(19): siRNA sense strand
auacauuacaagagcacaa

SEQ ID NO: 2631759 - RNA, 19 nt, Homo sapiens
  misc_RNA (1)...(19): siRNA sense strand
ggucauacuccaucaggaa

SEQ ID NO: 2631760 - RNA, 19 nt, Homo sapiens
  misc_RNA (1)...(19): siRNA sense strand
ggcauggccuggaaagaaa

SEQ ID NO: 2631761 - RNA, 19 nt, Homo sapiens
  misc_RNA (1)...(19): siRNA sense strand
ugggagacauaaugaacaa

SEQ ID NO: 2631762 - RNA, 19 nt, Homo sapiens
  misc_RNA (1)...(19): siRNA sense strand
aguugaaagccgauggcaa

SEQ ID NO: 2631763 - RNA, 19 nt, Homo sapiens
  misc_RNA (1)...(19): siRNA sense strand
agaaaugaaagcagcaaau

SEQ ID NO: 2631764 - RNA, 19 nt, Homo sapiens
  misc_RNA (1)...(19): siRNA sense strand
agacaaagaagaggagcaa

SEQ ID NO: 2631765 - RNA, 19 nt, Homo sapiens
  misc_RNA (1)...(19): siRNA sense strand
ggcaaaagacagaauaaaa

SEQ ID NO: 2631766 - RNA, 19 nt, Homo sapiens
  misc_RNA (1)...(19): siRNA sense strand
uguuugagcaucugaguua

SEQ ID NO: 2631767 - RNA, 19 nt, Homo sapiens
  misc_RNA (1)...(19): siRNA sense strand
cagaagaccugguugggau

SEQ ID NO: 2631768 - RNA, 19 nt, Homo sapiens
  misc_RNA (1)...(19): siRNA sense strand
agucagaguggauggaaau

SEQ ID NO: 2631769 - RNA, 19 nt, Homo sapiens
  misc_RNA (1)...(19): siRNA sense strand
ucucagaaauuauuggcaa

SEQ ID NO: 2631770 - RNA, 19 nt, Homo sapiens
  misc_RNA (1)...(19): siRNA sense strand
aggaaacagaugcaagaaa

SEQ ID NO: 2631771 - RNA, 19 nt, Homo sapiens
  misc_RNA (1)...(19): siRNA sense strand
aggagagcgaggaggacaa

SEQ ID NO: 2631772 - RNA, 19 nt, Homo sapiens
  misc_RNA (1)...(19): siRNA sense strand
aggcugaccugaagcgaga

SEQ ID NO: 2631773 - RNA, 19 nt, Homo sapiens
  misc_RNA (1)...(19): siRNA sense strand
cuucugaacgagagcgaga

SEQ ID NO: 2631774 - RNA, 19 nt, Homo sapiens
  misc_RNA (1)...(19): siRNA sense strand
ugaccgacgagcaggagaa

SEQ ID NO: 2631775 - RNA, 19 nt, Homo sapiens
  misc_RNA (1)...(19): siRNA sense strand
agaaggagagcgaggagga

SEQ ID NO: 2631776 - RNA, 19 nt, Homo sapiens
  misc_RNA (1)...(19): siRNA sense strand
gccaggugcucaaaggcua

SEQ ID NO: 2631777 - RNA, 19 nt, Homo sapiens
  misc_RNA (1)...(19): siRNA sense strand
cgggcaaggcugaccugaa

SEQ ID NO: 2631778 - RNA, 19 nt, Homo sapiens
  misc_RNA (1)...(19): siRNA sense strand
gcaagguguacguggccaa

SEQ ID NO: 2631779 - RNA, 19 nt, Homo sapiens
  misc_RNA (1)...(19): siRNA sense strand
ugaucuaccugcuaggcaa

SEQ ID NO: 2631780 - RNA, 19 nt, Homo sapiens
  misc_RNA (1)...(19): siRNA sense strand
uaaaggaccugaaggaagu

SEQ ID NO: 2631781 - RNA, 19 nt, Homo sapiens
  misc_RNA (1)...(19): siRNA sense strand
gcuaaaggaccugaaggaa

SEQ ID NO: 2631782 - RNA, 19 nt, Homo sapiens
  misc_RNA (1)...(19): siRNA sense strand
cuaaaggaccugaaggaag

SEQ ID NO: 2631783 - RNA, 19 nt, Homo sapiens
  misc_RNA (1)...(19): siRNA sense strand
gggccaucauuguccggaa

SEQ ID NO: 2631784 - RNA, 19 nt, Homo sapiens
  misc_RNA (1)...(19): siRNA sense strand
agcuaaaggaccugaagga

SEQ ID NO: 2631785 - RNA, 19 nt, Homo sapiens
  misc_RNA (1)...(19): siRNA sense strand
guauacagcucuggcccaa

SEQ ID NO: 2631786 - RNA, 19 nt, Homo sapiens
  misc_RNA (1)...(19): siRNA sense strand
gagagcagcuaaaggaccu

SEQ ID NO: 2631787 - RNA, 19 nt, Homo sapiens
  misc_RNA (1)...(19): siRNA sense strand
uggaauugaaagugcacaa

SEQ ID NO: 2631788 - RNA, 19 nt, Homo sapiens
  misc_RNA (1)...(19): siRNA sense strand
acuccaagaagcugcacaa

SEQ ID NO: 2631789 - RNA, 19 nt, Homo sapiens
  misc_RNA (1)...(19): siRNA sense strand
ggucaaggaaggagccaag

SEQ ID NO: 2631790 - RNA, 19 nt, Homo sapiens
  misc_RNA (1)...(19): siRNA sense strand
acaccaagcagcaagggau

SEQ ID NO: 2631791 - RNA, 19 nt, Homo sapiens
  misc_RNA (1)...(19): siRNA sense strand
ccugcuaugccaugggaga

SEQ ID NO: 2631792 - RNA, 19 nt, Homo sapiens
  misc_RNA (1)...(19): siRNA sense strand
guguauaccugcuaugcca

SEQ ID NO: 2631793 - RNA, 19 nt, Homo sapiens
  misc_RNA (1)...(19): siRNA sense strand
ucccaaggucagagagaaa

SEQ ID NO: 2631794 - RNA, 19 nt, Homo sapiens
  misc_RNA (1)...(19): siRNA sense strand
cacagauggaggaggaaua

SEQ ID NO: 2631795 - RNA, 19 nt, Homo sapiens
  misc_RNA (1)...(19): siRNA sense strand
gcaugaauguucuaagaca

SEQ ID NO: 2631796 - RNA, 19 nt, Homo sapiens
  misc_RNA (1)...(19): siRNA sense strand
uugcagagguccaggcaca

SEQ ID NO: 2631797 - RNA, 19 nt, Homo sapiens
  misc_RNA (1)...(19): siRNA sense strand
aggcacagauggaggagga

SEQ ID NO: 2631798 - RNA, 19 nt, Homo sapiens
  misc_RNA (1)...(19): siRNA sense strand
aggagaaugaugaugacaa

SEQ ID NO: 2631799 - RNA, 19 nt, Homo sapiens
  misc_RNA (1)...(19): siRNA sense strand
agcacaaggcucugauaaa

SEQ ID NO: 2631800 - RNA, 19 nt, Homo sapiens
  misc_RNA (1)...(19): siRNA sense strand
ccuggaggaaagagggcaa

SEQ ID NO: 2631801 - RNA, 19 nt, Homo sapiens
  misc_RNA (1)...(19): siRNA sense strand
gagaagaagaaguugagca

SEQ ID NO: 2631802 - RNA, 19 nt, Homo sapiens
  misc_RNA (1)...(19): siRNA sense strand
ccacagacugacaggcuga

SEQ ID NO: 2631803 - RNA, 19 nt, Homo sapiens
  misc_RNA (1)...(19): siRNA sense strand
ccucaaaagccaaaacaga

SEQ ID NO: 2631804 - RNA, 19 nt, Homo sapiens
  misc_RNA (1)...(19): siRNA sense strand
ccaaggucagagagaaaga

SEQ ID NO: 2631805 - RNA, 19 nt, Homo sapiens
  misc_RNA (1)...(19): siRNA sense strand
ugauaaagcaggacaaccu

SEQ ID NO: 2631806 - RNA, 19 nt, Homo sapiens
  misc_RNA (1)...(19): siRNA sense strand
gcacagauggaggaggaau

SEQ ID NO: 2631807 - RNA, 19 nt, Homo sapiens
  misc_RNA (1)...(19): siRNA sense strand
ggccaauccacgaaagcau

SEQ ID NO: 2631808 - RNA, 19 nt, Homo sapiens
  misc_RNA (1)...(19): siRNA sense strand
ccagguacccacagggcuu

SEQ ID NO: 2631809 - RNA, 19 nt, Homo sapiens
  misc_RNA (1)...(19): siRNA sense strand
cugcaugaauguucuaaga

SEQ ID NO: 2631810 - RNA, 19 nt, Homo sapiens
  misc_RNA (1)...(19): siRNA sense strand
gcucccaaggucagagaga

SEQ ID NO: 2631811 - RNA, 19 nt, Homo sapiens
  misc_RNA (1)...(19): siRNA sense strand
cagacuugauugagcagca

SEQ ID NO: 2631812 - RNA, 19 nt, Homo sapiens
  misc_RNA (1)...(19): siRNA sense strand
gaguccagccgcagcaaau

SEQ ID NO: 2631813 - RNA, 19 nt, Homo sapiens
  misc_RNA (1)...(19): siRNA sense strand
aggacaaccuagaugccuu

SEQ ID NO: 2631814 - RNA, 19 nt, Homo sapiens
  misc_RNA (1)...(19): siRNA sense strand
ccacgaaagcaucaagacu

SEQ ID NO: 2631815 - RNA, 19 nt, Homo sapiens
  misc_RNA (1)...(19): siRNA sense strand
acgaaagcaucaagacucu

SEQ ID NO: 2631816 - RNA, 19 nt, Homo sapiens
  misc_RNA (1)...(19): siRNA sense strand
ggggagaagaagaaguuga

SEQ ID NO: 2631817 - RNA, 19 nt, Homo sapiens
  misc_RNA (1)...(19): siRNA sense strand
ugagcaagucccugcagaa

SEQ ID NO: 2631818 - RNA, 19 nt, Homo sapiens
  misc_RNA (1)...(19): siRNA sense strand
ggucauuguuaaggccauu

SEQ ID NO: 2631819 - RNA, 19 nt, Homo sapiens
  misc_RNA (1)...(19): siRNA sense strand
auguaaaccgccacaaaga

SEQ ID NO: 2631820 - RNA, 19 nt, Homo sapiens
  misc_RNA (1)...(19): siRNA sense strand
ccacuugaacucugcauga

SEQ ID NO: 2631821 - RNA, 19 nt, Homo sapiens
  misc_RNA (1)...(19): siRNA sense strand
gcggcaaacuacagagcca

SEQ ID NO: 2631822 - RNA, 19 nt, Homo sapiens
  misc_RNA (1)...(19): siRNA sense strand
cugaagaagaagaaaacaa

SEQ ID NO: 2631823 - RNA, 19 nt, Homo sapiens
  misc_RNA (1)...(19): siRNA sense strand
aggcugaagaagaagaaaa

SEQ ID NO: 2631824 - RNA, 19 nt, Homo sapiens
  misc_RNA (1)...(19): siRNA sense strand
agacuauggcaaugagcuu

SEQ ID NO: 2631825 - RNA, 19 nt, Homo sapiens
  misc_RNA (1)...(19): siRNA sense strand
ccuaugaggagcuggcuga

SEQ ID NO: 2631826 - RNA, 19 nt, Homo sapiens
  misc_RNA (1)...(19): siRNA sense strand
ugugaugggcggaggcuga

SEQ ID NO: 2631827 - RNA, 19 nt, Homo sapiens
  misc_RNA (1)...(19): siRNA sense strand
gugcguauccugaaggcuu

SEQ ID NO: 2631828 - RNA, 19 nt, Homo sapiens
  misc_RNA (1)...(19): siRNA sense strand
ccaccuuugaugagaacuu

SEQ ID NO: 2631829 - RNA, 19 nt, Homo sapiens
  misc_RNA (1)...(19): siRNA sense strand
cggaaaacauggaucaagu

SEQ ID NO: 2631830 - RNA, 19 nt, Homo sapiens
  misc_RNA (1)...(19): siRNA sense strand
ccaguguagacuauggcaa

SEQ ID NO: 2631831 - RNA, 19 nt, Homo sapiens
  misc_RNA (1)...(19): siRNA sense strand
ccuugguggagguaaagaa

SEQ ID NO: 2631832 - RNA, 19 nt, Homo sapiens
  misc_RNA (1)...(19): siRNA sense strand
gcggcaaacuacagagcca

SEQ ID NO: 2631833 - RNA, 19 nt, Homo sapiens
  misc_RNA (1)...(19): siRNA sense strand
cugaagaagaagaaaacaa

SEQ ID NO: 2631834 - RNA, 19 nt, Homo sapiens
  misc_RNA (1)...(19): siRNA sense strand
aggcugaagaagaagaaaa

SEQ ID NO: 2631835 - RNA, 19 nt, Homo sapiens
  misc_RNA (1)...(19): siRNA sense strand
agacuauggcaaugagcuu

SEQ ID NO: 2631836 - RNA, 19 nt, Homo sapiens
  misc_RNA (1)...(19): siRNA sense strand
ccuaugaggagcuggcuga

SEQ ID NO: 2631837 - RNA, 19 nt, Homo sapiens
  misc_RNA (1)...(19): siRNA sense strand
ugugaugggcggaggcuga

SEQ ID NO: 2631838 - RNA, 19 nt, Homo sapiens
  misc_RNA (1)...(19): siRNA sense strand
gugcguauccugaaggcuu

SEQ ID NO: 2631839 - RNA, 19 nt, Homo sapiens
  misc_RNA (1)...(19): siRNA sense strand
ccaccuuugaugagaacuu

SEQ ID NO: 2631840 - RNA, 19 nt, Homo sapiens
  misc_RNA (1)...(19): siRNA sense strand
cggaaaacauggaucaagu

SEQ ID NO: 2631841 - RNA, 19 nt, Homo sapiens
  misc_RNA (1)...(19): siRNA sense strand
uggaugcccuggaggaaca

SEQ ID NO: 2631842 - RNA, 19 nt, Homo sapiens
  misc_RNA (1)...(19): siRNA sense strand
ccaguguagacuauggcaa

SEQ ID NO: 2631843 - RNA, 19 nt, Homo sapiens
  misc_RNA (1)...(19): siRNA sense strand
ccuugguggagguaaagaa

SEQ ID NO: 2631844 - RNA, 19 nt, Homo sapiens
  misc_RNA (1)...(19): siRNA sense strand
cggagaagcaggaggagaa

SEQ ID NO: 2631845 - RNA, 19 nt, Homo sapiens
  misc_RNA (1)...(19): siRNA sense strand
gcaaauugguaaaucggua

SEQ ID NO: 2631846 - RNA, 19 nt, Homo sapiens
  misc_RNA (1)...(19): siRNA sense strand
gagaauaagcugaaggcca

SEQ ID NO: 2631847 - RNA, 19 nt, Homo sapiens
  misc_RNA (1)...(19): siRNA sense strand
agaauaagcugaaggccau

SEQ ID NO: 2631848 - RNA, 19 nt, Homo sapiens
  misc_RNA (1)...(19): siRNA sense strand
cugaagaaucggcuggaua

SEQ ID NO: 2631849 - RNA, 19 nt, Homo sapiens
  misc_RNA (1)...(19): siRNA sense strand
gaaaggacaggcugaguaa

SEQ ID NO: 2631850 - RNA, 19 nt, Homo sapiens
  misc_RNA (1)...(19): siRNA sense strand
aggagaagcaaauugguaa

SEQ ID NO: 2631851 - RNA, 19 nt, Homo sapiens
  misc_RNA (1)...(19): siRNA sense strand
cagaaaacccugggagaaa

SEQ ID NO: 2631852 - RNA, 19 nt, Homo sapiens
  misc_RNA (1)...(19): siRNA sense strand
uugaaaacgaagagguaaa

SEQ ID NO: 2631853 - RNA, 19 nt, Homo sapiens
  misc_RNA (1)...(19): siRNA sense strand
ggucaaaccaccagccaca

SEQ ID NO: 2631854 - RNA, 19 nt, Homo sapiens
  misc_RNA (1)...(19): siRNA sense strand
ggaaaggacaggcugagua

SEQ ID NO: 2631855 - RNA, 19 nt, Homo sapiens
  misc_RNA (1)...(19): siRNA sense strand
agucugagauugaggucau

SEQ ID NO: 2631856 - RNA, 19 nt, Homo sapiens
  misc_RNA (1)...(19): siRNA sense strand
ggaggagcucagugaagaa

SEQ ID NO: 2631857 - RNA, 19 nt, Homo sapiens
  misc_RNA (1)...(19): siRNA sense strand
agucgaagcaugagggucu

SEQ ID NO: 2631858 - RNA, 19 nt, Homo sapiens
  misc_RNA (1)...(19): siRNA sense strand
gugaaugagcugaucaaaa

SEQ ID NO: 2631859 - RNA, 19 nt, Homo sapiens
  misc_RNA (1)...(19): siRNA sense strand
aagcaggaggagaagcaaa

SEQ ID NO: 2631860 - RNA, 19 nt, Homo sapiens
  misc_RNA (1)...(19): siRNA sense strand
acgaagagguaaagaagac

SEQ ID NO: 2631861 - RNA, 19 nt, Homo sapiens
  misc_RNA (1)...(19): siRNA sense strand
ggacaggcugaguaaagaa

SEQ ID NO: 2631862 - RNA, 19 nt, Homo sapiens
  misc_RNA (1)...(19): siRNA sense strand
gauugaaaacgaagaggua

SEQ ID NO: 2631863 - RNA, 19 nt, Homo sapiens
  misc_RNA (1)...(19): siRNA sense strand
aacuaaaggaggcggagaa

SEQ ID NO: 2631864 - RNA, 19 nt, Homo sapiens
  misc_RNA (1)...(19): siRNA sense strand
guaaaucgguaaagcagga

SEQ ID NO: 2631865 - RNA, 19 nt, Homo sapiens
  misc_RNA (1)...(19): siRNA sense strand
ucaccaaguuacaagccaa

SEQ ID NO: 2631866 - RNA, 19 nt, Homo sapiens
  misc_RNA (1)...(19): siRNA sense strand
acuacagcaugaaggaauu

SEQ ID NO: 2631867 - RNA, 19 nt, Homo sapiens
  misc_RNA (1)...(19): siRNA sense strand
auggaggauuacugugaua

SEQ ID NO: 2631868 - RNA, 19 nt, Homo sapiens
  misc_RNA (1)...(19): siRNA sense strand
ccaaccagcaagagacaga

SEQ ID NO: 2631869 - RNA, 19 nt, Homo sapiens
  misc_RNA (1)...(19): siRNA sense strand
ugucagugccagagggcca

SEQ ID NO: 2631870 - RNA, 19 nt, Homo sapiens
  misc_RNA (1)...(19): siRNA sense strand
auugagaagaugaaggaga

SEQ ID NO: 2631871 - RNA, 19 nt, Homo sapiens
  misc_RNA (1)...(19): siRNA sense strand
gggagaaagucagcggaca

SEQ ID NO: 2631872 - RNA, 19 nt, Homo sapiens
  misc_RNA (1)...(19): siRNA sense strand
gacuacagcaugaaggaau

SEQ ID NO: 2631873 - RNA, 19 nt, Homo sapiens
  misc_RNA (1)...(19): siRNA sense strand
gcacaauggcaucgacgga

SEQ ID NO: 2631874 - RNA, 19 nt, Homo sapiens
  misc_RNA (1)...(19): siRNA sense strand
gguacagagaugccaacaa

SEQ ID NO: 2631875 - RNA, 19 nt, Homo sapiens
  misc_RNA (1)...(19): siRNA sense strand
gcagaaaacccugggagaa

SEQ ID NO: 2631876 - RNA, 19 nt, Homo sapiens
  misc_RNA (1)...(19): siRNA sense strand
uggaagugaaugacaucaa

SEQ ID NO: 2631877 - RNA, 19 nt, Homo sapiens
  misc_RNA (1)...(19): siRNA sense strand
agaagauugagaagaugaa

SEQ ID NO: 2631878 - RNA, 19 nt, Homo sapiens
  misc_RNA (1)...(19): siRNA sense strand
ccacacgagcgaugacgaa

SEQ ID NO: 2631879 - RNA, 19 nt, Homo sapiens
  misc_RNA (1)...(19): siRNA sense strand
cagugaagaagauugagaa

SEQ ID NO: 2631880 - RNA, 19 nt, Homo sapiens
  misc_RNA (1)...(19): siRNA sense strand
aguuacaagccaagcauga

SEQ ID NO: 2631881 - RNA, 19 nt, Homo sapiens
  misc_RNA (1)...(19): siRNA sense strand
ggagaaagucagcggacag

SEQ ID NO: 2631882 - RNA, 19 nt, Homo sapiens
  misc_RNA (1)...(19): siRNA sense strand
uggaacagucgaagcauga

SEQ ID NO: 2631883 - RNA, 19 nt, Homo sapiens
  misc_RNA (1)...(19): siRNA sense strand
cugccaagcccacgugaau

SEQ ID NO: 2631884 - RNA, 19 nt, Homo sapiens
  misc_RNA (1)...(19): siRNA sense strand
cccaaagaagggccagaua

SEQ ID NO: 2631885 - RNA, 19 nt, Homo sapiens
  misc_RNA (1)...(19): siRNA sense strand
ccugaaugagcuacgggaa

SEQ ID NO: 2631886 - RNA, 19 nt, Homo sapiens
  misc_RNA (1)...(19): siRNA sense strand
aagaagauugagaagauga

SEQ ID NO: 2631887 - RNA, 19 nt, Homo sapiens
  misc_RNA (1)...(19): siRNA sense strand
ucgagaaugcaguagaaaa

SEQ ID NO: 2631888 - RNA, 19 nt, Homo sapiens
  misc_RNA (1)...(19): siRNA sense strand
agguggaagugaaugacau

SEQ ID NO: 2631889 - RNA, 19 nt, Homo sapiens
  misc_RNA (1)...(19): siRNA sense strand
agcaagagacagagcaguu

SEQ ID NO: 2631890 - RNA, 19 nt, Homo sapiens
  misc_RNA (1)...(19): siRNA sense strand
gcggagaagcaggaggaga

SEQ ID NO: 2631891 - RNA, 19 nt, Homo sapiens
  misc_RNA (1)...(19): siRNA sense strand
gugaagaagauugagaaga

SEQ ID NO: 2631892 - RNA, 19 nt, Homo sapiens
  misc_RNA (1)...(19): siRNA sense strand
aagccaaguacacggagaa

SEQ ID NO: 2631893 - RNA, 19 nt, Homo sapiens
  misc_RNA (1)...(19): siRNA sense strand
acacggagaauaagcugaa

SEQ ID NO: 2631894 - RNA, 19 nt, Homo sapiens
  misc_RNA (1)...(19): siRNA sense strand
agaagcaggaggagaagca

SEQ ID NO: 2631895 - RNA, 19 nt, Homo sapiens
  misc_RNA (1)...(19): siRNA sense strand
cugcaaaccauccaggaca

SEQ ID NO: 2631896 - RNA, 19 nt, Homo sapiens
  misc_RNA (1)...(19): siRNA sense strand
acgugaaugagcugaucaa

SEQ ID NO: 2631897 - RNA, 19 nt, Homo sapiens
  misc_RNA (1)...(19): siRNA sense strand
ggaaacaggacuccagcca

SEQ ID NO: 2631898 - RNA, 19 nt, Homo sapiens
  misc_RNA (1)...(19): siRNA sense strand
acaucaacaagcaaaggaa

SEQ ID NO: 2631899 - RNA, 19 nt, Homo sapiens
  misc_RNA (1)...(19): siRNA sense strand
gcaaacuaaaggaggcgga

SEQ ID NO: 2631900 - RNA, 19 nt, Homo sapiens
  misc_RNA (1)...(19): siRNA sense strand
cccuaugaaguuugaguuu

SEQ ID NO: 2631901 - RNA, 19 nt, Homo sapiens
  misc_RNA (1)...(19): siRNA sense strand
cagcagaggaggaagcaug

SEQ ID NO: 2631902 - RNA, 19 nt, Homo sapiens
  misc_RNA (1)...(19): siRNA sense strand
gaagaaaaggugacagcca

SEQ ID NO: 2631903 - RNA, 19 nt, Homo sapiens
  misc_RNA (1)...(19): siRNA sense strand
aaggaagcguccagaaucu

SEQ ID NO: 2631904 - RNA, 19 nt, Homo sapiens
  misc_RNA (1)...(19): siRNA sense strand
agcaggaggagaagcaaau

SEQ ID NO: 2631905 - RNA, 19 nt, Homo sapiens
  misc_RNA (1)...(19): siRNA sense strand
gccaaguacacggagaaua

SEQ ID NO: 2631906 - RNA, 19 nt, Homo sapiens
  misc_RNA (1)...(19): siRNA sense strand
cagaauuauuugugggcua

SEQ ID NO: 2631907 - RNA, 19 nt, Homo sapiens
  misc_RNA (1)...(19): siRNA sense strand
ucuuggaagcagagggaaa

SEQ ID NO: 2631908 - RNA, 19 nt, Homo sapiens
  misc_RNA (1)...(19): siRNA sense strand
uguuugagcuuguggguga

SEQ ID NO: 2631909 - RNA, 19 nt, Homo sapiens
  misc_RNA (1)...(19): siRNA sense strand
cccaaagggacaaggacaa

SEQ ID NO: 2631910 - RNA, 19 nt, Homo sapiens
  misc_RNA (1)...(19): siRNA sense strand
gagcguacccaaagggaca

SEQ ID NO: 2631911 - RNA, 19 nt, Homo sapiens
  misc_RNA (1)...(19): siRNA sense strand
acguaaaucaugugaaacu

SEQ ID NO: 2631912 - RNA, 19 nt, Homo sapiens
  misc_RNA (1)...(19): siRNA sense strand
gugcauuauaccuaacaaa

SEQ ID NO: 2631913 - RNA, 19 nt, Homo sapiens
  misc_RNA (1)...(19): siRNA sense strand
aggacaagugcaaacguaa

SEQ ID NO: 2631914 - RNA, 19 nt, Homo sapiens
  misc_RNA (1)...(19): siRNA sense strand
ggauuuuguuugugaugaa

SEQ ID NO: 2631915 - RNA, 19 nt, Homo sapiens
  misc_RNA (1)...(19): siRNA sense strand
acguaaaucaugucguaau

SEQ ID NO: 2631916 - RNA, 19 nt, Homo sapiens
  misc_RNA (1)...(19): siRNA sense strand
gcuaaggacaagugcaaac

SEQ ID NO: 2631917 - RNA, 19 nt, Homo sapiens
  misc_RNA (1)...(19): siRNA sense strand
ugaacaaaugggagccaga

SEQ ID NO: 2631918 - RNA, 19 nt, Homo sapiens
  misc_RNA (1)...(19): siRNA sense strand
gugaugacuuccugggcca

SEQ ID NO: 2631919 - RNA, 19 nt, Homo sapiens
  misc_RNA (1)...(19): siRNA sense strand
uggacaagugcuaaggaca

SEQ ID NO: 2631920 - RNA, 19 nt, Homo sapiens
  misc_RNA (1)...(19): siRNA sense strand
ccauauacugcaccagcaa

SEQ ID NO: 2631921 - RNA, 19 nt, Homo sapiens
  misc_RNA (1)...(19): siRNA sense strand
aagaugaucaagugggcau

SEQ ID NO: 2631922 - RNA, 19 nt, Homo sapiens
  misc_RNA (1)...(19): siRNA sense strand
auggaucaguggugaccua

SEQ ID NO: 2631923 - RNA, 19 nt, Homo sapiens
  misc_RNA (1)...(19): siRNA sense strand
acccaaagggacaaggaca

SEQ ID NO: 2631924 - RNA, 19 nt, Homo sapiens
  misc_RNA (1)...(19): siRNA sense strand
cagaugaaguggauaaaga

SEQ ID NO: 2631925 - RNA, 19 nt, Homo sapiens
  misc_RNA (1)...(19): siRNA sense strand
agucaaauucaauggcaaa

SEQ ID NO: 2631926 - RNA, 19 nt, Homo sapiens
  misc_RNA (1)...(19): siRNA sense strand
cuagugagcuccugguaaa

SEQ ID NO: 2631927 - RNA, 19 nt, Homo sapiens
  misc_RNA (1)...(19): siRNA sense strand
gagucaaauucaauggcaa

SEQ ID NO: 2631928 - RNA, 19 nt, Homo sapiens
  misc_RNA (1)...(19): siRNA sense strand
ggccagaagaggacaacaa

SEQ ID NO: 2631929 - RNA, 19 nt, Homo sapiens
  misc_RNA (1)...(19): siRNA sense strand
ccaucaacuugcagaucaa

SEQ ID NO: 2631930 - RNA, 19 nt, Homo sapiens
  misc_RNA (1)...(19): siRNA sense strand
ccaucauucugaagggcaa

SEQ ID NO: 2631931 - RNA, 19 nt, Homo sapiens
  misc_RNA (1)...(19): siRNA sense strand
cagcugagguccaaggaga

SEQ ID NO: 2631932 - RNA, 19 nt, Homo sapiens
  misc_RNA (1)...(19): siRNA sense strand
cugaaaagaugcugaccaa

SEQ ID NO: 2631933 - RNA, 19 nt, Homo sapiens
  misc_RNA (1)...(19): siRNA sense strand
aagcgcaagucucgagaaa

SEQ ID NO: 2631934 - RNA, 19 nt, Homo sapiens
  misc_RNA (1)...(19): siRNA sense strand
ugacagagguggaggggca

SEQ ID NO: 2631935 - RNA, 19 nt, Homo sapiens
  misc_RNA (1)...(19): siRNA sense strand
gggaauacaucaucgcuga

SEQ ID NO: 2631936 - RNA, 19 nt, Homo sapiens
  misc_RNA (1)...(19): siRNA sense strand
aaccagaugaaguggauaa

SEQ ID NO: 2631937 - RNA, 19 nt, Homo sapiens
  misc_RNA (1)...(19): siRNA sense strand
gggcaguggacauggacuu

SEQ ID NO: 2631938 - RNA, 19 nt, Homo sapiens
  misc_RNA (1)...(19): siRNA sense strand
cagccaaggugaggagcua

SEQ ID NO: 2631939 - RNA, 19 nt, Homo sapiens
  misc_RNA (1)...(19): siRNA sense strand
gccaaggauccgagucaaa

SEQ ID NO: 2631940 - RNA, 19 nt, Homo sapiens
  misc_RNA (1)...(19): siRNA sense strand
ucgauaagaaccuggagaa

SEQ ID NO: 2631941 - RNA, 19 nt, Homo sapiens
  misc_RNA (1)...(19): siRNA sense strand
ucuauaagcugacaggcaa

SEQ ID NO: 2631942 - RNA, 19 nt, Homo sapiens
  misc_RNA (1)...(19): siRNA sense strand
agcuggagguacaaggaaa

SEQ ID NO: 2631943 - RNA, 19 nt, Homo sapiens
  misc_RNA (1)...(19): siRNA sense strand
gguuugggcuggagcuaca

SEQ ID NO: 2631944 - RNA, 19 nt, Homo sapiens
  misc_RNA (1)...(19): siRNA sense strand
gcacaaacucuagggaaca

SEQ ID NO: 2631945 - RNA, 19 nt, Homo sapiens
  misc_RNA (1)...(19): siRNA sense strand
agccagaguucaugacgaa

SEQ ID NO: 2631946 - RNA, 19 nt, Homo sapiens
  misc_RNA (1)...(19): siRNA sense strand
cagauaaaccagaugaagu

SEQ ID NO: 2631947 - RNA, 19 nt, Homo sapiens
  misc_RNA (1)...(19): siRNA sense strand
uggcaaagaaucugucaau

SEQ ID NO: 2631948 - RNA, 19 nt, Homo sapiens
  misc_RNA (1)...(19): siRNA sense strand
uggaugggaagcaggauua

SEQ ID NO: 2631949 - RNA, 19 nt, Homo sapiens
  misc_RNA (1)...(19): siRNA sense strand
agggcaaccuggagcucaa

SEQ ID NO: 2631950 - RNA, 19 nt, Homo sapiens
  misc_RNA (1)...(19): siRNA sense strand
gaagcagccucuugaugaa

SEQ ID NO: 2631951 - RNA, 19 nt, Homo sapiens
  misc_RNA (1)...(19): siRNA sense strand
gagccaaggauccgaguca

SEQ ID NO: 2631952 - RNA, 19 nt, Homo sapiens
  misc_RNA (1)...(19): siRNA sense strand
cccacaagaaggagcacua

SEQ ID NO: 2631953 - RNA, 19 nt, Homo sapiens
  misc_RNA (1)...(19): siRNA sense strand
gaacagagaagcacaaacu

SEQ ID NO: 2631954 - RNA, 19 nt, Homo sapiens
  misc_RNA (1)...(19): siRNA sense strand
gguccaaggagacagggaa

SEQ ID NO: 2631955 - RNA, 19 nt, Homo sapiens
  misc_RNA (1)...(19): siRNA sense strand
gaucaauauuucagaggac

SEQ ID NO: 2631956 - RNA, 19 nt, Homo sapiens
  misc_RNA (1)...(19): siRNA sense strand
uguauaagaaugugcccua

SEQ ID NO: 2631957 - RNA, 19 nt, Homo sapiens
  misc_RNA (1)...(19): siRNA sense strand
ccaccaaccuagugagcuc

SEQ ID NO: 2631958 - RNA, 19 nt, Homo sapiens
  misc_RNA (1)...(19): siRNA sense strand
agcacaaacucuagggaac

SEQ ID NO: 2631959 - RNA, 19 nt, Homo sapiens
  misc_RNA (1)...(19): siRNA sense strand
gcuucaaccuggaugucau

SEQ ID NO: 2631960 - RNA, 19 nt, Homo sapiens
  misc_RNA (1)...(19): siRNA sense strand
gcugagcuccagacggaua

SEQ ID NO: 2631961 - RNA, 19 nt, Homo sapiens
  misc_RNA (1)...(19): siRNA sense strand
cuuauaagguggagcagcu

SEQ ID NO: 2631962 - RNA, 19 nt, Homo sapiens
  misc_RNA (1)...(19): siRNA sense strand
agacagggccagaagagga

SEQ ID NO: 2631963 - RNA, 19 nt, Homo sapiens
  misc_RNA (1)...(19): siRNA sense strand
guugggagcugcuagagaa

SEQ ID NO: 2631964 - RNA, 19 nt, Homo sapiens
  misc_RNA (1)...(19): siRNA sense strand
ggcagcagcacguggagaa

SEQ ID NO: 2631965 - RNA, 19 nt, Homo sapiens
  misc_RNA (1)...(19): siRNA sense strand
gugaccagaaggaggguga

SEQ ID NO: 2631966 - RNA, 19 nt, Homo sapiens
  misc_RNA (1)...(19): siRNA sense strand
cgaccgagcccauguggau

SEQ ID NO: 2631967 - RNA, 19 nt, Homo sapiens
  misc_RNA (1)...(19): siRNA sense strand
gggucgugcugcaagauga

SEQ ID NO: 2631968 - RNA, 19 nt, Homo sapiens
  misc_RNA (1)...(19): siRNA sense strand
ugcagaaguuuguggacga

SEQ ID NO: 2631969 - RNA, 19 nt, Homo sapiens
  misc_RNA (1)...(19): siRNA sense strand
cggggaagguggagcagau

SEQ ID NO: 2631970 - RNA, 19 nt, Homo sapiens
  misc_RNA (1)...(19): siRNA sense strand
gcuccagcguucaguguca

SEQ ID NO: 2631971 - RNA, 19 nt, Homo sapiens
  misc_RNA (1)...(19): siRNA sense strand
gggaggucaaugagugaga

SEQ ID NO: 2631972 - RNA, 19 nt, Homo sapiens
  misc_RNA (1)...(19): siRNA sense strand
agaaacaacugaaccuuga

SEQ ID NO: 2631973 - RNA, 19 nt, Homo sapiens
  misc_RNA (1)...(19): siRNA sense strand
gcagcaagaugguguccga

SEQ ID NO: 2631974 - RNA, 19 nt, Homo sapiens
  misc_RNA (1)...(19): siRNA sense strand
ggacggaaggacagaccga

SEQ ID NO: 2631975 - RNA, 19 nt, Homo sapiens
  misc_RNA (1)...(19): siRNA sense strand
gcacggcuguggaugggaa

SEQ ID NO: 2631976 - RNA, 19 nt, Homo sapiens
  misc_RNA (1)...(19): siRNA sense strand
uggcagucuaccugggcaa

SEQ ID NO: 2631977 - RNA, 19 nt, Homo sapiens
  misc_RNA (1)...(19): siRNA sense strand
ggucaaugagugagaucgu

SEQ ID NO: 2631978 - RNA, 19 nt, Homo sapiens
  misc_RNA (1)...(19): siRNA sense strand
cagcagaucgaguacaaga

SEQ ID NO: 2631979 - RNA, 19 nt, Homo sapiens
  misc_RNA (1)...(19): siRNA sense strand
ccucauucacccaugggaa

SEQ ID NO: 2631980 - RNA, 19 nt, Homo sapiens
  misc_RNA (1)...(19): siRNA sense strand
ugucaaagacccugagccu

SEQ ID NO: 2631981 - RNA, 19 nt, Homo sapiens
  misc_RNA (1)...(19): siRNA sense strand
gagcagaugagcacacaca

SEQ ID NO: 2631982 - RNA, 19 nt, Homo sapiens
  misc_RNA (1)...(19): siRNA sense strand
ucaccaacaaugucaacaa

SEQ ID NO: 2631983 - RNA, 19 nt, Homo sapiens
  misc_RNA (1)...(19): siRNA sense strand
aauccgaggucccgaguca

SEQ ID NO: 2631984 - RNA, 19 nt, Homo sapiens
  misc_RNA (1)...(19): siRNA sense strand
guggaugggaagcaggauu

SEQ ID NO: 2631985 - RNA, 19 nt, Homo sapiens
  misc_RNA (1)...(19): siRNA sense strand
acuaugagcuacacagcga

SEQ ID NO: 2631986 - RNA, 19 nt, Homo sapiens
  misc_RNA (1)...(19): siRNA sense strand
ccgcagggacaaaugccaa

SEQ ID NO: 2631987 - RNA, 19 nt, Homo sapiens
  misc_RNA (1)...(19): siRNA sense strand
caacauacaaggagccauc

SEQ ID NO: 2631988 - RNA, 19 nt, Homo sapiens
  misc_RNA (1)...(19): siRNA sense strand
gcccagaugaguuuggauu

SEQ ID NO: 2631989 - RNA, 19 nt, Homo sapiens
  misc_RNA (1)...(19): siRNA sense strand
agauugagggugacuggaa

SEQ ID NO: 2631990 - RNA, 19 nt, Homo sapiens
  misc_RNA (1)...(19): siRNA sense strand
acgacuuguuugagaccuu

SEQ ID NO: 2631991 - RNA, 19 nt, Homo sapiens
  misc_RNA (1)...(19): siRNA sense strand
acacugugcucaucggaga

SEQ ID NO: 2631992 - RNA, 19 nt, Homo sapiens
  misc_RNA (1)...(19): siRNA sense strand
guacaaaaggagugaaaga

SEQ ID NO: 2631993 - RNA, 19 nt, Homo sapiens
  misc_RNA (1)...(19): siRNA sense strand
ggacgaaagaagagcucau

SEQ ID NO: 2631994 - RNA, 19 nt, Homo sapiens
  misc_RNA (1)...(19): siRNA sense strand
cagaaauacccaagggagu

SEQ ID NO: 2631995 - RNA, 19 nt, Homo sapiens
  misc_RNA (1)...(19): siRNA sense strand
aaagaggaaagaugggaaa

SEQ ID NO: 2631996 - RNA, 19 nt, Homo sapiens
  misc_RNA (1)...(19): siRNA sense strand
gggaaauggcugccgaaaa

SEQ ID NO: 2631997 - RNA, 19 nt, Homo sapiens
  misc_RNA (1)...(19): siRNA sense strand
caacagaaacucaggagca

SEQ ID NO: 2631998 - RNA, 19 nt, Homo sapiens
  misc_RNA (1)...(19): siRNA sense strand
cggugguguuugaguacaa

SEQ ID NO: 2631999 - RNA, 19 nt, Homo sapiens
  misc_RNA (1)...(19): siRNA sense strand
gaucaugaacagagagaac

SEQ ID NO: 2632000 - RNA, 19 nt, Homo sapiens
  misc_RNA (1)...(19): siRNA sense strand
cuggaacacuaaugaggaa

SEQ ID NO: 2632001 - RNA, 19 nt, Homo sapiens
  misc_RNA (1)...(19): siRNA sense strand
gcgaaauggacgaaagaag

SEQ ID NO: 2632002 - RNA, 19 nt, Homo sapiens
  misc_RNA (1)...(19): siRNA sense strand
ccgaaguuacuaugaacaa

SEQ ID NO: 2632003 - RNA, 19 nt, Homo sapiens
  misc_RNA (1)...(19): siRNA sense strand
agaaagugaaauacaggaa

SEQ ID NO: 2632004 - RNA, 19 nt, Homo sapiens
  misc_RNA (1)...(19): siRNA sense strand
ccaaggagaucaagaccga

SEQ ID NO: 2632005 - RNA, 19 nt, Homo sapiens
  misc_RNA (1)...(19): siRNA sense strand
gagcagauggagaggagga

SEQ ID NO: 2632006 - RNA, 19 nt, Homo sapiens
  misc_RNA (1)...(19): siRNA sense strand
agugagagccacaaagauu

SEQ ID NO: 2632007 - RNA, 19 nt, Homo sapiens
  misc_RNA (1)...(19): siRNA sense strand
ggaacacuaaugaggaaau

SEQ ID NO: 2632008 - RNA, 19 nt, Homo sapiens
  misc_RNA (1)...(19): siRNA sense strand
acaugaaacucaaggucca

SEQ ID NO: 2632009 - RNA, 19 nt, Homo sapiens
  misc_RNA (1)...(19): siRNA sense strand
ccaucaacaccgacaagaa

SEQ ID NO: 2632010 - RNA, 19 nt, Homo sapiens
  misc_RNA (1)...(19): siRNA sense strand
aggaagaaagugaaauaca

SEQ ID NO: 2632011 - RNA, 19 nt, Homo sapiens
  misc_RNA (1)...(19): siRNA sense strand
gcaacguggugcagggacu

SEQ ID NO: 2632012 - RNA, 19 nt, Homo sapiens
  misc_RNA (1)...(19): siRNA sense strand
cagugagaagguagagaau

SEQ ID NO: 2632013 - RNA, 19 nt, Homo sapiens
  misc_RNA (1)...(19): siRNA sense strand
gggcgaaauggacgaaaga

SEQ ID NO: 2632014 - RNA, 19 nt, Homo sapiens
  misc_RNA (1)...(19): siRNA sense strand
gugagaagaggaacggcaa

SEQ ID NO: 2632015 - RNA, 19 nt, Homo sapiens
  misc_RNA (1)...(19): siRNA sense strand
cuaacagagagguggugaa

SEQ ID NO: 2632016 - RNA, 19 nt, Homo sapiens
  misc_RNA (1)...(19): siRNA sense strand
acacauuauugaagccaca

SEQ ID NO: 2632017 - RNA, 19 nt, Homo sapiens
  misc_RNA (1)...(19): siRNA sense strand
cgacuggagcagauggaga

SEQ ID NO: 2632018 - RNA, 19 nt, Homo sapiens
  misc_RNA (1)...(19): siRNA sense strand
gacaagaaggagugggcga

SEQ ID NO: 2632019 - RNA, 19 nt, Homo sapiens
  misc_RNA (1)...(19): siRNA sense strand
ccgugauagugcagaaaau

SEQ ID NO: 2632020 - RNA, 19 nt, Homo sapiens
  misc_RNA (1)...(19): siRNA sense strand
uggaugacauacaggugaa

SEQ ID NO: 2632021 - RNA, 19 nt, Homo sapiens
  misc_RNA (1)...(19): siRNA sense strand
gaccauaggcuguacaaaa

SEQ ID NO: 2632022 - RNA, 19 nt, Homo sapiens
  misc_RNA (1)...(19): siRNA sense strand
ccucaggauuggaaagaac

SEQ ID NO: 2632023 - RNA, 19 nt, Homo sapiens
  misc_RNA (1)...(19): siRNA sense strand
ugugauuguacaacagaaa

SEQ ID NO: 2632024 - RNA, 19 nt, Homo sapiens
  misc_RNA (1)...(19): siRNA sense strand
ugaaauuagcagagugucu

SEQ ID NO: 2632025 - RNA, 19 nt, Homo sapiens
  misc_RNA (1)...(19): siRNA sense strand
agacaaggcaggagaagcu

SEQ ID NO: 2632026 - RNA, 19 nt, Homo sapiens
  misc_RNA (1)...(19): siRNA sense strand
gugaaauacaggaaagaug

SEQ ID NO: 2632027 - RNA, 19 nt, Homo sapiens
  misc_RNA (1)...(19): siRNA sense strand
aagaagagcucaucgggca

SEQ ID NO: 2632028 - RNA, 19 nt, Homo sapiens
  misc_RNA (1)...(19): siRNA sense strand
cuaccgugauagugcagaa

SEQ ID NO: 2632029 - RNA, 19 nt, Homo sapiens
  misc_RNA (1)...(19): siRNA sense strand
ccuguaggaaaguggaauu

SEQ ID NO: 2632030 - RNA, 19 nt, Homo sapiens
  misc_RNA (1)...(19): siRNA sense strand
agaagaugaucaugggaac

SEQ ID NO: 2632031 - RNA, 19 nt, Homo sapiens
  misc_RNA (1)...(19): siRNA sense strand
caaaguguauucugcggaa

SEQ ID NO: 2632032 - RNA, 19 nt, Homo sapiens
  misc_RNA (1)...(19): siRNA sense strand
caagaaggagugggcgaaa

SEQ ID NO: 2632033 - RNA, 19 nt, Homo sapiens
  misc_RNA (1)...(19): siRNA sense strand
cuguacaaaaggagugaaa

SEQ ID NO: 2632034 - RNA, 19 nt, Homo sapiens
  misc_RNA (1)...(19): siRNA sense strand
acaaaaggagugaaagaau

SEQ ID NO: 2632035 - RNA, 19 nt, Homo sapiens
  misc_RNA (1)...(19): siRNA sense strand
uggagcaccugcagagaga

SEQ ID NO: 2632036 - RNA, 19 nt, Homo sapiens
  misc_RNA (1)...(19): siRNA sense strand
uagaagaugaucaugggaa

SEQ ID NO: 2632037 - RNA, 19 nt, Homo sapiens
  misc_RNA (1)...(19): siRNA sense strand
gcgugcaucacaaguguaa

SEQ ID NO: 2632038 - RNA, 19 nt, Homo sapiens
  misc_RNA (1)...(19): siRNA sense strand
uggaacgacuggagcagau

SEQ ID NO: 2632039 - RNA, 19 nt, Homo sapiens
  misc_RNA (1)...(19): siRNA sense strand
cguacaaagcacgcggaua

SEQ ID NO: 2632040 - RNA, 19 nt, Homo sapiens
  misc_RNA (1)...(19): siRNA sense strand
ccgaaauguucaaguuuac

SEQ ID NO: 2632041 - RNA, 19 nt, Homo sapiens
  misc_RNA (1)...(19): siRNA sense strand
ggaacggcaagguggccaa

SEQ ID NO: 2632042 - RNA, 19 nt, Homo sapiens
  misc_RNA (1)...(19): siRNA sense strand
augacgugucggagggcaa

SEQ ID NO: 2632043 - RNA, 19 nt, Homo sapiens
  misc_RNA (1)...(19): siRNA sense strand
gcuugaaugucugccgaaa

SEQ ID NO: 2632044 - RNA, 19 nt, Homo sapiens
  misc_RNA (1)...(19): siRNA sense strand
gugcaucacaaguguaaca

SEQ ID NO: 2632045 - RNA, 19 nt, Homo sapiens
  misc_RNA (1)...(19): siRNA sense strand
ggacggguguucaugguga

SEQ ID NO: 2632046 - RNA, 19 nt, Homo sapiens
  misc_RNA (1)...(19): siRNA sense strand
cagcguuguuacagaaaau

SEQ ID NO: 2632047 - RNA, 19 nt, Homo sapiens
  misc_RNA (1)...(19): siRNA sense strand
ccugaguacuuccagacaa

SEQ ID NO: 2632048 - RNA, 19 nt, Homo sapiens
  misc_RNA (1)...(19): siRNA sense strand
gagcaaauuccgaaguuac

SEQ ID NO: 2632049 - RNA, 19 nt, Homo sapiens
  misc_RNA (1)...(19): siRNA sense strand
gcgugaaguaugagagcga

SEQ ID NO: 2632050 - RNA, 19 nt, Homo sapiens
  misc_RNA (1)...(19): siRNA sense strand
acacagacuucaugggcga

SEQ ID NO: 2632051 - RNA, 19 nt, Homo sapiens
  misc_RNA (1)...(19): siRNA sense strand
ccaacaacuucaaacgaca

SEQ ID NO: 2632052 - RNA, 19 nt, Homo sapiens
  misc_RNA (1)...(19): siRNA sense strand
cccgaaaccagcaggagaa

SEQ ID NO: 2632053 - RNA, 19 nt, Homo sapiens
  misc_RNA (1)...(19): siRNA sense strand
uuguuaaacucuuggcuga

SEQ ID NO: 2632054 - RNA, 19 nt, Homo sapiens
  misc_RNA (1)...(19): siRNA sense strand
ccacaggacuucuggaggu

SEQ ID NO: 2632055 - RNA, 19 nt, Homo sapiens
  misc_RNA (1)...(19): siRNA sense strand
gggacagcuccgagucauu

SEQ ID NO: 2632056 - RNA, 19 nt, Homo sapiens
  misc_RNA (1)...(19): siRNA sense strand
uggccaauauccugcucaa

SEQ ID NO: 2632057 - RNA, 19 nt, Homo sapiens
  misc_RNA (1)...(19): siRNA sense strand
ucggaggaggcuuuggaua

SEQ ID NO: 2632058 - RNA, 19 nt, Homo sapiens
  misc_RNA (1)...(19): siRNA sense strand
uaucagaguaagaagucau

SEQ ID NO: 2632059 - RNA, 19 nt, Homo sapiens
  misc_RNA (1)...(19): siRNA sense strand
ccaagaggaggaagugcau

SEQ ID NO: 2632060 - RNA, 19 nt, Homo sapiens
  misc_RNA (1)...(19): siRNA sense strand
caaaagaggagcuggcaaa

SEQ ID NO: 2632061 - RNA, 19 nt, Homo sapiens
  misc_RNA (1)...(19): siRNA sense strand
aggaagaagcaacggguga

SEQ ID NO: 2632062 - RNA, 19 nt, Homo sapiens
  misc_RNA (1)...(19): siRNA sense strand
caaaggaaacagaugaaga

SEQ ID NO: 2632063 - RNA, 19 nt, Homo sapiens
  misc_RNA (1)...(19): siRNA sense strand
gaagaagaggcgaggcuca

SEQ ID NO: 2632064 - RNA, 19 nt, Homo sapiens
  misc_RNA (1)...(19): siRNA sense strand
ggcaaaggaaacagaugaa

SEQ ID NO: 2632065 - RNA, 19 nt, Homo sapiens
  misc_RNA (1)...(19): siRNA sense strand
gucaagagccgcuggguga

SEQ ID NO: 2632066 - RNA, 19 nt, Homo sapiens
  misc_RNA (1)...(19): siRNA sense strand
guacagugcaggauuggaa

SEQ ID NO: 2632067 - RNA, 19 nt, Homo sapiens
  misc_RNA (1)...(19): siRNA sense strand
ugcuggaggucgaggaaga

SEQ ID NO: 2632068 - RNA, 19 nt, Homo sapiens
  misc_RNA (1)...(19): siRNA sense strand
aggagcaggaggaggaaga

SEQ ID NO: 2632069 - RNA, 19 nt, Homo sapiens
  misc_RNA (1)...(19): siRNA sense strand
uccaugagaucgagcgcaa

SEQ ID NO: 2632070 - RNA, 19 nt, Homo sapiens
  misc_RNA (1)...(19): siRNA sense strand
cgaccacguacaagggcaa

SEQ ID NO: 2632071 - RNA, 19 nt, Homo sapiens
  misc_RNA (1)...(19): siRNA sense strand
gggagucaguggagcagau

SEQ ID NO: 2632072 - RNA, 19 nt, Homo sapiens
  misc_RNA (1)...(19): siRNA sense strand
aggaggagcaggaggagga

SEQ ID NO: 2632073 - RNA, 19 nt, Homo sapiens
  misc_RNA (1)...(19): siRNA sense strand
cuauggacacggaggauga

SEQ ID NO: 2632074 - RNA, 19 nt, Homo sapiens
  misc_RNA (1)...(19): siRNA sense strand
agagugaagacccgcgaaa

SEQ ID NO: 2632075 - RNA, 19 nt, Homo sapiens
  misc_RNA (1)...(19): siRNA sense strand
ggaaacagaugaagagugg

SEQ ID NO: 2632076 - RNA, 19 nt, Homo sapiens
  misc_RNA (1)...(19): siRNA sense strand
cguccaaacugcaggcaag

SEQ ID NO: 2632077 - RNA, 19 nt, Homo sapiens
  misc_RNA (1)...(19): siRNA sense strand
gagaagaagaggcgaggcu

SEQ ID NO: 2632078 - RNA, 19 nt, Homo sapiens
  misc_RNA (1)...(19): siRNA sense strand
uggcaaaggaaacagauga

SEQ ID NO: 2632079 - RNA, 19 nt, Homo sapiens
  misc_RNA (1)...(19): siRNA sense strand
ggcuagaggaggagcagga

SEQ ID NO: 2632080 - RNA, 19 nt, Homo sapiens
  misc_RNA (1)...(19): siRNA sense strand
aaacagaugaagaguggga

SEQ ID NO: 2632081 - RNA, 19 nt, Homo sapiens
  misc_RNA (1)...(19): siRNA sense strand
gggaggaacaacgggcuaa

SEQ ID NO: 2632082 - RNA, 19 nt, Homo sapiens
  misc_RNA (1)...(19): siRNA sense strand
cccacagccugcagaacaa

SEQ ID NO: 2632083 - RNA, 19 nt, Homo sapiens
  misc_RNA (1)...(19): siRNA sense strand
ccuucgugaucgugggcau

SEQ ID NO: 2632084 - RNA, 19 nt, Homo sapiens
  misc_RNA (1)...(19): siRNA sense strand
agcagauauucauggaaau

SEQ ID NO: 2632085 - RNA, 19 nt, Homo sapiens
  misc_RNA (1)...(19): siRNA sense strand
ccaccaaggagcagcagca

SEQ ID NO: 2632086 - RNA, 19 nt, Homo sapiens
  misc_RNA (1)...(19): siRNA sense strand
gcucaaaagcccacagcca

SEQ ID NO: 2632087 - RNA, 19 nt, Homo sapiens
  misc_RNA (1)...(19): siRNA sense strand
ccugcuggcuggagagaac

SEQ ID NO: 2632088 - RNA, 19 nt, Homo sapiens
  misc_RNA (1)...(19): siRNA sense strand
agucaguggagcagaucuu

SEQ ID NO: 2632089 - RNA, 19 nt, Homo sapiens
  misc_RNA (1)...(19): siRNA sense strand
gcuucuacguggccaccaa

SEQ ID NO: 2632090 - RNA, 19 nt, Homo sapiens
  misc_RNA (1)...(19): siRNA sense strand
auguguggcuagaggagga

SEQ ID NO: 2632091 - RNA, 19 nt, Homo sapiens
  misc_RNA (1)...(19): siRNA sense strand
gguauguggaugagggccu

SEQ ID NO: 2632092 - RNA, 19 nt, Homo sapiens
  misc_RNA (1)...(19): siRNA sense strand
gaggagcuggcaaaggaaa

SEQ ID NO: 2632093 - RNA, 19 nt, Homo sapiens
  misc_RNA (1)...(19): siRNA sense strand
cuucgaggccacagggaaa

SEQ ID NO: 2632094 - RNA, 19 nt, Homo sapiens
  misc_RNA (1)...(19): siRNA sense strand
agaagaaggcuguagguga

SEQ ID NO: 2632095 - RNA, 19 nt, Homo sapiens
  misc_RNA (1)...(19): siRNA sense strand
guggaguggaccaaggaua

SEQ ID NO: 2632096 - RNA, 19 nt, Homo sapiens
  misc_RNA (1)...(19): siRNA sense strand
cgucgaagaacaaggcaca

SEQ ID NO: 2632097 - RNA, 19 nt, Homo sapiens
  misc_RNA (1)...(19): siRNA sense strand
caacagaagaaacgggcca

SEQ ID NO: 2632098 - RNA, 19 nt, Homo sapiens
  misc_RNA (1)...(19): siRNA sense strand
gggcagugcuagaccagga

SEQ ID NO: 2632099 - RNA, 19 nt, Homo sapiens
  misc_RNA (1)...(19): siRNA sense strand
caacgaagauuccggagga

SEQ ID NO: 2632100 - RNA, 19 nt, Homo sapiens
  misc_RNA (1)...(19): siRNA sense strand
cggccugagugguagacau

SEQ ID NO: 2632101 - RNA, 19 nt, Homo sapiens
  misc_RNA (1)...(19): siRNA sense strand
acacaaagguucugcuggu

SEQ ID NO: 2632102 - RNA, 19 nt, Homo sapiens
  misc_RNA (1)...(19): siRNA sense strand
gggaaggagccaagaggag

SEQ ID NO: 2632103 - RNA, 19 nt, Homo sapiens
  misc_RNA (1)...(19): siRNA sense strand
gggacacggaccaaggauu

SEQ ID NO: 2632104 - RNA, 19 nt, Homo sapiens
  misc_RNA (1)...(19): siRNA sense strand
ucgaagaacaaggcacaaa

SEQ ID NO: 2632105 - RNA, 19 nt, Homo sapiens
  misc_RNA (1)...(19): siRNA sense strand
uggcuuuacagcagaaaca

SEQ ID NO: 2632106 - RNA, 19 nt, Homo sapiens
  misc_RNA (1)...(19): siRNA sense strand
gggaagaagcacaguggug

SEQ ID NO: 2632107 - RNA, 19 nt, Homo sapiens
  misc_RNA (1)...(19): siRNA sense strand
acucuugggcacaaagcaa

SEQ ID NO: 2632108 - RNA, 19 nt, Homo sapiens
  misc_RNA (1)...(19): siRNA sense strand
gcagagaacagacagcaga

SEQ ID NO: 2632109 - RNA, 19 nt, Homo sapiens
  misc_RNA (1)...(19): siRNA sense strand
cgacuggccaacuggucaa

SEQ ID NO: 2632110 - RNA, 19 nt, Homo sapiens
  misc_RNA (1)...(19): siRNA sense strand
cgaagaacaaggcacaaaa

SEQ ID NO: 2632111 - RNA, 19 nt, Homo sapiens
  misc_RNA (1)...(19): siRNA sense strand
ccuggaggcacuuggugaa

SEQ ID NO: 2632112 - RNA, 19 nt, Homo sapiens
  misc_RNA (1)...(19): siRNA sense strand
gaagaagcacaguggugga

SEQ ID NO: 2632113 - RNA, 19 nt, Homo sapiens
  misc_RNA (1)...(19): siRNA sense strand
ggcacuuggugaagaggca

SEQ ID NO: 2632114 - RNA, 19 nt, Homo sapiens
  misc_RNA (1)...(19): siRNA sense strand
gggcaguacacaaagguuc

SEQ ID NO: 2632115 - RNA, 19 nt, Homo sapiens
  misc_RNA (1)...(19): siRNA sense strand
ugaggaaaugccuggaaca

SEQ ID NO: 2632116 - RNA, 19 nt, Homo sapiens
  misc_RNA (1)...(19): siRNA sense strand
ccagaaaguuccagaucaa

SEQ ID NO: 2632117 - RNA, 19 nt, Homo sapiens
  misc_RNA (1)...(19): siRNA sense strand
ucaugaagauugaaggaaa

SEQ ID NO: 2632118 - RNA, 19 nt, Homo sapiens
  misc_RNA (1)...(19): siRNA sense strand
uggaaaugauugagggaga

SEQ ID NO: 2632119 - RNA, 19 nt, Homo sapiens
  misc_RNA (1)...(19): siRNA sense strand
uggcaaauagagagaaaua

SEQ ID NO: 2632120 - RNA, 19 nt, Homo sapiens
  misc_RNA (1)...(19): siRNA sense strand
caaaggugcuguugaauua

SEQ ID NO: 2632121 - RNA, 19 nt, Homo sapiens
  misc_RNA (1)...(19): siRNA sense strand
gggagaacccauagaggaa

SEQ ID NO: 2632122 - RNA, 19 nt, Homo sapiens
  misc_RNA (1)...(19): siRNA sense strand
ucaaggagcuggaacgaaa

SEQ ID NO: 2632123 - RNA, 19 nt, Homo sapiens
  misc_RNA (1)...(19): siRNA sense strand
gaaagaagcuucagagaac

SEQ ID NO: 2632124 - RNA, 19 nt, Homo sapiens
  misc_RNA (1)...(19): siRNA sense strand
cagcagcaacggagagaaa

SEQ ID NO: 2632125 - RNA, 19 nt, Homo sapiens
  misc_RNA (1)...(19): siRNA sense strand
ggaacagagcuuugaggaa

SEQ ID NO: 2632126 - RNA, 19 nt, Homo sapiens
  misc_RNA (1)...(19): siRNA sense strand
gaaugagccuguacagaaa

SEQ ID NO: 2632127 - RNA, 19 nt, Homo sapiens
  misc_RNA (1)...(19): siRNA sense strand
gcaauuagacguagcagaa

SEQ ID NO: 2632128 - RNA, 19 nt, Homo sapiens
  misc_RNA (1)...(19): siRNA sense strand
ggacagugggcauggcaaa

SEQ ID NO: 2632129 - RNA, 19 nt, Homo sapiens
  misc_RNA (1)...(19): siRNA sense strand
ccguauugauugugauauu

SEQ ID NO: 2632130 - RNA, 19 nt, Homo sapiens
  misc_RNA (1)...(19): siRNA sense strand
agaaagaugccuugaaaga

SEQ ID NO: 2632131 - RNA, 19 nt, Homo sapiens
  misc_RNA (1)...(19): siRNA sense strand
cauggcaaauagagagaaa

SEQ ID NO: 2632132 - RNA, 19 nt, Homo sapiens
  misc_RNA (1)...(19): siRNA sense strand
ggaaugugguugagggacu

SEQ ID NO: 2632133 - RNA, 19 nt, Homo sapiens
  misc_RNA (1)...(19): siRNA sense strand
caaagauguaugagaggua

SEQ ID NO: 2632134 - RNA, 19 nt, Homo sapiens
  misc_RNA (1)...(19): siRNA sense strand
gaguauagcgagaugguau

SEQ ID NO: 2632135 - RNA, 19 nt, Homo sapiens
  misc_RNA (1)...(19): siRNA sense strand
ccucaguaccuguggagaa

SEQ ID NO: 2632136 - RNA, 19 nt, Homo sapiens
  misc_RNA (1)...(19): siRNA sense strand
ggacaaagaaauaagucau

SEQ ID NO: 2632137 - RNA, 19 nt, Homo sapiens
  misc_RNA (1)...(19): siRNA sense strand
gaaaguaacccuucagauu

SEQ ID NO: 2632138 - RNA, 19 nt, Homo sapiens
  misc_RNA (1)...(19): siRNA sense strand
gaacagagcuuugaggaau

SEQ ID NO: 2632139 - RNA, 19 nt, Homo sapiens
  misc_RNA (1)...(19): siRNA sense strand
caagaaaggccgaggucga

SEQ ID NO: 2632140 - RNA, 19 nt, Homo sapiens
  misc_RNA (1)...(19): siRNA sense strand
aaggagaagcuguuggaaa

SEQ ID NO: 2632141 - RNA, 19 nt, Homo sapiens
  misc_RNA (1)...(19): siRNA sense strand
gugaagaucugaauaagua

SEQ ID NO: 2632142 - RNA, 19 nt, Homo sapiens
  misc_RNA (1)...(19): siRNA sense strand
uggaaaggaauuuggacaa

SEQ ID NO: 2632143 - RNA, 19 nt, Homo sapiens
  misc_RNA (1)...(19): siRNA sense strand
caugaagauugaaggaaaa

SEQ ID NO: 2632144 - RNA, 19 nt, Homo sapiens
  misc_RNA (1)...(19): siRNA sense strand
uugaagacgcugugauuaa

SEQ ID NO: 2632145 - RNA, 19 nt, Homo sapiens
  misc_RNA (1)...(19): siRNA sense strand
ucacaaacaggaagaacua

SEQ ID NO: 2632146 - RNA, 19 nt, Homo sapiens
  misc_RNA (1)...(19): siRNA sense strand
guuuacagcuuauggauuu

SEQ ID NO: 2632147 - RNA, 19 nt, Homo sapiens
  misc_RNA (1)...(19): siRNA sense strand
gagaagaucccuauagaga

SEQ ID NO: 2632148 - RNA, 19 nt, Homo sapiens
  misc_RNA (1)...(19): siRNA sense strand
aggacuuauuggagaagaa

SEQ ID NO: 2632149 - RNA, 19 nt, Homo sapiens
  misc_RNA (1)...(19): siRNA sense strand
ggaagcauguccaggauau

SEQ ID NO: 2632150 - RNA, 19 nt, Homo sapiens
  misc_RNA (1)...(19): siRNA sense strand
ggcuauaaagaaagagaau

SEQ ID NO: 2632151 - RNA, 19 nt, Homo sapiens
  misc_RNA (1)...(19): siRNA sense strand
uggaugaacuggaagaaaa

SEQ ID NO: 2632152 - RNA, 19 nt, Homo sapiens
  misc_RNA (1)...(19): siRNA sense strand
gcggcuuauuagagaacaa

SEQ ID NO: 2632153 - RNA, 19 nt, Homo sapiens
  misc_RNA (1)...(19): siRNA sense strand
cagaugacaaggaggaaau

SEQ ID NO: 2632154 - RNA, 19 nt, Homo sapiens
  misc_RNA (1)...(19): siRNA sense strand
caacacaugugguagagaa

SEQ ID NO: 2632155 - RNA, 19 nt, Homo sapiens
  misc_RNA (1)...(19): siRNA sense strand
gaagaucccuauagagaga

SEQ ID NO: 2632156 - RNA, 19 nt, Homo sapiens
  misc_RNA (1)...(19): siRNA sense strand
aaacacagucugaggaaaa

SEQ ID NO: 2632157 - RNA, 19 nt, Homo sapiens
  misc_RNA (1)...(19): siRNA sense strand
caucuuugcugcagagaga

SEQ ID NO: 2632158 - RNA, 19 nt, Homo sapiens
  misc_RNA (1)...(19): siRNA sense strand
gggaauucuucuuaucaaa

SEQ ID NO: 2632159 - RNA, 19 nt, Homo sapiens
  misc_RNA (1)...(19): siRNA sense strand
caaggauuguggagaauau

SEQ ID NO: 2632160 - RNA, 19 nt, Homo sapiens
  misc_RNA (1)...(19): siRNA sense strand
gagagacauccgagagaau

SEQ ID NO: 2632161 - RNA, 19 nt, Homo sapiens
  misc_RNA (1)...(19): siRNA sense strand
cagugcaaauugaggagaa

SEQ ID NO: 2632162 - RNA, 19 nt, Homo sapiens
  misc_RNA (1)...(19): siRNA sense strand
gcauagaggucaagcuuuu

SEQ ID NO: 2632163 - RNA, 19 nt, Homo sapiens
  misc_RNA (1)...(19): siRNA sense strand
uaucagagcuucagguuca

SEQ ID NO: 2632164 - RNA, 19 nt, Homo sapiens
  misc_RNA (1)...(19): siRNA sense strand
caacaguggaugagcccaa

SEQ ID NO: 2632165 - RNA, 19 nt, Homo sapiens
  misc_RNA (1)...(19): siRNA sense strand
aaagaugccuugaaagaau

SEQ ID NO: 2632166 - RNA, 19 nt, Homo sapiens
  misc_RNA (1)...(19): siRNA sense strand
gcauuugcacagagggaau

SEQ ID NO: 2632167 - RNA, 19 nt, Homo sapiens
  misc_RNA (1)...(19): siRNA sense strand
auguuaagacucagcgaaa

SEQ ID NO: 2632168 - RNA, 19 nt, Homo sapiens
  misc_RNA (1)...(19): siRNA sense strand
gcagaugccucguguauga

SEQ ID NO: 2632169 - RNA, 19 nt, Homo sapiens
  misc_RNA (1)...(19): siRNA sense strand
gagcaagagucccuuauua

SEQ ID NO: 2632170 - RNA, 19 nt, Homo sapiens
  misc_RNA (1)...(19): siRNA sense strand
gauaagaaacauccagaau

SEQ ID NO: 2632171 - RNA, 19 nt, Homo sapiens
  misc_RNA (1)...(19): siRNA sense strand
ggacugaagugaagcccau

SEQ ID NO: 2632172 - RNA, 19 nt, Homo sapiens
  misc_RNA (1)...(19): siRNA sense strand
ucacugaagcuuugaguuu

SEQ ID NO: 2632173 - RNA, 19 nt, Homo sapiens
  misc_RNA (1)...(19): siRNA sense strand
acagugaagaucugaauaa

SEQ ID NO: 2632174 - RNA, 19 nt, Homo sapiens
  misc_RNA (1)...(19): siRNA sense strand
gggcagacggugagagauc

SEQ ID NO: 2632175 - RNA, 19 nt, Homo sapiens
  misc_RNA (1)...(19): siRNA sense strand
guuaaaggaaugccaauua

SEQ ID NO: 2632176 - RNA, 19 nt, Homo sapiens
  misc_RNA (1)...(19): siRNA sense strand
cugacaaagagcagccaaa

SEQ ID NO: 2632177 - RNA, 19 nt, Homo sapiens
  misc_RNA (1)...(19): siRNA sense strand
augaaaaccuccaugaaaa

SEQ ID NO: 2632178 - RNA, 19 nt, Homo sapiens
  misc_RNA (1)...(19): siRNA sense strand
gaacuugagcuuugauauu

SEQ ID NO: 2632179 - RNA, 19 nt, Homo sapiens
  misc_RNA (1)...(19): siRNA sense strand
guacggaguuuguggucau

SEQ ID NO: 2632180 - RNA, 19 nt, Homo sapiens
  misc_RNA (1)...(19): siRNA sense strand
caauauaacaagcugaaga

SEQ ID NO: 2632181 - RNA, 19 nt, Homo sapiens
  misc_RNA (1)...(19): siRNA sense strand
aaagaaagaugccuugaaa

SEQ ID NO: 2632182 - RNA, 19 nt, Homo sapiens
  misc_RNA (1)...(19): siRNA sense strand
cgacaugauuucuuugaau

SEQ ID NO: 2632183 - RNA, 19 nt, Homo sapiens
  misc_RNA (1)...(19): siRNA sense strand
ggucaaggucaauguaaca

SEQ ID NO: 2632184 - RNA, 19 nt, Homo sapiens
  misc_RNA (1)...(19): siRNA sense strand
cagaaucagagguggaaaa

SEQ ID NO: 2632185 - RNA, 19 nt, Homo sapiens
  misc_RNA (1)...(19): siRNA sense strand
aggagaagcuguuggaaag

SEQ ID NO: 2632186 - RNA, 19 nt, Homo sapiens
  misc_RNA (1)...(19): siRNA sense strand
ggaagaacuagcagagagu

SEQ ID NO: 2632187 - RNA, 19 nt, Homo sapiens
  misc_RNA (1)...(19): siRNA sense strand
ccuuuaucuuagaggaaaa

SEQ ID NO: 2632188 - RNA, 19 nt, Homo sapiens
  misc_RNA (1)...(19): siRNA sense strand
gaacuacauuucagaucua

SEQ ID NO: 2632189 - RNA, 19 nt, Homo sapiens
  misc_RNA (1)...(19): siRNA sense strand
gaagaaugcuuuugacgaa

SEQ ID NO: 2632190 - RNA, 19 nt, Homo sapiens
  misc_RNA (1)...(19): siRNA sense strand
ugacgaacacccaagauaa

SEQ ID NO: 2632191 - RNA, 19 nt, Homo sapiens
  misc_RNA (1)...(19): siRNA sense strand
guuaaugucucaaugggua

SEQ ID NO: 2632192 - RNA, 19 nt, Homo sapiens
  misc_RNA (1)...(19): siRNA sense strand
cugaguuguuggugggaca

SEQ ID NO: 2632193 - RNA, 19 nt, Homo sapiens
  misc_RNA (1)...(19): siRNA sense strand
gcuaagaacagcagcacca

SEQ ID NO: 2632194 - RNA, 19 nt, Homo sapiens
  misc_RNA (1)...(19): siRNA sense strand
caugguuggacgagugaaa

SEQ ID NO: 2632195 - RNA, 19 nt, Homo sapiens
  misc_RNA (1)...(19): siRNA sense strand
cauaagaacuugagcuuug

SEQ ID NO: 2632196 - RNA, 19 nt, Homo sapiens
  misc_RNA (1)...(19): siRNA sense strand
uggaggacuuauuggagaa

SEQ ID NO: 2632197 - RNA, 19 nt, Homo sapiens
  misc_RNA (1)...(19): siRNA sense strand
acaccaaacuggaucucaa

SEQ ID NO: 2632198 - RNA, 19 nt, Homo sapiens
  misc_RNA (1)...(19): siRNA sense strand
aagcaaauguguccaaauu

SEQ ID NO: 2632199 - RNA, 19 nt, Homo sapiens
  misc_RNA (1)...(19): siRNA sense strand
ccacagugcucaccuauaa

SEQ ID NO: 2632200 - RNA, 19 nt, Homo sapiens
  misc_RNA (1)...(19): siRNA sense strand
gaacauuaucagauggcuu

SEQ ID NO: 2632201 - RNA, 19 nt, Homo sapiens
  misc_RNA (1)...(19): siRNA sense strand
gaaaggagaggcaggugaa

SEQ ID NO: 2632202 - RNA, 19 nt, Homo sapiens
  misc_RNA (1)...(19): siRNA sense strand
ccacagaugacaaggagga

SEQ ID NO: 2632203 - RNA, 19 nt, Homo sapiens
  misc_RNA (1)...(19): siRNA sense strand
cagcagagcaacaggagca

SEQ ID NO: 2632204 - RNA, 19 nt, Homo sapiens
  misc_RNA (1)...(19): siRNA sense strand
ccagaaaguuccagaucaa

SEQ ID NO: 2632205 - RNA, 19 nt, Homo sapiens
  misc_RNA (1)...(19): siRNA sense strand
ucaugaagauugaaggaaa

SEQ ID NO: 2632206 - RNA, 19 nt, Homo sapiens
  misc_RNA (1)...(19): siRNA sense strand
uggaaaugauugagggaga

SEQ ID NO: 2632207 - RNA, 19 nt, Homo sapiens
  misc_RNA (1)...(19): siRNA sense strand
uggcaaauagagagaaaua

SEQ ID NO: 2632208 - RNA, 19 nt, Homo sapiens
  misc_RNA (1)...(19): siRNA sense strand
caaaggugcuguugaauua

SEQ ID NO: 2632209 - RNA, 19 nt, Homo sapiens
  misc_RNA (1)...(19): siRNA sense strand
gggagaacccauagaggaa

SEQ ID NO: 2632210 - RNA, 19 nt, Homo sapiens
  misc_RNA (1)...(19): siRNA sense strand
ucaaggagcuggaacgaaa

SEQ ID NO: 2632211 - RNA, 19 nt, Homo sapiens
  misc_RNA (1)...(19): siRNA sense strand
gaaagaagcuucagagaac

SEQ ID NO: 2632212 - RNA, 19 nt, Homo sapiens
  misc_RNA (1)...(19): siRNA sense strand
cagcagcaacggagagaaa

SEQ ID NO: 2632213 - RNA, 19 nt, Homo sapiens
  misc_RNA (1)...(19): siRNA sense strand
ggaacagagcuuugaggaa

SEQ ID NO: 2632214 - RNA, 19 nt, Homo sapiens
  misc_RNA (1)...(19): siRNA sense strand
gaaugagccuguacagaaa

SEQ ID NO: 2632215 - RNA, 19 nt, Homo sapiens
  misc_RNA (1)...(19): siRNA sense strand
gcaauuagacguagcagaa

SEQ ID NO: 2632216 - RNA, 19 nt, Homo sapiens
  misc_RNA (1)...(19): siRNA sense strand
ggacagugggcauggcaaa

SEQ ID NO: 2632217 - RNA, 19 nt, Homo sapiens
  misc_RNA (1)...(19): siRNA sense strand
ccguauugauugugauauu

SEQ ID NO: 2632218 - RNA, 19 nt, Homo sapiens
  misc_RNA (1)...(19): siRNA sense strand
agaaagaugccuugaaaga

SEQ ID NO: 2632219 - RNA, 19 nt, Homo sapiens
  misc_RNA (1)...(19): siRNA sense strand
cauggcaaauagagagaaa

SEQ ID NO: 2632220 - RNA, 19 nt, Homo sapiens
  misc_RNA (1)...(19): siRNA sense strand
ggaaugugguugagggacu

SEQ ID NO: 2632221 - RNA, 19 nt, Homo sapiens
  misc_RNA (1)...(19): siRNA sense strand
caaagauguaugagaggua

SEQ ID NO: 2632222 - RNA, 19 nt, Homo sapiens
  misc_RNA (1)...(19): siRNA sense strand
gaguauagcgagaugguau

SEQ ID NO: 2632223 - RNA, 19 nt, Homo sapiens
  misc_RNA (1)...(19): siRNA sense strand
ccucaguaccuguggagaa

SEQ ID NO: 2632224 - RNA, 19 nt, Homo sapiens
  misc_RNA (1)...(19): siRNA sense strand
ggacaaagaaauaagucau

SEQ ID NO: 2632225 - RNA, 19 nt, Homo sapiens
  misc_RNA (1)...(19): siRNA sense strand
gaaaguaacccuucagauu

SEQ ID NO: 2632226 - RNA, 19 nt, Homo sapiens
  misc_RNA (1)...(19): siRNA sense strand
gaacagagcuuugaggaau

SEQ ID NO: 2632227 - RNA, 19 nt, Homo sapiens
  misc_RNA (1)...(19): siRNA sense strand
caagaaaggccgaggucga

SEQ ID NO: 2632228 - RNA, 19 nt, Homo sapiens
  misc_RNA (1)...(19): siRNA sense strand
aaggagaagcuguuggaaa

SEQ ID NO: 2632229 - RNA, 19 nt, Homo sapiens
  misc_RNA (1)...(19): siRNA sense strand
gugaagaucugaauaagua

SEQ ID NO: 2632230 - RNA, 19 nt, Homo sapiens
  misc_RNA (1)...(19): siRNA sense strand
uggaaaggaauuuggacaa

SEQ ID NO: 2632231 - RNA, 19 nt, Homo sapiens
  misc_RNA (1)...(19): siRNA sense strand
caugaagauugaaggaaaa

SEQ ID NO: 2632232 - RNA, 19 nt, Homo sapiens
  misc_RNA (1)...(19): siRNA sense strand
uugaagacgcugugauuaa

SEQ ID NO: 2632233 - RNA, 19 nt, Homo sapiens
  misc_RNA (1)...(19): siRNA sense strand
ucacaaacaggaagaacua

SEQ ID NO: 2632234 - RNA, 19 nt, Homo sapiens
  misc_RNA (1)...(19): siRNA sense strand
guuuacagcuuauggauuu

SEQ ID NO: 2632235 - RNA, 19 nt, Homo sapiens
  misc_RNA (1)...(19): siRNA sense strand
gagaagaucccuauagaga

SEQ ID NO: 2632236 - RNA, 19 nt, Homo sapiens
  misc_RNA (1)...(19): siRNA sense strand
aggacuuauuggagaagaa

SEQ ID NO: 2632237 - RNA, 19 nt, Homo sapiens
  misc_RNA (1)...(19): siRNA sense strand
ggaagcauguccaggauau

SEQ ID NO: 2632238 - RNA, 19 nt, Homo sapiens
  misc_RNA (1)...(19): siRNA sense strand
ggcuauaaagaaagagaau

SEQ ID NO: 2632239 - RNA, 19 nt, Homo sapiens
  misc_RNA (1)...(19): siRNA sense strand
uggaugaacuggaagaaaa

SEQ ID NO: 2632240 - RNA, 19 nt, Homo sapiens
  misc_RNA (1)...(19): siRNA sense strand
gcggcuuauuagagaacaa

SEQ ID NO: 2632241 - RNA, 19 nt, Homo sapiens
  misc_RNA (1)...(19): siRNA sense strand
cagaugacaaggaggaaau

SEQ ID NO: 2632242 - RNA, 19 nt, Homo sapiens
  misc_RNA (1)...(19): siRNA sense strand
caacacaugugguagagaa

SEQ ID NO: 2632243 - RNA, 19 nt, Homo sapiens
  misc_RNA (1)...(19): siRNA sense strand
gaagaucccuauagagaga

SEQ ID NO: 2632244 - RNA, 19 nt, Homo sapiens
  misc_RNA (1)...(19): siRNA sense strand
aaacacagucugaggaaaa

SEQ ID NO: 2632245 - RNA, 19 nt, Homo sapiens
  misc_RNA (1)...(19): siRNA sense strand
caucuuugcugcagagaga

SEQ ID NO: 2632246 - RNA, 19 nt, Homo sapiens
  misc_RNA (1)...(19): siRNA sense strand
gggaauucuucuuaucaaa

SEQ ID NO: 2632247 - RNA, 19 nt, Homo sapiens
  misc_RNA (1)...(19): siRNA sense strand
caaggauuguggagaauau

SEQ ID NO: 2632248 - RNA, 19 nt, Homo sapiens
  misc_RNA (1)...(19): siRNA sense strand
gagagacauccgagagaau

SEQ ID NO: 2632249 - RNA, 19 nt, Homo sapiens
  misc_RNA (1)...(19): siRNA sense strand
cagugcaaauugaggagaa

SEQ ID NO: 2632250 - RNA, 19 nt, Homo sapiens
  misc_RNA (1)...(19): siRNA sense strand
gcauagaggucaagcuuuu

SEQ ID NO: 2632251 - RNA, 19 nt, Homo sapiens
  misc_RNA (1)...(19): siRNA sense strand
uaucagagcuucagguuca

SEQ ID NO: 2632252 - RNA, 19 nt, Homo sapiens
  misc_RNA (1)...(19): siRNA sense strand
caacaguggaugagcccaa

SEQ ID NO: 2632253 - RNA, 19 nt, Homo sapiens
  misc_RNA (1)...(19): siRNA sense strand
aaagaugccuugaaagaau

SEQ ID NO: 2632254 - RNA, 19 nt, Homo sapiens
  misc_RNA (1)...(19): siRNA sense strand
gcauuugcacagagggaau

SEQ ID NO: 2632255 - RNA, 19 nt, Homo sapiens
  misc_RNA (1)...(19): siRNA sense strand
auguuaagacucagcgaaa

SEQ ID NO: 2632256 - RNA, 19 nt, Homo sapiens
  misc_RNA (1)...(19): siRNA sense strand
gcagaugccucguguauga

SEQ ID NO: 2632257 - RNA, 19 nt, Homo sapiens
  misc_RNA (1)...(19): siRNA sense strand
gagcaagagucccuuauua

SEQ ID NO: 2632258 - RNA, 19 nt, Homo sapiens
  misc_RNA (1)...(19): siRNA sense strand
gauaagaaacauccagaau

SEQ ID NO: 2632259 - RNA, 19 nt, Homo sapiens
  misc_RNA (1)...(19): siRNA sense strand
ggacugaagugaagcccau

SEQ ID NO: 2632260 - RNA, 19 nt, Homo sapiens
  misc_RNA (1)...(19): siRNA sense strand
ucacugaagcuuugaguuu

SEQ ID NO: 2632261 - RNA, 19 nt, Homo sapiens
  misc_RNA (1)...(19): siRNA sense strand
acagugaagaucugaauaa

SEQ ID NO: 2632262 - RNA, 19 nt, Homo sapiens
  misc_RNA (1)...(19): siRNA sense strand
gggcagacggugagagauc

SEQ ID NO: 2632263 - RNA, 19 nt, Homo sapiens
  misc_RNA (1)...(19): siRNA sense strand
guuaaaggaaugccaauua

SEQ ID NO: 2632264 - RNA, 19 nt, Homo sapiens
  misc_RNA (1)...(19): siRNA sense strand
cugacaaagagcagccaaa

SEQ ID NO: 2632265 - RNA, 19 nt, Homo sapiens
  misc_RNA (1)...(19): siRNA sense strand
augaaaaccuccaugaaaa

SEQ ID NO: 2632266 - RNA, 19 nt, Homo sapiens
  misc_RNA (1)...(19): siRNA sense strand
gaacuugagcuuugauauu

SEQ ID NO: 2632267 - RNA, 19 nt, Homo sapiens
  misc_RNA (1)...(19): siRNA sense strand
guacggaguuuguggucau

SEQ ID NO: 2632268 - RNA, 19 nt, Homo sapiens
  misc_RNA (1)...(19): siRNA sense strand
caauauaacaagcugaaga

SEQ ID NO: 2632269 - RNA, 19 nt, Homo sapiens
  misc_RNA (1)...(19): siRNA sense strand
aaagaaagaugccuugaaa

SEQ ID NO: 2632270 - RNA, 19 nt, Homo sapiens
  misc_RNA (1)...(19): siRNA sense strand
cgacaugauuucuuugaau

SEQ ID NO: 2632271 - RNA, 19 nt, Homo sapiens
  misc_RNA (1)...(19): siRNA sense strand
ggucaaggucaauguaaca

SEQ ID NO: 2632272 - RNA, 19 nt, Homo sapiens
  misc_RNA (1)...(19): siRNA sense strand
cagaaucagagguggaaaa

SEQ ID NO: 2632273 - RNA, 19 nt, Homo sapiens
  misc_RNA (1)...(19): siRNA sense strand
aggagaagcuguuggaaag

SEQ ID NO: 2632274 - RNA, 19 nt, Homo sapiens
  misc_RNA (1)...(19): siRNA sense strand
ggaagaacuagcagagagu

SEQ ID NO: 2632275 - RNA, 19 nt, Homo sapiens
  misc_RNA (1)...(19): siRNA sense strand
ccuuuaucuuagaggaaaa

SEQ ID NO: 2632276 - RNA, 19 nt, Homo sapiens
  misc_RNA (1)...(19): siRNA sense strand
gaacuacauuucagaucua

SEQ ID NO: 2632277 - RNA, 19 nt, Homo sapiens
  misc_RNA (1)...(19): siRNA sense strand
gaagaaugcuuuugacgaa

SEQ ID NO: 2632278 - RNA, 19 nt, Homo sapiens
  misc_RNA (1)...(19): siRNA sense strand
ugacgaacacccaagauaa

SEQ ID NO: 2632279 - RNA, 19 nt, Homo sapiens
  misc_RNA (1)...(19): siRNA sense strand
guuaaugucucaaugggua

SEQ ID NO: 2632280 - RNA, 19 nt, Homo sapiens
  misc_RNA (1)...(19): siRNA sense strand
cugaguuguuggugggaca

SEQ ID NO: 2632281 - RNA, 19 nt, Homo sapiens
  misc_RNA (1)...(19): siRNA sense strand
gcuaagaacagcagcacca

SEQ ID NO: 2632282 - RNA, 19 nt, Homo sapiens
  misc_RNA (1)...(19): siRNA sense strand
caugguuggacgagugaaa

SEQ ID NO: 2632283 - RNA, 19 nt, Homo sapiens
  misc_RNA (1)...(19): siRNA sense strand
cauaagaacuugagcuuug

SEQ ID NO: 2632284 - RNA, 19 nt, Homo sapiens
  misc_RNA (1)...(19): siRNA sense strand
uggaggacuuauuggagaa

SEQ ID NO: 2632285 - RNA, 19 nt, Homo sapiens
  misc_RNA (1)...(19): siRNA sense strand
acaccaaacuggaucucaa

SEQ ID NO: 2632286 - RNA, 19 nt, Homo sapiens
  misc_RNA (1)...(19): siRNA sense strand
aagcaaauguguccaaauu

SEQ ID NO: 2632287 - RNA, 19 nt, Homo sapiens
  misc_RNA (1)...(19): siRNA sense strand
ccacagugcucaccuauaa

SEQ ID NO: 2632288 - RNA, 19 nt, Homo sapiens
  misc_RNA (1)...(19): siRNA sense strand
gaacauuaucagauggcuu

SEQ ID NO: 2632289 - RNA, 19 nt, Homo sapiens
  misc_RNA (1)...(19): siRNA sense strand
gaaaggagaggcaggugaa

SEQ ID NO: 2632290 - RNA, 19 nt, Homo sapiens
  misc_RNA (1)...(19): siRNA sense strand
ccacagaugacaaggagga

SEQ ID NO: 2632291 - RNA, 19 nt, Homo sapiens
  misc_RNA (1)...(19): siRNA sense strand
cagcagagcaacaggagca

SEQ ID NO: 2632292 - RNA, 19 nt, Homo sapiens
  misc_RNA (1)...(19): siRNA sense strand
ggaaaguuauggugcugau

SEQ ID NO: 2632293 - RNA, 19 nt, Homo sapiens
  misc_RNA (1)...(19): siRNA sense strand
gugaauugcaaguggauac

SEQ ID NO: 2632294 - RNA, 19 nt, Homo sapiens
  misc_RNA (1)...(19): siRNA sense strand
uggagaaccugcugagcca

SEQ ID NO: 2632295 - RNA, 19 nt, Homo sapiens
  misc_RNA (1)...(19): siRNA sense strand
uguccaaggaugagagaac

SEQ ID NO: 2632296 - RNA, 19 nt, Homo sapiens
  misc_RNA (1)...(19): siRNA sense strand
agguggaagugaauugcaa

SEQ ID NO: 2632297 - RNA, 19 nt, Homo sapiens
  misc_RNA (1)...(19): siRNA sense strand
gucaagcagaggagagauu

SEQ ID NO: 2632298 - RNA, 19 nt, Homo sapiens
  misc_RNA (1)...(19): siRNA sense strand
ugaugaagaaagugaggca

SEQ ID NO: 2632299 - RNA, 19 nt, Homo sapiens
  misc_RNA (1)...(19): siRNA sense strand
uuuaugaccuggaggcaga

SEQ ID NO: 2632300 - RNA, 19 nt, Homo sapiens
  misc_RNA (1)...(19): siRNA sense strand
gggucaagcagaggagaga

SEQ ID NO: 2632301 - RNA, 19 nt, Homo sapiens
  misc_RNA (1)...(19): siRNA sense strand
ccagagcagaagaaggaga

SEQ ID NO: 2632302 - RNA, 19 nt, Homo sapiens
  misc_RNA (1)...(19): siRNA sense strand
ggucugaagcuauggccca

SEQ ID NO: 2632303 - RNA, 19 nt, Homo sapiens
  misc_RNA (1)...(19): siRNA sense strand
gcuguaagaagcugaaaau

SEQ ID NO: 2632304 - RNA, 19 nt, Homo sapiens
  misc_RNA (1)...(19): siRNA sense strand
gcaaguggauacugcccau

SEQ ID NO: 2632305 - RNA, 19 nt, Homo sapiens
  misc_RNA (1)...(19): siRNA sense strand
agcugaaaauuuugggaau

SEQ ID NO: 2632306 - RNA, 19 nt, Homo sapiens
  misc_RNA (1)...(19): siRNA sense strand
gcaggaaaguuauggugcu

SEQ ID NO: 2632307 - RNA, 19 nt, Homo sapiens
  misc_RNA (1)...(19): siRNA sense strand
cuucagcuucuguggaaau

SEQ ID NO: 2632308 - RNA, 19 nt, Homo sapiens
  misc_RNA (1)...(19): siRNA sense strand
gaaucagacuugaagcauc

SEQ ID NO: 2632309 - RNA, 19 nt, Homo sapiens
  misc_RNA (1)...(19): siRNA sense strand
cguuaaaaguccucacaau

SEQ ID NO: 2632310 - RNA, 19 nt, Homo sapiens
  misc_RNA (1)...(19): siRNA sense strand
gugaauugcaaguggguac

SEQ ID NO: 2632311 - RNA, 19 nt, Homo sapiens
  misc_RNA (1)...(19): siRNA sense strand
acuuauguguggagcugua

SEQ ID NO: 2632312 - RNA, 19 nt, Homo sapiens
  misc_RNA (1)...(19): siRNA sense strand
guuaaaaguccucacaaua

SEQ ID NO: 2632313 - RNA, 19 nt, Homo sapiens
  misc_RNA (1)...(19): siRNA sense strand
uggagaaccugcugagcca

SEQ ID NO: 2632314 - RNA, 19 nt, Homo sapiens
  misc_RNA (1)...(19): siRNA sense strand
agguggaagugaauugcaa

SEQ ID NO: 2632315 - RNA, 19 nt, Homo sapiens
  misc_RNA (1)...(19): siRNA sense strand
uuuaugaccuggaggcaga

SEQ ID NO: 2632316 - RNA, 19 nt, Homo sapiens
  misc_RNA (1)...(19): siRNA sense strand
gggucaagcagaggaaaga

SEQ ID NO: 2632317 - RNA, 19 nt, Homo sapiens
  misc_RNA (1)...(19): siRNA sense strand
ccagagcagaagaaggaga

SEQ ID NO: 2632318 - RNA, 19 nt, Homo sapiens
  misc_RNA (1)...(19): siRNA sense strand
cucaaugccaagaggaaca

SEQ ID NO: 2632319 - RNA, 19 nt, Homo sapiens
  misc_RNA (1)...(19): siRNA sense strand
ggucugaagcuauggccca

SEQ ID NO: 2632320 - RNA, 19 nt, Homo sapiens
  misc_RNA (1)...(19): siRNA sense strand
ucguagaacuuuggcucaa

SEQ ID NO: 2632321 - RNA, 19 nt, Homo sapiens
  misc_RNA (1)...(19): siRNA sense strand
gcuguaagaagcugaaaau

SEQ ID NO: 2632322 - RNA, 19 nt, Homo sapiens
  misc_RNA (1)...(19): siRNA sense strand
agcugaaaauuuugggaau

SEQ ID NO: 2632323 - RNA, 19 nt, Homo sapiens
  misc_RNA (1)...(19): siRNA sense strand
cuucagcuucuguggaaau

SEQ ID NO: 2632324 - RNA, 19 nt, Homo sapiens
  misc_RNA (1)...(19): siRNA sense strand
gaaucagacuugaagcauc

SEQ ID NO: 2632325 - RNA, 19 nt, Homo sapiens
  misc_RNA (1)...(19): siRNA sense strand
ccccagaggccaugaguaa

SEQ ID NO: 2632326 - RNA, 19 nt, Homo sapiens
  misc_RNA (1)...(19): siRNA sense strand
ccacuacagaagaggccua

SEQ ID NO: 2632327 - RNA, 19 nt, Homo sapiens
  misc_RNA (1)...(19): siRNA sense strand
gagcgugaguuguacguga

SEQ ID NO: 2632328 - RNA, 19 nt, Homo sapiens
  misc_RNA (1)...(19): siRNA sense strand
aggaaaguacacuggauga

SEQ ID NO: 2632329 - RNA, 19 nt, Homo sapiens
  misc_RNA (1)...(19): siRNA sense strand
uggaugaaugccugagcua

SEQ ID NO: 2632330 - RNA, 19 nt, Homo sapiens
  misc_RNA (1)...(19): siRNA sense strand
cagaagaggccuagugcac

SEQ ID NO: 2632331 - RNA, 19 nt, Homo sapiens
  misc_RNA (1)...(19): siRNA sense strand
uggaaaggauauacccaga

SEQ ID NO: 2632332 - RNA, 19 nt, Homo sapiens
  misc_RNA (1)...(19): siRNA sense strand
gccaugaguaagaggcaga

SEQ ID NO: 2632333 - RNA, 19 nt, Homo sapiens
  misc_RNA (1)...(19): siRNA sense strand
guucauagaccucugccua

SEQ ID NO: 2632334 - RNA, 19 nt, Homo sapiens
  misc_RNA (1)...(19): siRNA sense strand
cagaauuacucaaugccca

SEQ ID NO: 2632335 - RNA, 19 nt, Homo sapiens
  misc_RNA (1)...(19): siRNA sense strand
ccucuaaggacuugggcua

SEQ ID NO: 2632336 - RNA, 19 nt, Homo sapiens
  misc_RNA (1)...(19): siRNA sense strand
ggaagaagaaccagagcga

SEQ ID NO: 2632337 - RNA, 19 nt, Homo sapiens
  misc_RNA (1)...(19): siRNA sense strand
gaggaggagaggcgggaaa

SEQ ID NO: 2632338 - RNA, 19 nt, Homo sapiens
  misc_RNA (1)...(19): siRNA sense strand
agcgaaagaucgagagcau

SEQ ID NO: 2632339 - RNA, 19 nt, Homo sapiens
  misc_RNA (1)...(19): siRNA sense strand
cuaaaggauugguuggaca

SEQ ID NO: 2632340 - RNA, 19 nt, Homo sapiens
  misc_RNA (1)...(19): siRNA sense strand
gcaacaggaucgagaggcu

SEQ ID NO: 2632341 - RNA, 19 nt, Homo sapiens
  misc_RNA (1)...(19): siRNA sense strand
uggauaaaguuguggagcu

SEQ ID NO: 2632342 - RNA, 19 nt, Homo sapiens
  misc_RNA (1)...(19): siRNA sense strand
ggacagcaggcuacgggaa

SEQ ID NO: 2632343 - RNA, 19 nt, Homo sapiens
  misc_RNA (1)...(19): siRNA sense strand
ggauguaguuugugagacc

SEQ ID NO: 2632344 - RNA, 19 nt, Homo sapiens
  misc_RNA (1)...(19): siRNA sense strand
ggcugaaacuucugcccua

SEQ ID NO: 2632345 - RNA, 19 nt, Homo sapiens
  misc_RNA (1)...(19): siRNA sense strand
auaaaguuguggagcuaca

SEQ ID NO: 2632346 - RNA, 19 nt, Homo sapiens
  misc_RNA (1)...(19): siRNA sense strand
ccugugacauugugggcau

SEQ ID NO: 2632347 - RNA, 19 nt, Homo sapiens
  misc_RNA (1)...(19): siRNA sense strand
ccuacaaucccaagaaaau

SEQ ID NO: 2632348 - RNA, 19 nt, Homo sapiens
  misc_RNA (1)...(19): siRNA sense strand
gggaauaaccgcaucucga

SEQ ID NO: 2632349 - RNA, 19 nt, Homo sapiens
  misc_RNA (1)...(19): siRNA sense strand
cauuuuagaaccagacaaa

SEQ ID NO: 2632350 - RNA, 19 nt, Homo sapiens
  misc_RNA (1)...(19): siRNA sense strand
cggcaauagccucccggaa

SEQ ID NO: 2632351 - RNA, 19 nt, Homo sapiens
  misc_RNA (1)...(19): siRNA sense strand
aggauugguuggacagcau

SEQ ID NO: 2632352 - RNA, 19 nt, Homo sapiens
  misc_RNA (1)...(19): siRNA sense strand
gucaugaagcgcaggaaga

SEQ ID NO: 2632353 - RNA, 19 nt, Homo sapiens
  misc_RNA (1)...(19): siRNA sense strand
ggaacuuugcccaaggaga

SEQ ID NO: 2632354 - RNA, 19 nt, Homo sapiens
  misc_RNA (1)...(19): siRNA sense strand
ucuugcagcacauggauaa

SEQ ID NO: 2632355 - RNA, 19 nt, Homo sapiens
  misc_RNA (1)...(19): siRNA sense strand
acggaagggacuuggacga

SEQ ID NO: 2632356 - RNA, 19 nt, Homo sapiens
  misc_RNA (1)...(19): siRNA sense strand
gccucuaccugaauggcaa

SEQ ID NO: 2632357 - RNA, 19 nt, Homo sapiens
  misc_RNA (1)...(19): siRNA sense strand
gcaugaagcugugggugga

SEQ ID NO: 2632358 - RNA, 19 nt, Homo sapiens
  misc_RNA (1)...(19): siRNA sense strand
uuguagaacccaaccggaa

SEQ ID NO: 2632359 - RNA, 19 nt, Homo sapiens
  misc_RNA (1)...(19): siRNA sense strand
gggacuuggacgagguauc

SEQ ID NO: 2632360 - RNA, 19 nt, Homo sapiens
  misc_RNA (1)...(19): siRNA sense strand
aagcaggaacuuugcccaa

SEQ ID NO: 2632361 - RNA, 19 nt, Homo sapiens
  misc_RNA (1)...(19): siRNA sense strand
cguaaaugcugguggacaa

SEQ ID NO: 2632362 - RNA, 19 nt, Homo sapiens
  misc_RNA (1)...(19): siRNA sense strand
caucaaagcaagagaaauu

SEQ ID NO: 2632363 - RNA, 19 nt, Homo sapiens
  misc_RNA (1)...(19): siRNA sense strand
ggaagaagacacugaaaua

SEQ ID NO: 2632364 - RNA, 19 nt, Homo sapiens
  misc_RNA (1)...(19): siRNA sense strand
gaagagaaggauagagaaa

SEQ ID NO: 2632365 - RNA, 19 nt, Homo sapiens
  misc_RNA (1)...(19): siRNA sense strand
gcacaaagagcaaaggaaa

SEQ ID NO: 2632366 - RNA, 19 nt, Homo sapiens
  misc_RNA (1)...(19): siRNA sense strand
cauuaaagagcaagagaaa

SEQ ID NO: 2632367 - RNA, 19 nt, Homo sapiens
  misc_RNA (1)...(19): siRNA sense strand
acaugaaggucaagauaaa

SEQ ID NO: 2632368 - RNA, 19 nt, Homo sapiens
  misc_RNA (1)...(19): siRNA sense strand
agacaaaccuagaaagaga

SEQ ID NO: 2632369 - RNA, 19 nt, Homo sapiens
  misc_RNA (1)...(19): siRNA sense strand
aagcaaagguugaugaaau

SEQ ID NO: 2632370 - RNA, 19 nt, Homo sapiens
  misc_RNA (1)...(19): siRNA sense strand
agacaaagacagaguggaa

SEQ ID NO: 2632371 - RNA, 19 nt, Homo sapiens
  misc_RNA (1)...(19): siRNA sense strand
ccuagaaggaaaugggaua

SEQ ID NO: 2632372 - RNA, 19 nt, Homo sapiens
  misc_RNA (1)...(19): siRNA sense strand
gaauggaauccuagaauaa

SEQ ID NO: 2632373 - RNA, 19 nt, Homo sapiens
  misc_RNA (1)...(19): siRNA sense strand
ggaagugauacaagagaaa

SEQ ID NO: 2632374 - RNA, 19 nt, Homo sapiens
  misc_RNA (1)...(19): siRNA sense strand
aaacaaaugggaagaguaa

SEQ ID NO: 2632375 - RNA, 19 nt, Homo sapiens
  misc_RNA (1)...(19): siRNA sense strand
gggaaaaggcagaguuuaa

SEQ ID NO: 2632376 - RNA, 19 nt, Homo sapiens
  misc_RNA (1)...(19): siRNA sense strand
agagaaagauucaggaaga

SEQ ID NO: 2632377 - RNA, 19 nt, Homo sapiens
  misc_RNA (1)...(19): siRNA sense strand
cagauuaaaugcagagaau

SEQ ID NO: 2632378 - RNA, 19 nt, Homo sapiens
  misc_RNA (1)...(19): siRNA sense strand
gaaagaagacagaguacaa

SEQ ID NO: 2632379 - RNA, 19 nt, Homo sapiens
  misc_RNA (1)...(19): siRNA sense strand
guggaaaacuagagagcaa

SEQ ID NO: 2632380 - RNA, 19 nt, Homo sapiens
  misc_RNA (1)...(19): siRNA sense strand
gcauaaaagcagugaagaa

SEQ ID NO: 2632381 - RNA, 19 nt, Homo sapiens
  misc_RNA (1)...(19): siRNA sense strand
cagaaagccaagaaagaaa

SEQ ID NO: 2632382 - RNA, 19 nt, Homo sapiens
  misc_RNA (1)...(19): siRNA sense strand
aguaaaggacagaaggaua

SEQ ID NO: 2632383 - RNA, 19 nt, Homo sapiens
  misc_RNA (1)...(19): siRNA sense strand
gaggaagccaugagaauaa

SEQ ID NO: 2632384 - RNA, 19 nt, Homo sapiens
  misc_RNA (1)...(19): siRNA sense strand
cagcauacaucuaaagcaa

SEQ ID NO: 2632385 - RNA, 19 nt, Homo sapiens
  misc_RNA (1)...(19): siRNA sense strand
guucacauguauugggaaa

SEQ ID NO: 2632386 - RNA, 19 nt, Homo sapiens
  misc_RNA (1)...(19): siRNA sense strand
gcaagaugcaagaagguaa

SEQ ID NO: 2632387 - RNA, 19 nt, Homo sapiens
  misc_RNA (1)...(19): siRNA sense strand
cuggauacaaggagagaaa

SEQ ID NO: 2632388 - RNA, 19 nt, Homo sapiens
  misc_RNA (1)...(19): siRNA sense strand
gaaacuugcuccagagaau

SEQ ID NO: 2632389 - RNA, 19 nt, Homo sapiens
  misc_RNA (1)...(19): siRNA sense strand
cagaaagaagagaaggaua

SEQ ID NO: 2632390 - RNA, 19 nt, Homo sapiens
  misc_RNA (1)...(19): siRNA sense strand
ccugaaaccuuaaggaaaa

SEQ ID NO: 2632391 - RNA, 19 nt, Homo sapiens
  misc_RNA (1)...(19): siRNA sense strand
gcuuaauacucaaugcaua

SEQ ID NO: 2632392 - RNA, 19 nt, Homo sapiens
  misc_RNA (1)...(19): siRNA sense strand
caacagaaggacaggagaa

SEQ ID NO: 2632393 - RNA, 19 nt, Homo sapiens
  misc_RNA (1)...(19): siRNA sense strand
gaucagaaaggcagauuaa

SEQ ID NO: 2632394 - RNA, 19 nt, Homo sapiens
  misc_RNA (1)...(19): siRNA sense strand
cugaagaugugaugaagaa

SEQ ID NO: 2632395 - RNA, 19 nt, Homo sapiens
  misc_RNA (1)...(19): siRNA sense strand
gucacuagcugaagggaua

SEQ ID NO: 2632396 - RNA, 19 nt, Homo sapiens
  misc_RNA (1)...(19): siRNA sense strand
agaauaacacugagaagaa

SEQ ID NO: 2632397 - RNA, 19 nt, Homo sapiens
  misc_RNA (1)...(19): siRNA sense strand
caagagaagcagugaaaca

SEQ ID NO: 2632398 - RNA, 19 nt, Homo sapiens
  misc_RNA (1)...(19): siRNA sense strand
gagauagacaugagaauau

SEQ ID NO: 2632399 - RNA, 19 nt, Homo sapiens
  misc_RNA (1)...(19): siRNA sense strand
caugagaauaucaggguua

SEQ ID NO: 2632400 - RNA, 19 nt, Homo sapiens
  misc_RNA (1)...(19): siRNA sense strand
cggaaacagauguggacaa

SEQ ID NO: 2632401 - RNA, 19 nt, Homo sapiens
  misc_RNA (1)...(19): siRNA sense strand
gaaucagaaagaagggaaa

SEQ ID NO: 2632402 - RNA, 19 nt, Homo sapiens
  misc_RNA (1)...(19): siRNA sense strand
aggaagagguacaagaaaa

SEQ ID NO: 2632403 - RNA, 19 nt, Homo sapiens
  misc_RNA (1)...(19): siRNA sense strand
aggaagaaguacaagaaaa

SEQ ID NO: 2632404 - RNA, 19 nt, Homo sapiens
  misc_RNA (1)...(19): siRNA sense strand
gcagaaagacaaagacaga

SEQ ID NO: 2632405 - RNA, 19 nt, Homo sapiens
  misc_RNA (1)...(19): siRNA sense strand
cacaauagaaggagaggaa

SEQ ID NO: 2632406 - RNA, 19 nt, Homo sapiens
  misc_RNA (1)...(19): siRNA sense strand
guggaaaaguaaagaacaa

SEQ ID NO: 2632407 - RNA, 19 nt, Homo sapiens
  misc_RNA (1)...(19): siRNA sense strand
gcacaaggccagcaacaaa

SEQ ID NO: 2632408 - RNA, 19 nt, Homo sapiens
  misc_RNA (1)...(19): siRNA sense strand
auacaagagaaauggguua

SEQ ID NO: 2632409 - RNA, 19 nt, Homo sapiens
  misc_RNA (1)...(19): siRNA sense strand
aaaccaaggaaguaggaaa

SEQ ID NO: 2632410 - RNA, 19 nt, Homo sapiens
  misc_RNA (1)...(19): siRNA sense strand
gagaggaagccaugagaau

SEQ ID NO: 2632411 - RNA, 19 nt, Homo sapiens
  misc_RNA (1)...(19): siRNA sense strand
agaacaaggaagaggauga

SEQ ID NO: 2632412 - RNA, 19 nt, Homo sapiens
  misc_RNA (1)...(19): siRNA sense strand
aguugaaggcguugauaaa

SEQ ID NO: 2632413 - RNA, 19 nt, Homo sapiens
  misc_RNA (1)...(19): siRNA sense strand
uaccauaagaagugggaaa

SEQ ID NO: 2632414 - RNA, 19 nt, Homo sapiens
  misc_RNA (1)...(19): siRNA sense strand
gugaaaugucuaagagaga

SEQ ID NO: 2632415 - RNA, 19 nt, Homo sapiens
  misc_RNA (1)...(19): siRNA sense strand
ccucagaagugaaaugaau

SEQ ID NO: 2632416 - RNA, 19 nt, Homo sapiens
  misc_RNA (1)...(19): siRNA sense strand
gggaauugguauuacagaa

SEQ ID NO: 2632417 - RNA, 19 nt, Homo sapiens
  misc_RNA (1)...(19): siRNA sense strand
uaugaaagccggagcuaua

SEQ ID NO: 2632418 - RNA, 19 nt, Homo sapiens
  misc_RNA (1)...(19): siRNA sense strand
aagaaggaagauagagaaa

SEQ ID NO: 2632419 - RNA, 19 nt, Homo sapiens
  misc_RNA (1)...(19): siRNA sense strand
uuuagaagcugaagaacua

SEQ ID NO: 2632420 - RNA, 19 nt, Homo sapiens
  misc_RNA (1)...(19): siRNA sense strand
cauuagaguuuauaggcaa

SEQ ID NO: 2632421 - RNA, 19 nt, Homo sapiens
  misc_RNA (1)...(19): siRNA sense strand
cagaaaacuucauggcaaa

SEQ ID NO: 2632422 - RNA, 19 nt, Homo sapiens
  misc_RNA (1)...(19): siRNA sense strand
gagcagaaacagaacuuua

SEQ ID NO: 2632423 - RNA, 19 nt, Homo sapiens
  misc_RNA (1)...(19): siRNA sense strand
ccuuguaaagaaagagaaa

SEQ ID NO: 2632424 - RNA, 19 nt, Homo sapiens
  misc_RNA (1)...(19): siRNA sense strand
ggagaaggagagaggaaga

SEQ ID NO: 2632425 - RNA, 19 nt, Homo sapiens
  misc_RNA (1)...(19): siRNA sense strand
gagaaaugcuacugguuca

SEQ ID NO: 2632426 - RNA, 19 nt, Homo sapiens
  misc_RNA (1)...(19): siRNA sense strand
ccaaguaauggaagugaua

SEQ ID NO: 2632427 - RNA, 19 nt, Homo sapiens
  misc_RNA (1)...(19): siRNA sense strand
uuacagaggaagaggaaga

SEQ ID NO: 2632428 - RNA, 19 nt, Homo sapiens
  misc_RNA (1)...(19): siRNA sense strand
gggcagaucccaagacauu

SEQ ID NO: 2632429 - RNA, 19 nt, Homo sapiens
  misc_RNA (1)...(19): siRNA sense strand
gaaggaagauagagaaaau

SEQ ID NO: 2632430 - RNA, 19 nt, Homo sapiens
  misc_RNA (1)...(19): siRNA sense strand
caaacgaacagcaggcaaa

SEQ ID NO: 2632431 - RNA, 19 nt, Homo sapiens
  misc_RNA (1)...(19): siRNA sense strand
gaaggaaggaggagggugu

SEQ ID NO: 2632432 - RNA, 19 nt, Homo sapiens
  misc_RNA (1)...(19): siRNA sense strand
gaagaaauaaggaaggaag

SEQ ID NO: 2632433 - RNA, 19 nt, Homo sapiens
  misc_RNA (1)...(19): siRNA sense strand
agaagaaauaaggaaggaa

SEQ ID NO: 2632434 - RNA, 19 nt, Homo sapiens
  misc_RNA (1)...(19): siRNA sense strand
ucaucaaguaaaagggauu

SEQ ID NO: 2632435 - RNA, 19 nt, Homo sapiens
  misc_RNA (1)...(19): siRNA sense strand
aggaaaugucaaugagaaa

SEQ ID NO: 2632436 - RNA, 19 nt, Homo sapiens
  misc_RNA (1)...(19): siRNA sense strand
gagaaagcucugugaggaa

SEQ ID NO: 2632437 - RNA, 19 nt, Homo sapiens
  misc_RNA (1)...(19): siRNA sense strand
gccuacaguugcagagaaa

SEQ ID NO: 2632438 - RNA, 19 nt, Homo sapiens
  misc_RNA (1)...(19): siRNA sense strand
gugaaaaugucgugaucaa

SEQ ID NO: 2632439 - RNA, 19 nt, Homo sapiens
  misc_RNA (1)...(19): siRNA sense strand
gggcuuuggauuugcaaua

SEQ ID NO: 2632440 - RNA, 19 nt, Homo sapiens
  misc_RNA (1)...(19): siRNA sense strand
ggacaagacuggcagcaga

SEQ ID NO: 2632441 - RNA, 19 nt, Homo sapiens
  misc_RNA (1)...(19): siRNA sense strand
gugcaauggacaauauaaa

SEQ ID NO: 2632442 - RNA, 19 nt, Homo sapiens
  misc_RNA (1)...(19): siRNA sense strand
caacaaaaggucuguguaa

SEQ ID NO: 2632443 - RNA, 19 nt, Homo sapiens
  misc_RNA (1)...(19): siRNA sense strand
cguaauucuagcagcaaua

SEQ ID NO: 2632444 - RNA, 19 nt, Homo sapiens
  misc_RNA (1)...(19): siRNA sense strand
ugaaagcagaggagagauu

SEQ ID NO: 2632445 - RNA, 19 nt, Homo sapiens
  misc_RNA (1)...(19): siRNA sense strand
cgaaauugccugggaagaa

SEQ ID NO: 2632446 - RNA, 19 nt, Homo sapiens
  misc_RNA (1)...(19): siRNA sense strand
gggaacaaucagaucuaua

SEQ ID NO: 2632447 - RNA, 19 nt, Homo sapiens
  misc_RNA (1)...(19): siRNA sense strand
gcuuggagguggagaaucu

SEQ ID NO: 2632448 - RNA, 19 nt, Homo sapiens
  misc_RNA (1)...(19): siRNA sense strand
aggaaaucacuaauggaua

SEQ ID NO: 2632449 - RNA, 19 nt, Homo sapiens
  misc_RNA (1)...(19): siRNA sense strand
cuuuaaauuccgaggacau

SEQ ID NO: 2632450 - RNA, 19 nt, Homo sapiens
  misc_RNA (1)...(19): siRNA sense strand
uuucaaagacacagggaca

SEQ ID NO: 2632451 - RNA, 19 nt, Homo sapiens
  misc_RNA (1)...(19): siRNA sense strand
gcaaaagaaccgaugacaa

SEQ ID NO: 2632452 - RNA, 19 nt, Homo sapiens
  misc_RNA (1)...(19): siRNA sense strand
gggacagaauccagcucua

SEQ ID NO: 2632453 - RNA, 19 nt, Homo sapiens
  misc_RNA (1)...(19): siRNA sense strand
cugaguuuauugaggaaau

SEQ ID NO: 2632454 - RNA, 19 nt, Homo sapiens
  misc_RNA (1)...(19): siRNA sense strand
guggagaaucuguucguaa

SEQ ID NO: 2632455 - RNA, 19 nt, Homo sapiens
  misc_RNA (1)...(19): siRNA sense strand
cauacagauugcugaguuu

SEQ ID NO: 2632456 - RNA, 19 nt, Homo sapiens
  misc_RNA (1)...(19): siRNA sense strand
aaggagaauuguugcauuu

SEQ ID NO: 2632457 - RNA, 19 nt, Homo sapiens
  misc_RNA (1)...(19): siRNA sense strand
gcgaagaauccgaaaguuc

SEQ ID NO: 2632458 - RNA, 19 nt, Homo sapiens
  misc_RNA (1)...(19): siRNA sense strand
cuuaucaucuggaggaaau

SEQ ID NO: 2632459 - RNA, 19 nt, Homo sapiens
  misc_RNA (1)...(19): siRNA sense strand
cuuagaagccuuuggacau

SEQ ID NO: 2632460 - RNA, 19 nt, Homo sapiens
  misc_RNA (1)...(19): siRNA sense strand
ccucaaagaccacgguaca

SEQ ID NO: 2632461 - RNA, 19 nt, Homo sapiens
  misc_RNA (1)...(19): siRNA sense strand
ggaugaaaauggaguggau

SEQ ID NO: 2632462 - RNA, 19 nt, Homo sapiens
  misc_RNA (1)...(19): siRNA sense strand
cuacaaagucuccuagaau

SEQ ID NO: 2632463 - RNA, 19 nt, Homo sapiens
  misc_RNA (1)...(19): siRNA sense strand
ccguguacgaggagaugaa

SEQ ID NO: 2632464 - RNA, 19 nt, Homo sapiens
  misc_RNA (1)...(19): siRNA sense strand
ggagagauuuccaaagguu

SEQ ID NO: 2632465 - RNA, 19 nt, Homo sapiens
  misc_RNA (1)...(19): siRNA sense strand
agacauuggauauuggaau

SEQ ID NO: 2632466 - RNA, 19 nt, Homo sapiens
  misc_RNA (1)...(19): siRNA sense strand
agaaauuacuuccgagacu

SEQ ID NO: 2632467 - RNA, 19 nt, Homo sapiens
  misc_RNA (1)...(19): siRNA sense strand
gcauuuaugaccugugcaa

SEQ ID NO: 2632468 - RNA, 19 nt, Homo sapiens
  misc_RNA (1)...(19): siRNA sense strand
cuucagagaccaaugagua

SEQ ID NO: 2632469 - RNA, 19 nt, Homo sapiens
  misc_RNA (1)...(19): siRNA sense strand
gaggaguuuaagauggaaa

SEQ ID NO: 2632470 - RNA, 19 nt, Homo sapiens
  misc_RNA (1)...(19): siRNA sense strand
uggaacaaguggcuggaau

SEQ ID NO: 2632471 - RNA, 19 nt, Homo sapiens
  misc_RNA (1)...(19): siRNA sense strand
ggcugaagcaugcgaagaa

SEQ ID NO: 2632472 - RNA, 19 nt, Homo sapiens
  misc_RNA (1)...(19): siRNA sense strand
gcagcuuggagguggagaa

SEQ ID NO: 2632473 - RNA, 19 nt, Homo sapiens
  misc_RNA (1)...(19): siRNA sense strand
gcacuacgcaggaagggua

SEQ ID NO: 2632474 - RNA, 19 nt, Homo sapiens
  misc_RNA (1)...(19): siRNA sense strand
ugaccuaucuggaugaaaa

SEQ ID NO: 2632475 - RNA, 19 nt, Homo sapiens
  misc_RNA (1)...(19): siRNA sense strand
ccgagcaggucaagcuaau

SEQ ID NO: 2632476 - RNA, 19 nt, Homo sapiens
  misc_RNA (1)...(19): siRNA sense strand
gcaugcagacauuggauau

SEQ ID NO: 2632477 - RNA, 19 nt, Homo sapiens
  misc_RNA (1)...(19): siRNA sense strand
cagcauauucuccugguaa

SEQ ID NO: 2632478 - RNA, 19 nt, Homo sapiens
  misc_RNA (1)...(19): siRNA sense strand
agaccaaugaguauguuaa

SEQ ID NO: 2632479 - RNA, 19 nt, Homo sapiens
  misc_RNA (1)...(19): siRNA sense strand
gacccuaguacgucagaaa

SEQ ID NO: 2632480 - RNA, 19 nt, Homo sapiens
  misc_RNA (1)...(19): siRNA sense strand
caacaugaccaaugagaag

SEQ ID NO: 2632481 - RNA, 19 nt, Homo sapiens
  misc_RNA (1)...(19): siRNA sense strand
cuagaauccucaaacacaa

SEQ ID NO: 2632482 - RNA, 19 nt, Homo sapiens
  misc_RNA (1)...(19): siRNA sense strand
gaaggaugggaaugggaau

SEQ ID NO: 2632483 - RNA, 19 nt, Homo sapiens
  misc_RNA (1)...(19): siRNA sense strand
gaggagugugcuucggaaa

SEQ ID NO: 2632484 - RNA, 19 nt, Homo sapiens
  misc_RNA (1)...(19): siRNA sense strand
gagaaaggggaucaggaaa

SEQ ID NO: 2632485 - RNA, 19 nt, Homo sapiens
  misc_RNA (1)...(19): siRNA sense strand
ugguuuaccugaagaagau

SEQ ID NO: 2632486 - RNA, 19 nt, Homo sapiens
  misc_RNA (1)...(19): siRNA sense strand
ucaaacaugucgugugcau

SEQ ID NO: 2632487 - RNA, 19 nt, Homo sapiens
  misc_RNA (1)...(19): siRNA sense strand
acaaguaucaacagaugaa

SEQ ID NO: 2632488 - RNA, 19 nt, Homo sapiens
  misc_RNA (1)...(19): siRNA sense strand
ucaacauaguagaugauca

SEQ ID NO: 2632489 - RNA, 19 nt, Homo sapiens
  misc_RNA (1)...(19): siRNA sense strand
ggagaaaggggaucaggaa

SEQ ID NO: 2632490 - RNA, 19 nt, Homo sapiens
  misc_RNA (1)...(19): siRNA sense strand
caauauugcaccuuggaga

SEQ ID NO: 2632491 - RNA, 19 nt, Homo sapiens
  misc_RNA (1)...(19): siRNA sense strand
ccuccacagucaagaugaa

SEQ ID NO: 2632492 - RNA, 19 nt, Homo sapiens
  misc_RNA (1)...(19): siRNA sense strand
agaaaagcaugcagacauu

SEQ ID NO: 2632493 - RNA, 19 nt, Homo sapiens
  misc_RNA (1)...(19): siRNA sense strand
gcaucacaacucaggaaau

SEQ ID NO: 2632494 - RNA, 19 nt, Homo sapiens
  misc_RNA (1)...(19): siRNA sense strand
ccgagacucaagacagaaa

SEQ ID NO: 2632495 - RNA, 19 nt, Homo sapiens
  misc_RNA (1)...(19): siRNA sense strand
aggagaaggcgucagauau

SEQ ID NO: 2632496 - RNA, 19 nt, Homo sapiens
  misc_RNA (1)...(19): siRNA sense strand
ggucaguggaaucaaauuu

SEQ ID NO: 2632497 - RNA, 19 nt, Homo sapiens
  misc_RNA (1)...(19): siRNA sense strand
acucaagacagaaaugcaa

SEQ ID NO: 2632498 - RNA, 19 nt, Homo sapiens
  misc_RNA (1)...(19): siRNA sense strand
cauugugggcuuuggauuu

SEQ ID NO: 2632499 - RNA, 19 nt, Homo sapiens
  misc_RNA (1)...(19): siRNA sense strand
auaucaagugcaaggagaa

SEQ ID NO: 2632500 - RNA, 19 nt, Homo sapiens
  misc_RNA (1)...(19): siRNA sense strand
uggagaaucuguucguaau

SEQ ID NO: 2632501 - RNA, 19 nt, Homo sapiens
  misc_RNA (1)...(19): siRNA sense strand
guucguaauucuagcagca

SEQ ID NO: 2632502 - RNA, 19 nt, Homo sapiens
  misc_RNA (1)...(19): siRNA sense strand
ggauaugauaauacgacga

SEQ ID NO: 2632503 - RNA, 19 nt, Homo sapiens
  misc_RNA (1)...(19): siRNA sense strand
guagauagauuuaaggagu

SEQ ID NO: 2632504 - RNA, 19 nt, Homo sapiens
  misc_RNA (1)...(19): siRNA sense strand
gauugaaauuggagcugga

SEQ ID NO: 2632505 - RNA, 19 nt, Homo sapiens
  misc_RNA (1)...(19): siRNA sense strand
ccucauuaccuuugaccau

SEQ ID NO: 2632506 - RNA, 19 nt, Homo sapiens
  misc_RNA (1)...(19): siRNA sense strand
acaccaaaaugaaaagcaa

SEQ ID NO: 2632507 - RNA, 19 nt, Homo sapiens
  misc_RNA (1)...(19): siRNA sense strand
ccgaaacaccaaaaugaaa

SEQ ID NO: 2632508 - RNA, 19 nt, Homo sapiens
  misc_RNA (1)...(19): siRNA sense strand
agcauuugccucagguuaa

SEQ ID NO: 2632509 - RNA, 19 nt, Homo sapiens
  misc_RNA (1)...(19): siRNA sense strand
aauucagguuggagaagga

SEQ ID NO: 2632510 - RNA, 19 nt, Homo sapiens
  misc_RNA (1)...(19): siRNA sense strand
ccuuugaccaucugugcaa

SEQ ID NO: 2632511 - RNA, 19 nt, Homo sapiens
  misc_RNA (1)...(19): siRNA sense strand
guacaaauccauaugggua

SEQ ID NO: 2632512 - RNA, 19 nt, Homo sapiens
  misc_RNA (1)...(19): siRNA sense strand
ggcauaaugaagaggcaaa

SEQ ID NO: 2632513 - RNA, 19 nt, Homo sapiens
  misc_RNA (1)...(19): siRNA sense strand
gcuuaguaguagugaguac

SEQ ID NO: 2632514 - RNA, 19 nt, Homo sapiens
  misc_RNA (1)...(19): siRNA sense strand
aauggaugcuggugggcua

SEQ ID NO: 2632515 - RNA, 19 nt, Homo sapiens
  misc_RNA (1)...(19): siRNA sense strand
guggaaaaggaaaguauua

SEQ ID NO: 2632516 - RNA, 19 nt, Homo sapiens
  misc_RNA (1)...(19): siRNA sense strand
cgauggauauuaagggcca

SEQ ID NO: 2632517 - RNA, 19 nt, Homo sapiens
  misc_RNA (1)...(19): siRNA sense strand
uuucagaggcacagacuau

SEQ ID NO: 2632518 - RNA, 19 nt, Homo sapiens
  misc_RNA (1)...(19): siRNA sense strand
auacaugaagcguggaaaa

SEQ ID NO: 2632519 - RNA, 19 nt, Homo sapiens
  misc_RNA (1)...(19): siRNA sense strand
ggauauuaagggccaggaa

SEQ ID NO: 2632520 - RNA, 19 nt, Homo sapiens
  misc_RNA (1)...(19): siRNA sense strand
acuacaaauagaugccaua

SEQ ID NO: 2632521 - RNA, 19 nt, Homo sapiens
  misc_RNA (1)...(19): siRNA sense strand
aguaguagugaguacauaa

SEQ ID NO: 2632522 - RNA, 19 nt, Homo sapiens
  misc_RNA (1)...(19): siRNA sense strand
gauuuggaugcgauggaua

SEQ ID NO: 2632523 - RNA, 19 nt, Homo sapiens
  misc_RNA (1)...(19): siRNA sense strand
uggugaugaacuacaaaua

SEQ ID NO: 2632524 - RNA, 19 nt, Homo sapiens
  misc_RNA (1)...(19): siRNA sense strand
cagaaaauacccugcaauu

SEQ ID NO: 2632525 - RNA, 19 nt, Homo sapiens
  misc_RNA (1)...(19): siRNA sense strand
caauggaaacacagaaacu

SEQ ID NO: 2632526 - RNA, 19 nt, Homo sapiens
  misc_RNA (1)...(19): siRNA sense strand
ggaccuuggaagccagcua

SEQ ID NO: 2632527 - RNA, 19 nt, Homo sapiens
  misc_RNA (1)...(19): siRNA sense strand
uagaaaugugcuacaguuu

SEQ ID NO: 2632528 - RNA, 19 nt, Homo sapiens
  misc_RNA (1)...(19): siRNA sense strand
uguuguuucuccugagcua

SEQ ID NO: 2632529 - RNA, 19 nt, Homo sapiens
  misc_RNA (1)...(19): siRNA sense strand
gcauaaugaagaggcaaau

SEQ ID NO: 2632530 - RNA, 19 nt, Homo sapiens
  misc_RNA (1)...(19): siRNA sense strand
uguugagcuuggugaugaa

SEQ ID NO: 2632531 - RNA, 19 nt, Homo sapiens
  misc_RNA (1)...(19): siRNA sense strand
aaacagauuuggaugcgau

SEQ ID NO: 2632532 - RNA, 19 nt, Homo sapiens
  misc_RNA (1)...(19): siRNA sense strand
agagcagguugauguggaa

SEQ ID NO: 2632533 - RNA, 19 nt, Homo sapiens
  misc_RNA (1)...(19): siRNA sense strand
cagaaaagugcaaaguuau

SEQ ID NO: 2632534 - RNA, 19 nt, Homo sapiens
  misc_RNA (1)...(19): siRNA sense strand
cauaaaugcuucuucacca

SEQ ID NO: 2632535 - RNA, 19 nt, Homo sapiens
  misc_RNA (1)...(19): siRNA sense strand
gcucaagaaagacaaccaa

SEQ ID NO: 2632536 - RNA, 19 nt, Homo sapiens
  misc_RNA (1)...(19): siRNA sense strand
ccaccagaacuccgaaaga

SEQ ID NO: 2632537 - RNA, 19 nt, Homo sapiens
  misc_RNA (1)...(19): siRNA sense strand
aagaaagacaaccaagaga

SEQ ID NO: 2632538 - RNA, 19 nt, Homo sapiens
  misc_RNA (1)...(19): siRNA sense strand
cggcauaaugaagaggcaa

SEQ ID NO: 2632539 - RNA, 19 nt, Homo sapiens
  misc_RNA (1)...(19): siRNA sense strand
aggcacagacuaugaaaau

SEQ ID NO: 2632540 - RNA, 19 nt, Homo sapiens
  misc_RNA (1)...(19): siRNA sense strand
cucaaagaagcucaagaaa

SEQ ID NO: 2632541 - RNA, 19 nt, Homo sapiens
  misc_RNA (1)...(19): siRNA sense strand
gcguggaaaaggaaaguau

SEQ ID NO: 2632542 - RNA, 19 nt, Homo sapiens
  misc_RNA (1)...(19): siRNA sense strand
cccuguaucuccugaguca

SEQ ID NO: 2632543 - RNA, 19 nt, Homo sapiens
  misc_RNA (1)...(19): siRNA sense strand
ccauuaagccauaagggaa

SEQ ID NO: 2632544 - RNA, 19 nt, Homo sapiens
  misc_RNA (1)...(19): siRNA sense strand
ugauggugacagaggaaua

SEQ ID NO: 2632545 - RNA, 19 nt, Homo sapiens
  misc_RNA (1)...(19): siRNA sense strand
ucccaagaucaaagagaaa

SEQ ID NO: 2632546 - RNA, 19 nt, Homo sapiens
  misc_RNA (1)...(19): siRNA sense strand
cuggcauaacggugggaaa

SEQ ID NO: 2632547 - RNA, 19 nt, Homo sapiens
  misc_RNA (1)...(19): siRNA sense strand
ugaagaaagcaaaugguga

SEQ ID NO: 2632548 - RNA, 19 nt, Homo sapiens
  misc_RNA (1)...(19): siRNA sense strand
ggugggaaagagaggaaaa

SEQ ID NO: 2632549 - RNA, 19 nt, Homo sapiens
  misc_RNA (1)...(19): siRNA sense strand
guuaaauguggcaaaucaa

SEQ ID NO: 2632550 - RNA, 19 nt, Homo sapiens
  misc_RNA (1)...(19): siRNA sense strand
ugauuguagcucugaagaa

SEQ ID NO: 2632551 - RNA, 19 nt, Homo sapiens
  misc_RNA (1)...(19): siRNA sense strand
acuuacaucccaagaucaa

SEQ ID NO: 2632552 - RNA, 19 nt, Homo sapiens
  misc_RNA (1)...(19): siRNA sense strand
acugauggugacagaggaa

SEQ ID NO: 2632553 - RNA, 19 nt, Homo sapiens
  misc_RNA (1)...(19): siRNA sense strand
cgaggaugugguagagcuu

SEQ ID NO: 2632554 - RNA, 19 nt, Homo sapiens
  misc_RNA (1)...(19): siRNA sense strand
gugaugaagaacuugaaaa

SEQ ID NO: 2632555 - RNA, 19 nt, Homo sapiens
  misc_RNA (1)...(19): siRNA sense strand
acggugggaaagagaggaa

SEQ ID NO: 2632556 - RNA, 19 nt, Homo sapiens
  misc_RNA (1)...(19): siRNA sense strand
aggcgcaauguuugagcaa

SEQ ID NO: 2632557 - RNA, 19 nt, Homo sapiens
  misc_RNA (1)...(19): siRNA sense strand
uggcaauagauucugguuu

SEQ ID NO: 2632558 - RNA, 19 nt, Homo sapiens
  misc_RNA (1)...(19): siRNA sense strand
gauucugguuucaggaacu

SEQ ID NO: 2632559 - RNA, 19 nt, Homo sapiens
  misc_RNA (1)...(19): siRNA sense strand
uugacgaggaugugguaga

SEQ ID NO: 2632560 - RNA, 19 nt, Homo sapiens
  misc_RNA (1)...(19): siRNA sense strand
cauaacggugggaaagaga

SEQ ID NO: 2632561 - RNA, 19 nt, Homo sapiens
  misc_RNA (1)...(19): siRNA sense strand
ccauuaagccauaagggaa

SEQ ID NO: 2632562 - RNA, 19 nt, Homo sapiens
  misc_RNA (1)...(19): siRNA sense strand
ugauggugacagaggaaua

SEQ ID NO: 2632563 - RNA, 19 nt, Homo sapiens
  misc_RNA (1)...(19): siRNA sense strand
ucccaagaucaaagagaaa

SEQ ID NO: 2632564 - RNA, 19 nt, Homo sapiens
  misc_RNA (1)...(19): siRNA sense strand
cuggcauaacggugggaaa

SEQ ID NO: 2632565 - RNA, 19 nt, Homo sapiens
  misc_RNA (1)...(19): siRNA sense strand
ugaagaaagcaaaugguga

SEQ ID NO: 2632566 - RNA, 19 nt, Homo sapiens
  misc_RNA (1)...(19): siRNA sense strand
ggugggaaagagaggaaaa

SEQ ID NO: 2632567 - RNA, 19 nt, Homo sapiens
  misc_RNA (1)...(19): siRNA sense strand
guuaaauguggcaaaucaa

SEQ ID NO: 2632568 - RNA, 19 nt, Homo sapiens
  misc_RNA (1)...(19): siRNA sense strand
ugauuguagcucugaagaa

SEQ ID NO: 2632569 - RNA, 19 nt, Homo sapiens
  misc_RNA (1)...(19): siRNA sense strand
acuuacaucccaagaucaa

SEQ ID NO: 2632570 - RNA, 19 nt, Homo sapiens
  misc_RNA (1)...(19): siRNA sense strand
acugauggugacagaggaa

SEQ ID NO: 2632571 - RNA, 19 nt, Homo sapiens
  misc_RNA (1)...(19): siRNA sense strand
cgaggaugugguagagcuu

SEQ ID NO: 2632572 - RNA, 19 nt, Homo sapiens
  misc_RNA (1)...(19): siRNA sense strand
gugaugaagaacuugaaaa

SEQ ID NO: 2632573 - RNA, 19 nt, Homo sapiens
  misc_RNA (1)...(19): siRNA sense strand
acggugggaaagagaggaa

SEQ ID NO: 2632574 - RNA, 19 nt, Homo sapiens
  misc_RNA (1)...(19): siRNA sense strand
aggcgcaauguuugagcaa

SEQ ID NO: 2632575 - RNA, 19 nt, Homo sapiens
  misc_RNA (1)...(19): siRNA sense strand
uggcaauagauucugguuu

SEQ ID NO: 2632576 - RNA, 19 nt, Homo sapiens
  misc_RNA (1)...(19): siRNA sense strand
gauucugguuucaggaacu

SEQ ID NO: 2632577 - RNA, 19 nt, Homo sapiens
  misc_RNA (1)...(19): siRNA sense strand
uugacgaggaugugguaga

SEQ ID NO: 2632578 - RNA, 19 nt, Homo sapiens
  misc_RNA (1)...(19): siRNA sense strand
cauaacggugggaaagaga

SEQ ID NO: 2632579 - RNA, 19 nt, Homo sapiens
  misc_RNA (1)...(19): siRNA sense strand
auucaaagcaccaggacaa

SEQ ID NO: 2632580 - RNA, 19 nt, Homo sapiens
  misc_RNA (1)...(19): siRNA sense strand
ccaaaagaccacagaguuu

SEQ ID NO: 2632581 - RNA, 19 nt, Homo sapiens
  misc_RNA (1)...(19): siRNA sense strand
acacaaaagaggccggaaa

SEQ ID NO: 2632582 - RNA, 19 nt, Homo sapiens
  misc_RNA (1)...(19): siRNA sense strand
gugaaauacgcaauggaau

SEQ ID NO: 2632583 - RNA, 19 nt, Homo sapiens
  misc_RNA (1)...(19): siRNA sense strand
cugaagaggaggaaagagu

SEQ ID NO: 2632584 - RNA, 19 nt, Homo sapiens
  misc_RNA (1)...(19): siRNA sense strand
aggaagggcuacagggugu

SEQ ID NO: 2632585 - RNA, 19 nt, Homo sapiens
  misc_RNA (1)...(19): siRNA sense strand
gaugauaaugaauguggaa

SEQ ID NO: 2632586 - RNA, 19 nt, Homo sapiens
  misc_RNA (1)...(19): siRNA sense strand
ggaugugcauugaaggcau

SEQ ID NO: 2632587 - RNA, 19 nt, Homo sapiens
  misc_RNA (1)...(19): siRNA sense strand
gggauaaacugauuccuca

SEQ ID NO: 2632588 - RNA, 19 nt, Homo sapiens
  misc_RNA (1)...(19): siRNA sense strand
cagcacuaggauacagaua

SEQ ID NO: 2632589 - RNA, 19 nt, Homo sapiens
  misc_RNA (1)...(19): siRNA sense strand
auacagauauuauggcaca

SEQ ID NO: 2632590 - RNA, 19 nt, Homo sapiens
  misc_RNA (1)...(19): siRNA sense strand
acagauagguauaggaguc

SEQ ID NO: 2632591 - RNA, 19 nt, Homo sapiens
  misc_RNA (1)...(19): siRNA sense strand
ccaaaugcaaaaugugaaa

SEQ ID NO: 2632592 - RNA, 19 nt, Homo sapiens
  misc_RNA (1)...(19): siRNA sense strand
gguuacaagaacaacacua

SEQ ID NO: 2632593 - RNA, 19 nt, Homo sapiens
  misc_RNA (1)...(19): siRNA sense strand
acugauuugucuugccaua

SEQ ID NO: 2632594 - RNA, 19 nt, Homo sapiens
  misc_RNA (1)...(19): siRNA sense strand
acaaguuaucugugaauca

SEQ ID NO: 2632595 - RNA, 19 nt, Homo sapiens
  misc_RNA (1)...(19): siRNA sense strand
cagccgugguaguuggauu

SEQ ID NO: 2632596 - RNA, 19 nt, Homo sapiens
  misc_RNA (1)...(19): siRNA sense strand
gcuauugcaacaugggauu

SEQ ID NO: 2632597 - RNA, 19 nt, Homo sapiens
  misc_RNA (1)...(19): siRNA sense strand
cagauguaaggaagggcua

SEQ ID NO: 2632598 - RNA, 19 nt, Homo sapiens
  misc_RNA (1)...(19): siRNA sense strand
agaggaggaaagagucaua

SEQ ID NO: 2632599 - RNA, 19 nt, Homo sapiens
  misc_RNA (1)...(19): siRNA sense strand
aaucauugccggacugcua

SEQ ID NO: 2632600 - RNA, 19 nt, Homo sapiens
  misc_RNA (1)...(19): siRNA sense strand
gcauaugauucaaauggca

SEQ ID NO: 2632601 - RNA, 19 nt, Homo sapiens
  misc_RNA (1)...(19): siRNA sense strand
ucaucuacaacaagggauu

SEQ ID NO: 2632602 - RNA, 19 nt, Homo sapiens
  misc_RNA (1)...(19): siRNA sense strand
guaacauugcucaggguca

SEQ ID NO: 2632603 - RNA, 19 nt, Homo sapiens
  misc_RNA (1)...(19): siRNA sense strand
gcacuaacacagaaggaag

SEQ ID NO: 2632604 - RNA, 19 nt, Homo sapiens
  misc_RNA (1)...(19): siRNA sense strand
caggacaacaauucacaaa

SEQ ID NO: 2632605 - RNA, 19 nt, Homo sapiens
  misc_RNA (1)...(19): siRNA sense strand
acucaguccuguggcgaaa

SEQ ID NO: 2632606 - RNA, 19 nt, Homo sapiens
  misc_RNA (1)...(19): siRNA sense strand
uggauggagacuacauaaa

SEQ ID NO: 2632607 - RNA, 19 nt, Homo sapiens
  misc_RNA (1)...(19): siRNA sense strand
ccacauuauaugaacuuga

SEQ ID NO: 2632608 - RNA, 19 nt, Homo sapiens
  misc_RNA (1)...(19): siRNA sense strand
ucugugaaucauaggagaa

SEQ ID NO: 2632609 - RNA, 19 nt, Homo sapiens
  misc_RNA (1)...(19): siRNA sense strand
ggauacagauauuauggca

SEQ ID NO: 2632610 - RNA, 19 nt, Homo sapiens
  misc_RNA (1)...(19): siRNA sense strand
caggaaauggugucacaau

SEQ ID NO: 2632611 - RNA, 19 nt, Homo sapiens
  misc_RNA (1)...(19): siRNA sense strand
cauaugauucaaauggcaa

SEQ ID NO: 2632612 - RNA, 19 nt, Homo sapiens
  misc_RNA (1)...(19): siRNA sense strand
gccuaaucauucuuguuaa

SEQ ID NO: 2632613 - RNA, 19 nt, Homo sapiens
  misc_RNA (1)...(19): siRNA sense strand
gaaaaugcuaauugcacua

SEQ ID NO: 2632614 - RNA, 19 nt, Homo sapiens
  misc_RNA (1)...(19): siRNA sense strand
guuacaagaacaacacuau

SEQ ID NO: 2632615 - RNA, 19 nt, Homo sapiens
  misc_RNA (1)...(19): siRNA sense strand
acucaaaauugcaccaaga

SEQ ID NO: 2632616 - RNA, 19 nt, Homo sapiens
  misc_RNA (1)...(19): siRNA sense strand
ccuauuucuugcugaacuu

SEQ ID NO: 2632617 - RNA, 19 nt, Homo sapiens
  misc_RNA (1)...(19): siRNA sense strand
gggaucaauacaaauacua

SEQ ID NO: 2632618 - RNA, 19 nt, Homo sapiens
  misc_RNA (1)...(19): siRNA sense strand
acauggaaaacaaggaaaa

SEQ ID NO: 2632619 - RNA, 19 nt, Homo sapiens
  misc_RNA (1)...(19): siRNA sense strand
ccgugggauuugaggagca

SEQ ID NO: 2632620 - RNA, 19 nt, Homo sapiens
  misc_RNA (1)...(19): siRNA sense strand
gcuauugaugacaagaaau

SEQ ID NO: 2632621 - RNA, 19 nt, Homo sapiens
  misc_RNA (1)...(19): siRNA sense strand
ccgugauggaugucgucaa

SEQ ID NO: 2632622 - RNA, 19 nt, Homo sapiens
  misc_RNA (1)...(19): siRNA sense strand
agaagaaugucuaagggaa

SEQ ID NO: 2632623 - RNA, 19 nt, Homo sapiens
  misc_RNA (1)...(19): siRNA sense strand
ucuuaaaggcauugaccua

SEQ ID NO: 2632624 - RNA, 19 nt, Homo sapiens
  misc_RNA (1)...(19): siRNA sense strand
uguauauacucaagaggau

SEQ ID NO: 2632625 - RNA, 19 nt, Homo sapiens
  misc_RNA (1)...(19): siRNA sense strand
aauucauucccgugaguua

SEQ ID NO: 2632626 - RNA, 19 nt, Homo sapiens
  misc_RNA (1)...(19): siRNA sense strand
guagcaaagaagaguauca

SEQ ID NO: 2632627 - RNA, 19 nt, Homo sapiens
  misc_RNA (1)...(19): siRNA sense strand
guaugauuuaucuggguua

SEQ ID NO: 2632628 - RNA, 19 nt, Homo sapiens
  misc_RNA (1)...(19): siRNA sense strand
uggagaaaaugaagacaau

SEQ ID NO: 2632629 - RNA, 19 nt, Homo sapiens
  misc_RNA (1)...(19): siRNA sense strand
gaagaaugucuaagggaag

SEQ ID NO: 2632630 - RNA, 19 nt, Homo sapiens
  misc_RNA (1)...(19): siRNA sense strand
aggcauugaccuacagaca

SEQ ID NO: 2632631 - RNA, 19 nt, Homo sapiens
  misc_RNA (1)...(19): siRNA sense strand
cagcauuacaagaaaggga

SEQ ID NO: 2632632 - RNA, 19 nt, Homo sapiens
  misc_RNA (1)...(19): siRNA sense strand
ucaucagauaccuggguua

SEQ ID NO: 2632633 - RNA, 19 nt, Homo sapiens
  misc_RNA (1)...(19): siRNA sense strand
cgucagaaaugcaauggca

SEQ ID NO: 2632634 - RNA, 19 nt, Homo sapiens
  misc_RNA (1)...(19): siRNA sense strand
caguagcaaagaagaguau

SEQ ID NO: 2632635 - RNA, 19 nt, Homo sapiens
  misc_RNA (1)...(19): siRNA sense strand
gaggaaaagaagugaugau

SEQ ID NO: 2632636 - RNA, 19 nt, Homo sapiens
  misc_RNA (1)...(19): siRNA sense strand
ucagaaaugcaauggcaca

SEQ ID NO: 2632637 - RNA, 19 nt, Homo sapiens
  misc_RNA (1)...(19): siRNA sense strand
auuuggaucuacucagaaa

SEQ ID NO: 2632638 - RNA, 19 nt, Homo sapiens
  misc_RNA (1)...(19): siRNA sense strand
gaagaguaucagaaagagu

SEQ ID NO: 2632639 - RNA, 19 nt, Homo sapiens
  misc_RNA (1)...(19): siRNA sense strand
gaagaugacuacagcugca

SEQ ID NO: 2632640 - RNA, 19 nt, Homo sapiens
  misc_RNA (1)...(19): siRNA sense strand
ucagguuaaccgucagaaa

SEQ ID NO: 2632641 - RNA, 19 nt, Homo sapiens
  misc_RNA (1)...(19): siRNA sense strand
gcuuguucguuuugguuua

SEQ ID NO: 2632642 - RNA, 19 nt, Homo sapiens
  misc_RNA (1)...(19): siRNA sense strand
ccauuaagaaauuccaaca

SEQ ID NO: 2632643 - RNA, 19 nt, Homo sapiens
  misc_RNA (1)...(19): siRNA sense strand
cuaaauuucuuccuggaga

SEQ ID NO: 2632644 - RNA, 19 nt, Homo sapiens
  misc_RNA (1)...(19): siRNA sense strand
ucucuuauucuguguacaa

SEQ ID NO: 2632645 - RNA, 19 nt, Homo sapiens
  misc_RNA (1)...(19): siRNA sense strand
cugaaggaaugcaguagca

SEQ ID NO: 2632646 - RNA, 19 nt, Homo sapiens
  misc_RNA (1)...(19): siRNA sense strand
cagaaagaguccucagccu

SEQ ID NO: 2632647 - RNA, 19 nt, Homo sapiens
  misc_RNA (1)...(19): siRNA sense strand
uggaaaucaaagcaaagaa

SEQ ID NO: 2632648 - RNA, 19 nt, Homo sapiens
  misc_RNA (1)...(19): siRNA sense strand
aauuagaccuucaggaccu

SEQ ID NO: 2632649 - RNA, 19 nt, Homo sapiens
  misc_RNA (1)...(19): siRNA sense strand
aggcauauaaugugcugau

SEQ ID NO: 2632650 - RNA, 19 nt, Homo sapiens
  misc_RNA (1)...(19): siRNA sense strand
agaugaugaaggagaaaua

SEQ ID NO: 2632651 - RNA, 19 nt, Homo sapiens
  misc_RNA (1)...(19): siRNA sense strand
cuugaagagcugaaggaua

SEQ ID NO: 2632652 - RNA, 19 nt, Homo sapiens
  misc_RNA (1)...(19): siRNA sense strand
ugugauacgcaguggcaaa

SEQ ID NO: 2632653 - RNA, 19 nt, Homo sapiens
  misc_RNA (1)...(19): siRNA sense strand
cugcagaaguggauguaca

SEQ ID NO: 2632654 - RNA, 19 nt, Homo sapiens
  misc_RNA (1)...(19): siRNA sense strand
cgaacaugcaggugauauu

SEQ ID NO: 2632655 - RNA, 19 nt, Homo sapiens
  misc_RNA (1)...(19): siRNA sense strand
agauauaaaccaagaacca

SEQ ID NO: 2632656 - RNA, 19 nt, Homo sapiens
  misc_RNA (1)...(19): siRNA sense strand
aguuguagcaagaaugaaa

SEQ ID NO: 2632657 - RNA, 19 nt, Homo sapiens
  misc_RNA (1)...(19): siRNA sense strand
ccuuagugauggagacuca

SEQ ID NO: 2632658 - RNA, 19 nt, Homo sapiens
  misc_RNA (1)...(19): siRNA sense strand
ccaagauagaagucauuua

SEQ ID NO: 2632659 - RNA, 19 nt, Homo sapiens
  misc_RNA (1)...(19): siRNA sense strand
guauaaugguggaggacag

SEQ ID NO: 2632660 - RNA, 19 nt, Homo sapiens
  misc_RNA (1)...(19): siRNA sense strand
gcagaagccucgagagccu

SEQ ID NO: 2632661 - RNA, 19 nt, Homo sapiens
  misc_RNA (1)...(19): siRNA sense strand
agccgaaagcuaagcguua

SEQ ID NO: 2632662 - RNA, 19 nt, Homo sapiens
  misc_RNA (1)...(19): siRNA sense strand
gguagauucaguaaacaaa

SEQ ID NO: 2632663 - RNA, 19 nt, Homo sapiens
  misc_RNA (1)...(19): siRNA sense strand
ccuuauuuagagugacaaa

SEQ ID NO: 2632664 - RNA, 19 nt, Homo sapiens
  misc_RNA (1)...(19): siRNA sense strand
agguagauucaguaaacaa

SEQ ID NO: 2632665 - RNA, 19 nt, Homo sapiens
  misc_RNA (1)...(19): siRNA sense strand
gaagagaacuugaagagcu

SEQ ID NO: 2632666 - RNA, 19 nt, Homo sapiens
  misc_RNA (1)...(19): siRNA sense strand
ggucauugccagauaaaau

SEQ ID NO: 2632667 - RNA, 19 nt, Homo sapiens
  misc_RNA (1)...(19): siRNA sense strand
uggacuagauauaaaccaa

SEQ ID NO: 2632668 - RNA, 19 nt, Homo sapiens
  misc_RNA (1)...(19): siRNA sense strand
aagcuaagcguuaagggaa

SEQ ID NO: 2632669 - RNA, 19 nt, Homo sapiens
  misc_RNA (1)...(19): siRNA sense strand
gcuacaaauaguacugaau

SEQ ID NO: 2632670 - RNA, 19 nt, Homo sapiens
  misc_RNA (1)...(19): siRNA sense strand
ucuucauggacuagauaua

SEQ ID NO: 2632671 - RNA, 19 nt, Homo sapiens
  misc_RNA (1)...(19): siRNA sense strand
aaugaagggaagagaacuu

SEQ ID NO: 2632672 - RNA, 19 nt, Homo sapiens
  misc_RNA (1)...(19): siRNA sense strand
aaagaaacgcaauuggcua

SEQ ID NO: 2632673 - RNA, 19 nt, Homo sapiens
  misc_RNA (1)...(19): siRNA sense strand
cguuaagggaacauugaau

SEQ ID NO: 2632674 - RNA, 19 nt, Homo sapiens
  misc_RNA (1)...(19): siRNA sense strand
augcagaugaugaaggaga

SEQ ID NO: 2632675 - RNA, 19 nt, Homo sapiens
  misc_RNA (1)...(19): siRNA sense strand
gcagaugaugaaggagaaa

SEQ ID NO: 2632676 - RNA, 19 nt, Homo sapiens
  misc_RNA (1)...(19): siRNA sense strand
ugaugaaagcagagcggca

SEQ ID NO: 2632677 - RNA, 19 nt, Homo sapiens
  misc_RNA (1)...(19): siRNA sense strand
gcaagaaugaaauagacau

SEQ ID NO: 2632678 - RNA, 19 nt, Homo sapiens
  misc_RNA (1)...(19): siRNA sense strand
cagucaagaagcugcagaa

SEQ ID NO: 2632679 - RNA, 19 nt, Homo sapiens
  misc_RNA (1)...(19): siRNA sense strand
auucagaggucauaagcca

SEQ ID NO: 2632680 - RNA, 19 nt, Homo sapiens
  misc_RNA (1)...(19): siRNA sense strand
uguuauaagccgauaccau

SEQ ID NO: 2632681 - RNA, 19 nt, Homo sapiens
  misc_RNA (1)...(19): siRNA sense strand
gcggcauacugaagacuca

SEQ ID NO: 2632682 - RNA, 19 nt, Homo sapiens
  misc_RNA (1)...(19): siRNA sense strand
cuuauggaacagugggaga

SEQ ID NO: 2632683 - RNA, 19 nt, Homo sapiens
  misc_RNA (1)...(19): siRNA sense strand
ugcagaugaugaaggagaa

SEQ ID NO: 2632684 - RNA, 19 nt, Homo sapiens
  misc_RNA (1)...(19): siRNA sense strand
aagaaacgcaauuggcuau

SEQ ID NO: 2632685 - RNA, 19 nt, Homo sapiens
  misc_RNA (1)...(19): siRNA sense strand
ccacgaacugugaggaaac

SEQ ID NO: 2632686 - RNA, 19 nt, Homo sapiens
  misc_RNA (1)...(19): siRNA sense strand
aacuaaagcuagcaaacau

SEQ ID NO: 2632687 - RNA, 19 nt, Homo sapiens
  misc_RNA (1)...(19): siRNA sense strand
gcucacaugccgaacaaca

SEQ ID NO: 2632688 - RNA, 19 nt, Homo sapiens
  misc_RNA (1)...(19): siRNA sense strand
ccacacggucaaauggaau

SEQ ID NO: 2632689 - RNA, 19 nt, Homo sapiens
  misc_RNA (1)...(19): siRNA sense strand
acaagacacaagaagguau

SEQ ID NO: 2632690 - RNA, 19 nt, Homo sapiens
  misc_RNA (1)...(19): siRNA sense strand
gaggaauguuauaagccga

SEQ ID NO: 2632691 - RNA, 19 nt, Homo sapiens
  misc_RNA (1)...(19): siRNA sense strand
gaccaaagaauuacgcuga

SEQ ID NO: 2632692 - RNA, 19 nt, Homo sapiens
  misc_RNA (1)...(19): siRNA sense strand
aaaugaugcagaugaugaa

SEQ ID NO: 2632693 - RNA, 19 nt, Homo sapiens
  misc_RNA (1)...(19): siRNA sense strand
acacaagacacaagaaggu

SEQ ID NO: 2632694 - RNA, 19 nt, Homo sapiens
  misc_RNA (1)...(19): siRNA sense strand
caccuuauuuagagugaca

SEQ ID NO: 2632695 - RNA, 19 nt, Homo sapiens
  misc_RNA (1)...(19): siRNA sense strand
augaaagcagagcggcaua

SEQ ID NO: 2632696 - RNA, 19 nt, Homo sapiens
  misc_RNA (1)...(19): siRNA sense strand
augccaagauagaagucau

SEQ ID NO: 2632697 - RNA, 19 nt, Homo sapiens
  misc_RNA (1)...(19): siRNA sense strand
ugaaauagacauugaugcu

SEQ ID NO: 2632698 - RNA, 19 nt, Homo sapiens
  misc_RNA (1)...(19): siRNA sense strand
aguaguauucaguugggaa

SEQ ID NO: 2632699 - RNA, 19 nt, Homo sapiens
  misc_RNA (1)...(19): siRNA sense strand
gagaacuugaagagcugaa

SEQ ID NO: 2632700 - RNA, 19 nt, Homo sapiens
  misc_RNA (1)...(19): siRNA sense strand
cucuaugaguucuaaguau

SEQ ID NO: 2632701 - RNA, 19 nt, Homo sapiens
  misc_RNA (1)...(19): siRNA sense strand
ucuauggugcugaggauuu

SEQ ID NO: 2632702 - RNA, 19 nt, Homo sapiens
  misc_RNA (1)...(19): siRNA sense strand
gaaagaaaauauaggacug

SEQ ID NO: 2632703 - RNA, 19 nt, Homo sapiens
  misc_RNA (1)...(19): siRNA sense strand
aaggagaaauaugguacaa

SEQ ID NO: 2632704 - RNA, 19 nt, Homo sapiens
  misc_RNA (1)...(19): siRNA sense strand
uuuaaaaccaccucggaua

SEQ ID NO: 2632705 - RNA, 19 nt, Homo sapiens
  misc_RNA (1)...(19): siRNA sense strand
ucaaugaagggaagagaac

SEQ ID NO: 2632706 - RNA, 19 nt, Homo sapiens
  misc_RNA (1)...(19): siRNA sense strand
ccuaaguguucacaguaca

SEQ ID NO: 2632707 - RNA, 19 nt, Homo sapiens
  misc_RNA (1)...(19): siRNA sense strand
aaacaaagcaagaacagcu

SEQ ID NO: 2632708 - RNA, 19 nt, Homo sapiens
  misc_RNA (1)...(19): siRNA sense strand
gaaagaagcaaguaggcaa

SEQ ID NO: 2632709 - RNA, 19 nt, Homo sapiens
  misc_RNA (1)...(19): siRNA sense strand
gggccagguugauggaaau

SEQ ID NO: 2632710 - RNA, 19 nt, Homo sapiens
  misc_RNA (1)...(19): siRNA sense strand
ggaaagacucgauugguuu

SEQ ID NO: 2632711 - RNA, 19 nt, Homo sapiens
  misc_RNA (1)...(19): siRNA sense strand
uggaagucauucagaagaa

SEQ ID NO: 2632712 - RNA, 19 nt, Homo sapiens
  misc_RNA (1)...(19): siRNA sense strand
aggcuauagugaugaaaga

SEQ ID NO: 2632713 - RNA, 19 nt, Homo sapiens
  misc_RNA (1)...(19): siRNA sense strand
ccaagauagccaaguggaa

SEQ ID NO: 2632714 - RNA, 19 nt, Homo sapiens
  misc_RNA (1)...(19): siRNA sense strand
ccaaauuagagaucaggaa

SEQ ID NO: 2632715 - RNA, 19 nt, Homo sapiens
  misc_RNA (1)...(19): siRNA sense strand
ugcugaagaaauagagaaa

SEQ ID NO: 2632716 - RNA, 19 nt, Homo sapiens
  misc_RNA (1)...(19): siRNA sense strand
auguagaauuacugaguca

SEQ ID NO: 2632717 - RNA, 19 nt, Homo sapiens
  misc_RNA (1)...(19): siRNA sense strand
acaaaagguugcugaagaa

SEQ ID NO: 2632718 - RNA, 19 nt, Homo sapiens
  misc_RNA (1)...(19): siRNA sense strand
gggccgacucagagcacaa

SEQ ID NO: 2632719 - RNA, 19 nt, Homo sapiens
  misc_RNA (1)...(19): siRNA sense strand
aaagaagcaaguaggcaaa

SEQ ID NO: 2632720 - RNA, 19 nt, Homo sapiens
  misc_RNA (1)...(19): siRNA sense strand
cagaauugcaagaaguaga

SEQ ID NO: 2632721 - RNA, 19 nt, Homo sapiens
  misc_RNA (1)...(19): siRNA sense strand
uggagaaggcuguaaauga

SEQ ID NO: 2632722 - RNA, 19 nt, Homo sapiens
  misc_RNA (1)...(19): siRNA sense strand
gguacuauguggaaagacu

SEQ ID NO: 2632723 - RNA, 19 nt, Homo sapiens
  misc_RNA (1)...(19): siRNA sense strand
caguaaaaguaguacauga

SEQ ID NO: 2632724 - RNA, 19 nt, Homo sapiens
  misc_RNA (1)...(19): siRNA sense strand
acucagagcacaagaagga

SEQ ID NO: 2632725 - RNA, 19 nt, Homo sapiens
  misc_RNA (1)...(19): siRNA sense strand
cugcaaucaagaaugaaua

SEQ ID NO: 2632726 - RNA, 19 nt, Homo sapiens
  misc_RNA (1)...(19): siRNA sense strand
agggccagguugauggaaa

SEQ ID NO: 2632727 - RNA, 19 nt, Homo sapiens
  misc_RNA (1)...(19): siRNA sense strand
agucuugagaagucggaaa

SEQ ID NO: 2632728 - RNA, 19 nt, Homo sapiens
  misc_RNA (1)...(19): siRNA sense strand
gagucaaagaauaugaaca

SEQ ID NO: 2632729 - RNA, 19 nt, Homo sapiens
  misc_RNA (1)...(19): siRNA sense strand
ugaaggaguuagagcgugu

SEQ ID NO: 2632730 - RNA, 19 nt, Homo sapiens
  misc_RNA (1)...(19): siRNA sense strand
uugagaagaagcuggcaaa

SEQ ID NO: 2632731 - RNA, 19 nt, Homo sapiens
  misc_RNA (1)...(19): siRNA sense strand
uggaaagacucgauugguu

SEQ ID NO: 2632732 - RNA, 19 nt, Homo sapiens
  misc_RNA (1)...(19): siRNA sense strand
aggaaguguguuugaaaga

SEQ ID NO: 2632733 - RNA, 19 nt, Homo sapiens
  misc_RNA (1)...(19): siRNA sense strand
guggagaagucgcugugaa

SEQ ID NO: 2632734 - RNA, 19 nt, Homo sapiens
  misc_RNA (1)...(19): siRNA sense strand
aaauaaagagcuugagaag

SEQ ID NO: 2632735 - RNA, 19 nt, Homo sapiens
  misc_RNA (1)...(19): siRNA sense strand
uuuagaagaaggaagacaa

SEQ ID NO: 2632736 - RNA, 19 nt, Homo sapiens
  misc_RNA (1)...(19): siRNA sense strand
agagagagugcuuuacaaa

SEQ ID NO: 2632737 - RNA, 19 nt, Homo sapiens
  misc_RNA (1)...(19): siRNA sense strand
caaacaaaggcuugaccau

SEQ ID NO: 2632738 - RNA, 19 nt, Homo sapiens
  misc_RNA (1)...(19): siRNA sense strand
aaugaacaguaaagcacaa

SEQ ID NO: 2632739 - RNA, 19 nt, Homo sapiens
  misc_RNA (1)...(19): siRNA sense strand
ccgagaacgauaaguugaa

SEQ ID NO: 2632740 - RNA, 19 nt, Homo sapiens
  misc_RNA (1)...(19): siRNA sense strand
aauuggaaguacagauuga

SEQ ID NO: 2632741 - RNA, 19 nt, Homo sapiens
  misc_RNA (1)...(19): siRNA sense strand
gguuucaaaugcaggacuu

SEQ ID NO: 2632742 - RNA, 19 nt, Homo sapiens
  misc_RNA (1)...(19): siRNA sense strand
uuagaagaaggaagacaaa

SEQ ID NO: 2632743 - RNA, 19 nt, Homo sapiens
  misc_RNA (1)...(19): siRNA sense strand
ccaaauucauaaaagggaa

SEQ ID NO: 2632744 - RNA, 19 nt, Homo sapiens
  misc_RNA (1)...(19): siRNA sense strand
cugaacagaaggaaauauu

SEQ ID NO: 2632745 - RNA, 19 nt, Homo sapiens
  misc_RNA (1)...(19): siRNA sense strand
agggaagccgagaacgaua

SEQ ID NO: 2632746 - RNA, 19 nt, Homo sapiens
  misc_RNA (1)...(19): siRNA sense strand
aaaccgaauuggaaguaca

SEQ ID NO: 2632747 - RNA, 19 nt, Homo sapiens
  misc_RNA (1)...(19): siRNA sense strand
guauaaaacucagguacaa

SEQ ID NO: 2632748 - RNA, 19 nt, Homo sapiens
  misc_RNA (1)...(19): siRNA sense strand
cugcauugaauuugaagau

SEQ ID NO: 2632749 - RNA, 19 nt, Homo sapiens
  misc_RNA (1)...(19): siRNA sense strand
agaacgauaaguugaaaga

SEQ ID NO: 2632750 - RNA, 19 nt, Homo sapiens
  misc_RNA (1)...(19): siRNA sense strand
acaaaauagucuugagaag

SEQ ID NO: 2632751 - RNA, 19 nt, Homo sapiens
  misc_RNA (1)...(19): siRNA sense strand
aaagggaagccgagaacga

SEQ ID NO: 2632752 - RNA, 19 nt, Homo sapiens
  misc_RNA (1)...(19): siRNA sense strand
ucucagaauugcaagaagu

SEQ ID NO: 2632753 - RNA, 19 nt, Homo sapiens
  misc_RNA (1)...(19): siRNA sense strand
aaaugcaggacuugaaauu

SEQ ID NO: 2632754 - RNA, 19 nt, Homo sapiens
  misc_RNA (1)...(19): siRNA sense strand
uagaacagauggacgcaga

SEQ ID NO: 2632755 - RNA, 19 nt, Homo sapiens
  misc_RNA (1)...(19): siRNA sense strand
agauggacgcagaaaauaa

SEQ ID NO: 2632756 - RNA, 19 nt, Homo sapiens
  misc_RNA (1)...(19): siRNA sense strand
aagagaaaucugcagagua

SEQ ID NO: 2632757 - RNA, 19 nt, Homo sapiens
  misc_RNA (1)...(19): siRNA sense strand
gaacaguaaagcacaacau

SEQ ID NO: 2632758 - RNA, 19 nt, Homo sapiens
  misc_RNA (1)...(19): siRNA sense strand
aagaaugaggcuauaguga

SEQ ID NO: 2632759 - RNA, 19 nt, Homo sapiens
  misc_RNA (1)...(19): siRNA sense strand
uggaaacugagcuuagaaa

SEQ ID NO: 2632760 - RNA, 19 nt, Homo sapiens
  misc_RNA (1)...(19): siRNA sense strand
aucacaaucuucugacaaa

SEQ ID NO: 2632761 - RNA, 19 nt, Homo sapiens
  misc_RNA (1)...(19): siRNA sense strand
cuugagaagaagcuggcaa

SEQ ID NO: 2632762 - RNA, 19 nt, Homo sapiens
  misc_RNA (1)...(19): siRNA sense strand
gcuggcaaaccaagaagaa

SEQ ID NO: 2632763 - RNA, 19 nt, Homo sapiens
  misc_RNA (1)...(19): siRNA sense strand
ggcuguaaaugauggaagu

SEQ ID NO: 2632764 - RNA, 19 nt, Homo sapiens
  misc_RNA (1)...(19): siRNA sense strand
aaggaagcggaguugguaa

SEQ ID NO: 2632765 - RNA, 19 nt, Homo sapiens
  misc_RNA (1)...(19): siRNA sense strand
uagaaagagagacuacaaa

SEQ ID NO: 2632766 - RNA, 19 nt, Homo sapiens
  misc_RNA (1)...(19): siRNA sense strand
ccgaauuggaaguacagau

SEQ ID NO: 2632767 - RNA, 19 nt, Homo sapiens
  misc_RNA (1)...(19): siRNA sense strand
cagaaaugaacaaagggaa

SEQ ID NO: 2632768 - RNA, 19 nt, Homo sapiens
  misc_RNA (1)...(19): siRNA sense strand
gcacaucaguauuccggaa

SEQ ID NO: 2632769 - RNA, 19 nt, Homo sapiens
  misc_RNA (1)...(19): siRNA sense strand
auucaagagguaacagaaa

SEQ ID NO: 2632770 - RNA, 19 nt, Homo sapiens
  misc_RNA (1)...(19): siRNA sense strand
cucaggaguuagaggaaga

SEQ ID NO: 2632771 - RNA, 19 nt, Homo sapiens
  misc_RNA (1)...(19): siRNA sense strand
gucauaaacuguuagguca

SEQ ID NO: 2632772 - RNA, 19 nt, Homo sapiens
  misc_RNA (1)...(19): siRNA sense strand
uugcagaagauaaaggaga

SEQ ID NO: 2632773 - RNA, 19 nt, Homo sapiens
  misc_RNA (1)...(19): siRNA sense strand
aggaguuagaggaagaauu

SEQ ID NO: 2632774 - RNA, 19 nt, Homo sapiens
  misc_RNA (1)...(19): siRNA sense strand
ggucaggaaaagaggccaa

SEQ ID NO: 2632775 - RNA, 19 nt, Homo sapiens
  misc_RNA (1)...(19): siRNA sense strand
ugacaauauacaugggagu

SEQ ID NO: 2632776 - RNA, 19 nt, Homo sapiens
  misc_RNA (1)...(19): siRNA sense strand
caguaauggaugaucuauu

SEQ ID NO: 2632777 - RNA, 19 nt, Homo sapiens
  misc_RNA (1)...(19): siRNA sense strand
aguuagaggaagaauuaga

SEQ ID NO: 2632778 - RNA, 19 nt, Homo sapiens
  misc_RNA (1)...(19): siRNA sense strand
augaacaggaugaucuaaa

SEQ ID NO: 2632779 - RNA, 19 nt, Homo sapiens
  misc_RNA (1)...(19): siRNA sense strand
cugaaaucggagaaggcau

SEQ ID NO: 2632780 - RNA, 19 nt, Homo sapiens
  misc_RNA (1)...(19): siRNA sense strand
cggcaaaauuuagaaguau

SEQ ID NO: 2632781 - RNA, 19 nt, Homo sapiens
  misc_RNA (1)...(19): siRNA sense strand
auuuagaagggguagguaa

SEQ ID NO: 2632782 - RNA, 19 nt, Homo sapiens
  misc_RNA (1)...(19): siRNA sense strand
gcagaagauaaaggagaga

SEQ ID NO: 2632783 - RNA, 19 nt, Homo sapiens
  misc_RNA (1)...(19): siRNA sense strand
cuuuacacagauaggaauu

SEQ ID NO: 2632784 - RNA, 19 nt, Homo sapiens
  misc_RNA (1)...(19): siRNA sense strand
cagaugaaguugaaaacca

SEQ ID NO: 2632785 - RNA, 19 nt, Homo sapiens
  misc_RNA (1)...(19): siRNA sense strand
gcacugagauagcaccuga

SEQ ID NO: 2632786 - RNA, 19 nt, Homo sapiens
  misc_RNA (1)...(19): siRNA sense strand
aagauaaaggagagagcac

SEQ ID NO: 2632787 - RNA, 19 nt, Homo sapiens
  misc_RNA (1)...(19): siRNA sense strand
aguguuugaacuagcuaua

SEQ ID NO: 2632788 - RNA, 19 nt, Homo sapiens
  misc_RNA (1)...(19): siRNA sense strand
aaagaaagucaguggcaaa

SEQ ID NO: 2632789 - RNA, 19 nt, Homo sapiens
  misc_RNA (1)...(19): siRNA sense strand
aggcaauaguguauguaaa

SEQ ID NO: 2632790 - RNA, 19 nt, Homo sapiens
  misc_RNA (1)...(19): siRNA sense strand
gaagaaagcuacagggaag

SEQ ID NO: 2632791 - RNA, 19 nt, Homo sapiens
  misc_RNA (1)...(19): siRNA sense strand
acgagaaagugaagauaau

SEQ ID NO: 2632792 - RNA, 19 nt, Homo sapiens
  misc_RNA (1)...(19): siRNA sense strand
uggcaaaguuggaccacaa

SEQ ID NO: 2632793 - RNA, 19 nt, Homo sapiens
  misc_RNA (1)...(19): siRNA sense strand
gaugaaaucccuaggaaaa

SEQ ID NO: 2632794 - RNA, 19 nt, Homo sapiens
  misc_RNA (1)...(19): siRNA sense strand
gcucaaaaccucaggguau

SEQ ID NO: 2632795 - RNA, 19 nt, Homo sapiens
  misc_RNA (1)...(19): siRNA sense strand
ccucaaggcgaguggacaa

SEQ ID NO: 2632796 - RNA, 19 nt, Homo sapiens
  misc_RNA (1)...(19): siRNA sense strand
gauaauaacaacaaggaca

SEQ ID NO: 2632797 - RNA, 19 nt, Homo sapiens
  misc_RNA (1)...(19): siRNA sense strand
caguguagauagugucaaa

SEQ ID NO: 2632798 - RNA, 19 nt, Homo sapiens
  misc_RNA (1)...(19): siRNA sense strand
ccaugaaacuccagaaacu

SEQ ID NO: 2632799 - RNA, 19 nt, Homo sapiens
  misc_RNA (1)...(19): siRNA sense strand
cgucaaguaccaauagaaa

SEQ ID NO: 2632800 - RNA, 19 nt, Homo sapiens
  misc_RNA (1)...(19): siRNA sense strand
gagaaaucaggaagggcaa

SEQ ID NO: 2632801 - RNA, 19 nt, Homo sapiens
  misc_RNA (1)...(19): siRNA sense strand
aagaaagaguguuggaguu

SEQ ID NO: 2632802 - RNA, 19 nt, Homo sapiens
  misc_RNA (1)...(19): siRNA sense strand
cuggaugaaccgaaagaaa

SEQ ID NO: 2632803 - RNA, 19 nt, Homo sapiens
  misc_RNA (1)...(19): siRNA sense strand
cugaaaacguugcagaaaa

SEQ ID NO: 2632804 - RNA, 19 nt, Homo sapiens
  misc_RNA (1)...(19): siRNA sense strand
gauaaggcacgguuggaaa

SEQ ID NO: 2632805 - RNA, 19 nt, Homo sapiens
  misc_RNA (1)...(19): siRNA sense strand
ccauuaaacgaucaagaaa

SEQ ID NO: 2632806 - RNA, 19 nt, Homo sapiens
  misc_RNA (1)...(19): siRNA sense strand
guauuaaauguguggaaga

SEQ ID NO: 2632807 - RNA, 19 nt, Homo sapiens
  misc_RNA (1)...(19): siRNA sense strand
ugaugaaaucccuaggaaa

SEQ ID NO: 2632808 - RNA, 19 nt, Homo sapiens
  misc_RNA (1)...(19): siRNA sense strand
agaugaaacagaagaugaa

SEQ ID NO: 2632809 - RNA, 19 nt, Homo sapiens
  misc_RNA (1)...(19): siRNA sense strand
agaaagaguguuggaguua

SEQ ID NO: 2632810 - RNA, 19 nt, Homo sapiens
  misc_RNA (1)...(19): siRNA sense strand
ggauguaauagaagcauuu

SEQ ID NO: 2632811 - RNA, 19 nt, Homo sapiens
  misc_RNA (1)...(19): siRNA sense strand
cagcuuugccuaagguuaa

SEQ ID NO: 2632812 - RNA, 19 nt, Homo sapiens
  misc_RNA (1)...(19): siRNA sense strand
caagaugauguaaaggaaa

SEQ ID NO: 2632813 - RNA, 19 nt, Homo sapiens
  misc_RNA (1)...(19): siRNA sense strand
ugaucgaagacuuggcaaa

SEQ ID NO: 2632814 - RNA, 19 nt, Homo sapiens
  misc_RNA (1)...(19): siRNA sense strand
ggacauucgucaaguacca

SEQ ID NO: 2632815 - RNA, 19 nt, Homo sapiens
  misc_RNA (1)...(19): siRNA sense strand
auggaaaaggagugagaaa

SEQ ID NO: 2632816 - RNA, 19 nt, Homo sapiens
  misc_RNA (1)...(19): siRNA sense strand
agaaccaaguagggagaaa

SEQ ID NO: 2632817 - RNA, 19 nt, Homo sapiens
  misc_RNA (1)...(19): siRNA sense strand
cgugauaagcuguggaucu

SEQ ID NO: 2632818 - RNA, 19 nt, Homo sapiens
  misc_RNA (1)...(19): siRNA sense strand
cucaacaagugcagggcaa

SEQ ID NO: 2632819 - RNA, 19 nt, Homo sapiens
  misc_RNA (1)...(19): siRNA sense strand
cagaaaguggaaucagaaa

SEQ ID NO: 2632820 - RNA, 19 nt, Homo sapiens
  misc_RNA (1)...(19): siRNA sense strand
gcaacuggacagaagaauu

SEQ ID NO: 2632821 - RNA, 19 nt, Homo sapiens
  misc_RNA (1)...(19): siRNA sense strand
acuuaaaugugcaagccaa

SEQ ID NO: 2632822 - RNA, 19 nt, Homo sapiens
  misc_RNA (1)...(19): siRNA sense strand
auaguucacucuagggaaa

SEQ ID NO: 2632823 - RNA, 19 nt, Homo sapiens
  misc_RNA (1)...(19): siRNA sense strand
cuuaaaugugcaagccaaa

SEQ ID NO: 2632824 - RNA, 19 nt, Homo sapiens
  misc_RNA (1)...(19): siRNA sense strand
ugcuauggaugaagacaaa

SEQ ID NO: 2632825 - RNA, 19 nt, Homo sapiens
  misc_RNA (1)...(19): siRNA sense strand
aggaagguccagugaaaga

SEQ ID NO: 2632826 - RNA, 19 nt, Homo sapiens
  misc_RNA (1)...(19): siRNA sense strand
gaucaacagaagaagaaaa

SEQ ID NO: 2632827 - RNA, 19 nt, Homo sapiens
  misc_RNA (1)...(19): siRNA sense strand
ccugaaaggacaaauggua

SEQ ID NO: 2632828 - RNA, 19 nt, Homo sapiens
  misc_RNA (1)...(19): siRNA sense strand
aguaaacaauggaagcaau

SEQ ID NO: 2632829 - RNA, 19 nt, Homo sapiens
  misc_RNA (1)...(19): siRNA sense strand
cacagaugaucaacagaaa

SEQ ID NO: 2632830 - RNA, 19 nt, Homo sapiens
  misc_RNA (1)...(19): siRNA sense strand
cagaugaaacagaagauga

SEQ ID NO: 2632831 - RNA, 19 nt, Homo sapiens
  misc_RNA (1)...(19): siRNA sense strand
caauggaagcaauguggaa

SEQ ID NO: 2632832 - RNA, 19 nt, Homo sapiens
  misc_RNA (1)...(19): siRNA sense strand
cagcagauccacagauuca

SEQ ID NO: 2632833 - RNA, 19 nt, Homo sapiens
  misc_RNA (1)...(19): siRNA sense strand
ggagaaccaaguagggaga

SEQ ID NO: 2632834 - RNA, 19 nt, Homo sapiens
  misc_RNA (1)...(19): siRNA sense strand
cuaugaugcuggagggucu

SEQ ID NO: 2632835 - RNA, 19 nt, Homo sapiens
  misc_RNA (1)...(19): siRNA sense strand
gcaaauuucaggugccaga

SEQ ID NO: 2632836 - RNA, 19 nt, Homo sapiens
  misc_RNA (1)...(19): siRNA sense strand
ugaaaacguugcagaaaau

SEQ ID NO: 2632837 - RNA, 19 nt, Homo sapiens
  misc_RNA (1)...(19): siRNA sense strand
uagaagcauuugagcagaa

SEQ ID NO: 2632838 - RNA, 19 nt, Homo sapiens
  misc_RNA (1)...(19): siRNA sense strand
aaacaagcaccuaagagaa

SEQ ID NO: 2632839 - RNA, 19 nt, Homo sapiens
  misc_RNA (1)...(19): siRNA sense strand
gcgagagaguccugaaucu

SEQ ID NO: 2632840 - RNA, 19 nt, Homo sapiens
  misc_RNA (1)...(19): siRNA sense strand
aaacagaagaugaaagauc

SEQ ID NO: 2632841 - RNA, 19 nt, Homo sapiens
  misc_RNA (1)...(19): siRNA sense strand
cugcuauggaugaagacaa

SEQ ID NO: 2632842 - RNA, 19 nt, Homo sapiens
  misc_RNA (1)...(19): siRNA sense strand
ggggaaauaacaagaaaga

SEQ ID NO: 2632843 - RNA, 19 nt, Homo sapiens
  misc_RNA (1)...(19): siRNA sense strand
uguagaaagaucagcaaca

SEQ ID NO: 2632844 - RNA, 19 nt, Homo sapiens
  misc_RNA (1)...(19): siRNA sense strand
ggaugaaccgaaagaaaau

SEQ ID NO: 2632845 - RNA, 19 nt, Homo sapiens
  misc_RNA (1)...(19): siRNA sense strand
aacaagcaccuaagagaaa

SEQ ID NO: 2632846 - RNA, 19 nt, Homo sapiens
  misc_RNA (1)...(19): siRNA sense strand
uggcauuucucaugaacau

SEQ ID NO: 2632847 - RNA, 19 nt, Homo sapiens
  misc_RNA (1)...(19): siRNA sense strand
ugccuaagguuaaugcaaa

SEQ ID NO: 2632848 - RNA, 19 nt, Homo sapiens
  misc_RNA (1)...(19): siRNA sense strand
caauauaugagauggaugu

SEQ ID NO: 2632849 - RNA, 19 nt, Homo sapiens
  misc_RNA (1)...(19): siRNA sense strand
ggacacuacuaaagcaacu

SEQ ID NO: 2632850 - RNA, 19 nt, Homo sapiens
  misc_RNA (1)...(19): siRNA sense strand
ccucaggguauaacacaua

SEQ ID NO: 2632851 - RNA, 19 nt, Homo sapiens
  misc_RNA (1)...(19): siRNA sense strand
ggacaauucuggaacugga

SEQ ID NO: 2632852 - RNA, 19 nt, Homo sapiens
  misc_RNA (1)...(19): siRNA sense strand
ugaagcaagaugauguaaa

SEQ ID NO: 2632853 - RNA, 19 nt, Homo sapiens
  misc_RNA (1)...(19): siRNA sense strand
aauuagaaauggagagcua

SEQ ID NO: 2632854 - RNA, 19 nt, Homo sapiens
  misc_RNA (1)...(19): siRNA sense strand
gaacaggagcuuauggaaa

SEQ ID NO: 2632855 - RNA, 19 nt, Homo sapiens
  misc_RNA (1)...(19): siRNA sense strand
agagugaguuagagaacaa

SEQ ID NO: 2632856 - RNA, 19 nt, Homo sapiens
  misc_RNA (1)...(19): siRNA sense strand
agaaagaugcucauggaaa

SEQ ID NO: 2632857 - RNA, 19 nt, Homo sapiens
  misc_RNA (1)...(19): siRNA sense strand
cagcauaaagaaauggaaa

SEQ ID NO: 2632858 - RNA, 19 nt, Homo sapiens
  misc_RNA (1)...(19): siRNA sense strand
agacaaagacagagcuaga

SEQ ID NO: 2632859 - RNA, 19 nt, Homo sapiens
  misc_RNA (1)...(19): siRNA sense strand
agaaacagcuggaagaaaa

SEQ ID NO: 2632860 - RNA, 19 nt, Homo sapiens
  misc_RNA (1)...(19): siRNA sense strand
gagaauuaagcuugcaaua

SEQ ID NO: 2632861 - RNA, 19 nt, Homo sapiens
  misc_RNA (1)...(19): siRNA sense strand
cuaacugaaucuagacaaa

SEQ ID NO: 2632862 - RNA, 19 nt, Homo sapiens
  misc_RNA (1)...(19): siRNA sense strand
ugaaucaauuggaaggaaa

SEQ ID NO: 2632863 - RNA, 19 nt, Homo sapiens
  misc_RNA (1)...(19): siRNA sense strand
agacagagcuagaaaagaa

SEQ ID NO: 2632864 - RNA, 19 nt, Homo sapiens
  misc_RNA (1)...(19): siRNA sense strand
cguacuaagcugauacaaa

SEQ ID NO: 2632865 - RNA, 19 nt, Homo sapiens
  misc_RNA (1)...(19): siRNA sense strand
aaguaaagauugagaugga

SEQ ID NO: 2632866 - RNA, 19 nt, Homo sapiens
  misc_RNA (1)...(19): siRNA sense strand
aaagaaauggagaguguua

SEQ ID NO: 2632867 - RNA, 19 nt, Homo sapiens
  misc_RNA (1)...(19): siRNA sense strand
guccaagcacagagagaaa

SEQ ID NO: 2632868 - RNA, 19 nt, Homo sapiens
  misc_RNA (1)...(19): siRNA sense strand
ucaagagacuucugagcaa

SEQ ID NO: 2632869 - RNA, 19 nt, Homo sapiens
  misc_RNA (1)...(19): siRNA sense strand
acaaagaagagcugucuaa

SEQ ID NO: 2632870 - RNA, 19 nt, Homo sapiens
  misc_RNA (1)...(19): siRNA sense strand
gcuguaaaggaguuagaaa

SEQ ID NO: 2632871 - RNA, 19 nt, Homo sapiens
  misc_RNA (1)...(19): siRNA sense strand
gaggagaaauggaacaaaa

SEQ ID NO: 2632872 - RNA, 19 nt, Homo sapiens
  misc_RNA (1)...(19): siRNA sense strand
acaaaaugcucauggagaa

SEQ ID NO: 2632873 - RNA, 19 nt, Homo sapiens
  misc_RNA (1)...(19): siRNA sense strand
gcgacuagauuuaugucaa

SEQ ID NO: 2632874 - RNA, 19 nt, Homo sapiens
  misc_RNA (1)...(19): siRNA sense strand
aggaaauaaugcaccuaaa

SEQ ID NO: 2632875 - RNA, 19 nt, Homo sapiens
  misc_RNA (1)...(19): siRNA sense strand
auacagagcaugagaaaau

SEQ ID NO: 2632876 - RNA, 19 nt, Homo sapiens
  misc_RNA (1)...(19): siRNA sense strand
cuguaaaggaguuagaaaa

SEQ ID NO: 2632877 - RNA, 19 nt, Homo sapiens
  misc_RNA (1)...(19): siRNA sense strand
uaacagaagccuugcaaaa

SEQ ID NO: 2632878 - RNA, 19 nt, Homo sapiens
  misc_RNA (1)...(19): siRNA sense strand
aagacuuguuacuggaaua

SEQ ID NO: 2632879 - RNA, 19 nt, Homo sapiens
  misc_RNA (1)...(19): siRNA sense strand
uggaaagugaaaugacaaa

SEQ ID NO: 2632880 - RNA, 19 nt, Homo sapiens
  misc_RNA (1)...(19): siRNA sense strand
agagagaaauugggaacua

SEQ ID NO: 2632881 - RNA, 19 nt, Homo sapiens
  misc_RNA (1)...(19): siRNA sense strand
ccaagcacagagagaaaua

SEQ ID NO: 2632882 - RNA, 19 nt, Homo sapiens
  misc_RNA (1)...(19): siRNA sense strand
uaauacagagcaugagaaa

SEQ ID NO: 2632883 - RNA, 19 nt, Homo sapiens
  misc_RNA (1)...(19): siRNA sense strand
cagccaagaaaguagcaaa

SEQ ID NO: 2632884 - RNA, 19 nt, Homo sapiens
  misc_RNA (1)...(19): siRNA sense strand
aaaacgagauggagaaaau

SEQ ID NO: 2632885 - RNA, 19 nt, Homo sapiens
  misc_RNA (1)...(19): siRNA sense strand
agaagguacucuggagaaa

SEQ ID NO: 2632886 - RNA, 19 nt, Homo sapiens
  misc_RNA (1)...(19): siRNA sense strand
aagauaaggagucuagaaa

SEQ ID NO: 2632887 - RNA, 19 nt, Homo sapiens
  misc_RNA (1)...(19): siRNA sense strand
aggcacuuaaagagagaaa

SEQ ID NO: 2632888 - RNA, 19 nt, Homo sapiens
  misc_RNA (1)...(19): siRNA sense strand
aaagaacagcuucgagaaa

SEQ ID NO: 2632889 - RNA, 19 nt, Homo sapiens
  misc_RNA (1)...(19): siRNA sense strand
ucuaaauaccagaugagua

SEQ ID NO: 2632890 - RNA, 19 nt, Homo sapiens
  misc_RNA (1)...(19): siRNA sense strand
cagcugaaaaguugagaaa

SEQ ID NO: 2632891 - RNA, 19 nt, Homo sapiens
  misc_RNA (1)...(19): siRNA sense strand
gagaaacagcuggaagaaa

SEQ ID NO: 2632892 - RNA, 19 nt, Homo sapiens
  misc_RNA (1)...(19): siRNA sense strand
ccuaaaacgagauggagaa

SEQ ID NO: 2632893 - RNA, 19 nt, Homo sapiens
  misc_RNA (1)...(19): siRNA sense strand
agauagaaagucugaauga

SEQ ID NO: 2632894 - RNA, 19 nt, Homo sapiens
  misc_RNA (1)...(19): siRNA sense strand
gaaucaauuggaaggaaau

SEQ ID NO: 2632895 - RNA, 19 nt, Homo sapiens
  misc_RNA (1)...(19): siRNA sense strand
ugucaaaacuggaacaaga

SEQ ID NO: 2632896 - RNA, 19 nt, Homo sapiens
  misc_RNA (1)...(19): siRNA sense strand
acaaagacagagcuagaaa

SEQ ID NO: 2632897 - RNA, 19 nt, Homo sapiens
  misc_RNA (1)...(19): siRNA sense strand
ccaagauaggaaugaagua

SEQ ID NO: 2632898 - RNA, 19 nt, Homo sapiens
  misc_RNA (1)...(19): siRNA sense strand
caagauaggaaugaaguaa

SEQ ID NO: 2632899 - RNA, 19 nt, Homo sapiens
  misc_RNA (1)...(19): siRNA sense strand
agagaaugcaagauggaga

SEQ ID NO: 2632900 - RNA, 19 nt, Homo sapiens
  misc_RNA (1)...(19): siRNA sense strand
uggaaggaaauaaggaaaa

SEQ ID NO: 2632901 - RNA, 19 nt, Homo sapiens
  misc_RNA (1)...(19): siRNA sense strand
gaacaguuagagaaggcaa

SEQ ID NO: 2632902 - RNA, 19 nt, Homo sapiens
  misc_RNA (1)...(19): siRNA sense strand
uguaaugacagccaagaaa

SEQ ID NO: 2632903 - RNA, 19 nt, Homo sapiens
  misc_RNA (1)...(19): siRNA sense strand
gauacaaauagaagcugaa

SEQ ID NO: 2632904 - RNA, 19 nt, Homo sapiens
  misc_RNA (1)...(19): siRNA sense strand
ggaggagaaaugugaauca

SEQ ID NO: 2632905 - RNA, 19 nt, Homo sapiens
  misc_RNA (1)...(19): siRNA sense strand
acaugaagcagauuugaaa

SEQ ID NO: 2632906 - RNA, 19 nt, Homo sapiens
  misc_RNA (1)...(19): siRNA sense strand
caauaaaagaggcagaaau

SEQ ID NO: 2632907 - RNA, 19 nt, Homo sapiens
  misc_RNA (1)...(19): siRNA sense strand
cagcauuggaaauuuguaa

SEQ ID NO: 2632908 - RNA, 19 nt, Homo sapiens
  misc_RNA (1)...(19): siRNA sense strand
gacgaaauacuuagagaca

SEQ ID NO: 2632909 - RNA, 19 nt, Homo sapiens
  misc_RNA (1)...(19): siRNA sense strand
agagaaauugggaacuaaa

SEQ ID NO: 2632910 - RNA, 19 nt, Homo sapiens
  misc_RNA (1)...(19): siRNA sense strand
gcaagcagaaaucaagaaa

SEQ ID NO: 2632911 - RNA, 19 nt, Homo sapiens
  misc_RNA (1)...(19): siRNA sense strand
aaugcaagauggagauuga

SEQ ID NO: 2632912 - RNA, 19 nt, Homo sapiens
  misc_RNA (1)...(19): siRNA sense strand
agaaagucugaaugacaaa

SEQ ID NO: 2632913 - RNA, 19 nt, Homo sapiens
  misc_RNA (1)...(19): siRNA sense strand
caagaaauugucagcagaa

SEQ ID NO: 2632914 - RNA, 19 nt, Homo sapiens
  misc_RNA (1)...(19): siRNA sense strand
aauugaagcugcaaaugaa

SEQ ID NO: 2632915 - RNA, 19 nt, Homo sapiens
  misc_RNA (1)...(19): siRNA sense strand
agaggagcugcuagagaaa

SEQ ID NO: 2632916 - RNA, 19 nt, Homo sapiens
  misc_RNA (1)...(19): siRNA sense strand
uggaacagcauaaagaaau

SEQ ID NO: 2632917 - RNA, 19 nt, Homo sapiens
  misc_RNA (1)...(19): siRNA sense strand
aauuagaaauggagagcua

SEQ ID NO: 2632918 - RNA, 19 nt, Homo sapiens
  misc_RNA (1)...(19): siRNA sense strand
gaacaggagcuuauggaaa

SEQ ID NO: 2632919 - RNA, 19 nt, Homo sapiens
  misc_RNA (1)...(19): siRNA sense strand
agagugaguuagagaacaa

SEQ ID NO: 2632920 - RNA, 19 nt, Homo sapiens
  misc_RNA (1)...(19): siRNA sense strand
agaaagaugcucauggaaa

SEQ ID NO: 2632921 - RNA, 19 nt, Homo sapiens
  misc_RNA (1)...(19): siRNA sense strand
cagcauaaagaaauggaaa

SEQ ID NO: 2632922 - RNA, 19 nt, Homo sapiens
  misc_RNA (1)...(19): siRNA sense strand
agacaaagacagagcuaga

SEQ ID NO: 2632923 - RNA, 19 nt, Homo sapiens
  misc_RNA (1)...(19): siRNA sense strand
agaaacagcuggaagaaaa

SEQ ID NO: 2632924 - RNA, 19 nt, Homo sapiens
  misc_RNA (1)...(19): siRNA sense strand
gagaauuaagcuugcaaua

SEQ ID NO: 2632925 - RNA, 19 nt, Homo sapiens
  misc_RNA (1)...(19): siRNA sense strand
cuaacugaaucuagacaaa

SEQ ID NO: 2632926 - RNA, 19 nt, Homo sapiens
  misc_RNA (1)...(19): siRNA sense strand
ugaaucaauuggaaggaaa

SEQ ID NO: 2632927 - RNA, 19 nt, Homo sapiens
  misc_RNA (1)...(19): siRNA sense strand
agacagagcuagaaaagaa

SEQ ID NO: 2632928 - RNA, 19 nt, Homo sapiens
  misc_RNA (1)...(19): siRNA sense strand
cguacuaagcugauacaaa

SEQ ID NO: 2632929 - RNA, 19 nt, Homo sapiens
  misc_RNA (1)...(19): siRNA sense strand
aaguaaagauugagaugga

SEQ ID NO: 2632930 - RNA, 19 nt, Homo sapiens
  misc_RNA (1)...(19): siRNA sense strand
aaagaaauggagaguguua

SEQ ID NO: 2632931 - RNA, 19 nt, Homo sapiens
  misc_RNA (1)...(19): siRNA sense strand
guccaagcacagagagaaa

SEQ ID NO: 2632932 - RNA, 19 nt, Homo sapiens
  misc_RNA (1)...(19): siRNA sense strand
ucaagagacuucugagcaa

SEQ ID NO: 2632933 - RNA, 19 nt, Homo sapiens
  misc_RNA (1)...(19): siRNA sense strand
acaaagaagagcugucuaa

SEQ ID NO: 2632934 - RNA, 19 nt, Homo sapiens
  misc_RNA (1)...(19): siRNA sense strand
gcuguaaaggaguuagaaa

SEQ ID NO: 2632935 - RNA, 19 nt, Homo sapiens
  misc_RNA (1)...(19): siRNA sense strand
gaggagaaauggaacaaaa

SEQ ID NO: 2632936 - RNA, 19 nt, Homo sapiens
  misc_RNA (1)...(19): siRNA sense strand
acaaaaugcucauggagaa

SEQ ID NO: 2632937 - RNA, 19 nt, Homo sapiens
  misc_RNA (1)...(19): siRNA sense strand
gcgacuagauuuaugucaa

SEQ ID NO: 2632938 - RNA, 19 nt, Homo sapiens
  misc_RNA (1)...(19): siRNA sense strand
aggaaauaaugcaccuaaa

SEQ ID NO: 2632939 - RNA, 19 nt, Homo sapiens
  misc_RNA (1)...(19): siRNA sense strand
acaagaaagguguggucua

SEQ ID NO: 2632940 - RNA, 19 nt, Homo sapiens
  misc_RNA (1)...(19): siRNA sense strand
auacagagcaugagaaaau

SEQ ID NO: 2632941 - RNA, 19 nt, Homo sapiens
  misc_RNA (1)...(19): siRNA sense strand
cuguaaaggaguuagaaaa

SEQ ID NO: 2632942 - RNA, 19 nt, Homo sapiens
  misc_RNA (1)...(19): siRNA sense strand
uaacagaagccuugcaaaa

SEQ ID NO: 2632943 - RNA, 19 nt, Homo sapiens
  misc_RNA (1)...(19): siRNA sense strand
aagacuuguuacuggaaua

SEQ ID NO: 2632944 - RNA, 19 nt, Homo sapiens
  misc_RNA (1)...(19): siRNA sense strand
uggaaagugaaaugacaaa

SEQ ID NO: 2632945 - RNA, 19 nt, Homo sapiens
  misc_RNA (1)...(19): siRNA sense strand
agagagaaauugggaacua

SEQ ID NO: 2632946 - RNA, 19 nt, Homo sapiens
  misc_RNA (1)...(19): siRNA sense strand
ccaagcacagagagaaaua

SEQ ID NO: 2632947 - RNA, 19 nt, Homo sapiens
  misc_RNA (1)...(19): siRNA sense strand
uaauacagagcaugagaaa

SEQ ID NO: 2632948 - RNA, 19 nt, Homo sapiens
  misc_RNA (1)...(19): siRNA sense strand
cagccaagaaaguagcaaa

SEQ ID NO: 2632949 - RNA, 19 nt, Homo sapiens
  misc_RNA (1)...(19): siRNA sense strand
aaaacgagauggagaaaau

SEQ ID NO: 2632950 - RNA, 19 nt, Homo sapiens
  misc_RNA (1)...(19): siRNA sense strand
agaagguacucuggagaaa

SEQ ID NO: 2632951 - RNA, 19 nt, Homo sapiens
  misc_RNA (1)...(19): siRNA sense strand
aagauaaggagucuagaaa

SEQ ID NO: 2632952 - RNA, 19 nt, Homo sapiens
  misc_RNA (1)...(19): siRNA sense strand
aggcacuuaaagagagaaa

SEQ ID NO: 2632953 - RNA, 19 nt, Homo sapiens
  misc_RNA (1)...(19): siRNA sense strand
ucuaaauaccagaugagua

SEQ ID NO: 2632954 - RNA, 19 nt, Homo sapiens
  misc_RNA (1)...(19): siRNA sense strand
cagcugaaaaguugagaaa

SEQ ID NO: 2632955 - RNA, 19 nt, Homo sapiens
  misc_RNA (1)...(19): siRNA sense strand
gagaaacagcuggaagaaa

SEQ ID NO: 2632956 - RNA, 19 nt, Homo sapiens
  misc_RNA (1)...(19): siRNA sense strand
ccuaaaacgagauggagaa

SEQ ID NO: 2632957 - RNA, 19 nt, Homo sapiens
  misc_RNA (1)...(19): siRNA sense strand
agauagaaagucugaauga

SEQ ID NO: 2632958 - RNA, 19 nt, Homo sapiens
  misc_RNA (1)...(19): siRNA sense strand
gaaucaauuggaaggaaau

SEQ ID NO: 2632959 - RNA, 19 nt, Homo sapiens
  misc_RNA (1)...(19): siRNA sense strand
ugucaaaacuggaacaaga

SEQ ID NO: 2632960 - RNA, 19 nt, Homo sapiens
  misc_RNA (1)...(19): siRNA sense strand
acaaagacagagcuagaaa

SEQ ID NO: 2632961 - RNA, 19 nt, Homo sapiens
  misc_RNA (1)...(19): siRNA sense strand
ccaagauaggaaugaagua

SEQ ID NO: 2632962 - RNA, 19 nt, Homo sapiens
  misc_RNA (1)...(19): siRNA sense strand
caagauaggaaugaaguaa

SEQ ID NO: 2632963 - RNA, 19 nt, Homo sapiens
  misc_RNA (1)...(19): siRNA sense strand
agagaaugcaagauggaga

SEQ ID NO: 2632964 - RNA, 19 nt, Homo sapiens
  misc_RNA (1)...(19): siRNA sense strand
uggaaggaaauaaggaaaa

SEQ ID NO: 2632965 - RNA, 19 nt, Homo sapiens
  misc_RNA (1)...(19): siRNA sense strand
gaacaguuagagaaggcaa

SEQ ID NO: 2632966 - RNA, 19 nt, Homo sapiens
  misc_RNA (1)...(19): siRNA sense strand
uguaaugacagccaagaaa

SEQ ID NO: 2632967 - RNA, 19 nt, Homo sapiens
  misc_RNA (1)...(19): siRNA sense strand
gauacaaauagaagcugaa

SEQ ID NO: 2632968 - RNA, 19 nt, Homo sapiens
  misc_RNA (1)...(19): siRNA sense strand
ggaggagaaaugugaauca

SEQ ID NO: 2632969 - RNA, 19 nt, Homo sapiens
  misc_RNA (1)...(19): siRNA sense strand
acaugaagcagauuugaaa

SEQ ID NO: 2632970 - RNA, 19 nt, Homo sapiens
  misc_RNA (1)...(19): siRNA sense strand
gacgaaauacuuagagaca

SEQ ID NO: 2632971 - RNA, 19 nt, Homo sapiens
  misc_RNA (1)...(19): siRNA sense strand
caauaaaagaggcagaaau

SEQ ID NO: 2632972 - RNA, 19 nt, Homo sapiens
  misc_RNA (1)...(19): siRNA sense strand
cuugaaauucugaaagaga

SEQ ID NO: 2632973 - RNA, 19 nt, Homo sapiens
  misc_RNA (1)...(19): siRNA sense strand
cagcauuggaaauuuguaa

SEQ ID NO: 2632974 - RNA, 19 nt, Homo sapiens
  misc_RNA (1)...(19): siRNA sense strand
agagaaauugggaacuaaa

SEQ ID NO: 2632975 - RNA, 19 nt, Homo sapiens
  misc_RNA (1)...(19): siRNA sense strand
gcaagcagaaaucaagaaa

SEQ ID NO: 2632976 - RNA, 19 nt, Homo sapiens
  misc_RNA (1)...(19): siRNA sense strand
aaugcaagauggagauuga

SEQ ID NO: 2632977 - RNA, 19 nt, Homo sapiens
  misc_RNA (1)...(19): siRNA sense strand
agaaagucugaaugacaaa

SEQ ID NO: 2632978 - RNA, 19 nt, Homo sapiens
  misc_RNA (1)...(19): siRNA sense strand
caagaaauugucagcagaa

SEQ ID NO: 2632979 - RNA, 19 nt, Homo sapiens
  misc_RNA (1)...(19): siRNA sense strand
aauugaagcugcaaaugaa

SEQ ID NO: 2632980 - RNA, 19 nt, Homo sapiens
  misc_RNA (1)...(19): siRNA sense strand
agaggagcugcuagagaaa

SEQ ID NO: 2632981 - RNA, 19 nt, Homo sapiens
  misc_RNA (1)...(19): siRNA sense strand
caagagaagugcaggggaa

SEQ ID NO: 2632982 - RNA, 19 nt, Homo sapiens
  misc_RNA (1)...(19): siRNA sense strand
augaaagggcugaaggcaa

SEQ ID NO: 2632983 - RNA, 19 nt, Homo sapiens
  misc_RNA (1)...(19): siRNA sense strand
agauugaagaugaucgaaa

SEQ ID NO: 2632984 - RNA, 19 nt, Homo sapiens
  misc_RNA (1)...(19): siRNA sense strand
cccuuuagcaucugagaaa

SEQ ID NO: 2632985 - RNA, 19 nt, Homo sapiens
  misc_RNA (1)...(19): siRNA sense strand
acauaugaguacacagaca

SEQ ID NO: 2632986 - RNA, 19 nt, Homo sapiens
  misc_RNA (1)...(19): siRNA sense strand
cuacaaugcaagagaucga

SEQ ID NO: 2632987 - RNA, 19 nt, Homo sapiens
  misc_RNA (1)...(19): siRNA sense strand
ccacuuaacuggagccaag

SEQ ID NO: 2632988 - RNA, 19 nt, Homo sapiens
  misc_RNA (1)...(19): siRNA sense strand
cgaaagacacuuaugacca

SEQ ID NO: 2632989 - RNA, 19 nt, Homo sapiens
  misc_RNA (1)...(19): siRNA sense strand
guggcaaacugaugaaaau

SEQ ID NO: 2632990 - RNA, 19 nt, Homo sapiens
  misc_RNA (1)...(19): siRNA sense strand
cgaccuaauggcugaugaa

SEQ ID NO: 2632991 - RNA, 19 nt, Homo sapiens
  misc_RNA (1)...(19): siRNA sense strand
accaaagagugcugagcuu

SEQ ID NO: 2632992 - RNA, 19 nt, Homo sapiens
  misc_RNA (1)...(19): siRNA sense strand
uuucaugaucugugggaca

SEQ ID NO: 2632993 - RNA, 19 nt, Homo sapiens
  misc_RNA (1)...(19): siRNA sense strand
ccaacgaagccuggaguau

SEQ ID NO: 2632994 - RNA, 19 nt, Homo sapiens
  misc_RNA (1)...(19): siRNA sense strand
gggcugaaucaaggacaua

SEQ ID NO: 2632995 - RNA, 19 nt, Homo sapiens
  misc_RNA (1)...(19): siRNA sense strand
caaggaggaaauaaggaau

SEQ ID NO: 2632996 - RNA, 19 nt, Homo sapiens
  misc_RNA (1)...(19): siRNA sense strand
cgauuuggugcuuggauga

SEQ ID NO: 2632997 - RNA, 19 nt, Homo sapiens
  misc_RNA (1)...(19): siRNA sense strand
cugguauucaggaggaaau

SEQ ID NO: 2632998 - RNA, 19 nt, Homo sapiens
  misc_RNA (1)...(19): siRNA sense strand
ccuaugacuacgaggaacu

SEQ ID NO: 2632999 - RNA, 19 nt, Homo sapiens
  misc_RNA (1)...(19): siRNA sense strand
accuaauggcugaugaaau

SEQ ID NO: 2633000 - RNA, 19 nt, Homo sapiens
  misc_RNA (1)...(19): siRNA sense strand
augaagagcuggagcacug

SEQ ID NO: 2633001 - RNA, 19 nt, Homo sapiens
  misc_RNA (1)...(19): siRNA sense strand
ucaggaguugaaagagaaa

SEQ ID NO: 2633002 - RNA, 19 nt, Homo sapiens
  misc_RNA (1)...(19): siRNA sense strand
gcaauauugucaucagcca

SEQ ID NO: 2633003 - RNA, 19 nt, Homo sapiens
  misc_RNA (1)...(19): siRNA sense strand
aagaaggguggcaggugua

SEQ ID NO: 2633004 - RNA, 19 nt, Homo sapiens
  misc_RNA (1)...(19): siRNA sense strand
aggaguugaaagagaaaau

SEQ ID NO: 2633005 - RNA, 19 nt, Homo sapiens
  misc_RNA (1)...(19): siRNA sense strand
aguuaaucacccaguucaa

SEQ ID NO: 2633006 - RNA, 19 nt, Homo sapiens
  misc_RNA (1)...(19): siRNA sense strand
gggcuguguaugcaacuaa

SEQ ID NO: 2633007 - RNA, 19 nt, Homo sapiens
  misc_RNA (1)...(19): siRNA sense strand
gugaugaagagcuggagca

SEQ ID NO: 2633008 - RNA, 19 nt, Homo sapiens
  misc_RNA (1)...(19): siRNA sense strand
aguacaaaacagaugcuaa

SEQ ID NO: 2633009 - RNA, 19 nt, Homo sapiens
  misc_RNA (1)...(19): siRNA sense strand
caauauugucaucagccaa

SEQ ID NO: 2633010 - RNA, 19 nt, Homo sapiens
  misc_RNA (1)...(19): siRNA sense strand
cuucgugacugcaugaaaa

SEQ ID NO: 2633011 - RNA, 19 nt, Homo sapiens
  misc_RNA (1)...(19): siRNA sense strand
acaucgaccuaauggcuga

SEQ ID NO: 2633012 - RNA, 19 nt, Homo sapiens
  misc_RNA (1)...(19): siRNA sense strand
cgugauaauaguuggagaa

SEQ ID NO: 2633013 - RNA, 19 nt, Homo sapiens
  misc_RNA (1)...(19): siRNA sense strand
gaauaauuucaaagggaga

SEQ ID NO: 2633014 - RNA, 19 nt, Homo sapiens
  misc_RNA (1)...(19): siRNA sense strand
ccgugaacgugcagggcuu

SEQ ID NO: 2633015 - RNA, 19 nt, Homo sapiens
  misc_RNA (1)...(19): siRNA sense strand
ggacggugaugcuggcgua

SEQ ID NO: 2633016 - RNA, 19 nt, Homo sapiens
  misc_RNA (1)...(19): siRNA sense strand
uugugugcguggugaauaa

SEQ ID NO: 2633017 - RNA, 19 nt, Homo sapiens
  misc_RNA (1)...(19): siRNA sense strand
caaucaaagccaagggaac

SEQ ID NO: 2633018 - RNA, 19 nt, Homo sapiens
  misc_RNA (1)...(19): siRNA sense strand
gaguagcagaauaucgaaa

SEQ ID NO: 2633019 - RNA, 19 nt, Homo sapiens
  misc_RNA (1)...(19): siRNA sense strand
agcauauacacauggauaa

SEQ ID NO: 2633020 - RNA, 19 nt, Homo sapiens
  misc_RNA (1)...(19): siRNA sense strand
aagcagaaaaugagcauau

SEQ ID NO: 2633021 - RNA, 19 nt, Homo sapiens
  misc_RNA (1)...(19): siRNA sense strand
cuguguaagcccaauuaua

SEQ ID NO: 2633022 - RNA, 19 nt, Homo sapiens
  misc_RNA (1)...(19): siRNA sense strand
aggcuuucugguuggaaua

SEQ ID NO: 2633023 - RNA, 19 nt, Homo sapiens
  misc_RNA (1)...(19): siRNA sense strand
ccaacacaaucaaagccaa

SEQ ID NO: 2633024 - RNA, 19 nt, Homo sapiens
  misc_RNA (1)...(19): siRNA sense strand
acaacuagccacaagggau

SEQ ID NO: 2633025 - RNA, 19 nt, Homo sapiens
  misc_RNA (1)...(19): siRNA sense strand
ucgugauaauaguuggaga

SEQ ID NO: 2633026 - RNA, 19 nt, Homo sapiens
  misc_RNA (1)...(19): siRNA sense strand
uagcaaaucuucagcccaa

SEQ ID NO: 2633027 - RNA, 19 nt, Homo sapiens
  misc_RNA (1)...(19): siRNA sense strand
cuagaagggaauuggaaaa

SEQ ID NO: 2633028 - RNA, 19 nt, Homo sapiens
  misc_RNA (1)...(19): siRNA sense strand
ucuagaagggaauuggaaa

SEQ ID NO: 2633029 - RNA, 19 nt, Homo sapiens
  misc_RNA (1)...(19): siRNA sense strand
caucagaaacacagcggau

SEQ ID NO: 2633030 - RNA, 19 nt, Homo sapiens
  misc_RNA (1)...(19): siRNA sense strand
auguauuucuagaagggaa

SEQ ID NO: 2633031 - RNA, 19 nt, Homo sapiens
  misc_RNA (1)...(19): siRNA sense strand
cuauaaaggcauugacaag

SEQ ID NO: 2633032 - RNA, 19 nt, Homo sapiens
  misc_RNA (1)...(19): siRNA sense strand
cugaggagaaagaggacuu

SEQ ID NO: 2633033 - RNA, 19 nt, Homo sapiens
  misc_RNA (1)...(19): siRNA sense strand
acaucacagaggagauuaa

SEQ ID NO: 2633034 - RNA, 19 nt, Homo sapiens
  misc_RNA (1)...(19): siRNA sense strand
auucaugccucaaguauau

SEQ ID NO: 2633035 - RNA, 19 nt, Homo sapiens
  misc_RNA (1)...(19): siRNA sense strand
cccaaaagaccuaaaacaa

SEQ ID NO: 2633036 - RNA, 19 nt, Homo sapiens
  misc_RNA (1)...(19): siRNA sense strand
agauaaggggcgacugaaa

SEQ ID NO: 2633037 - RNA, 19 nt, Homo sapiens
  misc_RNA (1)...(19): siRNA sense strand
ccuuuaaauucaugccuca

SEQ ID NO: 2633038 - RNA, 19 nt, Homo sapiens
  misc_RNA (1)...(19): siRNA sense strand
cgagcagccgcuugcgaua

SEQ ID NO: 2633039 - RNA, 19 nt, Homo sapiens
  misc_RNA (1)...(19): siRNA sense strand
gucgaagaugauaaagaaa

SEQ ID NO: 2633040 - RNA, 19 nt, Homo sapiens
  misc_RNA (1)...(19): siRNA sense strand
ugaugaggaccgacagaga

SEQ ID NO: 2633041 - RNA, 19 nt, Homo sapiens
  misc_RNA (1)...(19): siRNA sense strand
cuagagaagaaauggaaac

SEQ ID NO: 2633042 - RNA, 19 nt, Homo sapiens
  misc_RNA (1)...(19): siRNA sense strand
cugucgaagaugauaaaga

SEQ ID NO: 2633043 - RNA, 19 nt, Homo sapiens
  misc_RNA (1)...(19): siRNA sense strand
ucuagagaagaaauggaaa

SEQ ID NO: 2633044 - RNA, 19 nt, Homo sapiens
  misc_RNA (1)...(19): siRNA sense strand
ccaccaccuuccagcacaa

SEQ ID NO: 2633045 - RNA, 19 nt, Homo sapiens
  misc_RNA (1)...(19): siRNA sense strand
ccuagcaaacauuguaaau

SEQ ID NO: 2633046 - RNA, 19 nt, Homo sapiens
  misc_RNA (1)...(19): siRNA sense strand
ccauguaugaagacuauau

SEQ ID NO: 2633047 - RNA, 19 nt, Homo sapiens
  misc_RNA (1)...(19): siRNA sense strand
augaggaccgacagagaau

SEQ ID NO: 2633048 - RNA, 19 nt, Homo sapiens
  misc_RNA (1)...(19): siRNA sense strand
aaacaauaaagcagcgcca

SEQ ID NO: 2633049 - RNA, 19 nt, Homo sapiens
  misc_RNA (1)...(19): siRNA sense strand
cuucagauguauuugacca

SEQ ID NO: 2633050 - RNA, 19 nt, Homo sapiens
  misc_RNA (1)...(19): siRNA sense strand
gcucgaucugcuagaccaa

SEQ ID NO: 2633051 - RNA, 19 nt, Homo sapiens
  misc_RNA (1)...(19): siRNA sense strand
gaccaaaacaagauccuaa

SEQ ID NO: 2633052 - RNA, 19 nt, Homo sapiens
  misc_RNA (1)...(19): siRNA sense strand
cugaugacccugucgaaga

SEQ ID NO: 2633053 - RNA, 19 nt, Homo sapiens
  misc_RNA (1)...(19): siRNA sense strand
uguauuucuagaagggaau

SEQ ID NO: 2633054 - RNA, 19 nt, Homo sapiens
  misc_RNA (1)...(19): siRNA sense strand
gcaccaaaccaugggcuga

SEQ ID NO: 2633055 - RNA, 19 nt, Homo sapiens
  misc_RNA (1)...(19): siRNA sense strand
aauucaugccucaaguaua

SEQ ID NO: 2633056 - RNA, 19 nt, Homo sapiens
  misc_RNA (1)...(19): siRNA sense strand
augaaagcacugaugauga

SEQ ID NO: 2633057 - RNA, 19 nt, Homo sapiens
  misc_RNA (1)...(19): siRNA sense strand
ggagauuaaagaagacucu

SEQ ID NO: 2633058 - RNA, 19 nt, Homo sapiens
  misc_RNA (1)...(19): siRNA sense strand
agacaaagcuggagggcga

SEQ ID NO: 2633059 - RNA, 19 nt, Homo sapiens
  misc_RNA (1)...(19): siRNA sense strand
ucagagaaguugaugggua

SEQ ID NO: 2633060 - RNA, 19 nt, Homo sapiens
  misc_RNA (1)...(19): siRNA sense strand
ugaagaaggcagagagcga

SEQ ID NO: 2633061 - RNA, 19 nt, Homo sapiens
  misc_RNA (1)...(19): siRNA sense strand
uggagaaggaucaggucaa

SEQ ID NO: 2633062 - RNA, 19 nt, Homo sapiens
  misc_RNA (1)...(19): siRNA sense strand
ccucagugccagagugaca

SEQ ID NO: 2633063 - RNA, 19 nt, Homo sapiens
  misc_RNA (1)...(19): siRNA sense strand
uggacaagguggagcggga

SEQ ID NO: 2633064 - RNA, 19 nt, Homo sapiens
  misc_RNA (1)...(19): siRNA sense strand
gcgcagcagcagaugcaaa

SEQ ID NO: 2633065 - RNA, 19 nt, Homo sapiens
  misc_RNA (1)...(19): siRNA sense strand
agaaggaagagcugaguga

SEQ ID NO: 2633066 - RNA, 19 nt, Homo sapiens
  misc_RNA (1)...(19): siRNA sense strand
gggcagagaaggagagcag

SEQ ID NO: 2633067 - RNA, 19 nt, Homo sapiens
  misc_RNA (1)...(19): siRNA sense strand
ccaaggagcugguggaggu

SEQ ID NO: 2633068 - RNA, 19 nt, Homo sapiens
  misc_RNA (1)...(19): siRNA sense strand
cagagaaguugauggguac

SEQ ID NO: 2633069 - RNA, 19 nt, Homo sapiens
  misc_RNA (1)...(19): siRNA sense strand
aggcagagagcgagcgcau

SEQ ID NO: 2633070 - RNA, 19 nt, Homo sapiens
  misc_RNA (1)...(19): siRNA sense strand
agauggaggcugagaggga

SEQ ID NO: 2633071 - RNA, 19 nt, Homo sapiens
  misc_RNA (1)...(19): siRNA sense strand
gagcuugagcgcagccaua

SEQ ID NO: 2633072 - RNA, 19 nt, Homo sapiens
  misc_RNA (1)...(19): siRNA sense strand
ucagcaagaugaaggccaa

SEQ ID NO: 2633073 - RNA, 19 nt, Homo sapiens
  misc_RNA (1)...(19): siRNA sense strand
ccaaugaggacaaggagca

SEQ ID NO: 2633074 - RNA, 19 nt, Homo sapiens
  misc_RNA (1)...(19): siRNA sense strand
gcgcagccauagacaacua

SEQ ID NO: 2633075 - RNA, 19 nt, Homo sapiens
  misc_RNA (1)...(19): siRNA sense strand
ucgcccagcuggaggaaga

SEQ ID NO: 2633076 - RNA, 19 nt, Homo sapiens
  misc_RNA (1)...(19): siRNA sense strand
aaggagagcaggcgggaga

SEQ ID NO: 2633077 - RNA, 19 nt, Homo sapiens
  misc_RNA (1)...(19): siRNA sense strand
uggccgagauggaggcuga

SEQ ID NO: 2633078 - RNA, 19 nt, Homo sapiens
  misc_RNA (1)...(19): siRNA sense strand
aggcgguggcugagaguga

SEQ ID NO: 2633079 - RNA, 19 nt, Homo sapiens
  misc_RNA (1)...(19): siRNA sense strand
uagagcagcuggaagggaa

SEQ ID NO: 2633080 - RNA, 19 nt, Homo sapiens
  misc_RNA (1)...(19): siRNA sense strand
cagcuuagcgacagcgaga

SEQ ID NO: 2633081 - RNA, 19 nt, Homo sapiens
  misc_RNA (1)...(19): siRNA sense strand
gugagaagcagcaggccuu

SEQ ID NO: 2633082 - RNA, 19 nt, Homo sapiens
  misc_RNA (1)...(19): siRNA sense strand
gggccagccaggagaagau

SEQ ID NO: 2633083 - RNA, 19 nt, Homo sapiens
  misc_RNA (1)...(19): siRNA sense strand
agaaggaucaggucaacaa

SEQ ID NO: 2633084 - RNA, 19 nt, Homo sapiens
  misc_RNA (1)...(19): siRNA sense strand
ugagcagggagaagagcaa

SEQ ID NO: 2633085 - RNA, 19 nt, Homo sapiens
  misc_RNA (1)...(19): siRNA sense strand
cugagaagcuugaggcccu

SEQ ID NO: 2633086 - RNA, 19 nt, Homo sapiens
  misc_RNA (1)...(19): siRNA sense strand
ggagaagcuucguagccau

SEQ ID NO: 2633087 - RNA, 19 nt, Homo sapiens
  misc_RNA (1)...(19): siRNA sense strand
uagcagagagugagaagca

SEQ ID NO: 2633088 - RNA, 19 nt, Homo sapiens
  misc_RNA (1)...(19): siRNA sense strand
gcagcaaauaauagcuaca

SEQ ID NO: 2633089 - RNA, 19 nt, Homo sapiens
  misc_RNA (1)...(19): siRNA sense strand
ugagugaggacauacgaaa

SEQ ID NO: 2633090 - RNA, 19 nt, Homo sapiens
  misc_RNA (1)...(19): siRNA sense strand
gggaagagcaggaacggcu

SEQ ID NO: 2633091 - RNA, 19 nt, Homo sapiens
  misc_RNA (1)...(19): siRNA sense strand
acaaggagcugauggccca

SEQ ID NO: 2633092 - RNA, 19 nt, Homo sapiens
  misc_RNA (1)...(19): siRNA sense strand
agaaggaggcgcuagccaa

SEQ ID NO: 2633093 - RNA, 19 nt, Homo sapiens
  misc_RNA (1)...(19): siRNA sense strand
cugagaagcgggaggugga

SEQ ID NO: 2633094 - RNA, 19 nt, Homo sapiens
  misc_RNA (1)...(19): siRNA sense strand
ggaagagcaggaacggcua

SEQ ID NO: 2633095 - RNA, 19 nt, Homo sapiens
  misc_RNA (1)...(19): siRNA sense strand
gagaaagccagucuagaca

SEQ ID NO: 2633096 - RNA, 19 nt, Homo sapiens
  misc_RNA (1)...(19): siRNA sense strand
ggcuggaggcugagaagga

SEQ ID NO: 2633097 - RNA, 19 nt, Homo sapiens
  misc_RNA (1)...(19): siRNA sense strand
gggcuacagcagacccuaa

SEQ ID NO: 2633098 - RNA, 19 nt, Homo sapiens
  misc_RNA (1)...(19): siRNA sense strand
cggcagcaaauaauagcua

SEQ ID NO: 2633099 - RNA, 19 nt, Homo sapiens
  misc_RNA (1)...(19): siRNA sense strand
cagugaagcgucuugagaa

SEQ ID NO: 2633100 - RNA, 19 nt, Homo sapiens
  misc_RNA (1)...(19): siRNA sense strand
cggagugcccagagagaac

SEQ ID NO: 2633101 - RNA, 19 nt, Homo sapiens
  misc_RNA (1)...(19): siRNA sense strand
agugaagcgucuugagaag

SEQ ID NO: 2633102 - RNA, 19 nt, Homo sapiens
  misc_RNA (1)...(19): siRNA sense strand
cagaugaagaugcuggaca

SEQ ID NO: 2633103 - RNA, 19 nt, Homo sapiens
  misc_RNA (1)...(19): siRNA sense strand
ccgccaaguacuccaggaa

SEQ ID NO: 2633104 - RNA, 19 nt, Homo sapiens
  misc_RNA (1)...(19): siRNA sense strand
ugcaaagcgaccuggacaa

SEQ ID NO: 2633105 - RNA, 19 nt, Homo sapiens
  misc_RNA (1)...(19): siRNA sense strand
gggacaagaaccugcaucu

SEQ ID NO: 2633106 - RNA, 19 nt, Homo sapiens
  misc_RNA (1)...(19): siRNA sense strand
gcacggaagcagagcagcu

SEQ ID NO: 2633107 - RNA, 19 nt, Homo sapiens
  misc_RNA (1)...(19): siRNA sense strand
acauacgaaaggugaccaa

SEQ ID NO: 2633108 - RNA, 19 nt, Homo sapiens
  misc_RNA (1)...(19): siRNA sense strand
ccauagacaacuagagcag

SEQ ID NO: 2633109 - RNA, 19 nt, Homo sapiens
  misc_RNA (1)...(19): siRNA sense strand
agagucagcugcagcguga

SEQ ID NO: 2633110 - RNA, 19 nt, Homo sapiens
  misc_RNA (1)...(19): siRNA sense strand
gaacugggcugcaggaggu

SEQ ID NO: 2633111 - RNA, 19 nt, Homo sapiens
  misc_RNA (1)...(19): siRNA sense strand
ggcuagaggagcugcgguu

SEQ ID NO: 2633112 - RNA, 19 nt, Homo sapiens
  misc_RNA (1)...(19): siRNA sense strand
augaggacaaggagcagaa

SEQ ID NO: 2633113 - RNA, 19 nt, Homo sapiens
  misc_RNA (1)...(19): siRNA sense strand
ucgcgaggcagaagagcuu

SEQ ID NO: 2633114 - RNA, 19 nt, Homo sapiens
  misc_RNA (1)...(19): siRNA sense strand
agagagaacgggacgaacu

SEQ ID NO: 2633115 - RNA, 19 nt, Homo sapiens
  misc_RNA (1)...(19): siRNA sense strand
agaagaucagcaagaugaa

SEQ ID NO: 2633116 - RNA, 19 nt, Homo sapiens
  misc_RNA (1)...(19): siRNA sense strand
aacccaaggaacagaguaa

SEQ ID NO: 2633117 - RNA, 19 nt, Homo sapiens
  misc_RNA (1)...(19): siRNA sense strand
aaugaugagcagagaccaa

SEQ ID NO: 2633118 - RNA, 19 nt, Homo sapiens
  misc_RNA (1)...(19): siRNA sense strand
gugaauaucuugacuggca

SEQ ID NO: 2633119 - RNA, 19 nt, Homo sapiens
  misc_RNA (1)...(19): siRNA sense strand
ccuucaauguaaugaucau

SEQ ID NO: 2633120 - RNA, 19 nt, Homo sapiens
  misc_RNA (1)...(19): siRNA sense strand
gcacagucuuucagcagca

SEQ ID NO: 2633121 - RNA, 19 nt, Homo sapiens
  misc_RNA (1)...(19): siRNA sense strand
ccaaaacagcaauggucaa

SEQ ID NO: 2633122 - RNA, 19 nt, Homo sapiens
  misc_RNA (1)...(19): siRNA sense strand
aggaacagggauaugaaga

SEQ ID NO: 2633123 - RNA, 19 nt, Homo sapiens
  misc_RNA (1)...(19): siRNA sense strand
gcagagaccaaaacagcaa

SEQ ID NO: 2633124 - RNA, 19 nt, Homo sapiens
  misc_RNA (1)...(19): siRNA sense strand
cccauaugccugagagcga

SEQ ID NO: 2633125 - RNA, 19 nt, Homo sapiens
  misc_RNA (1)...(19): siRNA sense strand
cagucuuucagcagcaaua

SEQ ID NO: 2633126 - RNA, 19 nt, Homo sapiens
  misc_RNA (1)...(19): siRNA sense strand
gggcaagcagagagcuguu

SEQ ID NO: 2633127 - RNA, 19 nt, Homo sapiens
  misc_RNA (1)...(19): siRNA sense strand
cugcaauucccgggagauu

SEQ ID NO: 2633128 - RNA, 19 nt, Homo sapiens
  misc_RNA (1)...(19): siRNA sense strand
cgaagaaggaguuggagua

SEQ ID NO: 2633129 - RNA, 19 nt, Homo sapiens
  misc_RNA (1)...(19): siRNA sense strand
ggaugacagugaagggcua

SEQ ID NO: 2633130 - RNA, 19 nt, Homo sapiens
  misc_RNA (1)...(19): siRNA sense strand
gaguagugggcgaagauaa

SEQ ID NO: 2633131 - RNA, 19 nt, Homo sapiens
  misc_RNA (1)...(19): siRNA sense strand
cuuaaagaaaggagaaaca

SEQ ID NO: 2633132 - RNA, 19 nt, Homo sapiens
  misc_RNA (1)...(19): siRNA sense strand
agagaagaucccaaagaaa

SEQ ID NO: 2633133 - RNA, 19 nt, Homo sapiens
  misc_RNA (1)...(19): siRNA sense strand
gaggcagagagaagagaaa

SEQ ID NO: 2633134 - RNA, 19 nt, Homo sapiens
  misc_RNA (1)...(19): siRNA sense strand
gcugaggacacuagagaga

SEQ ID NO: 2633135 - RNA, 19 nt, Homo sapiens
  misc_RNA (1)...(19): siRNA sense strand
cgagaaaggcugaggacac

SEQ ID NO: 2633136 - RNA, 19 nt, Homo sapiens
  misc_RNA (1)...(19): siRNA sense strand
agaaaauugcagagaacaa

SEQ ID NO: 2633137 - RNA, 19 nt, Homo sapiens
  misc_RNA (1)...(19): siRNA sense strand
cugaagaaccauuuagaga

SEQ ID NO: 2633138 - RNA, 19 nt, Homo sapiens
  misc_RNA (1)...(19): siRNA sense strand
uggagaagauccuggacau

SEQ ID NO: 2633139 - RNA, 19 nt, Homo sapiens
  misc_RNA (1)...(19): siRNA sense strand
aagaguagcagaagagaca

SEQ ID NO: 2633140 - RNA, 19 nt, Homo sapiens
  misc_RNA (1)...(19): siRNA sense strand
ucggaaaagggaagaaaua

SEQ ID NO: 2633141 - RNA, 19 nt, Homo sapiens
  misc_RNA (1)...(19): siRNA sense strand
uguucgagguggagaagau

SEQ ID NO: 2633142 - RNA, 19 nt, Homo sapiens
  misc_RNA (1)...(19): siRNA sense strand
acgacauauuugaggcgaa

SEQ ID NO: 2633143 - RNA, 19 nt, Homo sapiens
  misc_RNA (1)...(19): siRNA sense strand
ugucagaggcaggaggaaa

SEQ ID NO: 2633144 - RNA, 19 nt, Homo sapiens
  misc_RNA (1)...(19): siRNA sense strand
gcagagaagagaaacaaaa

SEQ ID NO: 2633145 - RNA, 19 nt, Homo sapiens
  misc_RNA (1)...(19): siRNA sense strand
cugcagaguuagagaagcu

SEQ ID NO: 2633146 - RNA, 19 nt, Homo sapiens
  misc_RNA (1)...(19): siRNA sense strand
aagccaaagaagaacuaaa

SEQ ID NO: 2633147 - RNA, 19 nt, Homo sapiens
  misc_RNA (1)...(19): siRNA sense strand
gggcauacauugcugcaga

SEQ ID NO: 2633148 - RNA, 19 nt, Homo sapiens
  misc_RNA (1)...(19): siRNA sense strand
gaguagcagaagagacaau

SEQ ID NO: 2633149 - RNA, 19 nt, Homo sapiens
  misc_RNA (1)...(19): siRNA sense strand
gggcgaagauaaugacgca

SEQ ID NO: 2633150 - RNA, 19 nt, Homo sapiens
  misc_RNA (1)...(19): siRNA sense strand
augggaaagaugagaauuu

SEQ ID NO: 2633151 - RNA, 19 nt, Homo sapiens
  misc_RNA (1)...(19): siRNA sense strand
gaguuggaguagugggcga

SEQ ID NO: 2633152 - RNA, 19 nt, Homo sapiens
  misc_RNA (1)...(19): siRNA sense strand
ucacuuaaagaaaggagaa

SEQ ID NO: 2633153 - RNA, 19 nt, Homo sapiens
  misc_RNA (1)...(19): siRNA sense strand
gaacaaagccaaagcaguc

SEQ ID NO: 2633154 - RNA, 19 nt, Homo sapiens
  misc_RNA (1)...(19): siRNA sense strand
acuaaaagugcaagagaga

SEQ ID NO: 2633155 - RNA, 19 nt, Homo sapiens
  misc_RNA (1)...(19): siRNA sense strand
aaaagaagaccccgagaaa

SEQ ID NO: 2633156 - RNA, 19 nt, Homo sapiens
  misc_RNA (1)...(19): siRNA sense strand
aaucaagacagaagcaaaa

SEQ ID NO: 2633157 - RNA, 19 nt, Homo sapiens
  misc_RNA (1)...(19): siRNA sense strand
aagccaaagcagucaggaa

SEQ ID NO: 2633158 - RNA, 19 nt, Homo sapiens
  misc_RNA (1)...(19): siRNA sense strand
gaacuaaaggaguccaaaa

SEQ ID NO: 2633159 - RNA, 19 nt, Homo sapiens
  misc_RNA (1)...(19): siRNA sense strand
agaagaaaacugugccuaa

SEQ ID NO: 2633160 - RNA, 19 nt, Homo sapiens
  misc_RNA (1)...(19): siRNA sense strand
gaacauaccagaaggcucu

SEQ ID NO: 2633161 - RNA, 19 nt, Homo sapiens
  misc_RNA (1)...(19): siRNA sense strand
cagcaaagcaauggugaga

SEQ ID NO: 2633162 - RNA, 19 nt, Homo sapiens
  misc_RNA (1)...(19): siRNA sense strand
uaaaagugcaagagagaga

SEQ ID NO: 2633163 - RNA, 19 nt, Homo sapiens
  misc_RNA (1)...(19): siRNA sense strand
cacuuaaggaaaucagaaa

SEQ ID NO: 2633164 - RNA, 19 nt, Homo sapiens
  misc_RNA (1)...(19): siRNA sense strand
aaggauauucagagacuau

SEQ ID NO: 2633165 - RNA, 19 nt, Homo sapiens
  misc_RNA (1)...(19): siRNA sense strand
aagaagaacuaaaggaguc

SEQ ID NO: 2633166 - RNA, 19 nt, Homo sapiens
  misc_RNA (1)...(19): siRNA sense strand
cagccgaggaggacaaaga

SEQ ID NO: 2633167 - RNA, 19 nt, Homo sapiens
  misc_RNA (1)...(19): siRNA sense strand
gaucacaaaaccaaggaaa

SEQ ID NO: 2633168 - RNA, 19 nt, Homo sapiens
  misc_RNA (1)...(19): siRNA sense strand
aguagugggcgaagauaau

SEQ ID NO: 2633169 - RNA, 19 nt, Homo sapiens
  misc_RNA (1)...(19): siRNA sense strand
uguacgacuugcugaagaa

SEQ ID NO: 2633170 - RNA, 19 nt, Homo sapiens
  misc_RNA (1)...(19): siRNA sense strand
cgaucagcaaagugagaca

SEQ ID NO: 2633171 - RNA, 19 nt, Homo sapiens
  misc_RNA (1)...(19): siRNA sense strand
gccaaaaggauuaaagaca

SEQ ID NO: 2633172 - RNA, 19 nt, Homo sapiens
  misc_RNA (1)...(19): siRNA sense strand
ccugggagcccgagauuca

SEQ ID NO: 2633173 - RNA, 19 nt, Homo sapiens
  misc_RNA (1)...(19): siRNA sense strand
aaauugaggcagagagaag

SEQ ID NO: 2633174 - RNA, 19 nt, Homo sapiens
  misc_RNA (1)...(19): siRNA sense strand
ccgggaagcuaaaagacaa

SEQ ID NO: 2633175 - RNA, 19 nt, Homo sapiens
  misc_RNA (1)...(19): siRNA sense strand
aaacaagagaagaucccaa

SEQ ID NO: 2633176 - RNA, 19 nt, Homo sapiens
  misc_RNA (1)...(19): siRNA sense strand
gcacugaggaguuggccga

SEQ ID NO: 2633177 - RNA, 19 nt, Homo sapiens
  misc_RNA (1)...(19): siRNA sense strand
aguaauguguuaagggaug

SEQ ID NO: 2633178 - RNA, 19 nt, Homo sapiens
  misc_RNA (1)...(19): siRNA sense strand
acagcagagaagagaaaca

SEQ ID NO: 2633179 - RNA, 19 nt, Homo sapiens
  misc_RNA (1)...(19): siRNA sense strand
uuucaagaguagcagaaga

SEQ ID NO: 2633180 - RNA, 19 nt, Homo sapiens
  misc_RNA (1)...(19): siRNA sense strand
aagcagaggaaucaagaca

SEQ ID NO: 2633181 - RNA, 19 nt, Homo sapiens
  misc_RNA (1)...(19): siRNA sense strand
acucagccgaggaggacaa

SEQ ID NO: 2633182 - RNA, 19 nt, Homo sapiens
  misc_RNA (1)...(19): siRNA sense strand
gucagaggcaggaggaaaa

SEQ ID NO: 2633183 - RNA, 19 nt, Homo sapiens
  misc_RNA (1)...(19): siRNA sense strand
cuagagaacaagaacgcuu

SEQ ID NO: 2633184 - RNA, 19 nt, Homo sapiens
  misc_RNA (1)...(19): siRNA sense strand
acacuagagagaacaggaa

SEQ ID NO: 2633185 - RNA, 19 nt, Homo sapiens
  misc_RNA (1)...(19): siRNA sense strand
gaaacggauacuugggcau

SEQ ID NO: 2633186 - RNA, 19 nt, Homo sapiens
  misc_RNA (1)...(19): siRNA sense strand
guagcagaagagacaauaa

SEQ ID NO: 2633187 - RNA, 19 nt, Homo sapiens
  misc_RNA (1)...(19): siRNA sense strand
aaagcagucaggaaggaua

SEQ ID NO: 2633188 - RNA, 19 nt, Homo sapiens
  misc_RNA (1)...(19): siRNA sense strand
agaagagacaauaaaggau

SEQ ID NO: 2633189 - RNA, 19 nt, Homo sapiens
  misc_RNA (1)...(19): siRNA sense strand
acagugaggaggacggaga

SEQ ID NO: 2633190 - RNA, 19 nt, Homo sapiens
  misc_RNA (1)...(19): siRNA sense strand
acaaaaggcgcgaaaguga

SEQ ID NO: 2633191 - RNA, 19 nt, Homo sapiens
  misc_RNA (1)...(19): siRNA sense strand
gaguugaacaggagggaaa

SEQ ID NO: 2633192 - RNA, 19 nt, Homo sapiens
  misc_RNA (1)...(19): siRNA sense strand
ucgaagaggccuugaggaa

SEQ ID NO: 2633193 - RNA, 19 nt, Homo sapiens
  misc_RNA (1)...(19): siRNA sense strand
aagaagagauugagccgaa

SEQ ID NO: 2633194 - RNA, 19 nt, Homo sapiens
  misc_RNA (1)...(19): siRNA sense strand
gaauauguugagaaggaaa

SEQ ID NO: 2633195 - RNA, 19 nt, Homo sapiens
  misc_RNA (1)...(19): siRNA sense strand
agggaaagggagaggccaa

SEQ ID NO: 2633196 - RNA, 19 nt, Homo sapiens
  misc_RNA (1)...(19): siRNA sense strand
aggagggaauggagaacua

SEQ ID NO: 2633197 - RNA, 19 nt, Homo sapiens
  misc_RNA (1)...(19): siRNA sense strand
cagcaaagugcgagaaacu

SEQ ID NO: 2633198 - RNA, 19 nt, Homo sapiens
  misc_RNA (1)...(19): siRNA sense strand
acagaaaugcagcaagaaa

SEQ ID NO: 2633199 - RNA, 19 nt, Homo sapiens
  misc_RNA (1)...(19): siRNA sense strand
gggagaugaaauuggaaau

SEQ ID NO: 2633200 - RNA, 19 nt, Homo sapiens
  misc_RNA (1)...(19): siRNA sense strand
gaacaaagaaagaugcuca

SEQ ID NO: 2633201 - RNA, 19 nt, Homo sapiens
  misc_RNA (1)...(19): siRNA sense strand
cagaaaugcagcaagaaau

SEQ ID NO: 2633202 - RNA, 19 nt, Homo sapiens
  misc_RNA (1)...(19): siRNA sense strand
cacaauuaggucagggaaa

SEQ ID NO: 2633203 - RNA, 19 nt, Homo sapiens
  misc_RNA (1)...(19): siRNA sense strand
gguucgaggacgaggugaa

SEQ ID NO: 2633204 - RNA, 19 nt, Homo sapiens
  misc_RNA (1)...(19): siRNA sense strand
agaaggaaacccaggagaa

SEQ ID NO: 2633205 - RNA, 19 nt, Homo sapiens
  misc_RNA (1)...(19): siRNA sense strand
acagaggagaggacagaaa

SEQ ID NO: 2633206 - RNA, 19 nt, Homo sapiens
  misc_RNA (1)...(19): siRNA sense strand
ggaagaacacagaggagca

SEQ ID NO: 2633207 - RNA, 19 nt, Homo sapiens
  misc_RNA (1)...(19): siRNA sense strand
caggagaagaagagauuga

SEQ ID NO: 2633208 - RNA, 19 nt, Homo sapiens
  misc_RNA (1)...(19): siRNA sense strand
cggcauguucccaaggaua

SEQ ID NO: 2633209 - RNA, 19 nt, Homo sapiens
  misc_RNA (1)...(19): siRNA sense strand
acuucagggcuuugggaaa

SEQ ID NO: 2633210 - RNA, 19 nt, Homo sapiens
  misc_RNA (1)...(19): siRNA sense strand
ggcaaagacccuugacaau

SEQ ID NO: 2633211 - RNA, 19 nt, Homo sapiens
  misc_RNA (1)...(19): siRNA sense strand
ccuaauaaucugacugaca

SEQ ID NO: 2633212 - RNA, 19 nt, Homo sapiens
  misc_RNA (1)...(19): siRNA sense strand
ggacagaaacuaagcccau

SEQ ID NO: 2633213 - RNA, 19 nt, Homo sapiens
  misc_RNA (1)...(19): siRNA sense strand
caaguaaacuggaagcaca

SEQ ID NO: 2633214 - RNA, 19 nt, Homo sapiens
  misc_RNA (1)...(19): siRNA sense strand
aggaaacccaggagaagaa

SEQ ID NO: 2633215 - RNA, 19 nt, Homo sapiens
  misc_RNA (1)...(19): siRNA sense strand
uggcaaagacccuugacaa

SEQ ID NO: 2633216 - RNA, 19 nt, Homo sapiens
  misc_RNA (1)...(19): siRNA sense strand
ccaccaaaggguugacaau

SEQ ID NO: 2633217 - RNA, 19 nt, Homo sapiens
  misc_RNA (1)...(19): siRNA sense strand
gcgguugggcagugggaau

SEQ ID NO: 2633218 - RNA, 19 nt, Homo sapiens
  misc_RNA (1)...(19): siRNA sense strand
agucagaggucuucagcga

SEQ ID NO: 2633219 - RNA, 19 nt, Homo sapiens
  misc_RNA (1)...(19): siRNA sense strand
ccaaggauaaacuggcaaa

SEQ ID NO: 2633220 - RNA, 19 nt, Homo sapiens
  misc_RNA (1)...(19): siRNA sense strand
cugcagaccacgcggagua

SEQ ID NO: 2633221 - RNA, 19 nt, Homo sapiens
  misc_RNA (1)...(19): siRNA sense strand
gggaaaggcagcccaggaa

SEQ ID NO: 2633222 - RNA, 19 nt, Homo sapiens
  misc_RNA (1)...(19): siRNA sense strand
agaaagaucaagauacgaa

SEQ ID NO: 2633223 - RNA, 19 nt, Homo sapiens
  misc_RNA (1)...(19): siRNA sense strand
cugcagaagccaagggucu

SEQ ID NO: 2633224 - RNA, 19 nt, Homo sapiens
  misc_RNA (1)...(19): siRNA sense strand
aagcaaggauugaccaaaa

SEQ ID NO: 2633225 - RNA, 19 nt, Homo sapiens
  misc_RNA (1)...(19): siRNA sense strand
gggaagaggcaacugugaa

SEQ ID NO: 2633226 - RNA, 19 nt, Homo sapiens
  misc_RNA (1)...(19): siRNA sense strand
cugccaaccucuaugagaa

SEQ ID NO: 2633227 - RNA, 19 nt, Homo sapiens
  misc_RNA (1)...(19): siRNA sense strand
ccaagcuggaucugaaaua

SEQ ID NO: 2633228 - RNA, 19 nt, Homo sapiens
  misc_RNA (1)...(19): siRNA sense strand
aggagaggacagaaacuaa

SEQ ID NO: 2633229 - RNA, 19 nt, Homo sapiens
  misc_RNA (1)...(19): siRNA sense strand
agacaugugaccugggaga

SEQ ID NO: 2633230 - RNA, 19 nt, Homo sapiens
  misc_RNA (1)...(19): siRNA sense strand
acuuuggcaucgaaggaaa

SEQ ID NO: 2633231 - RNA, 19 nt, Homo sapiens
  misc_RNA (1)...(19): siRNA sense strand
aggccaagcuggaucugaa

SEQ ID NO: 2633232 - RNA, 19 nt, Homo sapiens
  misc_RNA (1)...(19): siRNA sense strand
agagaaugcagauaagauu

SEQ ID NO: 2633233 - RNA, 19 nt, Homo sapiens
  misc_RNA (1)...(19): siRNA sense strand
aagaaagcuuccaguucaa

SEQ ID NO: 2633234 - RNA, 19 nt, Homo sapiens
  misc_RNA (1)...(19): siRNA sense strand
agggaaagagugugcguca

SEQ ID NO: 2633235 - RNA, 19 nt, Homo sapiens
  misc_RNA (1)...(19): siRNA sense strand
aaguaaacuggaagcacaa

SEQ ID NO: 2633236 - RNA, 19 nt, Homo sapiens
  misc_RNA (1)...(19): siRNA sense strand
gaaguugggugaaaggaca

SEQ ID NO: 2633237 - RNA, 19 nt, Homo sapiens
  misc_RNA (1)...(19): siRNA sense strand
gaggaaaggcgguugggca

SEQ ID NO: 2633238 - RNA, 19 nt, Homo sapiens
  misc_RNA (1)...(19): siRNA sense strand
cagaagcacgggaaagcaa

SEQ ID NO: 2633239 - RNA, 19 nt, Homo sapiens
  misc_RNA (1)...(19): siRNA sense strand
agcaaauacacgagcaaga

SEQ ID NO: 2633240 - RNA, 19 nt, Homo sapiens
  misc_RNA (1)...(19): siRNA sense strand
ccauaaggaauuucaccaa

SEQ ID NO: 2633241 - RNA, 19 nt, Homo sapiens
  misc_RNA (1)...(19): siRNA sense strand
cagauaagauugaaagcac

SEQ ID NO: 2633242 - RNA, 19 nt, Homo sapiens
  misc_RNA (1)...(19): siRNA sense strand
agaaaugaagaaucagcaa

SEQ ID NO: 2633243 - RNA, 19 nt, Homo sapiens
  misc_RNA (1)...(19): siRNA sense strand
ugggagaugaaauuggaaa

SEQ ID NO: 2633244 - RNA, 19 nt, Homo sapiens
  misc_RNA (1)...(19): siRNA sense strand
ggcauguucccaaggauaa

SEQ ID NO: 2633245 - RNA, 19 nt, Homo sapiens
  misc_RNA (1)...(19): siRNA sense strand
augagaaauucaagccaga

SEQ ID NO: 2633246 - RNA, 19 nt, Homo sapiens
  misc_RNA (1)...(19): siRNA sense strand
cccaggagaagaagagauu

SEQ ID NO: 2633247 - RNA, 19 nt, Homo sapiens
  misc_RNA (1)...(19): siRNA sense strand
gauugauggugucuggaau

SEQ ID NO: 2633248 - RNA, 19 nt, Homo sapiens
  misc_RNA (1)...(19): siRNA sense strand
auugaaagcaccucagcaa

SEQ ID NO: 2633249 - RNA, 19 nt, Homo sapiens
  misc_RNA (1)...(19): siRNA sense strand
uccuagagauggaaaauaa

SEQ ID NO: 2633250 - RNA, 19 nt, Homo sapiens
  misc_RNA (1)...(19): siRNA sense strand
accacaaaguccaagaauu

SEQ ID NO: 2633251 - RNA, 19 nt, Homo sapiens
  misc_RNA (1)...(19): siRNA sense strand
cagaggagcagcuggagau

SEQ ID NO: 2633252 - RNA, 19 nt, Homo sapiens
  misc_RNA (1)...(19): siRNA sense strand
ugaccugggagaugaaauu

SEQ ID NO: 2633253 - RNA, 19 nt, Homo sapiens
  misc_RNA (1)...(19): siRNA sense strand
aggaggcauucuuuggaaa

SEQ ID NO: 2633254 - RNA, 19 nt, Homo sapiens
  misc_RNA (1)...(19): siRNA sense strand
ccaccaggacccauaacaa

SEQ ID NO: 2633255 - RNA, 19 nt, Homo sapiens
  misc_RNA (1)...(19): siRNA sense strand
agaaauaauuggagagaca

SEQ ID NO: 2633256 - RNA, 19 nt, Homo sapiens
  misc_RNA (1)...(19): siRNA sense strand
aggaugaaguagacagaaa

SEQ ID NO: 2633257 - RNA, 19 nt, Homo sapiens
  misc_RNA (1)...(19): siRNA sense strand
acaaagacuucaagggcaa

SEQ ID NO: 2633258 - RNA, 19 nt, Homo sapiens
  misc_RNA (1)...(19): siRNA sense strand
cauuuagaguccaggauaa

SEQ ID NO: 2633259 - RNA, 19 nt, Homo sapiens
  misc_RNA (1)...(19): siRNA sense strand
aguaauggaaggugauaaa

SEQ ID NO: 2633260 - RNA, 19 nt, Homo sapiens
  misc_RNA (1)...(19): siRNA sense strand
ggagaaacugugucggaua

SEQ ID NO: 2633261 - RNA, 19 nt, Homo sapiens
  misc_RNA (1)...(19): siRNA sense strand
cuugaaagaagguggcaaa

SEQ ID NO: 2633262 - RNA, 19 nt, Homo sapiens
  misc_RNA (1)...(19): siRNA sense strand
ccuaaaaccugaugaaaau

SEQ ID NO: 2633263 - RNA, 19 nt, Homo sapiens
  misc_RNA (1)...(19): siRNA sense strand
gagcaugagcagucugaaa

SEQ ID NO: 2633264 - RNA, 19 nt, Homo sapiens
  misc_RNA (1)...(19): siRNA sense strand
cccaaaucgcagugaauaa

SEQ ID NO: 2633265 - RNA, 19 nt, Homo sapiens
  misc_RNA (1)...(19): siRNA sense strand
gaacagacuaugugggcau

SEQ ID NO: 2633266 - RNA, 19 nt, Homo sapiens
  misc_RNA (1)...(19): siRNA sense strand
gcuggagggaauugagaaa

SEQ ID NO: 2633267 - RNA, 19 nt, Homo sapiens
  misc_RNA (1)...(19): siRNA sense strand
ggaagaaguggcugcgcua

SEQ ID NO: 2633268 - RNA, 19 nt, Homo sapiens
  misc_RNA (1)...(19): siRNA sense strand
cagcauuauuuaugagcau

SEQ ID NO: 2633269 - RNA, 19 nt, Homo sapiens
  misc_RNA (1)...(19): siRNA sense strand
agaaacaagugcaguucaa

SEQ ID NO: 2633270 - RNA, 19 nt, Homo sapiens
  misc_RNA (1)...(19): siRNA sense strand
cagagauguuuaugagaga

SEQ ID NO: 2633271 - RNA, 19 nt, Homo sapiens
  misc_RNA (1)...(19): siRNA sense strand
ccaaauacuccguugaaga

SEQ ID NO: 2633272 - RNA, 19 nt, Homo sapiens
  misc_RNA (1)...(19): siRNA sense strand
uggaauacucuguggauga

SEQ ID NO: 2633273 - RNA, 19 nt, Homo sapiens
  misc_RNA (1)...(19): siRNA sense strand
agacagaguugcacgugaa

SEQ ID NO: 2633274 - RNA, 19 nt, Homo sapiens
  misc_RNA (1)...(19): siRNA sense strand
ggaugagagugcuggcuau

SEQ ID NO: 2633275 - RNA, 19 nt, Homo sapiens
  misc_RNA (1)...(19): siRNA sense strand
ccucauaaggagugaacca

SEQ ID NO: 2633276 - RNA, 19 nt, Homo sapiens
  misc_RNA (1)...(19): siRNA sense strand
ccacagacacagacgaaaa

SEQ ID NO: 2633277 - RNA, 19 nt, Homo sapiens
  misc_RNA (1)...(19): siRNA sense strand
agugaugggcagauaguua

SEQ ID NO: 2633278 - RNA, 19 nt, Homo sapiens
  misc_RNA (1)...(19): siRNA sense strand
ccuuagugccuguggauga

SEQ ID NO: 2633279 - RNA, 19 nt, Homo sapiens
  misc_RNA (1)...(19): siRNA sense strand
ugauaguaauggaagguga

SEQ ID NO: 2633280 - RNA, 19 nt, Homo sapiens
  misc_RNA (1)...(19): siRNA sense strand
gggcaaagcacagaaacaa

SEQ ID NO: 2633281 - RNA, 19 nt, Homo sapiens
  misc_RNA (1)...(19): siRNA sense strand
gcaaaagaaguguggagua

SEQ ID NO: 2633282 - RNA, 19 nt, Homo sapiens
  misc_RNA (1)...(19): siRNA sense strand
ccgaaaggcuccagcagca

SEQ ID NO: 2633283 - RNA, 19 nt, Homo sapiens
  misc_RNA (1)...(19): siRNA sense strand
caaagaugaacgggagaaa

SEQ ID NO: 2633284 - RNA, 19 nt, Homo sapiens
  misc_RNA (1)...(19): siRNA sense strand
ccauuagcgauguggacaa

SEQ ID NO: 2633285 - RNA, 19 nt, Homo sapiens
  misc_RNA (1)...(19): siRNA sense strand
auauauacuggcagcgaaa

SEQ ID NO: 2633286 - RNA, 19 nt, Homo sapiens
  misc_RNA (1)...(19): siRNA sense strand
ugaaaacagucgaggaaca

SEQ ID NO: 2633287 - RNA, 19 nt, Homo sapiens
  misc_RNA (1)...(19): siRNA sense strand
gggugagagagaugagaga

SEQ ID NO: 2633288 - RNA, 19 nt, Homo sapiens
  misc_RNA (1)...(19): siRNA sense strand
ccaaacuagcaguggauga

SEQ ID NO: 2633289 - RNA, 19 nt, Homo sapiens
  misc_RNA (1)...(19): siRNA sense strand
ugaaaguggaggacagaga

SEQ ID NO: 2633290 - RNA, 19 nt, Homo sapiens
  misc_RNA (1)...(19): siRNA sense strand
gcacuggagcugauggcua

SEQ ID NO: 2633291 - RNA, 19 nt, Homo sapiens
  misc_RNA (1)...(19): siRNA sense strand
uguccauaauguaggauau

SEQ ID NO: 2633292 - RNA, 19 nt, Homo sapiens
  misc_RNA (1)...(19): siRNA sense strand
aggaauauuaccuggucaa

SEQ ID NO: 2633293 - RNA, 19 nt, Homo sapiens
  misc_RNA (1)...(19): siRNA sense strand
gagauguuuaugagagaau

SEQ ID NO: 2633294 - RNA, 19 nt, Homo sapiens
  misc_RNA (1)...(19): siRNA sense strand
guucaugaucacaagcaaa

SEQ ID NO: 2633295 - RNA, 19 nt, Homo sapiens
  misc_RNA (1)...(19): siRNA sense strand
ggguggaaccuguggagga

SEQ ID NO: 2633296 - RNA, 19 nt, Homo sapiens
  misc_RNA (1)...(19): siRNA sense strand
agagguuacuugggagaaa

SEQ ID NO: 2633297 - RNA, 19 nt, Homo sapiens
  misc_RNA (1)...(19): siRNA sense strand
acagugagaucgaaagaca

SEQ ID NO: 2633298 - RNA, 19 nt, Homo sapiens
  misc_RNA (1)...(19): siRNA sense strand
ccauaauguaggauauaga

SEQ ID NO: 2633299 - RNA, 19 nt, Homo sapiens
  misc_RNA (1)...(19): siRNA sense strand
cagaguugcacgugaauga

SEQ ID NO: 2633300 - RNA, 19 nt, Homo sapiens
  misc_RNA (1)...(19): siRNA sense strand
gggaagcacucuguggaaa

SEQ ID NO: 2633301 - RNA, 19 nt, Homo sapiens
  misc_RNA (1)...(19): siRNA sense strand
ccaagauuaucaacaacaa

SEQ ID NO: 2633302 - RNA, 19 nt, Homo sapiens
  misc_RNA (1)...(19): siRNA sense strand
guucuuaaacguagagguu

SEQ ID NO: 2633303 - RNA, 19 nt, Homo sapiens
  misc_RNA (1)...(19): siRNA sense strand
cuggagagucggugguuau

SEQ ID NO: 2633304 - RNA, 19 nt, Homo sapiens
  misc_RNA (1)...(19): siRNA sense strand
ugacacuggcagaggguga

SEQ ID NO: 2633305 - RNA, 19 nt, Homo sapiens
  misc_RNA (1)...(19): siRNA sense strand
gugaacaguugauaguaau

SEQ ID NO: 2633306 - RNA, 19 nt, Homo sapiens
  misc_RNA (1)...(19): siRNA sense strand
gagaauuuauggugaugga

SEQ ID NO: 2633307 - RNA, 19 nt, Homo sapiens
  misc_RNA (1)...(19): siRNA sense strand
gguaauugauacacccauu

SEQ ID NO: 2633308 - RNA, 19 nt, Homo sapiens
  misc_RNA (1)...(19): siRNA sense strand
ggaagcacucuguggaaaa

SEQ ID NO: 2633309 - RNA, 19 nt, Homo sapiens
  misc_RNA (1)...(19): siRNA sense strand
cuacaaacaugauggcacu

SEQ ID NO: 2633310 - RNA, 19 nt, Homo sapiens
  misc_RNA (1)...(19): siRNA sense strand
ugaagauggugguggaaac

SEQ ID NO: 2633311 - RNA, 19 nt, Homo sapiens
  misc_RNA (1)...(19): siRNA sense strand
gcugaaaacagucgaggaa

SEQ ID NO: 2633312 - RNA, 19 nt, Homo sapiens
  misc_RNA (1)...(19): siRNA sense strand
gaaaauggggcuacugaaa

SEQ ID NO: 2633313 - RNA, 19 nt, Homo sapiens
  misc_RNA (1)...(19): siRNA sense strand
ccugauacgguguuugaaa

SEQ ID NO: 2633314 - RNA, 19 nt, Homo sapiens
  misc_RNA (1)...(19): siRNA sense strand
aguugaugguggucuguua

SEQ ID NO: 2633315 - RNA, 19 nt, Homo sapiens
  misc_RNA (1)...(19): siRNA sense strand
cauaaggauccgagaugau

SEQ ID NO: 2633316 - RNA, 19 nt, Homo sapiens
  misc_RNA (1)...(19): siRNA sense strand
uggaggagccagagaggga

SEQ ID NO: 2633317 - RNA, 19 nt, Homo sapiens
  misc_RNA (1)...(19): siRNA sense strand
ucuuaaacguagagguuac

SEQ ID NO: 2633318 - RNA, 19 nt, Homo sapiens
  misc_RNA (1)...(19): siRNA sense strand
gaucgaaagacaaugccaa

SEQ ID NO: 2633319 - RNA, 19 nt, Homo sapiens
  misc_RNA (1)...(19): siRNA sense strand
gaacagugacagaguggca

SEQ ID NO: 2633320 - RNA, 19 nt, Homo sapiens
  misc_RNA (1)...(19): siRNA sense strand
cacagaugaccgagaacua

SEQ ID NO: 2633321 - RNA, 19 nt, Homo sapiens
  misc_RNA (1)...(19): siRNA sense strand
cgugaaugauguagacacu

SEQ ID NO: 2633322 - RNA, 19 nt, Homo sapiens
  misc_RNA (1)...(19): siRNA sense strand
ggaccaaugaggaaacuga

SEQ ID NO: 2633323 - RNA, 19 nt, Homo sapiens
  misc_RNA (1)...(19): siRNA sense strand
caguacagaucuucaguga

SEQ ID NO: 2633324 - RNA, 19 nt, Homo sapiens
  misc_RNA (1)...(19): siRNA sense strand
ggcugcaguuggugaacaa

SEQ ID NO: 2633325 - RNA, 19 nt, Homo sapiens
  misc_RNA (1)...(19): siRNA sense strand
auacugaagugaagacuca

SEQ ID NO: 2633326 - RNA, 19 nt, Homo sapiens
  misc_RNA (1)...(19): siRNA sense strand
uccaaugaaugcagaauau

SEQ ID NO: 2633327 - RNA, 19 nt, Homo sapiens
  misc_RNA (1)...(19): siRNA sense strand
cuauacagugagaucgaaa

SEQ ID NO: 2633328 - RNA, 19 nt, Homo sapiens
  misc_RNA (1)...(19): siRNA sense strand
aggaaaggguuguggaaaa

SEQ ID NO: 2633329 - RNA, 19 nt, Homo sapiens
  misc_RNA (1)...(19): siRNA sense strand
cuauaaugcacaugagaaa

SEQ ID NO: 2633330 - RNA, 19 nt, Homo sapiens
  misc_RNA (1)...(19): siRNA sense strand
ggaaauugucaaagaagaa

SEQ ID NO: 2633331 - RNA, 19 nt, Homo sapiens
  misc_RNA (1)...(19): siRNA sense strand
acacacaaacucagagaaa

SEQ ID NO: 2633332 - RNA, 19 nt, Homo sapiens
  misc_RNA (1)...(19): siRNA sense strand
acacaaacucagagaaaca

SEQ ID NO: 2633333 - RNA, 19 nt, Homo sapiens
  misc_RNA (1)...(19): siRNA sense strand
uggaaaaggcagagaggaa

SEQ ID NO: 2633334 - RNA, 19 nt, Homo sapiens
  misc_RNA (1)...(19): siRNA sense strand
caugaaaccacuugugaaa

SEQ ID NO: 2633335 - RNA, 19 nt, Homo sapiens
  misc_RNA (1)...(19): siRNA sense strand
caaccaggguguaggaaaa

SEQ ID NO: 2633336 - RNA, 19 nt, Homo sapiens
  misc_RNA (1)...(19): siRNA sense strand
ggagaauaccauuggauga

SEQ ID NO: 2633337 - RNA, 19 nt, Homo sapiens
  misc_RNA (1)...(19): siRNA sense strand
gcaagaagugggaugcaaa

SEQ ID NO: 2633338 - RNA, 19 nt, Homo sapiens
  misc_RNA (1)...(19): siRNA sense strand
ggaugauuguucuggcaaa

SEQ ID NO: 2633339 - RNA, 19 nt, Homo sapiens
  misc_RNA (1)...(19): siRNA sense strand
gagcaaaacaaaucagaaa

SEQ ID NO: 2633340 - RNA, 19 nt, Homo sapiens
  misc_RNA (1)...(19): siRNA sense strand
acaucaagcuacuggagaa

SEQ ID NO: 2633341 - RNA, 19 nt, Homo sapiens
  misc_RNA (1)...(19): siRNA sense strand
cagcagaggcuaaaggaga

SEQ ID NO: 2633342 - RNA, 19 nt, Homo sapiens
  misc_RNA (1)...(19): siRNA sense strand
ggacaauaagcaaagacua

SEQ ID NO: 2633343 - RNA, 19 nt, Homo sapiens
  misc_RNA (1)...(19): siRNA sense strand
ggagaaacaugauuggaca

SEQ ID NO: 2633344 - RNA, 19 nt, Homo sapiens
  misc_RNA (1)...(19): siRNA sense strand
aagaagaagcugaugagua

SEQ ID NO: 2633345 - RNA, 19 nt, Homo sapiens
  misc_RNA (1)...(19): siRNA sense strand
cgaaucagguagugaggau

SEQ ID NO: 2633346 - RNA, 19 nt, Homo sapiens
  misc_RNA (1)...(19): siRNA sense strand
uggauaauuuacaggcuaa

SEQ ID NO: 2633347 - RNA, 19 nt, Homo sapiens
  misc_RNA (1)...(19): siRNA sense strand
aauccaugaucgagagcua

SEQ ID NO: 2633348 - RNA, 19 nt, Homo sapiens
  misc_RNA (1)...(19): siRNA sense strand
caacagaccccgagaauau

SEQ ID NO: 2633349 - RNA, 19 nt, Homo sapiens
  misc_RNA (1)...(19): siRNA sense strand
gguuaaagacggacuuauu

SEQ ID NO: 2633350 - RNA, 19 nt, Homo sapiens
  misc_RNA (1)...(19): siRNA sense strand
ugauagugauggaagauau

SEQ ID NO: 2633351 - RNA, 19 nt, Homo sapiens
  misc_RNA (1)...(19): siRNA sense strand
ggaacaaagaagaagcuga

SEQ ID NO: 2633352 - RNA, 19 nt, Homo sapiens
  misc_RNA (1)...(19): siRNA sense strand
ggauaaugcagaaggaucu

SEQ ID NO: 2633353 - RNA, 19 nt, Homo sapiens
  misc_RNA (1)...(19): siRNA sense strand
caucaaggaaauugucaaa

SEQ ID NO: 2633354 - RNA, 19 nt, Homo sapiens
  misc_RNA (1)...(19): siRNA sense strand
ccaaacgggaggucgaaua

SEQ ID NO: 2633355 - RNA, 19 nt, Homo sapiens
  misc_RNA (1)...(19): siRNA sense strand
gcaaccaggguguaggaaa

SEQ ID NO: 2633356 - RNA, 19 nt, Homo sapiens
  misc_RNA (1)...(19): siRNA sense strand
gagaauuagaugaugccaa

SEQ ID NO: 2633357 - RNA, 19 nt, Homo sapiens
  misc_RNA (1)...(19): siRNA sense strand
aggagaaguuccaguauga

SEQ ID NO: 2633358 - RNA, 19 nt, Homo sapiens
  misc_RNA (1)...(19): siRNA sense strand
aggaaauugucaaagaaga

SEQ ID NO: 2633359 - RNA, 19 nt, Homo sapiens
  misc_RNA (1)...(19): siRNA sense strand
caauggaggcuguguguau

SEQ ID NO: 2633360 - RNA, 19 nt, Homo sapiens
  misc_RNA (1)...(19): siRNA sense strand
cauccggauugcagauaaa

SEQ ID NO: 2633361 - RNA, 19 nt, Homo sapiens
  misc_RNA (1)...(19): siRNA sense strand
gagaaacaugauuggacaa

SEQ ID NO: 2633362 - RNA, 19 nt, Homo sapiens
  misc_RNA (1)...(19): siRNA sense strand
ggaggaaaggguuguggaa

SEQ ID NO: 2633363 - RNA, 19 nt, Homo sapiens
  misc_RNA (1)...(19): siRNA sense strand
gcagaugcuacaauagaaa

SEQ ID NO: 2633364 - RNA, 19 nt, Homo sapiens
  misc_RNA (1)...(19): siRNA sense strand
aaucaaagaaacuccgaua

SEQ ID NO: 2633365 - RNA, 19 nt, Homo sapiens
  misc_RNA (1)...(19): siRNA sense strand
ccgaagaggucaagagagc

SEQ ID NO: 2633366 - RNA, 19 nt, Homo sapiens
  misc_RNA (1)...(19): siRNA sense strand
gagaugggccagagagcau

SEQ ID NO: 2633367 - RNA, 19 nt, Homo sapiens
  misc_RNA (1)...(19): siRNA sense strand
uugaacaacuugcuggaaa

SEQ ID NO: 2633368 - RNA, 19 nt, Homo sapiens
  misc_RNA (1)...(19): siRNA sense strand
ugaacaacuugcuggaaaa

SEQ ID NO: 2633369 - RNA, 19 nt, Homo sapiens
  misc_RNA (1)...(19): siRNA sense strand
cagauaaagaggugaccau

SEQ ID NO: 2633370 - RNA, 19 nt, Homo sapiens
  misc_RNA (1)...(19): siRNA sense strand
acaucauucuauagaggaa

SEQ ID NO: 2633371 - RNA, 19 nt, Homo sapiens
  misc_RNA (1)...(19): siRNA sense strand
ucgagaacuaugaggagaa

SEQ ID NO: 2633372 - RNA, 19 nt, Homo sapiens
  misc_RNA (1)...(19): siRNA sense strand
acuuauuauugguuggcaa

SEQ ID NO: 2633373 - RNA, 19 nt, Homo sapiens
  misc_RNA (1)...(19): siRNA sense strand
ucacaguauccuaaugaaa

SEQ ID NO: 2633374 - RNA, 19 nt, Homo sapiens
  misc_RNA (1)...(19): siRNA sense strand
ggauuacaaaugugaagua

SEQ ID NO: 2633375 - RNA, 19 nt, Homo sapiens
  misc_RNA (1)...(19): siRNA sense strand
gaguuggauucuuggaaaa

SEQ ID NO: 2633376 - RNA, 19 nt, Homo sapiens
  misc_RNA (1)...(19): siRNA sense strand
gauucuagcagauggaaga

SEQ ID NO: 2633377 - RNA, 19 nt, Homo sapiens
  misc_RNA (1)...(19): siRNA sense strand
caggaguauccaauagaaa

SEQ ID NO: 2633378 - RNA, 19 nt, Homo sapiens
  misc_RNA (1)...(19): siRNA sense strand
uaaagaaagacaauggcua

SEQ ID NO: 2633379 - RNA, 19 nt, Homo sapiens
  misc_RNA (1)...(19): siRNA sense strand
gugaagaaauccaagugau

SEQ ID NO: 2633380 - RNA, 19 nt, Homo sapiens
  misc_RNA (1)...(19): siRNA sense strand
gagccagaacugaaggauu

SEQ ID NO: 2633381 - RNA, 19 nt, Homo sapiens
  misc_RNA (1)...(19): siRNA sense strand
ggaguauccaauagaaaga

SEQ ID NO: 2633382 - RNA, 19 nt, Homo sapiens
  misc_RNA (1)...(19): siRNA sense strand
ggucaagagagcugcuaga

SEQ ID NO: 2633383 - RNA, 19 nt, Homo sapiens
  misc_RNA (1)...(19): siRNA sense strand
gguccagcacuuauaaaua

SEQ ID NO: 2633384 - RNA, 19 nt, Homo sapiens
  misc_RNA (1)...(19): siRNA sense strand
aaacaugauuggacaagau

SEQ ID NO: 2633385 - RNA, 19 nt, Homo sapiens
  misc_RNA (1)...(19): siRNA sense strand
ggaaggaggacccagacaa

SEQ ID NO: 2633386 - RNA, 19 nt, Homo sapiens
  misc_RNA (1)...(19): siRNA sense strand
guuagaagggacagaacau

SEQ ID NO: 2633387 - RNA, 19 nt, Homo sapiens
  misc_RNA (1)...(19): siRNA sense strand
cuauagaggaaagaagaaa

SEQ ID NO: 2633388 - RNA, 19 nt, Homo sapiens
  misc_RNA (1)...(19): siRNA sense strand
agauaacaaucaacagaga

SEQ ID NO: 2633389 - RNA, 19 nt, Homo sapiens
  misc_RNA (1)...(19): siRNA sense strand
caggcuaaagguaaagaaa

SEQ ID NO: 2633390 - RNA, 19 nt, Homo sapiens
  misc_RNA (1)...(19): siRNA sense strand
cauugaacgcccagaagau

SEQ ID NO: 2633391 - RNA, 19 nt, Homo sapiens
  misc_RNA (1)...(19): siRNA sense strand
aaggaggaaugauaggcaa

SEQ ID NO: 2633392 - RNA, 19 nt, Homo sapiens
  misc_RNA (1)...(19): siRNA sense strand
caguugaagaaauuggauu

SEQ ID NO: 2633393 - RNA, 19 nt, Homo sapiens
  misc_RNA (1)...(19): siRNA sense strand
gaagaagggcugaaagcac

SEQ ID NO: 2633394 - RNA, 19 nt, Homo sapiens
  misc_RNA (1)...(19): siRNA sense strand
augcaagcgcaaagcaaca

SEQ ID NO: 2633395 - RNA, 19 nt, Homo sapiens
  misc_RNA (1)...(19): siRNA sense strand
cauggaagaaugaaggguu

SEQ ID NO: 2633396 - RNA, 19 nt, Homo sapiens
  misc_RNA (1)...(19): siRNA sense strand
ggaaauuagauaccgagga

SEQ ID NO: 2633397 - RNA, 19 nt, Homo sapiens
  misc_RNA (1)...(19): siRNA sense strand
ggauggaagaguuguggaa

SEQ ID NO: 2633398 - RNA, 19 nt, Homo sapiens
  misc_RNA (1)...(19): siRNA sense strand
gaagaguuguggaaccaaa

SEQ ID NO: 2633399 - RNA, 19 nt, Homo sapiens
  misc_RNA (1)...(19): siRNA sense strand
ugguaaugauggaagcaau

SEQ ID NO: 2633400 - RNA, 19 nt, Homo sapiens
  misc_RNA (1)...(19): siRNA sense strand
cugugguggugguggauau

SEQ ID NO: 2633401 - RNA, 19 nt, Homo sapiens
  misc_RNA (1)...(19): siRNA sense strand
cuacaaugauuuuggcaau

SEQ ID NO: 2633402 - RNA, 19 nt, Homo sapiens
  misc_RNA (1)...(19): siRNA sense strand
gcuuuggguuugucacaua

SEQ ID NO: 2633403 - RNA, 19 nt, Homo sapiens
  misc_RNA (1)...(19): siRNA sense strand
cagaaauaccauacuguga

SEQ ID NO: 2633404 - RNA, 19 nt, Homo sapiens
  misc_RNA (1)...(19): siRNA sense strand
uggauaagauugucauuca

SEQ ID NO: 2633405 - RNA, 19 nt, Homo sapiens
  misc_RNA (1)...(19): siRNA sense strand
ccaaagcaagagauggcua

SEQ ID NO: 2633406 - RNA, 19 nt, Homo sapiens
  misc_RNA (1)...(19): siRNA sense strand
ccaaagaggucgaaggggu

SEQ ID NO: 2633407 - RNA, 19 nt, Homo sapiens
  misc_RNA (1)...(19): siRNA sense strand
accaugacuccguggauaa

SEQ ID NO: 2633408 - RNA, 19 nt, Homo sapiens
  misc_RNA (1)...(19): siRNA sense strand
aggaaauuuuggaggcaga

SEQ ID NO: 2633409 - RNA, 19 nt, Homo sapiens
  misc_RNA (1)...(19): siRNA sense strand
acccaugaagggaggaaau

SEQ ID NO: 2633410 - RNA, 19 nt, Homo sapiens
  misc_RNA (1)...(19): siRNA sense strand
ugguaaugagagauccaaa

SEQ ID NO: 2633411 - RNA, 19 nt, Homo sapiens
  misc_RNA (1)...(19): siRNA sense strand
guggaugcagcuaugaaua

SEQ ID NO: 2633412 - RNA, 19 nt, Homo sapiens
  misc_RNA (1)...(19): siRNA sense strand
uggugguggucguggagau

SEQ ID NO: 2633413 - RNA, 19 nt, Homo sapiens
  misc_RNA (1)...(19): siRNA sense strand
uggaagaguuguggaacca

SEQ ID NO: 2633414 - RNA, 19 nt, Homo sapiens
  misc_RNA (1)...(19): siRNA sense strand
agaaauaccauacugugaa

SEQ ID NO: 2633415 - RNA, 19 nt, Homo sapiens
  misc_RNA (1)...(19): siRNA sense strand
agaugguuucggugggaau

SEQ ID NO: 2633416 - RNA, 19 nt, Homo sapiens
  misc_RNA (1)...(19): siRNA sense strand
acugugugguaaugagaga

SEQ ID NO: 2633417 - RNA, 19 nt, Homo sapiens
  misc_RNA (1)...(19): siRNA sense strand
ggaggaaacuucagugguc

SEQ ID NO: 2633418 - RNA, 19 nt, Homo sapiens
  misc_RNA (1)...(19): siRNA sense strand
caguggucgugguggcuuu

SEQ ID NO: 2633419 - RNA, 19 nt, Homo sapiens
  misc_RNA (1)...(19): siRNA sense strand
uuagaaaagcccugccaaa

SEQ ID NO: 2633420 - RNA, 19 nt, Homo sapiens
  misc_RNA (1)...(19): siRNA sense strand
cagcuguggugguggugga

SEQ ID NO: 2633421 - RNA, 19 nt, Homo sapiens
  misc_RNA (1)...(19): siRNA sense strand
cgguggaggccaauacuuu

SEQ ID NO: 2633422 - RNA, 19 nt, Homo sapiens
  misc_RNA (1)...(19): siRNA sense strand
aggccaauacuuugcaaaa

SEQ ID NO: 2633423 - RNA, 19 nt, Homo sapiens
  misc_RNA (1)...(19): siRNA sense strand
uagcuauggcaguggcaga

SEQ ID NO: 2633424 - RNA, 19 nt, Homo sapiens
  misc_RNA (1)...(19): siRNA sense strand
caagguggauggaagaguu

SEQ ID NO: 2633425 - RNA, 19 nt, Homo sapiens
  misc_RNA (1)...(19): siRNA sense strand
aggguugagcuuugaaaca

SEQ ID NO: 2633426 - RNA, 19 nt, Homo sapiens
  misc_RNA (1)...(19): siRNA sense strand
ccgaauaagcaguggaaga

SEQ ID NO: 2633427 - RNA, 19 nt, Homo sapiens
  misc_RNA (1)...(19): siRNA sense strand
agauagaacugaaggaaaa

SEQ ID NO: 2633428 - RNA, 19 nt, Homo sapiens
  misc_RNA (1)...(19): siRNA sense strand
gggaaugggaggugaggaa

SEQ ID NO: 2633429 - RNA, 19 nt, Homo sapiens
  misc_RNA (1)...(19): siRNA sense strand
ccuacaaagccaacagaaa

SEQ ID NO: 2633430 - RNA, 19 nt, Homo sapiens
  misc_RNA (1)...(19): siRNA sense strand
aaguaaaagugguggcuaa

SEQ ID NO: 2633431 - RNA, 19 nt, Homo sapiens
  misc_RNA (1)...(19): siRNA sense strand
cagauagaacugaaggaaa

SEQ ID NO: 2633432 - RNA, 19 nt, Homo sapiens
  misc_RNA (1)...(19): siRNA sense strand
cagaagcagcugaaagaaa

SEQ ID NO: 2633433 - RNA, 19 nt, Homo sapiens
  misc_RNA (1)...(19): siRNA sense strand
uccaagaagaugaggauua

SEQ ID NO: 2633434 - RNA, 19 nt, Homo sapiens
  misc_RNA (1)...(19): siRNA sense strand
aggaugagaugauggacaa

SEQ ID NO: 2633435 - RNA, 19 nt, Homo sapiens
  misc_RNA (1)...(19): siRNA sense strand
ggaugaacggagugggaca

SEQ ID NO: 2633436 - RNA, 19 nt, Homo sapiens
  misc_RNA (1)...(19): siRNA sense strand
uaacagaagcacuggaaaa

SEQ ID NO: 2633437 - RNA, 19 nt, Homo sapiens
  misc_RNA (1)...(19): siRNA sense strand
agauaaucgugauguggaa

SEQ ID NO: 2633438 - RNA, 19 nt, Homo sapiens
  misc_RNA (1)...(19): siRNA sense strand
cgucaggcguggagaaagu

SEQ ID NO: 2633439 - RNA, 19 nt, Homo sapiens
  misc_RNA (1)...(19): siRNA sense strand
cuacaaagccaacagaaaa

SEQ ID NO: 2633440 - RNA, 19 nt, Homo sapiens
  misc_RNA (1)...(19): siRNA sense strand
auguauacccagaagaaau

SEQ ID NO: 2633441 - RNA, 19 nt, Homo sapiens
  misc_RNA (1)...(19): siRNA sense strand
agagaagaaaccagccaaa

SEQ ID NO: 2633442 - RNA, 19 nt, Homo sapiens
  misc_RNA (1)...(19): siRNA sense strand
gauuagauaagcaggugaa

SEQ ID NO: 2633443 - RNA, 19 nt, Homo sapiens
  misc_RNA (1)...(19): siRNA sense strand
gcuggaagaauuugugaau

SEQ ID NO: 2633444 - RNA, 19 nt, Homo sapiens
  misc_RNA (1)...(19): siRNA sense strand
aaccauggagagugagaaa

SEQ ID NO: 2633445 - RNA, 19 nt, Homo sapiens
  misc_RNA (1)...(19): siRNA sense strand
cugggaagauagaaaugua

SEQ ID NO: 2633446 - RNA, 19 nt, Homo sapiens
  misc_RNA (1)...(19): siRNA sense strand
cuaauguggaucuggcaaa

SEQ ID NO: 2633447 - RNA, 19 nt, Homo sapiens
  misc_RNA (1)...(19): siRNA sense strand
cuucagcguaagagggaau

SEQ ID NO: 2633448 - RNA, 19 nt, Homo sapiens
  misc_RNA (1)...(19): siRNA sense strand
ccugauagcacagaagaaa

SEQ ID NO: 2633449 - RNA, 19 nt, Homo sapiens
  misc_RNA (1)...(19): siRNA sense strand
uguggaagaugauggguca

SEQ ID NO: 2633450 - RNA, 19 nt, Homo sapiens
  misc_RNA (1)...(19): siRNA sense strand
aaauguauacccagaagaa

SEQ ID NO: 2633451 - RNA, 19 nt, Homo sapiens
  misc_RNA (1)...(19): siRNA sense strand
gucgaggacaggaaggaaa

SEQ ID NO: 2633452 - RNA, 19 nt, Homo sapiens
  misc_RNA (1)...(19): siRNA sense strand
gaauaagcaguggaagaaa

SEQ ID NO: 2633453 - RNA, 19 nt, Homo sapiens
  misc_RNA (1)...(19): siRNA sense strand
caggaugagaugauggaca

SEQ ID NO: 2633454 - RNA, 19 nt, Homo sapiens
  misc_RNA (1)...(19): siRNA sense strand
agauagaaauguauaccca

SEQ ID NO: 2633455 - RNA, 19 nt, Homo sapiens
  misc_RNA (1)...(19): siRNA sense strand
ugagagaagcuuugaguac

SEQ ID NO: 2633456 - RNA, 19 nt, Homo sapiens
  misc_RNA (1)...(19): siRNA sense strand
caguggaagaaaucacaaa

SEQ ID NO: 2633457 - RNA, 19 nt, Homo sapiens
  misc_RNA (1)...(19): siRNA sense strand
agucuaagauaguugcuga

SEQ ID NO: 2633458 - RNA, 19 nt, Homo sapiens
  misc_RNA (1)...(19): siRNA sense strand
agauaaaacaggugggaag

SEQ ID NO: 2633459 - RNA, 19 nt, Homo sapiens
  misc_RNA (1)...(19): siRNA sense strand
cagaacuguaaaaggaaaa

SEQ ID NO: 2633460 - RNA, 19 nt, Homo sapiens
  misc_RNA (1)...(19): siRNA sense strand
ugauuguggcauugagaga

SEQ ID NO: 2633461 - RNA, 19 nt, Homo sapiens
  misc_RNA (1)...(19): siRNA sense strand
cuugguguauagagaacaa

SEQ ID NO: 2633462 - RNA, 19 nt, Homo sapiens
  misc_RNA (1)...(19): siRNA sense strand
agcaacaagaagagcacua

SEQ ID NO: 2633463 - RNA, 19 nt, Homo sapiens
  misc_RNA (1)...(19): siRNA sense strand
uggagagcacaguggaauu

SEQ ID NO: 2633464 - RNA, 19 nt, Homo sapiens
  misc_RNA (1)...(19): siRNA sense strand
caucagccggagugguaua

SEQ ID NO: 2633465 - RNA, 19 nt, Homo sapiens
  misc_RNA (1)...(19): siRNA sense strand
agagaagcuuugaguacca

SEQ ID NO: 2633466 - RNA, 19 nt, Homo sapiens
  misc_RNA (1)...(19): siRNA sense strand
auacaagcgcucagaagau

SEQ ID NO: 2633467 - RNA, 19 nt, Homo sapiens
  misc_RNA (1)...(19): siRNA sense strand
aagaagagcacuaccgcau

SEQ ID NO: 2633468 - RNA, 19 nt, Homo sapiens
  misc_RNA (1)...(19): siRNA sense strand
cugaacaaacaaccgaaua

SEQ ID NO: 2633469 - RNA, 19 nt, Homo sapiens
  misc_RNA (1)...(19): siRNA sense strand
cguaagagggaaugaaccu

SEQ ID NO: 2633470 - RNA, 19 nt, Homo sapiens
  misc_RNA (1)...(19): siRNA sense strand
ccacugaucagcagcaaca

SEQ ID NO: 2633471 - RNA, 19 nt, Homo sapiens
  misc_RNA (1)...(19): siRNA sense strand
ggacccuggcugagcauuu

SEQ ID NO: 2633472 - RNA, 19 nt, Homo sapiens
  misc_RNA (1)...(19): siRNA sense strand
uuucaguggcuuaaacuua

SEQ ID NO: 2633473 - RNA, 19 nt, Homo sapiens
  misc_RNA (1)...(19): siRNA sense strand
gccugauagcacagaagaa

SEQ ID NO: 2633474 - RNA, 19 nt, Homo sapiens
  misc_RNA (1)...(19): siRNA sense strand
ugguauaaucuuacggagu

SEQ ID NO: 2633475 - RNA, 19 nt, Homo sapiens
  misc_RNA (1)...(19): siRNA sense strand
ccauggagagugagaaauc

SEQ ID NO: 2633476 - RNA, 19 nt, Homo sapiens
  misc_RNA (1)...(19): siRNA sense strand
ccaccgaguaccagccaau

SEQ ID NO: 2633477 - RNA, 19 nt, Homo sapiens
  misc_RNA (1)...(19): siRNA sense strand
uggaagaauuugugaaugg

SEQ ID NO: 2633478 - RNA, 19 nt, Homo sapiens
  misc_RNA (1)...(19): siRNA sense strand
gaggaaucccagucaccaa

SEQ ID NO: 2633479 - RNA, 19 nt, Homo sapiens
  misc_RNA (1)...(19): siRNA sense strand
cugggagagaugaaagcua

SEQ ID NO: 2633480 - RNA, 19 nt, Homo sapiens
  misc_RNA (1)...(19): siRNA sense strand
aggaaaaguucuacccaga

SEQ ID NO: 2633481 - RNA, 19 nt, Homo sapiens
  misc_RNA (1)...(19): siRNA sense strand
gggaagggaaauagaggac

SEQ ID NO: 2633482 - RNA, 19 nt, Homo sapiens
  misc_RNA (1)...(19): siRNA sense strand
uagcagcaguggugggagu

SEQ ID NO: 2633483 - RNA, 19 nt, Homo sapiens
  misc_RNA (1)...(19): siRNA sense strand
uaccauaaagggaagaaau

SEQ ID NO: 2633484 - RNA, 19 nt, Homo sapiens
  misc_RNA (1)...(19): siRNA sense strand
cgggaugaacggaguggga

SEQ ID NO: 2633485 - RNA, 19 nt, Homo sapiens
  misc_RNA (1)...(19): siRNA sense strand
ggucaccaucaccgaguaa

SEQ ID NO: 2633486 - RNA, 19 nt, Homo sapiens
  misc_RNA (1)...(19): siRNA sense strand
aaauagaggacaugggcgu

SEQ ID NO: 2633487 - RNA, 19 nt, Homo sapiens
  misc_RNA (1)...(19): siRNA sense strand
gaacauagcagcaguggug

SEQ ID NO: 2633488 - RNA, 19 nt, Homo sapiens
  misc_RNA (1)...(19): siRNA sense strand
ggauuagauaagcagguga

SEQ ID NO: 2633489 - RNA, 19 nt, Homo sapiens
  misc_RNA (1)...(19): siRNA sense strand
ccgaauaagcaguggaaga

SEQ ID NO: 2633490 - RNA, 19 nt, Homo sapiens
  misc_RNA (1)...(19): siRNA sense strand
agauagaacugaaggaaaa

SEQ ID NO: 2633491 - RNA, 19 nt, Homo sapiens
  misc_RNA (1)...(19): siRNA sense strand
gggaaugggaggugaggaa

SEQ ID NO: 2633492 - RNA, 19 nt, Homo sapiens
  misc_RNA (1)...(19): siRNA sense strand
ccuacaaagccaacagaaa

SEQ ID NO: 2633493 - RNA, 19 nt, Homo sapiens
  misc_RNA (1)...(19): siRNA sense strand
aaguaaaagugguggcuaa

SEQ ID NO: 2633494 - RNA, 19 nt, Homo sapiens
  misc_RNA (1)...(19): siRNA sense strand
cagauagaacugaaggaaa

SEQ ID NO: 2633495 - RNA, 19 nt, Homo sapiens
  misc_RNA (1)...(19): siRNA sense strand
cagaagcagcugaaagaaa

SEQ ID NO: 2633496 - RNA, 19 nt, Homo sapiens
  misc_RNA (1)...(19): siRNA sense strand
uccaagaagaugaggauua

SEQ ID NO: 2633497 - RNA, 19 nt, Homo sapiens
  misc_RNA (1)...(19): siRNA sense strand
aggaugagaugauggacaa

SEQ ID NO: 2633498 - RNA, 19 nt, Homo sapiens
  misc_RNA (1)...(19): siRNA sense strand
ggaugaacggagugggaca

SEQ ID NO: 2633499 - RNA, 19 nt, Homo sapiens
  misc_RNA (1)...(19): siRNA sense strand
uaacagaagcacuggaaaa

SEQ ID NO: 2633500 - RNA, 19 nt, Homo sapiens
  misc_RNA (1)...(19): siRNA sense strand
agauaaucgugauguggaa

SEQ ID NO: 2633501 - RNA, 19 nt, Homo sapiens
  misc_RNA (1)...(19): siRNA sense strand
cgucaggcguggagaaagu

SEQ ID NO: 2633502 - RNA, 19 nt, Homo sapiens
  misc_RNA (1)...(19): siRNA sense strand
cgaaaauuccagucgguaa

SEQ ID NO: 2633503 - RNA, 19 nt, Homo sapiens
  misc_RNA (1)...(19): siRNA sense strand
cuacaaagccaacagaaaa

SEQ ID NO: 2633504 - RNA, 19 nt, Homo sapiens
  misc_RNA (1)...(19): siRNA sense strand
auguauacccagaagaaau

SEQ ID NO: 2633505 - RNA, 19 nt, Homo sapiens
  misc_RNA (1)...(19): siRNA sense strand
agagaagaaaccagccaaa

SEQ ID NO: 2633506 - RNA, 19 nt, Homo sapiens
  misc_RNA (1)...(19): siRNA sense strand
gauuagauaagcaggugaa

SEQ ID NO: 2633507 - RNA, 19 nt, Homo sapiens
  misc_RNA (1)...(19): siRNA sense strand
gcuggaagaauuugugaau

SEQ ID NO: 2633508 - RNA, 19 nt, Homo sapiens
  misc_RNA (1)...(19): siRNA sense strand
aaccauggagagugagaaa

SEQ ID NO: 2633509 - RNA, 19 nt, Homo sapiens
  misc_RNA (1)...(19): siRNA sense strand
cugggaagauagaaaugua

SEQ ID NO: 2633510 - RNA, 19 nt, Homo sapiens
  misc_RNA (1)...(19): siRNA sense strand
cuaauguggaucuggcaaa

SEQ ID NO: 2633511 - RNA, 19 nt, Homo sapiens
  misc_RNA (1)...(19): siRNA sense strand
cuucagcguaagagggaau

SEQ ID NO: 2633512 - RNA, 19 nt, Homo sapiens
  misc_RNA (1)...(19): siRNA sense strand
ccugauagcacagaagaaa

SEQ ID NO: 2633513 - RNA, 19 nt, Homo sapiens
  misc_RNA (1)...(19): siRNA sense strand
uguggaagaugauggguca

SEQ ID NO: 2633514 - RNA, 19 nt, Homo sapiens
  misc_RNA (1)...(19): siRNA sense strand
aaauguauacccagaagaa

SEQ ID NO: 2633515 - RNA, 19 nt, Homo sapiens
  misc_RNA (1)...(19): siRNA sense strand
gucgaggacaggaaggaaa

SEQ ID NO: 2633516 - RNA, 19 nt, Homo sapiens
  misc_RNA (1)...(19): siRNA sense strand
gaauaagcaguggaagaaa

SEQ ID NO: 2633517 - RNA, 19 nt, Homo sapiens
  misc_RNA (1)...(19): siRNA sense strand
caggaugagaugauggaca

SEQ ID NO: 2633518 - RNA, 19 nt, Homo sapiens
  misc_RNA (1)...(19): siRNA sense strand
agauagaaauguauaccca

SEQ ID NO: 2633519 - RNA, 19 nt, Homo sapiens
  misc_RNA (1)...(19): siRNA sense strand
ugagagaagcuuugaguac

SEQ ID NO: 2633520 - RNA, 19 nt, Homo sapiens
  misc_RNA (1)...(19): siRNA sense strand
caguggaagaaaucacaaa

SEQ ID NO: 2633521 - RNA, 19 nt, Homo sapiens
  misc_RNA (1)...(19): siRNA sense strand
agucuaagauaguugcuga

SEQ ID NO: 2633522 - RNA, 19 nt, Homo sapiens
  misc_RNA (1)...(19): siRNA sense strand
agauaaaacaggugggaag

SEQ ID NO: 2633523 - RNA, 19 nt, Homo sapiens
  misc_RNA (1)...(19): siRNA sense strand
cagaacuguaaaaggaaaa

SEQ ID NO: 2633524 - RNA, 19 nt, Homo sapiens
  misc_RNA (1)...(19): siRNA sense strand
ugauuguggcauugagaga

SEQ ID NO: 2633525 - RNA, 19 nt, Homo sapiens
  misc_RNA (1)...(19): siRNA sense strand
cuugguguauagagaacaa

SEQ ID NO: 2633526 - RNA, 19 nt, Homo sapiens
  misc_RNA (1)...(19): siRNA sense strand
agcaacaagaagagcacua

SEQ ID NO: 2633527 - RNA, 19 nt, Homo sapiens
  misc_RNA (1)...(19): siRNA sense strand
uggagagcacaguggaauu

SEQ ID NO: 2633528 - RNA, 19 nt, Homo sapiens
  misc_RNA (1)...(19): siRNA sense strand
caucagccggagugguaua

SEQ ID NO: 2633529 - RNA, 19 nt, Homo sapiens
  misc_RNA (1)...(19): siRNA sense strand
agagaagcuuugaguacca

SEQ ID NO: 2633530 - RNA, 19 nt, Homo sapiens
  misc_RNA (1)...(19): siRNA sense strand
auacaagcgcucagaagau

SEQ ID NO: 2633531 - RNA, 19 nt, Homo sapiens
  misc_RNA (1)...(19): siRNA sense strand
aagaagagcacuaccgcau

SEQ ID NO: 2633532 - RNA, 19 nt, Homo sapiens
  misc_RNA (1)...(19): siRNA sense strand
cugaacaaacaaccgaaua

SEQ ID NO: 2633533 - RNA, 19 nt, Homo sapiens
  misc_RNA (1)...(19): siRNA sense strand
cguaagagggaaugaaccu

SEQ ID NO: 2633534 - RNA, 19 nt, Homo sapiens
  misc_RNA (1)...(19): siRNA sense strand
ccacugaucagcagcaaca

SEQ ID NO: 2633535 - RNA, 19 nt, Homo sapiens
  misc_RNA (1)...(19): siRNA sense strand
ggacccuggcugagcauuu

SEQ ID NO: 2633536 - RNA, 19 nt, Homo sapiens
  misc_RNA (1)...(19): siRNA sense strand
uuucaguggcuuaaacuua

SEQ ID NO: 2633537 - RNA, 19 nt, Homo sapiens
  misc_RNA (1)...(19): siRNA sense strand
gccugauagcacagaagaa

SEQ ID NO: 2633538 - RNA, 19 nt, Homo sapiens
  misc_RNA (1)...(19): siRNA sense strand
ugguauaaucuuacggagu

SEQ ID NO: 2633539 - RNA, 19 nt, Homo sapiens
  misc_RNA (1)...(19): siRNA sense strand
ccauggagagugagaaauc

SEQ ID NO: 2633540 - RNA, 19 nt, Homo sapiens
  misc_RNA (1)...(19): siRNA sense strand
ccaccgaguaccagccaau

SEQ ID NO: 2633541 - RNA, 19 nt, Homo sapiens
  misc_RNA (1)...(19): siRNA sense strand
uggaagaauuugugaaugg

SEQ ID NO: 2633542 - RNA, 19 nt, Homo sapiens
  misc_RNA (1)...(19): siRNA sense strand
gaggaaucccagucaccaa

SEQ ID NO: 2633543 - RNA, 19 nt, Homo sapiens
  misc_RNA (1)...(19): siRNA sense strand
cugggagagaugaaagcua

SEQ ID NO: 2633544 - RNA, 19 nt, Homo sapiens
  misc_RNA (1)...(19): siRNA sense strand
aggaaaaguucuacccaga

SEQ ID NO: 2633545 - RNA, 19 nt, Homo sapiens
  misc_RNA (1)...(19): siRNA sense strand
gggaagggaaauagaggac

SEQ ID NO: 2633546 - RNA, 19 nt, Homo sapiens
  misc_RNA (1)...(19): siRNA sense strand
uagcagcaguggugggagu

SEQ ID NO: 2633547 - RNA, 19 nt, Homo sapiens
  misc_RNA (1)...(19): siRNA sense strand
uaccauaaagggaagaaau

SEQ ID NO: 2633548 - RNA, 19 nt, Homo sapiens
  misc_RNA (1)...(19): siRNA sense strand
cgggaugaacggaguggga

SEQ ID NO: 2633549 - RNA, 19 nt, Homo sapiens
  misc_RNA (1)...(19): siRNA sense strand
ggucaccaucaccgaguaa

SEQ ID NO: 2633550 - RNA, 19 nt, Homo sapiens
  misc_RNA (1)...(19): siRNA sense strand
aaauagaggacaugggcgu

SEQ ID NO: 2633551 - RNA, 19 nt, Homo sapiens
  misc_RNA (1)...(19): siRNA sense strand
gaacauagcagcaguggug

SEQ ID NO: 2633552 - RNA, 19 nt, Homo sapiens
  misc_RNA (1)...(19): siRNA sense strand
ggauuagauaagcagguga

SEQ ID NO: 2633553 - RNA, 19 nt, Homo sapiens
  misc_RNA (1)...(19): siRNA sense strand
acaaagaaguagaguggcu

SEQ ID NO: 2633554 - RNA, 19 nt, Homo sapiens
  misc_RNA (1)...(19): siRNA sense strand
ugaaaagaccagacaacau

SEQ ID NO: 2633555 - RNA, 19 nt, Homo sapiens
  misc_RNA (1)...(19): siRNA sense strand
gagaagaagaauauggaaa

SEQ ID NO: 2633556 - RNA, 19 nt, Homo sapiens
  misc_RNA (1)...(19): siRNA sense strand
aggaagaggcuaagugaaa

SEQ ID NO: 2633557 - RNA, 19 nt, Homo sapiens
  misc_RNA (1)...(19): siRNA sense strand
gacaauaggaagaggcuaa

SEQ ID NO: 2633558 - RNA, 19 nt, Homo sapiens
  misc_RNA (1)...(19): siRNA sense strand
ggacagugacagugagaga

SEQ ID NO: 2633559 - RNA, 19 nt, Homo sapiens
  misc_RNA (1)...(19): siRNA sense strand
gcaaacaagaaaugaggaa

SEQ ID NO: 2633560 - RNA, 19 nt, Homo sapiens
  misc_RNA (1)...(19): siRNA sense strand
uccaagagcccaagagaaa

SEQ ID NO: 2633561 - RNA, 19 nt, Homo sapiens
  misc_RNA (1)...(19): siRNA sense strand
agacaaugaagaaggagua

SEQ ID NO: 2633562 - RNA, 19 nt, Homo sapiens
  misc_RNA (1)...(19): siRNA sense strand
aaacaagaaaugaggaaca

SEQ ID NO: 2633563 - RNA, 19 nt, Homo sapiens
  misc_RNA (1)...(19): siRNA sense strand
caaugaagaaggaguauau

SEQ ID NO: 2633564 - RNA, 19 nt, Homo sapiens
  misc_RNA (1)...(19): siRNA sense strand
agaaagaagacaaugaaga

SEQ ID NO: 2633565 - RNA, 19 nt, Homo sapiens
  misc_RNA (1)...(19): siRNA sense strand
acacugacacauugaguaa

SEQ ID NO: 2633566 - RNA, 19 nt, Homo sapiens
  misc_RNA (1)...(19): siRNA sense strand
agacaaacucguaaggaca

SEQ ID NO: 2633567 - RNA, 19 nt, Homo sapiens
  misc_RNA (1)...(19): siRNA sense strand
cgaaacagcucuaggcacu

SEQ ID NO: 2633568 - RNA, 19 nt, Homo sapiens
  misc_RNA (1)...(19): siRNA sense strand
gggaauaagggaagaucca

SEQ ID NO: 2633569 - RNA, 19 nt, Homo sapiens
  misc_RNA (1)...(19): siRNA sense strand
ggacagggacagugaggga

SEQ ID NO: 2633570 - RNA, 19 nt, Homo sapiens
  misc_RNA (1)...(19): siRNA sense strand
ggacagugacagugaggga

SEQ ID NO: 2633571 - RNA, 19 nt, Homo sapiens
  misc_RNA (1)...(19): siRNA sense strand
ggacagggacagugaggga

SEQ ID NO: 2633572 - RNA, 19 nt, Homo sapiens
  misc_RNA (1)...(19): siRNA sense strand
cuggaaagaagaaacaaua

SEQ ID NO: 2633573 - RNA, 19 nt, Homo sapiens
  misc_RNA (1)...(19): siRNA sense strand
uugaagagaaagaagacaa

SEQ ID NO: 2633574 - RNA, 19 nt, Homo sapiens
  misc_RNA (1)...(19): siRNA sense strand
cagacaaacacgugggcca

SEQ ID NO: 2633575 - RNA, 19 nt, Homo sapiens
  misc_RNA (1)...(19): siRNA sense strand
cguaggggauccagaguua

SEQ ID NO: 2633576 - RNA, 19 nt, Homo sapiens
  misc_RNA (1)...(19): siRNA sense strand
aagaucaaguccaggagaa

SEQ ID NO: 2633577 - RNA, 19 nt, Homo sapiens
  misc_RNA (1)...(19): siRNA sense strand
aagaucaaguccaggagaa

SEQ ID NO: 2633578 - RNA, 19 nt, Homo sapiens
  misc_RNA (1)...(19): siRNA sense strand
aagaucaaguccaggagaa

SEQ ID NO: 2633579 - RNA, 19 nt, Homo sapiens
  misc_RNA (1)...(19): siRNA sense strand
cagaagagucagacacaca

SEQ ID NO: 2633580 - RNA, 19 nt, Homo sapiens
  misc_RNA (1)...(19): siRNA sense strand
ggaagauccaagagcccaa

SEQ ID NO: 2633581 - RNA, 19 nt, Homo sapiens
  misc_RNA (1)...(19): siRNA sense strand
aagaucaagugcaggagaa

SEQ ID NO: 2633582 - RNA, 19 nt, Homo sapiens
  misc_RNA (1)...(19): siRNA sense strand
cggcaaauccugaagaauc

SEQ ID NO: 2633583 - RNA, 19 nt, Homo sapiens
  misc_RNA (1)...(19): siRNA sense strand
acaaacacgaaaugaggaa

SEQ ID NO: 2633584 - RNA, 19 nt, Homo sapiens
  misc_RNA (1)...(19): siRNA sense strand
agaucaaguccaggagaaa

SEQ ID NO: 2633585 - RNA, 19 nt, Homo sapiens
  misc_RNA (1)...(19): siRNA sense strand
agaucaaguccaggagaaa

SEQ ID NO: 2633586 - RNA, 19 nt, Homo sapiens
  misc_RNA (1)...(19): siRNA sense strand
agaucaaguccaggagaaa

SEQ ID NO: 2633587 - RNA, 19 nt, Homo sapiens
  misc_RNA (1)...(19): siRNA sense strand
gauuaggagacaauaggaa

SEQ ID NO: 2633588 - RNA, 19 nt, Homo sapiens
  misc_RNA (1)...(19): siRNA sense strand
aagagaaagaagacaauga

SEQ ID NO: 2633589 - RNA, 19 nt, Homo sapiens
  misc_RNA (1)...(19): siRNA sense strand
cagcagagccacaaagagu

SEQ ID NO: 2633590 - RNA, 19 nt, Homo sapiens
  misc_RNA (1)...(19): siRNA sense strand
cagaagugcaagcaggcaa

SEQ ID NO: 2633591 - RNA, 19 nt, Homo sapiens
  misc_RNA (1)...(19): siRNA sense strand
gaagaggcuaagugaaaga

SEQ ID NO: 2633592 - RNA, 19 nt, Homo sapiens
  misc_RNA (1)...(19): siRNA sense strand
agaaaagggaauaagggaa

SEQ ID NO: 2633593 - RNA, 19 nt, Homo sapiens
  misc_RNA (1)...(19): siRNA sense strand
ggauauucaccuacucaua

SEQ ID NO: 2633594 - RNA, 19 nt, Homo sapiens
  misc_RNA (1)...(19): siRNA sense strand
cagaagugcaagcagacaa

SEQ ID NO: 2633595 - RNA, 19 nt, Homo sapiens
  misc_RNA (1)...(19): siRNA sense strand
cagaagugcaagcagacaa

SEQ ID NO: 2633596 - RNA, 19 nt, Homo sapiens
  misc_RNA (1)...(19): siRNA sense strand
ggaaaacaucuuugccaua

SEQ ID NO: 2633597 - RNA, 19 nt, Homo sapiens
  misc_RNA (1)...(19): siRNA sense strand
ccaucauaacucaaguaaa

SEQ ID NO: 2633598 - RNA, 19 nt, Homo sapiens
  misc_RNA (1)...(19): siRNA sense strand
caucaagaagauagagcca

SEQ ID NO: 2633599 - RNA, 19 nt, Homo sapiens
  misc_RNA (1)...(19): siRNA sense strand
ccucaagucuggaaagaag

SEQ ID NO: 2633600 - RNA, 19 nt, Homo sapiens
  misc_RNA (1)...(19): siRNA sense strand
agugagggacauucagaaa

SEQ ID NO: 2633601 - RNA, 19 nt, Homo sapiens
  misc_RNA (1)...(19): siRNA sense strand
gguagucaggccagugaua

SEQ ID NO: 2633602 - RNA, 19 nt, Homo sapiens
  misc_RNA (1)...(19): siRNA sense strand
cagcacuggacgaagacaa

SEQ ID NO: 2633603 - RNA, 19 nt, Homo sapiens
  misc_RNA (1)...(19): siRNA sense strand
ggacaaacaaucaggagac

SEQ ID NO: 2633604 - RNA, 19 nt, Homo sapiens
  misc_RNA (1)...(19): siRNA sense strand
gcaagcaggcaaacaagaa

SEQ ID NO: 2633605 - RNA, 19 nt, Homo sapiens
  misc_RNA (1)...(19): siRNA sense strand
ucaagaagauagagccagu

SEQ ID NO: 2633606 - RNA, 19 nt, Homo sapiens
  misc_RNA (1)...(19): siRNA sense strand
ucaucagggcccaggacaa

SEQ ID NO: 2633607 - RNA, 19 nt, Homo sapiens
  misc_RNA (1)...(19): siRNA sense strand
cagcacuggaggaagacaa

SEQ ID NO: 2633608 - RNA, 19 nt, Homo sapiens
  misc_RNA (1)...(19): siRNA sense strand
agaagugcaagcagacaaa

SEQ ID NO: 2633609 - RNA, 19 nt, Homo sapiens
  misc_RNA (1)...(19): siRNA sense strand
agaagugcaagcagacaaa

SEQ ID NO: 2633610 - RNA, 19 nt, Homo sapiens
  misc_RNA (1)...(19): siRNA sense strand
cagcacuggaggaagacaa

SEQ ID NO: 2633611 - RNA, 19 nt, Homo sapiens
  misc_RNA (1)...(19): siRNA sense strand
aggucaaguccaggagaaa

SEQ ID NO: 2633612 - RNA, 19 nt, Homo sapiens
  misc_RNA (1)...(19): siRNA sense strand
cagcacuggaggaagacaa

SEQ ID NO: 2633613 - RNA, 19 nt, Homo sapiens
  misc_RNA (1)...(19): siRNA sense strand
cucauagagaagaagaaua

SEQ ID NO: 2633614 - RNA, 19 nt, Homo sapiens
  misc_RNA (1)...(19): siRNA sense strand
ugaagagaaagaagacaau

SEQ ID NO: 2633615 - RNA, 19 nt, Homo sapiens
  misc_RNA (1)...(19): siRNA sense strand
cagaagacucagacacaca

SEQ ID NO: 2633616 - RNA, 19 nt, Homo sapiens
  misc_RNA (1)...(19): siRNA sense strand
gggucaaggagaggaggaa

SEQ ID NO: 2633617 - RNA, 19 nt, Homo sapiens
  misc_RNA (1)...(19): siRNA sense strand
cagaagacucagacacaca

SEQ ID NO: 2633618 - RNA, 19 nt, Homo sapiens
  misc_RNA (1)...(19): siRNA sense strand
gggucaagcagaggaggaa

SEQ ID NO: 2633619 - RNA, 19 nt, Homo sapiens
  misc_RNA (1)...(19): siRNA sense strand
agaagugcaagcaggcaaa

SEQ ID NO: 2633620 - RNA, 19 nt, Homo sapiens
  misc_RNA (1)...(19): siRNA sense strand
gggucaagcagaggaggaa

SEQ ID NO: 2633621 - RNA, 19 nt, Homo sapiens
  misc_RNA (1)...(19): siRNA sense strand
uauuaugagucuaccagaa

SEQ ID NO: 2633622 - RNA, 19 nt, Homo sapiens
  misc_RNA (1)...(19): siRNA sense strand
aaacacgaaaugaggaaca

SEQ ID NO: 2633623 - RNA, 19 nt, Homo sapiens
  misc_RNA (1)...(19): siRNA sense strand
cagauaugguugaugucuu

SEQ ID NO: 2633624 - RNA, 19 nt, Homo sapiens
  misc_RNA (1)...(19): siRNA sense strand
ggaagaaaacaaagaaaac

SEQ ID NO: 2633625 - RNA, 19 nt, Homo sapiens
  misc_RNA (1)...(19): siRNA sense strand
agaucaagugcaggagaaa

SEQ ID NO: 2633626 - RNA, 19 nt, Homo sapiens
  misc_RNA (1)...(19): siRNA sense strand
cgagacagcuccaggcacu

SEQ ID NO: 2633627 - RNA, 19 nt, Homo sapiens
  misc_RNA (1)...(19): siRNA sense strand
cagacgacuccgagagguu

SEQ ID NO: 2633628 - RNA, 19 nt, Homo sapiens
  misc_RNA (1)...(19): siRNA sense strand
cgagacagcuccaggcacu

SEQ ID NO: 2633629 - RNA, 19 nt, Homo sapiens
  misc_RNA (1)...(19): siRNA sense strand
uugcagaucucuuaaguau

SEQ ID NO: 2633630 - RNA, 19 nt, Homo sapiens
  misc_RNA (1)...(19): siRNA sense strand
gcuaaaaguggcagaucau

SEQ ID NO: 2633631 - RNA, 19 nt, Homo sapiens
  misc_RNA (1)...(19): siRNA sense strand
agaccaagugcuuugaaau

SEQ ID NO: 2633632 - RNA, 19 nt, Homo sapiens
  misc_RNA (1)...(19): siRNA sense strand
ggcagaucauucaggccaa

SEQ ID NO: 2633633 - RNA, 19 nt, Homo sapiens
  misc_RNA (1)...(19): siRNA sense strand
caggccaaguaaagaccaa

SEQ ID NO: 2633634 - RNA, 19 nt, Homo sapiens
  misc_RNA (1)...(19): siRNA sense strand
gaucauucaggccaaguaa

SEQ ID NO: 2633635 - RNA, 19 nt, Homo sapiens
  misc_RNA (1)...(19): siRNA sense strand
uugcagaucucuuaaguau

SEQ ID NO: 2633636 - RNA, 19 nt, Homo sapiens
  misc_RNA (1)...(19): siRNA sense strand
gcuaaaaguggcagaucau

SEQ ID NO: 2633637 - RNA, 19 nt, Homo sapiens
  misc_RNA (1)...(19): siRNA sense strand
agaccaagugcuuugaaau

SEQ ID NO: 2633638 - RNA, 19 nt, Homo sapiens
  misc_RNA (1)...(19): siRNA sense strand
ggcagaucauucaggccaa

SEQ ID NO: 2633639 - RNA, 19 nt, Homo sapiens
  misc_RNA (1)...(19): siRNA sense strand
caggccaaguaaagaccaa

SEQ ID NO: 2633640 - RNA, 19 nt, Homo sapiens
  misc_RNA (1)...(19): siRNA sense strand
gaucauucaggccaaguaa

SEQ ID NO: 2633641 - RNA, 19 nt, Homo sapiens
  misc_RNA (1)...(19): siRNA sense strand
agaccaagugcuuugaaau

SEQ ID NO: 2633642 - RNA, 19 nt, Homo sapiens
  misc_RNA (1)...(19): siRNA sense strand
caggccaaguaaagaccaa

SEQ ID NO: 2633643 - RNA, 19 nt, Homo sapiens
  misc_RNA (1)...(19): siRNA sense strand
ccuucuuaaugaugggaaa

SEQ ID NO: 2633644 - RNA, 19 nt, Homo sapiens
  misc_RNA (1)...(19): siRNA sense strand
agagaagcacagagauauu

SEQ ID NO: 2633645 - RNA, 19 nt, Homo sapiens
  misc_RNA (1)...(19): siRNA sense strand
caguagaugagcacacaaa

SEQ ID NO: 2633646 - RNA, 19 nt, Homo sapiens
  misc_RNA (1)...(19): siRNA sense strand
agaagggacaaguaauaaa

SEQ ID NO: 2633647 - RNA, 19 nt, Homo sapiens
  misc_RNA (1)...(19): siRNA sense strand
cugcaugggauaggagaaa

SEQ ID NO: 2633648 - RNA, 19 nt, Homo sapiens
  misc_RNA (1)...(19): siRNA sense strand
caagaagcuucaucggcaa

SEQ ID NO: 2633649 - RNA, 19 nt, Homo sapiens
  misc_RNA (1)...(19): siRNA sense strand
aguacagagucauuugaaa

SEQ ID NO: 2633650 - RNA, 19 nt, Homo sapiens
  misc_RNA (1)...(19): siRNA sense strand
ugcaaauguccuugagauu

SEQ ID NO: 2633651 - RNA, 19 nt, Homo sapiens
  misc_RNA (1)...(19): siRNA sense strand
gcuucugaugagagaggaa

SEQ ID NO: 2633652 - RNA, 19 nt, Homo sapiens
  misc_RNA (1)...(19): siRNA sense strand
aaaugggaguacagaguca

SEQ ID NO: 2633653 - RNA, 19 nt, Homo sapiens
  misc_RNA (1)...(19): siRNA sense strand
ucgaaaacugccagauaua

SEQ ID NO: 2633654 - RNA, 19 nt, Homo sapiens
  misc_RNA (1)...(19): siRNA sense strand
agaacggaguggaugguca

SEQ ID NO: 2633655 - RNA, 19 nt, Homo sapiens
  misc_RNA (1)...(19): siRNA sense strand
caaagaucuaguugugcaa

SEQ ID NO: 2633656 - RNA, 19 nt, Homo sapiens
  misc_RNA (1)...(19): siRNA sense strand
uugcagauacuaaggaaca

SEQ ID NO: 2633657 - RNA, 19 nt, Homo sapiens
  misc_RNA (1)...(19): siRNA sense strand
ugaacauagacguggaguu

SEQ ID NO: 2633658 - RNA, 19 nt, Homo sapiens
  misc_RNA (1)...(19): siRNA sense strand
ccucgaaaacugccagaua

SEQ ID NO: 2633659 - RNA, 19 nt, Homo sapiens
  misc_RNA (1)...(19): siRNA sense strand
gcaugggauaggagaaacu

SEQ ID NO: 2633660 - RNA, 19 nt, Homo sapiens
  misc_RNA (1)...(19): siRNA sense strand
auaagaagggacaaguaau

SEQ ID NO: 2633661 - RNA, 19 nt, Homo sapiens
  misc_RNA (1)...(19): siRNA sense strand
acaagaagcuucaucggca

SEQ ID NO: 2633662 - RNA, 19 nt, Homo sapiens
  misc_RNA (1)...(19): siRNA sense strand
cgagcugugcuuuggaauu

SEQ ID NO: 2633663 - RNA, 19 nt, Homo sapiens
  misc_RNA (1)...(19): siRNA sense strand
agauucagcaacaaagcaa

SEQ ID NO: 2633664 - RNA, 19 nt, Homo sapiens
  misc_RNA (1)...(19): siRNA sense strand
ccaacuugcaaauagaaaa

SEQ ID NO: 2633665 - RNA, 19 nt, Homo sapiens
  misc_RNA (1)...(19): siRNA sense strand
ugauuuggcuucuggcuca

SEQ ID NO: 2633666 - RNA, 19 nt, Homo sapiens
  misc_RNA (1)...(19): siRNA sense strand
gugaaagccuucuuggucu

SEQ ID NO: 2633667 - RNA, 19 nt, Homo sapiens
  misc_RNA (1)...(19): siRNA sense strand
guucauaaagcauugcaga

SEQ ID NO: 2633668 - RNA, 19 nt, Homo sapiens
  misc_RNA (1)...(19): siRNA sense strand
auacagaaguuuacgguga

SEQ ID NO: 2633669 - RNA, 19 nt, Homo sapiens
  misc_RNA (1)...(19): siRNA sense strand
cuacauacgaugaagcuga

SEQ ID NO: 2633670 - RNA, 19 nt, Homo sapiens
  misc_RNA (1)...(19): siRNA sense strand
cuggauauuucaauggaca

SEQ ID NO: 2633671 - RNA, 19 nt, Homo sapiens
  misc_RNA (1)...(19): siRNA sense strand
gaugaagcugagaaggcua

SEQ ID NO: 2633672 - RNA, 19 nt, Homo sapiens
  misc_RNA (1)...(19): siRNA sense strand
gcagcugcucauagaacaa

SEQ ID NO: 2633673 - RNA, 19 nt, Homo sapiens
  misc_RNA (1)...(19): siRNA sense strand
acucagaaucaucggcuau

SEQ ID NO: 2633674 - RNA, 19 nt, Homo sapiens
  misc_RNA (1)...(19): siRNA sense strand
cucaaagaauucaggagga

SEQ ID NO: 2633675 - RNA, 19 nt, Homo sapiens
  misc_RNA (1)...(19): siRNA sense strand
caguauuggcuuuggugga

SEQ ID NO: 2633676 - RNA, 19 nt, Homo sapiens
  misc_RNA (1)...(19): siRNA sense strand
aggcuaaagcugcugcaau

SEQ ID NO: 2633677 - RNA, 19 nt, Homo sapiens
  misc_RNA (1)...(19): siRNA sense strand
agaggauaacucagaauca

SEQ ID NO: 2633678 - RNA, 19 nt, Homo sapiens
  misc_RNA (1)...(19): siRNA sense strand
guacaaagaucccaggcaa

SEQ ID NO: 2633679 - RNA, 19 nt, Homo sapiens
  misc_RNA (1)...(19): siRNA sense strand
ccgaagugcugaugagcga

SEQ ID NO: 2633680 - RNA, 19 nt, Homo sapiens
  misc_RNA (1)...(19): siRNA sense strand
gaggauaacccuugggacu

SEQ ID NO: 2633681 - RNA, 19 nt, Homo sapiens
  misc_RNA (1)...(19): siRNA sense strand
ugaaagaauggcuggaaaa

SEQ ID NO: 2633682 - RNA, 19 nt, Homo sapiens
  misc_RNA (1)...(19): siRNA sense strand
uuucaagacaaaugggcaa

SEQ ID NO: 2633683 - RNA, 19 nt, Homo sapiens
  misc_RNA (1)...(19): siRNA sense strand
gcaagaggaucaugccaca

SEQ ID NO: 2633684 - RNA, 19 nt, Homo sapiens
  misc_RNA (1)...(19): siRNA sense strand
gauuaauucccuacagaca

SEQ ID NO: 2633685 - RNA, 19 nt, Homo sapiens
  misc_RNA (1)...(19): siRNA sense strand
ucaacaacaacaagaucaa

SEQ ID NO: 2633686 - RNA, 19 nt, Homo sapiens
  misc_RNA (1)...(19): siRNA sense strand
ggcuggacgaucuggaaua

SEQ ID NO: 2633687 - RNA, 19 nt, Homo sapiens
  misc_RNA (1)...(19): siRNA sense strand
cgagauaacaagauccaca

SEQ ID NO: 2633688 - RNA, 19 nt, Homo sapiens
  misc_RNA (1)...(19): siRNA sense strand
aggaggucuuggagcaaau

SEQ ID NO: 2633689 - RNA, 19 nt, Homo sapiens
  misc_RNA (1)...(19): siRNA sense strand
ugaacaagcuggaggugcu

SEQ ID NO: 2633690 - RNA, 19 nt, Homo sapiens
  misc_RNA (1)...(19): siRNA sense strand
gacaaaugggcaagaggau

SEQ ID NO: 2633691 - RNA, 19 nt, Homo sapiens
  misc_RNA (1)...(19): siRNA sense strand
accugaacguggaguacaa

SEQ ID NO: 2633692 - RNA, 19 nt, Homo sapiens
  misc_RNA (1)...(19): siRNA sense strand
cguuaacuucgcacaguaa

SEQ ID NO: 2633693 - RNA, 19 nt, Homo sapiens
  misc_RNA (1)...(19): siRNA sense strand
gcaaugagauagaagggga

SEQ ID NO: 2633694 - RNA, 19 nt, Homo sapiens
  misc_RNA (1)...(19): siRNA sense strand
ccuuccaggacuugaacaa

SEQ ID NO: 2633695 - RNA, 19 nt, Homo sapiens
  misc_RNA (1)...(19): siRNA sense strand
guuaguuugcacauggaaa

SEQ ID NO: 2633696 - RNA, 19 nt, Homo sapiens
  misc_RNA (1)...(19): siRNA sense strand
aggaacaaacccuuagcua

SEQ ID NO: 2633697 - RNA, 19 nt, Homo sapiens
  misc_RNA (1)...(19): siRNA sense strand
ccaagagacgagaugccaa

SEQ ID NO: 2633698 - RNA, 19 nt, Homo sapiens
  misc_RNA (1)...(19): siRNA sense strand
augaggaggucuuggagca

SEQ ID NO: 2633699 - RNA, 19 nt, Homo sapiens
  misc_RNA (1)...(19): siRNA sense strand
aagaauggcuggaaaacau

SEQ ID NO: 2633700 - RNA, 19 nt, Homo sapiens
  misc_RNA (1)...(19): siRNA sense strand
ccuccgcguccgagauuaa

SEQ ID NO: 2633701 - RNA, 19 nt, Homo sapiens
  misc_RNA (1)...(19): siRNA sense strand
ccuccaucauccagauaga

SEQ ID NO: 2633702 - RNA, 19 nt, Homo sapiens
  misc_RNA (1)...(19): siRNA sense strand
auuuauuucugcauggcaa

SEQ ID NO: 2633703 - RNA, 19 nt, Homo sapiens
  misc_RNA (1)...(19): siRNA sense strand
agacaaaugggcaagagga

SEQ ID NO: 2633704 - RNA, 19 nt, Homo sapiens
  misc_RNA (1)...(19): siRNA sense strand
uuaaagaugaacugcaaca

SEQ ID NO: 2633705 - RNA, 19 nt, Homo sapiens
  misc_RNA (1)...(19): siRNA sense strand
cuguagagaacaacacuuu

SEQ ID NO: 2633706 - RNA, 19 nt, Homo sapiens
  misc_RNA (1)...(19): siRNA sense strand
ccuucaagaucgagagaaa

SEQ ID NO: 2633707 - RNA, 19 nt, Homo sapiens
  misc_RNA (1)...(19): siRNA sense strand
cgggaugagccgugguaua

SEQ ID NO: 2633708 - RNA, 19 nt, Homo sapiens
  misc_RNA (1)...(19): siRNA sense strand
gguuugaauugcuggaaau

SEQ ID NO: 2633709 - RNA, 19 nt, Homo sapiens
  misc_RNA (1)...(19): siRNA sense strand
cggcaagcucguucggaaa

SEQ ID NO: 2633710 - RNA, 19 nt, Homo sapiens
  misc_RNA (1)...(19): siRNA sense strand
acugaagaacacugagaaa

SEQ ID NO: 2633711 - RNA, 19 nt, Homo sapiens
  misc_RNA (1)...(19): siRNA sense strand
ccuacaucccacagagaua

SEQ ID NO: 2633712 - RNA, 19 nt, Homo sapiens
  misc_RNA (1)...(19): siRNA sense strand
ccaagaggaucgaggagca

SEQ ID NO: 2633713 - RNA, 19 nt, Homo sapiens
  misc_RNA (1)...(19): siRNA sense strand
caacagacuuuguacgaca

SEQ ID NO: 2633714 - RNA, 19 nt, Homo sapiens
  misc_RNA (1)...(19): siRNA sense strand
accuaaggcugaaggacaa

SEQ ID NO: 2633715 - RNA, 19 nt, Homo sapiens
  misc_RNA (1)...(19): siRNA sense strand
cggcuaucaaacaggguua

SEQ ID NO: 2633716 - RNA, 19 nt, Homo sapiens
  misc_RNA (1)...(19): siRNA sense strand
cagaaaacggagucggaaa

SEQ ID NO: 2633717 - RNA, 19 nt, Homo sapiens
  misc_RNA (1)...(19): siRNA sense strand
gcauaggugucaucggcaa

SEQ ID NO: 2633718 - RNA, 19 nt, Homo sapiens
  misc_RNA (1)...(19): siRNA sense strand
agggagaaccacaucgaaa

SEQ ID NO: 2633719 - RNA, 19 nt, Homo sapiens
  misc_RNA (1)...(19): siRNA sense strand
ccgagugauagaaggcaaa

SEQ ID NO: 2633720 - RNA, 19 nt, Homo sapiens
  misc_RNA (1)...(19): siRNA sense strand
aagaagaauaugaaggcau

SEQ ID NO: 2633721 - RNA, 19 nt, Homo sapiens
  misc_RNA (1)...(19): siRNA sense strand
agcagaagccuaugagcaa

SEQ ID NO: 2633722 - RNA, 19 nt, Homo sapiens
  misc_RNA (1)...(19): siRNA sense strand
gugcaaaugaugucagcau

SEQ ID NO: 2633723 - RNA, 19 nt, Homo sapiens
  misc_RNA (1)...(19): siRNA sense strand
gaaacaaagucgaaagcug

SEQ ID NO: 2633724 - RNA, 19 nt, Homo sapiens
  misc_RNA (1)...(19): siRNA sense strand
cggucgagaugcagaaguu

SEQ ID NO: 2633725 - RNA, 19 nt, Homo sapiens
  misc_RNA (1)...(19): siRNA sense strand
ggaccaucuacgugggaca

SEQ ID NO: 2633726 - RNA, 19 nt, Homo sapiens
  misc_RNA (1)...(19): siRNA sense strand
ucggaaaggcagaggaauc

SEQ ID NO: 2633727 - RNA, 19 nt, Homo sapiens
  misc_RNA (1)...(19): siRNA sense strand
ugaagaacacugagaaaau

SEQ ID NO: 2633728 - RNA, 19 nt, Homo sapiens
  misc_RNA (1)...(19): siRNA sense strand
agacuggcuucgacauaaa

SEQ ID NO: 2633729 - RNA, 19 nt, Homo sapiens
  misc_RNA (1)...(19): siRNA sense strand
augagcaaauagagaaaga

SEQ ID NO: 2633730 - RNA, 19 nt, Homo sapiens
  misc_RNA (1)...(19): siRNA sense strand
gccaacagcaacagagaga

SEQ ID NO: 2633731 - RNA, 19 nt, Homo sapiens
  misc_RNA (1)...(19): siRNA sense strand
ucaaugaagagcugggaca

SEQ ID NO: 2633732 - RNA, 19 nt, Homo sapiens
  misc_RNA (1)...(19): siRNA sense strand
agguuugaauugcuggaaa

SEQ ID NO: 2633733 - RNA, 19 nt, Homo sapiens
  misc_RNA (1)...(19): siRNA sense strand
ggagaaagcugcagacacc

SEQ ID NO: 2633734 - RNA, 19 nt, Homo sapiens
  misc_RNA (1)...(19): siRNA sense strand
ccaucgaggcccugcagaa

SEQ ID NO: 2633735 - RNA, 19 nt, Homo sapiens
  misc_RNA (1)...(19): siRNA sense strand
cgucaggaaucgacaugau

SEQ ID NO: 2633736 - RNA, 19 nt, Homo sapiens
  misc_RNA (1)...(19): siRNA sense strand
gugugcaggagaagagaau

SEQ ID NO: 2633737 - RNA, 19 nt, Homo sapiens
  misc_RNA (1)...(19): siRNA sense strand
caacagcaacagagagagu

SEQ ID NO: 2633738 - RNA, 19 nt, Homo sapiens
  misc_RNA (1)...(19): siRNA sense strand
agucggaaaggcagaggaa

SEQ ID NO: 2633739 - RNA, 19 nt, Homo sapiens
  misc_RNA (1)...(19): siRNA sense strand
gagauauuaaacagggaga

SEQ ID NO: 2633740 - RNA, 19 nt, Homo sapiens
  misc_RNA (1)...(19): siRNA sense strand
gugcaguugauuauugaua

SEQ ID NO: 2633741 - RNA, 19 nt, Homo sapiens
  misc_RNA (1)...(19): siRNA sense strand
augcaaucccaaaguuuaa

SEQ ID NO: 2633742 - RNA, 19 nt, Homo sapiens
  misc_RNA (1)...(19): siRNA sense strand
ggagcuacacugaagaaca

SEQ ID NO: 2633743 - RNA, 19 nt, Homo sapiens
  misc_RNA (1)...(19): siRNA sense strand
ugggacagguggaguacau

SEQ ID NO: 2633744 - RNA, 19 nt, Homo sapiens
  misc_RNA (1)...(19): siRNA sense strand
gagcaaauagagaaagauc

SEQ ID NO: 2633745 - RNA, 19 nt, Homo sapiens
  misc_RNA (1)...(19): siRNA sense strand
gaagagaauuggguggaca

SEQ ID NO: 2633746 - RNA, 19 nt, Homo sapiens
  misc_RNA (1)...(19): siRNA sense strand
cccgagugauagaaggcaa

SEQ ID NO: 2633747 - RNA, 19 nt, Homo sapiens
  misc_RNA (1)...(19): siRNA sense strand
ggcugauccaagaagaaua

SEQ ID NO: 2633748 - RNA, 19 nt, Homo sapiens
  misc_RNA (1)...(19): siRNA sense strand
acacgggaauggaaaccaa

SEQ ID NO: 2633749 - RNA, 19 nt, Homo sapiens
  misc_RNA (1)...(19): siRNA sense strand
acggcaagcucguucggaa

SEQ ID NO: 2633750 - RNA, 19 nt, Homo sapiens
  misc_RNA (1)...(19): siRNA sense strand
aaggagaaugaguguaauu

SEQ ID NO: 2633751 - RNA, 19 nt, Homo sapiens
  misc_RNA (1)...(19): siRNA sense strand
ccgccagcuuggauggaga

SEQ ID NO: 2633752 - RNA, 19 nt, Homo sapiens
  misc_RNA (1)...(19): siRNA sense strand
uauuaaacagggagaacca

SEQ ID NO: 2633753 - RNA, 19 nt, Homo sapiens
  misc_RNA (1)...(19): siRNA sense strand
cagaagccuaugagcaaau

SEQ ID NO: 2633754 - RNA, 19 nt, Homo sapiens
  misc_RNA (1)...(19): siRNA sense strand
gugcaggagaagagaauug

SEQ ID NO: 2633755 - RNA, 19 nt, Homo sapiens
  misc_RNA (1)...(19): siRNA sense strand
gggacgaagacauguuuga

SEQ ID NO: 2633756 - RNA, 19 nt, Homo sapiens
  misc_RNA (1)...(19): siRNA sense strand
cggaaaacaacauggaguu

SEQ ID NO: 2633757 - RNA, 19 nt, Homo sapiens
  misc_RNA (1)...(19): siRNA sense strand
ucgaagguguccagagacu

SEQ ID NO: 2633758 - RNA, 19 nt, Homo sapiens
  misc_RNA (1)...(19): siRNA sense strand
ugauagaaggcaaaguuga

SEQ ID NO: 2633759 - RNA, 19 nt, Homo sapiens
  misc_RNA (1)...(19): siRNA sense strand
ccaaaguggcccuucaaga

SEQ ID NO: 2633760 - RNA, 19 nt, Homo sapiens
  misc_RNA (1)...(19): siRNA sense strand
uggaagcgcacgugggcau

SEQ ID NO: 2633761 - RNA, 19 nt, Homo sapiens
  misc_RNA (1)...(19): siRNA sense strand
acgaagacauguuugacga

SEQ ID NO: 2633762 - RNA, 19 nt, Homo sapiens
  misc_RNA (1)...(19): siRNA sense strand
aggaccggcugcaggagaa

SEQ ID NO: 2633763 - RNA, 19 nt, Homo sapiens
  misc_RNA (1)...(19): siRNA sense strand
ggaacagcgacuaugcaau

SEQ ID NO: 2633764 - RNA, 19 nt, Homo sapiens
  misc_RNA (1)...(19): siRNA sense strand
aaaacaacauggaguucaa

SEQ ID NO: 2633765 - RNA, 19 nt, Homo sapiens
  misc_RNA (1)...(19): siRNA sense strand
aggcaaaguugaccagauc

SEQ ID NO: 2633766 - RNA, 19 nt, Homo sapiens
  misc_RNA (1)...(19): siRNA sense strand
uugcugaggccgagggaga

SEQ ID NO: 2633767 - RNA, 19 nt, Homo sapiens
  misc_RNA (1)...(19): siRNA sense strand
guacagagcucaccgggau

SEQ ID NO: 2633768 - RNA, 19 nt, Homo sapiens
  misc_RNA (1)...(19): siRNA sense strand
gcuccauauccaccagaaa

SEQ ID NO: 2633769 - RNA, 19 nt, Homo sapiens
  misc_RNA (1)...(19): siRNA sense strand
ccaacugcccugagcgcuu

SEQ ID NO: 2633770 - RNA, 19 nt, Homo sapiens
  misc_RNA (1)...(19): siRNA sense strand
gcggauuacuucaagcagu

SEQ ID NO: 2633771 - RNA, 19 nt, Homo sapiens
  misc_RNA (1)...(19): siRNA sense strand
acuucaagcaguggauuaa

SEQ ID NO: 2633772 - RNA, 19 nt, Homo sapiens
  misc_RNA (1)...(19): siRNA sense strand
ccuuacacucugugagaaa

SEQ ID NO: 2633773 - RNA, 19 nt, Homo sapiens
  misc_RNA (1)...(19): siRNA sense strand
acugcaaacuggaggagaa

SEQ ID NO: 2633774 - RNA, 19 nt, Homo sapiens
  misc_RNA (1)...(19): siRNA sense strand
augaagaacaggugaaaga

SEQ ID NO: 2633775 - RNA, 19 nt, Homo sapiens
  misc_RNA (1)...(19): siRNA sense strand
ucuacaagcaucagaagaa

SEQ ID NO: 2633776 - RNA, 19 nt, Homo sapiens
  misc_RNA (1)...(19): siRNA sense strand
ggacgaugagcuagugcaa

SEQ ID NO: 2633777 - RNA, 19 nt, Homo sapiens
  misc_RNA (1)...(19): siRNA sense strand
ggauggaaacuauggacau

SEQ ID NO: 2633778 - RNA, 19 nt, Homo sapiens
  misc_RNA (1)...(19): siRNA sense strand
gguuacaggugaugcggau

SEQ ID NO: 2633779 - RNA, 19 nt, Homo sapiens
  misc_RNA (1)...(19): siRNA sense strand
ucacaaaccuggagggcug

SEQ ID NO: 2633780 - RNA, 19 nt, Homo sapiens
  misc_RNA (1)...(19): siRNA sense strand
ccugaaugaugauggcuau

SEQ ID NO: 2633781 - RNA, 19 nt, Homo sapiens
  misc_RNA (1)...(19): siRNA sense strand
ccaagacgguggcggaaaa

SEQ ID NO: 2633782 - RNA, 19 nt, Homo sapiens
  misc_RNA (1)...(19): siRNA sense strand
agaaaucaaccaagugaau

SEQ ID NO: 2633783 - RNA, 19 nt, Homo sapiens
  misc_RNA (1)...(19): siRNA sense strand
agaacaggugaaagaacaa

SEQ ID NO: 2633784 - RNA, 19 nt, Homo sapiens
  misc_RNA (1)...(19): siRNA sense strand
cugcaaacuggaggagaaa

SEQ ID NO: 2633785 - RNA, 19 nt, Homo sapiens
  misc_RNA (1)...(19): siRNA sense strand
agauaugaaugaaagcaga

SEQ ID NO: 2633786 - RNA, 19 nt, Homo sapiens
  misc_RNA (1)...(19): siRNA sense strand
uggaugaagaacaggugaa

SEQ ID NO: 2633787 - RNA, 19 nt, Homo sapiens
  misc_RNA (1)...(19): siRNA sense strand
gcaaacuggaggagaaauc

SEQ ID NO: 2633788 - RNA, 19 nt, Homo sapiens
  misc_RNA (1)...(19): siRNA sense strand
ugaaagaacaagugaagcu

SEQ ID NO: 2633789 - RNA, 19 nt, Homo sapiens
  misc_RNA (1)...(19): siRNA sense strand
ggugaaagaacaagugaag

SEQ ID NO: 2633790 - RNA, 19 nt, Homo sapiens
  misc_RNA (1)...(19): siRNA sense strand
ccuccaacucagaaaucaa

SEQ ID NO: 2633791 - RNA, 19 nt, Homo sapiens
  misc_RNA (1)...(19): siRNA sense strand
agaaagaacuguugcagag

SEQ ID NO: 2633792 - RNA, 19 nt, Homo sapiens
  misc_RNA (1)...(19): siRNA sense strand
ccaucaaugccuauaucaa

SEQ ID NO: 2633793 - RNA, 19 nt, Homo sapiens
  misc_RNA (1)...(19): siRNA sense strand
ccucaaacagaucuacaaa

SEQ ID NO: 2633794 - RNA, 19 nt, Homo sapiens
  misc_RNA (1)...(19): siRNA sense strand
aaacagaucuacaaaggca

SEQ ID NO: 2633795 - RNA, 19 nt, Homo sapiens
  misc_RNA (1)...(19): siRNA sense strand
gaugauggcuaucuggaga

SEQ ID NO: 2633796 - RNA, 19 nt, Homo sapiens
  misc_RNA (1)...(19): siRNA sense strand
aagcaauacagaagcacau

SEQ ID NO: 2633797 - RNA, 19 nt, Homo sapiens
  misc_RNA (1)...(19): siRNA sense strand
acgaugagcuagugcaaac

SEQ ID NO: 2633798 - RNA, 19 nt, Homo sapiens
  misc_RNA (1)...(19): siRNA sense strand
gagaagucauccaccgaga

SEQ ID NO: 2633799 - RNA, 19 nt, Homo sapiens
  misc_RNA (1)...(19): siRNA sense strand
gaacuuggguuacagguga

SEQ ID NO: 2633800 - RNA, 19 nt, Homo sapiens
  misc_RNA (1)...(19): siRNA sense strand
aggacaagguaugccguaa

SEQ ID NO: 2633801 - RNA, 19 nt, Homo sapiens
  misc_RNA (1)...(19): siRNA sense strand
cagcauugacgaugagaac

SEQ ID NO: 2633802 - RNA, 19 nt, Homo sapiens
  misc_RNA (1)...(19): siRNA sense strand
cugcagaaguggagcgacc

SEQ ID NO: 2633803 - RNA, 19 nt, Homo sapiens
  misc_RNA (1)...(19): siRNA sense strand
cauugaggggcgugaauua

SEQ ID NO: 2633804 - RNA, 19 nt, Homo sapiens
  misc_RNA (1)...(19): siRNA sense strand
cagaaaucaaccaagugaa

SEQ ID NO: 2633805 - RNA, 19 nt, Homo sapiens
  misc_RNA (1)...(19): siRNA sense strand
aggugaaagaacaagugaa

SEQ ID NO: 2633806 - RNA, 19 nt, Homo sapiens
  misc_RNA (1)...(19): siRNA sense strand
cugaaccagcagugacuua

SEQ ID NO: 2633807 - RNA, 19 nt, Homo sapiens
  misc_RNA (1)...(19): siRNA sense strand
aguauucacuagagccauu

SEQ ID NO: 2633808 - RNA, 19 nt, Homo sapiens
  misc_RNA (1)...(19): siRNA sense strand
caugcugacugcugccaaa

SEQ ID NO: 2633809 - RNA, 19 nt, Homo sapiens
  misc_RNA (1)...(19): siRNA sense strand
cagcagcggcaacuggaaa

SEQ ID NO: 2633810 - RNA, 19 nt, Homo sapiens
  misc_RNA (1)...(19): siRNA sense strand
aagaaagaacuguugcaga

SEQ ID NO: 2633811 - RNA, 19 nt, Homo sapiens
  misc_RNA (1)...(19): siRNA sense strand
gccucuacgcacaggacaa

SEQ ID NO: 2633812 - RNA, 19 nt, Homo sapiens
  misc_RNA (1)...(19): siRNA sense strand
gcgagagcgcuuuggcuga

SEQ ID NO: 2633813 - RNA, 19 nt, Homo sapiens
  misc_RNA (1)...(19): siRNA sense strand
ugccaagguucgagaaaug

SEQ ID NO: 2633814 - RNA, 19 nt, Homo sapiens
  misc_RNA (1)...(19): siRNA sense strand
cugagcaguuuguggcuga

SEQ ID NO: 2633815 - RNA, 19 nt, Homo sapiens
  misc_RNA (1)...(19): siRNA sense strand
cgaugagaacuguuggcau

SEQ ID NO: 2633816 - RNA, 19 nt, Homo sapiens
  misc_RNA (1)...(19): siRNA sense strand
uggaaaucuacaagcauca

SEQ ID NO: 2633817 - RNA, 19 nt, Homo sapiens
  misc_RNA (1)...(19): siRNA sense strand
gccugaaugaugauggcua

SEQ ID NO: 2633818 - RNA, 19 nt, Homo sapiens
  misc_RNA (1)...(19): siRNA sense strand
ugucauuggcccuggaagu

SEQ ID NO: 2633819 - RNA, 19 nt, Homo sapiens
  misc_RNA (1)...(19): siRNA sense strand
cgaacaauucuggaagcaa

SEQ ID NO: 2633820 - RNA, 19 nt, Homo sapiens
  misc_RNA (1)...(19): siRNA sense strand
cauacgaacggguggagga

SEQ ID NO: 2633821 - RNA, 19 nt, Homo sapiens
  misc_RNA (1)...(19): siRNA sense strand
uggagaacgugcugcaagu

SEQ ID NO: 2633822 - RNA, 19 nt, Homo sapiens
  misc_RNA (1)...(19): siRNA sense strand
cugaaggccucuacgcaca

SEQ ID NO: 2633823 - RNA, 19 nt, Homo sapiens
  misc_RNA (1)...(19): siRNA sense strand
uggagaguucauugaguuu

SEQ ID NO: 2633824 - RNA, 19 nt, Homo sapiens
  misc_RNA (1)...(19): siRNA sense strand
ggcauuuggaugaagaaca

SEQ ID NO: 2633825 - RNA, 19 nt, Homo sapiens
  misc_RNA (1)...(19): siRNA sense strand
ccagcgggaaagugaaaga

SEQ ID NO: 2633826 - RNA, 19 nt, Homo sapiens
  misc_RNA (1)...(19): siRNA sense strand
acuuugagacuccgaacaa

SEQ ID NO: 2633827 - RNA, 19 nt, Homo sapiens
  misc_RNA (1)...(19): siRNA sense strand
gauccguaaaccagaccaa

SEQ ID NO: 2633828 - RNA, 19 nt, Homo sapiens
  misc_RNA (1)...(19): siRNA sense strand
ugaauagggaccagcuaca

SEQ ID NO: 2633829 - RNA, 19 nt, Homo sapiens
  misc_RNA (1)...(19): siRNA sense strand
cgggaaagugaaagacuac

SEQ ID NO: 2633830 - RNA, 19 nt, Homo sapiens
  misc_RNA (1)...(19): siRNA sense strand
cggaauaagcaguggcugu

SEQ ID NO: 2633831 - RNA, 19 nt, Homo sapiens
  misc_RNA (1)...(19): siRNA sense strand
ccacagagcucauuggccu

SEQ ID NO: 2633832 - RNA, 19 nt, Homo sapiens
  misc_RNA (1)...(19): siRNA sense strand
auggaaaugugguccggaa

SEQ ID NO: 2633833 - RNA, 19 nt, Homo sapiens
  misc_RNA (1)...(19): siRNA sense strand
cagguuggcaguuggaaga

SEQ ID NO: 2633834 - RNA, 19 nt, Homo sapiens
  misc_RNA (1)...(19): siRNA sense strand
gugggaggagucagagauu

SEQ ID NO: 2633835 - RNA, 19 nt, Homo sapiens
  misc_RNA (1)...(19): siRNA sense strand
cagaagagcagaaggccua

SEQ ID NO: 2633836 - RNA, 19 nt, Homo sapiens
  misc_RNA (1)...(19): siRNA sense strand
cgaaagucgcagagcugaa

SEQ ID NO: 2633837 - RNA, 19 nt, Homo sapiens
  misc_RNA (1)...(19): siRNA sense strand
gacaagauguggaggcuga

SEQ ID NO: 2633838 - RNA, 19 nt, Homo sapiens
  misc_RNA (1)...(19): siRNA sense strand
agauagaaaucauugcuga

SEQ ID NO: 2633839 - RNA, 19 nt, Homo sapiens
  misc_RNA (1)...(19): siRNA sense strand
gcuacucagaagagcagaa

SEQ ID NO: 2633840 - RNA, 19 nt, Homo sapiens
  misc_RNA (1)...(19): siRNA sense strand
gcauaucaggugugugcau

SEQ ID NO: 2633841 - RNA, 19 nt, Homo sapiens
  misc_RNA (1)...(19): siRNA sense strand
ccaucugggccguguuaga

SEQ ID NO: 2633842 - RNA, 19 nt, Homo sapiens
  misc_RNA (1)...(19): siRNA sense strand
ccacagaggccgagaagua

SEQ ID NO: 2633843 - RNA, 19 nt, Homo sapiens
  misc_RNA (1)...(19): siRNA sense strand
cagcauaaguguuacauua

SEQ ID NO: 2633844 - RNA, 19 nt, Homo sapiens
  misc_RNA (1)...(19): siRNA sense strand
ggaaguagggagagggaga

SEQ ID NO: 2633845 - RNA, 19 nt, Homo sapiens
  misc_RNA (1)...(19): siRNA sense strand
gaaagaaacagaaguguga

SEQ ID NO: 2633846 - RNA, 19 nt, Homo sapiens
  misc_RNA (1)...(19): siRNA sense strand
cugacaaagaagaggguga

SEQ ID NO: 2633847 - RNA, 19 nt, Homo sapiens
  misc_RNA (1)...(19): siRNA sense strand
gaagcagagccgugacaaa

SEQ ID NO: 2633848 - RNA, 19 nt, Homo sapiens
  misc_RNA (1)...(19): siRNA sense strand
gggcagaaguauagagugg

SEQ ID NO: 2633849 - RNA, 19 nt, Homo sapiens
  misc_RNA (1)...(19): siRNA sense strand
agaacaaggaaguacgcaa

SEQ ID NO: 2633850 - RNA, 19 nt, Homo sapiens
  misc_RNA (1)...(19): siRNA sense strand
ggauccaagauuugaacua

SEQ ID NO: 2633851 - RNA, 19 nt, Homo sapiens
  misc_RNA (1)...(19): siRNA sense strand
cuguaagauuccuggaguu

SEQ ID NO: 2633852 - RNA, 19 nt, Homo sapiens
  misc_RNA (1)...(19): siRNA sense strand
caaaauagaacaaggaagu

SEQ ID NO: 2633853 - RNA, 19 nt, Homo sapiens
  misc_RNA (1)...(19): siRNA sense strand
aaguguaucccuuguauaa

SEQ ID NO: 2633854 - RNA, 19 nt, Homo sapiens
  misc_RNA (1)...(19): siRNA sense strand
aagccaaacuggacuuaau

SEQ ID NO: 2633855 - RNA, 19 nt, Homo sapiens
  misc_RNA (1)...(19): siRNA sense strand
caccaaggauccaagauuu

SEQ ID NO: 2633856 - RNA, 19 nt, Homo sapiens
  misc_RNA (1)...(19): siRNA sense strand
gggaagcaaaauagaacaa

SEQ ID NO: 2633857 - RNA, 19 nt, Homo sapiens
  misc_RNA (1)...(19): siRNA sense strand
acgcaaccaugaagcaaau

SEQ ID NO: 2633858 - RNA, 19 nt, Homo sapiens
  misc_RNA (1)...(19): siRNA sense strand
ccaaggaaccuaugcagau

SEQ ID NO: 2633859 - RNA, 19 nt, Homo sapiens
  misc_RNA (1)...(19): siRNA sense strand
agaaauuggggcagaagua

SEQ ID NO: 2633860 - RNA, 19 nt, Homo sapiens
  misc_RNA (1)...(19): siRNA sense strand
agaacugcuaggagccaaa

SEQ ID NO: 2633861 - RNA, 19 nt, Homo sapiens
  misc_RNA (1)...(19): siRNA sense strand
acugcuuaguacagaaauu

SEQ ID NO: 2633862 - RNA, 19 nt, Homo sapiens
  misc_RNA (1)...(19): siRNA sense strand
cagaaauuaacucagcaua

SEQ ID NO: 2633863 - RNA, 19 nt, Homo sapiens
  misc_RNA (1)...(19): siRNA sense strand
aaguagggagagggagaaa

SEQ ID NO: 2633864 - RNA, 19 nt, Homo sapiens
  misc_RNA (1)...(19): siRNA sense strand
cucagagaucagaggcuua

SEQ ID NO: 2633865 - RNA, 19 nt, Homo sapiens
  misc_RNA (1)...(19): siRNA sense strand
ggaaagaaacagaagugug

SEQ ID NO: 2633866 - RNA, 19 nt, Homo sapiens
  misc_RNA (1)...(19): siRNA sense strand
ggaaguacgcaaccaugaa

SEQ ID NO: 2633867 - RNA, 19 nt, Homo sapiens
  misc_RNA (1)...(19): siRNA sense strand
acauuaaaggaaagggaag

SEQ ID NO: 2633868 - RNA, 19 nt, Homo sapiens
  misc_RNA (1)...(19): siRNA sense strand
aauggauguccgaugauua

SEQ ID NO: 2633869 - RNA, 19 nt, Homo sapiens
  misc_RNA (1)...(19): siRNA sense strand
uugauccaguguugggaaa

SEQ ID NO: 2633870 - RNA, 19 nt, Homo sapiens
  misc_RNA (1)...(19): siRNA sense strand
aggcuuaaagaaaaggaua

SEQ ID NO: 2633871 - RNA, 19 nt, Homo sapiens
  misc_RNA (1)...(19): siRNA sense strand
cauuaaaggaaagggaagu

SEQ ID NO: 2633872 - RNA, 19 nt, Homo sapiens
  misc_RNA (1)...(19): siRNA sense strand
ucaccaaggauccaagauu

SEQ ID NO: 2633873 - RNA, 19 nt, Homo sapiens
  misc_RNA (1)...(19): siRNA sense strand
gauccaguguugggaaaga

SEQ ID NO: 2633874 - RNA, 19 nt, Homo sapiens
  misc_RNA (1)...(19): siRNA sense strand
aaacagaagugugauguga

SEQ ID NO: 2633875 - RNA, 19 nt, Homo sapiens
  misc_RNA (1)...(19): siRNA sense strand
ccucauugauaccaacuuu

SEQ ID NO: 2633876 - RNA, 19 nt, Homo sapiens
  misc_RNA (1)...(19): siRNA sense strand
gcagaaguauagaguggcu

SEQ ID NO: 2633877 - RNA, 19 nt, Homo sapiens
  misc_RNA (1)...(19): siRNA sense strand
ggagaaaggcccagagaac

SEQ ID NO: 2633878 - RNA, 19 nt, Homo sapiens
  misc_RNA (1)...(19): siRNA sense strand
gggacgacgaaguggaauu

SEQ ID NO: 2633879 - RNA, 19 nt, Homo sapiens
  misc_RNA (1)...(19): siRNA sense strand
acgagaacauggugagcuu

SEQ ID NO: 2633880 - RNA, 19 nt, Homo sapiens
  misc_RNA (1)...(19): siRNA sense strand
ggaugggauacuugagauu

SEQ ID NO: 2633881 - RNA, 19 nt, Homo sapiens
  misc_RNA (1)...(19): siRNA sense strand
uuauggagcaagacagaaa

SEQ ID NO: 2633882 - RNA, 19 nt, Homo sapiens
  misc_RNA (1)...(19): siRNA sense strand
ccuacaagggccaguggaa

SEQ ID NO: 2633883 - RNA, 19 nt, Homo sapiens
  misc_RNA (1)...(19): siRNA sense strand
agaaaggcccagagaacga

SEQ ID NO: 2633884 - RNA, 19 nt, Homo sapiens
  misc_RNA (1)...(19): siRNA sense strand
acagaaacgaagaggccau

SEQ ID NO: 2633885 - RNA, 19 nt, Homo sapiens
  misc_RNA (1)...(19): siRNA sense strand
ucucagaagcacucagcua

SEQ ID NO: 2633886 - RNA, 19 nt, Homo sapiens
  misc_RNA (1)...(19): siRNA sense strand
gcuuauggagcaagacaga

SEQ ID NO: 2633887 - RNA, 19 nt, Homo sapiens
  misc_RNA (1)...(19): siRNA sense strand
augggauacuugagauuau

SEQ ID NO: 2633888 - RNA, 19 nt, Homo sapiens
  misc_RNA (1)...(19): siRNA sense strand
acgaguacucaguggauga

SEQ ID NO: 2633889 - RNA, 19 nt, Homo sapiens
  misc_RNA (1)...(19): siRNA sense strand
uccaggaggccgaggagaa

SEQ ID NO: 2633890 - RNA, 19 nt, Homo sapiens
  misc_RNA (1)...(19): siRNA sense strand
gaggagaauuuuaggagca

SEQ ID NO: 2633891 - RNA, 19 nt, Homo sapiens
  misc_RNA (1)...(19): siRNA sense strand
uugaagucauuaaaggcaa

SEQ ID NO: 2633892 - RNA, 19 nt, Homo sapiens
  misc_RNA (1)...(19): siRNA sense strand
cuagagaacagcagcagau

SEQ ID NO: 2633893 - RNA, 19 nt, Homo sapiens
  misc_RNA (1)...(19): siRNA sense strand
cacaauacugcaaggguga

SEQ ID NO: 2633894 - RNA, 19 nt, Homo sapiens
  misc_RNA (1)...(19): siRNA sense strand
gcugaagagaugcuggaga

SEQ ID NO: 2633895 - RNA, 19 nt, Homo sapiens
  misc_RNA (1)...(19): siRNA sense strand
ccacagagaaguuugccau

SEQ ID NO: 2633896 - RNA, 19 nt, Homo sapiens
  misc_RNA (1)...(19): siRNA sense strand
gccaaugaaaagaagauua

SEQ ID NO: 2633897 - RNA, 19 nt, Homo sapiens
  misc_RNA (1)...(19): siRNA sense strand
aaggagaacugcuggucca

SEQ ID NO: 2633898 - RNA, 19 nt, Homo sapiens
  misc_RNA (1)...(19): siRNA sense strand
ugaagagaugcuggagaaa

SEQ ID NO: 2633899 - RNA, 19 nt, Homo sapiens
  misc_RNA (1)...(19): siRNA sense strand
ccuuugacccucaggacau

SEQ ID NO: 2633900 - RNA, 19 nt, Homo sapiens
  misc_RNA (1)...(19): siRNA sense strand
caucaaaguucgaaacagc

SEQ ID NO: 2633901 - RNA, 19 nt, Homo sapiens
  misc_RNA (1)...(19): siRNA sense strand
acaugaugaaggaggcaca

SEQ ID NO: 2633902 - RNA, 19 nt, Homo sapiens
  misc_RNA (1)...(19): siRNA sense strand
agggaggauugaagucauu

SEQ ID NO: 2633903 - RNA, 19 nt, Homo sapiens
  misc_RNA (1)...(19): siRNA sense strand
uacaagggccaguggaaga

SEQ ID NO: 2633904 - RNA, 19 nt, Homo sapiens
  misc_RNA (1)...(19): siRNA sense strand
acgaagaggccaucaaacu

SEQ ID NO: 2633905 - RNA, 19 nt, Homo sapiens
  misc_RNA (1)...(19): siRNA sense strand
aagcccagaaccaaggaaa

SEQ ID NO: 2633906 - RNA, 19 nt, Homo sapiens
  misc_RNA (1)...(19): siRNA sense strand
gcagaaagaucaaugagga

SEQ ID NO: 2633907 - RNA, 19 nt, Homo sapiens
  misc_RNA (1)...(19): siRNA sense strand
cugauaaagacgaggacga

SEQ ID NO: 2633908 - RNA, 19 nt, Homo sapiens
  misc_RNA (1)...(19): siRNA sense strand
gugugagaucagagaaauu

SEQ ID NO: 2633909 - RNA, 19 nt, Homo sapiens
  misc_RNA (1)...(19): siRNA sense strand
cagaaagaucaaugaggau

SEQ ID NO: 2633910 - RNA, 19 nt, Homo sapiens
  misc_RNA (1)...(19): siRNA sense strand
ugacggaugaggaggguga

SEQ ID NO: 2633911 - RNA, 19 nt, Homo sapiens
  misc_RNA (1)...(19): siRNA sense strand
gagaaauuguggagguccu

SEQ ID NO: 2633912 - RNA, 19 nt, Homo sapiens
  misc_RNA (1)...(19): siRNA sense strand
gcaagaagccagcacccaa

SEQ ID NO: 2633913 - RNA, 19 nt, Homo sapiens
  misc_RNA (1)...(19): siRNA sense strand
ucgagaaguuggcggcaga

SEQ ID NO: 2633914 - RNA, 19 nt, Homo sapiens
  misc_RNA (1)...(19): siRNA sense strand
gggauguggaggaggagga

SEQ ID NO: 2633915 - RNA, 19 nt, Homo sapiens
  misc_RNA (1)...(19): siRNA sense strand
aggaggaggaggaggagga

SEQ ID NO: 2633916 - RNA, 19 nt, Homo sapiens
  misc_RNA (1)...(19): siRNA sense strand
aguucaugcaccagggcaa

SEQ ID NO: 2633917 - RNA, 19 nt, Homo sapiens
  misc_RNA (1)...(19): siRNA sense strand
cuccaguggccuuaggaaa

SEQ ID NO: 2633918 - RNA, 19 nt, Homo sapiens
  misc_RNA (1)...(19): siRNA sense strand
uggaggaggaggaggagga

SEQ ID NO: 2633919 - RNA, 19 nt, Homo sapiens
  misc_RNA (1)...(19): siRNA sense strand
augaggaccuggaggcuga

SEQ ID NO: 2633920 - RNA, 19 nt, Homo sapiens
  misc_RNA (1)...(19): siRNA sense strand
ggaggaagaugcagagcug

SEQ ID NO: 2633921 - RNA, 19 nt, Homo sapiens
  misc_RNA (1)...(19): siRNA sense strand
cgacaagcugguuggcaca

SEQ ID NO: 2633922 - RNA, 19 nt, Homo sapiens
  misc_RNA (1)...(19): siRNA sense strand
acgcaguggcagcgacauu

SEQ ID NO: 2633923 - RNA, 19 nt, Homo sapiens
  misc_RNA (1)...(19): siRNA sense strand
cuggagaaugagugugaga

SEQ ID NO: 2633924 - RNA, 19 nt, Homo sapiens
  misc_RNA (1)...(19): siRNA sense strand
ucagagaaauuguggaggu

SEQ ID NO: 2633925 - RNA, 19 nt, Homo sapiens
  misc_RNA (1)...(19): siRNA sense strand
gcucaugaggauugggaag

SEQ ID NO: 2633926 - RNA, 19 nt, Homo sapiens
  misc_RNA (1)...(19): siRNA sense strand
cgacauuggcagcugcaga

SEQ ID NO: 2633927 - RNA, 19 nt, Homo sapiens
  misc_RNA (1)...(19): siRNA sense strand
gcgacaagcugguuggcac

SEQ ID NO: 2633928 - RNA, 19 nt, Homo sapiens
  misc_RNA (1)...(19): siRNA sense strand
cugaagaugaugaggaccu

SEQ ID NO: 2633929 - RNA, 19 nt, Homo sapiens
  misc_RNA (1)...(19): siRNA sense strand
cggaggagguguaugccca

SEQ ID NO: 2633930 - RNA, 19 nt, Homo sapiens
  misc_RNA (1)...(19): siRNA sense strand
guguggacgaggagacuga

SEQ ID NO: 2633931 - RNA, 19 nt, Homo sapiens
  misc_RNA (1)...(19): siRNA sense strand
cgagcaggacggaaaguca

SEQ ID NO: 2633932 - RNA, 19 nt, Homo sapiens
  misc_RNA (1)...(19): siRNA sense strand
cgcaagaaacagcuggaga

SEQ ID NO: 2633933 - RNA, 19 nt, Homo sapiens
  misc_RNA (1)...(19): siRNA sense strand
guguaugcccagcugcaaa

SEQ ID NO: 2633934 - RNA, 19 nt, Homo sapiens
  misc_RNA (1)...(19): siRNA sense strand
ugacggagcugcaggaggu

SEQ ID NO: 2633935 - RNA, 19 nt, Homo sapiens
  misc_RNA (1)...(19): siRNA sense strand
agaaggcggaggaggugua

SEQ ID NO: 2633936 - RNA, 19 nt, Homo sapiens
  misc_RNA (1)...(19): siRNA sense strand
ggcuggagaaugaguguga

SEQ ID NO: 2633937 - RNA, 19 nt, Homo sapiens
  misc_RNA (1)...(19): siRNA sense strand
aaacuaaacaucaaccgaa

SEQ ID NO: 2633938 - RNA, 19 nt, Homo sapiens
  misc_RNA (1)...(19): siRNA sense strand
cuauggguguugaggagga

SEQ ID NO: 2633939 - RNA, 19 nt, Homo sapiens
  misc_RNA (1)...(19): siRNA sense strand
gccucaaguucuaaggagu

SEQ ID NO: 2633940 - RNA, 19 nt, Homo sapiens
  misc_RNA (1)...(19): siRNA sense strand
gcuucaagagggugaucca

SEQ ID NO: 2633941 - RNA, 19 nt, Homo sapiens
  misc_RNA (1)...(19): siRNA sense strand
cagcaaaagcagugaaaua

SEQ ID NO: 2633942 - RNA, 19 nt, Homo sapiens
  misc_RNA (1)...(19): siRNA sense strand
aggaaauuguggaggaaau

SEQ ID NO: 2633943 - RNA, 19 nt, Homo sapiens
  misc_RNA (1)...(19): siRNA sense strand
ccaugaaaaugcagagaaa

SEQ ID NO: 2633944 - RNA, 19 nt, Homo sapiens
  misc_RNA (1)...(19): siRNA sense strand
agggaaugaagaagagaaa

SEQ ID NO: 2633945 - RNA, 19 nt, Homo sapiens
  misc_RNA (1)...(19): siRNA sense strand
gauaaaaguacuugggauu

SEQ ID NO: 2633946 - RNA, 19 nt, Homo sapiens
  misc_RNA (1)...(19): siRNA sense strand
aguaaugccaugaaggaaa

SEQ ID NO: 2633947 - RNA, 19 nt, Homo sapiens
  misc_RNA (1)...(19): siRNA sense strand
agaagaacgcuuagaaaga

SEQ ID NO: 2633948 - RNA, 19 nt, Homo sapiens
  misc_RNA (1)...(19): siRNA sense strand
gccuauaacuacugccaaa

SEQ ID NO: 2633949 - RNA, 19 nt, Homo sapiens
  misc_RNA (1)...(19): siRNA sense strand
acacaggcgaaguggguua

SEQ ID NO: 2633950 - RNA, 19 nt, Homo sapiens
  misc_RNA (1)...(19): siRNA sense strand
aagaagagaaggaagggaa

SEQ ID NO: 2633951 - RNA, 19 nt, Homo sapiens
  misc_RNA (1)...(19): siRNA sense strand
gcauaguagaagagaaguu

SEQ ID NO: 2633952 - RNA, 19 nt, Homo sapiens
  misc_RNA (1)...(19): siRNA sense strand
aaguagugcaacugagaaa

SEQ ID NO: 2633953 - RNA, 19 nt, Homo sapiens
  misc_RNA (1)...(19): siRNA sense strand
agacuaaagaagaaagaca

SEQ ID NO: 2633954 - RNA, 19 nt, Homo sapiens
  misc_RNA (1)...(19): siRNA sense strand
ccucagaguccgucaggaa

SEQ ID NO: 2633955 - RNA, 19 nt, Homo sapiens
  misc_RNA (1)...(19): siRNA sense strand
agaucaaagucauugcaaa

SEQ ID NO: 2633956 - RNA, 19 nt, Homo sapiens
  misc_RNA (1)...(19): siRNA sense strand
gggcauaguagaagagaag

SEQ ID NO: 2633957 - RNA, 19 nt, Homo sapiens
  misc_RNA (1)...(19): siRNA sense strand
gcugaagggcauaguagaa

SEQ ID NO: 2633958 - RNA, 19 nt, Homo sapiens
  misc_RNA (1)...(19): siRNA sense strand
gagacagaagacagaauua

SEQ ID NO: 2633959 - RNA, 19 nt, Homo sapiens
  misc_RNA (1)...(19): siRNA sense strand
gcuccaaauucccugguaa

SEQ ID NO: 2633960 - RNA, 19 nt, Homo sapiens
  misc_RNA (1)...(19): siRNA sense strand
uaucagaugaagucagaaa

SEQ ID NO: 2633961 - RNA, 19 nt, Homo sapiens
  misc_RNA (1)...(19): siRNA sense strand
guugaaacaagcagaagaa

SEQ ID NO: 2633962 - RNA, 19 nt, Homo sapiens
  misc_RNA (1)...(19): siRNA sense strand
acaagaagaaagugagcuu

SEQ ID NO: 2633963 - RNA, 19 nt, Homo sapiens
  misc_RNA (1)...(19): siRNA sense strand
aggaaaugucaaagguuau

SEQ ID NO: 2633964 - RNA, 19 nt, Homo sapiens
  misc_RNA (1)...(19): siRNA sense strand
gauaccaagaagacagaaa

SEQ ID NO: 2633965 - RNA, 19 nt, Homo sapiens
  misc_RNA (1)...(19): siRNA sense strand
ccaagaagacagaaacaga

SEQ ID NO: 2633966 - RNA, 19 nt, Homo sapiens
  misc_RNA (1)...(19): siRNA sense strand
aguauuaacagauggagaa

SEQ ID NO: 2633967 - RNA, 19 nt, Homo sapiens
  misc_RNA (1)...(19): siRNA sense strand
caaccaguuuacaggcaaa

SEQ ID NO: 2633968 - RNA, 19 nt, Homo sapiens
  misc_RNA (1)...(19): siRNA sense strand
ugggcuaaguugugcuaua

SEQ ID NO: 2633969 - RNA, 19 nt, Homo sapiens
  misc_RNA (1)...(19): siRNA sense strand
gagugcaguauuugggaua

SEQ ID NO: 2633970 - RNA, 19 nt, Homo sapiens
  misc_RNA (1)...(19): siRNA sense strand
agaaaaugccacugugaua

SEQ ID NO: 2633971 - RNA, 19 nt, Homo sapiens
  misc_RNA (1)...(19): siRNA sense strand
agaaaagagagaaggggaa

SEQ ID NO: 2633972 - RNA, 19 nt, Homo sapiens
  misc_RNA (1)...(19): siRNA sense strand
agauaauacuggugauucu

SEQ ID NO: 2633973 - RNA, 19 nt, Homo sapiens
  misc_RNA (1)...(19): siRNA sense strand
gugcaguauuugggauaua

SEQ ID NO: 2633974 - RNA, 19 nt, Homo sapiens
  misc_RNA (1)...(19): siRNA sense strand
gggagugcccagaggucaa

SEQ ID NO: 2633975 - RNA, 19 nt, Homo sapiens
  misc_RNA (1)...(19): siRNA sense strand
gccaaagugccuauaguaa

SEQ ID NO: 2633976 - RNA, 19 nt, Homo sapiens
  misc_RNA (1)...(19): siRNA sense strand
ggauauacuaugaaagugu

SEQ ID NO: 2633977 - RNA, 19 nt, Homo sapiens
  misc_RNA (1)...(19): siRNA sense strand
uggaaagaacacagaauca

SEQ ID NO: 2633978 - RNA, 19 nt, Homo sapiens
  misc_RNA (1)...(19): siRNA sense strand
gaguauuaacagauggaga

SEQ ID NO: 2633979 - RNA, 19 nt, Homo sapiens
  misc_RNA (1)...(19): siRNA sense strand
acuucaugcaucagggaaa

SEQ ID NO: 2633980 - RNA, 19 nt, Homo sapiens
  misc_RNA (1)...(19): siRNA sense strand
caguucaaguuauagguaa

SEQ ID NO: 2633981 - RNA, 19 nt, Homo sapiens
  misc_RNA (1)...(19): siRNA sense strand
aauauguuguggagagauu

SEQ ID NO: 2633982 - RNA, 19 nt, Homo sapiens
  misc_RNA (1)...(19): siRNA sense strand
ggaaauaagucuacagugg

SEQ ID NO: 2633983 - RNA, 19 nt, Homo sapiens
  misc_RNA (1)...(19): siRNA sense strand
agaaagacagugaagaaga

SEQ ID NO: 2633984 - RNA, 19 nt, Homo sapiens
  misc_RNA (1)...(19): siRNA sense strand
uugaaagacaugagacaga

SEQ ID NO: 2633985 - RNA, 19 nt, Homo sapiens
  misc_RNA (1)...(19): siRNA sense strand
agcaaaagaacauggaaua

SEQ ID NO: 2633986 - RNA, 19 nt, Homo sapiens
  misc_RNA (1)...(19): siRNA sense strand
agaagagaaggaagggaau

SEQ ID NO: 2633987 - RNA, 19 nt, Homo sapiens
  misc_RNA (1)...(19): siRNA sense strand
gagaaacgacauaagaaaa

SEQ ID NO: 2633988 - RNA, 19 nt, Homo sapiens
  misc_RNA (1)...(19): siRNA sense strand
ggacauguacgaagggagu

SEQ ID NO: 2633989 - RNA, 19 nt, Homo sapiens
  misc_RNA (1)...(19): siRNA sense strand
gaucaaagucauugcaaag

SEQ ID NO: 2633990 - RNA, 19 nt, Homo sapiens
  misc_RNA (1)...(19): siRNA sense strand
gcaaaagaacauggaauaa

SEQ ID NO: 2633991 - RNA, 19 nt, Homo sapiens
  misc_RNA (1)...(19): siRNA sense strand
agagagaaggggaaaauaa

SEQ ID NO: 2633992 - RNA, 19 nt, Homo sapiens
  misc_RNA (1)...(19): siRNA sense strand
gauuuagcgccuucagaaa

SEQ ID NO: 2633993 - RNA, 19 nt, Homo sapiens
  misc_RNA (1)...(19): siRNA sense strand
uguugaaagacaugagaca

SEQ ID NO: 2633994 - RNA, 19 nt, Homo sapiens
  misc_RNA (1)...(19): siRNA sense strand
cgaauauguuguggagaga

SEQ ID NO: 2633995 - RNA, 19 nt, Homo sapiens
  misc_RNA (1)...(19): siRNA sense strand
cgugauagugaucuggaua

SEQ ID NO: 2633996 - RNA, 19 nt, Homo sapiens
  misc_RNA (1)...(19): siRNA sense strand
aggaagggaaugaagaaga

SEQ ID NO: 2633997 - RNA, 19 nt, Homo sapiens
  misc_RNA (1)...(19): siRNA sense strand
agacagaauuacaacagau

SEQ ID NO: 2633998 - RNA, 19 nt, Homo sapiens
  misc_RNA (1)...(19): siRNA sense strand
gguugaaacaagcagaaga

SEQ ID NO: 2633999 - RNA, 19 nt, Homo sapiens
  misc_RNA (1)...(19): siRNA sense strand
agacagaaacagacaacca

SEQ ID NO: 2634000 - RNA, 19 nt, Homo sapiens
  misc_RNA (1)...(19): siRNA sense strand
gaugauagugcuucaggaa

SEQ ID NO: 2634001 - RNA, 19 nt, Homo sapiens
  misc_RNA (1)...(19): siRNA sense strand
auauaaaggagaaacgaca

SEQ ID NO: 2634002 - RNA, 19 nt, Homo sapiens
  misc_RNA (1)...(19): siRNA sense strand
gugaaaaucaugaaccaaa

SEQ ID NO: 2634003 - RNA, 19 nt, Homo sapiens
  misc_RNA (1)...(19): siRNA sense strand
ggaaacaccaaaucgggua

SEQ ID NO: 2634004 - RNA, 19 nt, Homo sapiens
  misc_RNA (1)...(19): siRNA sense strand
cuccaaauucccugguaaa

SEQ ID NO: 2634005 - RNA, 19 nt, Homo sapiens
  misc_RNA (1)...(19): siRNA sense strand
aaaugcagaaagagagcaa

SEQ ID NO: 2634006 - RNA, 19 nt, Homo sapiens
  misc_RNA (1)...(19): siRNA sense strand
ugaagaaagcaaagcaguu

SEQ ID NO: 2634007 - RNA, 19 nt, Homo sapiens
  misc_RNA (1)...(19): siRNA sense strand
agucguagccagaggaauu

SEQ ID NO: 2634008 - RNA, 19 nt, Homo sapiens
  misc_RNA (1)...(19): siRNA sense strand
uggaaguggaagucaguua

SEQ ID NO: 2634009 - RNA, 19 nt, Homo sapiens
  misc_RNA (1)...(19): siRNA sense strand
agacauuaucagugggcuu

SEQ ID NO: 2634010 - RNA, 19 nt, Homo sapiens
  misc_RNA (1)...(19): siRNA sense strand
uuuaauauccagaggugaa

SEQ ID NO: 2634011 - RNA, 19 nt, Homo sapiens
  misc_RNA (1)...(19): siRNA sense strand
gcucaaagccauggaacau

SEQ ID NO: 2634012 - RNA, 19 nt, Homo sapiens
  misc_RNA (1)...(19): siRNA sense strand
ccucacaggcgaaggacau

SEQ ID NO: 2634013 - RNA, 19 nt, Homo sapiens
  misc_RNA (1)...(19): siRNA sense strand
agcugaaguacaagaauua

SEQ ID NO: 2634014 - RNA, 19 nt, Homo sapiens
  misc_RNA (1)...(19): siRNA sense strand
ugccaagauuagagagcuu

SEQ ID NO: 2634015 - RNA, 19 nt, Homo sapiens
  misc_RNA (1)...(19): siRNA sense strand
cguugaagccuuuauacaa

SEQ ID NO: 2634016 - RNA, 19 nt, Homo sapiens
  misc_RNA (1)...(19): siRNA sense strand
agauuagagagcuuggaua

SEQ ID NO: 2634017 - RNA, 19 nt, Homo sapiens
  misc_RNA (1)...(19): siRNA sense strand
cagcaguuacagaagaauu

SEQ ID NO: 2634018 - RNA, 19 nt, Homo sapiens
  misc_RNA (1)...(19): siRNA sense strand
cugaauuaauguggaaaga

SEQ ID NO: 2634019 - RNA, 19 nt, Homo sapiens
  misc_RNA (1)...(19): siRNA sense strand
caugaggguucuagagucu

SEQ ID NO: 2634020 - RNA, 19 nt, Homo sapiens
  misc_RNA (1)...(19): siRNA sense strand
acaauauagcugaaguaca

SEQ ID NO: 2634021 - RNA, 19 nt, Homo sapiens
  misc_RNA (1)...(19): siRNA sense strand
ucaaauagugaagcagaaa

SEQ ID NO: 2634022 - RNA, 19 nt, Homo sapiens
  misc_RNA (1)...(19): siRNA sense strand
acaaugaagaccuggcuga

SEQ ID NO: 2634023 - RNA, 19 nt, Homo sapiens
  misc_RNA (1)...(19): siRNA sense strand
gcgaaggacauuugaaggu

SEQ ID NO: 2634024 - RNA, 19 nt, Homo sapiens
  misc_RNA (1)...(19): siRNA sense strand
ugacucaugugauggaaaa

SEQ ID NO: 2634025 - RNA, 19 nt, Homo sapiens
  misc_RNA (1)...(19): siRNA sense strand
agucauccauucagcagaa

SEQ ID NO: 2634026 - RNA, 19 nt, Homo sapiens
  misc_RNA (1)...(19): siRNA sense strand
augauggaacuguggguau

SEQ ID NO: 2634027 - RNA, 19 nt, Homo sapiens
  misc_RNA (1)...(19): siRNA sense strand
gaugauuugcauucagcua

SEQ ID NO: 2634028 - RNA, 19 nt, Homo sapiens
  misc_RNA (1)...(19): siRNA sense strand
acaucaaagaucaugaaca

SEQ ID NO: 2634029 - RNA, 19 nt, Homo sapiens
  misc_RNA (1)...(19): siRNA sense strand
gcugcaagcgccuguguau

SEQ ID NO: 2634030 - RNA, 19 nt, Homo sapiens
  misc_RNA (1)...(19): siRNA sense strand
ggaaagauuuuauagacca

SEQ ID NO: 2634031 - RNA, 19 nt, Homo sapiens
  misc_RNA (1)...(19): siRNA sense strand
gcugauugaagaaggagga

SEQ ID NO: 2634032 - RNA, 19 nt, Homo sapiens
  misc_RNA (1)...(19): siRNA sense strand
gggcauucuuuguucggga

SEQ ID NO: 2634033 - RNA, 19 nt, Homo sapiens
  misc_RNA (1)...(19): siRNA sense strand
acauugagucguagccaga

SEQ ID NO: 2634034 - RNA, 19 nt, Homo sapiens
  misc_RNA (1)...(19): siRNA sense strand
ggugaacaagcuuggacau

SEQ ID NO: 2634035 - RNA, 19 nt, Homo sapiens
  misc_RNA (1)...(19): siRNA sense strand
ucgacuuucuggagaucua

SEQ ID NO: 2634036 - RNA, 19 nt, Homo sapiens
  misc_RNA (1)...(19): siRNA sense strand
ccuuugaccuagaguacca

SEQ ID NO: 2634037 - RNA, 19 nt, Homo sapiens
  misc_RNA (1)...(19): siRNA sense strand
ccucaccagacaagggcaa

SEQ ID NO: 2634038 - RNA, 19 nt, Homo sapiens
  misc_RNA (1)...(19): siRNA sense strand
agccauggaaggugucaaa

SEQ ID NO: 2634039 - RNA, 19 nt, Homo sapiens
  misc_RNA (1)...(19): siRNA sense strand
cuuccaugccuuugaccua

SEQ ID NO: 2634040 - RNA, 19 nt, Homo sapiens
  misc_RNA (1)...(19): siRNA sense strand
gcuucgacuuucuggagau

SEQ ID NO: 2634041 - RNA, 19 nt, Homo sapiens
  misc_RNA (1)...(19): siRNA sense strand
gguuauaagugaggaaauu

SEQ ID NO: 2634042 - RNA, 19 nt, Homo sapiens
  misc_RNA (1)...(19): siRNA sense strand
guuagaggcuucaguguua

SEQ ID NO: 2634043 - RNA, 19 nt, Homo sapiens
  misc_RNA (1)...(19): siRNA sense strand
aagcuaaauaccagaguua

SEQ ID NO: 2634044 - RNA, 19 nt, Homo sapiens
  misc_RNA (1)...(19): siRNA sense strand
aaaugaagauaaagggaca

SEQ ID NO: 2634045 - RNA, 19 nt, Homo sapiens
  misc_RNA (1)...(19): siRNA sense strand
aggaaagccaugaggaaga

SEQ ID NO: 2634046 - RNA, 19 nt, Homo sapiens
  misc_RNA (1)...(19): siRNA sense strand
cagaaaagaugcaguagaa

SEQ ID NO: 2634047 - RNA, 19 nt, Homo sapiens
  misc_RNA (1)...(19): siRNA sense strand
gaaaagacaagauggauaa

SEQ ID NO: 2634048 - RNA, 19 nt, Homo sapiens
  misc_RNA (1)...(19): siRNA sense strand
guacaggacuacaguguga

SEQ ID NO: 2634049 - RNA, 19 nt, Homo sapiens
  misc_RNA (1)...(19): siRNA sense strand
aaagaagagaagaggaaaa

SEQ ID NO: 2634050 - RNA, 19 nt, Homo sapiens
  misc_RNA (1)...(19): siRNA sense strand
agaggaaagccaugaggaa

SEQ ID NO: 2634051 - RNA, 19 nt, Homo sapiens
  misc_RNA (1)...(19): siRNA sense strand
gccacaaacaguugacaaa

SEQ ID NO: 2634052 - RNA, 19 nt, Homo sapiens
  misc_RNA (1)...(19): siRNA sense strand
gugcaaaguucauugggau

SEQ ID NO: 2634053 - RNA, 19 nt, Homo sapiens
  misc_RNA (1)...(19): siRNA sense strand
ugaaaagacaagauggaua

SEQ ID NO: 2634054 - RNA, 19 nt, Homo sapiens
  misc_RNA (1)...(19): siRNA sense strand
caaaggacuuagaaggaca

SEQ ID NO: 2634055 - RNA, 19 nt, Homo sapiens
  misc_RNA (1)...(19): siRNA sense strand
cugcugaggaguuggcaaa

SEQ ID NO: 2634056 - RNA, 19 nt, Homo sapiens
  misc_RNA (1)...(19): siRNA sense strand
gccaaaugguagaggaaag

SEQ ID NO: 2634057 - RNA, 19 nt, Homo sapiens
  misc_RNA (1)...(19): siRNA sense strand
acucagaaguugauaaagu

SEQ ID NO: 2634058 - RNA, 19 nt, Homo sapiens
  misc_RNA (1)...(19): siRNA sense strand
gaaauaaucccuuaccaua

SEQ ID NO: 2634059 - RNA, 19 nt, Homo sapiens
  misc_RNA (1)...(19): siRNA sense strand
ggggauuaguauuugaaaa

SEQ ID NO: 2634060 - RNA, 19 nt, Homo sapiens
  misc_RNA (1)...(19): siRNA sense strand
gauaaagggacaaaggcau

SEQ ID NO: 2634061 - RNA, 19 nt, Homo sapiens
  misc_RNA (1)...(19): siRNA sense strand
gcuuuauggcugaagaauu

SEQ ID NO: 2634062 - RNA, 19 nt, Homo sapiens
  misc_RNA (1)...(19): siRNA sense strand
guguauaauaggccacaaa

SEQ ID NO: 2634063 - RNA, 19 nt, Homo sapiens
  misc_RNA (1)...(19): siRNA sense strand
caaccaagagaauggagua

SEQ ID NO: 2634064 - RNA, 19 nt, Homo sapiens
  misc_RNA (1)...(19): siRNA sense strand
ugaggaagacucugagcaa

SEQ ID NO: 2634065 - RNA, 19 nt, Homo sapiens
  misc_RNA (1)...(19): siRNA sense strand
cggucuggauaaagaaaca

SEQ ID NO: 2634066 - RNA, 19 nt, Homo sapiens
  misc_RNA (1)...(19): siRNA sense strand
augaggaagaagagcuuaa

SEQ ID NO: 2634067 - RNA, 19 nt, Homo sapiens
  misc_RNA (1)...(19): siRNA sense strand
agaagugauuggucuguua

SEQ ID NO: 2634068 - RNA, 19 nt, Homo sapiens
  misc_RNA (1)...(19): siRNA sense strand
cagauuaccugccugguua

SEQ ID NO: 2634069 - RNA, 19 nt, Homo sapiens
  misc_RNA (1)...(19): siRNA sense strand
gaguuaugcaagacaguau

SEQ ID NO: 2634070 - RNA, 19 nt, Homo sapiens
  misc_RNA (1)...(19): siRNA sense strand
ugacaaaguacgaaucaga

SEQ ID NO: 2634071 - RNA, 19 nt, Homo sapiens
  misc_RNA (1)...(19): siRNA sense strand
gcuaaauaccagaguuacu

SEQ ID NO: 2634072 - RNA, 19 nt, Homo sapiens
  misc_RNA (1)...(19): siRNA sense strand
aagaaaagcaggagccauu

SEQ ID NO: 2634073 - RNA, 19 nt, Homo sapiens
  misc_RNA (1)...(19): siRNA sense strand
gaagauacucagaaguuga

SEQ ID NO: 2634074 - RNA, 19 nt, Homo sapiens
  misc_RNA (1)...(19): siRNA sense strand
guaaaaugcaugaaaccaa

SEQ ID NO: 2634075 - RNA, 19 nt, Homo sapiens
  misc_RNA (1)...(19): siRNA sense strand
gcaacaagcaugauggaag

SEQ ID NO: 2634076 - RNA, 19 nt, Homo sapiens
  misc_RNA (1)...(19): siRNA sense strand
ucuccagagccuugugaaa

SEQ ID NO: 2634077 - RNA, 19 nt, Homo sapiens
  misc_RNA (1)...(19): siRNA sense strand
ccugaagaacuguggagau

SEQ ID NO: 2634078 - RNA, 19 nt, Homo sapiens
  misc_RNA (1)...(19): siRNA sense strand
aggaagauacucagaaguu

SEQ ID NO: 2634079 - RNA, 19 nt, Homo sapiens
  misc_RNA (1)...(19): siRNA sense strand
cgaaauaaucccuuaccau

SEQ ID NO: 2634080 - RNA, 19 nt, Homo sapiens
  misc_RNA (1)...(19): siRNA sense strand
ggaagaagagcuuaagcca

SEQ ID NO: 2634081 - RNA, 19 nt, Homo sapiens
  misc_RNA (1)...(19): siRNA sense strand
caguguuauuggaugguau

SEQ ID NO: 2634082 - RNA, 19 nt, Homo sapiens
  misc_RNA (1)...(19): siRNA sense strand
gaggaagacucugagcaaa

SEQ ID NO: 2634083 - RNA, 19 nt, Homo sapiens
  misc_RNA (1)...(19): siRNA sense strand
caguaaaguggacgauaga

SEQ ID NO: 2634084 - RNA, 19 nt, Homo sapiens
  misc_RNA (1)...(19): siRNA sense strand
ucacagaugagguggacga

SEQ ID NO: 2634085 - RNA, 19 nt, Homo sapiens
  misc_RNA (1)...(19): siRNA sense strand
aguacgaaucagagacaga

SEQ ID NO: 2634086 - RNA, 19 nt, Homo sapiens
  misc_RNA (1)...(19): siRNA sense strand
gaaacuggugugaugcaaa

SEQ ID NO: 2634087 - RNA, 19 nt, Homo sapiens
  misc_RNA (1)...(19): siRNA sense strand
cuuacgagauauugacaca

SEQ ID NO: 2634088 - RNA, 19 nt, Homo sapiens
  misc_RNA (1)...(19): siRNA sense strand
ugguuauaagugaggaaau

SEQ ID NO: 2634089 - RNA, 19 nt, Homo sapiens
  misc_RNA (1)...(19): siRNA sense strand
agauaaagggacaaaggca

SEQ ID NO: 2634090 - RNA, 19 nt, Homo sapiens
  misc_RNA (1)...(19): siRNA sense strand
guauaauaggccacaaaca

SEQ ID NO: 2634091 - RNA, 19 nt, Homo sapiens
  misc_RNA (1)...(19): siRNA sense strand
acaaacaguugacaaagua

SEQ ID NO: 2634092 - RNA, 19 nt, Homo sapiens
  misc_RNA (1)...(19): siRNA sense strand
cuuuauggcugaagaauuc

SEQ ID NO: 2634093 - RNA, 19 nt, Homo sapiens
  misc_RNA (1)...(19): siRNA sense strand
ccaugaggaagaagagcuu

SEQ ID NO: 2634094 - RNA, 19 nt, Homo sapiens
  misc_RNA (1)...(19): siRNA sense strand
caacugauaccuuguaauu

SEQ ID NO: 2634095 - RNA, 19 nt, Homo sapiens
  misc_RNA (1)...(19): siRNA sense strand
aauccuuccuuacgagaua

SEQ ID NO: 2634096 - RNA, 19 nt, Homo sapiens
  misc_RNA (1)...(19): siRNA sense strand
uugccaaaugguagaggaa

SEQ ID NO: 2634097 - RNA, 19 nt, Homo sapiens
  misc_RNA (1)...(19): siRNA sense strand
cuuagaaggacaaacguuu

SEQ ID NO: 2634098 - RNA, 19 nt, Homo sapiens
  misc_RNA (1)...(19): siRNA sense strand
gagaacuguacaaaggaau

SEQ ID NO: 2634099 - RNA, 19 nt, Homo sapiens
  misc_RNA (1)...(19): siRNA sense strand
uggaguaaccgaagagaac

SEQ ID NO: 2634100 - RNA, 19 nt, Homo sapiens
  misc_RNA (1)...(19): siRNA sense strand
aggcagaccuguuaaaucu

SEQ ID NO: 2634101 - RNA, 19 nt, Homo sapiens
  misc_RNA (1)...(19): siRNA sense strand
ccucagaaaccuuggcugu

SEQ ID NO: 2634102 - RNA, 19 nt, Homo sapiens
  misc_RNA (1)...(19): siRNA sense strand
ccgaagagaacuguacaaa

SEQ ID NO: 2634103 - RNA, 19 nt, Homo sapiens
  misc_RNA (1)...(19): siRNA sense strand
gggagauaugcaaaccaaa

SEQ ID NO: 2634104 - RNA, 19 nt, Homo sapiens
  misc_RNA (1)...(19): siRNA sense strand
agagaacuguacaaaggaa

SEQ ID NO: 2634105 - RNA, 19 nt, Homo sapiens
  misc_RNA (1)...(19): siRNA sense strand
uaauuguauuggacggauu

SEQ ID NO: 2634106 - RNA, 19 nt, Homo sapiens
  misc_RNA (1)...(19): siRNA sense strand
uggcagaagugauuggucu

SEQ ID NO: 2634107 - RNA, 19 nt, Homo sapiens
  misc_RNA (1)...(19): siRNA sense strand
guaaaguggacgauagaag

SEQ ID NO: 2634108 - RNA, 19 nt, Homo sapiens
  misc_RNA (1)...(19): siRNA sense strand
gauacucagaaguugauaa

SEQ ID NO: 2634109 - RNA, 19 nt, Homo sapiens
  misc_RNA (1)...(19): siRNA sense strand
cugaagaggcggaugugga

SEQ ID NO: 2634110 - RNA, 19 nt, Homo sapiens
  misc_RNA (1)...(19): siRNA sense strand
ccugguuauaagugaggaa

SEQ ID NO: 2634111 - RNA, 19 nt, Homo sapiens
  misc_RNA (1)...(19): siRNA sense strand
ggccacaaacaguugacaa

SEQ ID NO: 2634112 - RNA, 19 nt, Homo sapiens
  misc_RNA (1)...(19): siRNA sense strand
ccaaaguaauggauggcua

SEQ ID NO: 2634113 - RNA, 19 nt, Homo sapiens
  misc_RNA (1)...(19): siRNA sense strand
ccuugugaccuuuggguaa

SEQ ID NO: 2634114 - RNA, 19 nt, Homo sapiens
  misc_RNA (1)...(19): siRNA sense strand
cagcaaugagcuaaguaaa

SEQ ID NO: 2634115 - RNA, 19 nt, Homo sapiens
  misc_RNA (1)...(19): siRNA sense strand
gagaagaaguaaaugccau

SEQ ID NO: 2634116 - RNA, 19 nt, Homo sapiens
  misc_RNA (1)...(19): siRNA sense strand
agaagaaguaaaugccaua

SEQ ID NO: 2634117 - RNA, 19 nt, Homo sapiens
  misc_RNA (1)...(19): siRNA sense strand
ggcuguaggcugaggaaaa

SEQ ID NO: 2634118 - RNA, 19 nt, Homo sapiens
  misc_RNA (1)...(19): siRNA sense strand
aaaugagagucaagcaaau

SEQ ID NO: 2634119 - RNA, 19 nt, Homo sapiens
  misc_RNA (1)...(19): siRNA sense strand
auguaaaugcugauggcaa

SEQ ID NO: 2634120 - RNA, 19 nt, Homo sapiens
  misc_RNA (1)...(19): siRNA sense strand
acgaaauagagaaguguuu

SEQ ID NO: 2634121 - RNA, 19 nt, Homo sapiens
  misc_RNA (1)...(19): siRNA sense strand
gggcuaaugguaaccgaaa

SEQ ID NO: 2634122 - RNA, 19 nt, Homo sapiens
  misc_RNA (1)...(19): siRNA sense strand
cagaugagaaagugauuau

SEQ ID NO: 2634123 - RNA, 19 nt, Homo sapiens
  misc_RNA (1)...(19): siRNA sense strand
acuaacaagacaaggauuu

SEQ ID NO: 2634124 - RNA, 19 nt, Homo sapiens
  misc_RNA (1)...(19): siRNA sense strand
ccuggaauuuacugguuaa

SEQ ID NO: 2634125 - RNA, 19 nt, Homo sapiens
  misc_RNA (1)...(19): siRNA sense strand
caaagagaggugagaagau

SEQ ID NO: 2634126 - RNA, 19 nt, Homo sapiens
  misc_RNA (1)...(19): siRNA sense strand
ccauaauaaauuuggcuga

SEQ ID NO: 2634127 - RNA, 19 nt, Homo sapiens
  misc_RNA (1)...(19): siRNA sense strand
aguaacagaugaagcccaa

SEQ ID NO: 2634128 - RNA, 19 nt, Homo sapiens
  misc_RNA (1)...(19): siRNA sense strand
aggaagaaauccaucccaa

SEQ ID NO: 2634129 - RNA, 19 nt, Homo sapiens
  misc_RNA (1)...(19): siRNA sense strand
uccacuaacugaagaggaa

SEQ ID NO: 2634130 - RNA, 19 nt, Homo sapiens
  misc_RNA (1)...(19): siRNA sense strand
gaaugaacuaacaagacaa

SEQ ID NO: 2634131 - RNA, 19 nt, Homo sapiens
  misc_RNA (1)...(19): siRNA sense strand
ucacaucagcaaugagcua

SEQ ID NO: 2634132 - RNA, 19 nt, Homo sapiens
  misc_RNA (1)...(19): siRNA sense strand
gugagaaaugugaugaaga

SEQ ID NO: 2634133 - RNA, 19 nt, Homo sapiens
  misc_RNA (1)...(19): siRNA sense strand
aguugugacaccuggauaa

SEQ ID NO: 2634134 - RNA, 19 nt, Homo sapiens
  misc_RNA (1)...(19): siRNA sense strand
cuuagaagaagauggugaa

SEQ ID NO: 2634135 - RNA, 19 nt, Homo sapiens
  misc_RNA (1)...(19): siRNA sense strand
cgaacuacgaaauagagaa

SEQ ID NO: 2634136 - RNA, 19 nt, Homo sapiens
  misc_RNA (1)...(19): siRNA sense strand
acaacuggcuguaggcuga

SEQ ID NO: 2634137 - RNA, 19 nt, Homo sapiens
  misc_RNA (1)...(19): siRNA sense strand
agcuaaugaucgagaagga

SEQ ID NO: 2634138 - RNA, 19 nt, Homo sapiens
  misc_RNA (1)...(19): siRNA sense strand
cgucaguuauugaaaacaa

SEQ ID NO: 2634139 - RNA, 19 nt, Homo sapiens
  misc_RNA (1)...(19): siRNA sense strand
acucuaugggcuacaauaa

SEQ ID NO: 2634140 - RNA, 19 nt, Homo sapiens
  misc_RNA (1)...(19): siRNA sense strand
cccaaaagaccauuaauaa

SEQ ID NO: 2634141 - RNA, 19 nt, Homo sapiens
  misc_RNA (1)...(19): siRNA sense strand
gaaucuaauggaagcuaau

SEQ ID NO: 2634142 - RNA, 19 nt, Homo sapiens
  misc_RNA (1)...(19): siRNA sense strand
gaggaaugaacuaacaaga

SEQ ID NO: 2634143 - RNA, 19 nt, Homo sapiens
  misc_RNA (1)...(19): siRNA sense strand
gaaaaugagagucaagcaa

SEQ ID NO: 2634144 - RNA, 19 nt, Homo sapiens
  misc_RNA (1)...(19): siRNA sense strand
cuaaugaucgagaaggaga

SEQ ID NO: 2634145 - RNA, 19 nt, Homo sapiens
  misc_RNA (1)...(19): siRNA sense strand
uguaaaugaugauggcugu

SEQ ID NO: 2634146 - RNA, 19 nt, Homo sapiens
  misc_RNA (1)...(19): siRNA sense strand
gugagaagaugacucgaga

SEQ ID NO: 2634147 - RNA, 19 nt, Homo sapiens
  misc_RNA (1)...(19): siRNA sense strand
ccauuaaaccugagucaag

SEQ ID NO: 2634148 - RNA, 19 nt, Homo sapiens
  misc_RNA (1)...(19): siRNA sense strand
agaugaaacaggggaauua

SEQ ID NO: 2634149 - RNA, 19 nt, Homo sapiens
  misc_RNA (1)...(19): siRNA sense strand
uaauaaaggacuggcaaca

SEQ ID NO: 2634150 - RNA, 19 nt, Homo sapiens
  misc_RNA (1)...(19): siRNA sense strand
uggugagaaaugugaugaa

SEQ ID NO: 2634151 - RNA, 19 nt, Homo sapiens
  misc_RNA (1)...(19): siRNA sense strand
acacacugaccuuuauaaa

SEQ ID NO: 2634152 - RNA, 19 nt, Homo sapiens
  misc_RNA (1)...(19): siRNA sense strand
gauacaaagaggaaugaac

SEQ ID NO: 2634153 - RNA, 19 nt, Homo sapiens
  misc_RNA (1)...(19): siRNA sense strand
uacaaagaggaaugaacua

SEQ ID NO: 2634154 - RNA, 19 nt, Homo sapiens
  misc_RNA (1)...(19): siRNA sense strand
ucaaggaaaaugagaguca

SEQ ID NO: 2634155 - RNA, 19 nt, Homo sapiens
  misc_RNA (1)...(19): siRNA sense strand
cacuaacugaagaggaaau

SEQ ID NO: 2634156 - RNA, 19 nt, Homo sapiens
  misc_RNA (1)...(19): siRNA sense strand
ucagcaaugagcuaaguaa

SEQ ID NO: 2634157 - RNA, 19 nt, Homo sapiens
  misc_RNA (1)...(19): siRNA sense strand
agcaaugagcuaaguaaaa

SEQ ID NO: 2634158 - RNA, 19 nt, Homo sapiens
  misc_RNA (1)...(19): siRNA sense strand
ccucaaacugccaaacuga

SEQ ID NO: 2634159 - RNA, 19 nt, Homo sapiens
  misc_RNA (1)...(19): siRNA sense strand
ugaacuaacaagacaagga

SEQ ID NO: 2634160 - RNA, 19 nt, Homo sapiens
  misc_RNA (1)...(19): siRNA sense strand
gaacaaagaaauuuccacu

SEQ ID NO: 2634161 - RNA, 19 nt, Homo sapiens
  misc_RNA (1)...(19): siRNA sense strand
cauugauaucuaugcagaa

SEQ ID NO: 2634162 - RNA, 19 nt, Homo sapiens
  misc_RNA (1)...(19): siRNA sense strand
cagagagaauuuugauaca

SEQ ID NO: 2634163 - RNA, 19 nt, Homo sapiens
  misc_RNA (1)...(19): siRNA sense strand
aauggaagcuaaugaucga

SEQ ID NO: 2634164 - RNA, 19 nt, Homo sapiens
  misc_RNA (1)...(19): siRNA sense strand
aaaacaagucagaugagaa

SEQ ID NO: 2634165 - RNA, 19 nt, Homo sapiens
  misc_RNA (1)...(19): siRNA sense strand
acucaacauauuugcagua

SEQ ID NO: 2634166 - RNA, 19 nt, Homo sapiens
  misc_RNA (1)...(19): siRNA sense strand
gggaaaaucacaagagaaa

SEQ ID NO: 2634167 - RNA, 19 nt, Homo sapiens
  misc_RNA (1)...(19): siRNA sense strand
cacaagaaguggaagaaua

SEQ ID NO: 2634168 - RNA, 19 nt, Homo sapiens
  misc_RNA (1)...(19): siRNA sense strand
aggaaaaggauaagaguaa

SEQ ID NO: 2634169 - RNA, 19 nt, Homo sapiens
  misc_RNA (1)...(19): siRNA sense strand
cugacauaguacagggaaa

SEQ ID NO: 2634170 - RNA, 19 nt, Homo sapiens
  misc_RNA (1)...(19): siRNA sense strand
aggaugaguuaguaggaaa

SEQ ID NO: 2634171 - RNA, 19 nt, Homo sapiens
  misc_RNA (1)...(19): siRNA sense strand
agacgaaagcuuugagaau

SEQ ID NO: 2634172 - RNA, 19 nt, Homo sapiens
  misc_RNA (1)...(19): siRNA sense strand
gagcgaauccagagguuua

SEQ ID NO: 2634173 - RNA, 19 nt, Homo sapiens
  misc_RNA (1)...(19): siRNA sense strand
ccgaaaucuaggaaagaaa

SEQ ID NO: 2634174 - RNA, 19 nt, Homo sapiens
  misc_RNA (1)...(19): siRNA sense strand
cagaggaggaagaggacaa

SEQ ID NO: 2634175 - RNA, 19 nt, Homo sapiens
  misc_RNA (1)...(19): siRNA sense strand
ggggagagcugaagggcaa

SEQ ID NO: 2634176 - RNA, 19 nt, Homo sapiens
  misc_RNA (1)...(19): siRNA sense strand
aagcagauguggagaccaa

SEQ ID NO: 2634177 - RNA, 19 nt, Homo sapiens
  misc_RNA (1)...(19): siRNA sense strand
gaaagaaggaggaggggaa

SEQ ID NO: 2634178 - RNA, 19 nt, Homo sapiens
  misc_RNA (1)...(19): siRNA sense strand
agaaaagagcacugagaaa

SEQ ID NO: 2634179 - RNA, 19 nt, Homo sapiens
  misc_RNA (1)...(19): siRNA sense strand
gugaacuggaagaggauaa

SEQ ID NO: 2634180 - RNA, 19 nt, Homo sapiens
  misc_RNA (1)...(19): siRNA sense strand
ggaggaagguggaaaggau

SEQ ID NO: 2634181 - RNA, 19 nt, Homo sapiens
  misc_RNA (1)...(19): siRNA sense strand
gggaggaagcgguggauga

SEQ ID NO: 2634182 - RNA, 19 nt, Homo sapiens
  misc_RNA (1)...(19): siRNA sense strand
gcggaagaccucagggcua

SEQ ID NO: 2634183 - RNA, 19 nt, Homo sapiens
  misc_RNA (1)...(19): siRNA sense strand
cgacaucggaggagggaga

SEQ ID NO: 2634184 - RNA, 19 nt, Homo sapiens
  misc_RNA (1)...(19): siRNA sense strand
gggaaagugaggaaagaga

SEQ ID NO: 2634185 - RNA, 19 nt, Homo sapiens
  misc_RNA (1)...(19): siRNA sense strand
aaguaagagcugaggaaga

SEQ ID NO: 2634186 - RNA, 19 nt, Homo sapiens
  misc_RNA (1)...(19): siRNA sense strand
cugcagaagaaaaggaaaa

SEQ ID NO: 2634187 - RNA, 19 nt, Homo sapiens
  misc_RNA (1)...(19): siRNA sense strand
ggagaaaacaauagcaaau

SEQ ID NO: 2634188 - RNA, 19 nt, Homo sapiens
  misc_RNA (1)...(19): siRNA sense strand
gguuaugagaacagaaaca

SEQ ID NO: 2634189 - RNA, 19 nt, Homo sapiens
  misc_RNA (1)...(19): siRNA sense strand
gagugaagccagagacaca

SEQ ID NO: 2634190 - RNA, 19 nt, Homo sapiens
  misc_RNA (1)...(19): siRNA sense strand
gaucacaagaaguggaaga

SEQ ID NO: 2634191 - RNA, 19 nt, Homo sapiens
  misc_RNA (1)...(19): siRNA sense strand
gaaacauggagaaggagaa

SEQ ID NO: 2634192 - RNA, 19 nt, Homo sapiens
  misc_RNA (1)...(19): siRNA sense strand
agaaguaagagcugaggaa

SEQ ID NO: 2634193 - RNA, 19 nt, Homo sapiens
  misc_RNA (1)...(19): siRNA sense strand
gcauauggugcaaggagaa

SEQ ID NO: 2634194 - RNA, 19 nt, Homo sapiens
  misc_RNA (1)...(19): siRNA sense strand
gaagaaaaggaaaaggaua

SEQ ID NO: 2634195 - RNA, 19 nt, Homo sapiens
  misc_RNA (1)...(19): siRNA sense strand
cagggaagguggugguaga

SEQ ID NO: 2634196 - RNA, 19 nt, Homo sapiens
  misc_RNA (1)...(19): siRNA sense strand
ccagagacacagagcacaa

SEQ ID NO: 2634197 - RNA, 19 nt, Homo sapiens
  misc_RNA (1)...(19): siRNA sense strand
acuucaagguccagaucaa

SEQ ID NO: 2634198 - RNA, 19 nt, Homo sapiens
  misc_RNA (1)...(19): siRNA sense strand
acauggaaggagaaggaaa

SEQ ID NO: 2634199 - RNA, 19 nt, Homo sapiens
  misc_RNA (1)...(19): siRNA sense strand
ugaagaaggcugaggggaa

SEQ ID NO: 2634200 - RNA, 19 nt, Homo sapiens
  misc_RNA (1)...(19): siRNA sense strand
caguaauccugcaguagaa

SEQ ID NO: 2634201 - RNA, 19 nt, Homo sapiens
  misc_RNA (1)...(19): siRNA sense strand
agcaagagagcgaaggaaa

SEQ ID NO: 2634202 - RNA, 19 nt, Homo sapiens
  misc_RNA (1)...(19): siRNA sense strand
agguggugguagaggaauu

SEQ ID NO: 2634203 - RNA, 19 nt, Homo sapiens
  misc_RNA (1)...(19): siRNA sense strand
ggcagaagcuaauagggaa

SEQ ID NO: 2634204 - RNA, 19 nt, Homo sapiens
  misc_RNA (1)...(19): siRNA sense strand
aggagaugacagugacaua

SEQ ID NO: 2634205 - RNA, 19 nt, Homo sapiens
  misc_RNA (1)...(19): siRNA sense strand
agaaagaagcaauggagga

SEQ ID NO: 2634206 - RNA, 19 nt, Homo sapiens
  misc_RNA (1)...(19): siRNA sense strand
cggagacagccgaggagaa

SEQ ID NO: 2634207 - RNA, 19 nt, Homo sapiens
  misc_RNA (1)...(19): siRNA sense strand
aaguagaugaggagaaaca

SEQ ID NO: 2634208 - RNA, 19 nt, Homo sapiens
  misc_RNA (1)...(19): siRNA sense strand
aagaagcaauggaggaaga

SEQ ID NO: 2634209 - RNA, 19 nt, Homo sapiens
  misc_RNA (1)...(19): siRNA sense strand
ugacugaggcagaagcuaa

SEQ ID NO: 2634210 - RNA, 19 nt, Homo sapiens
  misc_RNA (1)...(19): siRNA sense strand
uggaagacgaccaggaaaa

SEQ ID NO: 2634211 - RNA, 19 nt, Homo sapiens
  misc_RNA (1)...(19): siRNA sense strand
gggagaggaaccagccaaa

SEQ ID NO: 2634212 - RNA, 19 nt, Homo sapiens
  misc_RNA (1)...(19): siRNA sense strand
uugaaaagucgcuggaaaa

SEQ ID NO: 2634213 - RNA, 19 nt, Homo sapiens
  misc_RNA (1)...(19): siRNA sense strand
agauuuagcaagagagcga

SEQ ID NO: 2634214 - RNA, 19 nt, Homo sapiens
  misc_RNA (1)...(19): siRNA sense strand
cgggagggagagagggaau

SEQ ID NO: 2634215 - RNA, 19 nt, Homo sapiens
  misc_RNA (1)...(19): siRNA sense strand
gaaagugaggaaagagaga

SEQ ID NO: 2634216 - RNA, 19 nt, Homo sapiens
  misc_RNA (1)...(19): siRNA sense strand
uugaaguagaugaggagaa

SEQ ID NO: 2634217 - RNA, 19 nt, Homo sapiens
  misc_RNA (1)...(19): siRNA sense strand
cugcucaggugaaggacaa

SEQ ID NO: 2634218 - RNA, 19 nt, Homo sapiens
  misc_RNA (1)...(19): siRNA sense strand
gaagaggugacaagggcaa

SEQ ID NO: 2634219 - RNA, 19 nt, Homo sapiens
  misc_RNA (1)...(19): siRNA sense strand
agaaaugagaucaaggaga

SEQ ID NO: 2634220 - RNA, 19 nt, Homo sapiens
  misc_RNA (1)...(19): siRNA sense strand
ggaggaaaugacaaguaaa

SEQ ID NO: 2634221 - RNA, 19 nt, Homo sapiens
  misc_RNA (1)...(19): siRNA sense strand
gggagaagcaggagcuguu

SEQ ID NO: 2634222 - RNA, 19 nt, Homo sapiens
  misc_RNA (1)...(19): siRNA sense strand
ccauagaccuagaggacac

SEQ ID NO: 2634223 - RNA, 19 nt, Homo sapiens
  misc_RNA (1)...(19): siRNA sense strand
acgaaagcuuugagaaugu

SEQ ID NO: 2634224 - RNA, 19 nt, Homo sapiens
  misc_RNA (1)...(19): siRNA sense strand
gggaacaggguuuagagaa

SEQ ID NO: 2634225 - RNA, 19 nt, Homo sapiens
  misc_RNA (1)...(19): siRNA sense strand
augugaaagaugagaauga

SEQ ID NO: 2634226 - RNA, 19 nt, Homo sapiens
  misc_RNA (1)...(19): siRNA sense strand
ugaaagugccagaagguca

SEQ ID NO: 2634227 - RNA, 19 nt, Homo sapiens
  misc_RNA (1)...(19): siRNA sense strand
ggaaagaaauuuuacccaa

SEQ ID NO: 2634228 - RNA, 19 nt, Homo sapiens
  misc_RNA (1)...(19): siRNA sense strand
gaggaagcaggcagggaaa

SEQ ID NO: 2634229 - RNA, 19 nt, Homo sapiens
  misc_RNA (1)...(19): siRNA sense strand
ggaugaggagcuugaggaa

SEQ ID NO: 2634230 - RNA, 19 nt, Homo sapiens
  misc_RNA (1)...(19): siRNA sense strand
cggaagaaacgguggggau

SEQ ID NO: 2634231 - RNA, 19 nt, Homo sapiens
  misc_RNA (1)...(19): siRNA sense strand
ugaggaagcaggcagggaa

SEQ ID NO: 2634232 - RNA, 19 nt, Homo sapiens
  misc_RNA (1)...(19): siRNA sense strand
ggaagaaacgguggggauu

SEQ ID NO: 2634233 - RNA, 19 nt, Homo sapiens
  misc_RNA (1)...(19): siRNA sense strand
aagacaggcuuucgauuga

SEQ ID NO: 2634234 - RNA, 19 nt, Homo sapiens
  misc_RNA (1)...(19): siRNA sense strand
ccaaaguccugguggcccu

SEQ ID NO: 2634235 - RNA, 19 nt, Homo sapiens
  misc_RNA (1)...(19): siRNA sense strand
gaguggaacaugaggaaau

SEQ ID NO: 2634236 - RNA, 19 nt, Homo sapiens
  misc_RNA (1)...(19): siRNA sense strand
ugacaagcauugaggagga

SEQ ID NO: 2634237 - RNA, 19 nt, Homo sapiens
  misc_RNA (1)...(19): siRNA sense strand
uccaugagcugguggccaa

SEQ ID NO: 2634238 - RNA, 19 nt, Homo sapiens
  misc_RNA (1)...(19): siRNA sense strand
uggaggagacagagggauc

SEQ ID NO: 2634239 - RNA, 19 nt, Homo sapiens
  misc_RNA (1)...(19): siRNA sense strand
uggaacaugaggaaaucaa

SEQ ID NO: 2634240 - RNA, 19 nt, Homo sapiens
  misc_RNA (1)...(19): siRNA sense strand
gcauugaggaggagccacu

SEQ ID NO: 2634241 - RNA, 19 nt, Homo sapiens
  misc_RNA (1)...(19): siRNA sense strand
ucgaguggaacaugaggaa

SEQ ID NO: 2634242 - RNA, 19 nt, Homo sapiens
  misc_RNA (1)...(19): siRNA sense strand
cggcagagaacucgagccu

SEQ ID NO: 2634243 - RNA, 19 nt, Homo sapiens
  misc_RNA (1)...(19): siRNA sense strand
acaucagcgugguggucau

SEQ ID NO: 2634244 - RNA, 19 nt, Homo sapiens
  misc_RNA (1)...(19): siRNA sense strand
gcaaagaggaccagggcau

SEQ ID NO: 2634245 - RNA, 19 nt, Homo sapiens
  misc_RNA (1)...(19): siRNA sense strand
ccaccaacauccugggcaa

SEQ ID NO: 2634246 - RNA, 19 nt, Homo sapiens
  misc_RNA (1)...(19): siRNA sense strand
aggaggaaacagagggcaa

SEQ ID NO: 2634247 - RNA, 19 nt, Homo sapiens
  misc_RNA (1)...(19): siRNA sense strand
agaaagaacaacauggaga

SEQ ID NO: 2634248 - RNA, 19 nt, Homo sapiens
  misc_RNA (1)...(19): siRNA sense strand
aaguggaggcggagagaga

SEQ ID NO: 2634249 - RNA, 19 nt, Homo sapiens
  misc_RNA (1)...(19): siRNA sense strand
gggccauaacggagaccua

SEQ ID NO: 2634250 - RNA, 19 nt, Homo sapiens
  misc_RNA (1)...(19): siRNA sense strand
acgacagccugguggacua

SEQ ID NO: 2634251 - RNA, 19 nt, Homo sapiens
  misc_RNA (1)...(19): siRNA sense strand
ggaugaagaaggaagacga

SEQ ID NO: 2634252 - RNA, 19 nt, Homo sapiens
  misc_RNA (1)...(19): siRNA sense strand
ccucuguggcccaaggaaa

SEQ ID NO: 2634253 - RNA, 19 nt, Homo sapiens
  misc_RNA (1)...(19): siRNA sense strand
acuauagugaugaggacaa

SEQ ID NO: 2634254 - RNA, 19 nt, Homo sapiens
  misc_RNA (1)...(19): siRNA sense strand
cacaaaugucucugaggaa

SEQ ID NO: 2634255 - RNA, 19 nt, Homo sapiens
  misc_RNA (1)...(19): siRNA sense strand
caaaugucucugaggaaga

SEQ ID NO: 2634256 - RNA, 19 nt, Homo sapiens
  misc_RNA (1)...(19): siRNA sense strand
aaauuaagaugauccgcaa

SEQ ID NO: 2634257 - RNA, 19 nt, Homo sapiens
  misc_RNA (1)...(19): siRNA sense strand
gaguaaaggcugcucccua

SEQ ID NO: 2634258 - RNA, 19 nt, Homo sapiens
  misc_RNA (1)...(19): siRNA sense strand
ugauugagugugaagcaaa

SEQ ID NO: 2634259 - RNA, 19 nt, Homo sapiens
  misc_RNA (1)...(19): siRNA sense strand
cuggugacgugaagggaga

SEQ ID NO: 2634260 - RNA, 19 nt, Homo sapiens
  misc_RNA (1)...(19): siRNA sense strand
aggacaaggaggaaacaga

SEQ ID NO: 2634261 - RNA, 19 nt, Homo sapiens
  misc_RNA (1)...(19): siRNA sense strand
agcccaaccuggagacaau

SEQ ID NO: 2634262 - RNA, 19 nt, Homo sapiens
  misc_RNA (1)...(19): siRNA sense strand
aggaaagcagauaguggaa

SEQ ID NO: 2634263 - RNA, 19 nt, Homo sapiens
  misc_RNA (1)...(19): siRNA sense strand
ccaacaaccaagcggacau

SEQ ID NO: 2634264 - RNA, 19 nt, Homo sapiens
  misc_RNA (1)...(19): siRNA sense strand
gauugagugugaagcaaaa

SEQ ID NO: 2634265 - RNA, 19 nt, Homo sapiens
  misc_RNA (1)...(19): siRNA sense strand
acgugaugcugcaggacau

SEQ ID NO: 2634266 - RNA, 19 nt, Homo sapiens
  misc_RNA (1)...(19): siRNA sense strand
gggcuguguaccagugcaa

SEQ ID NO: 2634267 - RNA, 19 nt, Homo sapiens
  misc_RNA (1)...(19): siRNA sense strand
cugaagaccccaaggaaga

SEQ ID NO: 2634268 - RNA, 19 nt, Homo sapiens
  misc_RNA (1)...(19): siRNA sense strand
cagcuggagugucggguga

SEQ ID NO: 2634269 - RNA, 19 nt, Homo sapiens
  misc_RNA (1)...(19): siRNA sense strand
ggagaggggaccagaaaga

SEQ ID NO: 2634270 - RNA, 19 nt, Homo sapiens
  misc_RNA (1)...(19): siRNA sense strand
ccaaaguaggaaagcagau

SEQ ID NO: 2634271 - RNA, 19 nt, Homo sapiens
  misc_RNA (1)...(19): siRNA sense strand
ccuccaacgagcauggcua

SEQ ID NO: 2634272 - RNA, 19 nt, Homo sapiens
  misc_RNA (1)...(19): siRNA sense strand
acaccauccagcagaagaa

SEQ ID NO: 2634273 - RNA, 19 nt, Homo sapiens
  misc_RNA (1)...(19): siRNA sense strand
cuaccgaaccaguggagca

SEQ ID NO: 2634274 - RNA, 19 nt, Homo sapiens
  misc_RNA (1)...(19): siRNA sense strand
caaucaaccuggaauggga

SEQ ID NO: 2634275 - RNA, 19 nt, Homo sapiens
  misc_RNA (1)...(19): siRNA sense strand
cuuugacgcuccagugcaa

SEQ ID NO: 2634276 - RNA, 19 nt, Homo sapiens
  misc_RNA (1)...(19): siRNA sense strand
ccaacaagaugggcagcau

SEQ ID NO: 2634277 - RNA, 19 nt, Homo sapiens
  misc_RNA (1)...(19): siRNA sense strand
cugaaaaugacuucgggaa

SEQ ID NO: 2634278 - RNA, 19 nt, Homo sapiens
  misc_RNA (1)...(19): siRNA sense strand
cggagaagauuuacccagu

SEQ ID NO: 2634279 - RNA, 19 nt, Homo sapiens
  misc_RNA (1)...(19): siRNA sense strand
ucacaaaugucucugagga

SEQ ID NO: 2634280 - RNA, 19 nt, Homo sapiens
  misc_RNA (1)...(19): siRNA sense strand
cuaccauguuuaugagaac

SEQ ID NO: 2634281 - RNA, 19 nt, Homo sapiens
  misc_RNA (1)...(19): siRNA sense strand
acacgaaacagcagauucu

SEQ ID NO: 2634282 - RNA, 19 nt, Homo sapiens
  misc_RNA (1)...(19): siRNA sense strand
uuggaaacaggaugaagaa

SEQ ID NO: 2634283 - RNA, 19 nt, Homo sapiens
  misc_RNA (1)...(19): siRNA sense strand
acaggaugaagaaggaaga

SEQ ID NO: 2634284 - RNA, 19 nt, Homo sapiens
  misc_RNA (1)...(19): siRNA sense strand
ggaccagaaagaacaacau

SEQ ID NO: 2634285 - RNA, 19 nt, Homo sapiens
  misc_RNA (1)...(19): siRNA sense strand
agaacaacauggagaucac

SEQ ID NO: 2634286 - RNA, 19 nt, Homo sapiens
  misc_RNA (1)...(19): siRNA sense strand
gccauaacggagaccuaua

SEQ ID NO: 2634287 - RNA, 19 nt, Homo sapiens
  misc_RNA (1)...(19): siRNA sense strand
guggauuaccugagggaaa

SEQ ID NO: 2634288 - RNA, 19 nt, Homo sapiens
  misc_RNA (1)...(19): siRNA sense strand
cgacagaaccugcgcgaga

SEQ ID NO: 2634289 - RNA, 19 nt, Homo sapiens
  misc_RNA (1)...(19): siRNA sense strand
aggagaauggagagcgaaa

SEQ ID NO: 2634290 - RNA, 19 nt, Homo sapiens
  misc_RNA (1)...(19): siRNA sense strand
cgucauugucccugagaau

SEQ ID NO: 2634291 - RNA, 19 nt, Homo sapiens
  misc_RNA (1)...(19): siRNA sense strand
uagaugugguggagggaau

SEQ ID NO: 2634292 - RNA, 19 nt, Homo sapiens
  misc_RNA (1)...(19): siRNA sense strand
caggaggaaaugaaggaua

SEQ ID NO: 2634293 - RNA, 19 nt, Homo sapiens
  misc_RNA (1)...(19): siRNA sense strand
caccuaaggaagagaagua

SEQ ID NO: 2634294 - RNA, 19 nt, Homo sapiens
  misc_RNA (1)...(19): siRNA sense strand
accgaaagcaggaggaaau

SEQ ID NO: 2634295 - RNA, 19 nt, Homo sapiens
  misc_RNA (1)...(19): siRNA sense strand
gggaugagcaagagcuuca

SEQ ID NO: 2634296 - RNA, 19 nt, Homo sapiens
  misc_RNA (1)...(19): siRNA sense strand
ccaggagaauggagagcga

SEQ ID NO: 2634297 - RNA, 19 nt, Homo sapiens
  misc_RNA (1)...(19): siRNA sense strand
caucagggcaacugggaga

SEQ ID NO: 2634298 - RNA, 19 nt, Homo sapiens
  misc_RNA (1)...(19): siRNA sense strand
ccaguaggcaccagagaga

SEQ ID NO: 2634299 - RNA, 19 nt, Homo sapiens
  misc_RNA (1)...(19): siRNA sense strand
gggaaagcuucgucggaac

SEQ ID NO: 2634300 - RNA, 19 nt, Homo sapiens
  misc_RNA (1)...(19): siRNA sense strand
gcagccaaacagaggacua

SEQ ID NO: 2634301 - RNA, 19 nt, Homo sapiens
  misc_RNA (1)...(19): siRNA sense strand
caguggauguucuggguga

SEQ ID NO: 2634302 - RNA, 19 nt, Homo sapiens
  misc_RNA (1)...(19): siRNA sense strand
ugaucagcucaguggauua

SEQ ID NO: 2634303 - RNA, 19 nt, Homo sapiens
  misc_RNA (1)...(19): siRNA sense strand
cugagagggaugagcaaga

SEQ ID NO: 2634304 - RNA, 19 nt, Homo sapiens
  misc_RNA (1)...(19): siRNA sense strand
ucaggaaauccgaaaguau

SEQ ID NO: 2634305 - RNA, 19 nt, Homo sapiens
  misc_RNA (1)...(19): siRNA sense strand
gccaguauggugugguaua

SEQ ID NO: 2634306 - RNA, 19 nt, Homo sapiens
  misc_RNA (1)...(19): siRNA sense strand
ccaagagaacaaugaggau

SEQ ID NO: 2634307 - RNA, 19 nt, Homo sapiens
  misc_RNA (1)...(19): siRNA sense strand
agagaaaacggaagaucua

SEQ ID NO: 2634308 - RNA, 19 nt, Homo sapiens
  misc_RNA (1)...(19): siRNA sense strand
uuaaucaggcaguggcuaa

SEQ ID NO: 2634309 - RNA, 19 nt, Homo sapiens
  misc_RNA (1)...(19): siRNA sense strand
gaucuauggcugaggguuc

SEQ ID NO: 2634310 - RNA, 19 nt, Homo sapiens
  misc_RNA (1)...(19): siRNA sense strand
ugccgaagcaugagcgauu

SEQ ID NO: 2634311 - RNA, 19 nt, Homo sapiens
  misc_RNA (1)...(19): siRNA sense strand
cucccaaacgucuggaaua

SEQ ID NO: 2634312 - RNA, 19 nt, Homo sapiens
  misc_RNA (1)...(19): siRNA sense strand
ugaauauugccaaccgaaa

SEQ ID NO: 2634313 - RNA, 19 nt, Homo sapiens
  misc_RNA (1)...(19): siRNA sense strand
ggaagaggaagguggccca

SEQ ID NO: 2634314 - RNA, 19 nt, Homo sapiens
  misc_RNA (1)...(19): siRNA sense strand
ugggugacuuggugaauga

SEQ ID NO: 2634315 - RNA, 19 nt, Homo sapiens
  misc_RNA (1)...(19): siRNA sense strand
cugagacacuugagcacau

SEQ ID NO: 2634316 - RNA, 19 nt, Homo sapiens
  misc_RNA (1)...(19): siRNA sense strand
gcuucaucguaaaccuaaa

SEQ ID NO: 2634317 - RNA, 19 nt, Homo sapiens
  misc_RNA (1)...(19): siRNA sense strand
uagcggaacuggagguaac

SEQ ID NO: 2634318 - RNA, 19 nt, Homo sapiens
  misc_RNA (1)...(19): siRNA sense strand
aggagaaugaguuguauga

SEQ ID NO: 2634319 - RNA, 19 nt, Homo sapiens
  misc_RNA (1)...(19): siRNA sense strand
gguuagagaaaacggaaga

SEQ ID NO: 2634320 - RNA, 19 nt, Homo sapiens
  misc_RNA (1)...(19): siRNA sense strand
gauggaagccuguugggau

SEQ ID NO: 2634321 - RNA, 19 nt, Homo sapiens
  misc_RNA (1)...(19): siRNA sense strand
ugccaagaucacugacuua

SEQ ID NO: 2634322 - RNA, 19 nt, Homo sapiens
  misc_RNA (1)...(19): siRNA sense strand
aggaaaugaaggauaugau

SEQ ID NO: 2634323 - RNA, 19 nt, Homo sapiens
  misc_RNA (1)...(19): siRNA sense strand
ggccaggauuguaacguca

SEQ ID NO: 2634324 - RNA, 19 nt, Homo sapiens
  misc_RNA (1)...(19): siRNA sense strand
gugguauaccugugugaca

SEQ ID NO: 2634325 - RNA, 19 nt, Homo sapiens
  misc_RNA (1)...(19): siRNA sense strand
ugguauaccugugugacaa

SEQ ID NO: 2634326 - RNA, 19 nt, Homo sapiens
  misc_RNA (1)...(19): siRNA sense strand
gcuaauugaccugggcuau

SEQ ID NO: 2634327 - RNA, 19 nt, Homo sapiens
  misc_RNA (1)...(19): siRNA sense strand
ucccaaacgucuggaauau

SEQ ID NO: 2634328 - RNA, 19 nt, Homo sapiens
  misc_RNA (1)...(19): siRNA sense strand
cuaacauggaguuuaaaga

SEQ ID NO: 2634329 - RNA, 19 nt, Homo sapiens
  misc_RNA (1)...(19): siRNA sense strand
ccauauggccccugaacuu

SEQ ID NO: 2634330 - RNA, 19 nt, Homo sapiens
  misc_RNA (1)...(19): siRNA sense strand
gaugaggagugcuggcagu

SEQ ID NO: 2634331 - RNA, 19 nt, Homo sapiens
  misc_RNA (1)...(19): siRNA sense strand
agaccaucccugaggagga

SEQ ID NO: 2634332 - RNA, 19 nt, Homo sapiens
  misc_RNA (1)...(19): siRNA sense strand
guggauuaccugagggaaa

SEQ ID NO: 2634333 - RNA, 19 nt, Homo sapiens
  misc_RNA (1)...(19): siRNA sense strand
cgacagaaccugcgcgaga

SEQ ID NO: 2634334 - RNA, 19 nt, Homo sapiens
  misc_RNA (1)...(19): siRNA sense strand
aggagaauggagagcgaaa

SEQ ID NO: 2634335 - RNA, 19 nt, Homo sapiens
  misc_RNA (1)...(19): siRNA sense strand
cgucauugucccugagaau

SEQ ID NO: 2634336 - RNA, 19 nt, Homo sapiens
  misc_RNA (1)...(19): siRNA sense strand
uagaugugguggagggaau

SEQ ID NO: 2634337 - RNA, 19 nt, Homo sapiens
  misc_RNA (1)...(19): siRNA sense strand
caggaggaaaugaaggaua

SEQ ID NO: 2634338 - RNA, 19 nt, Homo sapiens
  misc_RNA (1)...(19): siRNA sense strand
caccuaaggaagagaagua

SEQ ID NO: 2634339 - RNA, 19 nt, Homo sapiens
  misc_RNA (1)...(19): siRNA sense strand
accgaaagcaggaggaaau

SEQ ID NO: 2634340 - RNA, 19 nt, Homo sapiens
  misc_RNA (1)...(19): siRNA sense strand
gggaugagcaagagcuuca

SEQ ID NO: 2634341 - RNA, 19 nt, Homo sapiens
  misc_RNA (1)...(19): siRNA sense strand
ccaggagaauggagagcga

SEQ ID NO: 2634342 - RNA, 19 nt, Homo sapiens
  misc_RNA (1)...(19): siRNA sense strand
caucagggcaacugggaga

SEQ ID NO: 2634343 - RNA, 19 nt, Homo sapiens
  misc_RNA (1)...(19): siRNA sense strand
ccaguaggcaccagagaga

SEQ ID NO: 2634344 - RNA, 19 nt, Homo sapiens
  misc_RNA (1)...(19): siRNA sense strand
gggaaagcuucgucggaac

SEQ ID NO: 2634345 - RNA, 19 nt, Homo sapiens
  misc_RNA (1)...(19): siRNA sense strand
gcagccaaacagaggacua

SEQ ID NO: 2634346 - RNA, 19 nt, Homo sapiens
  misc_RNA (1)...(19): siRNA sense strand
caguggauguucuggguga

SEQ ID NO: 2634347 - RNA, 19 nt, Homo sapiens
  misc_RNA (1)...(19): siRNA sense strand
ugaucagcucaguggauua

SEQ ID NO: 2634348 - RNA, 19 nt, Homo sapiens
  misc_RNA (1)...(19): siRNA sense strand
cugagagggaugagcaaga

SEQ ID NO: 2634349 - RNA, 19 nt, Homo sapiens
  misc_RNA (1)...(19): siRNA sense strand
ucaggaaauccgaaaguau

SEQ ID NO: 2634350 - RNA, 19 nt, Homo sapiens
  misc_RNA (1)...(19): siRNA sense strand
gccaguauggugugguaua

SEQ ID NO: 2634351 - RNA, 19 nt, Homo sapiens
  misc_RNA (1)...(19): siRNA sense strand
ccaagagaacaaugaggau

SEQ ID NO: 2634352 - RNA, 19 nt, Homo sapiens
  misc_RNA (1)...(19): siRNA sense strand
agagaaaacggaagaucua

SEQ ID NO: 2634353 - RNA, 19 nt, Homo sapiens
  misc_RNA (1)...(19): siRNA sense strand
uuaaucaggcaguggcuaa

SEQ ID NO: 2634354 - RNA, 19 nt, Homo sapiens
  misc_RNA (1)...(19): siRNA sense strand
gaucuauggcugaggguuc

SEQ ID NO: 2634355 - RNA, 19 nt, Homo sapiens
  misc_RNA (1)...(19): siRNA sense strand
ugccgaagcaugagcgauu

SEQ ID NO: 2634356 - RNA, 19 nt, Homo sapiens
  misc_RNA (1)...(19): siRNA sense strand
cucccaaacgucuggaaua

SEQ ID NO: 2634357 - RNA, 19 nt, Homo sapiens
  misc_RNA (1)...(19): siRNA sense strand
ugaauauugccaaccgaaa

SEQ ID NO: 2634358 - RNA, 19 nt, Homo sapiens
  misc_RNA (1)...(19): siRNA sense strand
ggaagaggaagguggccca

SEQ ID NO: 2634359 - RNA, 19 nt, Homo sapiens
  misc_RNA (1)...(19): siRNA sense strand
ugggugacuuggugaauga

SEQ ID NO: 2634360 - RNA, 19 nt, Homo sapiens
  misc_RNA (1)...(19): siRNA sense strand
cugagacacuugagcacau

SEQ ID NO: 2634361 - RNA, 19 nt, Homo sapiens
  misc_RNA (1)...(19): siRNA sense strand
gcuucaucguaaaccuaaa

SEQ ID NO: 2634362 - RNA, 19 nt, Homo sapiens
  misc_RNA (1)...(19): siRNA sense strand
uagcggaacuggagguaac

SEQ ID NO: 2634363 - RNA, 19 nt, Homo sapiens
  misc_RNA (1)...(19): siRNA sense strand
aggagaaugaguuguauga

SEQ ID NO: 2634364 - RNA, 19 nt, Homo sapiens
  misc_RNA (1)...(19): siRNA sense strand
gguuagagaaaacggaaga

SEQ ID NO: 2634365 - RNA, 19 nt, Homo sapiens
  misc_RNA (1)...(19): siRNA sense strand
gauggaagccuguugggau

SEQ ID NO: 2634366 - RNA, 19 nt, Homo sapiens
  misc_RNA (1)...(19): siRNA sense strand
ugccaagaucacugacuua

SEQ ID NO: 2634367 - RNA, 19 nt, Homo sapiens
  misc_RNA (1)...(19): siRNA sense strand
aggaaaugaaggauaugau

SEQ ID NO: 2634368 - RNA, 19 nt, Homo sapiens
  misc_RNA (1)...(19): siRNA sense strand
ggccaggauuguaacguca

SEQ ID NO: 2634369 - RNA, 19 nt, Homo sapiens
  misc_RNA (1)...(19): siRNA sense strand
gugguauaccugugugaca

SEQ ID NO: 2634370 - RNA, 19 nt, Homo sapiens
  misc_RNA (1)...(19): siRNA sense strand
ugguauaccugugugacaa

SEQ ID NO: 2634371 - RNA, 19 nt, Homo sapiens
  misc_RNA (1)...(19): siRNA sense strand
gcuaauugaccugggcuau

SEQ ID NO: 2634372 - RNA, 19 nt, Homo sapiens
  misc_RNA (1)...(19): siRNA sense strand
ucccaaacgucuggaauau

SEQ ID NO: 2634373 - RNA, 19 nt, Homo sapiens
  misc_RNA (1)...(19): siRNA sense strand
cuaacauggaguuuaaaga

SEQ ID NO: 2634374 - RNA, 19 nt, Homo sapiens
  misc_RNA (1)...(19): siRNA sense strand
ccauauggccccugaacuu

SEQ ID NO: 2634375 - RNA, 19 nt, Homo sapiens
  misc_RNA (1)...(19): siRNA sense strand
gaugaggagugcuggcagu

SEQ ID NO: 2634376 - RNA, 19 nt, Homo sapiens
  misc_RNA (1)...(19): siRNA sense strand
agaccaucccugaggagga

SEQ ID NO: 2634377 - RNA, 19 nt, Homo sapiens
  misc_RNA (1)...(19): siRNA sense strand
ggacagugaugacagcgaa

SEQ ID NO: 2634378 - RNA, 19 nt, Homo sapiens
  misc_RNA (1)...(19): siRNA sense strand
gcuggagagaagaagguuu

SEQ ID NO: 2634379 - RNA, 19 nt, Homo sapiens
  misc_RNA (1)...(19): siRNA sense strand
gugaagugucugagugacu

SEQ ID NO: 2634380 - RNA, 19 nt, Homo sapiens
  misc_RNA (1)...(19): siRNA sense strand
acuguaaauugcagaacca

SEQ ID NO: 2634381 - RNA, 19 nt, Homo sapiens
  misc_RNA (1)...(19): siRNA sense strand
cagaaucacauaugggacu

SEQ ID NO: 2634382 - RNA, 19 nt, Homo sapiens
  misc_RNA (1)...(19): siRNA sense strand
augacagcgaagagcuuaa

SEQ ID NO: 2634383 - RNA, 19 nt, Homo sapiens
  misc_RNA (1)...(19): siRNA sense strand
gggaagaacaggcggcaga

SEQ ID NO: 2634384 - RNA, 19 nt, Homo sapiens
  misc_RNA (1)...(19): siRNA sense strand
ccauggaggacgucagcaa

SEQ ID NO: 2634385 - RNA, 19 nt, Homo sapiens
  misc_RNA (1)...(19): siRNA sense strand
acgugaaacuggacaaacu

SEQ ID NO: 2634386 - RNA, 19 nt, Homo sapiens
  misc_RNA (1)...(19): siRNA sense strand
ccaaugagguggugacccu

SEQ ID NO: 2634387 - RNA, 19 nt, Homo sapiens
  misc_RNA (1)...(19): siRNA sense strand
uugaagaauccuuggcuga

SEQ ID NO: 2634388 - RNA, 19 nt, Homo sapiens
  misc_RNA (1)...(19): siRNA sense strand
cggagaaccuuguggcccu

SEQ ID NO: 2634389 - RNA, 19 nt, Homo sapiens
  misc_RNA (1)...(19): siRNA sense strand
gcucgguccucuuggcaga

SEQ ID NO: 2634390 - RNA, 19 nt, Homo sapiens
  misc_RNA (1)...(19): siRNA sense strand
agaacaggcggcagagcau

SEQ ID NO: 2634391 - RNA, 19 nt, Homo sapiens
  misc_RNA (1)...(19): siRNA sense strand
cauacgugaaacuggacaa

SEQ ID NO: 2634392 - RNA, 19 nt, Homo sapiens
  misc_RNA (1)...(19): siRNA sense strand
gcaaacugacggagaaccu

SEQ ID NO: 2634393 - RNA, 19 nt, Homo sapiens
  misc_RNA (1)...(19): siRNA sense strand
ccgaugugcugcugggauc

SEQ ID NO: 2634394 - RNA, 19 nt, Homo sapiens
  misc_RNA (1)...(19): siRNA sense strand
cacugagaccauugaagaa

SEQ ID NO: 2634395 - RNA, 19 nt, Homo sapiens
  misc_RNA (1)...(19): siRNA sense strand
uggaaacauacgugaaacu

SEQ ID NO: 2634396 - RNA, 19 nt, Homo sapiens
  misc_RNA (1)...(19): siRNA sense strand
aaacauacgugaaacugga

SEQ ID NO: 2634397 - RNA, 19 nt, Homo sapiens
  misc_RNA (1)...(19): siRNA sense strand
aauuauugcucuuggacga

SEQ ID NO: 2634398 - RNA, 19 nt, Homo sapiens
  misc_RNA (1)...(19): siRNA sense strand
ggagaaucgcgcucggcuu

SEQ ID NO: 2634399 - RNA, 19 nt, Homo sapiens
  misc_RNA (1)...(19): siRNA sense strand
gggcagauggugaagcuga

SEQ ID NO: 2634400 - RNA, 19 nt, Homo sapiens
  misc_RNA (1)...(19): siRNA sense strand
cuacuaaugaagacaucaa

SEQ ID NO: 2634401 - RNA, 19 nt, Homo sapiens
  misc_RNA (1)...(19): siRNA sense strand
cuggagaaacagaucgaca

SEQ ID NO: 2634402 - RNA, 19 nt, Homo sapiens
  misc_RNA (1)...(19): siRNA sense strand
cugaaggagacaccagcaa

SEQ ID NO: 2634403 - RNA, 19 nt, Homo sapiens
  misc_RNA (1)...(19): siRNA sense strand
agauggugaagcugaagua

SEQ ID NO: 2634404 - RNA, 19 nt, Homo sapiens
  misc_RNA (1)...(19): siRNA sense strand
gggcagauggugaagcuga

SEQ ID NO: 2634405 - RNA, 19 nt, Homo sapiens
  misc_RNA (1)...(19): siRNA sense strand
cuacuaaugaagacaucaa

SEQ ID NO: 2634406 - RNA, 19 nt, Homo sapiens
  misc_RNA (1)...(19): siRNA sense strand
cuggagaaacagaucgaca

SEQ ID NO: 2634407 - RNA, 19 nt, Homo sapiens
  misc_RNA (1)...(19): siRNA sense strand
cugaaggagacaccagcaa

SEQ ID NO: 2634408 - RNA, 19 nt, Homo sapiens
  misc_RNA (1)...(19): siRNA sense strand
agauggugaagcugaagua

SEQ ID NO: 2634409 - RNA, 19 nt, Homo sapiens
  misc_RNA (1)...(19): siRNA sense strand
gggaagacugugaggcaga

SEQ ID NO: 2634410 - RNA, 19 nt, Homo sapiens
  misc_RNA (1)...(19): siRNA sense strand
gggagaggacuguggccaa

SEQ ID NO: 2634411 - RNA, 19 nt, Homo sapiens
  misc_RNA (1)...(19): siRNA sense strand
ccgaugaggaagaggcaga

SEQ ID NO: 2634412 - RNA, 19 nt, Homo sapiens
  misc_RNA (1)...(19): siRNA sense strand
cguagaagcccgugugcca

SEQ ID NO: 2634413 - RNA, 19 nt, Homo sapiens
  misc_RNA (1)...(19): siRNA sense strand
gugagugccacgugggcua

SEQ ID NO: 2634414 - RNA, 19 nt, Homo sapiens
  misc_RNA (1)...(19): siRNA sense strand
ccugugaagauguggacga

SEQ ID NO: 2634415 - RNA, 19 nt, Homo sapiens
  misc_RNA (1)...(19): siRNA sense strand
ccuucaagugcguguguca

SEQ ID NO: 2634416 - RNA, 19 nt, Homo sapiens
  misc_RNA (1)...(19): siRNA sense strand
cugugaagauguggacgaa

SEQ ID NO: 2634417 - RNA, 19 nt, Homo sapiens
  misc_RNA (1)...(19): siRNA sense strand
uggaacuaacugugaggau

SEQ ID NO: 2634418 - RNA, 19 nt, Homo sapiens
  misc_RNA (1)...(19): siRNA sense strand
gugaauggcuccugccucu

SEQ ID NO: 2634419 - RNA, 19 nt, Homo sapiens
  misc_RNA (1)...(19): siRNA sense strand
ccuaagaaugacagcgcuu

SEQ ID NO: 2634420 - RNA, 19 nt, Homo sapiens
  misc_RNA (1)...(19): siRNA sense strand
ccugagaccccuugugaaa

SEQ ID NO: 2634421 - RNA, 19 nt, Homo sapiens
  misc_RNA (1)...(19): siRNA sense strand
agucagaauuacagaagcu

SEQ ID NO: 2634422 - RNA, 19 nt, Homo sapiens
  misc_RNA (1)...(19): siRNA sense strand
uuggaaacguugagcucau

SEQ ID NO: 2634423 - RNA, 19 nt, Homo sapiens
  misc_RNA (1)...(19): siRNA sense strand
ucaaaugugacaaaggaca

SEQ ID NO: 2634424 - RNA, 19 nt, Homo sapiens
  misc_RNA (1)...(19): siRNA sense strand
gcagaagaauccaacagca

SEQ ID NO: 2634425 - RNA, 19 nt, Homo sapiens
  misc_RNA (1)...(19): siRNA sense strand
ccacaaagccacagacacg

SEQ ID NO: 2634426 - RNA, 19 nt, Homo sapiens
  misc_RNA (1)...(19): siRNA sense strand
ggcuacagacagaggaugu

SEQ ID NO: 2634427 - RNA, 19 nt, Homo sapiens
  misc_RNA (1)...(19): siRNA sense strand
gggagaaagugaagcgcua

SEQ ID NO: 2634428 - RNA, 19 nt, Homo sapiens
  misc_RNA (1)...(19): siRNA sense strand
gcaaauucuucuaugggaa

SEQ ID NO: 2634429 - RNA, 19 nt, Homo sapiens
  misc_RNA (1)...(19): siRNA sense strand
uggaagaugccaaggagaa

SEQ ID NO: 2634430 - RNA, 19 nt, Homo sapiens
  misc_RNA (1)...(19): siRNA sense strand
ggaagaugccaaggagaaa

SEQ ID NO: 2634431 - RNA, 19 nt, Homo sapiens
  misc_RNA (1)...(19): siRNA sense strand
gcaaagaguucauggacac

SEQ ID NO: 2634432 - RNA, 19 nt, Homo sapiens
  misc_RNA (1)...(19): siRNA sense strand
caucuggauuagugaguau

SEQ ID NO: 2634433 - RNA, 19 nt, Homo sapiens
  misc_RNA (1)...(19): siRNA sense strand
ggcaaagaguucauggaca

SEQ ID NO: 2634434 - RNA, 19 nt, Homo sapiens
  misc_RNA (1)...(19): siRNA sense strand
gaaaugacccugaggagga

SEQ ID NO: 2634435 - RNA, 19 nt, Homo sapiens
  misc_RNA (1)...(19): siRNA sense strand
aauauaaacucgacagcga

SEQ ID NO: 2634436 - RNA, 19 nt, Homo sapiens
  misc_RNA (1)...(19): siRNA sense strand
gcugcgagacuguggaaau

SEQ ID NO: 2634437 - RNA, 19 nt, Homo sapiens
  misc_RNA (1)...(19): siRNA sense strand
aagaaagagcucugcagaa

SEQ ID NO: 2634438 - RNA, 19 nt, Homo sapiens
  misc_RNA (1)...(19): siRNA sense strand
ggaagaaaucggagggcag

SEQ ID NO: 2634439 - RNA, 19 nt, Homo sapiens
  misc_RNA (1)...(19): siRNA sense strand
ccgaugagggugaugggaa

SEQ ID NO: 2634440 - RNA, 19 nt, Homo sapiens
  misc_RNA (1)...(19): siRNA sense strand
uuggaagugcccagagaaa

SEQ ID NO: 2634441 - RNA, 19 nt, Homo sapiens
  misc_RNA (1)...(19): siRNA sense strand
ccaaaguaaucaaugcaga

SEQ ID NO: 2634442 - RNA, 19 nt, Homo sapiens
  misc_RNA (1)...(19): siRNA sense strand
aaaugagacuggaggggaa

SEQ ID NO: 2634443 - RNA, 19 nt, Homo sapiens
  misc_RNA (1)...(19): siRNA sense strand
aggaaaaggcacauaggaa

SEQ ID NO: 2634444 - RNA, 19 nt, Homo sapiens
  misc_RNA (1)...(19): siRNA sense strand
agauccaggcaguggcaaa

SEQ ID NO: 2634445 - RNA, 19 nt, Homo sapiens
  misc_RNA (1)...(19): siRNA sense strand
aggccagagcacagaggaa

SEQ ID NO: 2634446 - RNA, 19 nt, Homo sapiens
  misc_RNA (1)...(19): siRNA sense strand
gaaaaggcacauaggaaau

SEQ ID NO: 2634447 - RNA, 19 nt, Homo sapiens
  misc_RNA (1)...(19): siRNA sense strand
ugucauagucaaagugcau

SEQ ID NO: 2634448 - RNA, 19 nt, Homo sapiens
  misc_RNA (1)...(19): siRNA sense strand
guguuauaguguuggaguu

SEQ ID NO: 2634449 - RNA, 19 nt, Homo sapiens
  misc_RNA (1)...(19): siRNA sense strand
gggaccagcuuuugaagaa

SEQ ID NO: 2634450 - RNA, 19 nt, Homo sapiens
  misc_RNA (1)...(19): siRNA sense strand
ucauagucaaagugcauaa

SEQ ID NO: 2634451 - RNA, 19 nt, Homo sapiens
  misc_RNA (1)...(19): siRNA sense strand
cuggguuccuauaaagaaa

SEQ ID NO: 2634452 - RNA, 19 nt, Homo sapiens
  misc_RNA (1)...(19): siRNA sense strand
cuacuuuggaauagaugaa

SEQ ID NO: 2634453 - RNA, 19 nt, Homo sapiens
  misc_RNA (1)...(19): siRNA sense strand
cgacaagcacuuugggucu

SEQ ID NO: 2634454 - RNA, 19 nt, Homo sapiens
  misc_RNA (1)...(19): siRNA sense strand
caacagcuacugaggaaaa

SEQ ID NO: 2634455 - RNA, 19 nt, Homo sapiens
  misc_RNA (1)...(19): siRNA sense strand
ggcaggaguacuugaaaga

SEQ ID NO: 2634456 - RNA, 19 nt, Homo sapiens
  misc_RNA (1)...(19): siRNA sense strand
aaucagagucgguggaaac

SEQ ID NO: 2634457 - RNA, 19 nt, Homo sapiens
  misc_RNA (1)...(19): siRNA sense strand
gcaagcaggcacccggaaa

SEQ ID NO: 2634458 - RNA, 19 nt, Homo sapiens
  misc_RNA (1)...(19): siRNA sense strand
auuugaaggucuugacuca

SEQ ID NO: 2634459 - RNA, 19 nt, Homo sapiens
  misc_RNA (1)...(19): siRNA sense strand
uuacgaaagaggagaaugu

SEQ ID NO: 2634460 - RNA, 19 nt, Homo sapiens
  misc_RNA (1)...(19): siRNA sense strand
guuaaaagugagcacgaaa

SEQ ID NO: 2634461 - RNA, 19 nt, Homo sapiens
  misc_RNA (1)...(19): siRNA sense strand
cgucugagcuggaggagag

SEQ ID NO: 2634462 - RNA, 19 nt, Homo sapiens
  misc_RNA (1)...(19): siRNA sense strand
gacugaaaggauuuaguaa

SEQ ID NO: 2634463 - RNA, 19 nt, Homo sapiens
  misc_RNA (1)...(19): siRNA sense strand
cagccuauucacagggaga

SEQ ID NO: 2634464 - RNA, 19 nt, Homo sapiens
  misc_RNA (1)...(19): siRNA sense strand
guaccgaaaauguguguua

SEQ ID NO: 2634465 - RNA, 19 nt, Homo sapiens
  misc_RNA (1)...(19): siRNA sense strand
cggccagucugcugacauu

SEQ ID NO: 2634466 - RNA, 19 nt, Homo sapiens
  misc_RNA (1)...(19): siRNA sense strand
auuaugauguccagagcau

SEQ ID NO: 2634467 - RNA, 19 nt, Homo sapiens
  misc_RNA (1)...(19): siRNA sense strand
gaggaagagauguauaaca

SEQ ID NO: 2634468 - RNA, 19 nt, Homo sapiens
  misc_RNA (1)...(19): siRNA sense strand
gcauaauccauguaccgaa

SEQ ID NO: 2634469 - RNA, 19 nt, Homo sapiens
  misc_RNA (1)...(19): siRNA sense strand
cugugaagguggucaucau

SEQ ID NO: 2634470 - RNA, 19 nt, Homo sapiens
  misc_RNA (1)...(19): siRNA sense strand
acaugagacugcaggagga

SEQ ID NO: 2634471 - RNA, 19 nt, Homo sapiens
  misc_RNA (1)...(19): siRNA sense strand
caggaguacuugaaagauc

SEQ ID NO: 2634472 - RNA, 19 nt, Homo sapiens
  misc_RNA (1)...(19): siRNA sense strand
gagagaagguggaagaugc

SEQ ID NO: 2634473 - RNA, 19 nt, Homo sapiens
  misc_RNA (1)...(19): siRNA sense strand
gacaaggggcagugaacaa

SEQ ID NO: 2634474 - RNA, 19 nt, Homo sapiens
  misc_RNA (1)...(19): siRNA sense strand
gaggagagccgacuggaga

SEQ ID NO: 2634475 - RNA, 19 nt, Homo sapiens
  misc_RNA (1)...(19): siRNA sense strand
cagaaaaugcagcccauaa

SEQ ID NO: 2634476 - RNA, 19 nt, Homo sapiens
  misc_RNA (1)...(19): siRNA sense strand
cuuccaaaguccuggguuc

SEQ ID NO: 2634477 - RNA, 19 nt, Homo sapiens
  misc_RNA (1)...(19): siRNA sense strand
agauggaaguugcaaagau

SEQ ID NO: 2634478 - RNA, 19 nt, Homo sapiens
  misc_RNA (1)...(19): siRNA sense strand
aaaucagagucgguggaaa

SEQ ID NO: 2634479 - RNA, 19 nt, Homo sapiens
  misc_RNA (1)...(19): siRNA sense strand
gagaaagugaagcgcuaca

SEQ ID NO: 2634480 - RNA, 19 nt, Homo sapiens
  misc_RNA (1)...(19): siRNA sense strand
ccaaggagaaagaaggauc

SEQ ID NO: 2634481 - RNA, 19 nt, Homo sapiens
  misc_RNA (1)...(19): siRNA sense strand
aagaaggaucccaguucaa

SEQ ID NO: 2634482 - RNA, 19 nt, Homo sapiens
  misc_RNA (1)...(19): siRNA sense strand
acagaggaagagauguaua

SEQ ID NO: 2634483 - RNA, 19 nt, Homo sapiens
  misc_RNA (1)...(19): siRNA sense strand
gguccauguccaagcccua

SEQ ID NO: 2634484 - RNA, 19 nt, Homo sapiens
  misc_RNA (1)...(19): siRNA sense strand
cgggauguauagugagaug

SEQ ID NO: 2634485 - RNA, 19 nt, Homo sapiens
  misc_RNA (1)...(19): siRNA sense strand
gagacagggacaagccuuu

SEQ ID NO: 2634486 - RNA, 19 nt, Homo sapiens
  misc_RNA (1)...(19): siRNA sense strand
ggaagagauguauaacaau

SEQ ID NO: 2634487 - RNA, 19 nt, Homo sapiens
  misc_RNA (1)...(19): siRNA sense strand
ccacauacaaagacuacga

SEQ ID NO: 2634488 - RNA, 19 nt, Homo sapiens
  misc_RNA (1)...(19): siRNA sense strand
gcagaaagauggaaguugc

SEQ ID NO: 2634489 - RNA, 19 nt, Homo sapiens
  misc_RNA (1)...(19): siRNA sense strand
aagucaaucagcuggaauu

SEQ ID NO: 2634490 - RNA, 19 nt, Homo sapiens
  misc_RNA (1)...(19): siRNA sense strand
gggccuauuauuaccgcaa

SEQ ID NO: 2634491 - RNA, 19 nt, Homo sapiens
  misc_RNA (1)...(19): siRNA sense strand
gccagagcacagaggaaga

SEQ ID NO: 2634492 - RNA, 19 nt, Homo sapiens
  misc_RNA (1)...(19): siRNA sense strand
aggagaagguaaagccaag

SEQ ID NO: 2634493 - RNA, 19 nt, Homo sapiens
  misc_RNA (1)...(19): siRNA sense strand
gguagacaacugugcugaa

SEQ ID NO: 2634494 - RNA, 19 nt, Homo sapiens
  misc_RNA (1)...(19): siRNA sense strand
gggagaaagugaagcgcua

SEQ ID NO: 2634495 - RNA, 19 nt, Homo sapiens
  misc_RNA (1)...(19): siRNA sense strand
gcaaauucuucuaugggaa

SEQ ID NO: 2634496 - RNA, 19 nt, Homo sapiens
  misc_RNA (1)...(19): siRNA sense strand
uggaagaugccaaggagaa

SEQ ID NO: 2634497 - RNA, 19 nt, Homo sapiens
  misc_RNA (1)...(19): siRNA sense strand
ggaagaugccaaggagaaa

SEQ ID NO: 2634498 - RNA, 19 nt, Homo sapiens
  misc_RNA (1)...(19): siRNA sense strand
gcaaagaguucauggacac

SEQ ID NO: 2634499 - RNA, 19 nt, Homo sapiens
  misc_RNA (1)...(19): siRNA sense strand
caucuggauuagugaguau

SEQ ID NO: 2634500 - RNA, 19 nt, Homo sapiens
  misc_RNA (1)...(19): siRNA sense strand
ggcaaagaguucauggaca

SEQ ID NO: 2634501 - RNA, 19 nt, Homo sapiens
  misc_RNA (1)...(19): siRNA sense strand
gaaaugacccugaggagga

SEQ ID NO: 2634502 - RNA, 19 nt, Homo sapiens
  misc_RNA (1)...(19): siRNA sense strand
aauauaaacucgacagcga

SEQ ID NO: 2634503 - RNA, 19 nt, Homo sapiens
  misc_RNA (1)...(19): siRNA sense strand
gcugcgagacuguggaaau

SEQ ID NO: 2634504 - RNA, 19 nt, Homo sapiens
  misc_RNA (1)...(19): siRNA sense strand
aagaaagagcucugcagaa

SEQ ID NO: 2634505 - RNA, 19 nt, Homo sapiens
  misc_RNA (1)...(19): siRNA sense strand
ccgaugagggugaugggaa

SEQ ID NO: 2634506 - RNA, 19 nt, Homo sapiens
  misc_RNA (1)...(19): siRNA sense strand
uuggaagugcccagagaaa

SEQ ID NO: 2634507 - RNA, 19 nt, Homo sapiens
  misc_RNA (1)...(19): siRNA sense strand
ccaaaguaaucaaugcaga

SEQ ID NO: 2634508 - RNA, 19 nt, Homo sapiens
  misc_RNA (1)...(19): siRNA sense strand
aaaugagacuggaggggaa

SEQ ID NO: 2634509 - RNA, 19 nt, Homo sapiens
  misc_RNA (1)...(19): siRNA sense strand
aggaaaaggcacauaggaa

SEQ ID NO: 2634510 - RNA, 19 nt, Homo sapiens
  misc_RNA (1)...(19): siRNA sense strand
agauccaggcaguggcaaa

SEQ ID NO: 2634511 - RNA, 19 nt, Homo sapiens
  misc_RNA (1)...(19): siRNA sense strand
aggccagagcacagaggaa

SEQ ID NO: 2634512 - RNA, 19 nt, Homo sapiens
  misc_RNA (1)...(19): siRNA sense strand
gaaaaggcacauaggaaau

SEQ ID NO: 2634513 - RNA, 19 nt, Homo sapiens
  misc_RNA (1)...(19): siRNA sense strand
ugucauagucaaagugcau

SEQ ID NO: 2634514 - RNA, 19 nt, Homo sapiens
  misc_RNA (1)...(19): siRNA sense strand
guguuauaguguuggaguu

SEQ ID NO: 2634515 - RNA, 19 nt, Homo sapiens
  misc_RNA (1)...(19): siRNA sense strand
gggaccagcuuuugaagaa

SEQ ID NO: 2634516 - RNA, 19 nt, Homo sapiens
  misc_RNA (1)...(19): siRNA sense strand
aauuaugaccacaaagcaa

SEQ ID NO: 2634517 - RNA, 19 nt, Homo sapiens
  misc_RNA (1)...(19): siRNA sense strand
ucauagucaaagugcauaa

SEQ ID NO: 2634518 - RNA, 19 nt, Homo sapiens
  misc_RNA (1)...(19): siRNA sense strand
cuggguuccuauaaagaaa

SEQ ID NO: 2634519 - RNA, 19 nt, Homo sapiens
  misc_RNA (1)...(19): siRNA sense strand
cuacuuuggaauagaugaa

SEQ ID NO: 2634520 - RNA, 19 nt, Homo sapiens
  misc_RNA (1)...(19): siRNA sense strand
cgacaagcacuuugggucu

SEQ ID NO: 2634521 - RNA, 19 nt, Homo sapiens
  misc_RNA (1)...(19): siRNA sense strand
caacagcuacugaggaaaa

SEQ ID NO: 2634522 - RNA, 19 nt, Homo sapiens
  misc_RNA (1)...(19): siRNA sense strand
ggcaggaguacuugaaaga

SEQ ID NO: 2634523 - RNA, 19 nt, Homo sapiens
  misc_RNA (1)...(19): siRNA sense strand
aaucagagucgguggaaac

SEQ ID NO: 2634524 - RNA, 19 nt, Homo sapiens
  misc_RNA (1)...(19): siRNA sense strand
gcaagcaggcacccggaaa

SEQ ID NO: 2634525 - RNA, 19 nt, Homo sapiens
  misc_RNA (1)...(19): siRNA sense strand
auuugaaggucuugacuca

SEQ ID NO: 2634526 - RNA, 19 nt, Homo sapiens
  misc_RNA (1)...(19): siRNA sense strand
uuacgaaagaggagaaugu

SEQ ID NO: 2634527 - RNA, 19 nt, Homo sapiens
  misc_RNA (1)...(19): siRNA sense strand
guuaaaagugagcacgaaa

SEQ ID NO: 2634528 - RNA, 19 nt, Homo sapiens
  misc_RNA (1)...(19): siRNA sense strand
cgucugagcuggaggagag

SEQ ID NO: 2634529 - RNA, 19 nt, Homo sapiens
  misc_RNA (1)...(19): siRNA sense strand
gacugaaaggauuuaguaa

SEQ ID NO: 2634530 - RNA, 19 nt, Homo sapiens
  misc_RNA (1)...(19): siRNA sense strand
cagccuauucacagggaga

SEQ ID NO: 2634531 - RNA, 19 nt, Homo sapiens
  misc_RNA (1)...(19): siRNA sense strand
guaccgaaaauguguguua

SEQ ID NO: 2634532 - RNA, 19 nt, Homo sapiens
  misc_RNA (1)...(19): siRNA sense strand
cggccagucugcugacauu

SEQ ID NO: 2634533 - RNA, 19 nt, Homo sapiens
  misc_RNA (1)...(19): siRNA sense strand
auuaugauguccagagcau

SEQ ID NO: 2634534 - RNA, 19 nt, Homo sapiens
  misc_RNA (1)...(19): siRNA sense strand
gaggaagagauguauaaca

SEQ ID NO: 2634535 - RNA, 19 nt, Homo sapiens
  misc_RNA (1)...(19): siRNA sense strand
gcauaauccauguaccgaa

SEQ ID NO: 2634536 - RNA, 19 nt, Homo sapiens
  misc_RNA (1)...(19): siRNA sense strand
cugugaagguggucaucau

SEQ ID NO: 2634537 - RNA, 19 nt, Homo sapiens
  misc_RNA (1)...(19): siRNA sense strand
acaugagacugcaggagga

SEQ ID NO: 2634538 - RNA, 19 nt, Homo sapiens
  misc_RNA (1)...(19): siRNA sense strand
caggaguacuugaaagauc

SEQ ID NO: 2634539 - RNA, 19 nt, Homo sapiens
  misc_RNA (1)...(19): siRNA sense strand
gagagaagguggaagaugc

SEQ ID NO: 2634540 - RNA, 19 nt, Homo sapiens
  misc_RNA (1)...(19): siRNA sense strand
gacaaggggcagugaacaa

SEQ ID NO: 2634541 - RNA, 19 nt, Homo sapiens
  misc_RNA (1)...(19): siRNA sense strand
gaggagagccgacuggaga

SEQ ID NO: 2634542 - RNA, 19 nt, Homo sapiens
  misc_RNA (1)...(19): siRNA sense strand
cagaaaaugcagcccauaa

SEQ ID NO: 2634543 - RNA, 19 nt, Homo sapiens
  misc_RNA (1)...(19): siRNA sense strand
cuuccaaaguccuggguuc

SEQ ID NO: 2634544 - RNA, 19 nt, Homo sapiens
  misc_RNA (1)...(19): siRNA sense strand
gguaccgaguagaaaauua

SEQ ID NO: 2634545 - RNA, 19 nt, Homo sapiens
  misc_RNA (1)...(19): siRNA sense strand
agauggaaguugcaaagau

SEQ ID NO: 2634546 - RNA, 19 nt, Homo sapiens
  misc_RNA (1)...(19): siRNA sense strand
aaaucagagucgguggaaa

SEQ ID NO: 2634547 - RNA, 19 nt, Homo sapiens
  misc_RNA (1)...(19): siRNA sense strand
gagaaagugaagcgcuaca

SEQ ID NO: 2634548 - RNA, 19 nt, Homo sapiens
  misc_RNA (1)...(19): siRNA sense strand
ccaaggagaaagaaggauc

SEQ ID NO: 2634549 - RNA, 19 nt, Homo sapiens
  misc_RNA (1)...(19): siRNA sense strand
aagaaggaucccaguucaa

SEQ ID NO: 2634550 - RNA, 19 nt, Homo sapiens
  misc_RNA (1)...(19): siRNA sense strand
acagaggaagagauguaua

SEQ ID NO: 2634551 - RNA, 19 nt, Homo sapiens
  misc_RNA (1)...(19): siRNA sense strand
gguccauguccaagcccua

SEQ ID NO: 2634552 - RNA, 19 nt, Homo sapiens
  misc_RNA (1)...(19): siRNA sense strand
cgggauguauagugagaug

SEQ ID NO: 2634553 - RNA, 19 nt, Homo sapiens
  misc_RNA (1)...(19): siRNA sense strand
gagacagggacaagccuuu

SEQ ID NO: 2634554 - RNA, 19 nt, Homo sapiens
  misc_RNA (1)...(19): siRNA sense strand
ggaagagauguauaacaau

SEQ ID NO: 2634555 - RNA, 19 nt, Homo sapiens
  misc_RNA (1)...(19): siRNA sense strand
ccacauacaaagacuacga

SEQ ID NO: 2634556 - RNA, 19 nt, Homo sapiens
  misc_RNA (1)...(19): siRNA sense strand
gcagaaagauggaaguugc

SEQ ID NO: 2634557 - RNA, 19 nt, Homo sapiens
  misc_RNA (1)...(19): siRNA sense strand
aagucaaucagcuggaauu

SEQ ID NO: 2634558 - RNA, 19 nt, Homo sapiens
  misc_RNA (1)...(19): siRNA sense strand
gggccuauuauuaccgcaa

SEQ ID NO: 2634559 - RNA, 19 nt, Homo sapiens
  misc_RNA (1)...(19): siRNA sense strand
gccagagcacagaggaaga

SEQ ID NO: 2634560 - RNA, 19 nt, Homo sapiens
  misc_RNA (1)...(19): siRNA sense strand
ucagaaagcuccagggaaa

SEQ ID NO: 2634561 - RNA, 19 nt, Homo sapiens
  misc_RNA (1)...(19): siRNA sense strand
cuaacgagcuggagaaaua

SEQ ID NO: 2634562 - RNA, 19 nt, Homo sapiens
  misc_RNA (1)...(19): siRNA sense strand
cuggagaaauacagaguua

SEQ ID NO: 2634563 - RNA, 19 nt, Homo sapiens
  misc_RNA (1)...(19): siRNA sense strand
agaaggaacaagagaguau

SEQ ID NO: 2634564 - RNA, 19 nt, Homo sapiens
  misc_RNA (1)...(19): siRNA sense strand
ugaaagagcagaugggaga

SEQ ID NO: 2634565 - RNA, 19 nt, Homo sapiens
  misc_RNA (1)...(19): siRNA sense strand
ggaggaacacagcgggaaa

SEQ ID NO: 2634566 - RNA, 19 nt, Homo sapiens
  misc_RNA (1)...(19): siRNA sense strand
caugauuaacaaagggaaa

SEQ ID NO: 2634567 - RNA, 19 nt, Homo sapiens
  misc_RNA (1)...(19): siRNA sense strand
ccaaagagggucugaguga

SEQ ID NO: 2634568 - RNA, 19 nt, Homo sapiens
  misc_RNA (1)...(19): siRNA sense strand
gaugggagaucgaggaaga

SEQ ID NO: 2634569 - RNA, 19 nt, Homo sapiens
  misc_RNA (1)...(19): siRNA sense strand
gcaaggaagggaauaguaa

SEQ ID NO: 2634570 - RNA, 19 nt, Homo sapiens
  misc_RNA (1)...(19): siRNA sense strand
uggcaaagugggagaauca

SEQ ID NO: 2634571 - RNA, 19 nt, Homo sapiens
  misc_RNA (1)...(19): siRNA sense strand
ggagagcggugcuggcaaa

SEQ ID NO: 2634572 - RNA, 19 nt, Homo sapiens
  misc_RNA (1)...(19): siRNA sense strand
ugaaauguugcuugagaaa

SEQ ID NO: 2634573 - RNA, 19 nt, Homo sapiens
  misc_RNA (1)...(19): siRNA sense strand
cuacaaguuuagaggacau

SEQ ID NO: 2634574 - RNA, 19 nt, Homo sapiens
  misc_RNA (1)...(19): siRNA sense strand
guuuagaggacauggauuu

SEQ ID NO: 2634575 - RNA, 19 nt, Homo sapiens
  misc_RNA (1)...(19): siRNA sense strand
gcagaaucccggaggccaa

SEQ ID NO: 2634576 - RNA, 19 nt, Homo sapiens
  misc_RNA (1)...(19): siRNA sense strand
uuaaagaaggcaaggacua

SEQ ID NO: 2634577 - RNA, 19 nt, Homo sapiens
  misc_RNA (1)...(19): siRNA sense strand
ggaccagggcagagugaga

SEQ ID NO: 2634578 - RNA, 19 nt, Homo sapiens
  misc_RNA (1)...(19): siRNA sense strand
caacugagcaucugaagaa

SEQ ID NO: 2634579 - RNA, 19 nt, Homo sapiens
  misc_RNA (1)...(19): siRNA sense strand
uggaugagcuaaacacaaa

SEQ ID NO: 2634580 - RNA, 19 nt, Homo sapiens
  misc_RNA (1)...(19): siRNA sense strand
cugaaagaagaaauggaaa

SEQ ID NO: 2634581 - RNA, 19 nt, Homo sapiens
  misc_RNA (1)...(19): siRNA sense strand
cagaagagggagucagaga

SEQ ID NO: 2634582 - RNA, 19 nt, Homo sapiens
  misc_RNA (1)...(19): siRNA sense strand
ggguaacaccuuuggauga

SEQ ID NO: 2634583 - RNA, 19 nt, Homo sapiens
  misc_RNA (1)...(19): siRNA sense strand
cggcuauggaauacgauua

SEQ ID NO: 2634584 - RNA, 19 nt, Homo sapiens
  misc_RNA (1)...(19): siRNA sense strand
auaaacaagugcuggaaca

SEQ ID NO: 2634585 - RNA, 19 nt, Homo sapiens
  misc_RNA (1)...(19): siRNA sense strand
ggacaagauggaucagcua

SEQ ID NO: 2634586 - RNA, 19 nt, Homo sapiens
  misc_RNA (1)...(19): siRNA sense strand
ggaagaagaccaagaccca

SEQ ID NO: 2634587 - RNA, 19 nt, Homo sapiens
  misc_RNA (1)...(19): siRNA sense strand
gagcuaaacacaaagauga

SEQ ID NO: 2634588 - RNA, 19 nt, Homo sapiens
  misc_RNA (1)...(19): siRNA sense strand
ccaaacaaugugugcaauu

SEQ ID NO: 2634589 - RNA, 19 nt, Homo sapiens
  misc_RNA (1)...(19): siRNA sense strand
cuucuaagugaucgaaaua

SEQ ID NO: 2634590 - RNA, 19 nt, Homo sapiens
  misc_RNA (1)...(19): siRNA sense strand
gugggagaaucaacagaaa

SEQ ID NO: 2634591 - RNA, 19 nt, Homo sapiens
  misc_RNA (1)...(19): siRNA sense strand
gggagaucgaggaagacaa

SEQ ID NO: 2634592 - RNA, 19 nt, Homo sapiens
  misc_RNA (1)...(19): siRNA sense strand
ggaagaagaccaaggccca

SEQ ID NO: 2634593 - RNA, 19 nt, Homo sapiens
  misc_RNA (1)...(19): siRNA sense strand
ggaagaagaccaaggccca

SEQ ID NO: 2634594 - RNA, 19 nt, Homo sapiens
  misc_RNA (1)...(19): siRNA sense strand
gaacugagaaccaaaguau

SEQ ID NO: 2634595 - RNA, 19 nt, Homo sapiens
  misc_RNA (1)...(19): siRNA sense strand
gcagaaggaacaagagagu

SEQ ID NO: 2634596 - RNA, 19 nt, Homo sapiens
  misc_RNA (1)...(19): siRNA sense strand
ggucaagucucuccaguuu

SEQ ID NO: 2634597 - RNA, 19 nt, Homo sapiens
  misc_RNA (1)...(19): siRNA sense strand
acaagauggaucagcuaaa

SEQ ID NO: 2634598 - RNA, 19 nt, Homo sapiens
  misc_RNA (1)...(19): siRNA sense strand
uagcagaucuuguagguga

SEQ ID NO: 2634599 - RNA, 19 nt, Homo sapiens
  misc_RNA (1)...(19): siRNA sense strand
ucgaggaagacaaggagaa

SEQ ID NO: 2634600 - RNA, 19 nt, Homo sapiens
  misc_RNA (1)...(19): siRNA sense strand
cgucuacagcgaaaggaaa

SEQ ID NO: 2634601 - RNA, 19 nt, Homo sapiens
  misc_RNA (1)...(19): siRNA sense strand
ccucauagagcaagaaacu

SEQ ID NO: 2634602 - RNA, 19 nt, Homo sapiens
  misc_RNA (1)...(19): siRNA sense strand
ugucagagguggagacuuc

SEQ ID NO: 2634603 - RNA, 19 nt, Homo sapiens
  misc_RNA (1)...(19): siRNA sense strand
ggaagggaauaguaaacuu

SEQ ID NO: 2634604 - RNA, 19 nt, Homo sapiens
  misc_RNA (1)...(19): siRNA sense strand
ccuucuaagugaucgaaau

SEQ ID NO: 2634605 - RNA, 19 nt, Homo sapiens
  misc_RNA (1)...(19): siRNA sense strand
ugaaagaagaaauggaaac

SEQ ID NO: 2634606 - RNA, 19 nt, Homo sapiens
  misc_RNA (1)...(19): siRNA sense strand
cgggaaagccuauggcguu

SEQ ID NO: 2634607 - RNA, 19 nt, Homo sapiens
  misc_RNA (1)...(19): siRNA sense strand
gagggugguacgacagaaa

SEQ ID NO: 2634608 - RNA, 19 nt, Homo sapiens
  misc_RNA (1)...(19): siRNA sense strand
ucgagauaacucagacaaa

SEQ ID NO: 2634609 - RNA, 19 nt, Homo sapiens
  misc_RNA (1)...(19): siRNA sense strand
gcaagaaaauggucccuua

SEQ ID NO: 2634610 - RNA, 19 nt, Homo sapiens
  misc_RNA (1)...(19): siRNA sense strand
aggcuaacgagcuggagaa

SEQ ID NO: 2634611 - RNA, 19 nt, Homo sapiens
  misc_RNA (1)...(19): siRNA sense strand
gaaauaaacaagugcugga

SEQ ID NO: 2634612 - RNA, 19 nt, Homo sapiens
  misc_RNA (1)...(19): siRNA sense strand
ggaccagaucagauggaca

SEQ ID NO: 2634613 - RNA, 19 nt, Homo sapiens
  misc_RNA (1)...(19): siRNA sense strand
agggagagguauuuguuau

SEQ ID NO: 2634614 - RNA, 19 nt, Homo sapiens
  misc_RNA (1)...(19): siRNA sense strand
caaggaagggaauaguaaa

SEQ ID NO: 2634615 - RNA, 19 nt, Homo sapiens
  misc_RNA (1)...(19): siRNA sense strand
agagugaacagcagaaaga

SEQ ID NO: 2634616 - RNA, 19 nt, Homo sapiens
  misc_RNA (1)...(19): siRNA sense strand
gaagggaauaguaaacuua

SEQ ID NO: 2634617 - RNA, 19 nt, Homo sapiens
  misc_RNA (1)...(19): siRNA sense strand
aagaagaggaagaagacca

SEQ ID NO: 2634618 - RNA, 19 nt, Homo sapiens
  misc_RNA (1)...(19): siRNA sense strand
aagaagaggaagaagacca

SEQ ID NO: 2634619 - RNA, 19 nt, Homo sapiens
  misc_RNA (1)...(19): siRNA sense strand
cugcagcacacgagaguga

SEQ ID NO: 2634620 - RNA, 19 nt, Homo sapiens
  misc_RNA (1)...(19): siRNA sense strand
aggagaagggcgaggugau

SEQ ID NO: 2634621 - RNA, 19 nt, Homo sapiens
  misc_RNA (1)...(19): siRNA sense strand
agacaaaacccuugaagca

SEQ ID NO: 2634622 - RNA, 19 nt, Homo sapiens
  misc_RNA (1)...(19): siRNA sense strand
aaauguugcuugagaaacu

SEQ ID NO: 2634623 - RNA, 19 nt, Homo sapiens
  misc_RNA (1)...(19): siRNA sense strand
ggaaagccaaccuggagaa

SEQ ID NO: 2634624 - RNA, 19 nt, Homo sapiens
  misc_RNA (1)...(19): siRNA sense strand
cggaaaaggcaaggaggaa

SEQ ID NO: 2634625 - RNA, 19 nt, Homo sapiens
  misc_RNA (1)...(19): siRNA sense strand
agagggagucagagaugua

SEQ ID NO: 2634626 - RNA, 19 nt, Homo sapiens
  misc_RNA (1)...(19): siRNA sense strand
agaagaaauggaaaccaaa

SEQ ID NO: 2634627 - RNA, 19 nt, Homo sapiens
  misc_RNA (1)...(19): siRNA sense strand
agaagaucuuagugcaaca

SEQ ID NO: 2634628 - RNA, 19 nt, Homo sapiens
  misc_RNA (1)...(19): siRNA sense strand
ggaaacauaaccagcugaa

SEQ ID NO: 2634629 - RNA, 19 nt, Homo sapiens
  misc_RNA (1)...(19): siRNA sense strand
gagccuuugccuugagaau

SEQ ID NO: 2634630 - RNA, 19 nt, Homo sapiens
  misc_RNA (1)...(19): siRNA sense strand
augaaauguugcuugagaa

SEQ ID NO: 2634631 - RNA, 19 nt, Homo sapiens
  misc_RNA (1)...(19): siRNA sense strand
aaauuuagccguuggcaga

SEQ ID NO: 2634632 - RNA, 19 nt, Homo sapiens
  misc_RNA (1)...(19): siRNA sense strand
cacaggaguuuguaggauu

SEQ ID NO: 2634633 - RNA, 19 nt, Homo sapiens
  misc_RNA (1)...(19): siRNA sense strand
cugcagccaacuugaaaua

SEQ ID NO: 2634634 - RNA, 19 nt, Homo sapiens
  misc_RNA (1)...(19): siRNA sense strand
cagagaggcucaccagcaa

SEQ ID NO: 2634635 - RNA, 19 nt, Homo sapiens
  misc_RNA (1)...(19): siRNA sense strand
gcaaacaacgcuaucaaga

SEQ ID NO: 2634636 - RNA, 19 nt, Homo sapiens
  misc_RNA (1)...(19): siRNA sense strand
accaagaagaggaagaaga

SEQ ID NO: 2634637 - RNA, 19 nt, Homo sapiens
  misc_RNA (1)...(19): siRNA sense strand
accaagaagaggaagaaga

SEQ ID NO: 2634638 - RNA, 19 nt, Homo sapiens
  misc_RNA (1)...(19): siRNA sense strand
aagacaaggagaagggcga

SEQ ID NO: 2634639 - RNA, 19 nt, Homo sapiens
  misc_RNA (1)...(19): siRNA sense strand
gaguagcaaggaagggaau

SEQ ID NO: 2634640 - RNA, 19 nt, Homo sapiens
  misc_RNA (1)...(19): siRNA sense strand
aggaccaagaagaggaaga

SEQ ID NO: 2634641 - RNA, 19 nt, Homo sapiens
  misc_RNA (1)...(19): siRNA sense strand
aggaccaagaagaggaaga

SEQ ID NO: 2634642 - RNA, 19 nt, Homo sapiens
  misc_RNA (1)...(19): siRNA sense strand
acaaaacccuugaagcaaa

SEQ ID NO: 2634643 - RNA, 19 nt, Homo sapiens
  misc_RNA (1)...(19): siRNA sense strand
acacaagagaagagauauu

SEQ ID NO: 2634644 - RNA, 19 nt, Homo sapiens
  misc_RNA (1)...(19): siRNA sense strand
gagaagagauauuccgaga

SEQ ID NO: 2634645 - RNA, 19 nt, Homo sapiens
  misc_RNA (1)...(19): siRNA sense strand
ugaauaaacuccaccgcaa

SEQ ID NO: 2634646 - RNA, 19 nt, Homo sapiens
  misc_RNA (1)...(19): siRNA sense strand
agugagagggagagaauau

SEQ ID NO: 2634647 - RNA, 19 nt, Homo sapiens
  misc_RNA (1)...(19): siRNA sense strand
cuugaagguagcugggaaa

SEQ ID NO: 2634648 - RNA, 19 nt, Homo sapiens
  misc_RNA (1)...(19): siRNA sense strand
cagcagggaguguggaaau

SEQ ID NO: 2634649 - RNA, 19 nt, Homo sapiens
  misc_RNA (1)...(19): siRNA sense strand
ugggaaauacaaaggaaau

SEQ ID NO: 2634650 - RNA, 19 nt, Homo sapiens
  misc_RNA (1)...(19): siRNA sense strand
gcuuauuccgcgagggaca

SEQ ID NO: 2634651 - RNA, 19 nt, Homo sapiens
  misc_RNA (1)...(19): siRNA sense strand
agaugaaggugcaguggau

SEQ ID NO: 2634652 - RNA, 19 nt, Homo sapiens
  misc_RNA (1)...(19): siRNA sense strand
aggaaaugauuauagccaa

SEQ ID NO: 2634653 - RNA, 19 nt, Homo sapiens
  misc_RNA (1)...(19): siRNA sense strand
ccaagaaauguguagaaga

SEQ ID NO: 2634654 - RNA, 19 nt, Homo sapiens
  misc_RNA (1)...(19): siRNA sense strand
ucaacuaguagaagaagaa

SEQ ID NO: 2634655 - RNA, 19 nt, Homo sapiens
  misc_RNA (1)...(19): siRNA sense strand
cccuauacccauugagauu

SEQ ID NO: 2634656 - RNA, 19 nt, Homo sapiens
  misc_RNA (1)...(19): siRNA sense strand
uugaagacacaaagcauua

SEQ ID NO: 2634657 - RNA, 19 nt, Homo sapiens
  misc_RNA (1)...(19): siRNA sense strand
cugggaaauacaaaggaaa

SEQ ID NO: 2634658 - RNA, 19 nt, Homo sapiens
  misc_RNA (1)...(19): siRNA sense strand
gaaugagggaccagcgauu

SEQ ID NO: 2634659 - RNA, 19 nt, Homo sapiens
  misc_RNA (1)...(19): siRNA sense strand
acacaaagcauuaugagga

SEQ ID NO: 2634660 - RNA, 19 nt, Homo sapiens
  misc_RNA (1)...(19): siRNA sense strand
ucaacagggaauacaguaa

SEQ ID NO: 2634661 - RNA, 19 nt, Homo sapiens
  misc_RNA (1)...(19): siRNA sense strand
agaagaagaaggcaggauu

SEQ ID NO: 2634662 - RNA, 19 nt, Homo sapiens
  misc_RNA (1)...(19): siRNA sense strand
cagcauagcaaauacaaaa

SEQ ID NO: 2634663 - RNA, 19 nt, Homo sapiens
  misc_RNA (1)...(19): siRNA sense strand
cagaauccagagaaagaua

SEQ ID NO: 2634664 - RNA, 19 nt, Homo sapiens
  misc_RNA (1)...(19): siRNA sense strand
ucagagaagagcagcagaa

SEQ ID NO: 2634665 - RNA, 19 nt, Homo sapiens
  misc_RNA (1)...(19): siRNA sense strand
ccucuuugcuuuauggaga

SEQ ID NO: 2634666 - RNA, 19 nt, Homo sapiens
  misc_RNA (1)...(19): siRNA sense strand
agggaaaucgggaagagaa

SEQ ID NO: 2634667 - RNA, 19 nt, Homo sapiens
  misc_RNA (1)...(19): siRNA sense strand
guguagaagaauuagcauu

SEQ ID NO: 2634668 - RNA, 19 nt, Homo sapiens
  misc_RNA (1)...(19): siRNA sense strand
ccucaagccucuaaaacua

SEQ ID NO: 2634669 - RNA, 19 nt, Homo sapiens
  misc_RNA (1)...(19): siRNA sense strand
gggaagagaacacgggaac

SEQ ID NO: 2634670 - RNA, 19 nt, Homo sapiens
  misc_RNA (1)...(19): siRNA sense strand
gguugaagacacaaagcau

SEQ ID NO: 2634671 - RNA, 19 nt, Homo sapiens
  misc_RNA (1)...(19): siRNA sense strand
gaaaggaaauaauggccca

SEQ ID NO: 2634672 - RNA, 19 nt, Homo sapiens
  misc_RNA (1)...(19): siRNA sense strand
cuagaggaaagaaagguua

SEQ ID NO: 2634673 - RNA, 19 nt, Homo sapiens
  misc_RNA (1)...(19): siRNA sense strand
gggaaaucgggaagagaac

SEQ ID NO: 2634674 - RNA, 19 nt, Homo sapiens
  misc_RNA (1)...(19): siRNA sense strand
cgggaagagaacacgggaa

SEQ ID NO: 2634675 - RNA, 19 nt, Homo sapiens
  misc_RNA (1)...(19): siRNA sense strand
cuaugauucuagucugaaa

SEQ ID NO: 2634676 - RNA, 19 nt, Homo sapiens
  misc_RNA (1)...(19): siRNA sense strand
acuugaagguagcugggaa

SEQ ID NO: 2634677 - RNA, 19 nt, Homo sapiens
  misc_RNA (1)...(19): siRNA sense strand
ucagugagagggagagaau

SEQ ID NO: 2634678 - RNA, 19 nt, Homo sapiens
  misc_RNA (1)...(19): siRNA sense strand
uggaaagggaaaucgggaa

SEQ ID NO: 2634679 - RNA, 19 nt, Homo sapiens
  misc_RNA (1)...(19): siRNA sense strand
cugucaacuaguagaagaa

SEQ ID NO: 2634680 - RNA, 19 nt, Homo sapiens
  misc_RNA (1)...(19): siRNA sense strand
gaugaagacuugaagguag

SEQ ID NO: 2634681 - RNA, 19 nt, Homo sapiens
  misc_RNA (1)...(19): siRNA sense strand
cgagaaagcccuauaccca

SEQ ID NO: 2634682 - RNA, 19 nt, Homo sapiens
  misc_RNA (1)...(19): siRNA sense strand
aaauaauggcccagcuaga

SEQ ID NO: 2634683 - RNA, 19 nt, Homo sapiens
  misc_RNA (1)...(19): siRNA sense strand
cgggaacugaguauggaaa

SEQ ID NO: 2634684 - RNA, 19 nt, Homo sapiens
  misc_RNA (1)...(19): siRNA sense strand
ccuccaagaacguguugua

SEQ ID NO: 2634685 - RNA, 19 nt, Homo sapiens
  misc_RNA (1)...(19): siRNA sense strand
ugaagguagcugggaaaua

SEQ ID NO: 2634686 - RNA, 19 nt, Homo sapiens
  misc_RNA (1)...(19): siRNA sense strand
gauuauauccagaaccaca

SEQ ID NO: 2634687 - RNA, 19 nt, Homo sapiens
  misc_RNA (1)...(19): siRNA sense strand
caguuuggguuguggccau

SEQ ID NO: 2634688 - RNA, 19 nt, Homo sapiens
  misc_RNA (1)...(19): siRNA sense strand
aaacauaccuucucaggga

SEQ ID NO: 2634689 - RNA, 19 nt, Homo sapiens
  misc_RNA (1)...(19): siRNA sense strand
aauuguaucaacagggaau

SEQ ID NO: 2634690 - RNA, 19 nt, Homo sapiens
  misc_RNA (1)...(19): siRNA sense strand
accagaauccagagaaaga

SEQ ID NO: 2634691 - RNA, 19 nt, Homo sapiens
  misc_RNA (1)...(19): siRNA sense strand
cagcaaacuugaaccgacu

SEQ ID NO: 2634692 - RNA, 19 nt, Homo sapiens
  misc_RNA (1)...(19): siRNA sense strand
gggaacugaguauggaaaa

SEQ ID NO: 2634693 - RNA, 19 nt, Homo sapiens
  misc_RNA (1)...(19): siRNA sense strand
gccaaauggaauuguauca

SEQ ID NO: 2634694 - RNA, 19 nt, Homo sapiens
  misc_RNA (1)...(19): siRNA sense strand
caaguaaacaagcagaaaa

SEQ ID NO: 2634695 - RNA, 19 nt, Homo sapiens
  misc_RNA (1)...(19): siRNA sense strand
ccauuugaccagaccacua

SEQ ID NO: 2634696 - RNA, 19 nt, Homo sapiens
  misc_RNA (1)...(19): siRNA sense strand
gcuagaggaaagaaagguu

SEQ ID NO: 2634697 - RNA, 19 nt, Homo sapiens
  misc_RNA (1)...(19): siRNA sense strand
ggaccagcgauuagaucuu

SEQ ID NO: 2634698 - RNA, 19 nt, Homo sapiens
  misc_RNA (1)...(19): siRNA sense strand
gagaagagcagcagaaacc

SEQ ID NO: 2634699 - RNA, 19 nt, Homo sapiens
  misc_RNA (1)...(19): siRNA sense strand
ggaaagggaaaucgggaag

SEQ ID NO: 2634700 - RNA, 19 nt, Homo sapiens
  misc_RNA (1)...(19): siRNA sense strand
uccaagaacguguuguaaa

SEQ ID NO: 2634701 - RNA, 19 nt, Homo sapiens
  misc_RNA (1)...(19): siRNA sense strand
ccaaagauguuguggcagc

SEQ ID NO: 2634702 - RNA, 19 nt, Homo sapiens
  misc_RNA (1)...(19): siRNA sense strand
ggaguguggaaaugaugaa

SEQ ID NO: 2634703 - RNA, 19 nt, Homo sapiens
  misc_RNA (1)...(19): siRNA sense strand
gaacaguuacagagcucau

SEQ ID NO: 2634704 - RNA, 19 nt, Homo sapiens
  misc_RNA (1)...(19): siRNA sense strand
gauaugaagcagagaggag

SEQ ID NO: 2634705 - RNA, 19 nt, Homo sapiens
  misc_RNA (1)...(19): siRNA sense strand
gaggagagcuggagggcaa

SEQ ID NO: 2634706 - RNA, 19 nt, Homo sapiens
  misc_RNA (1)...(19): siRNA sense strand
aggaaauggcagugcacaa

SEQ ID NO: 2634707 - RNA, 19 nt, Homo sapiens
  misc_RNA (1)...(19): siRNA sense strand
acaaguacguggugcgcua

SEQ ID NO: 2634708 - RNA, 19 nt, Homo sapiens
  misc_RNA (1)...(19): siRNA sense strand
acaaguacguggugcgcua

SEQ ID NO: 2634709 - RNA, 19 nt, Homo sapiens
  misc_RNA (1)...(19): siRNA sense strand
ggaaggagcucucugggaa

SEQ ID NO: 2634710 - RNA, 19 nt, Homo sapiens
  misc_RNA (1)...(19): siRNA sense strand
acaaguauguagugcgcua

SEQ ID NO: 2634711 - RNA, 19 nt, Homo sapiens
  misc_RNA (1)...(19): siRNA sense strand
aagagaugguggagaugaa

SEQ ID NO: 2634712 - RNA, 19 nt, Homo sapiens
  misc_RNA (1)...(19): siRNA sense strand
acaaguacauggugcgcua

SEQ ID NO: 2634713 - RNA, 19 nt, Homo sapiens
  misc_RNA (1)...(19): siRNA sense strand
ugguggagaugaaggaaca

SEQ ID NO: 2634714 - RNA, 19 nt, Homo sapiens
  misc_RNA (1)...(19): siRNA sense strand
gggaaggagcagagcagca

SEQ ID NO: 2634715 - RNA, 19 nt, Homo sapiens
  misc_RNA (1)...(19): siRNA sense strand
gggaaggagcagagcagca

SEQ ID NO: 2634716 - RNA, 19 nt, Homo sapiens
  misc_RNA (1)...(19): siRNA sense strand
gggaaggagcagagcagca

SEQ ID NO: 2634717 - RNA, 19 nt, Homo sapiens
  misc_RNA (1)...(19): siRNA sense strand
gggaaggagcagaguagca

SEQ ID NO: 2634718 - RNA, 19 nt, Homo sapiens
  misc_RNA (1)...(19): siRNA sense strand
acaccaaggcccagacaga

SEQ ID NO: 2634719 - RNA, 19 nt, Homo sapiens
  misc_RNA (1)...(19): siRNA sense strand
acagguauguggugcgcua

SEQ ID NO: 2634720 - RNA, 19 nt, Homo sapiens
  misc_RNA (1)...(19): siRNA sense strand
acaccaaggcccagacaga

SEQ ID NO: 2634721 - RNA, 19 nt, Homo sapiens
  misc_RNA (1)...(19): siRNA sense strand
acaccaaggcccagacaga

SEQ ID NO: 2634722 - RNA, 19 nt, Homo sapiens
  misc_RNA (1)...(19): siRNA sense strand
acaccaaggcccagacaga

SEQ ID NO: 2634723 - RNA, 19 nt, Homo sapiens
  misc_RNA (1)...(19): siRNA sense strand
ggagcuauguggaaggcuu

SEQ ID NO: 2634724 - RNA, 19 nt, Homo sapiens
  misc_RNA (1)...(19): siRNA sense strand
uggcagugcacaaggauga

SEQ ID NO: 2634725 - RNA, 19 nt, Homo sapiens
  misc_RNA (1)...(19): siRNA sense strand
cgguauaagcugacaguug

SEQ ID NO: 2634726 - RNA, 19 nt, Homo sapiens
  misc_RNA (1)...(19): siRNA sense strand
uaagcugacaguugggaaa

SEQ ID NO: 2634727 - RNA, 19 nt, Homo sapiens
  misc_RNA (1)...(19): siRNA sense strand
gcagcaacaaggagcaaca

SEQ ID NO: 2634728 - RNA, 19 nt, Homo sapiens
  misc_RNA (1)...(19): siRNA sense strand
acauagucacccugcguaa

SEQ ID NO: 2634729 - RNA, 19 nt, Homo sapiens
  misc_RNA (1)...(19): siRNA sense strand
ccacagaaggacugcgagu

SEQ ID NO: 2634730 - RNA, 19 nt, Homo sapiens
  misc_RNA (1)...(19): siRNA sense strand
gcagauauggggagaccaa

SEQ ID NO: 2634731 - RNA, 19 nt, Homo sapiens
  misc_RNA (1)...(19): siRNA sense strand
gggugaagaagcuggagga

SEQ ID NO: 2634732 - RNA, 19 nt, Homo sapiens
  misc_RNA (1)...(19): siRNA sense strand
gggaaggagcacagcagca

SEQ ID NO: 2634733 - RNA, 19 nt, Homo sapiens
  misc_RNA (1)...(19): siRNA sense strand
ccagggaggaacagaacau

SEQ ID NO: 2634734 - RNA, 19 nt, Homo sapiens
  misc_RNA (1)...(19): siRNA sense strand
cgaccgggugacagagaau

SEQ ID NO: 2634735 - RNA, 19 nt, Homo sapiens
  misc_RNA (1)...(19): siRNA sense strand
ucggaggacugcagcgaga

SEQ ID NO: 2634736 - RNA, 19 nt, Homo sapiens
  misc_RNA (1)...(19): siRNA sense strand
acuacuacaagcugcgaua

SEQ ID NO: 2634737 - RNA, 19 nt, Homo sapiens
  misc_RNA (1)...(19): siRNA sense strand
accaaggcccagacagaaa

SEQ ID NO: 2634738 - RNA, 19 nt, Homo sapiens
  misc_RNA (1)...(19): siRNA sense strand
cugacugggugacggagaa

SEQ ID NO: 2634739 - RNA, 19 nt, Homo sapiens
  misc_RNA (1)...(19): siRNA sense strand
ccagggagucacugaucua

SEQ ID NO: 2634740 - RNA, 19 nt, Homo sapiens
  misc_RNA (1)...(19): siRNA sense strand
gcuacugcgaggagggcuu

SEQ ID NO: 2634741 - RNA, 19 nt, Homo sapiens
  misc_RNA (1)...(19): siRNA sense strand
gagagguucugguggggaa

SEQ ID NO: 2634742 - RNA, 19 nt, Homo sapiens
  misc_RNA (1)...(19): siRNA sense strand
gggugacagaugagacuga

SEQ ID NO: 2634743 - RNA, 19 nt, Homo sapiens
  misc_RNA (1)...(19): siRNA sense strand
cugcagguguacugugaca

SEQ ID NO: 2634744 - RNA, 19 nt, Homo sapiens
  misc_RNA (1)...(19): siRNA sense strand
cugccuugguucagguuga

SEQ ID NO: 2634745 - RNA, 19 nt, Homo sapiens
  misc_RNA (1)...(19): siRNA sense strand
gggaggaacagaacaucau

SEQ ID NO: 2634746 - RNA, 19 nt, Homo sapiens
  misc_RNA (1)...(19): siRNA sense strand
accaaugcccucacagaaa

SEQ ID NO: 2634747 - RNA, 19 nt, Homo sapiens
  misc_RNA (1)...(19): siRNA sense strand
aggggaaccaggagagcaa

SEQ ID NO: 2634748 - RNA, 19 nt, Homo sapiens
  misc_RNA (1)...(19): siRNA sense strand
gcacaguuaaggagaugca

SEQ ID NO: 2634749 - RNA, 19 nt, Homo sapiens
  misc_RNA (1)...(19): siRNA sense strand
cgggaagaccagagguuug

SEQ ID NO: 2634750 - RNA, 19 nt, Homo sapiens
  misc_RNA (1)...(19): siRNA sense strand
gggaaccaggagagcaaga

SEQ ID NO: 2634751 - RNA, 19 nt, Homo sapiens
  misc_RNA (1)...(19): siRNA sense strand
gagcuauguggaaggcuuu

SEQ ID NO: 2634752 - RNA, 19 nt, Homo sapiens
  misc_RNA (1)...(19): siRNA sense strand
guuuacaacuuuugacaga

SEQ ID NO: 2634753 - RNA, 19 nt, Homo sapiens
  misc_RNA (1)...(19): siRNA sense strand
ggugaagaagcuggaggaa

SEQ ID NO: 2634754 - RNA, 19 nt, Homo sapiens
  misc_RNA (1)...(19): siRNA sense strand
guugggaaauacagaggca

SEQ ID NO: 2634755 - RNA, 19 nt, Homo sapiens
  misc_RNA (1)...(19): siRNA sense strand
gugacacgggcgagugcua

SEQ ID NO: 2634756 - RNA, 19 nt, Homo sapiens
  misc_RNA (1)...(19): siRNA sense strand
cagaugagacugagaacuc

SEQ ID NO: 2634757 - RNA, 19 nt, Homo sapiens
  misc_RNA (1)...(19): siRNA sense strand
cugcucagauccacggcua

SEQ ID NO: 2634758 - RNA, 19 nt, Homo sapiens
  misc_RNA (1)...(19): siRNA sense strand
aggccagggaggaacagaa

SEQ ID NO: 2634759 - RNA, 19 nt, Homo sapiens
  misc_RNA (1)...(19): siRNA sense strand
cuugacguggagugggaaa

SEQ ID NO: 2634760 - RNA, 19 nt, Homo sapiens
  misc_RNA (1)...(19): siRNA sense strand
gagaaauggucguggugga

SEQ ID NO: 2634761 - RNA, 19 nt, Homo sapiens
  misc_RNA (1)...(19): siRNA sense strand
gcaaagugcaagacggaca

SEQ ID NO: 2634762 - RNA, 19 nt, Homo sapiens
  misc_RNA (1)...(19): siRNA sense strand
cagaagaggagcugaggau

SEQ ID NO: 2634763 - RNA, 19 nt, Homo sapiens
  misc_RNA (1)...(19): siRNA sense strand
gcaaagucuccuugugcaa

SEQ ID NO: 2634764 - RNA, 19 nt, Homo sapiens
  misc_RNA (1)...(19): siRNA sense strand
gggaagugacuguggggaa

SEQ ID NO: 2634765 - RNA, 19 nt, Homo sapiens
  misc_RNA (1)...(19): siRNA sense strand
ccuccuccgucaagagaaa

SEQ ID NO: 2634766 - RNA, 19 nt, Homo sapiens
  misc_RNA (1)...(19): siRNA sense strand
aguaugaagacaucaguaa

SEQ ID NO: 2634767 - RNA, 19 nt, Homo sapiens
  misc_RNA (1)...(19): siRNA sense strand
gaaaggaacauucaggcaa

SEQ ID NO: 2634768 - RNA, 19 nt, Homo sapiens
  misc_RNA (1)...(19): siRNA sense strand
gcgagaacgaccugagcau

SEQ ID NO: 2634769 - RNA, 19 nt, Homo sapiens
  misc_RNA (1)...(19): siRNA sense strand
cagggaacacagaggauau

SEQ ID NO: 2634770 - RNA, 19 nt, Homo sapiens
  misc_RNA (1)...(19): siRNA sense strand
ucaaggagcaggaggcgua

SEQ ID NO: 2634771 - RNA, 19 nt, Homo sapiens
  misc_RNA (1)...(19): siRNA sense strand
cuucaggaacccaagauaa

SEQ ID NO: 2634772 - RNA, 19 nt, Homo sapiens
  misc_RNA (1)...(19): siRNA sense strand
gagucugaggagcgggaaa

SEQ ID NO: 2634773 - RNA, 19 nt, Homo sapiens
  misc_RNA (1)...(19): siRNA sense strand
gggacagcaaagagaucua

SEQ ID NO: 2634774 - RNA, 19 nt, Homo sapiens
  misc_RNA (1)...(19): siRNA sense strand
gcaacgacuucccgggaga

SEQ ID NO: 2634775 - RNA, 19 nt, Homo sapiens
  misc_RNA (1)...(19): siRNA sense strand
cagagaaagcggaucaaca

SEQ ID NO: 2634776 - RNA, 19 nt, Homo sapiens
  misc_RNA (1)...(19): siRNA sense strand
cuacaagcuugguguggau

SEQ ID NO: 2634777 - RNA, 19 nt, Homo sapiens
  misc_RNA (1)...(19): siRNA sense strand
gcacagaggcagaaaacga

SEQ ID NO: 2634778 - RNA, 19 nt, Homo sapiens
  misc_RNA (1)...(19): siRNA sense strand
ccuccagcagccagagaaa

SEQ ID NO: 2634779 - RNA, 19 nt, Homo sapiens
  misc_RNA (1)...(19): siRNA sense strand
caacaaagcaagagcuggu

SEQ ID NO: 2634780 - RNA, 19 nt, Homo sapiens
  misc_RNA (1)...(19): siRNA sense strand
gugggugcaucgaggacua

SEQ ID NO: 2634781 - RNA, 19 nt, Homo sapiens
  misc_RNA (1)...(19): siRNA sense strand
cucaagaaauagcagacaa

SEQ ID NO: 2634782 - RNA, 19 nt, Homo sapiens
  misc_RNA (1)...(19): siRNA sense strand
aagaaauagcagacaagau

SEQ ID NO: 2634783 - RNA, 19 nt, Homo sapiens
  misc_RNA (1)...(19): siRNA sense strand
cagcaaagugcaagacgga

SEQ ID NO: 2634784 - RNA, 19 nt, Homo sapiens
  misc_RNA (1)...(19): siRNA sense strand
cugaggagcgggaaagaga

SEQ ID NO: 2634785 - RNA, 19 nt, Homo sapiens
  misc_RNA (1)...(19): siRNA sense strand
cggaucaacaacaaagcaa

SEQ ID NO: 2634786 - RNA, 19 nt, Homo sapiens
  misc_RNA (1)...(19): siRNA sense strand
gcauggagugccacagcaa

SEQ ID NO: 2634787 - RNA, 19 nt, Homo sapiens
  misc_RNA (1)...(19): siRNA sense strand
cuaugagaguuuuggggaa

SEQ ID NO: 2634788 - RNA, 19 nt, Homo sapiens
  misc_RNA (1)...(19): siRNA sense strand
cagcagaacuccagcggac

SEQ ID NO: 2634789 - RNA, 19 nt, Homo sapiens
  misc_RNA (1)...(19): siRNA sense strand
gugaauaagaccaccuuga

SEQ ID NO: 2634790 - RNA, 19 nt, Homo sapiens
  misc_RNA (1)...(19): siRNA sense strand
gagcaggaggcguaguaga

SEQ ID NO: 2634791 - RNA, 19 nt, Homo sapiens
  misc_RNA (1)...(19): siRNA sense strand
ccaucaauccaucagcaaa

SEQ ID NO: 2634792 - RNA, 19 nt, Homo sapiens
  misc_RNA (1)...(19): siRNA sense strand
uggaugaugucaaggcuca

SEQ ID NO: 2634793 - RNA, 19 nt, Homo sapiens
  misc_RNA (1)...(19): siRNA sense strand
aaauagcagacaagaucua

SEQ ID NO: 2634794 - RNA, 19 nt, Homo sapiens
  misc_RNA (1)...(19): siRNA sense strand
augucaaggcucaagaaau

SEQ ID NO: 2634795 - RNA, 19 nt, Homo sapiens
  misc_RNA (1)...(19): siRNA sense strand
aggagcagacccugaguau

SEQ ID NO: 2634796 - RNA, 19 nt, Homo sapiens
  misc_RNA (1)...(19): siRNA sense strand
gcgacugcagcaaagauaa

SEQ ID NO: 2634797 - RNA, 19 nt, Homo sapiens
  misc_RNA (1)...(19): siRNA sense strand
aggaaguggcugccggaca

SEQ ID NO: 2634798 - RNA, 19 nt, Homo sapiens
  misc_RNA (1)...(19): siRNA sense strand
agacaucaguaaaggcaac

SEQ ID NO: 2634799 - RNA, 19 nt, Homo sapiens
  misc_RNA (1)...(19): siRNA sense strand
agaucaaacccuacggacu

SEQ ID NO: 2634800 - RNA, 19 nt, Homo sapiens
  misc_RNA (1)...(19): siRNA sense strand
caccuauccuggacggcua

SEQ ID NO: 2634801 - RNA, 19 nt, Homo sapiens
  misc_RNA (1)...(19): siRNA sense strand
agagaggagcugaugacuu

SEQ ID NO: 2634802 - RNA, 19 nt, Homo sapiens
  misc_RNA (1)...(19): siRNA sense strand
ggaagacgugugaggagca

SEQ ID NO: 2634803 - RNA, 19 nt, Homo sapiens
  misc_RNA (1)...(19): siRNA sense strand
ugguggacgaccuggagaa

SEQ ID NO: 2634804 - RNA, 19 nt, Homo sapiens
  misc_RNA (1)...(19): siRNA sense strand
aucaaugccuagaggagau

SEQ ID NO: 2634805 - RNA, 19 nt, Homo sapiens
  misc_RNA (1)...(19): siRNA sense strand
cggacaugacugugaugga

SEQ ID NO: 2634806 - RNA, 19 nt, Homo sapiens
  misc_RNA (1)...(19): siRNA sense strand
ggauggacgcucuugccaa

SEQ ID NO: 2634807 - RNA, 19 nt, Homo sapiens
  misc_RNA (1)...(19): siRNA sense strand
ggguggaaggagaaagcaa

SEQ ID NO: 2634808 - RNA, 19 nt, Homo sapiens
  misc_RNA (1)...(19): siRNA sense strand
ccaagaaggcugaggcgga

SEQ ID NO: 2634809 - RNA, 19 nt, Homo sapiens
  misc_RNA (1)...(19): siRNA sense strand
gaauugaaguguaaggcca

SEQ ID NO: 2634810 - RNA, 19 nt, Homo sapiens
  misc_RNA (1)...(19): siRNA sense strand
gcaaggaaucagagggaag

SEQ ID NO: 2634811 - RNA, 19 nt, Homo sapiens
  misc_RNA (1)...(19): siRNA sense strand
gcauuuuggggaagagaaa

SEQ ID NO: 2634812 - RNA, 19 nt, Homo sapiens
  misc_RNA (1)...(19): siRNA sense strand
agaagaugacaguggccaa

SEQ ID NO: 2634813 - RNA, 19 nt, Homo sapiens
  misc_RNA (1)...(19): siRNA sense strand
uggaaaaugaggugaaaga

SEQ ID NO: 2634814 - RNA, 19 nt, Homo sapiens
  misc_RNA (1)...(19): siRNA sense strand
gggcuuugaaggagaagau

SEQ ID NO: 2634815 - RNA, 19 nt, Homo sapiens
  misc_RNA (1)...(19): siRNA sense strand
cagcaaggaaucagaggga

SEQ ID NO: 2634816 - RNA, 19 nt, Homo sapiens
  misc_RNA (1)...(19): siRNA sense strand
gggaaacacacaucggaga

SEQ ID NO: 2634817 - RNA, 19 nt, Homo sapiens
  misc_RNA (1)...(19): siRNA sense strand
auggaauggauccgggaaa

SEQ ID NO: 2634818 - RNA, 19 nt, Homo sapiens
  misc_RNA (1)...(19): siRNA sense strand
augagauccucgaggugaa

SEQ ID NO: 2634819 - RNA, 19 nt, Homo sapiens
  misc_RNA (1)...(19): siRNA sense strand
gcuuugaaggagaagauga

SEQ ID NO: 2634820 - RNA, 19 nt, Homo sapiens
  misc_RNA (1)...(19): siRNA sense strand
cugcguggccucugggaau

SEQ ID NO: 2634821 - RNA, 19 nt, Homo sapiens
  misc_RNA (1)...(19): siRNA sense strand
guggagugguccugagcca

SEQ ID NO: 2634822 - RNA, 19 nt, Homo sapiens
  misc_RNA (1)...(19): siRNA sense strand
gcauugguggagaggaaaa

SEQ ID NO: 2634823 - RNA, 19 nt, Homo sapiens
  misc_RNA (1)...(19): siRNA sense strand
gaaagagggcagaggacac

SEQ ID NO: 2634824 - RNA, 19 nt, Homo sapiens
  misc_RNA (1)...(19): siRNA sense strand
cccaagacagggaguggaa

SEQ ID NO: 2634825 - RNA, 19 nt, Homo sapiens
  misc_RNA (1)...(19): siRNA sense strand
gugagggcuuugaaggaga

SEQ ID NO: 2634826 - RNA, 19 nt, Homo sapiens
  misc_RNA (1)...(19): siRNA sense strand
cugaugauguggaggugga

SEQ ID NO: 2634827 - RNA, 19 nt, Homo sapiens
  misc_RNA (1)...(19): siRNA sense strand
gaauccaaggugagggcuu

SEQ ID NO: 2634828 - RNA, 19 nt, Homo sapiens
  misc_RNA (1)...(19): siRNA sense strand
gcguggugacagaggcaga

SEQ ID NO: 2634829 - RNA, 19 nt, Homo sapiens
  misc_RNA (1)...(19): siRNA sense strand
gccacgagucccuggaaau

SEQ ID NO: 2634830 - RNA, 19 nt, Homo sapiens
  misc_RNA (1)...(19): siRNA sense strand
aauugaaguguaaggccaa

SEQ ID NO: 2634831 - RNA, 19 nt, Homo sapiens
  misc_RNA (1)...(19): siRNA sense strand
cuggagaccuggaggcucu

SEQ ID NO: 2634832 - RNA, 19 nt, Homo sapiens
  misc_RNA (1)...(19): siRNA sense strand
acucagagagcuugucaau

SEQ ID NO: 2634833 - RNA, 19 nt, Homo sapiens
  misc_RNA (1)...(19): siRNA sense strand
aagcaagcuccgucgguuu

SEQ ID NO: 2634834 - RNA, 19 nt, Homo sapiens
  misc_RNA (1)...(19): siRNA sense strand
ggccaaacagggagugagu

SEQ ID NO: 2634835 - RNA, 19 nt, Homo sapiens
  misc_RNA (1)...(19): siRNA sense strand
cagcagagauggaggaccc

SEQ ID NO: 2634836 - RNA, 19 nt, Homo sapiens
  misc_RNA (1)...(19): siRNA sense strand
ccucuggguggaaggagaa

SEQ ID NO: 2634837 - RNA, 19 nt, Homo sapiens
  misc_RNA (1)...(19): siRNA sense strand
gaacagcagagauggagga

SEQ ID NO: 2634838 - RNA, 19 nt, Homo sapiens
  misc_RNA (1)...(19): siRNA sense strand
uggccuugcccucaggaaa

SEQ ID NO: 2634839 - RNA, 19 nt, Homo sapiens
  misc_RNA (1)...(19): siRNA sense strand
augauguggagguggaaaa

SEQ ID NO: 2634840 - RNA, 19 nt, Homo sapiens
  misc_RNA (1)...(19): siRNA sense strand
cuggagaacagcagagaug

SEQ ID NO: 2634841 - RNA, 19 nt, Homo sapiens
  misc_RNA (1)...(19): siRNA sense strand
gguccuggucauuguaaca

SEQ ID NO: 2634842 - RNA, 19 nt, Homo sapiens
  misc_RNA (1)...(19): siRNA sense strand
ccuaggagacagagacaag

SEQ ID NO: 2634843 - RNA, 19 nt, Homo sapiens
  misc_RNA (1)...(19): siRNA sense strand
aggcagaucuggauagcac

SEQ ID NO: 2634844 - RNA, 19 nt, Homo sapiens
  misc_RNA (1)...(19): siRNA sense strand
gauaugagcugccuggaca

SEQ ID NO: 2634845 - RNA, 19 nt, Homo sapiens
  misc_RNA (1)...(19): siRNA sense strand
gugucaaggucaucgcaga

SEQ ID NO: 2634846 - RNA, 19 nt, Homo sapiens
  misc_RNA (1)...(19): siRNA sense strand
gcauguuggaaaugggcca

SEQ ID NO: 2634847 - RNA, 19 nt, Homo sapiens
  misc_RNA (1)...(19): siRNA sense strand
ccggagagcucuacggcua

SEQ ID NO: 2634848 - RNA, 19 nt, Homo sapiens
  misc_RNA (1)...(19): siRNA sense strand
cggagaugauccagcgcaa

SEQ ID NO: 2634849 - RNA, 19 nt, Homo sapiens
  misc_RNA (1)...(19): siRNA sense strand
aguggauacucgagccaaa

SEQ ID NO: 2634850 - RNA, 19 nt, Homo sapiens
  misc_RNA (1)...(19): siRNA sense strand
gcgcugagacagaggccau

SEQ ID NO: 2634851 - RNA, 19 nt, Homo sapiens
  misc_RNA (1)...(19): siRNA sense strand
acucacaccacaagaggaa

SEQ ID NO: 2634852 - RNA, 19 nt, Homo sapiens
  misc_RNA (1)...(19): siRNA sense strand
ccccuaagccugagcguaa

SEQ ID NO: 2634853 - RNA, 19 nt, Homo sapiens
  misc_RNA (1)...(19): siRNA sense strand
uagcaaggguggugggccu

SEQ ID NO: 2634854 - RNA, 19 nt, Homo sapiens
  misc_RNA (1)...(19): siRNA sense strand
aggcugagaaugacaaaca

SEQ ID NO: 2634855 - RNA, 19 nt, Homo sapiens
  misc_RNA (1)...(19): siRNA sense strand
acaucuaaguguagggccu

SEQ ID NO: 2634856 - RNA, 19 nt, Homo sapiens
  misc_RNA (1)...(19): siRNA sense strand
auggagacacccagaguau

SEQ ID NO: 2634857 - RNA, 19 nt, Homo sapiens
  misc_RNA (1)...(19): siRNA sense strand
gaggaaugagcgugaggca

SEQ ID NO: 2634858 - RNA, 19 nt, Homo sapiens
  misc_RNA (1)...(19): siRNA sense strand
cuaagaagccagagguggu

SEQ ID NO: 2634859 - RNA, 19 nt, Homo sapiens
  misc_RNA (1)...(19): siRNA sense strand
agacagaggccaugcugca

SEQ ID NO: 2634860 - RNA, 19 nt, Homo sapiens
  misc_RNA (1)...(19): siRNA sense strand
cugcaguggaugagcacca

SEQ ID NO: 2634861 - RNA, 19 nt, Homo sapiens
  misc_RNA (1)...(19): siRNA sense strand
uggugggcccagaggagaa

SEQ ID NO: 2634862 - RNA, 19 nt, Homo sapiens
  misc_RNA (1)...(19): siRNA sense strand
gaacaaggguggcugggac

SEQ ID NO: 2634863 - RNA, 19 nt, Homo sapiens
  misc_RNA (1)...(19): siRNA sense strand
ggucacgaguucugggaca

SEQ ID NO: 2634864 - RNA, 19 nt, Homo sapiens
  misc_RNA (1)...(19): siRNA sense strand
acgagaagcgcgugagcgu

SEQ ID NO: 2634865 - RNA, 19 nt, Homo sapiens
  misc_RNA (1)...(19): siRNA sense strand
cgucaguaagcgagagaaa

SEQ ID NO: 2634866 - RNA, 19 nt, Homo sapiens
  misc_RNA (1)...(19): siRNA sense strand
cagaaaggucggaagaaaa

SEQ ID NO: 2634867 - RNA, 19 nt, Homo sapiens
  misc_RNA (1)...(19): siRNA sense strand
aaacagaagcugagcggga

SEQ ID NO: 2634868 - RNA, 19 nt, Homo sapiens
  misc_RNA (1)...(19): siRNA sense strand
ccuauuaagaagcggaaga

SEQ ID NO: 2634869 - RNA, 19 nt, Homo sapiens
  misc_RNA (1)...(19): siRNA sense strand
gcucugaggaugaggagga

SEQ ID NO: 2634870 - RNA, 19 nt, Homo sapiens
  misc_RNA (1)...(19): siRNA sense strand
cugaggaugaggaggaaga

SEQ ID NO: 2634871 - RNA, 19 nt, Homo sapiens
  misc_RNA (1)...(19): siRNA sense strand
cugugaagggagugucuaa

SEQ ID NO: 2634872 - RNA, 19 nt, Homo sapiens
  misc_RNA (1)...(19): siRNA sense strand
gagagaaaggacggcgaaa

SEQ ID NO: 2634873 - RNA, 19 nt, Homo sapiens
  misc_RNA (1)...(19): siRNA sense strand
gaggaucucuucagggaca

SEQ ID NO: 2634874 - RNA, 19 nt, Homo sapiens
  misc_RNA (1)...(19): siRNA sense strand
agaaaucugugaagggagu

SEQ ID NO: 2634875 - RNA, 19 nt, Homo sapiens
  misc_RNA (1)...(19): siRNA sense strand
aggaagaugaagcagaaga

SEQ ID NO: 2634876 - RNA, 19 nt, Homo sapiens
  misc_RNA (1)...(19): siRNA sense strand
aggaggaagaugaagcaga

SEQ ID NO: 2634877 - RNA, 19 nt, Homo sapiens
  misc_RNA (1)...(19): siRNA sense strand
uuaacuaugaggagagcau

SEQ ID NO: 2634878 - RNA, 19 nt, Homo sapiens
  misc_RNA (1)...(19): siRNA sense strand
cgagagaaaggacggcgaa

SEQ ID NO: 2634879 - RNA, 19 nt, Homo sapiens
  misc_RNA (1)...(19): siRNA sense strand
aggauuaacuaugaggaga

SEQ ID NO: 2634880 - RNA, 19 nt, Homo sapiens
  misc_RNA (1)...(19): siRNA sense strand
aguugagcucugaggauga

SEQ ID NO: 2634881 - RNA, 19 nt, Homo sapiens
  misc_RNA (1)...(19): siRNA sense strand
gcgagagaaaggacggcga

SEQ ID NO: 2634882 - RNA, 19 nt, Homo sapiens
  misc_RNA (1)...(19): siRNA sense strand
agagaaaggacggcgaaaa

SEQ ID NO: 2634883 - RNA, 19 nt, Homo sapiens
  misc_RNA (1)...(19): siRNA sense strand
ggauuaacuaugaggagag

SEQ ID NO: 2634884 - RNA, 19 nt, Homo sapiens
  misc_RNA (1)...(19): siRNA sense strand
cugcugaagaccuguguga

SEQ ID NO: 2634885 - RNA, 19 nt, Homo sapiens
  misc_RNA (1)...(19): siRNA sense strand
gaagaaagcuccagaggga

SEQ ID NO: 2634886 - RNA, 19 nt, Homo sapiens
  misc_RNA (1)...(19): siRNA sense strand
aagaagaaguagaggagga

SEQ ID NO: 2634887 - RNA, 19 nt, Homo sapiens
  misc_RNA (1)...(19): siRNA sense strand
uugaagaggaggaggaaga

SEQ ID NO: 2634888 - RNA, 19 nt, Homo sapiens
  misc_RNA (1)...(19): siRNA sense strand
caacaaaggcaggaggcaa

SEQ ID NO: 2634889 - RNA, 19 nt, Homo sapiens
  misc_RNA (1)...(19): siRNA sense strand
aacaaaggcaggaggcaaa

SEQ ID NO: 2634890 - RNA, 19 nt, Homo sapiens
  misc_RNA (1)...(19): siRNA sense strand
aagaaguagaggaggaaca

SEQ ID NO: 2634891 - RNA, 19 nt, Homo sapiens
  misc_RNA (1)...(19): siRNA sense strand
aggaggaagagguggaaga

SEQ ID NO: 2634892 - RNA, 19 nt, Homo sapiens
  misc_RNA (1)...(19): siRNA sense strand
cauuaagcccucuggacaa

SEQ ID NO: 2634893 - RNA, 19 nt, Homo sapiens
  misc_RNA (1)...(19): siRNA sense strand
agaaagcuccagagggaau

SEQ ID NO: 2634894 - RNA, 19 nt, Homo sapiens
  misc_RNA (1)...(19): siRNA sense strand
uggaagaagaagaaguaga

SEQ ID NO: 2634895 - RNA, 19 nt, Homo sapiens
  misc_RNA (1)...(19): siRNA sense strand
caaagaggguaaugaggca

SEQ ID NO: 2634896 - RNA, 19 nt, Homo sapiens
  misc_RNA (1)...(19): siRNA sense strand
acggagagguggagcgacu

SEQ ID NO: 2634897 - RNA, 19 nt, Homo sapiens
  misc_RNA (1)...(19): siRNA sense strand
aggaggaggaagaggcaga

SEQ ID NO: 2634898 - RNA, 19 nt, Homo sapiens
  misc_RNA (1)...(19): siRNA sense strand
ccauagaagaggaagaaag

SEQ ID NO: 2634899 - RNA, 19 nt, Homo sapiens
  misc_RNA (1)...(19): siRNA sense strand
ucacagaguuccagaccca

SEQ ID NO: 2634900 - RNA, 19 nt, Homo sapiens
  misc_RNA (1)...(19): siRNA sense strand
ccaaagacggagaggugga

SEQ ID NO: 2634901 - RNA, 19 nt, Homo sapiens
  misc_RNA (1)...(19): siRNA sense strand
gggaagaggaggaagaggu

SEQ ID NO: 2634902 - RNA, 19 nt, Homo sapiens
  misc_RNA (1)...(19): siRNA sense strand
agugugaggugcugggaga

SEQ ID NO: 2634903 - RNA, 19 nt, Homo sapiens
  misc_RNA (1)...(19): siRNA sense strand
aguugaggucccagacaaa

SEQ ID NO: 2634904 - RNA, 19 nt, Homo sapiens
  misc_RNA (1)...(19): siRNA sense strand
ccaccaugcaggaguguga

SEQ ID NO: 2634905 - RNA, 19 nt, Homo sapiens
  misc_RNA (1)...(19): siRNA sense strand
ccucugaccuaucggaaaa

SEQ ID NO: 2634906 - RNA, 19 nt, Homo sapiens
  misc_RNA (1)...(19): siRNA sense strand
ccaccauggcugaggagga

SEQ ID NO: 2634907 - RNA, 19 nt, Homo sapiens
  misc_RNA (1)...(19): siRNA sense strand
cugcaggagaucugaguga

SEQ ID NO: 2634908 - RNA, 19 nt, Homo sapiens
  misc_RNA (1)...(19): siRNA sense strand
ggcccauagaagaggaaga

SEQ ID NO: 2634909 - RNA, 19 nt, Homo sapiens
  misc_RNA (1)...(19): siRNA sense strand
ccauggccaaagaggguaa

SEQ ID NO: 2634910 - RNA, 19 nt, Homo sapiens
  misc_RNA (1)...(19): siRNA sense strand
ccaacuuugcccuggacaa

SEQ ID NO: 2634911 - RNA, 19 nt, Homo sapiens
  misc_RNA (1)...(19): siRNA sense strand
aggaagaggcagagagagg

SEQ ID NO: 2634912 - RNA, 19 nt, Homo sapiens
  misc_RNA (1)...(19): siRNA sense strand
gcccaaggaaggcgagaca

SEQ ID NO: 2634913 - RNA, 19 nt, Homo sapiens
  misc_RNA (1)...(19): siRNA sense strand
aagaagaagaaguagagga

SEQ ID NO: 2634914 - RNA, 19 nt, Homo sapiens
  misc_RNA (1)...(19): siRNA sense strand
guacaaugaagggaagcaa

SEQ ID NO: 2634915 - RNA, 19 nt, Homo sapiens
  misc_RNA (1)...(19): siRNA sense strand
ucaagacacacgaggaaca

SEQ ID NO: 2634916 - RNA, 19 nt, Homo sapiens
  misc_RNA (1)...(19): siRNA sense strand
gccuaguccagcagugaaa

SEQ ID NO: 2634917 - RNA, 19 nt, Homo sapiens
  misc_RNA (1)...(19): siRNA sense strand
agaagaaguagaggaggaa

SEQ ID NO: 2634918 - RNA, 19 nt, Homo sapiens
  misc_RNA (1)...(19): siRNA sense strand
ucgcaagucuguugggucu

SEQ ID NO: 2634919 - RNA, 19 nt, Homo sapiens
  misc_RNA (1)...(19): siRNA sense strand
gcccagcugaagagugaaa

SEQ ID NO: 2634920 - RNA, 19 nt, Homo sapiens
  misc_RNA (1)...(19): siRNA sense strand
gcagaaggcccuaaccuga

SEQ ID NO: 2634921 - RNA, 19 nt, Homo sapiens
  misc_RNA (1)...(19): siRNA sense strand
cuguggggccugugggaaa

SEQ ID NO: 2634922 - RNA, 19 nt, Homo sapiens
  misc_RNA (1)...(19): siRNA sense strand
ccagaaugcucgugccaag

SEQ ID NO: 2634923 - RNA, 19 nt, Homo sapiens
  misc_RNA (1)...(19): siRNA sense strand
gaggggaagaggaggaaga

SEQ ID NO: 2634924 - RNA, 19 nt, Homo sapiens
  misc_RNA (1)...(19): siRNA sense strand
agagguggaagaagaagaa

SEQ ID NO: 2634925 - RNA, 19 nt, Homo sapiens
  misc_RNA (1)...(19): siRNA sense strand
ggaacagggccuugaaccu

SEQ ID NO: 2634926 - RNA, 19 nt, Homo sapiens
  misc_RNA (1)...(19): siRNA sense strand
gggaagcuggugagguuga

SEQ ID NO: 2634927 - RNA, 19 nt, Homo sapiens
  misc_RNA (1)...(19): siRNA sense strand
aggugggcacugagaagaa

SEQ ID NO: 2634928 - RNA, 19 nt, Homo sapiens
  misc_RNA (1)...(19): siRNA sense strand
ccaaggaaaagaaggccaa

SEQ ID NO: 2634929 - RNA, 19 nt, Homo sapiens
  misc_RNA (1)...(19): siRNA sense strand
cugaagagugaaagcaagu

SEQ ID NO: 2634930 - RNA, 19 nt, Homo sapiens
  misc_RNA (1)...(19): siRNA sense strand
ugccaaagaggaagcaaga

SEQ ID NO: 2634931 - RNA, 19 nt, Homo sapiens
  misc_RNA (1)...(19): siRNA sense strand
agacaaacccucaggaagc

SEQ ID NO: 2634932 - RNA, 19 nt, Homo sapiens
  misc_RNA (1)...(19): siRNA sense strand
acauuaagcccucuggaca

SEQ ID NO: 2634933 - RNA, 19 nt, Homo sapiens
  misc_RNA (1)...(19): siRNA sense strand
ccgccagaaagcacgcaaa

SEQ ID NO: 2634934 - RNA, 19 nt, Homo sapiens
  misc_RNA (1)...(19): siRNA sense strand
aagaggaggaagaggugga

SEQ ID NO: 2634935 - RNA, 19 nt, Homo sapiens
  misc_RNA (1)...(19): siRNA sense strand
gguacaugcaggauuccaa

SEQ ID NO: 2634936 - RNA, 19 nt, Homo sapiens
  misc_RNA (1)...(19): siRNA sense strand
ucuuauuaggcaagguaga

SEQ ID NO: 2634937 - RNA, 19 nt, Homo sapiens
  misc_RNA (1)...(19): siRNA sense strand
cucaagaaccucaaagcau

SEQ ID NO: 2634938 - RNA, 19 nt, Homo sapiens
  misc_RNA (1)...(19): siRNA sense strand
agaagaagaaguagaggag

SEQ ID NO: 2634939 - RNA, 19 nt, Homo sapiens
  misc_RNA (1)...(19): siRNA sense strand
agcugaagagugaaagcaa

SEQ ID NO: 2634940 - RNA, 19 nt, Homo sapiens
  misc_RNA (1)...(19): siRNA sense strand
gcagagaccaggcagcaga

SEQ ID NO: 2634941 - RNA, 19 nt, Homo sapiens
  misc_RNA (1)...(19): siRNA sense strand
guguggugguggugugguu

SEQ ID NO: 2634942 - RNA, 19 nt, Homo sapiens
  misc_RNA (1)...(19): siRNA sense strand
caagguagaugauggcacu

SEQ ID NO: 2634943 - RNA, 19 nt, Homo sapiens
  misc_RNA (1)...(19): siRNA sense strand
ccuaaaugcagaaucgcaa

SEQ ID NO: 2634944 - RNA, 19 nt, Homo sapiens
  misc_RNA (1)...(19): siRNA sense strand
augcagaaucgcaagugaa

SEQ ID NO: 2634945 - RNA, 19 nt, Homo sapiens
  misc_RNA (1)...(19): siRNA sense strand
aauuugaggacuaccuaaa

SEQ ID NO: 2634946 - RNA, 19 nt, Homo sapiens
  misc_RNA (1)...(19): siRNA sense strand
aggacuaccuaaaugcaga

SEQ ID NO: 2634947 - RNA, 19 nt, Homo sapiens
  misc_RNA (1)...(19): siRNA sense strand
aggaaauagacaagagaaa

SEQ ID NO: 2634948 - RNA, 19 nt, Homo sapiens
  misc_RNA (1)...(19): siRNA sense strand
agaaagauguagagggaga

SEQ ID NO: 2634949 - RNA, 19 nt, Homo sapiens
  misc_RNA (1)...(19): siRNA sense strand
agaagaagaaggagauaaa

SEQ ID NO: 2634950 - RNA, 19 nt, Homo sapiens
  misc_RNA (1)...(19): siRNA sense strand
cguaaugagugaugguaau

SEQ ID NO: 2634951 - RNA, 19 nt, Homo sapiens
  misc_RNA (1)...(19): siRNA sense strand
ugacauuagcagaggauuu

SEQ ID NO: 2634952 - RNA, 19 nt, Homo sapiens
  misc_RNA (1)...(19): siRNA sense strand
gggagaaacucaaaggcuu

SEQ ID NO: 2634953 - RNA, 19 nt, Homo sapiens
  misc_RNA (1)...(19): siRNA sense strand
cauaaaggucuuagaaaca

SEQ ID NO: 2634954 - RNA, 19 nt, Homo sapiens
  misc_RNA (1)...(19): siRNA sense strand
ugagaaagauguagaggga

SEQ ID NO: 2634955 - RNA, 19 nt, Homo sapiens
  misc_RNA (1)...(19): siRNA sense strand
ccguaaugagugaugguaa

SEQ ID NO: 2634956 - RNA, 19 nt, Homo sapiens
  misc_RNA (1)...(19): siRNA sense strand
ggauacaaugcaagaagaa

SEQ ID NO: 2634957 - RNA, 19 nt, Homo sapiens
  misc_RNA (1)...(19): siRNA sense strand
uggaggaaguucuggaauu

SEQ ID NO: 2634958 - RNA, 19 nt, Homo sapiens
  misc_RNA (1)...(19): siRNA sense strand
cgucagugguuuauagaca

SEQ ID NO: 2634959 - RNA, 19 nt, Homo sapiens
  misc_RNA (1)...(19): siRNA sense strand
uccuaaagaucuagaaaca

SEQ ID NO: 2634960 - RNA, 19 nt, Homo sapiens
  misc_RNA (1)...(19): siRNA sense strand
auguuuagguccagaagaa

SEQ ID NO: 2634961 - RNA, 19 nt, Homo sapiens
  misc_RNA (1)...(19): siRNA sense strand
cagaguuuggagagggaaa

SEQ ID NO: 2634962 - RNA, 19 nt, Homo sapiens
  misc_RNA (1)...(19): siRNA sense strand
gcugcagagucaugggcua

SEQ ID NO: 2634963 - RNA, 19 nt, Homo sapiens
  misc_RNA (1)...(19): siRNA sense strand
aggaauaaguucuucucaa

SEQ ID NO: 2634964 - RNA, 19 nt, Homo sapiens
  misc_RNA (1)...(19): siRNA sense strand
cugcugagcuugagaucuu

SEQ ID NO: 2634965 - RNA, 19 nt, Homo sapiens
  misc_RNA (1)...(19): siRNA sense strand
agacaaccuuugaagacua

SEQ ID NO: 2634966 - RNA, 19 nt, Homo sapiens
  misc_RNA (1)...(19): siRNA sense strand
caagaacaugugaaggaaa

SEQ ID NO: 2634967 - RNA, 19 nt, Homo sapiens
  misc_RNA (1)...(19): siRNA sense strand
aggaaagugucaaagucaa

SEQ ID NO: 2634968 - RNA, 19 nt, Homo sapiens
  misc_RNA (1)...(19): siRNA sense strand
aagaacaugugaaggaaaa

SEQ ID NO: 2634969 - RNA, 19 nt, Homo sapiens
  misc_RNA (1)...(19): siRNA sense strand
gguuacuguugcugaagaa

SEQ ID NO: 2634970 - RNA, 19 nt, Homo sapiens
  misc_RNA (1)...(19): siRNA sense strand
uugcggaagucuugaauau

SEQ ID NO: 2634971 - RNA, 19 nt, Homo sapiens
  misc_RNA (1)...(19): siRNA sense strand
acaaagagaagcagcugaa

SEQ ID NO: 2634972 - RNA, 19 nt, Homo sapiens
  misc_RNA (1)...(19): siRNA sense strand
caucuauggcaguggaaaa

SEQ ID NO: 2634973 - RNA, 19 nt, Homo sapiens
  misc_RNA (1)...(19): siRNA sense strand
auacaaugcaagaagaaga

SEQ ID NO: 2634974 - RNA, 19 nt, Homo sapiens
  misc_RNA (1)...(19): siRNA sense strand
ugguacaaaucaagaccua

SEQ ID NO: 2634975 - RNA, 19 nt, Homo sapiens
  misc_RNA (1)...(19): siRNA sense strand
ggcauaaaggucuuagaaa

SEQ ID NO: 2634976 - RNA, 19 nt, Homo sapiens
  misc_RNA (1)...(19): siRNA sense strand
ugaaugugucuguaggaua

SEQ ID NO: 2634977 - RNA, 19 nt, Homo sapiens
  misc_RNA (1)...(19): siRNA sense strand
ggauccaguugaugaaaca

SEQ ID NO: 2634978 - RNA, 19 nt, Homo sapiens
  misc_RNA (1)...(19): siRNA sense strand
cacguuagguccagagcua

SEQ ID NO: 2634979 - RNA, 19 nt, Homo sapiens
  misc_RNA (1)...(19): siRNA sense strand
aggagacagaugagagauu

SEQ ID NO: 2634980 - RNA, 19 nt, Homo sapiens
  misc_RNA (1)...(19): siRNA sense strand
agaaaagagccgaggagau

SEQ ID NO: 2634981 - RNA, 19 nt, Homo sapiens
  misc_RNA (1)...(19): siRNA sense strand
cuggauagcaaguggaguu

SEQ ID NO: 2634982 - RNA, 19 nt, Homo sapiens
  misc_RNA (1)...(19): siRNA sense strand
uagaagacgguaucagaaa

SEQ ID NO: 2634983 - RNA, 19 nt, Homo sapiens
  misc_RNA (1)...(19): siRNA sense strand
aagaagaagaaggagauaa

SEQ ID NO: 2634984 - RNA, 19 nt, Homo sapiens
  misc_RNA (1)...(19): siRNA sense strand
ggaacaguaucaagccaau

SEQ ID NO: 2634985 - RNA, 19 nt, Homo sapiens
  misc_RNA (1)...(19): siRNA sense strand
acagcagagacuagugaaa

SEQ ID NO: 2634986 - RNA, 19 nt, Homo sapiens
  misc_RNA (1)...(19): siRNA sense strand
ggaaauagacaagagaaaa

SEQ ID NO: 2634987 - RNA, 19 nt, Homo sapiens
  misc_RNA (1)...(19): siRNA sense strand
auaaagggcaaucaggaaa

SEQ ID NO: 2634988 - RNA, 19 nt, Homo sapiens
  misc_RNA (1)...(19): siRNA sense strand
auuagaagauggaaguaga

SEQ ID NO: 2634989 - RNA, 19 nt, Homo sapiens
  misc_RNA (1)...(19): siRNA sense strand
cuacaaaaucucaugcaaa

SEQ ID NO: 2634990 - RNA, 19 nt, Homo sapiens
  misc_RNA (1)...(19): siRNA sense strand
agauccugcuugacagaua

SEQ ID NO: 2634991 - RNA, 19 nt, Homo sapiens
  misc_RNA (1)...(19): siRNA sense strand
aagacgaagugcagaaguu

SEQ ID NO: 2634992 - RNA, 19 nt, Homo sapiens
  misc_RNA (1)...(19): siRNA sense strand
aggcaagauuauuaugaca

SEQ ID NO: 2634993 - RNA, 19 nt, Homo sapiens
  misc_RNA (1)...(19): siRNA sense strand
gagacagaugagagauuau

SEQ ID NO: 2634994 - RNA, 19 nt, Homo sapiens
  misc_RNA (1)...(19): siRNA sense strand
uaaaauacaggcuggaaaa

SEQ ID NO: 2634995 - RNA, 19 nt, Homo sapiens
  misc_RNA (1)...(19): siRNA sense strand
gaaaagaagcucuaaguca

SEQ ID NO: 2634996 - RNA, 19 nt, Homo sapiens
  misc_RNA (1)...(19): siRNA sense strand
gugaucaggacuuggguau

SEQ ID NO: 2634997 - RNA, 19 nt, Homo sapiens
  misc_RNA (1)...(19): siRNA sense strand
uguucuacaucgaguaauu

SEQ ID NO: 2634998 - RNA, 19 nt, Homo sapiens
  misc_RNA (1)...(19): siRNA sense strand
caaucaggaaagugucaaa

SEQ ID NO: 2634999 - RNA, 19 nt, Homo sapiens
  misc_RNA (1)...(19): siRNA sense strand
ugcaagaagaagaaggaga

SEQ ID NO: 2635000 - RNA, 19 nt, Homo sapiens
  misc_RNA (1)...(19): siRNA sense strand
cuaaaauacaggcuggaaa

SEQ ID NO: 2635001 - RNA, 19 nt, Homo sapiens
  misc_RNA (1)...(19): siRNA sense strand
agaaauggaucauguucau

SEQ ID NO: 2635002 - RNA, 19 nt, Homo sapiens
  misc_RNA (1)...(19): siRNA sense strand
guaccuuggcccagaucaa

SEQ ID NO: 2635003 - RNA, 19 nt, Homo sapiens
  misc_RNA (1)...(19): siRNA sense strand
acucaagcauccaauuaaa

SEQ ID NO: 2635004 - RNA, 19 nt, Homo sapiens
  misc_RNA (1)...(19): siRNA sense strand
uuucaaaguuacuaggcau

SEQ ID NO: 2635005 - RNA, 19 nt, Homo sapiens
  misc_RNA (1)...(19): siRNA sense strand
caucuggaagcuaaagaaa

SEQ ID NO: 2635006 - RNA, 19 nt, Homo sapiens
  misc_RNA (1)...(19): siRNA sense strand
agugaugguaauuuggaaa

SEQ ID NO: 2635007 - RNA, 19 nt, Homo sapiens
  misc_RNA (1)...(19): siRNA sense strand
aaaaggagcucgucagcaa

SEQ ID NO: 2635008 - RNA, 19 nt, Homo sapiens
  misc_RNA (1)...(19): siRNA sense strand
caucagagaaguuggccuu

SEQ ID NO: 2635009 - RNA, 19 nt, Homo sapiens
  misc_RNA (1)...(19): siRNA sense strand
ccuuaaugaucuccgaaga

SEQ ID NO: 2635010 - RNA, 19 nt, Homo sapiens
  misc_RNA (1)...(19): siRNA sense strand
agaucuuagcugugcuuaa

SEQ ID NO: 2635011 - RNA, 19 nt, Homo sapiens
  misc_RNA (1)...(19): siRNA sense strand
ccgaagugccuuaacaaca

SEQ ID NO: 2635012 - RNA, 19 nt, Homo sapiens
  misc_RNA (1)...(19): siRNA sense strand
ccaauuaugaugugcggau

SEQ ID NO: 2635013 - RNA, 19 nt, Homo sapiens
  misc_RNA (1)...(19): siRNA sense strand
guuuagguccagaagaaau

SEQ ID NO: 2635014 - RNA, 19 nt, Homo sapiens
  misc_RNA (1)...(19): siRNA sense strand
aggaggaaaccaagacaaa

SEQ ID NO: 2635015 - RNA, 19 nt, Homo sapiens
  misc_RNA (1)...(19): siRNA sense strand
auuauuaggcuacgagaaa

SEQ ID NO: 2635016 - RNA, 19 nt, Homo sapiens
  misc_RNA (1)...(19): siRNA sense strand
cuugaggacaucaggaaua

SEQ ID NO: 2635017 - RNA, 19 nt, Homo sapiens
  misc_RNA (1)...(19): siRNA sense strand
cagagaaaacagaagauua

SEQ ID NO: 2635018 - RNA, 19 nt, Homo sapiens
  misc_RNA (1)...(19): siRNA sense strand
guguaaaggaaguagaacu

SEQ ID NO: 2635019 - RNA, 19 nt, Homo sapiens
  misc_RNA (1)...(19): siRNA sense strand
uuguaaugcugguugacua

SEQ ID NO: 2635020 - RNA, 19 nt, Homo sapiens
  misc_RNA (1)...(19): siRNA sense strand
gguuuauauaagaggacuu

SEQ ID NO: 2635021 - RNA, 19 nt, Homo sapiens
  misc_RNA (1)...(19): siRNA sense strand
uggacaaggaggaaaccaa

SEQ ID NO: 2635022 - RNA, 19 nt, Homo sapiens
  misc_RNA (1)...(19): siRNA sense strand
cagcugaaauagcagaaaa

SEQ ID NO: 2635023 - RNA, 19 nt, Homo sapiens
  misc_RNA (1)...(19): siRNA sense strand
agaaaagcuugguuggcaa

SEQ ID NO: 2635024 - RNA, 19 nt, Homo sapiens
  misc_RNA (1)...(19): siRNA sense strand
aguugguaguguaaaggaa

SEQ ID NO: 2635025 - RNA, 19 nt, Homo sapiens
  misc_RNA (1)...(19): siRNA sense strand
ugugaaaccauuagagacu

SEQ ID NO: 2635026 - RNA, 19 nt, Homo sapiens
  misc_RNA (1)...(19): siRNA sense strand
uuggaauggcuaucagaaa

SEQ ID NO: 2635027 - RNA, 19 nt, Homo sapiens
  misc_RNA (1)...(19): siRNA sense strand
ugauagaacagaaccaaaa

SEQ ID NO: 2635028 - RNA, 19 nt, Homo sapiens
  misc_RNA (1)...(19): siRNA sense strand
acagagaagagcaggucau

SEQ ID NO: 2635029 - RNA, 19 nt, Homo sapiens
  misc_RNA (1)...(19): siRNA sense strand
cugauuuccgaaugaauaa

SEQ ID NO: 2635030 - RNA, 19 nt, Homo sapiens
  misc_RNA (1)...(19): siRNA sense strand
cugccuaaauauagacguu

SEQ ID NO: 2635031 - RNA, 19 nt, Homo sapiens
  misc_RNA (1)...(19): siRNA sense strand
ccaaauguuaggaaagcca

SEQ ID NO: 2635032 - RNA, 19 nt, Homo sapiens
  misc_RNA (1)...(19): siRNA sense strand
cuuuggaagaugauggaga

SEQ ID NO: 2635033 - RNA, 19 nt, Homo sapiens
  misc_RNA (1)...(19): siRNA sense strand
aaggagaaagggaagucaa

SEQ ID NO: 2635034 - RNA, 19 nt, Homo sapiens
  misc_RNA (1)...(19): siRNA sense strand
gagauggacaaggaggaaa

SEQ ID NO: 2635035 - RNA, 19 nt, Homo sapiens
  misc_RNA (1)...(19): siRNA sense strand
cuacccaggcauugaaaca

SEQ ID NO: 2635036 - RNA, 19 nt, Homo sapiens
  misc_RNA (1)...(19): siRNA sense strand
aagggaagucaaggagaaa

SEQ ID NO: 2635037 - RNA, 19 nt, Homo sapiens
  misc_RNA (1)...(19): siRNA sense strand
gaaauagcagaaaaggaaa

SEQ ID NO: 2635038 - RNA, 19 nt, Homo sapiens
  misc_RNA (1)...(19): siRNA sense strand
gaaaaggaaacauuggaau

SEQ ID NO: 2635039 - RNA, 19 nt, Homo sapiens
  misc_RNA (1)...(19): siRNA sense strand
cguuuauacccauugauuu

SEQ ID NO: 2635040 - RNA, 19 nt, Homo sapiens
  misc_RNA (1)...(19): siRNA sense strand
uuguccaaauguuaggaaa

SEQ ID NO: 2635041 - RNA, 19 nt, Homo sapiens
  misc_RNA (1)...(19): siRNA sense strand
augauagaacagaaccaaa

SEQ ID NO: 2635042 - RNA, 19 nt, Homo sapiens
  misc_RNA (1)...(19): siRNA sense strand
ccgcagcacaguuugaaau

SEQ ID NO: 2635043 - RNA, 19 nt, Homo sapiens
  misc_RNA (1)...(19): siRNA sense strand
cuaucagaaagaagacauu

SEQ ID NO: 2635044 - RNA, 19 nt, Homo sapiens
  misc_RNA (1)...(19): siRNA sense strand
gugaagagcaguuacagca

SEQ ID NO: 2635045 - RNA, 19 nt, Homo sapiens
  misc_RNA (1)...(19): siRNA sense strand
agaagauuaccuuagagaa

SEQ ID NO: 2635046 - RNA, 19 nt, Homo sapiens
  misc_RNA (1)...(19): siRNA sense strand
gaaagggaagucaaggaga

SEQ ID NO: 2635047 - RNA, 19 nt, Homo sapiens
  misc_RNA (1)...(19): siRNA sense strand
gcuaucagaaagaagacau

SEQ ID NO: 2635048 - RNA, 19 nt, Homo sapiens
  misc_RNA (1)...(19): siRNA sense strand
acuacauauuucaggaacu

SEQ ID NO: 2635049 - RNA, 19 nt, Homo sapiens
  misc_RNA (1)...(19): siRNA sense strand
gggaaaggcuggagcgaga

SEQ ID NO: 2635050 - RNA, 19 nt, Homo sapiens
  misc_RNA (1)...(19): siRNA sense strand
gggaaaggcuggagaggga

SEQ ID NO: 2635051 - RNA, 19 nt, Homo sapiens
  misc_RNA (1)...(19): siRNA sense strand
ggaaauucaaagaagacaa

SEQ ID NO: 2635052 - RNA, 19 nt, Homo sapiens
  misc_RNA (1)...(19): siRNA sense strand
agauacaggccguggaaau

SEQ ID NO: 2635053 - RNA, 19 nt, Homo sapiens
  misc_RNA (1)...(19): siRNA sense strand
guguuaaauucacaggaaa

SEQ ID NO: 2635054 - RNA, 19 nt, Homo sapiens
  misc_RNA (1)...(19): siRNA sense strand
ccaacauugccuagacaaa

SEQ ID NO: 2635055 - RNA, 19 nt, Homo sapiens
  misc_RNA (1)...(19): siRNA sense strand
gggagaggcaagaaagaca

SEQ ID NO: 2635056 - RNA, 19 nt, Homo sapiens
  misc_RNA (1)...(19): siRNA sense strand
gcaggaagauucaggacca

SEQ ID NO: 2635057 - RNA, 19 nt, Homo sapiens
  misc_RNA (1)...(19): siRNA sense strand
agaaagaauggaaagagaa

SEQ ID NO: 2635058 - RNA, 19 nt, Homo sapiens
  misc_RNA (1)...(19): siRNA sense strand
gggaucaacaauagaaaca

SEQ ID NO: 2635059 - RNA, 19 nt, Homo sapiens
  misc_RNA (1)...(19): siRNA sense strand
cgugauaaacugugccauu

SEQ ID NO: 2635060 - RNA, 19 nt, Homo sapiens
  misc_RNA (1)...(19): siRNA sense strand
ggcaagaaagggagcgaca

SEQ ID NO: 2635061 - RNA, 19 nt, Homo sapiens
  misc_RNA (1)...(19): siRNA sense strand
gggaacagcuggaauggga

SEQ ID NO: 2635062 - RNA, 19 nt, Homo sapiens
  misc_RNA (1)...(19): siRNA sense strand
cagcaaagaggaugccaau

SEQ ID NO: 2635063 - RNA, 19 nt, Homo sapiens
  misc_RNA (1)...(19): siRNA sense strand
gaacaagaacagcuggaga

SEQ ID NO: 2635064 - RNA, 19 nt, Homo sapiens
  misc_RNA (1)...(19): siRNA sense strand
gaggagaagaauugcugaa

SEQ ID NO: 2635065 - RNA, 19 nt, Homo sapiens
  misc_RNA (1)...(19): siRNA sense strand
aagaaagacaagaacgaga

SEQ ID NO: 2635066 - RNA, 19 nt, Homo sapiens
  misc_RNA (1)...(19): siRNA sense strand
gagagguuagaaagggaaa

SEQ ID NO: 2635067 - RNA, 19 nt, Homo sapiens
  misc_RNA (1)...(19): siRNA sense strand
gagagagguuagaaaggga

SEQ ID NO: 2635068 - RNA, 19 nt, Homo sapiens
  misc_RNA (1)...(19): siRNA sense strand
gcagcaaagaggaugccaa

SEQ ID NO: 2635069 - RNA, 19 nt, Homo sapiens
  misc_RNA (1)...(19): siRNA sense strand
gcgagaaagaauggaaaga

SEQ ID NO: 2635070 - RNA, 19 nt, Homo sapiens
  misc_RNA (1)...(19): siRNA sense strand
gaaagguuggagagagaga

SEQ ID NO: 2635071 - RNA, 19 nt, Homo sapiens
  misc_RNA (1)...(19): siRNA sense strand
gguuggagagagagagguu

SEQ ID NO: 2635072 - RNA, 19 nt, Homo sapiens
  misc_RNA (1)...(19): siRNA sense strand
gaaagagaaagguuggaga

SEQ ID NO: 2635073 - RNA, 19 nt, Homo sapiens
  misc_RNA (1)...(19): siRNA sense strand
gaggcaagaaagacaagaa

SEQ ID NO: 2635074 - RNA, 19 nt, Homo sapiens
  misc_RNA (1)...(19): siRNA sense strand
gguuuaugaugaugccaau

SEQ ID NO: 2635075 - RNA, 19 nt, Homo sapiens
  misc_RNA (1)...(19): siRNA sense strand
gugguuuaauggaagaaau

SEQ ID NO: 2635076 - RNA, 19 nt, Homo sapiens
  misc_RNA (1)...(19): siRNA sense strand
caagaacagcaacggcaaa

SEQ ID NO: 2635077 - RNA, 19 nt, Homo sapiens
  misc_RNA (1)...(19): siRNA sense strand
gggagaggcaagaaaggga

SEQ ID NO: 2635078 - RNA, 19 nt, Homo sapiens
  misc_RNA (1)...(19): siRNA sense strand
ugaaaagggaucaacaaua

SEQ ID NO: 2635079 - RNA, 19 nt, Homo sapiens
  misc_RNA (1)...(19): siRNA sense strand
ugggaaagaacaaauacaa

SEQ ID NO: 2635080 - RNA, 19 nt, Homo sapiens
  misc_RNA (1)...(19): siRNA sense strand
caacaauagaaacagaaca

SEQ ID NO: 2635081 - RNA, 19 nt, Homo sapiens
  misc_RNA (1)...(19): siRNA sense strand
ggagcgagaaagaauggaa

SEQ ID NO: 2635082 - RNA, 19 nt, Homo sapiens
  misc_RNA (1)...(19): siRNA sense strand
ggccaggaggagaagaauu

SEQ ID NO: 2635083 - RNA, 19 nt, Homo sapiens
  misc_RNA (1)...(19): siRNA sense strand
aaaccuugggaaagaacaa

SEQ ID NO: 2635084 - RNA, 19 nt, Homo sapiens
  misc_RNA (1)...(19): siRNA sense strand
ggcuggagcgagaaagaau

SEQ ID NO: 2635085 - RNA, 19 nt, Homo sapiens
  misc_RNA (1)...(19): siRNA sense strand
aagaaaaccuugggaaaga

SEQ ID NO: 2635086 - RNA, 19 nt, Homo sapiens
  misc_RNA (1)...(19): siRNA sense strand
cugugaugguuuaugauga

SEQ ID NO: 2635087 - RNA, 19 nt, Homo sapiens
  misc_RNA (1)...(19): siRNA sense strand
agagagacaagaacgggaa

SEQ ID NO: 2635088 - RNA, 19 nt, Homo sapiens
  misc_RNA (1)...(19): siRNA sense strand
acaagaacagcaacggcaa

SEQ ID NO: 2635089 - RNA, 19 nt, Homo sapiens
  misc_RNA (1)...(19): siRNA sense strand
cugcuggccaggaggagaa

SEQ ID NO: 2635090 - RNA, 19 nt, Homo sapiens
  misc_RNA (1)...(19): siRNA sense strand
gaacgagagaggcuggaga

SEQ ID NO: 2635091 - RNA, 19 nt, Homo sapiens
  misc_RNA (1)...(19): siRNA sense strand
ccuugggaaagaacaaaua

SEQ ID NO: 2635092 - RNA, 19 nt, Homo sapiens
  misc_RNA (1)...(19): siRNA sense strand
aggcaggaacugagcaagu

SEQ ID NO: 2635093 - RNA, 19 nt, Homo sapiens
  misc_RNA (1)...(19): siRNA sense strand
acaacuacaagaacagcaa

SEQ ID NO: 2635094 - RNA, 19 nt, Homo sapiens
  misc_RNA (1)...(19): siRNA sense strand
uguuaaauucacaggaaac

SEQ ID NO: 2635095 - RNA, 19 nt, Homo sapiens
  misc_RNA (1)...(19): siRNA sense strand
gaacagcuggaaugggaga

SEQ ID NO: 2635096 - RNA, 19 nt, Homo sapiens
  misc_RNA (1)...(19): siRNA sense strand
gcugaaaagggaucaacaa

SEQ ID NO: 2635097 - RNA, 19 nt, Homo sapiens
  misc_RNA (1)...(19): siRNA sense strand
gcaacaacacauucagagu

SEQ ID NO: 2635098 - RNA, 19 nt, Homo sapiens
  misc_RNA (1)...(19): siRNA sense strand
aaaaggagcuggagcggga

SEQ ID NO: 2635099 - RNA, 19 nt, Homo sapiens
  misc_RNA (1)...(19): siRNA sense strand
gacaagaacgagagaggcu

SEQ ID NO: 2635100 - RNA, 19 nt, Homo sapiens
  misc_RNA (1)...(19): siRNA sense strand
cuggccaggaggagaagaa

SEQ ID NO: 2635101 - RNA, 19 nt, Homo sapiens
  misc_RNA (1)...(19): siRNA sense strand
acaaauacaaugaauggca

SEQ ID NO: 2635102 - RNA, 19 nt, Homo sapiens
  misc_RNA (1)...(19): siRNA sense strand
gguuagaaagggaaaggcu

SEQ ID NO: 2635103 - RNA, 19 nt, Homo sapiens
  misc_RNA (1)...(19): siRNA sense strand
ccaaacaucuguaaggaaa

SEQ ID NO: 2635104 - RNA, 19 nt, Homo sapiens
  misc_RNA (1)...(19): siRNA sense strand
cgaaauuccaguugggcaa

SEQ ID NO: 2635105 - RNA, 19 nt, Homo sapiens
  misc_RNA (1)...(19): siRNA sense strand
gaauggaagaacaaagaaa

SEQ ID NO: 2635106 - RNA, 19 nt, Homo sapiens
  misc_RNA (1)...(19): siRNA sense strand
cuauauacgcagugcuaaa

SEQ ID NO: 2635107 - RNA, 19 nt, Homo sapiens
  misc_RNA (1)...(19): siRNA sense strand
cagaauaacuguagcaaag

SEQ ID NO: 2635108 - RNA, 19 nt, Homo sapiens
  misc_RNA (1)...(19): siRNA sense strand
gugauuuaccauuggauaa

SEQ ID NO: 2635109 - RNA, 19 nt, Homo sapiens
  misc_RNA (1)...(19): siRNA sense strand
agauaaagggcaagaagau

SEQ ID NO: 2635110 - RNA, 19 nt, Homo sapiens
  misc_RNA (1)...(19): siRNA sense strand
acauagucauucagguaaa

SEQ ID NO: 2635111 - RNA, 19 nt, Homo sapiens
  misc_RNA (1)...(19): siRNA sense strand
guuuagaauggaagaacaa

SEQ ID NO: 2635112 - RNA, 19 nt, Homo sapiens
  misc_RNA (1)...(19): siRNA sense strand
ucucacagacauugaaaua

SEQ ID NO: 2635113 - RNA, 19 nt, Homo sapiens
  misc_RNA (1)...(19): siRNA sense strand
agaaagaugcugaaaccaa

SEQ ID NO: 2635114 - RNA, 19 nt, Homo sapiens
  misc_RNA (1)...(19): siRNA sense strand
ggaucaaagcaaaccuaaa

SEQ ID NO: 2635115 - RNA, 19 nt, Homo sapiens
  misc_RNA (1)...(19): siRNA sense strand
cuguaguauugaugaagaa

SEQ ID NO: 2635116 - RNA, 19 nt, Homo sapiens
  misc_RNA (1)...(19): siRNA sense strand
auguaaacuuugugacaga

SEQ ID NO: 2635117 - RNA, 19 nt, Homo sapiens
  misc_RNA (1)...(19): siRNA sense strand
aagcagcagcuaugagaaa

SEQ ID NO: 2635118 - RNA, 19 nt, Homo sapiens
  misc_RNA (1)...(19): siRNA sense strand
agggaaaggaguuggacau

SEQ ID NO: 2635119 - RNA, 19 nt, Homo sapiens
  misc_RNA (1)...(19): siRNA sense strand
ggaugaguuuauagcagaa

SEQ ID NO: 2635120 - RNA, 19 nt, Homo sapiens
  misc_RNA (1)...(19): siRNA sense strand
cccacaaucaggagauaaa

SEQ ID NO: 2635121 - RNA, 19 nt, Homo sapiens
  misc_RNA (1)...(19): siRNA sense strand
ggauccaacaagaggaaaa

SEQ ID NO: 2635122 - RNA, 19 nt, Homo sapiens
  misc_RNA (1)...(19): siRNA sense strand
ugaaauaguucgcagaguu

SEQ ID NO: 2635123 - RNA, 19 nt, Homo sapiens
  misc_RNA (1)...(19): siRNA sense strand
gagauaaagggcaagaaga

SEQ ID NO: 2635124 - RNA, 19 nt, Homo sapiens
  misc_RNA (1)...(19): siRNA sense strand
guacaaguaucaauggaca

SEQ ID NO: 2635125 - RNA, 19 nt, Homo sapiens
  misc_RNA (1)...(19): siRNA sense strand
aaagaggacaugagccaaa

SEQ ID NO: 2635126 - RNA, 19 nt, Homo sapiens
  misc_RNA (1)...(19): siRNA sense strand
guugcaagcucuucagaau

SEQ ID NO: 2635127 - RNA, 19 nt, Homo sapiens
  misc_RNA (1)...(19): siRNA sense strand
gaaauaguucgcagaguuu

SEQ ID NO: 2635128 - RNA, 19 nt, Homo sapiens
  misc_RNA (1)...(19): siRNA sense strand
gagaaaagugguaaaagua

SEQ ID NO: 2635129 - RNA, 19 nt, Homo sapiens
  misc_RNA (1)...(19): siRNA sense strand
ugcaagagccugaagaaau

SEQ ID NO: 2635130 - RNA, 19 nt, Homo sapiens
  misc_RNA (1)...(19): siRNA sense strand
ucaagucacuauagaagaa

SEQ ID NO: 2635131 - RNA, 19 nt, Homo sapiens
  misc_RNA (1)...(19): siRNA sense strand
auacauagucauucaggua

SEQ ID NO: 2635132 - RNA, 19 nt, Homo sapiens
  misc_RNA (1)...(19): siRNA sense strand
gauaaaacagacagaacua

SEQ ID NO: 2635133 - RNA, 19 nt, Homo sapiens
  misc_RNA (1)...(19): siRNA sense strand
aaacuuugugacagagaua

SEQ ID NO: 2635134 - RNA, 19 nt, Homo sapiens
  misc_RNA (1)...(19): siRNA sense strand
gauaaagaaagaugcugaa

SEQ ID NO: 2635135 - RNA, 19 nt, Homo sapiens
  misc_RNA (1)...(19): siRNA sense strand
aaggugaagucuugccaaa

SEQ ID NO: 2635136 - RNA, 19 nt, Homo sapiens
  misc_RNA (1)...(19): siRNA sense strand
gccaaagaauauucagaga

SEQ ID NO: 2635137 - RNA, 19 nt, Homo sapiens
  misc_RNA (1)...(19): siRNA sense strand
ugucaggagaucauaaaua

SEQ ID NO: 2635138 - RNA, 19 nt, Homo sapiens
  misc_RNA (1)...(19): siRNA sense strand
gaacauggaccucgaacuu

SEQ ID NO: 2635139 - RNA, 19 nt, Homo sapiens
  misc_RNA (1)...(19): siRNA sense strand
aagaagaucucacaagcua

SEQ ID NO: 2635140 - RNA, 19 nt, Homo sapiens
  misc_RNA (1)...(19): siRNA sense strand
auaaagaggacaugagcca

SEQ ID NO: 2635141 - RNA, 19 nt, Homo sapiens
  misc_RNA (1)...(19): siRNA sense strand
ucagaauaacuguagcaaa

SEQ ID NO: 2635142 - RNA, 19 nt, Homo sapiens
  misc_RNA (1)...(19): siRNA sense strand
ugauaaagaaagaugcuga

SEQ ID NO: 2635143 - RNA, 19 nt, Homo sapiens
  misc_RNA (1)...(19): siRNA sense strand
gucaggagaucauaaauaa

SEQ ID NO: 2635144 - RNA, 19 nt, Homo sapiens
  misc_RNA (1)...(19): siRNA sense strand
gaauaacuguagcaaagaa

SEQ ID NO: 2635145 - RNA, 19 nt, Homo sapiens
  misc_RNA (1)...(19): siRNA sense strand
acauggaccucgaacuuua

SEQ ID NO: 2635146 - RNA, 19 nt, Homo sapiens
  misc_RNA (1)...(19): siRNA sense strand
ccacucaaccuucaagaaa

SEQ ID NO: 2635147 - RNA, 19 nt, Homo sapiens
  misc_RNA (1)...(19): siRNA sense strand
aagugaagaaacuggaaau

SEQ ID NO: 2635148 - RNA, 19 nt, Homo sapiens
  misc_RNA (1)...(19): siRNA sense strand
uuuaguauccagagaagaa

SEQ ID NO: 2635149 - RNA, 19 nt, Homo sapiens
  misc_RNA (1)...(19): siRNA sense strand
ucauaacgccucugaagaa

SEQ ID NO: 2635150 - RNA, 19 nt, Homo sapiens
  misc_RNA (1)...(19): siRNA sense strand
cuggaugaacacacagaua

SEQ ID NO: 2635151 - RNA, 19 nt, Homo sapiens
  misc_RNA (1)...(19): siRNA sense strand
aguuuagaauggaagaaca

SEQ ID NO: 2635152 - RNA, 19 nt, Homo sapiens
  misc_RNA (1)...(19): siRNA sense strand
cugagugaacagaaacaaa

SEQ ID NO: 2635153 - RNA, 19 nt, Homo sapiens
  misc_RNA (1)...(19): siRNA sense strand
ucagauagucauucggauu

SEQ ID NO: 2635154 - RNA, 19 nt, Homo sapiens
  misc_RNA (1)...(19): siRNA sense strand
gaggaaaaugggaccaaua

SEQ ID NO: 2635155 - RNA, 19 nt, Homo sapiens
  misc_RNA (1)...(19): siRNA sense strand
uaagcugagugaacagaaa

SEQ ID NO: 2635156 - RNA, 19 nt, Homo sapiens
  misc_RNA (1)...(19): siRNA sense strand
guuuauagcagaacgacuu

SEQ ID NO: 2635157 - RNA, 19 nt, Homo sapiens
  misc_RNA (1)...(19): siRNA sense strand
ccaauaugauggccgaaaa

SEQ ID NO: 2635158 - RNA, 19 nt, Homo sapiens
  misc_RNA (1)...(19): siRNA sense strand
uuucaauggaagaaggaga

SEQ ID NO: 2635159 - RNA, 19 nt, Homo sapiens
  misc_RNA (1)...(19): siRNA sense strand
gaccaauacugcugaucau

SEQ ID NO: 2635160 - RNA, 19 nt, Homo sapiens
  misc_RNA (1)...(19): siRNA sense strand
gcaaagaacagcucuggau

SEQ ID NO: 2635161 - RNA, 19 nt, Homo sapiens
  misc_RNA (1)...(19): siRNA sense strand
acuaugacaagaagaggaa

SEQ ID NO: 2635162 - RNA, 19 nt, Homo sapiens
  misc_RNA (1)...(19): siRNA sense strand
auauagaucacauggaaca

SEQ ID NO: 2635163 - RNA, 19 nt, Homo sapiens
  misc_RNA (1)...(19): siRNA sense strand
ggaccucgaacuuuagaua

SEQ ID NO: 2635164 - RNA, 19 nt, Homo sapiens
  misc_RNA (1)...(19): siRNA sense strand
cugaagaaauugugaucac

SEQ ID NO: 2635165 - RNA, 19 nt, Homo sapiens
  misc_RNA (1)...(19): siRNA sense strand
cuauggagacauuaacuaa

SEQ ID NO: 2635166 - RNA, 19 nt, Homo sapiens
  misc_RNA (1)...(19): siRNA sense strand
aucaggagauaaagggcaa

SEQ ID NO: 2635167 - RNA, 19 nt, Homo sapiens
  misc_RNA (1)...(19): siRNA sense strand
cugaagaagccacagaaca

SEQ ID NO: 2635168 - RNA, 19 nt, Homo sapiens
  misc_RNA (1)...(19): siRNA sense strand
aggaguuggacaugaauuu

SEQ ID NO: 2635169 - RNA, 19 nt, Homo sapiens
  misc_RNA (1)...(19): siRNA sense strand
gaggaguauaguacggcaa

SEQ ID NO: 2635170 - RNA, 19 nt, Homo sapiens
  misc_RNA (1)...(19): siRNA sense strand
ccgcucaacuagagucaga

SEQ ID NO: 2635171 - RNA, 19 nt, Homo sapiens
  misc_RNA (1)...(19): siRNA sense strand
ccgaaaaggcgaggaguau

SEQ ID NO: 2635172 - RNA, 19 nt, Homo sapiens
  misc_RNA (1)...(19): siRNA sense strand
ggauucagguucuggccau

SEQ ID NO: 2635173 - RNA, 19 nt, Homo sapiens
  misc_RNA (1)...(19): siRNA sense strand
ugcaagcucuucagaauaa

SEQ ID NO: 2635174 - RNA, 19 nt, Homo sapiens
  misc_RNA (1)...(19): siRNA sense strand
gccuauauacgcagugcua

SEQ ID NO: 2635175 - RNA, 19 nt, Homo sapiens
  misc_RNA (1)...(19): siRNA sense strand
agauauguguaaacgcauu

SEQ ID NO: 2635176 - RNA, 19 nt, Homo sapiens
  misc_RNA (1)...(19): siRNA sense strand
gagacagaggagugcaaca

SEQ ID NO: 2635177 - RNA, 19 nt, Homo sapiens
  misc_RNA (1)...(19): siRNA sense strand
ugaugagcuuucagauauu

SEQ ID NO: 2635178 - RNA, 19 nt, Homo sapiens
  misc_RNA (1)...(19): siRNA sense strand
gaacaaagaaaaccaagaa

SEQ ID NO: 2635179 - RNA, 19 nt, Homo sapiens
  misc_RNA (1)...(19): siRNA sense strand
ugagaaaagugguaaaagu

SEQ ID NO: 2635180 - RNA, 19 nt, Homo sapiens
  misc_RNA (1)...(19): siRNA sense strand
ugucacagaccaugauauu

SEQ ID NO: 2635181 - RNA, 19 nt, Homo sapiens
  misc_RNA (1)...(19): siRNA sense strand
ugaacgagccaaagucaau

SEQ ID NO: 2635182 - RNA, 19 nt, Homo sapiens
  misc_RNA (1)...(19): siRNA sense strand
acuauuacugguucagaaa

SEQ ID NO: 2635183 - RNA, 19 nt, Homo sapiens
  misc_RNA (1)...(19): siRNA sense strand
accucgaacuuuagauaau

SEQ ID NO: 2635184 - RNA, 19 nt, Homo sapiens
  misc_RNA (1)...(19): siRNA sense strand
ucaagaaacucaagucacu

SEQ ID NO: 2635185 - RNA, 19 nt, Homo sapiens
  misc_RNA (1)...(19): siRNA sense strand
gcagaagcaccucgcgcua

SEQ ID NO: 2635186 - RNA, 19 nt, Homo sapiens
  misc_RNA (1)...(19): siRNA sense strand
ucaugaacggcgugagcuu

SEQ ID NO: 2635187 - RNA, 19 nt, Homo sapiens
  misc_RNA (1)...(19): siRNA sense strand
cagagaagaucaagggucc

SEQ ID NO: 2635188 - RNA, 19 nt, Homo sapiens
  misc_RNA (1)...(19): siRNA sense strand
ugcuagggcugcugaccaa

SEQ ID NO: 2635189 - RNA, 19 nt, Homo sapiens
  misc_RNA (1)...(19): siRNA sense strand
acucagaauccgaggugaa

SEQ ID NO: 2635190 - RNA, 19 nt, Homo sapiens
  misc_RNA (1)...(19): siRNA sense strand
agucagaggaggaggagca

SEQ ID NO: 2635191 - RNA, 19 nt, Homo sapiens
  misc_RNA (1)...(19): siRNA sense strand
guuuaugaucuucaggaaa

SEQ ID NO: 2635192 - RNA, 19 nt, Homo sapiens
  misc_RNA (1)...(19): siRNA sense strand
ccgaauacaaccugcucaa

SEQ ID NO: 2635193 - RNA, 19 nt, Homo sapiens
  misc_RNA (1)...(19): siRNA sense strand
aggacuaccuagagaccau

SEQ ID NO: 2635194 - RNA, 19 nt, Homo sapiens
  misc_RNA (1)...(19): siRNA sense strand
acacaauaucccuggacau

SEQ ID NO: 2635195 - RNA, 19 nt, Homo sapiens
  misc_RNA (1)...(19): siRNA sense strand
guguacaccugcagcguga

SEQ ID NO: 2635196 - RNA, 19 nt, Homo sapiens
  misc_RNA (1)...(19): siRNA sense strand
aguuuaugaucuucaggaa

SEQ ID NO: 2635197 - RNA, 19 nt, Homo sapiens
  misc_RNA (1)...(19): siRNA sense strand
cagaggaggaggagcagga

SEQ ID NO: 2635198 - RNA, 19 nt, Homo sapiens
  misc_RNA (1)...(19): siRNA sense strand
gaacaugacucuccgagca

SEQ ID NO: 2635199 - RNA, 19 nt, Homo sapiens
  misc_RNA (1)...(19): siRNA sense strand
cauuaaaaucugcgacuuu

SEQ ID NO: 2635200 - RNA, 19 nt, Homo sapiens
  misc_RNA (1)...(19): siRNA sense strand
agacugugguccugggcca

SEQ ID NO: 2635201 - RNA, 19 nt, Homo sapiens
  misc_RNA (1)...(19): siRNA sense strand
aggaggaggagcaggagga

SEQ ID NO: 2635202 - RNA, 19 nt, Homo sapiens
  misc_RNA (1)...(19): siRNA sense strand
ggccggaaggucuggagaa

SEQ ID NO: 2635203 - RNA, 19 nt, Homo sapiens
  misc_RNA (1)...(19): siRNA sense strand
gguccgagaacaugaucau

SEQ ID NO: 2635204 - RNA, 19 nt, Homo sapiens
  misc_RNA (1)...(19): siRNA sense strand
acgccaaagacuucaucaa

SEQ ID NO: 2635205 - RNA, 19 nt, Homo sapiens
  misc_RNA (1)...(19): siRNA sense strand
gggcugcgugagagaguga

SEQ ID NO: 2635206 - RNA, 19 nt, Homo sapiens
  misc_RNA (1)...(19): siRNA sense strand
aggucaaggucuacaucca

SEQ ID NO: 2635207 - RNA, 19 nt, Homo sapiens
  misc_RNA (1)...(19): siRNA sense strand
acaccugcagcgugagcaa

SEQ ID NO: 2635208 - RNA, 19 nt, Homo sapiens
  misc_RNA (1)...(19): siRNA sense strand
gagaagaggcucagcggga

SEQ ID NO: 2635209 - RNA, 19 nt, Homo sapiens
  misc_RNA (1)...(19): siRNA sense strand
ggaagaaggcacugaccga

SEQ ID NO: 2635210 - RNA, 19 nt, Homo sapiens
  misc_RNA (1)...(19): siRNA sense strand
gccaggagacagcggacaa

SEQ ID NO: 2635211 - RNA, 19 nt, Homo sapiens
  misc_RNA (1)...(19): siRNA sense strand
cugcaguguggaagggaca

SEQ ID NO: 2635212 - RNA, 19 nt, Homo sapiens
  misc_RNA (1)...(19): siRNA sense strand
ggaugagagcagcggagga

SEQ ID NO: 2635213 - RNA, 19 nt, Homo sapiens
  misc_RNA (1)...(19): siRNA sense strand
gggccuucuuuguggagga

SEQ ID NO: 2635214 - RNA, 19 nt, Homo sapiens
  misc_RNA (1)...(19): siRNA sense strand
uggagaagaagcaucgcaa

SEQ ID NO: 2635215 - RNA, 19 nt, Homo sapiens
  misc_RNA (1)...(19): siRNA sense strand
ccuucuuuguggaggagga

SEQ ID NO: 2635216 - RNA, 19 nt, Homo sapiens
  misc_RNA (1)...(19): siRNA sense strand
gcacagagacugacugaau

SEQ ID NO: 2635217 - RNA, 19 nt, Homo sapiens
  misc_RNA (1)...(19): siRNA sense strand
ucacaaagcaggaguucau

SEQ ID NO: 2635218 - RNA, 19 nt, Homo sapiens
  misc_RNA (1)...(19): siRNA sense strand
ugccugagggagagggaaa

SEQ ID NO: 2635219 - RNA, 19 nt, Homo sapiens
  misc_RNA (1)...(19): siRNA sense strand
gcuccaauuaucaggauuu

SEQ ID NO: 2635220 - RNA, 19 nt, Homo sapiens
  misc_RNA (1)...(19): siRNA sense strand
aggccaagauguuaauuau

SEQ ID NO: 2635221 - RNA, 19 nt, Homo sapiens
  misc_RNA (1)...(19): siRNA sense strand
acuuugugccugagggaga

SEQ ID NO: 2635222 - RNA, 19 nt, Homo sapiens
  misc_RNA (1)...(19): siRNA sense strand
cgugccaaguccaggaaca

SEQ ID NO: 2635223 - RNA, 19 nt, Homo sapiens
  misc_RNA (1)...(19): siRNA sense strand
ggaguucauccgaggccaa

SEQ ID NO: 2635224 - RNA, 19 nt, Homo sapiens
  misc_RNA (1)...(19): siRNA sense strand
ccaauuaucaggauuugaa

SEQ ID NO: 2635225 - RNA, 19 nt, Homo sapiens
  misc_RNA (1)...(19): siRNA sense strand
gaggccaagauguuaauua

SEQ ID NO: 2635226 - RNA, 19 nt, Homo sapiens
  misc_RNA (1)...(19): siRNA sense strand
gguuaggagcccagggaga

SEQ ID NO: 2635227 - RNA, 19 nt, Homo sapiens
  misc_RNA (1)...(19): siRNA sense strand
gcagcaacuucgugagcga

SEQ ID NO: 2635228 - RNA, 19 nt, Homo sapiens
  misc_RNA (1)...(19): siRNA sense strand
gaacaaggauucauggaag

SEQ ID NO: 2635229 - RNA, 19 nt, Homo sapiens
  misc_RNA (1)...(19): siRNA sense strand
gcuuaaaggcccugcgaug

SEQ ID NO: 2635230 - RNA, 19 nt, Homo sapiens
  misc_RNA (1)...(19): siRNA sense strand
uggaaguaggugaaccaaa

SEQ ID NO: 2635231 - RNA, 19 nt, Homo sapiens
  misc_RNA (1)...(19): siRNA sense strand
uuacaauggaaguagguga

SEQ ID NO: 2635232 - RNA, 19 nt, Homo sapiens
  misc_RNA (1)...(19): siRNA sense strand
aggucaaauuugucaagau

SEQ ID NO: 2635233 - RNA, 19 nt, Homo sapiens
  misc_RNA (1)...(19): siRNA sense strand
gccaaagagaggaaggcca

SEQ ID NO: 2635234 - RNA, 19 nt, Homo sapiens
  misc_RNA (1)...(19): siRNA sense strand
cgaacagagccaggaggua

SEQ ID NO: 2635235 - RNA, 19 nt, Homo sapiens
  misc_RNA (1)...(19): siRNA sense strand
gcauggccaaagagaggaa

SEQ ID NO: 2635236 - RNA, 19 nt, Homo sapiens
  misc_RNA (1)...(19): siRNA sense strand
uguuuaaagagcuugagaa

SEQ ID NO: 2635237 - RNA, 19 nt, Homo sapiens
  misc_RNA (1)...(19): siRNA sense strand
ugaaccaaaacaagaguaa

SEQ ID NO: 2635238 - RNA, 19 nt, Homo sapiens
  misc_RNA (1)...(19): siRNA sense strand
cguccaucgaagagaucau

SEQ ID NO: 2635239 - RNA, 19 nt, Homo sapiens
  misc_RNA (1)...(19): siRNA sense strand
agcaaaaguucgugguaaa

SEQ ID NO: 2635240 - RNA, 19 nt, Homo sapiens
  misc_RNA (1)...(19): siRNA sense strand
ccaaggaagcuguggaagu

SEQ ID NO: 2635241 - RNA, 19 nt, Homo sapiens
  misc_RNA (1)...(19): siRNA sense strand
ccaagcaagcacagaaaga

SEQ ID NO: 2635242 - RNA, 19 nt, Homo sapiens
  misc_RNA (1)...(19): siRNA sense strand
guuacauggaggaaggcaa

SEQ ID NO: 2635243 - RNA, 19 nt, Homo sapiens
  misc_RNA (1)...(19): siRNA sense strand
cagaauuaguuuuggcuau

SEQ ID NO: 2635244 - RNA, 19 nt, Homo sapiens
  misc_RNA (1)...(19): siRNA sense strand
cggacuaacgggagccuuu

SEQ ID NO: 2635245 - RNA, 19 nt, Homo sapiens
  misc_RNA (1)...(19): siRNA sense strand
aaaugaaggccaagagaac

SEQ ID NO: 2635246 - RNA, 19 nt, Homo sapiens
  misc_RNA (1)...(19): siRNA sense strand
ccaguauggcuuugcacua

SEQ ID NO: 2635247 - RNA, 19 nt, Homo sapiens
  misc_RNA (1)...(19): siRNA sense strand
gcuauaauuugcaggccca

SEQ ID NO: 2635248 - RNA, 19 nt, Homo sapiens
  misc_RNA (1)...(19): siRNA sense strand
augaacuagcugaggaaga

SEQ ID NO: 2635249 - RNA, 19 nt, Homo sapiens
  misc_RNA (1)...(19): siRNA sense strand
cuguggaagugcuuaagaa

SEQ ID NO: 2635250 - RNA, 19 nt, Homo sapiens
  misc_RNA (1)...(19): siRNA sense strand
ggaccagaugccacagcaa

SEQ ID NO: 2635251 - RNA, 19 nt, Homo sapiens
  misc_RNA (1)...(19): siRNA sense strand
aaauagcagaaauggacaa

SEQ ID NO: 2635252 - RNA, 19 nt, Homo sapiens
  misc_RNA (1)...(19): siRNA sense strand
gagcauuauguuacaccaa

SEQ ID NO: 2635253 - RNA, 19 nt, Homo sapiens
  misc_RNA (1)...(19): siRNA sense strand
cagaaauggacaaaggucu

SEQ ID NO: 2635254 - RNA, 19 nt, Homo sapiens
  misc_RNA (1)...(19): siRNA sense strand
ugaugaagccaccaagcaa

SEQ ID NO: 2635255 - RNA, 19 nt, Homo sapiens
  misc_RNA (1)...(19): siRNA sense strand
agauaagggaacuucaaau

SEQ ID NO: 2635256 - RNA, 19 nt, Homo sapiens
  misc_RNA (1)...(19): siRNA sense strand
caccaagcaagcacagaaa

SEQ ID NO: 2635257 - RNA, 19 nt, Homo sapiens
  misc_RNA (1)...(19): siRNA sense strand
ggccacaaacagaaugcaa

SEQ ID NO: 2635258 - RNA, 19 nt, Homo sapiens
  misc_RNA (1)...(19): siRNA sense strand
auaugaacuagcugaggaa

SEQ ID NO: 2635259 - RNA, 19 nt, Homo sapiens
  misc_RNA (1)...(19): siRNA sense strand
ggaauagagcugagaugac

SEQ ID NO: 2635260 - RNA, 19 nt, Homo sapiens
  misc_RNA (1)...(19): siRNA sense strand
gggugauucaugaguuuau

SEQ ID NO: 2635261 - RNA, 19 nt, Homo sapiens
  misc_RNA (1)...(19): siRNA sense strand
cguagaacuaggccaguau

SEQ ID NO: 2635262 - RNA, 19 nt, Homo sapiens
  misc_RNA (1)...(19): siRNA sense strand
ugaagaagcaaaagaagau

SEQ ID NO: 2635263 - RNA, 19 nt, Homo sapiens
  misc_RNA (1)...(19): siRNA sense strand
uagcugaggaagaccuuaa

SEQ ID NO: 2635264 - RNA, 19 nt, Homo sapiens
  misc_RNA (1)...(19): siRNA sense strand
uggcuuugcacuagaggau

SEQ ID NO: 2635265 - RNA, 19 nt, Homo sapiens
  misc_RNA (1)...(19): siRNA sense strand
uuacauggaggaaggcaau

SEQ ID NO: 2635266 - RNA, 19 nt, Homo sapiens
  misc_RNA (1)...(19): siRNA sense strand
ccaaagaacuaccuagccu

SEQ ID NO: 2635267 - RNA, 19 nt, Homo sapiens
  misc_RNA (1)...(19): siRNA sense strand
caaagaacuaccuagccua

SEQ ID NO: 2635268 - RNA, 19 nt, Homo sapiens
  misc_RNA (1)...(19): siRNA sense strand
cagaaugcaaugaaagacu

SEQ ID NO: 2635269 - RNA, 19 nt, Homo sapiens
  misc_RNA (1)...(19): siRNA sense strand
agauuuaacuacagcuauc

SEQ ID NO: 2635270 - RNA, 19 nt, Homo sapiens
  misc_RNA (1)...(19): siRNA sense strand
cagcuaucagcauggacaa

SEQ ID NO: 2635271 - RNA, 19 nt, Homo sapiens
  misc_RNA (1)...(19): siRNA sense strand
ggauauuaaugcugccaug

SEQ ID NO: 2635272 - RNA, 19 nt, Homo sapiens
  misc_RNA (1)...(19): siRNA sense strand
ccaagaugcaauuacucua

SEQ ID NO: 2635273 - RNA, 19 nt, Homo sapiens
  misc_RNA (1)...(19): siRNA sense strand
ggccaagagaaccaaggaa

SEQ ID NO: 2635274 - RNA, 19 nt, Homo sapiens
  misc_RNA (1)...(19): siRNA sense strand
uggaauuccucaugcgcaa

SEQ ID NO: 2635275 - RNA, 19 nt, Homo sapiens
  misc_RNA (1)...(19): siRNA sense strand
auguagauccagugcauaa

SEQ ID NO: 2635276 - RNA, 19 nt, Homo sapiens
  misc_RNA (1)...(19): siRNA sense strand
ccugaguaauaguaggcaa

SEQ ID NO: 2635277 - RNA, 19 nt, Homo sapiens
  misc_RNA (1)...(19): siRNA sense strand
gcuugaagucaccgaagaa

SEQ ID NO: 2635278 - RNA, 19 nt, Homo sapiens
  misc_RNA (1)...(19): siRNA sense strand
gagucuuaacugauagcaa

SEQ ID NO: 2635279 - RNA, 19 nt, Homo sapiens
  misc_RNA (1)...(19): siRNA sense strand
agguggacccugauggcaa

SEQ ID NO: 2635280 - RNA, 19 nt, Homo sapiens
  misc_RNA (1)...(19): siRNA sense strand
aagcauugauuuugaccaa

SEQ ID NO: 2635281 - RNA, 19 nt, Homo sapiens
  misc_RNA (1)...(19): siRNA sense strand
uaauaguaggcaacugaaa

SEQ ID NO: 2635282 - RNA, 19 nt, Homo sapiens
  misc_RNA (1)...(19): siRNA sense strand
agucauggacaucgaauca

SEQ ID NO: 2635283 - RNA, 19 nt, Homo sapiens
  misc_RNA (1)...(19): siRNA sense strand
ugcacaagucucuggacaa

SEQ ID NO: 2635284 - RNA, 19 nt, Homo sapiens
  misc_RNA (1)...(19): siRNA sense strand
agcaacuguuugaagaaau

SEQ ID NO: 2635285 - RNA, 19 nt, Homo sapiens
  misc_RNA (1)...(19): siRNA sense strand
uguuaaagauucugaaacc

SEQ ID NO: 2635286 - RNA, 19 nt, Homo sapiens
  misc_RNA (1)...(19): siRNA sense strand
aaugaagauccguugguuu

SEQ ID NO: 2635287 - RNA, 19 nt, Homo sapiens
  misc_RNA (1)...(19): siRNA sense strand
gcugagauggcaagagucu

SEQ ID NO: 2635288 - RNA, 19 nt, Homo sapiens
  misc_RNA (1)...(19): siRNA sense strand
agagagaugcaaagcuuca

SEQ ID NO: 2635289 - RNA, 19 nt, Homo sapiens
  misc_RNA (1)...(19): siRNA sense strand
gguuuauauucgagcaaca

SEQ ID NO: 2635290 - RNA, 19 nt, Homo sapiens
  misc_RNA (1)...(19): siRNA sense strand
uauucgagcaacagagaaa

SEQ ID NO: 2635291 - RNA, 19 nt, Homo sapiens
  misc_RNA (1)...(19): siRNA sense strand
cuacuuuggauuugggaca

SEQ ID NO: 2635292 - RNA, 19 nt, Homo sapiens
  misc_RNA (1)...(19): siRNA sense strand
auuugggacaagauggaaa

SEQ ID NO: 2635293 - RNA, 19 nt, Homo sapiens
  misc_RNA (1)...(19): siRNA sense strand
gaggaucagcagcgcacaa

SEQ ID NO: 2635294 - RNA, 19 nt, Homo sapiens
  misc_RNA (1)...(19): siRNA sense strand
gugugguggcuuaagagaa

SEQ ID NO: 2635295 - RNA, 19 nt, Homo sapiens
  misc_RNA (1)...(19): siRNA sense strand
ugggaaugagcaugauaau

SEQ ID NO: 2635296 - RNA, 19 nt, Homo sapiens
  misc_RNA (1)...(19): siRNA sense strand
acuaugaugggcucagaaa

SEQ ID NO: 2635297 - RNA, 19 nt, Homo sapiens
  misc_RNA (1)...(19): siRNA sense strand
uuaacaaagaggaacauca

SEQ ID NO: 2635298 - RNA, 19 nt, Homo sapiens
  misc_RNA (1)...(19): siRNA sense strand
cauuaugagaggagagaaa

SEQ ID NO: 2635299 - RNA, 19 nt, Homo sapiens
  misc_RNA (1)...(19): siRNA sense strand
gguauuaagugcaggaaaa

SEQ ID NO: 2635300 - RNA, 19 nt, Homo sapiens
  misc_RNA (1)...(19): siRNA sense strand
cagcaauaguggauaacaa

SEQ ID NO: 2635301 - RNA, 19 nt, Homo sapiens
  misc_RNA (1)...(19): siRNA sense strand
caguaguaguuguuggaaa

SEQ ID NO: 2635302 - RNA, 19 nt, Homo sapiens
  misc_RNA (1)...(19): siRNA sense strand
gguagaaaucauggagaaa

SEQ ID NO: 2635303 - RNA, 19 nt, Homo sapiens
  misc_RNA (1)...(19): siRNA sense strand
acauacaggaacugagaaa

SEQ ID NO: 2635304 - RNA, 19 nt, Homo sapiens
  misc_RNA (1)...(19): siRNA sense strand
aaacaggacaugacggaaa

SEQ ID NO: 2635305 - RNA, 19 nt, Homo sapiens
  misc_RNA (1)...(19): siRNA sense strand
gauauuuggaagugugaaa

SEQ ID NO: 2635306 - RNA, 19 nt, Homo sapiens
  misc_RNA (1)...(19): siRNA sense strand
caucaaauccacagcaaau

SEQ ID NO: 2635307 - RNA, 19 nt, Homo sapiens
  misc_RNA (1)...(19): siRNA sense strand
gccuggagcuggaggaaau

SEQ ID NO: 2635308 - RNA, 19 nt, Homo sapiens
  misc_RNA (1)...(19): siRNA sense strand
aguaguaguuguuggaaaa

SEQ ID NO: 2635309 - RNA, 19 nt, Homo sapiens
  misc_RNA (1)...(19): siRNA sense strand
cgaacuaguccaaagcaua

SEQ ID NO: 2635310 - RNA, 19 nt, Homo sapiens
  misc_RNA (1)...(19): siRNA sense strand
gauuauuggaucaggaaga

SEQ ID NO: 2635311 - RNA, 19 nt, Homo sapiens
  misc_RNA (1)...(19): siRNA sense strand
agagaaaagaagagaaaga

SEQ ID NO: 2635312 - RNA, 19 nt, Homo sapiens
  misc_RNA (1)...(19): siRNA sense strand
cgaaugagacauacaggaa

SEQ ID NO: 2635313 - RNA, 19 nt, Homo sapiens
  misc_RNA (1)...(19): siRNA sense strand
agaagaagaaucugagaca

SEQ ID NO: 2635314 - RNA, 19 nt, Homo sapiens
  misc_RNA (1)...(19): siRNA sense strand
ggguauuaagugcaggaaa

SEQ ID NO: 2635315 - RNA, 19 nt, Homo sapiens
  misc_RNA (1)...(19): siRNA sense strand
aggauaaagauuuggauca

SEQ ID NO: 2635316 - RNA, 19 nt, Homo sapiens
  misc_RNA (1)...(19): siRNA sense strand
gaucaagaagagaugcaua

SEQ ID NO: 2635317 - RNA, 19 nt, Homo sapiens
  misc_RNA (1)...(19): siRNA sense strand
ugagagaggagguggugaa

SEQ ID NO: 2635318 - RNA, 19 nt, Homo sapiens
  misc_RNA (1)...(19): siRNA sense strand
aaacaaaucuuucugggaa

SEQ ID NO: 2635319 - RNA, 19 nt, Homo sapiens
  misc_RNA (1)...(19): siRNA sense strand
agaagaagcuugucagcca

SEQ ID NO: 2635320 - RNA, 19 nt, Homo sapiens
  misc_RNA (1)...(19): siRNA sense strand
cacucauaguccagaaaua

SEQ ID NO: 2635321 - RNA, 19 nt, Homo sapiens
  misc_RNA (1)...(19): siRNA sense strand
cagaaauagcacugacaga

SEQ ID NO: 2635322 - RNA, 19 nt, Homo sapiens
  misc_RNA (1)...(19): siRNA sense strand
acgaacagccacagcuaaa

SEQ ID NO: 2635323 - RNA, 19 nt, Homo sapiens
  misc_RNA (1)...(19): siRNA sense strand
aggcguauuuggaaguuua

SEQ ID NO: 2635324 - RNA, 19 nt, Homo sapiens
  misc_RNA (1)...(19): siRNA sense strand
uguuagaaacuuacagcaa

SEQ ID NO: 2635325 - RNA, 19 nt, Homo sapiens
  misc_RNA (1)...(19): siRNA sense strand
cugagauacugaacacaaa

SEQ ID NO: 2635326 - RNA, 19 nt, Homo sapiens
  misc_RNA (1)...(19): siRNA sense strand
ggggauacauuuucaauua

SEQ ID NO: 2635327 - RNA, 19 nt, Homo sapiens
  misc_RNA (1)...(19): siRNA sense strand
ggaaaagcuugcugauauu

SEQ ID NO: 2635328 - RNA, 19 nt, Homo sapiens
  misc_RNA (1)...(19): siRNA sense strand
caucaaugggcucagguaa

SEQ ID NO: 2635329 - RNA, 19 nt, Homo sapiens
  misc_RNA (1)...(19): siRNA sense strand
uaauagugcagcuaagaaa

SEQ ID NO: 2635330 - RNA, 19 nt, Homo sapiens
  misc_RNA (1)...(19): siRNA sense strand
gagcuagauaccacaguaa

SEQ ID NO: 2635331 - RNA, 19 nt, Homo sapiens
  misc_RNA (1)...(19): siRNA sense strand
ucuuaucaaugguggacaa

SEQ ID NO: 2635332 - RNA, 19 nt, Homo sapiens
  misc_RNA (1)...(19): siRNA sense strand
agcagggauuuguggaaua

SEQ ID NO: 2635333 - RNA, 19 nt, Homo sapiens
  misc_RNA (1)...(19): siRNA sense strand
cauugagagcuaugguuaa

SEQ ID NO: 2635334 - RNA, 19 nt, Homo sapiens
  misc_RNA (1)...(19): siRNA sense strand
ggagauaccauuagauacu

SEQ ID NO: 2635335 - RNA, 19 nt, Homo sapiens
  misc_RNA (1)...(19): siRNA sense strand
ggaaauauacgaacagcca

SEQ ID NO: 2635336 - RNA, 19 nt, Homo sapiens
  misc_RNA (1)...(19): siRNA sense strand
agaagaaaauugagggacu

SEQ ID NO: 2635337 - RNA, 19 nt, Homo sapiens
  misc_RNA (1)...(19): siRNA sense strand
agaugagacaaaagagaaa

SEQ ID NO: 2635338 - RNA, 19 nt, Homo sapiens
  misc_RNA (1)...(19): siRNA sense strand
acacaaaguugcaugaaac

SEQ ID NO: 2635339 - RNA, 19 nt, Homo sapiens
  misc_RNA (1)...(19): siRNA sense strand
gcugaugaggauugggaga

SEQ ID NO: 2635340 - RNA, 19 nt, Homo sapiens
  misc_RNA (1)...(19): siRNA sense strand
acuugaagccucuggauuu

SEQ ID NO: 2635341 - RNA, 19 nt, Homo sapiens
  misc_RNA (1)...(19): siRNA sense strand
ggugaccacgugagggaua

SEQ ID NO: 2635342 - RNA, 19 nt, Homo sapiens
  misc_RNA (1)...(19): siRNA sense strand
ugggaacgaaugagacaua

SEQ ID NO: 2635343 - RNA, 19 nt, Homo sapiens
  misc_RNA (1)...(19): siRNA sense strand
uaagagaagauguugacaa

SEQ ID NO: 2635344 - RNA, 19 nt, Homo sapiens
  misc_RNA (1)...(19): siRNA sense strand
gagucagcauguagacaau

SEQ ID NO: 2635345 - RNA, 19 nt, Homo sapiens
  misc_RNA (1)...(19): siRNA sense strand
cuuagaaagugcugaguac

SEQ ID NO: 2635346 - RNA, 19 nt, Homo sapiens
  misc_RNA (1)...(19): siRNA sense strand
uuggaaacauugugaagau

SEQ ID NO: 2635347 - RNA, 19 nt, Homo sapiens
  misc_RNA (1)...(19): siRNA sense strand
cuggagaggugcugagaac

SEQ ID NO: 2635348 - RNA, 19 nt, Homo sapiens
  misc_RNA (1)...(19): siRNA sense strand
cuuacaauuccuagggaca

SEQ ID NO: 2635349 - RNA, 19 nt, Homo sapiens
  misc_RNA (1)...(19): siRNA sense strand
gagcuauuucacaguauaa

SEQ ID NO: 2635350 - RNA, 19 nt, Homo sapiens
  misc_RNA (1)...(19): siRNA sense strand
gcuagauaccacaguaaaa

SEQ ID NO: 2635351 - RNA, 19 nt, Homo sapiens
  misc_RNA (1)...(19): siRNA sense strand
uggcaguguuggaaauaca

SEQ ID NO: 2635352 - RNA, 19 nt, Homo sapiens
  misc_RNA (1)...(19): siRNA sense strand
uggaggaaauauacgaaca

SEQ ID NO: 2635353 - RNA, 19 nt, Homo sapiens
  misc_RNA (1)...(19): siRNA sense strand
gagaacgcuuauacaacaa

SEQ ID NO: 2635354 - RNA, 19 nt, Homo sapiens
  misc_RNA (1)...(19): siRNA sense strand
gcagcuaagaaaagagcaa

SEQ ID NO: 2635355 - RNA, 19 nt, Homo sapiens
  misc_RNA (1)...(19): siRNA sense strand
gaggauugggagaagaaaa

SEQ ID NO: 2635356 - RNA, 19 nt, Homo sapiens
  misc_RNA (1)...(19): siRNA sense strand
aaguaaaucugguggcucu

SEQ ID NO: 2635357 - RNA, 19 nt, Homo sapiens
  misc_RNA (1)...(19): siRNA sense strand
aucaaugggcucagguaaa

SEQ ID NO: 2635358 - RNA, 19 nt, Homo sapiens
  misc_RNA (1)...(19): siRNA sense strand
gcagauacggacuggcuuu

SEQ ID NO: 2635359 - RNA, 19 nt, Homo sapiens
  misc_RNA (1)...(19): siRNA sense strand
ccaauugaucuuucagaau

SEQ ID NO: 2635360 - RNA, 19 nt, Homo sapiens
  misc_RNA (1)...(19): siRNA sense strand
ccagcaaccugcagccaau

SEQ ID NO: 2635361 - RNA, 19 nt, Homo sapiens
  misc_RNA (1)...(19): siRNA sense strand
cugaaagagcuguaacuga

SEQ ID NO: 2635362 - RNA, 19 nt, Homo sapiens
  misc_RNA (1)...(19): siRNA sense strand
ccuauaaucaacaugcuaa

SEQ ID NO: 2635363 - RNA, 19 nt, Homo sapiens
  misc_RNA (1)...(19): siRNA sense strand
gggccgagugcuuguggaa

SEQ ID NO: 2635364 - RNA, 19 nt, Homo sapiens
  misc_RNA (1)...(19): siRNA sense strand
cauuaugagaggagagaaa

SEQ ID NO: 2635365 - RNA, 19 nt, Homo sapiens
  misc_RNA (1)...(19): siRNA sense strand
gguauuaagugcaggaaaa

SEQ ID NO: 2635366 - RNA, 19 nt, Homo sapiens
  misc_RNA (1)...(19): siRNA sense strand
cagcaauaguggauaacaa

SEQ ID NO: 2635367 - RNA, 19 nt, Homo sapiens
  misc_RNA (1)...(19): siRNA sense strand
caguaguaguuguuggaaa

SEQ ID NO: 2635368 - RNA, 19 nt, Homo sapiens
  misc_RNA (1)...(19): siRNA sense strand
gguagaaaucauggagaaa

SEQ ID NO: 2635369 - RNA, 19 nt, Homo sapiens
  misc_RNA (1)...(19): siRNA sense strand
acauacaggaacugagaaa

SEQ ID NO: 2635370 - RNA, 19 nt, Homo sapiens
  misc_RNA (1)...(19): siRNA sense strand
aaacaggacaugacggaaa

SEQ ID NO: 2635371 - RNA, 19 nt, Homo sapiens
  misc_RNA (1)...(19): siRNA sense strand
gauauuuggaagugugaaa

SEQ ID NO: 2635372 - RNA, 19 nt, Homo sapiens
  misc_RNA (1)...(19): siRNA sense strand
caucaaauccacagcaaau

SEQ ID NO: 2635373 - RNA, 19 nt, Homo sapiens
  misc_RNA (1)...(19): siRNA sense strand
gccuggagcuggaggaaau

SEQ ID NO: 2635374 - RNA, 19 nt, Homo sapiens
  misc_RNA (1)...(19): siRNA sense strand
aguaguaguuguuggaaaa

SEQ ID NO: 2635375 - RNA, 19 nt, Homo sapiens
  misc_RNA (1)...(19): siRNA sense strand
cgaacuaguccaaagcaua

SEQ ID NO: 2635376 - RNA, 19 nt, Homo sapiens
  misc_RNA (1)...(19): siRNA sense strand
gauuauuggaucaggaaga

SEQ ID NO: 2635377 - RNA, 19 nt, Homo sapiens
  misc_RNA (1)...(19): siRNA sense strand
agagaaaagaagagaaaga

SEQ ID NO: 2635378 - RNA, 19 nt, Homo sapiens
  misc_RNA (1)...(19): siRNA sense strand
cgaaugagacauacaggaa

SEQ ID NO: 2635379 - RNA, 19 nt, Homo sapiens
  misc_RNA (1)...(19): siRNA sense strand
agaagaagaaucugagaca

SEQ ID NO: 2635380 - RNA, 19 nt, Homo sapiens
  misc_RNA (1)...(19): siRNA sense strand
ggguauuaagugcaggaaa

SEQ ID NO: 2635381 - RNA, 19 nt, Homo sapiens
  misc_RNA (1)...(19): siRNA sense strand
aggauaaagauuuggauca

SEQ ID NO: 2635382 - RNA, 19 nt, Homo sapiens
  misc_RNA (1)...(19): siRNA sense strand
gaucaagaagagaugcaua

SEQ ID NO: 2635383 - RNA, 19 nt, Homo sapiens
  misc_RNA (1)...(19): siRNA sense strand
ugagagaggagguggugaa

SEQ ID NO: 2635384 - RNA, 19 nt, Homo sapiens
  misc_RNA (1)...(19): siRNA sense strand
aaacaaaucuuucugggaa

SEQ ID NO: 2635385 - RNA, 19 nt, Homo sapiens
  misc_RNA (1)...(19): siRNA sense strand
agaagaagcuugucagcca

SEQ ID NO: 2635386 - RNA, 19 nt, Homo sapiens
  misc_RNA (1)...(19): siRNA sense strand
cacucauaguccagaaaua

SEQ ID NO: 2635387 - RNA, 19 nt, Homo sapiens
  misc_RNA (1)...(19): siRNA sense strand
cagaaauagcacugacaga

SEQ ID NO: 2635388 - RNA, 19 nt, Homo sapiens
  misc_RNA (1)...(19): siRNA sense strand
acgaacagccacagcuaaa

SEQ ID NO: 2635389 - RNA, 19 nt, Homo sapiens
  misc_RNA (1)...(19): siRNA sense strand
aggcguauuuggaaguuua

SEQ ID NO: 2635390 - RNA, 19 nt, Homo sapiens
  misc_RNA (1)...(19): siRNA sense strand
uguuagaaacuuacagcaa

SEQ ID NO: 2635391 - RNA, 19 nt, Homo sapiens
  misc_RNA (1)...(19): siRNA sense strand
cugagauacugaacacaaa

SEQ ID NO: 2635392 - RNA, 19 nt, Homo sapiens
  misc_RNA (1)...(19): siRNA sense strand
ggaaaagcuugcugauauu

SEQ ID NO: 2635393 - RNA, 19 nt, Homo sapiens
  misc_RNA (1)...(19): siRNA sense strand
caucaaugggcucagguaa

SEQ ID NO: 2635394 - RNA, 19 nt, Homo sapiens
  misc_RNA (1)...(19): siRNA sense strand
uaauagugcagcuaagaaa

SEQ ID NO: 2635395 - RNA, 19 nt, Homo sapiens
  misc_RNA (1)...(19): siRNA sense strand
gagcuagauaccacaguaa

SEQ ID NO: 2635396 - RNA, 19 nt, Homo sapiens
  misc_RNA (1)...(19): siRNA sense strand
ucuuaucaaugguggacaa

SEQ ID NO: 2635397 - RNA, 19 nt, Homo sapiens
  misc_RNA (1)...(19): siRNA sense strand
agcagggauuuguggaaua

SEQ ID NO: 2635398 - RNA, 19 nt, Homo sapiens
  misc_RNA (1)...(19): siRNA sense strand
cauugagagcuaugguuaa

SEQ ID NO: 2635399 - RNA, 19 nt, Homo sapiens
  misc_RNA (1)...(19): siRNA sense strand
ggagauaccauuagauacu

SEQ ID NO: 2635400 - RNA, 19 nt, Homo sapiens
  misc_RNA (1)...(19): siRNA sense strand
ggaaauauacgaacagcca

SEQ ID NO: 2635401 - RNA, 19 nt, Homo sapiens
  misc_RNA (1)...(19): siRNA sense strand
agaagaaaauugagggacu

SEQ ID NO: 2635402 - RNA, 19 nt, Homo sapiens
  misc_RNA (1)...(19): siRNA sense strand
agaugagacaaaagagaaa

SEQ ID NO: 2635403 - RNA, 19 nt, Homo sapiens
  misc_RNA (1)...(19): siRNA sense strand
acacaaaguugcaugaaac

SEQ ID NO: 2635404 - RNA, 19 nt, Homo sapiens
  misc_RNA (1)...(19): siRNA sense strand
gcugaugaggauugggaga

SEQ ID NO: 2635405 - RNA, 19 nt, Homo sapiens
  misc_RNA (1)...(19): siRNA sense strand
acuugaagccucuggauuu

SEQ ID NO: 2635406 - RNA, 19 nt, Homo sapiens
  misc_RNA (1)...(19): siRNA sense strand
ggugaccacgugagggaua

SEQ ID NO: 2635407 - RNA, 19 nt, Homo sapiens
  misc_RNA (1)...(19): siRNA sense strand
ugggaacgaaugagacaua

SEQ ID NO: 2635408 - RNA, 19 nt, Homo sapiens
  misc_RNA (1)...(19): siRNA sense strand
uaagagaagauguugacaa

SEQ ID NO: 2635409 - RNA, 19 nt, Homo sapiens
  misc_RNA (1)...(19): siRNA sense strand
gagucagcauguagacaau

SEQ ID NO: 2635410 - RNA, 19 nt, Homo sapiens
  misc_RNA (1)...(19): siRNA sense strand
cuuagaaagugcugaguac

SEQ ID NO: 2635411 - RNA, 19 nt, Homo sapiens
  misc_RNA (1)...(19): siRNA sense strand
uuggaaacauugugaagau

SEQ ID NO: 2635412 - RNA, 19 nt, Homo sapiens
  misc_RNA (1)...(19): siRNA sense strand
cuggagaggugcugagaac

SEQ ID NO: 2635413 - RNA, 19 nt, Homo sapiens
  misc_RNA (1)...(19): siRNA sense strand
cuuacaauuccuagggaca

SEQ ID NO: 2635414 - RNA, 19 nt, Homo sapiens
  misc_RNA (1)...(19): siRNA sense strand
gagcuauuucacaguauaa

SEQ ID NO: 2635415 - RNA, 19 nt, Homo sapiens
  misc_RNA (1)...(19): siRNA sense strand
gcuagauaccacaguaaaa

SEQ ID NO: 2635416 - RNA, 19 nt, Homo sapiens
  misc_RNA (1)...(19): siRNA sense strand
uggcaguguuggaaauaca

SEQ ID NO: 2635417 - RNA, 19 nt, Homo sapiens
  misc_RNA (1)...(19): siRNA sense strand
uggaggaaauauacgaaca

SEQ ID NO: 2635418 - RNA, 19 nt, Homo sapiens
  misc_RNA (1)...(19): siRNA sense strand
gagaacgcuuauacaacaa

SEQ ID NO: 2635419 - RNA, 19 nt, Homo sapiens
  misc_RNA (1)...(19): siRNA sense strand
gcagcuaagaaaagagcaa

SEQ ID NO: 2635420 - RNA, 19 nt, Homo sapiens
  misc_RNA (1)...(19): siRNA sense strand
gaggauugggagaagaaaa

SEQ ID NO: 2635421 - RNA, 19 nt, Homo sapiens
  misc_RNA (1)...(19): siRNA sense strand
aaguaaaucugguggcucu

SEQ ID NO: 2635422 - RNA, 19 nt, Homo sapiens
  misc_RNA (1)...(19): siRNA sense strand
aucaaugggcucagguaaa

SEQ ID NO: 2635423 - RNA, 19 nt, Homo sapiens
  misc_RNA (1)...(19): siRNA sense strand
gcagauacggacuggcuuu

SEQ ID NO: 2635424 - RNA, 19 nt, Homo sapiens
  misc_RNA (1)...(19): siRNA sense strand
ccaauugaucuuucagaau

SEQ ID NO: 2635425 - RNA, 19 nt, Homo sapiens
  misc_RNA (1)...(19): siRNA sense strand
ccagcaaccugcagccaau

SEQ ID NO: 2635426 - RNA, 19 nt, Homo sapiens
  misc_RNA (1)...(19): siRNA sense strand
cugaaagagcuguaacuga

SEQ ID NO: 2635427 - RNA, 19 nt, Homo sapiens
  misc_RNA (1)...(19): siRNA sense strand
ccuauaaucaacaugcuaa

SEQ ID NO: 2635428 - RNA, 19 nt, Homo sapiens
  misc_RNA (1)...(19): siRNA sense strand
gggccgagugcuuguggaa

SEQ ID NO: 2635429 - RNA, 19 nt, Homo sapiens
  misc_RNA (1)...(19): siRNA sense strand
cuuauaacaagaugagaca

SEQ ID NO: 2635430 - RNA, 19 nt, Homo sapiens
  misc_RNA (1)...(19): siRNA sense strand
gggaauacaacaaggcaua

SEQ ID NO: 2635431 - RNA, 19 nt, Homo sapiens
  misc_RNA (1)...(19): siRNA sense strand
cuuuauagauuaagggaca

SEQ ID NO: 2635432 - RNA, 19 nt, Homo sapiens
  misc_RNA (1)...(19): siRNA sense strand
cagaaagacuguagaaaau

SEQ ID NO: 2635433 - RNA, 19 nt, Homo sapiens
  misc_RNA (1)...(19): siRNA sense strand
cggccaugccucagggaaa

SEQ ID NO: 2635434 - RNA, 19 nt, Homo sapiens
  misc_RNA (1)...(19): siRNA sense strand
gaacauaaaucaaggcagu

SEQ ID NO: 2635435 - RNA, 19 nt, Homo sapiens
  misc_RNA (1)...(19): siRNA sense strand
uagcuaauguagagagauu

SEQ ID NO: 2635436 - RNA, 19 nt, Homo sapiens
  misc_RNA (1)...(19): siRNA sense strand
cagccaauuauuagaguaa

SEQ ID NO: 2635437 - RNA, 19 nt, Homo sapiens
  misc_RNA (1)...(19): siRNA sense strand
gauaaaaggacaucagaua

SEQ ID NO: 2635438 - RNA, 19 nt, Homo sapiens
  misc_RNA (1)...(19): siRNA sense strand
cugaagaagaugcagaaua

SEQ ID NO: 2635439 - RNA, 19 nt, Homo sapiens
  misc_RNA (1)...(19): siRNA sense strand
ugcaaaugauagagggaau

SEQ ID NO: 2635440 - RNA, 19 nt, Homo sapiens
  misc_RNA (1)...(19): siRNA sense strand
caagugaggaggagaacaa

SEQ ID NO: 2635441 - RNA, 19 nt, Homo sapiens
  misc_RNA (1)...(19): siRNA sense strand
caucaaagucccaaagaga

SEQ ID NO: 2635442 - RNA, 19 nt, Homo sapiens
  misc_RNA (1)...(19): siRNA sense strand
uguaagagaacuagucaaa

SEQ ID NO: 2635443 - RNA, 19 nt, Homo sapiens
  misc_RNA (1)...(19): siRNA sense strand
ugaagaaucaugaggauau

SEQ ID NO: 2635444 - RNA, 19 nt, Homo sapiens
  misc_RNA (1)...(19): siRNA sense strand
auauaaaggcugugcaaca

SEQ ID NO: 2635445 - RNA, 19 nt, Homo sapiens
  misc_RNA (1)...(19): siRNA sense strand
cgagauaguguucaagaaa

SEQ ID NO: 2635446 - RNA, 19 nt, Homo sapiens
  misc_RNA (1)...(19): siRNA sense strand
guggaaaaggacagagaaa

SEQ ID NO: 2635447 - RNA, 19 nt, Homo sapiens
  misc_RNA (1)...(19): siRNA sense strand
ucgcugaauuuaaaggaua

SEQ ID NO: 2635448 - RNA, 19 nt, Homo sapiens
  misc_RNA (1)...(19): siRNA sense strand
agggauggaaugaggcaaa

SEQ ID NO: 2635449 - RNA, 19 nt, Homo sapiens
  misc_RNA (1)...(19): siRNA sense strand
cugcagaguauguuugaaa

SEQ ID NO: 2635450 - RNA, 19 nt, Homo sapiens
  misc_RNA (1)...(19): siRNA sense strand
ggauggaacuaaagggaug

SEQ ID NO: 2635451 - RNA, 19 nt, Homo sapiens
  misc_RNA (1)...(19): siRNA sense strand
gugaugagagugagaauuu

SEQ ID NO: 2635452 - RNA, 19 nt, Homo sapiens
  misc_RNA (1)...(19): siRNA sense strand
guucuuugauucagaggaa

SEQ ID NO: 2635453 - RNA, 19 nt, Homo sapiens
  misc_RNA (1)...(19): siRNA sense strand
gggaaaagcacgaaggguu

SEQ ID NO: 2635454 - RNA, 19 nt, Homo sapiens
  misc_RNA (1)...(19): siRNA sense strand
uauggaagguauuuggaaa

SEQ ID NO: 2635455 - RNA, 19 nt, Homo sapiens
  misc_RNA (1)...(19): siRNA sense strand
agagaucaguuuaggaaaa

SEQ ID NO: 2635456 - RNA, 19 nt, Homo sapiens
  misc_RNA (1)...(19): siRNA sense strand
ugauagagggaaugagaca

SEQ ID NO: 2635457 - RNA, 19 nt, Homo sapiens
  misc_RNA (1)...(19): siRNA sense strand
acguaguacuucagcaaau

SEQ ID NO: 2635458 - RNA, 19 nt, Homo sapiens
  misc_RNA (1)...(19): siRNA sense strand
ugauagaaucugaugaaga

SEQ ID NO: 2635459 - RNA, 19 nt, Homo sapiens
  misc_RNA (1)...(19): siRNA sense strand
ggguacugcacuugagaau

SEQ ID NO: 2635460 - RNA, 19 nt, Homo sapiens
  misc_RNA (1)...(19): siRNA sense strand
cugcauaaauccugucauu

SEQ ID NO: 2635461 - RNA, 19 nt, Homo sapiens
  misc_RNA (1)...(19): siRNA sense strand
ucauaaagcucucggaaac

SEQ ID NO: 2635462 - RNA, 19 nt, Homo sapiens
  misc_RNA (1)...(19): siRNA sense strand
agaccuaccaaaugauaaa

SEQ ID NO: 2635463 - RNA, 19 nt, Homo sapiens
  misc_RNA (1)...(19): siRNA sense strand
uuugauugcucuagggauu

SEQ ID NO: 2635464 - RNA, 19 nt, Homo sapiens
  misc_RNA (1)...(19): siRNA sense strand
caaaugaagauaugcagaa

SEQ ID NO: 2635465 - RNA, 19 nt, Homo sapiens
  misc_RNA (1)...(19): siRNA sense strand
ccagauucuaguaaggaaa

SEQ ID NO: 2635466 - RNA, 19 nt, Homo sapiens
  misc_RNA (1)...(19): siRNA sense strand
cgugaugagacccgaguua

SEQ ID NO: 2635467 - RNA, 19 nt, Homo sapiens
  misc_RNA (1)...(19): siRNA sense strand
ccuauaaacagaucagaau

SEQ ID NO: 2635468 - RNA, 19 nt, Homo sapiens
  misc_RNA (1)...(19): siRNA sense strand
ggaaaagcacgaaggguuu

SEQ ID NO: 2635469 - RNA, 19 nt, Homo sapiens
  misc_RNA (1)...(19): siRNA sense strand
acuaauaccaagagaucau

SEQ ID NO: 2635470 - RNA, 19 nt, Homo sapiens
  misc_RNA (1)...(19): siRNA sense strand
accaagagaucauaguaaa

SEQ ID NO: 2635471 - RNA, 19 nt, Homo sapiens
  misc_RNA (1)...(19): siRNA sense strand
aagugaagaugacgagauu

SEQ ID NO: 2635472 - RNA, 19 nt, Homo sapiens
  misc_RNA (1)...(19): siRNA sense strand
gauucugaaaugagagcua

SEQ ID NO: 2635473 - RNA, 19 nt, Homo sapiens
  misc_RNA (1)...(19): siRNA sense strand
gcugaaaacacuacugaaa

SEQ ID NO: 2635474 - RNA, 19 nt, Homo sapiens
  misc_RNA (1)...(19): siRNA sense strand
gggacagugaugaaauuaa

SEQ ID NO: 2635475 - RNA, 19 nt, Homo sapiens
  misc_RNA (1)...(19): siRNA sense strand
cauucgaagaagagcuuua

SEQ ID NO: 2635476 - RNA, 19 nt, Homo sapiens
  misc_RNA (1)...(19): siRNA sense strand
gaaaaugaugagucagaaa

SEQ ID NO: 2635477 - RNA, 19 nt, Homo sapiens
  misc_RNA (1)...(19): siRNA sense strand
aggccaaucaagugaagaa

SEQ ID NO: 2635478 - RNA, 19 nt, Homo sapiens
  misc_RNA (1)...(19): siRNA sense strand
uggcagauuacuuuggaaa

SEQ ID NO: 2635479 - RNA, 19 nt, Homo sapiens
  misc_RNA (1)...(19): siRNA sense strand
cuauaaucaucuagagugu

SEQ ID NO: 2635480 - RNA, 19 nt, Homo sapiens
  misc_RNA (1)...(19): siRNA sense strand
gugaagaaucaugaggaua

SEQ ID NO: 2635481 - RNA, 19 nt, Homo sapiens
  misc_RNA (1)...(19): siRNA sense strand
guucggacaucuagcacua

SEQ ID NO: 2635482 - RNA, 19 nt, Homo sapiens
  misc_RNA (1)...(19): siRNA sense strand
cugcugaaauaaaguguuu

SEQ ID NO: 2635483 - RNA, 19 nt, Homo sapiens
  misc_RNA (1)...(19): siRNA sense strand
ugauauaaaggcugugcaa

SEQ ID NO: 2635484 - RNA, 19 nt, Homo sapiens
  misc_RNA (1)...(19): siRNA sense strand
cauaaucgagggagaguuu

SEQ ID NO: 2635485 - RNA, 19 nt, Homo sapiens
  misc_RNA (1)...(19): siRNA sense strand
ggacaauaauucugaacuc

SEQ ID NO: 2635486 - RNA, 19 nt, Homo sapiens
  misc_RNA (1)...(19): siRNA sense strand
agaagaaguuuguguugau

SEQ ID NO: 2635487 - RNA, 19 nt, Homo sapiens
  misc_RNA (1)...(19): siRNA sense strand
auucaagugaggaggagaa

SEQ ID NO: 2635488 - RNA, 19 nt, Homo sapiens
  misc_RNA (1)...(19): siRNA sense strand
agauaauucuggcaagaga

SEQ ID NO: 2635489 - RNA, 19 nt, Homo sapiens
  misc_RNA (1)...(19): siRNA sense strand
ccagguuguaagagaacua

SEQ ID NO: 2635490 - RNA, 19 nt, Homo sapiens
  misc_RNA (1)...(19): siRNA sense strand
agagagguguacaggaaga

SEQ ID NO: 2635491 - RNA, 19 nt, Homo sapiens
  misc_RNA (1)...(19): siRNA sense strand
gguccaauguaucugcaua

SEQ ID NO: 2635492 - RNA, 19 nt, Homo sapiens
  misc_RNA (1)...(19): siRNA sense strand
ccaaagagacagagucacu

SEQ ID NO: 2635493 - RNA, 19 nt, Homo sapiens
  misc_RNA (1)...(19): siRNA sense strand
aguccaaugaugaacaaua

SEQ ID NO: 2635494 - RNA, 19 nt, Homo sapiens
  misc_RNA (1)...(19): siRNA sense strand
gauggaugucagagccaaa

SEQ ID NO: 2635495 - RNA, 19 nt, Homo sapiens
  misc_RNA (1)...(19): siRNA sense strand
aggaguggaagcaaggaaa

SEQ ID NO: 2635496 - RNA, 19 nt, Homo sapiens
  misc_RNA (1)...(19): siRNA sense strand
ggaccgaucuauagcagga

SEQ ID NO: 2635497 - RNA, 19 nt, Homo sapiens
  misc_RNA (1)...(19): siRNA sense strand
ggaaaaucacccagagguu

SEQ ID NO: 2635498 - RNA, 19 nt, Homo sapiens
  misc_RNA (1)...(19): siRNA sense strand
gaggaguggaagcaaggaa

SEQ ID NO: 2635499 - RNA, 19 nt, Homo sapiens
  misc_RNA (1)...(19): siRNA sense strand
ggaguggaagcaaggaaaa

SEQ ID NO: 2635500 - RNA, 19 nt, Homo sapiens
  misc_RNA (1)...(19): siRNA sense strand
cuauuaaaugugugcacuu

SEQ ID NO: 2635501 - RNA, 19 nt, Homo sapiens
  misc_RNA (1)...(19): siRNA sense strand
uuuuauagcuggagagaug

SEQ ID NO: 2635502 - RNA, 19 nt, Homo sapiens
  misc_RNA (1)...(19): siRNA sense strand
gggugcacagccaaggaaa

SEQ ID NO: 2635503 - RNA, 19 nt, Homo sapiens
  misc_RNA (1)...(19): siRNA sense strand
ucgaauaguaagauggaug

SEQ ID NO: 2635504 - RNA, 19 nt, Homo sapiens
  misc_RNA (1)...(19): siRNA sense strand
uugaaaucuggauggaaau

SEQ ID NO: 2635505 - RNA, 19 nt, Homo sapiens
  misc_RNA (1)...(19): siRNA sense strand
ccuccaagcccgaaccuca

SEQ ID NO: 2635506 - RNA, 19 nt, Homo sapiens
  misc_RNA (1)...(19): siRNA sense strand
ccaggaacgcagaccaaca

SEQ ID NO: 2635507 - RNA, 19 nt, Homo sapiens
  misc_RNA (1)...(19): siRNA sense strand
caggaaaggaaaaggaaaa

SEQ ID NO: 2635508 - RNA, 19 nt, Homo sapiens
  misc_RNA (1)...(19): siRNA sense strand
gcacaaucugcuauagaaa

SEQ ID NO: 2635509 - RNA, 19 nt, Homo sapiens
  misc_RNA (1)...(19): siRNA sense strand
ggaccaaagaagauaaaga

SEQ ID NO: 2635510 - RNA, 19 nt, Homo sapiens
  misc_RNA (1)...(19): siRNA sense strand
uaaaagacucugaggaaaa

SEQ ID NO: 2635511 - RNA, 19 nt, Homo sapiens
  misc_RNA (1)...(19): siRNA sense strand
gacaagaaucggugccaaa

SEQ ID NO: 2635512 - RNA, 19 nt, Homo sapiens
  misc_RNA (1)...(19): siRNA sense strand
ugaaggaaguauuagggua

SEQ ID NO: 2635513 - RNA, 19 nt, Homo sapiens
  misc_RNA (1)...(19): siRNA sense strand
ggguagagucaauugcuaa

SEQ ID NO: 2635514 - RNA, 19 nt, Homo sapiens
  misc_RNA (1)...(19): siRNA sense strand
ggccauugcugaugcacaa

SEQ ID NO: 2635515 - RNA, 19 nt, Homo sapiens
  misc_RNA (1)...(19): siRNA sense strand
gaaagaagaaaaugagcaa

SEQ ID NO: 2635516 - RNA, 19 nt, Homo sapiens
  misc_RNA (1)...(19): siRNA sense strand
uggacgaagcuguggaauu

SEQ ID NO: 2635517 - RNA, 19 nt, Homo sapiens
  misc_RNA (1)...(19): siRNA sense strand
aguaaaagacucugaggaa

SEQ ID NO: 2635518 - RNA, 19 nt, Homo sapiens
  misc_RNA (1)...(19): siRNA sense strand
ugucaaugugugcggauaa

SEQ ID NO: 2635519 - RNA, 19 nt, Homo sapiens
  misc_RNA (1)...(19): siRNA sense strand
gcugaaauuacuggagaaa

SEQ ID NO: 2635520 - RNA, 19 nt, Homo sapiens
  misc_RNA (1)...(19): siRNA sense strand
acaagaagacagagaaugu

SEQ ID NO: 2635521 - RNA, 19 nt, Homo sapiens
  misc_RNA (1)...(19): siRNA sense strand
aaagaugagaacagcauaa

SEQ ID NO: 2635522 - RNA, 19 nt, Homo sapiens
  misc_RNA (1)...(19): siRNA sense strand
agaagcaagcucaggcaaa

SEQ ID NO: 2635523 - RNA, 19 nt, Homo sapiens
  misc_RNA (1)...(19): siRNA sense strand
agauuuggcagaagagcaa

SEQ ID NO: 2635524 - RNA, 19 nt, Homo sapiens
  misc_RNA (1)...(19): siRNA sense strand
cgauggaugggaaggcaaa

SEQ ID NO: 2635525 - RNA, 19 nt, Homo sapiens
  misc_RNA (1)...(19): siRNA sense strand
gauugaacgguuugaaauu

SEQ ID NO: 2635526 - RNA, 19 nt, Homo sapiens
  misc_RNA (1)...(19): siRNA sense strand
guuugaaauuccagagcca

SEQ ID NO: 2635527 - RNA, 19 nt, Homo sapiens
  misc_RNA (1)...(19): siRNA sense strand
uggaauugcuggaaagacu

SEQ ID NO: 2635528 - RNA, 19 nt, Homo sapiens
  misc_RNA (1)...(19): siRNA sense strand
ccgaagaagggaauaauga

SEQ ID NO: 2635529 - RNA, 19 nt, Homo sapiens
  misc_RNA (1)...(19): siRNA sense strand
ccaccaaggcagaauucaa

SEQ ID NO: 2635530 - RNA, 19 nt, Homo sapiens
  misc_RNA (1)...(19): siRNA sense strand
aaagauuucgcaaggaaua

SEQ ID NO: 2635531 - RNA, 19 nt, Homo sapiens
  misc_RNA (1)...(19): siRNA sense strand
gcuaagaucaucaggagga

SEQ ID NO: 2635532 - RNA, 19 nt, Homo sapiens
  misc_RNA (1)...(19): siRNA sense strand
guaaaagacucugaggaaa

SEQ ID NO: 2635533 - RNA, 19 nt, Homo sapiens
  misc_RNA (1)...(19): siRNA sense strand
uugaaagagaccuggaauu

SEQ ID NO: 2635534 - RNA, 19 nt, Homo sapiens
  misc_RNA (1)...(19): siRNA sense strand
gcauuugauccuuaugaaa

SEQ ID NO: 2635535 - RNA, 19 nt, Homo sapiens
  misc_RNA (1)...(19): siRNA sense strand
aggcaaagauauuggacag

SEQ ID NO: 2635536 - RNA, 19 nt, Homo sapiens
  misc_RNA (1)...(19): siRNA sense strand
aaauaucgauggaugggaa

SEQ ID NO: 2635537 - RNA, 19 nt, Homo sapiens
  misc_RNA (1)...(19): siRNA sense strand
ggaugggaaggcaaagaua

SEQ ID NO: 2635538 - RNA, 19 nt, Homo sapiens
  misc_RNA (1)...(19): siRNA sense strand
ccaaagaugagaacagcau

SEQ ID NO: 2635539 - RNA, 19 nt, Homo sapiens
  misc_RNA (1)...(19): siRNA sense strand
gaaccagauaugaggagau

SEQ ID NO: 2635540 - RNA, 19 nt, Homo sapiens
  misc_RNA (1)...(19): siRNA sense strand
agacaguaucuacgggaau

SEQ ID NO: 2635541 - RNA, 19 nt, Homo sapiens
  misc_RNA (1)...(19): siRNA sense strand
uucaaguguaagagggaaa

SEQ ID NO: 2635542 - RNA, 19 nt, Homo sapiens
  misc_RNA (1)...(19): siRNA sense strand
acacuugauccaauagaaa

SEQ ID NO: 2635543 - RNA, 19 nt, Homo sapiens
  misc_RNA (1)...(19): siRNA sense strand
agaccgaagaagggaauaa

SEQ ID NO: 2635544 - RNA, 19 nt, Homo sapiens
  misc_RNA (1)...(19): siRNA sense strand
cuaaagcaauugaaagcau

SEQ ID NO: 2635545 - RNA, 19 nt, Homo sapiens
  misc_RNA (1)...(19): siRNA sense strand
ccaccaauugaauggcaua

SEQ ID NO: 2635546 - RNA, 19 nt, Homo sapiens
  misc_RNA (1)...(19): siRNA sense strand
gaauaauuucaauggcgua

SEQ ID NO: 2635547 - RNA, 19 nt, Homo sapiens
  misc_RNA (1)...(19): siRNA sense strand
gcaggaaaggaaaaggaaa

SEQ ID NO: 2635548 - RNA, 19 nt, Homo sapiens
  misc_RNA (1)...(19): siRNA sense strand
aaacauuaucacaggacau

SEQ ID NO: 2635549 - RNA, 19 nt, Homo sapiens
  misc_RNA (1)...(19): siRNA sense strand
aagaacaagaagacagaga

SEQ ID NO: 2635550 - RNA, 19 nt, Homo sapiens
  misc_RNA (1)...(19): siRNA sense strand
agugcagaauacagguuaa

SEQ ID NO: 2635551 - RNA, 19 nt, Homo sapiens
  misc_RNA (1)...(19): siRNA sense strand
gauugaagacacaguugaa

SEQ ID NO: 2635552 - RNA, 19 nt, Homo sapiens
  misc_RNA (1)...(19): siRNA sense strand
uauuaaaggaggaacugua

SEQ ID NO: 2635553 - RNA, 19 nt, Homo sapiens
  misc_RNA (1)...(19): siRNA sense strand
cgaggagaacaguccgaaa

SEQ ID NO: 2635554 - RNA, 19 nt, Homo sapiens
  misc_RNA (1)...(19): siRNA sense strand
cauuauuaaaggaggaacu

SEQ ID NO: 2635555 - RNA, 19 nt, Homo sapiens
  misc_RNA (1)...(19): siRNA sense strand
cuacugacgcagacaaauu

SEQ ID NO: 2635556 - RNA, 19 nt, Homo sapiens
  misc_RNA (1)...(19): siRNA sense strand
cgcagaagaaagacaguau

SEQ ID NO: 2635557 - RNA, 19 nt, Homo sapiens
  misc_RNA (1)...(19): siRNA sense strand
ggaaaguagcugaaauuac

SEQ ID NO: 2635558 - RNA, 19 nt, Homo sapiens
  misc_RNA (1)...(19): siRNA sense strand
gaggagaacaguccgaaau

SEQ ID NO: 2635559 - RNA, 19 nt, Homo sapiens
  misc_RNA (1)...(19): siRNA sense strand
uggcagaagagcaagcauu

SEQ ID NO: 2635560 - RNA, 19 nt, Homo sapiens
  misc_RNA (1)...(19): siRNA sense strand
agcauguagugaagaacaa

SEQ ID NO: 2635561 - RNA, 19 nt, Homo sapiens
  misc_RNA (1)...(19): siRNA sense strand
ucaccaauuaagaagcaaa

SEQ ID NO: 2635562 - RNA, 19 nt, Homo sapiens
  misc_RNA (1)...(19): siRNA sense strand
caaagauauuggacagugu

SEQ ID NO: 2635563 - RNA, 19 nt, Homo sapiens
  misc_RNA (1)...(19): siRNA sense strand
gcaaaguagaaguggcauc

SEQ ID NO: 2635564 - RNA, 19 nt, Homo sapiens
  misc_RNA (1)...(19): siRNA sense strand
gagaaaggcgagcagccaa

SEQ ID NO: 2635565 - RNA, 19 nt, Homo sapiens
  misc_RNA (1)...(19): siRNA sense strand
gguucagguucaagugcau

SEQ ID NO: 2635566 - RNA, 19 nt, Homo sapiens
  misc_RNA (1)...(19): siRNA sense strand
agcugaaauuacuggagaa

SEQ ID NO: 2635567 - RNA, 19 nt, Homo sapiens
  misc_RNA (1)...(19): siRNA sense strand
gcuagaaaaugcagaaacu

SEQ ID NO: 2635568 - RNA, 19 nt, Homo sapiens
  misc_RNA (1)...(19): siRNA sense strand
aguaagaggaggaaaguag

SEQ ID NO: 2635569 - RNA, 19 nt, Homo sapiens
  misc_RNA (1)...(19): siRNA sense strand
cuccagaacacuuuauaaa

SEQ ID NO: 2635570 - RNA, 19 nt, Homo sapiens
  misc_RNA (1)...(19): siRNA sense strand
gaaggaaguauuaggguac

SEQ ID NO: 2635571 - RNA, 19 nt, Homo sapiens
  misc_RNA (1)...(19): siRNA sense strand
aggaacaacaugaagauaa

SEQ ID NO: 2635572 - RNA, 19 nt, Homo sapiens
  misc_RNA (1)...(19): siRNA sense strand
caauauugacacugguaaa

SEQ ID NO: 2635573 - RNA, 19 nt, Homo sapiens
  misc_RNA (1)...(19): siRNA sense strand
gggaaaagcaggaguucua

SEQ ID NO: 2635574 - RNA, 19 nt, Homo sapiens
  misc_RNA (1)...(19): siRNA sense strand
cauauuuauucaagggcaa

SEQ ID NO: 2635575 - RNA, 19 nt, Homo sapiens
  misc_RNA (1)...(19): siRNA sense strand
cggaaaucacuguggaaaa

SEQ ID NO: 2635576 - RNA, 19 nt, Homo sapiens
  misc_RNA (1)...(19): siRNA sense strand
cgauugaaacucugagaau

SEQ ID NO: 2635577 - RNA, 19 nt, Homo sapiens
  misc_RNA (1)...(19): siRNA sense strand
agagauaggaagagaaaau

SEQ ID NO: 2635578 - RNA, 19 nt, Homo sapiens
  misc_RNA (1)...(19): siRNA sense strand
uccaagaagcagaagaaua

SEQ ID NO: 2635579 - RNA, 19 nt, Homo sapiens
  misc_RNA (1)...(19): siRNA sense strand
aagcauuggaauagaagua

SEQ ID NO: 2635580 - RNA, 19 nt, Homo sapiens
  misc_RNA (1)...(19): siRNA sense strand
aggaaauacaagaagauga

SEQ ID NO: 2635581 - RNA, 19 nt, Homo sapiens
  misc_RNA (1)...(19): siRNA sense strand
ugucuuaaccacagaaauu

SEQ ID NO: 2635582 - RNA, 19 nt, Homo sapiens
  misc_RNA (1)...(19): siRNA sense strand
guacauugcaaccaggaaa

SEQ ID NO: 2635583 - RNA, 19 nt, Homo sapiens
  misc_RNA (1)...(19): siRNA sense strand
cccaaguguaugaaagaaa

SEQ ID NO: 2635584 - RNA, 19 nt, Homo sapiens
  misc_RNA (1)...(19): siRNA sense strand
ugauagaagaacugcagaa

SEQ ID NO: 2635585 - RNA, 19 nt, Homo sapiens
  misc_RNA (1)...(19): siRNA sense strand
auaaaucggcagucagaaa

SEQ ID NO: 2635586 - RNA, 19 nt, Homo sapiens
  misc_RNA (1)...(19): siRNA sense strand
ccagcaauguagaagaaca

SEQ ID NO: 2635587 - RNA, 19 nt, Homo sapiens
  misc_RNA (1)...(19): siRNA sense strand
gcauuggaauagaaguaau

SEQ ID NO: 2635588 - RNA, 19 nt, Homo sapiens
  misc_RNA (1)...(19): siRNA sense strand
agaaaagaaccgauugaaa

SEQ ID NO: 2635589 - RNA, 19 nt, Homo sapiens
  misc_RNA (1)...(19): siRNA sense strand
cuucuaugcugguuggcaa

SEQ ID NO: 2635590 - RNA, 19 nt, Homo sapiens
  misc_RNA (1)...(19): siRNA sense strand
cagaugugcaggagaauga

SEQ ID NO: 2635591 - RNA, 19 nt, Homo sapiens
  misc_RNA (1)...(19): siRNA sense strand
aggagaaugauaaggaaca

SEQ ID NO: 2635592 - RNA, 19 nt, Homo sapiens
  misc_RNA (1)...(19): siRNA sense strand
aggauuugaugaaagcaua

SEQ ID NO: 2635593 - RNA, 19 nt, Homo sapiens
  misc_RNA (1)...(19): siRNA sense strand
guggaaaagaaaaggauuu

SEQ ID NO: 2635594 - RNA, 19 nt, Homo sapiens
  misc_RNA (1)...(19): siRNA sense strand
uagaauaaacugugcagau

SEQ ID NO: 2635595 - RNA, 19 nt, Homo sapiens
  misc_RNA (1)...(19): siRNA sense strand
ugacacugguaaagcagaa

SEQ ID NO: 2635596 - RNA, 19 nt, Homo sapiens
  misc_RNA (1)...(19): siRNA sense strand
gguuuaaagaagcagaaaa

SEQ ID NO: 2635597 - RNA, 19 nt, Homo sapiens
  misc_RNA (1)...(19): siRNA sense strand
gcaauguagaagaacacua

SEQ ID NO: 2635598 - RNA, 19 nt, Homo sapiens
  misc_RNA (1)...(19): siRNA sense strand
caaaagagcagaagaggga

SEQ ID NO: 2635599 - RNA, 19 nt, Homo sapiens
  misc_RNA (1)...(19): siRNA sense strand
uacaagaagaugaagacaa

SEQ ID NO: 2635600 - RNA, 19 nt, Homo sapiens
  misc_RNA (1)...(19): siRNA sense strand
ugauguauguacuaagcaa

SEQ ID NO: 2635601 - RNA, 19 nt, Homo sapiens
  misc_RNA (1)...(19): siRNA sense strand
guauuguggcugaagaaau

SEQ ID NO: 2635602 - RNA, 19 nt, Homo sapiens
  misc_RNA (1)...(19): siRNA sense strand
uaauaugcacauugaggaa

SEQ ID NO: 2635603 - RNA, 19 nt, Homo sapiens
  misc_RNA (1)...(19): siRNA sense strand
aagaagaugaagacaauga

SEQ ID NO: 2635604 - RNA, 19 nt, Homo sapiens
  misc_RNA (1)...(19): siRNA sense strand
cagacacacagaaggcaaa

SEQ ID NO: 2635605 - RNA, 19 nt, Homo sapiens
  misc_RNA (1)...(19): siRNA sense strand
gaaaaugcucugaaaggaa

SEQ ID NO: 2635606 - RNA, 19 nt, Homo sapiens
  misc_RNA (1)...(19): siRNA sense strand
ccagacacacagaaggcaa

SEQ ID NO: 2635607 - RNA, 19 nt, Homo sapiens
  misc_RNA (1)...(19): siRNA sense strand
gcugaagaaauuagaagca

SEQ ID NO: 2635608 - RNA, 19 nt, Homo sapiens
  misc_RNA (1)...(19): siRNA sense strand
cauagaaaaugcucugaaa

SEQ ID NO: 2635609 - RNA, 19 nt, Homo sapiens
  misc_RNA (1)...(19): siRNA sense strand
auaugcacauugaggaaau

SEQ ID NO: 2635610 - RNA, 19 nt, Homo sapiens
  misc_RNA (1)...(19): siRNA sense strand
guacaagaaaggcgagaac

SEQ ID NO: 2635611 - RNA, 19 nt, Homo sapiens
  misc_RNA (1)...(19): siRNA sense strand
cugcaggacuauggaauuu

SEQ ID NO: 2635612 - RNA, 19 nt, Homo sapiens
  misc_RNA (1)...(19): siRNA sense strand
gaaaacagcaaaagaagau

SEQ ID NO: 2635613 - RNA, 19 nt, Homo sapiens
  misc_RNA (1)...(19): siRNA sense strand
ggauuugaugaaagcauau

SEQ ID NO: 2635614 - RNA, 19 nt, Homo sapiens
  misc_RNA (1)...(19): siRNA sense strand
gaaaauuaccuuuggaacu

SEQ ID NO: 2635615 - RNA, 19 nt, Homo sapiens
  misc_RNA (1)...(19): siRNA sense strand
gauguauguacuaagcaaa

SEQ ID NO: 2635616 - RNA, 19 nt, Homo sapiens
  misc_RNA (1)...(19): siRNA sense strand
cacacaugcacaagacaua

SEQ ID NO: 2635617 - RNA, 19 nt, Homo sapiens
  misc_RNA (1)...(19): siRNA sense strand
gaagaaauuagaagcagga

SEQ ID NO: 2635618 - RNA, 19 nt, Homo sapiens
  misc_RNA (1)...(19): siRNA sense strand
caacauauugcucagagaa

SEQ ID NO: 2635619 - RNA, 19 nt, Homo sapiens
  misc_RNA (1)...(19): siRNA sense strand
gacugaaguugcugaagau

SEQ ID NO: 2635620 - RNA, 19 nt, Homo sapiens
  misc_RNA (1)...(19): siRNA sense strand
caugaaaacagcaaaagaa

SEQ ID NO: 2635621 - RNA, 19 nt, Homo sapiens
  misc_RNA (1)...(19): siRNA sense strand
ccggaaaucacuguggaaa

SEQ ID NO: 2635622 - RNA, 19 nt, Homo sapiens
  misc_RNA (1)...(19): siRNA sense strand
uggccaaguauuugcauuu

SEQ ID NO: 2635623 - RNA, 19 nt, Homo sapiens
  misc_RNA (1)...(19): siRNA sense strand
ucaacguggcacuaggaaa

SEQ ID NO: 2635624 - RNA, 19 nt, Homo sapiens
  misc_RNA (1)...(19): siRNA sense strand
agauaaaucggcagucaga

SEQ ID NO: 2635625 - RNA, 19 nt, Homo sapiens
  misc_RNA (1)...(19): siRNA sense strand
aaguauuggcucugaggau

SEQ ID NO: 2635626 - RNA, 19 nt, Homo sapiens
  misc_RNA (1)...(19): siRNA sense strand
ggaacuuacaguggaacua

SEQ ID NO: 2635627 - RNA, 19 nt, Homo sapiens
  misc_RNA (1)...(19): siRNA sense strand
aguuauaguuccagagcuu

SEQ ID NO: 2635628 - RNA, 19 nt, Homo sapiens
  misc_RNA (1)...(19): siRNA sense strand
gcacagagauuaaaccaga

SEQ ID NO: 2635629 - RNA, 19 nt, Homo sapiens
  misc_RNA (1)...(19): siRNA sense strand
gggaaguucaagagaagga

SEQ ID NO: 2635630 - RNA, 19 nt, Homo sapiens
  misc_RNA (1)...(19): siRNA sense strand
uuuaauuauggcugggaua

SEQ ID NO: 2635631 - RNA, 19 nt, Homo sapiens
  misc_RNA (1)...(19): siRNA sense strand
ucucaggauacauuagaaa

SEQ ID NO: 2635632 - RNA, 19 nt, Homo sapiens
  misc_RNA (1)...(19): siRNA sense strand
agaagacauaaguggagaa

SEQ ID NO: 2635633 - RNA, 19 nt, Homo sapiens
  misc_RNA (1)...(19): siRNA sense strand
ugaacuugacagacacaaa

SEQ ID NO: 2635634 - RNA, 19 nt, Homo sapiens
  misc_RNA (1)...(19): siRNA sense strand
acauaaguggagaagagua

SEQ ID NO: 2635635 - RNA, 19 nt, Homo sapiens
  misc_RNA (1)...(19): siRNA sense strand
acgauaugauagugaugau

SEQ ID NO: 2635636 - RNA, 19 nt, Homo sapiens
  misc_RNA (1)...(19): siRNA sense strand
acacaaaauucuacugcau

SEQ ID NO: 2635637 - RNA, 19 nt, Homo sapiens
  misc_RNA (1)...(19): siRNA sense strand
cugggaaguucaagagaag

SEQ ID NO: 2635638 - RNA, 19 nt, Homo sapiens
  misc_RNA (1)...(19): siRNA sense strand
augucuaccucgaaucaaa

SEQ ID NO: 2635639 - RNA, 19 nt, Homo sapiens
  misc_RNA (1)...(19): siRNA sense strand
cagcauggucggugguacu

SEQ ID NO: 2635640 - RNA, 19 nt, Homo sapiens
  misc_RNA (1)...(19): siRNA sense strand
cagaugugccacugaacuu

SEQ ID NO: 2635641 - RNA, 19 nt, Homo sapiens
  misc_RNA (1)...(19): siRNA sense strand
guucaagagaaggaaguuu

SEQ ID NO: 2635642 - RNA, 19 nt, Homo sapiens
  misc_RNA (1)...(19): siRNA sense strand
agagaaggaaguuuaccaa

SEQ ID NO: 2635643 - RNA, 19 nt, Homo sapiens
  misc_RNA (1)...(19): siRNA sense strand
gugaacuugacuugcgcaa

SEQ ID NO: 2635644 - RNA, 19 nt, Homo sapiens
  misc_RNA (1)...(19): siRNA sense strand
aggaaauacuggaagucaa

SEQ ID NO: 2635645 - RNA, 19 nt, Homo sapiens
  misc_RNA (1)...(19): siRNA sense strand
aguuaaaggccuucagcaa

SEQ ID NO: 2635646 - RNA, 19 nt, Homo sapiens
  misc_RNA (1)...(19): siRNA sense strand
ggaaauagaagaacggcuu

SEQ ID NO: 2635647 - RNA, 19 nt, Homo sapiens
  misc_RNA (1)...(19): siRNA sense strand
gcugaaggaaauagaagaa

SEQ ID NO: 2635648 - RNA, 19 nt, Homo sapiens
  misc_RNA (1)...(19): siRNA sense strand
gguucuacaaggaggacaa

SEQ ID NO: 2635649 - RNA, 19 nt, Homo sapiens
  misc_RNA (1)...(19): siRNA sense strand
ugguggagcuugugaacau

SEQ ID NO: 2635650 - RNA, 19 nt, Homo sapiens
  misc_RNA (1)...(19): siRNA sense strand
gcuaugagguagugacgga

SEQ ID NO: 2635651 - RNA, 19 nt, Homo sapiens
  misc_RNA (1)...(19): siRNA sense strand
ccggagaagaugacgauga

SEQ ID NO: 2635652 - RNA, 19 nt, Homo sapiens
  misc_RNA (1)...(19): siRNA sense strand
acaaauauaggcaaagcaa

SEQ ID NO: 2635653 - RNA, 19 nt, Homo sapiens
  misc_RNA (1)...(19): siRNA sense strand
gcuacuacagcgaggguga

SEQ ID NO: 2635654 - RNA, 19 nt, Homo sapiens
  misc_RNA (1)...(19): siRNA sense strand
ccucaguuucagagaauga

SEQ ID NO: 2635655 - RNA, 19 nt, Homo sapiens
  misc_RNA (1)...(19): siRNA sense strand
cugcauuggaguuggauca

SEQ ID NO: 2635656 - RNA, 19 nt, Homo sapiens
  misc_RNA (1)...(19): siRNA sense strand
ucuacaaggaggacaagaa

SEQ ID NO: 2635657 - RNA, 19 nt, Homo sapiens
  misc_RNA (1)...(19): siRNA sense strand
aggaagaagaguugccuga

SEQ ID NO: 2635658 - RNA, 19 nt, Homo sapiens
  misc_RNA (1)...(19): siRNA sense strand
cagacuucauagagguuau

SEQ ID NO: 2635659 - RNA, 19 nt, Homo sapiens
  misc_RNA (1)...(19): siRNA sense strand
aguacgagguuuaagggau

SEQ ID NO: 2635660 - RNA, 19 nt, Homo sapiens
  misc_RNA (1)...(19): siRNA sense strand
ugaacuaguuaaaggccuu

SEQ ID NO: 2635661 - RNA, 19 nt, Homo sapiens
  misc_RNA (1)...(19): siRNA sense strand
uggaaagggacuuggagga

SEQ ID NO: 2635662 - RNA, 19 nt, Homo sapiens
  misc_RNA (1)...(19): siRNA sense strand
uguauaaacaugagcacga

SEQ ID NO: 2635663 - RNA, 19 nt, Homo sapiens
  misc_RNA (1)...(19): siRNA sense strand
gagaagaugacgaugagga

SEQ ID NO: 2635664 - RNA, 19 nt, Homo sapiens
  misc_RNA (1)...(19): siRNA sense strand
cggagaugguggagcuugu

SEQ ID NO: 2635665 - RNA, 19 nt, Homo sapiens
  misc_RNA (1)...(19): siRNA sense strand
guuuaagggauaugcugaa

SEQ ID NO: 2635666 - RNA, 19 nt, Homo sapiens
  misc_RNA (1)...(19): siRNA sense strand
caaaagacucaauggaaga

SEQ ID NO: 2635667 - RNA, 19 nt, Homo sapiens
  misc_RNA (1)...(19): siRNA sense strand
uuccauuacuccugacaaa

SEQ ID NO: 2635668 - RNA, 19 nt, Homo sapiens
  misc_RNA (1)...(19): siRNA sense strand
ccugaugaacgauggauga

SEQ ID NO: 2635669 - RNA, 19 nt, Homo sapiens
  misc_RNA (1)...(19): siRNA sense strand
cagcagugcaauggacaua

SEQ ID NO: 2635670 - RNA, 19 nt, Homo sapiens
  misc_RNA (1)...(19): siRNA sense strand
auggaugagcuaugaagaa

SEQ ID NO: 2635671 - RNA, 19 nt, Homo sapiens
  misc_RNA (1)...(19): siRNA sense strand
ccgccgacacuauggagaa

SEQ ID NO: 2635672 - RNA, 19 nt, Homo sapiens
  misc_RNA (1)...(19): siRNA sense strand
augcguggacagugguuua

SEQ ID NO: 2635673 - RNA, 19 nt, Homo sapiens
  misc_RNA (1)...(19): siRNA sense strand
uggcauccgcccaggaaau

SEQ ID NO: 2635674 - RNA, 19 nt, Homo sapiens
  misc_RNA (1)...(19): siRNA sense strand
gccagcagaugcaggaaaa

SEQ ID NO: 2635675 - RNA, 19 nt, Homo sapiens
  misc_RNA (1)...(19): siRNA sense strand
gguuuaagggauaugcuga

SEQ ID NO: 2635676 - RNA, 19 nt, Homo sapiens
  misc_RNA (1)...(19): siRNA sense strand
ggccagcagaugcaggaaa

SEQ ID NO: 2635677 - RNA, 19 nt, Homo sapiens
  misc_RNA (1)...(19): siRNA sense strand
acaguguggaugaaguaua

SEQ ID NO: 2635678 - RNA, 19 nt, Homo sapiens
  misc_RNA (1)...(19): siRNA sense strand
agaagaggaagaaaguaau

SEQ ID NO: 2635679 - RNA, 19 nt, Homo sapiens
  misc_RNA (1)...(19): siRNA sense strand
aagccacauuagaagacaa

SEQ ID NO: 2635680 - RNA, 19 nt, Homo sapiens
  misc_RNA (1)...(19): siRNA sense strand
gagaaggccuuguggagag

SEQ ID NO: 2635681 - RNA, 19 nt, Homo sapiens
  misc_RNA (1)...(19): siRNA sense strand
ggaaccaggcugauaaaau

SEQ ID NO: 2635682 - RNA, 19 nt, Homo sapiens
  misc_RNA (1)...(19): siRNA sense strand
aauccagacuuugaagaaa

SEQ ID NO: 2635683 - RNA, 19 nt, Homo sapiens
  misc_RNA (1)...(19): siRNA sense strand
ucuuuauagugaugcaaca

SEQ ID NO: 2635684 - RNA, 19 nt, Homo sapiens
  misc_RNA (1)...(19): siRNA sense strand
ggcugaaggaaauagaaga

SEQ ID NO: 2635685 - RNA, 19 nt, Homo sapiens
  misc_RNA (1)...(19): siRNA sense strand
acacuauggagaaucuaua

SEQ ID NO: 2635686 - RNA, 19 nt, Homo sapiens
  misc_RNA (1)...(19): siRNA sense strand
gcugauaaaauaccaguaa

SEQ ID NO: 2635687 - RNA, 19 nt, Homo sapiens
  misc_RNA (1)...(19): siRNA sense strand
gccucagugacgagaacua

SEQ ID NO: 2635688 - RNA, 19 nt, Homo sapiens
  misc_RNA (1)...(19): siRNA sense strand
auccagacuuugaagaaaa

SEQ ID NO: 2635689 - RNA, 19 nt, Homo sapiens
  misc_RNA (1)...(19): siRNA sense strand
gcaaaaggaagaagaguug

SEQ ID NO: 2635690 - RNA, 19 nt, Homo sapiens
  misc_RNA (1)...(19): siRNA sense strand
ugacccaaggagagugcua

SEQ ID NO: 2635691 - RNA, 19 nt, Homo sapiens
  misc_RNA (1)...(19): siRNA sense strand
ucuagaagaggaagaaagu

SEQ ID NO: 2635692 - RNA, 19 nt, Homo sapiens
  misc_RNA (1)...(19): siRNA sense strand
cagacuacccauauuguau

SEQ ID NO: 2635693 - RNA, 19 nt, Homo sapiens
  misc_RNA (1)...(19): siRNA sense strand
aggaaauacuggaagucaa

SEQ ID NO: 2635694 - RNA, 19 nt, Homo sapiens
  misc_RNA (1)...(19): siRNA sense strand
aguuaaaggccuucagcaa

SEQ ID NO: 2635695 - RNA, 19 nt, Homo sapiens
  misc_RNA (1)...(19): siRNA sense strand
ggaaauagaagaacggcuu

SEQ ID NO: 2635696 - RNA, 19 nt, Homo sapiens
  misc_RNA (1)...(19): siRNA sense strand
gcugaaggaaauagaagaa

SEQ ID NO: 2635697 - RNA, 19 nt, Homo sapiens
  misc_RNA (1)...(19): siRNA sense strand
gguucuacaaggaggacaa

SEQ ID NO: 2635698 - RNA, 19 nt, Homo sapiens
  misc_RNA (1)...(19): siRNA sense strand
ugguggagcuugugaacau

SEQ ID NO: 2635699 - RNA, 19 nt, Homo sapiens
  misc_RNA (1)...(19): siRNA sense strand
gcuaugagguagugacgga

SEQ ID NO: 2635700 - RNA, 19 nt, Homo sapiens
  misc_RNA (1)...(19): siRNA sense strand
ccggagaagaugacgauga

SEQ ID NO: 2635701 - RNA, 19 nt, Homo sapiens
  misc_RNA (1)...(19): siRNA sense strand
acaaauauaggcaaagcaa

SEQ ID NO: 2635702 - RNA, 19 nt, Homo sapiens
  misc_RNA (1)...(19): siRNA sense strand
gcuacuacagcgaggguga

SEQ ID NO: 2635703 - RNA, 19 nt, Homo sapiens
  misc_RNA (1)...(19): siRNA sense strand
ccucaguuucagagaauga

SEQ ID NO: 2635704 - RNA, 19 nt, Homo sapiens
  misc_RNA (1)...(19): siRNA sense strand
cugcauuggaguuggauca

SEQ ID NO: 2635705 - RNA, 19 nt, Homo sapiens
  misc_RNA (1)...(19): siRNA sense strand
ucuacaaggaggacaagaa

SEQ ID NO: 2635706 - RNA, 19 nt, Homo sapiens
  misc_RNA (1)...(19): siRNA sense strand
aggaagaagaguugccuga

SEQ ID NO: 2635707 - RNA, 19 nt, Homo sapiens
  misc_RNA (1)...(19): siRNA sense strand
cagacuucauagagguuau

SEQ ID NO: 2635708 - RNA, 19 nt, Homo sapiens
  misc_RNA (1)...(19): siRNA sense strand
aguacgagguuuaagggau

SEQ ID NO: 2635709 - RNA, 19 nt, Homo sapiens
  misc_RNA (1)...(19): siRNA sense strand
ugaacuaguuaaaggccuu

SEQ ID NO: 2635710 - RNA, 19 nt, Homo sapiens
  misc_RNA (1)...(19): siRNA sense strand
uggaaagggacuuggagga

SEQ ID NO: 2635711 - RNA, 19 nt, Homo sapiens
  misc_RNA (1)...(19): siRNA sense strand
uguauaaacaugagcacga

SEQ ID NO: 2635712 - RNA, 19 nt, Homo sapiens
  misc_RNA (1)...(19): siRNA sense strand
gagaagaugacgaugagga

SEQ ID NO: 2635713 - RNA, 19 nt, Homo sapiens
  misc_RNA (1)...(19): siRNA sense strand
cggagaugguggagcuugu

SEQ ID NO: 2635714 - RNA, 19 nt, Homo sapiens
  misc_RNA (1)...(19): siRNA sense strand
guuuaagggauaugcugaa

SEQ ID NO: 2635715 - RNA, 19 nt, Homo sapiens
  misc_RNA (1)...(19): siRNA sense strand
caaaagacucaauggaaga

SEQ ID NO: 2635716 - RNA, 19 nt, Homo sapiens
  misc_RNA (1)...(19): siRNA sense strand
uuccauuacuccugacaaa

SEQ ID NO: 2635717 - RNA, 19 nt, Homo sapiens
  misc_RNA (1)...(19): siRNA sense strand
ccugaugaacgauggauga

SEQ ID NO: 2635718 - RNA, 19 nt, Homo sapiens
  misc_RNA (1)...(19): siRNA sense strand
cagcagugcaauggacaua

SEQ ID NO: 2635719 - RNA, 19 nt, Homo sapiens
  misc_RNA (1)...(19): siRNA sense strand
auggaugagcuaugaagaa

SEQ ID NO: 2635720 - RNA, 19 nt, Homo sapiens
  misc_RNA (1)...(19): siRNA sense strand
ccgccgacacuauggagaa

SEQ ID NO: 2635721 - RNA, 19 nt, Homo sapiens
  misc_RNA (1)...(19): siRNA sense strand
augcguggacagugguuua

SEQ ID NO: 2635722 - RNA, 19 nt, Homo sapiens
  misc_RNA (1)...(19): siRNA sense strand
uggcauccgcccaggaaau

SEQ ID NO: 2635723 - RNA, 19 nt, Homo sapiens
  misc_RNA (1)...(19): siRNA sense strand
gccagcagaugcaggaaaa

SEQ ID NO: 2635724 - RNA, 19 nt, Homo sapiens
  misc_RNA (1)...(19): siRNA sense strand
gguuuaagggauaugcuga

SEQ ID NO: 2635725 - RNA, 19 nt, Homo sapiens
  misc_RNA (1)...(19): siRNA sense strand
ggccagcagaugcaggaaa

SEQ ID NO: 2635726 - RNA, 19 nt, Homo sapiens
  misc_RNA (1)...(19): siRNA sense strand
acaguguggaugaaguaua

SEQ ID NO: 2635727 - RNA, 19 nt, Homo sapiens
  misc_RNA (1)...(19): siRNA sense strand
agaagaggaagaaaguaau

SEQ ID NO: 2635728 - RNA, 19 nt, Homo sapiens
  misc_RNA (1)...(19): siRNA sense strand
aagccacauuagaagacaa

SEQ ID NO: 2635729 - RNA, 19 nt, Homo sapiens
  misc_RNA (1)...(19): siRNA sense strand
gagaaggccuuguggagag

SEQ ID NO: 2635730 - RNA, 19 nt, Homo sapiens
  misc_RNA (1)...(19): siRNA sense strand
ggaaccaggcugauaaaau

SEQ ID NO: 2635731 - RNA, 19 nt, Homo sapiens
  misc_RNA (1)...(19): siRNA sense strand
aauccagacuuugaagaaa

SEQ ID NO: 2635732 - RNA, 19 nt, Homo sapiens
  misc_RNA (1)...(19): siRNA sense strand
ucuuuauagugaugcaaca

SEQ ID NO: 2635733 - RNA, 19 nt, Homo sapiens
  misc_RNA (1)...(19): siRNA sense strand
ggcugaaggaaauagaaga

SEQ ID NO: 2635734 - RNA, 19 nt, Homo sapiens
  misc_RNA (1)...(19): siRNA sense strand
acacuauggagaaucuaua

SEQ ID NO: 2635735 - RNA, 19 nt, Homo sapiens
  misc_RNA (1)...(19): siRNA sense strand
gcugauaaaauaccaguaa

SEQ ID NO: 2635736 - RNA, 19 nt, Homo sapiens
  misc_RNA (1)...(19): siRNA sense strand
gccucagugacgagaacua

SEQ ID NO: 2635737 - RNA, 19 nt, Homo sapiens
  misc_RNA (1)...(19): siRNA sense strand
auccagacuuugaagaaaa

SEQ ID NO: 2635738 - RNA, 19 nt, Homo sapiens
  misc_RNA (1)...(19): siRNA sense strand
gcaaaaggaagaagaguug

SEQ ID NO: 2635739 - RNA, 19 nt, Homo sapiens
  misc_RNA (1)...(19): siRNA sense strand
ugacccaaggagagugcua

SEQ ID NO: 2635740 - RNA, 19 nt, Homo sapiens
  misc_RNA (1)...(19): siRNA sense strand
ucuagaagaggaagaaagu

SEQ ID NO: 2635741 - RNA, 19 nt, Homo sapiens
  misc_RNA (1)...(19): siRNA sense strand
cagacuacccauauuguau

SEQ ID NO: 2635742 - RNA, 19 nt, Homo sapiens
  misc_RNA (1)...(19): siRNA sense strand
aggaggaggaggaggaaga

SEQ ID NO: 2635743 - RNA, 19 nt, Homo sapiens
  misc_RNA (1)...(19): siRNA sense strand
augccaugguugagggaga

SEQ ID NO: 2635744 - RNA, 19 nt, Homo sapiens
  misc_RNA (1)...(19): siRNA sense strand
cgauacgauauguccgaua

SEQ ID NO: 2635745 - RNA, 19 nt, Homo sapiens
  misc_RNA (1)...(19): siRNA sense strand
acgaggaggacgacgaaga

SEQ ID NO: 2635746 - RNA, 19 nt, Homo sapiens
  misc_RNA (1)...(19): siRNA sense strand
ccgauaugaauccgagcua

SEQ ID NO: 2635747 - RNA, 19 nt, Homo sapiens
  misc_RNA (1)...(19): siRNA sense strand
aggaggaggaggaagacga

SEQ ID NO: 2635748 - RNA, 19 nt, Homo sapiens
  misc_RNA (1)...(19): siRNA sense strand
agagcaagguccugagcgu

SEQ ID NO: 2635749 - RNA, 19 nt, Homo sapiens
  misc_RNA (1)...(19): siRNA sense strand
uggaaaccgaaauaacaaa

SEQ ID NO: 2635750 - RNA, 19 nt, Homo sapiens
  misc_RNA (1)...(19): siRNA sense strand
aggcauaagacgugugauu

SEQ ID NO: 2635751 - RNA, 19 nt, Homo sapiens
  misc_RNA (1)...(19): siRNA sense strand
cuuaaagugaggaaagaaa

SEQ ID NO: 2635752 - RNA, 19 nt, Homo sapiens
  misc_RNA (1)...(19): siRNA sense strand
ccuccaaggaccagucaaa

SEQ ID NO: 2635753 - RNA, 19 nt, Homo sapiens
  misc_RNA (1)...(19): siRNA sense strand
ucaugauuccuuugagaaa

SEQ ID NO: 2635754 - RNA, 19 nt, Homo sapiens
  misc_RNA (1)...(19): siRNA sense strand
augacaaagguucgagaaa

SEQ ID NO: 2635755 - RNA, 19 nt, Homo sapiens
  misc_RNA (1)...(19): siRNA sense strand
cagucaaagaagaguuaau

SEQ ID NO: 2635756 - RNA, 19 nt, Homo sapiens
  misc_RNA (1)...(19): siRNA sense strand
ccuaaaccuucgagaucau

SEQ ID NO: 2635757 - RNA, 19 nt, Homo sapiens
  misc_RNA (1)...(19): siRNA sense strand
cauaaauggcuguuguaca

SEQ ID NO: 2635758 - RNA, 19 nt, Homo sapiens
  misc_RNA (1)...(19): siRNA sense strand
gaaacacaugagagagaga

SEQ ID NO: 2635759 - RNA, 19 nt, Homo sapiens
  misc_RNA (1)...(19): siRNA sense strand
gauccggaagauaaagaaa

SEQ ID NO: 2635760 - RNA, 19 nt, Homo sapiens
  misc_RNA (1)...(19): siRNA sense strand
uugacaauauguaccgaaa

SEQ ID NO: 2635761 - RNA, 19 nt, Homo sapiens
  misc_RNA (1)...(19): siRNA sense strand
cuuauugggucaaagaaaa

SEQ ID NO: 2635762 - RNA, 19 nt, Homo sapiens
  misc_RNA (1)...(19): siRNA sense strand
gcuuaaagugaggaaagaa

SEQ ID NO: 2635763 - RNA, 19 nt, Homo sapiens
  misc_RNA (1)...(19): siRNA sense strand
ucuucaacuuggaugggaa

SEQ ID NO: 2635764 - RNA, 19 nt, Homo sapiens
  misc_RNA (1)...(19): siRNA sense strand
cuucaacuuggaugggaaa

SEQ ID NO: 2635765 - RNA, 19 nt, Homo sapiens
  misc_RNA (1)...(19): siRNA sense strand
uggaagugcuaucuggaga

SEQ ID NO: 2635766 - RNA, 19 nt, Homo sapiens
  misc_RNA (1)...(19): siRNA sense strand
aacagaaacacaugagaga

SEQ ID NO: 2635767 - RNA, 19 nt, Homo sapiens
  misc_RNA (1)...(19): siRNA sense strand
ccagguuaugauugacaaa

SEQ ID NO: 2635768 - RNA, 19 nt, Homo sapiens
  misc_RNA (1)...(19): siRNA sense strand
caugagagagagacugaau

SEQ ID NO: 2635769 - RNA, 19 nt, Homo sapiens
  misc_RNA (1)...(19): siRNA sense strand
acuggaaagccauagcaua

SEQ ID NO: 2635770 - RNA, 19 nt, Homo sapiens
  misc_RNA (1)...(19): siRNA sense strand
gcugaggauguucggcaaa

SEQ ID NO: 2635771 - RNA, 19 nt, Homo sapiens
  misc_RNA (1)...(19): siRNA sense strand
agucaacauuccagugcuu

SEQ ID NO: 2635772 - RNA, 19 nt, Homo sapiens
  misc_RNA (1)...(19): siRNA sense strand
ucaacauuccagugcuuaa

SEQ ID NO: 2635773 - RNA, 19 nt, Homo sapiens
  misc_RNA (1)...(19): siRNA sense strand
cggaagauaaagaaaguag

SEQ ID NO: 2635774 - RNA, 19 nt, Homo sapiens
  misc_RNA (1)...(19): siRNA sense strand
gcaaagggcuggagcugug

SEQ ID NO: 2635775 - RNA, 19 nt, Homo sapiens
  misc_RNA (1)...(19): siRNA sense strand
cauuccaguagcaaagaaa

SEQ ID NO: 2635776 - RNA, 19 nt, Homo sapiens
  misc_RNA (1)...(19): siRNA sense strand
gugcauuguuauagcuuuu

SEQ ID NO: 2635777 - RNA, 19 nt, Homo sapiens
  misc_RNA (1)...(19): siRNA sense strand
gugcuuaaagugaggaaag

SEQ ID NO: 2635778 - RNA, 19 nt, Homo sapiens
  misc_RNA (1)...(19): siRNA sense strand
agagaaucaugaagaucca

SEQ ID NO: 2635779 - RNA, 19 nt, Homo sapiens
  misc_RNA (1)...(19): siRNA sense strand
ugauugaagauccggaaga

SEQ ID NO: 2635780 - RNA, 19 nt, Homo sapiens
  misc_RNA (1)...(19): siRNA sense strand
gacaaagguucgagaaaac

SEQ ID NO: 2635781 - RNA, 19 nt, Homo sapiens
  misc_RNA (1)...(19): siRNA sense strand
agccauagcauaacugaau

SEQ ID NO: 2635782 - RNA, 19 nt, Homo sapiens
  misc_RNA (1)...(19): siRNA sense strand
cagcaaaagcuauagaguu

SEQ ID NO: 2635783 - RNA, 19 nt, Homo sapiens
  misc_RNA (1)...(19): siRNA sense strand
cugaaacuggaaagccaua

SEQ ID NO: 2635784 - RNA, 19 nt, Homo sapiens
  misc_RNA (1)...(19): siRNA sense strand
ccauagcauaacugaauca

SEQ ID NO: 2635785 - RNA, 19 nt, Homo sapiens
  misc_RNA (1)...(19): siRNA sense strand
aggucaagauguaacuuca

SEQ ID NO: 2635786 - RNA, 19 nt, Homo sapiens
  misc_RNA (1)...(19): siRNA sense strand
ggaccgacuaccacgucaa

SEQ ID NO: 2635787 - RNA, 19 nt, Homo sapiens
  misc_RNA (1)...(19): siRNA sense strand
gggaggaaggcgagccaaa

SEQ ID NO: 2635788 - RNA, 19 nt, Homo sapiens
  misc_RNA (1)...(19): siRNA sense strand
ccauacagcugaaaggaga

SEQ ID NO: 2635789 - RNA, 19 nt, Homo sapiens
  misc_RNA (1)...(19): siRNA sense strand
uagcaauggcccagaggaa

SEQ ID NO: 2635790 - RNA, 19 nt, Homo sapiens
  misc_RNA (1)...(19): siRNA sense strand
ggaggcagaugaagggaga

SEQ ID NO: 2635791 - RNA, 19 nt, Homo sapiens
  misc_RNA (1)...(19): siRNA sense strand
uaacaaagauggagagacc

SEQ ID NO: 2635792 - RNA, 19 nt, Homo sapiens
  misc_RNA (1)...(19): siRNA sense strand
caaauaacaaagauggaga

SEQ ID NO: 2635793 - RNA, 19 nt, Homo sapiens
  misc_RNA (1)...(19): siRNA sense strand
gcucugaggaugaggagga

SEQ ID NO: 2635794 - RNA, 19 nt, Homo sapiens
  misc_RNA (1)...(19): siRNA sense strand
cugaaagggcaucgaucua

SEQ ID NO: 2635795 - RNA, 19 nt, Homo sapiens
  misc_RNA (1)...(19): siRNA sense strand
aguuugacaaucaggguua

SEQ ID NO: 2635796 - RNA, 19 nt, Homo sapiens
  misc_RNA (1)...(19): siRNA sense strand
aggaugaggaggagcugaa

SEQ ID NO: 2635797 - RNA, 19 nt, Homo sapiens
  misc_RNA (1)...(19): siRNA sense strand
cgugauaacucgucccuga

SEQ ID NO: 2635798 - RNA, 19 nt, Homo sapiens
  misc_RNA (1)...(19): siRNA sense strand
caaaggaaggagugggacu

SEQ ID NO: 2635799 - RNA, 19 nt, Homo sapiens
  misc_RNA (1)...(19): siRNA sense strand
agguggaacuagacacaga

SEQ ID NO: 2635800 - RNA, 19 nt, Homo sapiens
  misc_RNA (1)...(19): siRNA sense strand
cauagaaucaguugagcga

SEQ ID NO: 2635801 - RNA, 19 nt, Homo sapiens
  misc_RNA (1)...(19): siRNA sense strand
ccucaaaaggcaacgaauu

SEQ ID NO: 2635802 - RNA, 19 nt, Homo sapiens
  misc_RNA (1)...(19): siRNA sense strand
ccuccaugauguugaaagu

SEQ ID NO: 2635803 - RNA, 19 nt, Homo sapiens
  misc_RNA (1)...(19): siRNA sense strand
guguacgauucaacagcaa

SEQ ID NO: 2635804 - RNA, 19 nt, Homo sapiens
  misc_RNA (1)...(19): siRNA sense strand
agacaacccgagaagacaa

SEQ ID NO: 2635805 - RNA, 19 nt, Homo sapiens
  misc_RNA (1)...(19): siRNA sense strand
acaauaacgggcagaacuu

SEQ ID NO: 2635806 - RNA, 19 nt, Homo sapiens
  misc_RNA (1)...(19): siRNA sense strand
ugauguugaaagugagaca

SEQ ID NO: 2635807 - RNA, 19 nt, Homo sapiens
  misc_RNA (1)...(19): siRNA sense strand
agcuggaggugguggccua

SEQ ID NO: 2635808 - RNA, 19 nt, Homo sapiens
  misc_RNA (1)...(19): siRNA sense strand
agaugaagggagagcagga

SEQ ID NO: 2635809 - RNA, 19 nt, Homo sapiens
  misc_RNA (1)...(19): siRNA sense strand
uggaggcaaugaugagcaa

SEQ ID NO: 2635810 - RNA, 19 nt, Homo sapiens
  misc_RNA (1)...(19): siRNA sense strand
caacacuuacauuggagaa

SEQ ID NO: 2635811 - RNA, 19 nt, Homo sapiens
  misc_RNA (1)...(19): siRNA sense strand
cuguacauguggagaauuc

SEQ ID NO: 2635812 - RNA, 19 nt, Homo sapiens
  misc_RNA (1)...(19): siRNA sense strand
augaggaggagcugaauga

SEQ ID NO: 2635813 - RNA, 19 nt, Homo sapiens
  misc_RNA (1)...(19): siRNA sense strand
caaagauuguugcgggucu

SEQ ID NO: 2635814 - RNA, 19 nt, Homo sapiens
  misc_RNA (1)...(19): siRNA sense strand
ggagaaugucugugaggug

SEQ ID NO: 2635815 - RNA, 19 nt, Homo sapiens
  misc_RNA (1)...(19): siRNA sense strand
acauuggagaagacaacua

SEQ ID NO: 2635816 - RNA, 19 nt, Homo sapiens
  misc_RNA (1)...(19): siRNA sense strand
cuuccacgcuagagauuca

SEQ ID NO: 2635817 - RNA, 19 nt, Homo sapiens
  misc_RNA (1)...(19): siRNA sense strand
aguaaggaagccugucuaa

SEQ ID NO: 2635818 - RNA, 19 nt, Homo sapiens
  misc_RNA (1)...(19): siRNA sense strand
cugugagcccagugaauga

SEQ ID NO: 2635819 - RNA, 19 nt, Homo sapiens
  misc_RNA (1)...(19): siRNA sense strand
agaucaaaguggaugaccu

SEQ ID NO: 2635820 - RNA, 19 nt, Homo sapiens
  misc_RNA (1)...(19): siRNA sense strand
uccagaagcagguggcauu

SEQ ID NO: 2635821 - RNA, 19 nt, Homo sapiens
  misc_RNA (1)...(19): siRNA sense strand
auuggaagauacagauuca

SEQ ID NO: 2635822 - RNA, 19 nt, Homo sapiens
  misc_RNA (1)...(19): siRNA sense strand
ccuccucagagaagaaauu

SEQ ID NO: 2635823 - RNA, 19 nt, Homo sapiens
  misc_RNA (1)...(19): siRNA sense strand
gaaugaacgccgagccucu

SEQ ID NO: 2635824 - RNA, 19 nt, Homo sapiens
  misc_RNA (1)...(19): siRNA sense strand
cagaggugccagaggguac

SEQ ID NO: 2635825 - RNA, 19 nt, Homo sapiens
  misc_RNA (1)...(19): siRNA sense strand
guuugugaauguuaccuaa

SEQ ID NO: 2635826 - RNA, 19 nt, Homo sapiens
  misc_RNA (1)...(19): siRNA sense strand
gggcuggagcucugacuca

SEQ ID NO: 2635827 - RNA, 19 nt, Homo sapiens
  misc_RNA (1)...(19): siRNA sense strand
accaagaagcucaauggaa

SEQ ID NO: 2635828 - RNA, 19 nt, Homo sapiens
  misc_RNA (1)...(19): siRNA sense strand
ggacauuagccauggccaa

SEQ ID NO: 2635829 - RNA, 19 nt, Homo sapiens
  misc_RNA (1)...(19): siRNA sense strand
cggauagagcagaggaaga

SEQ ID NO: 2635830 - RNA, 19 nt, Homo sapiens
  misc_RNA (1)...(19): siRNA sense strand
gcuuagaaucucagggcca

SEQ ID NO: 2635831 - RNA, 19 nt, Homo sapiens
  misc_RNA (1)...(19): siRNA sense strand
gggccaugucuucaggaaa

SEQ ID NO: 2635832 - RNA, 19 nt, Homo sapiens
  misc_RNA (1)...(19): siRNA sense strand
gcugaaggcuggagaggac

SEQ ID NO: 2635833 - RNA, 19 nt, Homo sapiens
  misc_RNA (1)...(19): siRNA sense strand
gcuuugaugagaaggccua

SEQ ID NO: 2635834 - RNA, 19 nt, Homo sapiens
  misc_RNA (1)...(19): siRNA sense strand
gcagaaguguggauggaug

SEQ ID NO: 2635835 - RNA, 19 nt, Homo sapiens
  misc_RNA (1)...(19): siRNA sense strand
gucuaugacugcuggacau

SEQ ID NO: 2635836 - RNA, 19 nt, Homo sapiens
  misc_RNA (1)...(19): siRNA sense strand
gcucauugugacaggaacu

SEQ ID NO: 2635837 - RNA, 19 nt, Homo sapiens
  misc_RNA (1)...(19): siRNA sense strand
cagaaauggaggagaaaag

SEQ ID NO: 2635838 - RNA, 19 nt, Homo sapiens
  misc_RNA (1)...(19): siRNA sense strand
aggucaagugccugcgcaa

SEQ ID NO: 2635839 - RNA, 19 nt, Homo sapiens
  misc_RNA (1)...(19): siRNA sense strand
cagaggaagaagaugaacu

SEQ ID NO: 2635840 - RNA, 19 nt, Homo sapiens
  misc_RNA (1)...(19): siRNA sense strand
gagcagaagaugacccgga

SEQ ID NO: 2635841 - RNA, 19 nt, Homo sapiens
  misc_RNA (1)...(19): siRNA sense strand
aggaagaagaugaacugca

SEQ ID NO: 2635842 - RNA, 19 nt, Homo sapiens
  misc_RNA (1)...(19): siRNA sense strand
uggagaacgucuacccaga

SEQ ID NO: 2635843 - RNA, 19 nt, Homo sapiens
  misc_RNA (1)...(19): siRNA sense strand
ccgugaagccauaggcaaa

SEQ ID NO: 2635844 - RNA, 19 nt, Homo sapiens
  misc_RNA (1)...(19): siRNA sense strand
gcgcagugcuacaaggaca

SEQ ID NO: 2635845 - RNA, 19 nt, Homo sapiens
  misc_RNA (1)...(19): siRNA sense strand
cgaugcucccagagagaaa

SEQ ID NO: 2635846 - RNA, 19 nt, Homo sapiens
  misc_RNA (1)...(19): siRNA sense strand
ucucggaggagcagagcaa

SEQ ID NO: 2635847 - RNA, 19 nt, Homo sapiens
  misc_RNA (1)...(19): siRNA sense strand
gcaagacgguggaagccau

SEQ ID NO: 2635848 - RNA, 19 nt, Homo sapiens
  misc_RNA (1)...(19): siRNA sense strand
ucggaggagcagagcaaga

SEQ ID NO: 2635849 - RNA, 19 nt, Homo sapiens
  misc_RNA (1)...(19): siRNA sense strand
acaccaacgugauucggua

SEQ ID NO: 2635850 - RNA, 19 nt, Homo sapiens
  misc_RNA (1)...(19): siRNA sense strand
gggagaacuucaaggcccu

SEQ ID NO: 2635851 - RNA, 19 nt, Homo sapiens
  misc_RNA (1)...(19): siRNA sense strand
cuaugaacgagucaaggaa

SEQ ID NO: 2635852 - RNA, 19 nt, Homo sapiens
  misc_RNA (1)...(19): siRNA sense strand
agaaggaaggggagaacuu

SEQ ID NO: 2635853 - RNA, 19 nt, Homo sapiens
  misc_RNA (1)...(19): siRNA sense strand
ugaagaaacgcaagggcaa

SEQ ID NO: 2635854 - RNA, 19 nt, Homo sapiens
  misc_RNA (1)...(19): siRNA sense strand
cagccagaccauagagaau

SEQ ID NO: 2635855 - RNA, 19 nt, Homo sapiens
  misc_RNA (1)...(19): siRNA sense strand
ggauauaagcaguggucgu

SEQ ID NO: 2635856 - RNA, 19 nt, Homo sapiens
  misc_RNA (1)...(19): siRNA sense strand
ggaguuugcucguggagga

SEQ ID NO: 2635857 - RNA, 19 nt, Homo sapiens
  misc_RNA (1)...(19): siRNA sense strand
uggaagagauuauuggcau

SEQ ID NO: 2635858 - RNA, 19 nt, Homo sapiens
  misc_RNA (1)...(19): siRNA sense strand
gcagauugccagagggaug

SEQ ID NO: 2635859 - RNA, 19 nt, Homo sapiens
  misc_RNA (1)...(19): siRNA sense strand
agaagaaccaggaggaacu

SEQ ID NO: 2635860 - RNA, 19 nt, Homo sapiens
  misc_RNA (1)...(19): siRNA sense strand
agaauggagaccugagcaa

SEQ ID NO: 2635861 - RNA, 19 nt, Homo sapiens
  misc_RNA (1)...(19): siRNA sense strand
cagugaaggcccagggagu

SEQ ID NO: 2635862 - RNA, 19 nt, Homo sapiens
  misc_RNA (1)...(19): siRNA sense strand
ggaagagauuauuggcauc

SEQ ID NO: 2635863 - RNA, 19 nt, Homo sapiens
  misc_RNA (1)...(19): siRNA sense strand
gcuucaaacgagauccuaa

SEQ ID NO: 2635864 - RNA, 19 nt, Homo sapiens
  misc_RNA (1)...(19): siRNA sense strand
cagccgagacccaggugaa

SEQ ID NO: 2635865 - RNA, 19 nt, Homo sapiens
  misc_RNA (1)...(19): siRNA sense strand
ccuuaaguccagcaacaua

SEQ ID NO: 2635866 - RNA, 19 nt, Homo sapiens
  misc_RNA (1)...(19): siRNA sense strand
cuucugauuuccagcacaa

SEQ ID NO: 2635867 - RNA, 19 nt, Homo sapiens
  misc_RNA (1)...(19): siRNA sense strand
agccacaggccuaggguuu

SEQ ID NO: 2635868 - RNA, 19 nt, Homo sapiens
  misc_RNA (1)...(19): siRNA sense strand
agucccugguagauggaua

SEQ ID NO: 2635869 - RNA, 19 nt, Homo sapiens
  misc_RNA (1)...(19): siRNA sense strand
ucaagaaggaggagcccau

SEQ ID NO: 2635870 - RNA, 19 nt, Homo sapiens
  misc_RNA (1)...(19): siRNA sense strand
acuggaaacacgagauuca

SEQ ID NO: 2635871 - RNA, 19 nt, Homo sapiens
  misc_RNA (1)...(19): siRNA sense strand
gugaagaaacgcaagggca

SEQ ID NO: 2635872 - RNA, 19 nt, Homo sapiens
  misc_RNA (1)...(19): siRNA sense strand
accuuugaauagaguguua

SEQ ID NO: 2635873 - RNA, 19 nt, Homo sapiens
  misc_RNA (1)...(19): siRNA sense strand
cuacuuacaugaugaggca

SEQ ID NO: 2635874 - RNA, 19 nt, Homo sapiens
  misc_RNA (1)...(19): siRNA sense strand
ggugaagggcccaaggagu

SEQ ID NO: 2635875 - RNA, 19 nt, Homo sapiens
  misc_RNA (1)...(19): siRNA sense strand
ucaccuuggaagagauuau

SEQ ID NO: 2635876 - RNA, 19 nt, Homo sapiens
  misc_RNA (1)...(19): siRNA sense strand
cauagagaauguucgccaa

SEQ ID NO: 2635877 - RNA, 19 nt, Homo sapiens
  misc_RNA (1)...(19): siRNA sense strand
ccuccaucuccgagugcaa

SEQ ID NO: 2635878 - RNA, 19 nt, Homo sapiens
  misc_RNA (1)...(19): siRNA sense strand
gggaggaggaggagaagag

SEQ ID NO: 2635879 - RNA, 19 nt, Homo sapiens
  misc_RNA (1)...(19): siRNA sense strand
acuuacaugaugaggcaau

SEQ ID NO: 2635880 - RNA, 19 nt, Homo sapiens
  misc_RNA (1)...(19): siRNA sense strand
gggaguugcugacugguga

SEQ ID NO: 2635881 - RNA, 19 nt, Homo sapiens
  misc_RNA (1)...(19): siRNA sense strand
uagaguguuaucugggaaa

SEQ ID NO: 2635882 - RNA, 19 nt, Homo sapiens
  misc_RNA (1)...(19): siRNA sense strand
ccauagagaauguucgcca

SEQ ID NO: 2635883 - RNA, 19 nt, Homo sapiens
  misc_RNA (1)...(19): siRNA sense strand
ucacgaauauccuggacca

SEQ ID NO: 2635884 - RNA, 19 nt, Homo sapiens
  misc_RNA (1)...(19): siRNA sense strand
uggccgagcgggagauuga

SEQ ID NO: 2635885 - RNA, 19 nt, Homo sapiens
  misc_RNA (1)...(19): siRNA sense strand
cccagggaguggagagagu

SEQ ID NO: 2635886 - RNA, 19 nt, Homo sapiens
  misc_RNA (1)...(19): siRNA sense strand
cuuaugagauccagcagga

SEQ ID NO: 2635887 - RNA, 19 nt, Homo sapiens
  misc_RNA (1)...(19): siRNA sense strand
cggccguguucgaguacga

SEQ ID NO: 2635888 - RNA, 19 nt, Homo sapiens
  misc_RNA (1)...(19): siRNA sense strand
ccaucgacauugaagagga

SEQ ID NO: 2635889 - RNA, 19 nt, Homo sapiens
  misc_RNA (1)...(19): siRNA sense strand
aggccaagcucuucgccau

SEQ ID NO: 2635890 - RNA, 19 nt, Homo sapiens
  misc_RNA (1)...(19): siRNA sense strand
gugcagauugccagaggga

SEQ ID NO: 2635891 - RNA, 19 nt, Homo sapiens
  misc_RNA (1)...(19): siRNA sense strand
aagggcaaguucaggaaga

SEQ ID NO: 2635892 - RNA, 19 nt, Homo sapiens
  misc_RNA (1)...(19): siRNA sense strand
ggaccuuugaauagagugu

SEQ ID NO: 2635893 - RNA, 19 nt, Homo sapiens
  misc_RNA (1)...(19): siRNA sense strand
ugaauugggcugugcagau

SEQ ID NO: 2635894 - RNA, 19 nt, Homo sapiens
  misc_RNA (1)...(19): siRNA sense strand
cauggaagacugcuggaau

SEQ ID NO: 2635895 - RNA, 19 nt, Homo sapiens
  misc_RNA (1)...(19): siRNA sense strand
ccaaagaagaagggacgga

SEQ ID NO: 2635896 - RNA, 19 nt, Homo sapiens
  misc_RNA (1)...(19): siRNA sense strand
gcuccgacagcgaugaaau

SEQ ID NO: 2635897 - RNA, 19 nt, Homo sapiens
  misc_RNA (1)...(19): siRNA sense strand
gggccaaagaaaaggaacu

SEQ ID NO: 2635898 - RNA, 19 nt, Homo sapiens
  misc_RNA (1)...(19): siRNA sense strand
ggagcaggaauguugaaaa

SEQ ID NO: 2635899 - RNA, 19 nt, Homo sapiens
  misc_RNA (1)...(19): siRNA sense strand
cagagacgugagaaagcua

SEQ ID NO: 2635900 - RNA, 19 nt, Homo sapiens
  misc_RNA (1)...(19): siRNA sense strand
ucgacauugaagaggauga

SEQ ID NO: 2635901 - RNA, 19 nt, Homo sapiens
  misc_RNA (1)...(19): siRNA sense strand
ccugcaaauuggagagaaa

SEQ ID NO: 2635902 - RNA, 19 nt, Homo sapiens
  misc_RNA (1)...(19): siRNA sense strand
aggaagaagaagaaggaaa

SEQ ID NO: 2635903 - RNA, 19 nt, Homo sapiens
  misc_RNA (1)...(19): siRNA sense strand
cgagauaggaagagagaga

SEQ ID NO: 2635904 - RNA, 19 nt, Homo sapiens
  misc_RNA (1)...(19): siRNA sense strand
cgaauuagaccauggauua

SEQ ID NO: 2635905 - RNA, 19 nt, Homo sapiens
  misc_RNA (1)...(19): siRNA sense strand
cgggaaagagagagagaga

SEQ ID NO: 2635906 - RNA, 19 nt, Homo sapiens
  misc_RNA (1)...(19): siRNA sense strand
cgugaaagggaacgagaaa

SEQ ID NO: 2635907 - RNA, 19 nt, Homo sapiens
  misc_RNA (1)...(19): siRNA sense strand
aagaaaacuccgagagaaa

SEQ ID NO: 2635908 - RNA, 19 nt, Homo sapiens
  misc_RNA (1)...(19): siRNA sense strand
gcuuaaaggcuaaagaaaa

SEQ ID NO: 2635909 - RNA, 19 nt, Homo sapiens
  misc_RNA (1)...(19): siRNA sense strand
aaucagaagaggaggaaga

SEQ ID NO: 2635910 - RNA, 19 nt, Homo sapiens
  misc_RNA (1)...(19): siRNA sense strand
agaagaaagaagaagagaa

SEQ ID NO: 2635911 - RNA, 19 nt, Homo sapiens
  misc_RNA (1)...(19): siRNA sense strand
gggaaaucagagaacgaaa

SEQ ID NO: 2635912 - RNA, 19 nt, Homo sapiens
  misc_RNA (1)...(19): siRNA sense strand
ucguuaaaguugaugcaaa

SEQ ID NO: 2635913 - RNA, 19 nt, Homo sapiens
  misc_RNA (1)...(19): siRNA sense strand
cgccuuaagaauugggaaa

SEQ ID NO: 2635914 - RNA, 19 nt, Homo sapiens
  misc_RNA (1)...(19): siRNA sense strand
cccaaauauuacagaggaa

SEQ ID NO: 2635915 - RNA, 19 nt, Homo sapiens
  misc_RNA (1)...(19): siRNA sense strand
cagcaaauucagagacaca

SEQ ID NO: 2635916 - RNA, 19 nt, Homo sapiens
  misc_RNA (1)...(19): siRNA sense strand
uggaagaagagaaaggcaa

SEQ ID NO: 2635917 - RNA, 19 nt, Homo sapiens
  misc_RNA (1)...(19): siRNA sense strand
aaauaaagcaagagccaga

SEQ ID NO: 2635918 - RNA, 19 nt, Homo sapiens
  misc_RNA (1)...(19): siRNA sense strand
agaaagaagaagagaaaug

SEQ ID NO: 2635919 - RNA, 19 nt, Homo sapiens
  misc_RNA (1)...(19): siRNA sense strand
ggcuuaaaggcuaaagaaa

SEQ ID NO: 2635920 - RNA, 19 nt, Homo sapiens
  misc_RNA (1)...(19): siRNA sense strand
agacaugcuuauaagacaa

SEQ ID NO: 2635921 - RNA, 19 nt, Homo sapiens
  misc_RNA (1)...(19): siRNA sense strand
uagaaauggaagaagacaa

SEQ ID NO: 2635922 - RNA, 19 nt, Homo sapiens
  misc_RNA (1)...(19): siRNA sense strand
ggagagaaagagagaggga

SEQ ID NO: 2635923 - RNA, 19 nt, Homo sapiens
  misc_RNA (1)...(19): siRNA sense strand
agagagagggagcgugaaa

SEQ ID NO: 2635924 - RNA, 19 nt, Homo sapiens
  misc_RNA (1)...(19): siRNA sense strand
agaagaagaaagaagaaga

SEQ ID NO: 2635925 - RNA, 19 nt, Homo sapiens
  misc_RNA (1)...(19): siRNA sense strand
ggauggaacaagaggcuga

SEQ ID NO: 2635926 - RNA, 19 nt, Homo sapiens
  misc_RNA (1)...(19): siRNA sense strand
cuggaugaauggaaagcaa

SEQ ID NO: 2635927 - RNA, 19 nt, Homo sapiens
  misc_RNA (1)...(19): siRNA sense strand
augaagaagccuuggauga

SEQ ID NO: 2635928 - RNA, 19 nt, Homo sapiens
  misc_RNA (1)...(19): siRNA sense strand
aaagagagagagagagaga

SEQ ID NO: 2635929 - RNA, 19 nt, Homo sapiens
  misc_RNA (1)...(19): siRNA sense strand
gggaaugcaaggccagaaa

SEQ ID NO: 2635930 - RNA, 19 nt, Homo sapiens
  misc_RNA (1)...(19): siRNA sense strand
aagacaggaaauugagaaa

SEQ ID NO: 2635931 - RNA, 19 nt, Homo sapiens
  misc_RNA (1)...(19): siRNA sense strand
cgggaacgagaaagggaaa

SEQ ID NO: 2635932 - RNA, 19 nt, Homo sapiens
  misc_RNA (1)...(19): siRNA sense strand
ggauuauggugaagaugau

SEQ ID NO: 2635933 - RNA, 19 nt, Homo sapiens
  misc_RNA (1)...(19): siRNA sense strand
aaacagaagccaagaaaau

SEQ ID NO: 2635934 - RNA, 19 nt, Homo sapiens
  misc_RNA (1)...(19): siRNA sense strand
cgagaaagggaaagagaac

SEQ ID NO: 2635935 - RNA, 19 nt, Homo sapiens
  misc_RNA (1)...(19): siRNA sense strand
agagagaacgagagcgaga

SEQ ID NO: 2635936 - RNA, 19 nt, Homo sapiens
  misc_RNA (1)...(19): siRNA sense strand
gaagaagagaaauggccaa

SEQ ID NO: 2635937 - RNA, 19 nt, Homo sapiens
  misc_RNA (1)...(19): siRNA sense strand
agagagagaacgagagcga

SEQ ID NO: 2635938 - RNA, 19 nt, Homo sapiens
  misc_RNA (1)...(19): siRNA sense strand
cgagagagagagcgagaga

SEQ ID NO: 2635939 - RNA, 19 nt, Homo sapiens
  misc_RNA (1)...(19): siRNA sense strand
cuguaaacacugaagaaaa

SEQ ID NO: 2635940 - RNA, 19 nt, Homo sapiens
  misc_RNA (1)...(19): siRNA sense strand
guucuaagguuauggcuca

SEQ ID NO: 2635941 - RNA, 19 nt, Homo sapiens
  misc_RNA (1)...(19): siRNA sense strand
aggaaaagaaggaggacau

SEQ ID NO: 2635942 - RNA, 19 nt, Homo sapiens
  misc_RNA (1)...(19): siRNA sense strand
acaaauaaagcaagagcca

SEQ ID NO: 2635943 - RNA, 19 nt, Homo sapiens
  misc_RNA (1)...(19): siRNA sense strand
cguuaaaguugaugcaaag

SEQ ID NO: 2635944 - RNA, 19 nt, Homo sapiens
  misc_RNA (1)...(19): siRNA sense strand
agaaagaacgggagcggga

SEQ ID NO: 2635945 - RNA, 19 nt, Homo sapiens
  misc_RNA (1)...(19): siRNA sense strand
cgagaacgggaacgagaaa

SEQ ID NO: 2635946 - RNA, 19 nt, Homo sapiens
  misc_RNA (1)...(19): siRNA sense strand
cauccaggcuuaaaggcua

SEQ ID NO: 2635947 - RNA, 19 nt, Homo sapiens
  misc_RNA (1)...(19): siRNA sense strand
agagaagaagaaagaagaa

SEQ ID NO: 2635948 - RNA, 19 nt, Homo sapiens
  misc_RNA (1)...(19): siRNA sense strand
augcaaagacaaaggcaca

SEQ ID NO: 2635949 - RNA, 19 nt, Homo sapiens
  misc_RNA (1)...(19): siRNA sense strand
aauggaaagcaaagaagaa

SEQ ID NO: 2635950 - RNA, 19 nt, Homo sapiens
  misc_RNA (1)...(19): siRNA sense strand
agagagagcgagagaggga

SEQ ID NO: 2635951 - RNA, 19 nt, Homo sapiens
  misc_RNA (1)...(19): siRNA sense strand
cgggagcgagaaagagaaa

SEQ ID NO: 2635952 - RNA, 19 nt, Homo sapiens
  misc_RNA (1)...(19): siRNA sense strand
cagaugaacgagauaggaa

SEQ ID NO: 2635953 - RNA, 19 nt, Homo sapiens
  misc_RNA (1)...(19): siRNA sense strand
ggaagagagagaaggagga

SEQ ID NO: 2635954 - RNA, 19 nt, Homo sapiens
  misc_RNA (1)...(19): siRNA sense strand
aagaugaagaagaugcaua

SEQ ID NO: 2635955 - RNA, 19 nt, Homo sapiens
  misc_RNA (1)...(19): siRNA sense strand
cgaaagaaaacccgggaau

SEQ ID NO: 2635956 - RNA, 19 nt, Homo sapiens
  misc_RNA (1)...(19): siRNA sense strand
aagaggagccagagcaaaa

SEQ ID NO: 2635957 - RNA, 19 nt, Homo sapiens
  misc_RNA (1)...(19): siRNA sense strand
cagagaucgugaaagggaa

SEQ ID NO: 2635958 - RNA, 19 nt, Homo sapiens
  misc_RNA (1)...(19): siRNA sense strand
ccaugguacuugaugaaga

SEQ ID NO: 2635959 - RNA, 19 nt, Homo sapiens
  misc_RNA (1)...(19): siRNA sense strand
agacaaaggcacagcugga

SEQ ID NO: 2635960 - RNA, 19 nt, Homo sapiens
  misc_RNA (1)...(19): siRNA sense strand
acucaaaggcacagguaga

SEQ ID NO: 2635961 - RNA, 19 nt, Homo sapiens
  misc_RNA (1)...(19): siRNA sense strand
ugucgaugaucuaggaaaa

SEQ ID NO: 2635962 - RNA, 19 nt, Homo sapiens
  misc_RNA (1)...(19): siRNA sense strand
gaucaaagcuggaagagug

SEQ ID NO: 2635963 - RNA, 19 nt, Homo sapiens
  misc_RNA (1)...(19): siRNA sense strand
cugaaaggcuacaagcuca

SEQ ID NO: 2635964 - RNA, 19 nt, Homo sapiens
  misc_RNA (1)...(19): siRNA sense strand
uggaagugcuggacggcca

SEQ ID NO: 2635965 - RNA, 19 nt, Homo sapiens
  misc_RNA (1)...(19): siRNA sense strand
aagaaagaccccagauaau

SEQ ID NO: 2635966 - RNA, 19 nt, Homo sapiens
  misc_RNA (1)...(19): siRNA sense strand
caaagcuggaagagugaau

SEQ ID NO: 2635967 - RNA, 19 nt, Homo sapiens
  misc_RNA (1)...(19): siRNA sense strand
ucuauggaggugagccaaa

SEQ ID NO: 2635968 - RNA, 19 nt, Homo sapiens
  misc_RNA (1)...(19): siRNA sense strand
ggcuacaagcucaugggaa

SEQ ID NO: 2635969 - RNA, 19 nt, Homo sapiens
  misc_RNA (1)...(19): siRNA sense strand
cgaagaucugaaugaugua

SEQ ID NO: 2635970 - RNA, 19 nt, Homo sapiens
  misc_RNA (1)...(19): siRNA sense strand
uuacagagguccugggcaa

SEQ ID NO: 2635971 - RNA, 19 nt, Homo sapiens
  misc_RNA (1)...(19): siRNA sense strand
cggccagauaauagagaua

SEQ ID NO: 2635972 - RNA, 19 nt, Homo sapiens
  misc_RNA (1)...(19): siRNA sense strand
cgggauaagaugaugggua

SEQ ID NO: 2635973 - RNA, 19 nt, Homo sapiens
  misc_RNA (1)...(19): siRNA sense strand
gggauaaaggucuaguaaa

SEQ ID NO: 2635974 - RNA, 19 nt, Homo sapiens
  misc_RNA (1)...(19): siRNA sense strand
acuaaaagcaaguggggaa

SEQ ID NO: 2635975 - RNA, 19 nt, Homo sapiens
  misc_RNA (1)...(19): siRNA sense strand
agggauaccuccucaguua

SEQ ID NO: 2635976 - RNA, 19 nt, Homo sapiens
  misc_RNA (1)...(19): siRNA sense strand
gggccuggcagucgagaaa

SEQ ID NO: 2635977 - RNA, 19 nt, Homo sapiens
  misc_RNA (1)...(19): siRNA sense strand
gggauaagaugauggguag

SEQ ID NO: 2635978 - RNA, 19 nt, Homo sapiens
  misc_RNA (1)...(19): siRNA sense strand
caggauuggucaagcaaga

SEQ ID NO: 2635979 - RNA, 19 nt, Homo sapiens
  misc_RNA (1)...(19): siRNA sense strand
ggguagaagagaagauagu

SEQ ID NO: 2635980 - RNA, 19 nt, Homo sapiens
  misc_RNA (1)...(19): siRNA sense strand
agaagauagucgagagaag

SEQ ID NO: 2635981 - RNA, 19 nt, Homo sapiens
  misc_RNA (1)...(19): siRNA sense strand
cucgcaaguuccagagaaa

SEQ ID NO: 2635982 - RNA, 19 nt, Homo sapiens
  misc_RNA (1)...(19): siRNA sense strand
gccagauaauagagauaau

SEQ ID NO: 2635983 - RNA, 19 nt, Homo sapiens
  misc_RNA (1)...(19): siRNA sense strand
uggaagcagucgggagaaa

SEQ ID NO: 2635984 - RNA, 19 nt, Homo sapiens
  misc_RNA (1)...(19): siRNA sense strand
caucauuaacagcagauaa

SEQ ID NO: 2635985 - RNA, 19 nt, Homo sapiens
  misc_RNA (1)...(19): siRNA sense strand
cagaaaacaaccaagauaa

SEQ ID NO: 2635986 - RNA, 19 nt, Homo sapiens
  misc_RNA (1)...(19): siRNA sense strand
gggcaaagcagaauggaag

SEQ ID NO: 2635987 - RNA, 19 nt, Homo sapiens
  misc_RNA (1)...(19): siRNA sense strand
ggucaagcaagaagacuuu

SEQ ID NO: 2635988 - RNA, 19 nt, Homo sapiens
  misc_RNA (1)...(19): siRNA sense strand
aagaagacuuucgggauaa

SEQ ID NO: 2635989 - RNA, 19 nt, Homo sapiens
  misc_RNA (1)...(19): siRNA sense strand
caucagaacaagugaauuc

SEQ ID NO: 2635990 - RNA, 19 nt, Homo sapiens
  misc_RNA (1)...(19): siRNA sense strand
acaaagaaccauuagcaga

SEQ ID NO: 2635991 - RNA, 19 nt, Homo sapiens
  misc_RNA (1)...(19): siRNA sense strand
cugcagauguaaaggaugu

SEQ ID NO: 2635992 - RNA, 19 nt, Homo sapiens
  misc_RNA (1)...(19): siRNA sense strand
ggagggaggaacagcagua

SEQ ID NO: 2635993 - RNA, 19 nt, Homo sapiens
  misc_RNA (1)...(19): siRNA sense strand
cgggauaaaggucuaguaa

SEQ ID NO: 2635994 - RNA, 19 nt, Homo sapiens
  misc_RNA (1)...(19): siRNA sense strand
gcaagaagacuuucgggau

SEQ ID NO: 2635995 - RNA, 19 nt, Homo sapiens
  misc_RNA (1)...(19): siRNA sense strand
cucgaagauuugaggauuu

SEQ ID NO: 2635996 - RNA, 19 nt, Homo sapiens
  misc_RNA (1)...(19): siRNA sense strand
aggaacagcaguagcaaca

SEQ ID NO: 2635997 - RNA, 19 nt, Homo sapiens
  misc_RNA (1)...(19): siRNA sense strand
ggagaagguagccgggaca

SEQ ID NO: 2635998 - RNA, 19 nt, Homo sapiens
  misc_RNA (1)...(19): siRNA sense strand
ggaaaguccaagaggccca

SEQ ID NO: 2635999 - RNA, 19 nt, Homo sapiens
  misc_RNA (1)...(19): siRNA sense strand
auggaagacacacgggaua

SEQ ID NO: 2636000 - RNA, 19 nt, Homo sapiens
  misc_RNA (1)...(19): siRNA sense strand
ccaccauugucuucagcua

SEQ ID NO: 2636001 - RNA, 19 nt, Homo sapiens
  misc_RNA (1)...(19): siRNA sense strand
gguccugggcaaagcagaa

SEQ ID NO: 2636002 - RNA, 19 nt, Homo sapiens
  misc_RNA (1)...(19): siRNA sense strand
ggaagacacacgggauaaa

SEQ ID NO: 2636003 - RNA, 19 nt, Homo sapiens
  misc_RNA (1)...(19): siRNA sense strand
ccuaaguccucgacagagu

SEQ ID NO: 2636004 - RNA, 19 nt, Homo sapiens
  misc_RNA (1)...(19): siRNA sense strand
agagaagauagucgagaga

SEQ ID NO: 2636005 - RNA, 19 nt, Homo sapiens
  misc_RNA (1)...(19): siRNA sense strand
gccaagacccagauaugaa

SEQ ID NO: 2636006 - RNA, 19 nt, Homo sapiens
  misc_RNA (1)...(19): siRNA sense strand
ccuggaagcagucgggaga

SEQ ID NO: 2636007 - RNA, 19 nt, Homo sapiens
  misc_RNA (1)...(19): siRNA sense strand
aagcagaauggaagacaca

SEQ ID NO: 2636008 - RNA, 19 nt, Homo sapiens
  misc_RNA (1)...(19): siRNA sense strand
auuugaggauuuaggguca

SEQ ID NO: 2636009 - RNA, 19 nt, Homo sapiens
  misc_RNA (1)...(19): siRNA sense strand
caaaguauggagacucaaa

SEQ ID NO: 2636010 - RNA, 19 nt, Homo sapiens
  misc_RNA (1)...(19): siRNA sense strand
uggaagacacacgggauaa

SEQ ID NO: 2636011 - RNA, 19 nt, Homo sapiens
  misc_RNA (1)...(19): siRNA sense strand
agagaaaccuagaccagca

SEQ ID NO: 2636012 - RNA, 19 nt, Homo sapiens
  misc_RNA (1)...(19): siRNA sense strand
ccagauccuccuagaagua

SEQ ID NO: 2636013 - RNA, 19 nt, Homo sapiens
  misc_RNA (1)...(19): siRNA sense strand
gauaagaugauggguagaa

SEQ ID NO: 2636014 - RNA, 19 nt, Homo sapiens
  misc_RNA (1)...(19): siRNA sense strand
aggaaacaaagaaccauua

SEQ ID NO: 2636015 - RNA, 19 nt, Homo sapiens
  misc_RNA (1)...(19): siRNA sense strand
aguaguaaccagcagaaga

SEQ ID NO: 2636016 - RNA, 19 nt, Homo sapiens
  misc_RNA (1)...(19): siRNA sense strand
cagucaaaugagaaucuaa

SEQ ID NO: 2636017 - RNA, 19 nt, Homo sapiens
  misc_RNA (1)...(19): siRNA sense strand
ggcaaucagucgaggccca

SEQ ID NO: 2636018 - RNA, 19 nt, Homo sapiens
  misc_RNA (1)...(19): siRNA sense strand
ugaugguccucgaagauuu

SEQ ID NO: 2636019 - RNA, 19 nt, Homo sapiens
  misc_RNA (1)...(19): siRNA sense strand
caggaaacaaagaaccauu

SEQ ID NO: 2636020 - RNA, 19 nt, Homo sapiens
  misc_RNA (1)...(19): siRNA sense strand
gggaggaacagcaguagca

SEQ ID NO: 2636021 - RNA, 19 nt, Homo sapiens
  misc_RNA (1)...(19): siRNA sense strand
ggauuuagggucaaggugu

SEQ ID NO: 2636022 - RNA, 19 nt, Homo sapiens
  misc_RNA (1)...(19): siRNA sense strand
gggccaagacccagauaug

SEQ ID NO: 2636023 - RNA, 19 nt, Homo sapiens
  misc_RNA (1)...(19): siRNA sense strand
ucagaaaacaaccaagaua

SEQ ID NO: 2636024 - RNA, 19 nt, Homo sapiens
  misc_RNA (1)...(19): siRNA sense strand
uggucaagcaagaagacuu

SEQ ID NO: 2636025 - RNA, 19 nt, Homo sapiens
  misc_RNA (1)...(19): siRNA sense strand
gugaaggacaugccaguga

SEQ ID NO: 2636026 - RNA, 19 nt, Homo sapiens
  misc_RNA (1)...(19): siRNA sense strand
ggggauggagggaggaaca

SEQ ID NO: 2636027 - RNA, 19 nt, Homo sapiens
  misc_RNA (1)...(19): siRNA sense strand
auuuuaaaccuguggguau

SEQ ID NO: 2636028 - RNA, 19 nt, Homo sapiens
  misc_RNA (1)...(19): siRNA sense strand
ggcaaagcagaauggaaga

SEQ ID NO: 2636029 - RNA, 19 nt, Homo sapiens
  misc_RNA (1)...(19): siRNA sense strand
gaacagaggagaagguagc

SEQ ID NO: 2636030 - RNA, 19 nt, Homo sapiens
  misc_RNA (1)...(19): siRNA sense strand
uccaagaggcccaagauuu

SEQ ID NO: 2636031 - RNA, 19 nt, Homo sapiens
  misc_RNA (1)...(19): siRNA sense strand
accagaauguucaaaguau

SEQ ID NO: 2636032 - RNA, 19 nt, Homo sapiens
  misc_RNA (1)...(19): siRNA sense strand
ugggcaaagcagaauggaa

SEQ ID NO: 2636033 - RNA, 19 nt, Homo sapiens
  misc_RNA (1)...(19): siRNA sense strand
ggagaaagugccagguggu

SEQ ID NO: 2636034 - RNA, 19 nt, Homo sapiens
  misc_RNA (1)...(19): siRNA sense strand
gaaagugccagguggucuu

SEQ ID NO: 2636035 - RNA, 19 nt, Homo sapiens
  misc_RNA (1)...(19): siRNA sense strand
ucaacaagagccaccuaaa

SEQ ID NO: 2636036 - RNA, 19 nt, Homo sapiens
  misc_RNA (1)...(19): siRNA sense strand
agucgagagaagaugaaca

SEQ ID NO: 2636037 - RNA, 19 nt, Homo sapiens
  misc_RNA (1)...(19): siRNA sense strand
aggacaugccagugagauc

SEQ ID NO: 2636038 - RNA, 19 nt, Homo sapiens
  misc_RNA (1)...(19): siRNA sense strand
caauagaggcaacagcuca

SEQ ID NO: 2636039 - RNA, 19 nt, Homo sapiens
  misc_RNA (1)...(19): siRNA sense strand
ggauaagaugauggguaga

SEQ ID NO: 2636040 - RNA, 19 nt, Homo sapiens
  misc_RNA (1)...(19): siRNA sense strand
gcucgcaaguuccagagaa

SEQ ID NO: 2636041 - RNA, 19 nt, Homo sapiens
  misc_RNA (1)...(19): siRNA sense strand
ugaaggaccgagacccaaa

SEQ ID NO: 2636042 - RNA, 19 nt, Homo sapiens
  misc_RNA (1)...(19): siRNA sense strand
uuccauugcugcagaugua

SEQ ID NO: 2636043 - RNA, 19 nt, Homo sapiens
  misc_RNA (1)...(19): siRNA sense strand
caaaugagaaucuaagcga

SEQ ID NO: 2636044 - RNA, 19 nt, Homo sapiens
  misc_RNA (1)...(19): siRNA sense strand
caacaagagccaccuaaaa

SEQ ID NO: 2636045 - RNA, 19 nt, Homo sapiens
  misc_RNA (1)...(19): siRNA sense strand
uuagaaggcaauagaggca

SEQ ID NO: 2636046 - RNA, 19 nt, Homo sapiens
  misc_RNA (1)...(19): siRNA sense strand
gauggguagaagagaagau

SEQ ID NO: 2636047 - RNA, 19 nt, Homo sapiens
  misc_RNA (1)...(19): siRNA sense strand
gagaagaugaacagaggag

SEQ ID NO: 2636048 - RNA, 19 nt, Homo sapiens
  misc_RNA (1)...(19): siRNA sense strand
uuacagagguccugggcaa

SEQ ID NO: 2636049 - RNA, 19 nt, Homo sapiens
  misc_RNA (1)...(19): siRNA sense strand
cggccagauaauagagaua

SEQ ID NO: 2636050 - RNA, 19 nt, Homo sapiens
  misc_RNA (1)...(19): siRNA sense strand
cgggauaagaugaugggua

SEQ ID NO: 2636051 - RNA, 19 nt, Homo sapiens
  misc_RNA (1)...(19): siRNA sense strand
gggauaaaggucuaguaaa

SEQ ID NO: 2636052 - RNA, 19 nt, Homo sapiens
  misc_RNA (1)...(19): siRNA sense strand
acuaaaagcaaguggggaa

SEQ ID NO: 2636053 - RNA, 19 nt, Homo sapiens
  misc_RNA (1)...(19): siRNA sense strand
gggccuggcagucgagaaa

SEQ ID NO: 2636054 - RNA, 19 nt, Homo sapiens
  misc_RNA (1)...(19): siRNA sense strand
gggauaagaugauggguag

SEQ ID NO: 2636055 - RNA, 19 nt, Homo sapiens
  misc_RNA (1)...(19): siRNA sense strand
caggauuggucaagcaaga

SEQ ID NO: 2636056 - RNA, 19 nt, Homo sapiens
  misc_RNA (1)...(19): siRNA sense strand
ggguagaagagaagauagu

SEQ ID NO: 2636057 - RNA, 19 nt, Homo sapiens
  misc_RNA (1)...(19): siRNA sense strand
agaagauagucgagagaag

SEQ ID NO: 2636058 - RNA, 19 nt, Homo sapiens
  misc_RNA (1)...(19): siRNA sense strand
cucgcaaguuccagagaaa

SEQ ID NO: 2636059 - RNA, 19 nt, Homo sapiens
  misc_RNA (1)...(19): siRNA sense strand
gccagauaauagagauaau

SEQ ID NO: 2636060 - RNA, 19 nt, Homo sapiens
  misc_RNA (1)...(19): siRNA sense strand
uggaagcagucgggagaaa

SEQ ID NO: 2636061 - RNA, 19 nt, Homo sapiens
  misc_RNA (1)...(19): siRNA sense strand
caucauuaacagcagauaa

SEQ ID NO: 2636062 - RNA, 19 nt, Homo sapiens
  misc_RNA (1)...(19): siRNA sense strand
cagaaaacaaccaagauaa

SEQ ID NO: 2636063 - RNA, 19 nt, Homo sapiens
  misc_RNA (1)...(19): siRNA sense strand
gggcaaagcagaauggaag

SEQ ID NO: 2636064 - RNA, 19 nt, Homo sapiens
  misc_RNA (1)...(19): siRNA sense strand
ggucaagcaagaagacuuu

SEQ ID NO: 2636065 - RNA, 19 nt, Homo sapiens
  misc_RNA (1)...(19): siRNA sense strand
aagaagacuuucgggauaa

SEQ ID NO: 2636066 - RNA, 19 nt, Homo sapiens
  misc_RNA (1)...(19): siRNA sense strand
caucagaacaagugaauuc

SEQ ID NO: 2636067 - RNA, 19 nt, Homo sapiens
  misc_RNA (1)...(19): siRNA sense strand
acaaagaaccauuagcaga

SEQ ID NO: 2636068 - RNA, 19 nt, Homo sapiens
  misc_RNA (1)...(19): siRNA sense strand
cugcagauguaaaggaugu

SEQ ID NO: 2636069 - RNA, 19 nt, Homo sapiens
  misc_RNA (1)...(19): siRNA sense strand
ggagggaggaacagcagua

SEQ ID NO: 2636070 - RNA, 19 nt, Homo sapiens
  misc_RNA (1)...(19): siRNA sense strand
cgggauaaaggucuaguaa

SEQ ID NO: 2636071 - RNA, 19 nt, Homo sapiens
  misc_RNA (1)...(19): siRNA sense strand
gcaagaagacuuucgggau

SEQ ID NO: 2636072 - RNA, 19 nt, Homo sapiens
  misc_RNA (1)...(19): siRNA sense strand
cucgaagauuugaggauuu

SEQ ID NO: 2636073 - RNA, 19 nt, Homo sapiens
  misc_RNA (1)...(19): siRNA sense strand
aggaacagcaguagcaaca

SEQ ID NO: 2636074 - RNA, 19 nt, Homo sapiens
  misc_RNA (1)...(19): siRNA sense strand
ggagaagguagccgggaca

SEQ ID NO: 2636075 - RNA, 19 nt, Homo sapiens
  misc_RNA (1)...(19): siRNA sense strand
ggaaaguccaagaggccca

SEQ ID NO: 2636076 - RNA, 19 nt, Homo sapiens
  misc_RNA (1)...(19): siRNA sense strand
auggaagacacacgggaua

SEQ ID NO: 2636077 - RNA, 19 nt, Homo sapiens
  misc_RNA (1)...(19): siRNA sense strand
ccaccauugucuucagcua

SEQ ID NO: 2636078 - RNA, 19 nt, Homo sapiens
  misc_RNA (1)...(19): siRNA sense strand
gguccugggcaaagcagaa

SEQ ID NO: 2636079 - RNA, 19 nt, Homo sapiens
  misc_RNA (1)...(19): siRNA sense strand
ggaagacacacgggauaaa

SEQ ID NO: 2636080 - RNA, 19 nt, Homo sapiens
  misc_RNA (1)...(19): siRNA sense strand
ccuaaguccucgacagagu

SEQ ID NO: 2636081 - RNA, 19 nt, Homo sapiens
  misc_RNA (1)...(19): siRNA sense strand
agagaagauagucgagaga

SEQ ID NO: 2636082 - RNA, 19 nt, Homo sapiens
  misc_RNA (1)...(19): siRNA sense strand
gccaagacccagauaugaa

SEQ ID NO: 2636083 - RNA, 19 nt, Homo sapiens
  misc_RNA (1)...(19): siRNA sense strand
ccuggaagcagucgggaga

SEQ ID NO: 2636084 - RNA, 19 nt, Homo sapiens
  misc_RNA (1)...(19): siRNA sense strand
aagcagaauggaagacaca

SEQ ID NO: 2636085 - RNA, 19 nt, Homo sapiens
  misc_RNA (1)...(19): siRNA sense strand
auuugaggauuuaggguca

SEQ ID NO: 2636086 - RNA, 19 nt, Homo sapiens
  misc_RNA (1)...(19): siRNA sense strand
caaaguauggagacucaaa

SEQ ID NO: 2636087 - RNA, 19 nt, Homo sapiens
  misc_RNA (1)...(19): siRNA sense strand
uggaagacacacgggauaa

SEQ ID NO: 2636088 - RNA, 19 nt, Homo sapiens
  misc_RNA (1)...(19): siRNA sense strand
agagaaaccuagaccagca

SEQ ID NO: 2636089 - RNA, 19 nt, Homo sapiens
  misc_RNA (1)...(19): siRNA sense strand
ccagauccuccuagaagua

SEQ ID NO: 2636090 - RNA, 19 nt, Homo sapiens
  misc_RNA (1)...(19): siRNA sense strand
gauaagaugauggguagaa

SEQ ID NO: 2636091 - RNA, 19 nt, Homo sapiens
  misc_RNA (1)...(19): siRNA sense strand
aggaaacaaagaaccauua

SEQ ID NO: 2636092 - RNA, 19 nt, Homo sapiens
  misc_RNA (1)...(19): siRNA sense strand
aguaguaaccagcagaaga

SEQ ID NO: 2636093 - RNA, 19 nt, Homo sapiens
  misc_RNA (1)...(19): siRNA sense strand
cagucaaaugagaaucuaa

SEQ ID NO: 2636094 - RNA, 19 nt, Homo sapiens
  misc_RNA (1)...(19): siRNA sense strand
ggcaaucagucgaggccca

SEQ ID NO: 2636095 - RNA, 19 nt, Homo sapiens
  misc_RNA (1)...(19): siRNA sense strand
ugaugguccucgaagauuu

SEQ ID NO: 2636096 - RNA, 19 nt, Homo sapiens
  misc_RNA (1)...(19): siRNA sense strand
caggaaacaaagaaccauu

SEQ ID NO: 2636097 - RNA, 19 nt, Homo sapiens
  misc_RNA (1)...(19): siRNA sense strand
gggaggaacagcaguagca

SEQ ID NO: 2636098 - RNA, 19 nt, Homo sapiens
  misc_RNA (1)...(19): siRNA sense strand
ggauuuagggucaaggugu

SEQ ID NO: 2636099 - RNA, 19 nt, Homo sapiens
  misc_RNA (1)...(19): siRNA sense strand
gggccaagacccagauaug

SEQ ID NO: 2636100 - RNA, 19 nt, Homo sapiens
  misc_RNA (1)...(19): siRNA sense strand
ucagaaaacaaccaagaua

SEQ ID NO: 2636101 - RNA, 19 nt, Homo sapiens
  misc_RNA (1)...(19): siRNA sense strand
uggucaagcaagaagacuu

SEQ ID NO: 2636102 - RNA, 19 nt, Homo sapiens
  misc_RNA (1)...(19): siRNA sense strand
gugaaggacaugccaguga

SEQ ID NO: 2636103 - RNA, 19 nt, Homo sapiens
  misc_RNA (1)...(19): siRNA sense strand
ggggauggagggaggaaca

SEQ ID NO: 2636104 - RNA, 19 nt, Homo sapiens
  misc_RNA (1)...(19): siRNA sense strand
auuuuaaaccuguggguau

SEQ ID NO: 2636105 - RNA, 19 nt, Homo sapiens
  misc_RNA (1)...(19): siRNA sense strand
ggcaaagcagaauggaaga

SEQ ID NO: 2636106 - RNA, 19 nt, Homo sapiens
  misc_RNA (1)...(19): siRNA sense strand
gaacagaggagaagguagc

SEQ ID NO: 2636107 - RNA, 19 nt, Homo sapiens
  misc_RNA (1)...(19): siRNA sense strand
uccaagaggcccaagauuu

SEQ ID NO: 2636108 - RNA, 19 nt, Homo sapiens
  misc_RNA (1)...(19): siRNA sense strand
accagaauguucaaaguau

SEQ ID NO: 2636109 - RNA, 19 nt, Homo sapiens
  misc_RNA (1)...(19): siRNA sense strand
ugggcaaagcagaauggaa

SEQ ID NO: 2636110 - RNA, 19 nt, Homo sapiens
  misc_RNA (1)...(19): siRNA sense strand
ggagaaagugccagguggu

SEQ ID NO: 2636111 - RNA, 19 nt, Homo sapiens
  misc_RNA (1)...(19): siRNA sense strand
gaaagugccagguggucuu

SEQ ID NO: 2636112 - RNA, 19 nt, Homo sapiens
  misc_RNA (1)...(19): siRNA sense strand
ucaacaagagccaccuaaa

SEQ ID NO: 2636113 - RNA, 19 nt, Homo sapiens
  misc_RNA (1)...(19): siRNA sense strand
agucgagagaagaugaaca

SEQ ID NO: 2636114 - RNA, 19 nt, Homo sapiens
  misc_RNA (1)...(19): siRNA sense strand
aggacaugccagugagauc

SEQ ID NO: 2636115 - RNA, 19 nt, Homo sapiens
  misc_RNA (1)...(19): siRNA sense strand
caauagaggcaacagcuca

SEQ ID NO: 2636116 - RNA, 19 nt, Homo sapiens
  misc_RNA (1)...(19): siRNA sense strand
ggauaagaugauggguaga

SEQ ID NO: 2636117 - RNA, 19 nt, Homo sapiens
  misc_RNA (1)...(19): siRNA sense strand
gcucgcaaguuccagagaa

SEQ ID NO: 2636118 - RNA, 19 nt, Homo sapiens
  misc_RNA (1)...(19): siRNA sense strand
ugaaggaccgagacccaaa

SEQ ID NO: 2636119 - RNA, 19 nt, Homo sapiens
  misc_RNA (1)...(19): siRNA sense strand
uuccauugcugcagaugua

SEQ ID NO: 2636120 - RNA, 19 nt, Homo sapiens
  misc_RNA (1)...(19): siRNA sense strand
caaaugagaaucuaagcga

SEQ ID NO: 2636121 - RNA, 19 nt, Homo sapiens
  misc_RNA (1)...(19): siRNA sense strand
caacaagagccaccuaaaa

SEQ ID NO: 2636122 - RNA, 19 nt, Homo sapiens
  misc_RNA (1)...(19): siRNA sense strand
uuagaaggcaauagaggca

SEQ ID NO: 2636123 - RNA, 19 nt, Homo sapiens
  misc_RNA (1)...(19): siRNA sense strand
gauggguagaagagaagau

SEQ ID NO: 2636124 - RNA, 19 nt, Homo sapiens
  misc_RNA (1)...(19): siRNA sense strand
gagaagaugaacagaggag

SEQ ID NO: 2636125 - RNA, 19 nt, Homo sapiens
  misc_RNA (1)...(19): siRNA sense strand
ucauauuacuggaggguca

SEQ ID NO: 2636126 - RNA, 19 nt, Homo sapiens
  misc_RNA (1)...(19): siRNA sense strand
cggaagagggagaagaaga

SEQ ID NO: 2636127 - RNA, 19 nt, Homo sapiens
  misc_RNA (1)...(19): siRNA sense strand
gcauaacaaugaaggacga

SEQ ID NO: 2636128 - RNA, 19 nt, Homo sapiens
  misc_RNA (1)...(19): siRNA sense strand
caaugaaggacgaggaucu

SEQ ID NO: 2636129 - RNA, 19 nt, Homo sapiens
  misc_RNA (1)...(19): siRNA sense strand
aggacgaggaucugauuaa

SEQ ID NO: 2636130 - RNA, 19 nt, Homo sapiens
  misc_RNA (1)...(19): siRNA sense strand
agaacaugacaguggauga

SEQ ID NO: 2636131 - RNA, 19 nt, Homo sapiens
  misc_RNA (1)...(19): siRNA sense strand
gagauggaacgcagagaca

SEQ ID NO: 2636132 - RNA, 19 nt, Homo sapiens
  misc_RNA (1)...(19): siRNA sense strand
ucaaggagguggaugcaga

SEQ ID NO: 2636133 - RNA, 19 nt, Homo sapiens
  misc_RNA (1)...(19): siRNA sense strand
gcaugaagcacuugacgga

SEQ ID NO: 2636134 - RNA, 19 nt, Homo sapiens
  misc_RNA (1)...(19): siRNA sense strand
ccaccaaacugaacgagca

SEQ ID NO: 2636135 - RNA, 19 nt, Homo sapiens
  misc_RNA (1)...(19): siRNA sense strand
ggggaagguuacagaacau

SEQ ID NO: 2636136 - RNA, 19 nt, Homo sapiens
  misc_RNA (1)...(19): siRNA sense strand
ccaguuugggcgugaguau

SEQ ID NO: 2636137 - RNA, 19 nt, Homo sapiens
  misc_RNA (1)...(19): siRNA sense strand
ccgaggaggaggagaucca

SEQ ID NO: 2636138 - RNA, 19 nt, Homo sapiens
  misc_RNA (1)...(19): siRNA sense strand
uggccaagcguguccguaa

SEQ ID NO: 2636139 - RNA, 19 nt, Homo sapiens
  misc_RNA (1)...(19): siRNA sense strand
gcauggagcugcugcgucu

SEQ ID NO: 2636140 - RNA, 19 nt, Homo sapiens
  misc_RNA (1)...(19): siRNA sense strand
cggaaagcugcgugggacu

SEQ ID NO: 2636141 - RNA, 19 nt, Homo sapiens
  misc_RNA (1)...(19): siRNA sense strand
acagcgagcuagaggagca

SEQ ID NO: 2636142 - RNA, 19 nt, Homo sapiens
  misc_RNA (1)...(19): siRNA sense strand
aguucaacgccgagcucaa

SEQ ID NO: 2636143 - RNA, 19 nt, Homo sapiens
  misc_RNA (1)...(19): siRNA sense strand
gccggaagagggagaagaa

SEQ ID NO: 2636144 - RNA, 19 nt, Homo sapiens
  misc_RNA (1)...(19): siRNA sense strand
aggaauagccaaaagguca

SEQ ID NO: 2636145 - RNA, 19 nt, Homo sapiens
  misc_RNA (1)...(19): siRNA sense strand
ucagaaagaaccaggccau

SEQ ID NO: 2636146 - RNA, 19 nt, Homo sapiens
  misc_RNA (1)...(19): siRNA sense strand
aagaagacugggaagguga

SEQ ID NO: 2636147 - RNA, 19 nt, Homo sapiens
  misc_RNA (1)...(19): siRNA sense strand
agguggaugcagagcagua

SEQ ID NO: 2636148 - RNA, 19 nt, Homo sapiens
  misc_RNA (1)...(19): siRNA sense strand
uguccaguguggugugcaa

SEQ ID NO: 2636149 - RNA, 19 nt, Homo sapiens
  misc_RNA (1)...(19): siRNA sense strand
acuacgagcccgaggagga

SEQ ID NO: 2636150 - RNA, 19 nt, Homo sapiens
  misc_RNA (1)...(19): siRNA sense strand
cgugaguaugcguggauga

SEQ ID NO: 2636151 - RNA, 19 nt, Homo sapiens
  misc_RNA (1)...(19): siRNA sense strand
ccaucgagaagcugcagaa

SEQ ID NO: 2636152 - RNA, 19 nt, Homo sapiens
  misc_RNA (1)...(19): siRNA sense strand
ccaaaaggucacaaggaca

SEQ ID NO: 2636153 - RNA, 19 nt, Homo sapiens
  misc_RNA (1)...(19): siRNA sense strand
gcaguauuacagcgagcua

SEQ ID NO: 2636154 - RNA, 19 nt, Homo sapiens
  misc_RNA (1)...(19): siRNA sense strand
agagagucaacaucagaaa

SEQ ID NO: 2636155 - RNA, 19 nt, Homo sapiens
  misc_RNA (1)...(19): siRNA sense strand
ccaaacugaacgagcagau

SEQ ID NO: 2636156 - RNA, 19 nt, Homo sapiens
  misc_RNA (1)...(19): siRNA sense strand
ugaacaaccagccggaaga

SEQ ID NO: 2636157 - RNA, 19 nt, Homo sapiens
  misc_RNA (1)...(19): siRNA sense strand
gggcuuugcgagggagcua

SEQ ID NO: 2636158 - RNA, 19 nt, Homo sapiens
  misc_RNA (1)...(19): siRNA sense strand
gcaucuacaucguguucca

SEQ ID NO: 2636159 - RNA, 19 nt, Homo sapiens
  misc_RNA (1)...(19): siRNA sense strand
ugacaguggaugaaugcuu

SEQ ID NO: 2636160 - RNA, 19 nt, Homo sapiens
  misc_RNA (1)...(19): siRNA sense strand
aggaagggcuggaacugga

SEQ ID NO: 2636161 - RNA, 19 nt, Homo sapiens
  misc_RNA (1)...(19): siRNA sense strand
ccucauugccauggugauu

SEQ ID NO: 2636162 - RNA, 19 nt, Homo sapiens
  misc_RNA (1)...(19): siRNA sense strand
aggaugaagaagaggaaga

SEQ ID NO: 2636163 - RNA, 19 nt, Homo sapiens
  misc_RNA (1)...(19): siRNA sense strand
aagaagaggaagaggagga

SEQ ID NO: 2636164 - RNA, 19 nt, Homo sapiens
  misc_RNA (1)...(19): siRNA sense strand
aagaggaagaggaggaaga

SEQ ID NO: 2636165 - RNA, 19 nt, Homo sapiens
  misc_RNA (1)...(19): siRNA sense strand
aggaagaggaggaagagau

SEQ ID NO: 2636166 - RNA, 19 nt, Homo sapiens
  misc_RNA (1)...(19): siRNA sense strand
gagaaugaagaucuagaaa

SEQ ID NO: 2636167 - RNA, 19 nt, Homo sapiens
  misc_RNA (1)...(19): siRNA sense strand
ugguaucuccagugaguaa

SEQ ID NO: 2636168 - RNA, 19 nt, Homo sapiens
  misc_RNA (1)...(19): siRNA sense strand
ccacggaagaucugcggaa

SEQ ID NO: 2636169 - RNA, 19 nt, Homo sapiens
  misc_RNA (1)...(19): siRNA sense strand
gaaugaagaucuagaaaac

SEQ ID NO: 2636170 - RNA, 19 nt, Homo sapiens
  misc_RNA (1)...(19): siRNA sense strand
gaguaaggaugccacggaa

SEQ ID NO: 2636171 - RNA, 19 nt, Homo sapiens
  misc_RNA (1)...(19): siRNA sense strand
ccucagagaaugaagaucu

SEQ ID NO: 2636172 - RNA, 19 nt, Homo sapiens
  misc_RNA (1)...(19): siRNA sense strand
uguaacuagcacugacaua

SEQ ID NO: 2636173 - RNA, 19 nt, Homo sapiens
  misc_RNA (1)...(19): siRNA sense strand
augaagaagaggaagagga

SEQ ID NO: 2636174 - RNA, 19 nt, Homo sapiens
  misc_RNA (1)...(19): siRNA sense strand
ugaggaugaagaagaggaa

SEQ ID NO: 2636175 - RNA, 19 nt, Homo sapiens
  misc_RNA (1)...(19): siRNA sense strand
aaacaaggauaccucuuua

SEQ ID NO: 2636176 - RNA, 19 nt, Homo sapiens
  misc_RNA (1)...(19): siRNA sense strand
gggacaucguuaugaucca

SEQ ID NO: 2636177 - RNA, 19 nt, Homo sapiens
  misc_RNA (1)...(19): siRNA sense strand
aggaagagauugaagaacc

SEQ ID NO: 2636178 - RNA, 19 nt, Homo sapiens
  misc_RNA (1)...(19): siRNA sense strand
cucagagaaugaagaucua

SEQ ID NO: 2636179 - RNA, 19 nt, Homo sapiens
  misc_RNA (1)...(19): siRNA sense strand
gaucuagaaaacaaggaua

SEQ ID NO: 2636180 - RNA, 19 nt, Homo sapiens
  misc_RNA (1)...(19): siRNA sense strand
ggugaagcguggugaggug

SEQ ID NO: 2636181 - RNA, 19 nt, Homo sapiens
  misc_RNA (1)...(19): siRNA sense strand
gugacgaugaggaugaaga

SEQ ID NO: 2636182 - RNA, 19 nt, Homo sapiens
  misc_RNA (1)...(19): siRNA sense strand
aggaggaagagauugaaga

SEQ ID NO: 2636183 - RNA, 19 nt, Homo sapiens
  misc_RNA (1)...(19): siRNA sense strand
ccuuggugaaacaggauuu

SEQ ID NO: 2636184 - RNA, 19 nt, Homo sapiens
  misc_RNA (1)...(19): siRNA sense strand
gcaaaggacaugaugcuga

SEQ ID NO: 2636185 - RNA, 19 nt, Homo sapiens
  misc_RNA (1)...(19): siRNA sense strand
caggaagaagaaaggaaga

SEQ ID NO: 2636186 - RNA, 19 nt, Homo sapiens
  misc_RNA (1)...(19): siRNA sense strand
aggaagaagaaaggaagaa

SEQ ID NO: 2636187 - RNA, 19 nt, Homo sapiens
  misc_RNA (1)...(19): siRNA sense strand
ggaaacaaauucagccaac

SEQ ID NO: 2636188 - RNA, 19 nt, Homo sapiens
  misc_RNA (1)...(19): siRNA sense strand
agcaggaagaagaaaggaa

SEQ ID NO: 2636189 - RNA, 19 nt, Homo sapiens
  misc_RNA (1)...(19): siRNA sense strand
augcaagcuuccacaucua

SEQ ID NO: 2636190 - RNA, 19 nt, Homo sapiens
  misc_RNA (1)...(19): siRNA sense strand
cgucagaguucaaggccaa

SEQ ID NO: 2636191 - RNA, 19 nt, Homo sapiens
  misc_RNA (1)...(19): siRNA sense strand
cggaagauuuagagagcuu

SEQ ID NO: 2636192 - RNA, 19 nt, Homo sapiens
  misc_RNA (1)...(19): siRNA sense strand
cguugaugugggagagaaa

SEQ ID NO: 2636193 - RNA, 19 nt, Homo sapiens
  misc_RNA (1)...(19): siRNA sense strand
ugaauuauguggaagguga

SEQ ID NO: 2636194 - RNA, 19 nt, Homo sapiens
  misc_RNA (1)...(19): siRNA sense strand
ccugauggcugcuggaaaa

SEQ ID NO: 2636195 - RNA, 19 nt, Homo sapiens
  misc_RNA (1)...(19): siRNA sense strand
auaaagaagcucugaacau

SEQ ID NO: 2636196 - RNA, 19 nt, Homo sapiens
  misc_RNA (1)...(19): siRNA sense strand
ccgcaaaggagcaaacaca

SEQ ID NO: 2636197 - RNA, 19 nt, Homo sapiens
  misc_RNA (1)...(19): siRNA sense strand
cggccaagcucaucgccaa

SEQ ID NO: 2636198 - RNA, 19 nt, Homo sapiens
  misc_RNA (1)...(19): siRNA sense strand
aguucaaggccaaaggcua

SEQ ID NO: 2636199 - RNA, 19 nt, Homo sapiens
  misc_RNA (1)...(19): siRNA sense strand
uggaagaagaggccaguau

SEQ ID NO: 2636200 - RNA, 19 nt, Homo sapiens
  misc_RNA (1)...(19): siRNA sense strand
ccaagagauagaaagggua

SEQ ID NO: 2636201 - RNA, 19 nt, Homo sapiens
  misc_RNA (1)...(19): siRNA sense strand
acucaaaaccugcgaauga

SEQ ID NO: 2636202 - RNA, 19 nt, Homo sapiens
  misc_RNA (1)...(19): siRNA sense strand
gagcaguaccugaaggaac

SEQ ID NO: 2636203 - RNA, 19 nt, Homo sapiens
  misc_RNA (1)...(19): siRNA sense strand
gagcagagcuacuggaacc

SEQ ID NO: 2636204 - RNA, 19 nt, Homo sapiens
  misc_RNA (1)...(19): siRNA sense strand
agcaguaccugaaggaaca

SEQ ID NO: 2636205 - RNA, 19 nt, Homo sapiens
  misc_RNA (1)...(19): siRNA sense strand
ccacccacgugaagagcau

SEQ ID NO: 2636206 - RNA, 19 nt, Homo sapiens
  misc_RNA (1)...(19): siRNA sense strand
guaugugugagcagagcua

SEQ ID NO: 2636207 - RNA, 19 nt, Homo sapiens
  misc_RNA (1)...(19): siRNA sense strand
cugagugaauacccagaaa

SEQ ID NO: 2636208 - RNA, 19 nt, Homo sapiens
  misc_RNA (1)...(19): siRNA sense strand
cgaucaagaacuagguuuu

SEQ ID NO: 2636209 - RNA, 19 nt, Homo sapiens
  misc_RNA (1)...(19): siRNA sense strand
cugucagagugccuagaaa

SEQ ID NO: 2636210 - RNA, 19 nt, Homo sapiens
  misc_RNA (1)...(19): siRNA sense strand
gagugaauacccagaaaau

SEQ ID NO: 2636211 - RNA, 19 nt, Homo sapiens
  misc_RNA (1)...(19): siRNA sense strand
ccaaucugaucauggccaa

SEQ ID NO: 2636212 - RNA, 19 nt, Homo sapiens
  misc_RNA (1)...(19): siRNA sense strand
gggugaucgcagaagccua

SEQ ID NO: 2636213 - RNA, 19 nt, Homo sapiens
  misc_RNA (1)...(19): siRNA sense strand
ccaacgaugacauggcaga

SEQ ID NO: 2636214 - RNA, 19 nt, Homo sapiens
  misc_RNA (1)...(19): siRNA sense strand
gugaaggugcugaaagagu

SEQ ID NO: 2636215 - RNA, 19 nt, Homo sapiens
  misc_RNA (1)...(19): siRNA sense strand
ucaagcagcugucggccaa

SEQ ID NO: 2636216 - RNA, 19 nt, Homo sapiens
  misc_RNA (1)...(19): siRNA sense strand
gguuggaagaggcugaaaa

SEQ ID NO: 2636217 - RNA, 19 nt, Homo sapiens
  misc_RNA (1)...(19): siRNA sense strand
uggaagaggcugaaaaguu

SEQ ID NO: 2636218 - RNA, 19 nt, Homo sapiens
  misc_RNA (1)...(19): siRNA sense strand
cugacagacgacagcuuaa

SEQ ID NO: 2636219 - RNA, 19 nt, Homo sapiens
  misc_RNA (1)...(19): siRNA sense strand
ucgacauggcccugaguga

SEQ ID NO: 2636220 - RNA, 19 nt, Homo sapiens
  misc_RNA (1)...(19): siRNA sense strand
gcucugaacaucaucgaca

SEQ ID NO: 2636221 - RNA, 19 nt, Homo sapiens
  misc_RNA (1)...(19): siRNA sense strand
aguuugccuuugaggaauu

SEQ ID NO: 2636222 - RNA, 19 nt, Homo sapiens
  misc_RNA (1)...(19): siRNA sense strand
guucaaggccaaaggcuac

SEQ ID NO: 2636223 - RNA, 19 nt, Homo sapiens
  misc_RNA (1)...(19): siRNA sense strand
ggugguaugaagaggccuu

SEQ ID NO: 2636224 - RNA, 19 nt, Homo sapiens
  misc_RNA (1)...(19): siRNA sense strand
uggaaggugauuauaaaga

SEQ ID NO: 2636225 - RNA, 19 nt, Homo sapiens
  misc_RNA (1)...(19): siRNA sense strand
gcaugaaagacguggagaa

SEQ ID NO: 2636226 - RNA, 19 nt, Homo sapiens
  misc_RNA (1)...(19): siRNA sense strand
cagagaagcuggagaggga

SEQ ID NO: 2636227 - RNA, 19 nt, Homo sapiens
  misc_RNA (1)...(19): siRNA sense strand
gcacagauggagagggaga

SEQ ID NO: 2636228 - RNA, 19 nt, Homo sapiens
  misc_RNA (1)...(19): siRNA sense strand
cagcaggagcagaggacaa

SEQ ID NO: 2636229 - RNA, 19 nt, Homo sapiens
  misc_RNA (1)...(19): siRNA sense strand
ccaucgagcuggagcggaa

SEQ ID NO: 2636230 - RNA, 19 nt, Homo sapiens
  misc_RNA (1)...(19): siRNA sense strand
cuaaagaaggagugugaga

SEQ ID NO: 2636231 - RNA, 19 nt, Homo sapiens
  misc_RNA (1)...(19): siRNA sense strand
uuacgaagacauaaggaaa

SEQ ID NO: 2636232 - RNA, 19 nt, Homo sapiens
  misc_RNA (1)...(19): siRNA sense strand
aggccaugcuggaggaaca

SEQ ID NO: 2636233 - RNA, 19 nt, Homo sapiens
  misc_RNA (1)...(19): siRNA sense strand
gugacaugcugaagcgcaa

SEQ ID NO: 2636234 - RNA, 19 nt, Homo sapiens
  misc_RNA (1)...(19): siRNA sense strand
agaaggaggagcugaggaa

SEQ ID NO: 2636235 - RNA, 19 nt, Homo sapiens
  misc_RNA (1)...(19): siRNA sense strand
ggacgauagcacugccaaa

SEQ ID NO: 2636236 - RNA, 19 nt, Homo sapiens
  misc_RNA (1)...(19): siRNA sense strand
agcagaacauggagaacaa

SEQ ID NO: 2636237 - RNA, 19 nt, Homo sapiens
  misc_RNA (1)...(19): siRNA sense strand
gauaagaagcugcuggaga

SEQ ID NO: 2636238 - RNA, 19 nt, Homo sapiens
  misc_RNA (1)...(19): siRNA sense strand
aagcagagcaugaacgaau

SEQ ID NO: 2636239 - RNA, 19 nt, Homo sapiens
  misc_RNA (1)...(19): siRNA sense strand
gcuauaacucagaugacaa

SEQ ID NO: 2636240 - RNA, 19 nt, Homo sapiens
  misc_RNA (1)...(19): siRNA sense strand
gggacuaccugcaggcaca

SEQ ID NO: 2636241 - RNA, 19 nt, Homo sapiens
  misc_RNA (1)...(19): siRNA sense strand
ucgagaagcugaagagcca

SEQ ID NO: 2636242 - RNA, 19 nt, Homo sapiens
  misc_RNA (1)...(19): siRNA sense strand
acguggagaaggagaacaa

SEQ ID NO: 2636243 - RNA, 19 nt, Homo sapiens
  misc_RNA (1)...(19): siRNA sense strand
ucaucaaaccaaagaaaga

SEQ ID NO: 2636244 - RNA, 19 nt, Homo sapiens
  misc_RNA (1)...(19): siRNA sense strand
aaguuaagcaggagaacau

SEQ ID NO: 2636245 - RNA, 19 nt, Homo sapiens
  misc_RNA (1)...(19): siRNA sense strand
ccaugaagcuggaugagca

SEQ ID NO: 2636246 - RNA, 19 nt, Homo sapiens
  misc_RNA (1)...(19): siRNA sense strand
gagcaggagcugagagaag

SEQ ID NO: 2636247 - RNA, 19 nt, Homo sapiens
  misc_RNA (1)...(19): siRNA sense strand
gggccgagaaggacaggaa

SEQ ID NO: 2636248 - RNA, 19 nt, Homo sapiens
  misc_RNA (1)...(19): siRNA sense strand
ggaacuuggaggaagaaaa

SEQ ID NO: 2636249 - RNA, 19 nt, Homo sapiens
  misc_RNA (1)...(19): siRNA sense strand
gaaucaaacagcuggacau

SEQ ID NO: 2636250 - RNA, 19 nt, Homo sapiens
  misc_RNA (1)...(19): siRNA sense strand
uggcacagauggagaggga

SEQ ID NO: 2636251 - RNA, 19 nt, Homo sapiens
  misc_RNA (1)...(19): siRNA sense strand
cggccaaggagacggagaa

SEQ ID NO: 2636252 - RNA, 19 nt, Homo sapiens
  misc_RNA (1)...(19): siRNA sense strand
gagccaaagccuuagucaa

SEQ ID NO: 2636253 - RNA, 19 nt, Homo sapiens
  misc_RNA (1)...(19): siRNA sense strand
aggagaaccugcagcugaa

SEQ ID NO: 2636254 - RNA, 19 nt, Homo sapiens
  misc_RNA (1)...(19): siRNA sense strand
aaggaggagcugaggaaga

SEQ ID NO: 2636255 - RNA, 19 nt, Homo sapiens
  misc_RNA (1)...(19): siRNA sense strand
agaaaguuaagcaggagaa

SEQ ID NO: 2636256 - RNA, 19 nt, Homo sapiens
  misc_RNA (1)...(19): siRNA sense strand
ccgagaaagucgaggcccu

SEQ ID NO: 2636257 - RNA, 19 nt, Homo sapiens
  misc_RNA (1)...(19): siRNA sense strand
cgacagcggcagugacaca

SEQ ID NO: 2636258 - RNA, 19 nt, Homo sapiens
  misc_RNA (1)...(19): siRNA sense strand
cgauaaaguccaugagcug

SEQ ID NO: 2636259 - RNA, 19 nt, Homo sapiens
  misc_RNA (1)...(19): siRNA sense strand
gggcagaaaugaaucagca

SEQ ID NO: 2636260 - RNA, 19 nt, Homo sapiens
  misc_RNA (1)...(19): siRNA sense strand
uggagaacaaggagcagua

SEQ ID NO: 2636261 - RNA, 19 nt, Homo sapiens
  misc_RNA (1)...(19): siRNA sense strand
ggacaaacgcccucgccau

SEQ ID NO: 2636262 - RNA, 19 nt, Homo sapiens
  misc_RNA (1)...(19): siRNA sense strand
cguuuguguuugagcugaa

SEQ ID NO: 2636263 - RNA, 19 nt, Homo sapiens
  misc_RNA (1)...(19): siRNA sense strand
agagagaaaagcagagcaa

SEQ ID NO: 2636264 - RNA, 19 nt, Homo sapiens
  misc_RNA (1)...(19): siRNA sense strand
gcaagaagucagagcgccu

SEQ ID NO: 2636265 - RNA, 19 nt, Homo sapiens
  misc_RNA (1)...(19): siRNA sense strand
aaggagacggagaacgaaa

SEQ ID NO: 2636266 - RNA, 19 nt, Homo sapiens
  misc_RNA (1)...(19): siRNA sense strand
agaaagaggguucgaggga

SEQ ID NO: 2636267 - RNA, 19 nt, Homo sapiens
  misc_RNA (1)...(19): siRNA sense strand
acucaucaaaccaaagaaa

SEQ ID NO: 2636268 - RNA, 19 nt, Homo sapiens
  misc_RNA (1)...(19): siRNA sense strand
gcauggagugggugaaguu

SEQ ID NO: 2636269 - RNA, 19 nt, Homo sapiens
  misc_RNA (1)...(19): siRNA sense strand
ggagcugagagaagauaau

SEQ ID NO: 2636270 - RNA, 19 nt, Homo sapiens
  misc_RNA (1)...(19): siRNA sense strand
cagaagcaguacauagaca

SEQ ID NO: 2636271 - RNA, 19 nt, Homo sapiens
  misc_RNA (1)...(19): siRNA sense strand
auuaaaugccuuacgaaga

SEQ ID NO: 2636272 - RNA, 19 nt, Homo sapiens
  misc_RNA (1)...(19): siRNA sense strand
gggcaguacguaaagccaa

SEQ ID NO: 2636273 - RNA, 19 nt, Homo sapiens
  misc_RNA (1)...(19): siRNA sense strand
ggcagcagguggagcucaa

SEQ ID NO: 2636274 - RNA, 19 nt, Homo sapiens
  misc_RNA (1)...(19): siRNA sense strand
guagaaacacauccagcaa

SEQ ID NO: 2636275 - RNA, 19 nt, Homo sapiens
  misc_RNA (1)...(19): siRNA sense strand
agacggugacggaggccaa

SEQ ID NO: 2636276 - RNA, 19 nt, Homo sapiens
  misc_RNA (1)...(19): siRNA sense strand
ugcuaaagaaggaguguga

SEQ ID NO: 2636277 - RNA, 19 nt, Homo sapiens
  misc_RNA (1)...(19): siRNA sense strand
gugagaggaaagaggaguu

SEQ ID NO: 2636278 - RNA, 19 nt, Homo sapiens
  misc_RNA (1)...(19): siRNA sense strand
uggagcaggccaaggagaa

SEQ ID NO: 2636279 - RNA, 19 nt, Homo sapiens
  misc_RNA (1)...(19): siRNA sense strand
ggacaagcugagccaggaa

SEQ ID NO: 2636280 - RNA, 19 nt, Homo sapiens
  misc_RNA (1)...(19): siRNA sense strand
aggcaggagcuggaggaua

SEQ ID NO: 2636281 - RNA, 19 nt, Homo sapiens
  misc_RNA (1)...(19): siRNA sense strand
gggagcuggagaaggagaa

SEQ ID NO: 2636282 - RNA, 19 nt, Homo sapiens
  misc_RNA (1)...(19): siRNA sense strand
ccaagcugcagguggagaa

SEQ ID NO: 2636283 - RNA, 19 nt, Homo sapiens
  misc_RNA (1)...(19): siRNA sense strand
acacagauaagaaacgaau

SEQ ID NO: 2636284 - RNA, 19 nt, Homo sapiens
  misc_RNA (1)...(19): siRNA sense strand
gagcagaacauggagaaca

SEQ ID NO: 2636285 - RNA, 19 nt, Homo sapiens
  misc_RNA (1)...(19): siRNA sense strand
ccaaagaagaagaaccacu

SEQ ID NO: 2636286 - RNA, 19 nt, Homo sapiens
  misc_RNA (1)...(19): siRNA sense strand
gcuuagagagcaguagaaa

SEQ ID NO: 2636287 - RNA, 19 nt, Homo sapiens
  misc_RNA (1)...(19): siRNA sense strand
ucgacgagcugaaggagca

SEQ ID NO: 2636288 - RNA, 19 nt, Homo sapiens
  misc_RNA (1)...(19): siRNA sense strand
cggccaaguagcuuagaga

SEQ ID NO: 2636289 - RNA, 19 nt, Homo sapiens
  misc_RNA (1)...(19): siRNA sense strand
guucaagggauguccauga

SEQ ID NO: 2636290 - RNA, 19 nt, Homo sapiens
  misc_RNA (1)...(19): siRNA sense strand
guguuugagcugaacgaau

SEQ ID NO: 2636291 - RNA, 19 nt, Homo sapiens
  misc_RNA (1)...(19): siRNA sense strand
uuacaaacccagcuggaga

SEQ ID NO: 2636292 - RNA, 19 nt, Homo sapiens
  misc_RNA (1)...(19): siRNA sense strand
cugcagagugacauggaga

SEQ ID NO: 2636293 - RNA, 19 nt, Homo sapiens
  misc_RNA (1)...(19): siRNA sense strand
guacaagagcugaucccaa

SEQ ID NO: 2636294 - RNA, 19 nt, Homo sapiens
  misc_RNA (1)...(19): siRNA sense strand
gggauggauuggaguggga

SEQ ID NO: 2636295 - RNA, 19 nt, Homo sapiens
  misc_RNA (1)...(19): siRNA sense strand
ugaaggaaccacauggaca

SEQ ID NO: 2636296 - RNA, 19 nt, Homo sapiens
  misc_RNA (1)...(19): siRNA sense strand
gauggauuggagugggauu

SEQ ID NO: 2636297 - RNA, 19 nt, Homo sapiens
  misc_RNA (1)...(19): siRNA sense strand
gaacagaagucccagauaa

SEQ ID NO: 2636298 - RNA, 19 nt, Homo sapiens
  misc_RNA (1)...(19): siRNA sense strand
uggaaugccucaugaaaua

SEQ ID NO: 2636299 - RNA, 19 nt, Homo sapiens
  misc_RNA (1)...(19): siRNA sense strand
aaauagaacuggcugaaua

SEQ ID NO: 2636300 - RNA, 19 nt, Homo sapiens
  misc_RNA (1)...(19): siRNA sense strand
gcagcaaaauggugaaaua

SEQ ID NO: 2636301 - RNA, 19 nt, Homo sapiens
  misc_RNA (1)...(19): siRNA sense strand
ggacaaucauaaauggcaa

SEQ ID NO: 2636302 - RNA, 19 nt, Homo sapiens
  misc_RNA (1)...(19): siRNA sense strand
ucagaauagucgagaguga

SEQ ID NO: 2636303 - RNA, 19 nt, Homo sapiens
  misc_RNA (1)...(19): siRNA sense strand
ccgguaacauugagacuaa

SEQ ID NO: 2636304 - RNA, 19 nt, Homo sapiens
  misc_RNA (1)...(19): siRNA sense strand
ccacaaugcaauuaacaaa

SEQ ID NO: 2636305 - RNA, 19 nt, Homo sapiens
  misc_RNA (1)...(19): siRNA sense strand
guuuauacauugccagaaa

SEQ ID NO: 2636306 - RNA, 19 nt, Homo sapiens
  misc_RNA (1)...(19): siRNA sense strand
gagaacacgccuacagaaa

SEQ ID NO: 2636307 - RNA, 19 nt, Homo sapiens
  misc_RNA (1)...(19): siRNA sense strand
guaaagaaugauaccgaaa

SEQ ID NO: 2636308 - RNA, 19 nt, Homo sapiens
  misc_RNA (1)...(19): siRNA sense strand
cagaggaagcagaggaaga

SEQ ID NO: 2636309 - RNA, 19 nt, Homo sapiens
  misc_RNA (1)...(19): siRNA sense strand
uaacaaggacgaugauaaa

SEQ ID NO: 2636310 - RNA, 19 nt, Homo sapiens
  misc_RNA (1)...(19): siRNA sense strand
agaaugauaccgaaagaaa

SEQ ID NO: 2636311 - RNA, 19 nt, Homo sapiens
  misc_RNA (1)...(19): siRNA sense strand
caguauaggcagaugaaaa

SEQ ID NO: 2636312 - RNA, 19 nt, Homo sapiens
  misc_RNA (1)...(19): siRNA sense strand
gguuugaagcaguggaaaa

SEQ ID NO: 2636313 - RNA, 19 nt, Homo sapiens
  misc_RNA (1)...(19): siRNA sense strand
agaagaaagcauuccgaaa

SEQ ID NO: 2636314 - RNA, 19 nt, Homo sapiens
  misc_RNA (1)...(19): siRNA sense strand
cagcaaggaccuaaagaau

SEQ ID NO: 2636315 - RNA, 19 nt, Homo sapiens
  misc_RNA (1)...(19): siRNA sense strand
acaaagugaugguagaaau

SEQ ID NO: 2636316 - RNA, 19 nt, Homo sapiens
  misc_RNA (1)...(19): siRNA sense strand
gagacuagcuccuaaagaa

SEQ ID NO: 2636317 - RNA, 19 nt, Homo sapiens
  misc_RNA (1)...(19): siRNA sense strand
ggacagccauugaggauga

SEQ ID NO: 2636318 - RNA, 19 nt, Homo sapiens
  misc_RNA (1)...(19): siRNA sense strand
auaacaaggacgaugauaa

SEQ ID NO: 2636319 - RNA, 19 nt, Homo sapiens
  misc_RNA (1)...(19): siRNA sense strand
acucaaaucaucacaguaa

SEQ ID NO: 2636320 - RNA, 19 nt, Homo sapiens
  misc_RNA (1)...(19): siRNA sense strand
ccucaaaguucccgaagau

SEQ ID NO: 2636321 - RNA, 19 nt, Homo sapiens
  misc_RNA (1)...(19): siRNA sense strand
cugaaaggaagguggaaga

SEQ ID NO: 2636322 - RNA, 19 nt, Homo sapiens
  misc_RNA (1)...(19): siRNA sense strand
aagaauaggcggcagcaaa

SEQ ID NO: 2636323 - RNA, 19 nt, Homo sapiens
  misc_RNA (1)...(19): siRNA sense strand
cacuaaggaacgagauaaa

SEQ ID NO: 2636324 - RNA, 19 nt, Homo sapiens
  misc_RNA (1)...(19): siRNA sense strand
gguaaagccugcuccuaaa

SEQ ID NO: 2636325 - RNA, 19 nt, Homo sapiens
  misc_RNA (1)...(19): siRNA sense strand
aggaaggacuauugacuuu

SEQ ID NO: 2636326 - RNA, 19 nt, Homo sapiens
  misc_RNA (1)...(19): siRNA sense strand
agguuaaacuguauggaga

SEQ ID NO: 2636327 - RNA, 19 nt, Homo sapiens
  misc_RNA (1)...(19): siRNA sense strand
agucaacaauccugagcaa

SEQ ID NO: 2636328 - RNA, 19 nt, Homo sapiens
  misc_RNA (1)...(19): siRNA sense strand
cagucaaagagcuggcaaa

SEQ ID NO: 2636329 - RNA, 19 nt, Homo sapiens
  misc_RNA (1)...(19): siRNA sense strand
caaagaaaaucaagaguca

SEQ ID NO: 2636330 - RNA, 19 nt, Homo sapiens
  misc_RNA (1)...(19): siRNA sense strand
ccacugacgcugaagcaaa

SEQ ID NO: 2636331 - RNA, 19 nt, Homo sapiens
  misc_RNA (1)...(19): siRNA sense strand
ggaaaugccacgagaaucu

SEQ ID NO: 2636332 - RNA, 19 nt, Homo sapiens
  misc_RNA (1)...(19): siRNA sense strand
ggaauaugguucuuaguga

SEQ ID NO: 2636333 - RNA, 19 nt, Homo sapiens
  misc_RNA (1)...(19): siRNA sense strand
ucaaagagcuggcaaauca

SEQ ID NO: 2636334 - RNA, 19 nt, Homo sapiens
  misc_RNA (1)...(19): siRNA sense strand
gcagagaaccccacagaaa

SEQ ID NO: 2636335 - RNA, 19 nt, Homo sapiens
  misc_RNA (1)...(19): siRNA sense strand
acagauacagccugggaaa

SEQ ID NO: 2636336 - RNA, 19 nt, Homo sapiens
  misc_RNA (1)...(19): siRNA sense strand
ugaccaaacugaagagcca

SEQ ID NO: 2636337 - RNA, 19 nt, Homo sapiens
  misc_RNA (1)...(19): siRNA sense strand
guugguggcuacugggaua

SEQ ID NO: 2636338 - RNA, 19 nt, Homo sapiens
  misc_RNA (1)...(19): siRNA sense strand
ccaaugauucagucaaaua

SEQ ID NO: 2636339 - RNA, 19 nt, Homo sapiens
  misc_RNA (1)...(19): siRNA sense strand
cgguaaagccugcuccuaa

SEQ ID NO: 2636340 - RNA, 19 nt, Homo sapiens
  misc_RNA (1)...(19): siRNA sense strand
ccuucaacauucuggacaa

SEQ ID NO: 2636341 - RNA, 19 nt, Homo sapiens
  misc_RNA (1)...(19): siRNA sense strand
ucaacgaagugcuggauuu

SEQ ID NO: 2636342 - RNA, 19 nt, Homo sapiens
  misc_RNA (1)...(19): siRNA sense strand
caaacugggagaacagaaa

SEQ ID NO: 2636343 - RNA, 19 nt, Homo sapiens
  misc_RNA (1)...(19): siRNA sense strand
ugaagagacacuugggcua

SEQ ID NO: 2636344 - RNA, 19 nt, Homo sapiens
  misc_RNA (1)...(19): siRNA sense strand
agucaaauaucaagcacuu

SEQ ID NO: 2636345 - RNA, 19 nt, Homo sapiens
  misc_RNA (1)...(19): siRNA sense strand
gugaagaugaugaaaugaa

SEQ ID NO: 2636346 - RNA, 19 nt, Homo sapiens
  misc_RNA (1)...(19): siRNA sense strand
cgugaaagggccuguggaa

SEQ ID NO: 2636347 - RNA, 19 nt, Homo sapiens
  misc_RNA (1)...(19): siRNA sense strand
auaacaaagugaugguaga

SEQ ID NO: 2636348 - RNA, 19 nt, Homo sapiens
  misc_RNA (1)...(19): siRNA sense strand
acgaagaagaggagacgau

SEQ ID NO: 2636349 - RNA, 19 nt, Homo sapiens
  misc_RNA (1)...(19): siRNA sense strand
cuucuaaggacucaggaaa

SEQ ID NO: 2636350 - RNA, 19 nt, Homo sapiens
  misc_RNA (1)...(19): siRNA sense strand
ggacaaaugccaugacugu

SEQ ID NO: 2636351 - RNA, 19 nt, Homo sapiens
  misc_RNA (1)...(19): siRNA sense strand
cguauaugauggaugauga

SEQ ID NO: 2636352 - RNA, 19 nt, Homo sapiens
  misc_RNA (1)...(19): siRNA sense strand
auaagcagauacagcgaaa

SEQ ID NO: 2636353 - RNA, 19 nt, Homo sapiens
  misc_RNA (1)...(19): siRNA sense strand
ugggaagucugguggaaaa

SEQ ID NO: 2636354 - RNA, 19 nt, Homo sapiens
  misc_RNA (1)...(19): siRNA sense strand
gcugacaucuucuggacaa

SEQ ID NO: 2636355 - RNA, 19 nt, Homo sapiens
  misc_RNA (1)...(19): siRNA sense strand
cugaaguguucuuuagauu

SEQ ID NO: 2636356 - RNA, 19 nt, Homo sapiens
  misc_RNA (1)...(19): siRNA sense strand
gguuaaagacagacccaca

SEQ ID NO: 2636357 - RNA, 19 nt, Homo sapiens
  misc_RNA (1)...(19): siRNA sense strand
ucuaaggacucaggaaaua

SEQ ID NO: 2636358 - RNA, 19 nt, Homo sapiens
  misc_RNA (1)...(19): siRNA sense strand
agaauacgaugaagagaca

SEQ ID NO: 2636359 - RNA, 19 nt, Homo sapiens
  misc_RNA (1)...(19): siRNA sense strand
gcaaccaguuucagacauu

SEQ ID NO: 2636360 - RNA, 19 nt, Homo sapiens
  misc_RNA (1)...(19): siRNA sense strand
cugaagagccacaugaaga

SEQ ID NO: 2636361 - RNA, 19 nt, Homo sapiens
  misc_RNA (1)...(19): siRNA sense strand
agcaaagacuggaagauga

SEQ ID NO: 2636362 - RNA, 19 nt, Homo sapiens
  misc_RNA (1)...(19): siRNA sense strand
gaagaaagcauuccgaaaa

SEQ ID NO: 2636363 - RNA, 19 nt, Homo sapiens
  misc_RNA (1)...(19): siRNA sense strand
gcacuagaauuuuggagua

SEQ ID NO: 2636364 - RNA, 19 nt, Homo sapiens
  misc_RNA (1)...(19): siRNA sense strand
gcacagugacucagcugaa

SEQ ID NO: 2636365 - RNA, 19 nt, Homo sapiens
  misc_RNA (1)...(19): siRNA sense strand
aggccugacaauagugaaa

SEQ ID NO: 2636366 - RNA, 19 nt, Homo sapiens
  misc_RNA (1)...(19): siRNA sense strand
ucagagaagugaaauagaa

SEQ ID NO: 2636367 - RNA, 19 nt, Homo sapiens
  misc_RNA (1)...(19): siRNA sense strand
gcagaaagcaugaugguuc

SEQ ID NO: 2636368 - RNA, 19 nt, Homo sapiens
  misc_RNA (1)...(19): siRNA sense strand
gcaaggaccuaaagaauuc

SEQ ID NO: 2636369 - RNA, 19 nt, Homo sapiens
  misc_RNA (1)...(19): siRNA sense strand
gcaagaaaccgccagaaga

SEQ ID NO: 2636370 - RNA, 19 nt, Homo sapiens
  misc_RNA (1)...(19): siRNA sense strand
cgacggugaugacggacaa

SEQ ID NO: 2636371 - RNA, 19 nt, Homo sapiens
  misc_RNA (1)...(19): siRNA sense strand
ugaaagaagccgaguucca

SEQ ID NO: 2636372 - RNA, 19 nt, Homo sapiens
  misc_RNA (1)...(19): siRNA sense strand
cagggaaguauuaagcaaa

SEQ ID NO: 2636373 - RNA, 19 nt, Homo sapiens
  misc_RNA (1)...(19): siRNA sense strand
ccacugugugagagaagaa

SEQ ID NO: 2636374 - RNA, 19 nt, Homo sapiens
  misc_RNA (1)...(19): siRNA sense strand
ucagggaaguauuaagcaa

SEQ ID NO: 2636375 - RNA, 19 nt, Homo sapiens
  misc_RNA (1)...(19): siRNA sense strand
cauagaucggugugacaua

SEQ ID NO: 2636376 - RNA, 19 nt, Homo sapiens
  misc_RNA (1)...(19): siRNA sense strand
gaagaagaggagacgauga

SEQ ID NO: 2636377 - RNA, 19 nt, Homo sapiens
  misc_RNA (1)...(19): siRNA sense strand
aagaagaggagacgaugaa

SEQ ID NO: 2636378 - RNA, 19 nt, Homo sapiens
  misc_RNA (1)...(19): siRNA sense strand
ggacaaacugggagaacag

SEQ ID NO: 2636379 - RNA, 19 nt, Homo sapiens
  misc_RNA (1)...(19): siRNA sense strand
cuaaggaacgagauaaauu

SEQ ID NO: 2636380 - RNA, 19 nt, Homo sapiens
  misc_RNA (1)...(19): siRNA sense strand
ugucaguagcguuggguga

SEQ ID NO: 2636381 - RNA, 19 nt, Homo sapiens
  misc_RNA (1)...(19): siRNA sense strand
ugugaagaaugcagcgaga

SEQ ID NO: 2636382 - RNA, 19 nt, Homo sapiens
  misc_RNA (1)...(19): siRNA sense strand
ccaaauggcugaagaccgu

SEQ ID NO: 2636383 - RNA, 19 nt, Homo sapiens
  misc_RNA (1)...(19): siRNA sense strand
ggauaaguccuguagcaca

SEQ ID NO: 2636384 - RNA, 19 nt, Homo sapiens
  misc_RNA (1)...(19): siRNA sense strand
uggaguuaauucagucaaa

SEQ ID NO: 2636385 - RNA, 19 nt, Homo sapiens
  misc_RNA (1)...(19): siRNA sense strand
ugacuuugauugugaagau

SEQ ID NO: 2636386 - RNA, 19 nt, Homo sapiens
  misc_RNA (1)...(19): siRNA sense strand
aguuacaagaugauggaau

SEQ ID NO: 2636387 - RNA, 19 nt, Homo sapiens
  misc_RNA (1)...(19): siRNA sense strand
ccugagggacagcgugaaa

SEQ ID NO: 2636388 - RNA, 19 nt, Homo sapiens
  misc_RNA (1)...(19): siRNA sense strand
gugaaauagaacuggcuga

SEQ ID NO: 2636389 - RNA, 19 nt, Homo sapiens
  misc_RNA (1)...(19): siRNA sense strand
gcacaaggauaucauugaa

SEQ ID NO: 2636390 - RNA, 19 nt, Homo sapiens
  misc_RNA (1)...(19): siRNA sense strand
gcagcaaggaccuaaagaa

SEQ ID NO: 2636391 - RNA, 19 nt, Homo sapiens
  misc_RNA (1)...(19): siRNA sense strand
aaagaaugauaccgaaaga

SEQ ID NO: 2636392 - RNA, 19 nt, Homo sapiens
  misc_RNA (1)...(19): siRNA sense strand
aggaaauggcuaaguuuga

SEQ ID NO: 2636393 - RNA, 19 nt, Homo sapiens
  misc_RNA (1)...(19): siRNA sense strand
cagcaguggaggaugucaa

SEQ ID NO: 2636394 - RNA, 19 nt, Homo sapiens
  misc_RNA (1)...(19): siRNA sense strand
aguuugauacugugguuaa

SEQ ID NO: 2636395 - RNA, 19 nt, Homo sapiens
  misc_RNA (1)...(19): siRNA sense strand
ccucagcgaugcagccuua

SEQ ID NO: 2636396 - RNA, 19 nt, Homo sapiens
  misc_RNA (1)...(19): siRNA sense strand
agucgagagugacgaagaa

SEQ ID NO: 2636397 - RNA, 19 nt, Homo sapiens
  misc_RNA (1)...(19): siRNA sense strand
gcaaggagauacuggccaa

SEQ ID NO: 2636398 - RNA, 19 nt, Homo sapiens
  misc_RNA (1)...(19): siRNA sense strand
ggguguacaggcuggcaaa

SEQ ID NO: 2636399 - RNA, 19 nt, Homo sapiens
  misc_RNA (1)...(19): siRNA sense strand
agaaguaccacguggacca

SEQ ID NO: 2636400 - RNA, 19 nt, Homo sapiens
  misc_RNA (1)...(19): siRNA sense strand
gggugaaggugcucuggga

SEQ ID NO: 2636401 - RNA, 19 nt, Homo sapiens
  misc_RNA (1)...(19): siRNA sense strand
acuucguggccgagcacua

SEQ ID NO: 2636402 - RNA, 19 nt, Homo sapiens
  misc_RNA (1)...(19): siRNA sense strand
ucaccuucaaugugggcua

SEQ ID NO: 2636403 - RNA, 19 nt, Homo sapiens
  misc_RNA (1)...(19): siRNA sense strand
gcaaggagauacuggccaa

SEQ ID NO: 2636404 - RNA, 19 nt, Homo sapiens
  misc_RNA (1)...(19): siRNA sense strand
ggguguacaggcuggcaaa

SEQ ID NO: 2636405 - RNA, 19 nt, Homo sapiens
  misc_RNA (1)...(19): siRNA sense strand
agaaguaccacguggacca

SEQ ID NO: 2636406 - RNA, 19 nt, Homo sapiens
  misc_RNA (1)...(19): siRNA sense strand
gggugaaggugcucuggga

SEQ ID NO: 2636407 - RNA, 19 nt, Homo sapiens
  misc_RNA (1)...(19): siRNA sense strand
acuucguggccgagcacua

SEQ ID NO: 2636408 - RNA, 19 nt, Homo sapiens
  misc_RNA (1)...(19): siRNA sense strand
ucaccuucaaugugggcua

SEQ ID NO: 2636409 - RNA, 19 nt, Homo sapiens
  misc_RNA (1)...(19): siRNA sense strand
gagccaaaguacacaggca

SEQ ID NO: 2636410 - RNA, 19 nt, Homo sapiens
  misc_RNA (1)...(19): siRNA sense strand
gcgguguugcugugggcua

SEQ ID NO: 2636411 - RNA, 19 nt, Homo sapiens
  misc_RNA (1)...(19): siRNA sense strand
cugucaacaugguggucuu

SEQ ID NO: 2636412 - RNA, 19 nt, Homo sapiens
  misc_RNA (1)...(19): siRNA sense strand
uggcacugcguccgggaua

SEQ ID NO: 2636413 - RNA, 19 nt, Homo sapiens
  misc_RNA (1)...(19): siRNA sense strand
cggucaugcuacaggaaga

SEQ ID NO: 2636414 - RNA, 19 nt, Homo sapiens
  misc_RNA (1)...(19): siRNA sense strand
gaugguuguucuagagauu

SEQ ID NO: 2636415 - RNA, 19 nt, Homo sapiens
  misc_RNA (1)...(19): siRNA sense strand
gaagcaaagcauuucaaua

SEQ ID NO: 2636416 - RNA, 19 nt, Homo sapiens
  misc_RNA (1)...(19): siRNA sense strand
gcaucauccuugaccacaa

SEQ ID NO: 2636417 - RNA, 19 nt, Homo sapiens
  misc_RNA (1)...(19): siRNA sense strand
ccacaagaucugcgucauu

SEQ ID NO: 2636418 - RNA, 19 nt, Homo sapiens
  misc_RNA (1)...(19): siRNA sense strand
agauaaaaccucauugcaa

SEQ ID NO: 2636419 - RNA, 19 nt, Homo sapiens
  misc_RNA (1)...(19): siRNA sense strand
ucacacaggaagacgguca

SEQ ID NO: 2636420 - RNA, 19 nt, Homo sapiens
  misc_RNA (1)...(19): siRNA sense strand
acuugggacucuggagaua

SEQ ID NO: 2636421 - RNA, 19 nt, Homo sapiens
  misc_RNA (1)...(19): siRNA sense strand
cgucauuggauuugucuca

SEQ ID NO: 2636422 - RNA, 19 nt, Homo sapiens
  misc_RNA (1)...(19): siRNA sense strand
ucacagagccugauauugu

SEQ ID NO: 2636423 - RNA, 19 nt, Homo sapiens
  misc_RNA (1)...(19): siRNA sense strand
agucacagagccugauauu

SEQ ID NO: 2636424 - RNA, 19 nt, Homo sapiens
  misc_RNA (1)...(19): siRNA sense strand
uugggacucuggagauaaa

SEQ ID NO: 2636425 - RNA, 19 nt, Homo sapiens
  misc_RNA (1)...(19): siRNA sense strand
uggcugagauccugggcga

SEQ ID NO: 2636426 - RNA, 19 nt, Homo sapiens
  misc_RNA (1)...(19): siRNA sense strand
cagaggaaauugaagggaa

SEQ ID NO: 2636427 - RNA, 19 nt, Homo sapiens
  misc_RNA (1)...(19): siRNA sense strand
ugucauggaccaagaguau

SEQ ID NO: 2636428 - RNA, 19 nt, Homo sapiens
  misc_RNA (1)...(19): siRNA sense strand
acgaaauccaacagagaga

SEQ ID NO: 2636429 - RNA, 19 nt, Homo sapiens
  misc_RNA (1)...(19): siRNA sense strand
gauacaggauugaugaaaa

SEQ ID NO: 2636430 - RNA, 19 nt, Homo sapiens
  misc_RNA (1)...(19): siRNA sense strand
cguucauucugcagaggaa

SEQ ID NO: 2636431 - RNA, 19 nt, Homo sapiens
  misc_RNA (1)...(19): siRNA sense strand
cgaucuugaaagugaaauu

SEQ ID NO: 2636432 - RNA, 19 nt, Homo sapiens
  misc_RNA (1)...(19): siRNA sense strand
cggugauaacuaaggauau

SEQ ID NO: 2636433 - RNA, 19 nt, Homo sapiens
  misc_RNA (1)...(19): siRNA sense strand
ggucugugaugaagauaca

SEQ ID NO: 2636434 - RNA, 19 nt, Homo sapiens
  misc_RNA (1)...(19): siRNA sense strand
aggaagaguuuuagcccaa

SEQ ID NO: 2636435 - RNA, 19 nt, Homo sapiens
  misc_RNA (1)...(19): siRNA sense strand
gaauugaagacuagaaucu

SEQ ID NO: 2636436 - RNA, 19 nt, Homo sapiens
  misc_RNA (1)...(19): siRNA sense strand
cuuuguagauuauggcaau

SEQ ID NO: 2636437 - RNA, 19 nt, Homo sapiens
  misc_RNA (1)...(19): siRNA sense strand
cgugagagcagcagaggga

SEQ ID NO: 2636438 - RNA, 19 nt, Homo sapiens
  misc_RNA (1)...(19): siRNA sense strand
caagagaauuagagaggug

SEQ ID NO: 2636439 - RNA, 19 nt, Homo sapiens
  misc_RNA (1)...(19): siRNA sense strand
gaauuagagagguggcuga

SEQ ID NO: 2636440 - RNA, 19 nt, Homo sapiens
  misc_RNA (1)...(19): siRNA sense strand
auauauaagcagcgauuca

SEQ ID NO: 2636441 - RNA, 19 nt, Homo sapiens
  misc_RNA (1)...(19): siRNA sense strand
cuuuagagcucaaguccuu

SEQ ID NO: 2636442 - RNA, 19 nt, Homo sapiens
  misc_RNA (1)...(19): siRNA sense strand
uggcugaauuauaugaaga

SEQ ID NO: 2636443 - RNA, 19 nt, Homo sapiens
  misc_RNA (1)...(19): siRNA sense strand
auaaaagguugcaggucua

SEQ ID NO: 2636444 - RNA, 19 nt, Homo sapiens
  misc_RNA (1)...(19): siRNA sense strand
cacaaggauuucugggaca

SEQ ID NO: 2636445 - RNA, 19 nt, Homo sapiens
  misc_RNA (1)...(19): siRNA sense strand
ccggugauaacuaaggaua

SEQ ID NO: 2636446 - RNA, 19 nt, Homo sapiens
  misc_RNA (1)...(19): siRNA sense strand
ccagcuguaaucagagaaa

SEQ ID NO: 2636447 - RNA, 19 nt, Homo sapiens
  misc_RNA (1)...(19): siRNA sense strand
cuuuagacaguguggucaa

SEQ ID NO: 2636448 - RNA, 19 nt, Homo sapiens
  misc_RNA (1)...(19): siRNA sense strand
agaggaaauugaagggaag

SEQ ID NO: 2636449 - RNA, 19 nt, Homo sapiens
  misc_RNA (1)...(19): siRNA sense strand
caccaauauugcagagagu

SEQ ID NO: 2636450 - RNA, 19 nt, Homo sapiens
  misc_RNA (1)...(19): siRNA sense strand
ggacgagugucuagagggu

SEQ ID NO: 2636451 - RNA, 19 nt, Homo sapiens
  misc_RNA (1)...(19): siRNA sense strand
gcacgaucuugaaagugaa

SEQ ID NO: 2636452 - RNA, 19 nt, Homo sapiens
  misc_RNA (1)...(19): siRNA sense strand
acaguguggucaagucaaa

SEQ ID NO: 2636453 - RNA, 19 nt, Homo sapiens
  misc_RNA (1)...(19): siRNA sense strand
ucacgaaauccaacagaga

SEQ ID NO: 2636454 - RNA, 19 nt, Homo sapiens
  misc_RNA (1)...(19): siRNA sense strand
uggaaggcuugcagacaga

SEQ ID NO: 2636455 - RNA, 19 nt, Homo sapiens
  misc_RNA (1)...(19): siRNA sense strand
ggauacaggauugaugaaa

SEQ ID NO: 2636456 - RNA, 19 nt, Homo sapiens
  misc_RNA (1)...(19): siRNA sense strand
gagaaaaggccgugcugga

SEQ ID NO: 2636457 - RNA, 19 nt, Homo sapiens
  misc_RNA (1)...(19): siRNA sense strand
auuuggaugucuagaugaa

SEQ ID NO: 2636458 - RNA, 19 nt, Homo sapiens
  misc_RNA (1)...(19): siRNA sense strand
uagagagguggcugaauua

SEQ ID NO: 2636459 - RNA, 19 nt, Homo sapiens
  misc_RNA (1)...(19): siRNA sense strand
gaagaauugaagacuagaa

SEQ ID NO: 2636460 - RNA, 19 nt, Homo sapiens
  misc_RNA (1)...(19): siRNA sense strand
aggagauggcggugaggga

SEQ ID NO: 2636461 - RNA, 19 nt, Homo sapiens
  misc_RNA (1)...(19): siRNA sense strand
gauaugaaggagaguggga

SEQ ID NO: 2636462 - RNA, 19 nt, Homo sapiens
  misc_RNA (1)...(19): siRNA sense strand
gggcagagagaagaugaaa

SEQ ID NO: 2636463 - RNA, 19 nt, Homo sapiens
  misc_RNA (1)...(19): siRNA sense strand
ugagggagcuggcuggcaa

SEQ ID NO: 2636464 - RNA, 19 nt, Homo sapiens
  misc_RNA (1)...(19): siRNA sense strand
gggauacaggauugaugaa

SEQ ID NO: 2636465 - RNA, 19 nt, Homo sapiens
  misc_RNA (1)...(19): siRNA sense strand
cauaaaagguugcaggucu

SEQ ID NO: 2636466 - RNA, 19 nt, Homo sapiens
  misc_RNA (1)...(19): siRNA sense strand
ccaauauugcagagaguuc

SEQ ID NO: 2636467 - RNA, 19 nt, Homo sapiens
  misc_RNA (1)...(19): siRNA sense strand
aaaucagcaacuugguaaa

SEQ ID NO: 2636468 - RNA, 19 nt, Homo sapiens
  misc_RNA (1)...(19): siRNA sense strand
aagggaaggugcaaggcau

SEQ ID NO: 2636469 - RNA, 19 nt, Homo sapiens
  misc_RNA (1)...(19): siRNA sense strand
ugaaaacaacucagagauu

SEQ ID NO: 2636470 - RNA, 19 nt, Homo sapiens
  misc_RNA (1)...(19): siRNA sense strand
guucccaaguggcaugaaa

SEQ ID NO: 2636471 - RNA, 19 nt, Homo sapiens
  misc_RNA (1)...(19): siRNA sense strand
gugagugggcagagagaag

SEQ ID NO: 2636472 - RNA, 19 nt, Homo sapiens
  misc_RNA (1)...(19): siRNA sense strand
cucgauggauauaggaaca

SEQ ID NO: 2636473 - RNA, 19 nt, Homo sapiens
  misc_RNA (1)...(19): siRNA sense strand
gauauaggaacaaagugaa

SEQ ID NO: 2636474 - RNA, 19 nt, Homo sapiens
  misc_RNA (1)...(19): siRNA sense strand
cugcaguauauauggcaau

SEQ ID NO: 2636475 - RNA, 19 nt, Homo sapiens
  misc_RNA (1)...(19): siRNA sense strand
cgguagauccuaugcaagu

SEQ ID NO: 2636476 - RNA, 19 nt, Homo sapiens
  misc_RNA (1)...(19): siRNA sense strand
cagucaaaaccaagggaga

SEQ ID NO: 2636477 - RNA, 19 nt, Homo sapiens
  misc_RNA (1)...(19): siRNA sense strand
ccgccuggucugagugaca

SEQ ID NO: 2636478 - RNA, 19 nt, Homo sapiens
  misc_RNA (1)...(19): siRNA sense strand
ucauggaccaagaguauau

SEQ ID NO: 2636479 - RNA, 19 nt, Homo sapiens
  misc_RNA (1)...(19): siRNA sense strand
cgauggauauaggaacaaa

SEQ ID NO: 2636480 - RNA, 19 nt, Homo sapiens
  misc_RNA (1)...(19): siRNA sense strand
ggcugaauuauaugaagaa

SEQ ID NO: 2636481 - RNA, 19 nt, Homo sapiens
  misc_RNA (1)...(19): siRNA sense strand
uuaaugauuuggagcacau

SEQ ID NO: 2636482 - RNA, 19 nt, Homo sapiens
  misc_RNA (1)...(19): siRNA sense strand
gucucaaagcucaggaaca

SEQ ID NO: 2636483 - RNA, 19 nt, Homo sapiens
  misc_RNA (1)...(19): siRNA sense strand
ggaccaaauggaugcaagu

SEQ ID NO: 2636484 - RNA, 19 nt, Homo sapiens
  misc_RNA (1)...(19): siRNA sense strand
ggcuuuagaagaacagaau

SEQ ID NO: 2636485 - RNA, 19 nt, Homo sapiens
  misc_RNA (1)...(19): siRNA sense strand
augaagaauugaagacuag

SEQ ID NO: 2636486 - RNA, 19 nt, Homo sapiens
  misc_RNA (1)...(19): siRNA sense strand
acaaggauuucugggacaa

SEQ ID NO: 2636487 - RNA, 19 nt, Homo sapiens
  misc_RNA (1)...(19): siRNA sense strand
aaaggagguuggagcacuu

SEQ ID NO: 2636488 - RNA, 19 nt, Homo sapiens
  misc_RNA (1)...(19): siRNA sense strand
ggcaguagcaagagugacu

SEQ ID NO: 2636489 - RNA, 19 nt, Homo sapiens
  misc_RNA (1)...(19): siRNA sense strand
cuauaaacaacuacagucu

SEQ ID NO: 2636490 - RNA, 19 nt, Homo sapiens
  misc_RNA (1)...(19): siRNA sense strand
gucccuggguacagaaaga

SEQ ID NO: 2636491 - RNA, 19 nt, Homo sapiens
  misc_RNA (1)...(19): siRNA sense strand
gugcaaggcaugaacgucu

SEQ ID NO: 2636492 - RNA, 19 nt, Homo sapiens
  misc_RNA (1)...(19): siRNA sense strand
agucugugauggaccaaau

SEQ ID NO: 2636493 - RNA, 19 nt, Homo sapiens
  misc_RNA (1)...(19): siRNA sense strand
ggcagagagaagaugaaaa

SEQ ID NO: 2636494 - RNA, 19 nt, Homo sapiens
  misc_RNA (1)...(19): siRNA sense strand
gaugaaaacaacucagaga

SEQ ID NO: 2636495 - RNA, 19 nt, Homo sapiens
  misc_RNA (1)...(19): siRNA sense strand
agacauugcccgucagaag

SEQ ID NO: 2636496 - RNA, 19 nt, Homo sapiens
  misc_RNA (1)...(19): siRNA sense strand
gcuuuagaagaacagaaua

SEQ ID NO: 2636497 - RNA, 19 nt, Homo sapiens
  misc_RNA (1)...(19): siRNA sense strand
ccuggguacagaaagauua

SEQ ID NO: 2636498 - RNA, 19 nt, Homo sapiens
  misc_RNA (1)...(19): siRNA sense strand
cagaggaaauugaagggaa

SEQ ID NO: 2636499 - RNA, 19 nt, Homo sapiens
  misc_RNA (1)...(19): siRNA sense strand
ugucauggaccaagaguau

SEQ ID NO: 2636500 - RNA, 19 nt, Homo sapiens
  misc_RNA (1)...(19): siRNA sense strand
acgaaauccaacagagaga

SEQ ID NO: 2636501 - RNA, 19 nt, Homo sapiens
  misc_RNA (1)...(19): siRNA sense strand
gauacaggauugaugaaaa

SEQ ID NO: 2636502 - RNA, 19 nt, Homo sapiens
  misc_RNA (1)...(19): siRNA sense strand
cguucauucugcagaggaa

SEQ ID NO: 2636503 - RNA, 19 nt, Homo sapiens
  misc_RNA (1)...(19): siRNA sense strand
cgaucuugaaagugaaauu

SEQ ID NO: 2636504 - RNA, 19 nt, Homo sapiens
  misc_RNA (1)...(19): siRNA sense strand
cggugauaacuaaggauau

SEQ ID NO: 2636505 - RNA, 19 nt, Homo sapiens
  misc_RNA (1)...(19): siRNA sense strand
ggucugugaugaagauaca

SEQ ID NO: 2636506 - RNA, 19 nt, Homo sapiens
  misc_RNA (1)...(19): siRNA sense strand
aggaagaguuuuagcccaa

SEQ ID NO: 2636507 - RNA, 19 nt, Homo sapiens
  misc_RNA (1)...(19): siRNA sense strand
cuuuguagauuauggcaau

SEQ ID NO: 2636508 - RNA, 19 nt, Homo sapiens
  misc_RNA (1)...(19): siRNA sense strand
cgugagagcagcagaggga

SEQ ID NO: 2636509 - RNA, 19 nt, Homo sapiens
  misc_RNA (1)...(19): siRNA sense strand
caagagaauuagagaggug

SEQ ID NO: 2636510 - RNA, 19 nt, Homo sapiens
  misc_RNA (1)...(19): siRNA sense strand
gaauuagagagguggcuga

SEQ ID NO: 2636511 - RNA, 19 nt, Homo sapiens
  misc_RNA (1)...(19): siRNA sense strand
auauauaagcagcgauuca

SEQ ID NO: 2636512 - RNA, 19 nt, Homo sapiens
  misc_RNA (1)...(19): siRNA sense strand
cuuuagagcucaaguccuu

SEQ ID NO: 2636513 - RNA, 19 nt, Homo sapiens
  misc_RNA (1)...(19): siRNA sense strand
uggcugaauuauaugaaga

SEQ ID NO: 2636514 - RNA, 19 nt, Homo sapiens
  misc_RNA (1)...(19): siRNA sense strand
auaaaagguugcaggucua

SEQ ID NO: 2636515 - RNA, 19 nt, Homo sapiens
  misc_RNA (1)...(19): siRNA sense strand
cacaaggauuucugggaca

SEQ ID NO: 2636516 - RNA, 19 nt, Homo sapiens
  misc_RNA (1)...(19): siRNA sense strand
ccggugauaacuaaggaua

SEQ ID NO: 2636517 - RNA, 19 nt, Homo sapiens
  misc_RNA (1)...(19): siRNA sense strand
ccagcuguaaucagagaaa

SEQ ID NO: 2636518 - RNA, 19 nt, Homo sapiens
  misc_RNA (1)...(19): siRNA sense strand
cuuuagacaguguggucaa

SEQ ID NO: 2636519 - RNA, 19 nt, Homo sapiens
  misc_RNA (1)...(19): siRNA sense strand
agaggaaauugaagggaag

SEQ ID NO: 2636520 - RNA, 19 nt, Homo sapiens
  misc_RNA (1)...(19): siRNA sense strand
caccaauauugcagagagu

SEQ ID NO: 2636521 - RNA, 19 nt, Homo sapiens
  misc_RNA (1)...(19): siRNA sense strand
ggacgagugucuagagggu

SEQ ID NO: 2636522 - RNA, 19 nt, Homo sapiens
  misc_RNA (1)...(19): siRNA sense strand
gcacgaucuugaaagugaa

SEQ ID NO: 2636523 - RNA, 19 nt, Homo sapiens
  misc_RNA (1)...(19): siRNA sense strand
acaguguggucaagucaaa

SEQ ID NO: 2636524 - RNA, 19 nt, Homo sapiens
  misc_RNA (1)...(19): siRNA sense strand
ucacgaaauccaacagaga

SEQ ID NO: 2636525 - RNA, 19 nt, Homo sapiens
  misc_RNA (1)...(19): siRNA sense strand
uggaaggcuugcagacaga

SEQ ID NO: 2636526 - RNA, 19 nt, Homo sapiens
  misc_RNA (1)...(19): siRNA sense strand
ggauacaggauugaugaaa

SEQ ID NO: 2636527 - RNA, 19 nt, Homo sapiens
  misc_RNA (1)...(19): siRNA sense strand
gagaaaaggccgugcugga

SEQ ID NO: 2636528 - RNA, 19 nt, Homo sapiens
  misc_RNA (1)...(19): siRNA sense strand
auuuggaugucuagaugaa

SEQ ID NO: 2636529 - RNA, 19 nt, Homo sapiens
  misc_RNA (1)...(19): siRNA sense strand
uagagagguggcugaauua

SEQ ID NO: 2636530 - RNA, 19 nt, Homo sapiens
  misc_RNA (1)...(19): siRNA sense strand
aggagauggcggugaggga

SEQ ID NO: 2636531 - RNA, 19 nt, Homo sapiens
  misc_RNA (1)...(19): siRNA sense strand
gauaugaaggagaguggga

SEQ ID NO: 2636532 - RNA, 19 nt, Homo sapiens
  misc_RNA (1)...(19): siRNA sense strand
gggcagagagaagaugaaa

SEQ ID NO: 2636533 - RNA, 19 nt, Homo sapiens
  misc_RNA (1)...(19): siRNA sense strand
ugagggagcuggcuggcaa

SEQ ID NO: 2636534 - RNA, 19 nt, Homo sapiens
  misc_RNA (1)...(19): siRNA sense strand
gggauacaggauugaugaa

SEQ ID NO: 2636535 - RNA, 19 nt, Homo sapiens
  misc_RNA (1)...(19): siRNA sense strand
cauaaaagguugcaggucu

SEQ ID NO: 2636536 - RNA, 19 nt, Homo sapiens
  misc_RNA (1)...(19): siRNA sense strand
ccaauauugcagagaguuc

SEQ ID NO: 2636537 - RNA, 19 nt, Homo sapiens
  misc_RNA (1)...(19): siRNA sense strand
aaaucagcaacuugguaaa

SEQ ID NO: 2636538 - RNA, 19 nt, Homo sapiens
  misc_RNA (1)...(19): siRNA sense strand
aagggaaggugcaaggcau

SEQ ID NO: 2636539 - RNA, 19 nt, Homo sapiens
  misc_RNA (1)...(19): siRNA sense strand
ugaaaacaacucagagauu

SEQ ID NO: 2636540 - RNA, 19 nt, Homo sapiens
  misc_RNA (1)...(19): siRNA sense strand
guucccaaguggcaugaaa

SEQ ID NO: 2636541 - RNA, 19 nt, Homo sapiens
  misc_RNA (1)...(19): siRNA sense strand
gugagugggcagagagaag

SEQ ID NO: 2636542 - RNA, 19 nt, Homo sapiens
  misc_RNA (1)...(19): siRNA sense strand
cucgauggauauaggaaca

SEQ ID NO: 2636543 - RNA, 19 nt, Homo sapiens
  misc_RNA (1)...(19): siRNA sense strand
gauauaggaacaaagugaa

SEQ ID NO: 2636544 - RNA, 19 nt, Homo sapiens
  misc_RNA (1)...(19): siRNA sense strand
cugcaguauauauggcaau

SEQ ID NO: 2636545 - RNA, 19 nt, Homo sapiens
  misc_RNA (1)...(19): siRNA sense strand
cgguagauccuaugcaagu

SEQ ID NO: 2636546 - RNA, 19 nt, Homo sapiens
  misc_RNA (1)...(19): siRNA sense strand
cagucaaaaccaagggaga

SEQ ID NO: 2636547 - RNA, 19 nt, Homo sapiens
  misc_RNA (1)...(19): siRNA sense strand
ccgccuggucugagugaca

SEQ ID NO: 2636548 - RNA, 19 nt, Homo sapiens
  misc_RNA (1)...(19): siRNA sense strand
ucauggaccaagaguauau

SEQ ID NO: 2636549 - RNA, 19 nt, Homo sapiens
  misc_RNA (1)...(19): siRNA sense strand
uuaaugauuuggagcacau

SEQ ID NO: 2636550 - RNA, 19 nt, Homo sapiens
  misc_RNA (1)...(19): siRNA sense strand
cgauggauauaggaacaaa

SEQ ID NO: 2636551 - RNA, 19 nt, Homo sapiens
  misc_RNA (1)...(19): siRNA sense strand
ggcugaauuauaugaagaa

SEQ ID NO: 2636552 - RNA, 19 nt, Homo sapiens
  misc_RNA (1)...(19): siRNA sense strand
gucucaaagcucaggaaca

SEQ ID NO: 2636553 - RNA, 19 nt, Homo sapiens
  misc_RNA (1)...(19): siRNA sense strand
ggaccaaauggaugcaagu

SEQ ID NO: 2636554 - RNA, 19 nt, Homo sapiens
  misc_RNA (1)...(19): siRNA sense strand
ggcuuuagaagaacagaau

SEQ ID NO: 2636555 - RNA, 19 nt, Homo sapiens
  misc_RNA (1)...(19): siRNA sense strand
acaaggauuucugggacaa

SEQ ID NO: 2636556 - RNA, 19 nt, Homo sapiens
  misc_RNA (1)...(19): siRNA sense strand
aaaggagguuggagcacuu

SEQ ID NO: 2636557 - RNA, 19 nt, Homo sapiens
  misc_RNA (1)...(19): siRNA sense strand
ggcaguagcaagagugacu

SEQ ID NO: 2636558 - RNA, 19 nt, Homo sapiens
  misc_RNA (1)...(19): siRNA sense strand
cuauaaacaacuacagucu

SEQ ID NO: 2636559 - RNA, 19 nt, Homo sapiens
  misc_RNA (1)...(19): siRNA sense strand
gucccuggguacagaaaga

SEQ ID NO: 2636560 - RNA, 19 nt, Homo sapiens
  misc_RNA (1)...(19): siRNA sense strand
gugcaaggcaugaacgucu

SEQ ID NO: 2636561 - RNA, 19 nt, Homo sapiens
  misc_RNA (1)...(19): siRNA sense strand
agucugugauggaccaaau

SEQ ID NO: 2636562 - RNA, 19 nt, Homo sapiens
  misc_RNA (1)...(19): siRNA sense strand
ggcagagagaagaugaaaa

SEQ ID NO: 2636563 - RNA, 19 nt, Homo sapiens
  misc_RNA (1)...(19): siRNA sense strand
gaugaaaacaacucagaga

SEQ ID NO: 2636564 - RNA, 19 nt, Homo sapiens
  misc_RNA (1)...(19): siRNA sense strand
agacauugcccgucagaag

SEQ ID NO: 2636565 - RNA, 19 nt, Homo sapiens
  misc_RNA (1)...(19): siRNA sense strand
gcuuuagaagaacagaaua

SEQ ID NO: 2636566 - RNA, 19 nt, Homo sapiens
  misc_RNA (1)...(19): siRNA sense strand
ccuggguacagaaagauua

SEQ ID NO: 2636567 - RNA, 19 nt, Homo sapiens
  misc_RNA (1)...(19): siRNA sense strand
ucacaguuccagaugucaa

SEQ ID NO: 2636568 - RNA, 19 nt, Homo sapiens
  misc_RNA (1)...(19): siRNA sense strand
acccgaaggaugaacuuaa

SEQ ID NO: 2636569 - RNA, 19 nt, Homo sapiens
  misc_RNA (1)...(19): siRNA sense strand
ccuccaagaccaaggacaa

SEQ ID NO: 2636570 - RNA, 19 nt, Homo sapiens
  misc_RNA (1)...(19): siRNA sense strand
uggaaugcauggacggcaa

SEQ ID NO: 2636571 - RNA, 19 nt, Homo sapiens
  misc_RNA (1)...(19): siRNA sense strand
acgaccagcucgagggaca

SEQ ID NO: 2636572 - RNA, 19 nt, Homo sapiens
  misc_RNA (1)...(19): siRNA sense strand
gagccaagcaugugccgua

SEQ ID NO: 2636573 - RNA, 19 nt, Homo sapiens
  misc_RNA (1)...(19): siRNA sense strand
ugguggagcucaagcgaca

SEQ ID NO: 2636574 - RNA, 19 nt, Homo sapiens
  misc_RNA (1)...(19): siRNA sense strand
augaugaguuugacgccua

SEQ ID NO: 2636575 - RNA, 19 nt, Homo sapiens
  misc_RNA (1)...(19): siRNA sense strand
ggauggaagcucuggguuc

SEQ ID NO: 2636576 - RNA, 19 nt, Homo sapiens
  misc_RNA (1)...(19): siRNA sense strand
caguggagcucaacggcga

SEQ ID NO: 2636577 - RNA, 19 nt, Homo sapiens
  misc_RNA (1)...(19): siRNA sense strand
cugaaggagccguucgaga

SEQ ID NO: 2636578 - RNA, 19 nt, Homo sapiens
  misc_RNA (1)...(19): siRNA sense strand
cugcaggagcggcuggaau

SEQ ID NO: 2636579 - RNA, 19 nt, Homo sapiens
  misc_RNA (1)...(19): siRNA sense strand
cagcaagguagaagcagca

SEQ ID NO: 2636580 - RNA, 19 nt, Homo sapiens
  misc_RNA (1)...(19): siRNA sense strand
uggagugucucgcggguca

SEQ ID NO: 2636581 - RNA, 19 nt, Homo sapiens
  misc_RNA (1)...(19): siRNA sense strand
uggcagacacgguccgaga

SEQ ID NO: 2636582 - RNA, 19 nt, Homo sapiens
  misc_RNA (1)...(19): siRNA sense strand
ccucggaagaagcagguga

SEQ ID NO: 2636583 - RNA, 19 nt, Homo sapiens
  misc_RNA (1)...(19): siRNA sense strand
ggaucaacgccgagaacga

SEQ ID NO: 2636584 - RNA, 19 nt, Homo sapiens
  misc_RNA (1)...(19): siRNA sense strand
agaugaagaucaaggacca

SEQ ID NO: 2636585 - RNA, 19 nt, Homo sapiens
  misc_RNA (1)...(19): siRNA sense strand
ccucagugacgcagggaca

SEQ ID NO: 2636586 - RNA, 19 nt, Homo sapiens
  misc_RNA (1)...(19): siRNA sense strand
ccagagagcagcaggagga

SEQ ID NO: 2636587 - RNA, 19 nt, Homo sapiens
  misc_RNA (1)...(19): siRNA sense strand
gggaacucggcguggacaa

SEQ ID NO: 2636588 - RNA, 19 nt, Homo sapiens
  misc_RNA (1)...(19): siRNA sense strand
aggugagcgugaaggguuu

SEQ ID NO: 2636589 - RNA, 19 nt, Homo sapiens
  misc_RNA (1)...(19): siRNA sense strand
ggaccggagaccaggaaca

SEQ ID NO: 2636590 - RNA, 19 nt, Homo sapiens
  misc_RNA (1)...(19): siRNA sense strand
ugucagugccaaugggaga

SEQ ID NO: 2636591 - RNA, 19 nt, Homo sapiens
  misc_RNA (1)...(19): siRNA sense strand
gcgagauggugucggcuga

SEQ ID NO: 2636592 - RNA, 19 nt, Homo sapiens
  misc_RNA (1)...(19): siRNA sense strand
gaccagaacaugaacgaca

SEQ ID NO: 2636593 - RNA, 19 nt, Homo sapiens
  misc_RNA (1)...(19): siRNA sense strand
cggcaagagagcuucacua

SEQ ID NO: 2636594 - RNA, 19 nt, Homo sapiens
  misc_RNA (1)...(19): siRNA sense strand
cggacgacgaugaggagga

SEQ ID NO: 2636595 - RNA, 19 nt, Homo sapiens
  misc_RNA (1)...(19): siRNA sense strand
cagaacacagggagagcuu

SEQ ID NO: 2636596 - RNA, 19 nt, Homo sapiens
  misc_RNA (1)...(19): siRNA sense strand
cgucuaugucagugccaau

SEQ ID NO: 2636597 - RNA, 19 nt, Homo sapiens
  misc_RNA (1)...(19): siRNA sense strand
gcgggagaagacagaggaa

SEQ ID NO: 2636598 - RNA, 19 nt, Homo sapiens
  misc_RNA (1)...(19): siRNA sense strand
gggagaagacagaggaacg

SEQ ID NO: 2636599 - RNA, 19 nt, Homo sapiens
  misc_RNA (1)...(19): siRNA sense strand
uggugaaggacguggccau

SEQ ID NO: 2636600 - RNA, 19 nt, Homo sapiens
  misc_RNA (1)...(19): siRNA sense strand
caccugaucuugaaggaga

SEQ ID NO: 2636601 - RNA, 19 nt, Homo sapiens
  misc_RNA (1)...(19): siRNA sense strand
cgugcagacggcagagauu

SEQ ID NO: 2636602 - RNA, 19 nt, Homo sapiens
  misc_RNA (1)...(19): siRNA sense strand
ggaaacaggagcuuggcca

SEQ ID NO: 2636603 - RNA, 19 nt, Homo sapiens
  misc_RNA (1)...(19): siRNA sense strand
acgaugaggaggagccuga

SEQ ID NO: 2636604 - RNA, 19 nt, Homo sapiens
  misc_RNA (1)...(19): siRNA sense strand
gggacuuugaccagaacau

SEQ ID NO: 2636605 - RNA, 19 nt, Homo sapiens
  misc_RNA (1)...(19): siRNA sense strand
ccacaggacagcagacgca

SEQ ID NO: 2636606 - RNA, 19 nt, Homo sapiens
  misc_RNA (1)...(19): siRNA sense strand
gggacacggacgacgauga

SEQ ID NO: 2636607 - RNA, 19 nt, Homo sapiens
  misc_RNA (1)...(19): siRNA sense strand
aagacaucuaacaaggaaa

SEQ ID NO: 2636608 - RNA, 19 nt, Homo sapiens
  misc_RNA (1)...(19): siRNA sense strand
gggacgagcacugggugaa

SEQ ID NO: 2636609 - RNA, 19 nt, Homo sapiens
  misc_RNA (1)...(19): siRNA sense strand
gggacauacaccaucgaga

SEQ ID NO: 2636610 - RNA, 19 nt, Homo sapiens
  misc_RNA (1)...(19): siRNA sense strand
cuguggaugccgaguguga

SEQ ID NO: 2636611 - RNA, 19 nt, Homo sapiens
  misc_RNA (1)...(19): siRNA sense strand
cuuucagaacacagggaga

SEQ ID NO: 2636612 - RNA, 19 nt, Homo sapiens
  misc_RNA (1)...(19): siRNA sense strand
ccgagaacgaggugcccau

SEQ ID NO: 2636613 - RNA, 19 nt, Homo sapiens
  misc_RNA (1)...(19): siRNA sense strand
cguuaaaugacgcaggaac

SEQ ID NO: 2636614 - RNA, 19 nt, Homo sapiens
  misc_RNA (1)...(19): siRNA sense strand
uguaugugcuggagcgugu

SEQ ID NO: 2636615 - RNA, 19 nt, Homo sapiens
  misc_RNA (1)...(19): siRNA sense strand
ucgcugaacucucgggacu

SEQ ID NO: 2636616 - RNA, 19 nt, Homo sapiens
  misc_RNA (1)...(19): siRNA sense strand
gggcagagcuggaagaaca

SEQ ID NO: 2636617 - RNA, 19 nt, Homo sapiens
  misc_RNA (1)...(19): siRNA sense strand
aggcagagccagagggaga

SEQ ID NO: 2636618 - RNA, 19 nt, Homo sapiens
  misc_RNA (1)...(19): siRNA sense strand
acaaagacaggcagagaaa

SEQ ID NO: 2636619 - RNA, 19 nt, Homo sapiens
  misc_RNA (1)...(19): siRNA sense strand
gagcaaagcuggauggugu

SEQ ID NO: 2636620 - RNA, 19 nt, Homo sapiens
  misc_RNA (1)...(19): siRNA sense strand
aagacaaaccagaaaguaa

SEQ ID NO: 2636621 - RNA, 19 nt, Homo sapiens
  misc_RNA (1)...(19): siRNA sense strand
agacaaaccagaaaguaaa

SEQ ID NO: 2636622 - RNA, 19 nt, Homo sapiens
  misc_RNA (1)...(19): siRNA sense strand
gggugaagcagcagcuaaa

SEQ ID NO: 2636623 - RNA, 19 nt, Homo sapiens
  misc_RNA (1)...(19): siRNA sense strand
cgaugaaagcaaaggguca

SEQ ID NO: 2636624 - RNA, 19 nt, Homo sapiens
  misc_RNA (1)...(19): siRNA sense strand
gggaagacacagaaggaca

SEQ ID NO: 2636625 - RNA, 19 nt, Homo sapiens
  misc_RNA (1)...(19): siRNA sense strand
cguacaagguucaguucaa

SEQ ID NO: 2636626 - RNA, 19 nt, Homo sapiens
  misc_RNA (1)...(19): siRNA sense strand
cuacagaggacaaggauca

SEQ ID NO: 2636627 - RNA, 19 nt, Homo sapiens
  misc_RNA (1)...(19): siRNA sense strand
ccacuuaaauugaaagcuu

SEQ ID NO: 2636628 - RNA, 19 nt, Homo sapiens
  misc_RNA (1)...(19): siRNA sense strand
gggcagaacaggaucgaga

SEQ ID NO: 2636629 - RNA, 19 nt, Homo sapiens
  misc_RNA (1)...(19): siRNA sense strand
cagcaguggcccagaggaa

SEQ ID NO: 2636630 - RNA, 19 nt, Homo sapiens
  misc_RNA (1)...(19): siRNA sense strand
aagagaaggaagaggguga

SEQ ID NO: 2636631 - RNA, 19 nt, Homo sapiens
  misc_RNA (1)...(19): siRNA sense strand
cggcaagaacagaguuaau

SEQ ID NO: 2636632 - RNA, 19 nt, Homo sapiens
  misc_RNA (1)...(19): siRNA sense strand
gcguggagguggacgucaa

SEQ ID NO: 2636633 - RNA, 19 nt, Homo sapiens
  misc_RNA (1)...(19): siRNA sense strand
cguugaagguggaggccga

SEQ ID NO: 2636634 - RNA, 19 nt, Homo sapiens
  misc_RNA (1)...(19): siRNA sense strand
caggaaagcugguuuaaaa

SEQ ID NO: 2636635 - RNA, 19 nt, Homo sapiens
  misc_RNA (1)...(19): siRNA sense strand
cgccaaagauggaggccga

SEQ ID NO: 2636636 - RNA, 19 nt, Homo sapiens
  misc_RNA (1)...(19): siRNA sense strand
cgaggauguagcugggaaa

SEQ ID NO: 2636637 - RNA, 19 nt, Homo sapiens
  misc_RNA (1)...(19): siRNA sense strand
ccucuuagcccuggagaaa

SEQ ID NO: 2636638 - RNA, 19 nt, Homo sapiens
  misc_RNA (1)...(19): siRNA sense strand
gggaggacuuggugcaaca

SEQ ID NO: 2636639 - RNA, 19 nt, Homo sapiens
  misc_RNA (1)...(19): siRNA sense strand
gcgucaauguacugggaca

SEQ ID NO: 2636640 - RNA, 19 nt, Homo sapiens
  misc_RNA (1)...(19): siRNA sense strand
cagaaaagcugacgaugaa

SEQ ID NO: 2636641 - RNA, 19 nt, Homo sapiens
  misc_RNA (1)...(19): siRNA sense strand
gcccaaaggcagaggugau

SEQ ID NO: 2636642 - RNA, 19 nt, Homo sapiens
  misc_RNA (1)...(19): siRNA sense strand
acagagacgcacagaggaa

SEQ ID NO: 2636643 - RNA, 19 nt, Homo sapiens
  misc_RNA (1)...(19): siRNA sense strand
ggccaaagguggacccaga

SEQ ID NO: 2636644 - RNA, 19 nt, Homo sapiens
  misc_RNA (1)...(19): siRNA sense strand
gggaugaaggagauggaga

SEQ ID NO: 2636645 - RNA, 19 nt, Homo sapiens
  misc_RNA (1)...(19): siRNA sense strand
ucacugaggaacaggacaa

SEQ ID NO: 2636646 - RNA, 19 nt, Homo sapiens
  misc_RNA (1)...(19): siRNA sense strand
ugggaaagacaguaaguuu

SEQ ID NO: 2636647 - RNA, 19 nt, Homo sapiens
  misc_RNA (1)...(19): siRNA sense strand
cagcuaaagucaaagaguu

SEQ ID NO: 2636648 - RNA, 19 nt, Homo sapiens
  misc_RNA (1)...(19): siRNA sense strand
acgcacagaggaaggauua

SEQ ID NO: 2636649 - RNA, 19 nt, Homo sapiens
  misc_RNA (1)...(19): siRNA sense strand
ugauagaagagaacagaga

SEQ ID NO: 2636650 - RNA, 19 nt, Homo sapiens
  misc_RNA (1)...(19): siRNA sense strand
ugucugagcugaaggcgaa

SEQ ID NO: 2636651 - RNA, 19 nt, Homo sapiens
  misc_RNA (1)...(19): siRNA sense strand
cgcugaagguggaggcuga

SEQ ID NO: 2636652 - RNA, 19 nt, Homo sapiens
  misc_RNA (1)...(19): siRNA sense strand
gcaagguucugcugggaga

SEQ ID NO: 2636653 - RNA, 19 nt, Homo sapiens
  misc_RNA (1)...(19): siRNA sense strand
gcacagacacagaggccca

SEQ ID NO: 2636654 - RNA, 19 nt, Homo sapiens
  misc_RNA (1)...(19): siRNA sense strand
cagaaggacagauaagaau

SEQ ID NO: 2636655 - RNA, 19 nt, Homo sapiens
  misc_RNA (1)...(19): siRNA sense strand
uugccagcauggaggauaa

SEQ ID NO: 2636656 - RNA, 19 nt, Homo sapiens
  misc_RNA (1)...(19): siRNA sense strand
ccugaaaggucauaaggca

SEQ ID NO: 2636657 - RNA, 19 nt, Homo sapiens
  misc_RNA (1)...(19): siRNA sense strand
uggcaguuccugagggaga

SEQ ID NO: 2636658 - RNA, 19 nt, Homo sapiens
  misc_RNA (1)...(19): siRNA sense strand
ccacgaagggaaagggagu

SEQ ID NO: 2636659 - RNA, 19 nt, Homo sapiens
  misc_RNA (1)...(19): siRNA sense strand
ccaaagacagcaaguucaa

SEQ ID NO: 2636660 - RNA, 19 nt, Homo sapiens
  misc_RNA (1)...(19): siRNA sense strand
ccaaagacagcaaguucaa

SEQ ID NO: 2636661 - RNA, 19 nt, Homo sapiens
  misc_RNA (1)...(19): siRNA sense strand
ccaaagacagcaaguucaa

SEQ ID NO: 2636662 - RNA, 19 nt, Homo sapiens
  misc_RNA (1)...(19): siRNA sense strand
ccaaagacagcaaguucaa

SEQ ID NO: 2636663 - RNA, 19 nt, Homo sapiens
  misc_RNA (1)...(19): siRNA sense strand
ccaaagacagcaaguucaa

SEQ ID NO: 2636664 - RNA, 19 nt, Homo sapiens
  misc_RNA (1)...(19): siRNA sense strand
ccaaagacagcaaguucaa

SEQ ID NO: 2636665 - RNA, 19 nt, Homo sapiens
  misc_RNA (1)...(19): siRNA sense strand
ccaaagacagcaaguucaa

SEQ ID NO: 2636666 - RNA, 19 nt, Homo sapiens
  misc_RNA (1)...(19): siRNA sense strand
ccaaagacagcaaguucaa

SEQ ID NO: 2636667 - RNA, 19 nt, Homo sapiens
  misc_RNA (1)...(19): siRNA sense strand
ccaaagacagcaaguucaa

SEQ ID NO: 2636668 - RNA, 19 nt, Homo sapiens
  misc_RNA (1)...(19): siRNA sense strand
ccaaagacagcaaguucaa

SEQ ID NO: 2636669 - RNA, 19 nt, Homo sapiens
  misc_RNA (1)...(19): siRNA sense strand
ccaaagacagcaaguucaa

SEQ ID NO: 2636670 - RNA, 19 nt, Homo sapiens
  misc_RNA (1)...(19): siRNA sense strand
ccaaagacagcaaguucaa

SEQ ID NO: 2636671 - RNA, 19 nt, Homo sapiens
  misc_RNA (1)...(19): siRNA sense strand
ccaaagacagcaaguucaa

SEQ ID NO: 2636672 - RNA, 19 nt, Homo sapiens
  misc_RNA (1)...(19): siRNA sense strand
ccaaagacagcaaguucaa

SEQ ID NO: 2636673 - RNA, 19 nt, Homo sapiens
  misc_RNA (1)...(19): siRNA sense strand
ccaaagacagcaaguucaa

SEQ ID NO: 2636674 - RNA, 19 nt, Homo sapiens
  misc_RNA (1)...(19): siRNA sense strand
ucaaagagcaccugcccaa

SEQ ID NO: 2636675 - RNA, 19 nt, Homo sapiens
  misc_RNA (1)...(19): siRNA sense strand
ccaaagacagcaaguucaa

SEQ ID NO: 2636676 - RNA, 19 nt, Homo sapiens
  misc_RNA (1)...(19): siRNA sense strand
ccaaagacagcaaguucaa

SEQ ID NO: 2636677 - RNA, 19 nt, Homo sapiens
  misc_RNA (1)...(19): siRNA sense strand
ccaaagacagcaaguucaa

SEQ ID NO: 2636678 - RNA, 19 nt, Homo sapiens
  misc_RNA (1)...(19): siRNA sense strand
gccaagaggaugugaaacu

SEQ ID NO: 2636679 - RNA, 19 nt, Homo sapiens
  misc_RNA (1)...(19): siRNA sense strand
ccaaagacagcaaguucaa

SEQ ID NO: 2636680 - RNA, 19 nt, Homo sapiens
  misc_RNA (1)...(19): siRNA sense strand
gagaaggggaggagcacaa

SEQ ID NO: 2636681 - RNA, 19 nt, Homo sapiens
  misc_RNA (1)...(19): siRNA sense strand
ggucaaacguggaggcagc

SEQ ID NO: 2636682 - RNA, 19 nt, Homo sapiens
  misc_RNA (1)...(19): siRNA sense strand
agcaaaucauccacagaua

SEQ ID NO: 2636683 - RNA, 19 nt, Homo sapiens
  misc_RNA (1)...(19): siRNA sense strand
gagcaaagcuggauggugc

SEQ ID NO: 2636684 - RNA, 19 nt, Homo sapiens
  misc_RNA (1)...(19): siRNA sense strand
gagcaaagcuggauggugc

SEQ ID NO: 2636685 - RNA, 19 nt, Homo sapiens
  misc_RNA (1)...(19): siRNA sense strand
gagcaaagcuggauggugc

SEQ ID NO: 2636686 - RNA, 19 nt, Homo sapiens
  misc_RNA (1)...(19): siRNA sense strand
gagcaaagcuggauggugc

SEQ ID NO: 2636687 - RNA, 19 nt, Homo sapiens
  misc_RNA (1)...(19): siRNA sense strand
gagcaaagcuggauggugc

SEQ ID NO: 2636688 - RNA, 19 nt, Homo sapiens
  misc_RNA (1)...(19): siRNA sense strand
accaaguacucgcaggaaa

SEQ ID NO: 2636689 - RNA, 19 nt, Homo sapiens
  misc_RNA (1)...(19): siRNA sense strand
ggaggauaaaacagagaaa

SEQ ID NO: 2636690 - RNA, 19 nt, Homo sapiens
  misc_RNA (1)...(19): siRNA sense strand
uggccaagaggaugugaaa

SEQ ID NO: 2636691 - RNA, 19 nt, Homo sapiens
  misc_RNA (1)...(19): siRNA sense strand
aggaggaagccaugaccaa

SEQ ID NO: 2636692 - RNA, 19 nt, Homo sapiens
  misc_RNA (1)...(19): siRNA sense strand
cauagugacaccagaguuu

SEQ ID NO: 2636693 - RNA, 19 nt, Homo sapiens
  misc_RNA (1)...(19): siRNA sense strand
gcuagaguguacacaacaa

SEQ ID NO: 2636694 - RNA, 19 nt, Homo sapiens
  misc_RNA (1)...(19): siRNA sense strand
agauggagaggaaggacua

SEQ ID NO: 2636695 - RNA, 19 nt, Homo sapiens
  misc_RNA (1)...(19): siRNA sense strand
acagaaggacagauaagaa

SEQ ID NO: 2636696 - RNA, 19 nt, Homo sapiens
  misc_RNA (1)...(19): siRNA sense strand
uggccaaguggaugugaaa

SEQ ID NO: 2636697 - RNA, 19 nt, Homo sapiens
  misc_RNA (1)...(19): siRNA sense strand
uggccaaguggaugugaaa

SEQ ID NO: 2636698 - RNA, 19 nt, Homo sapiens
  misc_RNA (1)...(19): siRNA sense strand
gagaagaacaagaagguga

SEQ ID NO: 2636699 - RNA, 19 nt, Homo sapiens
  misc_RNA (1)...(19): siRNA sense strand
caacagaacuucaagcaga

SEQ ID NO: 2636700 - RNA, 19 nt, Homo sapiens
  misc_RNA (1)...(19): siRNA sense strand
ccgaagaagcagcggagau

SEQ ID NO: 2636701 - RNA, 19 nt, Homo sapiens
  misc_RNA (1)...(19): siRNA sense strand
aggccaaguccacggauaa

SEQ ID NO: 2636702 - RNA, 19 nt, Homo sapiens
  misc_RNA (1)...(19): siRNA sense strand
ucaacaagcuggaggccca

SEQ ID NO: 2636703 - RNA, 19 nt, Homo sapiens
  misc_RNA (1)...(19): siRNA sense strand
aggaggaguaugagagcuu

SEQ ID NO: 2636704 - RNA, 19 nt, Homo sapiens
  misc_RNA (1)...(19): siRNA sense strand
gggccaacagccuggacaa

SEQ ID NO: 2636705 - RNA, 19 nt, Homo sapiens
  misc_RNA (1)...(19): siRNA sense strand
cagaagagauggggagaga

SEQ ID NO: 2636706 - RNA, 19 nt, Homo sapiens
  misc_RNA (1)...(19): siRNA sense strand
uggaaguggauguggacga

SEQ ID NO: 2636707 - RNA, 19 nt, Homo sapiens
  misc_RNA (1)...(19): siRNA sense strand
ccuacaagcagaagagaug

SEQ ID NO: 2636708 - RNA, 19 nt, Homo sapiens
  misc_RNA (1)...(19): siRNA sense strand
ucuucaaggagcuggagaa

SEQ ID NO: 2636709 - RNA, 19 nt, Homo sapiens
  misc_RNA (1)...(19): siRNA sense strand
gguugugaagguuggaauu

SEQ ID NO: 2636710 - RNA, 19 nt, Homo sapiens
  misc_RNA (1)...(19): siRNA sense strand
cccaagaaagcgaaggaca

SEQ ID NO: 2636711 - RNA, 19 nt, Homo sapiens
  misc_RNA (1)...(19): siRNA sense strand
acagaaccauccugggcua

SEQ ID NO: 2636712 - RNA, 19 nt, Homo sapiens
  misc_RNA (1)...(19): siRNA sense strand
cagcauuaccucagugcca

SEQ ID NO: 2636713 - RNA, 19 nt, Homo sapiens
  misc_RNA (1)...(19): siRNA sense strand
gguucaaaguguccgacga

SEQ ID NO: 2636714 - RNA, 19 nt, Homo sapiens
  misc_RNA (1)...(19): siRNA sense strand
agaagaacaagaaggugau

SEQ ID NO: 2636715 - RNA, 19 nt, Homo sapiens
  misc_RNA (1)...(19): siRNA sense strand
gccagugcauugagggcau

SEQ ID NO: 2636716 - RNA, 19 nt, Homo sapiens
  misc_RNA (1)...(19): siRNA sense strand
aggacuuggacgaggacga

SEQ ID NO: 2636717 - RNA, 19 nt, Homo sapiens
  misc_RNA (1)...(19): siRNA sense strand
cuucaagcagaaaguggua

SEQ ID NO: 2636718 - RNA, 19 nt, Homo sapiens
  misc_RNA (1)...(19): siRNA sense strand
cgguugugaagguuggaau

SEQ ID NO: 2636719 - RNA, 19 nt, Homo sapiens
  misc_RNA (1)...(19): siRNA sense strand
cuggauguguucacggaga

SEQ ID NO: 2636720 - RNA, 19 nt, Homo sapiens
  misc_RNA (1)...(19): siRNA sense strand
aggugauguuucugcccaa

SEQ ID NO: 2636721 - RNA, 19 nt, Homo sapiens
  misc_RNA (1)...(19): siRNA sense strand
gggacaagcagcaggccaa

SEQ ID NO: 2636722 - RNA, 19 nt, Homo sapiens
  misc_RNA (1)...(19): siRNA sense strand
gcuuugaggugguggagga

SEQ ID NO: 2636723 - RNA, 19 nt, Homo sapiens
  misc_RNA (1)...(19): siRNA sense strand
gggugauugucauggagaa

SEQ ID NO: 2636724 - RNA, 19 nt, Homo sapiens
  misc_RNA (1)...(19): siRNA sense strand
gcgucaagaacaaggucua

SEQ ID NO: 2636725 - RNA, 19 nt, Homo sapiens
  misc_RNA (1)...(19): siRNA sense strand
uggcacaggaggacagcaa

SEQ ID NO: 2636726 - RNA, 19 nt, Homo sapiens
  misc_RNA (1)...(19): siRNA sense strand
guggcaaagguaagaggaa

SEQ ID NO: 2636727 - RNA, 19 nt, Homo sapiens
  misc_RNA (1)...(19): siRNA sense strand
gugaagaucugggagggaa

SEQ ID NO: 2636728 - RNA, 19 nt, Homo sapiens
  misc_RNA (1)...(19): siRNA sense strand
cguagaaagucggagccaa

SEQ ID NO: 2636729 - RNA, 19 nt, Homo sapiens
  misc_RNA (1)...(19): siRNA sense strand
caggcaacucaacgagaaa

SEQ ID NO: 2636730 - RNA, 19 nt, Homo sapiens
  misc_RNA (1)...(19): siRNA sense strand
ugaagaucugggagggaau

SEQ ID NO: 2636731 - RNA, 19 nt, Homo sapiens
  misc_RNA (1)...(19): siRNA sense strand
augaagaagaggauggcuu

SEQ ID NO: 2636732 - RNA, 19 nt, Homo sapiens
  misc_RNA (1)...(19): siRNA sense strand
gcgucauugcggagcgauu

SEQ ID NO: 2636733 - RNA, 19 nt, Homo sapiens
  misc_RNA (1)...(19): siRNA sense strand
cggaaugcaugcgggacaa

SEQ ID NO: 2636734 - RNA, 19 nt, Homo sapiens
  misc_RNA (1)...(19): siRNA sense strand
cauuagguggcaaagguaa

SEQ ID NO: 2636735 - RNA, 19 nt, Homo sapiens
  misc_RNA (1)...(19): siRNA sense strand
acggaaugcaugcgggaca

SEQ ID NO: 2636736 - RNA, 19 nt, Homo sapiens
  misc_RNA (1)...(19): siRNA sense strand
aggccaagacaguggagga

SEQ ID NO: 2636737 - RNA, 19 nt, Homo sapiens
  misc_RNA (1)...(19): siRNA sense strand
guagaaagucggagccaac

SEQ ID NO: 2636738 - RNA, 19 nt, Homo sapiens
  misc_RNA (1)...(19): siRNA sense strand
gggcgcagggagucugaaa

SEQ ID NO: 2636739 - RNA, 19 nt, Homo sapiens
  misc_RNA (1)...(19): siRNA sense strand
gcugucacacccugggaaa

SEQ ID NO: 2636740 - RNA, 19 nt, Homo sapiens
  misc_RNA (1)...(19): siRNA sense strand
gggaaaagguggccccuga

SEQ ID NO: 2636741 - RNA, 19 nt, Homo sapiens
  misc_RNA (1)...(19): siRNA sense strand
aguacagcauccaggccaa

SEQ ID NO: 2636742 - RNA, 19 nt, Homo sapiens
  misc_RNA (1)...(19): siRNA sense strand
aaggaagccaucuuggaaa

SEQ ID NO: 2636743 - RNA, 19 nt, Homo sapiens
  misc_RNA (1)...(19): siRNA sense strand
agacacagcuugaugccca

SEQ ID NO: 2636744 - RNA, 19 nt, Homo sapiens
  misc_RNA (1)...(19): siRNA sense strand
cugcagagugccagccgaa

SEQ ID NO: 2636745 - RNA, 19 nt, Homo sapiens
  misc_RNA (1)...(19): siRNA sense strand
caguggaggagaaacggaa

SEQ ID NO: 2636746 - RNA, 19 nt, Homo sapiens
  misc_RNA (1)...(19): siRNA sense strand
gcaugagcuucgaguccau

SEQ ID NO: 2636747 - RNA, 19 nt, Homo sapiens
  misc_RNA (1)...(19): siRNA sense strand
ugggagugagcaagaggua

SEQ ID NO: 2636748 - RNA, 19 nt, Homo sapiens
  misc_RNA (1)...(19): siRNA sense strand
ccuuaagggccguagaaag

SEQ ID NO: 2636749 - RNA, 19 nt, Homo sapiens
  misc_RNA (1)...(19): siRNA sense strand
guaagaaacuccaucucca

SEQ ID NO: 2636750 - RNA, 19 nt, Homo sapiens
  misc_RNA (1)...(19): siRNA sense strand
gcaagagacaggugggcuc

SEQ ID NO: 2636751 - RNA, 19 nt, Homo sapiens
  misc_RNA (1)...(19): siRNA sense strand
gagcaugagcugggagcca

SEQ ID NO: 2636752 - RNA, 19 nt, Homo sapiens
  misc_RNA (1)...(19): siRNA sense strand
ccauuagguggcaaaggua

SEQ ID NO: 2636753 - RNA, 19 nt, Homo sapiens
  misc_RNA (1)...(19): siRNA sense strand
cuugaagaucauugacaca

SEQ ID NO: 2636754 - RNA, 19 nt, Homo sapiens
  misc_RNA (1)...(19): siRNA sense strand
ccuauuaucccaaucggua

SEQ ID NO: 2636755 - RNA, 19 nt, Homo sapiens
  misc_RNA (1)...(19): siRNA sense strand
acguggagaagcugaucaa

SEQ ID NO: 2636756 - RNA, 19 nt, Homo sapiens
  misc_RNA (1)...(19): siRNA sense strand
ucccgaagccagcgaagaa

SEQ ID NO: 2636757 - RNA, 19 nt, Homo sapiens
  misc_RNA (1)...(19): siRNA sense strand
gguacaucaacgacaugaa

SEQ ID NO: 2636758 - RNA, 19 nt, Homo sapiens
  misc_RNA (1)...(19): siRNA sense strand
ugagcagcgaggaggaaga

SEQ ID NO: 2636759 - RNA, 19 nt, Homo sapiens
  misc_RNA (1)...(19): siRNA sense strand
ccagauugcuucuuggaaa

SEQ ID NO: 2636760 - RNA, 19 nt, Homo sapiens
  misc_RNA (1)...(19): siRNA sense strand
ggaagaaacccauuuauaa

SEQ ID NO: 2636761 - RNA, 19 nt, Homo sapiens
  misc_RNA (1)...(19): siRNA sense strand
gggaaaugacuuugagguu

SEQ ID NO: 2636762 - RNA, 19 nt, Homo sapiens
  misc_RNA (1)...(19): siRNA sense strand
gggccagaguggagaccau

SEQ ID NO: 2636763 - RNA, 19 nt, Homo sapiens
  misc_RNA (1)...(19): siRNA sense strand
cagauugcuucuuggaaau

SEQ ID NO: 2636764 - RNA, 19 nt, Homo sapiens
  misc_RNA (1)...(19): siRNA sense strand
cagugacaucccagagaua

SEQ ID NO: 2636765 - RNA, 19 nt, Homo sapiens
  misc_RNA (1)...(19): siRNA sense strand
uggaagaaacccauuuaua

SEQ ID NO: 2636766 - RNA, 19 nt, Homo sapiens
  misc_RNA (1)...(19): siRNA sense strand
gagaggaagaggaagcaga

SEQ ID NO: 2636767 - RNA, 19 nt, Homo sapiens
  misc_RNA (1)...(19): siRNA sense strand
gugacaucccagagauauu

SEQ ID NO: 2636768 - RNA, 19 nt, Homo sapiens
  misc_RNA (1)...(19): siRNA sense strand
agcagaagcuuguacggaa

SEQ ID NO: 2636769 - RNA, 19 nt, Homo sapiens
  misc_RNA (1)...(19): siRNA sense strand
ugcacuacaacaagggaaa

SEQ ID NO: 2636770 - RNA, 19 nt, Homo sapiens
  misc_RNA (1)...(19): siRNA sense strand
cgagagaggaagaggaagc

SEQ ID NO: 2636771 - RNA, 19 nt, Homo sapiens
  misc_RNA (1)...(19): siRNA sense strand
cccgagagaggaagaggaa

SEQ ID NO: 2636772 - RNA, 19 nt, Homo sapiens
  misc_RNA (1)...(19): siRNA sense strand
augagcacauccaggcaaa

SEQ ID NO: 2636773 - RNA, 19 nt, Homo sapiens
  misc_RNA (1)...(19): siRNA sense strand
gcaaagagggccagagugg

SEQ ID NO: 2636774 - RNA, 19 nt, Homo sapiens
  misc_RNA (1)...(19): siRNA sense strand
acuagagauucugaggaaa

SEQ ID NO: 2636775 - RNA, 19 nt, Homo sapiens
  misc_RNA (1)...(19): siRNA sense strand
ugaucaagugguucagcaa

SEQ ID NO: 2636776 - RNA, 19 nt, Homo sapiens
  misc_RNA (1)...(19): siRNA sense strand
gcagaagcuuguacggaag

SEQ ID NO: 2636777 - RNA, 19 nt, Homo sapiens
  misc_RNA (1)...(19): siRNA sense strand
gggaccagggcaacaggaa

SEQ ID NO: 2636778 - RNA, 19 nt, Homo sapiens
  misc_RNA (1)...(19): siRNA sense strand
ggaaaugacuuugagguuc

SEQ ID NO: 2636779 - RNA, 19 nt, Homo sapiens
  misc_RNA (1)...(19): siRNA sense strand
gcuugacguuacaggaguu

SEQ ID NO: 2636780 - RNA, 19 nt, Homo sapiens
  misc_RNA (1)...(19): siRNA sense strand
ggucaaagaaccagccuca

SEQ ID NO: 2636781 - RNA, 19 nt, Homo sapiens
  misc_RNA (1)...(19): siRNA sense strand
ccaagagaacccagggaca

SEQ ID NO: 2636782 - RNA, 19 nt, Homo sapiens
  misc_RNA (1)...(19): siRNA sense strand
gcgacgugggccagaacaa

SEQ ID NO: 2636783 - RNA, 19 nt, Homo sapiens
  misc_RNA (1)...(19): siRNA sense strand
ucuacuacucaguggguau

SEQ ID NO: 2636784 - RNA, 19 nt, Homo sapiens
  misc_RNA (1)...(19): siRNA sense strand
acgagaacgccguggacca

SEQ ID NO: 2636785 - RNA, 19 nt, Homo sapiens
  misc_RNA (1)...(19): siRNA sense strand
ccuuugggacauuuggaaa

SEQ ID NO: 2636786 - RNA, 19 nt, Homo sapiens
  misc_RNA (1)...(19): siRNA sense strand
ccauggaugacacggacua

SEQ ID NO: 2636787 - RNA, 19 nt, Homo sapiens
  misc_RNA (1)...(19): siRNA sense strand
gcauccagcuguaaggcca

SEQ ID NO: 2636788 - RNA, 19 nt, Homo sapiens
  misc_RNA (1)...(19): siRNA sense strand
ucagagucuccgaggauga

SEQ ID NO: 2636789 - RNA, 19 nt, Homo sapiens
  misc_RNA (1)...(19): siRNA sense strand
cggccagaccugugaguuc

SEQ ID NO: 2636790 - RNA, 19 nt, Homo sapiens
  misc_RNA (1)...(19): siRNA sense strand
ugggcaaggugcugcgcau

SEQ ID NO: 2636791 - RNA, 19 nt, Homo sapiens
  misc_RNA (1)...(19): siRNA sense strand
cgagggaccuguugugcca

SEQ ID NO: 2636792 - RNA, 19 nt, Homo sapiens
  misc_RNA (1)...(19): siRNA sense strand
gagcagaucuacaacgaga

SEQ ID NO: 2636793 - RNA, 19 nt, Homo sapiens
  misc_RNA (1)...(19): siRNA sense strand
ucaagaagcucaaggccau

SEQ ID NO: 2636794 - RNA, 19 nt, Homo sapiens
  misc_RNA (1)...(19): siRNA sense strand
cugugcagguggaggagaa

SEQ ID NO: 2636795 - RNA, 19 nt, Homo sapiens
  misc_RNA (1)...(19): siRNA sense strand
aguaugagacaguggugaa

SEQ ID NO: 2636796 - RNA, 19 nt, Homo sapiens
  misc_RNA (1)...(19): siRNA sense strand
gcgugugguuggaggcuca

SEQ ID NO: 2636797 - RNA, 19 nt, Homo sapiens
  misc_RNA (1)...(19): siRNA sense strand
agacaguggugaaacccaa

SEQ ID NO: 2636798 - RNA, 19 nt, Homo sapiens
  misc_RNA (1)...(19): siRNA sense strand
ucuacaaggcugaggucau

SEQ ID NO: 2636799 - RNA, 19 nt, Homo sapiens
  misc_RNA (1)...(19): siRNA sense strand
gggcagcagagguggagau

SEQ ID NO: 2636800 - RNA, 19 nt, Homo sapiens
  misc_RNA (1)...(19): siRNA sense strand
acuauaaggccgagcagga

SEQ ID NO: 2636801 - RNA, 19 nt, Homo sapiens
  misc_RNA (1)...(19): siRNA sense strand
acauggaggccgagaagca

SEQ ID NO: 2636802 - RNA, 19 nt, Homo sapiens
  misc_RNA (1)...(19): siRNA sense strand
ccugcugggacgaagauaa

SEQ ID NO: 2636803 - RNA, 19 nt, Homo sapiens
  misc_RNA (1)...(19): siRNA sense strand
ccuuagagguggugcggac

SEQ ID NO: 2636804 - RNA, 19 nt, Homo sapiens
  misc_RNA (1)...(19): siRNA sense strand
aguaccaggaggagaucaa

SEQ ID NO: 2636805 - RNA, 19 nt, Homo sapiens
  misc_RNA (1)...(19): siRNA sense strand
agaacaaaccagcccgcaa

SEQ ID NO: 2636806 - RNA, 19 nt, Homo sapiens
  misc_RNA (1)...(19): siRNA sense strand
aagcguaagaaaagcaaaa

SEQ ID NO: 2636807 - RNA, 19 nt, Homo sapiens
  misc_RNA (1)...(19): siRNA sense strand
gagaagggcguguacguga

SEQ ID NO: 2636808 - RNA, 19 nt, Homo sapiens
  misc_RNA (1)...(19): siRNA sense strand
gagaagaugcagaggaagc

SEQ ID NO: 2636809 - RNA, 19 nt, Homo sapiens
  misc_RNA (1)...(19): siRNA sense strand
gggacgaagauaacggcuu

SEQ ID NO: 2636810 - RNA, 19 nt, Homo sapiens
  misc_RNA (1)...(19): siRNA sense strand
cggacaacaacuacgauga

SEQ ID NO: 2636811 - RNA, 19 nt, Homo sapiens
  misc_RNA (1)...(19): siRNA sense strand
uggugaaacccaaggucuu

SEQ ID NO: 2636812 - RNA, 19 nt, Homo sapiens
  misc_RNA (1)...(19): siRNA sense strand
cagacaauggcgagccgaa

SEQ ID NO: 2636813 - RNA, 19 nt, Homo sapiens
  misc_RNA (1)...(19): siRNA sense strand
uugccgagguggaagccaa

SEQ ID NO: 2636814 - RNA, 19 nt, Homo sapiens
  misc_RNA (1)...(19): siRNA sense strand
gguuguggguggagagcag

SEQ ID NO: 2636815 - RNA, 19 nt, Homo sapiens
  misc_RNA (1)...(19): siRNA sense strand
guaagaaaagcaaaagcaa

SEQ ID NO: 2636816 - RNA, 19 nt, Homo sapiens
  misc_RNA (1)...(19): siRNA sense strand
uggaggagaaccugcggaa

SEQ ID NO: 2636817 - RNA, 19 nt, Homo sapiens
  misc_RNA (1)...(19): siRNA sense strand
gcuggugugaagagggaga

SEQ ID NO: 2636818 - RNA, 19 nt, Homo sapiens
  misc_RNA (1)...(19): siRNA sense strand
ucaaagaucugcaguccga

SEQ ID NO: 2636819 - RNA, 19 nt, Homo sapiens
  misc_RNA (1)...(19): siRNA sense strand
gaggagaucaagaagcuca

SEQ ID NO: 2636820 - RNA, 19 nt, Homo sapiens
  misc_RNA (1)...(19): siRNA sense strand
ccgaguuucagcuggagaa

SEQ ID NO: 2636821 - RNA, 19 nt, Homo sapiens
  misc_RNA (1)...(19): siRNA sense strand
cguccagugugcagagaac

SEQ ID NO: 2636822 - RNA, 19 nt, Homo sapiens
  misc_RNA (1)...(19): siRNA sense strand
aacaaggaccugaaggaga

SEQ ID NO: 2636823 - RNA, 19 nt, Homo sapiens
  misc_RNA (1)...(19): siRNA sense strand
acugaggaguccaggagca

SEQ ID NO: 2636824 - RNA, 19 nt, Homo sapiens
  misc_RNA (1)...(19): siRNA sense strand
agagggagagcgugggcau

SEQ ID NO: 2636825 - RNA, 19 nt, Homo sapiens
  misc_RNA (1)...(19): siRNA sense strand
ggaaguggccuuagaggug

SEQ ID NO: 2636826 - RNA, 19 nt, Homo sapiens
  misc_RNA (1)...(19): siRNA sense strand
gugugaagagggagagcgu

SEQ ID NO: 2636827 - RNA, 19 nt, Homo sapiens
  misc_RNA (1)...(19): siRNA sense strand
accugaaggagaagcacaa

SEQ ID NO: 2636828 - RNA, 19 nt, Homo sapiens
  misc_RNA (1)...(19): siRNA sense strand
ugaaccagcgggagcgaga

SEQ ID NO: 2636829 - RNA, 19 nt, Homo sapiens
  misc_RNA (1)...(19): siRNA sense strand
aggcaaagaagaaggaaaa

SEQ ID NO: 2636830 - RNA, 19 nt, Homo sapiens
  misc_RNA (1)...(19): siRNA sense strand
aaggcaaagaagaaggaaa

SEQ ID NO: 2636831 - RNA, 19 nt, Homo sapiens
  misc_RNA (1)...(19): siRNA sense strand
aggaaagagaaaaggcaaa

SEQ ID NO: 2636832 - RNA, 19 nt, Homo sapiens
  misc_RNA (1)...(19): siRNA sense strand
gggacaaguguguggagau

SEQ ID NO: 2636833 - RNA, 19 nt, Homo sapiens
  misc_RNA (1)...(19): siRNA sense strand
agaucaaacagcagcaaau

SEQ ID NO: 2636834 - RNA, 19 nt, Homo sapiens
  misc_RNA (1)...(19): siRNA sense strand
aaaggagaggaaagagaaa

SEQ ID NO: 2636835 - RNA, 19 nt, Homo sapiens
  misc_RNA (1)...(19): siRNA sense strand
agaugacggcagaggaaau

SEQ ID NO: 2636836 - RNA, 19 nt, Homo sapiens
  misc_RNA (1)...(19): siRNA sense strand
augcaaugaauguggcaau

SEQ ID NO: 2636837 - RNA, 19 nt, Homo sapiens
  misc_RNA (1)...(19): siRNA sense strand
cagaaaucgaagaucauau

SEQ ID NO: 2636838 - RNA, 19 nt, Homo sapiens
  misc_RNA (1)...(19): siRNA sense strand
acgaugauuacaaggacua

SEQ ID NO: 2636839 - RNA, 19 nt, Homo sapiens
  misc_RNA (1)...(19): siRNA sense strand
agcaaaugcaagaagaaga

SEQ ID NO: 2636840 - RNA, 19 nt, Homo sapiens
  misc_RNA (1)...(19): siRNA sense strand
gaggaaagagaaaaggcaa

SEQ ID NO: 2636841 - RNA, 19 nt, Homo sapiens
  misc_RNA (1)...(19): siRNA sense strand
guggaaagaucaaacagca

SEQ ID NO: 2636842 - RNA, 19 nt, Homo sapiens
  misc_RNA (1)...(19): siRNA sense strand
agugaugaacugagggagu

SEQ ID NO: 2636843 - RNA, 19 nt, Homo sapiens
  misc_RNA (1)...(19): siRNA sense strand
agagaaaaggcaaagaaga

SEQ ID NO: 2636844 - RNA, 19 nt, Homo sapiens
  misc_RNA (1)...(19): siRNA sense strand
cccugaaggcggacgauga

SEQ ID NO: 2636845 - RNA, 19 nt, Homo sapiens
  misc_RNA (1)...(19): siRNA sense strand
cggacaugaaguaccggaa

SEQ ID NO: 2636846 - RNA, 19 nt, Homo sapiens
  misc_RNA (1)...(19): siRNA sense strand
uagccaagaugacggcaga

SEQ ID NO: 2636847 - RNA, 19 nt, Homo sapiens
  misc_RNA (1)...(19): siRNA sense strand
gcgcacauccgaaggaauu

SEQ ID NO: 2636848 - RNA, 19 nt, Homo sapiens
  misc_RNA (1)...(19): siRNA sense strand
ggcagagaggacagagaaa

SEQ ID NO: 2636849 - RNA, 19 nt, Homo sapiens
  misc_RNA (1)...(19): siRNA sense strand
ccgaugagaugaagcgcau

SEQ ID NO: 2636850 - RNA, 19 nt, Homo sapiens
  misc_RNA (1)...(19): siRNA sense strand
acucagaagacguguccaa

SEQ ID NO: 2636851 - RNA, 19 nt, Homo sapiens
  misc_RNA (1)...(19): siRNA sense strand
aggaugaguucgagcgcga

SEQ ID NO: 2636852 - RNA, 19 nt, Homo sapiens
  misc_RNA (1)...(19): siRNA sense strand
agucuaugcugcggagaaa

SEQ ID NO: 2636853 - RNA, 19 nt, Homo sapiens
  misc_RNA (1)...(19): siRNA sense strand
gggcagagaggacagagaa

SEQ ID NO: 2636854 - RNA, 19 nt, Homo sapiens
  misc_RNA (1)...(19): siRNA sense strand
uggccaaggugaagcgcga

SEQ ID NO: 2636855 - RNA, 19 nt, Homo sapiens
  misc_RNA (1)...(19): siRNA sense strand
gagucuaugcugcggagaa

SEQ ID NO: 2636856 - RNA, 19 nt, Homo sapiens
  misc_RNA (1)...(19): siRNA sense strand
ucuacaacgugcuggccaa

SEQ ID NO: 2636857 - RNA, 19 nt, Homo sapiens
  misc_RNA (1)...(19): siRNA sense strand
agggcgagcaagaggaaaa

SEQ ID NO: 2636858 - RNA, 19 nt, Homo sapiens
  misc_RNA (1)...(19): siRNA sense strand
aggagaugaaugagaagau

SEQ ID NO: 2636859 - RNA, 19 nt, Homo sapiens
  misc_RNA (1)...(19): siRNA sense strand
gggaagagaaugaagacac

SEQ ID NO: 2636860 - RNA, 19 nt, Homo sapiens
  misc_RNA (1)...(19): siRNA sense strand
cugcggagaaagcgggaga

SEQ ID NO: 2636861 - RNA, 19 nt, Homo sapiens
  misc_RNA (1)...(19): siRNA sense strand
gaaucgauaucacggccaa

SEQ ID NO: 2636862 - RNA, 19 nt, Homo sapiens
  misc_RNA (1)...(19): siRNA sense strand
ggagcugggcggagucuau

SEQ ID NO: 2636863 - RNA, 19 nt, Homo sapiens
  misc_RNA (1)...(19): siRNA sense strand
uggagaagcagcuggagca

SEQ ID NO: 2636864 - RNA, 19 nt, Homo sapiens
  misc_RNA (1)...(19): siRNA sense strand
caggaggagaugaaugaga

SEQ ID NO: 2636865 - RNA, 19 nt, Homo sapiens
  misc_RNA (1)...(19): siRNA sense strand
aggaaguacagaugagauc

SEQ ID NO: 2636866 - RNA, 19 nt, Homo sapiens
  misc_RNA (1)...(19): siRNA sense strand
cgggcagagaggacagaga

SEQ ID NO: 2636867 - RNA, 19 nt, Homo sapiens
  misc_RNA (1)...(19): siRNA sense strand
ggagaaagcgggagaaccc

SEQ ID NO: 2636868 - RNA, 19 nt, Homo sapiens
  misc_RNA (1)...(19): siRNA sense strand
cugcacgaguacauggaga

SEQ ID NO: 2636869 - RNA, 19 nt, Homo sapiens
  misc_RNA (1)...(19): siRNA sense strand
aggcggauguggagcccau

SEQ ID NO: 2636870 - RNA, 19 nt, Homo sapiens
  misc_RNA (1)...(19): siRNA sense strand
aggccaugaagguggacau

SEQ ID NO: 2636871 - RNA, 19 nt, Homo sapiens
  misc_RNA (1)...(19): siRNA sense strand
aagaggaaaacuugggcaa

SEQ ID NO: 2636872 - RNA, 19 nt, Homo sapiens
  misc_RNA (1)...(19): siRNA sense strand
uggauaaacuggaggagga

SEQ ID NO: 2636873 - RNA, 19 nt, Homo sapiens
  misc_RNA (1)...(19): siRNA sense strand
ggaggaauuucuacggcaa

SEQ ID NO: 2636874 - RNA, 19 nt, Homo sapiens
  misc_RNA (1)...(19): siRNA sense strand
ccgaagaagaagaugacau

SEQ ID NO: 2636875 - RNA, 19 nt, Homo sapiens
  misc_RNA (1)...(19): siRNA sense strand
gagaauggccuauggcuca

SEQ ID NO: 2636876 - RNA, 19 nt, Homo sapiens
  misc_RNA (1)...(19): siRNA sense strand
gugacaauggaguggauuu

SEQ ID NO: 2636877 - RNA, 19 nt, Homo sapiens
  misc_RNA (1)...(19): siRNA sense strand
ggauaaacuggaggaggaa

SEQ ID NO: 2636878 - RNA, 19 nt, Homo sapiens
  misc_RNA (1)...(19): siRNA sense strand
gaacagacucgcuggggaa

SEQ ID NO: 2636879 - RNA, 19 nt, Homo sapiens
  misc_RNA (1)...(19): siRNA sense strand
cugaagaagagaaugacau

SEQ ID NO: 2636880 - RNA, 19 nt, Homo sapiens
  misc_RNA (1)...(19): siRNA sense strand
ccaacuauuacuacggcaa

SEQ ID NO: 2636881 - RNA, 19 nt, Homo sapiens
  misc_RNA (1)...(19): siRNA sense strand
aggucauuguccugagcaa

SEQ ID NO: 2636882 - RNA, 19 nt, Homo sapiens
  misc_RNA (1)...(19): siRNA sense strand
gaagaaauucgaaccgaga

SEQ ID NO: 2636883 - RNA, 19 nt, Homo sapiens
  misc_RNA (1)...(19): siRNA sense strand
auaggaaggugcaaggaca

SEQ ID NO: 2636884 - RNA, 19 nt, Homo sapiens
  misc_RNA (1)...(19): siRNA sense strand
uggccaaggaugagcggau

SEQ ID NO: 2636885 - RNA, 19 nt, Homo sapiens
  misc_RNA (1)...(19): siRNA sense strand
acauugaagagcagcaaga

SEQ ID NO: 2636886 - RNA, 19 nt, Homo sapiens
  misc_RNA (1)...(19): siRNA sense strand
aggcggacaaccaggagaa

SEQ ID NO: 2636887 - RNA, 19 nt, Homo sapiens
  misc_RNA (1)...(19): siRNA sense strand
cggacaaccaggagaacgu

SEQ ID NO: 2636888 - RNA, 19 nt, Homo sapiens
  misc_RNA (1)...(19): siRNA sense strand
cagaguaugaagagcgguu

SEQ ID NO: 2636889 - RNA, 19 nt, Homo sapiens
  misc_RNA (1)...(19): siRNA sense strand
agccaaggucucugaagaa

SEQ ID NO: 2636890 - RNA, 19 nt, Homo sapiens
  misc_RNA (1)...(19): siRNA sense strand
gcagagggaugcagcagca

SEQ ID NO: 2636891 - RNA, 19 nt, Homo sapiens
  misc_RNA (1)...(19): siRNA sense strand
acacagaaggagaccacau

SEQ ID NO: 2636892 - RNA, 19 nt, Homo sapiens
  misc_RNA (1)...(19): siRNA sense strand
aggcagacagccaggacuu

SEQ ID NO: 2636893 - RNA, 19 nt, Homo sapiens
  misc_RNA (1)...(19): siRNA sense strand
gaacaaaucaaagaggaca

SEQ ID NO: 2636894 - RNA, 19 nt, Homo sapiens
  misc_RNA (1)...(19): siRNA sense strand
gagaugaauaagcgaggca

SEQ ID NO: 2636895 - RNA, 19 nt, Homo sapiens
  misc_RNA (1)...(19): siRNA sense strand
aggaagaaaccguguccca

SEQ ID NO: 2636896 - RNA, 19 nt, Homo sapiens
  misc_RNA (1)...(19): siRNA sense strand
aaacaaggucgcuggagca

SEQ ID NO: 2636897 - RNA, 19 nt, Homo sapiens
  misc_RNA (1)...(19): siRNA sense strand
cggugacaauggaguggau

SEQ ID NO: 2636898 - RNA, 19 nt, Homo sapiens
  misc_RNA (1)...(19): siRNA sense strand
ccaaggucucugaagaaga

SEQ ID NO: 2636899 - RNA, 19 nt, Homo sapiens
  misc_RNA (1)...(19): siRNA sense strand
ccguacagcuggaucggca

SEQ ID NO: 2636900 - RNA, 19 nt, Homo sapiens
  misc_RNA (1)...(19): siRNA sense strand
aggacgagacucugcaaaa

SEQ ID NO: 2636901 - RNA, 19 nt, Homo sapiens
  misc_RNA (1)...(19): siRNA sense strand
uggauaaacuggaggagga

SEQ ID NO: 2636902 - RNA, 19 nt, Homo sapiens
  misc_RNA (1)...(19): siRNA sense strand
ggaggaauuucuacggcaa

SEQ ID NO: 2636903 - RNA, 19 nt, Homo sapiens
  misc_RNA (1)...(19): siRNA sense strand
ccgaagaagaagaugacau

SEQ ID NO: 2636904 - RNA, 19 nt, Homo sapiens
  misc_RNA (1)...(19): siRNA sense strand
gagaauggccuauggcuca

SEQ ID NO: 2636905 - RNA, 19 nt, Homo sapiens
  misc_RNA (1)...(19): siRNA sense strand
gugacaauggaguggauuu

SEQ ID NO: 2636906 - RNA, 19 nt, Homo sapiens
  misc_RNA (1)...(19): siRNA sense strand
ggauaaacuggaggaggaa

SEQ ID NO: 2636907 - RNA, 19 nt, Homo sapiens
  misc_RNA (1)...(19): siRNA sense strand
gaacagacucgcuggggaa

SEQ ID NO: 2636908 - RNA, 19 nt, Homo sapiens
  misc_RNA (1)...(19): siRNA sense strand
cugaagaagagaaugacau

SEQ ID NO: 2636909 - RNA, 19 nt, Homo sapiens
  misc_RNA (1)...(19): siRNA sense strand
ccaacuauuacuacggcaa

SEQ ID NO: 2636910 - RNA, 19 nt, Homo sapiens
  misc_RNA (1)...(19): siRNA sense strand
aggucauuguccugagcaa

SEQ ID NO: 2636911 - RNA, 19 nt, Homo sapiens
  misc_RNA (1)...(19): siRNA sense strand
gaagaaauucgaaccgaga

SEQ ID NO: 2636912 - RNA, 19 nt, Homo sapiens
  misc_RNA (1)...(19): siRNA sense strand
auaggaaggugcaaggaca

SEQ ID NO: 2636913 - RNA, 19 nt, Homo sapiens
  misc_RNA (1)...(19): siRNA sense strand
uggccaaggaugagcggau

SEQ ID NO: 2636914 - RNA, 19 nt, Homo sapiens
  misc_RNA (1)...(19): siRNA sense strand
acauugaagagcagcaaga

SEQ ID NO: 2636915 - RNA, 19 nt, Homo sapiens
  misc_RNA (1)...(19): siRNA sense strand
aggcggacaaccaggagaa

SEQ ID NO: 2636916 - RNA, 19 nt, Homo sapiens
  misc_RNA (1)...(19): siRNA sense strand
cggacaaccaggagaacgu

SEQ ID NO: 2636917 - RNA, 19 nt, Homo sapiens
  misc_RNA (1)...(19): siRNA sense strand
cagaguaugaagagcgguu

SEQ ID NO: 2636918 - RNA, 19 nt, Homo sapiens
  misc_RNA (1)...(19): siRNA sense strand
agccaaggucucugaagaa

SEQ ID NO: 2636919 - RNA, 19 nt, Homo sapiens
  misc_RNA (1)...(19): siRNA sense strand
gcagagggaugcagcagca

SEQ ID NO: 2636920 - RNA, 19 nt, Homo sapiens
  misc_RNA (1)...(19): siRNA sense strand
acacagaaggagaccacau

SEQ ID NO: 2636921 - RNA, 19 nt, Homo sapiens
  misc_RNA (1)...(19): siRNA sense strand
aggcagacagccaggacuu

SEQ ID NO: 2636922 - RNA, 19 nt, Homo sapiens
  misc_RNA (1)...(19): siRNA sense strand
gaacaaaucaaagaggaca

SEQ ID NO: 2636923 - RNA, 19 nt, Homo sapiens
  misc_RNA (1)...(19): siRNA sense strand
gagaugaauaagcgaggca

SEQ ID NO: 2636924 - RNA, 19 nt, Homo sapiens
  misc_RNA (1)...(19): siRNA sense strand
aggaagaaaccguguccca

SEQ ID NO: 2636925 - RNA, 19 nt, Homo sapiens
  misc_RNA (1)...(19): siRNA sense strand
aaacaaggucgcuggagca

SEQ ID NO: 2636926 - RNA, 19 nt, Homo sapiens
  misc_RNA (1)...(19): siRNA sense strand
cggugacaauggaguggau

SEQ ID NO: 2636927 - RNA, 19 nt, Homo sapiens
  misc_RNA (1)...(19): siRNA sense strand
ccaaggucucugaagaaga

SEQ ID NO: 2636928 - RNA, 19 nt, Homo sapiens
  misc_RNA (1)...(19): siRNA sense strand
ccguacagcuggaucggca

SEQ ID NO: 2636929 - RNA, 19 nt, Homo sapiens
  misc_RNA (1)...(19): siRNA sense strand
aggacgagacucugcaaaa

SEQ ID NO: 2636930 - RNA, 19 nt, Homo sapiens
  misc_RNA (1)...(19): siRNA sense strand
ggucugaagaagagggaga

SEQ ID NO: 2636931 - RNA, 19 nt, Homo sapiens
  misc_RNA (1)...(19): siRNA sense strand
aagaagagggagagaaaga

SEQ ID NO: 2636932 - RNA, 19 nt, Homo sapiens
  misc_RNA (1)...(19): siRNA sense strand
gggaggaagaggaagaaau

SEQ ID NO: 2636933 - RNA, 19 nt, Homo sapiens
  misc_RNA (1)...(19): siRNA sense strand
acgaggaggaggaggagaa

SEQ ID NO: 2636934 - RNA, 19 nt, Homo sapiens
  misc_RNA (1)...(19): siRNA sense strand
aggagagagaagaggacua

SEQ ID NO: 2636935 - RNA, 19 nt, Homo sapiens
  misc_RNA (1)...(19): siRNA sense strand
ggucaaggaagaugaggau

SEQ ID NO: 2636936 - RNA, 19 nt, Homo sapiens
  misc_RNA (1)...(19): siRNA sense strand
agaaggaggaggagagcga

SEQ ID NO: 2636937 - RNA, 19 nt, Homo sapiens
  misc_RNA (1)...(19): siRNA sense strand
gcucagaagcaaaaugaaa

SEQ ID NO: 2636938 - RNA, 19 nt, Homo sapiens
  misc_RNA (1)...(19): siRNA sense strand
ggggaagggaggaggagaa

SEQ ID NO: 2636939 - RNA, 19 nt, Homo sapiens
  misc_RNA (1)...(19): siRNA sense strand
ucaagaagaagaaggucaa

SEQ ID NO: 2636940 - RNA, 19 nt, Homo sapiens
  misc_RNA (1)...(19): siRNA sense strand
gcgaggaggacgaagccaa

SEQ ID NO: 2636941 - RNA, 19 nt, Homo sapiens
  misc_RNA (1)...(19): siRNA sense strand
gaacuuggccggaaggaga

SEQ ID NO: 2636942 - RNA, 19 nt, Homo sapiens
  misc_RNA (1)...(19): siRNA sense strand
acgaggacguggagaggau

SEQ ID NO: 2636943 - RNA, 19 nt, Homo sapiens
  misc_RNA (1)...(19): siRNA sense strand
cugacaauguggaccuaaa

SEQ ID NO: 2636944 - RNA, 19 nt, Homo sapiens
  misc_RNA (1)...(19): siRNA sense strand
gcaaagagauggauagcag

SEQ ID NO: 2636945 - RNA, 19 nt, Homo sapiens
  misc_RNA (1)...(19): siRNA sense strand
ggaagauguggaagaguca

SEQ ID NO: 2636946 - RNA, 19 nt, Homo sapiens
  misc_RNA (1)...(19): siRNA sense strand
cagauggagcuuagggaga

SEQ ID NO: 2636947 - RNA, 19 nt, Homo sapiens
  misc_RNA (1)...(19): siRNA sense strand
gcugacuuacagagggaaa

SEQ ID NO: 2636948 - RNA, 19 nt, Homo sapiens
  misc_RNA (1)...(19): siRNA sense strand
caucauugcugcuuggaga

SEQ ID NO: 2636949 - RNA, 19 nt, Homo sapiens
  misc_RNA (1)...(19): siRNA sense strand
aguugauggaggagagaga

SEQ ID NO: 2636950 - RNA, 19 nt, Homo sapiens
  misc_RNA (1)...(19): siRNA sense strand
gggaggaggagaaggagga

SEQ ID NO: 2636951 - RNA, 19 nt, Homo sapiens
  misc_RNA (1)...(19): siRNA sense strand
uggaaagauggaagaucaa

SEQ ID NO: 2636952 - RNA, 19 nt, Homo sapiens
  misc_RNA (1)...(19): siRNA sense strand
cgguggaagaggaggacga

SEQ ID NO: 2636953 - RNA, 19 nt, Homo sapiens
  misc_RNA (1)...(19): siRNA sense strand
acagggaggaagaggaaga

SEQ ID NO: 2636954 - RNA, 19 nt, Homo sapiens
  misc_RNA (1)...(19): siRNA sense strand
cuuugaugaccgugcguaa

SEQ ID NO: 2636955 - RNA, 19 nt, Homo sapiens
  misc_RNA (1)...(19): siRNA sense strand
gguaccacgccaagagcaa

SEQ ID NO: 2636956 - RNA, 19 nt, Homo sapiens
  misc_RNA (1)...(19): siRNA sense strand
gcagcaggaacaaggacaa

SEQ ID NO: 2636957 - RNA, 19 nt, Homo sapiens
  misc_RNA (1)...(19): siRNA sense strand
gaaaggacacagaggagga

SEQ ID NO: 2636958 - RNA, 19 nt, Homo sapiens
  misc_RNA (1)...(19): siRNA sense strand
ggaaugagguggaugaggu

SEQ ID NO: 2636959 - RNA, 19 nt, Homo sapiens
  misc_RNA (1)...(19): siRNA sense strand
aggaggaggaggagaaacu

SEQ ID NO: 2636960 - RNA, 19 nt, Homo sapiens
  misc_RNA (1)...(19): siRNA sense strand
uggcagagccgaaacgaga

SEQ ID NO: 2636961 - RNA, 19 nt, Homo sapiens
  misc_RNA (1)...(19): siRNA sense strand
agaguguggcugugaacaa

SEQ ID NO: 2636962 - RNA, 19 nt, Homo sapiens
  misc_RNA (1)...(19): siRNA sense strand
acgccaagagcaagagaga

SEQ ID NO: 2636963 - RNA, 19 nt, Homo sapiens
  misc_RNA (1)...(19): siRNA sense strand
cugaagaggcugggaauca

SEQ ID NO: 2636964 - RNA, 19 nt, Homo sapiens
  misc_RNA (1)...(19): siRNA sense strand
ucauagacgaggaggagga

SEQ ID NO: 2636965 - RNA, 19 nt, Homo sapiens
  misc_RNA (1)...(19): siRNA sense strand
aggagaaacuguacgagca

SEQ ID NO: 2636966 - RNA, 19 nt, Homo sapiens
  misc_RNA (1)...(19): siRNA sense strand
gggaagauguggaagaguc

SEQ ID NO: 2636967 - RNA, 19 nt, Homo sapiens
  misc_RNA (1)...(19): siRNA sense strand
uggcagcagaguuggcaaa

SEQ ID NO: 2636968 - RNA, 19 nt, Homo sapiens
  misc_RNA (1)...(19): siRNA sense strand
gggagaagauggaugacac

SEQ ID NO: 2636969 - RNA, 19 nt, Homo sapiens
  misc_RNA (1)...(19): siRNA sense strand
cuuuaugaggucugaagaa

SEQ ID NO: 2636970 - RNA, 19 nt, Homo sapiens
  misc_RNA (1)...(19): siRNA sense strand
agauggaagaucaagagaa

SEQ ID NO: 2636971 - RNA, 19 nt, Homo sapiens
  misc_RNA (1)...(19): siRNA sense strand
aggaagaggaagaaaugga

SEQ ID NO: 2636972 - RNA, 19 nt, Homo sapiens
  misc_RNA (1)...(19): siRNA sense strand
agacaggagcucagaagca

SEQ ID NO: 2636973 - RNA, 19 nt, Homo sapiens
  misc_RNA (1)...(19): siRNA sense strand
ggaaguucacccagagcuu

SEQ ID NO: 2636974 - RNA, 19 nt, Homo sapiens
  misc_RNA (1)...(19): siRNA sense strand
gacagaaaacagagaagaa

SEQ ID NO: 2636975 - RNA, 19 nt, Homo sapiens
  misc_RNA (1)...(19): siRNA sense strand
ccuggaaugagguggauga

SEQ ID NO: 2636976 - RNA, 19 nt, Homo sapiens
  misc_RNA (1)...(19): siRNA sense strand
aggaggagaaggaggagga

SEQ ID NO: 2636977 - RNA, 19 nt, Homo sapiens
  misc_RNA (1)...(19): siRNA sense strand
acgagaggcugcuggagau

SEQ ID NO: 2636978 - RNA, 19 nt, Homo sapiens
  misc_RNA (1)...(19): siRNA sense strand
agcugaaacaccagaagaa

SEQ ID NO: 2636979 - RNA, 19 nt, Homo sapiens
  misc_RNA (1)...(19): siRNA sense strand
ggcugaagaggcugggaau

SEQ ID NO: 2636980 - RNA, 19 nt, Homo sapiens
  misc_RNA (1)...(19): siRNA sense strand
augagaaguugauggagga

SEQ ID NO: 2636981 - RNA, 19 nt, Homo sapiens
  misc_RNA (1)...(19): siRNA sense strand
caggaguggcagagccgaa

SEQ ID NO: 2636982 - RNA, 19 nt, Homo sapiens
  misc_RNA (1)...(19): siRNA sense strand
caagaagaaaccaggacca

SEQ ID NO: 2636983 - RNA, 19 nt, Homo sapiens
  misc_RNA (1)...(19): siRNA sense strand
uggccauccuggaggcuuu

SEQ ID NO: 2636984 - RNA, 19 nt, Homo sapiens
  misc_RNA (1)...(19): siRNA sense strand
aggaugaugguguggguga

SEQ ID NO: 2636985 - RNA, 19 nt, Homo sapiens
  misc_RNA (1)...(19): siRNA sense strand
aguauuaauaaguggcuca

SEQ ID NO: 2636986 - RNA, 19 nt, Homo sapiens
  misc_RNA (1)...(19): siRNA sense strand
cgagagguaccaagcagaa

SEQ ID NO: 2636987 - RNA, 19 nt, Homo sapiens
  misc_RNA (1)...(19): siRNA sense strand
aggcaguaggggagaagaa

SEQ ID NO: 2636988 - RNA, 19 nt, Homo sapiens
  misc_RNA (1)...(19): siRNA sense strand
acugggaagauguggaaga

SEQ ID NO: 2636989 - RNA, 19 nt, Homo sapiens
  misc_RNA (1)...(19): siRNA sense strand
ggaugaaacuagaagaaaa

SEQ ID NO: 2636990 - RNA, 19 nt, Homo sapiens
  misc_RNA (1)...(19): siRNA sense strand
caauaaacugacugggaua

SEQ ID NO: 2636991 - RNA, 19 nt, Homo sapiens
  misc_RNA (1)...(19): siRNA sense strand
aggaagaacgucagaagaa

SEQ ID NO: 2636992 - RNA, 19 nt, Homo sapiens
  misc_RNA (1)...(19): siRNA sense strand
cauaauggaacaagaacaa

SEQ ID NO: 2636993 - RNA, 19 nt, Homo sapiens
  misc_RNA (1)...(19): siRNA sense strand
gagcauaagaaggaggaaa

SEQ ID NO: 2636994 - RNA, 19 nt, Homo sapiens
  misc_RNA (1)...(19): siRNA sense strand
aauaaauggagaagaggaa

SEQ ID NO: 2636995 - RNA, 19 nt, Homo sapiens
  misc_RNA (1)...(19): siRNA sense strand
ggcacaaauuccagaagaa

SEQ ID NO: 2636996 - RNA, 19 nt, Homo sapiens
  misc_RNA (1)...(19): siRNA sense strand
gugcagaagaugagaaagu

SEQ ID NO: 2636997 - RNA, 19 nt, Homo sapiens
  misc_RNA (1)...(19): siRNA sense strand
gagcaacaaucuuggguga

SEQ ID NO: 2636998 - RNA, 19 nt, Homo sapiens
  misc_RNA (1)...(19): siRNA sense strand
cuguagaaauggucaguau

SEQ ID NO: 2636999 - RNA, 19 nt, Homo sapiens
  misc_RNA (1)...(19): siRNA sense strand
ugauggagaaagugauaaa

SEQ ID NO: 2637000 - RNA, 19 nt, Homo sapiens
  misc_RNA (1)...(19): siRNA sense strand
cggaaacaacugaaacuaa

SEQ ID NO: 2637001 - RNA, 19 nt, Homo sapiens
  misc_RNA (1)...(19): siRNA sense strand
gauucuucguugagagauu

SEQ ID NO: 2637002 - RNA, 19 nt, Homo sapiens
  misc_RNA (1)...(19): siRNA sense strand
cuucauccauaaagaguaa

SEQ ID NO: 2637003 - RNA, 19 nt, Homo sapiens
  misc_RNA (1)...(19): siRNA sense strand
gggugcagaagaugagaaa

SEQ ID NO: 2637004 - RNA, 19 nt, Homo sapiens
  misc_RNA (1)...(19): siRNA sense strand
gcauugaagaagaacuuaa

SEQ ID NO: 2637005 - RNA, 19 nt, Homo sapiens
  misc_RNA (1)...(19): siRNA sense strand
cagagaauuuauuaggcaa

SEQ ID NO: 2637006 - RNA, 19 nt, Homo sapiens
  misc_RNA (1)...(19): siRNA sense strand
caaagaacccagugcaaaa

SEQ ID NO: 2637007 - RNA, 19 nt, Homo sapiens
  misc_RNA (1)...(19): siRNA sense strand
agaagauaguguacagaga

SEQ ID NO: 2637008 - RNA, 19 nt, Homo sapiens
  misc_RNA (1)...(19): siRNA sense strand
auccaaaccuaaagaggaa

SEQ ID NO: 2637009 - RNA, 19 nt, Homo sapiens
  misc_RNA (1)...(19): siRNA sense strand
gcccagaaacugaagaaau

SEQ ID NO: 2637010 - RNA, 19 nt, Homo sapiens
  misc_RNA (1)...(19): siRNA sense strand
gauugaaggacuuuacaaa

SEQ ID NO: 2637011 - RNA, 19 nt, Homo sapiens
  misc_RNA (1)...(19): siRNA sense strand
aaagaaaggggaugggaua

SEQ ID NO: 2637012 - RNA, 19 nt, Homo sapiens
  misc_RNA (1)...(19): siRNA sense strand
gcagaagaugagaaaguau

SEQ ID NO: 2637013 - RNA, 19 nt, Homo sapiens
  misc_RNA (1)...(19): siRNA sense strand
cagaaauggagcauaagaa

SEQ ID NO: 2637014 - RNA, 19 nt, Homo sapiens
  misc_RNA (1)...(19): siRNA sense strand
ugaaguagacacuggaauu

SEQ ID NO: 2637015 - RNA, 19 nt, Homo sapiens
  misc_RNA (1)...(19): siRNA sense strand
agacauaauggaacaagaa

SEQ ID NO: 2637016 - RNA, 19 nt, Homo sapiens
  misc_RNA (1)...(19): siRNA sense strand
aagaggaagcagagagcau

SEQ ID NO: 2637017 - RNA, 19 nt, Homo sapiens
  misc_RNA (1)...(19): siRNA sense strand
gagcauugaagaagaacuu

SEQ ID NO: 2637018 - RNA, 19 nt, Homo sapiens
  misc_RNA (1)...(19): siRNA sense strand
auuccuuacuguagugaaa

SEQ ID NO: 2637019 - RNA, 19 nt, Homo sapiens
  misc_RNA (1)...(19): siRNA sense strand
guauauacugaucgagcaa

SEQ ID NO: 2637020 - RNA, 19 nt, Homo sapiens
  misc_RNA (1)...(19): siRNA sense strand
gggcagcuuuguuggagaa

SEQ ID NO: 2637021 - RNA, 19 nt, Homo sapiens
  misc_RNA (1)...(19): siRNA sense strand
acaaauuccagaagaaaca

SEQ ID NO: 2637022 - RNA, 19 nt, Homo sapiens
  misc_RNA (1)...(19): siRNA sense strand
uguuaaugcagaugagaga

SEQ ID NO: 2637023 - RNA, 19 nt, Homo sapiens
  misc_RNA (1)...(19): siRNA sense strand
cagaaacagauucgagauu

SEQ ID NO: 2637024 - RNA, 19 nt, Homo sapiens
  misc_RNA (1)...(19): siRNA sense strand
gagagagcacgcagagaau

SEQ ID NO: 2637025 - RNA, 19 nt, Homo sapiens
  misc_RNA (1)...(19): siRNA sense strand
ccuuaacacaaaugaacua

SEQ ID NO: 2637026 - RNA, 19 nt, Homo sapiens
  misc_RNA (1)...(19): siRNA sense strand
gcguaaaacugaggaagaa

SEQ ID NO: 2637027 - RNA, 19 nt, Homo sapiens
  misc_RNA (1)...(19): siRNA sense strand
gaaucauaccgauggaaaa

SEQ ID NO: 2637028 - RNA, 19 nt, Homo sapiens
  misc_RNA (1)...(19): siRNA sense strand
gaaacagauucgagauuuu

SEQ ID NO: 2637029 - RNA, 19 nt, Homo sapiens
  misc_RNA (1)...(19): siRNA sense strand
gagaaagugauaaagaaca

SEQ ID NO: 2637030 - RNA, 19 nt, Homo sapiens
  misc_RNA (1)...(19): siRNA sense strand
gagagcacgcagagaauuu

SEQ ID NO: 2637031 - RNA, 19 nt, Homo sapiens
  misc_RNA (1)...(19): siRNA sense strand
gggacauggcccaaagaga

SEQ ID NO: 2637032 - RNA, 19 nt, Homo sapiens
  misc_RNA (1)...(19): siRNA sense strand
agagagcauugaagaagaa

SEQ ID NO: 2637033 - RNA, 19 nt, Homo sapiens
  misc_RNA (1)...(19): siRNA sense strand
agaaaagaggcgugcuaua

SEQ ID NO: 2637034 - RNA, 19 nt, Homo sapiens
  misc_RNA (1)...(19): siRNA sense strand
auggagaaccucaguuaaa

SEQ ID NO: 2637035 - RNA, 19 nt, Homo sapiens
  misc_RNA (1)...(19): siRNA sense strand
gaaaagauuaagaagggaa

SEQ ID NO: 2637036 - RNA, 19 nt, Homo sapiens
  misc_RNA (1)...(19): siRNA sense strand
cagagagcauugaagaaga

SEQ ID NO: 2637037 - RNA, 19 nt, Homo sapiens
  misc_RNA (1)...(19): siRNA sense strand
ggagaaagugauaaagaac

SEQ ID NO: 2637038 - RNA, 19 nt, Homo sapiens
  misc_RNA (1)...(19): siRNA sense strand
agaaagaagaugagagagc

SEQ ID NO: 2637039 - RNA, 19 nt, Homo sapiens
  misc_RNA (1)...(19): siRNA sense strand
uggaggaaauggagaaauc

SEQ ID NO: 2637040 - RNA, 19 nt, Homo sapiens
  misc_RNA (1)...(19): siRNA sense strand
ccugauaauguaacugaua

SEQ ID NO: 2637041 - RNA, 19 nt, Homo sapiens
  misc_RNA (1)...(19): siRNA sense strand
gaagaaaagaggcgugcua

SEQ ID NO: 2637042 - RNA, 19 nt, Homo sapiens
  misc_RNA (1)...(19): siRNA sense strand
agaaauggucaguauagaa

SEQ ID NO: 2637043 - RNA, 19 nt, Homo sapiens
  misc_RNA (1)...(19): siRNA sense strand
ggacuuacucugaacaaca

SEQ ID NO: 2637044 - RNA, 19 nt, Homo sapiens
  misc_RNA (1)...(19): siRNA sense strand
gaaccucaguuaaaggaau

SEQ ID NO: 2637045 - RNA, 19 nt, Homo sapiens
  misc_RNA (1)...(19): siRNA sense strand
caagagugaugcugcaaaa

SEQ ID NO: 2637046 - RNA, 19 nt, Homo sapiens
  misc_RNA (1)...(19): siRNA sense strand
gacauggcccaaagagaaa

SEQ ID NO: 2637047 - RNA, 19 nt, Homo sapiens
  misc_RNA (1)...(19): siRNA sense strand
acauaauggaacaagaaca

SEQ ID NO: 2637048 - RNA, 19 nt, Homo sapiens
  misc_RNA (1)...(19): siRNA sense strand
caauaaauggagaagagga

SEQ ID NO: 2637049 - RNA, 19 nt, Homo sapiens
  misc_RNA (1)...(19): siRNA sense strand
ccaaauugcuaauggcuuc

SEQ ID NO: 2637050 - RNA, 19 nt, Homo sapiens
  misc_RNA (1)...(19): siRNA sense strand
cagaagaaaaggaaaucaa

SEQ ID NO: 2637051 - RNA, 19 nt, Homo sapiens
  misc_RNA (1)...(19): siRNA sense strand
gcagagaauuuauuaggca

SEQ ID NO: 2637052 - RNA, 19 nt, Homo sapiens
  misc_RNA (1)...(19): siRNA sense strand
gaauauaugaggcggaaac

SEQ ID NO: 2637053 - RNA, 19 nt, Homo sapiens
  misc_RNA (1)...(19): siRNA sense strand
ggacagaaaaugugccaga

SEQ ID NO: 2637054 - RNA, 19 nt, Homo sapiens
  misc_RNA (1)...(19): siRNA sense strand
uaggaugaaacuagaagaa

SEQ ID NO: 2637055 - RNA, 19 nt, Homo sapiens
  misc_RNA (1)...(19): siRNA sense strand
gagcaaaagaaaaggaauc

SEQ ID NO: 2637056 - RNA, 19 nt, Homo sapiens
  misc_RNA (1)...(19): siRNA sense strand
agaaaaugugccagaggaa

SEQ ID NO: 2637057 - RNA, 19 nt, Homo sapiens
  misc_RNA (1)...(19): siRNA sense strand
gcagaaaaugauauggcaa

SEQ ID NO: 2637058 - RNA, 19 nt, Homo sapiens
  misc_RNA (1)...(19): siRNA sense strand
ggaugaaacuagaagaaaa

SEQ ID NO: 2637059 - RNA, 19 nt, Homo sapiens
  misc_RNA (1)...(19): siRNA sense strand
caauaaacugacugggaua

SEQ ID NO: 2637060 - RNA, 19 nt, Homo sapiens
  misc_RNA (1)...(19): siRNA sense strand
aggaagaacgucagaagaa

SEQ ID NO: 2637061 - RNA, 19 nt, Homo sapiens
  misc_RNA (1)...(19): siRNA sense strand
cauaauggaacaagaacaa

SEQ ID NO: 2637062 - RNA, 19 nt, Homo sapiens
  misc_RNA (1)...(19): siRNA sense strand
gagcauaagaaggaggaaa

SEQ ID NO: 2637063 - RNA, 19 nt, Homo sapiens
  misc_RNA (1)...(19): siRNA sense strand
ggcacaaauuccagaagaa

SEQ ID NO: 2637064 - RNA, 19 nt, Homo sapiens
  misc_RNA (1)...(19): siRNA sense strand
gugcagaagaugagaaagu

SEQ ID NO: 2637065 - RNA, 19 nt, Homo sapiens
  misc_RNA (1)...(19): siRNA sense strand
gagcaacaaucuuggguga

SEQ ID NO: 2637066 - RNA, 19 nt, Homo sapiens
  misc_RNA (1)...(19): siRNA sense strand
cuguagaaauggucaguau

SEQ ID NO: 2637067 - RNA, 19 nt, Homo sapiens
  misc_RNA (1)...(19): siRNA sense strand
ugauggagaaagugauaaa

SEQ ID NO: 2637068 - RNA, 19 nt, Homo sapiens
  misc_RNA (1)...(19): siRNA sense strand
cggaaacaacugaaacuaa

SEQ ID NO: 2637069 - RNA, 19 nt, Homo sapiens
  misc_RNA (1)...(19): siRNA sense strand
gauucuucguugagagauu

SEQ ID NO: 2637070 - RNA, 19 nt, Homo sapiens
  misc_RNA (1)...(19): siRNA sense strand
cuucauccauaaagaguaa

SEQ ID NO: 2637071 - RNA, 19 nt, Homo sapiens
  misc_RNA (1)...(19): siRNA sense strand
gggugcagaagaugagaaa

SEQ ID NO: 2637072 - RNA, 19 nt, Homo sapiens
  misc_RNA (1)...(19): siRNA sense strand
gcauugaagaagaacuuaa

SEQ ID NO: 2637073 - RNA, 19 nt, Homo sapiens
  misc_RNA (1)...(19): siRNA sense strand
cagagaauuuauuaggcaa

SEQ ID NO: 2637074 - RNA, 19 nt, Homo sapiens
  misc_RNA (1)...(19): siRNA sense strand
caaagaacccagugcaaaa

SEQ ID NO: 2637075 - RNA, 19 nt, Homo sapiens
  misc_RNA (1)...(19): siRNA sense strand
agaagauaguguacagaga

SEQ ID NO: 2637076 - RNA, 19 nt, Homo sapiens
  misc_RNA (1)...(19): siRNA sense strand
auccaaaccuaaagaggaa

SEQ ID NO: 2637077 - RNA, 19 nt, Homo sapiens
  misc_RNA (1)...(19): siRNA sense strand
gcccagaaacugaagaaau

SEQ ID NO: 2637078 - RNA, 19 nt, Homo sapiens
  misc_RNA (1)...(19): siRNA sense strand
gauugaaggacuuuacaaa

SEQ ID NO: 2637079 - RNA, 19 nt, Homo sapiens
  misc_RNA (1)...(19): siRNA sense strand
aaagaaaggggaugggaua

SEQ ID NO: 2637080 - RNA, 19 nt, Homo sapiens
  misc_RNA (1)...(19): siRNA sense strand
gcagaagaugagaaaguau

SEQ ID NO: 2637081 - RNA, 19 nt, Homo sapiens
  misc_RNA (1)...(19): siRNA sense strand
cagaaauggagcauaagaa

SEQ ID NO: 2637082 - RNA, 19 nt, Homo sapiens
  misc_RNA (1)...(19): siRNA sense strand
ugaaguagacacuggaauu

SEQ ID NO: 2637083 - RNA, 19 nt, Homo sapiens
  misc_RNA (1)...(19): siRNA sense strand
agacauaauggaacaagaa

SEQ ID NO: 2637084 - RNA, 19 nt, Homo sapiens
  misc_RNA (1)...(19): siRNA sense strand
aagaggaagcagagagcau

SEQ ID NO: 2637085 - RNA, 19 nt, Homo sapiens
  misc_RNA (1)...(19): siRNA sense strand
gagcauugaagaagaacuu

SEQ ID NO: 2637086 - RNA, 19 nt, Homo sapiens
  misc_RNA (1)...(19): siRNA sense strand
auuccuuacuguagugaaa

SEQ ID NO: 2637087 - RNA, 19 nt, Homo sapiens
  misc_RNA (1)...(19): siRNA sense strand
guauauacugaucgagcaa

SEQ ID NO: 2637088 - RNA, 19 nt, Homo sapiens
  misc_RNA (1)...(19): siRNA sense strand
gggcagcuuuguuggagaa

SEQ ID NO: 2637089 - RNA, 19 nt, Homo sapiens
  misc_RNA (1)...(19): siRNA sense strand
acaaauuccagaagaaaca

SEQ ID NO: 2637090 - RNA, 19 nt, Homo sapiens
  misc_RNA (1)...(19): siRNA sense strand
uguuaaugcagaugagaga

SEQ ID NO: 2637091 - RNA, 19 nt, Homo sapiens
  misc_RNA (1)...(19): siRNA sense strand
cagaaacagauucgagauu

SEQ ID NO: 2637092 - RNA, 19 nt, Homo sapiens
  misc_RNA (1)...(19): siRNA sense strand
gagagagcacgcagagaau

SEQ ID NO: 2637093 - RNA, 19 nt, Homo sapiens
  misc_RNA (1)...(19): siRNA sense strand
ccuuaacacaaaugaacua

SEQ ID NO: 2637094 - RNA, 19 nt, Homo sapiens
  misc_RNA (1)...(19): siRNA sense strand
gcguaaaacugaggaagaa

SEQ ID NO: 2637095 - RNA, 19 nt, Homo sapiens
  misc_RNA (1)...(19): siRNA sense strand
gaaucauaccgauggaaaa

SEQ ID NO: 2637096 - RNA, 19 nt, Homo sapiens
  misc_RNA (1)...(19): siRNA sense strand
gaaacagauucgagauuuu

SEQ ID NO: 2637097 - RNA, 19 nt, Homo sapiens
  misc_RNA (1)...(19): siRNA sense strand
gagaaagugauaaagaaca

SEQ ID NO: 2637098 - RNA, 19 nt, Homo sapiens
  misc_RNA (1)...(19): siRNA sense strand
gagagcacgcagagaauuu

SEQ ID NO: 2637099 - RNA, 19 nt, Homo sapiens
  misc_RNA (1)...(19): siRNA sense strand
gggacauggcccaaagaga

SEQ ID NO: 2637100 - RNA, 19 nt, Homo sapiens
  misc_RNA (1)...(19): siRNA sense strand
agagagcauugaagaagaa

SEQ ID NO: 2637101 - RNA, 19 nt, Homo sapiens
  misc_RNA (1)...(19): siRNA sense strand
agaaaagaggcgugcuaua

SEQ ID NO: 2637102 - RNA, 19 nt, Homo sapiens
  misc_RNA (1)...(19): siRNA sense strand
gaaaagauuaagaagggaa

SEQ ID NO: 2637103 - RNA, 19 nt, Homo sapiens
  misc_RNA (1)...(19): siRNA sense strand
cagagagcauugaagaaga

SEQ ID NO: 2637104 - RNA, 19 nt, Homo sapiens
  misc_RNA (1)...(19): siRNA sense strand
ggagaaagugauaaagaac

SEQ ID NO: 2637105 - RNA, 19 nt, Homo sapiens
  misc_RNA (1)...(19): siRNA sense strand
agaaagaagaugagagagc

SEQ ID NO: 2637106 - RNA, 19 nt, Homo sapiens
  misc_RNA (1)...(19): siRNA sense strand
uggaggaaauggagaaauc

SEQ ID NO: 2637107 - RNA, 19 nt, Homo sapiens
  misc_RNA (1)...(19): siRNA sense strand
ccugauaauguaacugaua

SEQ ID NO: 2637108 - RNA, 19 nt, Homo sapiens
  misc_RNA (1)...(19): siRNA sense strand
gaagaaaagaggcgugcua

SEQ ID NO: 2637109 - RNA, 19 nt, Homo sapiens
  misc_RNA (1)...(19): siRNA sense strand
agaaauggucaguauagaa

SEQ ID NO: 2637110 - RNA, 19 nt, Homo sapiens
  misc_RNA (1)...(19): siRNA sense strand
ggacuuacucugaacaaca

SEQ ID NO: 2637111 - RNA, 19 nt, Homo sapiens
  misc_RNA (1)...(19): siRNA sense strand
caagagugaugcugcaaaa

SEQ ID NO: 2637112 - RNA, 19 nt, Homo sapiens
  misc_RNA (1)...(19): siRNA sense strand
gacauggcccaaagagaaa

SEQ ID NO: 2637113 - RNA, 19 nt, Homo sapiens
  misc_RNA (1)...(19): siRNA sense strand
ggacagaaaaugugccaga

SEQ ID NO: 2637114 - RNA, 19 nt, Homo sapiens
  misc_RNA (1)...(19): siRNA sense strand
acauaauggaacaagaaca

SEQ ID NO: 2637115 - RNA, 19 nt, Homo sapiens
  misc_RNA (1)...(19): siRNA sense strand
ccaaauugcuaauggcuuc

SEQ ID NO: 2637116 - RNA, 19 nt, Homo sapiens
  misc_RNA (1)...(19): siRNA sense strand
cagaagaaaaggaaaucaa

SEQ ID NO: 2637117 - RNA, 19 nt, Homo sapiens
  misc_RNA (1)...(19): siRNA sense strand
gcagagaauuuauuaggca

SEQ ID NO: 2637118 - RNA, 19 nt, Homo sapiens
  misc_RNA (1)...(19): siRNA sense strand
gaauauaugaggcggaaac

SEQ ID NO: 2637119 - RNA, 19 nt, Homo sapiens
  misc_RNA (1)...(19): siRNA sense strand
agaaaaugugccagaggaa

SEQ ID NO: 2637120 - RNA, 19 nt, Homo sapiens
  misc_RNA (1)...(19): siRNA sense strand
uaggaugaaacuagaagaa

SEQ ID NO: 2637121 - RNA, 19 nt, Homo sapiens
  misc_RNA (1)...(19): siRNA sense strand
gagcaaaagaaaaggaauc

SEQ ID NO: 2637122 - RNA, 19 nt, Homo sapiens
  misc_RNA (1)...(19): siRNA sense strand
gcagaaaaugauauggcaa

SEQ ID NO: 2637123 - RNA, 19 nt, Homo sapiens
  misc_RNA (1)...(19): siRNA sense strand
uugucagauuagaggauau

SEQ ID NO: 2637124 - RNA, 19 nt, Homo sapiens
  misc_RNA (1)...(19): siRNA sense strand
uaccaaacagagacagaaa

SEQ ID NO: 2637125 - RNA, 19 nt, Homo sapiens
  misc_RNA (1)...(19): siRNA sense strand
ggagcaagucacuggcaga

SEQ ID NO: 2637126 - RNA, 19 nt, Homo sapiens
  misc_RNA (1)...(19): siRNA sense strand
cggaauggcuccuggcauc

SEQ ID NO: 2637127 - RNA, 19 nt, Homo sapiens
  misc_RNA (1)...(19): siRNA sense strand
ccgagaggcagcagaagca

SEQ ID NO: 2637128 - RNA, 19 nt, Homo sapiens
  misc_RNA (1)...(19): siRNA sense strand
cauuugaaggccaggagau

SEQ ID NO: 2637129 - RNA, 19 nt, Homo sapiens
  misc_RNA (1)...(19): siRNA sense strand
guguagagccagaggggaa

SEQ ID NO: 2637130 - RNA, 19 nt, Homo sapiens
  misc_RNA (1)...(19): siRNA sense strand
gaucuuagcuggaacgcca

SEQ ID NO: 2637131 - RNA, 19 nt, Homo sapiens
  misc_RNA (1)...(19): siRNA sense strand
ccagacaagcagagaacca

SEQ ID NO: 2637132 - RNA, 19 nt, Homo sapiens
  misc_RNA (1)...(19): siRNA sense strand
ugucaagugucaauaauca

SEQ ID NO: 2637133 - RNA, 19 nt, Homo sapiens
  misc_RNA (1)...(19): siRNA sense strand
cagccauuguguagagcca

SEQ ID NO: 2637134 - RNA, 19 nt, Homo sapiens
  misc_RNA (1)...(19): siRNA sense strand
uccugaugcugcagaacaa

SEQ ID NO: 2637135 - RNA, 19 nt, Homo sapiens
  misc_RNA (1)...(19): siRNA sense strand
uggagauggaggacucaaa

SEQ ID NO: 2637136 - RNA, 19 nt, Homo sapiens
  misc_RNA (1)...(19): siRNA sense strand
cuucaagcccugugaguac

SEQ ID NO: 2637137 - RNA, 19 nt, Homo sapiens
  misc_RNA (1)...(19): siRNA sense strand
aucugaagcucaaagggaa

SEQ ID NO: 2637138 - RNA, 19 nt, Homo sapiens
  misc_RNA (1)...(19): siRNA sense strand
guuugugguaggugcgauu

SEQ ID NO: 2637139 - RNA, 19 nt, Homo sapiens
  misc_RNA (1)...(19): siRNA sense strand
ggauccuggaggugccuua

SEQ ID NO: 2637140 - RNA, 19 nt, Homo sapiens
  misc_RNA (1)...(19): siRNA sense strand
ugacugaacucgaggagga

SEQ ID NO: 2637141 - RNA, 19 nt, Homo sapiens
  misc_RNA (1)...(19): siRNA sense strand
gggaagaaggagaagggca

SEQ ID NO: 2637142 - RNA, 19 nt, Homo sapiens
  misc_RNA (1)...(19): siRNA sense strand
caaagaagaucaugccuga

SEQ ID NO: 2637143 - RNA, 19 nt, Homo sapiens
  misc_RNA (1)...(19): siRNA sense strand
acacagagauccagcggga

SEQ ID NO: 2637144 - RNA, 19 nt, Homo sapiens
  misc_RNA (1)...(19): siRNA sense strand
acugaaagcagaacggaau

SEQ ID NO: 2637145 - RNA, 19 nt, Homo sapiens
  misc_RNA (1)...(19): siRNA sense strand
cugaagaacggcauggcaa

SEQ ID NO: 2637146 - RNA, 19 nt, Homo sapiens
  misc_RNA (1)...(19): siRNA sense strand
gggaaaagaugaaugagga

SEQ ID NO: 2637147 - RNA, 19 nt, Homo sapiens
  misc_RNA (1)...(19): siRNA sense strand
ggaugauucaggaagagaa

SEQ ID NO: 2637148 - RNA, 19 nt, Homo sapiens
  misc_RNA (1)...(19): siRNA sense strand
aggauaaagccaccauaaa

SEQ ID NO: 2637149 - RNA, 19 nt, Homo sapiens
  misc_RNA (1)...(19): siRNA sense strand
acgagaacuucgaccacaa

SEQ ID NO: 2637150 - RNA, 19 nt, Homo sapiens
  misc_RNA (1)...(19): siRNA sense strand
ggaagaaggagaagggcag

SEQ ID NO: 2637151 - RNA, 19 nt, Homo sapiens
  misc_RNA (1)...(19): siRNA sense strand
cugaaagcagaacggaaua

SEQ ID NO: 2637152 - RNA, 19 nt, Homo sapiens
  misc_RNA (1)...(19): siRNA sense strand
ggguagaggagcugcagga

SEQ ID NO: 2637153 - RNA, 19 nt, Homo sapiens
  misc_RNA (1)...(19): siRNA sense strand
ccgacguggaugaggauga

SEQ ID NO: 2637154 - RNA, 19 nt, Homo sapiens
  misc_RNA (1)...(19): siRNA sense strand
cgucaagaguggugccauc

SEQ ID NO: 2637155 - RNA, 19 nt, Homo sapiens
  misc_RNA (1)...(19): siRNA sense strand
ucaauaaccuguuggccuu

SEQ ID NO: 2637156 - RNA, 19 nt, Homo sapiens
  misc_RNA (1)...(19): siRNA sense strand
uuaagaaagcauaggagga

SEQ ID NO: 2637157 - RNA, 19 nt, Homo sapiens
  misc_RNA (1)...(19): siRNA sense strand
acagagauccagcgggaga

SEQ ID NO: 2637158 - RNA, 19 nt, Homo sapiens
  misc_RNA (1)...(19): siRNA sense strand
uggaugagaaggugcgaga

SEQ ID NO: 2637159 - RNA, 19 nt, Homo sapiens
  misc_RNA (1)...(19): siRNA sense strand
cgggagaaguugcuggagu

SEQ ID NO: 2637160 - RNA, 19 nt, Homo sapiens
  misc_RNA (1)...(19): siRNA sense strand
auggaaagagaguucaaua

SEQ ID NO: 2637161 - RNA, 19 nt, Homo sapiens
  misc_RNA (1)...(19): siRNA sense strand
gggagaaguugcuggaguc

SEQ ID NO: 2637162 - RNA, 19 nt, Homo sapiens
  misc_RNA (1)...(19): siRNA sense strand
cuggaaacaucuacuaaaa

SEQ ID NO: 2637163 - RNA, 19 nt, Homo sapiens
  misc_RNA (1)...(19): siRNA sense strand
ccaugaguggauugggaau

SEQ ID NO: 2637164 - RNA, 19 nt, Homo sapiens
  misc_RNA (1)...(19): siRNA sense strand
gagaagaggcgagaggaga

SEQ ID NO: 2637165 - RNA, 19 nt, Homo sapiens
  misc_RNA (1)...(19): siRNA sense strand
uggagguggcagagcagaa

SEQ ID NO: 2637166 - RNA, 19 nt, Homo sapiens
  misc_RNA (1)...(19): siRNA sense strand
gauugggaaugaauggcua

SEQ ID NO: 2637167 - RNA, 19 nt, Homo sapiens
  misc_RNA (1)...(19): siRNA sense strand
aggaagagauaucagaacu

SEQ ID NO: 2637168 - RNA, 19 nt, Homo sapiens
  misc_RNA (1)...(19): siRNA sense strand
agaugaaugaggaccacaa

SEQ ID NO: 2637169 - RNA, 19 nt, Homo sapiens
  misc_RNA (1)...(19): siRNA sense strand
agagcgggaggaagagaua

SEQ ID NO: 2637170 - RNA, 19 nt, Homo sapiens
  misc_RNA (1)...(19): siRNA sense strand
cuacacuggagaagcgcua

SEQ ID NO: 2637171 - RNA, 19 nt, Homo sapiens
  misc_RNA (1)...(19): siRNA sense strand
uggacgagcgggagaaguu

SEQ ID NO: 2637172 - RNA, 19 nt, Homo sapiens
  misc_RNA (1)...(19): siRNA sense strand
uggagaaugagcuggccaa

SEQ ID NO: 2637173 - RNA, 19 nt, Homo sapiens
  misc_RNA (1)...(19): siRNA sense strand
ggagaagaggcgagaggag

SEQ ID NO: 2637174 - RNA, 19 nt, Homo sapiens
  misc_RNA (1)...(19): siRNA sense strand
gggauggagcggcagaaga

SEQ ID NO: 2637175 - RNA, 19 nt, Homo sapiens
  misc_RNA (1)...(19): siRNA sense strand
ggccgaaacgccuguggaa

SEQ ID NO: 2637176 - RNA, 19 nt, Homo sapiens
  misc_RNA (1)...(19): siRNA sense strand
ggaagguaggucauggaga

SEQ ID NO: 2637177 - RNA, 19 nt, Homo sapiens
  misc_RNA (1)...(19): siRNA sense strand
gcagcaagcaucagcggga

SEQ ID NO: 2637178 - RNA, 19 nt, Homo sapiens
  misc_RNA (1)...(19): siRNA sense strand
caggacuucuucugggaau

SEQ ID NO: 2637179 - RNA, 19 nt, Homo sapiens
  misc_RNA (1)...(19): siRNA sense strand
ucuggaugauucaggaaga

SEQ ID NO: 2637180 - RNA, 19 nt, Homo sapiens
  misc_RNA (1)...(19): siRNA sense strand
agagccagcaugagaucaa

SEQ ID NO: 2637181 - RNA, 19 nt, Homo sapiens
  misc_RNA (1)...(19): siRNA sense strand
ugauggaaagagaguucaa

SEQ ID NO: 2637182 - RNA, 19 nt, Homo sapiens
  misc_RNA (1)...(19): siRNA sense strand
aggacauggaagagcggau

SEQ ID NO: 2637183 - RNA, 19 nt, Homo sapiens
  misc_RNA (1)...(19): siRNA sense strand
agacgaugcgcaaggcaga

SEQ ID NO: 2637184 - RNA, 19 nt, Homo sapiens
  misc_RNA (1)...(19): siRNA sense strand
gagucgggauggagccaca

SEQ ID NO: 2637185 - RNA, 19 nt, Homo sapiens
  misc_RNA (1)...(19): siRNA sense strand
gggagaucggcaucagcaa

SEQ ID NO: 2637186 - RNA, 19 nt, Homo sapiens
  misc_RNA (1)...(19): siRNA sense strand
uucuagagcgggaggaaga

SEQ ID NO: 2637187 - RNA, 19 nt, Homo sapiens
  misc_RNA (1)...(19): siRNA sense strand
cuguuugggaagaaggaga

SEQ ID NO: 2637188 - RNA, 19 nt, Homo sapiens
  misc_RNA (1)...(19): siRNA sense strand
gggaaugaauggcuaccca

SEQ ID NO: 2637189 - RNA, 19 nt, Homo sapiens
  misc_RNA (1)...(19): siRNA sense strand
gcacagaccggaagcugga

SEQ ID NO: 2637190 - RNA, 19 nt, Homo sapiens
  misc_RNA (1)...(19): siRNA sense strand
gaucaugccugaagcugca

SEQ ID NO: 2637191 - RNA, 19 nt, Homo sapiens
  misc_RNA (1)...(19): siRNA sense strand
ggauuacuacacuggagaa

SEQ ID NO: 2637192 - RNA, 19 nt, Homo sapiens
  misc_RNA (1)...(19): siRNA sense strand
agaagaacacguugaucca

SEQ ID NO: 2637193 - RNA, 19 nt, Homo sapiens
  misc_RNA (1)...(19): siRNA sense strand
uggugaacaugcuggacga

SEQ ID NO: 2637194 - RNA, 19 nt, Homo sapiens
  misc_RNA (1)...(19): siRNA sense strand
cggaaggagcuggagaaga

SEQ ID NO: 2637195 - RNA, 19 nt, Homo sapiens
  misc_RNA (1)...(19): siRNA sense strand
ccagugagguggaggugcu

SEQ ID NO: 2637196 - RNA, 19 nt, Homo sapiens
  misc_RNA (1)...(19): siRNA sense strand
gauaaagccaccauaaaau

SEQ ID NO: 2637197 - RNA, 19 nt, Homo sapiens
  misc_RNA (1)...(19): siRNA sense strand
ugaaagcagaacggaauaa

SEQ ID NO: 2637198 - RNA, 19 nt, Homo sapiens
  misc_RNA (1)...(19): siRNA sense strand
gugagguggaggugcugaa

SEQ ID NO: 2637199 - RNA, 19 nt, Homo sapiens
  misc_RNA (1)...(19): siRNA sense strand
gggccaacgucaagagugg

SEQ ID NO: 2637200 - RNA, 19 nt, Homo sapiens
  misc_RNA (1)...(19): siRNA sense strand
gcuaaaggauucagagauu

SEQ ID NO: 2637201 - RNA, 19 nt, Homo sapiens
  misc_RNA (1)...(19): siRNA sense strand
cagcagauuaccagauuaa

SEQ ID NO: 2637202 - RNA, 19 nt, Homo sapiens
  misc_RNA (1)...(19): siRNA sense strand
cagcaguacuacauagcaa

SEQ ID NO: 2637203 - RNA, 19 nt, Homo sapiens
  misc_RNA (1)...(19): siRNA sense strand
aaacagaacuggacuugaa

SEQ ID NO: 2637204 - RNA, 19 nt, Homo sapiens
  misc_RNA (1)...(19): siRNA sense strand
cagcaagccucaaagaaga

SEQ ID NO: 2637205 - RNA, 19 nt, Homo sapiens
  misc_RNA (1)...(19): siRNA sense strand
gacagaugccauugaauua

SEQ ID NO: 2637206 - RNA, 19 nt, Homo sapiens
  misc_RNA (1)...(19): siRNA sense strand
acaaugaguuggaugauca

SEQ ID NO: 2637207 - RNA, 19 nt, Homo sapiens
  misc_RNA (1)...(19): siRNA sense strand
ugagacagguggucaguuu

SEQ ID NO: 2637208 - RNA, 19 nt, Homo sapiens
  misc_RNA (1)...(19): siRNA sense strand
agacagaugccauugaauu

SEQ ID NO: 2637209 - RNA, 19 nt, Homo sapiens
  misc_RNA (1)...(19): siRNA sense strand
acagcaagauggaagccua

SEQ ID NO: 2637210 - RNA, 19 nt, Homo sapiens
  misc_RNA (1)...(19): siRNA sense strand
gagaaacagaacuggacuu

SEQ ID NO: 2637211 - RNA, 19 nt, Homo sapiens
  misc_RNA (1)...(19): siRNA sense strand
gcagauuaccagauuaaaa

SEQ ID NO: 2637212 - RNA, 19 nt, Homo sapiens
  misc_RNA (1)...(19): siRNA sense strand
ucucaaggauacacaguga

SEQ ID NO: 2637213 - RNA, 19 nt, Homo sapiens
  misc_RNA (1)...(19): siRNA sense strand
aaggauacacagugaauca

SEQ ID NO: 2637214 - RNA, 19 nt, Homo sapiens
  misc_RNA (1)...(19): siRNA sense strand
ccaugauauuggaacugaa

SEQ ID NO: 2637215 - RNA, 19 nt, Homo sapiens
  misc_RNA (1)...(19): siRNA sense strand
ccgaaacccuuuugcuaaa

SEQ ID NO: 2637216 - RNA, 19 nt, Homo sapiens
  misc_RNA (1)...(19): siRNA sense strand
gaacuggacuugaagccau

SEQ ID NO: 2637217 - RNA, 19 nt, Homo sapiens
  misc_RNA (1)...(19): siRNA sense strand
cccaauaaccaacaggcaa

SEQ ID NO: 2637218 - RNA, 19 nt, Homo sapiens
  misc_RNA (1)...(19): siRNA sense strand
ccucagagacagaugccau

SEQ ID NO: 2637219 - RNA, 19 nt, Homo sapiens
  misc_RNA (1)...(19): siRNA sense strand
gcaaagacuucagcaguga

SEQ ID NO: 2637220 - RNA, 19 nt, Homo sapiens
  misc_RNA (1)...(19): siRNA sense strand
gagagaagagucuggcuca

SEQ ID NO: 2637221 - RNA, 19 nt, Homo sapiens
  misc_RNA (1)...(19): siRNA sense strand
guuggaugaucaaggacau

SEQ ID NO: 2637222 - RNA, 19 nt, Homo sapiens
  misc_RNA (1)...(19): siRNA sense strand
ggacaauaaaagauacaga

SEQ ID NO: 2637223 - RNA, 19 nt, Homo sapiens
  misc_RNA (1)...(19): siRNA sense strand
caugauauuggaacugaaa

SEQ ID NO: 2637224 - RNA, 19 nt, Homo sapiens
  misc_RNA (1)...(19): siRNA sense strand
ggaacgaagaggcagcaca

SEQ ID NO: 2637225 - RNA, 19 nt, Homo sapiens
  misc_RNA (1)...(19): siRNA sense strand
gccucgaguucaugugauu

SEQ ID NO: 2637226 - RNA, 19 nt, Homo sapiens
  misc_RNA (1)...(19): siRNA sense strand
ucaaggauacacagugaau

SEQ ID NO: 2637227 - RNA, 19 nt, Homo sapiens
  misc_RNA (1)...(19): siRNA sense strand
uggaggagauucaggugga

SEQ ID NO: 2637228 - RNA, 19 nt, Homo sapiens
  misc_RNA (1)...(19): siRNA sense strand
cuuccauggaggagauuca

SEQ ID NO: 2637229 - RNA, 19 nt, Homo sapiens
  misc_RNA (1)...(19): siRNA sense strand
cgucagggauggagcacag

SEQ ID NO: 2637230 - RNA, 19 nt, Homo sapiens
  misc_RNA (1)...(19): siRNA sense strand
ccaauaaccaacaggcaac

SEQ ID NO: 2637231 - RNA, 19 nt, Homo sapiens
  misc_RNA (1)...(19): siRNA sense strand
cauugaauuauacgagaga

SEQ ID NO: 2637232 - RNA, 19 nt, Homo sapiens
  misc_RNA (1)...(19): siRNA sense strand
uugaauuauacgagagaag

SEQ ID NO: 2637233 - RNA, 19 nt, Homo sapiens
  misc_RNA (1)...(19): siRNA sense strand
cggaacaacagcuggguga

SEQ ID NO: 2637234 - RNA, 19 nt, Homo sapiens
  misc_RNA (1)...(19): siRNA sense strand
agaggaagacagaggcaau

SEQ ID NO: 2637235 - RNA, 19 nt, Homo sapiens
  misc_RNA (1)...(19): siRNA sense strand
aggacacagugcagguuaa

SEQ ID NO: 2637236 - RNA, 19 nt, Homo sapiens
  misc_RNA (1)...(19): siRNA sense strand
ugucuguggcugaaggaaa

SEQ ID NO: 2637237 - RNA, 19 nt, Homo sapiens
  misc_RNA (1)...(19): siRNA sense strand
cguccagccuucagaccaa

SEQ ID NO: 2637238 - RNA, 19 nt, Homo sapiens
  misc_RNA (1)...(19): siRNA sense strand
cgggauguuagcaaagaaa

SEQ ID NO: 2637239 - RNA, 19 nt, Homo sapiens
  misc_RNA (1)...(19): siRNA sense strand
aagaaaaggccguggaagu

SEQ ID NO: 2637240 - RNA, 19 nt, Homo sapiens
  misc_RNA (1)...(19): siRNA sense strand
agaaggaggcagagaucca

SEQ ID NO: 2637241 - RNA, 19 nt, Homo sapiens
  misc_RNA (1)...(19): siRNA sense strand
ggacaaggcuccugugcuc

SEQ ID NO: 2637242 - RNA, 19 nt, Homo sapiens
  misc_RNA (1)...(19): siRNA sense strand
gcuccgaggaccaggacuu

SEQ ID NO: 2637243 - RNA, 19 nt, Homo sapiens
  misc_RNA (1)...(19): siRNA sense strand
guuguaagaaggagguuca

SEQ ID NO: 2637244 - RNA, 19 nt, Homo sapiens
  misc_RNA (1)...(19): siRNA sense strand
augccacuguccagggaaa

SEQ ID NO: 2637245 - RNA, 19 nt, Homo sapiens
  misc_RNA (1)...(19): siRNA sense strand
agguuaaagugcuggccga

SEQ ID NO: 2637246 - RNA, 19 nt, Homo sapiens
  misc_RNA (1)...(19): siRNA sense strand
ugaagauggaugugcugaa

SEQ ID NO: 2637247 - RNA, 19 nt, Homo sapiens
  misc_RNA (1)...(19): siRNA sense strand
ugucgauggagauggacua

SEQ ID NO: 2637248 - RNA, 19 nt, Homo sapiens
  misc_RNA (1)...(19): siRNA sense strand
gcaaagaaaacucuggcua

SEQ ID NO: 2637249 - RNA, 19 nt, Homo sapiens
  misc_RNA (1)...(19): siRNA sense strand
uggcaggaaauccaagaaa

SEQ ID NO: 2637250 - RNA, 19 nt, Homo sapiens
  misc_RNA (1)...(19): siRNA sense strand
cugagaagccugucggcga

SEQ ID NO: 2637251 - RNA, 19 nt, Homo sapiens
  misc_RNA (1)...(19): siRNA sense strand
agaaggagguucaggagac

SEQ ID NO: 2637252 - RNA, 19 nt, Homo sapiens
  misc_RNA (1)...(19): siRNA sense strand
ucgugguacuacaggauga

SEQ ID NO: 2637253 - RNA, 19 nt, Homo sapiens
  misc_RNA (1)...(19): siRNA sense strand
gcuaaaauauggagagagg

SEQ ID NO: 2637254 - RNA, 19 nt, Homo sapiens
  misc_RNA (1)...(19): siRNA sense strand
aaauauggagagaggagca

SEQ ID NO: 2637255 - RNA, 19 nt, Homo sapiens
  misc_RNA (1)...(19): siRNA sense strand
cuggagaauuggacagaug

SEQ ID NO: 2637256 - RNA, 19 nt, Homo sapiens
  misc_RNA (1)...(19): siRNA sense strand
ucuaaggaacauacagaca

SEQ ID NO: 2637257 - RNA, 19 nt, Homo sapiens
  misc_RNA (1)...(19): siRNA sense strand
auuccgugcuuguggugaa

SEQ ID NO: 2637258 - RNA, 19 nt, Homo sapiens
  misc_RNA (1)...(19): siRNA sense strand
agaaugugucuguggcuga

SEQ ID NO: 2637259 - RNA, 19 nt, Homo sapiens
  misc_RNA (1)...(19): siRNA sense strand
aggcucaugucgauggaga

SEQ ID NO: 2637260 - RNA, 19 nt, Homo sapiens
  misc_RNA (1)...(19): siRNA sense strand
guaagaaggagguucagga

SEQ ID NO: 2637261 - RNA, 19 nt, Homo sapiens
  misc_RNA (1)...(19): siRNA sense strand
gggacuggacgcuaaaaua

SEQ ID NO: 2637262 - RNA, 19 nt, Homo sapiens
  misc_RNA (1)...(19): siRNA sense strand
gugcaaagaaagagaugaa

SEQ ID NO: 2637263 - RNA, 19 nt, Homo sapiens
  misc_RNA (1)...(19): siRNA sense strand
ggaaaacagugcaaagaaa

SEQ ID NO: 2637264 - RNA, 19 nt, Homo sapiens
  misc_RNA (1)...(19): siRNA sense strand
gcaaagaaagagaugaaau

SEQ ID NO: 2637265 - RNA, 19 nt, Homo sapiens
  misc_RNA (1)...(19): siRNA sense strand
ugugaaagcucuuagcaaa

SEQ ID NO: 2637266 - RNA, 19 nt, Homo sapiens
  misc_RNA (1)...(19): siRNA sense strand
gcgaggaccuggagugcua

SEQ ID NO: 2637267 - RNA, 19 nt, Homo sapiens
  misc_RNA (1)...(19): siRNA sense strand
gcugaaacgagaagaggaa

SEQ ID NO: 2637268 - RNA, 19 nt, Homo sapiens
  misc_RNA (1)...(19): siRNA sense strand
caucaaaggcugcaaaaua

SEQ ID NO: 2637269 - RNA, 19 nt, Homo sapiens
  misc_RNA (1)...(19): siRNA sense strand
acgagaagaggaagugaaa

SEQ ID NO: 2637270 - RNA, 19 nt, Homo sapiens
  misc_RNA (1)...(19): siRNA sense strand
gagcagagcaggagcagga

SEQ ID NO: 2637271 - RNA, 19 nt, Homo sapiens
  misc_RNA (1)...(19): siRNA sense strand
gggacugccugaagugcaa

SEQ ID NO: 2637272 - RNA, 19 nt, Homo sapiens
  misc_RNA (1)...(19): siRNA sense strand
caucgagagucuugaggau

SEQ ID NO: 2637273 - RNA, 19 nt, Homo sapiens
  misc_RNA (1)...(19): siRNA sense strand
ggagaugacucuuucaaca

SEQ ID NO: 2637274 - RNA, 19 nt, Homo sapiens
  misc_RNA (1)...(19): siRNA sense strand
gggaugaugaggugugaga

SEQ ID NO: 2637275 - RNA, 19 nt, Homo sapiens
  misc_RNA (1)...(19): siRNA sense strand
gugaaagcucuuagcaaaa

SEQ ID NO: 2637276 - RNA, 19 nt, Homo sapiens
  misc_RNA (1)...(19): siRNA sense strand
ucgagagucuugaggauga

SEQ ID NO: 2637277 - RNA, 19 nt, Homo sapiens
  misc_RNA (1)...(19): siRNA sense strand
gcgaaguacgaguggcuga

SEQ ID NO: 2637278 - RNA, 19 nt, Homo sapiens
  misc_RNA (1)...(19): siRNA sense strand
gcacgcagcugcagaacca

SEQ ID NO: 2637279 - RNA, 19 nt, Homo sapiens
  misc_RNA (1)...(19): siRNA sense strand
gugugaaagcucuuagcaa

SEQ ID NO: 2637280 - RNA, 19 nt, Homo sapiens
  misc_RNA (1)...(19): siRNA sense strand
agucugauaaggaagauaa

SEQ ID NO: 2637281 - RNA, 19 nt, Homo sapiens
  misc_RNA (1)...(19): siRNA sense strand
agcaggagcaggacggaaa

SEQ ID NO: 2637282 - RNA, 19 nt, Homo sapiens
  misc_RNA (1)...(19): siRNA sense strand
agaugagccuggaugagaa

SEQ ID NO: 2637283 - RNA, 19 nt, Homo sapiens
  misc_RNA (1)...(19): siRNA sense strand
gauggagaagagcgggaaa

SEQ ID NO: 2637284 - RNA, 19 nt, Homo sapiens
  misc_RNA (1)...(19): siRNA sense strand
acaaggagcucaccgacaa

SEQ ID NO: 2637285 - RNA, 19 nt, Homo sapiens
  misc_RNA (1)...(19): siRNA sense strand
caaacacauuccauacaaa

SEQ ID NO: 2637286 - RNA, 19 nt, Homo sapiens
  misc_RNA (1)...(19): siRNA sense strand
cagcuuuccuuucgaagaa

SEQ ID NO: 2637287 - RNA, 19 nt, Homo sapiens
  misc_RNA (1)...(19): siRNA sense strand
aaauauccacagugagcaa

SEQ ID NO: 2637288 - RNA, 19 nt, Homo sapiens
  misc_RNA (1)...(19): siRNA sense strand
uaaacgaacgcaaggaaaa

SEQ ID NO: 2637289 - RNA, 19 nt, Homo sapiens
  misc_RNA (1)...(19): siRNA sense strand
cgaagaugagccuggauga

SEQ ID NO: 2637290 - RNA, 19 nt, Homo sapiens
  misc_RNA (1)...(19): siRNA sense strand
gagaugacucuuucaacaa

SEQ ID NO: 2637291 - RNA, 19 nt, Homo sapiens
  misc_RNA (1)...(19): siRNA sense strand
auaaacgaacgcaaggaaa

SEQ ID NO: 2637292 - RNA, 19 nt, Homo sapiens
  misc_RNA (1)...(19): siRNA sense strand
uuccauacaaagagagcaa

SEQ ID NO: 2637293 - RNA, 19 nt, Homo sapiens
  misc_RNA (1)...(19): siRNA sense strand
ggaagaagcagaucaccuu

SEQ ID NO: 2637294 - RNA, 19 nt, Homo sapiens
  misc_RNA (1)...(19): siRNA sense strand
cagauugcaucgagagucu

SEQ ID NO: 2637295 - RNA, 19 nt, Homo sapiens
  misc_RNA (1)...(19): siRNA sense strand
gcucgagauacuucagaau

SEQ ID NO: 2637296 - RNA, 19 nt, Homo sapiens
  misc_RNA (1)...(19): siRNA sense strand
gaauccagcucuuucuuaa

SEQ ID NO: 2637297 - RNA, 19 nt, Homo sapiens
  misc_RNA (1)...(19): siRNA sense strand
uguccaagaccucggagua

SEQ ID NO: 2637298 - RNA, 19 nt, Homo sapiens
  misc_RNA (1)...(19): siRNA sense strand
agaccaauaucacaguuua

SEQ ID NO: 2637299 - RNA, 19 nt, Homo sapiens
  misc_RNA (1)...(19): siRNA sense strand
ucaacaaggugaaggacac

SEQ ID NO: 2637300 - RNA, 19 nt, Homo sapiens
  misc_RNA (1)...(19): siRNA sense strand
gcagcaaacacauuccaua

SEQ ID NO: 2637301 - RNA, 19 nt, Homo sapiens
  misc_RNA (1)...(19): siRNA sense strand
gcuguggugugcagagaga

SEQ ID NO: 2637302 - RNA, 19 nt, Homo sapiens
  misc_RNA (1)...(19): siRNA sense strand
agcugaagauucuggaaca

SEQ ID NO: 2637303 - RNA, 19 nt, Homo sapiens
  misc_RNA (1)...(19): siRNA sense strand
uggaguaccuggaggcacu

SEQ ID NO: 2637304 - RNA, 19 nt, Homo sapiens
  misc_RNA (1)...(19): siRNA sense strand
gaugaugaggugugagacu

SEQ ID NO: 2637305 - RNA, 19 nt, Homo sapiens
  misc_RNA (1)...(19): siRNA sense strand
gcaaccagcuucaguggga

SEQ ID NO: 2637306 - RNA, 19 nt, Homo sapiens
  misc_RNA (1)...(19): siRNA sense strand
cauaaacgaacgcaaggaa

SEQ ID NO: 2637307 - RNA, 19 nt, Homo sapiens
  misc_RNA (1)...(19): siRNA sense strand
gcaaacacauuccauacaa

SEQ ID NO: 2637308 - RNA, 19 nt, Homo sapiens
  misc_RNA (1)...(19): siRNA sense strand
ggaaaauccuacaccauga

SEQ ID NO: 2637309 - RNA, 19 nt, Homo sapiens
  misc_RNA (1)...(19): siRNA sense strand
ccaccaugaucgcgcacau

SEQ ID NO: 2637310 - RNA, 19 nt, Homo sapiens
  misc_RNA (1)...(19): siRNA sense strand
ccaagaccucggaguacaa

SEQ ID NO: 2637311 - RNA, 19 nt, Homo sapiens
  misc_RNA (1)...(19): siRNA sense strand
ggugagcagucgugccaca

SEQ ID NO: 2637312 - RNA, 19 nt, Homo sapiens
  misc_RNA (1)...(19): siRNA sense strand
agagagaagcccaaggcca

SEQ ID NO: 2637313 - RNA, 19 nt, Homo sapiens
  misc_RNA (1)...(19): siRNA sense strand
ugaaacgagaagaggaagu

SEQ ID NO: 2637314 - RNA, 19 nt, Homo sapiens
  misc_RNA (1)...(19): siRNA sense strand
aggagaggcuggacugcau

SEQ ID NO: 2637315 - RNA, 19 nt, Homo sapiens
  misc_RNA (1)...(19): siRNA sense strand
ccuacaccaugaucggaaa

SEQ ID NO: 2637316 - RNA, 19 nt, Homo sapiens
  misc_RNA (1)...(19): siRNA sense strand
cggaaacuccugucgauga

SEQ ID NO: 2637317 - RNA, 19 nt, Homo sapiens
  misc_RNA (1)...(19): siRNA sense strand
ccacggaagaagcagauca

SEQ ID NO: 2637318 - RNA, 19 nt, Homo sapiens
  misc_RNA (1)...(19): siRNA sense strand
caacagagaaggcccugaa

SEQ ID NO: 2637319 - RNA, 19 nt, Homo sapiens
  misc_RNA (1)...(19): siRNA sense strand
ccacagugagcaaggccau

SEQ ID NO: 2637320 - RNA, 19 nt, Homo sapiens
  misc_RNA (1)...(19): siRNA sense strand
ggucaaaaugccuuccaaa

SEQ ID NO: 2637321 - RNA, 19 nt, Homo sapiens
  misc_RNA (1)...(19): siRNA sense strand
ggaaacuccugucgaugau

SEQ ID NO: 2637322 - RNA, 19 nt, Homo sapiens
  misc_RNA (1)...(19): siRNA sense strand
ggagacaggcucagcagca

SEQ ID NO: 2637323 - RNA, 19 nt, Homo sapiens
  misc_RNA (1)...(19): siRNA sense strand
cggacagccucuccuauua

SEQ ID NO: 2637324 - RNA, 19 nt, Homo sapiens
  misc_RNA (1)...(19): siRNA sense strand
cggaagaagcagaucaccu

SEQ ID NO: 2637325 - RNA, 19 nt, Homo sapiens
  misc_RNA (1)...(19): siRNA sense strand
ccaugaucggaaaggauga

SEQ ID NO: 2637326 - RNA, 19 nt, Homo sapiens
  misc_RNA (1)...(19): siRNA sense strand
gggaacaugaacugccgua

SEQ ID NO: 2637327 - RNA, 19 nt, Homo sapiens
  misc_RNA (1)...(19): siRNA sense strand
gugaauuugacuuggagca

SEQ ID NO: 2637328 - RNA, 19 nt, Homo sapiens
  misc_RNA (1)...(19): siRNA sense strand
gggcugucaacaaggugaa

SEQ ID NO: 2637329 - RNA, 19 nt, Homo sapiens
  misc_RNA (1)...(19): siRNA sense strand
cggauggagaagagcggga

SEQ ID NO: 2637330 - RNA, 19 nt, Homo sapiens
  misc_RNA (1)...(19): siRNA sense strand
aaaucgagaaggaggcuca

SEQ ID NO: 2637331 - RNA, 19 nt, Homo sapiens
  misc_RNA (1)...(19): siRNA sense strand
aggaugauuccaugcagaa

SEQ ID NO: 2637332 - RNA, 19 nt, Homo sapiens
  misc_RNA (1)...(19): siRNA sense strand
aagaagaaacaucggccuu

SEQ ID NO: 2637333 - RNA, 19 nt, Homo sapiens
  misc_RNA (1)...(19): siRNA sense strand
cuucaagcucauaaacgaa

SEQ ID NO: 2637334 - RNA, 19 nt, Homo sapiens
  misc_RNA (1)...(19): siRNA sense strand
ucucggcagcugugugaaa

SEQ ID NO: 2637335 - RNA, 19 nt, Homo sapiens
  misc_RNA (1)...(19): siRNA sense strand
gcagccggcaagucagaaa

SEQ ID NO: 2637336 - RNA, 19 nt, Homo sapiens
  misc_RNA (1)...(19): siRNA sense strand
agaccagagcagagcagga

SEQ ID NO: 2637337 - RNA, 19 nt, Homo sapiens
  misc_RNA (1)...(19): siRNA sense strand
gcaagaaggcgcuaggcaa

SEQ ID NO: 2637338 - RNA, 19 nt, Homo sapiens
  misc_RNA (1)...(19): siRNA sense strand
uguaaaggagagaaagaaa

SEQ ID NO: 2637339 - RNA, 19 nt, Homo sapiens
  misc_RNA (1)...(19): siRNA sense strand
acaugaagucugagggaca

SEQ ID NO: 2637340 - RNA, 19 nt, Homo sapiens
  misc_RNA (1)...(19): siRNA sense strand
gauuaaaguccccgagaua

SEQ ID NO: 2637341 - RNA, 19 nt, Homo sapiens
  misc_RNA (1)...(19): siRNA sense strand
aaacagaggaugauggaga

SEQ ID NO: 2637342 - RNA, 19 nt, Homo sapiens
  misc_RNA (1)...(19): siRNA sense strand
cugcuguaaaggagagaaa

SEQ ID NO: 2637343 - RNA, 19 nt, Homo sapiens
  misc_RNA (1)...(19): siRNA sense strand
gcuguaaaggagagaaaga

SEQ ID NO: 2637344 - RNA, 19 nt, Homo sapiens
  misc_RNA (1)...(19): siRNA sense strand
ugaaguugaagcagggaaa

SEQ ID NO: 2637345 - RNA, 19 nt, Homo sapiens
  misc_RNA (1)...(19): siRNA sense strand
cgggcaagaagaagagcaa

SEQ ID NO: 2637346 - RNA, 19 nt, Homo sapiens
  misc_RNA (1)...(19): siRNA sense strand
ggacaaagggaguaggaag

SEQ ID NO: 2637347 - RNA, 19 nt, Homo sapiens
  misc_RNA (1)...(19): siRNA sense strand
agaaauugugugagacauu

SEQ ID NO: 2637348 - RNA, 19 nt, Homo sapiens
  misc_RNA (1)...(19): siRNA sense strand
accaagaggcagaggaaaa

SEQ ID NO: 2637349 - RNA, 19 nt, Homo sapiens
  misc_RNA (1)...(19): siRNA sense strand
gcuugagaauggagugaca

SEQ ID NO: 2637350 - RNA, 19 nt, Homo sapiens
  misc_RNA (1)...(19): siRNA sense strand
gaucacaagcaguuggaau

SEQ ID NO: 2637351 - RNA, 19 nt, Homo sapiens
  misc_RNA (1)...(19): siRNA sense strand
ccacacacucauuggacua

SEQ ID NO: 2637352 - RNA, 19 nt, Homo sapiens
  misc_RNA (1)...(19): siRNA sense strand
gggcgaacgcuguuggaga

SEQ ID NO: 2637353 - RNA, 19 nt, Homo sapiens
  misc_RNA (1)...(19): siRNA sense strand
ugaccaagaggcagaggaa

SEQ ID NO: 2637354 - RNA, 19 nt, Homo sapiens
  misc_RNA (1)...(19): siRNA sense strand
ucuggaagaaagagaacaa

SEQ ID NO: 2637355 - RNA, 19 nt, Homo sapiens
  misc_RNA (1)...(19): siRNA sense strand
acagaaauugugugagaca

SEQ ID NO: 2637356 - RNA, 19 nt, Homo sapiens
  misc_RNA (1)...(19): siRNA sense strand
uagcugaacuagagaggca

SEQ ID NO: 2637357 - RNA, 19 nt, Homo sapiens
  misc_RNA (1)...(19): siRNA sense strand
aggaaaacauggaacaauu

SEQ ID NO: 2637358 - RNA, 19 nt, Homo sapiens
  misc_RNA (1)...(19): siRNA sense strand
ggcaagaagaagagcaagu

SEQ ID NO: 2637359 - RNA, 19 nt, Homo sapiens
  misc_RNA (1)...(19): siRNA sense strand
ggaaauaagacucgaggac

SEQ ID NO: 2637360 - RNA, 19 nt, Homo sapiens
  misc_RNA (1)...(19): siRNA sense strand
aggaaguuguugacaugaa

SEQ ID NO: 2637361 - RNA, 19 nt, Homo sapiens
  misc_RNA (1)...(19): siRNA sense strand
acacggaugaggaggguga

SEQ ID NO: 2637362 - RNA, 19 nt, Homo sapiens
  misc_RNA (1)...(19): siRNA sense strand
aucacaagcaguuggaaua

SEQ ID NO: 2637363 - RNA, 19 nt, Homo sapiens
  misc_RNA (1)...(19): siRNA sense strand
aaauaagacucgaggacag

SEQ ID NO: 2637364 - RNA, 19 nt, Homo sapiens
  misc_RNA (1)...(19): siRNA sense strand
ugaugaggaugcuggaaaa

SEQ ID NO: 2637365 - RNA, 19 nt, Homo sapiens
  misc_RNA (1)...(19): siRNA sense strand
cuucuacaagagagaguaa

SEQ ID NO: 2637366 - RNA, 19 nt, Homo sapiens
  misc_RNA (1)...(19): siRNA sense strand
cuguugugaacuuggauaa

SEQ ID NO: 2637367 - RNA, 19 nt, Homo sapiens
  misc_RNA (1)...(19): siRNA sense strand
augcugaaacagaggauga

SEQ ID NO: 2637368 - RNA, 19 nt, Homo sapiens
  misc_RNA (1)...(19): siRNA sense strand
ugaaagaugucaagagcag

SEQ ID NO: 2637369 - RNA, 19 nt, Homo sapiens
  misc_RNA (1)...(19): siRNA sense strand
aagaaagacuugaaagccu

SEQ ID NO: 2637370 - RNA, 19 nt, Homo sapiens
  misc_RNA (1)...(19): siRNA sense strand
gggagucgggcaagaagaa

SEQ ID NO: 2637371 - RNA, 19 nt, Homo sapiens
  misc_RNA (1)...(19): siRNA sense strand
augccaagucucuggacaa

SEQ ID NO: 2637372 - RNA, 19 nt, Homo sapiens
  misc_RNA (1)...(19): siRNA sense strand
cuuuaugaacugucacuaa

SEQ ID NO: 2637373 - RNA, 19 nt, Homo sapiens
  misc_RNA (1)...(19): siRNA sense strand
gguuagaagaaaaggaagu

SEQ ID NO: 2637374 - RNA, 19 nt, Homo sapiens
  misc_RNA (1)...(19): siRNA sense strand
ugacaauagcagaagccuu

SEQ ID NO: 2637375 - RNA, 19 nt, Homo sapiens
  misc_RNA (1)...(19): siRNA sense strand
agugauugcuucagggaac

SEQ ID NO: 2637376 - RNA, 19 nt, Homo sapiens
  misc_RNA (1)...(19): siRNA sense strand
ccauagauugucaugaauu

SEQ ID NO: 2637377 - RNA, 19 nt, Homo sapiens
  misc_RNA (1)...(19): siRNA sense strand
aaggagagaaagaaaccua

SEQ ID NO: 2637378 - RNA, 19 nt, Homo sapiens
  misc_RNA (1)...(19): siRNA sense strand
acucuggaauuaaagcaaa

SEQ ID NO: 2637379 - RNA, 19 nt, Homo sapiens
  misc_RNA (1)...(19): siRNA sense strand
agaggaugauggagaaucu

SEQ ID NO: 2637380 - RNA, 19 nt, Homo sapiens
  misc_RNA (1)...(19): siRNA sense strand
gcaaggacagccuggguca

SEQ ID NO: 2637381 - RNA, 19 nt, Homo sapiens
  misc_RNA (1)...(19): siRNA sense strand
uggauaauucugugguuga

SEQ ID NO: 2637382 - RNA, 19 nt, Homo sapiens
  misc_RNA (1)...(19): siRNA sense strand
aggcagauggcuuuggauu

SEQ ID NO: 2637383 - RNA, 19 nt, Homo sapiens
  misc_RNA (1)...(19): siRNA sense strand
uugaugaggaugcuggaaa

SEQ ID NO: 2637384 - RNA, 19 nt, Homo sapiens
  misc_RNA (1)...(19): siRNA sense strand
gaaucaggacaaagggagu

SEQ ID NO: 2637385 - RNA, 19 nt, Homo sapiens
  misc_RNA (1)...(19): siRNA sense strand
ggaggaugcuuuugaggau

SEQ ID NO: 2637386 - RNA, 19 nt, Homo sapiens
  misc_RNA (1)...(19): siRNA sense strand
gaauaucaguccagcucga

SEQ ID NO: 2637387 - RNA, 19 nt, Homo sapiens
  misc_RNA (1)...(19): siRNA sense strand
agggaugaaucaggacaaa

SEQ ID NO: 2637388 - RNA, 19 nt, Homo sapiens
  misc_RNA (1)...(19): siRNA sense strand
aaauugaccaagaggcaga

SEQ ID NO: 2637389 - RNA, 19 nt, Homo sapiens
  misc_RNA (1)...(19): siRNA sense strand
gaaaauucacugacagaga

SEQ ID NO: 2637390 - RNA, 19 nt, Homo sapiens
  misc_RNA (1)...(19): siRNA sense strand
ucuacaagagagaguaaaa

SEQ ID NO: 2637391 - RNA, 19 nt, Homo sapiens
  misc_RNA (1)...(19): siRNA sense strand
gaguaaaagaagccgaaga

SEQ ID NO: 2637392 - RNA, 19 nt, Homo sapiens
  misc_RNA (1)...(19): siRNA sense strand
aaucagagccccaggauca

SEQ ID NO: 2637393 - RNA, 19 nt, Homo sapiens
  misc_RNA (1)...(19): siRNA sense strand
gcuucagggaaccguguaa

SEQ ID NO: 2637394 - RNA, 19 nt, Homo sapiens
  misc_RNA (1)...(19): siRNA sense strand
ugaaaguggaccucagaca

SEQ ID NO: 2637395 - RNA, 19 nt, Homo sapiens
  misc_RNA (1)...(19): siRNA sense strand
uggcuuuggauuagacauu

SEQ ID NO: 2637396 - RNA, 19 nt, Homo sapiens
  misc_RNA (1)...(19): siRNA sense strand
aagacaugacucuggaauu

SEQ ID NO: 2637397 - RNA, 19 nt, Homo sapiens
  misc_RNA (1)...(19): siRNA sense strand
gagccauuuaauagagcaa

SEQ ID NO: 2637398 - RNA, 19 nt, Homo sapiens
  misc_RNA (1)...(19): siRNA sense strand
gggugaaauaguuaauaca

SEQ ID NO: 2637399 - RNA, 19 nt, Homo sapiens
  misc_RNA (1)...(19): siRNA sense strand
cuugacaccgagagauuaa

SEQ ID NO: 2637400 - RNA, 19 nt, Homo sapiens
  misc_RNA (1)...(19): siRNA sense strand
ccagacaaucauaugaaaa

SEQ ID NO: 2637401 - RNA, 19 nt, Homo sapiens
  misc_RNA (1)...(19): siRNA sense strand
aguuuuaagugcagagcuu

SEQ ID NO: 2637402 - RNA, 19 nt, Homo sapiens
  misc_RNA (1)...(19): siRNA sense strand
aguaauuugcccaagguca

SEQ ID NO: 2637403 - RNA, 19 nt, Homo sapiens
  misc_RNA (1)...(19): siRNA sense strand
gagcgaggacagaggagca

SEQ ID NO: 2637404 - RNA, 19 nt, Homo sapiens
  misc_RNA (1)...(19): siRNA sense strand
cagcaaacccagcagccuu

SEQ ID NO: 2637405 - RNA, 19 nt, Homo sapiens
  misc_RNA (1)...(19): siRNA sense strand
aggaugaagacgaggacaa

SEQ ID NO: 2637406 - RNA, 19 nt, Homo sapiens
  misc_RNA (1)...(19): siRNA sense strand
auggagagcaggaggauau

SEQ ID NO: 2637407 - RNA, 19 nt, Homo sapiens
  misc_RNA (1)...(19): siRNA sense strand
ccaacaaagaugcggagga

SEQ ID NO: 2637408 - RNA, 19 nt, Homo sapiens
  misc_RNA (1)...(19): siRNA sense strand
cauuuaaaucugaaagcga

SEQ ID NO: 2637409 - RNA, 19 nt, Homo sapiens
  misc_RNA (1)...(19): siRNA sense strand
acaacaaccuggugggcgu

SEQ ID NO: 2637410 - RNA, 19 nt, Homo sapiens
  misc_RNA (1)...(19): siRNA sense strand
ucugaaagcgagugcacau

SEQ ID NO: 2637411 - RNA, 19 nt, Homo sapiens
  misc_RNA (1)...(19): siRNA sense strand
gaguguagguucagccugu

SEQ ID NO: 2637412 - RNA, 19 nt, Homo sapiens
  misc_RNA (1)...(19): siRNA sense strand
ggaggauaucccugcguga

SEQ ID NO: 2637413 - RNA, 19 nt, Homo sapiens
  misc_RNA (1)...(19): siRNA sense strand
cggccaagcucguguuccu

SEQ ID NO: 2637414 - RNA, 19 nt, Homo sapiens
  misc_RNA (1)...(19): siRNA sense strand
agagagaaacagagcgaaa

SEQ ID NO: 2637415 - RNA, 19 nt, Homo sapiens
  misc_RNA (1)...(19): siRNA sense strand
aggaagaacggaagagaau

SEQ ID NO: 2637416 - RNA, 19 nt, Homo sapiens
  misc_RNA (1)...(19): siRNA sense strand
ggcuagagcaagaggagaa

SEQ ID NO: 2637417 - RNA, 19 nt, Homo sapiens
  misc_RNA (1)...(19): siRNA sense strand
ccaacaguuaauagagaaa

SEQ ID NO: 2637418 - RNA, 19 nt, Homo sapiens
  misc_RNA (1)...(19): siRNA sense strand
gcuuuagagcucagugaaa

SEQ ID NO: 2637419 - RNA, 19 nt, Homo sapiens
  misc_RNA (1)...(19): siRNA sense strand
caucaugaaguuaaggaaa

SEQ ID NO: 2637420 - RNA, 19 nt, Homo sapiens
  misc_RNA (1)...(19): siRNA sense strand
agaagaaggcuuuggcgaa

SEQ ID NO: 2637421 - RNA, 19 nt, Homo sapiens
  misc_RNA (1)...(19): siRNA sense strand
aggagaggcuagagcaaga

SEQ ID NO: 2637422 - RNA, 19 nt, Homo sapiens
  misc_RNA (1)...(19): siRNA sense strand
uggaauauaaggagcaaau

SEQ ID NO: 2637423 - RNA, 19 nt, Homo sapiens
  misc_RNA (1)...(19): siRNA sense strand
ugcuaaaggaagaguuaaa

SEQ ID NO: 2637424 - RNA, 19 nt, Homo sapiens
  misc_RNA (1)...(19): siRNA sense strand
aggagaagcucaaagccaa

SEQ ID NO: 2637425 - RNA, 19 nt, Homo sapiens
  misc_RNA (1)...(19): siRNA sense strand
aggaagcauuagaggaaga

SEQ ID NO: 2637426 - RNA, 19 nt, Homo sapiens
  misc_RNA (1)...(19): siRNA sense strand
uggagaaagaaaugaagaa

SEQ ID NO: 2637427 - RNA, 19 nt, Homo sapiens
  misc_RNA (1)...(19): siRNA sense strand
caggagaagaacagaguga

SEQ ID NO: 2637428 - RNA, 19 nt, Homo sapiens
  misc_RNA (1)...(19): siRNA sense strand
ggucauucagcgucagaaa

SEQ ID NO: 2637429 - RNA, 19 nt, Homo sapiens
  misc_RNA (1)...(19): siRNA sense strand
ggagaagcucaaagccaaa

SEQ ID NO: 2637430 - RNA, 19 nt, Homo sapiens
  misc_RNA (1)...(19): siRNA sense strand
gaggaagaacggaagagaa

SEQ ID NO: 2637431 - RNA, 19 nt, Homo sapiens
  misc_RNA (1)...(19): siRNA sense strand
gguugaagagacucagaaa

SEQ ID NO: 2637432 - RNA, 19 nt, Homo sapiens
  misc_RNA (1)...(19): siRNA sense strand
gggaaaacagagaggauga

SEQ ID NO: 2637433 - RNA, 19 nt, Homo sapiens
  misc_RNA (1)...(19): siRNA sense strand
cggaagagaaggcggcuuu

SEQ ID NO: 2637434 - RNA, 19 nt, Homo sapiens
  misc_RNA (1)...(19): siRNA sense strand
ccaagcagaaagaggaauu

SEQ ID NO: 2637435 - RNA, 19 nt, Homo sapiens
  misc_RNA (1)...(19): siRNA sense strand
cuggagacauccugagauu

SEQ ID NO: 2637436 - RNA, 19 nt, Homo sapiens
  misc_RNA (1)...(19): siRNA sense strand
caucgaugccaaacagaaa

SEQ ID NO: 2637437 - RNA, 19 nt, Homo sapiens
  misc_RNA (1)...(19): siRNA sense strand
ggaaauugcuucagcugca

SEQ ID NO: 2637438 - RNA, 19 nt, Homo sapiens
  misc_RNA (1)...(19): siRNA sense strand
cagagaggaugaaggccua

SEQ ID NO: 2637439 - RNA, 19 nt, Homo sapiens
  misc_RNA (1)...(19): siRNA sense strand
ggaagauggauguggcuga

SEQ ID NO: 2637440 - RNA, 19 nt, Homo sapiens
  misc_RNA (1)...(19): siRNA sense strand
ccaugaaacugucagaaaa

SEQ ID NO: 2637441 - RNA, 19 nt, Homo sapiens
  misc_RNA (1)...(19): siRNA sense strand
agaaugagggcgagaacuu

SEQ ID NO: 2637442 - RNA, 19 nt, Homo sapiens
  misc_RNA (1)...(19): siRNA sense strand
aagagaagcuucaggagga

SEQ ID NO: 2637443 - RNA, 19 nt, Homo sapiens
  misc_RNA (1)...(19): siRNA sense strand
aggacaaggaugaaauaau

SEQ ID NO: 2637444 - RNA, 19 nt, Homo sapiens
  misc_RNA (1)...(19): siRNA sense strand
uagcaaaggaugagcaagu

SEQ ID NO: 2637445 - RNA, 19 nt, Homo sapiens
  misc_RNA (1)...(19): siRNA sense strand
gccaugaaacugucagaaa

SEQ ID NO: 2637446 - RNA, 19 nt, Homo sapiens
  misc_RNA (1)...(19): siRNA sense strand
aggcagaaugagaaggaga

SEQ ID NO: 2637447 - RNA, 19 nt, Homo sapiens
  misc_RNA (1)...(19): siRNA sense strand
gggaacagagagagcguca

SEQ ID NO: 2637448 - RNA, 19 nt, Homo sapiens
  misc_RNA (1)...(19): siRNA sense strand
cagagaaggagaagcugaa

SEQ ID NO: 2637449 - RNA, 19 nt, Homo sapiens
  misc_RNA (1)...(19): siRNA sense strand
agaaagaucgggagcugaa

SEQ ID NO: 2637450 - RNA, 19 nt, Homo sapiens
  misc_RNA (1)...(19): siRNA sense strand
agauuuauguggaggagga

SEQ ID NO: 2637451 - RNA, 19 nt, Homo sapiens
  misc_RNA (1)...(19): siRNA sense strand
caagacauggagaaagaaa

SEQ ID NO: 2637452 - RNA, 19 nt, Homo sapiens
  misc_RNA (1)...(19): siRNA sense strand
cuuuagaggaagaacggaa

SEQ ID NO: 2637453 - RNA, 19 nt, Homo sapiens
  misc_RNA (1)...(19): siRNA sense strand
cgaagagaaacuccagaaa

SEQ ID NO: 2637454 - RNA, 19 nt, Homo sapiens
  misc_RNA (1)...(19): siRNA sense strand
gaauuaaagaacucgagaa

SEQ ID NO: 2637455 - RNA, 19 nt, Homo sapiens
  misc_RNA (1)...(19): siRNA sense strand
acauuacucaagagagaaa

SEQ ID NO: 2637456 - RNA, 19 nt, Homo sapiens
  misc_RNA (1)...(19): siRNA sense strand
cccaggaacuucagaucaa

SEQ ID NO: 2637457 - RNA, 19 nt, Homo sapiens
  misc_RNA (1)...(19): siRNA sense strand
agucuuuacugcaggaaaa

SEQ ID NO: 2637458 - RNA, 19 nt, Homo sapiens
  misc_RNA (1)...(19): siRNA sense strand
gggcgagaacuuaaagaga

SEQ ID NO: 2637459 - RNA, 19 nt, Homo sapiens
  misc_RNA (1)...(19): siRNA sense strand
acgagaaacgcaaagcaaa

SEQ ID NO: 2637460 - RNA, 19 nt, Homo sapiens
  misc_RNA (1)...(19): siRNA sense strand
cagaaagaggaauuagaau

SEQ ID NO: 2637461 - RNA, 19 nt, Homo sapiens
  misc_RNA (1)...(19): siRNA sense strand
uugcaacauugaaggacaa

SEQ ID NO: 2637462 - RNA, 19 nt, Homo sapiens
  misc_RNA (1)...(19): siRNA sense strand
aaauacuacuggaugcaaa

SEQ ID NO: 2637463 - RNA, 19 nt, Homo sapiens
  misc_RNA (1)...(19): siRNA sense strand
agucagaaggugucagaga

SEQ ID NO: 2637464 - RNA, 19 nt, Homo sapiens
  misc_RNA (1)...(19): siRNA sense strand
agaacaaggacaaggacca

SEQ ID NO: 2637465 - RNA, 19 nt, Homo sapiens
  misc_RNA (1)...(19): siRNA sense strand
caagagagaaacagagcga

SEQ ID NO: 2637466 - RNA, 19 nt, Homo sapiens
  misc_RNA (1)...(19): siRNA sense strand
agaaacagagcgaaagaga

SEQ ID NO: 2637467 - RNA, 19 nt, Homo sapiens
  misc_RNA (1)...(19): siRNA sense strand
aaacagagcgaaagagacu

SEQ ID NO: 2637468 - RNA, 19 nt, Homo sapiens
  misc_RNA (1)...(19): siRNA sense strand
gcaaaggaggccauggaga

SEQ ID NO: 2637469 - RNA, 19 nt, Homo sapiens
  misc_RNA (1)...(19): siRNA sense strand
cagggaagcccaggagaaa

SEQ ID NO: 2637470 - RNA, 19 nt, Homo sapiens
  misc_RNA (1)...(19): siRNA sense strand
gcauuacccaggagaagaa

SEQ ID NO: 2637471 - RNA, 19 nt, Homo sapiens
  misc_RNA (1)...(19): siRNA sense strand
augaagacaucgaugccaa

SEQ ID NO: 2637472 - RNA, 19 nt, Homo sapiens
  misc_RNA (1)...(19): siRNA sense strand
aagcaagguugaagagaag

SEQ ID NO: 2637473 - RNA, 19 nt, Homo sapiens
  misc_RNA (1)...(19): siRNA sense strand
gagcuaaacgagaagcaga

SEQ ID NO: 2637474 - RNA, 19 nt, Homo sapiens
  misc_RNA (1)...(19): siRNA sense strand
ccaaacagaaagagaucca

SEQ ID NO: 2637475 - RNA, 19 nt, Homo sapiens
  misc_RNA (1)...(19): siRNA sense strand
gcagagaaggagaagcuga

SEQ ID NO: 2637476 - RNA, 19 nt, Homo sapiens
  misc_RNA (1)...(19): siRNA sense strand
uggaaacuaccaagacaaa

SEQ ID NO: 2637477 - RNA, 19 nt, Homo sapiens
  misc_RNA (1)...(19): siRNA sense strand
ucauaaagaccaccagaau

SEQ ID NO: 2637478 - RNA, 19 nt, Homo sapiens
  misc_RNA (1)...(19): siRNA sense strand
ggaccaaugccaugaaacu

SEQ ID NO: 2637479 - RNA, 19 nt, Homo sapiens
  misc_RNA (1)...(19): siRNA sense strand
ggccaugguugaagagacu

SEQ ID NO: 2637480 - RNA, 19 nt, Homo sapiens
  misc_RNA (1)...(19): siRNA sense strand
aaaugaucaugguggaaga

SEQ ID NO: 2637481 - RNA, 19 nt, Homo sapiens
  misc_RNA (1)...(19): siRNA sense strand
caggagagggagaagguca

SEQ ID NO: 2637482 - RNA, 19 nt, Homo sapiens
  misc_RNA (1)...(19): siRNA sense strand
agaaagagaagaugggauu

SEQ ID NO: 2637483 - RNA, 19 nt, Homo sapiens
  misc_RNA (1)...(19): siRNA sense strand
agacagaccuggugagcca

SEQ ID NO: 2637484 - RNA, 19 nt, Homo sapiens
  misc_RNA (1)...(19): siRNA sense strand
ugaaggagauguuggcgaa

SEQ ID NO: 2637485 - RNA, 19 nt, Homo sapiens
  misc_RNA (1)...(19): siRNA sense strand
ccaugaaagcugaucggaa

SEQ ID NO: 2637486 - RNA, 19 nt, Homo sapiens
  misc_RNA (1)...(19): siRNA sense strand
ugaaggagcuggaggccga

SEQ ID NO: 2637487 - RNA, 19 nt, Homo sapiens
  misc_RNA (1)...(19): siRNA sense strand
cggucaaagcgcuggccaa

SEQ ID NO: 2637488 - RNA, 19 nt, Homo sapiens
  misc_RNA (1)...(19): siRNA sense strand
gcuuaaagggcgagaagac

SEQ ID NO: 2637489 - RNA, 19 nt, Homo sapiens
  misc_RNA (1)...(19): siRNA sense strand
agacggugcucaauggcaa

SEQ ID NO: 2637490 - RNA, 19 nt, Homo sapiens
  misc_RNA (1)...(19): siRNA sense strand
gggaagaagugucgcggcu

SEQ ID NO: 2637491 - RNA, 19 nt, Homo sapiens
  misc_RNA (1)...(19): siRNA sense strand
aagaaagagaagaugggau

SEQ ID NO: 2637492 - RNA, 19 nt, Homo sapiens
  misc_RNA (1)...(19): siRNA sense strand
ccagagggaagcagcggaa

SEQ ID NO: 2637493 - RNA, 19 nt, Homo sapiens
  misc_RNA (1)...(19): siRNA sense strand
cgaaggaccuggaggaguc

SEQ ID NO: 2637494 - RNA, 19 nt, Homo sapiens
  misc_RNA (1)...(19): siRNA sense strand
gccaaacaguccuuagcua

SEQ ID NO: 2637495 - RNA, 19 nt, Homo sapiens
  misc_RNA (1)...(19): siRNA sense strand
caugaaagcugaucggaag

SEQ ID NO: 2637496 - RNA, 19 nt, Homo sapiens
  misc_RNA (1)...(19): siRNA sense strand
ccgcaaggagagcgaggau

SEQ ID NO: 2637497 - RNA, 19 nt, Homo sapiens
  misc_RNA (1)...(19): siRNA sense strand
agcuggaccucaaggacaa

SEQ ID NO: 2637498 - RNA, 19 nt, Homo sapiens
  misc_RNA (1)...(19): siRNA sense strand
auuauuacauagaggagga

SEQ ID NO: 2637499 - RNA, 19 nt, Homo sapiens
  misc_RNA (1)...(19): siRNA sense strand
gagcagcaccgcaaggaga

SEQ ID NO: 2637500 - RNA, 19 nt, Homo sapiens
  misc_RNA (1)...(19): siRNA sense strand
aggagauguuggcgaagga

SEQ ID NO: 2637501 - RNA, 19 nt, Homo sapiens
  misc_RNA (1)...(19): siRNA sense strand
uggcgaaggaccuggagga

SEQ ID NO: 2637502 - RNA, 19 nt, Homo sapiens
  misc_RNA (1)...(19): siRNA sense strand
ggacacacucccucugcaa

SEQ ID NO: 2637503 - RNA, 19 nt, Homo sapiens
  misc_RNA (1)...(19): siRNA sense strand
agagcgaggaugcggucaa

SEQ ID NO: 2637504 - RNA, 19 nt, Homo sapiens
  misc_RNA (1)...(19): siRNA sense strand
aggaccugcuggagcguga

SEQ ID NO: 2637505 - RNA, 19 nt, Homo sapiens
  misc_RNA (1)...(19): siRNA sense strand
gaggaggaggagagggaca

SEQ ID NO: 2637506 - RNA, 19 nt, Homo sapiens
  misc_RNA (1)...(19): siRNA sense strand
auucaacagcagagaagaa

SEQ ID NO: 2637507 - RNA, 19 nt, Homo sapiens
  misc_RNA (1)...(19): siRNA sense strand
cugcauaaguacuacguca

SEQ ID NO: 2637508 - RNA, 19 nt, Homo sapiens
  misc_RNA (1)...(19): siRNA sense strand
aguucagaguagacaacaa

SEQ ID NO: 2637509 - RNA, 19 nt, Homo sapiens
  misc_RNA (1)...(19): siRNA sense strand
agaagaagagggaggagga

SEQ ID NO: 2637510 - RNA, 19 nt, Homo sapiens
  misc_RNA (1)...(19): siRNA sense strand
agaagagggaggaggagga

SEQ ID NO: 2637511 - RNA, 19 nt, Homo sapiens
  misc_RNA (1)...(19): siRNA sense strand
aggagaaggaggaggccca

SEQ ID NO: 2637512 - RNA, 19 nt, Homo sapiens
  misc_RNA (1)...(19): siRNA sense strand
ccgagauggccgaguggau

SEQ ID NO: 2637513 - RNA, 19 nt, Homo sapiens
  misc_RNA (1)...(19): siRNA sense strand
agaagaaauucgaggaugc

SEQ ID NO: 2637514 - RNA, 19 nt, Homo sapiens
  misc_RNA (1)...(19): siRNA sense strand
ggcaaggaacacuggaaga

SEQ ID NO: 2637515 - RNA, 19 nt, Homo sapiens
  misc_RNA (1)...(19): siRNA sense strand
gggccacagagaagccaua

SEQ ID NO: 2637516 - RNA, 19 nt, Homo sapiens
  misc_RNA (1)...(19): siRNA sense strand
ggauuaugauuuuggagau

SEQ ID NO: 2637517 - RNA, 19 nt, Homo sapiens
  misc_RNA (1)...(19): siRNA sense strand
cggugaagcuggugugcac

SEQ ID NO: 2637518 - RNA, 19 nt, Homo sapiens
  misc_RNA (1)...(19): siRNA sense strand
agaaaauuggcaagaagaa

SEQ ID NO: 2637519 - RNA, 19 nt, Homo sapiens
  misc_RNA (1)...(19): siRNA sense strand
gaucagaugaggaggcaag

SEQ ID NO: 2637520 - RNA, 19 nt, Homo sapiens
  misc_RNA (1)...(19): siRNA sense strand
aagaaguugcagagcuauu

SEQ ID NO: 2637521 - RNA, 19 nt, Homo sapiens
  misc_RNA (1)...(19): siRNA sense strand
cagcagagaagaaucccaa

SEQ ID NO: 2637522 - RNA, 19 nt, Homo sapiens
  misc_RNA (1)...(19): siRNA sense strand
cagacugggaagauggaga

SEQ ID NO: 2637523 - RNA, 19 nt, Homo sapiens
  misc_RNA (1)...(19): siRNA sense strand
ucaccaagaagaagaaaau

SEQ ID NO: 2637524 - RNA, 19 nt, Homo sapiens
  misc_RNA (1)...(19): siRNA sense strand
ccaaagaaggcaugcugca

SEQ ID NO: 2637525 - RNA, 19 nt, Homo sapiens
  misc_RNA (1)...(19): siRNA sense strand
gugaagaaguugcagagcu

SEQ ID NO: 2637526 - RNA, 19 nt, Homo sapiens
  misc_RNA (1)...(19): siRNA sense strand
gugggaugacagugcgauu

SEQ ID NO: 2637527 - RNA, 19 nt, Homo sapiens
  misc_RNA (1)...(19): siRNA sense strand
uggccaagaagaagaggga

SEQ ID NO: 2637528 - RNA, 19 nt, Homo sapiens
  misc_RNA (1)...(19): siRNA sense strand
cggaaaggggccacagaga

SEQ ID NO: 2637529 - RNA, 19 nt, Homo sapiens
  misc_RNA (1)...(19): siRNA sense strand
agcgaaagcuggagaagaa

SEQ ID NO: 2637530 - RNA, 19 nt, Homo sapiens
  misc_RNA (1)...(19): siRNA sense strand
gcagcaugaaggagcgaaa

SEQ ID NO: 2637531 - RNA, 19 nt, Homo sapiens
  misc_RNA (1)...(19): siRNA sense strand
uggagaagaagaagcagaa

SEQ ID NO: 2637532 - RNA, 19 nt, Homo sapiens
  misc_RNA (1)...(19): siRNA sense strand
agaagaagcagaaggagca

SEQ ID NO: 2637533 - RNA, 19 nt, Homo sapiens
  misc_RNA (1)...(19): siRNA sense strand
agaagaagaagcagaagga

SEQ ID NO: 2637534 - RNA, 19 nt, Homo sapiens
  misc_RNA (1)...(19): siRNA sense strand
gaaagcuggagaagaagaa

SEQ ID NO: 2637535 - RNA, 19 nt, Homo sapiens
  misc_RNA (1)...(19): siRNA sense strand
agaaggagcaggagcaagu

SEQ ID NO: 2637536 - RNA, 19 nt, Homo sapiens
  misc_RNA (1)...(19): siRNA sense strand
cuggagaagaagaagcaga

SEQ ID NO: 2637537 - RNA, 19 nt, Homo sapiens
  misc_RNA (1)...(19): siRNA sense strand
ugucggaucucuucaacaa

SEQ ID NO: 2637538 - RNA, 19 nt, Homo sapiens
  misc_RNA (1)...(19): siRNA sense strand
gagcgaaagcuggagaaga

SEQ ID NO: 2637539 - RNA, 19 nt, Homo sapiens
  misc_RNA (1)...(19): siRNA sense strand
gcagaaggagcaggagcaa

SEQ ID NO: 2637540 - RNA, 19 nt, Homo sapiens
  misc_RNA (1)...(19): siRNA sense strand
cgaaagcuggagaagaaga

SEQ ID NO: 2637541 - RNA, 19 nt, Homo sapiens
  misc_RNA (1)...(19): siRNA sense strand
caagggcaucucugggaaa

SEQ ID NO: 2637542 - RNA, 19 nt, Homo sapiens
  misc_RNA (1)...(19): siRNA sense strand
ggagcaggagcaagugaga

SEQ ID NO: 2637543 - RNA, 19 nt, Homo sapiens
  misc_RNA (1)...(19): siRNA sense strand
ggucagagucccaggguca

SEQ ID NO: 2637544 - RNA, 19 nt, Homo sapiens
  misc_RNA (1)...(19): siRNA sense strand
gaacgugagcgcagggcua

SEQ ID NO: 2637545 - RNA, 19 nt, Homo sapiens
  misc_RNA (1)...(19): siRNA sense strand
guacagcaacuuaggauga

SEQ ID NO: 2637546 - RNA, 19 nt, Homo sapiens
  misc_RNA (1)...(19): siRNA sense strand
cugaagauccgcuggcaca

SEQ ID NO: 2637547 - RNA, 19 nt, Homo sapiens
  misc_RNA (1)...(19): siRNA sense strand
ugacgggaacacaggaaau

SEQ ID NO: 2637548 - RNA, 19 nt, Homo sapiens
  misc_RNA (1)...(19): siRNA sense strand
ccguggaggagaucaacaa

SEQ ID NO: 2637549 - RNA, 19 nt, Homo sapiens
  misc_RNA (1)...(19): siRNA sense strand
gggacagagcccaggaucu

SEQ ID NO: 2637550 - RNA, 19 nt, Homo sapiens
  misc_RNA (1)...(19): siRNA sense strand
ugaaaauggccguggagga

SEQ ID NO: 2637551 - RNA, 19 nt, Homo sapiens
  misc_RNA (1)...(19): siRNA sense strand
uggccguggaggagaucaa

SEQ ID NO: 2637552 - RNA, 19 nt, Homo sapiens
  misc_RNA (1)...(19): siRNA sense strand
gggcacuggccaugaaaau

SEQ ID NO: 2637553 - RNA, 19 nt, Homo sapiens
  misc_RNA (1)...(19): siRNA sense strand
gcgcagggcuaaaucacca

SEQ ID NO: 2637554 - RNA, 19 nt, Homo sapiens
  misc_RNA (1)...(19): siRNA sense strand
ccugguaccugguggccuu

SEQ ID NO: 2637555 - RNA, 19 nt, Homo sapiens
  misc_RNA (1)...(19): siRNA sense strand
acacaggaaaucaggggaa

SEQ ID NO: 2637556 - RNA, 19 nt, Homo sapiens
  misc_RNA (1)...(19): siRNA sense strand
gggaaacaugagugaccca

SEQ ID NO: 2637557 - RNA, 19 nt, Homo sapiens
  misc_RNA (1)...(19): siRNA sense strand
ggaaacauucagugggaga

SEQ ID NO: 2637558 - RNA, 19 nt, Homo sapiens
  misc_RNA (1)...(19): siRNA sense strand
gguagaaaaugaagagcau

SEQ ID NO: 2637559 - RNA, 19 nt, Homo sapiens
  misc_RNA (1)...(19): siRNA sense strand
uaucaaagguguagcccau

SEQ ID NO: 2637560 - RNA, 19 nt, Homo sapiens
  misc_RNA (1)...(19): siRNA sense strand
gaguuugagcaguggagaa

SEQ ID NO: 2637561 - RNA, 19 nt, Homo sapiens
  misc_RNA (1)...(19): siRNA sense strand
caguaagaagcauggauga

SEQ ID NO: 2637562 - RNA, 19 nt, Homo sapiens
  misc_RNA (1)...(19): siRNA sense strand
caucauauuuggaggacuc

SEQ ID NO: 2637563 - RNA, 19 nt, Homo sapiens
  misc_RNA (1)...(19): siRNA sense strand
uuggaggacucauggacaa

SEQ ID NO: 2637564 - RNA, 19 nt, Homo sapiens
  misc_RNA (1)...(19): siRNA sense strand
uuguacgagcaaagagaua

SEQ ID NO: 2637565 - RNA, 19 nt, Homo sapiens
  misc_RNA (1)...(19): siRNA sense strand
aggcuguccaggaaggaaa

SEQ ID NO: 2637566 - RNA, 19 nt, Homo sapiens
  misc_RNA (1)...(19): siRNA sense strand
aguuugagcaguggagaaa

SEQ ID NO: 2637567 - RNA, 19 nt, Homo sapiens
  misc_RNA (1)...(19): siRNA sense strand
aguaagaagcauggaugaa

SEQ ID NO: 2637568 - RNA, 19 nt, Homo sapiens
  misc_RNA (1)...(19): siRNA sense strand
auuaaagacaccaaggaga

SEQ ID NO: 2637569 - RNA, 19 nt, Homo sapiens
  misc_RNA (1)...(19): siRNA sense strand
uggaagggacaauggauca

SEQ ID NO: 2637570 - RNA, 19 nt, Homo sapiens
  misc_RNA (1)...(19): siRNA sense strand
acagacaaauggugugcau

SEQ ID NO: 2637571 - RNA, 19 nt, Homo sapiens
  misc_RNA (1)...(19): siRNA sense strand
aggaagaaacugugcugga

SEQ ID NO: 2637572 - RNA, 19 nt, Homo sapiens
  misc_RNA (1)...(19): siRNA sense strand
cugugugauagaugauaaa

SEQ ID NO: 2637573 - RNA, 19 nt, Homo sapiens
  misc_RNA (1)...(19): siRNA sense strand
gggucaaauggaaaguauu

SEQ ID NO: 2637574 - RNA, 19 nt, Homo sapiens
  misc_RNA (1)...(19): siRNA sense strand
ccccaaagcuggagcaacu

SEQ ID NO: 2637575 - RNA, 19 nt, Homo sapiens
  misc_RNA (1)...(19): siRNA sense strand
ucuuuaggaucccggcaaa

SEQ ID NO: 2637576 - RNA, 19 nt, Homo sapiens
  misc_RNA (1)...(19): siRNA sense strand
agacaaauggugugcauac

SEQ ID NO: 2637577 - RNA, 19 nt, Homo sapiens
  misc_RNA (1)...(19): siRNA sense strand
ccauagaucugaauuggga

SEQ ID NO: 2637578 - RNA, 19 nt, Homo sapiens
  misc_RNA (1)...(19): siRNA sense strand
aaggaaacauucaguggga

SEQ ID NO: 2637579 - RNA, 19 nt, Homo sapiens
  misc_RNA (1)...(19): siRNA sense strand
ccucuggagacuugaccua

SEQ ID NO: 2637580 - RNA, 19 nt, Homo sapiens
  misc_RNA (1)...(19): siRNA sense strand
uuugagcaguggagaaaca

SEQ ID NO: 2637581 - RNA, 19 nt, Homo sapiens
  misc_RNA (1)...(19): siRNA sense strand
uggcauggacaauaggaca

SEQ ID NO: 2637582 - RNA, 19 nt, Homo sapiens
  misc_RNA (1)...(19): siRNA sense strand
uggacaagaaacagaaugu

SEQ ID NO: 2637583 - RNA, 19 nt, Homo sapiens
  misc_RNA (1)...(19): siRNA sense strand
acccaguauuggaggcuga

SEQ ID NO: 2637584 - RNA, 19 nt, Homo sapiens
  misc_RNA (1)...(19): siRNA sense strand
guggagaaacagugcccau

SEQ ID NO: 2637585 - RNA, 19 nt, Homo sapiens
  misc_RNA (1)...(19): siRNA sense strand
uggcuguggaccaggaaga

SEQ ID NO: 2637586 - RNA, 19 nt, Homo sapiens
  misc_RNA (1)...(19): siRNA sense strand
gugcuggacauuaaagaca

SEQ ID NO: 2637587 - RNA, 19 nt, Homo sapiens
  misc_RNA (1)...(19): siRNA sense strand
cggagaaggaucaggucaa

SEQ ID NO: 2637588 - RNA, 19 nt, Homo sapiens
  misc_RNA (1)...(19): siRNA sense strand
ggagagauccggagagcug

SEQ ID NO: 2637589 - RNA, 19 nt, Homo sapiens
  misc_RNA (1)...(19): siRNA sense strand
gaagauguucaccgagaga

SEQ ID NO: 2637590 - RNA, 19 nt, Homo sapiens
  misc_RNA (1)...(19): siRNA sense strand
agcgcaagcugcaggccua

SEQ ID NO: 2637591 - RNA, 19 nt, Homo sapiens
  misc_RNA (1)...(19): siRNA sense strand
aagcagaggaagaggauga

SEQ ID NO: 2637592 - RNA, 19 nt, Homo sapiens
  misc_RNA (1)...(19): siRNA sense strand
gggccaaaggaaaggagaa

SEQ ID NO: 2637593 - RNA, 19 nt, Homo sapiens
  misc_RNA (1)...(19): siRNA sense strand
gcagaaagguucauggagu

SEQ ID NO: 2637594 - RNA, 19 nt, Homo sapiens
  misc_RNA (1)...(19): siRNA sense strand
ggccaaaggaaaggagaaa

SEQ ID NO: 2637595 - RNA, 19 nt, Homo sapiens
  misc_RNA (1)...(19): siRNA sense strand
aggaagaggaugaggaacu

SEQ ID NO: 2637596 - RNA, 19 nt, Homo sapiens
  misc_RNA (1)...(19): siRNA sense strand
cagacagggccaaaggaaa

SEQ ID NO: 2637597 - RNA, 19 nt, Homo sapiens
  misc_RNA (1)...(19): siRNA sense strand
ccuuggaagaggaggaaga

SEQ ID NO: 2637598 - RNA, 19 nt, Homo sapiens
  misc_RNA (1)...(19): siRNA sense strand
ucugcaaggacaaggguua

SEQ ID NO: 2637599 - RNA, 19 nt, Homo sapiens
  misc_RNA (1)...(19): siRNA sense strand
uggcaaggucauugucaaa

SEQ ID NO: 2637600 - RNA, 19 nt, Homo sapiens
  misc_RNA (1)...(19): siRNA sense strand
cugugaaaccguagggcau

SEQ ID NO: 2637601 - RNA, 19 nt, Homo sapiens
  misc_RNA (1)...(19): siRNA sense strand
agucaggagucuuacacaa

SEQ ID NO: 2637602 - RNA, 19 nt, Homo sapiens
  misc_RNA (1)...(19): siRNA sense strand
ucauggaguuugaggcuga

SEQ ID NO: 2637603 - RNA, 19 nt, Homo sapiens
  misc_RNA (1)...(19): siRNA sense strand
aguuugaggcugaggagau

SEQ ID NO: 2637604 - RNA, 19 nt, Homo sapiens
  misc_RNA (1)...(19): siRNA sense strand
gggaguaguucgacccuca

SEQ ID NO: 2637605 - RNA, 19 nt, Homo sapiens
  misc_RNA (1)...(19): siRNA sense strand
agaggaagaggaugaggaa

SEQ ID NO: 2637606 - RNA, 19 nt, Homo sapiens
  misc_RNA (1)...(19): siRNA sense strand
gggauugcagaaaggacaa

SEQ ID NO: 2637607 - RNA, 19 nt, Homo sapiens
  misc_RNA (1)...(19): siRNA sense strand
aaaaggaagcagaggaaga

SEQ ID NO: 2637608 - RNA, 19 nt, Homo sapiens
  misc_RNA (1)...(19): siRNA sense strand
caccagaagcugugaagga

SEQ ID NO: 2637609 - RNA, 19 nt, Homo sapiens
  misc_RNA (1)...(19): siRNA sense strand
auggaaaacaagaggaaga

SEQ ID NO: 2637610 - RNA, 19 nt, Homo sapiens
  misc_RNA (1)...(19): siRNA sense strand
ccuuaauugaggagcuaga

SEQ ID NO: 2637611 - RNA, 19 nt, Homo sapiens
  misc_RNA (1)...(19): siRNA sense strand
ggaccggauaugagcauga

SEQ ID NO: 2637612 - RNA, 19 nt, Homo sapiens
  misc_RNA (1)...(19): siRNA sense strand
ccaaagaaaaucaagaaca

SEQ ID NO: 2637613 - RNA, 19 nt, Homo sapiens
  misc_RNA (1)...(19): siRNA sense strand
ccauugugccccuggaaaa

SEQ ID NO: 2637614 - RNA, 19 nt, Homo sapiens
  misc_RNA (1)...(19): siRNA sense strand
aggaggucauagagagcuu

SEQ ID NO: 2637615 - RNA, 19 nt, Homo sapiens
  misc_RNA (1)...(19): siRNA sense strand
aauugaggagcuagagcaa

SEQ ID NO: 2637616 - RNA, 19 nt, Homo sapiens
  misc_RNA (1)...(19): siRNA sense strand
agacagggccaaaggaaag

SEQ ID NO: 2637617 - RNA, 19 nt, Homo sapiens
  misc_RNA (1)...(19): siRNA sense strand
ggcagggagcagaggcaau

SEQ ID NO: 2637618 - RNA, 19 nt, Homo sapiens
  misc_RNA (1)...(19): siRNA sense strand
ccucuaaggcuguuggugu

SEQ ID NO: 2637619 - RNA, 19 nt, Homo sapiens
  misc_RNA (1)...(19): siRNA sense strand
caguuuggaugcuggacuu

SEQ ID NO: 2637620 - RNA, 19 nt, Homo sapiens
  misc_RNA (1)...(19): siRNA sense strand
agauggaaaacaagaggaa

SEQ ID NO: 2637621 - RNA, 19 nt, Homo sapiens
  misc_RNA (1)...(19): siRNA sense strand
aggaagaagggcagcagca

SEQ ID NO: 2637622 - RNA, 19 nt, Homo sapiens
  misc_RNA (1)...(19): siRNA sense strand
cuggcaaggucauugucaa

SEQ ID NO: 2637623 - RNA, 19 nt, Homo sapiens
  misc_RNA (1)...(19): siRNA sense strand
ugauaggacuucagaggcu

SEQ ID NO: 2637624 - RNA, 19 nt, Homo sapiens
  misc_RNA (1)...(19): siRNA sense strand
gaaguguguaacugaguau

SEQ ID NO: 2637625 - RNA, 19 nt, Homo sapiens
  misc_RNA (1)...(19): siRNA sense strand
cuguacaaauagaggaggu

SEQ ID NO: 2637626 - RNA, 19 nt, Homo sapiens
  misc_RNA (1)...(19): siRNA sense strand
gagcaaaaggccccagcaa

SEQ ID NO: 2637627 - RNA, 19 nt, Homo sapiens
  misc_RNA (1)...(19): siRNA sense strand
cgucaguggcagcguuaca

SEQ ID NO: 2637628 - RNA, 19 nt, Homo sapiens
  misc_RNA (1)...(19): siRNA sense strand
gaggagagggucugggaag

SEQ ID NO: 2637629 - RNA, 19 nt, Homo sapiens
  misc_RNA (1)...(19): siRNA sense strand
cagggcagccagagagcau

SEQ ID NO: 2637630 - RNA, 19 nt, Homo sapiens
  misc_RNA (1)...(19): siRNA sense strand
gcaucuaaugugaagacca

SEQ ID NO: 2637631 - RNA, 19 nt, Homo sapiens
  misc_RNA (1)...(19): siRNA sense strand
agagagaucccuuggccuu

SEQ ID NO: 2637632 - RNA, 19 nt, Homo sapiens
  misc_RNA (1)...(19): siRNA sense strand
aggaaaacgggcaagagaa

SEQ ID NO: 2637633 - RNA, 19 nt, Homo sapiens
  misc_RNA (1)...(19): siRNA sense strand
aaaagcaaguccugggauu

SEQ ID NO: 2637634 - RNA, 19 nt, Homo sapiens
  misc_RNA (1)...(19): siRNA sense strand
cagaggaagaggaugagga

SEQ ID NO: 2637635 - RNA, 19 nt, Homo sapiens
  misc_RNA (1)...(19): siRNA sense strand
gcaaaaggccccagcaaac

SEQ ID NO: 2637636 - RNA, 19 nt, Homo sapiens
  misc_RNA (1)...(19): siRNA sense strand
ccacuaugacccuggagga

SEQ ID NO: 2637637 - RNA, 19 nt, Homo sapiens
  misc_RNA (1)...(19): siRNA sense strand
cuagauagccccagaggga

SEQ ID NO: 2637638 - RNA, 19 nt, Homo sapiens
  misc_RNA (1)...(19): siRNA sense strand
ggagaaaaccaaaggaaaa

SEQ ID NO: 2637639 - RNA, 19 nt, Homo sapiens
  misc_RNA (1)...(19): siRNA sense strand
gguagaagagggugaggaa

SEQ ID NO: 2637640 - RNA, 19 nt, Homo sapiens
  misc_RNA (1)...(19): siRNA sense strand
gggaagaguauaucagcaa

SEQ ID NO: 2637641 - RNA, 19 nt, Homo sapiens
  misc_RNA (1)...(19): siRNA sense strand
gcaaaagagucuagggguu

SEQ ID NO: 2637642 - RNA, 19 nt, Homo sapiens
  misc_RNA (1)...(19): siRNA sense strand
aagcaagagaacaggcaua

SEQ ID NO: 2637643 - RNA, 19 nt, Homo sapiens
  misc_RNA (1)...(19): siRNA sense strand
ugauagauuucaaggucaa

SEQ ID NO: 2637644 - RNA, 19 nt, Homo sapiens
  misc_RNA (1)...(19): siRNA sense strand
guauaucagcaaagugaaa

SEQ ID NO: 2637645 - RNA, 19 nt, Homo sapiens
  misc_RNA (1)...(19): siRNA sense strand
ugauaaaggacgugucauu

SEQ ID NO: 2637646 - RNA, 19 nt, Homo sapiens
  misc_RNA (1)...(19): siRNA sense strand
augaagaagacauggaaau

SEQ ID NO: 2637647 - RNA, 19 nt, Homo sapiens
  misc_RNA (1)...(19): siRNA sense strand
cgacuaaaacgauggauua

SEQ ID NO: 2637648 - RNA, 19 nt, Homo sapiens
  misc_RNA (1)...(19): siRNA sense strand
gagaaugagaugaccacaa

SEQ ID NO: 2637649 - RNA, 19 nt, Homo sapiens
  misc_RNA (1)...(19): siRNA sense strand
gggcaugcuggaugauaaa

SEQ ID NO: 2637650 - RNA, 19 nt, Homo sapiens
  misc_RNA (1)...(19): siRNA sense strand
cugugaaacugcaggcuau

SEQ ID NO: 2637651 - RNA, 19 nt, Homo sapiens
  misc_RNA (1)...(19): siRNA sense strand
aaacagaagaagaggccau

SEQ ID NO: 2637652 - RNA, 19 nt, Homo sapiens
  misc_RNA (1)...(19): siRNA sense strand
gcgucuuggucauggagaa

SEQ ID NO: 2637653 - RNA, 19 nt, Homo sapiens
  misc_RNA (1)...(19): siRNA sense strand
gguaaugucucgcugggaa

SEQ ID NO: 2637654 - RNA, 19 nt, Homo sapiens
  misc_RNA (1)...(19): siRNA sense strand
caagaaacagaauuggaaa

SEQ ID NO: 2637655 - RNA, 19 nt, Homo sapiens
  misc_RNA (1)...(19): siRNA sense strand
agaaugaagccauggcaau

SEQ ID NO: 2637656 - RNA, 19 nt, Homo sapiens
  misc_RNA (1)...(19): siRNA sense strand
agggcaugcuggaugauaa

SEQ ID NO: 2637657 - RNA, 19 nt, Homo sapiens
  misc_RNA (1)...(19): siRNA sense strand
cgucaugaacgucgaauuu

SEQ ID NO: 2637658 - RNA, 19 nt, Homo sapiens
  misc_RNA (1)...(19): siRNA sense strand
auacaagaaucuaggaaac

SEQ ID NO: 2637659 - RNA, 19 nt, Homo sapiens
  misc_RNA (1)...(19): siRNA sense strand
aggcugugcuggagacuau

SEQ ID NO: 2637660 - RNA, 19 nt, Homo sapiens
  misc_RNA (1)...(19): siRNA sense strand
uagaagagggugaggaagu

SEQ ID NO: 2637661 - RNA, 19 nt, Homo sapiens
  misc_RNA (1)...(19): siRNA sense strand
cggcauuagcugaaacuga

SEQ ID NO: 2637662 - RNA, 19 nt, Homo sapiens
  misc_RNA (1)...(19): siRNA sense strand
aaucauggcauuagacauu

SEQ ID NO: 2637663 - RNA, 19 nt, Homo sapiens
  misc_RNA (1)...(19): siRNA sense strand
acccaaucuuagaggagaa

SEQ ID NO: 2637664 - RNA, 19 nt, Homo sapiens
  misc_RNA (1)...(19): siRNA sense strand
aggagaaaaccaaaggaaa

SEQ ID NO: 2637665 - RNA, 19 nt, Homo sapiens
  misc_RNA (1)...(19): siRNA sense strand
ggacccaaguagugcacau

SEQ ID NO: 2637666 - RNA, 19 nt, Homo sapiens
  misc_RNA (1)...(19): siRNA sense strand
ccaugaauacuuugcaaau

SEQ ID NO: 2637667 - RNA, 19 nt, Homo sapiens
  misc_RNA (1)...(19): siRNA sense strand
gcagaggauguguaugaaa

SEQ ID NO: 2637668 - RNA, 19 nt, Homo sapiens
  misc_RNA (1)...(19): siRNA sense strand
caauagacgauguggaaac

SEQ ID NO: 2637669 - RNA, 19 nt, Homo sapiens
  misc_RNA (1)...(19): siRNA sense strand
agaauuggaaacagaagaa

SEQ ID NO: 2637670 - RNA, 19 nt, Homo sapiens
  misc_RNA (1)...(19): siRNA sense strand
agaugaagacaccgaggaa

SEQ ID NO: 2637671 - RNA, 19 nt, Homo sapiens
  misc_RNA (1)...(19): siRNA sense strand
caagaaucuaggaaacuua

SEQ ID NO: 2637672 - RNA, 19 nt, Homo sapiens
  misc_RNA (1)...(19): siRNA sense strand
auuucaaggucaacagaau

SEQ ID NO: 2637673 - RNA, 19 nt, Homo sapiens
  misc_RNA (1)...(19): siRNA sense strand
cccacaaggcgcugguuua

SEQ ID NO: 2637674 - RNA, 19 nt, Homo sapiens
  misc_RNA (1)...(19): siRNA sense strand
caaucuuguucguagagaa

SEQ ID NO: 2637675 - RNA, 19 nt, Homo sapiens
  misc_RNA (1)...(19): siRNA sense strand
caaucuuagaggagaauca

SEQ ID NO: 2637676 - RNA, 19 nt, Homo sapiens
  misc_RNA (1)...(19): siRNA sense strand
ggaaagaugcggaugugga

SEQ ID NO: 2637677 - RNA, 19 nt, Homo sapiens
  misc_RNA (1)...(19): siRNA sense strand
caagggagagccagagcaa

SEQ ID NO: 2637678 - RNA, 19 nt, Homo sapiens
  misc_RNA (1)...(19): siRNA sense strand
cauugaagauggaccugaa

SEQ ID NO: 2637679 - RNA, 19 nt, Homo sapiens
  misc_RNA (1)...(19): siRNA sense strand
gcuguauggugaaugagaa

SEQ ID NO: 2637680 - RNA, 19 nt, Homo sapiens
  misc_RNA (1)...(19): siRNA sense strand
agaguuuaguacagcaaau

SEQ ID NO: 2637681 - RNA, 19 nt, Homo sapiens
  misc_RNA (1)...(19): siRNA sense strand
cagaauauguaguagcacu

SEQ ID NO: 2637682 - RNA, 19 nt, Homo sapiens
  misc_RNA (1)...(19): siRNA sense strand
cagaaugaagccauggcaa

SEQ ID NO: 2637683 - RNA, 19 nt, Homo sapiens
  misc_RNA (1)...(19): siRNA sense strand
ggauggauuuagccgacua

SEQ ID NO: 2637684 - RNA, 19 nt, Homo sapiens
  misc_RNA (1)...(19): siRNA sense strand
cccaacuacuagaaagaau

SEQ ID NO: 2637685 - RNA, 19 nt, Homo sapiens
  misc_RNA (1)...(19): siRNA sense strand
ggaaaagggaagaaaagga

SEQ ID NO: 2637686 - RNA, 19 nt, Homo sapiens
  misc_RNA (1)...(19): siRNA sense strand
agacauggaaauugcugaa

SEQ ID NO: 2637687 - RNA, 19 nt, Homo sapiens
  misc_RNA (1)...(19): siRNA sense strand
ugggagaaucugaaccuaa

SEQ ID NO: 2637688 - RNA, 19 nt, Homo sapiens
  misc_RNA (1)...(19): siRNA sense strand
agaagaagccagaccacuu

SEQ ID NO: 2637689 - RNA, 19 nt, Homo sapiens
  misc_RNA (1)...(19): siRNA sense strand
gcauaucaagagaggagau

SEQ ID NO: 2637690 - RNA, 19 nt, Homo sapiens
  misc_RNA (1)...(19): siRNA sense strand
cgucaggacauugaagaua

SEQ ID NO: 2637691 - RNA, 19 nt, Homo sapiens
  misc_RNA (1)...(19): siRNA sense strand
gaaaauuaucucuggauga

SEQ ID NO: 2637692 - RNA, 19 nt, Homo sapiens
  misc_RNA (1)...(19): siRNA sense strand
acaccuaagcuaagaaaau

SEQ ID NO: 2637693 - RNA, 19 nt, Homo sapiens
  misc_RNA (1)...(19): siRNA sense strand
guagagaagaggauggcca

SEQ ID NO: 2637694 - RNA, 19 nt, Homo sapiens
  misc_RNA (1)...(19): siRNA sense strand
agaggagaaucaaggacau

SEQ ID NO: 2637695 - RNA, 19 nt, Homo sapiens
  misc_RNA (1)...(19): siRNA sense strand
guucacucauacacagaua

SEQ ID NO: 2637696 - RNA, 19 nt, Homo sapiens
  misc_RNA (1)...(19): siRNA sense strand
agagcuggagacagagaaa

SEQ ID NO: 2637697 - RNA, 19 nt, Homo sapiens
  misc_RNA (1)...(19): siRNA sense strand
cuaugguagaagaggguga

SEQ ID NO: 2637698 - RNA, 19 nt, Homo sapiens
  misc_RNA (1)...(19): siRNA sense strand
caucauacccaguccaaca

SEQ ID NO: 2637699 - RNA, 19 nt, Homo sapiens
  misc_RNA (1)...(19): siRNA sense strand
agcugaaacugauggugaa

SEQ ID NO: 2637700 - RNA, 19 nt, Homo sapiens
  misc_RNA (1)...(19): siRNA sense strand
cuguaauauuugugggaaa

SEQ ID NO: 2637701 - RNA, 19 nt, Homo sapiens
  misc_RNA (1)...(19): siRNA sense strand
gaagauugcuggaggccaa

SEQ ID NO: 2637702 - RNA, 19 nt, Homo sapiens
  misc_RNA (1)...(19): siRNA sense strand
agaacgaccacaagggaaa

SEQ ID NO: 2637703 - RNA, 19 nt, Homo sapiens
  misc_RNA (1)...(19): siRNA sense strand
aggcagagucacaggauuu

SEQ ID NO: 2637704 - RNA, 19 nt, Homo sapiens
  misc_RNA (1)...(19): siRNA sense strand
cuuuaauaacugugaggua

SEQ ID NO: 2637705 - RNA, 19 nt, Homo sapiens
  misc_RNA (1)...(19): siRNA sense strand
ggcaauagaaagaagaaaa

SEQ ID NO: 2637706 - RNA, 19 nt, Homo sapiens
  misc_RNA (1)...(19): siRNA sense strand
auucagagcaucaggagaa

SEQ ID NO: 2637707 - RNA, 19 nt, Homo sapiens
  misc_RNA (1)...(19): siRNA sense strand
augcaguguuugugcuaaa

SEQ ID NO: 2637708 - RNA, 19 nt, Homo sapiens
  misc_RNA (1)...(19): siRNA sense strand
cuuuaaagaacgaccacaa

SEQ ID NO: 2637709 - RNA, 19 nt, Homo sapiens
  misc_RNA (1)...(19): siRNA sense strand
gaguuaaggcagagucaca

SEQ ID NO: 2637710 - RNA, 19 nt, Homo sapiens
  misc_RNA (1)...(19): siRNA sense strand
cguacuagacauaagauau

SEQ ID NO: 2637711 - RNA, 19 nt, Homo sapiens
  misc_RNA (1)...(19): siRNA sense strand
guucaucaggugaggaauu

SEQ ID NO: 2637712 - RNA, 19 nt, Homo sapiens
  misc_RNA (1)...(19): siRNA sense strand
ugucaggaguuaaggcaga

SEQ ID NO: 2637713 - RNA, 19 nt, Homo sapiens
  misc_RNA (1)...(19): siRNA sense strand
agggaaagugguugccuua

SEQ ID NO: 2637714 - RNA, 19 nt, Homo sapiens
  misc_RNA (1)...(19): siRNA sense strand
acuuacacauucagaagaa

SEQ ID NO: 2637715 - RNA, 19 nt, Homo sapiens
  misc_RNA (1)...(19): siRNA sense strand
uuauuaaagaagaggcgua

SEQ ID NO: 2637716 - RNA, 19 nt, Homo sapiens
  misc_RNA (1)...(19): siRNA sense strand
acaaaugugagaagguauu

SEQ ID NO: 2637717 - RNA, 19 nt, Homo sapiens
  misc_RNA (1)...(19): siRNA sense strand
ucucagagucagaucaaau

SEQ ID NO: 2637718 - RNA, 19 nt, Homo sapiens
  misc_RNA (1)...(19): siRNA sense strand
gacaaaugugagaagguau

SEQ ID NO: 2637719 - RNA, 19 nt, Homo sapiens
  misc_RNA (1)...(19): siRNA sense strand
agacauuugugaagcacca

SEQ ID NO: 2637720 - RNA, 19 nt, Homo sapiens
  misc_RNA (1)...(19): siRNA sense strand
ucucauucauacuggucaa

SEQ ID NO: 2637721 - RNA, 19 nt, Homo sapiens
  misc_RNA (1)...(19): siRNA sense strand
cauacuaggaauaaggcuu

SEQ ID NO: 2637722 - RNA, 19 nt, Homo sapiens
  misc_RNA (1)...(19): siRNA sense strand
gcaguuauucagagcauca

SEQ ID NO: 2637723 - RNA, 19 nt, Homo sapiens
  misc_RNA (1)...(19): siRNA sense strand
cuggagaggcaucaacuaa

SEQ ID NO: 2637724 - RNA, 19 nt, Homo sapiens
  misc_RNA (1)...(19): siRNA sense strand
aggccauauguuugcaaua

SEQ ID NO: 2637725 - RNA, 19 nt, Homo sapiens
  misc_RNA (1)...(19): siRNA sense strand
gcuuaagcgugcuaggagu

SEQ ID NO: 2637726 - RNA, 19 nt, Homo sapiens
  misc_RNA (1)...(19): siRNA sense strand
cuggaaagacacuaccuaa

SEQ ID NO: 2637727 - RNA, 19 nt, Homo sapiens
  misc_RNA (1)...(19): siRNA sense strand
agaggaaagaugggcauua

SEQ ID NO: 2637728 - RNA, 19 nt, Homo sapiens
  misc_RNA (1)...(19): siRNA sense strand
ggucagaggccuuuuaaau

SEQ ID NO: 2637729 - RNA, 19 nt, Homo sapiens
  misc_RNA (1)...(19): siRNA sense strand
uggcaauagaaagaagaaa

SEQ ID NO: 2637730 - RNA, 19 nt, Homo sapiens
  misc_RNA (1)...(19): siRNA sense strand
uggaaucagagcaaagcaa

SEQ ID NO: 2637731 - RNA, 19 nt, Homo sapiens
  misc_RNA (1)...(19): siRNA sense strand
uggaaagacacuaccuaau

SEQ ID NO: 2637732 - RNA, 19 nt, Homo sapiens
  misc_RNA (1)...(19): siRNA sense strand
gauucaacaguguguggua

SEQ ID NO: 2637733 - RNA, 19 nt, Homo sapiens
  misc_RNA (1)...(19): siRNA sense strand
gggaaaucuuuuagacagu

SEQ ID NO: 2637734 - RNA, 19 nt, Homo sapiens
  misc_RNA (1)...(19): siRNA sense strand
guuaaacaggucagaagau

SEQ ID NO: 2637735 - RNA, 19 nt, Homo sapiens
  misc_RNA (1)...(19): siRNA sense strand
uuggugaaucugaggagaa

SEQ ID NO: 2637736 - RNA, 19 nt, Homo sapiens
  misc_RNA (1)...(19): siRNA sense strand
acguacuagacauaagaua

SEQ ID NO: 2637737 - RNA, 19 nt, Homo sapiens
  misc_RNA (1)...(19): siRNA sense strand
ggucucagagucagaucaa

SEQ ID NO: 2637738 - RNA, 19 nt, Homo sapiens
  misc_RNA (1)...(19): siRNA sense strand
ccuuagauucgguuaugua

SEQ ID NO: 2637739 - RNA, 19 nt, Homo sapiens
  misc_RNA (1)...(19): siRNA sense strand
cuuaagcgugcuaggagua

SEQ ID NO: 2637740 - RNA, 19 nt, Homo sapiens
  misc_RNA (1)...(19): siRNA sense strand
uggugaaucugaggagaau

SEQ ID NO: 2637741 - RNA, 19 nt, Homo sapiens
  misc_RNA (1)...(19): siRNA sense strand
caauguccaaagugugaaa

SEQ ID NO: 2637742 - RNA, 19 nt, Homo sapiens
  misc_RNA (1)...(19): siRNA sense strand
cugaacaaacccagagaac

SEQ ID NO: 2637743 - RNA, 19 nt, Homo sapiens
  misc_RNA (1)...(19): siRNA sense strand
caacaaacuaccuagaaac

SEQ ID NO: 2637744 - RNA, 19 nt, Homo sapiens
  misc_RNA (1)...(19): siRNA sense strand
agaucaaaugucaggaguu

SEQ ID NO: 2637745 - RNA, 19 nt, Homo sapiens
  misc_RNA (1)...(19): siRNA sense strand
cuggaggccaagcaagaaa

SEQ ID NO: 2637746 - RNA, 19 nt, Homo sapiens
  misc_RNA (1)...(19): siRNA sense strand
auacgaggucucagaguca

SEQ ID NO: 2637747 - RNA, 19 nt, Homo sapiens
  misc_RNA (1)...(19): siRNA sense strand
aaagaagaggcguacagaa

SEQ ID NO: 2637748 - RNA, 19 nt, Homo sapiens
  misc_RNA (1)...(19): siRNA sense strand
uguggguucucuuggcaaa

SEQ ID NO: 2637749 - RNA, 19 nt, Homo sapiens
  misc_RNA (1)...(19): siRNA sense strand
gaaaagaguccuuaugcau

SEQ ID NO: 2637750 - RNA, 19 nt, Homo sapiens
  misc_RNA (1)...(19): siRNA sense strand
uugcaguuauucagagcau

SEQ ID NO: 2637751 - RNA, 19 nt, Homo sapiens
  misc_RNA (1)...(19): siRNA sense strand
cuguaauauuugugggaaa

SEQ ID NO: 2637752 - RNA, 19 nt, Homo sapiens
  misc_RNA (1)...(19): siRNA sense strand
gaagauugcuggaggccaa

SEQ ID NO: 2637753 - RNA, 19 nt, Homo sapiens
  misc_RNA (1)...(19): siRNA sense strand
agaacgaccacaagggaaa

SEQ ID NO: 2637754 - RNA, 19 nt, Homo sapiens
  misc_RNA (1)...(19): siRNA sense strand
aggcagagucacaggauuu

SEQ ID NO: 2637755 - RNA, 19 nt, Homo sapiens
  misc_RNA (1)...(19): siRNA sense strand
cuuuaauaacugugaggua

SEQ ID NO: 2637756 - RNA, 19 nt, Homo sapiens
  misc_RNA (1)...(19): siRNA sense strand
ggcaauagaaagaagaaaa

SEQ ID NO: 2637757 - RNA, 19 nt, Homo sapiens
  misc_RNA (1)...(19): siRNA sense strand
auucagagcaucaggagaa

SEQ ID NO: 2637758 - RNA, 19 nt, Homo sapiens
  misc_RNA (1)...(19): siRNA sense strand
augcaguguuugugcuaaa

SEQ ID NO: 2637759 - RNA, 19 nt, Homo sapiens
  misc_RNA (1)...(19): siRNA sense strand
cuuuaaagaacgaccacaa

SEQ ID NO: 2637760 - RNA, 19 nt, Homo sapiens
  misc_RNA (1)...(19): siRNA sense strand
gaguuaaggcagagucaca

SEQ ID NO: 2637761 - RNA, 19 nt, Homo sapiens
  misc_RNA (1)...(19): siRNA sense strand
cguacuagacauaagauau

SEQ ID NO: 2637762 - RNA, 19 nt, Homo sapiens
  misc_RNA (1)...(19): siRNA sense strand
guucaucaggugaggaauu

SEQ ID NO: 2637763 - RNA, 19 nt, Homo sapiens
  misc_RNA (1)...(19): siRNA sense strand
ugucaggaguuaaggcaga

SEQ ID NO: 2637764 - RNA, 19 nt, Homo sapiens
  misc_RNA (1)...(19): siRNA sense strand
agggaaagugguugccuua

SEQ ID NO: 2637765 - RNA, 19 nt, Homo sapiens
  misc_RNA (1)...(19): siRNA sense strand
acuuacacauucagaagaa

SEQ ID NO: 2637766 - RNA, 19 nt, Homo sapiens
  misc_RNA (1)...(19): siRNA sense strand
uuauuaaagaagaggcgua

SEQ ID NO: 2637767 - RNA, 19 nt, Homo sapiens
  misc_RNA (1)...(19): siRNA sense strand
acaaaugugagaagguauu

SEQ ID NO: 2637768 - RNA, 19 nt, Homo sapiens
  misc_RNA (1)...(19): siRNA sense strand
ucucagagucagaucaaau

SEQ ID NO: 2637769 - RNA, 19 nt, Homo sapiens
  misc_RNA (1)...(19): siRNA sense strand
gacaaaugugagaagguau

SEQ ID NO: 2637770 - RNA, 19 nt, Homo sapiens
  misc_RNA (1)...(19): siRNA sense strand
agacauuugugaagcacca

SEQ ID NO: 2637771 - RNA, 19 nt, Homo sapiens
  misc_RNA (1)...(19): siRNA sense strand
ucucauucauacuggucaa

SEQ ID NO: 2637772 - RNA, 19 nt, Homo sapiens
  misc_RNA (1)...(19): siRNA sense strand
cauacuaggaauaaggcuu

SEQ ID NO: 2637773 - RNA, 19 nt, Homo sapiens
  misc_RNA (1)...(19): siRNA sense strand
gcaguuauucagagcauca

SEQ ID NO: 2637774 - RNA, 19 nt, Homo sapiens
  misc_RNA (1)...(19): siRNA sense strand
cuggagaggcaucaacuaa

SEQ ID NO: 2637775 - RNA, 19 nt, Homo sapiens
  misc_RNA (1)...(19): siRNA sense strand
aggccauauguuugcaaua

SEQ ID NO: 2637776 - RNA, 19 nt, Homo sapiens
  misc_RNA (1)...(19): siRNA sense strand
gcuuaagcgugcuaggagu

SEQ ID NO: 2637777 - RNA, 19 nt, Homo sapiens
  misc_RNA (1)...(19): siRNA sense strand
cuggaaagacacuaccuaa

SEQ ID NO: 2637778 - RNA, 19 nt, Homo sapiens
  misc_RNA (1)...(19): siRNA sense strand
agaggaaagaugggcauua

SEQ ID NO: 2637779 - RNA, 19 nt, Homo sapiens
  misc_RNA (1)...(19): siRNA sense strand
ggucagaggccuuuuaaau

SEQ ID NO: 2637780 - RNA, 19 nt, Homo sapiens
  misc_RNA (1)...(19): siRNA sense strand
uggcaauagaaagaagaaa

SEQ ID NO: 2637781 - RNA, 19 nt, Homo sapiens
  misc_RNA (1)...(19): siRNA sense strand
uggaaucagagcaaagcaa

SEQ ID NO: 2637782 - RNA, 19 nt, Homo sapiens
  misc_RNA (1)...(19): siRNA sense strand
uggaaagacacuaccuaau

SEQ ID NO: 2637783 - RNA, 19 nt, Homo sapiens
  misc_RNA (1)...(19): siRNA sense strand
gauucaacaguguguggua

SEQ ID NO: 2637784 - RNA, 19 nt, Homo sapiens
  misc_RNA (1)...(19): siRNA sense strand
gggaaaucuuuuagacagu

SEQ ID NO: 2637785 - RNA, 19 nt, Homo sapiens
  misc_RNA (1)...(19): siRNA sense strand
guuaaacaggucagaagau

SEQ ID NO: 2637786 - RNA, 19 nt, Homo sapiens
  misc_RNA (1)...(19): siRNA sense strand
uuggugaaucugaggagaa

SEQ ID NO: 2637787 - RNA, 19 nt, Homo sapiens
  misc_RNA (1)...(19): siRNA sense strand
acguacuagacauaagaua

SEQ ID NO: 2637788 - RNA, 19 nt, Homo sapiens
  misc_RNA (1)...(19): siRNA sense strand
ggucucagagucagaucaa

SEQ ID NO: 2637789 - RNA, 19 nt, Homo sapiens
  misc_RNA (1)...(19): siRNA sense strand
ccuuagauucgguuaugua

SEQ ID NO: 2637790 - RNA, 19 nt, Homo sapiens
  misc_RNA (1)...(19): siRNA sense strand
cuuaagcgugcuaggagua

SEQ ID NO: 2637791 - RNA, 19 nt, Homo sapiens
  misc_RNA (1)...(19): siRNA sense strand
uggugaaucugaggagaau

SEQ ID NO: 2637792 - RNA, 19 nt, Homo sapiens
  misc_RNA (1)...(19): siRNA sense strand
caauguccaaagugugaaa

SEQ ID NO: 2637793 - RNA, 19 nt, Homo sapiens
  misc_RNA (1)...(19): siRNA sense strand
cugaacaaacccagagaac

SEQ ID NO: 2637794 - RNA, 19 nt, Homo sapiens
  misc_RNA (1)...(19): siRNA sense strand
caacaaacuaccuagaaac

SEQ ID NO: 2637795 - RNA, 19 nt, Homo sapiens
  misc_RNA (1)...(19): siRNA sense strand
agaucaaaugucaggaguu

SEQ ID NO: 2637796 - RNA, 19 nt, Homo sapiens
  misc_RNA (1)...(19): siRNA sense strand
cuggaggccaagcaagaaa

SEQ ID NO: 2637797 - RNA, 19 nt, Homo sapiens
  misc_RNA (1)...(19): siRNA sense strand
auacgaggucucagaguca

SEQ ID NO: 2637798 - RNA, 19 nt, Homo sapiens
  misc_RNA (1)...(19): siRNA sense strand
aaagaagaggcguacagaa

SEQ ID NO: 2637799 - RNA, 19 nt, Homo sapiens
  misc_RNA (1)...(19): siRNA sense strand
uguggguucucuuggcaaa

SEQ ID NO: 2637800 - RNA, 19 nt, Homo sapiens
  misc_RNA (1)...(19): siRNA sense strand
gaaaagaguccuuaugcau

SEQ ID NO: 2637801 - RNA, 19 nt, Homo sapiens
  misc_RNA (1)...(19): siRNA sense strand
uugcaguuauucagagcau

SEQ ID NO: 2637802 - RNA, 19 nt, Homo sapiens
  misc_RNA (1)...(19): siRNA sense strand
cuggagaaguuucgggaca

SEQ ID NO: 2637803 - RNA, 19 nt, Homo sapiens
  misc_RNA (1)...(19): siRNA sense strand
cgggacaacuguuuggcaa

SEQ ID NO: 2637804 - RNA, 19 nt, Homo sapiens
  misc_RNA (1)...(19): siRNA sense strand
uggcaauuuuggagagcaa

SEQ ID NO: 2637805 - RNA, 19 nt, Homo sapiens
  misc_RNA (1)...(19): siRNA sense strand
gagacgagagaaugggcaa

SEQ ID NO: 2637806 - RNA, 19 nt, Homo sapiens
  misc_RNA (1)...(19): siRNA sense strand
aggaaauggagcagcuauu

SEQ ID NO: 2637807 - RNA, 19 nt, Homo sapiens
  misc_RNA (1)...(19): siRNA sense strand
gggacaacuguuuggcaau

SEQ ID NO: 2637808 - RNA, 19 nt, Homo sapiens
  misc_RNA (1)...(19): siRNA sense strand
agaugaaagaggaaagagu

SEQ ID NO: 2637809 - RNA, 19 nt, Homo sapiens
  misc_RNA (1)...(19): siRNA sense strand
cgacaguugcugcagggaa

SEQ ID NO: 2637810 - RNA, 19 nt, Homo sapiens
  misc_RNA (1)...(19): siRNA sense strand
agggagagcugaaggaccu

SEQ ID NO: 2637811 - RNA, 19 nt, Homo sapiens
  misc_RNA (1)...(19): siRNA sense strand
gcuggagaugaaagaggaa

SEQ ID NO: 2637812 - RNA, 19 nt, Homo sapiens
  misc_RNA (1)...(19): siRNA sense strand
uggaggaguuacaggccuu

SEQ ID NO: 2637813 - RNA, 19 nt, Homo sapiens
  misc_RNA (1)...(19): siRNA sense strand
gguccaaagaagucgaugu

SEQ ID NO: 2637814 - RNA, 19 nt, Homo sapiens
  misc_RNA (1)...(19): siRNA sense strand
agacgagagaaugggcaaa

SEQ ID NO: 2637815 - RNA, 19 nt, Homo sapiens
  misc_RNA (1)...(19): siRNA sense strand
gaaagaggaaagaguccga

SEQ ID NO: 2637816 - RNA, 19 nt, Homo sapiens
  misc_RNA (1)...(19): siRNA sense strand
caguauaaauggaaagaga

SEQ ID NO: 2637817 - RNA, 19 nt, Homo sapiens
  misc_RNA (1)...(19): siRNA sense strand
ggaacaauugaaagagaaa

SEQ ID NO: 2637818 - RNA, 19 nt, Homo sapiens
  misc_RNA (1)...(19): siRNA sense strand
gugacaaacuacagaaaga

SEQ ID NO: 2637819 - RNA, 19 nt, Homo sapiens
  misc_RNA (1)...(19): siRNA sense strand
gggagagagugaagucaaa

SEQ ID NO: 2637820 - RNA, 19 nt, Homo sapiens
  misc_RNA (1)...(19): siRNA sense strand
ggguaaaaguagaagguga

SEQ ID NO: 2637821 - RNA, 19 nt, Homo sapiens
  misc_RNA (1)...(19): siRNA sense strand
ccacacaaucauaaggaaa

SEQ ID NO: 2637822 - RNA, 19 nt, Homo sapiens
  misc_RNA (1)...(19): siRNA sense strand
ccauaauaaugcaaaggaa

SEQ ID NO: 2637823 - RNA, 19 nt, Homo sapiens
  misc_RNA (1)...(19): siRNA sense strand
ggaugauacugaugagaca

SEQ ID NO: 2637824 - RNA, 19 nt, Homo sapiens
  misc_RNA (1)...(19): siRNA sense strand
aggcaagggaggaggaaga

SEQ ID NO: 2637825 - RNA, 19 nt, Homo sapiens
  misc_RNA (1)...(19): siRNA sense strand
gggaggaggaagaaggaau

SEQ ID NO: 2637826 - RNA, 19 nt, Homo sapiens
  misc_RNA (1)...(19): siRNA sense strand
cuguagacccugaggcuaa

SEQ ID NO: 2637827 - RNA, 19 nt, Homo sapiens
  misc_RNA (1)...(19): siRNA sense strand
cgucaggaaugaagauaau

SEQ ID NO: 2637828 - RNA, 19 nt, Homo sapiens
  misc_RNA (1)...(19): siRNA sense strand
agagaaagaagcuagaaua

SEQ ID NO: 2637829 - RNA, 19 nt, Homo sapiens
  misc_RNA (1)...(19): siRNA sense strand
acacacaacuucagggaca

SEQ ID NO: 2637830 - RNA, 19 nt, Homo sapiens
  misc_RNA (1)...(19): siRNA sense strand
aaccaaagcaagagaagaa

SEQ ID NO: 2637831 - RNA, 19 nt, Homo sapiens
  misc_RNA (1)...(19): siRNA sense strand
aagaagugguccugaagaa

SEQ ID NO: 2637832 - RNA, 19 nt, Homo sapiens
  misc_RNA (1)...(19): siRNA sense strand
cagggaagcuuguggccua

SEQ ID NO: 2637833 - RNA, 19 nt, Homo sapiens
  misc_RNA (1)...(19): siRNA sense strand
cuggagaaagacagggaaa

SEQ ID NO: 2637834 - RNA, 19 nt, Homo sapiens
  misc_RNA (1)...(19): siRNA sense strand
caaauugauaggacagaaa

SEQ ID NO: 2637835 - RNA, 19 nt, Homo sapiens
  misc_RNA (1)...(19): siRNA sense strand
cagcauuagcacagaaaga

SEQ ID NO: 2637836 - RNA, 19 nt, Homo sapiens
  misc_RNA (1)...(19): siRNA sense strand
gggaugaugggcugaauaa

SEQ ID NO: 2637837 - RNA, 19 nt, Homo sapiens
  misc_RNA (1)...(19): siRNA sense strand
cagaaaaucaggcgaauaa

SEQ ID NO: 2637838 - RNA, 19 nt, Homo sapiens
  misc_RNA (1)...(19): siRNA sense strand
agauauggguggcagcaaa

SEQ ID NO: 2637839 - RNA, 19 nt, Homo sapiens
  misc_RNA (1)...(19): siRNA sense strand
gguaaaaguagaaggugaa

SEQ ID NO: 2637840 - RNA, 19 nt, Homo sapiens
  misc_RNA (1)...(19): siRNA sense strand
uaaucaagaugguggaaca

SEQ ID NO: 2637841 - RNA, 19 nt, Homo sapiens
  misc_RNA (1)...(19): siRNA sense strand
ggagaaagacagggaaaga

SEQ ID NO: 2637842 - RNA, 19 nt, Homo sapiens
  misc_RNA (1)...(19): siRNA sense strand
cagaagaagugguccugaa

SEQ ID NO: 2637843 - RNA, 19 nt, Homo sapiens
  misc_RNA (1)...(19): siRNA sense strand
ggaacaagauuuugagcau

SEQ ID NO: 2637844 - RNA, 19 nt, Homo sapiens
  misc_RNA (1)...(19): siRNA sense strand
ggaagaaucugaaggcguu

SEQ ID NO: 2637845 - RNA, 19 nt, Homo sapiens
  misc_RNA (1)...(19): siRNA sense strand
ccugauuacuggagugaca

SEQ ID NO: 2637846 - RNA, 19 nt, Homo sapiens
  misc_RNA (1)...(19): siRNA sense strand
ggucagagucucaagguga

SEQ ID NO: 2637847 - RNA, 19 nt, Homo sapiens
  misc_RNA (1)...(19): siRNA sense strand
aggaagagacagaugaaga

SEQ ID NO: 2637848 - RNA, 19 nt, Homo sapiens
  misc_RNA (1)...(19): siRNA sense strand
augaagagacggauguaua

SEQ ID NO: 2637849 - RNA, 19 nt, Homo sapiens
  misc_RNA (1)...(19): siRNA sense strand
ggacuugggcagaaagaga

SEQ ID NO: 2637850 - RNA, 19 nt, Homo sapiens
  misc_RNA (1)...(19): siRNA sense strand
uguuaaaggaggauccaaa

SEQ ID NO: 2637851 - RNA, 19 nt, Homo sapiens
  misc_RNA (1)...(19): siRNA sense strand
ccagagagauggaaaacaa

SEQ ID NO: 2637852 - RNA, 19 nt, Homo sapiens
  misc_RNA (1)...(19): siRNA sense strand
agaaacagcuaaagaggca

SEQ ID NO: 2637853 - RNA, 19 nt, Homo sapiens
  misc_RNA (1)...(19): siRNA sense strand
agguuaaugguaagaguua

SEQ ID NO: 2637854 - RNA, 19 nt, Homo sapiens
  misc_RNA (1)...(19): siRNA sense strand
cuaaguugcuauugggaca

SEQ ID NO: 2637855 - RNA, 19 nt, Homo sapiens
  misc_RNA (1)...(19): siRNA sense strand
auaaauggaaagagaguga

SEQ ID NO: 2637856 - RNA, 19 nt, Homo sapiens
  misc_RNA (1)...(19): siRNA sense strand
cuagaugaauacuuggaaa

SEQ ID NO: 2637857 - RNA, 19 nt, Homo sapiens
  misc_RNA (1)...(19): siRNA sense strand
gggaggaggaggaacaauu

SEQ ID NO: 2637858 - RNA, 19 nt, Homo sapiens
  misc_RNA (1)...(19): siRNA sense strand
caaacaaagauucugguua

SEQ ID NO: 2637859 - RNA, 19 nt, Homo sapiens
  misc_RNA (1)...(19): siRNA sense strand
ccgcaaagguagugaaugc

SEQ ID NO: 2637860 - RNA, 19 nt, Homo sapiens
  misc_RNA (1)...(19): siRNA sense strand
ucuuaaagcagccaggaaa

SEQ ID NO: 2637861 - RNA, 19 nt, Homo sapiens
  misc_RNA (1)...(19): siRNA sense strand
gaauauucugauacggaaa

SEQ ID NO: 2637862 - RNA, 19 nt, Homo sapiens
  misc_RNA (1)...(19): siRNA sense strand
ugaaacaggaagagacaga

SEQ ID NO: 2637863 - RNA, 19 nt, Homo sapiens
  misc_RNA (1)...(19): siRNA sense strand
aggaacaauugaaagagaa

SEQ ID NO: 2637864 - RNA, 19 nt, Homo sapiens
  misc_RNA (1)...(19): siRNA sense strand
aggagaaacagcagauuau

SEQ ID NO: 2637865 - RNA, 19 nt, Homo sapiens
  misc_RNA (1)...(19): siRNA sense strand
accaaguucugcagggaaa

SEQ ID NO: 2637866 - RNA, 19 nt, Homo sapiens
  misc_RNA (1)...(19): siRNA sense strand
gaaggcaagcugauggaaa

SEQ ID NO: 2637867 - RNA, 19 nt, Homo sapiens
  misc_RNA (1)...(19): siRNA sense strand
cguggaaacuaaagaaacu

SEQ ID NO: 2637868 - RNA, 19 nt, Homo sapiens
  misc_RNA (1)...(19): siRNA sense strand
cagacaaauugauaggaca

SEQ ID NO: 2637869 - RNA, 19 nt, Homo sapiens
  misc_RNA (1)...(19): siRNA sense strand
ugaaagacaccgucaggaa

SEQ ID NO: 2637870 - RNA, 19 nt, Homo sapiens
  misc_RNA (1)...(19): siRNA sense strand
agagugaagucaaaggauu

SEQ ID NO: 2637871 - RNA, 19 nt, Homo sapiens
  misc_RNA (1)...(19): siRNA sense strand
acauggaagaugaggauga

SEQ ID NO: 2637872 - RNA, 19 nt, Homo sapiens
  misc_RNA (1)...(19): siRNA sense strand
cagcuaaagaggcacaaua

SEQ ID NO: 2637873 - RNA, 19 nt, Homo sapiens
  misc_RNA (1)...(19): siRNA sense strand
agguguugcuaaagcuaaa

SEQ ID NO: 2637874 - RNA, 19 nt, Homo sapiens
  misc_RNA (1)...(19): siRNA sense strand
ccacaucucgaaaggauaa

SEQ ID NO: 2637875 - RNA, 19 nt, Homo sapiens
  misc_RNA (1)...(19): siRNA sense strand
ggauucaguuggagacuca

SEQ ID NO: 2637876 - RNA, 19 nt, Homo sapiens
  misc_RNA (1)...(19): siRNA sense strand
gguuacagagcaagaauuu

SEQ ID NO: 2637877 - RNA, 19 nt, Homo sapiens
  misc_RNA (1)...(19): siRNA sense strand
aggaggaacaauugaaaga

SEQ ID NO: 2637878 - RNA, 19 nt, Homo sapiens
  misc_RNA (1)...(19): siRNA sense strand
aguagaaggugaaguagau

SEQ ID NO: 2637879 - RNA, 19 nt, Homo sapiens
  misc_RNA (1)...(19): siRNA sense strand
ugaaguagauccagaacca

SEQ ID NO: 2637880 - RNA, 19 nt, Homo sapiens
  misc_RNA (1)...(19): siRNA sense strand
cagaagauaccuggaguua

SEQ ID NO: 2637881 - RNA, 19 nt, Homo sapiens
  misc_RNA (1)...(19): siRNA sense strand
gugaugaagaagaggaaga

SEQ ID NO: 2637882 - RNA, 19 nt, Homo sapiens
  misc_RNA (1)...(19): siRNA sense strand
gggugaugaagaagaggaa

SEQ ID NO: 2637883 - RNA, 19 nt, Homo sapiens
  misc_RNA (1)...(19): siRNA sense strand
ggacagagugccaggcuca

SEQ ID NO: 2637884 - RNA, 19 nt, Homo sapiens
  misc_RNA (1)...(19): siRNA sense strand
augaagaagaggaagaaga

SEQ ID NO: 2637885 - RNA, 19 nt, Homo sapiens
  misc_RNA (1)...(19): siRNA sense strand
guucagugaucgaaggcuu

SEQ ID NO: 2637886 - RNA, 19 nt, Homo sapiens
  misc_RNA (1)...(19): siRNA sense strand
agaaagugggcaaggugua

SEQ ID NO: 2637887 - RNA, 19 nt, Homo sapiens
  misc_RNA (1)...(19): siRNA sense strand
ccgaggugaaggauaguaa

SEQ ID NO: 2637888 - RNA, 19 nt, Homo sapiens
  misc_RNA (1)...(19): siRNA sense strand
gugagcagcugguggcaga

SEQ ID NO: 2637889 - RNA, 19 nt, Homo sapiens
  misc_RNA (1)...(19): siRNA sense strand
gugccugcucuguggauua

SEQ ID NO: 2637890 - RNA, 19 nt, Homo sapiens
  misc_RNA (1)...(19): siRNA sense strand
aagaagaggaagaagagga

SEQ ID NO: 2637891 - RNA, 19 nt, Homo sapiens
  misc_RNA (1)...(19): siRNA sense strand
ggaaaagcucacaguacaa

SEQ ID NO: 2637892 - RNA, 19 nt, Homo sapiens
  misc_RNA (1)...(19): siRNA sense strand
ggguuugggacguggcaga

SEQ ID NO: 2637893 - RNA, 19 nt, Homo sapiens
  misc_RNA (1)...(19): siRNA sense strand
gagcugaggaacauagaca

SEQ ID NO: 2637894 - RNA, 19 nt, Homo sapiens
  misc_RNA (1)...(19): siRNA sense strand
aggucagagucucggagua

SEQ ID NO: 2637895 - RNA, 19 nt, Homo sapiens
  misc_RNA (1)...(19): siRNA sense strand
cucacuagccagaaugaaa

SEQ ID NO: 2637896 - RNA, 19 nt, Homo sapiens
  misc_RNA (1)...(19): siRNA sense strand
gaguaaggcaggaaaccga

SEQ ID NO: 2637897 - RNA, 19 nt, Homo sapiens
  misc_RNA (1)...(19): siRNA sense strand
ggccuguggcagaggaaaa

SEQ ID NO: 2637898 - RNA, 19 nt, Homo sapiens
  misc_RNA (1)...(19): siRNA sense strand
gugagaugcugaaggugga

SEQ ID NO: 2637899 - RNA, 19 nt, Homo sapiens
  misc_RNA (1)...(19): siRNA sense strand
acagugacaaggagggaga

SEQ ID NO: 2637900 - RNA, 19 nt, Homo sapiens
  misc_RNA (1)...(19): siRNA sense strand
gguucagccagguguggaa

SEQ ID NO: 2637901 - RNA, 19 nt, Homo sapiens
  misc_RNA (1)...(19): siRNA sense strand
aggaagaagaggagggagg

SEQ ID NO: 2637902 - RNA, 19 nt, Homo sapiens
  misc_RNA (1)...(19): siRNA sense strand
ggagaaggugcugggaauu

SEQ ID NO: 2637903 - RNA, 19 nt, Homo sapiens
  misc_RNA (1)...(19): siRNA sense strand
ggguggagcugaggaacau

SEQ ID NO: 2637904 - RNA, 19 nt, Homo sapiens
  misc_RNA (1)...(19): siRNA sense strand
agacaaagcugaugcaucc

SEQ ID NO: 2637905 - RNA, 19 nt, Homo sapiens
  misc_RNA (1)...(19): siRNA sense strand
guggaaagcagaagaagcu

SEQ ID NO: 2637906 - RNA, 19 nt, Homo sapiens
  misc_RNA (1)...(19): siRNA sense strand
ggacagacauugcuagcgu

SEQ ID NO: 2637907 - RNA, 19 nt, Homo sapiens
  misc_RNA (1)...(19): siRNA sense strand
agcugagggugaugaagaa

SEQ ID NO: 2637908 - RNA, 19 nt, Homo sapiens
  misc_RNA (1)...(19): siRNA sense strand
gaacauagacagcuucaca

SEQ ID NO: 2637909 - RNA, 19 nt, Homo sapiens
  misc_RNA (1)...(19): siRNA sense strand
gcaggaguaaggcaggaaa

SEQ ID NO: 2637910 - RNA, 19 nt, Homo sapiens
  misc_RNA (1)...(19): siRNA sense strand
ugaggaacauagacagcuu

SEQ ID NO: 2637911 - RNA, 19 nt, Homo sapiens
  misc_RNA (1)...(19): siRNA sense strand
cggcaagcagcaaggacca

SEQ ID NO: 2637912 - RNA, 19 nt, Homo sapiens
  misc_RNA (1)...(19): siRNA sense strand
aggaaaagcucacaguaca

SEQ ID NO: 2637913 - RNA, 19 nt, Homo sapiens
  misc_RNA (1)...(19): siRNA sense strand
gugugggccuggaagaaaa

SEQ ID NO: 2637914 - RNA, 19 nt, Homo sapiens
  misc_RNA (1)...(19): siRNA sense strand
gaagcuguuuaaaggguca

SEQ ID NO: 2637915 - RNA, 19 nt, Homo sapiens
  misc_RNA (1)...(19): siRNA sense strand
ggaaacacaaacagcacca

SEQ ID NO: 2637916 - RNA, 19 nt, Homo sapiens
  misc_RNA (1)...(19): siRNA sense strand
ccgagcugcaggagcacaa

SEQ ID NO: 2637917 - RNA, 19 nt, Homo sapiens
  misc_RNA (1)...(19): siRNA sense strand
acauugucucugugggcua

SEQ ID NO: 2637918 - RNA, 19 nt, Homo sapiens
  misc_RNA (1)...(19): siRNA sense strand
ugauguggccuguggcaga

SEQ ID NO: 2637919 - RNA, 19 nt, Homo sapiens
  misc_RNA (1)...(19): siRNA sense strand
ggcccaugacucugagauu

SEQ ID NO: 2637920 - RNA, 19 nt, Homo sapiens
  misc_RNA (1)...(19): siRNA sense strand
gagccaggacucagagcca

SEQ ID NO: 2637921 - RNA, 19 nt, Homo sapiens
  misc_RNA (1)...(19): siRNA sense strand
ccucaaaggugaaugccac

SEQ ID NO: 2637922 - RNA, 19 nt, Homo sapiens
  misc_RNA (1)...(19): siRNA sense strand
ucuggaguguggaggucua

SEQ ID NO: 2637923 - RNA, 19 nt, Homo sapiens
  misc_RNA (1)...(19): siRNA sense strand
gcugccuggaggagacaaa

SEQ ID NO: 2637924 - RNA, 19 nt, Homo sapiens
  misc_RNA (1)...(19): siRNA sense strand
gcacugaugucgagaccag

SEQ ID NO: 2637925 - RNA, 19 nt, Homo sapiens
  misc_RNA (1)...(19): siRNA sense strand
uggguggagcugaggaaca

SEQ ID NO: 2637926 - RNA, 19 nt, Homo sapiens
  misc_RNA (1)...(19): siRNA sense strand
ggucugaaacugcuagcau

SEQ ID NO: 2637927 - RNA, 19 nt, Homo sapiens
  misc_RNA (1)...(19): siRNA sense strand
ggcagcaggagcucagaaa

SEQ ID NO: 2637928 - RNA, 19 nt, Homo sapiens
  misc_RNA (1)...(19): siRNA sense strand
uggacagcaucuagcauca

SEQ ID NO: 2637929 - RNA, 19 nt, Homo sapiens
  misc_RNA (1)...(19): siRNA sense strand
gcgcagaguuggaggcuca

SEQ ID NO: 2637930 - RNA, 19 nt, Homo sapiens
  misc_RNA (1)...(19): siRNA sense strand
gagcaggaguuucuggaca

SEQ ID NO: 2637931 - RNA, 19 nt, Homo sapiens
  misc_RNA (1)...(19): siRNA sense strand
gugaaggugcugagggcca

SEQ ID NO: 2637932 - RNA, 19 nt, Homo sapiens
  misc_RNA (1)...(19): siRNA sense strand
cacaagagcugcaggugga

SEQ ID NO: 2637933 - RNA, 19 nt, Homo sapiens
  misc_RNA (1)...(19): siRNA sense strand
uguccaaagccgacugcua

SEQ ID NO: 2637934 - RNA, 19 nt, Homo sapiens
  misc_RNA (1)...(19): siRNA sense strand
ugagcaugaagguggaaau

SEQ ID NO: 2637935 - RNA, 19 nt, Homo sapiens
  misc_RNA (1)...(19): siRNA sense strand
cuggagugguacagaggca

SEQ ID NO: 2637936 - RNA, 19 nt, Homo sapiens
  misc_RNA (1)...(19): siRNA sense strand
cagcugaggagaaggccuu

SEQ ID NO: 2637937 - RNA, 19 nt, Homo sapiens
  misc_RNA (1)...(19): siRNA sense strand
ggaccuagaccuacgccuu

SEQ ID NO: 2637938 - RNA, 19 nt, Homo sapiens
  misc_RNA (1)...(19): siRNA sense strand
ccgaguggaaugagaccuu

SEQ ID NO: 2637939 - RNA, 19 nt, Homo sapiens
  misc_RNA (1)...(19): siRNA sense strand
gugcugagcuccaggcuac

SEQ ID NO: 2637940 - RNA, 19 nt, Homo sapiens
  misc_RNA (1)...(19): siRNA sense strand
cgacaaacagcugaggaga

SEQ ID NO: 2637941 - RNA, 19 nt, Homo sapiens
  misc_RNA (1)...(19): siRNA sense strand
acgagaagccacagcucuu

SEQ ID NO: 2637942 - RNA, 19 nt, Homo sapiens
  misc_RNA (1)...(19): siRNA sense strand
cccuaggccaggaggaaca

SEQ ID NO: 2637943 - RNA, 19 nt, Homo sapiens
  misc_RNA (1)...(19): siRNA sense strand
aggcaaaggcccagagaaa

SEQ ID NO: 2637944 - RNA, 19 nt, Homo sapiens
  misc_RNA (1)...(19): siRNA sense strand
caauguaagccuugagaaa

SEQ ID NO: 2637945 - RNA, 19 nt, Homo sapiens
  misc_RNA (1)...(19): siRNA sense strand
gaucaaagaccaagcgcaa

SEQ ID NO: 2637946 - RNA, 19 nt, Homo sapiens
  misc_RNA (1)...(19): siRNA sense strand
uggcagagcaggacagaaa

SEQ ID NO: 2637947 - RNA, 19 nt, Homo sapiens
  misc_RNA (1)...(19): siRNA sense strand
caucagagaaucagguaaa

SEQ ID NO: 2637948 - RNA, 19 nt, Homo sapiens
  misc_RNA (1)...(19): siRNA sense strand
cuggaaagaaacagaauaa

SEQ ID NO: 2637949 - RNA, 19 nt, Homo sapiens
  misc_RNA (1)...(19): siRNA sense strand
gccaaaagcucaagguaaa

SEQ ID NO: 2637950 - RNA, 19 nt, Homo sapiens
  misc_RNA (1)...(19): siRNA sense strand
gugagaaagaggcgaguua

SEQ ID NO: 2637951 - RNA, 19 nt, Homo sapiens
  misc_RNA (1)...(19): siRNA sense strand
cuuuagcacuagugagaaa

SEQ ID NO: 2637952 - RNA, 19 nt, Homo sapiens
  misc_RNA (1)...(19): siRNA sense strand
uauugaaggaagaggauaa

SEQ ID NO: 2637953 - RNA, 19 nt, Homo sapiens
  misc_RNA (1)...(19): siRNA sense strand
cuuaggaagucuugaggaa

SEQ ID NO: 2637954 - RNA, 19 nt, Homo sapiens
  misc_RNA (1)...(19): siRNA sense strand
acaaaggaguaaugggaga

SEQ ID NO: 2637955 - RNA, 19 nt, Homo sapiens
  misc_RNA (1)...(19): siRNA sense strand
gaggagaggaaaugggauu

SEQ ID NO: 2637956 - RNA, 19 nt, Homo sapiens
  misc_RNA (1)...(19): siRNA sense strand
ggauuuaagugaagggucu

SEQ ID NO: 2637957 - RNA, 19 nt, Homo sapiens
  misc_RNA (1)...(19): siRNA sense strand
gaugaaauggcuaggcuaa

SEQ ID NO: 2637958 - RNA, 19 nt, Homo sapiens
  misc_RNA (1)...(19): siRNA sense strand
uggagaaguuucagauaau

SEQ ID NO: 2637959 - RNA, 19 nt, Homo sapiens
  misc_RNA (1)...(19): siRNA sense strand
ggacagaccaggacgaaca

SEQ ID NO: 2637960 - RNA, 19 nt, Homo sapiens
  misc_RNA (1)...(19): siRNA sense strand
ccugauugaugcagaggaa

SEQ ID NO: 2637961 - RNA, 19 nt, Homo sapiens
  misc_RNA (1)...(19): siRNA sense strand
agguaaaugcccuggaaau

SEQ ID NO: 2637962 - RNA, 19 nt, Homo sapiens
  misc_RNA (1)...(19): siRNA sense strand
ccacagagaaugaaagcau

SEQ ID NO: 2637963 - RNA, 19 nt, Homo sapiens
  misc_RNA (1)...(19): siRNA sense strand
gcguuugagggcagagaaa

SEQ ID NO: 2637964 - RNA, 19 nt, Homo sapiens
  misc_RNA (1)...(19): siRNA sense strand
auguaagccuugagaaaga

SEQ ID NO: 2637965 - RNA, 19 nt, Homo sapiens
  misc_RNA (1)...(19): siRNA sense strand
acagggaaagcgagagaaa

SEQ ID NO: 2637966 - RNA, 19 nt, Homo sapiens
  misc_RNA (1)...(19): siRNA sense strand
agguaaaguugaagaaaug

SEQ ID NO: 2637967 - RNA, 19 nt, Homo sapiens
  misc_RNA (1)...(19): siRNA sense strand
agaaacugccuuagagauu

SEQ ID NO: 2637968 - RNA, 19 nt, Homo sapiens
  misc_RNA (1)...(19): siRNA sense strand
aggcuaauuaggaguguaa

SEQ ID NO: 2637969 - RNA, 19 nt, Homo sapiens
  misc_RNA (1)...(19): siRNA sense strand
gggaagaucagcaagaaga

SEQ ID NO: 2637970 - RNA, 19 nt, Homo sapiens
  misc_RNA (1)...(19): siRNA sense strand
gaggaagagaagacagauu

SEQ ID NO: 2637971 - RNA, 19 nt, Homo sapiens
  misc_RNA (1)...(19): siRNA sense strand
aggaagaagagcuggauca

SEQ ID NO: 2637972 - RNA, 19 nt, Homo sapiens
  misc_RNA (1)...(19): siRNA sense strand
agaggaaacagcacagaaa

SEQ ID NO: 2637973 - RNA, 19 nt, Homo sapiens
  misc_RNA (1)...(19): siRNA sense strand
aggcagagaaggagacuga

SEQ ID NO: 2637974 - RNA, 19 nt, Homo sapiens
  misc_RNA (1)...(19): siRNA sense strand
ggaacucacagaagcgaaa

SEQ ID NO: 2637975 - RNA, 19 nt, Homo sapiens
  misc_RNA (1)...(19): siRNA sense strand
ccuucagaguugcaggaaa

SEQ ID NO: 2637976 - RNA, 19 nt, Homo sapiens
  misc_RNA (1)...(19): siRNA sense strand
ggaauuggagacugugaaa

SEQ ID NO: 2637977 - RNA, 19 nt, Homo sapiens
  misc_RNA (1)...(19): siRNA sense strand
cagaacaccaagagggaca

SEQ ID NO: 2637978 - RNA, 19 nt, Homo sapiens
  misc_RNA (1)...(19): siRNA sense strand
uugugauucuuuagggaaa

SEQ ID NO: 2637979 - RNA, 19 nt, Homo sapiens
  misc_RNA (1)...(19): siRNA sense strand
gaguagagcaucaggacca

SEQ ID NO: 2637980 - RNA, 19 nt, Homo sapiens
  misc_RNA (1)...(19): siRNA sense strand
gcugagaagagguaccaaa

SEQ ID NO: 2637981 - RNA, 19 nt, Homo sapiens
  misc_RNA (1)...(19): siRNA sense strand
auggaucauucaagagaaa

SEQ ID NO: 2637982 - RNA, 19 nt, Homo sapiens
  misc_RNA (1)...(19): siRNA sense strand
agagugaaccugugagaga

SEQ ID NO: 2637983 - RNA, 19 nt, Homo sapiens
  misc_RNA (1)...(19): siRNA sense strand
aggaaauguuagagggcgu

SEQ ID NO: 2637984 - RNA, 19 nt, Homo sapiens
  misc_RNA (1)...(19): siRNA sense strand
gaacaagagaagcugagaa

SEQ ID NO: 2637985 - RNA, 19 nt, Homo sapiens
  misc_RNA (1)...(19): siRNA sense strand
guuugagggcagagaaaga

SEQ ID NO: 2637986 - RNA, 19 nt, Homo sapiens
  misc_RNA (1)...(19): siRNA sense strand
ucaguagaucguagaguaa

SEQ ID NO: 2637987 - RNA, 19 nt, Homo sapiens
  misc_RNA (1)...(19): siRNA sense strand
guguaaugcagcuggaaaa

SEQ ID NO: 2637988 - RNA, 19 nt, Homo sapiens
  misc_RNA (1)...(19): siRNA sense strand
ccaaagauguuaacaggga

SEQ ID NO: 2637989 - RNA, 19 nt, Homo sapiens
  misc_RNA (1)...(19): siRNA sense strand
agagcaaguuggugguaga

SEQ ID NO: 2637990 - RNA, 19 nt, Homo sapiens
  misc_RNA (1)...(19): siRNA sense strand
agaagaaagccaugauuca

SEQ ID NO: 2637991 - RNA, 19 nt, Homo sapiens
  misc_RNA (1)...(19): siRNA sense strand
gaaagaaaccccagugaau

SEQ ID NO: 2637992 - RNA, 19 nt, Homo sapiens
  misc_RNA (1)...(19): siRNA sense strand
cgauggagguuaacagcau

SEQ ID NO: 2637993 - RNA, 19 nt, Homo sapiens
  misc_RNA (1)...(19): siRNA sense strand
uuacuaagccggacagaau

SEQ ID NO: 2637994 - RNA, 19 nt, Homo sapiens
  misc_RNA (1)...(19): siRNA sense strand
ggacagcagcccagagcau

SEQ ID NO: 2637995 - RNA, 19 nt, Homo sapiens
  misc_RNA (1)...(19): siRNA sense strand
acuccaggguccagaagaa

SEQ ID NO: 2637996 - RNA, 19 nt, Homo sapiens
  misc_RNA (1)...(19): siRNA sense strand
uagcaaaggaggagauacu

SEQ ID NO: 2637997 - RNA, 19 nt, Homo sapiens
  misc_RNA (1)...(19): siRNA sense strand
cggcagacuuagaaucauu

SEQ ID NO: 2637998 - RNA, 19 nt, Homo sapiens
  misc_RNA (1)...(19): siRNA sense strand
caugugaagucaagcagaa

SEQ ID NO: 2637999 - RNA, 19 nt, Homo sapiens
  misc_RNA (1)...(19): siRNA sense strand
cuggagcgauggagguuaa

SEQ ID NO: 2638000 - RNA, 19 nt, Homo sapiens
  misc_RNA (1)...(19): siRNA sense strand
ccaaccaagaagagccaaa

SEQ ID NO: 2638001 - RNA, 19 nt, Homo sapiens
  misc_RNA (1)...(19): siRNA sense strand
auggagaaguuucagauaa

SEQ ID NO: 2638002 - RNA, 19 nt, Homo sapiens
  misc_RNA (1)...(19): siRNA sense strand
cagcccgucuagagggaaa

SEQ ID NO: 2638003 - RNA, 19 nt, Homo sapiens
  misc_RNA (1)...(19): siRNA sense strand
caacagggaaagcgagaga

SEQ ID NO: 2638004 - RNA, 19 nt, Homo sapiens
  misc_RNA (1)...(19): siRNA sense strand
agagagaggcagaggaaac

SEQ ID NO: 2638005 - RNA, 19 nt, Homo sapiens
  misc_RNA (1)...(19): siRNA sense strand
ggaagaucagcaagaagaa

SEQ ID NO: 2638006 - RNA, 19 nt, Homo sapiens
  misc_RNA (1)...(19): siRNA sense strand
ggaaacugacagagagcca

SEQ ID NO: 2638007 - RNA, 19 nt, Homo sapiens
  misc_RNA (1)...(19): siRNA sense strand
agggaaagcgagagaaacu

SEQ ID NO: 2638008 - RNA, 19 nt, Homo sapiens
  misc_RNA (1)...(19): siRNA sense strand
ggacaauggccuagaagac

SEQ ID NO: 2638009 - RNA, 19 nt, Homo sapiens
  misc_RNA (1)...(19): siRNA sense strand
cgagauacccacagagacu

SEQ ID NO: 2638010 - RNA, 19 nt, Homo sapiens
  misc_RNA (1)...(19): siRNA sense strand
cuucagaguugcaggaaac

SEQ ID NO: 2638011 - RNA, 19 nt, Homo sapiens
  misc_RNA (1)...(19): siRNA sense strand
aggcagaccaucaauguaa

SEQ ID NO: 2638012 - RNA, 19 nt, Homo sapiens
  misc_RNA (1)...(19): siRNA sense strand
ccaguuggcccuaggguau

SEQ ID NO: 2638013 - RNA, 19 nt, Homo sapiens
  misc_RNA (1)...(19): siRNA sense strand
ggacaguuuaaaugccaaa

SEQ ID NO: 2638014 - RNA, 19 nt, Homo sapiens
  misc_RNA (1)...(19): siRNA sense strand
cuacaaaugcacaggucuu

SEQ ID NO: 2638015 - RNA, 19 nt, Homo sapiens
  misc_RNA (1)...(19): siRNA sense strand
gugaagucaagcagaacaa

SEQ ID NO: 2638016 - RNA, 19 nt, Homo sapiens
  misc_RNA (1)...(19): siRNA sense strand
aauaauggccaguuuguaa

SEQ ID NO: 2638017 - RNA, 19 nt, Homo sapiens
  misc_RNA (1)...(19): siRNA sense strand
cauaacagucccuugguaa

SEQ ID NO: 2638018 - RNA, 19 nt, Homo sapiens
  misc_RNA (1)...(19): siRNA sense strand
gguaacuggaguagagcau

SEQ ID NO: 2638019 - RNA, 19 nt, Homo sapiens
  misc_RNA (1)...(19): siRNA sense strand
ggcagaaggcagagaagga

SEQ ID NO: 2638020 - RNA, 19 nt, Homo sapiens
  misc_RNA (1)...(19): siRNA sense strand
gcacagaacuugaggcugc

SEQ ID NO: 2638021 - RNA, 19 nt, Homo sapiens
  misc_RNA (1)...(19): siRNA sense strand
aagaagagcagcacagaga

SEQ ID NO: 2638022 - RNA, 19 nt, Homo sapiens
  misc_RNA (1)...(19): siRNA sense strand
ccuaugagccagaggagga

SEQ ID NO: 2638023 - RNA, 19 nt, Homo sapiens
  misc_RNA (1)...(19): siRNA sense strand
cagcacugccucuggaaaa

SEQ ID NO: 2638024 - RNA, 19 nt, Homo sapiens
  misc_RNA (1)...(19): siRNA sense strand
aguggaagaaggagcggau

SEQ ID NO: 2638025 - RNA, 19 nt, Homo sapiens
  misc_RNA (1)...(19): siRNA sense strand
ccuaugagccagaggagga

SEQ ID NO: 2638026 - RNA, 19 nt, Homo sapiens
  misc_RNA (1)...(19): siRNA sense strand
cagcacugccucuggaaaa

SEQ ID NO: 2638027 - RNA, 19 nt, Homo sapiens
  misc_RNA (1)...(19): siRNA sense strand
cagugagaccagcaagaau

SEQ ID NO: 2638028 - RNA, 19 nt, Homo sapiens
  misc_RNA (1)...(19): siRNA sense strand
agagaaggucccugaaaau

SEQ ID NO: 2638029 - RNA, 19 nt, Homo sapiens
  misc_RNA (1)...(19): siRNA sense strand
aguggaagaaggagcggau

SEQ ID NO: 2638030 - RNA, 19 nt, Homo sapiens
  misc_RNA (1)...(19): siRNA sense strand
ggagacuggcgaaggcuca

SEQ ID NO: 2638031 - RNA, 19 nt, Homo sapiens
  misc_RNA (1)...(19): siRNA sense strand
uggcgaaggcucagcagga

SEQ ID NO: 2638032 - RNA, 19 nt, Homo sapiens
  misc_RNA (1)...(19): siRNA sense strand
ggacuaugaaagagagaaa

SEQ ID NO: 2638033 - RNA, 19 nt, Homo sapiens
  misc_RNA (1)...(19): siRNA sense strand
ccacagaauccaagaacaa

SEQ ID NO: 2638034 - RNA, 19 nt, Homo sapiens
  misc_RNA (1)...(19): siRNA sense strand
uggaaaagaaagagagaua

SEQ ID NO: 2638035 - RNA, 19 nt, Homo sapiens
  misc_RNA (1)...(19): siRNA sense strand
gcauaaagcaugugggauc

SEQ ID NO: 2638036 - RNA, 19 nt, Homo sapiens
  misc_RNA (1)...(19): siRNA sense strand
aggcagaaguacagcguuu

SEQ ID NO: 2638037 - RNA, 19 nt, Homo sapiens
  misc_RNA (1)...(19): siRNA sense strand
ccacaaggaacuuuggaaa

SEQ ID NO: 2638038 - RNA, 19 nt, Homo sapiens
  misc_RNA (1)...(19): siRNA sense strand
ccaacaagauaguggcuuu

SEQ ID NO: 2638039 - RNA, 19 nt, Homo sapiens
  misc_RNA (1)...(19): siRNA sense strand
caggagaagaucaaagaaa

SEQ ID NO: 2638040 - RNA, 19 nt, Homo sapiens
  misc_RNA (1)...(19): siRNA sense strand
ucauaaggcugauagauua

SEQ ID NO: 2638041 - RNA, 19 nt, Homo sapiens
  misc_RNA (1)...(19): siRNA sense strand
gcuaaagagaaauggaaga

SEQ ID NO: 2638042 - RNA, 19 nt, Homo sapiens
  misc_RNA (1)...(19): siRNA sense strand
ggaaauaccaagugaaucu

SEQ ID NO: 2638043 - RNA, 19 nt, Homo sapiens
  misc_RNA (1)...(19): siRNA sense strand
gagaacagcaugagagcau

SEQ ID NO: 2638044 - RNA, 19 nt, Homo sapiens
  misc_RNA (1)...(19): siRNA sense strand
guuauauucaggagaguaa

SEQ ID NO: 2638045 - RNA, 19 nt, Homo sapiens
  misc_RNA (1)...(19): siRNA sense strand
gaccagagucguagagaau

SEQ ID NO: 2638046 - RNA, 19 nt, Homo sapiens
  misc_RNA (1)...(19): siRNA sense strand
gaucaaacuauaaaggcaa

SEQ ID NO: 2638047 - RNA, 19 nt, Homo sapiens
  misc_RNA (1)...(19): siRNA sense strand
ggaaauaaacccucaccua

SEQ ID NO: 2638048 - RNA, 19 nt, Homo sapiens
  misc_RNA (1)...(19): siRNA sense strand
cgugaaagccuauuagcaa

SEQ ID NO: 2638049 - RNA, 19 nt, Homo sapiens
  misc_RNA (1)...(19): siRNA sense strand
acaaggaacuuuggaaaua

SEQ ID NO: 2638050 - RNA, 19 nt, Homo sapiens
  misc_RNA (1)...(19): siRNA sense strand
ccaagaaagagauggcaau

SEQ ID NO: 2638051 - RNA, 19 nt, Homo sapiens
  misc_RNA (1)...(19): siRNA sense strand
cuggaaaggaauuggaaga

SEQ ID NO: 2638052 - RNA, 19 nt, Homo sapiens
  misc_RNA (1)...(19): siRNA sense strand
cagcauuguacaagaagaa

SEQ ID NO: 2638053 - RNA, 19 nt, Homo sapiens
  misc_RNA (1)...(19): siRNA sense strand
aagcagaagcugauaagaa

SEQ ID NO: 2638054 - RNA, 19 nt, Homo sapiens
  misc_RNA (1)...(19): siRNA sense strand
gcacaagaagaaagaccua

SEQ ID NO: 2638055 - RNA, 19 nt, Homo sapiens
  misc_RNA (1)...(19): siRNA sense strand
aggaaagaucagugugaau

SEQ ID NO: 2638056 - RNA, 19 nt, Homo sapiens
  misc_RNA (1)...(19): siRNA sense strand
aucaagaaguccagaacaa

SEQ ID NO: 2638057 - RNA, 19 nt, Homo sapiens
  misc_RNA (1)...(19): siRNA sense strand
caaugaaaugucagcguua

SEQ ID NO: 2638058 - RNA, 19 nt, Homo sapiens
  misc_RNA (1)...(19): siRNA sense strand
ggaucaaacuauaaaggca

SEQ ID NO: 2638059 - RNA, 19 nt, Homo sapiens
  misc_RNA (1)...(19): siRNA sense strand
aggagaagaucaaagaaaa

SEQ ID NO: 2638060 - RNA, 19 nt, Homo sapiens
  misc_RNA (1)...(19): siRNA sense strand
gguagaaauagcugugcaa

SEQ ID NO: 2638061 - RNA, 19 nt, Homo sapiens
  misc_RNA (1)...(19): siRNA sense strand
caacagaagcagaagcuga

SEQ ID NO: 2638062 - RNA, 19 nt, Homo sapiens
  misc_RNA (1)...(19): siRNA sense strand
uuacaaaggcuguuagaga

SEQ ID NO: 2638063 - RNA, 19 nt, Homo sapiens
  misc_RNA (1)...(19): siRNA sense strand
aguuaaaggcagaaguaca

SEQ ID NO: 2638064 - RNA, 19 nt, Homo sapiens
  misc_RNA (1)...(19): siRNA sense strand
ucaaauacgugaaagccua

SEQ ID NO: 2638065 - RNA, 19 nt, Homo sapiens
  misc_RNA (1)...(19): siRNA sense strand
cuagaagugugcagagaga

SEQ ID NO: 2638066 - RNA, 19 nt, Homo sapiens
  misc_RNA (1)...(19): siRNA sense strand
aggaauuggaagagaagau

SEQ ID NO: 2638067 - RNA, 19 nt, Homo sapiens
  misc_RNA (1)...(19): siRNA sense strand
agugaauggaacaaagaaa

SEQ ID NO: 2638068 - RNA, 19 nt, Homo sapiens
  misc_RNA (1)...(19): siRNA sense strand
aggcaaagcaggaauguca

SEQ ID NO: 2638069 - RNA, 19 nt, Homo sapiens
  misc_RNA (1)...(19): siRNA sense strand
uaacaaagcaaaagagaga

SEQ ID NO: 2638070 - RNA, 19 nt, Homo sapiens
  misc_RNA (1)...(19): siRNA sense strand
gcuaaggcucggagugaau

SEQ ID NO: 2638071 - RNA, 19 nt, Homo sapiens
  misc_RNA (1)...(19): siRNA sense strand
gagcaagauuaccggcaau

SEQ ID NO: 2638072 - RNA, 19 nt, Homo sapiens
  misc_RNA (1)...(19): siRNA sense strand
ugucaagaucugaaaggaa

SEQ ID NO: 2638073 - RNA, 19 nt, Homo sapiens
  misc_RNA (1)...(19): siRNA sense strand
agaaagaccuacucaguga

SEQ ID NO: 2638074 - RNA, 19 nt, Homo sapiens
  misc_RNA (1)...(19): siRNA sense strand
aguaugacgaagaggacua

SEQ ID NO: 2638075 - RNA, 19 nt, Homo sapiens
  misc_RNA (1)...(19): siRNA sense strand
acucagagcaucagagcau

SEQ ID NO: 2638076 - RNA, 19 nt, Homo sapiens
  misc_RNA (1)...(19): siRNA sense strand
cauauaaccuuucgcgauu

SEQ ID NO: 2638077 - RNA, 19 nt, Homo sapiens
  misc_RNA (1)...(19): siRNA sense strand
augaagaacagaugaucaa

SEQ ID NO: 2638078 - RNA, 19 nt, Homo sapiens
  misc_RNA (1)...(19): siRNA sense strand
agaccagagucguagagaa

SEQ ID NO: 2638079 - RNA, 19 nt, Homo sapiens
  misc_RNA (1)...(19): siRNA sense strand
ggacuaugcaggaagccaa

SEQ ID NO: 2638080 - RNA, 19 nt, Homo sapiens
  misc_RNA (1)...(19): siRNA sense strand
cagauacagaggaaaguaa

SEQ ID NO: 2638081 - RNA, 19 nt, Homo sapiens
  misc_RNA (1)...(19): siRNA sense strand
gauaacaggaagugacaca

SEQ ID NO: 2638082 - RNA, 19 nt, Homo sapiens
  misc_RNA (1)...(19): siRNA sense strand
gauacagaggaaaguaaua

SEQ ID NO: 2638083 - RNA, 19 nt, Homo sapiens
  misc_RNA (1)...(19): siRNA sense strand
ugaacaaggcuuugcaaga

SEQ ID NO: 2638084 - RNA, 19 nt, Homo sapiens
  misc_RNA (1)...(19): siRNA sense strand
uagaaauagcugugcaaaa

SEQ ID NO: 2638085 - RNA, 19 nt, Homo sapiens
  misc_RNA (1)...(19): siRNA sense strand
aaaugaaagugaacgucaa

SEQ ID NO: 2638086 - RNA, 19 nt, Homo sapiens
  misc_RNA (1)...(19): siRNA sense strand
gaaaagaaagagagauaca

SEQ ID NO: 2638087 - RNA, 19 nt, Homo sapiens
  misc_RNA (1)...(19): siRNA sense strand
acucagaaggagaauuaaa

SEQ ID NO: 2638088 - RNA, 19 nt, Homo sapiens
  misc_RNA (1)...(19): siRNA sense strand
ugugaaggcagaacagaaa

SEQ ID NO: 2638089 - RNA, 19 nt, Homo sapiens
  misc_RNA (1)...(19): siRNA sense strand
aaaagaaggggcugagaaa

SEQ ID NO: 2638090 - RNA, 19 nt, Homo sapiens
  misc_RNA (1)...(19): siRNA sense strand
acuuagaacaagagaagga

SEQ ID NO: 2638091 - RNA, 19 nt, Homo sapiens
  misc_RNA (1)...(19): siRNA sense strand
gaauguuucuccugaguuu

SEQ ID NO: 2638092 - RNA, 19 nt, Homo sapiens
  misc_RNA (1)...(19): siRNA sense strand
cauaaggcugauagauuaa

SEQ ID NO: 2638093 - RNA, 19 nt, Homo sapiens
  misc_RNA (1)...(19): siRNA sense strand
ccuuaaagaaugugaagaa

SEQ ID NO: 2638094 - RNA, 19 nt, Homo sapiens
  misc_RNA (1)...(19): siRNA sense strand
agaaauaaguauggagcaa

SEQ ID NO: 2638095 - RNA, 19 nt, Homo sapiens
  misc_RNA (1)...(19): siRNA sense strand
ccuuaaugguucugaggaa

SEQ ID NO: 2638096 - RNA, 19 nt, Homo sapiens
  misc_RNA (1)...(19): siRNA sense strand
gaagaaagcuuuagcagca

SEQ ID NO: 2638097 - RNA, 19 nt, Homo sapiens
  misc_RNA (1)...(19): siRNA sense strand
cguuaugggucuaagagaa

SEQ ID NO: 2638098 - RNA, 19 nt, Homo sapiens
  misc_RNA (1)...(19): siRNA sense strand
cuucuaaaguauuggauga

SEQ ID NO: 2638099 - RNA, 19 nt, Homo sapiens
  misc_RNA (1)...(19): siRNA sense strand
aggaggaggaggaagauua

SEQ ID NO: 2638100 - RNA, 19 nt, Homo sapiens
  misc_RNA (1)...(19): siRNA sense strand
cuguagaagugcagcucaa

SEQ ID NO: 2638101 - RNA, 19 nt, Homo sapiens
  misc_RNA (1)...(19): siRNA sense strand
augcuaaggaugagaauau

SEQ ID NO: 2638102 - RNA, 19 nt, Homo sapiens
  misc_RNA (1)...(19): siRNA sense strand
cagcaggggcuuugagaaa

SEQ ID NO: 2638103 - RNA, 19 nt, Homo sapiens
  misc_RNA (1)...(19): siRNA sense strand
cagaaagaagacagaauuu

SEQ ID NO: 2638104 - RNA, 19 nt, Homo sapiens
  misc_RNA (1)...(19): siRNA sense strand
agcuacaagugcugggaaa

SEQ ID NO: 2638105 - RNA, 19 nt, Homo sapiens
  misc_RNA (1)...(19): siRNA sense strand
cagcagaaguccagcaacu

SEQ ID NO: 2638106 - RNA, 19 nt, Homo sapiens
  misc_RNA (1)...(19): siRNA sense strand
uggcaugcuugaagaagaa

SEQ ID NO: 2638107 - RNA, 19 nt, Homo sapiens
  misc_RNA (1)...(19): siRNA sense strand
aagaagaagaagaugaaga

SEQ ID NO: 2638108 - RNA, 19 nt, Homo sapiens
  misc_RNA (1)...(19): siRNA sense strand
gcaaaagagaccagauaau

SEQ ID NO: 2638109 - RNA, 19 nt, Homo sapiens
  misc_RNA (1)...(19): siRNA sense strand
gugauaaagaggaagugaa

SEQ ID NO: 2638110 - RNA, 19 nt, Homo sapiens
  misc_RNA (1)...(19): siRNA sense strand
cuguuagcguagugggaau

SEQ ID NO: 2638111 - RNA, 19 nt, Homo sapiens
  misc_RNA (1)...(19): siRNA sense strand
caucagaaaaugagaaaga

SEQ ID NO: 2638112 - RNA, 19 nt, Homo sapiens
  misc_RNA (1)...(19): siRNA sense strand
aaacaguaacagaggauca

SEQ ID NO: 2638113 - RNA, 19 nt, Homo sapiens
  misc_RNA (1)...(19): siRNA sense strand
guagcuacucagaaagaaa

SEQ ID NO: 2638114 - RNA, 19 nt, Homo sapiens
  misc_RNA (1)...(19): siRNA sense strand
agucagaagaagaaagcuu

SEQ ID NO: 2638115 - RNA, 19 nt, Homo sapiens
  misc_RNA (1)...(19): siRNA sense strand
agcaagugauaaagaggaa

SEQ ID NO: 2638116 - RNA, 19 nt, Homo sapiens
  misc_RNA (1)...(19): siRNA sense strand
ccauagaagcgauccaaau

SEQ ID NO: 2638117 - RNA, 19 nt, Homo sapiens
  misc_RNA (1)...(19): siRNA sense strand
gcuugaagaagaagaagau

SEQ ID NO: 2638118 - RNA, 19 nt, Homo sapiens
  misc_RNA (1)...(19): siRNA sense strand
augaggaggaggaggaaga

SEQ ID NO: 2638119 - RNA, 19 nt, Homo sapiens
  misc_RNA (1)...(19): siRNA sense strand
gcaaaaggccgcuggugaa

SEQ ID NO: 2638120 - RNA, 19 nt, Homo sapiens
  misc_RNA (1)...(19): siRNA sense strand
cgacauugacagugauagu

SEQ ID NO: 2638121 - RNA, 19 nt, Homo sapiens
  misc_RNA (1)...(19): siRNA sense strand
gcauuuaagcucuagucaa

SEQ ID NO: 2638122 - RNA, 19 nt, Homo sapiens
  misc_RNA (1)...(19): siRNA sense strand
ccaggaaagcauauaaaga

SEQ ID NO: 2638123 - RNA, 19 nt, Homo sapiens
  misc_RNA (1)...(19): siRNA sense strand
agaagaagaagaugaagau

SEQ ID NO: 2638124 - RNA, 19 nt, Homo sapiens
  misc_RNA (1)...(19): siRNA sense strand
acccagagaacuauggaaa

SEQ ID NO: 2638125 - RNA, 19 nt, Homo sapiens
  misc_RNA (1)...(19): siRNA sense strand
uugaagaagaagaagauga

SEQ ID NO: 2638126 - RNA, 19 nt, Homo sapiens
  misc_RNA (1)...(19): siRNA sense strand
uucuagagguggaaggcaa

SEQ ID NO: 2638127 - RNA, 19 nt, Homo sapiens
  misc_RNA (1)...(19): siRNA sense strand
caggaaaaccaguccaaua

SEQ ID NO: 2638128 - RNA, 19 nt, Homo sapiens
  misc_RNA (1)...(19): siRNA sense strand
gugugcaggugguguaaau

SEQ ID NO: 2638129 - RNA, 19 nt, Homo sapiens
  misc_RNA (1)...(19): siRNA sense strand
aaggaaaagagaaggaaau

SEQ ID NO: 2638130 - RNA, 19 nt, Homo sapiens
  misc_RNA (1)...(19): siRNA sense strand
caaugauauacgauggcaa

SEQ ID NO: 2638131 - RNA, 19 nt, Homo sapiens
  misc_RNA (1)...(19): siRNA sense strand
agaaacaguaacagaggau

SEQ ID NO: 2638132 - RNA, 19 nt, Homo sapiens
  misc_RNA (1)...(19): siRNA sense strand
gcaaacugaacaaagaaau

SEQ ID NO: 2638133 - RNA, 19 nt, Homo sapiens
  misc_RNA (1)...(19): siRNA sense strand
aagagaaggaaauugcaaa

SEQ ID NO: 2638134 - RNA, 19 nt, Homo sapiens
  misc_RNA (1)...(19): siRNA sense strand
uaucaaaagcagcuggaaa

SEQ ID NO: 2638135 - RNA, 19 nt, Homo sapiens
  misc_RNA (1)...(19): siRNA sense strand
cagcaauggaacaggagca

SEQ ID NO: 2638136 - RNA, 19 nt, Homo sapiens
  misc_RNA (1)...(19): siRNA sense strand
cugaggaagccuuaaagaa

SEQ ID NO: 2638137 - RNA, 19 nt, Homo sapiens
  misc_RNA (1)...(19): siRNA sense strand
ucuaauuacacaacgcaaa

SEQ ID NO: 2638138 - RNA, 19 nt, Homo sapiens
  misc_RNA (1)...(19): siRNA sense strand
gaaagaaacaaaugcagca

SEQ ID NO: 2638139 - RNA, 19 nt, Homo sapiens
  misc_RNA (1)...(19): siRNA sense strand
gcaacaaugcucuggaagu

SEQ ID NO: 2638140 - RNA, 19 nt, Homo sapiens
  misc_RNA (1)...(19): siRNA sense strand
ucuaagagaaguuaccaaa

SEQ ID NO: 2638141 - RNA, 19 nt, Homo sapiens
  misc_RNA (1)...(19): siRNA sense strand
agaaaaugagaaagaggua

SEQ ID NO: 2638142 - RNA, 19 nt, Homo sapiens
  misc_RNA (1)...(19): siRNA sense strand
agaauugagucuugggucu

SEQ ID NO: 2638143 - RNA, 19 nt, Homo sapiens
  misc_RNA (1)...(19): siRNA sense strand
auggaaaugcuaaggauga

SEQ ID NO: 2638144 - RNA, 19 nt, Homo sapiens
  misc_RNA (1)...(19): siRNA sense strand
guggagaagaggaagcaga

SEQ ID NO: 2638145 - RNA, 19 nt, Homo sapiens
  misc_RNA (1)...(19): siRNA sense strand
ggcaaacugaacaaagaaa

SEQ ID NO: 2638146 - RNA, 19 nt, Homo sapiens
  misc_RNA (1)...(19): siRNA sense strand
agauggguuucaagaacua

SEQ ID NO: 2638147 - RNA, 19 nt, Homo sapiens
  misc_RNA (1)...(19): siRNA sense strand
aagaggaagugaagccaga

SEQ ID NO: 2638148 - RNA, 19 nt, Homo sapiens
  misc_RNA (1)...(19): siRNA sense strand
uccaagggcaggagaagaa

SEQ ID NO: 2638149 - RNA, 19 nt, Homo sapiens
  misc_RNA (1)...(19): siRNA sense strand
gggcaggagaagaagagca

SEQ ID NO: 2638150 - RNA, 19 nt, Homo sapiens
  misc_RNA (1)...(19): siRNA sense strand
agacagaauuugcaaaaga

SEQ ID NO: 2638151 - RNA, 19 nt, Homo sapiens
  misc_RNA (1)...(19): siRNA sense strand
aucaaaagcagcuggaaaa

SEQ ID NO: 2638152 - RNA, 19 nt, Homo sapiens
  misc_RNA (1)...(19): siRNA sense strand
ccuuuaauucuguggacau

SEQ ID NO: 2638153 - RNA, 19 nt, Homo sapiens
  misc_RNA (1)...(19): siRNA sense strand
acagaaaugcacuuagauu

SEQ ID NO: 2638154 - RNA, 19 nt, Homo sapiens
  misc_RNA (1)...(19): siRNA sense strand
aagaugaagaugaggagga

SEQ ID NO: 2638155 - RNA, 19 nt, Homo sapiens
  misc_RNA (1)...(19): siRNA sense strand
ccuuaaagaaugugaagaa

SEQ ID NO: 2638156 - RNA, 19 nt, Homo sapiens
  misc_RNA (1)...(19): siRNA sense strand
agaaauaaguauggagcaa

SEQ ID NO: 2638157 - RNA, 19 nt, Homo sapiens
  misc_RNA (1)...(19): siRNA sense strand
ccuuaaugguucugaggaa

SEQ ID NO: 2638158 - RNA, 19 nt, Homo sapiens
  misc_RNA (1)...(19): siRNA sense strand
gaagaaagcuuuagcagca

SEQ ID NO: 2638159 - RNA, 19 nt, Homo sapiens
  misc_RNA (1)...(19): siRNA sense strand
cguuaugggucuaagagaa

SEQ ID NO: 2638160 - RNA, 19 nt, Homo sapiens
  misc_RNA (1)...(19): siRNA sense strand
cuucuaaaguauuggauga

SEQ ID NO: 2638161 - RNA, 19 nt, Homo sapiens
  misc_RNA (1)...(19): siRNA sense strand
aggaggaggaggaagauua

SEQ ID NO: 2638162 - RNA, 19 nt, Homo sapiens
  misc_RNA (1)...(19): siRNA sense strand
cuguagaagugcagcucaa

SEQ ID NO: 2638163 - RNA, 19 nt, Homo sapiens
  misc_RNA (1)...(19): siRNA sense strand
augcuaaggaugagaauau

SEQ ID NO: 2638164 - RNA, 19 nt, Homo sapiens
  misc_RNA (1)...(19): siRNA sense strand
cagcaggggcuuugagaaa

SEQ ID NO: 2638165 - RNA, 19 nt, Homo sapiens
  misc_RNA (1)...(19): siRNA sense strand
cagaaagaagacagaauuu

SEQ ID NO: 2638166 - RNA, 19 nt, Homo sapiens
  misc_RNA (1)...(19): siRNA sense strand
agcuacaagugcugggaaa

SEQ ID NO: 2638167 - RNA, 19 nt, Homo sapiens
  misc_RNA (1)...(19): siRNA sense strand
cagcagaaguccagcaacu

SEQ ID NO: 2638168 - RNA, 19 nt, Homo sapiens
  misc_RNA (1)...(19): siRNA sense strand
uggcaugcuugaagaagaa

SEQ ID NO: 2638169 - RNA, 19 nt, Homo sapiens
  misc_RNA (1)...(19): siRNA sense strand
aagaagaagaagaugaaga

SEQ ID NO: 2638170 - RNA, 19 nt, Homo sapiens
  misc_RNA (1)...(19): siRNA sense strand
gcaaaagagaccagauaau

SEQ ID NO: 2638171 - RNA, 19 nt, Homo sapiens
  misc_RNA (1)...(19): siRNA sense strand
gugauaaagaggaagugaa

SEQ ID NO: 2638172 - RNA, 19 nt, Homo sapiens
  misc_RNA (1)...(19): siRNA sense strand
cuguuagcguagugggaau

SEQ ID NO: 2638173 - RNA, 19 nt, Homo sapiens
  misc_RNA (1)...(19): siRNA sense strand
caucagaaaaugagaaaga

SEQ ID NO: 2638174 - RNA, 19 nt, Homo sapiens
  misc_RNA (1)...(19): siRNA sense strand
aaacaguaacagaggauca

SEQ ID NO: 2638175 - RNA, 19 nt, Homo sapiens
  misc_RNA (1)...(19): siRNA sense strand
guagcuacucagaaagaaa

SEQ ID NO: 2638176 - RNA, 19 nt, Homo sapiens
  misc_RNA (1)...(19): siRNA sense strand
agucagaagaagaaagcuu

SEQ ID NO: 2638177 - RNA, 19 nt, Homo sapiens
  misc_RNA (1)...(19): siRNA sense strand
agcaagugauaaagaggaa

SEQ ID NO: 2638178 - RNA, 19 nt, Homo sapiens
  misc_RNA (1)...(19): siRNA sense strand
ccauagaagcgauccaaau

SEQ ID NO: 2638179 - RNA, 19 nt, Homo sapiens
  misc_RNA (1)...(19): siRNA sense strand
gcuugaagaagaagaagau

SEQ ID NO: 2638180 - RNA, 19 nt, Homo sapiens
  misc_RNA (1)...(19): siRNA sense strand
augaggaggaggaggaaga

SEQ ID NO: 2638181 - RNA, 19 nt, Homo sapiens
  misc_RNA (1)...(19): siRNA sense strand
gcaaaaggccgcuggugaa

SEQ ID NO: 2638182 - RNA, 19 nt, Homo sapiens
  misc_RNA (1)...(19): siRNA sense strand
cgacauugacagugauagu

SEQ ID NO: 2638183 - RNA, 19 nt, Homo sapiens
  misc_RNA (1)...(19): siRNA sense strand
gcauuuaagcucuagucaa

SEQ ID NO: 2638184 - RNA, 19 nt, Homo sapiens
  misc_RNA (1)...(19): siRNA sense strand
ccaggaaagcauauaaaga

SEQ ID NO: 2638185 - RNA, 19 nt, Homo sapiens
  misc_RNA (1)...(19): siRNA sense strand
agaagaagaagaugaagau

SEQ ID NO: 2638186 - RNA, 19 nt, Homo sapiens
  misc_RNA (1)...(19): siRNA sense strand
acccagagaacuauggaaa

SEQ ID NO: 2638187 - RNA, 19 nt, Homo sapiens
  misc_RNA (1)...(19): siRNA sense strand
uugaagaagaagaagauga

SEQ ID NO: 2638188 - RNA, 19 nt, Homo sapiens
  misc_RNA (1)...(19): siRNA sense strand
uucuagagguggaaggcaa

SEQ ID NO: 2638189 - RNA, 19 nt, Homo sapiens
  misc_RNA (1)...(19): siRNA sense strand
caggaaaaccaguccaaua

SEQ ID NO: 2638190 - RNA, 19 nt, Homo sapiens
  misc_RNA (1)...(19): siRNA sense strand
gugugcaggugguguaaau

SEQ ID NO: 2638191 - RNA, 19 nt, Homo sapiens
  misc_RNA (1)...(19): siRNA sense strand
aaggaaaagagaaggaaau

SEQ ID NO: 2638192 - RNA, 19 nt, Homo sapiens
  misc_RNA (1)...(19): siRNA sense strand
caaugauauacgauggcaa

SEQ ID NO: 2638193 - RNA, 19 nt, Homo sapiens
  misc_RNA (1)...(19): siRNA sense strand
agaaacaguaacagaggau

SEQ ID NO: 2638194 - RNA, 19 nt, Homo sapiens
  misc_RNA (1)...(19): siRNA sense strand
gcaaacugaacaaagaaau

SEQ ID NO: 2638195 - RNA, 19 nt, Homo sapiens
  misc_RNA (1)...(19): siRNA sense strand
aagagaaggaaauugcaaa

SEQ ID NO: 2638196 - RNA, 19 nt, Homo sapiens
  misc_RNA (1)...(19): siRNA sense strand
uaucaaaagcagcuggaaa

SEQ ID NO: 2638197 - RNA, 19 nt, Homo sapiens
  misc_RNA (1)...(19): siRNA sense strand
cagcaauggaacaggagca

SEQ ID NO: 2638198 - RNA, 19 nt, Homo sapiens
  misc_RNA (1)...(19): siRNA sense strand
cugaggaagccuuaaagaa

SEQ ID NO: 2638199 - RNA, 19 nt, Homo sapiens
  misc_RNA (1)...(19): siRNA sense strand
ucuaauuacacaacgcaaa

SEQ ID NO: 2638200 - RNA, 19 nt, Homo sapiens
  misc_RNA (1)...(19): siRNA sense strand
gaaagaaacaaaugcagca

SEQ ID NO: 2638201 - RNA, 19 nt, Homo sapiens
  misc_RNA (1)...(19): siRNA sense strand
gcaacaaugcucuggaagu

SEQ ID NO: 2638202 - RNA, 19 nt, Homo sapiens
  misc_RNA (1)...(19): siRNA sense strand
ucuaagagaaguuaccaaa

SEQ ID NO: 2638203 - RNA, 19 nt, Homo sapiens
  misc_RNA (1)...(19): siRNA sense strand
agaaaaugagaaagaggua

SEQ ID NO: 2638204 - RNA, 19 nt, Homo sapiens
  misc_RNA (1)...(19): siRNA sense strand
agaauugagucuugggucu

SEQ ID NO: 2638205 - RNA, 19 nt, Homo sapiens
  misc_RNA (1)...(19): siRNA sense strand
auggaaaugcuaaggauga

SEQ ID NO: 2638206 - RNA, 19 nt, Homo sapiens
  misc_RNA (1)...(19): siRNA sense strand
guggagaagaggaagcaga

SEQ ID NO: 2638207 - RNA, 19 nt, Homo sapiens
  misc_RNA (1)...(19): siRNA sense strand
ggcaaacugaacaaagaaa

SEQ ID NO: 2638208 - RNA, 19 nt, Homo sapiens
  misc_RNA (1)...(19): siRNA sense strand
agauggguuucaagaacua

SEQ ID NO: 2638209 - RNA, 19 nt, Homo sapiens
  misc_RNA (1)...(19): siRNA sense strand
aagaggaagugaagccaga

SEQ ID NO: 2638210 - RNA, 19 nt, Homo sapiens
  misc_RNA (1)...(19): siRNA sense strand
uccaagggcaggagaagaa

SEQ ID NO: 2638211 - RNA, 19 nt, Homo sapiens
  misc_RNA (1)...(19): siRNA sense strand
gggcaggagaagaagagca

SEQ ID NO: 2638212 - RNA, 19 nt, Homo sapiens
  misc_RNA (1)...(19): siRNA sense strand
agacagaauuugcaaaaga

SEQ ID NO: 2638213 - RNA, 19 nt, Homo sapiens
  misc_RNA (1)...(19): siRNA sense strand
aucaaaagcagcuggaaaa

SEQ ID NO: 2638214 - RNA, 19 nt, Homo sapiens
  misc_RNA (1)...(19): siRNA sense strand
ccuuuaauucuguggacau

SEQ ID NO: 2638215 - RNA, 19 nt, Homo sapiens
  misc_RNA (1)...(19): siRNA sense strand
acagaaaugcacuuagauu

SEQ ID NO: 2638216 - RNA, 19 nt, Homo sapiens
  misc_RNA (1)...(19): siRNA sense strand
aagaugaagaugaggagga

SEQ ID NO: 2638217 - RNA, 19 nt, Homo sapiens
  misc_RNA (1)...(19): siRNA sense strand
cagaacaauccuagugaaa

SEQ ID NO: 2638218 - RNA, 19 nt, Homo sapiens
  misc_RNA (1)...(19): siRNA sense strand
ggggaaaauucgacuaaaa

SEQ ID NO: 2638219 - RNA, 19 nt, Homo sapiens
  misc_RNA (1)...(19): siRNA sense strand
agaaaugagcaauggaauu

SEQ ID NO: 2638220 - RNA, 19 nt, Homo sapiens
  misc_RNA (1)...(19): siRNA sense strand
cuaauaagacuguggugaa

SEQ ID NO: 2638221 - RNA, 19 nt, Homo sapiens
  misc_RNA (1)...(19): siRNA sense strand
gccuaagacaugugagcaa

SEQ ID NO: 2638222 - RNA, 19 nt, Homo sapiens
  misc_RNA (1)...(19): siRNA sense strand
ucuaaaugauccugcgauu

SEQ ID NO: 2638223 - RNA, 19 nt, Homo sapiens
  misc_RNA (1)...(19): siRNA sense strand
guaaaaggucgaacagaaa

SEQ ID NO: 2638224 - RNA, 19 nt, Homo sapiens
  misc_RNA (1)...(19): siRNA sense strand
aaaaugagaacgugggaaa

SEQ ID NO: 2638225 - RNA, 19 nt, Homo sapiens
  misc_RNA (1)...(19): siRNA sense strand
gcugauaacagaaggacga

SEQ ID NO: 2638226 - RNA, 19 nt, Homo sapiens
  misc_RNA (1)...(19): siRNA sense strand
cgauuaagcaagaugcauu

SEQ ID NO: 2638227 - RNA, 19 nt, Homo sapiens
  misc_RNA (1)...(19): siRNA sense strand
acaagaaacaucagugaga

SEQ ID NO: 2638228 - RNA, 19 nt, Homo sapiens
  misc_RNA (1)...(19): siRNA sense strand
gggaaaagguaaagaagcu

SEQ ID NO: 2638229 - RNA, 19 nt, Homo sapiens
  misc_RNA (1)...(19): siRNA sense strand
cuuuagagucccuugguaa

SEQ ID NO: 2638230 - RNA, 19 nt, Homo sapiens
  misc_RNA (1)...(19): siRNA sense strand
acauuguuguggaagaaua

SEQ ID NO: 2638231 - RNA, 19 nt, Homo sapiens
  misc_RNA (1)...(19): siRNA sense strand
auucaaauguguggcgaaa

SEQ ID NO: 2638232 - RNA, 19 nt, Homo sapiens
  misc_RNA (1)...(19): siRNA sense strand
cccaaaugaagcagaacaa

SEQ ID NO: 2638233 - RNA, 19 nt, Homo sapiens
  misc_RNA (1)...(19): siRNA sense strand
aaacaagaagugaagagaa

SEQ ID NO: 2638234 - RNA, 19 nt, Homo sapiens
  misc_RNA (1)...(19): siRNA sense strand
gauucaaggagcaagaaau

SEQ ID NO: 2638235 - RNA, 19 nt, Homo sapiens
  misc_RNA (1)...(19): siRNA sense strand
ccuaggaaauuuugaggaa

SEQ ID NO: 2638236 - RNA, 19 nt, Homo sapiens
  misc_RNA (1)...(19): siRNA sense strand
gauaacagaaggacgaaca

SEQ ID NO: 2638237 - RNA, 19 nt, Homo sapiens
  misc_RNA (1)...(19): siRNA sense strand
caaaguacguaucaggaga

SEQ ID NO: 2638238 - RNA, 19 nt, Homo sapiens
  misc_RNA (1)...(19): siRNA sense strand
guacguaucaggagacaca

SEQ ID NO: 2638239 - RNA, 19 nt, Homo sapiens
  misc_RNA (1)...(19): siRNA sense strand
cauuguuguggaagaauaa

SEQ ID NO: 2638240 - RNA, 19 nt, Homo sapiens
  misc_RNA (1)...(19): siRNA sense strand
gcagauucaaggagcaaga

SEQ ID NO: 2638241 - RNA, 19 nt, Homo sapiens
  misc_RNA (1)...(19): siRNA sense strand
ggauggaacuucaaccaga

SEQ ID NO: 2638242 - RNA, 19 nt, Homo sapiens
  misc_RNA (1)...(19): siRNA sense strand
cugaaaagcuucucaucua

SEQ ID NO: 2638243 - RNA, 19 nt, Homo sapiens
  misc_RNA (1)...(19): siRNA sense strand
auucaggagcggcaagaaa

SEQ ID NO: 2638244 - RNA, 19 nt, Homo sapiens
  misc_RNA (1)...(19): siRNA sense strand
gaacgugggaaaagguaaa

SEQ ID NO: 2638245 - RNA, 19 nt, Homo sapiens
  misc_RNA (1)...(19): siRNA sense strand
cuuuagugguauaggugau

SEQ ID NO: 2638246 - RNA, 19 nt, Homo sapiens
  misc_RNA (1)...(19): siRNA sense strand
cagaauggugaccgauuua

SEQ ID NO: 2638247 - RNA, 19 nt, Homo sapiens
  misc_RNA (1)...(19): siRNA sense strand
uggcccaaguccagaauau

SEQ ID NO: 2638248 - RNA, 19 nt, Homo sapiens
  misc_RNA (1)...(19): siRNA sense strand
aaacaagaaaucaguguca

SEQ ID NO: 2638249 - RNA, 19 nt, Homo sapiens
  misc_RNA (1)...(19): siRNA sense strand
acaagaaaucagugucaga

SEQ ID NO: 2638250 - RNA, 19 nt, Homo sapiens
  misc_RNA (1)...(19): siRNA sense strand
agauguuauugcaaggauu

SEQ ID NO: 2638251 - RNA, 19 nt, Homo sapiens
  misc_RNA (1)...(19): siRNA sense strand
aggagcaagaaaugagcaa

SEQ ID NO: 2638252 - RNA, 19 nt, Homo sapiens
  misc_RNA (1)...(19): siRNA sense strand
gagcaagaaaugagcaaug

SEQ ID NO: 2638253 - RNA, 19 nt, Homo sapiens
  misc_RNA (1)...(19): siRNA sense strand
gaacaaauaugaaagcaug

SEQ ID NO: 2638254 - RNA, 19 nt, Homo sapiens
  misc_RNA (1)...(19): siRNA sense strand
agaaacuccucgaagugaa

SEQ ID NO: 2638255 - RNA, 19 nt, Homo sapiens
  misc_RNA (1)...(19): siRNA sense strand
aagaaaugagcaauggaau

SEQ ID NO: 2638256 - RNA, 19 nt, Homo sapiens
  misc_RNA (1)...(19): siRNA sense strand
cagccaaucaucagacauu

SEQ ID NO: 2638257 - RNA, 19 nt, Homo sapiens
  misc_RNA (1)...(19): siRNA sense strand
aacaagaagugaagagaag

SEQ ID NO: 2638258 - RNA, 19 nt, Homo sapiens
  misc_RNA (1)...(19): siRNA sense strand
gagcaaaauacucaacuua

SEQ ID NO: 2638259 - RNA, 19 nt, Homo sapiens
  misc_RNA (1)...(19): siRNA sense strand
cggcauuguugaugguuuu

SEQ ID NO: 2638260 - RNA, 19 nt, Homo sapiens
  misc_RNA (1)...(19): siRNA sense strand
gcacauugauccaacagca

SEQ ID NO: 2638261 - RNA, 19 nt, Homo sapiens
  misc_RNA (1)...(19): siRNA sense strand
cauccgacacacagaagaa

SEQ ID NO: 2638262 - RNA, 19 nt, Homo sapiens
  misc_RNA (1)...(19): siRNA sense strand
agugaagagaaguguuaau

SEQ ID NO: 2638263 - RNA, 19 nt, Homo sapiens
  misc_RNA (1)...(19): siRNA sense strand
cgaacuaggucugagguca

SEQ ID NO: 2638264 - RNA, 19 nt, Homo sapiens
  misc_RNA (1)...(19): siRNA sense strand
ccgauuuauugaagagaag

SEQ ID NO: 2638265 - RNA, 19 nt, Homo sapiens
  misc_RNA (1)...(19): siRNA sense strand
gaaacaucagugagaacuu

SEQ ID NO: 2638266 - RNA, 19 nt, Homo sapiens
  misc_RNA (1)...(19): siRNA sense strand
ucuuagucuccuaggaaau

SEQ ID NO: 2638267 - RNA, 19 nt, Homo sapiens
  misc_RNA (1)...(19): siRNA sense strand
gccaguuccucgacagaau

SEQ ID NO: 2638268 - RNA, 19 nt, Homo sapiens
  misc_RNA (1)...(19): siRNA sense strand
ccgccaagccagacgaacu

SEQ ID NO: 2638269 - RNA, 19 nt, Homo sapiens
  misc_RNA (1)...(19): siRNA sense strand
gcaccauaacccaaaugaa

SEQ ID NO: 2638270 - RNA, 19 nt, Homo sapiens
  misc_RNA (1)...(19): siRNA sense strand
ccgagauacucuggaugaa

SEQ ID NO: 2638271 - RNA, 19 nt, Homo sapiens
  misc_RNA (1)...(19): siRNA sense strand
augaacaagauaagcaaga

SEQ ID NO: 2638272 - RNA, 19 nt, Homo sapiens
  misc_RNA (1)...(19): siRNA sense strand
auugaggacuacacugaaa

SEQ ID NO: 2638273 - RNA, 19 nt, Homo sapiens
  misc_RNA (1)...(19): siRNA sense strand
agacuguggugaagauguu

SEQ ID NO: 2638274 - RNA, 19 nt, Homo sapiens
  misc_RNA (1)...(19): siRNA sense strand
gcauaugaacucaaaucuu

SEQ ID NO: 2638275 - RNA, 19 nt, Homo sapiens
  misc_RNA (1)...(19): siRNA sense strand
guuggaaaugucugaauau

SEQ ID NO: 2638276 - RNA, 19 nt, Homo sapiens
  misc_RNA (1)...(19): siRNA sense strand
aauaugaugcagaggaguu

SEQ ID NO: 2638277 - RNA, 19 nt, Homo sapiens
  misc_RNA (1)...(19): siRNA sense strand
cgucuguguagcaaacaaa

SEQ ID NO: 2638278 - RNA, 19 nt, Homo sapiens
  misc_RNA (1)...(19): siRNA sense strand
caggagacacagaacaaaa

SEQ ID NO: 2638279 - RNA, 19 nt, Homo sapiens
  misc_RNA (1)...(19): siRNA sense strand
agauucaaggagcaagaaa

SEQ ID NO: 2638280 - RNA, 19 nt, Homo sapiens
  misc_RNA (1)...(19): siRNA sense strand
cuacaugugagcaaccaaa

SEQ ID NO: 2638281 - RNA, 19 nt, Homo sapiens
  misc_RNA (1)...(19): siRNA sense strand
cagacauuccuacgacaaa

SEQ ID NO: 2638282 - RNA, 19 nt, Homo sapiens
  misc_RNA (1)...(19): siRNA sense strand
ggaaauaagagaagaugaa

SEQ ID NO: 2638283 - RNA, 19 nt, Homo sapiens
  misc_RNA (1)...(19): siRNA sense strand
cugucaaaguauagggaaa

SEQ ID NO: 2638284 - RNA, 19 nt, Homo sapiens
  misc_RNA (1)...(19): siRNA sense strand
ucacaaagccaaagagaau

SEQ ID NO: 2638285 - RNA, 19 nt, Homo sapiens
  misc_RNA (1)...(19): siRNA sense strand
ggaauaagucagauugaaa

SEQ ID NO: 2638286 - RNA, 19 nt, Homo sapiens
  misc_RNA (1)...(19): siRNA sense strand
ggaugaagaugaugauauu

SEQ ID NO: 2638287 - RNA, 19 nt, Homo sapiens
  misc_RNA (1)...(19): siRNA sense strand
gcaaaggaauguuuacaaa

SEQ ID NO: 2638288 - RNA, 19 nt, Homo sapiens
  misc_RNA (1)...(19): siRNA sense strand
acucaugacaucagagaaa

SEQ ID NO: 2638289 - RNA, 19 nt, Homo sapiens
  misc_RNA (1)...(19): siRNA sense strand
ggaaagaacaaaagaagaa

SEQ ID NO: 2638290 - RNA, 19 nt, Homo sapiens
  misc_RNA (1)...(19): siRNA sense strand
gauauuaaauccagaguca

SEQ ID NO: 2638291 - RNA, 19 nt, Homo sapiens
  misc_RNA (1)...(19): siRNA sense strand
agucagagcuucuaacaaa

SEQ ID NO: 2638292 - RNA, 19 nt, Homo sapiens
  misc_RNA (1)...(19): siRNA sense strand
aagcagaggaugaggaaga

SEQ ID NO: 2638293 - RNA, 19 nt, Homo sapiens
  misc_RNA (1)...(19): siRNA sense strand
uggcagaguuggaagagaa

SEQ ID NO: 2638294 - RNA, 19 nt, Homo sapiens
  misc_RNA (1)...(19): siRNA sense strand
ccaaagaugccguggguca

SEQ ID NO: 2638295 - RNA, 19 nt, Homo sapiens
  misc_RNA (1)...(19): siRNA sense strand
ggauaggacaccagagaga

SEQ ID NO: 2638296 - RNA, 19 nt, Homo sapiens
  misc_RNA (1)...(19): siRNA sense strand
ggaaaugaucuuuaaggaa

SEQ ID NO: 2638297 - RNA, 19 nt, Homo sapiens
  misc_RNA (1)...(19): siRNA sense strand
cagagaaagaaaagagaaa

SEQ ID NO: 2638298 - RNA, 19 nt, Homo sapiens
  misc_RNA (1)...(19): siRNA sense strand
caucugaccucaauagaaa

SEQ ID NO: 2638299 - RNA, 19 nt, Homo sapiens
  misc_RNA (1)...(19): siRNA sense strand
acuauaaagcagaggauga

SEQ ID NO: 2638300 - RNA, 19 nt, Homo sapiens
  misc_RNA (1)...(19): siRNA sense strand
cagcaaugaaagaaagaau

SEQ ID NO: 2638301 - RNA, 19 nt, Homo sapiens
  misc_RNA (1)...(19): siRNA sense strand
uuaaggaacuucagggaau

SEQ ID NO: 2638302 - RNA, 19 nt, Homo sapiens
  misc_RNA (1)...(19): siRNA sense strand
aagaaaagagaaagggaua

SEQ ID NO: 2638303 - RNA, 19 nt, Homo sapiens
  misc_RNA (1)...(19): siRNA sense strand
gugcuagauccaagaauaa

SEQ ID NO: 2638304 - RNA, 19 nt, Homo sapiens
  misc_RNA (1)...(19): siRNA sense strand
caauaaagaccuagaauac

SEQ ID NO: 2638305 - RNA, 19 nt, Homo sapiens
  misc_RNA (1)...(19): siRNA sense strand
gcaaaugagucaaguacca

SEQ ID NO: 2638306 - RNA, 19 nt, Homo sapiens
  misc_RNA (1)...(19): siRNA sense strand
cuaaaucaaaugagagcaa

SEQ ID NO: 2638307 - RNA, 19 nt, Homo sapiens
  misc_RNA (1)...(19): siRNA sense strand
ccaagaaauaguugaugaa

SEQ ID NO: 2638308 - RNA, 19 nt, Homo sapiens
  misc_RNA (1)...(19): siRNA sense strand
acucaaaggaacaggcauu

SEQ ID NO: 2638309 - RNA, 19 nt, Homo sapiens
  misc_RNA (1)...(19): siRNA sense strand
gggaugaagaugaugauau

SEQ ID NO: 2638310 - RNA, 19 nt, Homo sapiens
  misc_RNA (1)...(19): siRNA sense strand
aucuaaugguggagugaaa

SEQ ID NO: 2638311 - RNA, 19 nt, Homo sapiens
  misc_RNA (1)...(19): siRNA sense strand
gggaauaagaaguaagucu

SEQ ID NO: 2638312 - RNA, 19 nt, Homo sapiens
  misc_RNA (1)...(19): siRNA sense strand
agaaugaagaucagggaga

SEQ ID NO: 2638313 - RNA, 19 nt, Homo sapiens
  misc_RNA (1)...(19): siRNA sense strand
cgaguaagaaacaggauau

SEQ ID NO: 2638314 - RNA, 19 nt, Homo sapiens
  misc_RNA (1)...(19): siRNA sense strand
caacagugauaaugaggau

SEQ ID NO: 2638315 - RNA, 19 nt, Homo sapiens
  misc_RNA (1)...(19): siRNA sense strand
agaaguaagucuuuggaca

SEQ ID NO: 2638316 - RNA, 19 nt, Homo sapiens
  misc_RNA (1)...(19): siRNA sense strand
gaaaacaggacuaguauua

SEQ ID NO: 2638317 - RNA, 19 nt, Homo sapiens
  misc_RNA (1)...(19): siRNA sense strand
gguuguacaaagugaaauu

SEQ ID NO: 2638318 - RNA, 19 nt, Homo sapiens
  misc_RNA (1)...(19): siRNA sense strand
cuagagacauccaugauua

SEQ ID NO: 2638319 - RNA, 19 nt, Homo sapiens
  misc_RNA (1)...(19): siRNA sense strand
accuagaauacuugggaaa

SEQ ID NO: 2638320 - RNA, 19 nt, Homo sapiens
  misc_RNA (1)...(19): siRNA sense strand
gcaaugaaagaaagaauga

SEQ ID NO: 2638321 - RNA, 19 nt, Homo sapiens
  misc_RNA (1)...(19): siRNA sense strand
ggacaguggcucuucauua

SEQ ID NO: 2638322 - RNA, 19 nt, Homo sapiens
  misc_RNA (1)...(19): siRNA sense strand
cagaggaugaggaagauua

SEQ ID NO: 2638323 - RNA, 19 nt, Homo sapiens
  misc_RNA (1)...(19): siRNA sense strand
cugcaagaccugaaaucaa

SEQ ID NO: 2638324 - RNA, 19 nt, Homo sapiens
  misc_RNA (1)...(19): siRNA sense strand
cuaaggaguagcacagaaa

SEQ ID NO: 2638325 - RNA, 19 nt, Homo sapiens
  misc_RNA (1)...(19): siRNA sense strand
gcauugaccuuucugauaa

SEQ ID NO: 2638326 - RNA, 19 nt, Homo sapiens
  misc_RNA (1)...(19): siRNA sense strand
uugaaguaauccaggaaau

SEQ ID NO: 2638327 - RNA, 19 nt, Homo sapiens
  misc_RNA (1)...(19): siRNA sense strand
caacuuauccacugaggaa

SEQ ID NO: 2638328 - RNA, 19 nt, Homo sapiens
  misc_RNA (1)...(19): siRNA sense strand
aggaagacgaggccaguaa

SEQ ID NO: 2638329 - RNA, 19 nt, Homo sapiens
  misc_RNA (1)...(19): siRNA sense strand
acaaagggauucugucuua

SEQ ID NO: 2638330 - RNA, 19 nt, Homo sapiens
  misc_RNA (1)...(19): siRNA sense strand
caguaugggaugagaaguu

SEQ ID NO: 2638331 - RNA, 19 nt, Homo sapiens
  misc_RNA (1)...(19): siRNA sense strand
gaguaugggaugaagauga

SEQ ID NO: 2638332 - RNA, 19 nt, Homo sapiens
  misc_RNA (1)...(19): siRNA sense strand
agcaauggaugcagagauu

SEQ ID NO: 2638333 - RNA, 19 nt, Homo sapiens
  misc_RNA (1)...(19): siRNA sense strand
cuguaaagaagauugcaaa

SEQ ID NO: 2638334 - RNA, 19 nt, Homo sapiens
  misc_RNA (1)...(19): siRNA sense strand
ccacccaaaucauggcaua

SEQ ID NO: 2638335 - RNA, 19 nt, Homo sapiens
  misc_RNA (1)...(19): siRNA sense strand
gggcagacugaaacugaaa

SEQ ID NO: 2638336 - RNA, 19 nt, Homo sapiens
  misc_RNA (1)...(19): siRNA sense strand
gaaugaagaucagggagaa

SEQ ID NO: 2638337 - RNA, 19 nt, Homo sapiens
  misc_RNA (1)...(19): siRNA sense strand
gagaaauggaugucuggua

SEQ ID NO: 2638338 - RNA, 19 nt, Homo sapiens
  misc_RNA (1)...(19): siRNA sense strand
ccgaguaagaaacaggaua

SEQ ID NO: 2638339 - RNA, 19 nt, Homo sapiens
  misc_RNA (1)...(19): siRNA sense strand
gagccugcuuauaaaguua

SEQ ID NO: 2638340 - RNA, 19 nt, Homo sapiens
  misc_RNA (1)...(19): siRNA sense strand
aaaugugacugaagaaaga

SEQ ID NO: 2638341 - RNA, 19 nt, Homo sapiens
  misc_RNA (1)...(19): siRNA sense strand
agugcuagauccaagaaua

SEQ ID NO: 2638342 - RNA, 19 nt, Homo sapiens
  misc_RNA (1)...(19): siRNA sense strand
aagaugacucagagagcua

SEQ ID NO: 2638343 - RNA, 19 nt, Homo sapiens
  misc_RNA (1)...(19): siRNA sense strand
guccagucucggagggaaa

SEQ ID NO: 2638344 - RNA, 19 nt, Homo sapiens
  misc_RNA (1)...(19): siRNA sense strand
gaggaaacaggaaggaaca

SEQ ID NO: 2638345 - RNA, 19 nt, Homo sapiens
  misc_RNA (1)...(19): siRNA sense strand
ccaaauugugucagucuua

SEQ ID NO: 2638346 - RNA, 19 nt, Homo sapiens
  misc_RNA (1)...(19): siRNA sense strand
uuggagacaagaagagaaa

SEQ ID NO: 2638347 - RNA, 19 nt, Homo sapiens
  misc_RNA (1)...(19): siRNA sense strand
ggcuaaagaauuuguaaga

SEQ ID NO: 2638348 - RNA, 19 nt, Homo sapiens
  misc_RNA (1)...(19): siRNA sense strand
agucaaagugaauugcaaa

SEQ ID NO: 2638349 - RNA, 19 nt, Homo sapiens
  misc_RNA (1)...(19): siRNA sense strand
ggagugaaaugccacgaaa

SEQ ID NO: 2638350 - RNA, 19 nt, Homo sapiens
  misc_RNA (1)...(19): siRNA sense strand
cauauaaacucaaaggaac

SEQ ID NO: 2638351 - RNA, 19 nt, Homo sapiens
  misc_RNA (1)...(19): siRNA sense strand
gccagaaguauuugaagua

SEQ ID NO: 2638352 - RNA, 19 nt, Homo sapiens
  misc_RNA (1)...(19): siRNA sense strand
agauaaaaggagaagagaa

SEQ ID NO: 2638353 - RNA, 19 nt, Homo sapiens
  misc_RNA (1)...(19): siRNA sense strand
aaaugagagcaaauggaaa

SEQ ID NO: 2638354 - RNA, 19 nt, Homo sapiens
  misc_RNA (1)...(19): siRNA sense strand
aaaguaaccaacagugaua

SEQ ID NO: 2638355 - RNA, 19 nt, Homo sapiens
  misc_RNA (1)...(19): siRNA sense strand
cuaaugagcuauaccaaaa

SEQ ID NO: 2638356 - RNA, 19 nt, Homo sapiens
  misc_RNA (1)...(19): siRNA sense strand
guaucgaagucaaagugaa

SEQ ID NO: 2638357 - RNA, 19 nt, Homo sapiens
  misc_RNA (1)...(19): siRNA sense strand
ccuuggaaguaguauggaa

SEQ ID NO: 2638358 - RNA, 19 nt, Homo sapiens
  misc_RNA (1)...(19): siRNA sense strand
gauggaaauaagagaagau

SEQ ID NO: 2638359 - RNA, 19 nt, Homo sapiens
  misc_RNA (1)...(19): siRNA sense strand
ggaugaagguucuggagcu

SEQ ID NO: 2638360 - RNA, 19 nt, Homo sapiens
  misc_RNA (1)...(19): siRNA sense strand
ccagugaugauguggcuaa

SEQ ID NO: 2638361 - RNA, 19 nt, Homo sapiens
  misc_RNA (1)...(19): siRNA sense strand
gggaaaucauggaggaagu

SEQ ID NO: 2638362 - RNA, 19 nt, Homo sapiens
  misc_RNA (1)...(19): siRNA sense strand
ccgccuaaguacugagaau

SEQ ID NO: 2638363 - RNA, 19 nt, Homo sapiens
  misc_RNA (1)...(19): siRNA sense strand
guggaaaugagguaggaaa

SEQ ID NO: 2638364 - RNA, 19 nt, Homo sapiens
  misc_RNA (1)...(19): siRNA sense strand
uggaaggagcuguaggaaa

SEQ ID NO: 2638365 - RNA, 19 nt, Homo sapiens
  misc_RNA (1)...(19): siRNA sense strand
cgaaguaaagccaggaaau

SEQ ID NO: 2638366 - RNA, 19 nt, Homo sapiens
  misc_RNA (1)...(19): siRNA sense strand
acagaauacucuagaggau

SEQ ID NO: 2638367 - RNA, 19 nt, Homo sapiens
  misc_RNA (1)...(19): siRNA sense strand
agacaaagucauugccuau

SEQ ID NO: 2638368 - RNA, 19 nt, Homo sapiens
  misc_RNA (1)...(19): siRNA sense strand
gggcaauaaccauggcuuu

SEQ ID NO: 2638369 - RNA, 19 nt, Homo sapiens
  misc_RNA (1)...(19): siRNA sense strand
acaugaaagcagaagguuu

SEQ ID NO: 2638370 - RNA, 19 nt, Homo sapiens
  misc_RNA (1)...(19): siRNA sense strand
cuccuuagcuaguggaaau

SEQ ID NO: 2638371 - RNA, 19 nt, Homo sapiens
  misc_RNA (1)...(19): siRNA sense strand
aagaagggcagcaggagaa

SEQ ID NO: 2638372 - RNA, 19 nt, Homo sapiens
  misc_RNA (1)...(19): siRNA sense strand
cuggagagauguauggaga

SEQ ID NO: 2638373 - RNA, 19 nt, Homo sapiens
  misc_RNA (1)...(19): siRNA sense strand
augcauggccacaggaaau

SEQ ID NO: 2638374 - RNA, 19 nt, Homo sapiens
  misc_RNA (1)...(19): siRNA sense strand
cuugauauaccgaaguaaa

SEQ ID NO: 2638375 - RNA, 19 nt, Homo sapiens
  misc_RNA (1)...(19): siRNA sense strand
caggaguauugcagaucua

SEQ ID NO: 2638376 - RNA, 19 nt, Homo sapiens
  misc_RNA (1)...(19): siRNA sense strand
cauccaaugaggugggaga

SEQ ID NO: 2638377 - RNA, 19 nt, Homo sapiens
  misc_RNA (1)...(19): siRNA sense strand
guccauagguuuagaucca

SEQ ID NO: 2638378 - RNA, 19 nt, Homo sapiens
  misc_RNA (1)...(19): siRNA sense strand
ccagauuauuccugaagau

SEQ ID NO: 2638379 - RNA, 19 nt, Homo sapiens
  misc_RNA (1)...(19): siRNA sense strand
cagacaaagucauugccua

SEQ ID NO: 2638380 - RNA, 19 nt, Homo sapiens
  misc_RNA (1)...(19): siRNA sense strand
uggcauugcuguagguguu

SEQ ID NO: 2638381 - RNA, 19 nt, Homo sapiens
  misc_RNA (1)...(19): siRNA sense strand
cauuugaaguccagccaau

SEQ ID NO: 2638382 - RNA, 19 nt, Homo sapiens
  misc_RNA (1)...(19): siRNA sense strand
ccauagguuuagauccaaa

SEQ ID NO: 2638383 - RNA, 19 nt, Homo sapiens
  misc_RNA (1)...(19): siRNA sense strand
gccaaagggauucuggaaa

SEQ ID NO: 2638384 - RNA, 19 nt, Homo sapiens
  misc_RNA (1)...(19): siRNA sense strand
gaagaagggcagcaggaga

SEQ ID NO: 2638385 - RNA, 19 nt, Homo sapiens
  misc_RNA (1)...(19): siRNA sense strand
ugcuguagguguuggcaua

SEQ ID NO: 2638386 - RNA, 19 nt, Homo sapiens
  misc_RNA (1)...(19): siRNA sense strand
ccgaaguaaagccaggaaa

SEQ ID NO: 2638387 - RNA, 19 nt, Homo sapiens
  misc_RNA (1)...(19): siRNA sense strand
uugaauggccagaaaguuu

SEQ ID NO: 2638388 - RNA, 19 nt, Homo sapiens
  misc_RNA (1)...(19): siRNA sense strand
gaaaauaucaugugagacu

SEQ ID NO: 2638389 - RNA, 19 nt, Homo sapiens
  misc_RNA (1)...(19): siRNA sense strand
auacagaacauucagcaaa

SEQ ID NO: 2638390 - RNA, 19 nt, Homo sapiens
  misc_RNA (1)...(19): siRNA sense strand
ucaaguagucaucggaaau

SEQ ID NO: 2638391 - RNA, 19 nt, Homo sapiens
  misc_RNA (1)...(19): siRNA sense strand
acuuagagccugccagcaa

SEQ ID NO: 2638392 - RNA, 19 nt, Homo sapiens
  misc_RNA (1)...(19): siRNA sense strand
agucgaagucccacugaua

SEQ ID NO: 2638393 - RNA, 19 nt, Homo sapiens
  misc_RNA (1)...(19): siRNA sense strand
ccaaaguuuauucaggaua

SEQ ID NO: 2638394 - RNA, 19 nt, Homo sapiens
  misc_RNA (1)...(19): siRNA sense strand
gaaucaaaucagaggccca

SEQ ID NO: 2638395 - RNA, 19 nt, Homo sapiens
  misc_RNA (1)...(19): siRNA sense strand
ggacaggauaacugcccua

SEQ ID NO: 2638396 - RNA, 19 nt, Homo sapiens
  misc_RNA (1)...(19): siRNA sense strand
guguacagaagcaaugaaa

SEQ ID NO: 2638397 - RNA, 19 nt, Homo sapiens
  misc_RNA (1)...(19): siRNA sense strand
acaacauagacgauggcua

SEQ ID NO: 2638398 - RNA, 19 nt, Homo sapiens
  misc_RNA (1)...(19): siRNA sense strand
ugccaaugaucaugccaaa

SEQ ID NO: 2638399 - RNA, 19 nt, Homo sapiens
  misc_RNA (1)...(19): siRNA sense strand
gguacuuggaaaugguaau

SEQ ID NO: 2638400 - RNA, 19 nt, Homo sapiens
  misc_RNA (1)...(19): siRNA sense strand
aguccaacgaugagauaca

SEQ ID NO: 2638401 - RNA, 19 nt, Homo sapiens
  misc_RNA (1)...(19): siRNA sense strand
augugagacuccuggcuua

SEQ ID NO: 2638402 - RNA, 19 nt, Homo sapiens
  misc_RNA (1)...(19): siRNA sense strand
cagauaaacauccuagcaa

SEQ ID NO: 2638403 - RNA, 19 nt, Homo sapiens
  misc_RNA (1)...(19): siRNA sense strand
cauaggacgcccaaagcua

SEQ ID NO: 2638404 - RNA, 19 nt, Homo sapiens
  misc_RNA (1)...(19): siRNA sense strand
ccugaaauuaguuugacaa

SEQ ID NO: 2638405 - RNA, 19 nt, Homo sapiens
  misc_RNA (1)...(19): siRNA sense strand
augacuauggacaggauaa

SEQ ID NO: 2638406 - RNA, 19 nt, Homo sapiens
  misc_RNA (1)...(19): siRNA sense strand
gaugucagccaaagggauu

SEQ ID NO: 2638407 - RNA, 19 nt, Homo sapiens
  misc_RNA (1)...(19): siRNA sense strand
aucaaguagucaucggaaa

SEQ ID NO: 2638408 - RNA, 19 nt, Homo sapiens
  misc_RNA (1)...(19): siRNA sense strand
aaacuugguagcaggaaau

SEQ ID NO: 2638409 - RNA, 19 nt, Homo sapiens
  misc_RNA (1)...(19): siRNA sense strand
gauacagaacauucagcaa

SEQ ID NO: 2638410 - RNA, 19 nt, Homo sapiens
  misc_RNA (1)...(19): siRNA sense strand
gcagcaagauguagaggac

SEQ ID NO: 2638411 - RNA, 19 nt, Homo sapiens
  misc_RNA (1)...(19): siRNA sense strand
cuauaauguacaugcugaa

SEQ ID NO: 2638412 - RNA, 19 nt, Homo sapiens
  misc_RNA (1)...(19): siRNA sense strand
ccuucaaacaucagaaacu

SEQ ID NO: 2638413 - RNA, 19 nt, Homo sapiens
  misc_RNA (1)...(19): siRNA sense strand
cauguugguucaaggucua

SEQ ID NO: 2638414 - RNA, 19 nt, Homo sapiens
  misc_RNA (1)...(19): siRNA sense strand
uguaggaaaugaagaaucu

SEQ ID NO: 2638415 - RNA, 19 nt, Homo sapiens
  misc_RNA (1)...(19): siRNA sense strand
acugagcaaugccgagaaa

SEQ ID NO: 2638416 - RNA, 19 nt, Homo sapiens
  misc_RNA (1)...(19): siRNA sense strand
ggaguaaaagugacauuaa

SEQ ID NO: 2638417 - RNA, 19 nt, Homo sapiens
  misc_RNA (1)...(19): siRNA sense strand
gaaagaaccuggaaggagc

SEQ ID NO: 2638418 - RNA, 19 nt, Homo sapiens
  misc_RNA (1)...(19): siRNA sense strand
gcaaugaaaaguagcucaa

SEQ ID NO: 2638419 - RNA, 19 nt, Homo sapiens
  misc_RNA (1)...(19): siRNA sense strand
uagcaaguguacagaagca

SEQ ID NO: 2638420 - RNA, 19 nt, Homo sapiens
  misc_RNA (1)...(19): siRNA sense strand
gauaaacauccuagcaagu

SEQ ID NO: 2638421 - RNA, 19 nt, Homo sapiens
  misc_RNA (1)...(19): siRNA sense strand
gcguuuagauucugcugau

SEQ ID NO: 2638422 - RNA, 19 nt, Homo sapiens
  misc_RNA (1)...(19): siRNA sense strand
cuuuaaugccaaugaucau

SEQ ID NO: 2638423 - RNA, 19 nt, Homo sapiens
  misc_RNA (1)...(19): siRNA sense strand
gagaaaaggcaccuggaga

SEQ ID NO: 2638424 - RNA, 19 nt, Homo sapiens
  misc_RNA (1)...(19): siRNA sense strand
ccuauaauguacaugcuga

SEQ ID NO: 2638425 - RNA, 19 nt, Homo sapiens
  misc_RNA (1)...(19): siRNA sense strand
aggaagaagggcagcagga

SEQ ID NO: 2638426 - RNA, 19 nt, Homo sapiens
  misc_RNA (1)...(19): siRNA sense strand
ccaaacaccaaauacgaau

SEQ ID NO: 2638427 - RNA, 19 nt, Homo sapiens
  misc_RNA (1)...(19): siRNA sense strand
gaaagagaguugauugaau

SEQ ID NO: 2638428 - RNA, 19 nt, Homo sapiens
  misc_RNA (1)...(19): siRNA sense strand
ggacugggauggaaagaga

SEQ ID NO: 2638429 - RNA, 19 nt, Homo sapiens
  misc_RNA (1)...(19): siRNA sense strand
uggaaagagaguugauuga

SEQ ID NO: 2638430 - RNA, 19 nt, Homo sapiens
  misc_RNA (1)...(19): siRNA sense strand
agccaacgcccgaggacaa

SEQ ID NO: 2638431 - RNA, 19 nt, Homo sapiens
  misc_RNA (1)...(19): siRNA sense strand
gaaucugaaucuugaugau

SEQ ID NO: 2638432 - RNA, 19 nt, Homo sapiens
  misc_RNA (1)...(19): siRNA sense strand
ugaaacuuaugguggccua

SEQ ID NO: 2638433 - RNA, 19 nt, Homo sapiens
  misc_RNA (1)...(19): siRNA sense strand
ggagcugucagguggauuu

SEQ ID NO: 2638434 - RNA, 19 nt, Homo sapiens
  misc_RNA (1)...(19): siRNA sense strand
uggcuguaccugaaacuua

SEQ ID NO: 2638435 - RNA, 19 nt, Homo sapiens
  misc_RNA (1)...(19): siRNA sense strand
agguucaaguggagaaucu

SEQ ID NO: 2638436 - RNA, 19 nt, Homo sapiens
  misc_RNA (1)...(19): siRNA sense strand
ggauggaaagagaguugau

SEQ ID NO: 2638437 - RNA, 19 nt, Homo sapiens
  misc_RNA (1)...(19): siRNA sense strand
gguuuggacuugaaggaca

SEQ ID NO: 2638438 - RNA, 19 nt, Homo sapiens
  misc_RNA (1)...(19): siRNA sense strand
gguuagugaaggugggcuu

SEQ ID NO: 2638439 - RNA, 19 nt, Homo sapiens
  misc_RNA (1)...(19): siRNA sense strand
auuacaugcuugaugcaaa

SEQ ID NO: 2638440 - RNA, 19 nt, Homo sapiens
  misc_RNA (1)...(19): siRNA sense strand
uuguaaaagcuguugguaa

SEQ ID NO: 2638441 - RNA, 19 nt, Homo sapiens
  misc_RNA (1)...(19): siRNA sense strand
gugaggagggagcggagaa

SEQ ID NO: 2638442 - RNA, 19 nt, Homo sapiens
  misc_RNA (1)...(19): siRNA sense strand
gaugcaaagccaaaagaaa

SEQ ID NO: 2638443 - RNA, 19 nt, Homo sapiens
  misc_RNA (1)...(19): siRNA sense strand
augcaaagccaaaagaaau

SEQ ID NO: 2638444 - RNA, 19 nt, Homo sapiens
  misc_RNA (1)...(19): siRNA sense strand
uguaaaagcuguugguaac

SEQ ID NO: 2638445 - RNA, 19 nt, Homo sapiens
  misc_RNA (1)...(19): siRNA sense strand
augaacagaauaugaguga

SEQ ID NO: 2638446 - RNA, 19 nt, Homo sapiens
  misc_RNA (1)...(19): siRNA sense strand
ggauguaaauauugaugac

SEQ ID NO: 2638447 - RNA, 19 nt, Homo sapiens
  misc_RNA (1)...(19): siRNA sense strand
cgggacaaucuguguauca

SEQ ID NO: 2638448 - RNA, 19 nt, Homo sapiens
  misc_RNA (1)...(19): siRNA sense strand
gaauaugagugaugccaug

SEQ ID NO: 2638449 - RNA, 19 nt, Homo sapiens
  misc_RNA (1)...(19): siRNA sense strand
aggccuggauguaaauauu

SEQ ID NO: 2638450 - RNA, 19 nt, Homo sapiens
  misc_RNA (1)...(19): siRNA sense strand
guucaauagugaggaggga

SEQ ID NO: 2638451 - RNA, 19 nt, Homo sapiens
  misc_RNA (1)...(19): siRNA sense strand
ugauggaauauuuaggaga

SEQ ID NO: 2638452 - RNA, 19 nt, Homo sapiens
  misc_RNA (1)...(19): siRNA sense strand
gggcuguuccucugugcaa

SEQ ID NO: 2638453 - RNA, 19 nt, Homo sapiens
  misc_RNA (1)...(19): siRNA sense strand
aggaagggcuacaggagac

SEQ ID NO: 2638454 - RNA, 19 nt, Homo sapiens
  misc_RNA (1)...(19): siRNA sense strand
caggaagggcuacaggaga

SEQ ID NO: 2638455 - RNA, 19 nt, Homo sapiens
  misc_RNA (1)...(19): siRNA sense strand
ggacauuggaguagggaau

SEQ ID NO: 2638456 - RNA, 19 nt, Homo sapiens
  misc_RNA (1)...(19): siRNA sense strand
gggaaagugaagaacgaua

SEQ ID NO: 2638457 - RNA, 19 nt, Homo sapiens
  misc_RNA (1)...(19): siRNA sense strand
aaggaagaguggaagcaaa

SEQ ID NO: 2638458 - RNA, 19 nt, Homo sapiens
  misc_RNA (1)...(19): siRNA sense strand
gaacuaaaccggagccaga

SEQ ID NO: 2638459 - RNA, 19 nt, Homo sapiens
  misc_RNA (1)...(19): siRNA sense strand
gaguauagcuauugagccu

SEQ ID NO: 2638460 - RNA, 19 nt, Homo sapiens
  misc_RNA (1)...(19): siRNA sense strand
gggcaggagccaauagcaa

SEQ ID NO: 2638461 - RNA, 19 nt, Homo sapiens
  misc_RNA (1)...(19): siRNA sense strand
aggcaggaguggagagcca

SEQ ID NO: 2638462 - RNA, 19 nt, Homo sapiens
  misc_RNA (1)...(19): siRNA sense strand
uggcaaagacacuagcaaa

SEQ ID NO: 2638463 - RNA, 19 nt, Homo sapiens
  misc_RNA (1)...(19): siRNA sense strand
gcuacagcgaccagaguua

SEQ ID NO: 2638464 - RNA, 19 nt, Homo sapiens
  misc_RNA (1)...(19): siRNA sense strand
ucuaagagcaagaaggaga

SEQ ID NO: 2638465 - RNA, 19 nt, Homo sapiens
  misc_RNA (1)...(19): siRNA sense strand
accaaggcuuugagaguua

SEQ ID NO: 2638466 - RNA, 19 nt, Homo sapiens
  misc_RNA (1)...(19): siRNA sense strand
gcucaaaggagguggggau

SEQ ID NO: 2638467 - RNA, 19 nt, Homo sapiens
  misc_RNA (1)...(19): siRNA sense strand
gcaaauugaaggaggaaag

SEQ ID NO: 2638468 - RNA, 19 nt, Homo sapiens
  misc_RNA (1)...(19): siRNA sense strand
gcauagaagggaaagugaa

SEQ ID NO: 2638469 - RNA, 19 nt, Homo sapiens
  misc_RNA (1)...(19): siRNA sense strand
aauguaacguggaggaaca

SEQ ID NO: 2638470 - RNA, 19 nt, Homo sapiens
  misc_RNA (1)...(19): siRNA sense strand
aggcagcacucaaggaaga

SEQ ID NO: 2638471 - RNA, 19 nt, Homo sapiens
  misc_RNA (1)...(19): siRNA sense strand
aggcagagauggauccaau

SEQ ID NO: 2638472 - RNA, 19 nt, Homo sapiens
  misc_RNA (1)...(19): siRNA sense strand
cugugaugaugcagaacua

SEQ ID NO: 2638473 - RNA, 19 nt, Homo sapiens
  misc_RNA (1)...(19): siRNA sense strand
aaggaagaugggaaggaaa

SEQ ID NO: 2638474 - RNA, 19 nt, Homo sapiens
  misc_RNA (1)...(19): siRNA sense strand
auacagaugaugacagcaa

SEQ ID NO: 2638475 - RNA, 19 nt, Homo sapiens
  misc_RNA (1)...(19): siRNA sense strand
uagaagggaaagugaagaa

SEQ ID NO: 2638476 - RNA, 19 nt, Homo sapiens
  misc_RNA (1)...(19): siRNA sense strand
ggacaaagguagaacccac

SEQ ID NO: 2638477 - RNA, 19 nt, Homo sapiens
  misc_RNA (1)...(19): siRNA sense strand
acgccgaacaguugguuaa

SEQ ID NO: 2638478 - RNA, 19 nt, Homo sapiens
  misc_RNA (1)...(19): siRNA sense strand
aggaagaguggaagcaaaa

SEQ ID NO: 2638479 - RNA, 19 nt, Homo sapiens
  misc_RNA (1)...(19): siRNA sense strand
uggaaaaggaccagcagaa

SEQ ID NO: 2638480 - RNA, 19 nt, Homo sapiens
  misc_RNA (1)...(19): siRNA sense strand
augaggaaccugagagcau

SEQ ID NO: 2638481 - RNA, 19 nt, Homo sapiens
  misc_RNA (1)...(19): siRNA sense strand
ugagagcauagaagggaaa

SEQ ID NO: 2638482 - RNA, 19 nt, Homo sapiens
  misc_RNA (1)...(19): siRNA sense strand
aagaaagucaagucugaaa

SEQ ID NO: 2638483 - RNA, 19 nt, Homo sapiens
  misc_RNA (1)...(19): siRNA sense strand
augggauguuggugguaaa

SEQ ID NO: 2638484 - RNA, 19 nt, Homo sapiens
  misc_RNA (1)...(19): siRNA sense strand
ccaccaagcucaugcccau

SEQ ID NO: 2638485 - RNA, 19 nt, Homo sapiens
  misc_RNA (1)...(19): siRNA sense strand
cguggaggaacaagacaua

SEQ ID NO: 2638486 - RNA, 19 nt, Homo sapiens
  misc_RNA (1)...(19): siRNA sense strand
cagugaguacggagaggaa

SEQ ID NO: 2638487 - RNA, 19 nt, Homo sapiens
  misc_RNA (1)...(19): siRNA sense strand
ccacuugggaguauagcua

SEQ ID NO: 2638488 - RNA, 19 nt, Homo sapiens
  misc_RNA (1)...(19): siRNA sense strand
cugagagcauagaagggaa

SEQ ID NO: 2638489 - RNA, 19 nt, Homo sapiens
  misc_RNA (1)...(19): siRNA sense strand
aagggaaagugaagaacga

SEQ ID NO: 2638490 - RNA, 19 nt, Homo sapiens
  misc_RNA (1)...(19): siRNA sense strand
ccaaguacucagacaucaa

SEQ ID NO: 2638491 - RNA, 19 nt, Homo sapiens
  misc_RNA (1)...(19): siRNA sense strand
aguaagaguggcaaagaca

SEQ ID NO: 2638492 - RNA, 19 nt, Homo sapiens
  misc_RNA (1)...(19): siRNA sense strand
aaucaaaggacgccgaaca

SEQ ID NO: 2638493 - RNA, 19 nt, Homo sapiens
  misc_RNA (1)...(19): siRNA sense strand
gggaaggaaggcaaaucaa

SEQ ID NO: 2638494 - RNA, 19 nt, Homo sapiens
  misc_RNA (1)...(19): siRNA sense strand
caguguagccgguuccaaa

SEQ ID NO: 2638495 - RNA, 19 nt, Homo sapiens
  misc_RNA (1)...(19): siRNA sense strand
ggaaacagaagaugggaug

SEQ ID NO: 2638496 - RNA, 19 nt, Homo sapiens
  misc_RNA (1)...(19): siRNA sense strand
acaagaaguacaagcacau

SEQ ID NO: 2638497 - RNA, 19 nt, Homo sapiens
  misc_RNA (1)...(19): siRNA sense strand
aggaaaggagucggaguaa

SEQ ID NO: 2638498 - RNA, 19 nt, Homo sapiens
  misc_RNA (1)...(19): siRNA sense strand
caguaauacaccugucaau

SEQ ID NO: 2638499 - RNA, 19 nt, Homo sapiens
  misc_RNA (1)...(19): siRNA sense strand
ggcaggagccaauagcaaa

SEQ ID NO: 2638500 - RNA, 19 nt, Homo sapiens
  misc_RNA (1)...(19): siRNA sense strand
aguacgaagaacagcagaa

SEQ ID NO: 2638501 - RNA, 19 nt, Homo sapiens
  misc_RNA (1)...(19): siRNA sense strand
guaaauguaacguggagga

SEQ ID NO: 2638502 - RNA, 19 nt, Homo sapiens
  misc_RNA (1)...(19): siRNA sense strand
aaggaguaagaguggcaaa

SEQ ID NO: 2638503 - RNA, 19 nt, Homo sapiens
  misc_RNA (1)...(19): siRNA sense strand
ggaugaaaauggaggggcu

SEQ ID NO: 2638504 - RNA, 19 nt, Homo sapiens
  misc_RNA (1)...(19): siRNA sense strand
cggcuuaccggcagcagua

SEQ ID NO: 2638505 - RNA, 19 nt, Homo sapiens
  misc_RNA (1)...(19): siRNA sense strand
caucuaagagcaagaagga

SEQ ID NO: 2638506 - RNA, 19 nt, Homo sapiens
  misc_RNA (1)...(19): siRNA sense strand
caagaaggagagaagcgaa

SEQ ID NO: 2638507 - RNA, 19 nt, Homo sapiens
  misc_RNA (1)...(19): siRNA sense strand
ccacagccucugacagcaa

SEQ ID NO: 2638508 - RNA, 19 nt, Homo sapiens
  misc_RNA (1)...(19): siRNA sense strand
gaugggaaggaaagcacaa

SEQ ID NO: 2638509 - RNA, 19 nt, Homo sapiens
  misc_RNA (1)...(19): siRNA sense strand
ggaaaaggaccagcagaaa

SEQ ID NO: 2638510 - RNA, 19 nt, Homo sapiens
  misc_RNA (1)...(19): siRNA sense strand
gagaaggagaacagcucau

SEQ ID NO: 2638511 - RNA, 19 nt, Homo sapiens
  misc_RNA (1)...(19): siRNA sense strand
ggagagaagcgaaggagug

SEQ ID NO: 2638512 - RNA, 19 nt, Homo sapiens
  misc_RNA (1)...(19): siRNA sense strand
gaaccuggaacuagcguca

SEQ ID NO: 2638513 - RNA, 19 nt, Homo sapiens
  misc_RNA (1)...(19): siRNA sense strand
ccucagugauggaugaaac

SEQ ID NO: 2638514 - RNA, 19 nt, Homo sapiens
  misc_RNA (1)...(19): siRNA sense strand
aaagaaggggcuaagaaaa

SEQ ID NO: 2638515 - RNA, 19 nt, Homo sapiens
  misc_RNA (1)...(19): siRNA sense strand
ggagagagaucgaggaggc

SEQ ID NO: 2638516 - RNA, 19 nt, Homo sapiens
  misc_RNA (1)...(19): siRNA sense strand
agaaaggaaguguauggaa

SEQ ID NO: 2638517 - RNA, 19 nt, Homo sapiens
  misc_RNA (1)...(19): siRNA sense strand
uaaagaaggggcuaagaaa

SEQ ID NO: 2638518 - RNA, 19 nt, Homo sapiens
  misc_RNA (1)...(19): siRNA sense strand
uuaccaaggcuuugagagu

SEQ ID NO: 2638519 - RNA, 19 nt, Homo sapiens
  misc_RNA (1)...(19): siRNA sense strand
ucaagggaaggaaggcaaa

SEQ ID NO: 2638520 - RNA, 19 nt, Homo sapiens
  misc_RNA (1)...(19): siRNA sense strand
aagaagaggaggaggauga

SEQ ID NO: 2638521 - RNA, 19 nt, Homo sapiens
  misc_RNA (1)...(19): siRNA sense strand
auacaaauguuaugggaca

SEQ ID NO: 2638522 - RNA, 19 nt, Homo sapiens
  misc_RNA (1)...(19): siRNA sense strand
ccaaagaagccauguaaaa

SEQ ID NO: 2638523 - RNA, 19 nt, Homo sapiens
  misc_RNA (1)...(19): siRNA sense strand
aaucuaaacugcaggaaaa

SEQ ID NO: 2638524 - RNA, 19 nt, Homo sapiens
  misc_RNA (1)...(19): siRNA sense strand
uauagaagaggaagagaua

SEQ ID NO: 2638525 - RNA, 19 nt, Homo sapiens
  misc_RNA (1)...(19): siRNA sense strand
caggagaaagcauggguaa

SEQ ID NO: 2638526 - RNA, 19 nt, Homo sapiens
  misc_RNA (1)...(19): siRNA sense strand
aaaaggaguugcagagaaa

SEQ ID NO: 2638527 - RNA, 19 nt, Homo sapiens
  misc_RNA (1)...(19): siRNA sense strand
gguaaaauaucaggagaaa

SEQ ID NO: 2638528 - RNA, 19 nt, Homo sapiens
  misc_RNA (1)...(19): siRNA sense strand
aggaguuuauacagagaaa

SEQ ID NO: 2638529 - RNA, 19 nt, Homo sapiens
  misc_RNA (1)...(19): siRNA sense strand
aggaagucccacaggauua

SEQ ID NO: 2638530 - RNA, 19 nt, Homo sapiens
  misc_RNA (1)...(19): siRNA sense strand
cuggaaagaaagauugaaa

SEQ ID NO: 2638531 - RNA, 19 nt, Homo sapiens
  misc_RNA (1)...(19): siRNA sense strand
agacuuagacagugaaaca

SEQ ID NO: 2638532 - RNA, 19 nt, Homo sapiens
  misc_RNA (1)...(19): siRNA sense strand
guguagaacuugugauugu

SEQ ID NO: 2638533 - RNA, 19 nt, Homo sapiens
  misc_RNA (1)...(19): siRNA sense strand
gcagagaaagcaagcaaau

SEQ ID NO: 2638534 - RNA, 19 nt, Homo sapiens
  misc_RNA (1)...(19): siRNA sense strand
aguagaugcuucaggaaaa

SEQ ID NO: 2638535 - RNA, 19 nt, Homo sapiens
  misc_RNA (1)...(19): siRNA sense strand
cagcaguauacuuguguua

SEQ ID NO: 2638536 - RNA, 19 nt, Homo sapiens
  misc_RNA (1)...(19): siRNA sense strand
ugaugaacacacugaauaa

SEQ ID NO: 2638537 - RNA, 19 nt, Homo sapiens
  misc_RNA (1)...(19): siRNA sense strand
uguuauggacugugguuua

SEQ ID NO: 2638538 - RNA, 19 nt, Homo sapiens
  misc_RNA (1)...(19): siRNA sense strand
aagaagaagaggaggagga

SEQ ID NO: 2638539 - RNA, 19 nt, Homo sapiens
  misc_RNA (1)...(19): siRNA sense strand
cagcagagaccgagagaug

SEQ ID NO: 2638540 - RNA, 19 nt, Homo sapiens
  misc_RNA (1)...(19): siRNA sense strand
guguagauaaaguggauau

SEQ ID NO: 2638541 - RNA, 19 nt, Homo sapiens
  misc_RNA (1)...(19): siRNA sense strand
caauagaauuaaccaggaa

SEQ ID NO: 2638542 - RNA, 19 nt, Homo sapiens
  misc_RNA (1)...(19): siRNA sense strand
agggaagaaucucaggaua

SEQ ID NO: 2638543 - RNA, 19 nt, Homo sapiens
  misc_RNA (1)...(19): siRNA sense strand
gggaagaaucucaggauac

SEQ ID NO: 2638544 - RNA, 19 nt, Homo sapiens
  misc_RNA (1)...(19): siRNA sense strand
gggcaugugaugauaaauu

SEQ ID NO: 2638545 - RNA, 19 nt, Homo sapiens
  misc_RNA (1)...(19): siRNA sense strand
cuucagggacuaagagaau

SEQ ID NO: 2638546 - RNA, 19 nt, Homo sapiens
  misc_RNA (1)...(19): siRNA sense strand
aggaugaagaugauagcaa

SEQ ID NO: 2638547 - RNA, 19 nt, Homo sapiens
  misc_RNA (1)...(19): siRNA sense strand
uugaaagaccugaaggauu

SEQ ID NO: 2638548 - RNA, 19 nt, Homo sapiens
  misc_RNA (1)...(19): siRNA sense strand
ccucagagaccacggauuu

SEQ ID NO: 2638549 - RNA, 19 nt, Homo sapiens
  misc_RNA (1)...(19): siRNA sense strand
ucagauuggugacaagaaa

SEQ ID NO: 2638550 - RNA, 19 nt, Homo sapiens
  misc_RNA (1)...(19): siRNA sense strand
agaucauacuuaaggccaa

SEQ ID NO: 2638551 - RNA, 19 nt, Homo sapiens
  misc_RNA (1)...(19): siRNA sense strand
auaaaguggauauggacaa

SEQ ID NO: 2638552 - RNA, 19 nt, Homo sapiens
  misc_RNA (1)...(19): siRNA sense strand
ggucaaggcaugcagaaga

SEQ ID NO: 2638553 - RNA, 19 nt, Homo sapiens
  misc_RNA (1)...(19): siRNA sense strand
cgcaaauauuagugggagu

SEQ ID NO: 2638554 - RNA, 19 nt, Homo sapiens
  misc_RNA (1)...(19): siRNA sense strand
uagaagacuuagacaguga

SEQ ID NO: 2638555 - RNA, 19 nt, Homo sapiens
  misc_RNA (1)...(19): siRNA sense strand
cuauagaagaggaagagau

SEQ ID NO: 2638556 - RNA, 19 nt, Homo sapiens
  misc_RNA (1)...(19): siRNA sense strand
cugaauaaguguccacauu

SEQ ID NO: 2638557 - RNA, 19 nt, Homo sapiens
  misc_RNA (1)...(19): siRNA sense strand
cagauuuaccuuugcuaua

SEQ ID NO: 2638558 - RNA, 19 nt, Homo sapiens
  misc_RNA (1)...(19): siRNA sense strand
cugcaaagucgacaagaau

SEQ ID NO: 2638559 - RNA, 19 nt, Homo sapiens
  misc_RNA (1)...(19): siRNA sense strand
gcaaagacgaacacuguau

SEQ ID NO: 2638560 - RNA, 19 nt, Homo sapiens
  misc_RNA (1)...(19): siRNA sense strand
ggaaaagacauaaaaguga

SEQ ID NO: 2638561 - RNA, 19 nt, Homo sapiens
  misc_RNA (1)...(19): siRNA sense strand
aagaagucguaguggcuau

SEQ ID NO: 2638562 - RNA, 19 nt, Homo sapiens
  misc_RNA (1)...(19): siRNA sense strand
cgguguagaacuugugauu

SEQ ID NO: 2638563 - RNA, 19 nt, Homo sapiens
  misc_RNA (1)...(19): siRNA sense strand
gggacaauaugaaguuaca

SEQ ID NO: 2638564 - RNA, 19 nt, Homo sapiens
  misc_RNA (1)...(19): siRNA sense strand
gcaaauauuagugggagua

SEQ ID NO: 2638565 - RNA, 19 nt, Homo sapiens
  misc_RNA (1)...(19): siRNA sense strand
uggccuaauuuguagauau

SEQ ID NO: 2638566 - RNA, 19 nt, Homo sapiens
  misc_RNA (1)...(19): siRNA sense strand
gguuuauggugcugcuauu

SEQ ID NO: 2638567 - RNA, 19 nt, Homo sapiens
  misc_RNA (1)...(19): siRNA sense strand
aaguagaugcuucaggaaa

SEQ ID NO: 2638568 - RNA, 19 nt, Homo sapiens
  misc_RNA (1)...(19): siRNA sense strand
aaaucuaaacugcaggaaa

SEQ ID NO: 2638569 - RNA, 19 nt, Homo sapiens
  misc_RNA (1)...(19): siRNA sense strand
acuaagugguggcaaguuu

SEQ ID NO: 2638570 - RNA, 19 nt, Homo sapiens
  misc_RNA (1)...(19): siRNA sense strand
ucagagagugagaguacaa

SEQ ID NO: 2638571 - RNA, 19 nt, Homo sapiens
  misc_RNA (1)...(19): siRNA sense strand
gaaagcauggguaaggaaa

SEQ ID NO: 2638572 - RNA, 19 nt, Homo sapiens
  misc_RNA (1)...(19): siRNA sense strand
ucugcaaagucgacaagaa

SEQ ID NO: 2638573 - RNA, 19 nt, Homo sapiens
  misc_RNA (1)...(19): siRNA sense strand
aaccauacucugaggagaa

SEQ ID NO: 2638574 - RNA, 19 nt, Homo sapiens
  misc_RNA (1)...(19): siRNA sense strand
ucuauaacaugaugaccaa

SEQ ID NO: 2638575 - RNA, 19 nt, Homo sapiens
  misc_RNA (1)...(19): siRNA sense strand
agacagugaaacagaugua

SEQ ID NO: 2638576 - RNA, 19 nt, Homo sapiens
  misc_RNA (1)...(19): siRNA sense strand
ccuuuacaguacagcuaua

SEQ ID NO: 2638577 - RNA, 19 nt, Homo sapiens
  misc_RNA (1)...(19): siRNA sense strand
caagcaaagaagaacaaau

SEQ ID NO: 2638578 - RNA, 19 nt, Homo sapiens
  misc_RNA (1)...(19): siRNA sense strand
ugguaaaauaucaggagaa

SEQ ID NO: 2638579 - RNA, 19 nt, Homo sapiens
  misc_RNA (1)...(19): siRNA sense strand
ccacaucaucuaaggauca

SEQ ID NO: 2638580 - RNA, 19 nt, Homo sapiens
  misc_RNA (1)...(19): siRNA sense strand
uagcagacuuuguggacca

SEQ ID NO: 2638581 - RNA, 19 nt, Homo sapiens
  misc_RNA (1)...(19): siRNA sense strand
gcagagaccgagagaugau

SEQ ID NO: 2638582 - RNA, 19 nt, Homo sapiens
  misc_RNA (1)...(19): siRNA sense strand
cuacagauucuuuagguuu

SEQ ID NO: 2638583 - RNA, 19 nt, Homo sapiens
  misc_RNA (1)...(19): siRNA sense strand
agacagaggaguuuauaca

SEQ ID NO: 2638584 - RNA, 19 nt, Homo sapiens
  misc_RNA (1)...(19): siRNA sense strand
uucaaagccucuagaagaa

SEQ ID NO: 2638585 - RNA, 19 nt, Homo sapiens
  misc_RNA (1)...(19): siRNA sense strand
ggaaauuaaaucagcccau

SEQ ID NO: 2638586 - RNA, 19 nt, Homo sapiens
  misc_RNA (1)...(19): siRNA sense strand
agacugaacagcagcaaaa

SEQ ID NO: 2638587 - RNA, 19 nt, Homo sapiens
  misc_RNA (1)...(19): siRNA sense strand
uugaaugggagaaaggaua

SEQ ID NO: 2638588 - RNA, 19 nt, Homo sapiens
  misc_RNA (1)...(19): siRNA sense strand
ggggaaagugcuugggaau

SEQ ID NO: 2638589 - RNA, 19 nt, Homo sapiens
  misc_RNA (1)...(19): siRNA sense strand
acuacaagguccaggagga

SEQ ID NO: 2638590 - RNA, 19 nt, Homo sapiens
  misc_RNA (1)...(19): siRNA sense strand
aggugaacaagaagggaau

SEQ ID NO: 2638591 - RNA, 19 nt, Homo sapiens
  misc_RNA (1)...(19): siRNA sense strand
agcaaggucuggugggaau

SEQ ID NO: 2638592 - RNA, 19 nt, Homo sapiens
  misc_RNA (1)...(19): siRNA sense strand
gguacaucacggaaaggaa

SEQ ID NO: 2638593 - RNA, 19 nt, Homo sapiens
  misc_RNA (1)...(19): siRNA sense strand
caggugaacaagaagggaa

SEQ ID NO: 2638594 - RNA, 19 nt, Homo sapiens
  misc_RNA (1)...(19): siRNA sense strand
gugcuaauauaaaggggua

SEQ ID NO: 2638595 - RNA, 19 nt, Homo sapiens
  misc_RNA (1)...(19): siRNA sense strand
cuacauuggaagaaagagu

SEQ ID NO: 2638596 - RNA, 19 nt, Homo sapiens
  misc_RNA (1)...(19): siRNA sense strand
aggacuacauuggaagaaa

SEQ ID NO: 2638597 - RNA, 19 nt, Homo sapiens
  misc_RNA (1)...(19): siRNA sense strand
guggaaaguugguaccuca

SEQ ID NO: 2638598 - RNA, 19 nt, Homo sapiens
  misc_RNA (1)...(19): siRNA sense strand
agucacaugcaaaugguua

SEQ ID NO: 2638599 - RNA, 19 nt, Homo sapiens
  misc_RNA (1)...(19): siRNA sense strand
uggauaaguuugaauggga

SEQ ID NO: 2638600 - RNA, 19 nt, Homo sapiens
  misc_RNA (1)...(19): siRNA sense strand
gauaaguuugaaugggaga

SEQ ID NO: 2638601 - RNA, 19 nt, Homo sapiens
  misc_RNA (1)...(19): siRNA sense strand
cgugugaagcacuggauca

SEQ ID NO: 2638602 - RNA, 19 nt, Homo sapiens
  misc_RNA (1)...(19): siRNA sense strand
gagcuacauuaaaggcaca

SEQ ID NO: 2638603 - RNA, 19 nt, Homo sapiens
  misc_RNA (1)...(19): siRNA sense strand
augcaaaugguuacggaga

SEQ ID NO: 2638604 - RNA, 19 nt, Homo sapiens
  misc_RNA (1)...(19): siRNA sense strand
ucauuaaggcccacgccaa

SEQ ID NO: 2638605 - RNA, 19 nt, Homo sapiens
  misc_RNA (1)...(19): siRNA sense strand
augaaggacuacauuggaa

SEQ ID NO: 2638606 - RNA, 19 nt, Homo sapiens
  misc_RNA (1)...(19): siRNA sense strand
cuggagaugucgagguuac

SEQ ID NO: 2638607 - RNA, 19 nt, Homo sapiens
  misc_RNA (1)...(19): siRNA sense strand
gggagaaaggauacucaga

SEQ ID NO: 2638608 - RNA, 19 nt, Homo sapiens
  misc_RNA (1)...(19): siRNA sense strand
acucgguacaucacggaaa

SEQ ID NO: 2638609 - RNA, 19 nt, Homo sapiens
  misc_RNA (1)...(19): siRNA sense strand
ggucaaauacggugggugg

SEQ ID NO: 2638610 - RNA, 19 nt, Homo sapiens
  misc_RNA (1)...(19): siRNA sense strand
ggaaaauggagcaucucaa

SEQ ID NO: 2638611 - RNA, 19 nt, Homo sapiens
  misc_RNA (1)...(19): siRNA sense strand
acucagauagauauggauu

SEQ ID NO: 2638612 - RNA, 19 nt, Homo sapiens
  misc_RNA (1)...(19): siRNA sense strand
ggguauacuuccuggucuc

SEQ ID NO: 2638613 - RNA, 19 nt, Homo sapiens
  misc_RNA (1)...(19): siRNA sense strand
gaagaaagagugcagagca

SEQ ID NO: 2638614 - RNA, 19 nt, Homo sapiens
  misc_RNA (1)...(19): siRNA sense strand
cuuaaaggcagcagggcaa

SEQ ID NO: 2638615 - RNA, 19 nt, Homo sapiens
  misc_RNA (1)...(19): siRNA sense strand
acacacaauuaaagggaga

SEQ ID NO: 2638616 - RNA, 19 nt, Homo sapiens
  misc_RNA (1)...(19): siRNA sense strand
caagaaucuaacugagaaa

SEQ ID NO: 2638617 - RNA, 19 nt, Homo sapiens
  misc_RNA (1)...(19): siRNA sense strand
aaaagaaacugcaggggaa

SEQ ID NO: 2638618 - RNA, 19 nt, Homo sapiens
  misc_RNA (1)...(19): siRNA sense strand
agcagaagacagagacaaa

SEQ ID NO: 2638619 - RNA, 19 nt, Homo sapiens
  misc_RNA (1)...(19): siRNA sense strand
guucaagucuuuagagcca

SEQ ID NO: 2638620 - RNA, 19 nt, Homo sapiens
  misc_RNA (1)...(19): siRNA sense strand
gauuaagucauuacagcaa

SEQ ID NO: 2638621 - RNA, 19 nt, Homo sapiens
  misc_RNA (1)...(19): siRNA sense strand
gagacagagucaagugcau

SEQ ID NO: 2638622 - RNA, 19 nt, Homo sapiens
  misc_RNA (1)...(19): siRNA sense strand
cuucagaguggauggguuu

SEQ ID NO: 2638623 - RNA, 19 nt, Homo sapiens
  misc_RNA (1)...(19): siRNA sense strand
gguauaugaaacagcagaa

SEQ ID NO: 2638624 - RNA, 19 nt, Homo sapiens
  misc_RNA (1)...(19): siRNA sense strand
aauaaguguuccagugaca

SEQ ID NO: 2638625 - RNA, 19 nt, Homo sapiens
  misc_RNA (1)...(19): siRNA sense strand
ucucaaaugcucagcuaau

SEQ ID NO: 2638626 - RNA, 19 nt, Homo sapiens
  misc_RNA (1)...(19): siRNA sense strand
gcagcagggcaaagcacaa

SEQ ID NO: 2638627 - RNA, 19 nt, Homo sapiens
  misc_RNA (1)...(19): siRNA sense strand
ggcucaaauaugaagaaau

SEQ ID NO: 2638628 - RNA, 19 nt, Homo sapiens
  misc_RNA (1)...(19): siRNA sense strand
gggucaacuauaagacuuu

SEQ ID NO: 2638629 - RNA, 19 nt, Homo sapiens
  misc_RNA (1)...(19): siRNA sense strand
ggguugaaggugugccauu

SEQ ID NO: 2638630 - RNA, 19 nt, Homo sapiens
  misc_RNA (1)...(19): siRNA sense strand
uaguaaggaaccaggauga

SEQ ID NO: 2638631 - RNA, 19 nt, Homo sapiens
  misc_RNA (1)...(19): siRNA sense strand
uauccuugcaacugggaaa

SEQ ID NO: 2638632 - RNA, 19 nt, Homo sapiens
  misc_RNA (1)...(19): siRNA sense strand
uugcaaaagguaagggauu

SEQ ID NO: 2638633 - RNA, 19 nt, Homo sapiens
  misc_RNA (1)...(19): siRNA sense strand
gcuucagaguggauggguu

SEQ ID NO: 2638634 - RNA, 19 nt, Homo sapiens
  misc_RNA (1)...(19): siRNA sense strand
aauucagcuuuaagggcaa

SEQ ID NO: 2638635 - RNA, 19 nt, Homo sapiens
  misc_RNA (1)...(19): siRNA sense strand
uguggaaguccgagacaga

SEQ ID NO: 2638636 - RNA, 19 nt, Homo sapiens
  misc_RNA (1)...(19): siRNA sense strand
augacugguaugaagaaua

SEQ ID NO: 2638637 - RNA, 19 nt, Homo sapiens
  misc_RNA (1)...(19): siRNA sense strand
cuacauuagucagggccua

SEQ ID NO: 2638638 - RNA, 19 nt, Homo sapiens
  misc_RNA (1)...(19): siRNA sense strand
uggaaaggugguucaguau

SEQ ID NO: 2638639 - RNA, 19 nt, Homo sapiens
  misc_RNA (1)...(19): siRNA sense strand
ugguuagguugauugcaaa

SEQ ID NO: 2638640 - RNA, 19 nt, Homo sapiens
  misc_RNA (1)...(19): siRNA sense strand
cagcagaagacagagacaa

SEQ ID NO: 2638641 - RNA, 19 nt, Homo sapiens
  misc_RNA (1)...(19): siRNA sense strand
caaccaaaauaaugcccaa

SEQ ID NO: 2638642 - RNA, 19 nt, Homo sapiens
  misc_RNA (1)...(19): siRNA sense strand
agggauuccucgacaacau

SEQ ID NO: 2638643 - RNA, 19 nt, Homo sapiens
  misc_RNA (1)...(19): siRNA sense strand
gguucaguaugauggcuau

SEQ ID NO: 2638644 - RNA, 19 nt, Homo sapiens
  misc_RNA (1)...(19): siRNA sense strand
aaacagcagaagacagaga

SEQ ID NO: 2638645 - RNA, 19 nt, Homo sapiens
  misc_RNA (1)...(19): siRNA sense strand
ccaaaauaaugcccaagaa

SEQ ID NO: 2638646 - RNA, 19 nt, Homo sapiens
  misc_RNA (1)...(19): siRNA sense strand
gagauauauacuauggcau

SEQ ID NO: 2638647 - RNA, 19 nt, Homo sapiens
  misc_RNA (1)...(19): siRNA sense strand
gguaagggauuccucgaca

SEQ ID NO: 2638648 - RNA, 19 nt, Homo sapiens
  misc_RNA (1)...(19): siRNA sense strand
aaauaaugcccaagaaggu

SEQ ID NO: 2638649 - RNA, 19 nt, Homo sapiens
  misc_RNA (1)...(19): siRNA sense strand
gaaguaagguguuagggcu

SEQ ID NO: 2638650 - RNA, 19 nt, Homo sapiens
  misc_RNA (1)...(19): siRNA sense strand
augaagaaauugacugucu

SEQ ID NO: 2638651 - RNA, 19 nt, Homo sapiens
  misc_RNA (1)...(19): siRNA sense strand
acuucauggagcacaguua

SEQ ID NO: 2638652 - RNA, 19 nt, Homo sapiens
  misc_RNA (1)...(19): siRNA sense strand
auuccaaagucuaugcaca

SEQ ID NO: 2638653 - RNA, 19 nt, Homo sapiens
  misc_RNA (1)...(19): siRNA sense strand
ggauuaagucauuacagca

SEQ ID NO: 2638654 - RNA, 19 nt, Homo sapiens
  misc_RNA (1)...(19): siRNA sense strand
aaggaaccaggaugagaaa

SEQ ID NO: 2638655 - RNA, 19 nt, Homo sapiens
  misc_RNA (1)...(19): siRNA sense strand
caauucagcuuuaagggca

SEQ ID NO: 2638656 - RNA, 19 nt, Homo sapiens
  misc_RNA (1)...(19): siRNA sense strand
gaacacacaauuaaaggga

SEQ ID NO: 2638657 - RNA, 19 nt, Homo sapiens
  misc_RNA (1)...(19): siRNA sense strand
agacagagucaagugcaua

SEQ ID NO: 2638658 - RNA, 19 nt, Homo sapiens
  misc_RNA (1)...(19): siRNA sense strand
augacuggacugugccaaa

SEQ ID NO: 2638659 - RNA, 19 nt, Homo sapiens
  misc_RNA (1)...(19): siRNA sense strand
ggcauugggcccagaacuu

SEQ ID NO: 2638660 - RNA, 19 nt, Homo sapiens
  misc_RNA (1)...(19): siRNA sense strand
cacaacugggcaagagaaa

SEQ ID NO: 2638661 - RNA, 19 nt, Homo sapiens
  misc_RNA (1)...(19): siRNA sense strand
ccaugaagugucagggagu

SEQ ID NO: 2638662 - RNA, 19 nt, Homo sapiens
  misc_RNA (1)...(19): siRNA sense strand
ccacagaacauucagccau

SEQ ID NO: 2638663 - RNA, 19 nt, Homo sapiens
  misc_RNA (1)...(19): siRNA sense strand
aggccacacuucagguuau

SEQ ID NO: 2638664 - RNA, 19 nt, Homo sapiens
  misc_RNA (1)...(19): siRNA sense strand
ucugaggacaugagcaaaa

SEQ ID NO: 2638665 - RNA, 19 nt, Homo sapiens
  misc_RNA (1)...(19): siRNA sense strand
aggaugagcuggaggagga

SEQ ID NO: 2638666 - RNA, 19 nt, Homo sapiens
  misc_RNA (1)...(19): siRNA sense strand
cagaaggcuugaaggguga

SEQ ID NO: 2638667 - RNA, 19 nt, Homo sapiens
  misc_RNA (1)...(19): siRNA sense strand
ccugagaugaaguggagaa

SEQ ID NO: 2638668 - RNA, 19 nt, Homo sapiens
  misc_RNA (1)...(19): siRNA sense strand
agucugaguguaagagaau

SEQ ID NO: 2638669 - RNA, 19 nt, Homo sapiens
  misc_RNA (1)...(19): siRNA sense strand
gcuugaagggugaagagau

SEQ ID NO: 2638670 - RNA, 19 nt, Homo sapiens
  misc_RNA (1)...(19): siRNA sense strand
gauaaagaaguguggccga

SEQ ID NO: 2638671 - RNA, 19 nt, Homo sapiens
  misc_RNA (1)...(19): siRNA sense strand
aagagaaaccagacagagu

SEQ ID NO: 2638672 - RNA, 19 nt, Homo sapiens
  misc_RNA (1)...(19): siRNA sense strand
aagggauaacacugaauaa

SEQ ID NO: 2638673 - RNA, 19 nt, Homo sapiens
  misc_RNA (1)...(19): siRNA sense strand
ucugaguguaagagaauuu

SEQ ID NO: 2638674 - RNA, 19 nt, Homo sapiens
  misc_RNA (1)...(19): siRNA sense strand
aagagaauuuucaggggaa

SEQ ID NO: 2638675 - RNA, 19 nt, Homo sapiens
  misc_RNA (1)...(19): siRNA sense strand
cugucuaugaggaggauga

SEQ ID NO: 2638676 - RNA, 19 nt, Homo sapiens
  misc_RNA (1)...(19): siRNA sense strand
cugagaugaaguggagaaa

SEQ ID NO: 2638677 - RNA, 19 nt, Homo sapiens
  misc_RNA (1)...(19): siRNA sense strand
augaaguggagaaagguau

SEQ ID NO: 2638678 - RNA, 19 nt, Homo sapiens
  misc_RNA (1)...(19): siRNA sense strand
agggauaacacugaauaaa

SEQ ID NO: 2638679 - RNA, 19 nt, Homo sapiens
  misc_RNA (1)...(19): siRNA sense strand
ccuaagaagaugccgaacu

SEQ ID NO: 2638680 - RNA, 19 nt, Homo sapiens
  misc_RNA (1)...(19): siRNA sense strand
ccagaaggcuugaagggug

SEQ ID NO: 2638681 - RNA, 19 nt, Homo sapiens
  misc_RNA (1)...(19): siRNA sense strand
guguggccgagaagggaua

SEQ ID NO: 2638682 - RNA, 19 nt, Homo sapiens
  misc_RNA (1)...(19): siRNA sense strand
gggugaagagauaaagaag

SEQ ID NO: 2638683 - RNA, 19 nt, Homo sapiens
  misc_RNA (1)...(19): siRNA sense strand
cuuccaaacccgagggcaa

SEQ ID NO: 2638684 - RNA, 19 nt, Homo sapiens
  misc_RNA (1)...(19): siRNA sense strand
cggaggaaggagagggaga

SEQ ID NO: 2638685 - RNA, 19 nt, Homo sapiens
  misc_RNA (1)...(19): siRNA sense strand
gggcaaaaucaaaggccaa

SEQ ID NO: 2638686 - RNA, 19 nt, Homo sapiens
  misc_RNA (1)...(19): siRNA sense strand
gagaggaggccgaagacca

SEQ ID NO: 2638687 - RNA, 19 nt, Homo sapiens
  misc_RNA (1)...(19): siRNA sense strand
cuuacaaagaguugcguga

SEQ ID NO: 2638688 - RNA, 19 nt, Homo sapiens
  misc_RNA (1)...(19): siRNA sense strand
aaggagagggagaaggaga

SEQ ID NO: 2638689 - RNA, 19 nt, Homo sapiens
  misc_RNA (1)...(19): siRNA sense strand
aggccaaccaagaggaguu

SEQ ID NO: 2638690 - RNA, 19 nt, Homo sapiens
  misc_RNA (1)...(19): siRNA sense strand
gggagaaggagauggggau

SEQ ID NO: 2638691 - RNA, 19 nt, Homo sapiens
  misc_RNA (1)...(19): siRNA sense strand
cccaggagauuaauggcaa

SEQ ID NO: 2638692 - RNA, 19 nt, Homo sapiens
  misc_RNA (1)...(19): siRNA sense strand
cggaaggacugccugccaa

SEQ ID NO: 2638693 - RNA, 19 nt, Homo sapiens
  misc_RNA (1)...(19): siRNA sense strand
aggagagggagaaggagau

SEQ ID NO: 2638694 - RNA, 19 nt, Homo sapiens
  misc_RNA (1)...(19): siRNA sense strand
gcguagaggaaggcgucaa

SEQ ID NO: 2638695 - RNA, 19 nt, Homo sapiens
  misc_RNA (1)...(19): siRNA sense strand
agggagaggaggccgaaga

SEQ ID NO: 2638696 - RNA, 19 nt, Homo sapiens
  misc_RNA (1)...(19): siRNA sense strand
gcaucugagugccgagcca

SEQ ID NO: 2638697 - RNA, 19 nt, Homo sapiens
  misc_RNA (1)...(19): siRNA sense strand
aguccaaggccaaccaaga

SEQ ID NO: 2638698 - RNA, 19 nt, Homo sapiens
  misc_RNA (1)...(19): siRNA sense strand
aggacacaagugagggaga

SEQ ID NO: 2638699 - RNA, 19 nt, Homo sapiens
  misc_RNA (1)...(19): siRNA sense strand
ccauaaaguguguagccaa

SEQ ID NO: 2638700 - RNA, 19 nt, Homo sapiens
  misc_RNA (1)...(19): siRNA sense strand
ccaagaaaagucugaacaa

SEQ ID NO: 2638701 - RNA, 19 nt, Homo sapiens
  misc_RNA (1)...(19): siRNA sense strand
ccucaagggcauucgacau

SEQ ID NO: 2638702 - RNA, 19 nt, Homo sapiens
  misc_RNA (1)...(19): siRNA sense strand
ucgugaagugguagccaua

SEQ ID NO: 2638703 - RNA, 19 nt, Homo sapiens
  misc_RNA (1)...(19): siRNA sense strand
cugagaagguggcgcgugu

SEQ ID NO: 2638704 - RNA, 19 nt, Homo sapiens
  misc_RNA (1)...(19): siRNA sense strand
gggucauccuguaugguga

SEQ ID NO: 2638705 - RNA, 19 nt, Homo sapiens
  misc_RNA (1)...(19): siRNA sense strand
uguacaaggccuacgccaa

SEQ ID NO: 2638706 - RNA, 19 nt, Homo sapiens
  misc_RNA (1)...(19): siRNA sense strand
aggcaucgguggagaaccu

SEQ ID NO: 2638707 - RNA, 19 nt, Homo sapiens
  misc_RNA (1)...(19): siRNA sense strand
ccacgguguacaaggccua

SEQ ID NO: 2638708 - RNA, 19 nt, Homo sapiens
  misc_RNA (1)...(19): siRNA sense strand
cauaaaguguguagccaag

SEQ ID NO: 2638709 - RNA, 19 nt, Homo sapiens
  misc_RNA (1)...(19): siRNA sense strand
acaaggcaucgguggagaa

SEQ ID NO: 2638710 - RNA, 19 nt, Homo sapiens
  misc_RNA (1)...(19): siRNA sense strand
acauugugcagcugaaaga

SEQ ID NO: 2638711 - RNA, 19 nt, Homo sapiens
  misc_RNA (1)...(19): siRNA sense strand
ccuaaaacuggcagacuuu

SEQ ID NO: 2638712 - RNA, 19 nt, Homo sapiens
  misc_RNA (1)...(19): siRNA sense strand
ggugguuggaugugaguua

SEQ ID NO: 2638713 - RNA, 19 nt, Homo sapiens
  misc_RNA (1)...(19): siRNA sense strand
uggaggugauccugagaaa

SEQ ID NO: 2638714 - RNA, 19 nt, Homo sapiens
  misc_RNA (1)...(19): siRNA sense strand
agaaauaugguucaggaaa

SEQ ID NO: 2638715 - RNA, 19 nt, Homo sapiens
  misc_RNA (1)...(19): siRNA sense strand
gguuggaggcauugaaaca

SEQ ID NO: 2638716 - RNA, 19 nt, Homo sapiens
  misc_RNA (1)...(19): siRNA sense strand
cuucaguaaaugugcaaua

SEQ ID NO: 2638717 - RNA, 19 nt, Homo sapiens
  misc_RNA (1)...(19): siRNA sense strand
aaguggaguucaagaguuu

SEQ ID NO: 2638718 - RNA, 19 nt, Homo sapiens
  misc_RNA (1)...(19): siRNA sense strand
aaguaggaguggcuggaaa

SEQ ID NO: 2638719 - RNA, 19 nt, Homo sapiens
  misc_RNA (1)...(19): siRNA sense strand
uugaagaugauguggaaau

SEQ ID NO: 2638720 - RNA, 19 nt, Homo sapiens
  misc_RNA (1)...(19): siRNA sense strand
cggcagaaaucgagagagg

SEQ ID NO: 2638721 - RNA, 19 nt, Homo sapiens
  misc_RNA (1)...(19): siRNA sense strand
guauuuacugggugugaaa

SEQ ID NO: 2638722 - RNA, 19 nt, Homo sapiens
  misc_RNA (1)...(19): siRNA sense strand
aaguagaauucggcagaaa

SEQ ID NO: 2638723 - RNA, 19 nt, Homo sapiens
  misc_RNA (1)...(19): siRNA sense strand
gagaagaaguucaucgagu

SEQ ID NO: 2638724 - RNA, 19 nt, Homo sapiens
  misc_RNA (1)...(19): siRNA sense strand
ccucaguucaaguggagua

SEQ ID NO: 2638725 - RNA, 19 nt, Homo sapiens
  misc_RNA (1)...(19): siRNA sense strand
acgaaauugugauggcuuu

SEQ ID NO: 2638726 - RNA, 19 nt, Homo sapiens
  misc_RNA (1)...(19): siRNA sense strand
ugaagaaggaagauguuau

SEQ ID NO: 2638727 - RNA, 19 nt, Homo sapiens
  misc_RNA (1)...(19): siRNA sense strand
ggaaaaguauucagcguga

SEQ ID NO: 2638728 - RNA, 19 nt, Homo sapiens
  misc_RNA (1)...(19): siRNA sense strand
cuggaaaguuuguugaguu

SEQ ID NO: 2638729 - RNA, 19 nt, Homo sapiens
  misc_RNA (1)...(19): siRNA sense strand
acacauuaccucaguucaa

SEQ ID NO: 2638730 - RNA, 19 nt, Homo sapiens
  misc_RNA (1)...(19): siRNA sense strand
agauguuguucuugguauu

SEQ ID NO: 2638731 - RNA, 19 nt, Homo sapiens
  misc_RNA (1)...(19): siRNA sense strand
auauagauuuccagacaga

SEQ ID NO: 2638732 - RNA, 19 nt, Homo sapiens
  misc_RNA (1)...(19): siRNA sense strand
accuuaaagcugugaaauu

SEQ ID NO: 2638733 - RNA, 19 nt, Homo sapiens
  misc_RNA (1)...(19): siRNA sense strand
ucaggaaacuccagagacu

SEQ ID NO: 2638734 - RNA, 19 nt, Homo sapiens
  misc_RNA (1)...(19): siRNA sense strand
gaucgaacuacaauagcaa

SEQ ID NO: 2638735 - RNA, 19 nt, Homo sapiens
  misc_RNA (1)...(19): siRNA sense strand
aagccaaacucgaaucaau

SEQ ID NO: 2638736 - RNA, 19 nt, Homo sapiens
  misc_RNA (1)...(19): siRNA sense strand
cuuccaaauugcagcugaa

SEQ ID NO: 2638737 - RNA, 19 nt, Homo sapiens
  misc_RNA (1)...(19): siRNA sense strand
gcagaaagcaggaaagcuc

SEQ ID NO: 2638738 - RNA, 19 nt, Homo sapiens
  misc_RNA (1)...(19): siRNA sense strand
caaacauguguccggaaua

SEQ ID NO: 2638739 - RNA, 19 nt, Homo sapiens
  misc_RNA (1)...(19): siRNA sense strand
cgaaaugaccagaauucuu

SEQ ID NO: 2638740 - RNA, 19 nt, Homo sapiens
  misc_RNA (1)...(19): siRNA sense strand
cauuaugaaggaagugaau

SEQ ID NO: 2638741 - RNA, 19 nt, Homo sapiens
  misc_RNA (1)...(19): siRNA sense strand
cugcaugauauuuggccua

SEQ ID NO: 2638742 - RNA, 19 nt, Homo sapiens
  misc_RNA (1)...(19): siRNA sense strand
aggaaagaaauaugguuca

SEQ ID NO: 2638743 - RNA, 19 nt, Homo sapiens
  misc_RNA (1)...(19): siRNA sense strand
agaaggaagauguuaugaa

SEQ ID NO: 2638744 - RNA, 19 nt, Homo sapiens
  misc_RNA (1)...(19): siRNA sense strand
agaacuaggccgaaacuca

SEQ ID NO: 2638745 - RNA, 19 nt, Homo sapiens
  misc_RNA (1)...(19): siRNA sense strand
caggauacgccuuugagua

SEQ ID NO: 2638746 - RNA, 19 nt, Homo sapiens
  misc_RNA (1)...(19): siRNA sense strand
cccaggugauccagauuaa

SEQ ID NO: 2638747 - RNA, 19 nt, Homo sapiens
  misc_RNA (1)...(19): siRNA sense strand
cuggagaacuaggccgaaa

SEQ ID NO: 2638748 - RNA, 19 nt, Homo sapiens
  misc_RNA (1)...(19): siRNA sense strand
aaacagggugauuugguua

SEQ ID NO: 2638749 - RNA, 19 nt, Homo sapiens
  misc_RNA (1)...(19): siRNA sense strand
gaguagaggaagaacaugu

SEQ ID NO: 2638750 - RNA, 19 nt, Homo sapiens
  misc_RNA (1)...(19): siRNA sense strand
aggccgaaacucaggaaca

SEQ ID NO: 2638751 - RNA, 19 nt, Homo sapiens
  misc_RNA (1)...(19): siRNA sense strand
gcagaaaucgagagaggcu

SEQ ID NO: 2638752 - RNA, 19 nt, Homo sapiens
  misc_RNA (1)...(19): siRNA sense strand
caauggaaacauaccuuaa

SEQ ID NO: 2638753 - RNA, 19 nt, Homo sapiens
  misc_RNA (1)...(19): siRNA sense strand
aggaaguaucgcuaggaau

SEQ ID NO: 2638754 - RNA, 19 nt, Homo sapiens
  misc_RNA (1)...(19): siRNA sense strand
acauacagguuuuagcaaa

SEQ ID NO: 2638755 - RNA, 19 nt, Homo sapiens
  misc_RNA (1)...(19): siRNA sense strand
cugaauacucccaggugau

SEQ ID NO: 2638756 - RNA, 19 nt, Homo sapiens
  misc_RNA (1)...(19): siRNA sense strand
uagcaggcacagugaauau

SEQ ID NO: 2638757 - RNA, 19 nt, Homo sapiens
  misc_RNA (1)...(19): siRNA sense strand
ugaaaaugcccaugucuua

SEQ ID NO: 2638758 - RNA, 19 nt, Homo sapiens
  misc_RNA (1)...(19): siRNA sense strand
aagaaauaugguucaggaa

SEQ ID NO: 2638759 - RNA, 19 nt, Homo sapiens
  misc_RNA (1)...(19): siRNA sense strand
acagacaagcacuggaaaa

SEQ ID NO: 2638760 - RNA, 19 nt, Homo sapiens
  misc_RNA (1)...(19): siRNA sense strand
ccgaggaucuugugauucu

SEQ ID NO: 2638761 - RNA, 19 nt, Homo sapiens
  misc_RNA (1)...(19): siRNA sense strand
cauugaaacagaagcaguu

SEQ ID NO: 2638762 - RNA, 19 nt, Homo sapiens
  misc_RNA (1)...(19): siRNA sense strand
ggauuuaaaggcuuccaaa

SEQ ID NO: 2638763 - RNA, 19 nt, Homo sapiens
  misc_RNA (1)...(19): siRNA sense strand
cugcaggucuuuuggcuaa

SEQ ID NO: 2638764 - RNA, 19 nt, Homo sapiens
  misc_RNA (1)...(19): siRNA sense strand
ucuaaguaagcuuggauuu

SEQ ID NO: 2638765 - RNA, 19 nt, Homo sapiens
  misc_RNA (1)...(19): siRNA sense strand
cauagcaggcacagugaau

SEQ ID NO: 2638766 - RNA, 19 nt, Homo sapiens
  misc_RNA (1)...(19): siRNA sense strand
ugucacaacagaucauaua

SEQ ID NO: 2638767 - RNA, 19 nt, Homo sapiens
  misc_RNA (1)...(19): siRNA sense strand
aggacagacgcuagaugua

SEQ ID NO: 2638768 - RNA, 19 nt, Homo sapiens
  misc_RNA (1)...(19): siRNA sense strand
uuugauuggaauuggcaua

SEQ ID NO: 2638769 - RNA, 19 nt, Homo sapiens
  misc_RNA (1)...(19): siRNA sense strand
acacauaacgauggugaau

SEQ ID NO: 2638770 - RNA, 19 nt, Homo sapiens
  misc_RNA (1)...(19): siRNA sense strand
aguucaucgaguagaggaa

SEQ ID NO: 2638771 - RNA, 19 nt, Homo sapiens
  misc_RNA (1)...(19): siRNA sense strand
cagacuaccugccgaggau

SEQ ID NO: 2638772 - RNA, 19 nt, Homo sapiens
  misc_RNA (1)...(19): siRNA sense strand
agaaguagaauucggcaga

SEQ ID NO: 2638773 - RNA, 19 nt, Homo sapiens
  misc_RNA (1)...(19): siRNA sense strand
gcaagggagacaagggcaa

SEQ ID NO: 2638774 - RNA, 19 nt, Homo sapiens
  misc_RNA (1)...(19): siRNA sense strand
agugaaagccugcggguca

SEQ ID NO: 2638775 - RNA, 19 nt, Homo sapiens
  misc_RNA (1)...(19): siRNA sense strand
ccgaguuggccgaggugaa

SEQ ID NO: 2638776 - RNA, 19 nt, Homo sapiens
  misc_RNA (1)...(19): siRNA sense strand
ucagcaaagcagagaauga

SEQ ID NO: 2638777 - RNA, 19 nt, Homo sapiens
  misc_RNA (1)...(19): siRNA sense strand
gagaaugagcacagggaac

SEQ ID NO: 2638778 - RNA, 19 nt, Homo sapiens
  misc_RNA (1)...(19): siRNA sense strand
aguuuaaagacaagagcau

SEQ ID NO: 2638779 - RNA, 19 nt, Homo sapiens
  misc_RNA (1)...(19): siRNA sense strand
cuaaagaggcagacaggca

SEQ ID NO: 2638780 - RNA, 19 nt, Homo sapiens
  misc_RNA (1)...(19): siRNA sense strand
aaucagagcaucaaggaga

SEQ ID NO: 2638781 - RNA, 19 nt, Homo sapiens
  misc_RNA (1)...(19): siRNA sense strand
acucagaaauugucagcga

SEQ ID NO: 2638782 - RNA, 19 nt, Homo sapiens
  misc_RNA (1)...(19): siRNA sense strand
agacacaggcccaggagau

SEQ ID NO: 2638783 - RNA, 19 nt, Homo sapiens
  misc_RNA (1)...(19): siRNA sense strand
ggaaaucuaaagaggcaga

SEQ ID NO: 2638784 - RNA, 19 nt, Homo sapiens
  misc_RNA (1)...(19): siRNA sense strand
ucggaaaucuaaagaggca

SEQ ID NO: 2638785 - RNA, 19 nt, Homo sapiens
  misc_RNA (1)...(19): siRNA sense strand
gccuaaacacagaggaagu

SEQ ID NO: 2638786 - RNA, 19 nt, Homo sapiens
  misc_RNA (1)...(19): siRNA sense strand
uggugaagaucuuggagga

SEQ ID NO: 2638787 - RNA, 19 nt, Homo sapiens
  misc_RNA (1)...(19): siRNA sense strand
caucagcaaagcagagaau

SEQ ID NO: 2638788 - RNA, 19 nt, Homo sapiens
  misc_RNA (1)...(19): siRNA sense strand
ccaaaugccaguagccaga

SEQ ID NO: 2638789 - RNA, 19 nt, Homo sapiens
  misc_RNA (1)...(19): siRNA sense strand
gaguuagcaaagaggugaa

SEQ ID NO: 2638790 - RNA, 19 nt, Homo sapiens
  misc_RNA (1)...(19): siRNA sense strand
cuguugaccuggagaagca

SEQ ID NO: 2638791 - RNA, 19 nt, Homo sapiens
  misc_RNA (1)...(19): siRNA sense strand
agccaaggucugcaagaua

SEQ ID NO: 2638792 - RNA, 19 nt, Homo sapiens
  misc_RNA (1)...(19): siRNA sense strand
ggugaagaucuuggaggaa

SEQ ID NO: 2638793 - RNA, 19 nt, Homo sapiens
  misc_RNA (1)...(19): siRNA sense strand
aggcccacaugaagagcaa

SEQ ID NO: 2638794 - RNA, 19 nt, Homo sapiens
  misc_RNA (1)...(19): siRNA sense strand
ugaagaucuuggaggaacu

SEQ ID NO: 2638795 - RNA, 19 nt, Homo sapiens
  misc_RNA (1)...(19): siRNA sense strand
cgacgacaucagugacauu

SEQ ID NO: 2638796 - RNA, 19 nt, Homo sapiens
  misc_RNA (1)...(19): siRNA sense strand
gcagacaggcaguacgaca

SEQ ID NO: 2638797 - RNA, 19 nt, Homo sapiens
  misc_RNA (1)...(19): siRNA sense strand
gagcugagugagaggucuu

SEQ ID NO: 2638798 - RNA, 19 nt, Homo sapiens
  misc_RNA (1)...(19): siRNA sense strand
gugaaagccugcgggucaa

SEQ ID NO: 2638799 - RNA, 19 nt, Homo sapiens
  misc_RNA (1)...(19): siRNA sense strand
ggucccuaacagaggagaa

SEQ ID NO: 2638800 - RNA, 19 nt, Homo sapiens
  misc_RNA (1)...(19): siRNA sense strand
gccaaaggaucaacagcca

SEQ ID NO: 2638801 - RNA, 19 nt, Homo sapiens
  misc_RNA (1)...(19): siRNA sense strand
aggugagugugcagauaga

SEQ ID NO: 2638802 - RNA, 19 nt, Homo sapiens
  misc_RNA (1)...(19): siRNA sense strand
gauaaaagacacaggccca

SEQ ID NO: 2638803 - RNA, 19 nt, Homo sapiens
  misc_RNA (1)...(19): siRNA sense strand
cauuuauacuccaggauac

SEQ ID NO: 2638804 - RNA, 19 nt, Homo sapiens
  misc_RNA (1)...(19): siRNA sense strand
aguacuggauggaagacau

SEQ ID NO: 2638805 - RNA, 19 nt, Homo sapiens
  misc_RNA (1)...(19): siRNA sense strand
ccacgcuauucaaagacaa

SEQ ID NO: 2638806 - RNA, 19 nt, Homo sapiens
  misc_RNA (1)...(19): siRNA sense strand
gaaucauguaggucggaca

SEQ ID NO: 2638807 - RNA, 19 nt, Homo sapiens
  misc_RNA (1)...(19): siRNA sense strand
gugcuggagcccaagaaau

SEQ ID NO: 2638808 - RNA, 19 nt, Homo sapiens
  misc_RNA (1)...(19): siRNA sense strand
cuaaauaaauuggaccaga

SEQ ID NO: 2638809 - RNA, 19 nt, Homo sapiens
  misc_RNA (1)...(19): siRNA sense strand
gauaauaaagacuggcauc

SEQ ID NO: 2638810 - RNA, 19 nt, Homo sapiens
  misc_RNA (1)...(19): siRNA sense strand
cuaacuuccuguugggagu

SEQ ID NO: 2638811 - RNA, 19 nt, Homo sapiens
  misc_RNA (1)...(19): siRNA sense strand
ccuucaagccucuacauau

SEQ ID NO: 2638812 - RNA, 19 nt, Homo sapiens
  misc_RNA (1)...(19): siRNA sense strand
augaaaugcacugugaaua

SEQ ID NO: 2638813 - RNA, 19 nt, Homo sapiens
  misc_RNA (1)...(19): siRNA sense strand
ccgaggagaagcuacacua

SEQ ID NO: 2638814 - RNA, 19 nt, Homo sapiens
  misc_RNA (1)...(19): siRNA sense strand
ccaaaggaucaacagccaa

SEQ ID NO: 2638815 - RNA, 19 nt, Homo sapiens
  misc_RNA (1)...(19): siRNA sense strand
guaugaaugcgcagcggua

SEQ ID NO: 2638816 - RNA, 19 nt, Homo sapiens
  misc_RNA (1)...(19): siRNA sense strand
ccuacgacuacucgggaua

SEQ ID NO: 2638817 - RNA, 19 nt, Homo sapiens
  misc_RNA (1)...(19): siRNA sense strand
cauucaugguacagaggau

SEQ ID NO: 2638818 - RNA, 19 nt, Homo sapiens
  misc_RNA (1)...(19): siRNA sense strand
gcgugagucccgagaacau

SEQ ID NO: 2638819 - RNA, 19 nt, Homo sapiens
  misc_RNA (1)...(19): siRNA sense strand
agaagaaccucuacgccga

SEQ ID NO: 2638820 - RNA, 19 nt, Homo sapiens
  misc_RNA (1)...(19): siRNA sense strand
acauuauccucuaugguca

SEQ ID NO: 2638821 - RNA, 19 nt, Homo sapiens
  misc_RNA (1)...(19): siRNA sense strand
augaaugcgcagcgguaau

SEQ ID NO: 2638822 - RNA, 19 nt, Homo sapiens
  misc_RNA (1)...(19): siRNA sense strand
ucaaggacguugugggcua

SEQ ID NO: 2638823 - RNA, 19 nt, Homo sapiens
  misc_RNA (1)...(19): siRNA sense strand
acaaaguggagcagagcua

SEQ ID NO: 2638824 - RNA, 19 nt, Homo sapiens
  misc_RNA (1)...(19): siRNA sense strand
acauugaaguggaugggaa

SEQ ID NO: 2638825 - RNA, 19 nt, Homo sapiens
  misc_RNA (1)...(19): siRNA sense strand
ggauaaagauuaaagcucu

SEQ ID NO: 2638826 - RNA, 19 nt, Homo sapiens
  misc_RNA (1)...(19): siRNA sense strand
gacuaaagguggggagaaa

SEQ ID NO: 2638827 - RNA, 19 nt, Homo sapiens
  misc_RNA (1)...(19): siRNA sense strand
ggaccuugcagauggacaa

SEQ ID NO: 2638828 - RNA, 19 nt, Homo sapiens
  misc_RNA (1)...(19): siRNA sense strand
ccaggaaggcgaugaccaa

SEQ ID NO: 2638829 - RNA, 19 nt, Homo sapiens
  misc_RNA (1)...(19): siRNA sense strand
ccuauagauccaagaaaga

SEQ ID NO: 2638830 - RNA, 19 nt, Homo sapiens
  misc_RNA (1)...(19): siRNA sense strand
aggugaagauggagaguuc

SEQ ID NO: 2638831 - RNA, 19 nt, Homo sapiens
  misc_RNA (1)...(19): siRNA sense strand
aggucaaaguggcagggaa

SEQ ID NO: 2638832 - RNA, 19 nt, Homo sapiens
  misc_RNA (1)...(19): siRNA sense strand
agauagacggcguggacau

SEQ ID NO: 2638833 - RNA, 19 nt, Homo sapiens
  misc_RNA (1)...(19): siRNA sense strand
guacauugggguugguaaa

SEQ ID NO: 2638834 - RNA, 19 nt, Homo sapiens
  misc_RNA (1)...(19): siRNA sense strand
uucugaacuuggaggauaa

SEQ ID NO: 2638835 - RNA, 19 nt, Homo sapiens
  misc_RNA (1)...(19): siRNA sense strand
ccgauuacuuccagagugu

SEQ ID NO: 2638836 - RNA, 19 nt, Homo sapiens
  misc_RNA (1)...(19): siRNA sense strand
ccagaguguucuucggaga

SEQ ID NO: 2638837 - RNA, 19 nt, Homo sapiens
  misc_RNA (1)...(19): siRNA sense strand
gcuauaacucuuugggcca

SEQ ID NO: 2638838 - RNA, 19 nt, Homo sapiens
  misc_RNA (1)...(19): siRNA sense strand
aagcaagagauaaagaaca

SEQ ID NO: 2638839 - RNA, 19 nt, Homo sapiens
  misc_RNA (1)...(19): siRNA sense strand
gugaagaagaagaaguugu

SEQ ID NO: 2638840 - RNA, 19 nt, Homo sapiens
  misc_RNA (1)...(19): siRNA sense strand
cauagacaacggagucaaa

SEQ ID NO: 2638841 - RNA, 19 nt, Homo sapiens
  misc_RNA (1)...(19): siRNA sense strand
agaacgagagagagaaguu

SEQ ID NO: 2638842 - RNA, 19 nt, Homo sapiens
  misc_RNA (1)...(19): siRNA sense strand
caagaaagagagugaacgu

SEQ ID NO: 2638843 - RNA, 19 nt, Homo sapiens
  misc_RNA (1)...(19): siRNA sense strand
cagaagaguuccaggugcu

SEQ ID NO: 2638844 - RNA, 19 nt, Homo sapiens
  misc_RNA (1)...(19): siRNA sense strand
ccuacaagaaccaggacca

SEQ ID NO: 2638845 - RNA, 19 nt, Homo sapiens
  misc_RNA (1)...(19): siRNA sense strand
gcauccaggugguggugau

SEQ ID NO: 2638846 - RNA, 19 nt, Homo sapiens
  misc_RNA (1)...(19): siRNA sense strand
gggaggagauagacggcgu

SEQ ID NO: 2638847 - RNA, 19 nt, Homo sapiens
  misc_RNA (1)...(19): siRNA sense strand
guggaagaccauauugaau

SEQ ID NO: 2638848 - RNA, 19 nt, Homo sapiens
  misc_RNA (1)...(19): siRNA sense strand
ugacaauuccauagugcuu

SEQ ID NO: 2638849 - RNA, 19 nt, Homo sapiens
  misc_RNA (1)...(19): siRNA sense strand
guauggaagggcugaugaa

SEQ ID NO: 2638850 - RNA, 19 nt, Homo sapiens
  misc_RNA (1)...(19): siRNA sense strand
cuacaauggauggaguuaa

SEQ ID NO: 2638851 - RNA, 19 nt, Homo sapiens
  misc_RNA (1)...(19): siRNA sense strand
auucugaacuuggaggaua

SEQ ID NO: 2638852 - RNA, 19 nt, Homo sapiens
  misc_RNA (1)...(19): siRNA sense strand
ucauggaaaccuggagaua

SEQ ID NO: 2638853 - RNA, 19 nt, Homo sapiens
  misc_RNA (1)...(19): siRNA sense strand
agacgaaaggggagguuau

SEQ ID NO: 2638854 - RNA, 19 nt, Homo sapiens
  misc_RNA (1)...(19): siRNA sense strand
aagcucagaacgagagaga

SEQ ID NO: 2638855 - RNA, 19 nt, Homo sapiens
  misc_RNA (1)...(19): siRNA sense strand
ccucggaccgugacagcaa

SEQ ID NO: 2638856 - RNA, 19 nt, Homo sapiens
  misc_RNA (1)...(19): siRNA sense strand
cuauaacaaccgagcacau

SEQ ID NO: 2638857 - RNA, 19 nt, Homo sapiens
  misc_RNA (1)...(19): siRNA sense strand
ugaaaggcugugagaggau

SEQ ID NO: 2638858 - RNA, 19 nt, Homo sapiens
  misc_RNA (1)...(19): siRNA sense strand
uggugaagaagaagaaguu

SEQ ID NO: 2638859 - RNA, 19 nt, Homo sapiens
  misc_RNA (1)...(19): siRNA sense strand
agauggaggacaaaugcua

SEQ ID NO: 2638860 - RNA, 19 nt, Homo sapiens
  misc_RNA (1)...(19): siRNA sense strand
cugcaggaucugaggaaac

SEQ ID NO: 2638861 - RNA, 19 nt, Homo sapiens
  misc_RNA (1)...(19): siRNA sense strand
agauguacauucaagccua

SEQ ID NO: 2638862 - RNA, 19 nt, Homo sapiens
  misc_RNA (1)...(19): siRNA sense strand
cuaaagguggggagaaaau

SEQ ID NO: 2638863 - RNA, 19 nt, Homo sapiens
  misc_RNA (1)...(19): siRNA sense strand
aggccaggauuauagguuu

SEQ ID NO: 2638864 - RNA, 19 nt, Homo sapiens
  misc_RNA (1)...(19): siRNA sense strand
ggccggugauguagacgaa

SEQ ID NO: 2638865 - RNA, 19 nt, Homo sapiens
  misc_RNA (1)...(19): siRNA sense strand
uggaaaagcuuggggcaga

SEQ ID NO: 2638866 - RNA, 19 nt, Homo sapiens
  misc_RNA (1)...(19): siRNA sense strand
gaacaagacccuucaccca

SEQ ID NO: 2638867 - RNA, 19 nt, Homo sapiens
  misc_RNA (1)...(19): siRNA sense strand
gagauaaagaacagcuugu

SEQ ID NO: 2638868 - RNA, 19 nt, Homo sapiens
  misc_RNA (1)...(19): siRNA sense strand
gggacggaaaugauggaca

SEQ ID NO: 2638869 - RNA, 19 nt, Homo sapiens
  misc_RNA (1)...(19): siRNA sense strand
ugguggugauugacgggaa

SEQ ID NO: 2638870 - RNA, 19 nt, Homo sapiens
  misc_RNA (1)...(19): siRNA sense strand
ugguaaaggaggcgcucuu

SEQ ID NO: 2638871 - RNA, 19 nt, Homo sapiens
  misc_RNA (1)...(19): siRNA sense strand
ccuggacauuucugaacaa

SEQ ID NO: 2638872 - RNA, 19 nt, Homo sapiens
  misc_RNA (1)...(19): siRNA sense strand
aggaaggcgaugaccaaau

SEQ ID NO: 2638873 - RNA, 19 nt, Homo sapiens
  misc_RNA (1)...(19): siRNA sense strand
ggcacggagcugaagcaua

SEQ ID NO: 2638874 - RNA, 19 nt, Homo sapiens
  misc_RNA (1)...(19): siRNA sense strand
gcaagaugugcaagaugau

SEQ ID NO: 2638875 - RNA, 19 nt, Homo sapiens
  misc_RNA (1)...(19): siRNA sense strand
uggccaaucccaacaacaa

SEQ ID NO: 2638876 - RNA, 19 nt, Homo sapiens
  misc_RNA (1)...(19): siRNA sense strand
caugaaaggcugugagagg

SEQ ID NO: 2638877 - RNA, 19 nt, Homo sapiens
  misc_RNA (1)...(19): siRNA sense strand
gcuuauggcaucaaaggga

SEQ ID NO: 2638878 - RNA, 19 nt, Homo sapiens
  misc_RNA (1)...(19): siRNA sense strand
agaaagagagugaacgucu

SEQ ID NO: 2638879 - RNA, 19 nt, Homo sapiens
  misc_RNA (1)...(19): siRNA sense strand
ccgagagggcugucguaga

SEQ ID NO: 2638880 - RNA, 19 nt, Homo sapiens
  misc_RNA (1)...(19): siRNA sense strand
ccguggaguuauuguucau

SEQ ID NO: 2638881 - RNA, 19 nt, Homo sapiens
  misc_RNA (1)...(19): siRNA sense strand
uggaugacauggccaggaa

SEQ ID NO: 2638882 - RNA, 19 nt, Homo sapiens
  misc_RNA (1)...(19): siRNA sense strand
uaauguacagucauggaaa

SEQ ID NO: 2638883 - RNA, 19 nt, Homo sapiens
  misc_RNA (1)...(19): siRNA sense strand
ggucauugccaguacugau

SEQ ID NO: 2638884 - RNA, 19 nt, Homo sapiens
  misc_RNA (1)...(19): siRNA sense strand
cggcacauccugauugaca

SEQ ID NO: 2638885 - RNA, 19 nt, Homo sapiens
  misc_RNA (1)...(19): siRNA sense strand
ucaaguuugcucugggauu

SEQ ID NO: 2638886 - RNA, 19 nt, Homo sapiens
  misc_RNA (1)...(19): siRNA sense strand
agcugaagcauaugggaca

SEQ ID NO: 2638887 - RNA, 19 nt, Homo sapiens
  misc_RNA (1)...(19): siRNA sense strand
ucgcagaccuggagcgcaa

SEQ ID NO: 2638888 - RNA, 19 nt, Homo sapiens
  misc_RNA (1)...(19): siRNA sense strand
ggaaggaggauguggccau

SEQ ID NO: 2638889 - RNA, 19 nt, Homo sapiens
  misc_RNA (1)...(19): siRNA sense strand
gggagaagccucagugcca

SEQ ID NO: 2638890 - RNA, 19 nt, Homo sapiens
  misc_RNA (1)...(19): siRNA sense strand
gagaggagauugaggcgca

SEQ ID NO: 2638891 - RNA, 19 nt, Homo sapiens
  misc_RNA (1)...(19): siRNA sense strand
acaauaacaauaacggcaa

SEQ ID NO: 2638892 - RNA, 19 nt, Homo sapiens
  misc_RNA (1)...(19): siRNA sense strand
ccgugugcuucgagagcga

SEQ ID NO: 2638893 - RNA, 19 nt, Homo sapiens
  misc_RNA (1)...(19): siRNA sense strand
acaauaacggcaaugggua

SEQ ID NO: 2638894 - RNA, 19 nt, Homo sapiens
  misc_RNA (1)...(19): siRNA sense strand
ccgcgcaagaagagcguga

SEQ ID NO: 2638895 - RNA, 19 nt, Homo sapiens
  misc_RNA (1)...(19): siRNA sense strand
ggaauaagaacacggcacu

SEQ ID NO: 2638896 - RNA, 19 nt, Homo sapiens
  misc_RNA (1)...(19): siRNA sense strand
cagcagacgcacacguaca

SEQ ID NO: 2638897 - RNA, 19 nt, Homo sapiens
  misc_RNA (1)...(19): siRNA sense strand
cgcacaacggaaacaauaa

SEQ ID NO: 2638898 - RNA, 19 nt, Homo sapiens
  misc_RNA (1)...(19): siRNA sense strand
cggaauaagaacacggcac

SEQ ID NO: 2638899 - RNA, 19 nt, Homo sapiens
  misc_RNA (1)...(19): siRNA sense strand
agaacgacuuccacgccaa

SEQ ID NO: 2638900 - RNA, 19 nt, Homo sapiens
  misc_RNA (1)...(19): siRNA sense strand
caauaacggcaauggguac

SEQ ID NO: 2638901 - RNA, 19 nt, Homo sapiens
  misc_RNA (1)...(19): siRNA sense strand
ggugaagaaacaagagaua

SEQ ID NO: 2638902 - RNA, 19 nt, Homo sapiens
  misc_RNA (1)...(19): siRNA sense strand
ucucaaaugaacaggauaa

SEQ ID NO: 2638903 - RNA, 19 nt, Homo sapiens
  misc_RNA (1)...(19): siRNA sense strand
uugaagaaauggaggauga

SEQ ID NO: 2638904 - RNA, 19 nt, Homo sapiens
  misc_RNA (1)...(19): siRNA sense strand
cagaaagauucaacaggaa

SEQ ID NO: 2638905 - RNA, 19 nt, Homo sapiens
  misc_RNA (1)...(19): siRNA sense strand
agucuggcguugagaaaua

SEQ ID NO: 2638906 - RNA, 19 nt, Homo sapiens
  misc_RNA (1)...(19): siRNA sense strand
agguaaagaaauuggaaga

SEQ ID NO: 2638907 - RNA, 19 nt, Homo sapiens
  misc_RNA (1)...(19): siRNA sense strand
ccugaauuaucuaaggaaa

SEQ ID NO: 2638908 - RNA, 19 nt, Homo sapiens
  misc_RNA (1)...(19): siRNA sense strand
aaguagaagaggaugauua

SEQ ID NO: 2638909 - RNA, 19 nt, Homo sapiens
  misc_RNA (1)...(19): siRNA sense strand
caggaaaccaggaaacaaa

SEQ ID NO: 2638910 - RNA, 19 nt, Homo sapiens
  misc_RNA (1)...(19): siRNA sense strand
gcucaaagcucgugcugca

SEQ ID NO: 2638911 - RNA, 19 nt, Homo sapiens
  misc_RNA (1)...(19): siRNA sense strand
gagacaguguggagggaga

SEQ ID NO: 2638912 - RNA, 19 nt, Homo sapiens
  misc_RNA (1)...(19): siRNA sense strand
guacaagauaagacagaau

SEQ ID NO: 2638913 - RNA, 19 nt, Homo sapiens
  misc_RNA (1)...(19): siRNA sense strand
ggauaagauugaugccuau

SEQ ID NO: 2638914 - RNA, 19 nt, Homo sapiens
  misc_RNA (1)...(19): siRNA sense strand
caacagauaaagagcagaa

SEQ ID NO: 2638915 - RNA, 19 nt, Homo sapiens
  misc_RNA (1)...(19): siRNA sense strand
cuaaaguagaagaggauga

SEQ ID NO: 2638916 - RNA, 19 nt, Homo sapiens
  misc_RNA (1)...(19): siRNA sense strand
ucugagaaguugaagacua

SEQ ID NO: 2638917 - RNA, 19 nt, Homo sapiens
  misc_RNA (1)...(19): siRNA sense strand
gaguaugaacggcaagaaa

SEQ ID NO: 2638918 - RNA, 19 nt, Homo sapiens
  misc_RNA (1)...(19): siRNA sense strand
cagaaauugaagaaagcaa

SEQ ID NO: 2638919 - RNA, 19 nt, Homo sapiens
  misc_RNA (1)...(19): siRNA sense strand
cugagaaguugaagacuau

SEQ ID NO: 2638920 - RNA, 19 nt, Homo sapiens
  misc_RNA (1)...(19): siRNA sense strand
gcuuaugaugauacagaaa

SEQ ID NO: 2638921 - RNA, 19 nt, Homo sapiens
  misc_RNA (1)...(19): siRNA sense strand
gaggaaagugauaguguau

SEQ ID NO: 2638922 - RNA, 19 nt, Homo sapiens
  misc_RNA (1)...(19): siRNA sense strand
agggagacgcuuugguaaa

SEQ ID NO: 2638923 - RNA, 19 nt, Homo sapiens
  misc_RNA (1)...(19): siRNA sense strand
cugcagaaccugaagauga

SEQ ID NO: 2638924 - RNA, 19 nt, Homo sapiens
  misc_RNA (1)...(19): siRNA sense strand
ugaauuagcaaauggagaa

SEQ ID NO: 2638925 - RNA, 19 nt, Homo sapiens
  misc_RNA (1)...(19): siRNA sense strand
agaaaugcugcaagauaaa

SEQ ID NO: 2638926 - RNA, 19 nt, Homo sapiens
  misc_RNA (1)...(19): siRNA sense strand
aggauaagauugaugccua

SEQ ID NO: 2638927 - RNA, 19 nt, Homo sapiens
  misc_RNA (1)...(19): siRNA sense strand
acaaagaaguaaacgcaga

SEQ ID NO: 2638928 - RNA, 19 nt, Homo sapiens
  misc_RNA (1)...(19): siRNA sense strand
cggaaugagaagaugaaaa

SEQ ID NO: 2638929 - RNA, 19 nt, Homo sapiens
  misc_RNA (1)...(19): siRNA sense strand
gauaaagagcagaauucaa

SEQ ID NO: 2638930 - RNA, 19 nt, Homo sapiens
  misc_RNA (1)...(19): siRNA sense strand
caaauacaaugguggaaaa

SEQ ID NO: 2638931 - RNA, 19 nt, Homo sapiens
  misc_RNA (1)...(19): siRNA sense strand
uggcaaugcugcaagaaga

SEQ ID NO: 2638932 - RNA, 19 nt, Homo sapiens
  misc_RNA (1)...(19): siRNA sense strand
gaagaaaaugcuaggcuua

SEQ ID NO: 2638933 - RNA, 19 nt, Homo sapiens
  misc_RNA (1)...(19): siRNA sense strand
aguauuaugcaguuggaaa

SEQ ID NO: 2638934 - RNA, 19 nt, Homo sapiens
  misc_RNA (1)...(19): siRNA sense strand
aagaaauggaggaugaauu

SEQ ID NO: 2638935 - RNA, 19 nt, Homo sapiens
  misc_RNA (1)...(19): siRNA sense strand
acgcagaacaucacauuaa

SEQ ID NO: 2638936 - RNA, 19 nt, Homo sapiens
  misc_RNA (1)...(19): siRNA sense strand
ugugaaggauagaguauau

SEQ ID NO: 2638937 - RNA, 19 nt, Homo sapiens
  misc_RNA (1)...(19): siRNA sense strand
cagaauuagaggaugaaaa

SEQ ID NO: 2638938 - RNA, 19 nt, Homo sapiens
  misc_RNA (1)...(19): siRNA sense strand
ggguaaagacacauuaaaa

SEQ ID NO: 2638939 - RNA, 19 nt, Homo sapiens
  misc_RNA (1)...(19): siRNA sense strand
ccaguaagcaaaugaguga

SEQ ID NO: 2638940 - RNA, 19 nt, Homo sapiens
  misc_RNA (1)...(19): siRNA sense strand
aagaacuacuagaggauga

SEQ ID NO: 2638941 - RNA, 19 nt, Homo sapiens
  misc_RNA (1)...(19): siRNA sense strand
augcuaggcuuaagaagaa

SEQ ID NO: 2638942 - RNA, 19 nt, Homo sapiens
  misc_RNA (1)...(19): siRNA sense strand
ccaaauacaaugguggaaa

SEQ ID NO: 2638943 - RNA, 19 nt, Homo sapiens
  misc_RNA (1)...(19): siRNA sense strand
acgacaacccugaggaaca

SEQ ID NO: 2638944 - RNA, 19 nt, Homo sapiens
  misc_RNA (1)...(19): siRNA sense strand
ccaucggguucaagaagaa

SEQ ID NO: 2638945 - RNA, 19 nt, Homo sapiens
  misc_RNA (1)...(19): siRNA sense strand
agauaugccuagaagugaa

SEQ ID NO: 2638946 - RNA, 19 nt, Homo sapiens
  misc_RNA (1)...(19): siRNA sense strand
agccaaauacugagaaaga

SEQ ID NO: 2638947 - RNA, 19 nt, Homo sapiens
  misc_RNA (1)...(19): siRNA sense strand
gagcaguugcagcaggaaa

SEQ ID NO: 2638948 - RNA, 19 nt, Homo sapiens
  misc_RNA (1)...(19): siRNA sense strand
agaagaacuuuuaggguuu

SEQ ID NO: 2638949 - RNA, 19 nt, Homo sapiens
  misc_RNA (1)...(19): siRNA sense strand
cugagaaagcuguagaaaa

SEQ ID NO: 2638950 - RNA, 19 nt, Homo sapiens
  misc_RNA (1)...(19): siRNA sense strand
aggaagaugaggagaacca

SEQ ID NO: 2638951 - RNA, 19 nt, Homo sapiens
  misc_RNA (1)...(19): siRNA sense strand
caaaugaaugacagaaaga

SEQ ID NO: 2638952 - RNA, 19 nt, Homo sapiens
  misc_RNA (1)...(19): siRNA sense strand
gagcaauggaagagaugca

SEQ ID NO: 2638953 - RNA, 19 nt, Homo sapiens
  misc_RNA (1)...(19): siRNA sense strand
uggaagaccagguaaagaa

SEQ ID NO: 2638954 - RNA, 19 nt, Homo sapiens
  misc_RNA (1)...(19): siRNA sense strand
agaaguaaacgcagaacau

SEQ ID NO: 2638955 - RNA, 19 nt, Homo sapiens
  misc_RNA (1)...(19): siRNA sense strand
guacaauucugcagcuaca

SEQ ID NO: 2638956 - RNA, 19 nt, Homo sapiens
  misc_RNA (1)...(19): siRNA sense strand
cacaggaggugaagaaaca

SEQ ID NO: 2638957 - RNA, 19 nt, Homo sapiens
  misc_RNA (1)...(19): siRNA sense strand
augagaacacagagaagua

SEQ ID NO: 2638958 - RNA, 19 nt, Homo sapiens
  misc_RNA (1)...(19): siRNA sense strand
agaagaaagcucaugaaaa

SEQ ID NO: 2638959 - RNA, 19 nt, Homo sapiens
  misc_RNA (1)...(19): siRNA sense strand
uugaagaaaugcugcaaga

SEQ ID NO: 2638960 - RNA, 19 nt, Homo sapiens
  misc_RNA (1)...(19): siRNA sense strand
guaugaacggcaagaaaga

SEQ ID NO: 2638961 - RNA, 19 nt, Homo sapiens
  misc_RNA (1)...(19): siRNA sense strand
ucgaugaaggcaagguuaa

SEQ ID NO: 2638962 - RNA, 19 nt, Homo sapiens
  misc_RNA (1)...(19): siRNA sense strand
ugcuagaaucugagagaga

SEQ ID NO: 2638963 - RNA, 19 nt, Homo sapiens
  misc_RNA (1)...(19): siRNA sense strand
aagaccagguaaagaaauu

SEQ ID NO: 2638964 - RNA, 19 nt, Homo sapiens
  misc_RNA (1)...(19): siRNA sense strand
gugacaagagggaggacuu

SEQ ID NO: 2638965 - RNA, 19 nt, Homo sapiens
  misc_RNA (1)...(19): siRNA sense strand
gggaaaccacagucagcaa

SEQ ID NO: 2638966 - RNA, 19 nt, Homo sapiens
  misc_RNA (1)...(19): siRNA sense strand
agccuaaggaggagaagaa

SEQ ID NO: 2638967 - RNA, 19 nt, Homo sapiens
  misc_RNA (1)...(19): siRNA sense strand
aggcagaccuggagcugga

SEQ ID NO: 2638968 - RNA, 19 nt, Homo sapiens
  misc_RNA (1)...(19): siRNA sense strand
gcaagagcaaggaccgcaa

SEQ ID NO: 2638969 - RNA, 19 nt, Homo sapiens
  misc_RNA (1)...(19): siRNA sense strand
augacaacuuggacaguga

SEQ ID NO: 2638970 - RNA, 19 nt, Homo sapiens
  misc_RNA (1)...(19): siRNA sense strand
ggacagugauagcggcuuc

SEQ ID NO: 2638971 - RNA, 19 nt, Homo sapiens
  misc_RNA (1)...(19): siRNA sense strand
ccacagaagacaaggcccu

SEQ ID NO: 2638972 - RNA, 19 nt, Homo sapiens
  misc_RNA (1)...(19): siRNA sense strand
agcgugaggcggaggacua

SEQ ID NO: 2638973 - RNA, 19 nt, Homo sapiens
  misc_RNA (1)...(19): siRNA sense strand
gccagcagauggagcguga

SEQ ID NO: 2638974 - RNA, 19 nt, Homo sapiens
  misc_RNA (1)...(19): siRNA sense strand
ggacagucggucaagcgaa

SEQ ID NO: 2638975 - RNA, 19 nt, Homo sapiens
  misc_RNA (1)...(19): siRNA sense strand
gcgugcagguggaagagga

SEQ ID NO: 2638976 - RNA, 19 nt, Homo sapiens
  misc_RNA (1)...(19): siRNA sense strand
uggagaagcuggagcacug

SEQ ID NO: 2638977 - RNA, 19 nt, Homo sapiens
  misc_RNA (1)...(19): siRNA sense strand
aggccaaagccaggacuua

SEQ ID NO: 2638978 - RNA, 19 nt, Homo sapiens
  misc_RNA (1)...(19): siRNA sense strand
ccucaaguuccuggagcua

SEQ ID NO: 2638979 - RNA, 19 nt, Homo sapiens
  misc_RNA (1)...(19): siRNA sense strand
ccuccuucaacuucagaaa

SEQ ID NO: 2638980 - RNA, 19 nt, Homo sapiens
  misc_RNA (1)...(19): siRNA sense strand
ggacaagaggcgagcaagg

SEQ ID NO: 2638981 - RNA, 19 nt, Homo sapiens
  misc_RNA (1)...(19): siRNA sense strand
ggcaagaggagcaagagca

SEQ ID NO: 2638982 - RNA, 19 nt, Homo sapiens
  misc_RNA (1)...(19): siRNA sense strand
gggaagaacugaaugaaga

SEQ ID NO: 2638983 - RNA, 19 nt, Homo sapiens
  misc_RNA (1)...(19): siRNA sense strand
ggaagaacugaaugaagau

SEQ ID NO: 2638984 - RNA, 19 nt, Homo sapiens
  misc_RNA (1)...(19): siRNA sense strand
acguguaugcuguggagaa

SEQ ID NO: 2638985 - RNA, 19 nt, Homo sapiens
  misc_RNA (1)...(19): siRNA sense strand
gaagaugguucucagguga

SEQ ID NO: 2638986 - RNA, 19 nt, Homo sapiens
  misc_RNA (1)...(19): siRNA sense strand
ggguaaauauggacagcug

SEQ ID NO: 2638987 - RNA, 19 nt, Homo sapiens
  misc_RNA (1)...(19): siRNA sense strand
caagggaagaacugaauga

SEQ ID NO: 2638988 - RNA, 19 nt, Homo sapiens
  misc_RNA (1)...(19): siRNA sense strand
ucgcaagggaagaacugaa

SEQ ID NO: 2638989 - RNA, 19 nt, Homo sapiens
  misc_RNA (1)...(19): siRNA sense strand
gaaagaaagagaaaggaaa

SEQ ID NO: 2638990 - RNA, 19 nt, Homo sapiens
  misc_RNA (1)...(19): siRNA sense strand
gaacuauacgggagagaaa

SEQ ID NO: 2638991 - RNA, 19 nt, Homo sapiens
  misc_RNA (1)...(19): siRNA sense strand
gcuaauauccuguuggaaa

SEQ ID NO: 2638992 - RNA, 19 nt, Homo sapiens
  misc_RNA (1)...(19): siRNA sense strand
ggaaagaaagagaaaggaa

SEQ ID NO: 2638993 - RNA, 19 nt, Homo sapiens
  misc_RNA (1)...(19): siRNA sense strand
aguaagagccugaacuaua

SEQ ID NO: 2638994 - RNA, 19 nt, Homo sapiens
  misc_RNA (1)...(19): siRNA sense strand
ucaccaagcuuaagggaca

SEQ ID NO: 2638995 - RNA, 19 nt, Homo sapiens
  misc_RNA (1)...(19): siRNA sense strand
ggaagagucgggaaagaaa

SEQ ID NO: 2638996 - RNA, 19 nt, Homo sapiens
  misc_RNA (1)...(19): siRNA sense strand
acuucaagaucaaaggaaa

SEQ ID NO: 2638997 - RNA, 19 nt, Homo sapiens
  misc_RNA (1)...(19): siRNA sense strand
aggaaggagaagagagaga

SEQ ID NO: 2638998 - RNA, 19 nt, Homo sapiens
  misc_RNA (1)...(19): siRNA sense strand
aaaucagccuguugagaaa

SEQ ID NO: 2638999 - RNA, 19 nt, Homo sapiens
  misc_RNA (1)...(19): siRNA sense strand
uguuaaaggacuugugcaa

SEQ ID NO: 2639000 - RNA, 19 nt, Homo sapiens
  misc_RNA (1)...(19): siRNA sense strand
acgaagaccuagaugauau

SEQ ID NO: 2639001 - RNA, 19 nt, Homo sapiens
  misc_RNA (1)...(19): siRNA sense strand
agaauagguuugaggacau

SEQ ID NO: 2639002 - RNA, 19 nt, Homo sapiens
  misc_RNA (1)...(19): siRNA sense strand
ggacaagugagccaagaaa

SEQ ID NO: 2639003 - RNA, 19 nt, Homo sapiens
  misc_RNA (1)...(19): siRNA sense strand
caguggaagagucgggaaa

SEQ ID NO: 2639004 - RNA, 19 nt, Homo sapiens
  misc_RNA (1)...(19): siRNA sense strand
ucuaagaaguccaagguga

SEQ ID NO: 2639005 - RNA, 19 nt, Homo sapiens
  misc_RNA (1)...(19): siRNA sense strand
cuaagaaguccaaggugaa

SEQ ID NO: 2639006 - RNA, 19 nt, Homo sapiens
  misc_RNA (1)...(19): siRNA sense strand
ggguaaagccaaaacuaaa

SEQ ID NO: 2639007 - RNA, 19 nt, Homo sapiens
  misc_RNA (1)...(19): siRNA sense strand
guauaagaguccugucauu

SEQ ID NO: 2639008 - RNA, 19 nt, Homo sapiens
  misc_RNA (1)...(19): siRNA sense strand
ggccagaguucuucgggaa

SEQ ID NO: 2639009 - RNA, 19 nt, Homo sapiens
  misc_RNA (1)...(19): siRNA sense strand
auggauaguuugaggagau

SEQ ID NO: 2639010 - RNA, 19 nt, Homo sapiens
  misc_RNA (1)...(19): siRNA sense strand
ccaagaaaccuuaucagaa

SEQ ID NO: 2639011 - RNA, 19 nt, Homo sapiens
  misc_RNA (1)...(19): siRNA sense strand
gccaacaagacaagugaua

SEQ ID NO: 2639012 - RNA, 19 nt, Homo sapiens
  misc_RNA (1)...(19): siRNA sense strand
ggauguagagguggagaaa

SEQ ID NO: 2639013 - RNA, 19 nt, Homo sapiens
  misc_RNA (1)...(19): siRNA sense strand
uuaaaggacuugugcaaaa

SEQ ID NO: 2639014 - RNA, 19 nt, Homo sapiens
  misc_RNA (1)...(19): siRNA sense strand
cuuggaggguuuacagaaa

SEQ ID NO: 2639015 - RNA, 19 nt, Homo sapiens
  misc_RNA (1)...(19): siRNA sense strand
aggaggaggaagaggcauu

SEQ ID NO: 2639016 - RNA, 19 nt, Homo sapiens
  misc_RNA (1)...(19): siRNA sense strand
gagaggaggaagaggagga

SEQ ID NO: 2639017 - RNA, 19 nt, Homo sapiens
  misc_RNA (1)...(19): siRNA sense strand
gagcaccaguauuggcaua

SEQ ID NO: 2639018 - RNA, 19 nt, Homo sapiens
  misc_RNA (1)...(19): siRNA sense strand
caacaagacaagugauagu

SEQ ID NO: 2639019 - RNA, 19 nt, Homo sapiens
  misc_RNA (1)...(19): siRNA sense strand
acuuagcagucaagaggaa

SEQ ID NO: 2639020 - RNA, 19 nt, Homo sapiens
  misc_RNA (1)...(19): siRNA sense strand
gagucuugcuauggagaua

SEQ ID NO: 2639021 - RNA, 19 nt, Homo sapiens
  misc_RNA (1)...(19): siRNA sense strand
cuucaaaguuguucuucua

SEQ ID NO: 2639022 - RNA, 19 nt, Homo sapiens
  misc_RNA (1)...(19): siRNA sense strand
gaugggaguuugugagguu

SEQ ID NO: 2639023 - RNA, 19 nt, Homo sapiens
  misc_RNA (1)...(19): siRNA sense strand
ccauaaguaguuucaguaa

SEQ ID NO: 2639024 - RNA, 19 nt, Homo sapiens
  misc_RNA (1)...(19): siRNA sense strand
aggagaagagagagaagau

SEQ ID NO: 2639025 - RNA, 19 nt, Homo sapiens
  misc_RNA (1)...(19): siRNA sense strand
uaaggaaggagaagagaga

SEQ ID NO: 2639026 - RNA, 19 nt, Homo sapiens
  misc_RNA (1)...(19): siRNA sense strand
ggagaaaccugcugccguu

SEQ ID NO: 2639027 - RNA, 19 nt, Homo sapiens
  misc_RNA (1)...(19): siRNA sense strand
gagaaaggaaagagcaucu

SEQ ID NO: 2639028 - RNA, 19 nt, Homo sapiens
  misc_RNA (1)...(19): siRNA sense strand
gagaugaucagacaagaaa

SEQ ID NO: 2639029 - RNA, 19 nt, Homo sapiens
  misc_RNA (1)...(19): siRNA sense strand
gaugaucagacaagaaauu

SEQ ID NO: 2639030 - RNA, 19 nt, Homo sapiens
  misc_RNA (1)...(19): siRNA sense strand
guggaagagucgggaaaga

SEQ ID NO: 2639031 - RNA, 19 nt, Homo sapiens
  misc_RNA (1)...(19): siRNA sense strand
ucacagauaaggaaggaga

SEQ ID NO: 2639032 - RNA, 19 nt, Homo sapiens
  misc_RNA (1)...(19): siRNA sense strand
gaagaaguggacuggcuaa

SEQ ID NO: 2639033 - RNA, 19 nt, Homo sapiens
  misc_RNA (1)...(19): siRNA sense strand
cuacgaagaccuagaugau

SEQ ID NO: 2639034 - RNA, 19 nt, Homo sapiens
  misc_RNA (1)...(19): siRNA sense strand
aagagaaaggaaagagcau

SEQ ID NO: 2639035 - RNA, 19 nt, Homo sapiens
  misc_RNA (1)...(19): siRNA sense strand
aggauguagagguggagaa

SEQ ID NO: 2639036 - RNA, 19 nt, Homo sapiens
  misc_RNA (1)...(19): siRNA sense strand
agagugagcuggaagacuu

SEQ ID NO: 2639037 - RNA, 19 nt, Homo sapiens
  misc_RNA (1)...(19): siRNA sense strand
aagaauagguuugaggaca

SEQ ID NO: 2639038 - RNA, 19 nt, Homo sapiens
  misc_RNA (1)...(19): siRNA sense strand
agaguaagagccugaacua

SEQ ID NO: 2639039 - RNA, 19 nt, Homo sapiens
  misc_RNA (1)...(19): siRNA sense strand
aggaggaagaggaggagga

SEQ ID NO: 2639040 - RNA, 19 nt, Homo sapiens
  misc_RNA (1)...(19): siRNA sense strand
aauaagaguaagagccuga

SEQ ID NO: 2639041 - RNA, 19 nt, Homo sapiens
  misc_RNA (1)...(19): siRNA sense strand
gaauuuacuuagcagucaa

SEQ ID NO: 2639042 - RNA, 19 nt, Homo sapiens
  misc_RNA (1)...(19): siRNA sense strand
uuacagcccuugucagaua

SEQ ID NO: 2639043 - RNA, 19 nt, Homo sapiens
  misc_RNA (1)...(19): siRNA sense strand
gaauacagucauacccuua

SEQ ID NO: 2639044 - RNA, 19 nt, Homo sapiens
  misc_RNA (1)...(19): siRNA sense strand
uggaaguagugaagaauag

SEQ ID NO: 2639045 - RNA, 19 nt, Homo sapiens
  misc_RNA (1)...(19): siRNA sense strand
ugagaugaucagacaagaa

SEQ ID NO: 2639046 - RNA, 19 nt, Homo sapiens
  misc_RNA (1)...(19): siRNA sense strand
aguuugaggagaugcuuaa

SEQ ID NO: 2639047 - RNA, 19 nt, Homo sapiens
  misc_RNA (1)...(19): siRNA sense strand
caaagaagcccuccugcua

SEQ ID NO: 2639048 - RNA, 19 nt, Homo sapiens
  misc_RNA (1)...(19): siRNA sense strand
caaaucagccuguugagaa

SEQ ID NO: 2639049 - RNA, 19 nt, Homo sapiens
  misc_RNA (1)...(19): siRNA sense strand
cgaagaccuagaugauaua

SEQ ID NO: 2639050 - RNA, 19 nt, Homo sapiens
  misc_RNA (1)...(19): siRNA sense strand
ggcuaaucaccaagcuuaa

SEQ ID NO: 2639051 - RNA, 19 nt, Homo sapiens
  misc_RNA (1)...(19): siRNA sense strand
gggacaagugagccaagaa

SEQ ID NO: 2639052 - RNA, 19 nt, Homo sapiens
  misc_RNA (1)...(19): siRNA sense strand
cacgagacuucaagaucaa

SEQ ID NO: 2639053 - RNA, 19 nt, Homo sapiens
  misc_RNA (1)...(19): siRNA sense strand
gugacuugucccaggauau

SEQ ID NO: 2639054 - RNA, 19 nt, Homo sapiens
  misc_RNA (1)...(19): siRNA sense strand
gcuaauucagucaugcaaa

SEQ ID NO: 2639055 - RNA, 19 nt, Homo sapiens
  misc_RNA (1)...(19): siRNA sense strand
gguaaagccaaaacuaaaa

SEQ ID NO: 2639056 - RNA, 19 nt, Homo sapiens
  misc_RNA (1)...(19): siRNA sense strand
caagaaaccuuaucagaag

SEQ ID NO: 2639057 - RNA, 19 nt, Homo sapiens
  misc_RNA (1)...(19): siRNA sense strand
cgucauguaugcacccuua

SEQ ID NO: 2639058 - RNA, 19 nt, Homo sapiens
  misc_RNA (1)...(19): siRNA sense strand
gagauauagaccaggaugu

SEQ ID NO: 2639059 - RNA, 19 nt, Homo sapiens
  misc_RNA (1)...(19): siRNA sense strand
gcaauagugaauuugagaa

SEQ ID NO: 2639060 - RNA, 19 nt, Homo sapiens
  misc_RNA (1)...(19): siRNA sense strand
cagagguccuuguugaauu

SEQ ID NO: 2639061 - RNA, 19 nt, Homo sapiens
  misc_RNA (1)...(19): siRNA sense strand
caauagugaauuugagaac

SEQ ID NO: 2639062 - RNA, 19 nt, Homo sapiens
  misc_RNA (1)...(19): siRNA sense strand
gaagguucuugauggaaaa

SEQ ID NO: 2639063 - RNA, 19 nt, Homo sapiens
  misc_RNA (1)...(19): siRNA sense strand
cguagaacuugguuucauu

SEQ ID NO: 2639064 - RNA, 19 nt, Homo sapiens
  misc_RNA (1)...(19): siRNA sense strand
agauauagaccaggaugua

SEQ ID NO: 2639065 - RNA, 19 nt, Homo sapiens
  misc_RNA (1)...(19): siRNA sense strand
ucacgagacuucaagauca

SEQ ID NO: 2639066 - RNA, 19 nt, Homo sapiens
  misc_RNA (1)...(19): siRNA sense strand
guucacagccauuacaauu

SEQ ID NO: 2639067 - RNA, 19 nt, Homo sapiens
  misc_RNA (1)...(19): siRNA sense strand
cgggaaagaaagagaaagg

SEQ ID NO: 2639068 - RNA, 19 nt, Homo sapiens
  misc_RNA (1)...(19): siRNA sense strand
gcagucaagaggaagauuu

SEQ ID NO: 2639069 - RNA, 19 nt, Homo sapiens
  misc_RNA (1)...(19): siRNA sense strand
auguagagguggagaaaac

SEQ ID NO: 2639070 - RNA, 19 nt, Homo sapiens
  misc_RNA (1)...(19): siRNA sense strand
cuaauauccuguuggaaac

SEQ ID NO: 2639071 - RNA, 19 nt, Homo sapiens
  misc_RNA (1)...(19): siRNA sense strand
uggcuaaucaccaagcuua

SEQ ID NO: 2639072 - RNA, 19 nt, Homo sapiens
  misc_RNA (1)...(19): siRNA sense strand
cuucaagaucaaaggaaac

SEQ ID NO: 2639073 - RNA, 19 nt, Homo sapiens
  misc_RNA (1)...(19): siRNA sense strand
ucuuagaccugcuuucaaa

SEQ ID NO: 2639074 - RNA, 19 nt, Homo sapiens
  misc_RNA (1)...(19): siRNA sense strand
agggagaggaggaagagga

SEQ ID NO: 2639075 - RNA, 19 nt, Homo sapiens
  misc_RNA (1)...(19): siRNA sense strand
gucgggaaagaaagagaaa

SEQ ID NO: 2639076 - RNA, 19 nt, Homo sapiens
  misc_RNA (1)...(19): siRNA sense strand
gcccaagucuuucuagaau

SEQ ID NO: 2639077 - RNA, 19 nt, Homo sapiens
  misc_RNA (1)...(19): siRNA sense strand
ucacagaagcuuuugacua

SEQ ID NO: 2639078 - RNA, 19 nt, Homo sapiens
  misc_RNA (1)...(19): siRNA sense strand
cggguaaagccaaaacuaa

SEQ ID NO: 2639079 - RNA, 19 nt, Homo sapiens
  misc_RNA (1)...(19): siRNA sense strand
aaagaaagagaaaggaaag

SEQ ID NO: 2639080 - RNA, 19 nt, Homo sapiens
  misc_RNA (1)...(19): siRNA sense strand
gagagaagaugcagauguc

SEQ ID NO: 2639081 - RNA, 19 nt, Homo sapiens
  misc_RNA (1)...(19): siRNA sense strand
aagacuuugaacuggauaa

SEQ ID NO: 2639082 - RNA, 19 nt, Homo sapiens
  misc_RNA (1)...(19): siRNA sense strand
uggaagagucgggaaagaa

SEQ ID NO: 2639083 - RNA, 19 nt, Homo sapiens
  misc_RNA (1)...(19): siRNA sense strand
gccagaguucuucgggaaa

SEQ ID NO: 2639084 - RNA, 19 nt, Homo sapiens
  misc_RNA (1)...(19): siRNA sense strand
aaaccaagccaaucccuaa

SEQ ID NO: 2639085 - RNA, 19 nt, Homo sapiens
  misc_RNA (1)...(19): siRNA sense strand
aaacuaaaauggccaacaa

SEQ ID NO: 2639086 - RNA, 19 nt, Homo sapiens
  misc_RNA (1)...(19): siRNA sense strand
agagagagaagaugcagau

SEQ ID NO: 2639087 - RNA, 19 nt, Homo sapiens
  misc_RNA (1)...(19): siRNA sense strand
cugcauguuucguauaaga

SEQ ID NO: 2639088 - RNA, 19 nt, Homo sapiens
  misc_RNA (1)...(19): siRNA sense strand
gaaagaaagagaaaggaaa

SEQ ID NO: 2639089 - RNA, 19 nt, Homo sapiens
  misc_RNA (1)...(19): siRNA sense strand
gaacuauacgggagagaaa

SEQ ID NO: 2639090 - RNA, 19 nt, Homo sapiens
  misc_RNA (1)...(19): siRNA sense strand
gcuaauauccuguuggaaa

SEQ ID NO: 2639091 - RNA, 19 nt, Homo sapiens
  misc_RNA (1)...(19): siRNA sense strand
ggaaagaaagagaaaggaa

SEQ ID NO: 2639092 - RNA, 19 nt, Homo sapiens
  misc_RNA (1)...(19): siRNA sense strand
aguaagagccugaacuaua

SEQ ID NO: 2639093 - RNA, 19 nt, Homo sapiens
  misc_RNA (1)...(19): siRNA sense strand
ucaccaagcuuaagggaca

SEQ ID NO: 2639094 - RNA, 19 nt, Homo sapiens
  misc_RNA (1)...(19): siRNA sense strand
ggaagagucgggaaagaaa

SEQ ID NO: 2639095 - RNA, 19 nt, Homo sapiens
  misc_RNA (1)...(19): siRNA sense strand
acuucaagaucaaaggaaa

SEQ ID NO: 2639096 - RNA, 19 nt, Homo sapiens
  misc_RNA (1)...(19): siRNA sense strand
aggaaggagaagagagaga

SEQ ID NO: 2639097 - RNA, 19 nt, Homo sapiens
  misc_RNA (1)...(19): siRNA sense strand
aaaucagccuguugagaaa

SEQ ID NO: 2639098 - RNA, 19 nt, Homo sapiens
  misc_RNA (1)...(19): siRNA sense strand
uguuaaaggacuugugcaa

SEQ ID NO: 2639099 - RNA, 19 nt, Homo sapiens
  misc_RNA (1)...(19): siRNA sense strand
acgaagaccuagaugauau

SEQ ID NO: 2639100 - RNA, 19 nt, Homo sapiens
  misc_RNA (1)...(19): siRNA sense strand
agaauagguuugaggacau

SEQ ID NO: 2639101 - RNA, 19 nt, Homo sapiens
  misc_RNA (1)...(19): siRNA sense strand
ggacaagugagccaagaaa

SEQ ID NO: 2639102 - RNA, 19 nt, Homo sapiens
  misc_RNA (1)...(19): siRNA sense strand
caguggaagagucgggaaa

SEQ ID NO: 2639103 - RNA, 19 nt, Homo sapiens
  misc_RNA (1)...(19): siRNA sense strand
ucuaagaaguccaagguga

SEQ ID NO: 2639104 - RNA, 19 nt, Homo sapiens
  misc_RNA (1)...(19): siRNA sense strand
cuaagaaguccaaggugaa

SEQ ID NO: 2639105 - RNA, 19 nt, Homo sapiens
  misc_RNA (1)...(19): siRNA sense strand
guauaagaguccugucauu

SEQ ID NO: 2639106 - RNA, 19 nt, Homo sapiens
  misc_RNA (1)...(19): siRNA sense strand
ggccagaguucuucgggaa

SEQ ID NO: 2639107 - RNA, 19 nt, Homo sapiens
  misc_RNA (1)...(19): siRNA sense strand
auggauaguuugaggagau

SEQ ID NO: 2639108 - RNA, 19 nt, Homo sapiens
  misc_RNA (1)...(19): siRNA sense strand
ccaagaaaccuuaucagaa

SEQ ID NO: 2639109 - RNA, 19 nt, Homo sapiens
  misc_RNA (1)...(19): siRNA sense strand
gccaacaagacaagugaua

SEQ ID NO: 2639110 - RNA, 19 nt, Homo sapiens
  misc_RNA (1)...(19): siRNA sense strand
ggauguagagguggagaaa

SEQ ID NO: 2639111 - RNA, 19 nt, Homo sapiens
  misc_RNA (1)...(19): siRNA sense strand
uuaaaggacuugugcaaaa

SEQ ID NO: 2639112 - RNA, 19 nt, Homo sapiens
  misc_RNA (1)...(19): siRNA sense strand
cuuggaggguuuacagaaa

SEQ ID NO: 2639113 - RNA, 19 nt, Homo sapiens
  misc_RNA (1)...(19): siRNA sense strand
aggaggaggaagaggcauu

SEQ ID NO: 2639114 - RNA, 19 nt, Homo sapiens
  misc_RNA (1)...(19): siRNA sense strand
gagaggaggaagaggagga

SEQ ID NO: 2639115 - RNA, 19 nt, Homo sapiens
  misc_RNA (1)...(19): siRNA sense strand
gagcaccaguauuggcaua

SEQ ID NO: 2639116 - RNA, 19 nt, Homo sapiens
  misc_RNA (1)...(19): siRNA sense strand
caacaagacaagugauagu

SEQ ID NO: 2639117 - RNA, 19 nt, Homo sapiens
  misc_RNA (1)...(19): siRNA sense strand
acuuagcagucaagaggaa

SEQ ID NO: 2639118 - RNA, 19 nt, Homo sapiens
  misc_RNA (1)...(19): siRNA sense strand
gagucuugcuauggagaua

SEQ ID NO: 2639119 - RNA, 19 nt, Homo sapiens
  misc_RNA (1)...(19): siRNA sense strand
cuucaaaguuguucuucua

SEQ ID NO: 2639120 - RNA, 19 nt, Homo sapiens
  misc_RNA (1)...(19): siRNA sense strand
gaugggaguuugugagguu

SEQ ID NO: 2639121 - RNA, 19 nt, Homo sapiens
  misc_RNA (1)...(19): siRNA sense strand
ccauaaguaguuucaguaa

SEQ ID NO: 2639122 - RNA, 19 nt, Homo sapiens
  misc_RNA (1)...(19): siRNA sense strand
aggagaagagagagaagau

SEQ ID NO: 2639123 - RNA, 19 nt, Homo sapiens
  misc_RNA (1)...(19): siRNA sense strand
uaaggaaggagaagagaga

SEQ ID NO: 2639124 - RNA, 19 nt, Homo sapiens
  misc_RNA (1)...(19): siRNA sense strand
ggagaaaccugcugccguu

SEQ ID NO: 2639125 - RNA, 19 nt, Homo sapiens
  misc_RNA (1)...(19): siRNA sense strand
gagaaaggaaagagcaucu

SEQ ID NO: 2639126 - RNA, 19 nt, Homo sapiens
  misc_RNA (1)...(19): siRNA sense strand
gagaugaucagacaagaaa

SEQ ID NO: 2639127 - RNA, 19 nt, Homo sapiens
  misc_RNA (1)...(19): siRNA sense strand
gaugaucagacaagaaauu

SEQ ID NO: 2639128 - RNA, 19 nt, Homo sapiens
  misc_RNA (1)...(19): siRNA sense strand
guggaagagucgggaaaga

SEQ ID NO: 2639129 - RNA, 19 nt, Homo sapiens
  misc_RNA (1)...(19): siRNA sense strand
ucacagauaaggaaggaga

SEQ ID NO: 2639130 - RNA, 19 nt, Homo sapiens
  misc_RNA (1)...(19): siRNA sense strand
gaagaaguggacuggcuaa

SEQ ID NO: 2639131 - RNA, 19 nt, Homo sapiens
  misc_RNA (1)...(19): siRNA sense strand
cuacgaagaccuagaugau

SEQ ID NO: 2639132 - RNA, 19 nt, Homo sapiens
  misc_RNA (1)...(19): siRNA sense strand
aagagaaaggaaagagcau

SEQ ID NO: 2639133 - RNA, 19 nt, Homo sapiens
  misc_RNA (1)...(19): siRNA sense strand
aggauguagagguggagaa

SEQ ID NO: 2639134 - RNA, 19 nt, Homo sapiens
  misc_RNA (1)...(19): siRNA sense strand
agagugagcuggaagacuu

SEQ ID NO: 2639135 - RNA, 19 nt, Homo sapiens
  misc_RNA (1)...(19): siRNA sense strand
aagaauagguuugaggaca

SEQ ID NO: 2639136 - RNA, 19 nt, Homo sapiens
  misc_RNA (1)...(19): siRNA sense strand
caaccaugaucuuggaagu

SEQ ID NO: 2639137 - RNA, 19 nt, Homo sapiens
  misc_RNA (1)...(19): siRNA sense strand
agaguaagagccugaacua

SEQ ID NO: 2639138 - RNA, 19 nt, Homo sapiens
  misc_RNA (1)...(19): siRNA sense strand
aggaggaagaggaggagga

SEQ ID NO: 2639139 - RNA, 19 nt, Homo sapiens
  misc_RNA (1)...(19): siRNA sense strand
aauaagaguaagagccuga

SEQ ID NO: 2639140 - RNA, 19 nt, Homo sapiens
  misc_RNA (1)...(19): siRNA sense strand
gaauuuacuuagcagucaa

SEQ ID NO: 2639141 - RNA, 19 nt, Homo sapiens
  misc_RNA (1)...(19): siRNA sense strand
uuacagcccuugucagaua

SEQ ID NO: 2639142 - RNA, 19 nt, Homo sapiens
  misc_RNA (1)...(19): siRNA sense strand
gaauacagucauacccuua

SEQ ID NO: 2639143 - RNA, 19 nt, Homo sapiens
  misc_RNA (1)...(19): siRNA sense strand
uggaaguagugaagaauag

SEQ ID NO: 2639144 - RNA, 19 nt, Homo sapiens
  misc_RNA (1)...(19): siRNA sense strand
ugagaugaucagacaagaa

SEQ ID NO: 2639145 - RNA, 19 nt, Homo sapiens
  misc_RNA (1)...(19): siRNA sense strand
aguuugaggagaugcuuaa

SEQ ID NO: 2639146 - RNA, 19 nt, Homo sapiens
  misc_RNA (1)...(19): siRNA sense strand
caaagaagcccuccugcua

SEQ ID NO: 2639147 - RNA, 19 nt, Homo sapiens
  misc_RNA (1)...(19): siRNA sense strand
caaaucagccuguugagaa

SEQ ID NO: 2639148 - RNA, 19 nt, Homo sapiens
  misc_RNA (1)...(19): siRNA sense strand
cgaagaccuagaugauaua

SEQ ID NO: 2639149 - RNA, 19 nt, Homo sapiens
  misc_RNA (1)...(19): siRNA sense strand
ggcuaaucaccaagcuuaa

SEQ ID NO: 2639150 - RNA, 19 nt, Homo sapiens
  misc_RNA (1)...(19): siRNA sense strand
gggacaagugagccaagaa

SEQ ID NO: 2639151 - RNA, 19 nt, Homo sapiens
  misc_RNA (1)...(19): siRNA sense strand
cacgagacuucaagaucaa

SEQ ID NO: 2639152 - RNA, 19 nt, Homo sapiens
  misc_RNA (1)...(19): siRNA sense strand
gugacuugucccaggauau

SEQ ID NO: 2639153 - RNA, 19 nt, Homo sapiens
  misc_RNA (1)...(19): siRNA sense strand
gcuaauucagucaugcaaa

SEQ ID NO: 2639154 - RNA, 19 nt, Homo sapiens
  misc_RNA (1)...(19): siRNA sense strand
gguaaagccaaaacuaaaa

SEQ ID NO: 2639155 - RNA, 19 nt, Homo sapiens
  misc_RNA (1)...(19): siRNA sense strand
caagaaaccuuaucagaag

SEQ ID NO: 2639156 - RNA, 19 nt, Homo sapiens
  misc_RNA (1)...(19): siRNA sense strand
cgucauguaugcacccuua

SEQ ID NO: 2639157 - RNA, 19 nt, Homo sapiens
  misc_RNA (1)...(19): siRNA sense strand
gagauauagaccaggaugu

SEQ ID NO: 2639158 - RNA, 19 nt, Homo sapiens
  misc_RNA (1)...(19): siRNA sense strand
gcaauagugaauuugagaa

SEQ ID NO: 2639159 - RNA, 19 nt, Homo sapiens
  misc_RNA (1)...(19): siRNA sense strand
cagagguccuuguugaauu

SEQ ID NO: 2639160 - RNA, 19 nt, Homo sapiens
  misc_RNA (1)...(19): siRNA sense strand
caauagugaauuugagaac

SEQ ID NO: 2639161 - RNA, 19 nt, Homo sapiens
  misc_RNA (1)...(19): siRNA sense strand
cguagaacuugguuucauu

SEQ ID NO: 2639162 - RNA, 19 nt, Homo sapiens
  misc_RNA (1)...(19): siRNA sense strand
gaagguucuugauggaaaa

SEQ ID NO: 2639163 - RNA, 19 nt, Homo sapiens
  misc_RNA (1)...(19): siRNA sense strand
agauauagaccaggaugua

SEQ ID NO: 2639164 - RNA, 19 nt, Homo sapiens
  misc_RNA (1)...(19): siRNA sense strand
ucacgagacuucaagauca

SEQ ID NO: 2639165 - RNA, 19 nt, Homo sapiens
  misc_RNA (1)...(19): siRNA sense strand
guucacagccauuacaauu

SEQ ID NO: 2639166 - RNA, 19 nt, Homo sapiens
  misc_RNA (1)...(19): siRNA sense strand
cgggaaagaaagagaaagg

SEQ ID NO: 2639167 - RNA, 19 nt, Homo sapiens
  misc_RNA (1)...(19): siRNA sense strand
gcagucaagaggaagauuu

SEQ ID NO: 2639168 - RNA, 19 nt, Homo sapiens
  misc_RNA (1)...(19): siRNA sense strand
auguagagguggagaaaac

SEQ ID NO: 2639169 - RNA, 19 nt, Homo sapiens
  misc_RNA (1)...(19): siRNA sense strand
cuaauauccuguuggaaac

SEQ ID NO: 2639170 - RNA, 19 nt, Homo sapiens
  misc_RNA (1)...(19): siRNA sense strand
uggcuaaucaccaagcuua

SEQ ID NO: 2639171 - RNA, 19 nt, Homo sapiens
  misc_RNA (1)...(19): siRNA sense strand
cuucaagaucaaaggaaac

SEQ ID NO: 2639172 - RNA, 19 nt, Homo sapiens
  misc_RNA (1)...(19): siRNA sense strand
ucuuagaccugcuuucaaa

SEQ ID NO: 2639173 - RNA, 19 nt, Homo sapiens
  misc_RNA (1)...(19): siRNA sense strand
agggagaggaggaagagga

SEQ ID NO: 2639174 - RNA, 19 nt, Homo sapiens
  misc_RNA (1)...(19): siRNA sense strand
gucgggaaagaaagagaaa

SEQ ID NO: 2639175 - RNA, 19 nt, Homo sapiens
  misc_RNA (1)...(19): siRNA sense strand
gcccaagucuuucuagaau

SEQ ID NO: 2639176 - RNA, 19 nt, Homo sapiens
  misc_RNA (1)...(19): siRNA sense strand
ucacagaagcuuuugacua

SEQ ID NO: 2639177 - RNA, 19 nt, Homo sapiens
  misc_RNA (1)...(19): siRNA sense strand
aaagaaagagaaaggaaag

SEQ ID NO: 2639178 - RNA, 19 nt, Homo sapiens
  misc_RNA (1)...(19): siRNA sense strand
gagagaagaugcagauguc

SEQ ID NO: 2639179 - RNA, 19 nt, Homo sapiens
  misc_RNA (1)...(19): siRNA sense strand
aagacuuugaacuggauaa

SEQ ID NO: 2639180 - RNA, 19 nt, Homo sapiens
  misc_RNA (1)...(19): siRNA sense strand
uggaagagucgggaaagaa

SEQ ID NO: 2639181 - RNA, 19 nt, Homo sapiens
  misc_RNA (1)...(19): siRNA sense strand
gccagaguucuucgggaaa

SEQ ID NO: 2639182 - RNA, 19 nt, Homo sapiens
  misc_RNA (1)...(19): siRNA sense strand
aaaccaagccaaucccuaa

SEQ ID NO: 2639183 - RNA, 19 nt, Homo sapiens
  misc_RNA (1)...(19): siRNA sense strand
aaacuaaaauggccaacaa

SEQ ID NO: 2639184 - RNA, 19 nt, Homo sapiens
  misc_RNA (1)...(19): siRNA sense strand
agagagagaagaugcagau

SEQ ID NO: 2639185 - RNA, 19 nt, Homo sapiens
  misc_RNA (1)...(19): siRNA sense strand
cugcauguuucguauaaga

SEQ ID NO: 2639186 - RNA, 19 nt, Homo sapiens
  misc_RNA (1)...(19): siRNA sense strand
ggaacucucagcuggcuaa

SEQ ID NO: 2639187 - RNA, 19 nt, Homo sapiens
  misc_RNA (1)...(19): siRNA sense strand
agaaagaggcuuccggaca

SEQ ID NO: 2639188 - RNA, 19 nt, Homo sapiens
  misc_RNA (1)...(19): siRNA sense strand
gagucagaagacagcgaaa

SEQ ID NO: 2639189 - RNA, 19 nt, Homo sapiens
  misc_RNA (1)...(19): siRNA sense strand
gcaagagucugaagcagga

SEQ ID NO: 2639190 - RNA, 19 nt, Homo sapiens
  misc_RNA (1)...(19): siRNA sense strand
cggacaugcucuggaguca

SEQ ID NO: 2639191 - RNA, 19 nt, Homo sapiens
  misc_RNA (1)...(19): siRNA sense strand
ccgcgaggccuagaggaaa

SEQ ID NO: 2639192 - RNA, 19 nt, Homo sapiens
  misc_RNA (1)...(19): siRNA sense strand
cuguaaagcaccuggauaa

SEQ ID NO: 2639193 - RNA, 19 nt, Homo sapiens
  misc_RNA (1)...(19): siRNA sense strand
cucaaagggacuuggauaa

SEQ ID NO: 2639194 - RNA, 19 nt, Homo sapiens
  misc_RNA (1)...(19): siRNA sense strand
uccugaaggucaagugaaa

SEQ ID NO: 2639195 - RNA, 19 nt, Homo sapiens
  misc_RNA (1)...(19): siRNA sense strand
cagagaaggaggaggagca

SEQ ID NO: 2639196 - RNA, 19 nt, Homo sapiens
  misc_RNA (1)...(19): siRNA sense strand
caaauauaugcgugggaga

SEQ ID NO: 2639197 - RNA, 19 nt, Homo sapiens
  misc_RNA (1)...(19): siRNA sense strand
agaagaacccagagaagga

SEQ ID NO: 2639198 - RNA, 19 nt, Homo sapiens
  misc_RNA (1)...(19): siRNA sense strand
ggaugauaccagcaagcaa

SEQ ID NO: 2639199 - RNA, 19 nt, Homo sapiens
  misc_RNA (1)...(19): siRNA sense strand
agucagacccagaaaauaa

SEQ ID NO: 2639200 - RNA, 19 nt, Homo sapiens
  misc_RNA (1)...(19): siRNA sense strand
gugaaaucccaaaugaaau

SEQ ID NO: 2639201 - RNA, 19 nt, Homo sapiens
  misc_RNA (1)...(19): siRNA sense strand
ggagaagagaugugagcgu

SEQ ID NO: 2639202 - RNA, 19 nt, Homo sapiens
  misc_RNA (1)...(19): siRNA sense strand
gggcagaaucauuucauca

SEQ ID NO: 2639203 - RNA, 19 nt, Homo sapiens
  misc_RNA (1)...(19): siRNA sense strand
aucggaagcuggagaagaa

SEQ ID NO: 2639204 - RNA, 19 nt, Homo sapiens
  misc_RNA (1)...(19): siRNA sense strand
cuacaaggagccggagaua

SEQ ID NO: 2639205 - RNA, 19 nt, Homo sapiens
  misc_RNA (1)...(19): siRNA sense strand
ggccuaaagacgaugaaca

SEQ ID NO: 2639206 - RNA, 19 nt, Homo sapiens
  misc_RNA (1)...(19): siRNA sense strand
agaagagaugugagcguuu

SEQ ID NO: 2639207 - RNA, 19 nt, Homo sapiens
  misc_RNA (1)...(19): siRNA sense strand
agagaaacgcacugaggga

SEQ ID NO: 2639208 - RNA, 19 nt, Homo sapiens
  misc_RNA (1)...(19): siRNA sense strand
ccuugucgcuccagagaga

SEQ ID NO: 2639209 - RNA, 19 nt, Homo sapiens
  misc_RNA (1)...(19): siRNA sense strand
cagggauguuucugccaaa

SEQ ID NO: 2639210 - RNA, 19 nt, Homo sapiens
  misc_RNA (1)...(19): siRNA sense strand
ggucaagugaaaucccaaa

SEQ ID NO: 2639211 - RNA, 19 nt, Homo sapiens
  misc_RNA (1)...(19): siRNA sense strand
ccuguaaagcaccuggaua

SEQ ID NO: 2639212 - RNA, 19 nt, Homo sapiens
  misc_RNA (1)...(19): siRNA sense strand
acagagaaggacuggccua

SEQ ID NO: 2639213 - RNA, 19 nt, Homo sapiens
  misc_RNA (1)...(19): siRNA sense strand
acucauugcuccuguggau

SEQ ID NO: 2639214 - RNA, 19 nt, Homo sapiens
  misc_RNA (1)...(19): siRNA sense strand
cuguacagugcuaaacaaa

SEQ ID NO: 2639215 - RNA, 19 nt, Homo sapiens
  misc_RNA (1)...(19): siRNA sense strand
cccuggaagucuuugcaaa

SEQ ID NO: 2639216 - RNA, 19 nt, Homo sapiens
  misc_RNA (1)...(19): siRNA sense strand
aaauauaugcgugggagaa

SEQ ID NO: 2639217 - RNA, 19 nt, Homo sapiens
  misc_RNA (1)...(19): siRNA sense strand
ggccuguguccuugguaua

SEQ ID NO: 2639218 - RNA, 19 nt, Homo sapiens
  misc_RNA (1)...(19): siRNA sense strand
cagagaaggacuggccuaa

SEQ ID NO: 2639219 - RNA, 19 nt, Homo sapiens
  misc_RNA (1)...(19): siRNA sense strand
cacuucaaauccaaagaaa

SEQ ID NO: 2639220 - RNA, 19 nt, Homo sapiens
  misc_RNA (1)...(19): siRNA sense strand
gcugagaucuucaacgcuu

SEQ ID NO: 2639221 - RNA, 19 nt, Homo sapiens
  misc_RNA (1)...(19): siRNA sense strand
cagaagagcuaucggaagc

SEQ ID NO: 2639222 - RNA, 19 nt, Homo sapiens
  misc_RNA (1)...(19): siRNA sense strand
uugcaaagaucaaggacug

SEQ ID NO: 2639223 - RNA, 19 nt, Homo sapiens
  misc_RNA (1)...(19): siRNA sense strand
uguaaagcaccuggauaaa

SEQ ID NO: 2639224 - RNA, 19 nt, Homo sapiens
  misc_RNA (1)...(19): siRNA sense strand
cuaaagacgaugaacagga

SEQ ID NO: 2639225 - RNA, 19 nt, Homo sapiens
  misc_RNA (1)...(19): siRNA sense strand
uauaaauugcccaaggaga

SEQ ID NO: 2639226 - RNA, 19 nt, Homo sapiens
  misc_RNA (1)...(19): siRNA sense strand
accgaacucuaaaggauaa

SEQ ID NO: 2639227 - RNA, 19 nt, Homo sapiens
  misc_RNA (1)...(19): siRNA sense strand
gggaaauuauugaagagag

SEQ ID NO: 2639228 - RNA, 19 nt, Homo sapiens
  misc_RNA (1)...(19): siRNA sense strand
uuugaccagucuugggaaa

SEQ ID NO: 2639229 - RNA, 19 nt, Homo sapiens
  misc_RNA (1)...(19): siRNA sense strand
gcuuaagguugaugucacu

SEQ ID NO: 2639230 - RNA, 19 nt, Homo sapiens
  misc_RNA (1)...(19): siRNA sense strand
acagauuuagggaaugaaa

SEQ ID NO: 2639231 - RNA, 19 nt, Homo sapiens
  misc_RNA (1)...(19): siRNA sense strand
ccuacaaggagccggagau

SEQ ID NO: 2639232 - RNA, 19 nt, Homo sapiens
  misc_RNA (1)...(19): siRNA sense strand
gggccacagauuuagggaa

SEQ ID NO: 2639233 - RNA, 19 nt, Homo sapiens
  misc_RNA (1)...(19): siRNA sense strand
cuguggaugaaauggguau

SEQ ID NO: 2639234 - RNA, 19 nt, Homo sapiens
  misc_RNA (1)...(19): siRNA sense strand
aagugaaaucccaaaugaa

SEQ ID NO: 2639235 - RNA, 19 nt, Homo sapiens
  misc_RNA (1)...(19): siRNA sense strand
gccuuauggauguggccaa

SEQ ID NO: 2639236 - RNA, 19 nt, Homo sapiens
  misc_RNA (1)...(19): siRNA sense strand
aagcacugccacuggagaa

SEQ ID NO: 2639237 - RNA, 19 nt, Homo sapiens
  misc_RNA (1)...(19): siRNA sense strand
auagggagugggaggaaga

SEQ ID NO: 2639238 - RNA, 19 nt, Homo sapiens
  misc_RNA (1)...(19): siRNA sense strand
aaccgaacucuaaaggaua

SEQ ID NO: 2639239 - RNA, 19 nt, Homo sapiens
  misc_RNA (1)...(19): siRNA sense strand
acccagagaaggaggagga

SEQ ID NO: 2639240 - RNA, 19 nt, Homo sapiens
  misc_RNA (1)...(19): siRNA sense strand
ggagauauuuggcuggaug

SEQ ID NO: 2639241 - RNA, 19 nt, Homo sapiens
  misc_RNA (1)...(19): siRNA sense strand
caaagaucaaggacugcua

SEQ ID NO: 2639242 - RNA, 19 nt, Homo sapiens
  misc_RNA (1)...(19): siRNA sense strand
gugcagagguggugcccaa

SEQ ID NO: 2639243 - RNA, 19 nt, Homo sapiens
  misc_RNA (1)...(19): siRNA sense strand
ccagcgagcgggagaaacu

SEQ ID NO: 2639244 - RNA, 19 nt, Homo sapiens
  misc_RNA (1)...(19): siRNA sense strand
ugaccaagaucgagacgcu

SEQ ID NO: 2639245 - RNA, 19 nt, Homo sapiens
  misc_RNA (1)...(19): siRNA sense strand
ccgcaguguaccagggucu

SEQ ID NO: 2639246 - RNA, 19 nt, Homo sapiens
  misc_RNA (1)...(19): siRNA sense strand
ggaaggagauggaggagga

SEQ ID NO: 2639247 - RNA, 19 nt, Homo sapiens
  misc_RNA (1)...(19): siRNA sense strand
cguugaagaaggagaagaa

SEQ ID NO: 2639248 - RNA, 19 nt, Homo sapiens
  misc_RNA (1)...(19): siRNA sense strand
gggaggagaugaaggugaa

SEQ ID NO: 2639249 - RNA, 19 nt, Homo sapiens
  misc_RNA (1)...(19): siRNA sense strand
ugagugagcugguggagaa

SEQ ID NO: 2639250 - RNA, 19 nt, Homo sapiens
  misc_RNA (1)...(19): siRNA sense strand
cagcagaaccagcagcuaa

SEQ ID NO: 2639251 - RNA, 19 nt, Homo sapiens
  misc_RNA (1)...(19): siRNA sense strand
agaaagaagaacuuggauu

SEQ ID NO: 2639252 - RNA, 19 nt, Homo sapiens
  misc_RNA (1)...(19): siRNA sense strand
ccacaagcauggugaucuu

SEQ ID NO: 2639253 - RNA, 19 nt, Homo sapiens
  misc_RNA (1)...(19): siRNA sense strand
gugagcugguggagaaaga

SEQ ID NO: 2639254 - RNA, 19 nt, Homo sapiens
  misc_RNA (1)...(19): siRNA sense strand
aggcccagguggaguacaa

SEQ ID NO: 2639255 - RNA, 19 nt, Homo sapiens
  misc_RNA (1)...(19): siRNA sense strand
guaaaggagcugcaggaga

SEQ ID NO: 2639256 - RNA, 19 nt, Homo sapiens
  misc_RNA (1)...(19): siRNA sense strand
gaaagaagaacuuggauuc

SEQ ID NO: 2639257 - RNA, 19 nt, Homo sapiens
  misc_RNA (1)...(19): siRNA sense strand
gcucguugaagaaggagaa

SEQ ID NO: 2639258 - RNA, 19 nt, Homo sapiens
  misc_RNA (1)...(19): siRNA sense strand
aggagauggaggaggacau

SEQ ID NO: 2639259 - RNA, 19 nt, Homo sapiens
  misc_RNA (1)...(19): siRNA sense strand
auaaauaucggguagagaa

SEQ ID NO: 2639260 - RNA, 19 nt, Homo sapiens
  misc_RNA (1)...(19): siRNA sense strand
cuacaagggacacagcaaa

SEQ ID NO: 2639261 - RNA, 19 nt, Homo sapiens
  misc_RNA (1)...(19): siRNA sense strand
uggacagggaggagaugaa

SEQ ID NO: 2639262 - RNA, 19 nt, Homo sapiens
  misc_RNA (1)...(19): siRNA sense strand
agcuagagagggaugaaua

SEQ ID NO: 2639263 - RNA, 19 nt, Homo sapiens
  misc_RNA (1)...(19): siRNA sense strand
aguuggagcagcaaguaaa

SEQ ID NO: 2639264 - RNA, 19 nt, Homo sapiens
  misc_RNA (1)...(19): siRNA sense strand
ggaacuagagagaguggca

SEQ ID NO: 2639265 - RNA, 19 nt, Homo sapiens
  misc_RNA (1)...(19): siRNA sense strand
gccaagaagaaggagauaa

SEQ ID NO: 2639266 - RNA, 19 nt, Homo sapiens
  misc_RNA (1)...(19): siRNA sense strand
aaggagaagaagcaugaua

SEQ ID NO: 2639267 - RNA, 19 nt, Homo sapiens
  misc_RNA (1)...(19): siRNA sense strand
aggagaggcuucaggagca

SEQ ID NO: 2639268 - RNA, 19 nt, Homo sapiens
  misc_RNA (1)...(19): siRNA sense strand
uagagaagcuggagaggag

SEQ ID NO: 2639269 - RNA, 19 nt, Homo sapiens
  misc_RNA (1)...(19): siRNA sense strand
agcugaacaaugagaacaa

SEQ ID NO: 2639270 - RNA, 19 nt, Homo sapiens
  misc_RNA (1)...(19): siRNA sense strand
caguuggagcagcaaguaa

SEQ ID NO: 2639271 - RNA, 19 nt, Homo sapiens
  misc_RNA (1)...(19): siRNA sense strand
caguugaaggagucacuua

SEQ ID NO: 2639272 - RNA, 19 nt, Homo sapiens
  misc_RNA (1)...(19): siRNA sense strand
acuacaagggacacagcaa

SEQ ID NO: 2639273 - RNA, 19 nt, Homo sapiens
  misc_RNA (1)...(19): siRNA sense strand
cugccaagaagaaggagau

SEQ ID NO: 2639274 - RNA, 19 nt, Homo sapiens
  misc_RNA (1)...(19): siRNA sense strand
gggaugaauaugcugaaca

SEQ ID NO: 2639275 - RNA, 19 nt, Homo sapiens
  misc_RNA (1)...(19): siRNA sense strand
aaguaaaggagcugcagga

SEQ ID NO: 2639276 - RNA, 19 nt, Homo sapiens
  misc_RNA (1)...(19): siRNA sense strand
agggaggagaugaagguga

SEQ ID NO: 2639277 - RNA, 19 nt, Homo sapiens
  misc_RNA (1)...(19): siRNA sense strand
uagagagaguggcaggaga

SEQ ID NO: 2639278 - RNA, 19 nt, Homo sapiens
  misc_RNA (1)...(19): siRNA sense strand
gggcaaaaggagaggcuuc

SEQ ID NO: 2639279 - RNA, 19 nt, Homo sapiens
  misc_RNA (1)...(19): siRNA sense strand
cgguggcagcagaggauga

SEQ ID NO: 2639280 - RNA, 19 nt, Homo sapiens
  misc_RNA (1)...(19): siRNA sense strand
uuccaguacuacagagaga

SEQ ID NO: 2639281 - RNA, 19 nt, Homo sapiens
  misc_RNA (1)...(19): siRNA sense strand
gguggagaaagaagaacuu

SEQ ID NO: 2639282 - RNA, 19 nt, Homo sapiens
  misc_RNA (1)...(19): siRNA sense strand
aggcaaggagcgucuggaa

SEQ ID NO: 2639283 - RNA, 19 nt, Homo sapiens
  misc_RNA (1)...(19): siRNA sense strand
aaguccagcuagagaggga

SEQ ID NO: 2639284 - RNA, 19 nt, Homo sapiens
  misc_RNA (1)...(19): siRNA sense strand
cuucaggagcagcaggaga

SEQ ID NO: 2639285 - RNA, 19 nt, Homo sapiens
  misc_RNA (1)...(19): siRNA sense strand
gcugguggagaaagaagaa

SEQ ID NO: 2639286 - RNA, 19 nt, Homo sapiens
  misc_RNA (1)...(19): siRNA sense strand
cuacagagagagaugccau

SEQ ID NO: 2639287 - RNA, 19 nt, Homo sapiens
  misc_RNA (1)...(19): siRNA sense strand
uggcagcagaggaugagaa

SEQ ID NO: 2639288 - RNA, 19 nt, Homo sapiens
  misc_RNA (1)...(19): siRNA sense strand
uaauaguaucggagagaaa

SEQ ID NO: 2639289 - RNA, 19 nt, Homo sapiens
  misc_RNA (1)...(19): siRNA sense strand
gcauauuggaccagggaau

SEQ ID NO: 2639290 - RNA, 19 nt, Homo sapiens
  misc_RNA (1)...(19): siRNA sense strand
gagaagaacugucuagcaa

SEQ ID NO: 2639291 - RNA, 19 nt, Homo sapiens
  misc_RNA (1)...(19): siRNA sense strand
ccuuaaaguacaucagaua

SEQ ID NO: 2639292 - RNA, 19 nt, Homo sapiens
  misc_RNA (1)...(19): siRNA sense strand
caguagacgucuuugauaa

SEQ ID NO: 2639293 - RNA, 19 nt, Homo sapiens
  misc_RNA (1)...(19): siRNA sense strand
ccaaagaagccauggcauu

SEQ ID NO: 2639294 - RNA, 19 nt, Homo sapiens
  misc_RNA (1)...(19): siRNA sense strand
uggccagauuauagaaaua

SEQ ID NO: 2639295 - RNA, 19 nt, Homo sapiens
  misc_RNA (1)...(19): siRNA sense strand
caaagaagguauucaaaga

SEQ ID NO: 2639296 - RNA, 19 nt, Homo sapiens
  misc_RNA (1)...(19): siRNA sense strand
guuauaaaguacagguaga

SEQ ID NO: 2639297 - RNA, 19 nt, Homo sapiens
  misc_RNA (1)...(19): siRNA sense strand
uguuaagguugaugugaua

SEQ ID NO: 2639298 - RNA, 19 nt, Homo sapiens
  misc_RNA (1)...(19): siRNA sense strand
gaaagaugguguuguggua

SEQ ID NO: 2639299 - RNA, 19 nt, Homo sapiens
  misc_RNA (1)...(19): siRNA sense strand
aagaaaagcccaaaagaaa

SEQ ID NO: 2639300 - RNA, 19 nt, Homo sapiens
  misc_RNA (1)...(19): siRNA sense strand
cggagaagacagagaagau

SEQ ID NO: 2639301 - RNA, 19 nt, Homo sapiens
  misc_RNA (1)...(19): siRNA sense strand
guaucaagacugagggaca

SEQ ID NO: 2639302 - RNA, 19 nt, Homo sapiens
  misc_RNA (1)...(19): siRNA sense strand
ggauaaacaaggagucuuu

SEQ ID NO: 2639303 - RNA, 19 nt, Homo sapiens
  misc_RNA (1)...(19): siRNA sense strand
gaaacaaggagaugugauu

SEQ ID NO: 2639304 - RNA, 19 nt, Homo sapiens
  misc_RNA (1)...(19): siRNA sense strand
ggacaagaugggaagaaaa

SEQ ID NO: 2639305 - RNA, 19 nt, Homo sapiens
  misc_RNA (1)...(19): siRNA sense strand
ggagagugacagaggugaa

SEQ ID NO: 2639306 - RNA, 19 nt, Homo sapiens
  misc_RNA (1)...(19): siRNA sense strand
gcacaaaggucuauauuuc

SEQ ID NO: 2639307 - RNA, 19 nt, Homo sapiens
  misc_RNA (1)...(19): siRNA sense strand
gcaacuaacuaccgugaau

SEQ ID NO: 2639308 - RNA, 19 nt, Homo sapiens
  misc_RNA (1)...(19): siRNA sense strand
gguaacaguaagugugaau

SEQ ID NO: 2639309 - RNA, 19 nt, Homo sapiens
  misc_RNA (1)...(19): siRNA sense strand
gaagauuggaauagcacaa

SEQ ID NO: 2639310 - RNA, 19 nt, Homo sapiens
  misc_RNA (1)...(19): siRNA sense strand
ggacagaguucuuaggaag

SEQ ID NO: 2639311 - RNA, 19 nt, Homo sapiens
  misc_RNA (1)...(19): siRNA sense strand
ggucauaguaaccacgaaa

SEQ ID NO: 2639312 - RNA, 19 nt, Homo sapiens
  misc_RNA (1)...(19): siRNA sense strand
caguggaaaugguagcaaa

SEQ ID NO: 2639313 - RNA, 19 nt, Homo sapiens
  misc_RNA (1)...(19): siRNA sense strand
uggcaaagucauuguguuu

SEQ ID NO: 2639314 - RNA, 19 nt, Homo sapiens
  misc_RNA (1)...(19): siRNA sense strand
gugauaaacagcauugaaa

SEQ ID NO: 2639315 - RNA, 19 nt, Homo sapiens
  misc_RNA (1)...(19): siRNA sense strand
cauuggaugcugaaggaaa

SEQ ID NO: 2639316 - RNA, 19 nt, Homo sapiens
  misc_RNA (1)...(19): siRNA sense strand
agauaagaguacugggagu

SEQ ID NO: 2639317 - RNA, 19 nt, Homo sapiens
  misc_RNA (1)...(19): siRNA sense strand
caacaagaagugaagauuu

SEQ ID NO: 2639318 - RNA, 19 nt, Homo sapiens
  misc_RNA (1)...(19): siRNA sense strand
gcauggugaaccugggaua

SEQ ID NO: 2639319 - RNA, 19 nt, Homo sapiens
  misc_RNA (1)...(19): siRNA sense strand
aggacaagaugggaagaaa

SEQ ID NO: 2639320 - RNA, 19 nt, Homo sapiens
  misc_RNA (1)...(19): siRNA sense strand
ugaauaugaugcagguaau

SEQ ID NO: 2639321 - RNA, 19 nt, Homo sapiens
  misc_RNA (1)...(19): siRNA sense strand
aggaugaaguacagauuga

SEQ ID NO: 2639322 - RNA, 19 nt, Homo sapiens
  misc_RNA (1)...(19): siRNA sense strand
gguucaagggagagugaca

SEQ ID NO: 2639323 - RNA, 19 nt, Homo sapiens
  misc_RNA (1)...(19): siRNA sense strand
agacagagaagauuggaau

SEQ ID NO: 2639324 - RNA, 19 nt, Homo sapiens
  misc_RNA (1)...(19): siRNA sense strand
uggcuauacuggaugacaa

SEQ ID NO: 2639325 - RNA, 19 nt, Homo sapiens
  misc_RNA (1)...(19): siRNA sense strand
cgagucagcaagagaagaa

SEQ ID NO: 2639326 - RNA, 19 nt, Homo sapiens
  misc_RNA (1)...(19): siRNA sense strand
cagugaacguagcaagaau

SEQ ID NO: 2639327 - RNA, 19 nt, Homo sapiens
  misc_RNA (1)...(19): siRNA sense strand
ugggaauguuauaucguua

SEQ ID NO: 2639328 - RNA, 19 nt, Homo sapiens
  misc_RNA (1)...(19): siRNA sense strand
augaauaugaugcagguaa

SEQ ID NO: 2639329 - RNA, 19 nt, Homo sapiens
  misc_RNA (1)...(19): siRNA sense strand
gaaaguggcagcagccuua

SEQ ID NO: 2639330 - RNA, 19 nt, Homo sapiens
  misc_RNA (1)...(19): siRNA sense strand
ggaagaaaauacacaucaa

SEQ ID NO: 2639331 - RNA, 19 nt, Homo sapiens
  misc_RNA (1)...(19): siRNA sense strand
cuauaaauucucagcucaa

SEQ ID NO: 2639332 - RNA, 19 nt, Homo sapiens
  misc_RNA (1)...(19): siRNA sense strand
agguagcaccggugacaua

SEQ ID NO: 2639333 - RNA, 19 nt, Homo sapiens
  misc_RNA (1)...(19): siRNA sense strand
gaacugauggugagggcau

SEQ ID NO: 2639334 - RNA, 19 nt, Homo sapiens
  misc_RNA (1)...(19): siRNA sense strand
gaagaacugucuagcaaaa

SEQ ID NO: 2639335 - RNA, 19 nt, Homo sapiens
  misc_RNA (1)...(19): siRNA sense strand
agacauuccagcaaguaaa

SEQ ID NO: 2639336 - RNA, 19 nt, Homo sapiens
  misc_RNA (1)...(19): siRNA sense strand
ccaucauuuaccagaauaa

SEQ ID NO: 2639337 - RNA, 19 nt, Homo sapiens
  misc_RNA (1)...(19): siRNA sense strand
gaacauggauaaacaagga

SEQ ID NO: 2639338 - RNA, 19 nt, Homo sapiens
  misc_RNA (1)...(19): siRNA sense strand
uggaauugaaugcggagaa

SEQ ID NO: 2639339 - RNA, 19 nt, Homo sapiens
  misc_RNA (1)...(19): siRNA sense strand
gagucaauuuugugggcua

SEQ ID NO: 2639340 - RNA, 19 nt, Homo sapiens
  misc_RNA (1)...(19): siRNA sense strand
gggaauaagaacuauacuu

SEQ ID NO: 2639341 - RNA, 19 nt, Homo sapiens
  misc_RNA (1)...(19): siRNA sense strand
ccauugagccagacaccaa

SEQ ID NO: 2639342 - RNA, 19 nt, Homo sapiens
  misc_RNA (1)...(19): siRNA sense strand
caucccaggaguagugaaa

SEQ ID NO: 2639343 - RNA, 19 nt, Homo sapiens
  misc_RNA (1)...(19): siRNA sense strand
cuguaagaguggucaacuu

SEQ ID NO: 2639344 - RNA, 19 nt, Homo sapiens
  misc_RNA (1)...(19): siRNA sense strand
ggaguacuuugaagagcaa

SEQ ID NO: 2639345 - RNA, 19 nt, Homo sapiens
  misc_RNA (1)...(19): siRNA sense strand
aaucaaacaccaacaagaa

SEQ ID NO: 2639346 - RNA, 19 nt, Homo sapiens
  misc_RNA (1)...(19): siRNA sense strand
ggcuauacuggaugacaaa

SEQ ID NO: 2639347 - RNA, 19 nt, Homo sapiens
  misc_RNA (1)...(19): siRNA sense strand
cacuaaugcuagaauggaa

SEQ ID NO: 2639348 - RNA, 19 nt, Homo sapiens
  misc_RNA (1)...(19): siRNA sense strand
ggacaacgagucagcaaga

SEQ ID NO: 2639349 - RNA, 19 nt, Homo sapiens
  misc_RNA (1)...(19): siRNA sense strand
gagugacagaggugaaauu

SEQ ID NO: 2639350 - RNA, 19 nt, Homo sapiens
  misc_RNA (1)...(19): siRNA sense strand
uggcagucugugaaggaaa

SEQ ID NO: 2639351 - RNA, 19 nt, Homo sapiens
  misc_RNA (1)...(19): siRNA sense strand
gaucaacauaggagaaagu

SEQ ID NO: 2639352 - RNA, 19 nt, Homo sapiens
  misc_RNA (1)...(19): siRNA sense strand
acuaaugcuagaauggaaa

SEQ ID NO: 2639353 - RNA, 19 nt, Homo sapiens
  misc_RNA (1)...(19): siRNA sense strand
agggaagauuguuggcaca

SEQ ID NO: 2639354 - RNA, 19 nt, Homo sapiens
  misc_RNA (1)...(19): siRNA sense strand
uguaccaacucuaggaaca

SEQ ID NO: 2639355 - RNA, 19 nt, Homo sapiens
  misc_RNA (1)...(19): siRNA sense strand
ggagcauugcccaggacaa

SEQ ID NO: 2639356 - RNA, 19 nt, Homo sapiens
  misc_RNA (1)...(19): siRNA sense strand
cugugaaggaaaugguauu

SEQ ID NO: 2639357 - RNA, 19 nt, Homo sapiens
  misc_RNA (1)...(19): siRNA sense strand
uuaggaagcuagaggucau

SEQ ID NO: 2639358 - RNA, 19 nt, Homo sapiens
  misc_RNA (1)...(19): siRNA sense strand
agaaauagugacugaccau

SEQ ID NO: 2639359 - RNA, 19 nt, Homo sapiens
  misc_RNA (1)...(19): siRNA sense strand
guacacauaucgcagcuaa

SEQ ID NO: 2639360 - RNA, 19 nt, Homo sapiens
  misc_RNA (1)...(19): siRNA sense strand
gacagagaagauuggaaua

SEQ ID NO: 2639361 - RNA, 19 nt, Homo sapiens
  misc_RNA (1)...(19): siRNA sense strand
caacaaacuuaacgugcca

SEQ ID NO: 2639362 - RNA, 19 nt, Homo sapiens
  misc_RNA (1)...(19): siRNA sense strand
uggagcaacaggacgaaua

SEQ ID NO: 2639363 - RNA, 19 nt, Homo sapiens
  misc_RNA (1)...(19): siRNA sense strand
ggacgaauacucugaaaau

SEQ ID NO: 2639364 - RNA, 19 nt, Homo sapiens
  misc_RNA (1)...(19): siRNA sense strand
ccgagaauacaaugagaaa

SEQ ID NO: 2639365 - RNA, 19 nt, Homo sapiens
  misc_RNA (1)...(19): siRNA sense strand
cagcagaacuugauggcga

SEQ ID NO: 2639366 - RNA, 19 nt, Homo sapiens
  misc_RNA (1)...(19): siRNA sense strand
cagcaggagcaguggauga

SEQ ID NO: 2639367 - RNA, 19 nt, Homo sapiens
  misc_RNA (1)...(19): siRNA sense strand
ccaacaacaaacuggacaa

SEQ ID NO: 2639368 - RNA, 19 nt, Homo sapiens
  misc_RNA (1)...(19): siRNA sense strand
ggaagaagcagaaggccca

SEQ ID NO: 2639369 - RNA, 19 nt, Homo sapiens
  misc_RNA (1)...(19): siRNA sense strand
ccuacaaggaucuggauga

SEQ ID NO: 2639370 - RNA, 19 nt, Homo sapiens
  misc_RNA (1)...(19): siRNA sense strand
acacaaagcugaauuggga

SEQ ID NO: 2639371 - RNA, 19 nt, Homo sapiens
  misc_RNA (1)...(19): siRNA sense strand
aagaaaagaacgaaggaga

SEQ ID NO: 2639372 - RNA, 19 nt, Homo sapiens
  misc_RNA (1)...(19): siRNA sense strand
gcaucuaugaggagguuga

SEQ ID NO: 2639373 - RNA, 19 nt, Homo sapiens
  misc_RNA (1)...(19): siRNA sense strand
gacacuaagcugaugcaaa

SEQ ID NO: 2639374 - RNA, 19 nt, Homo sapiens
  misc_RNA (1)...(19): siRNA sense strand
gggagaagaugauggacuc

SEQ ID NO: 2639375 - RNA, 19 nt, Homo sapiens
  misc_RNA (1)...(19): siRNA sense strand
uuacauagagacagcagaa

SEQ ID NO: 2639376 - RNA, 19 nt, Homo sapiens
  misc_RNA (1)...(19): siRNA sense strand
cuggacaaauucagcggaa

SEQ ID NO: 2639377 - RNA, 19 nt, Homo sapiens
  misc_RNA (1)...(19): siRNA sense strand
caaaacagcggcagaacaa

SEQ ID NO: 2639378 - RNA, 19 nt, Homo sapiens
  misc_RNA (1)...(19): siRNA sense strand
gggcuguguuacauagaga

SEQ ID NO: 2639379 - RNA, 19 nt, Homo sapiens
  misc_RNA (1)...(19): siRNA sense strand
ggcaagaacaugcggcuga

SEQ ID NO: 2639380 - RNA, 19 nt, Homo sapiens
  misc_RNA (1)...(19): siRNA sense strand
agaacgaaggagagcugua

SEQ ID NO: 2639381 - RNA, 19 nt, Homo sapiens
  misc_RNA (1)...(19): siRNA sense strand
cgggagaagaugauggacu

SEQ ID NO: 2639382 - RNA, 19 nt, Homo sapiens
  misc_RNA (1)...(19): siRNA sense strand
ugucuguguuggugauauu

SEQ ID NO: 2639383 - RNA, 19 nt, Homo sapiens
  misc_RNA (1)...(19): siRNA sense strand
aggcagacauggagcugga

SEQ ID NO: 2639384 - RNA, 19 nt, Homo sapiens
  misc_RNA (1)...(19): siRNA sense strand
cauagagacagcagaacuu

SEQ ID NO: 2639385 - RNA, 19 nt, Homo sapiens
  misc_RNA (1)...(19): siRNA sense strand
uugccaaguuugacgguga

SEQ ID NO: 2639386 - RNA, 19 nt, Homo sapiens
  misc_RNA (1)...(19): siRNA sense strand
acgaaggagagcuguacua

SEQ ID NO: 2639387 - RNA, 19 nt, Homo sapiens
  misc_RNA (1)...(19): siRNA sense strand
gggaguacgcccuggucau

SEQ ID NO: 2639388 - RNA, 19 nt, Homo sapiens
  misc_RNA (1)...(19): siRNA sense strand
aggcacaggugguagaacu

SEQ ID NO: 2639389 - RNA, 19 nt, Homo sapiens
  misc_RNA (1)...(19): siRNA sense strand
cgcaggaagaagagugaca

SEQ ID NO: 2639390 - RNA, 19 nt, Homo sapiens
  misc_RNA (1)...(19): siRNA sense strand
gggaugaggcaguggacag

SEQ ID NO: 2639391 - RNA, 19 nt, Homo sapiens
  misc_RNA (1)...(19): siRNA sense strand
uggucaagaaguacaagaa

SEQ ID NO: 2639392 - RNA, 19 nt, Homo sapiens
  misc_RNA (1)...(19): siRNA sense strand
ccucagaauugggagacau

SEQ ID NO: 2639393 - RNA, 19 nt, Homo sapiens
  misc_RNA (1)...(19): siRNA sense strand
ucuaugaggagguugagaa

SEQ ID NO: 2639394 - RNA, 19 nt, Homo sapiens
  misc_RNA (1)...(19): siRNA sense strand
aggaagggauccaggcugu

SEQ ID NO: 2639395 - RNA, 19 nt, Homo sapiens
  misc_RNA (1)...(19): siRNA sense strand
gagccaaugaugucagcau

SEQ ID NO: 2639396 - RNA, 19 nt, Homo sapiens
  misc_RNA (1)...(19): siRNA sense strand
acaaagcugaauugggaga

SEQ ID NO: 2639397 - RNA, 19 nt, Homo sapiens
  misc_RNA (1)...(19): siRNA sense strand
auaaguucccucugagcaa

SEQ ID NO: 2639398 - RNA, 19 nt, Homo sapiens
  misc_RNA (1)...(19): siRNA sense strand
gagaaauuccaguaugcga

SEQ ID NO: 2639399 - RNA, 19 nt, Homo sapiens
  misc_RNA (1)...(19): siRNA sense strand
ccaccauggaccaccuuaa

SEQ ID NO: 2639400 - RNA, 19 nt, Homo sapiens
  misc_RNA (1)...(19): siRNA sense strand
gagcuggaguuucuggaga

SEQ ID NO: 2639401 - RNA, 19 nt, Homo sapiens
  misc_RNA (1)...(19): siRNA sense strand
ggagcauggaguacccuaa

SEQ ID NO: 2639402 - RNA, 19 nt, Homo sapiens
  misc_RNA (1)...(19): siRNA sense strand
acacagcucgugaggaaga

SEQ ID NO: 2639403 - RNA, 19 nt, Homo sapiens
  misc_RNA (1)...(19): siRNA sense strand
gcagauugggcucgacaca

SEQ ID NO: 2639404 - RNA, 19 nt, Homo sapiens
  misc_RNA (1)...(19): siRNA sense strand
cgagaauacaaugagaaau

SEQ ID NO: 2639405 - RNA, 19 nt, Homo sapiens
  misc_RNA (1)...(19): siRNA sense strand
ggacaaauucagcggaacc

SEQ ID NO: 2639406 - RNA, 19 nt, Homo sapiens
  misc_RNA (1)...(19): siRNA sense strand
gcgggaggagcucaggaaa

SEQ ID NO: 2639407 - RNA, 19 nt, Homo sapiens
  misc_RNA (1)...(19): siRNA sense strand
ccgucuaugaccaguauuu

SEQ ID NO: 2639408 - RNA, 19 nt, Homo sapiens
  misc_RNA (1)...(19): siRNA sense strand
ucaacaagcgggaguucuu

SEQ ID NO: 2639409 - RNA, 19 nt, Homo sapiens
  misc_RNA (1)...(19): siRNA sense strand
gugugcagguugagggcaa

SEQ ID NO: 2639410 - RNA, 19 nt, Homo sapiens
  misc_RNA (1)...(19): siRNA sense strand
gguaguugccuuuggccaa

SEQ ID NO: 2639411 - RNA, 19 nt, Homo sapiens
  misc_RNA (1)...(19): siRNA sense strand
cugacuacagccagaguaa

SEQ ID NO: 2639412 - RNA, 19 nt, Homo sapiens
  misc_RNA (1)...(19): siRNA sense strand
agugggaacaccuggacaa

SEQ ID NO: 2639413 - RNA, 19 nt, Homo sapiens
  misc_RNA (1)...(19): siRNA sense strand
uugucauuguggugggcua

SEQ ID NO: 2639414 - RNA, 19 nt, Homo sapiens
  misc_RNA (1)...(19): siRNA sense strand
uggcaaugacaaugaugau

SEQ ID NO: 2639415 - RNA, 19 nt, Homo sapiens
  misc_RNA (1)...(19): siRNA sense strand
cugcuuaccuauaucccaa

SEQ ID NO: 2639416 - RNA, 19 nt, Homo sapiens
  misc_RNA (1)...(19): siRNA sense strand
gugugcagguugagggcaa

SEQ ID NO: 2639417 - RNA, 19 nt, Homo sapiens
  misc_RNA (1)...(19): siRNA sense strand
gguaguugccuuuggccaa

SEQ ID NO: 2639418 - RNA, 19 nt, Homo sapiens
  misc_RNA (1)...(19): siRNA sense strand
cugacuacagccagaguaa

SEQ ID NO: 2639419 - RNA, 19 nt, Homo sapiens
  misc_RNA (1)...(19): siRNA sense strand
ccauggaggacaaacgcaa

SEQ ID NO: 2639420 - RNA, 19 nt, Homo sapiens
  misc_RNA (1)...(19): siRNA sense strand
agugggaacaccuggacaa

SEQ ID NO: 2639421 - RNA, 19 nt, Homo sapiens
  misc_RNA (1)...(19): siRNA sense strand
uugucauuguggugggcua

SEQ ID NO: 2639422 - RNA, 19 nt, Homo sapiens
  misc_RNA (1)...(19): siRNA sense strand
caggcaccauggaggacaa

SEQ ID NO: 2639423 - RNA, 19 nt, Homo sapiens
  misc_RNA (1)...(19): siRNA sense strand
uggcaaugacaaugaugau

SEQ ID NO: 2639424 - RNA, 19 nt, Homo sapiens
  misc_RNA (1)...(19): siRNA sense strand
cugcuuaccuauaucccaa

SEQ ID NO: 2639425 - RNA, 19 nt, Homo sapiens
  misc_RNA (1)...(19): siRNA sense strand
aggccuucuuggagcgaua

SEQ ID NO: 2639426 - RNA, 19 nt, Homo sapiens
  misc_RNA (1)...(19): siRNA sense strand
ccaagaaagugucuggcuu

SEQ ID NO: 2639427 - RNA, 19 nt, Homo sapiens
  misc_RNA (1)...(19): siRNA sense strand
cuucaaacucuccgaggaa

SEQ ID NO: 2639428 - RNA, 19 nt, Homo sapiens
  misc_RNA (1)...(19): siRNA sense strand
ccaccaagcagcagcccua

SEQ ID NO: 2639429 - RNA, 19 nt, Homo sapiens
  misc_RNA (1)...(19): siRNA sense strand
gaaggugccucuuggccua

SEQ ID NO: 2639430 - RNA, 19 nt, Homo sapiens
  misc_RNA (1)...(19): siRNA sense strand
augaggaggcugagcauga

SEQ ID NO: 2639431 - RNA, 19 nt, Homo sapiens
  misc_RNA (1)...(19): siRNA sense strand
aggaauuuguggaucccaa

SEQ ID NO: 2639432 - RNA, 19 nt, Homo sapiens
  misc_RNA (1)...(19): siRNA sense strand
ucaaacucuccgaggaauu

SEQ ID NO: 2639433 - RNA, 19 nt, Homo sapiens
  misc_RNA (1)...(19): siRNA sense strand
ccaaggacauggaggacag

SEQ ID NO: 2639434 - RNA, 19 nt, Homo sapiens
  misc_RNA (1)...(19): siRNA sense strand
ccaaguccguccuggccaa

SEQ ID NO: 2639435 - RNA, 19 nt, Homo sapiens
  misc_RNA (1)...(19): siRNA sense strand
cgacaguaguaacgggcac

SEQ ID NO: 2639436 - RNA, 19 nt, Homo sapiens
  misc_RNA (1)...(19): siRNA sense strand
ugcaggaagaggagcagaa

SEQ ID NO: 2639437 - RNA, 19 nt, Homo sapiens
  misc_RNA (1)...(19): siRNA sense strand
acuacuaugaggaggcuga

SEQ ID NO: 2639438 - RNA, 19 nt, Homo sapiens
  misc_RNA (1)...(19): siRNA sense strand
aaacaguggacauugguga

SEQ ID NO: 2639439 - RNA, 19 nt, Homo sapiens
  misc_RNA (1)...(19): siRNA sense strand
ggccaaaccuccaaggaca

SEQ ID NO: 2639440 - RNA, 19 nt, Homo sapiens
  misc_RNA (1)...(19): siRNA sense strand
gguuggacgcugaggucua

SEQ ID NO: 2639441 - RNA, 19 nt, Homo sapiens
  misc_RNA (1)...(19): siRNA sense strand
gcguaagggaucaggaagu

SEQ ID NO: 2639442 - RNA, 19 nt, Homo sapiens
  misc_RNA (1)...(19): siRNA sense strand
gcaagauguucgaugagga

SEQ ID NO: 2639443 - RNA, 19 nt, Homo sapiens
  misc_RNA (1)...(19): siRNA sense strand
caguggaaaucgagcagga

SEQ ID NO: 2639444 - RNA, 19 nt, Homo sapiens
  misc_RNA (1)...(19): siRNA sense strand
aguacaagcagguggagca

SEQ ID NO: 2639445 - RNA, 19 nt, Homo sapiens
  misc_RNA (1)...(19): siRNA sense strand
gugcaacaugacagagaca

SEQ ID NO: 2639446 - RNA, 19 nt, Homo sapiens
  misc_RNA (1)...(19): siRNA sense strand
gggaucucguggugcguga

SEQ ID NO: 2639447 - RNA, 19 nt, Homo sapiens
  misc_RNA (1)...(19): siRNA sense strand
ccuuugagacuguggccau

SEQ ID NO: 2639448 - RNA, 19 nt, Homo sapiens
  misc_RNA (1)...(19): siRNA sense strand
uguucaaggccaugagcca

SEQ ID NO: 2639449 - RNA, 19 nt, Homo sapiens
  misc_RNA (1)...(19): siRNA sense strand
gcaucauggagcagcacuu

SEQ ID NO: 2639450 - RNA, 19 nt, Homo sapiens
  misc_RNA (1)...(19): siRNA sense strand
gcgaggagaucgagacgca

SEQ ID NO: 2639451 - RNA, 19 nt, Homo sapiens
  misc_RNA (1)...(19): siRNA sense strand
gggcaaccaucaagcgcau

SEQ ID NO: 2639452 - RNA, 19 nt, Homo sapiens
  misc_RNA (1)...(19): siRNA sense strand
gcugcaagauuaaggccuu

SEQ ID NO: 2639453 - RNA, 19 nt, Homo sapiens
  misc_RNA (1)...(19): siRNA sense strand
cugaagggcagcagcaaca

SEQ ID NO: 2639454 - RNA, 19 nt, Homo sapiens
  misc_RNA (1)...(19): siRNA sense strand
guucauggugacagggcga

SEQ ID NO: 2639455 - RNA, 19 nt, Homo sapiens
  misc_RNA (1)...(19): siRNA sense strand
uggaaaugguucagcagga

SEQ ID NO: 2639456 - RNA, 19 nt, Homo sapiens
  misc_RNA (1)...(19): siRNA sense strand
ugucagagucggagcuaca

SEQ ID NO: 2639457 - RNA, 19 nt, Homo sapiens
  misc_RNA (1)...(19): siRNA sense strand
aggaugaagacgacaaaga

SEQ ID NO: 2639458 - RNA, 19 nt, Homo sapiens
  misc_RNA (1)...(19): siRNA sense strand
ugugaagaguacaaagaca

SEQ ID NO: 2639459 - RNA, 19 nt, Homo sapiens
  misc_RNA (1)...(19): siRNA sense strand
gaaguuacgggaagggaga

SEQ ID NO: 2639460 - RNA, 19 nt, Homo sapiens
  misc_RNA (1)...(19): siRNA sense strand
aguauaaagcccugguuca

SEQ ID NO: 2639461 - RNA, 19 nt, Homo sapiens
  misc_RNA (1)...(19): siRNA sense strand
uggcauuggaugaacagaa

SEQ ID NO: 2639462 - RNA, 19 nt, Homo sapiens
  misc_RNA (1)...(19): siRNA sense strand
cgggagaaguuacgggaag

SEQ ID NO: 2639463 - RNA, 19 nt, Homo sapiens
  misc_RNA (1)...(19): siRNA sense strand
gguugagaaaguacaggaa

SEQ ID NO: 2639464 - RNA, 19 nt, Homo sapiens
  misc_RNA (1)...(19): siRNA sense strand
uggccaaccagcugaagaa

SEQ ID NO: 2639465 - RNA, 19 nt, Homo sapiens
  misc_RNA (1)...(19): siRNA sense strand
augaagaugaggaugaaga

SEQ ID NO: 2639466 - RNA, 19 nt, Homo sapiens
  misc_RNA (1)...(19): siRNA sense strand
gcagagaagcucaggcaag

SEQ ID NO: 2639467 - RNA, 19 nt, Homo sapiens
  misc_RNA (1)...(19): siRNA sense strand
uugagaaaguacaggaauc

SEQ ID NO: 2639468 - RNA, 19 nt, Homo sapiens
  misc_RNA (1)...(19): siRNA sense strand
acaagugugaagaguacaa

SEQ ID NO: 2639469 - RNA, 19 nt, Homo sapiens
  misc_RNA (1)...(19): siRNA sense strand
ccuagaaaucaaccaggaa

SEQ ID NO: 2639470 - RNA, 19 nt, Homo sapiens
  misc_RNA (1)...(19): siRNA sense strand
augaugaagaugaagauga

SEQ ID NO: 2639471 - RNA, 19 nt, Homo sapiens
  misc_RNA (1)...(19): siRNA sense strand
gaacugcaguccauggaga

SEQ ID NO: 2639472 - RNA, 19 nt, Homo sapiens
  misc_RNA (1)...(19): siRNA sense strand
ccauggagaagcuggcaga

SEQ ID NO: 2639473 - RNA, 19 nt, Homo sapiens
  misc_RNA (1)...(19): siRNA sense strand
aagacgaggagguugagaa

SEQ ID NO: 2639474 - RNA, 19 nt, Homo sapiens
  misc_RNA (1)...(19): siRNA sense strand
agucggagcuacaggcagu

SEQ ID NO: 2639475 - RNA, 19 nt, Homo sapiens
  misc_RNA (1)...(19): siRNA sense strand
augaggaggaggaggggaa

SEQ ID NO: 2639476 - RNA, 19 nt, Homo sapiens
  misc_RNA (1)...(19): siRNA sense strand
gaagagaaucuguugccuu

SEQ ID NO: 2639477 - RNA, 19 nt, Homo sapiens
  misc_RNA (1)...(19): siRNA sense strand
aagaaauacaagugugaag

SEQ ID NO: 2639478 - RNA, 19 nt, Homo sapiens
  misc_RNA (1)...(19): siRNA sense strand
ugaagaugaagaugaggau

SEQ ID NO: 2639479 - RNA, 19 nt, Homo sapiens
  misc_RNA (1)...(19): siRNA sense strand
aagaugaggaugaagacga

SEQ ID NO: 2639480 - RNA, 19 nt, Homo sapiens
  misc_RNA (1)...(19): siRNA sense strand
acgacaaagacgaggaggu

SEQ ID NO: 2639481 - RNA, 19 nt, Homo sapiens
  misc_RNA (1)...(19): siRNA sense strand
ugcagaagacugaagaaaa

SEQ ID NO: 2639482 - RNA, 19 nt, Homo sapiens
  misc_RNA (1)...(19): siRNA sense strand
caggauguugccagggauu

SEQ ID NO: 2639483 - RNA, 19 nt, Homo sapiens
  misc_RNA (1)...(19): siRNA sense strand
cgcagcuggcagagagcaa

SEQ ID NO: 2639484 - RNA, 19 nt, Homo sapiens
  misc_RNA (1)...(19): siRNA sense strand
accaagaagaagagagauu

SEQ ID NO: 2639485 - RNA, 19 nt, Homo sapiens
  misc_RNA (1)...(19): siRNA sense strand
ccgugaggauugugagaga

SEQ ID NO: 2639486 - RNA, 19 nt, Homo sapiens
  misc_RNA (1)...(19): siRNA sense strand
aagugaaagcgaagaagaa

SEQ ID NO: 2639487 - RNA, 19 nt, Homo sapiens
  misc_RNA (1)...(19): siRNA sense strand
uguuaaaguagcagauaga

SEQ ID NO: 2639488 - RNA, 19 nt, Homo sapiens
  misc_RNA (1)...(19): siRNA sense strand
aagaaaggacagaagaaaa

SEQ ID NO: 2639489 - RNA, 19 nt, Homo sapiens
  misc_RNA (1)...(19): siRNA sense strand
ugucagucaaagaaagaaa

SEQ ID NO: 2639490 - RNA, 19 nt, Homo sapiens
  misc_RNA (1)...(19): siRNA sense strand
gaacuguguuuguugggaa

SEQ ID NO: 2639491 - RNA, 19 nt, Homo sapiens
  misc_RNA (1)...(19): siRNA sense strand
uguaauaagaagaagcuga

SEQ ID NO: 2639492 - RNA, 19 nt, Homo sapiens
  misc_RNA (1)...(19): siRNA sense strand
cggaaugaggaggaagaaa

SEQ ID NO: 2639493 - RNA, 19 nt, Homo sapiens
  misc_RNA (1)...(19): siRNA sense strand
aagaaauucaccagaaaca

SEQ ID NO: 2639494 - RNA, 19 nt, Homo sapiens
  misc_RNA (1)...(19): siRNA sense strand
aggcaucggcaaaggguuu

SEQ ID NO: 2639495 - RNA, 19 nt, Homo sapiens
  misc_RNA (1)...(19): siRNA sense strand
gaaacagagaaaacagaaa

SEQ ID NO: 2639496 - RNA, 19 nt, Homo sapiens
  misc_RNA (1)...(19): siRNA sense strand
cggaagagaaagagaagug

SEQ ID NO: 2639497 - RNA, 19 nt, Homo sapiens
  misc_RNA (1)...(19): siRNA sense strand
guaucauggccgugaggau

SEQ ID NO: 2639498 - RNA, 19 nt, Homo sapiens
  misc_RNA (1)...(19): siRNA sense strand
ggagagugcugccacgcaa

SEQ ID NO: 2639499 - RNA, 19 nt, Homo sapiens
  misc_RNA (1)...(19): siRNA sense strand
gugaggauugugagagaca

SEQ ID NO: 2639500 - RNA, 19 nt, Homo sapiens
  misc_RNA (1)...(19): siRNA sense strand
aaacgaagaagaaaggaca

SEQ ID NO: 2639501 - RNA, 19 nt, Homo sapiens
  misc_RNA (1)...(19): siRNA sense strand
cgaaacggaaugaggagga

SEQ ID NO: 2639502 - RNA, 19 nt, Homo sapiens
  misc_RNA (1)...(19): siRNA sense strand
agcaaacggaagagaaaga

SEQ ID NO: 2639503 - RNA, 19 nt, Homo sapiens
  misc_RNA (1)...(19): siRNA sense strand
uguccaggagggagagaau

SEQ ID NO: 2639504 - RNA, 19 nt, Homo sapiens
  misc_RNA (1)...(19): siRNA sense strand
ccuaagaaacagagaaaac

SEQ ID NO: 2639505 - RNA, 19 nt, Homo sapiens
  misc_RNA (1)...(19): siRNA sense strand
gaaguguccaggagggaga

SEQ ID NO: 2639506 - RNA, 19 nt, Homo sapiens
  misc_RNA (1)...(19): siRNA sense strand
aaaucaaccaagaagaaga

SEQ ID NO: 2639507 - RNA, 19 nt, Homo sapiens
  misc_RNA (1)...(19): siRNA sense strand
aaguggacgcccuaagaaa

SEQ ID NO: 2639508 - RNA, 19 nt, Homo sapiens
  misc_RNA (1)...(19): siRNA sense strand
agugaaagcgaagaagaaa

SEQ ID NO: 2639509 - RNA, 19 nt, Homo sapiens
  misc_RNA (1)...(19): siRNA sense strand
aauucauccugaucagaaa

SEQ ID NO: 2639510 - RNA, 19 nt, Homo sapiens
  misc_RNA (1)...(19): siRNA sense strand
acgcaagcauugaaaagaa

SEQ ID NO: 2639511 - RNA, 19 nt, Homo sapiens
  misc_RNA (1)...(19): siRNA sense strand
aguacaucccagauugaaa

SEQ ID NO: 2639512 - RNA, 19 nt, Homo sapiens
  misc_RNA (1)...(19): siRNA sense strand
cuaugugcucuuugagaau

SEQ ID NO: 2639513 - RNA, 19 nt, Homo sapiens
  misc_RNA (1)...(19): siRNA sense strand
gaagaaaguacaucccaga

SEQ ID NO: 2639514 - RNA, 19 nt, Homo sapiens
  misc_RNA (1)...(19): siRNA sense strand
aaugacaggcaucggcaaa

SEQ ID NO: 2639515 - RNA, 19 nt, Homo sapiens
  misc_RNA (1)...(19): siRNA sense strand
gugaaagcgaagaagaaac

SEQ ID NO: 2639516 - RNA, 19 nt, Homo sapiens
  misc_RNA (1)...(19): siRNA sense strand
gagaccucaucuagagaca

SEQ ID NO: 2639517 - RNA, 19 nt, Homo sapiens
  misc_RNA (1)...(19): siRNA sense strand
agacagggaaagcgcucua

SEQ ID NO: 2639518 - RNA, 19 nt, Homo sapiens
  misc_RNA (1)...(19): siRNA sense strand
uguacgugccugugccuaa

SEQ ID NO: 2639519 - RNA, 19 nt, Homo sapiens
  misc_RNA (1)...(19): siRNA sense strand
caaacggaagagaaagaga

SEQ ID NO: 2639520 - RNA, 19 nt, Homo sapiens
  misc_RNA (1)...(19): siRNA sense strand
gugccugugccuaaacaaa

SEQ ID NO: 2639521 - RNA, 19 nt, Homo sapiens
  misc_RNA (1)...(19): siRNA sense strand
cgaagaagaaaggacagaa

SEQ ID NO: 2639522 - RNA, 19 nt, Homo sapiens
  misc_RNA (1)...(19): siRNA sense strand
cgcaagcauugaaaagaaa

SEQ ID NO: 2639523 - RNA, 19 nt, Homo sapiens
  misc_RNA (1)...(19): siRNA sense strand
aggaagaggaugaagaaga

SEQ ID NO: 2639524 - RNA, 19 nt, Homo sapiens
  misc_RNA (1)...(19): siRNA sense strand
ggaaaguaguccaagcuga

SEQ ID NO: 2639525 - RNA, 19 nt, Homo sapiens
  misc_RNA (1)...(19): siRNA sense strand
cagauaauugagauggaaa

SEQ ID NO: 2639526 - RNA, 19 nt, Homo sapiens
  misc_RNA (1)...(19): siRNA sense strand
cgggaagccuauagguaca

SEQ ID NO: 2639527 - RNA, 19 nt, Homo sapiens
  misc_RNA (1)...(19): siRNA sense strand
uggaaacaauagaggagau

SEQ ID NO: 2639528 - RNA, 19 nt, Homo sapiens
  misc_RNA (1)...(19): siRNA sense strand
gagacuuaguggagaggca

SEQ ID NO: 2639529 - RNA, 19 nt, Homo sapiens
  misc_RNA (1)...(19): siRNA sense strand
ugcaaagaacugauggaaa

SEQ ID NO: 2639530 - RNA, 19 nt, Homo sapiens
  misc_RNA (1)...(19): siRNA sense strand
aguaugaauuucugcacaa

SEQ ID NO: 2639531 - RNA, 19 nt, Homo sapiens
  misc_RNA (1)...(19): siRNA sense strand
gggagguggagguggauga

SEQ ID NO: 2639532 - RNA, 19 nt, Homo sapiens
  misc_RNA (1)...(19): siRNA sense strand
gugaagaggcugugcugau

SEQ ID NO: 2639533 - RNA, 19 nt, Homo sapiens
  misc_RNA (1)...(19): siRNA sense strand
uggaaagugccaaggauga

SEQ ID NO: 2639534 - RNA, 19 nt, Homo sapiens
  misc_RNA (1)...(19): siRNA sense strand
ccgaggaagaggaugaaga

SEQ ID NO: 2639535 - RNA, 19 nt, Homo sapiens
  misc_RNA (1)...(19): siRNA sense strand
acgaggagaagguggauuu

SEQ ID NO: 2639536 - RNA, 19 nt, Homo sapiens
  misc_RNA (1)...(19): siRNA sense strand
cauauugcucagugacaaa

SEQ ID NO: 2639537 - RNA, 19 nt, Homo sapiens
  misc_RNA (1)...(19): siRNA sense strand
uguacgaagugaaaggaga

SEQ ID NO: 2639538 - RNA, 19 nt, Homo sapiens
  misc_RNA (1)...(19): siRNA sense strand
aagagaagcuggaagccuu

SEQ ID NO: 2639539 - RNA, 19 nt, Homo sapiens
  misc_RNA (1)...(19): siRNA sense strand
cagccagggagcagagaga

SEQ ID NO: 2639540 - RNA, 19 nt, Homo sapiens
  misc_RNA (1)...(19): siRNA sense strand
acgacacuguggagagcua

SEQ ID NO: 2639541 - RNA, 19 nt, Homo sapiens
  misc_RNA (1)...(19): siRNA sense strand
guguugcugucaugggaaa

SEQ ID NO: 2639542 - RNA, 19 nt, Homo sapiens
  misc_RNA (1)...(19): siRNA sense strand
agaugugucacgaggagaa

SEQ ID NO: 2639543 - RNA, 19 nt, Homo sapiens
  misc_RNA (1)...(19): siRNA sense strand
caguaugaauuuuggguca

SEQ ID NO: 2639544 - RNA, 19 nt, Homo sapiens
  misc_RNA (1)...(19): siRNA sense strand
ccuuauaugaugaagagga

SEQ ID NO: 2639545 - RNA, 19 nt, Homo sapiens
  misc_RNA (1)...(19): siRNA sense strand
aggagaagguggauuucau

SEQ ID NO: 2639546 - RNA, 19 nt, Homo sapiens
  misc_RNA (1)...(19): siRNA sense strand
agaagguggauuucauaaa

SEQ ID NO: 2639547 - RNA, 19 nt, Homo sapiens
  misc_RNA (1)...(19): siRNA sense strand
cugacagacucgggaaauu

SEQ ID NO: 2639548 - RNA, 19 nt, Homo sapiens
  misc_RNA (1)...(19): siRNA sense strand
aagaggaaguggaugaacu

SEQ ID NO: 2639549 - RNA, 19 nt, Homo sapiens
  misc_RNA (1)...(19): siRNA sense strand
ucaucacuguggaggagaa

SEQ ID NO: 2639550 - RNA, 19 nt, Homo sapiens
  misc_RNA (1)...(19): siRNA sense strand
aagaacugauggaaacaau

SEQ ID NO: 2639551 - RNA, 19 nt, Homo sapiens
  misc_RNA (1)...(19): siRNA sense strand
aagagaccuucaagaggaa

SEQ ID NO: 2639552 - RNA, 19 nt, Homo sapiens
  misc_RNA (1)...(19): siRNA sense strand
uucaagaggaaguggauga

SEQ ID NO: 2639553 - RNA, 19 nt, Homo sapiens
  misc_RNA (1)...(19): siRNA sense strand
acuugaagaugaucaugaa

SEQ ID NO: 2639554 - RNA, 19 nt, Homo sapiens
  misc_RNA (1)...(19): siRNA sense strand
acuuguaagacuccaauaa

SEQ ID NO: 2639555 - RNA, 19 nt, Homo sapiens
  misc_RNA (1)...(19): siRNA sense strand
ggaggaucugggagcaaau

SEQ ID NO: 2639556 - RNA, 19 nt, Homo sapiens
  misc_RNA (1)...(19): siRNA sense strand
cuuauauggacuugaagau

SEQ ID NO: 2639557 - RNA, 19 nt, Homo sapiens
  misc_RNA (1)...(19): siRNA sense strand
uggagguggaugagcauuu

SEQ ID NO: 2639558 - RNA, 19 nt, Homo sapiens
  misc_RNA (1)...(19): siRNA sense strand
gaugaagaggagagaccca

SEQ ID NO: 2639559 - RNA, 19 nt, Homo sapiens
  misc_RNA (1)...(19): siRNA sense strand
caaagaaacauauugcuca

SEQ ID NO: 2639560 - RNA, 19 nt, Homo sapiens
  misc_RNA (1)...(19): siRNA sense strand
gaugaggaaaguaguccaa

SEQ ID NO: 2639561 - RNA, 19 nt, Homo sapiens
  misc_RNA (1)...(19): siRNA sense strand
cuuggaaacacuugcucaa

SEQ ID NO: 2639562 - RNA, 19 nt, Homo sapiens
  misc_RNA (1)...(19): siRNA sense strand
cuggucagcuguggagaaa

SEQ ID NO: 2639563 - RNA, 19 nt, Homo sapiens
  misc_RNA (1)...(19): siRNA sense strand
cauaaaggaugcaguggcu

SEQ ID NO: 2639564 - RNA, 19 nt, Homo sapiens
  misc_RNA (1)...(19): siRNA sense strand
agguggagguggaugagca

SEQ ID NO: 2639565 - RNA, 19 nt, Homo sapiens
  misc_RNA (1)...(19): siRNA sense strand
ugaauuaggggaugaguuu

SEQ ID NO: 2639566 - RNA, 19 nt, Homo sapiens
  misc_RNA (1)...(19): siRNA sense strand
gugaggagcgagccagcua

SEQ ID NO: 2639567 - RNA, 19 nt, Homo sapiens
  misc_RNA (1)...(19): siRNA sense strand
aaagagaccuucaagagga

SEQ ID NO: 2639568 - RNA, 19 nt, Homo sapiens
  misc_RNA (1)...(19): siRNA sense strand
ggcugacagacucgggaaa

SEQ ID NO: 2639569 - RNA, 19 nt, Homo sapiens
  misc_RNA (1)...(19): siRNA sense strand
gugcugauuugcugggagu

SEQ ID NO: 2639570 - RNA, 19 nt, Homo sapiens
  misc_RNA (1)...(19): siRNA sense strand
agagaagcuggaagccuua

SEQ ID NO: 2639571 - RNA, 19 nt, Homo sapiens
  misc_RNA (1)...(19): siRNA sense strand
agaacugauggaaacaaua

SEQ ID NO: 2639572 - RNA, 19 nt, Homo sapiens
  misc_RNA (1)...(19): siRNA sense strand
acugggagguggaggugga

SEQ ID NO: 2639573 - RNA, 19 nt, Homo sapiens
  misc_RNA (1)...(19): siRNA sense strand
augguaaggcucaaagaga

SEQ ID NO: 2639574 - RNA, 19 nt, Homo sapiens
  misc_RNA (1)...(19): siRNA sense strand
uggaaaacuuugcaaauca

SEQ ID NO: 2639575 - RNA, 19 nt, Homo sapiens
  misc_RNA (1)...(19): siRNA sense strand
agagauaaggagcugugaa

SEQ ID NO: 2639576 - RNA, 19 nt, Homo sapiens
  misc_RNA (1)...(19): siRNA sense strand
caggaggaucugggagcaa

SEQ ID NO: 2639577 - RNA, 19 nt, Homo sapiens
  misc_RNA (1)...(19): siRNA sense strand
agauaaacgccuagcucaa

SEQ ID NO: 2639578 - RNA, 19 nt, Homo sapiens
  misc_RNA (1)...(19): siRNA sense strand
agaaagaaauggaacagga

SEQ ID NO: 2639579 - RNA, 19 nt, Homo sapiens
  misc_RNA (1)...(19): siRNA sense strand
agaauuuggaagugaaaga

SEQ ID NO: 2639580 - RNA, 19 nt, Homo sapiens
  misc_RNA (1)...(19): siRNA sense strand
ggguaguugcccuggagaa

SEQ ID NO: 2639581 - RNA, 19 nt, Homo sapiens
  misc_RNA (1)...(19): siRNA sense strand
gcaacucaugagagcgaaa

SEQ ID NO: 2639582 - RNA, 19 nt, Homo sapiens
  misc_RNA (1)...(19): siRNA sense strand
caggaaugcagaaagaaau

SEQ ID NO: 2639583 - RNA, 19 nt, Homo sapiens
  misc_RNA (1)...(19): siRNA sense strand
acguuuaccaagaggaaga

SEQ ID NO: 2639584 - RNA, 19 nt, Homo sapiens
  misc_RNA (1)...(19): siRNA sense strand
agauaaaagaagaggagca

SEQ ID NO: 2639585 - RNA, 19 nt, Homo sapiens
  misc_RNA (1)...(19): siRNA sense strand
cagagaaucaagagggugu

SEQ ID NO: 2639586 - RNA, 19 nt, Homo sapiens
  misc_RNA (1)...(19): siRNA sense strand
agucuuuggaugaggauga

SEQ ID NO: 2639587 - RNA, 19 nt, Homo sapiens
  misc_RNA (1)...(19): siRNA sense strand
gugaaaauccagaggaacu

SEQ ID NO: 2639588 - RNA, 19 nt, Homo sapiens
  misc_RNA (1)...(19): siRNA sense strand
ggaucaaccaagaacguca

SEQ ID NO: 2639589 - RNA, 19 nt, Homo sapiens
  misc_RNA (1)...(19): siRNA sense strand
gaacaggaugcgaagagau

SEQ ID NO: 2639590 - RNA, 19 nt, Homo sapiens
  misc_RNA (1)...(19): siRNA sense strand
gauaaaagaagaggagcaa

SEQ ID NO: 2639591 - RNA, 19 nt, Homo sapiens
  misc_RNA (1)...(19): siRNA sense strand
augugaaaauccagaggaa

SEQ ID NO: 2639592 - RNA, 19 nt, Homo sapiens
  misc_RNA (1)...(19): siRNA sense strand
cgaaucaccugcugagcga

SEQ ID NO: 2639593 - RNA, 19 nt, Homo sapiens
  misc_RNA (1)...(19): siRNA sense strand
uaggaaaacuagagguguu

SEQ ID NO: 2639594 - RNA, 19 nt, Homo sapiens
  misc_RNA (1)...(19): siRNA sense strand
acucugaggaggacaguga

SEQ ID NO: 2639595 - RNA, 19 nt, Homo sapiens
  misc_RNA (1)...(19): siRNA sense strand
cauuuagggcuaugcgaga

SEQ ID NO: 2639596 - RNA, 19 nt, Homo sapiens
  misc_RNA (1)...(19): siRNA sense strand
aguaaaagcauuagcagga

SEQ ID NO: 2639597 - RNA, 19 nt, Homo sapiens
  misc_RNA (1)...(19): siRNA sense strand
aagaagaggagcaaaagaa

SEQ ID NO: 2639598 - RNA, 19 nt, Homo sapiens
  misc_RNA (1)...(19): siRNA sense strand
ccgaaacaccucuggcuca

SEQ ID NO: 2639599 - RNA, 19 nt, Homo sapiens
  misc_RNA (1)...(19): siRNA sense strand
cugcaggaugauaagaauu

SEQ ID NO: 2639600 - RNA, 19 nt, Homo sapiens
  misc_RNA (1)...(19): siRNA sense strand
ugaagaaagcauaagauac

SEQ ID NO: 2639601 - RNA, 19 nt, Homo sapiens
  misc_RNA (1)...(19): siRNA sense strand
uguuccaguuggugaucaa

SEQ ID NO: 2639602 - RNA, 19 nt, Homo sapiens
  misc_RNA (1)...(19): siRNA sense strand
uggagaaagaagcugaaga

SEQ ID NO: 2639603 - RNA, 19 nt, Homo sapiens
  misc_RNA (1)...(19): siRNA sense strand
ggaucagugcaaagaaaau

SEQ ID NO: 2639604 - RNA, 19 nt, Homo sapiens
  misc_RNA (1)...(19): siRNA sense strand
ugaucaaacacauuccaaa

SEQ ID NO: 2639605 - RNA, 19 nt, Homo sapiens
  misc_RNA (1)...(19): siRNA sense strand
uuaccaagaggaagaugaa

SEQ ID NO: 2639606 - RNA, 19 nt, Homo sapiens
  misc_RNA (1)...(19): siRNA sense strand
gagaaagaagcugaagaau

SEQ ID NO: 2639607 - RNA, 19 nt, Homo sapiens
  misc_RNA (1)...(19): siRNA sense strand
agaagaggagcaaaagaaa

SEQ ID NO: 2639608 - RNA, 19 nt, Homo sapiens
  misc_RNA (1)...(19): siRNA sense strand
ugcagaaagaaauggaaca

SEQ ID NO: 2639609 - RNA, 19 nt, Homo sapiens
  misc_RNA (1)...(19): siRNA sense strand
cugcaacucaugagagcga

SEQ ID NO: 2639610 - RNA, 19 nt, Homo sapiens
  misc_RNA (1)...(19): siRNA sense strand
ccaagaggaagaugaagca

SEQ ID NO: 2639611 - RNA, 19 nt, Homo sapiens
  misc_RNA (1)...(19): siRNA sense strand
aaauggaacaggaugcgaa

SEQ ID NO: 2639612 - RNA, 19 nt, Homo sapiens
  misc_RNA (1)...(19): siRNA sense strand
gcucaaucuguccgaaaca

SEQ ID NO: 2639613 - RNA, 19 nt, Homo sapiens
  misc_RNA (1)...(19): siRNA sense strand
augaagcauaccaggaauu

SEQ ID NO: 2639614 - RNA, 19 nt, Homo sapiens
  misc_RNA (1)...(19): siRNA sense strand
ggaacaggaugcgaagaga

SEQ ID NO: 2639615 - RNA, 19 nt, Homo sapiens
  misc_RNA (1)...(19): siRNA sense strand
agaaaggaucagugcaaag

SEQ ID NO: 2639616 - RNA, 19 nt, Homo sapiens
  misc_RNA (1)...(19): siRNA sense strand
agucaucaguggagacaaa

SEQ ID NO: 2639617 - RNA, 19 nt, Homo sapiens
  misc_RNA (1)...(19): siRNA sense strand
agucaugucaagagggaua

SEQ ID NO: 2639618 - RNA, 19 nt, Homo sapiens
  misc_RNA (1)...(19): siRNA sense strand
agucgaagugugagaauua

SEQ ID NO: 2639619 - RNA, 19 nt, Homo sapiens
  misc_RNA (1)...(19): siRNA sense strand
ugugagaauuacagugaaa

SEQ ID NO: 2639620 - RNA, 19 nt, Homo sapiens
  misc_RNA (1)...(19): siRNA sense strand
aaggaaagaacaaggcaua

SEQ ID NO: 2639621 - RNA, 19 nt, Homo sapiens
  misc_RNA (1)...(19): siRNA sense strand
agauauugcagguggaaga

SEQ ID NO: 2639622 - RNA, 19 nt, Homo sapiens
  misc_RNA (1)...(19): siRNA sense strand
ucaccaaaccagagcacaa

SEQ ID NO: 2639623 - RNA, 19 nt, Homo sapiens
  misc_RNA (1)...(19): siRNA sense strand
aguuaaacaaggagcauau

SEQ ID NO: 2639624 - RNA, 19 nt, Homo sapiens
  misc_RNA (1)...(19): siRNA sense strand
gggcagaacauucgguaca

SEQ ID NO: 2639625 - RNA, 19 nt, Homo sapiens
  misc_RNA (1)...(19): siRNA sense strand
aggaaacaguugugcucaa

SEQ ID NO: 2639626 - RNA, 19 nt, Homo sapiens
  misc_RNA (1)...(19): siRNA sense strand
ucaaggaagcaaaggagaa

SEQ ID NO: 2639627 - RNA, 19 nt, Homo sapiens
  misc_RNA (1)...(19): siRNA sense strand
guuugaagcagcaguuaaa

SEQ ID NO: 2639628 - RNA, 19 nt, Homo sapiens
  misc_RNA (1)...(19): siRNA sense strand
cagcaguguuccaggacuu

SEQ ID NO: 2639629 - RNA, 19 nt, Homo sapiens
  misc_RNA (1)...(19): siRNA sense strand
ccgaauuagccaaggcaca

SEQ ID NO: 2639630 - RNA, 19 nt, Homo sapiens
  misc_RNA (1)...(19): siRNA sense strand
gggaagucgaagugugaga

SEQ ID NO: 2639631 - RNA, 19 nt, Homo sapiens
  misc_RNA (1)...(19): siRNA sense strand
acucaagugucaugcacaa

SEQ ID NO: 2639632 - RNA, 19 nt, Homo sapiens
  misc_RNA (1)...(19): siRNA sense strand
uuaaagagauaaugcccua

SEQ ID NO: 2639633 - RNA, 19 nt, Homo sapiens
  misc_RNA (1)...(19): siRNA sense strand
gggaagauacagauacaga

SEQ ID NO: 2639634 - RNA, 19 nt, Homo sapiens
  misc_RNA (1)...(19): siRNA sense strand
cggagauguuugacuggaa

SEQ ID NO: 2639635 - RNA, 19 nt, Homo sapiens
  misc_RNA (1)...(19): siRNA sense strand
ccacacaaggaguugcaaa

SEQ ID NO: 2639636 - RNA, 19 nt, Homo sapiens
  misc_RNA (1)...(19): siRNA sense strand
ccaaagacagcgugguuca

SEQ ID NO: 2639637 - RNA, 19 nt, Homo sapiens
  misc_RNA (1)...(19): siRNA sense strand
gacuuguggccgaggguua

SEQ ID NO: 2639638 - RNA, 19 nt, Homo sapiens
  misc_RNA (1)...(19): siRNA sense strand
ccuaauauaacuugguuga

SEQ ID NO: 2639639 - RNA, 19 nt, Homo sapiens
  misc_RNA (1)...(19): siRNA sense strand
ugauaagaaacaugaguca

SEQ ID NO: 2639640 - RNA, 19 nt, Homo sapiens
  misc_RNA (1)...(19): siRNA sense strand
agaacaaggcauauaugaa

SEQ ID NO: 2639641 - RNA, 19 nt, Homo sapiens
  misc_RNA (1)...(19): siRNA sense strand
aaacaaaggugcugccagu

SEQ ID NO: 2639642 - RNA, 19 nt, Homo sapiens
  misc_RNA (1)...(19): siRNA sense strand
agugauggauuuaaagaga

SEQ ID NO: 2639643 - RNA, 19 nt, Homo sapiens
  misc_RNA (1)...(19): siRNA sense strand
agggaagagaagcguauua

SEQ ID NO: 2639644 - RNA, 19 nt, Homo sapiens
  misc_RNA (1)...(19): siRNA sense strand
guugcaaaccuguggccaa

SEQ ID NO: 2639645 - RNA, 19 nt, Homo sapiens
  misc_RNA (1)...(19): siRNA sense strand
gcugaaacaagcacaagaa

SEQ ID NO: 2639646 - RNA, 19 nt, Homo sapiens
  misc_RNA (1)...(19): siRNA sense strand
gcaaaggagaacacagcuu

SEQ ID NO: 2639647 - RNA, 19 nt, Homo sapiens
  misc_RNA (1)...(19): siRNA sense strand
cuuuguguguguagaggaa

SEQ ID NO: 2639648 - RNA, 19 nt, Homo sapiens
  misc_RNA (1)...(19): siRNA sense strand
ggagcauauagcauggaua

SEQ ID NO: 2639649 - RNA, 19 nt, Homo sapiens
  misc_RNA (1)...(19): siRNA sense strand
augaagacaaagauggcaa

SEQ ID NO: 2639650 - RNA, 19 nt, Homo sapiens
  misc_RNA (1)...(19): siRNA sense strand
gaacauaauccuuggacug

SEQ ID NO: 2639651 - RNA, 19 nt, Homo sapiens
  misc_RNA (1)...(19): siRNA sense strand
gagaugaugugcagggauc

SEQ ID NO: 2639652 - RNA, 19 nt, Homo sapiens
  misc_RNA (1)...(19): siRNA sense strand
cugggaagauacagauaca

SEQ ID NO: 2639653 - RNA, 19 nt, Homo sapiens
  misc_RNA (1)...(19): siRNA sense strand
guacaagacaugcagcaau

SEQ ID NO: 2639654 - RNA, 19 nt, Homo sapiens
  misc_RNA (1)...(19): siRNA sense strand
agaaagcaggugugucaaa

SEQ ID NO: 2639655 - RNA, 19 nt, Homo sapiens
  misc_RNA (1)...(19): siRNA sense strand
auguuugacuggaaggaau

SEQ ID NO: 2639656 - RNA, 19 nt, Homo sapiens
  misc_RNA (1)...(19): siRNA sense strand
cugcugaauguguggauau

SEQ ID NO: 2639657 - RNA, 19 nt, Homo sapiens
  misc_RNA (1)...(19): siRNA sense strand
caagggaagagaagcguau

SEQ ID NO: 2639658 - RNA, 19 nt, Homo sapiens
  misc_RNA (1)...(19): siRNA sense strand
ccagcgaggugguucacaa

SEQ ID NO: 2639659 - RNA, 19 nt, Homo sapiens
  misc_RNA (1)...(19): siRNA sense strand
gcucauugguacugacaac

SEQ ID NO: 2639660 - RNA, 19 nt, Homo sapiens
  misc_RNA (1)...(19): siRNA sense strand
gcaaugccaaggaggacaa

SEQ ID NO: 2639661 - RNA, 19 nt, Homo sapiens
  misc_RNA (1)...(19): siRNA sense strand
ggacaaaagccaauggaac

SEQ ID NO: 2639662 - RNA, 19 nt, Homo sapiens
  misc_RNA (1)...(19): siRNA sense strand
gaagaauggaagugcaugu

SEQ ID NO: 2639663 - RNA, 19 nt, Homo sapiens
  misc_RNA (1)...(19): siRNA sense strand
aaaucagagaugaagacaa

SEQ ID NO: 2639664 - RNA, 19 nt, Homo sapiens
  misc_RNA (1)...(19): siRNA sense strand
caauauacugugugaccuu

SEQ ID NO: 2639665 - RNA, 19 nt, Homo sapiens
  misc_RNA (1)...(19): siRNA sense strand
uggcacaaaaugaggcaaa

SEQ ID NO: 2639666 - RNA, 19 nt, Homo sapiens
  misc_RNA (1)...(19): siRNA sense strand
guugaagagaggaggaucu

SEQ ID NO: 2639667 - RNA, 19 nt, Homo sapiens
  misc_RNA (1)...(19): siRNA sense strand
ccagagaguagaaucguau

SEQ ID NO: 2639668 - RNA, 19 nt, Homo sapiens
  misc_RNA (1)...(19): siRNA sense strand
ggaacugggaagauacaga

SEQ ID NO: 2639669 - RNA, 19 nt, Homo sapiens
  misc_RNA (1)...(19): siRNA sense strand
gcaaccaacacuagaacca

SEQ ID NO: 2639670 - RNA, 19 nt, Homo sapiens
  misc_RNA (1)...(19): siRNA sense strand
gagagauauugcaggugga

SEQ ID NO: 2639671 - RNA, 19 nt, Homo sapiens
  misc_RNA (1)...(19): siRNA sense strand
uggaagaauggaagugcau

SEQ ID NO: 2639672 - RNA, 19 nt, Homo sapiens
  misc_RNA (1)...(19): siRNA sense strand
ggcaaauguggaauaacaa

SEQ ID NO: 2639673 - RNA, 19 nt, Homo sapiens
  misc_RNA (1)...(19): siRNA sense strand
acacuagaaccaacagcaa

SEQ ID NO: 2639674 - RNA, 19 nt, Homo sapiens
  misc_RNA (1)...(19): siRNA sense strand
cagguacacugcagccaaa

SEQ ID NO: 2639675 - RNA, 19 nt, Homo sapiens
  misc_RNA (1)...(19): siRNA sense strand
agauaaugcccuaugacca

SEQ ID NO: 2639676 - RNA, 19 nt, Homo sapiens
  misc_RNA (1)...(19): siRNA sense strand
ccacauauacauggaccaa

SEQ ID NO: 2639677 - RNA, 19 nt, Homo sapiens
  misc_RNA (1)...(19): siRNA sense strand
gaggguaguuccugaccau

SEQ ID NO: 2639678 - RNA, 19 nt, Homo sapiens
  misc_RNA (1)...(19): siRNA sense strand
ccaacacauccgugauuau

SEQ ID NO: 2639679 - RNA, 19 nt, Homo sapiens
  misc_RNA (1)...(19): siRNA sense strand
gggcauccaggaagagaca

SEQ ID NO: 2639680 - RNA, 19 nt, Homo sapiens
  misc_RNA (1)...(19): siRNA sense strand
aaaccaaaacugaaggaau

SEQ ID NO: 2639681 - RNA, 19 nt, Homo sapiens
  misc_RNA (1)...(19): siRNA sense strand
augugaaaguccagaggaa

SEQ ID NO: 2639682 - RNA, 19 nt, Homo sapiens
  misc_RNA (1)...(19): siRNA sense strand
aggaugaaguugucuauua

SEQ ID NO: 2639683 - RNA, 19 nt, Homo sapiens
  misc_RNA (1)...(19): siRNA sense strand
agaaagaaauggaacagga

SEQ ID NO: 2639684 - RNA, 19 nt, Homo sapiens
  misc_RNA (1)...(19): siRNA sense strand
gcaacucaugagagcgaaa

SEQ ID NO: 2639685 - RNA, 19 nt, Homo sapiens
  misc_RNA (1)...(19): siRNA sense strand
gugaaaguccagaggaacu

SEQ ID NO: 2639686 - RNA, 19 nt, Homo sapiens
  misc_RNA (1)...(19): siRNA sense strand
aagaaauggaacaggaugu

SEQ ID NO: 2639687 - RNA, 19 nt, Homo sapiens
  misc_RNA (1)...(19): siRNA sense strand
gaacaggaugugaagagau

SEQ ID NO: 2639688 - RNA, 19 nt, Homo sapiens
  misc_RNA (1)...(19): siRNA sense strand
aacaggaugugaagagauu

SEQ ID NO: 2639689 - RNA, 19 nt, Homo sapiens
  misc_RNA (1)...(19): siRNA sense strand
ccagaggaacuuagucauu

SEQ ID NO: 2639690 - RNA, 19 nt, Homo sapiens
  misc_RNA (1)...(19): siRNA sense strand
ggaacaggaugugaagaga

SEQ ID NO: 2639691 - RNA, 19 nt, Homo sapiens
  misc_RNA (1)...(19): siRNA sense strand
aaauggaacaggaugugaa

SEQ ID NO: 2639692 - RNA, 19 nt, Homo sapiens
  misc_RNA (1)...(19): siRNA sense strand
ugcagaaagaaauggaaca

SEQ ID NO: 2639693 - RNA, 19 nt, Homo sapiens
  misc_RNA (1)...(19): siRNA sense strand
cugcaacucaugagagcga

SEQ ID NO: 2639694 - RNA, 19 nt, Homo sapiens
  misc_RNA (1)...(19): siRNA sense strand
ucaacuaggaaugcagaaa

SEQ ID NO: 2639695 - RNA, 19 nt, Homo sapiens
  misc_RNA (1)...(19): siRNA sense strand
auaagaagcacuugccuca

SEQ ID NO: 2639696 - RNA, 19 nt, Homo sapiens
  misc_RNA (1)...(19): siRNA sense strand
gaacagaugugcagcauau

SEQ ID NO: 2639697 - RNA, 19 nt, Homo sapiens
  misc_RNA (1)...(19): siRNA sense strand
ccuguguggucgugggaau

SEQ ID NO: 2639698 - RNA, 19 nt, Homo sapiens
  misc_RNA (1)...(19): siRNA sense strand
ugcaaagacagcaaggaaa

SEQ ID NO: 2639699 - RNA, 19 nt, Homo sapiens
  misc_RNA (1)...(19): siRNA sense strand
gaggaggucugaagaggga

SEQ ID NO: 2639700 - RNA, 19 nt, Homo sapiens
  misc_RNA (1)...(19): siRNA sense strand
ggaacagaugugcagcaua

SEQ ID NO: 2639701 - RNA, 19 nt, Homo sapiens
  misc_RNA (1)...(19): siRNA sense strand
ugaagagggacaagaagca

SEQ ID NO: 2639702 - RNA, 19 nt, Homo sapiens
  misc_RNA (1)...(19): siRNA sense strand
ggaggucugaagagggaca

SEQ ID NO: 2639703 - RNA, 19 nt, Homo sapiens
  misc_RNA (1)...(19): siRNA sense strand
aagaagaagaugaggagaa

SEQ ID NO: 2639704 - RNA, 19 nt, Homo sapiens
  misc_RNA (1)...(19): siRNA sense strand
ugaacaagcacaagggcaa

SEQ ID NO: 2639705 - RNA, 19 nt, Homo sapiens
  misc_RNA (1)...(19): siRNA sense strand
ggucaaguuugcaggccua

SEQ ID NO: 2639706 - RNA, 19 nt, Homo sapiens
  misc_RNA (1)...(19): siRNA sense strand
gaagaugaguauaggagca

SEQ ID NO: 2639707 - RNA, 19 nt, Homo sapiens
  misc_RNA (1)...(19): siRNA sense strand
gggaggaggaccugaucaa

SEQ ID NO: 2639708 - RNA, 19 nt, Homo sapiens
  misc_RNA (1)...(19): siRNA sense strand
gggaagaagaagaugagga

SEQ ID NO: 2639709 - RNA, 19 nt, Homo sapiens
  misc_RNA (1)...(19): siRNA sense strand
cauuaaacccaccgagaca

SEQ ID NO: 2639710 - RNA, 19 nt, Homo sapiens
  misc_RNA (1)...(19): siRNA sense strand
ggcuaaagguacagagggu

SEQ ID NO: 2639711 - RNA, 19 nt, Homo sapiens
  misc_RNA (1)...(19): siRNA sense strand
gcaagaggcgggugcaaaa

SEQ ID NO: 2639712 - RNA, 19 nt, Homo sapiens
  misc_RNA (1)...(19): siRNA sense strand
gcggcaugguccagcgauu

SEQ ID NO: 2639713 - RNA, 19 nt, Homo sapiens
  misc_RNA (1)...(19): siRNA sense strand
caggauauucagagaaguu

SEQ ID NO: 2639714 - RNA, 19 nt, Homo sapiens
  misc_RNA (1)...(19): siRNA sense strand
ucacagaacagaaccggaa

SEQ ID NO: 2639715 - RNA, 19 nt, Homo sapiens
  misc_RNA (1)...(19): siRNA sense strand
uuauaagggagaagacauu

SEQ ID NO: 2639716 - RNA, 19 nt, Homo sapiens
  misc_RNA (1)...(19): siRNA sense strand
cguuaaaacucaacaacca

SEQ ID NO: 2639717 - RNA, 19 nt, Homo sapiens
  misc_RNA (1)...(19): siRNA sense strand
gaagagaucgagaugguga

SEQ ID NO: 2639718 - RNA, 19 nt, Homo sapiens
  misc_RNA (1)...(19): siRNA sense strand
augaggagauuauggccua

SEQ ID NO: 2639719 - RNA, 19 nt, Homo sapiens
  misc_RNA (1)...(19): siRNA sense strand
uggacauguuugaagauga

SEQ ID NO: 2639720 - RNA, 19 nt, Homo sapiens
  misc_RNA (1)...(19): siRNA sense strand
acaccacggacgaggagaa

SEQ ID NO: 2639721 - RNA, 19 nt, Homo sapiens
  misc_RNA (1)...(19): siRNA sense strand
aggcaaggcgcaugaagau

SEQ ID NO: 2639722 - RNA, 19 nt, Homo sapiens
  misc_RNA (1)...(19): siRNA sense strand
ccacagucacagaacagaa

SEQ ID NO: 2639723 - RNA, 19 nt, Homo sapiens
  misc_RNA (1)...(19): siRNA sense strand
gaugaguauaggagcauga

SEQ ID NO: 2639724 - RNA, 19 nt, Homo sapiens
  misc_RNA (1)...(19): siRNA sense strand
cugcacuacauccgagaua

SEQ ID NO: 2639725 - RNA, 19 nt, Homo sapiens
  misc_RNA (1)...(19): siRNA sense strand
agcccaugaacguggaaua

SEQ ID NO: 2639726 - RNA, 19 nt, Homo sapiens
  misc_RNA (1)...(19): siRNA sense strand
gccgagaaggcuaaaggua

SEQ ID NO: 2639727 - RNA, 19 nt, Homo sapiens
  misc_RNA (1)...(19): siRNA sense strand
ccacugaaguccugggguu

SEQ ID NO: 2639728 - RNA, 19 nt, Homo sapiens
  misc_RNA (1)...(19): siRNA sense strand
agauguacgcuaagacuga

SEQ ID NO: 2639729 - RNA, 19 nt, Homo sapiens
  misc_RNA (1)...(19): siRNA sense strand
cgcuaagacugaacaggau

SEQ ID NO: 2639730 - RNA, 19 nt, Homo sapiens
  misc_RNA (1)...(19): siRNA sense strand
gggagagugaagagaucga

SEQ ID NO: 2639731 - RNA, 19 nt, Homo sapiens
  misc_RNA (1)...(19): siRNA sense strand
ugacuggcguggaggacga

SEQ ID NO: 2639732 - RNA, 19 nt, Homo sapiens
  misc_RNA (1)...(19): siRNA sense strand
gggaggagaacggccgaaa

SEQ ID NO: 2639733 - RNA, 19 nt, Homo sapiens
  misc_RNA (1)...(19): siRNA sense strand
ggcaagaggcgggugcaaa

SEQ ID NO: 2639734 - RNA, 19 nt, Homo sapiens
  misc_RNA (1)...(19): siRNA sense strand
ggaagaagaagaugaggag

SEQ ID NO: 2639735 - RNA, 19 nt, Homo sapiens
  misc_RNA (1)...(19): siRNA sense strand
ccgagaaggcuaaagguac

SEQ ID NO: 2639736 - RNA, 19 nt, Homo sapiens
  misc_RNA (1)...(19): siRNA sense strand
ccgaggaugcccaagaaga

SEQ ID NO: 2639737 - RNA, 19 nt, Homo sapiens
  misc_RNA (1)...(19): siRNA sense strand
cccaagaagacgccgagaa

SEQ ID NO: 2639738 - RNA, 19 nt, Homo sapiens
  misc_RNA (1)...(19): siRNA sense strand
augaagaugcagagaauag

SEQ ID NO: 2639739 - RNA, 19 nt, Homo sapiens
  misc_RNA (1)...(19): siRNA sense strand
ggacaagggaggagaacgg

SEQ ID NO: 2639740 - RNA, 19 nt, Homo sapiens
  misc_RNA (1)...(19): siRNA sense strand
caggcaaggcgcaugaaga

SEQ ID NO: 2639741 - RNA, 19 nt, Homo sapiens
  misc_RNA (1)...(19): siRNA sense strand
ggacaaggugccaggcuuc

SEQ ID NO: 2639742 - RNA, 19 nt, Homo sapiens
  misc_RNA (1)...(19): siRNA sense strand
acguguacucacuggagaa

SEQ ID NO: 2639743 - RNA, 19 nt, Homo sapiens
  misc_RNA (1)...(19): siRNA sense strand
ccaggacaagggaggagaa

SEQ ID NO: 2639744 - RNA, 19 nt, Homo sapiens
  misc_RNA (1)...(19): siRNA sense strand
cguguggcgauguggagaa

SEQ ID NO: 2639745 - RNA, 19 nt, Homo sapiens
  misc_RNA (1)...(19): siRNA sense strand
ugaguuugguggagccuga

SEQ ID NO: 2639746 - RNA, 19 nt, Homo sapiens
  misc_RNA (1)...(19): siRNA sense strand
uggacaaggugccaggcuu

SEQ ID NO: 2639747 - RNA, 19 nt, Homo sapiens
  misc_RNA (1)...(19): siRNA sense strand
ucaacgaaacggaagcaga

SEQ ID NO: 2639748 - RNA, 19 nt, Homo sapiens
  misc_RNA (1)...(19): siRNA sense strand
aguaaagaacugaggguca

SEQ ID NO: 2639749 - RNA, 19 nt, Homo sapiens
  misc_RNA (1)...(19): siRNA sense strand
aggaaaagcccaaguuaaa

SEQ ID NO: 2639750 - RNA, 19 nt, Homo sapiens
  misc_RNA (1)...(19): siRNA sense strand
aaacaaaaggagaggaaga

SEQ ID NO: 2639751 - RNA, 19 nt, Homo sapiens
  misc_RNA (1)...(19): siRNA sense strand
gagaagugggagagcguga

SEQ ID NO: 2639752 - RNA, 19 nt, Homo sapiens
  misc_RNA (1)...(19): siRNA sense strand
aagaagaggcagcaggcua

SEQ ID NO: 2639753 - RNA, 19 nt, Homo sapiens
  misc_RNA (1)...(19): siRNA sense strand
aaggagaggaagaagaaga

SEQ ID NO: 2639754 - RNA, 19 nt, Homo sapiens
  misc_RNA (1)...(19): siRNA sense strand
aaaacguggcagaggaaaa

SEQ ID NO: 2639755 - RNA, 19 nt, Homo sapiens
  misc_RNA (1)...(19): siRNA sense strand
caaaugaauccgaagacga

SEQ ID NO: 2639756 - RNA, 19 nt, Homo sapiens
  misc_RNA (1)...(19): siRNA sense strand
uaguaaagaugauguggca

SEQ ID NO: 2639757 - RNA, 19 nt, Homo sapiens
  misc_RNA (1)...(19): siRNA sense strand
cagcacaccucgugggaag

SEQ ID NO: 2639758 - RNA, 19 nt, Homo sapiens
  misc_RNA (1)...(19): siRNA sense strand
cgaucagauucagaagaua

SEQ ID NO: 2639759 - RNA, 19 nt, Homo sapiens
  misc_RNA (1)...(19): siRNA sense strand
cuuacugaugccagaauua

SEQ ID NO: 2639760 - RNA, 19 nt, Homo sapiens
  misc_RNA (1)...(19): siRNA sense strand
caaaaggagaggaagaaga

SEQ ID NO: 2639761 - RNA, 19 nt, Homo sapiens
  misc_RNA (1)...(19): siRNA sense strand
guuuauuuacgaaggauga

SEQ ID NO: 2639762 - RNA, 19 nt, Homo sapiens
  misc_RNA (1)...(19): siRNA sense strand
cugaaucaaagaaggaaca

SEQ ID NO: 2639763 - RNA, 19 nt, Homo sapiens
  misc_RNA (1)...(19): siRNA sense strand
cccaaaagcugcagagucu

SEQ ID NO: 2639764 - RNA, 19 nt, Homo sapiens
  misc_RNA (1)...(19): siRNA sense strand
agaacagguuagaaaggca

SEQ ID NO: 2639765 - RNA, 19 nt, Homo sapiens
  misc_RNA (1)...(19): siRNA sense strand
gggaagaaaagaaaggcuu

SEQ ID NO: 2639766 - RNA, 19 nt, Homo sapiens
  misc_RNA (1)...(19): siRNA sense strand
cagagaagugggagagcgu

SEQ ID NO: 2639767 - RNA, 19 nt, Homo sapiens
  misc_RNA (1)...(19): siRNA sense strand
aggcagcaggcuaggaaga

SEQ ID NO: 2639768 - RNA, 19 nt, Homo sapiens
  misc_RNA (1)...(19): siRNA sense strand
gcaaagaguccuaauccca

SEQ ID NO: 2639769 - RNA, 19 nt, Homo sapiens
  misc_RNA (1)...(19): siRNA sense strand
cuggauaaagaacagguua

SEQ ID NO: 2639770 - RNA, 19 nt, Homo sapiens
  misc_RNA (1)...(19): siRNA sense strand
aaaucaaagaagaggcagu

SEQ ID NO: 2639771 - RNA, 19 nt, Homo sapiens
  misc_RNA (1)...(19): siRNA sense strand
agugaagaaaccugaauca

SEQ ID NO: 2639772 - RNA, 19 nt, Homo sapiens
  misc_RNA (1)...(19): siRNA sense strand
aagaggcagugaaggaaaa

SEQ ID NO: 2639773 - RNA, 19 nt, Homo sapiens
  misc_RNA (1)...(19): siRNA sense strand
agaggaagaagaagaggca

SEQ ID NO: 2639774 - RNA, 19 nt, Homo sapiens
  misc_RNA (1)...(19): siRNA sense strand
agcccaaguuaaagcaaca

SEQ ID NO: 2639775 - RNA, 19 nt, Homo sapiens
  misc_RNA (1)...(19): siRNA sense strand
gugauacuacagugaagaa

SEQ ID NO: 2639776 - RNA, 19 nt, Homo sapiens
  misc_RNA (1)...(19): siRNA sense strand
uuacgaaggaugaacccaa

SEQ ID NO: 2639777 - RNA, 19 nt, Homo sapiens
  misc_RNA (1)...(19): siRNA sense strand
gugaagaaaccugaaucaa

SEQ ID NO: 2639778 - RNA, 19 nt, Homo sapiens
  misc_RNA (1)...(19): siRNA sense strand
gggaaaagcccagagaaga

SEQ ID NO: 2639779 - RNA, 19 nt, Homo sapiens
  misc_RNA (1)...(19): siRNA sense strand
uugccagagaagugggaga

SEQ ID NO: 2639780 - RNA, 19 nt, Homo sapiens
  misc_RNA (1)...(19): siRNA sense strand
ccaaguuaaagcaacaaau

SEQ ID NO: 2639781 - RNA, 19 nt, Homo sapiens
  misc_RNA (1)...(19): siRNA sense strand
aguaaagaacugaggguca

SEQ ID NO: 2639782 - RNA, 19 nt, Homo sapiens
  misc_RNA (1)...(19): siRNA sense strand
aggaaaagcccaaguuaaa

SEQ ID NO: 2639783 - RNA, 19 nt, Homo sapiens
  misc_RNA (1)...(19): siRNA sense strand
aaacaaaaggagaggaaga

SEQ ID NO: 2639784 - RNA, 19 nt, Homo sapiens
  misc_RNA (1)...(19): siRNA sense strand
gagaagugggagagcguga

SEQ ID NO: 2639785 - RNA, 19 nt, Homo sapiens
  misc_RNA (1)...(19): siRNA sense strand
aagaagaggcagcaggcua

SEQ ID NO: 2639786 - RNA, 19 nt, Homo sapiens
  misc_RNA (1)...(19): siRNA sense strand
aaggagaggaagaagaaga

SEQ ID NO: 2639787 - RNA, 19 nt, Homo sapiens
  misc_RNA (1)...(19): siRNA sense strand
aaaacguggcagaggaaaa

SEQ ID NO: 2639788 - RNA, 19 nt, Homo sapiens
  misc_RNA (1)...(19): siRNA sense strand
caaaugaauccgaagacga

SEQ ID NO: 2639789 - RNA, 19 nt, Homo sapiens
  misc_RNA (1)...(19): siRNA sense strand
uaguaaagaugauguggca

SEQ ID NO: 2639790 - RNA, 19 nt, Homo sapiens
  misc_RNA (1)...(19): siRNA sense strand
cagcacaccucgugggaag

SEQ ID NO: 2639791 - RNA, 19 nt, Homo sapiens
  misc_RNA (1)...(19): siRNA sense strand
cgaucagauucagaagaua

SEQ ID NO: 2639792 - RNA, 19 nt, Homo sapiens
  misc_RNA (1)...(19): siRNA sense strand
cuuacugaugccagaauua

SEQ ID NO: 2639793 - RNA, 19 nt, Homo sapiens
  misc_RNA (1)...(19): siRNA sense strand
caaaaggagaggaagaaga

SEQ ID NO: 2639794 - RNA, 19 nt, Homo sapiens
  misc_RNA (1)...(19): siRNA sense strand
cugaaucaaagaaggaaca

SEQ ID NO: 2639795 - RNA, 19 nt, Homo sapiens
  misc_RNA (1)...(19): siRNA sense strand
cccaaaagcugcagagucu

SEQ ID NO: 2639796 - RNA, 19 nt, Homo sapiens
  misc_RNA (1)...(19): siRNA sense strand
agaacagguuagaaaggca

SEQ ID NO: 2639797 - RNA, 19 nt, Homo sapiens
  misc_RNA (1)...(19): siRNA sense strand
gggaagaaaagaaaggcuu

SEQ ID NO: 2639798 - RNA, 19 nt, Homo sapiens
  misc_RNA (1)...(19): siRNA sense strand
accuaaagucagugauuca

SEQ ID NO: 2639799 - RNA, 19 nt, Homo sapiens
  misc_RNA (1)...(19): siRNA sense strand
cagagaagugggagagcgu

SEQ ID NO: 2639800 - RNA, 19 nt, Homo sapiens
  misc_RNA (1)...(19): siRNA sense strand
aggcagcaggcuaggaaga

SEQ ID NO: 2639801 - RNA, 19 nt, Homo sapiens
  misc_RNA (1)...(19): siRNA sense strand
gcaaagaguccuaauccca

SEQ ID NO: 2639802 - RNA, 19 nt, Homo sapiens
  misc_RNA (1)...(19): siRNA sense strand
cuggauaaagaacagguua

SEQ ID NO: 2639803 - RNA, 19 nt, Homo sapiens
  misc_RNA (1)...(19): siRNA sense strand
aaaucaaagaagaggcagu

SEQ ID NO: 2639804 - RNA, 19 nt, Homo sapiens
  misc_RNA (1)...(19): siRNA sense strand
agugaagaaaccugaauca

SEQ ID NO: 2639805 - RNA, 19 nt, Homo sapiens
  misc_RNA (1)...(19): siRNA sense strand
aagaggcagugaaggaaaa

SEQ ID NO: 2639806 - RNA, 19 nt, Homo sapiens
  misc_RNA (1)...(19): siRNA sense strand
agaggaagaagaagaggca

SEQ ID NO: 2639807 - RNA, 19 nt, Homo sapiens
  misc_RNA (1)...(19): siRNA sense strand
agcccaaguuaaagcaaca

SEQ ID NO: 2639808 - RNA, 19 nt, Homo sapiens
  misc_RNA (1)...(19): siRNA sense strand
gugauacuacagugaagaa

SEQ ID NO: 2639809 - RNA, 19 nt, Homo sapiens
  misc_RNA (1)...(19): siRNA sense strand
gugaagaaaccugaaucaa

SEQ ID NO: 2639810 - RNA, 19 nt, Homo sapiens
  misc_RNA (1)...(19): siRNA sense strand
gggaaaagcccagagaaga

SEQ ID NO: 2639811 - RNA, 19 nt, Homo sapiens
  misc_RNA (1)...(19): siRNA sense strand
uugccagagaagugggaga

SEQ ID NO: 2639812 - RNA, 19 nt, Homo sapiens
  misc_RNA (1)...(19): siRNA sense strand
ccaaguuaaagcaacaaau

SEQ ID NO: 2639813 - RNA, 19 nt, Homo sapiens
  misc_RNA (1)...(19): siRNA sense strand
gcauccugcuggagaguua

SEQ ID NO: 2639814 - RNA, 19 nt, Homo sapiens
  misc_RNA (1)...(19): siRNA sense strand
gcgccuacgagcaacauaa

SEQ ID NO: 2639815 - RNA, 19 nt, Homo sapiens
  misc_RNA (1)...(19): siRNA sense strand
gugcaguuccuuagggacu

SEQ ID NO: 2639816 - RNA, 19 nt, Homo sapiens
  misc_RNA (1)...(19): siRNA sense strand
cagcacgccaggagcagaa

SEQ ID NO: 2639817 - RNA, 19 nt, Homo sapiens
  misc_RNA (1)...(19): siRNA sense strand
agaguuacuacgagcauga

SEQ ID NO: 2639818 - RNA, 19 nt, Homo sapiens
  misc_RNA (1)...(19): siRNA sense strand
gaugaaauccacugacaua

SEQ ID NO: 2639819 - RNA, 19 nt, Homo sapiens
  misc_RNA (1)...(19): siRNA sense strand
gcuacuggugucugagaaa

SEQ ID NO: 2639820 - RNA, 19 nt, Homo sapiens
  misc_RNA (1)...(19): siRNA sense strand
ucaaagaugaagaugggua

SEQ ID NO: 2639821 - RNA, 19 nt, Homo sapiens
  misc_RNA (1)...(19): siRNA sense strand
ggagaaggcuggcaagcga

SEQ ID NO: 2639822 - RNA, 19 nt, Homo sapiens
  misc_RNA (1)...(19): siRNA sense strand
cgagacaaggaguggaaga

SEQ ID NO: 2639823 - RNA, 19 nt, Homo sapiens
  misc_RNA (1)...(19): siRNA sense strand
ugucuaaggccaaggcuau

SEQ ID NO: 2639824 - RNA, 19 nt, Homo sapiens
  misc_RNA (1)...(19): siRNA sense strand
uccuauggccagacagaaa

SEQ ID NO: 2639825 - RNA, 19 nt, Homo sapiens
  misc_RNA (1)...(19): siRNA sense strand
gauggaugcugguuggaca

SEQ ID NO: 2639826 - RNA, 19 nt, Homo sapiens
  misc_RNA (1)...(19): siRNA sense strand
cagaugaaauccacugaca

SEQ ID NO: 2639827 - RNA, 19 nt, Homo sapiens
  misc_RNA (1)...(19): siRNA sense strand
gaguggaagauguccggaa

SEQ ID NO: 2639828 - RNA, 19 nt, Homo sapiens
  misc_RNA (1)...(19): siRNA sense strand
gggaaggaauuaaugugga

SEQ ID NO: 2639829 - RNA, 19 nt, Homo sapiens
  misc_RNA (1)...(19): siRNA sense strand
aaaccaggauacaugggaa

SEQ ID NO: 2639830 - RNA, 19 nt, Homo sapiens
  misc_RNA (1)...(19): siRNA sense strand
gggugaaugggaaggggaa

SEQ ID NO: 2639831 - RNA, 19 nt, Homo sapiens
  misc_RNA (1)...(19): siRNA sense strand
ccgacaagacagcagccaa

SEQ ID NO: 2639832 - RNA, 19 nt, Homo sapiens
  misc_RNA (1)...(19): siRNA sense strand
cgacaagacagcagccaac

SEQ ID NO: 2639833 - RNA, 19 nt, Homo sapiens
  misc_RNA (1)...(19): siRNA sense strand
uugcagaugucuaaggcca

SEQ ID NO: 2639834 - RNA, 19 nt, Homo sapiens
  misc_RNA (1)...(19): siRNA sense strand
gaauuaagcuacugguguc

SEQ ID NO: 2639835 - RNA, 19 nt, Homo sapiens
  misc_RNA (1)...(19): siRNA sense strand
gaaacuacuaaaugaggca

SEQ ID NO: 2639836 - RNA, 19 nt, Homo sapiens
  misc_RNA (1)...(19): siRNA sense strand
ccugagugguggcugguga

SEQ ID NO: 2639837 - RNA, 19 nt, Homo sapiens
  misc_RNA (1)...(19): siRNA sense strand
cagaaggagacauuggcau

SEQ ID NO: 2639838 - RNA, 19 nt, Homo sapiens
  misc_RNA (1)...(19): siRNA sense strand
ggagagguggugaaggcau

SEQ ID NO: 2639839 - RNA, 19 nt, Homo sapiens
  misc_RNA (1)...(19): siRNA sense strand
gcaugguuuccaagacaau

SEQ ID NO: 2639840 - RNA, 19 nt, Homo sapiens
  misc_RNA (1)...(19): siRNA sense strand
ggagacauguggaaacaaa

SEQ ID NO: 2639841 - RNA, 19 nt, Homo sapiens
  misc_RNA (1)...(19): siRNA sense strand
cgucauuacucuacggaga

SEQ ID NO: 2639842 - RNA, 19 nt, Homo sapiens
  misc_RNA (1)...(19): siRNA sense strand
gggcagaggacuaccacaa

SEQ ID NO: 2639843 - RNA, 19 nt, Homo sapiens
  misc_RNA (1)...(19): siRNA sense strand
ggaaagaggaagaccgcca

SEQ ID NO: 2639844 - RNA, 19 nt, Homo sapiens
  misc_RNA (1)...(19): siRNA sense strand
cccaagaggcggagguuga

SEQ ID NO: 2639845 - RNA, 19 nt, Homo sapiens
  misc_RNA (1)...(19): siRNA sense strand
aaucaaccaucaugacaaa

SEQ ID NO: 2639846 - RNA, 19 nt, Homo sapiens
  misc_RNA (1)...(19): siRNA sense strand
cguaagaggaaggugacaa

SEQ ID NO: 2639847 - RNA, 19 nt, Homo sapiens
  misc_RNA (1)...(19): siRNA sense strand
caucauuacccgaacccaa

SEQ ID NO: 2639848 - RNA, 19 nt, Homo sapiens
  misc_RNA (1)...(19): siRNA sense strand
aaaucaauggaaagaggaa

SEQ ID NO: 2639849 - RNA, 19 nt, Homo sapiens
  misc_RNA (1)...(19): siRNA sense strand
caagauaccugcugagcgu

SEQ ID NO: 2639850 - RNA, 19 nt, Homo sapiens
  misc_RNA (1)...(19): siRNA sense strand
cuaaaauccguaagaggaa

SEQ ID NO: 2639851 - RNA, 19 nt, Homo sapiens
  misc_RNA (1)...(19): siRNA sense strand
gcucuuugcaacuggguca

SEQ ID NO: 2639852 - RNA, 19 nt, Homo sapiens
  misc_RNA (1)...(19): siRNA sense strand
aucaauggaaagaggaaga

SEQ ID NO: 2639853 - RNA, 19 nt, Homo sapiens
  misc_RNA (1)...(19): siRNA sense strand
gcuaaaauccguaagagga

SEQ ID NO: 2639854 - RNA, 19 nt, Homo sapiens
  misc_RNA (1)...(19): siRNA sense strand
aaaucaaccaucaugacaa

SEQ ID NO: 2639855 - RNA, 19 nt, Homo sapiens
  misc_RNA (1)...(19): siRNA sense strand
caagacaccuuccgagcau

SEQ ID NO: 2639856 - RNA, 19 nt, Homo sapiens
  misc_RNA (1)...(19): siRNA sense strand
caucaucacccgaacccaa

SEQ ID NO: 2639857 - RNA, 19 nt, Homo sapiens
  misc_RNA (1)...(19): siRNA sense strand
caucaucacccgaacccaa

SEQ ID NO: 2639858 - RNA, 19 nt, Homo sapiens
  misc_RNA (1)...(19): siRNA sense strand
agacauuacuggaucggaa

SEQ ID NO: 2639859 - RNA, 19 nt, Homo sapiens
  misc_RNA (1)...(19): siRNA sense strand
gggaacuggaagaaacaaa

SEQ ID NO: 2639860 - RNA, 19 nt, Homo sapiens
  misc_RNA (1)...(19): siRNA sense strand
cagcaagggaacuggaaga

SEQ ID NO: 2639861 - RNA, 19 nt, Homo sapiens
  misc_RNA (1)...(19): siRNA sense strand
ccgagaugcuggcggaaaa

SEQ ID NO: 2639862 - RNA, 19 nt, Homo sapiens
  misc_RNA (1)...(19): siRNA sense strand
auagaugaacagagaacaa

SEQ ID NO: 2639863 - RNA, 19 nt, Homo sapiens
  misc_RNA (1)...(19): siRNA sense strand
aggagcaguuacaggaaau

SEQ ID NO: 2639864 - RNA, 19 nt, Homo sapiens
  misc_RNA (1)...(19): siRNA sense strand
ugacgaagcaaguggaacu

SEQ ID NO: 2639865 - RNA, 19 nt, Homo sapiens
  misc_RNA (1)...(19): siRNA sense strand
cggaaaaccugguagagga

SEQ ID NO: 2639866 - RNA, 19 nt, Homo sapiens
  misc_RNA (1)...(19): siRNA sense strand
guuacaggaaauugaguau

SEQ ID NO: 2639867 - RNA, 19 nt, Homo sapiens
  misc_RNA (1)...(19): siRNA sense strand
agaagugccaagaggaaca

SEQ ID NO: 2639868 - RNA, 19 nt, Homo sapiens
  misc_RNA (1)...(19): siRNA sense strand
ugacaauguugcaggccca

SEQ ID NO: 2639869 - RNA, 19 nt, Homo sapiens
  misc_RNA (1)...(19): siRNA sense strand
cggcagaagcgggugacua

SEQ ID NO: 2639870 - RNA, 19 nt, Homo sapiens
  misc_RNA (1)...(19): siRNA sense strand
aagaaaacuaagcaggaaa

SEQ ID NO: 2639871 - RNA, 19 nt, Homo sapiens
  misc_RNA (1)...(19): siRNA sense strand
aguuugagaugaaggagga

SEQ ID NO: 2639872 - RNA, 19 nt, Homo sapiens
  misc_RNA (1)...(19): siRNA sense strand
gccaaguggaggagcugaa

SEQ ID NO: 2639873 - RNA, 19 nt, Homo sapiens
  misc_RNA (1)...(19): siRNA sense strand
aguaugaagaguugcugaa

SEQ ID NO: 2639874 - RNA, 19 nt, Homo sapiens
  misc_RNA (1)...(19): siRNA sense strand
gcugaagucaucuggccaa

SEQ ID NO: 2639875 - RNA, 19 nt, Homo sapiens
  misc_RNA (1)...(19): siRNA sense strand
gcccugaugaagaggaaaa

SEQ ID NO: 2639876 - RNA, 19 nt, Homo sapiens
  misc_RNA (1)...(19): siRNA sense strand
gugacaucgugaagggcca

SEQ ID NO: 2639877 - RNA, 19 nt, Homo sapiens
  misc_RNA (1)...(19): siRNA sense strand
aaauagaugaacagagaac

SEQ ID NO: 2639878 - RNA, 19 nt, Homo sapiens
  misc_RNA (1)...(19): siRNA sense strand
ggcucguguuaaaggagaa

SEQ ID NO: 2639879 - RNA, 19 nt, Homo sapiens
  misc_RNA (1)...(19): siRNA sense strand
cuuuaguugcaucaagaaa

SEQ ID NO: 2639880 - RNA, 19 nt, Homo sapiens
  misc_RNA (1)...(19): siRNA sense strand
ggaaagugugaccaggaga

SEQ ID NO: 2639881 - RNA, 19 nt, Homo sapiens
  misc_RNA (1)...(19): siRNA sense strand
aggugaaguaugaagaguu

SEQ ID NO: 2639882 - RNA, 19 nt, Homo sapiens
  misc_RNA (1)...(19): siRNA sense strand
aagcguuguuuaaggagau

SEQ ID NO: 2639883 - RNA, 19 nt, Homo sapiens
  misc_RNA (1)...(19): siRNA sense strand
gggaagacauuacuggauc

SEQ ID NO: 2639884 - RNA, 19 nt, Homo sapiens
  misc_RNA (1)...(19): siRNA sense strand
aaauugaguaucugacgaa

SEQ ID NO: 2639885 - RNA, 19 nt, Homo sapiens
  misc_RNA (1)...(19): siRNA sense strand
cgcuggaacuagaggccga

SEQ ID NO: 2639886 - RNA, 19 nt, Homo sapiens
  misc_RNA (1)...(19): siRNA sense strand
agcaggaaauagaugaaca

SEQ ID NO: 2639887 - RNA, 19 nt, Homo sapiens
  misc_RNA (1)...(19): siRNA sense strand
ugguagaggaguuugagau

SEQ ID NO: 2639888 - RNA, 19 nt, Homo sapiens
  misc_RNA (1)...(19): siRNA sense strand
ggaacacagaguuggagga

SEQ ID NO: 2639889 - RNA, 19 nt, Homo sapiens
  misc_RNA (1)...(19): siRNA sense strand
cuggaagaaacaaaucaaa

SEQ ID NO: 2639890 - RNA, 19 nt, Homo sapiens
  misc_RNA (1)...(19): siRNA sense strand
gggugacuauggaggagga

SEQ ID NO: 2639891 - RNA, 19 nt, Homo sapiens
  misc_RNA (1)...(19): siRNA sense strand
caaaagauucugagccuga

SEQ ID NO: 2639892 - RNA, 19 nt, Homo sapiens
  misc_RNA (1)...(19): siRNA sense strand
acgaaguggacacgcagua

SEQ ID NO: 2639893 - RNA, 19 nt, Homo sapiens
  misc_RNA (1)...(19): siRNA sense strand
ccuacaacaccuccagaau

SEQ ID NO: 2639894 - RNA, 19 nt, Homo sapiens
  misc_RNA (1)...(19): siRNA sense strand
acagcaagucugaggacaa

SEQ ID NO: 2639895 - RNA, 19 nt, Homo sapiens
  misc_RNA (1)...(19): siRNA sense strand
augcaaauacaacgggaaa

SEQ ID NO: 2639896 - RNA, 19 nt, Homo sapiens
  misc_RNA (1)...(19): siRNA sense strand
ugucagaaacagagcaaca

SEQ ID NO: 2639897 - RNA, 19 nt, Homo sapiens
  misc_RNA (1)...(19): siRNA sense strand
cuucaagacuauuguguca

SEQ ID NO: 2639898 - RNA, 19 nt, Homo sapiens
  misc_RNA (1)...(19): siRNA sense strand
uuguaaauacugaggauga

SEQ ID NO: 2639899 - RNA, 19 nt, Homo sapiens
  misc_RNA (1)...(19): siRNA sense strand
ucguagauacacagagcaa

SEQ ID NO: 2639900 - RNA, 19 nt, Homo sapiens
  misc_RNA (1)...(19): siRNA sense strand
caaagaaaccagagagcac

SEQ ID NO: 2639901 - RNA, 19 nt, Homo sapiens
  misc_RNA (1)...(19): siRNA sense strand
guuugaagagggacagcaa

SEQ ID NO: 2639902 - RNA, 19 nt, Homo sapiens
  misc_RNA (1)...(19): siRNA sense strand
cuguuaagucugucuguaa

SEQ ID NO: 2639903 - RNA, 19 nt, Homo sapiens
  misc_RNA (1)...(19): siRNA sense strand
auuuaggccugaaggaauu

SEQ ID NO: 2639904 - RNA, 19 nt, Homo sapiens
  misc_RNA (1)...(19): siRNA sense strand
gggacaaggagacaagaga

SEQ ID NO: 2639905 - RNA, 19 nt, Homo sapiens
  misc_RNA (1)...(19): siRNA sense strand
accuaaaccacuugaaauu

SEQ ID NO: 2639906 - RNA, 19 nt, Homo sapiens
  misc_RNA (1)...(19): siRNA sense strand
uggagaaaggagugaagau

SEQ ID NO: 2639907 - RNA, 19 nt, Homo sapiens
  misc_RNA (1)...(19): siRNA sense strand
guggagaugacuggagaaa

SEQ ID NO: 2639908 - RNA, 19 nt, Homo sapiens
  misc_RNA (1)...(19): siRNA sense strand
cagcaaagcaggggaaaau

SEQ ID NO: 2639909 - RNA, 19 nt, Homo sapiens
  misc_RNA (1)...(19): siRNA sense strand
ccucauugucagaaacaga

SEQ ID NO: 2639910 - RNA, 19 nt, Homo sapiens
  misc_RNA (1)...(19): siRNA sense strand
ucucagucaaagaggaauu

SEQ ID NO: 2639911 - RNA, 19 nt, Homo sapiens
  misc_RNA (1)...(19): siRNA sense strand
gcacugggcaacaagggaa

SEQ ID NO: 2639912 - RNA, 19 nt, Homo sapiens
  misc_RNA (1)...(19): siRNA sense strand
aaaucagccuugagacaga

SEQ ID NO: 2639913 - RNA, 19 nt, Homo sapiens
  misc_RNA (1)...(19): siRNA sense strand
cuacacaaacagcagcaaa

SEQ ID NO: 2639914 - RNA, 19 nt, Homo sapiens
  misc_RNA (1)...(19): siRNA sense strand
ugagaaguguccagcguca

SEQ ID NO: 2639915 - RNA, 19 nt, Homo sapiens
  misc_RNA (1)...(19): siRNA sense strand
aauuaguagucgaguggga

SEQ ID NO: 2639916 - RNA, 19 nt, Homo sapiens
  misc_RNA (1)...(19): siRNA sense strand
cugcagugccucagcaaca

SEQ ID NO: 2639917 - RNA, 19 nt, Homo sapiens
  misc_RNA (1)...(19): siRNA sense strand
uauuuaggccugaaggaau

SEQ ID NO: 2639918 - RNA, 19 nt, Homo sapiens
  misc_RNA (1)...(19): siRNA sense strand
gcagcaaagcaggggaaaa

SEQ ID NO: 2639919 - RNA, 19 nt, Homo sapiens
  misc_RNA (1)...(19): siRNA sense strand
cuguaaaagucucucuaaa

SEQ ID NO: 2639920 - RNA, 19 nt, Homo sapiens
  misc_RNA (1)...(19): siRNA sense strand
gggaggcagcagaugacaa

SEQ ID NO: 2639921 - RNA, 19 nt, Homo sapiens
  misc_RNA (1)...(19): siRNA sense strand
auuaaaaucuuguggacca

SEQ ID NO: 2639922 - RNA, 19 nt, Homo sapiens
  misc_RNA (1)...(19): siRNA sense strand
cuguaguguaucaaggcaa

SEQ ID NO: 2639923 - RNA, 19 nt, Homo sapiens
  misc_RNA (1)...(19): siRNA sense strand
guagauacacagagcaaac

SEQ ID NO: 2639924 - RNA, 19 nt, Homo sapiens
  misc_RNA (1)...(19): siRNA sense strand
aggaauucucagucaaaga

SEQ ID NO: 2639925 - RNA, 19 nt, Homo sapiens
  misc_RNA (1)...(19): siRNA sense strand
gcaacaagggaaaagauuu

SEQ ID NO: 2639926 - RNA, 19 nt, Homo sapiens
  misc_RNA (1)...(19): siRNA sense strand
gugguuaagaggagccaga

SEQ ID NO: 2639927 - RNA, 19 nt, Homo sapiens
  misc_RNA (1)...(19): siRNA sense strand
cagaaggaaaucuuggaga

SEQ ID NO: 2639928 - RNA, 19 nt, Homo sapiens
  misc_RNA (1)...(19): siRNA sense strand
uuggagaagaugaaguauu

SEQ ID NO: 2639929 - RNA, 19 nt, Homo sapiens
  misc_RNA (1)...(19): siRNA sense strand
ucaagacuauugugucaaa

SEQ ID NO: 2639930 - RNA, 19 nt, Homo sapiens
  misc_RNA (1)...(19): siRNA sense strand
aaguauuucuugaggccca

SEQ ID NO: 2639931 - RNA, 19 nt, Homo sapiens
  misc_RNA (1)...(19): siRNA sense strand
gauacagacgaccuggaaa

SEQ ID NO: 2639932 - RNA, 19 nt, Homo sapiens
  misc_RNA (1)...(19): siRNA sense strand
aagaaaccagagagcacaa

SEQ ID NO: 2639933 - RNA, 19 nt, Homo sapiens
  misc_RNA (1)...(19): siRNA sense strand
cagccaaaugcaaauacaa

SEQ ID NO: 2639934 - RNA, 19 nt, Homo sapiens
  misc_RNA (1)...(19): siRNA sense strand
aggcucacucgcaaagaaa

SEQ ID NO: 2639935 - RNA, 19 nt, Homo sapiens
  misc_RNA (1)...(19): siRNA sense strand
gagaaaagcuugcggaagg

SEQ ID NO: 2639936 - RNA, 19 nt, Homo sapiens
  misc_RNA (1)...(19): siRNA sense strand
uggucaguguuguuggaau

SEQ ID NO: 2639937 - RNA, 19 nt, Homo sapiens
  misc_RNA (1)...(19): siRNA sense strand
ccaauaguagaaagggcau

SEQ ID NO: 2639938 - RNA, 19 nt, Homo sapiens
  misc_RNA (1)...(19): siRNA sense strand
aauaguagaaagggcauua

SEQ ID NO: 2639939 - RNA, 19 nt, Homo sapiens
  misc_RNA (1)...(19): siRNA sense strand
gguccauuugauaacaaua

SEQ ID NO: 2639940 - RNA, 19 nt, Homo sapiens
  misc_RNA (1)...(19): siRNA sense strand
gagcaggacuucagaccac

SEQ ID NO: 2639941 - RNA, 19 nt, Homo sapiens
  misc_RNA (1)...(19): siRNA sense strand
guagagagggcuccagaca

SEQ ID NO: 2639942 - RNA, 19 nt, Homo sapiens
  misc_RNA (1)...(19): siRNA sense strand
ccguggagaugacuggaga

SEQ ID NO: 2639943 - RNA, 19 nt, Homo sapiens
  misc_RNA (1)...(19): siRNA sense strand
ucauggaaggcguguucaa

SEQ ID NO: 2639944 - RNA, 19 nt, Homo sapiens
  misc_RNA (1)...(19): siRNA sense strand
cagagaaaagcuugcggaa

SEQ ID NO: 2639945 - RNA, 19 nt, Homo sapiens
  misc_RNA (1)...(19): siRNA sense strand
ccacagaagcagaagucag

SEQ ID NO: 2639946 - RNA, 19 nt, Homo sapiens
  misc_RNA (1)...(19): siRNA sense strand
gggaacaggaagaggguga

SEQ ID NO: 2639947 - RNA, 19 nt, Homo sapiens
  misc_RNA (1)...(19): siRNA sense strand
gggcaaauaaccauggaga

SEQ ID NO: 2639948 - RNA, 19 nt, Homo sapiens
  misc_RNA (1)...(19): siRNA sense strand
uggaaguugggaugggaaa

SEQ ID NO: 2639949 - RNA, 19 nt, Homo sapiens
  misc_RNA (1)...(19): siRNA sense strand
acagaaaugugaugcccaa

SEQ ID NO: 2639950 - RNA, 19 nt, Homo sapiens
  misc_RNA (1)...(19): siRNA sense strand
aguuggagucccagaggaa

SEQ ID NO: 2639951 - RNA, 19 nt, Homo sapiens
  misc_RNA (1)...(19): siRNA sense strand
aggaaaagcggaagcgaga

SEQ ID NO: 2639952 - RNA, 19 nt, Homo sapiens
  misc_RNA (1)...(19): siRNA sense strand
gggcugaguuggaguccca

SEQ ID NO: 2639953 - RNA, 19 nt, Homo sapiens
  misc_RNA (1)...(19): siRNA sense strand
gggagaagaagcugccaca

SEQ ID NO: 2639954 - RNA, 19 nt, Homo sapiens
  misc_RNA (1)...(19): siRNA sense strand
gaaagauggaaguugggau

SEQ ID NO: 2639955 - RNA, 19 nt, Homo sapiens
  misc_RNA (1)...(19): siRNA sense strand
accgaaggcaggaggauau

SEQ ID NO: 2639956 - RNA, 19 nt, Homo sapiens
  misc_RNA (1)...(19): siRNA sense strand
ccuuugaggugcuggccuu

SEQ ID NO: 2639957 - RNA, 19 nt, Homo sapiens
  misc_RNA (1)...(19): siRNA sense strand
gcgagaugaucacggcuca

SEQ ID NO: 2639958 - RNA, 19 nt, Homo sapiens
  misc_RNA (1)...(19): siRNA sense strand
ccucaucucuugaagcaga

SEQ ID NO: 2639959 - RNA, 19 nt, Homo sapiens
  misc_RNA (1)...(19): siRNA sense strand
auccacagacugaggaaau

SEQ ID NO: 2639960 - RNA, 19 nt, Homo sapiens
  misc_RNA (1)...(19): siRNA sense strand
ccgacuauggggagaagaa

SEQ ID NO: 2639961 - RNA, 19 nt, Homo sapiens
  misc_RNA (1)...(19): siRNA sense strand
gauuaagggugucgaggag

SEQ ID NO: 2639962 - RNA, 19 nt, Homo sapiens
  misc_RNA (1)...(19): siRNA sense strand
ggaacuacgaaaagggguu

SEQ ID NO: 2639963 - RNA, 19 nt, Homo sapiens
  misc_RNA (1)...(19): siRNA sense strand
acuccauggccaaggacau

SEQ ID NO: 2639964 - RNA, 19 nt, Homo sapiens
  misc_RNA (1)...(19): siRNA sense strand
ggauaaaggccuacggcau

SEQ ID NO: 2639965 - RNA, 19 nt, Homo sapiens
  misc_RNA (1)...(19): siRNA sense strand
cugcaaagcggaaggacaa

SEQ ID NO: 2639966 - RNA, 19 nt, Homo sapiens
  misc_RNA (1)...(19): siRNA sense strand
ugucccaguuagaggaaua

SEQ ID NO: 2639967 - RNA, 19 nt, Homo sapiens
  misc_RNA (1)...(19): siRNA sense strand
gccuggaaguggugggcaa

SEQ ID NO: 2639968 - RNA, 19 nt, Homo sapiens
  misc_RNA (1)...(19): siRNA sense strand
uaucagacacagaggacaa

SEQ ID NO: 2639969 - RNA, 19 nt, Homo sapiens
  misc_RNA (1)...(19): siRNA sense strand
aaacauuagcggaugcaaa

SEQ ID NO: 2639970 - RNA, 19 nt, Homo sapiens
  misc_RNA (1)...(19): siRNA sense strand
cauaaaagggaaaggaauu

SEQ ID NO: 2639971 - RNA, 19 nt, Homo sapiens
  misc_RNA (1)...(19): siRNA sense strand
ccauggaggaugagcauau

SEQ ID NO: 2639972 - RNA, 19 nt, Homo sapiens
  misc_RNA (1)...(19): siRNA sense strand
gugauggagcugagaagaa

SEQ ID NO: 2639973 - RNA, 19 nt, Homo sapiens
  misc_RNA (1)...(19): siRNA sense strand
cuacaauaaaucucggaua

SEQ ID NO: 2639974 - RNA, 19 nt, Homo sapiens
  misc_RNA (1)...(19): siRNA sense strand
aggaaaugugucuggcaaa

SEQ ID NO: 2639975 - RNA, 19 nt, Homo sapiens
  misc_RNA (1)...(19): siRNA sense strand
cagcagaggaaccggauau

SEQ ID NO: 2639976 - RNA, 19 nt, Homo sapiens
  misc_RNA (1)...(19): siRNA sense strand
cugaguacccagaggaaga

SEQ ID NO: 2639977 - RNA, 19 nt, Homo sapiens
  misc_RNA (1)...(19): siRNA sense strand
cgagagggcaggauggcua

SEQ ID NO: 2639978 - RNA, 19 nt, Homo sapiens
  misc_RNA (1)...(19): siRNA sense strand
acuaauugcaggaaagaca

SEQ ID NO: 2639979 - RNA, 19 nt, Homo sapiens
  misc_RNA (1)...(19): siRNA sense strand
cagaggacaaacagagaau

SEQ ID NO: 2639980 - RNA, 19 nt, Homo sapiens
  misc_RNA (1)...(19): siRNA sense strand
aaucauuaccaacgcgaaa

SEQ ID NO: 2639981 - RNA, 19 nt, Homo sapiens
  misc_RNA (1)...(19): siRNA sense strand
ccuggaacuuaguguaaau

SEQ ID NO: 2639982 - RNA, 19 nt, Homo sapiens
  misc_RNA (1)...(19): siRNA sense strand
gaacgagaagagcgagcaa

SEQ ID NO: 2639983 - RNA, 19 nt, Homo sapiens
  misc_RNA (1)...(19): siRNA sense strand
cuucaagcagcguggacaa

SEQ ID NO: 2639984 - RNA, 19 nt, Homo sapiens
  misc_RNA (1)...(19): siRNA sense strand
gcaaguuagacaaaggaga

SEQ ID NO: 2639985 - RNA, 19 nt, Homo sapiens
  misc_RNA (1)...(19): siRNA sense strand
gcgacuggacucagaaaga

SEQ ID NO: 2639986 - RNA, 19 nt, Homo sapiens
  misc_RNA (1)...(19): siRNA sense strand
agaagaacgagaagagcga

SEQ ID NO: 2639987 - RNA, 19 nt, Homo sapiens
  misc_RNA (1)...(19): siRNA sense strand
guccagaugaugaaugaaa

SEQ ID NO: 2639988 - RNA, 19 nt, Homo sapiens
  misc_RNA (1)...(19): siRNA sense strand
augagaaacaugaugagua

SEQ ID NO: 2639989 - RNA, 19 nt, Homo sapiens
  misc_RNA (1)...(19): siRNA sense strand
ggagcaaguaucagacaca

SEQ ID NO: 2639990 - RNA, 19 nt, Homo sapiens
  misc_RNA (1)...(19): siRNA sense strand
agcuuuacgucaacagaaa

SEQ ID NO: 2639991 - RNA, 19 nt, Homo sapiens
  misc_RNA (1)...(19): siRNA sense strand
aaggaaaugugucuggcaa

SEQ ID NO: 2639992 - RNA, 19 nt, Homo sapiens
  misc_RNA (1)...(19): siRNA sense strand
gcuucuggaacuacaauaa

SEQ ID NO: 2639993 - RNA, 19 nt, Homo sapiens
  misc_RNA (1)...(19): siRNA sense strand
gaagaagccuuaagacgca

SEQ ID NO: 2639994 - RNA, 19 nt, Homo sapiens
  misc_RNA (1)...(19): siRNA sense strand
gagaccgaggccagggaua

SEQ ID NO: 2639995 - RNA, 19 nt, Homo sapiens
  misc_RNA (1)...(19): siRNA sense strand
cagaaggaccaccagcaaa

SEQ ID NO: 2639996 - RNA, 19 nt, Homo sapiens
  misc_RNA (1)...(19): siRNA sense strand
agaccgaggccagggauaa

SEQ ID NO: 2639997 - RNA, 19 nt, Homo sapiens
  misc_RNA (1)...(19): siRNA sense strand
cagacuuugaugagaaaca

SEQ ID NO: 2639998 - RNA, 19 nt, Homo sapiens
  misc_RNA (1)...(19): siRNA sense strand
gaaagauguucacggggaa

SEQ ID NO: 2639999 - RNA, 19 nt, Homo sapiens
  misc_RNA (1)...(19): siRNA sense strand
cagacaagcucaucgacca

SEQ ID NO: 2640000 - RNA, 19 nt, Homo sapiens
  misc_RNA (1)...(19): siRNA sense strand
ucauaaaagggaaaggaau

SEQ ID NO: 2640001 - RNA, 19 nt, Homo sapiens
  misc_RNA (1)...(19): siRNA sense strand
ugaacaggacccaggauga

SEQ ID NO: 2640002 - RNA, 19 nt, Homo sapiens
  misc_RNA (1)...(19): siRNA sense strand
uggacagccugcaggauga

SEQ ID NO: 2640003 - RNA, 19 nt, Homo sapiens
  misc_RNA (1)...(19): siRNA sense strand
acuguggaauuaugcgaaa

SEQ ID NO: 2640004 - RNA, 19 nt, Homo sapiens
  misc_RNA (1)...(19): siRNA sense strand
aauugaggcuggagcacuu

SEQ ID NO: 2640005 - RNA, 19 nt, Homo sapiens
  misc_RNA (1)...(19): siRNA sense strand
guuucgagaagcugaagaa

SEQ ID NO: 2640006 - RNA, 19 nt, Homo sapiens
  misc_RNA (1)...(19): siRNA sense strand
cggaauuacuggacagcug

SEQ ID NO: 2640007 - RNA, 19 nt, Homo sapiens
  misc_RNA (1)...(19): siRNA sense strand
uuuaccagccuaugggaaa

SEQ ID NO: 2640008 - RNA, 19 nt, Homo sapiens
  misc_RNA (1)...(19): siRNA sense strand
agacaagcucaucgaccaa

SEQ ID NO: 2640009 - RNA, 19 nt, Homo sapiens
  misc_RNA (1)...(19): siRNA sense strand
gugccaauucggagcugaa

SEQ ID NO: 2640010 - RNA, 19 nt, Homo sapiens
  misc_RNA (1)...(19): siRNA sense strand
agaaggaccaccagcaaaa

SEQ ID NO: 2640011 - RNA, 19 nt, Homo sapiens
  misc_RNA (1)...(19): siRNA sense strand
aaacagagaaugagggcag

SEQ ID NO: 2640012 - RNA, 19 nt, Homo sapiens
  misc_RNA (1)...(19): siRNA sense strand
gaaugagggcagacgagau

SEQ ID NO: 2640013 - RNA, 19 nt, Homo sapiens
  misc_RNA (1)...(19): siRNA sense strand
guaugacgagcgaggagaa

SEQ ID NO: 2640014 - RNA, 19 nt, Homo sapiens
  misc_RNA (1)...(19): siRNA sense strand
caaaagucauaaaagggaa

SEQ ID NO: 2640015 - RNA, 19 nt, Homo sapiens
  misc_RNA (1)...(19): siRNA sense strand
gaagcagacaacagcagaa

SEQ ID NO: 2640016 - RNA, 19 nt, Homo sapiens
  misc_RNA (1)...(19): siRNA sense strand
acacgauuauggacgaaga

SEQ ID NO: 2640017 - RNA, 19 nt, Homo sapiens
  misc_RNA (1)...(19): siRNA sense strand
cgauuauggacgaagaacu

SEQ ID NO: 2640018 - RNA, 19 nt, Homo sapiens
  misc_RNA (1)...(19): siRNA sense strand
ggaacaggagacagaagga

SEQ ID NO: 2640019 - RNA, 19 nt, Homo sapiens
  misc_RNA (1)...(19): siRNA sense strand
caauaaaucucccgaggac

SEQ ID NO: 2640020 - RNA, 19 nt, Homo sapiens
  misc_RNA (1)...(19): siRNA sense strand
gcugagaagaagccuggaa

SEQ ID NO: 2640021 - RNA, 19 nt, Homo sapiens
  misc_RNA (1)...(19): siRNA sense strand
augaucaaacuguggaauu

SEQ ID NO: 2640022 - RNA, 19 nt, Homo sapiens
  misc_RNA (1)...(19): siRNA sense strand
ugaaagaaaacgugagaua

SEQ ID NO: 2640023 - RNA, 19 nt, Homo sapiens
  misc_RNA (1)...(19): siRNA sense strand
ggaaggaggaguugcggaa

SEQ ID NO: 2640024 - RNA, 19 nt, Homo sapiens
  misc_RNA (1)...(19): siRNA sense strand
cagaaaaucaccaaggaua

SEQ ID NO: 2640025 - RNA, 19 nt, Homo sapiens
  misc_RNA (1)...(19): siRNA sense strand
gaugagagcuauaucgaga

SEQ ID NO: 2640026 - RNA, 19 nt, Homo sapiens
  misc_RNA (1)...(19): siRNA sense strand
gcaaauaggagccuggaga

SEQ ID NO: 2640027 - RNA, 19 nt, Homo sapiens
  misc_RNA (1)...(19): siRNA sense strand
agaaaaucaccaaggauaa

SEQ ID NO: 2640028 - RNA, 19 nt, Homo sapiens
  misc_RNA (1)...(19): siRNA sense strand
ucucaggauaagauggaaa

SEQ ID NO: 2640029 - RNA, 19 nt, Homo sapiens
  misc_RNA (1)...(19): siRNA sense strand
cugcaaaguuauuguugau

SEQ ID NO: 2640030 - RNA, 19 nt, Homo sapiens
  misc_RNA (1)...(19): siRNA sense strand
gcagacagugcuugggcua

SEQ ID NO: 2640031 - RNA, 19 nt, Homo sapiens
  misc_RNA (1)...(19): siRNA sense strand
cugaggagcagauggagaa

SEQ ID NO: 2640032 - RNA, 19 nt, Homo sapiens
  misc_RNA (1)...(19): siRNA sense strand
agauagaggagcuucuuaa

SEQ ID NO: 2640033 - RNA, 19 nt, Homo sapiens
  misc_RNA (1)...(19): siRNA sense strand
gcugaggagcagauggaga

SEQ ID NO: 2640034 - RNA, 19 nt, Homo sapiens
  misc_RNA (1)...(19): siRNA sense strand
ccuaagaagaaucgagucu

SEQ ID NO: 2640035 - RNA, 19 nt, Homo sapiens
  misc_RNA (1)...(19): siRNA sense strand
uggaauuugaggaguauuu

SEQ ID NO: 2640036 - RNA, 19 nt, Homo sapiens
  misc_RNA (1)...(19): siRNA sense strand
uggaaagguuggucaaagu

SEQ ID NO: 2640037 - RNA, 19 nt, Homo sapiens
  misc_RNA (1)...(19): siRNA sense strand
agaagauauuguggagaau

SEQ ID NO: 2640038 - RNA, 19 nt, Homo sapiens
  misc_RNA (1)...(19): siRNA sense strand
gugcauggagcaaguguau

SEQ ID NO: 2640039 - RNA, 19 nt, Homo sapiens
  misc_RNA (1)...(19): siRNA sense strand
cugaucauguugaagacaa

SEQ ID NO: 2640040 - RNA, 19 nt, Homo sapiens
  misc_RNA (1)...(19): siRNA sense strand
aaagaaaacgugagauaga

SEQ ID NO: 2640041 - RNA, 19 nt, Homo sapiens
  misc_RNA (1)...(19): siRNA sense strand
ggacuaucugacaaguaaa

SEQ ID NO: 2640042 - RNA, 19 nt, Homo sapiens
  misc_RNA (1)...(19): siRNA sense strand
cauugaaacugcugugcca

SEQ ID NO: 2640043 - RNA, 19 nt, Homo sapiens
  misc_RNA (1)...(19): siRNA sense strand
ccaagaacugugugccuau

SEQ ID NO: 2640044 - RNA, 19 nt, Homo sapiens
  misc_RNA (1)...(19): siRNA sense strand
agacggaguggcagcggua

SEQ ID NO: 2640045 - RNA, 19 nt, Homo sapiens
  misc_RNA (1)...(19): siRNA sense strand
ucgauaaggcccagguguu

SEQ ID NO: 2640046 - RNA, 19 nt, Homo sapiens
  misc_RNA (1)...(19): siRNA sense strand
ugauguggagagugaguau

SEQ ID NO: 2640047 - RNA, 19 nt, Homo sapiens
  misc_RNA (1)...(19): siRNA sense strand
aagcccagcuggaggaguu

SEQ ID NO: 2640048 - RNA, 19 nt, Homo sapiens
  misc_RNA (1)...(19): siRNA sense strand
gguacuuacggcagagcuu

SEQ ID NO: 2640049 - RNA, 19 nt, Homo sapiens
  misc_RNA (1)...(19): siRNA sense strand
ccaaagugauggagcuccu

SEQ ID NO: 2640050 - RNA, 19 nt, Homo sapiens
  misc_RNA (1)...(19): siRNA sense strand
guuucgaggccuuagagua

SEQ ID NO: 2640051 - RNA, 19 nt, Homo sapiens
  misc_RNA (1)...(19): siRNA sense strand
gggucaggacacagguuga

SEQ ID NO: 2640052 - RNA, 19 nt, Homo sapiens
  misc_RNA (1)...(19): siRNA sense strand
ugauauuggacgucaggau

SEQ ID NO: 2640053 - RNA, 19 nt, Homo sapiens
  misc_RNA (1)...(19): siRNA sense strand
agcaaaucauacagacuuu

SEQ ID NO: 2640054 - RNA, 19 nt, Homo sapiens
  misc_RNA (1)...(19): siRNA sense strand
aaauaggagccuggagauu

SEQ ID NO: 2640055 - RNA, 19 nt, Homo sapiens
  misc_RNA (1)...(19): siRNA sense strand
uuguacaaccaaugaaaga

SEQ ID NO: 2640056 - RNA, 19 nt, Homo sapiens
  misc_RNA (1)...(19): siRNA sense strand
agcuauaucgagaaguuua

SEQ ID NO: 2640057 - RNA, 19 nt, Homo sapiens
  misc_RNA (1)...(19): siRNA sense strand
aagcagaagcuguaccaca

SEQ ID NO: 2640058 - RNA, 19 nt, Homo sapiens
  misc_RNA (1)...(19): siRNA sense strand
ggaagcugcuacuggacca

SEQ ID NO: 2640059 - RNA, 19 nt, Homo sapiens
  misc_RNA (1)...(19): siRNA sense strand
cugaguaaccuguugcaga

SEQ ID NO: 2640060 - RNA, 19 nt, Homo sapiens
  misc_RNA (1)...(19): siRNA sense strand
cagagguguugaaucgaau

SEQ ID NO: 2640061 - RNA, 19 nt, Homo sapiens
  misc_RNA (1)...(19): siRNA sense strand
cagcugugaugguguggau

SEQ ID NO: 2640062 - RNA, 19 nt, Homo sapiens
  misc_RNA (1)...(19): siRNA sense strand
acaaggaagcaguucucaa

SEQ ID NO: 2640063 - RNA, 19 nt, Homo sapiens
  misc_RNA (1)...(19): siRNA sense strand
augaugagacucuggauga

SEQ ID NO: 2640064 - RNA, 19 nt, Homo sapiens
  misc_RNA (1)...(19): siRNA sense strand
uccuugauguggagaguga

SEQ ID NO: 2640065 - RNA, 19 nt, Homo sapiens
  misc_RNA (1)...(19): siRNA sense strand
agaacugugucucggguca

SEQ ID NO: 2640066 - RNA, 19 nt, Homo sapiens
  misc_RNA (1)...(19): siRNA sense strand
gugaugguguggaugccaa

SEQ ID NO: 2640067 - RNA, 19 nt, Homo sapiens
  misc_RNA (1)...(19): siRNA sense strand
ggcuagaagagcucgauga

SEQ ID NO: 2640068 - RNA, 19 nt, Homo sapiens
  misc_RNA (1)...(19): siRNA sense strand
caaauaggagccuggagau

SEQ ID NO: 2640069 - RNA, 19 nt, Homo sapiens
  misc_RNA (1)...(19): siRNA sense strand
gugccaucaugcaggcuuu

SEQ ID NO: 2640070 - RNA, 19 nt, Homo sapiens
  misc_RNA (1)...(19): siRNA sense strand
cagucgacuuugauggcuu

SEQ ID NO: 2640071 - RNA, 19 nt, Homo sapiens
  misc_RNA (1)...(19): siRNA sense strand
ugaaagaaaacgugagaua

SEQ ID NO: 2640072 - RNA, 19 nt, Homo sapiens
  misc_RNA (1)...(19): siRNA sense strand
ggaaggaggaguugcggaa

SEQ ID NO: 2640073 - RNA, 19 nt, Homo sapiens
  misc_RNA (1)...(19): siRNA sense strand
cagaaaaucaccaaggaua

SEQ ID NO: 2640074 - RNA, 19 nt, Homo sapiens
  misc_RNA (1)...(19): siRNA sense strand
gaugagagcuauaucgaga

SEQ ID NO: 2640075 - RNA, 19 nt, Homo sapiens
  misc_RNA (1)...(19): siRNA sense strand
gcaaauaggagccuggaga

SEQ ID NO: 2640076 - RNA, 19 nt, Homo sapiens
  misc_RNA (1)...(19): siRNA sense strand
agaaaaucaccaaggauaa

SEQ ID NO: 2640077 - RNA, 19 nt, Homo sapiens
  misc_RNA (1)...(19): siRNA sense strand
ucucaggauaagauggaaa

SEQ ID NO: 2640078 - RNA, 19 nt, Homo sapiens
  misc_RNA (1)...(19): siRNA sense strand
cugcaaaguuauuguugau

SEQ ID NO: 2640079 - RNA, 19 nt, Homo sapiens
  misc_RNA (1)...(19): siRNA sense strand
gcagacagugcuugggcua

SEQ ID NO: 2640080 - RNA, 19 nt, Homo sapiens
  misc_RNA (1)...(19): siRNA sense strand
cugaggagcagauggagaa

SEQ ID NO: 2640081 - RNA, 19 nt, Homo sapiens
  misc_RNA (1)...(19): siRNA sense strand
agauagaggagcuucuuaa

SEQ ID NO: 2640082 - RNA, 19 nt, Homo sapiens
  misc_RNA (1)...(19): siRNA sense strand
gcugaggagcagauggaga

SEQ ID NO: 2640083 - RNA, 19 nt, Homo sapiens
  misc_RNA (1)...(19): siRNA sense strand
ccuaagaagaaucgagucu

SEQ ID NO: 2640084 - RNA, 19 nt, Homo sapiens
  misc_RNA (1)...(19): siRNA sense strand
uggaauuugaggaguauuu

SEQ ID NO: 2640085 - RNA, 19 nt, Homo sapiens
  misc_RNA (1)...(19): siRNA sense strand
uggaaagguuggucaaagu

SEQ ID NO: 2640086 - RNA, 19 nt, Homo sapiens
  misc_RNA (1)...(19): siRNA sense strand
agaagauauuguggagaau

SEQ ID NO: 2640087 - RNA, 19 nt, Homo sapiens
  misc_RNA (1)...(19): siRNA sense strand
gugcauggagcaaguguau

SEQ ID NO: 2640088 - RNA, 19 nt, Homo sapiens
  misc_RNA (1)...(19): siRNA sense strand
cugaucauguugaagacaa

SEQ ID NO: 2640089 - RNA, 19 nt, Homo sapiens
  misc_RNA (1)...(19): siRNA sense strand
aaagaaaacgugagauaga

SEQ ID NO: 2640090 - RNA, 19 nt, Homo sapiens
  misc_RNA (1)...(19): siRNA sense strand
ggacuaucugacaaguaaa

SEQ ID NO: 2640091 - RNA, 19 nt, Homo sapiens
  misc_RNA (1)...(19): siRNA sense strand
cauugaaacugcugugcca

SEQ ID NO: 2640092 - RNA, 19 nt, Homo sapiens
  misc_RNA (1)...(19): siRNA sense strand
ccaagaacugugugccuau

SEQ ID NO: 2640093 - RNA, 19 nt, Homo sapiens
  misc_RNA (1)...(19): siRNA sense strand
agacggaguggcagcggua

SEQ ID NO: 2640094 - RNA, 19 nt, Homo sapiens
  misc_RNA (1)...(19): siRNA sense strand
ucgauaaggcccagguguu

SEQ ID NO: 2640095 - RNA, 19 nt, Homo sapiens
  misc_RNA (1)...(19): siRNA sense strand
ugauguggagagugaguau

SEQ ID NO: 2640096 - RNA, 19 nt, Homo sapiens
  misc_RNA (1)...(19): siRNA sense strand
aagcccagcuggaggaguu

SEQ ID NO: 2640097 - RNA, 19 nt, Homo sapiens
  misc_RNA (1)...(19): siRNA sense strand
gguacuuacggcagagcuu

SEQ ID NO: 2640098 - RNA, 19 nt, Homo sapiens
  misc_RNA (1)...(19): siRNA sense strand
ccaaagugauggagcuccu

SEQ ID NO: 2640099 - RNA, 19 nt, Homo sapiens
  misc_RNA (1)...(19): siRNA sense strand
guuucgaggccuuagagua

SEQ ID NO: 2640100 - RNA, 19 nt, Homo sapiens
  misc_RNA (1)...(19): siRNA sense strand
gggucaggacacagguuga

SEQ ID NO: 2640101 - RNA, 19 nt, Homo sapiens
  misc_RNA (1)...(19): siRNA sense strand
ugauauuggacgucaggau

SEQ ID NO: 2640102 - RNA, 19 nt, Homo sapiens
  misc_RNA (1)...(19): siRNA sense strand
agcaaaucauacagacuuu

SEQ ID NO: 2640103 - RNA, 19 nt, Homo sapiens
  misc_RNA (1)...(19): siRNA sense strand
aaauaggagccuggagauu

SEQ ID NO: 2640104 - RNA, 19 nt, Homo sapiens
  misc_RNA (1)...(19): siRNA sense strand
uuguacaaccaaugaaaga

SEQ ID NO: 2640105 - RNA, 19 nt, Homo sapiens
  misc_RNA (1)...(19): siRNA sense strand
agcuauaucgagaaguuua

SEQ ID NO: 2640106 - RNA, 19 nt, Homo sapiens
  misc_RNA (1)...(19): siRNA sense strand
aagcagaagcuguaccaca

SEQ ID NO: 2640107 - RNA, 19 nt, Homo sapiens
  misc_RNA (1)...(19): siRNA sense strand
ggaagcugcuacuggacca

SEQ ID NO: 2640108 - RNA, 19 nt, Homo sapiens
  misc_RNA (1)...(19): siRNA sense strand
cugaguaaccuguugcaga

SEQ ID NO: 2640109 - RNA, 19 nt, Homo sapiens
  misc_RNA (1)...(19): siRNA sense strand
cagagguguugaaucgaau

SEQ ID NO: 2640110 - RNA, 19 nt, Homo sapiens
  misc_RNA (1)...(19): siRNA sense strand
cagcugugaugguguggau

SEQ ID NO: 2640111 - RNA, 19 nt, Homo sapiens
  misc_RNA (1)...(19): siRNA sense strand
acaaggaagcaguucucaa

SEQ ID NO: 2640112 - RNA, 19 nt, Homo sapiens
  misc_RNA (1)...(19): siRNA sense strand
augaugagacucuggauga

SEQ ID NO: 2640113 - RNA, 19 nt, Homo sapiens
  misc_RNA (1)...(19): siRNA sense strand
uccuugauguggagaguga

SEQ ID NO: 2640114 - RNA, 19 nt, Homo sapiens
  misc_RNA (1)...(19): siRNA sense strand
agaacugugucucggguca

SEQ ID NO: 2640115 - RNA, 19 nt, Homo sapiens
  misc_RNA (1)...(19): siRNA sense strand
gugaugguguggaugccaa

SEQ ID NO: 2640116 - RNA, 19 nt, Homo sapiens
  misc_RNA (1)...(19): siRNA sense strand
ggcuagaagagcucgauga

SEQ ID NO: 2640117 - RNA, 19 nt, Homo sapiens
  misc_RNA (1)...(19): siRNA sense strand
caaauaggagccuggagau

SEQ ID NO: 2640118 - RNA, 19 nt, Homo sapiens
  misc_RNA (1)...(19): siRNA sense strand
gugccaucaugcaggcuuu

SEQ ID NO: 2640119 - RNA, 19 nt, Homo sapiens
  misc_RNA (1)...(19): siRNA sense strand
cagucgacuuugauggcuu

SEQ ID NO: 2640120 - RNA, 19 nt, Homo sapiens
  misc_RNA (1)...(19): siRNA sense strand
guuugaaggaagugaauua

SEQ ID NO: 2640121 - RNA, 19 nt, Homo sapiens
  misc_RNA (1)...(19): siRNA sense strand
ugacagaagugguucggaa

SEQ ID NO: 2640122 - RNA, 19 nt, Homo sapiens
  misc_RNA (1)...(19): siRNA sense strand
ugauaagagcaguuugaaa

SEQ ID NO: 2640123 - RNA, 19 nt, Homo sapiens
  misc_RNA (1)...(19): siRNA sense strand
gaagaacagaagaggaaaa

SEQ ID NO: 2640124 - RNA, 19 nt, Homo sapiens
  misc_RNA (1)...(19): siRNA sense strand
cagaagaggaaaauggaaa

SEQ ID NO: 2640125 - RNA, 19 nt, Homo sapiens
  misc_RNA (1)...(19): siRNA sense strand
gaguauaagagcaugaaga

SEQ ID NO: 2640126 - RNA, 19 nt, Homo sapiens
  misc_RNA (1)...(19): siRNA sense strand
caggaaaguuugaaggaag

SEQ ID NO: 2640127 - RNA, 19 nt, Homo sapiens
  misc_RNA (1)...(19): siRNA sense strand
gaggagaacucgaggcuuc

SEQ ID NO: 2640128 - RNA, 19 nt, Homo sapiens
  misc_RNA (1)...(19): siRNA sense strand
gaacaaggucauauggcuu

SEQ ID NO: 2640129 - RNA, 19 nt, Homo sapiens
  misc_RNA (1)...(19): siRNA sense strand
uagaaggaccggagagcuu

SEQ ID NO: 2640130 - RNA, 19 nt, Homo sapiens
  misc_RNA (1)...(19): siRNA sense strand
cgaagaggaaagagaagga

SEQ ID NO: 2640131 - RNA, 19 nt, Homo sapiens
  misc_RNA (1)...(19): siRNA sense strand
gcaaagauauguaggcuug

SEQ ID NO: 2640132 - RNA, 19 nt, Homo sapiens
  misc_RNA (1)...(19): siRNA sense strand
cguuagcugaaaugggaaa

SEQ ID NO: 2640133 - RNA, 19 nt, Homo sapiens
  misc_RNA (1)...(19): siRNA sense strand
ucggaaaggcauucaggaa

SEQ ID NO: 2640134 - RNA, 19 nt, Homo sapiens
  misc_RNA (1)...(19): siRNA sense strand
acuccagggcagugggcaa

SEQ ID NO: 2640135 - RNA, 19 nt, Homo sapiens
  misc_RNA (1)...(19): siRNA sense strand
aggaaaguuugaaggaagu

SEQ ID NO: 2640136 - RNA, 19 nt, Homo sapiens
  misc_RNA (1)...(19): siRNA sense strand
uaaagaugauauagagcga

SEQ ID NO: 2640137 - RNA, 19 nt, Homo sapiens
  misc_RNA (1)...(19): siRNA sense strand
ggggagaggauguggauca

SEQ ID NO: 2640138 - RNA, 19 nt, Homo sapiens
  misc_RNA (1)...(19): siRNA sense strand
cagugaagaugcuggagga

SEQ ID NO: 2640139 - RNA, 19 nt, Homo sapiens
  misc_RNA (1)...(19): siRNA sense strand
acucgaggcuucuggaaaa

SEQ ID NO: 2640140 - RNA, 19 nt, Homo sapiens
  misc_RNA (1)...(19): siRNA sense strand
cccgggagauagaggagaa

SEQ ID NO: 2640141 - RNA, 19 nt, Homo sapiens
  misc_RNA (1)...(19): siRNA sense strand
gcaggaaaguuugaaggaa

SEQ ID NO: 2640142 - RNA, 19 nt, Homo sapiens
  misc_RNA (1)...(19): siRNA sense strand
ggacagucagagaagaaca

SEQ ID NO: 2640143 - RNA, 19 nt, Homo sapiens
  misc_RNA (1)...(19): siRNA sense strand
agaggaaagagaaggacuu

SEQ ID NO: 2640144 - RNA, 19 nt, Homo sapiens
  misc_RNA (1)...(19): siRNA sense strand
gacagaagugguucggaaa

SEQ ID NO: 2640145 - RNA, 19 nt, Homo sapiens
  misc_RNA (1)...(19): siRNA sense strand
uuacagaagggaagaacuu

SEQ ID NO: 2640146 - RNA, 19 nt, Homo sapiens
  misc_RNA (1)...(19): siRNA sense strand
ggaagugaauuacaucaaa

SEQ ID NO: 2640147 - RNA, 19 nt, Homo sapiens
  misc_RNA (1)...(19): siRNA sense strand
cugaagaaguuaaaugaac

SEQ ID NO: 2640148 - RNA, 19 nt, Homo sapiens
  misc_RNA (1)...(19): siRNA sense strand
gcaggaaguggaagcaaca

SEQ ID NO: 2640149 - RNA, 19 nt, Homo sapiens
  misc_RNA (1)...(19): siRNA sense strand
gcauauggcuucaugugga

SEQ ID NO: 2640150 - RNA, 19 nt, Homo sapiens
  misc_RNA (1)...(19): siRNA sense strand
aggaagugaauuacaucaa

SEQ ID NO: 2640151 - RNA, 19 nt, Homo sapiens
  misc_RNA (1)...(19): siRNA sense strand
augcuggacuccugaagaa

SEQ ID NO: 2640152 - RNA, 19 nt, Homo sapiens
  misc_RNA (1)...(19): siRNA sense strand
guucaagcaggaaguggaa

SEQ ID NO: 2640153 - RNA, 19 nt, Homo sapiens
  misc_RNA (1)...(19): siRNA sense strand
ugaacaugcuaaugaugau

SEQ ID NO: 2640154 - RNA, 19 nt, Homo sapiens
  misc_RNA (1)...(19): siRNA sense strand
cggagauauuccaggccca

SEQ ID NO: 2640155 - RNA, 19 nt, Homo sapiens
  misc_RNA (1)...(19): siRNA sense strand
ccagcagcacugagggaca

SEQ ID NO: 2640156 - RNA, 19 nt, Homo sapiens
  misc_RNA (1)...(19): siRNA sense strand
ccuuauggcuaugcagaau

SEQ ID NO: 2640157 - RNA, 19 nt, Homo sapiens
  misc_RNA (1)...(19): siRNA sense strand
ggguuuguggagaggauca

SEQ ID NO: 2640158 - RNA, 19 nt, Homo sapiens
  misc_RNA (1)...(19): siRNA sense strand
ccugaguauaagagcauga

SEQ ID NO: 2640159 - RNA, 19 nt, Homo sapiens
  misc_RNA (1)...(19): siRNA sense strand
gggccaauaccuuuguaau

SEQ ID NO: 2640160 - RNA, 19 nt, Homo sapiens
  misc_RNA (1)...(19): siRNA sense strand
gccaaaugugauagcauga

SEQ ID NO: 2640161 - RNA, 19 nt, Homo sapiens
  misc_RNA (1)...(19): siRNA sense strand
ugaagaugcuggaggacag

SEQ ID NO: 2640162 - RNA, 19 nt, Homo sapiens
  misc_RNA (1)...(19): siRNA sense strand
gggagauagaggagaacuc

SEQ ID NO: 2640163 - RNA, 19 nt, Homo sapiens
  misc_RNA (1)...(19): siRNA sense strand
gaaagaacucugugagcag

SEQ ID NO: 2640164 - RNA, 19 nt, Homo sapiens
  misc_RNA (1)...(19): siRNA sense strand
cagccaaaugugauagcau

SEQ ID NO: 2640165 - RNA, 19 nt, Homo sapiens
  misc_RNA (1)...(19): siRNA sense strand
ggccagaagccuuuuaaaa

SEQ ID NO: 2640166 - RNA, 19 nt, Homo sapiens
  misc_RNA (1)...(19): siRNA sense strand
uagaaaagguggagcgccu

SEQ ID NO: 2640167 - RNA, 19 nt, Homo sapiens
  misc_RNA (1)...(19): siRNA sense strand
gcugcagccaaaugugaua

SEQ ID NO: 2640168 - RNA, 19 nt, Homo sapiens
  misc_RNA (1)...(19): siRNA sense strand
ugaaggaagugaauuacau

SEQ ID NO: 2640169 - RNA, 19 nt, Homo sapiens
  misc_RNA (1)...(19): siRNA sense strand
ggaaaggcauucaggaagc

SEQ ID NO: 2640170 - RNA, 19 nt, Homo sapiens
  misc_RNA (1)...(19): siRNA sense strand
agagaagaacagaagagga

SEQ ID NO: 2640171 - RNA, 19 nt, Homo sapiens
  misc_RNA (1)...(19): siRNA sense strand
gacaaagagaagcugagaa

SEQ ID NO: 2640172 - RNA, 19 nt, Homo sapiens
  misc_RNA (1)...(19): siRNA sense strand
caguaggacacacagacaa

SEQ ID NO: 2640173 - RNA, 19 nt, Homo sapiens
  misc_RNA (1)...(19): siRNA sense strand
cagaaaagcaaaagggaaa

SEQ ID NO: 2640174 - RNA, 19 nt, Homo sapiens
  misc_RNA (1)...(19): siRNA sense strand
agaagaagggaaagggaaa

SEQ ID NO: 2640175 - RNA, 19 nt, Homo sapiens
  misc_RNA (1)...(19): siRNA sense strand
uugcaagaguaguaggaaa

SEQ ID NO: 2640176 - RNA, 19 nt, Homo sapiens
  misc_RNA (1)...(19): siRNA sense strand
gguagagaauacaggacaa

SEQ ID NO: 2640177 - RNA, 19 nt, Homo sapiens
  misc_RNA (1)...(19): siRNA sense strand
cuaagaagcaagaggaaaa

SEQ ID NO: 2640178 - RNA, 19 nt, Homo sapiens
  misc_RNA (1)...(19): siRNA sense strand
aagcaaaggaaaagaguua

SEQ ID NO: 2640179 - RNA, 19 nt, Homo sapiens
  misc_RNA (1)...(19): siRNA sense strand
ucauagaagccauggacaa

SEQ ID NO: 2640180 - RNA, 19 nt, Homo sapiens
  misc_RNA (1)...(19): siRNA sense strand
cuucaguguuuguagauaa

SEQ ID NO: 2640181 - RNA, 19 nt, Homo sapiens
  misc_RNA (1)...(19): siRNA sense strand
gagaagaagggaaagggaa

SEQ ID NO: 2640182 - RNA, 19 nt, Homo sapiens
  misc_RNA (1)...(19): siRNA sense strand
agggaaagccacaggaaga

SEQ ID NO: 2640183 - RNA, 19 nt, Homo sapiens
  misc_RNA (1)...(19): siRNA sense strand
aagcaaagggaaaggaaaa

SEQ ID NO: 2640184 - RNA, 19 nt, Homo sapiens
  misc_RNA (1)...(19): siRNA sense strand
acuaagaacacaagaucua

SEQ ID NO: 2640185 - RNA, 19 nt, Homo sapiens
  misc_RNA (1)...(19): siRNA sense strand
gaguaagguggcaaagaua

SEQ ID NO: 2640186 - RNA, 19 nt, Homo sapiens
  misc_RNA (1)...(19): siRNA sense strand
caguuaaagcaaaggaaaa

SEQ ID NO: 2640187 - RNA, 19 nt, Homo sapiens
  misc_RNA (1)...(19): siRNA sense strand
ugucagaagaugugcgauu

SEQ ID NO: 2640188 - RNA, 19 nt, Homo sapiens
  misc_RNA (1)...(19): siRNA sense strand
cauuuaagguagagaauac

SEQ ID NO: 2640189 - RNA, 19 nt, Homo sapiens
  misc_RNA (1)...(19): siRNA sense strand
agucaaacuuacugcaaaa

SEQ ID NO: 2640190 - RNA, 19 nt, Homo sapiens
  misc_RNA (1)...(19): siRNA sense strand
gugacuagguauaagauca

SEQ ID NO: 2640191 - RNA, 19 nt, Homo sapiens
  misc_RNA (1)...(19): siRNA sense strand
ggaaaacgucagagccaaa

SEQ ID NO: 2640192 - RNA, 19 nt, Homo sapiens
  misc_RNA (1)...(19): siRNA sense strand
ccuaagaagcaagaggaaa

SEQ ID NO: 2640193 - RNA, 19 nt, Homo sapiens
  misc_RNA (1)...(19): siRNA sense strand
caggagaaucguugguauu

SEQ ID NO: 2640194 - RNA, 19 nt, Homo sapiens
  misc_RNA (1)...(19): siRNA sense strand
ugcaagaguaguaggaaau

SEQ ID NO: 2640195 - RNA, 19 nt, Homo sapiens
  misc_RNA (1)...(19): siRNA sense strand
aggcaauagaacuacaaua

SEQ ID NO: 2640196 - RNA, 19 nt, Homo sapiens
  misc_RNA (1)...(19): siRNA sense strand
ugggaauggcuuugcuaaa

SEQ ID NO: 2640197 - RNA, 19 nt, Homo sapiens
  misc_RNA (1)...(19): siRNA sense strand
gcuacagaagcaaguaaua

SEQ ID NO: 2640198 - RNA, 19 nt, Homo sapiens
  misc_RNA (1)...(19): siRNA sense strand
aaaaggagaagaagggaaa

SEQ ID NO: 2640199 - RNA, 19 nt, Homo sapiens
  misc_RNA (1)...(19): siRNA sense strand
ucacggaagcauuguuaaa

SEQ ID NO: 2640200 - RNA, 19 nt, Homo sapiens
  misc_RNA (1)...(19): siRNA sense strand
uuuacagcuucuagaguua

SEQ ID NO: 2640201 - RNA, 19 nt, Homo sapiens
  misc_RNA (1)...(19): siRNA sense strand
cauagaagccauggacaaa

SEQ ID NO: 2640202 - RNA, 19 nt, Homo sapiens
  misc_RNA (1)...(19): siRNA sense strand
caauagaacuuguagcugu

SEQ ID NO: 2640203 - RNA, 19 nt, Homo sapiens
  misc_RNA (1)...(19): siRNA sense strand
cugcagaguucaacaggau

SEQ ID NO: 2640204 - RNA, 19 nt, Homo sapiens
  misc_RNA (1)...(19): siRNA sense strand
gaaaaggagaagaagggaa

SEQ ID NO: 2640205 - RNA, 19 nt, Homo sapiens
  misc_RNA (1)...(19): siRNA sense strand
cuagagaagcagauaauca

SEQ ID NO: 2640206 - RNA, 19 nt, Homo sapiens
  misc_RNA (1)...(19): siRNA sense strand
acuaugagauccugacaau

SEQ ID NO: 2640207 - RNA, 19 nt, Homo sapiens
  misc_RNA (1)...(19): siRNA sense strand
caaugcuucuagagauaua

SEQ ID NO: 2640208 - RNA, 19 nt, Homo sapiens
  misc_RNA (1)...(19): siRNA sense strand
uaucaucaucucaggaaua

SEQ ID NO: 2640209 - RNA, 19 nt, Homo sapiens
  misc_RNA (1)...(19): siRNA sense strand
aaagcaaagggaaaggaaa

SEQ ID NO: 2640210 - RNA, 19 nt, Homo sapiens
  misc_RNA (1)...(19): siRNA sense strand
ggccagagucccugugaau

SEQ ID NO: 2640211 - RNA, 19 nt, Homo sapiens
  misc_RNA (1)...(19): siRNA sense strand
caagggauggacaggaaua

SEQ ID NO: 2640212 - RNA, 19 nt, Homo sapiens
  misc_RNA (1)...(19): siRNA sense strand
ccucagaagaagagauuac

SEQ ID NO: 2640213 - RNA, 19 nt, Homo sapiens
  misc_RNA (1)...(19): siRNA sense strand
ggucauuggaacagccuau

SEQ ID NO: 2640214 - RNA, 19 nt, Homo sapiens
  misc_RNA (1)...(19): siRNA sense strand
cgaaaugcccagaaaacaa

SEQ ID NO: 2640215 - RNA, 19 nt, Homo sapiens
  misc_RNA (1)...(19): siRNA sense strand
ccagaaaacugugggaaau

SEQ ID NO: 2640216 - RNA, 19 nt, Homo sapiens
  misc_RNA (1)...(19): siRNA sense strand
gaacaaaagauguaccaau

SEQ ID NO: 2640217 - RNA, 19 nt, Homo sapiens
  misc_RNA (1)...(19): siRNA sense strand
acaguuaaagcaaaggaaa

SEQ ID NO: 2640218 - RNA, 19 nt, Homo sapiens
  misc_RNA (1)...(19): siRNA sense strand
uggacaggaauaaaggaaa

SEQ ID NO: 2640219 - RNA, 19 nt, Homo sapiens
  misc_RNA (1)...(19): siRNA sense strand
cauagaaaccauugaaauc

SEQ ID NO: 2640220 - RNA, 19 nt, Homo sapiens
  misc_RNA (1)...(19): siRNA sense strand
gugaaaugucucaagugaa

SEQ ID NO: 2640221 - RNA, 19 nt, Homo sapiens
  misc_RNA (1)...(19): siRNA sense strand
ggagcuggaacgaguuuaa

SEQ ID NO: 2640222 - RNA, 19 nt, Homo sapiens
  misc_RNA (1)...(19): siRNA sense strand
acaccaagguugcaagcau

SEQ ID NO: 2640223 - RNA, 19 nt, Homo sapiens
  misc_RNA (1)...(19): siRNA sense strand
gcucagacagcucggguuu

SEQ ID NO: 2640224 - RNA, 19 nt, Homo sapiens
  misc_RNA (1)...(19): siRNA sense strand
cagaaguuuuagaugguua

SEQ ID NO: 2640225 - RNA, 19 nt, Homo sapiens
  misc_RNA (1)...(19): siRNA sense strand
cgguuuaucaauagaacuu

SEQ ID NO: 2640226 - RNA, 19 nt, Homo sapiens
  misc_RNA (1)...(19): siRNA sense strand
gcagaguucaacaggauuu

SEQ ID NO: 2640227 - RNA, 19 nt, Homo sapiens
  misc_RNA (1)...(19): siRNA sense strand
ccagaaaacaaaagguaca

SEQ ID NO: 2640228 - RNA, 19 nt, Homo sapiens
  misc_RNA (1)...(19): siRNA sense strand
aguaguaggaaauguagaa

SEQ ID NO: 2640229 - RNA, 19 nt, Homo sapiens
  misc_RNA (1)...(19): siRNA sense strand
cagaggagcuggaacgagu

SEQ ID NO: 2640230 - RNA, 19 nt, Homo sapiens
  misc_RNA (1)...(19): siRNA sense strand
cagcugacgacuugggaca

SEQ ID NO: 2640231 - RNA, 19 nt, Homo sapiens
  misc_RNA (1)...(19): siRNA sense strand
gaagaugagcugaaggacu

SEQ ID NO: 2640232 - RNA, 19 nt, Homo sapiens
  misc_RNA (1)...(19): siRNA sense strand
ccaaaauagaggaacguuu

SEQ ID NO: 2640233 - RNA, 19 nt, Homo sapiens
  misc_RNA (1)...(19): siRNA sense strand
ugacuagguauaagaucaa

SEQ ID NO: 2640234 - RNA, 19 nt, Homo sapiens
  misc_RNA (1)...(19): siRNA sense strand
aaaugaugcuauaacggua

SEQ ID NO: 2640235 - RNA, 19 nt, Homo sapiens
  misc_RNA (1)...(19): siRNA sense strand
ggcaggaagcagagaagaa

SEQ ID NO: 2640236 - RNA, 19 nt, Homo sapiens
  misc_RNA (1)...(19): siRNA sense strand
gagaagaaugugcagcaaa

SEQ ID NO: 2640237 - RNA, 19 nt, Homo sapiens
  misc_RNA (1)...(19): siRNA sense strand
caaaaugugaggaggacaa

SEQ ID NO: 2640238 - RNA, 19 nt, Homo sapiens
  misc_RNA (1)...(19): siRNA sense strand
agagcaacaaugugugaua

SEQ ID NO: 2640239 - RNA, 19 nt, Homo sapiens
  misc_RNA (1)...(19): siRNA sense strand
gugaggaggacaaagaauu

SEQ ID NO: 2640240 - RNA, 19 nt, Homo sapiens
  misc_RNA (1)...(19): siRNA sense strand
ugauaauggcugaaaacaa

SEQ ID NO: 2640241 - RNA, 19 nt, Homo sapiens
  misc_RNA (1)...(19): siRNA sense strand
aacaagaaguccuccauaa

SEQ ID NO: 2640242 - RNA, 19 nt, Homo sapiens
  misc_RNA (1)...(19): siRNA sense strand
cauuaggaugagagaugua

SEQ ID NO: 2640243 - RNA, 19 nt, Homo sapiens
  misc_RNA (1)...(19): siRNA sense strand
gaauucaccugcagggcau

SEQ ID NO: 2640244 - RNA, 19 nt, Homo sapiens
  misc_RNA (1)...(19): siRNA sense strand
auaucacaguaaagagcaa

SEQ ID NO: 2640245 - RNA, 19 nt, Homo sapiens
  misc_RNA (1)...(19): siRNA sense strand
cagcaaaaugugaggagga

SEQ ID NO: 2640246 - RNA, 19 nt, Homo sapiens
  misc_RNA (1)...(19): siRNA sense strand
gagcaacaaugugugauaa

SEQ ID NO: 2640247 - RNA, 19 nt, Homo sapiens
  misc_RNA (1)...(19): siRNA sense strand
cagagaagaaugugcagca

SEQ ID NO: 2640248 - RNA, 19 nt, Homo sapiens
  misc_RNA (1)...(19): siRNA sense strand
guaaagagcaacaaugugu

SEQ ID NO: 2640249 - RNA, 19 nt, Homo sapiens
  misc_RNA (1)...(19): siRNA sense strand
caguaaagagcaacaaugu

SEQ ID NO: 2640250 - RNA, 19 nt, Homo sapiens
  misc_RNA (1)...(19): siRNA sense strand
aagaaguccuccauaauca

SEQ ID NO: 2640251 - RNA, 19 nt, Homo sapiens
  misc_RNA (1)...(19): siRNA sense strand
agagaagaaugugcagcaa

SEQ ID NO: 2640252 - RNA, 19 nt, Homo sapiens
  misc_RNA (1)...(19): siRNA sense strand
acaagaaguccuccauaau

SEQ ID NO: 2640253 - RNA, 19 nt, Homo sapiens
  misc_RNA (1)...(19): siRNA sense strand
ugaaaucaggucaaggaga

SEQ ID NO: 2640254 - RNA, 19 nt, Homo sapiens
  misc_RNA (1)...(19): siRNA sense strand
cugauaagcuccaugggaa

SEQ ID NO: 2640255 - RNA, 19 nt, Homo sapiens
  misc_RNA (1)...(19): siRNA sense strand
ugaauauggcugaggcgaa

SEQ ID NO: 2640256 - RNA, 19 nt, Homo sapiens
  misc_RNA (1)...(19): siRNA sense strand
gggacgaggaauucgaaau

SEQ ID NO: 2640257 - RNA, 19 nt, Homo sapiens
  misc_RNA (1)...(19): siRNA sense strand
cagccuuggagaagaacaa

SEQ ID NO: 2640258 - RNA, 19 nt, Homo sapiens
  misc_RNA (1)...(19): siRNA sense strand
gguacuacggcuacagcaa

SEQ ID NO: 2640259 - RNA, 19 nt, Homo sapiens
  misc_RNA (1)...(19): siRNA sense strand
gcuacagcaaguuuggaaa

SEQ ID NO: 2640260 - RNA, 19 nt, Homo sapiens
  misc_RNA (1)...(19): siRNA sense strand
cagcaaauccagcagcaga

SEQ ID NO: 2640261 - RNA, 19 nt, Homo sapiens
  misc_RNA (1)...(19): siRNA sense strand
caacagagccauuggagag

SEQ ID NO: 2640262 - RNA, 19 nt, Homo sapiens
  misc_RNA (1)...(19): siRNA sense strand
ccaacaugcccucgaacau

SEQ ID NO: 2640263 - RNA, 19 nt, Homo sapiens
  misc_RNA (1)...(19): siRNA sense strand
accaaaugcaucagcaaau

SEQ ID NO: 2640264 - RNA, 19 nt, Homo sapiens
  misc_RNA (1)...(19): siRNA sense strand
gaaagaucccaaugagcca

SEQ ID NO: 2640265 - RNA, 19 nt, Homo sapiens
  misc_RNA (1)...(19): siRNA sense strand
gcaaauuaaucaacagcag

SEQ ID NO: 2640266 - RNA, 19 nt, Homo sapiens
  misc_RNA (1)...(19): siRNA sense strand
aagaacaaaagcagguaua

SEQ ID NO: 2640267 - RNA, 19 nt, Homo sapiens
  misc_RNA (1)...(19): siRNA sense strand
gaugaagccaacagagcca

SEQ ID NO: 2640268 - RNA, 19 nt, Homo sapiens
  misc_RNA (1)...(19): siRNA sense strand
aagaauaccugaaggcccu

SEQ ID NO: 2640269 - RNA, 19 nt, Homo sapiens
  misc_RNA (1)...(19): siRNA sense strand
ggcugcaauuaaaggucaa

SEQ ID NO: 2640270 - RNA, 19 nt, Homo sapiens
  misc_RNA (1)...(19): siRNA sense strand
cccaagacuccaaagaaaa

SEQ ID NO: 2640271 - RNA, 19 nt, Homo sapiens
  misc_RNA (1)...(19): siRNA sense strand
ggaaauuucaccagaggua

SEQ ID NO: 2640272 - RNA, 19 nt, Homo sapiens
  misc_RNA (1)...(19): siRNA sense strand
ccugaagauaggaaggaaa

SEQ ID NO: 2640273 - RNA, 19 nt, Homo sapiens
  misc_RNA (1)...(19): siRNA sense strand
caccagagguagagcauau

SEQ ID NO: 2640274 - RNA, 19 nt, Homo sapiens
  misc_RNA (1)...(19): siRNA sense strand
acaacaaagcaaagagaga

SEQ ID NO: 2640275 - RNA, 19 nt, Homo sapiens
  misc_RNA (1)...(19): siRNA sense strand
ugugaaagauacaggucua

SEQ ID NO: 2640276 - RNA, 19 nt, Homo sapiens
  misc_RNA (1)...(19): siRNA sense strand
cagaaauaacagaggacuu

SEQ ID NO: 2640277 - RNA, 19 nt, Homo sapiens
  misc_RNA (1)...(19): siRNA sense strand
gaucauagcucuaagccuu

SEQ ID NO: 2640278 - RNA, 19 nt, Homo sapiens
  misc_RNA (1)...(19): siRNA sense strand
ccacuuagaacgaggcgaa

SEQ ID NO: 2640279 - RNA, 19 nt, Homo sapiens
  misc_RNA (1)...(19): siRNA sense strand
gcaguguagaugagguaaa

SEQ ID NO: 2640280 - RNA, 19 nt, Homo sapiens
  misc_RNA (1)...(19): siRNA sense strand
gugaaaguagauagugaaa

SEQ ID NO: 2640281 - RNA, 19 nt, Homo sapiens
  misc_RNA (1)...(19): siRNA sense strand
ccagaggagaaauaagaaa

SEQ ID NO: 2640282 - RNA, 19 nt, Homo sapiens
  misc_RNA (1)...(19): siRNA sense strand
acagcaagcuacagaucaa

SEQ ID NO: 2640283 - RNA, 19 nt, Homo sapiens
  misc_RNA (1)...(19): siRNA sense strand
cuuuggaaugggaggguua

SEQ ID NO: 2640284 - RNA, 19 nt, Homo sapiens
  misc_RNA (1)...(19): siRNA sense strand
aggcaaacuccauacaaua

SEQ ID NO: 2640285 - RNA, 19 nt, Homo sapiens
  misc_RNA (1)...(19): siRNA sense strand
guuuaacaccuguagauaa

SEQ ID NO: 2640286 - RNA, 19 nt, Homo sapiens
  misc_RNA (1)...(19): siRNA sense strand
agaaaaugcagcaaggaaa

SEQ ID NO: 2640287 - RNA, 19 nt, Homo sapiens
  misc_RNA (1)...(19): siRNA sense strand
gagacuugccugugaaaga

SEQ ID NO: 2640288 - RNA, 19 nt, Homo sapiens
  misc_RNA (1)...(19): siRNA sense strand
ccauaaacuagaagcccaa

SEQ ID NO: 2640289 - RNA, 19 nt, Homo sapiens
  misc_RNA (1)...(19): siRNA sense strand
cccgcaagcaggaggauaa

SEQ ID NO: 2640290 - RNA, 19 nt, Homo sapiens
  misc_RNA (1)...(19): siRNA sense strand
gcauauaccagaaauagaa

SEQ ID NO: 2640291 - RNA, 19 nt, Homo sapiens
  misc_RNA (1)...(19): siRNA sense strand
gaaaaugcagcaaggaaaa

SEQ ID NO: 2640292 - RNA, 19 nt, Homo sapiens
  misc_RNA (1)...(19): siRNA sense strand
uaaacagcuaguagagaaa

SEQ ID NO: 2640293 - RNA, 19 nt, Homo sapiens
  misc_RNA (1)...(19): siRNA sense strand
ggaaguuaaaggagcaaca

SEQ ID NO: 2640294 - RNA, 19 nt, Homo sapiens
  misc_RNA (1)...(19): siRNA sense strand
cgagaaagggcaaaggcuu

SEQ ID NO: 2640295 - RNA, 19 nt, Homo sapiens
  misc_RNA (1)...(19): siRNA sense strand
uagugaaaguagauaguga

SEQ ID NO: 2640296 - RNA, 19 nt, Homo sapiens
  misc_RNA (1)...(19): siRNA sense strand
cugaagauaggaaggaaau

SEQ ID NO: 2640297 - RNA, 19 nt, Homo sapiens
  misc_RNA (1)...(19): siRNA sense strand
gggacaauguagaaaugau

SEQ ID NO: 2640298 - RNA, 19 nt, Homo sapiens
  misc_RNA (1)...(19): siRNA sense strand
gcuaauuaugcaacacaaa

SEQ ID NO: 2640299 - RNA, 19 nt, Homo sapiens
  misc_RNA (1)...(19): siRNA sense strand
caacaguuuacuugaagaa

SEQ ID NO: 2640300 - RNA, 19 nt, Homo sapiens
  misc_RNA (1)...(19): siRNA sense strand
gucuaaaccucuuuggaau

SEQ ID NO: 2640301 - RNA, 19 nt, Homo sapiens
  misc_RNA (1)...(19): siRNA sense strand
cagaggagaaauaagaaau

SEQ ID NO: 2640302 - RNA, 19 nt, Homo sapiens
  misc_RNA (1)...(19): siRNA sense strand
uguacaaccaggagaauga

SEQ ID NO: 2640303 - RNA, 19 nt, Homo sapiens
  misc_RNA (1)...(19): siRNA sense strand
agagcauauaccagaaaua

SEQ ID NO: 2640304 - RNA, 19 nt, Homo sapiens
  misc_RNA (1)...(19): siRNA sense strand
augcugcagucuugagaaa

SEQ ID NO: 2640305 - RNA, 19 nt, Homo sapiens
  misc_RNA (1)...(19): siRNA sense strand
gcugcagucuugagaaaca

SEQ ID NO: 2640306 - RNA, 19 nt, Homo sapiens
  misc_RNA (1)...(19): siRNA sense strand
gcauaaaauuguacaacca

SEQ ID NO: 2640307 - RNA, 19 nt, Homo sapiens
  misc_RNA (1)...(19): siRNA sense strand
agauggagguugaggcagu

SEQ ID NO: 2640308 - RNA, 19 nt, Homo sapiens
  misc_RNA (1)...(19): siRNA sense strand
auagaagagcugcaggaua

SEQ ID NO: 2640309 - RNA, 19 nt, Homo sapiens
  misc_RNA (1)...(19): siRNA sense strand
acucaaaguggaacaguau

SEQ ID NO: 2640310 - RNA, 19 nt, Homo sapiens
  misc_RNA (1)...(19): siRNA sense strand
cagaaguugaagaggacau

SEQ ID NO: 2640311 - RNA, 19 nt, Homo sapiens
  misc_RNA (1)...(19): siRNA sense strand
aguuagagcacuuggcuga

SEQ ID NO: 2640312 - RNA, 19 nt, Homo sapiens
  misc_RNA (1)...(19): siRNA sense strand
gcuacagaucaaaggucaa

SEQ ID NO: 2640313 - RNA, 19 nt, Homo sapiens
  misc_RNA (1)...(19): siRNA sense strand
acaagaaggcaguguagau

SEQ ID NO: 2640314 - RNA, 19 nt, Homo sapiens
  misc_RNA (1)...(19): siRNA sense strand
aggcaguguagaugaggua

SEQ ID NO: 2640315 - RNA, 19 nt, Homo sapiens
  misc_RNA (1)...(19): siRNA sense strand
auguggaaauggaagaaau

SEQ ID NO: 2640316 - RNA, 19 nt, Homo sapiens
  misc_RNA (1)...(19): siRNA sense strand
agacaagaaacaugcuaau

SEQ ID NO: 2640317 - RNA, 19 nt, Homo sapiens
  misc_RNA (1)...(19): siRNA sense strand
auuccaagaugcagaugua

SEQ ID NO: 2640318 - RNA, 19 nt, Homo sapiens
  misc_RNA (1)...(19): siRNA sense strand
gaauagaagagcugcagga

SEQ ID NO: 2640319 - RNA, 19 nt, Homo sapiens
  misc_RNA (1)...(19): siRNA sense strand
ugaucuacguggauaaaga

SEQ ID NO: 2640320 - RNA, 19 nt, Homo sapiens
  misc_RNA (1)...(19): siRNA sense strand
agaugcagauguagcagaa

SEQ ID NO: 2640321 - RNA, 19 nt, Homo sapiens
  misc_RNA (1)...(19): siRNA sense strand
cagguguaucucaggaaua

SEQ ID NO: 2640322 - RNA, 19 nt, Homo sapiens
  misc_RNA (1)...(19): siRNA sense strand
gagauguggaaauggaaga

SEQ ID NO: 2640323 - RNA, 19 nt, Homo sapiens
  misc_RNA (1)...(19): siRNA sense strand
gagaaaaugcagcaaggaa

SEQ ID NO: 2640324 - RNA, 19 nt, Homo sapiens
  misc_RNA (1)...(19): siRNA sense strand
acgugucagucgugaggaa

SEQ ID NO: 2640325 - RNA, 19 nt, Homo sapiens
  misc_RNA (1)...(19): siRNA sense strand
agaagccagaggagaaaua

SEQ ID NO: 2640326 - RNA, 19 nt, Homo sapiens
  misc_RNA (1)...(19): siRNA sense strand
uagaggaguuagagcacuu

SEQ ID NO: 2640327 - RNA, 19 nt, Homo sapiens
  misc_RNA (1)...(19): siRNA sense strand
ggcaaauggggaugaauua

SEQ ID NO: 2640328 - RNA, 19 nt, Homo sapiens
  misc_RNA (1)...(19): siRNA sense strand
ggaucaagcaauucgacuu

SEQ ID NO: 2640329 - RNA, 19 nt, Homo sapiens
  misc_RNA (1)...(19): siRNA sense strand
auauggacuuggaucgaua

SEQ ID NO: 2640330 - RNA, 19 nt, Homo sapiens
  misc_RNA (1)...(19): siRNA sense strand
cuggaaaagacaagaaaca

SEQ ID NO: 2640331 - RNA, 19 nt, Homo sapiens
  misc_RNA (1)...(19): siRNA sense strand
ggaagaagauggagggugu

SEQ ID NO: 2640332 - RNA, 19 nt, Homo sapiens
  misc_RNA (1)...(19): siRNA sense strand
agauggagggugugacaaa

SEQ ID NO: 2640333 - RNA, 19 nt, Homo sapiens
  misc_RNA (1)...(19): siRNA sense strand
uuuaagaucucaugggaca

SEQ ID NO: 2640334 - RNA, 19 nt, Homo sapiens
  misc_RNA (1)...(19): siRNA sense strand
ugaaacaaggagaagaaau

SEQ ID NO: 2640335 - RNA, 19 nt, Homo sapiens
  misc_RNA (1)...(19): siRNA sense strand
uuugaaacaaggagaagaa

SEQ ID NO: 2640336 - RNA, 19 nt, Homo sapiens
  misc_RNA (1)...(19): siRNA sense strand
gacaagaugaaguggacau

SEQ ID NO: 2640337 - RNA, 19 nt, Homo sapiens
  misc_RNA (1)...(19): siRNA sense strand
cauuaagagcagagcagca

SEQ ID NO: 2640338 - RNA, 19 nt, Homo sapiens
  misc_RNA (1)...(19): siRNA sense strand
aagaggaaagugaggauga

SEQ ID NO: 2640339 - RNA, 19 nt, Homo sapiens
  misc_RNA (1)...(19): siRNA sense strand
guggaacaaaggaaugaaa

SEQ ID NO: 2640340 - RNA, 19 nt, Homo sapiens
  misc_RNA (1)...(19): siRNA sense strand
cuggaagcacuguggaaga

SEQ ID NO: 2640341 - RNA, 19 nt, Homo sapiens
  misc_RNA (1)...(19): siRNA sense strand
ugaagaggaaagugaggau

SEQ ID NO: 2640342 - RNA, 19 nt, Homo sapiens
  misc_RNA (1)...(19): siRNA sense strand
cagaaccugaggagagaau

SEQ ID NO: 2640343 - RNA, 19 nt, Homo sapiens
  misc_RNA (1)...(19): siRNA sense strand
gcccugaagaggaaaguga

SEQ ID NO: 2640344 - RNA, 19 nt, Homo sapiens
  misc_RNA (1)...(19): siRNA sense strand
gguuucaaggcaaucgaua

SEQ ID NO: 2640345 - RNA, 19 nt, Homo sapiens
  misc_RNA (1)...(19): siRNA sense strand
ggaaaauggcagugagcug

SEQ ID NO: 2640346 - RNA, 19 nt, Homo sapiens
  misc_RNA (1)...(19): siRNA sense strand
aaggcaaucgauacagaaa

SEQ ID NO: 2640347 - RNA, 19 nt, Homo sapiens
  misc_RNA (1)...(19): siRNA sense strand
ucugugacgauguggacaa

SEQ ID NO: 2640348 - RNA, 19 nt, Homo sapiens
  misc_RNA (1)...(19): siRNA sense strand
cggacaagaugaaguggac

SEQ ID NO: 2640349 - RNA, 19 nt, Homo sapiens
  misc_RNA (1)...(19): siRNA sense strand
ugucggccauacugggaaa

SEQ ID NO: 2640350 - RNA, 19 nt, Homo sapiens
  misc_RNA (1)...(19): siRNA sense strand
agagcagcauacaacguaa

SEQ ID NO: 2640351 - RNA, 19 nt, Homo sapiens
  misc_RNA (1)...(19): siRNA sense strand
gugaaggcccugaagagga

SEQ ID NO: 2640352 - RNA, 19 nt, Homo sapiens
  misc_RNA (1)...(19): siRNA sense strand
uggaacaaaggaaugaaau

SEQ ID NO: 2640353 - RNA, 19 nt, Homo sapiens
  misc_RNA (1)...(19): siRNA sense strand
caguaugagcugaaggaca

SEQ ID NO: 2640354 - RNA, 19 nt, Homo sapiens
  misc_RNA (1)...(19): siRNA sense strand
aggaagacgaagaggagga

SEQ ID NO: 2640355 - RNA, 19 nt, Homo sapiens
  misc_RNA (1)...(19): siRNA sense strand
gugccuuggaaguggagaa

SEQ ID NO: 2640356 - RNA, 19 nt, Homo sapiens
  misc_RNA (1)...(19): siRNA sense strand
acgacgaggacgaggagau

SEQ ID NO: 2640357 - RNA, 19 nt, Homo sapiens
  misc_RNA (1)...(19): siRNA sense strand
acgaagaggaggacgagga

SEQ ID NO: 2640358 - RNA, 19 nt, Homo sapiens
  misc_RNA (1)...(19): siRNA sense strand
aagaggaggacgaggagga

SEQ ID NO: 2640359 - RNA, 19 nt, Homo sapiens
  misc_RNA (1)...(19): siRNA sense strand
aggagaucgauuuggagaa

SEQ ID NO: 2640360 - RNA, 19 nt, Homo sapiens
  misc_RNA (1)...(19): siRNA sense strand
aagacgaagaggaggacga

SEQ ID NO: 2640361 - RNA, 19 nt, Homo sapiens
  misc_RNA (1)...(19): siRNA sense strand
aggacgaggaggacugcaa

SEQ ID NO: 2640362 - RNA, 19 nt, Homo sapiens
  misc_RNA (1)...(19): siRNA sense strand
ggacugcaaacgcgagcua

SEQ ID NO: 2640363 - RNA, 19 nt, Homo sapiens
  misc_RNA (1)...(19): siRNA sense strand
gggaaacgcuuaugggagc

SEQ ID NO: 2640364 - RNA, 19 nt, Homo sapiens
  misc_RNA (1)...(19): siRNA sense strand
gcgcgcaguaugagcugaa

SEQ ID NO: 2640365 - RNA, 19 nt, Homo sapiens
  misc_RNA (1)...(19): siRNA sense strand
cugcagaagcccaagaucu

SEQ ID NO: 2640366 - RNA, 19 nt, Homo sapiens
  misc_RNA (1)...(19): siRNA sense strand
aggaggaagacgaagagga

SEQ ID NO: 2640367 - RNA, 19 nt, Homo sapiens
  misc_RNA (1)...(19): siRNA sense strand
cugacgacgacgaggacga

SEQ ID NO: 2640368 - RNA, 19 nt, Homo sapiens
  misc_RNA (1)...(19): siRNA sense strand
aagauagcucugagggcuu

SEQ ID NO: 2640369 - RNA, 19 nt, Homo sapiens
  misc_RNA (1)...(19): siRNA sense strand
gaggagaucgauuuggaga

SEQ ID NO: 2640370 - RNA, 19 nt, Homo sapiens
  misc_RNA (1)...(19): siRNA sense strand
aguaugagcugaaggacag

SEQ ID NO: 2640371 - RNA, 19 nt, Homo sapiens
  misc_RNA (1)...(19): siRNA sense strand
aggaagaggaggaggagga

SEQ ID NO: 2640372 - RNA, 19 nt, Homo sapiens
  misc_RNA (1)...(19): siRNA sense strand
gccucaagaaagagaacaa

SEQ ID NO: 2640373 - RNA, 19 nt, Homo sapiens
  misc_RNA (1)...(19): siRNA sense strand
gggaggagaggaaggcaga

SEQ ID NO: 2640374 - RNA, 19 nt, Homo sapiens
  misc_RNA (1)...(19): siRNA sense strand
aggaggaggaggaggagga

SEQ ID NO: 2640375 - RNA, 19 nt, Homo sapiens
  misc_RNA (1)...(19): siRNA sense strand
cugaagacgaggagguagu

SEQ ID NO: 2640376 - RNA, 19 nt, Homo sapiens
  misc_RNA (1)...(19): siRNA sense strand
uggaggaagaggaggagga

SEQ ID NO: 2640377 - RNA, 19 nt, Homo sapiens
  misc_RNA (1)...(19): siRNA sense strand
aagaggaggaggaggagga

SEQ ID NO: 2640378 - RNA, 19 nt, Homo sapiens
  misc_RNA (1)...(19): siRNA sense strand
aggaggaagcugaagacga

SEQ ID NO: 2640379 - RNA, 19 nt, Homo sapiens
  misc_RNA (1)...(19): siRNA sense strand
ggagaggaaggcagaggga

SEQ ID NO: 2640380 - RNA, 19 nt, Homo sapiens
  misc_RNA (1)...(19): siRNA sense strand
cgauuggagcgcagggagu

SEQ ID NO: 2640381 - RNA, 19 nt, Homo sapiens
  misc_RNA (1)...(19): siRNA sense strand
aggaggaggaggaagcuga

SEQ ID NO: 2640382 - RNA, 19 nt, Homo sapiens
  misc_RNA (1)...(19): siRNA sense strand
ggcacaaccaggagccuau

SEQ ID NO: 2640383 - RNA, 19 nt, Homo sapiens
  misc_RNA (1)...(19): siRNA sense strand
ggaggaagcugaagacgag

SEQ ID NO: 2640384 - RNA, 19 nt, Homo sapiens
  misc_RNA (1)...(19): siRNA sense strand
uaaggaggcugcagggagu

SEQ ID NO: 2640385 - RNA, 19 nt, Homo sapiens
  misc_RNA (1)...(19): siRNA sense strand
aggaagaggaggaggagga

SEQ ID NO: 2640386 - RNA, 19 nt, Homo sapiens
  misc_RNA (1)...(19): siRNA sense strand
gccucaagaaagagaacaa

SEQ ID NO: 2640387 - RNA, 19 nt, Homo sapiens
  misc_RNA (1)...(19): siRNA sense strand
gggaggagaggaaggcaga

SEQ ID NO: 2640388 - RNA, 19 nt, Homo sapiens
  misc_RNA (1)...(19): siRNA sense strand
aggaggaggaggaggagga

SEQ ID NO: 2640389 - RNA, 19 nt, Homo sapiens
  misc_RNA (1)...(19): siRNA sense strand
cugaagacgaggagguagu

SEQ ID NO: 2640390 - RNA, 19 nt, Homo sapiens
  misc_RNA (1)...(19): siRNA sense strand
uggaggaagaggaggagga

SEQ ID NO: 2640391 - RNA, 19 nt, Homo sapiens
  misc_RNA (1)...(19): siRNA sense strand
aagaggaggaggaggagga

SEQ ID NO: 2640392 - RNA, 19 nt, Homo sapiens
  misc_RNA (1)...(19): siRNA sense strand
aggaggaagcugaagacga

SEQ ID NO: 2640393 - RNA, 19 nt, Homo sapiens
  misc_RNA (1)...(19): siRNA sense strand
ggagaggaaggcagaggga

SEQ ID NO: 2640394 - RNA, 19 nt, Homo sapiens
  misc_RNA (1)...(19): siRNA sense strand
cgauuggagcgcagggagu

SEQ ID NO: 2640395 - RNA, 19 nt, Homo sapiens
  misc_RNA (1)...(19): siRNA sense strand
aggaggaggaggaagcuga

SEQ ID NO: 2640396 - RNA, 19 nt, Homo sapiens
  misc_RNA (1)...(19): siRNA sense strand
ggcacaaccaggagccuau

SEQ ID NO: 2640397 - RNA, 19 nt, Homo sapiens
  misc_RNA (1)...(19): siRNA sense strand
ggaggaagcugaagacgag

SEQ ID NO: 2640398 - RNA, 19 nt, Homo sapiens
  misc_RNA (1)...(19): siRNA sense strand
uaaggaggcugcagggagu

SEQ ID NO: 2640399 - RNA, 19 nt, Homo sapiens
  misc_RNA (1)...(19): siRNA sense strand
ccucaugagccaaggagaa

SEQ ID NO: 2640400 - RNA, 19 nt, Homo sapiens
  misc_RNA (1)...(19): siRNA sense strand
cuggaaagaaggagauaca

SEQ ID NO: 2640401 - RNA, 19 nt, Homo sapiens
  misc_RNA (1)...(19): siRNA sense strand
ccauugugucguaaagaaa

SEQ ID NO: 2640402 - RNA, 19 nt, Homo sapiens
  misc_RNA (1)...(19): siRNA sense strand
aggagauacaguaggauuu

SEQ ID NO: 2640403 - RNA, 19 nt, Homo sapiens
  misc_RNA (1)...(19): siRNA sense strand
ccgagaugacaguggaaca

SEQ ID NO: 2640404 - RNA, 19 nt, Homo sapiens
  misc_RNA (1)...(19): siRNA sense strand
acauuggaguccugggcua

SEQ ID NO: 2640405 - RNA, 19 nt, Homo sapiens
  misc_RNA (1)...(19): siRNA sense strand
acgaaauggcagaaacaga

SEQ ID NO: 2640406 - RNA, 19 nt, Homo sapiens
  misc_RNA (1)...(19): siRNA sense strand
acagcugaccuaugagaaa

SEQ ID NO: 2640407 - RNA, 19 nt, Homo sapiens
  misc_RNA (1)...(19): siRNA sense strand
acacgaaauggcagaaaca

SEQ ID NO: 2640408 - RNA, 19 nt, Homo sapiens
  misc_RNA (1)...(19): siRNA sense strand
uuuacuuagcccaggaaua

SEQ ID NO: 2640409 - RNA, 19 nt, Homo sapiens
  misc_RNA (1)...(19): siRNA sense strand
gugaacuugaguagcauua

SEQ ID NO: 2640410 - RNA, 19 nt, Homo sapiens
  misc_RNA (1)...(19): siRNA sense strand
uguugaagcaagucaguau

SEQ ID NO: 2640411 - RNA, 19 nt, Homo sapiens
  misc_RNA (1)...(19): siRNA sense strand
ccaccaucuaugaaauuua

SEQ ID NO: 2640412 - RNA, 19 nt, Homo sapiens
  misc_RNA (1)...(19): siRNA sense strand
guaucuagaaucagacaga

SEQ ID NO: 2640413 - RNA, 19 nt, Homo sapiens
  misc_RNA (1)...(19): siRNA sense strand
ccuuuguugugaugaggua

SEQ ID NO: 2640414 - RNA, 19 nt, Homo sapiens
  misc_RNA (1)...(19): siRNA sense strand
ccaguggagcuuagacaau

SEQ ID NO: 2640415 - RNA, 19 nt, Homo sapiens
  misc_RNA (1)...(19): siRNA sense strand
gcauuggggaugaugaaua

SEQ ID NO: 2640416 - RNA, 19 nt, Homo sapiens
  misc_RNA (1)...(19): siRNA sense strand
uguagauaaugaucaggaa

SEQ ID NO: 2640417 - RNA, 19 nt, Homo sapiens
  misc_RNA (1)...(19): siRNA sense strand
acaaaauguggaugggcua

SEQ ID NO: 2640418 - RNA, 19 nt, Homo sapiens
  misc_RNA (1)...(19): siRNA sense strand
ugguacaaugccagaagua

SEQ ID NO: 2640419 - RNA, 19 nt, Homo sapiens
  misc_RNA (1)...(19): siRNA sense strand
ggguaugguacuaugaagu

SEQ ID NO: 2640420 - RNA, 19 nt, Homo sapiens
  misc_RNA (1)...(19): siRNA sense strand
aaggagauacaguaggauu

SEQ ID NO: 2640421 - RNA, 19 nt, Homo sapiens
  misc_RNA (1)...(19): siRNA sense strand
ugagccaaggagaaagaaa

SEQ ID NO: 2640422 - RNA, 19 nt, Homo sapiens
  misc_RNA (1)...(19): siRNA sense strand
ucaugaaggcuacggcauu

SEQ ID NO: 2640423 - RNA, 19 nt, Homo sapiens
  misc_RNA (1)...(19): siRNA sense strand
cugauuaucugaaacguca

SEQ ID NO: 2640424 - RNA, 19 nt, Homo sapiens
  misc_RNA (1)...(19): siRNA sense strand
uugaguagcauuagggcca

SEQ ID NO: 2640425 - RNA, 19 nt, Homo sapiens
  misc_RNA (1)...(19): siRNA sense strand
gagccaaggagaaagaaac

SEQ ID NO: 2640426 - RNA, 19 nt, Homo sapiens
  misc_RNA (1)...(19): siRNA sense strand
gaugaaggaugguuggaug

SEQ ID NO: 2640427 - RNA, 19 nt, Homo sapiens
  misc_RNA (1)...(19): siRNA sense strand
ggccgagaacagugcagua

SEQ ID NO: 2640428 - RNA, 19 nt, Homo sapiens
  misc_RNA (1)...(19): siRNA sense strand
agacuugaaugaaaagcaa

SEQ ID NO: 2640429 - RNA, 19 nt, Homo sapiens
  misc_RNA (1)...(19): siRNA sense strand
agccaaggagaaagaaaca

SEQ ID NO: 2640430 - RNA, 19 nt, Homo sapiens
  misc_RNA (1)...(19): siRNA sense strand
caguauuagugaccggcuu

SEQ ID NO: 2640431 - RNA, 19 nt, Homo sapiens
  misc_RNA (1)...(19): siRNA sense strand
ccucaaucaugaaggcuac

SEQ ID NO: 2640432 - RNA, 19 nt, Homo sapiens
  misc_RNA (1)...(19): siRNA sense strand
gagcagaagccuuggccag

SEQ ID NO: 2640433 - RNA, 19 nt, Homo sapiens
  misc_RNA (1)...(19): siRNA sense strand
ccucaugagccaaggagaa

SEQ ID NO: 2640434 - RNA, 19 nt, Homo sapiens
  misc_RNA (1)...(19): siRNA sense strand
cuggaaagaaggagauaca

SEQ ID NO: 2640435 - RNA, 19 nt, Homo sapiens
  misc_RNA (1)...(19): siRNA sense strand
ccauugugucguaaagaaa

SEQ ID NO: 2640436 - RNA, 19 nt, Homo sapiens
  misc_RNA (1)...(19): siRNA sense strand
aggagauacaguaggauuu

SEQ ID NO: 2640437 - RNA, 19 nt, Homo sapiens
  misc_RNA (1)...(19): siRNA sense strand
ccgagaugacaguggaaca

SEQ ID NO: 2640438 - RNA, 19 nt, Homo sapiens
  misc_RNA (1)...(19): siRNA sense strand
acauuggaguccugggcua

SEQ ID NO: 2640439 - RNA, 19 nt, Homo sapiens
  misc_RNA (1)...(19): siRNA sense strand
acgaaauggcagaaacaga

SEQ ID NO: 2640440 - RNA, 19 nt, Homo sapiens
  misc_RNA (1)...(19): siRNA sense strand
acagcugaccuaugagaaa

SEQ ID NO: 2640441 - RNA, 19 nt, Homo sapiens
  misc_RNA (1)...(19): siRNA sense strand
acacgaaauggcagaaaca

SEQ ID NO: 2640442 - RNA, 19 nt, Homo sapiens
  misc_RNA (1)...(19): siRNA sense strand
uuuacuuagcccaggaaua

SEQ ID NO: 2640443 - RNA, 19 nt, Homo sapiens
  misc_RNA (1)...(19): siRNA sense strand
gugaacuugaguagcauua

SEQ ID NO: 2640444 - RNA, 19 nt, Homo sapiens
  misc_RNA (1)...(19): siRNA sense strand
uguugaagcaagucaguau

SEQ ID NO: 2640445 - RNA, 19 nt, Homo sapiens
  misc_RNA (1)...(19): siRNA sense strand
ccaccaucuaugaaauuua

SEQ ID NO: 2640446 - RNA, 19 nt, Homo sapiens
  misc_RNA (1)...(19): siRNA sense strand
guaucuagaaucagacaga

SEQ ID NO: 2640447 - RNA, 19 nt, Homo sapiens
  misc_RNA (1)...(19): siRNA sense strand
ccuuuguugugaugaggua

SEQ ID NO: 2640448 - RNA, 19 nt, Homo sapiens
  misc_RNA (1)...(19): siRNA sense strand
ccaguggagcuuagacaau

SEQ ID NO: 2640449 - RNA, 19 nt, Homo sapiens
  misc_RNA (1)...(19): siRNA sense strand
gcauuggggaugaugaaua

SEQ ID NO: 2640450 - RNA, 19 nt, Homo sapiens
  misc_RNA (1)...(19): siRNA sense strand
uguagauaaugaucaggaa

SEQ ID NO: 2640451 - RNA, 19 nt, Homo sapiens
  misc_RNA (1)...(19): siRNA sense strand
acaaaauguggaugggcua

SEQ ID NO: 2640452 - RNA, 19 nt, Homo sapiens
  misc_RNA (1)...(19): siRNA sense strand
ugguacaaugccagaagua

SEQ ID NO: 2640453 - RNA, 19 nt, Homo sapiens
  misc_RNA (1)...(19): siRNA sense strand
ggguaugguacuaugaagu

SEQ ID NO: 2640454 - RNA, 19 nt, Homo sapiens
  misc_RNA (1)...(19): siRNA sense strand
aaggagauacaguaggauu

SEQ ID NO: 2640455 - RNA, 19 nt, Homo sapiens
  misc_RNA (1)...(19): siRNA sense strand
ugagccaaggagaaagaaa

SEQ ID NO: 2640456 - RNA, 19 nt, Homo sapiens
  misc_RNA (1)...(19): siRNA sense strand
ucaugaaggcuacggcauu

SEQ ID NO: 2640457 - RNA, 19 nt, Homo sapiens
  misc_RNA (1)...(19): siRNA sense strand
cugauuaucugaaacguca

SEQ ID NO: 2640458 - RNA, 19 nt, Homo sapiens
  misc_RNA (1)...(19): siRNA sense strand
uugaguagcauuagggcca

SEQ ID NO: 2640459 - RNA, 19 nt, Homo sapiens
  misc_RNA (1)...(19): siRNA sense strand
gagccaaggagaaagaaac

SEQ ID NO: 2640460 - RNA, 19 nt, Homo sapiens
  misc_RNA (1)...(19): siRNA sense strand
gaugaaggaugguuggaug

SEQ ID NO: 2640461 - RNA, 19 nt, Homo sapiens
  misc_RNA (1)...(19): siRNA sense strand
ggccgagaacagugcagua

SEQ ID NO: 2640462 - RNA, 19 nt, Homo sapiens
  misc_RNA (1)...(19): siRNA sense strand
agacuugaaugaaaagcaa

SEQ ID NO: 2640463 - RNA, 19 nt, Homo sapiens
  misc_RNA (1)...(19): siRNA sense strand
agccaaggagaaagaaaca

SEQ ID NO: 2640464 - RNA, 19 nt, Homo sapiens
  misc_RNA (1)...(19): siRNA sense strand
caguauuagugaccggcuu

SEQ ID NO: 2640465 - RNA, 19 nt, Homo sapiens
  misc_RNA (1)...(19): siRNA sense strand
ccucaaucaugaaggcuac

SEQ ID NO: 2640466 - RNA, 19 nt, Homo sapiens
  misc_RNA (1)...(19): siRNA sense strand
gagcagaagccuuggccag

SEQ ID NO: 2640467 - RNA, 19 nt, Homo sapiens
  misc_RNA (1)...(19): siRNA sense strand
agguaaaguccacaggaga

SEQ ID NO: 2640468 - RNA, 19 nt, Homo sapiens
  misc_RNA (1)...(19): siRNA sense strand
cagcagaggcgauugcaga

SEQ ID NO: 2640469 - RNA, 19 nt, Homo sapiens
  misc_RNA (1)...(19): siRNA sense strand
ccagcaugguggaugacau

SEQ ID NO: 2640470 - RNA, 19 nt, Homo sapiens
  misc_RNA (1)...(19): siRNA sense strand
aggaggacuaugaaaguga

SEQ ID NO: 2640471 - RNA, 19 nt, Homo sapiens
  misc_RNA (1)...(19): siRNA sense strand
caggcggagaagaggaaga

SEQ ID NO: 2640472 - RNA, 19 nt, Homo sapiens
  misc_RNA (1)...(19): siRNA sense strand
guuaaugaugcaaugaaca

SEQ ID NO: 2640473 - RNA, 19 nt, Homo sapiens
  misc_RNA (1)...(19): siRNA sense strand
cagccagcauguucgggaa

SEQ ID NO: 2640474 - RNA, 19 nt, Homo sapiens
  misc_RNA (1)...(19): siRNA sense strand
gagaagaggaagacagacc

SEQ ID NO: 2640475 - RNA, 19 nt, Homo sapiens
  misc_RNA (1)...(19): siRNA sense strand
cagaugagcagaagcagca

SEQ ID NO: 2640476 - RNA, 19 nt, Homo sapiens
  misc_RNA (1)...(19): siRNA sense strand
aguggaaaccagacugaga

SEQ ID NO: 2640477 - RNA, 19 nt, Homo sapiens
  misc_RNA (1)...(19): siRNA sense strand
gcgugcaggcugagcagaa

SEQ ID NO: 2640478 - RNA, 19 nt, Homo sapiens
  misc_RNA (1)...(19): siRNA sense strand
cggcaugagcggauccaca

SEQ ID NO: 2640479 - RNA, 19 nt, Homo sapiens
  misc_RNA (1)...(19): siRNA sense strand
gugcacgcugugugacaaa

SEQ ID NO: 2640480 - RNA, 19 nt, Homo sapiens
  misc_RNA (1)...(19): siRNA sense strand
cuacaagccagcugaggca

SEQ ID NO: 2640481 - RNA, 19 nt, Homo sapiens
  misc_RNA (1)...(19): siRNA sense strand
cugcugaacaggccgacaa

SEQ ID NO: 2640482 - RNA, 19 nt, Homo sapiens
  misc_RNA (1)...(19): siRNA sense strand
ucagauggccugugggaca

SEQ ID NO: 2640483 - RNA, 19 nt, Homo sapiens
  misc_RNA (1)...(19): siRNA sense strand
ggacgaucaucauggagga

SEQ ID NO: 2640484 - RNA, 19 nt, Homo sapiens
  misc_RNA (1)...(19): siRNA sense strand
guaaagaguugcagcgcag

SEQ ID NO: 2640485 - RNA, 19 nt, Homo sapiens
  misc_RNA (1)...(19): siRNA sense strand
gcgaggauguacagggaug

SEQ ID NO: 2640486 - RNA, 19 nt, Homo sapiens
  misc_RNA (1)...(19): siRNA sense strand
cuugauuugcacauggaaa

SEQ ID NO: 2640487 - RNA, 19 nt, Homo sapiens
  misc_RNA (1)...(19): siRNA sense strand
caaauucaguguugcgguu

SEQ ID NO: 2640488 - RNA, 19 nt, Homo sapiens
  misc_RNA (1)...(19): siRNA sense strand
cugaaguggaguaaagagu

SEQ ID NO: 2640489 - RNA, 19 nt, Homo sapiens
  misc_RNA (1)...(19): siRNA sense strand
gcccaagcagugagcgaga

SEQ ID NO: 2640490 - RNA, 19 nt, Homo sapiens
  misc_RNA (1)...(19): siRNA sense strand
ccuugaaagcagaguccca

SEQ ID NO: 2640491 - RNA, 19 nt, Homo sapiens
  misc_RNA (1)...(19): siRNA sense strand
cuuaaauucuacaaggaac

SEQ ID NO: 2640492 - RNA, 19 nt, Homo sapiens
  misc_RNA (1)...(19): siRNA sense strand
ggcugaggccccaggauaa

SEQ ID NO: 2640493 - RNA, 19 nt, Homo sapiens
  misc_RNA (1)...(19): siRNA sense strand
ugugcaaagccuacagaca

SEQ ID NO: 2640494 - RNA, 19 nt, Homo sapiens
  misc_RNA (1)...(19): siRNA sense strand
auggagggagcuauggaaa

SEQ ID NO: 2640495 - RNA, 19 nt, Homo sapiens
  misc_RNA (1)...(19): siRNA sense strand
uggaaaugggacuaagcau

SEQ ID NO: 2640496 - RNA, 19 nt, Homo sapiens
  misc_RNA (1)...(19): siRNA sense strand
uggcagagcuggagcagga

SEQ ID NO: 2640497 - RNA, 19 nt, Homo sapiens
  misc_RNA (1)...(19): siRNA sense strand
cggcaauggacaaggcuga

SEQ ID NO: 2640498 - RNA, 19 nt, Homo sapiens
  misc_RNA (1)...(19): siRNA sense strand
acaacaaggaggugcgcau

SEQ ID NO: 2640499 - RNA, 19 nt, Homo sapiens
  misc_RNA (1)...(19): siRNA sense strand
acugaauucucuagggcuu

SEQ ID NO: 2640500 - RNA, 19 nt, Homo sapiens
  misc_RNA (1)...(19): siRNA sense strand
gaaacgaccugcuggccau

SEQ ID NO: 2640501 - RNA, 19 nt, Homo sapiens
  misc_RNA (1)...(19): siRNA sense strand
ccagacuacaggacggcaa

SEQ ID NO: 2640502 - RNA, 19 nt, Homo sapiens
  misc_RNA (1)...(19): siRNA sense strand
cgcucuacagcaagaauaa

SEQ ID NO: 2640503 - RNA, 19 nt, Homo sapiens
  misc_RNA (1)...(19): siRNA sense strand
ccuacagcuucgaucggaa

SEQ ID NO: 2640504 - RNA, 19 nt, Homo sapiens
  misc_RNA (1)...(19): siRNA sense strand
cuagaguacacuauggaga

SEQ ID NO: 2640505 - RNA, 19 nt, Homo sapiens
  misc_RNA (1)...(19): siRNA sense strand
cuggagaagcugcgggacu

SEQ ID NO: 2640506 - RNA, 19 nt, Homo sapiens
  misc_RNA (1)...(19): siRNA sense strand
ucgaaagugugaaggcugu

SEQ ID NO: 2640507 - RNA, 19 nt, Homo sapiens
  misc_RNA (1)...(19): siRNA sense strand
cacuggaggcugaggcaga

SEQ ID NO: 2640508 - RNA, 19 nt, Homo sapiens
  misc_RNA (1)...(19): siRNA sense strand
gggaaagcggacugcacca

SEQ ID NO: 2640509 - RNA, 19 nt, Homo sapiens
  misc_RNA (1)...(19): siRNA sense strand
agauggagauggaggcaga

SEQ ID NO: 2640510 - RNA, 19 nt, Homo sapiens
  misc_RNA (1)...(19): siRNA sense strand
agauggaggcagagcacua

SEQ ID NO: 2640511 - RNA, 19 nt, Homo sapiens
  misc_RNA (1)...(19): siRNA sense strand
cagcaaaggaagagauggu

SEQ ID NO: 2640512 - RNA, 19 nt, Homo sapiens
  misc_RNA (1)...(19): siRNA sense strand
gaauaggacucucggcuca

SEQ ID NO: 2640513 - RNA, 19 nt, Homo sapiens
  misc_RNA (1)...(19): siRNA sense strand
gggagauuguggacgccaa

SEQ ID NO: 2640514 - RNA, 19 nt, Homo sapiens
  misc_RNA (1)...(19): siRNA sense strand
agagaugguuacaugggaa

SEQ ID NO: 2640515 - RNA, 19 nt, Homo sapiens
  misc_RNA (1)...(19): siRNA sense strand
caucauggguauugugcca

SEQ ID NO: 2640516 - RNA, 19 nt, Homo sapiens
  misc_RNA (1)...(19): siRNA sense strand
acacagagaugcugcagga

SEQ ID NO: 2640517 - RNA, 19 nt, Homo sapiens
  misc_RNA (1)...(19): siRNA sense strand
uccauaaagaacagacaaa

SEQ ID NO: 2640518 - RNA, 19 nt, Homo sapiens
  misc_RNA (1)...(19): siRNA sense strand
ccuacaagcaugaggaccu

SEQ ID NO: 2640519 - RNA, 19 nt, Homo sapiens
  misc_RNA (1)...(19): siRNA sense strand
acuacaaaggucauggcaa

SEQ ID NO: 2640520 - RNA, 19 nt, Homo sapiens
  misc_RNA (1)...(19): siRNA sense strand
uugccagaguugaugacua

SEQ ID NO: 2640521 - RNA, 19 nt, Homo sapiens
  misc_RNA (1)...(19): siRNA sense strand
ccaccaagucccagcacca

SEQ ID NO: 2640522 - RNA, 19 nt, Homo sapiens
  misc_RNA (1)...(19): siRNA sense strand
gagaugguuacaugggaau

SEQ ID NO: 2640523 - RNA, 19 nt, Homo sapiens
  misc_RNA (1)...(19): siRNA sense strand
uggccacagccuugguaua

SEQ ID NO: 2640524 - RNA, 19 nt, Homo sapiens
  misc_RNA (1)...(19): siRNA sense strand
cagcauggaugacaggcau

SEQ ID NO: 2640525 - RNA, 19 nt, Homo sapiens
  misc_RNA (1)...(19): siRNA sense strand
cgggaguacggcaagaauu

SEQ ID NO: 2640526 - RNA, 19 nt, Homo sapiens
  misc_RNA (1)...(19): siRNA sense strand
gauugucagcaaaggaaga

SEQ ID NO: 2640527 - RNA, 19 nt, Homo sapiens
  misc_RNA (1)...(19): siRNA sense strand
aggcauugagugagcaguu

SEQ ID NO: 2640528 - RNA, 19 nt, Homo sapiens
  misc_RNA (1)...(19): siRNA sense strand
aggaagaacaggcguccau

SEQ ID NO: 2640529 - RNA, 19 nt, Homo sapiens
  misc_RNA (1)...(19): siRNA sense strand
gcgucaacaugaacagacu

SEQ ID NO: 2640530 - RNA, 19 nt, Homo sapiens
  misc_RNA (1)...(19): siRNA sense strand
aguugcaggcauugaguga

SEQ ID NO: 2640531 - RNA, 19 nt, Homo sapiens
  misc_RNA (1)...(19): siRNA sense strand
guguaaggaaugugggaaa

SEQ ID NO: 2640532 - RNA, 19 nt, Homo sapiens
  misc_RNA (1)...(19): siRNA sense strand
agaauaaggccuagugaau

SEQ ID NO: 2640533 - RNA, 19 nt, Homo sapiens
  misc_RNA (1)...(19): siRNA sense strand
auguaauguaugugggaaa

SEQ ID NO: 2640534 - RNA, 19 nt, Homo sapiens
  misc_RNA (1)...(19): siRNA sense strand
auguauugacugugggaaa

SEQ ID NO: 2640535 - RNA, 19 nt, Homo sapiens
  misc_RNA (1)...(19): siRNA sense strand
uuguaaggaaugugggaaa

SEQ ID NO: 2640536 - RNA, 19 nt, Homo sapiens
  misc_RNA (1)...(19): siRNA sense strand
guguagucucugugggaaa

SEQ ID NO: 2640537 - RNA, 19 nt, Homo sapiens
  misc_RNA (1)...(19): siRNA sense strand
ggugaaaauucuagauuga

SEQ ID NO: 2640538 - RNA, 19 nt, Homo sapiens
  misc_RNA (1)...(19): siRNA sense strand
uuacuaaacaccagagaau

SEQ ID NO: 2640539 - RNA, 19 nt, Homo sapiens
  misc_RNA (1)...(19): siRNA sense strand
gcuuacuaaacaugagaaa

SEQ ID NO: 2640540 - RNA, 19 nt, Homo sapiens
  misc_RNA (1)...(19): siRNA sense strand
aggagaagagccauggaua

SEQ ID NO: 2640541 - RNA, 19 nt, Homo sapiens
  misc_RNA (1)...(19): siRNA sense strand
ucauagagcaucacagaau

SEQ ID NO: 2640542 - RNA, 19 nt, Homo sapiens
  misc_RNA (1)...(19): siRNA sense strand
gauucauaagagaggcaaa

SEQ ID NO: 2640543 - RNA, 19 nt, Homo sapiens
  misc_RNA (1)...(19): siRNA sense strand
ggagcaaggagaagagcca

SEQ ID NO: 2640544 - RNA, 19 nt, Homo sapiens
  misc_RNA (1)...(19): siRNA sense strand
ggauguuagcagccaguua

SEQ ID NO: 2640545 - RNA, 19 nt, Homo sapiens
  misc_RNA (1)...(19): siRNA sense strand
auguaaugaaugugggaga

SEQ ID NO: 2640546 - RNA, 19 nt, Homo sapiens
  misc_RNA (1)...(19): siRNA sense strand
ugcucauaccggagagaaa

SEQ ID NO: 2640547 - RNA, 19 nt, Homo sapiens
  misc_RNA (1)...(19): siRNA sense strand
gcaggauguaucagaagua

SEQ ID NO: 2640548 - RNA, 19 nt, Homo sapiens
  misc_RNA (1)...(19): siRNA sense strand
ucaaauuggagcaaggaga

SEQ ID NO: 2640549 - RNA, 19 nt, Homo sapiens
  misc_RNA (1)...(19): siRNA sense strand
ccuuggaaucagugacauu

SEQ ID NO: 2640550 - RNA, 19 nt, Homo sapiens
  misc_RNA (1)...(19): siRNA sense strand
cagacuuacuuaaugagaa

SEQ ID NO: 2640551 - RNA, 19 nt, Homo sapiens
  misc_RNA (1)...(19): siRNA sense strand
auguaaugaguguggagaa

SEQ ID NO: 2640552 - RNA, 19 nt, Homo sapiens
  misc_RNA (1)...(19): siRNA sense strand
gauccauacugcagagaac

SEQ ID NO: 2640553 - RNA, 19 nt, Homo sapiens
  misc_RNA (1)...(19): siRNA sense strand
cauggauaucagagggaga

SEQ ID NO: 2640554 - RNA, 19 nt, Homo sapiens
  misc_RNA (1)...(19): siRNA sense strand
gcagaaugcaguccacuua

SEQ ID NO: 2640555 - RNA, 19 nt, Homo sapiens
  misc_RNA (1)...(19): siRNA sense strand
agaccaggccugaagucaa

SEQ ID NO: 2640556 - RNA, 19 nt, Homo sapiens
  misc_RNA (1)...(19): siRNA sense strand
cccuaauggaacagaucaa

SEQ ID NO: 2640557 - RNA, 19 nt, Homo sapiens
  misc_RNA (1)...(19): siRNA sense strand
ggaagagacaucugggauc

SEQ ID NO: 2640558 - RNA, 19 nt, Homo sapiens
  misc_RNA (1)...(19): siRNA sense strand
aagaauaaggccuagugaa

SEQ ID NO: 2640559 - RNA, 19 nt, Homo sapiens
  misc_RNA (1)...(19): siRNA sense strand
cgaaaagauguguggagau

SEQ ID NO: 2640560 - RNA, 19 nt, Homo sapiens
  misc_RNA (1)...(19): siRNA sense strand
aggaaaacuggaagagaca

SEQ ID NO: 2640561 - RNA, 19 nt, Homo sapiens
  misc_RNA (1)...(19): siRNA sense strand
ccugcaagaauaaggccua

SEQ ID NO: 2640562 - RNA, 19 nt, Homo sapiens
  misc_RNA (1)...(19): siRNA sense strand
ugaaaguauccgcugacaa

SEQ ID NO: 2640563 - RNA, 19 nt, Homo sapiens
  misc_RNA (1)...(19): siRNA sense strand
cagccgaaguucagcucuu

SEQ ID NO: 2640564 - RNA, 19 nt, Homo sapiens
  misc_RNA (1)...(19): siRNA sense strand
aggcauccacccagaagaa

SEQ ID NO: 2640565 - RNA, 19 nt, Homo sapiens
  misc_RNA (1)...(19): siRNA sense strand
ggaauuuauccuggaaaga

SEQ ID NO: 2640566 - RNA, 19 nt, Homo sapiens
  misc_RNA (1)...(19): siRNA sense strand
cggugaaaguauccgcuga

SEQ ID NO: 2640567 - RNA, 19 nt, Homo sapiens
  misc_RNA (1)...(19): siRNA sense strand
uagacaggcaacaggaaaa

SEQ ID NO: 2640568 - RNA, 19 nt, Homo sapiens
  misc_RNA (1)...(19): siRNA sense strand
auguaccgacugugggaaa

SEQ ID NO: 2640569 - RNA, 19 nt, Homo sapiens
  misc_RNA (1)...(19): siRNA sense strand
gugggagagccuuccgaaa

SEQ ID NO: 2640570 - RNA, 19 nt, Homo sapiens
  misc_RNA (1)...(19): siRNA sense strand
acuaaacaccagagaauuc

SEQ ID NO: 2640571 - RNA, 19 nt, Homo sapiens
  misc_RNA (1)...(19): siRNA sense strand
gcauagauuucaagcacag

SEQ ID NO: 2640572 - RNA, 19 nt, Homo sapiens
  misc_RNA (1)...(19): siRNA sense strand
caaguuucauagagcauca

SEQ ID NO: 2640573 - RNA, 19 nt, Homo sapiens
  misc_RNA (1)...(19): siRNA sense strand
cuaugaauguauugacugu

SEQ ID NO: 2640574 - RNA, 19 nt, Homo sapiens
  misc_RNA (1)...(19): siRNA sense strand
uguaaggaaugugggaaaa

SEQ ID NO: 2640575 - RNA, 19 nt, Homo sapiens
  misc_RNA (1)...(19): siRNA sense strand
cgauguaaucuauguggga

SEQ ID NO: 2640576 - RNA, 19 nt, Homo sapiens
  misc_RNA (1)...(19): siRNA sense strand
aaaccuuaccaaagcagua

SEQ ID NO: 2640577 - RNA, 19 nt, Homo sapiens
  misc_RNA (1)...(19): siRNA sense strand
guacaaguuucauagagca

SEQ ID NO: 2640578 - RNA, 19 nt, Homo sapiens
  misc_RNA (1)...(19): siRNA sense strand
aaguucagcucuuacuaaa

SEQ ID NO: 2640579 - RNA, 19 nt, Homo sapiens
  misc_RNA (1)...(19): siRNA sense strand
ggaacagaucaaggaauuu

SEQ ID NO: 2640580 - RNA, 19 nt, Homo sapiens
  misc_RNA (1)...(19): siRNA sense strand
ggagagaaaccuuuugaau

SEQ ID NO: 2640581 - RNA, 19 nt, Homo sapiens
  misc_RNA (1)...(19): siRNA sense strand
ccgaaaagauguguggaga

SEQ ID NO: 2640582 - RNA, 19 nt, Homo sapiens
  misc_RNA (1)...(19): siRNA sense strand
cgucaaagccgaaaagaug

SEQ ID NO: 2640583 - RNA, 19 nt, Homo sapiens
  misc_RNA (1)...(19): siRNA sense strand
cgaagaggaaagagaagga

SEQ ID NO: 2640584 - RNA, 19 nt, Homo sapiens
  misc_RNA (1)...(19): siRNA sense strand
gcaaagauauguaggcuug

SEQ ID NO: 2640585 - RNA, 19 nt, Homo sapiens
  misc_RNA (1)...(19): siRNA sense strand
uaaagaugauauagagcga

SEQ ID NO: 2640586 - RNA, 19 nt, Homo sapiens
  misc_RNA (1)...(19): siRNA sense strand
agaggaaagagaaggacuu

SEQ ID NO: 2640587 - RNA, 19 nt, Homo sapiens
  misc_RNA (1)...(19): siRNA sense strand
gcauauggcuucaugugga

SEQ ID NO: 2640588 - RNA, 19 nt, Homo sapiens
  misc_RNA (1)...(19): siRNA sense strand
ccaagaauuaccaggcuca

SEQ ID NO: 2640589 - RNA, 19 nt, Homo sapiens
  misc_RNA (1)...(19): siRNA sense strand
ccuuauggcuaugcagaau

SEQ ID NO: 2640590 - RNA, 19 nt, Homo sapiens
  misc_RNA (1)...(19): siRNA sense strand
ggguuuguggagaggauca

SEQ ID NO: 2640591 - RNA, 19 nt, Homo sapiens
  misc_RNA (1)...(19): siRNA sense strand
gggccaauaccuuuguaau

SEQ ID NO: 2640592 - RNA, 19 nt, Homo sapiens
  misc_RNA (1)...(19): siRNA sense strand
gccaaaugugauagcauga

SEQ ID NO: 2640593 - RNA, 19 nt, Homo sapiens
  misc_RNA (1)...(19): siRNA sense strand
gaaagaacucugugagcag

SEQ ID NO: 2640594 - RNA, 19 nt, Homo sapiens
  misc_RNA (1)...(19): siRNA sense strand
cagccaaaugugauagcau

SEQ ID NO: 2640595 - RNA, 19 nt, Homo sapiens
  misc_RNA (1)...(19): siRNA sense strand
gcugcagccaaaugugaua

SEQ ID NO: 2640596 - RNA, 19 nt, Homo sapiens
  misc_RNA (1)...(19): siRNA sense strand
caguaggacacacagacaa

SEQ ID NO: 2640597 - RNA, 19 nt, Homo sapiens
  misc_RNA (1)...(19): siRNA sense strand
cuugggacuugauggguuu

SEQ ID NO: 2640598 - RNA, 19 nt, Homo sapiens
  misc_RNA (1)...(19): siRNA sense strand
agaacaaggucauguggcu

SEQ ID NO: 2640599 - RNA, 19 nt, Homo sapiens
  misc_RNA (1)...(19): siRNA sense strand
cugagaaaacuuacaacua

SEQ ID NO: 2640600 - RNA, 19 nt, Homo sapiens
  misc_RNA (1)...(19): siRNA sense strand
ucuuagugcugcugcuaga

SEQ ID NO: 2640601 - RNA, 19 nt, Homo sapiens
  misc_RNA (1)...(19): siRNA sense strand
cugcggugacacuguauaa

SEQ ID NO: 2640602 - RNA, 19 nt, Homo sapiens
  misc_RNA (1)...(19): siRNA sense strand
gcaaagagcuacuugggaa

SEQ ID NO: 2640603 - RNA, 19 nt, Homo sapiens
  misc_RNA (1)...(19): siRNA sense strand
gaguggagcuccugcgaga

SEQ ID NO: 2640604 - RNA, 19 nt, Homo sapiens
  misc_RNA (1)...(19): siRNA sense strand
cggccaaccagcuggacaa

SEQ ID NO: 2640605 - RNA, 19 nt, Homo sapiens
  misc_RNA (1)...(19): siRNA sense strand
cagaagagcagccgggacu

SEQ ID NO: 2640606 - RNA, 19 nt, Homo sapiens
  misc_RNA (1)...(19): siRNA sense strand
augaagagcuccuacccua

SEQ ID NO: 2640607 - RNA, 19 nt, Homo sapiens
  misc_RNA (1)...(19): siRNA sense strand
ucaaagaccuaaagggcuc

SEQ ID NO: 2640608 - RNA, 19 nt, Homo sapiens
  misc_RNA (1)...(19): siRNA sense strand
uggaggagacggagaagca

SEQ ID NO: 2640609 - RNA, 19 nt, Homo sapiens
  misc_RNA (1)...(19): siRNA sense strand
accuaaagggcucggacua

SEQ ID NO: 2640610 - RNA, 19 nt, Homo sapiens
  misc_RNA (1)...(19): siRNA sense strand
aagacaugcugguggccau

SEQ ID NO: 2640611 - RNA, 19 nt, Homo sapiens
  misc_RNA (1)...(19): siRNA sense strand
ccauagucaacgacaugaa

SEQ ID NO: 2640612 - RNA, 19 nt, Homo sapiens
  misc_RNA (1)...(19): siRNA sense strand
ccgccagcgagcagguaau

SEQ ID NO: 2640613 - RNA, 19 nt, Homo sapiens
  misc_RNA (1)...(19): siRNA sense strand
aggccauagucaacgacau

SEQ ID NO: 2640614 - RNA, 19 nt, Homo sapiens
  misc_RNA (1)...(19): siRNA sense strand
gcaaagagcuacuugggaa

SEQ ID NO: 2640615 - RNA, 19 nt, Homo sapiens
  misc_RNA (1)...(19): siRNA sense strand
gaguggagcuccugcgaga

SEQ ID NO: 2640616 - RNA, 19 nt, Homo sapiens
  misc_RNA (1)...(19): siRNA sense strand
cggccaaccagcuggacaa

SEQ ID NO: 2640617 - RNA, 19 nt, Homo sapiens
  misc_RNA (1)...(19): siRNA sense strand
cagaagagcagccgggacu

SEQ ID NO: 2640618 - RNA, 19 nt, Homo sapiens
  misc_RNA (1)...(19): siRNA sense strand
augaagagcuccuacccua

SEQ ID NO: 2640619 - RNA, 19 nt, Homo sapiens
  misc_RNA (1)...(19): siRNA sense strand
ucaaagaccuaaagggcuc

SEQ ID NO: 2640620 - RNA, 19 nt, Homo sapiens
  misc_RNA (1)...(19): siRNA sense strand
uggaggagacggagaagca

SEQ ID NO: 2640621 - RNA, 19 nt, Homo sapiens
  misc_RNA (1)...(19): siRNA sense strand
accuaaagggcucggacua

SEQ ID NO: 2640622 - RNA, 19 nt, Homo sapiens
  misc_RNA (1)...(19): siRNA sense strand
aagacaugcugguggccau

SEQ ID NO: 2640623 - RNA, 19 nt, Homo sapiens
  misc_RNA (1)...(19): siRNA sense strand
ccauagucaacgacaugaa

SEQ ID NO: 2640624 - RNA, 19 nt, Homo sapiens
  misc_RNA (1)...(19): siRNA sense strand
ccgccagcgagcagguaau

SEQ ID NO: 2640625 - RNA, 19 nt, Homo sapiens
  misc_RNA (1)...(19): siRNA sense strand
aggccauagucaacgacau

SEQ ID NO: 2640626 - RNA, 19 nt, Homo sapiens
  misc_RNA (1)...(19): siRNA sense strand
cuaugaauguggagaucaa

SEQ ID NO: 2640627 - RNA, 19 nt, Homo sapiens
  misc_RNA (1)...(19): siRNA sense strand
ccucaaaggcagucagcuu

SEQ ID NO: 2640628 - RNA, 19 nt, Homo sapiens
  misc_RNA (1)...(19): siRNA sense strand
gguaaaagagguagugaau

SEQ ID NO: 2640629 - RNA, 19 nt, Homo sapiens
  misc_RNA (1)...(19): siRNA sense strand
uuggagacuucgagagcaa

SEQ ID NO: 2640630 - RNA, 19 nt, Homo sapiens
  misc_RNA (1)...(19): siRNA sense strand
augucaaggccgagggcua

SEQ ID NO: 2640631 - RNA, 19 nt, Homo sapiens
  misc_RNA (1)...(19): siRNA sense strand
caccaaagcaggaaggaga

SEQ ID NO: 2640632 - RNA, 19 nt, Homo sapiens
  misc_RNA (1)...(19): siRNA sense strand
cugaagaaauugaaagucu

SEQ ID NO: 2640633 - RNA, 19 nt, Homo sapiens
  misc_RNA (1)...(19): siRNA sense strand
gcaccaugaacuuggagaa

SEQ ID NO: 2640634 - RNA, 19 nt, Homo sapiens
  misc_RNA (1)...(19): siRNA sense strand
gggaagauucagaaguuca

SEQ ID NO: 2640635 - RNA, 19 nt, Homo sapiens
  misc_RNA (1)...(19): siRNA sense strand
aggaaggagaugugaacuu

SEQ ID NO: 2640636 - RNA, 19 nt, Homo sapiens
  misc_RNA (1)...(19): siRNA sense strand
gcucuaagaaagacuacaa

SEQ ID NO: 2640637 - RNA, 19 nt, Homo sapiens
  misc_RNA (1)...(19): siRNA sense strand
agucagggcacgaugcaua

SEQ ID NO: 2640638 - RNA, 19 nt, Homo sapiens
  misc_RNA (1)...(19): siRNA sense strand
gguaaagccaggaaacaca

SEQ ID NO: 2640639 - RNA, 19 nt, Homo sapiens
  misc_RNA (1)...(19): siRNA sense strand
cagucgaaaucaaagggaa

SEQ ID NO: 2640640 - RNA, 19 nt, Homo sapiens
  misc_RNA (1)...(19): siRNA sense strand
ccugaaagcuggagaaacc

SEQ ID NO: 2640641 - RNA, 19 nt, Homo sapiens
  misc_RNA (1)...(19): siRNA sense strand
gguuuaaaugggacaucaa

SEQ ID NO: 2640642 - RNA, 19 nt, Homo sapiens
  misc_RNA (1)...(19): siRNA sense strand
agaaagacuacaagcugaa

SEQ ID NO: 2640643 - RNA, 19 nt, Homo sapiens
  misc_RNA (1)...(19): siRNA sense strand
ugaacaagccccagagauu

SEQ ID NO: 2640644 - RNA, 19 nt, Homo sapiens
  misc_RNA (1)...(19): siRNA sense strand
gggagugagacuggaguua

SEQ ID NO: 2640645 - RNA, 19 nt, Homo sapiens
  misc_RNA (1)...(19): siRNA sense strand
gagaucaagugcaaggaca

SEQ ID NO: 2640646 - RNA, 19 nt, Homo sapiens
  misc_RNA (1)...(19): siRNA sense strand
acaaacaaacccugguaau

SEQ ID NO: 2640647 - RNA, 19 nt, Homo sapiens
  misc_RNA (1)...(19): siRNA sense strand
cgguaaaagagguagugaa

SEQ ID NO: 2640648 - RNA, 19 nt, Homo sapiens
  misc_RNA (1)...(19): siRNA sense strand
caggaaacacauuggagau

SEQ ID NO: 2640649 - RNA, 19 nt, Homo sapiens
  misc_RNA (1)...(19): siRNA sense strand
aagaaagacuacaagcuga

SEQ ID NO: 2640650 - RNA, 19 nt, Homo sapiens
  misc_RNA (1)...(19): siRNA sense strand
guacagacuuccacgcaga

SEQ ID NO: 2640651 - RNA, 19 nt, Homo sapiens
  misc_RNA (1)...(19): siRNA sense strand
ccugccaccuggagagcaa

SEQ ID NO: 2640652 - RNA, 19 nt, Homo sapiens
  misc_RNA (1)...(19): siRNA sense strand
auguggagaucaagugcaa

SEQ ID NO: 2640653 - RNA, 19 nt, Homo sapiens
  misc_RNA (1)...(19): siRNA sense strand
ccccaaagcuguagccaau

SEQ ID NO: 2640654 - RNA, 19 nt, Homo sapiens
  misc_RNA (1)...(19): siRNA sense strand
ggaagauucagaaguucaa

SEQ ID NO: 2640655 - RNA, 19 nt, Homo sapiens
  misc_RNA (1)...(19): siRNA sense strand
uggaaauacugaaaccaga

SEQ ID NO: 2640656 - RNA, 19 nt, Homo sapiens
  misc_RNA (1)...(19): siRNA sense strand
uccgaaacgaggugacaaa

SEQ ID NO: 2640657 - RNA, 19 nt, Homo sapiens
  misc_RNA (1)...(19): siRNA sense strand
gcacuguggauguaggaca

SEQ ID NO: 2640658 - RNA, 19 nt, Homo sapiens
  misc_RNA (1)...(19): siRNA sense strand
gaaaucaaagggaagggua

SEQ ID NO: 2640659 - RNA, 19 nt, Homo sapiens
  misc_RNA (1)...(19): siRNA sense strand
agaccauccugcugucaaa

SEQ ID NO: 2640660 - RNA, 19 nt, Homo sapiens
  misc_RNA (1)...(19): siRNA sense strand
gaauguguccagugugaau

SEQ ID NO: 2640661 - RNA, 19 nt, Homo sapiens
  misc_RNA (1)...(19): siRNA sense strand
ccauuaaagaagugugucu

SEQ ID NO: 2640662 - RNA, 19 nt, Homo sapiens
  misc_RNA (1)...(19): siRNA sense strand
cuccauuagcccagaagaa

SEQ ID NO: 2640663 - RNA, 19 nt, Homo sapiens
  misc_RNA (1)...(19): siRNA sense strand
aagaaacaccuaugagcau

SEQ ID NO: 2640664 - RNA, 19 nt, Homo sapiens
  misc_RNA (1)...(19): siRNA sense strand
ccaggaaacacauuggaga

SEQ ID NO: 2640665 - RNA, 19 nt, Homo sapiens
  misc_RNA (1)...(19): siRNA sense strand
cgagccggguacagcauaa

SEQ ID NO: 2640666 - RNA, 19 nt, Homo sapiens
  misc_RNA (1)...(19): siRNA sense strand
augaauguguccaguguga

SEQ ID NO: 2640667 - RNA, 19 nt, Homo sapiens
  misc_RNA (1)...(19): siRNA sense strand
aaugugaguuucaggguca

SEQ ID NO: 2640668 - RNA, 19 nt, Homo sapiens
  misc_RNA (1)...(19): siRNA sense strand
cugcaauguggaaaagaaa

SEQ ID NO: 2640669 - RNA, 19 nt, Homo sapiens
  misc_RNA (1)...(19): siRNA sense strand
acaacacugacuuggguua

SEQ ID NO: 2640670 - RNA, 19 nt, Homo sapiens
  misc_RNA (1)...(19): siRNA sense strand
gaagaaacaccuaugagca

SEQ ID NO: 2640671 - RNA, 19 nt, Homo sapiens
  misc_RNA (1)...(19): siRNA sense strand
aacaaacagucgaaaucaa

SEQ ID NO: 2640672 - RNA, 19 nt, Homo sapiens
  misc_RNA (1)...(19): siRNA sense strand
aggaaguguucauggaaug

SEQ ID NO: 2640673 - RNA, 19 nt, Homo sapiens
  misc_RNA (1)...(19): siRNA sense strand
cggaaaagccuguucacuu

SEQ ID NO: 2640674 - RNA, 19 nt, Homo sapiens
  misc_RNA (1)...(19): siRNA sense strand
ucgagaaaguaucaacuau

SEQ ID NO: 2640675 - RNA, 19 nt, Homo sapiens
  misc_RNA (1)...(19): siRNA sense strand
ccuuuggacccguggugua

SEQ ID NO: 2640676 - RNA, 19 nt, Homo sapiens
  misc_RNA (1)...(19): siRNA sense strand
acacuaugaauguggagau

SEQ ID NO: 2640677 - RNA, 19 nt, Homo sapiens
  misc_RNA (1)...(19): siRNA sense strand
gugcaagguuuaaauggga

SEQ ID NO: 2640678 - RNA, 19 nt, Homo sapiens
  misc_RNA (1)...(19): siRNA sense strand
caucguggaaauacugaaa

SEQ ID NO: 2640679 - RNA, 19 nt, Homo sapiens
  misc_RNA (1)...(19): siRNA sense strand
gaagacuaacuuugcacaa

SEQ ID NO: 2640680 - RNA, 19 nt, Homo sapiens
  misc_RNA (1)...(19): siRNA sense strand
aaaucauccuugugaaguu

SEQ ID NO: 2640681 - RNA, 19 nt, Homo sapiens
  misc_RNA (1)...(19): siRNA sense strand
uggugaagggagugagacu

SEQ ID NO: 2640682 - RNA, 19 nt, Homo sapiens
  misc_RNA (1)...(19): siRNA sense strand
cgugaagugccauguaaga

SEQ ID NO: 2640683 - RNA, 19 nt, Homo sapiens
  misc_RNA (1)...(19): siRNA sense strand
acagaauacuacugcagga

SEQ ID NO: 2640684 - RNA, 19 nt, Homo sapiens
  misc_RNA (1)...(19): siRNA sense strand
agucgaaaucaaagggaag

SEQ ID NO: 2640685 - RNA, 19 nt, Homo sapiens
  misc_RNA (1)...(19): siRNA sense strand
ucuguaaacuggaagucau

SEQ ID NO: 2640686 - RNA, 19 nt, Homo sapiens
  misc_RNA (1)...(19): siRNA sense strand
ucaccaacuggcugaacaa

SEQ ID NO: 2640687 - RNA, 19 nt, Homo sapiens
  misc_RNA (1)...(19): siRNA sense strand
agacuaacuuugcacaaca

SEQ ID NO: 2640688 - RNA, 19 nt, Homo sapiens
  misc_RNA (1)...(19): siRNA sense strand
gggagacugugcagaucau

SEQ ID NO: 2640689 - RNA, 19 nt, Homo sapiens
  misc_RNA (1)...(19): siRNA sense strand
gaagauaccucaaaggcag

SEQ ID NO: 2640690 - RNA, 19 nt, Homo sapiens
  misc_RNA (1)...(19): siRNA sense strand
gaaucgugccgguggggaa

SEQ ID NO: 2640691 - RNA, 19 nt, Homo sapiens
  misc_RNA (1)...(19): siRNA sense strand
ugaaagacucggacuacau

SEQ ID NO: 2640692 - RNA, 19 nt, Homo sapiens
  misc_RNA (1)...(19): siRNA sense strand
aggaaacacauuggagauu

SEQ ID NO: 2640693 - RNA, 19 nt, Homo sapiens
  misc_RNA (1)...(19): siRNA sense strand
caguuuccaucaugaacaa

SEQ ID NO: 2640694 - RNA, 19 nt, Homo sapiens
  misc_RNA (1)...(19): siRNA sense strand
agacaaaggagcuggauuu

SEQ ID NO: 2640695 - RNA, 19 nt, Homo sapiens
  misc_RNA (1)...(19): siRNA sense strand
agauaagguuugugacauu

SEQ ID NO: 2640696 - RNA, 19 nt, Homo sapiens
  misc_RNA (1)...(19): siRNA sense strand
ugacauaauaacugaggaa

SEQ ID NO: 2640697 - RNA, 19 nt, Homo sapiens
  misc_RNA (1)...(19): siRNA sense strand
gggcgaaauaucuggagaa

SEQ ID NO: 2640698 - RNA, 19 nt, Homo sapiens
  misc_RNA (1)...(19): siRNA sense strand
caauuaaguauguggaaca

SEQ ID NO: 2640699 - RNA, 19 nt, Homo sapiens
  misc_RNA (1)...(19): siRNA sense strand
ggauagaagaaguguuuga

SEQ ID NO: 2640700 - RNA, 19 nt, Homo sapiens
  misc_RNA (1)...(19): siRNA sense strand
caucauugcacaagcuaaa

SEQ ID NO: 2640701 - RNA, 19 nt, Homo sapiens
  misc_RNA (1)...(19): siRNA sense strand
gagaagaaaccuaacagua

SEQ ID NO: 2640702 - RNA, 19 nt, Homo sapiens
  misc_RNA (1)...(19): siRNA sense strand
aaauaacacugaagggaga

SEQ ID NO: 2640703 - RNA, 19 nt, Homo sapiens
  misc_RNA (1)...(19): siRNA sense strand
ggauauucacuacggauua

SEQ ID NO: 2640704 - RNA, 19 nt, Homo sapiens
  misc_RNA (1)...(19): siRNA sense strand
ccgaggugauagugaagaa

SEQ ID NO: 2640705 - RNA, 19 nt, Homo sapiens
  misc_RNA (1)...(19): siRNA sense strand
agaagaaaccuaacaguau

SEQ ID NO: 2640706 - RNA, 19 nt, Homo sapiens
  misc_RNA (1)...(19): siRNA sense strand
aggagaaugaagaggaaga

SEQ ID NO: 2640707 - RNA, 19 nt, Homo sapiens
  misc_RNA (1)...(19): siRNA sense strand
cagacaaagaguauaacaa

SEQ ID NO: 2640708 - RNA, 19 nt, Homo sapiens
  misc_RNA (1)...(19): siRNA sense strand
ccucauugugaaacggaaa

SEQ ID NO: 2640709 - RNA, 19 nt, Homo sapiens
  misc_RNA (1)...(19): siRNA sense strand
ccaacgugcaagugaaauu

SEQ ID NO: 2640710 - RNA, 19 nt, Homo sapiens
  misc_RNA (1)...(19): siRNA sense strand
gggaaaucacgcugacgaa

SEQ ID NO: 2640711 - RNA, 19 nt, Homo sapiens
  misc_RNA (1)...(19): siRNA sense strand
acuggaaauugaugaagaa

SEQ ID NO: 2640712 - RNA, 19 nt, Homo sapiens
  misc_RNA (1)...(19): siRNA sense strand
acauaauaacugaggaagu

SEQ ID NO: 2640713 - RNA, 19 nt, Homo sapiens
  misc_RNA (1)...(19): siRNA sense strand
gaacagaaugagaugcuuu

SEQ ID NO: 2640714 - RNA, 19 nt, Homo sapiens
  misc_RNA (1)...(19): siRNA sense strand
gagacgaggccgaggugau

SEQ ID NO: 2640715 - RNA, 19 nt, Homo sapiens
  misc_RNA (1)...(19): siRNA sense strand
uagaggaagaggaggauga

SEQ ID NO: 2640716 - RNA, 19 nt, Homo sapiens
  misc_RNA (1)...(19): siRNA sense strand
uggugaaugaugaggaaaa

SEQ ID NO: 2640717 - RNA, 19 nt, Homo sapiens
  misc_RNA (1)...(19): siRNA sense strand
agaauauacucaagccaga

SEQ ID NO: 2640718 - RNA, 19 nt, Homo sapiens
  misc_RNA (1)...(19): siRNA sense strand
agauggagguagaaagacu

SEQ ID NO: 2640719 - RNA, 19 nt, Homo sapiens
  misc_RNA (1)...(19): siRNA sense strand
cauuaucauucaugggaca

SEQ ID NO: 2640720 - RNA, 19 nt, Homo sapiens
  misc_RNA (1)...(19): siRNA sense strand
agacuguccuuguggauga

SEQ ID NO: 2640721 - RNA, 19 nt, Homo sapiens
  misc_RNA (1)...(19): siRNA sense strand
ugggcaaggucuagagcca

SEQ ID NO: 2640722 - RNA, 19 nt, Homo sapiens
  misc_RNA (1)...(19): siRNA sense strand
gcaguaucucauagaagaa

SEQ ID NO: 2640723 - RNA, 19 nt, Homo sapiens
  misc_RNA (1)...(19): siRNA sense strand
ggaggaaguuggagaggug

SEQ ID NO: 2640724 - RNA, 19 nt, Homo sapiens
  misc_RNA (1)...(19): siRNA sense strand
aguucaagguucugacuga

SEQ ID NO: 2640725 - RNA, 19 nt, Homo sapiens
  misc_RNA (1)...(19): siRNA sense strand
ugccaaaagaagagaaauu

SEQ ID NO: 2640726 - RNA, 19 nt, Homo sapiens
  misc_RNA (1)...(19): siRNA sense strand
ugcggaagcugaagggcua

SEQ ID NO: 2640727 - RNA, 19 nt, Homo sapiens
  misc_RNA (1)...(19): siRNA sense strand
gguucuucuuggugaauga

SEQ ID NO: 2640728 - RNA, 19 nt, Homo sapiens
  misc_RNA (1)...(19): siRNA sense strand
ugggauagaagaaguguuu

SEQ ID NO: 2640729 - RNA, 19 nt, Homo sapiens
  misc_RNA (1)...(19): siRNA sense strand
acacaguagccaccaaaua

SEQ ID NO: 2640730 - RNA, 19 nt, Homo sapiens
  misc_RNA (1)...(19): siRNA sense strand
aggaagaggaggaugagga

SEQ ID NO: 2640731 - RNA, 19 nt, Homo sapiens
  misc_RNA (1)...(19): siRNA sense strand
ccauggaggaaguuggaga

SEQ ID NO: 2640732 - RNA, 19 nt, Homo sapiens
  misc_RNA (1)...(19): siRNA sense strand
ccaggaaccucacagcaaa

SEQ ID NO: 2640733 - RNA, 19 nt, Homo sapiens
  misc_RNA (1)...(19): siRNA sense strand
gccaaaagccuguugacaa

SEQ ID NO: 2640734 - RNA, 19 nt, Homo sapiens
  misc_RNA (1)...(19): siRNA sense strand
ccggaaaggcaucgccauu

SEQ ID NO: 2640735 - RNA, 19 nt, Homo sapiens
  misc_RNA (1)...(19): siRNA sense strand
cgagauggauuuaaaugau

SEQ ID NO: 2640736 - RNA, 19 nt, Homo sapiens
  misc_RNA (1)...(19): siRNA sense strand
aggguaggcaggaaauaaa

SEQ ID NO: 2640737 - RNA, 19 nt, Homo sapiens
  misc_RNA (1)...(19): siRNA sense strand
uguccuagaacaucagaaa

SEQ ID NO: 2640738 - RNA, 19 nt, Homo sapiens
  misc_RNA (1)...(19): siRNA sense strand
aaaacaacccagugagcaa

SEQ ID NO: 2640739 - RNA, 19 nt, Homo sapiens
  misc_RNA (1)...(19): siRNA sense strand
gaugcuuuccauugggaua

SEQ ID NO: 2640740 - RNA, 19 nt, Homo sapiens
  misc_RNA (1)...(19): siRNA sense strand
gagacaaaggagcuggauu

SEQ ID NO: 2640741 - RNA, 19 nt, Homo sapiens
  misc_RNA (1)...(19): siRNA sense strand
agagccagguggaggauca

SEQ ID NO: 2640742 - RNA, 19 nt, Homo sapiens
  misc_RNA (1)...(19): siRNA sense strand
gccaagaaccggaaaggca

SEQ ID NO: 2640743 - RNA, 19 nt, Homo sapiens
  misc_RNA (1)...(19): siRNA sense strand
ucagauaagguuugugaca

SEQ ID NO: 2640744 - RNA, 19 nt, Homo sapiens
  misc_RNA (1)...(19): siRNA sense strand
agucaaaagaggagcagau

SEQ ID NO: 2640745 - RNA, 19 nt, Homo sapiens
  misc_RNA (1)...(19): siRNA sense strand
ccaccugggcauugacauu

SEQ ID NO: 2640746 - RNA, 19 nt, Homo sapiens
  misc_RNA (1)...(19): siRNA sense strand
caaggugguuggagggcca

SEQ ID NO: 2640747 - RNA, 19 nt, Homo sapiens
  misc_RNA (1)...(19): siRNA sense strand
ccuuagaauuugaucagca

SEQ ID NO: 2640748 - RNA, 19 nt, Homo sapiens
  misc_RNA (1)...(19): siRNA sense strand
cgacuggagaagaaaccua

SEQ ID NO: 2640749 - RNA, 19 nt, Homo sapiens
  misc_RNA (1)...(19): siRNA sense strand
ccaccaagcagcucaucua

SEQ ID NO: 2640750 - RNA, 19 nt, Homo sapiens
  misc_RNA (1)...(19): siRNA sense strand
uaaaaggaguuuccagaua

SEQ ID NO: 2640751 - RNA, 19 nt, Homo sapiens
  misc_RNA (1)...(19): siRNA sense strand
aggaagugccagaagacga

SEQ ID NO: 2640752 - RNA, 19 nt, Homo sapiens
  misc_RNA (1)...(19): siRNA sense strand
guacugagcuagaucgugu

SEQ ID NO: 2640753 - RNA, 19 nt, Homo sapiens
  misc_RNA (1)...(19): siRNA sense strand
aguccaacgugcaagugaa

SEQ ID NO: 2640754 - RNA, 19 nt, Homo sapiens
  misc_RNA (1)...(19): siRNA sense strand
gugaagaaucccugcaacu

SEQ ID NO: 2640755 - RNA, 19 nt, Homo sapiens
  misc_RNA (1)...(19): siRNA sense strand
uuggagagguggaaaacaa

SEQ ID NO: 2640756 - RNA, 19 nt, Homo sapiens
  misc_RNA (1)...(19): siRNA sense strand
cggcaacuccugagccuau

SEQ ID NO: 2640757 - RNA, 19 nt, Homo sapiens
  misc_RNA (1)...(19): siRNA sense strand
caacuggguggcagaagaa

SEQ ID NO: 2640758 - RNA, 19 nt, Homo sapiens
  misc_RNA (1)...(19): siRNA sense strand
ucuaccgacuggagaagaa

SEQ ID NO: 2640759 - RNA, 19 nt, Homo sapiens
  misc_RNA (1)...(19): siRNA sense strand
ccaucggagucgccgcaaa

SEQ ID NO: 2640760 - RNA, 19 nt, Homo sapiens
  misc_RNA (1)...(19): siRNA sense strand
uggagaaacacaugccgaa

SEQ ID NO: 2640761 - RNA, 19 nt, Homo sapiens
  misc_RNA (1)...(19): siRNA sense strand
aggccgaggugauagugaa

SEQ ID NO: 2640762 - RNA, 19 nt, Homo sapiens
  misc_RNA (1)...(19): siRNA sense strand
ccgagauggauuuaaauga

SEQ ID NO: 2640763 - RNA, 19 nt, Homo sapiens
  misc_RNA (1)...(19): siRNA sense strand
uugaaaaucuggagggaaa

SEQ ID NO: 2640764 - RNA, 19 nt, Homo sapiens
  misc_RNA (1)...(19): siRNA sense strand
gagcagaaauuguuugaau

SEQ ID NO: 2640765 - RNA, 19 nt, Homo sapiens
  misc_RNA (1)...(19): siRNA sense strand
cagaagugcccaagaggaa

SEQ ID NO: 2640766 - RNA, 19 nt, Homo sapiens
  misc_RNA (1)...(19): siRNA sense strand
cgagaaagagacuggcuaa

SEQ ID NO: 2640767 - RNA, 19 nt, Homo sapiens
  misc_RNA (1)...(19): siRNA sense strand
cugaauaggaugaaccaua

SEQ ID NO: 2640768 - RNA, 19 nt, Homo sapiens
  misc_RNA (1)...(19): siRNA sense strand
gcuaagaagcugugcacau

SEQ ID NO: 2640769 - RNA, 19 nt, Homo sapiens
  misc_RNA (1)...(19): siRNA sense strand
agguagagguggaaguaga

SEQ ID NO: 2640770 - RNA, 19 nt, Homo sapiens
  misc_RNA (1)...(19): siRNA sense strand
aagagaagauguaaagaga

SEQ ID NO: 2640771 - RNA, 19 nt, Homo sapiens
  misc_RNA (1)...(19): siRNA sense strand
aaguauuagaugugagcua

SEQ ID NO: 2640772 - RNA, 19 nt, Homo sapiens
  misc_RNA (1)...(19): siRNA sense strand
gcuggagagggaagagaaa

SEQ ID NO: 2640773 - RNA, 19 nt, Homo sapiens
  misc_RNA (1)...(19): siRNA sense strand
gaauaggagaaguagguuu

SEQ ID NO: 2640774 - RNA, 19 nt, Homo sapiens
  misc_RNA (1)...(19): siRNA sense strand
agaaauaagcugugugucu

SEQ ID NO: 2640775 - RNA, 19 nt, Homo sapiens
  misc_RNA (1)...(19): siRNA sense strand
gcagcaagguagaggugga

SEQ ID NO: 2640776 - RNA, 19 nt, Homo sapiens
  misc_RNA (1)...(19): siRNA sense strand
ggcuaagagaagauguaaa

SEQ ID NO: 2640777 - RNA, 19 nt, Homo sapiens
  misc_RNA (1)...(19): siRNA sense strand
gucaaauuccugagguuua

SEQ ID NO: 2640778 - RNA, 19 nt, Homo sapiens
  misc_RNA (1)...(19): siRNA sense strand
uggaagaagaagugaagga

SEQ ID NO: 2640779 - RNA, 19 nt, Homo sapiens
  misc_RNA (1)...(19): siRNA sense strand
uuugaauauuggugaggaa

SEQ ID NO: 2640780 - RNA, 19 nt, Homo sapiens
  misc_RNA (1)...(19): siRNA sense strand
guaaagagaggcuguguuu

SEQ ID NO: 2640781 - RNA, 19 nt, Homo sapiens
  misc_RNA (1)...(19): siRNA sense strand
gaaagauagaagaagugaa

SEQ ID NO: 2640782 - RNA, 19 nt, Homo sapiens
  misc_RNA (1)...(19): siRNA sense strand
caacaaagugaauggggua

SEQ ID NO: 2640783 - RNA, 19 nt, Homo sapiens
  misc_RNA (1)...(19): siRNA sense strand
cgcaaugggagcagaaauu

SEQ ID NO: 2640784 - RNA, 19 nt, Homo sapiens
  misc_RNA (1)...(19): siRNA sense strand
auaucaagcauguggauuu

SEQ ID NO: 2640785 - RNA, 19 nt, Homo sapiens
  misc_RNA (1)...(19): siRNA sense strand
auaauguacgcaagggaaa

SEQ ID NO: 2640786 - RNA, 19 nt, Homo sapiens
  misc_RNA (1)...(19): siRNA sense strand
ucugguugguggaaagaua

SEQ ID NO: 2640787 - RNA, 19 nt, Homo sapiens
  misc_RNA (1)...(19): siRNA sense strand
caacacugguagagcacau

SEQ ID NO: 2640788 - RNA, 19 nt, Homo sapiens
  misc_RNA (1)...(19): siRNA sense strand
gaucagaaaccuuugccaa

SEQ ID NO: 2640789 - RNA, 19 nt, Homo sapiens
  misc_RNA (1)...(19): siRNA sense strand
ccaucaucacagaggacaa

SEQ ID NO: 2640790 - RNA, 19 nt, Homo sapiens
  misc_RNA (1)...(19): siRNA sense strand
guauuagaugugagcuaua

SEQ ID NO: 2640791 - RNA, 19 nt, Homo sapiens
  misc_RNA (1)...(19): siRNA sense strand
auggcagggcagagaaaua

SEQ ID NO: 2640792 - RNA, 19 nt, Homo sapiens
  misc_RNA (1)...(19): siRNA sense strand
uguuugaauaggagaagua

SEQ ID NO: 2640793 - RNA, 19 nt, Homo sapiens
  misc_RNA (1)...(19): siRNA sense strand
ugaaggaacaaaugaaaca

SEQ ID NO: 2640794 - RNA, 19 nt, Homo sapiens
  misc_RNA (1)...(19): siRNA sense strand
cuacuuuaccugaagaauu

SEQ ID NO: 2640795 - RNA, 19 nt, Homo sapiens
  misc_RNA (1)...(19): siRNA sense strand
ugcaacgacuugacagaaa

SEQ ID NO: 2640796 - RNA, 19 nt, Homo sapiens
  misc_RNA (1)...(19): siRNA sense strand
acacaagacacuggacaua

SEQ ID NO: 2640797 - RNA, 19 nt, Homo sapiens
  misc_RNA (1)...(19): siRNA sense strand
agauggaaccagaggacca

SEQ ID NO: 2640798 - RNA, 19 nt, Homo sapiens
  misc_RNA (1)...(19): siRNA sense strand
cagagguucccgugagaau

SEQ ID NO: 2640799 - RNA, 19 nt, Homo sapiens
  misc_RNA (1)...(19): siRNA sense strand
gauuuaaggaugaaccauu

SEQ ID NO: 2640800 - RNA, 19 nt, Homo sapiens
  misc_RNA (1)...(19): siRNA sense strand
agugaaggaacaaaugaaa

SEQ ID NO: 2640801 - RNA, 19 nt, Homo sapiens
  misc_RNA (1)...(19): siRNA sense strand
uaccugaagaauugggaaa

SEQ ID NO: 2640802 - RNA, 19 nt, Homo sapiens
  misc_RNA (1)...(19): siRNA sense strand
cugcaagcaaacuaaauaa

SEQ ID NO: 2640803 - RNA, 19 nt, Homo sapiens
  misc_RNA (1)...(19): siRNA sense strand
ccacauggaucguuuggau

SEQ ID NO: 2640804 - RNA, 19 nt, Homo sapiens
  misc_RNA (1)...(19): siRNA sense strand
ccuauauuguuaugcgaga

SEQ ID NO: 2640805 - RNA, 19 nt, Homo sapiens
  misc_RNA (1)...(19): siRNA sense strand
caaccauagcaaacuguaa

SEQ ID NO: 2640806 - RNA, 19 nt, Homo sapiens
  misc_RNA (1)...(19): siRNA sense strand
gacaccagcaucagaaaua

SEQ ID NO: 2640807 - RNA, 19 nt, Homo sapiens
  misc_RNA (1)...(19): siRNA sense strand
gagaagauguaaagagagg

SEQ ID NO: 2640808 - RNA, 19 nt, Homo sapiens
  misc_RNA (1)...(19): siRNA sense strand
uccugagguuuaugagaaa

SEQ ID NO: 2640809 - RNA, 19 nt, Homo sapiens
  misc_RNA (1)...(19): siRNA sense strand
ccuuugcacuguagagaca

SEQ ID NO: 2640810 - RNA, 19 nt, Homo sapiens
  misc_RNA (1)...(19): siRNA sense strand
aauaugugcuggagaggga

SEQ ID NO: 2640811 - RNA, 19 nt, Homo sapiens
  misc_RNA (1)...(19): siRNA sense strand
agcaaagaagauagaagua

SEQ ID NO: 2640812 - RNA, 19 nt, Homo sapiens
  misc_RNA (1)...(19): siRNA sense strand
gcaagguagagguggaagu

SEQ ID NO: 2640813 - RNA, 19 nt, Homo sapiens
  misc_RNA (1)...(19): siRNA sense strand
ugguggaaagauagaagaa

SEQ ID NO: 2640814 - RNA, 19 nt, Homo sapiens
  misc_RNA (1)...(19): siRNA sense strand
cucaaagggugaaggacca

SEQ ID NO: 2640815 - RNA, 19 nt, Homo sapiens
  misc_RNA (1)...(19): siRNA sense strand
gggaaaucuacaacagcuu

SEQ ID NO: 2640816 - RNA, 19 nt, Homo sapiens
  misc_RNA (1)...(19): siRNA sense strand
gagugguuauggcaggaaa

SEQ ID NO: 2640817 - RNA, 19 nt, Homo sapiens
  misc_RNA (1)...(19): siRNA sense strand
gaacugaaccuaaguggca

SEQ ID NO: 2640818 - RNA, 19 nt, Homo sapiens
  misc_RNA (1)...(19): siRNA sense strand
aguugcugauucugggaaa

SEQ ID NO: 2640819 - RNA, 19 nt, Homo sapiens
  misc_RNA (1)...(19): siRNA sense strand
aggacaggauggaguuaca

SEQ ID NO: 2640820 - RNA, 19 nt, Homo sapiens
  misc_RNA (1)...(19): siRNA sense strand
ccaacaaucuccugacgga

SEQ ID NO: 2640821 - RNA, 19 nt, Homo sapiens
  misc_RNA (1)...(19): siRNA sense strand
agauggcagggcagagaaa

SEQ ID NO: 2640822 - RNA, 19 nt, Homo sapiens
  misc_RNA (1)...(19): siRNA sense strand
gcugauucugggaaacaaa

SEQ ID NO: 2640823 - RNA, 19 nt, Homo sapiens
  misc_RNA (1)...(19): siRNA sense strand
aagaagugaaggaacaaau

SEQ ID NO: 2640824 - RNA, 19 nt, Homo sapiens
  misc_RNA (1)...(19): siRNA sense strand
uggagagggaagagaaagu

SEQ ID NO: 2640825 - RNA, 19 nt, Homo sapiens
  misc_RNA (1)...(19): siRNA sense strand
cuucaugcaguuagaaaga

SEQ ID NO: 2640826 - RNA, 19 nt, Homo sapiens
  misc_RNA (1)...(19): siRNA sense strand
ugaacuugucccauaauaa

SEQ ID NO: 2640827 - RNA, 19 nt, Homo sapiens
  misc_RNA (1)...(19): siRNA sense strand
ccauaauaaacuuggguug

SEQ ID NO: 2640828 - RNA, 19 nt, Homo sapiens
  misc_RNA (1)...(19): siRNA sense strand
gcauacaggaggaggcuac

SEQ ID NO: 2640829 - RNA, 19 nt, Homo sapiens
  misc_RNA (1)...(19): siRNA sense strand
uagucaaauuccugagguu

SEQ ID NO: 2640830 - RNA, 19 nt, Homo sapiens
  misc_RNA (1)...(19): siRNA sense strand
aggaugaaccauuugaaaa

SEQ ID NO: 2640831 - RNA, 19 nt, Homo sapiens
  misc_RNA (1)...(19): siRNA sense strand
gggcagagaaauaagcugu

SEQ ID NO: 2640832 - RNA, 19 nt, Homo sapiens
  misc_RNA (1)...(19): siRNA sense strand
ggaacaugcuagagggucg

SEQ ID NO: 2640833 - RNA, 19 nt, Homo sapiens
  misc_RNA (1)...(19): siRNA sense strand
agaaauaugugcuggagag

SEQ ID NO: 2640834 - RNA, 19 nt, Homo sapiens
  misc_RNA (1)...(19): siRNA sense strand
gcaucuauaauguacgcaa

SEQ ID NO: 2640835 - RNA, 19 nt, Homo sapiens
  misc_RNA (1)...(19): siRNA sense strand
agaagugaagcgacggcaa

SEQ ID NO: 2640836 - RNA, 19 nt, Homo sapiens
  misc_RNA (1)...(19): siRNA sense strand
cauccaaggugguguccca

SEQ ID NO: 2640837 - RNA, 19 nt, Homo sapiens
  misc_RNA (1)...(19): siRNA sense strand
gagcagaaccacagccuga

SEQ ID NO: 2640838 - RNA, 19 nt, Homo sapiens
  misc_RNA (1)...(19): siRNA sense strand
ccaaagagguggagcugcu

SEQ ID NO: 2640839 - RNA, 19 nt, Homo sapiens
  misc_RNA (1)...(19): siRNA sense strand
uggaggugcugcugaggaa

SEQ ID NO: 2640840 - RNA, 19 nt, Homo sapiens
  misc_RNA (1)...(19): siRNA sense strand
gcaaggagacccuggacga

SEQ ID NO: 2640841 - RNA, 19 nt, Homo sapiens
  misc_RNA (1)...(19): siRNA sense strand
ccucgcuacacaagagaua

SEQ ID NO: 2640842 - RNA, 19 nt, Homo sapiens
  misc_RNA (1)...(19): siRNA sense strand
guggcuucuuggagacaua

SEQ ID NO: 2640843 - RNA, 19 nt, Homo sapiens
  misc_RNA (1)...(19): siRNA sense strand
gaggagauucagugggcga

SEQ ID NO: 2640844 - RNA, 19 nt, Homo sapiens
  misc_RNA (1)...(19): siRNA sense strand
gaucaagaaagcuggcuca

SEQ ID NO: 2640845 - RNA, 19 nt, Homo sapiens
  misc_RNA (1)...(19): siRNA sense strand
gagaagaugcagagccgca

SEQ ID NO: 2640846 - RNA, 19 nt, Homo sapiens
  misc_RNA (1)...(19): siRNA sense strand
caagagauagcaaggccua

SEQ ID NO: 2640847 - RNA, 19 nt, Homo sapiens
  misc_RNA (1)...(19): siRNA sense strand
ggucaaagcccaagucccu

SEQ ID NO: 2640848 - RNA, 19 nt, Homo sapiens
  misc_RNA (1)...(19): siRNA sense strand
ggauaacggcuucggcuca

SEQ ID NO: 2640849 - RNA, 19 nt, Homo sapiens
  misc_RNA (1)...(19): siRNA sense strand
gggagggugcugugcaaaa

SEQ ID NO: 2640850 - RNA, 19 nt, Homo sapiens
  misc_RNA (1)...(19): siRNA sense strand
ggguacaaguaaugcugca

SEQ ID NO: 2640851 - RNA, 19 nt, Homo sapiens
  misc_RNA (1)...(19): siRNA sense strand
ggacugaucuagagaccag

SEQ ID NO: 2640852 - RNA, 19 nt, Homo sapiens
  misc_RNA (1)...(19): siRNA sense strand
caucacaccuggaggagcu

SEQ ID NO: 2640853 - RNA, 19 nt, Homo sapiens
  misc_RNA (1)...(19): siRNA sense strand
cuggagaccugcagccuga

SEQ ID NO: 2640854 - RNA, 19 nt, Homo sapiens
  misc_RNA (1)...(19): siRNA sense strand
uggaggagcuggugcugga

SEQ ID NO: 2640855 - RNA, 19 nt, Homo sapiens
  misc_RNA (1)...(19): siRNA sense strand
gaucauggcugaggcccua

SEQ ID NO: 2640856 - RNA, 19 nt, Homo sapiens
  misc_RNA (1)...(19): siRNA sense strand
cuggagacgcagagagaaa

SEQ ID NO: 2640857 - RNA, 19 nt, Homo sapiens
  misc_RNA (1)...(19): siRNA sense strand
ggcuggagacgcagagaga

SEQ ID NO: 2640858 - RNA, 19 nt, Homo sapiens
  misc_RNA (1)...(19): siRNA sense strand
cugaaauggaagagaugaa

SEQ ID NO: 2640859 - RNA, 19 nt, Homo sapiens
  misc_RNA (1)...(19): siRNA sense strand
ggaacuacaagcugcgcaa

SEQ ID NO: 2640860 - RNA, 19 nt, Homo sapiens
  misc_RNA (1)...(19): siRNA sense strand
uggaagaggugauggacgu

SEQ ID NO: 2640861 - RNA, 19 nt, Homo sapiens
  misc_RNA (1)...(19): siRNA sense strand
gcaccagcuuuguggcaga

SEQ ID NO: 2640862 - RNA, 19 nt, Homo sapiens
  misc_RNA (1)...(19): siRNA sense strand
aggaggugcugaaggccua

SEQ ID NO: 2640863 - RNA, 19 nt, Homo sapiens
  misc_RNA (1)...(19): siRNA sense strand
gggugaagaaggacgcuca

SEQ ID NO: 2640864 - RNA, 19 nt, Homo sapiens
  misc_RNA (1)...(19): siRNA sense strand
uggugaaggccgagaugga

SEQ ID NO: 2640865 - RNA, 19 nt, Homo sapiens
  misc_RNA (1)...(19): siRNA sense strand
uggcagacguggugcguuc

SEQ ID NO: 2640866 - RNA, 19 nt, Homo sapiens
  misc_RNA (1)...(19): siRNA sense strand
ucaucgaccucauggccaa

SEQ ID NO: 2640867 - RNA, 19 nt, Homo sapiens
  misc_RNA (1)...(19): siRNA sense strand
cugaagaaggggaagauuu

SEQ ID NO: 2640868 - RNA, 19 nt, Homo sapiens
  misc_RNA (1)...(19): siRNA sense strand
uggaggagaucaagcagga

SEQ ID NO: 2640869 - RNA, 19 nt, Homo sapiens
  misc_RNA (1)...(19): siRNA sense strand
ggguucagcucaugcggga

SEQ ID NO: 2640870 - RNA, 19 nt, Homo sapiens
  misc_RNA (1)...(19): siRNA sense strand
caaccauggucgugccacu

SEQ ID NO: 2640871 - RNA, 19 nt, Homo sapiens
  misc_RNA (1)...(19): siRNA sense strand
gggaaagcugagagggaga

SEQ ID NO: 2640872 - RNA, 19 nt, Homo sapiens
  misc_RNA (1)...(19): siRNA sense strand
gggccagccaggagugaaa

SEQ ID NO: 2640873 - RNA, 19 nt, Homo sapiens
  misc_RNA (1)...(19): siRNA sense strand
cuggaguggcuaagaguaa

SEQ ID NO: 2640874 - RNA, 19 nt, Homo sapiens
  misc_RNA (1)...(19): siRNA sense strand
agggagaagccaagaaaga

SEQ ID NO: 2640875 - RNA, 19 nt, Homo sapiens
  misc_RNA (1)...(19): siRNA sense strand
cugcaaaggagcaaagaca

SEQ ID NO: 2640876 - RNA, 19 nt, Homo sapiens
  misc_RNA (1)...(19): siRNA sense strand
cuagagaaaugcaagggaa

SEQ ID NO: 2640877 - RNA, 19 nt, Homo sapiens
  misc_RNA (1)...(19): siRNA sense strand
cgaccaagcccaagcccaa

SEQ ID NO: 2640878 - RNA, 19 nt, Homo sapiens
  misc_RNA (1)...(19): siRNA sense strand
ucaaauaagaaaaggggaa

SEQ ID NO: 2640879 - RNA, 19 nt, Homo sapiens
  misc_RNA (1)...(19): siRNA sense strand
gaucagagguugugagcug

SEQ ID NO: 2640880 - RNA, 19 nt, Homo sapiens
  misc_RNA (1)...(19): siRNA sense strand
uuuaagaauuccagaggau

SEQ ID NO: 2640881 - RNA, 19 nt, Homo sapiens
  misc_RNA (1)...(19): siRNA sense strand
ccagagaggaugagccaca

SEQ ID NO: 2640882 - RNA, 19 nt, Homo sapiens
  misc_RNA (1)...(19): siRNA sense strand
ggaaggacagacugggcaa

SEQ ID NO: 2640883 - RNA, 19 nt, Homo sapiens
  misc_RNA (1)...(19): siRNA sense strand
cuuugaggguaaugaguuu

SEQ ID NO: 2640884 - RNA, 19 nt, Homo sapiens
  misc_RNA (1)...(19): siRNA sense strand
aaagagaagcugugggagu

SEQ ID NO: 2640885 - RNA, 19 nt, Homo sapiens
  misc_RNA (1)...(19): siRNA sense strand
cagaauucacagaggcuuu

SEQ ID NO: 2640886 - RNA, 19 nt, Homo sapiens
  misc_RNA (1)...(19): siRNA sense strand
gcaaagagucugggagcga

SEQ ID NO: 2640887 - RNA, 19 nt, Homo sapiens
  misc_RNA (1)...(19): siRNA sense strand
gggugacuccagagagcaa

SEQ ID NO: 2640888 - RNA, 19 nt, Homo sapiens
  misc_RNA (1)...(19): siRNA sense strand
agucaaugccagucccaaa

SEQ ID NO: 2640889 - RNA, 19 nt, Homo sapiens
  misc_RNA (1)...(19): siRNA sense strand
ggcaagagggagaagccaa

SEQ ID NO: 2640890 - RNA, 19 nt, Homo sapiens
  misc_RNA (1)...(19): siRNA sense strand
cggacaacccggagaucga

SEQ ID NO: 2640891 - RNA, 19 nt, Homo sapiens
  misc_RNA (1)...(19): siRNA sense strand
aguugaagcuguuccggaa

SEQ ID NO: 2640892 - RNA, 19 nt, Homo sapiens
  misc_RNA (1)...(19): siRNA sense strand
gggaagucaaauaagaaaa

SEQ ID NO: 2640893 - RNA, 19 nt, Homo sapiens
  misc_RNA (1)...(19): siRNA sense strand
ccuucaagcugcagcgcca

SEQ ID NO: 2640894 - RNA, 19 nt, Homo sapiens
  misc_RNA (1)...(19): siRNA sense strand
cagagaacggccaguggaa

SEQ ID NO: 2640895 - RNA, 19 nt, Homo sapiens
  misc_RNA (1)...(19): siRNA sense strand
ccacagagccgaaggacag

SEQ ID NO: 2640896 - RNA, 19 nt, Homo sapiens
  misc_RNA (1)...(19): siRNA sense strand
caagagagaccaaggcguu

SEQ ID NO: 2640897 - RNA, 19 nt, Homo sapiens
  misc_RNA (1)...(19): siRNA sense strand
uggagaggccagagaacga

SEQ ID NO: 2640898 - RNA, 19 nt, Homo sapiens
  misc_RNA (1)...(19): siRNA sense strand
ggaaggaaguggagcugac

SEQ ID NO: 2640899 - RNA, 19 nt, Homo sapiens
  misc_RNA (1)...(19): siRNA sense strand
caaauaagaaaaggggaaa

SEQ ID NO: 2640900 - RNA, 19 nt, Homo sapiens
  misc_RNA (1)...(19): siRNA sense strand
uuagaaagucagcugcaaa

SEQ ID NO: 2640901 - RNA, 19 nt, Homo sapiens
  misc_RNA (1)...(19): siRNA sense strand
uggaguaccagucggacaa

SEQ ID NO: 2640902 - RNA, 19 nt, Homo sapiens
  misc_RNA (1)...(19): siRNA sense strand
ccaugagccuucaggagga

SEQ ID NO: 2640903 - RNA, 19 nt, Homo sapiens
  misc_RNA (1)...(19): siRNA sense strand
aagaaaagccacagggugu

SEQ ID NO: 2640904 - RNA, 19 nt, Homo sapiens
  misc_RNA (1)...(19): siRNA sense strand
ggggaagucaaauaagaaa

SEQ ID NO: 2640905 - RNA, 19 nt, Homo sapiens
  misc_RNA (1)...(19): siRNA sense strand
ccaaccagcuucagccaga

SEQ ID NO: 2640906 - RNA, 19 nt, Homo sapiens
  misc_RNA (1)...(19): siRNA sense strand
ccaccggagaugaggcaca

SEQ ID NO: 2640907 - RNA, 19 nt, Homo sapiens
  misc_RNA (1)...(19): siRNA sense strand
ucucguguucucagggaaa

SEQ ID NO: 2640908 - RNA, 19 nt, Homo sapiens
  misc_RNA (1)...(19): siRNA sense strand
gggaagcaguugaagcugu

SEQ ID NO: 2640909 - RNA, 19 nt, Homo sapiens
  misc_RNA (1)...(19): siRNA sense strand
acauggaggaugacgccaa

SEQ ID NO: 2640910 - RNA, 19 nt, Homo sapiens
  misc_RNA (1)...(19): siRNA sense strand
aggaaggaccccaggaaga

SEQ ID NO: 2640911 - RNA, 19 nt, Homo sapiens
  misc_RNA (1)...(19): siRNA sense strand
cgggaagcgcugugagaag

SEQ ID NO: 2640912 - RNA, 19 nt, Homo sapiens
  misc_RNA (1)...(19): siRNA sense strand
ucacagaggcuuugcguuc

SEQ ID NO: 2640913 - RNA, 19 nt, Homo sapiens
  misc_RNA (1)...(19): siRNA sense strand
ccucacgcgcguuggagaa

SEQ ID NO: 2640914 - RNA, 19 nt, Homo sapiens
  misc_RNA (1)...(19): siRNA sense strand
agcaugagguagaugugaa

SEQ ID NO: 2640915 - RNA, 19 nt, Homo sapiens
  misc_RNA (1)...(19): siRNA sense strand
gcaacuacaccuucgccaa

SEQ ID NO: 2640916 - RNA, 19 nt, Homo sapiens
  misc_RNA (1)...(19): siRNA sense strand
gccuaggucccaaggagaa

SEQ ID NO: 2640917 - RNA, 19 nt, Homo sapiens
  misc_RNA (1)...(19): siRNA sense strand
agcaguacgaagaggaaaa

SEQ ID NO: 2640918 - RNA, 19 nt, Homo sapiens
  misc_RNA (1)...(19): siRNA sense strand
gggaguggauguagcguug

SEQ ID NO: 2640919 - RNA, 19 nt, Homo sapiens
  misc_RNA (1)...(19): siRNA sense strand
cagaagggagccucggcaa

SEQ ID NO: 2640920 - RNA, 19 nt, Homo sapiens
  misc_RNA (1)...(19): siRNA sense strand
acaacgagcaccugcguga

SEQ ID NO: 2640921 - RNA, 19 nt, Homo sapiens
  misc_RNA (1)...(19): siRNA sense strand
agaggaugagccacagaaa

SEQ ID NO: 2640922 - RNA, 19 nt, Homo sapiens
  misc_RNA (1)...(19): siRNA sense strand
gagaaaugcaagggaagca

SEQ ID NO: 2640923 - RNA, 19 nt, Homo sapiens
  misc_RNA (1)...(19): siRNA sense strand
acucagaggggaagucaaa

SEQ ID NO: 2640924 - RNA, 19 nt, Homo sapiens
  misc_RNA (1)...(19): siRNA sense strand
aggcguugggugugugcaa

SEQ ID NO: 2640925 - RNA, 19 nt, Homo sapiens
  misc_RNA (1)...(19): siRNA sense strand
agaaagagaaggagguguc

SEQ ID NO: 2640926 - RNA, 19 nt, Homo sapiens
  misc_RNA (1)...(19): siRNA sense strand
ggcccguggcacagagaau

SEQ ID NO: 2640927 - RNA, 19 nt, Homo sapiens
  misc_RNA (1)...(19): siRNA sense strand
gagcaguacgaagaggaaa

SEQ ID NO: 2640928 - RNA, 19 nt, Homo sapiens
  misc_RNA (1)...(19): siRNA sense strand
acaccgggacccagagaga

SEQ ID NO: 2640929 - RNA, 19 nt, Homo sapiens
  misc_RNA (1)...(19): siRNA sense strand
ggcuggaggcagauggaca

SEQ ID NO: 2640930 - RNA, 19 nt, Homo sapiens
  misc_RNA (1)...(19): siRNA sense strand
uggaagaggcagauggcgu

SEQ ID NO: 2640931 - RNA, 19 nt, Homo sapiens
  misc_RNA (1)...(19): siRNA sense strand
accaagaugcccaggguca

SEQ ID NO: 2640932 - RNA, 19 nt, Homo sapiens
  misc_RNA (1)...(19): siRNA sense strand
ccuacaacggaaugacaga

SEQ ID NO: 2640933 - RNA, 19 nt, Homo sapiens
  misc_RNA (1)...(19): siRNA sense strand
cagaaauuggucaccgaau

SEQ ID NO: 2640934 - RNA, 19 nt, Homo sapiens
  misc_RNA (1)...(19): siRNA sense strand
ucuuagacuucgagggcac

SEQ ID NO: 2640935 - RNA, 19 nt, Homo sapiens
  misc_RNA (1)...(19): siRNA sense strand
gccacagagccgaaggaca

SEQ ID NO: 2640936 - RNA, 19 nt, Homo sapiens
  misc_RNA (1)...(19): siRNA sense strand
ucgccaagaaggagcaguu

SEQ ID NO: 2640937 - RNA, 19 nt, Homo sapiens
  misc_RNA (1)...(19): siRNA sense strand
aggagaagggagagagcag

SEQ ID NO: 2640938 - RNA, 19 nt, Homo sapiens
  misc_RNA (1)...(19): siRNA sense strand
gagccaagauucugccaaa

SEQ ID NO: 2640939 - RNA, 19 nt, Homo sapiens
  misc_RNA (1)...(19): siRNA sense strand
gaucaaagacccuggccga

SEQ ID NO: 2640940 - RNA, 19 nt, Homo sapiens
  misc_RNA (1)...(19): siRNA sense strand
agaagugugugaagugcaa

SEQ ID NO: 2640941 - RNA, 19 nt, Homo sapiens
  misc_RNA (1)...(19): siRNA sense strand
guguacaggacaagugaga

SEQ ID NO: 2640942 - RNA, 19 nt, Homo sapiens
  misc_RNA (1)...(19): siRNA sense strand
guccacaaguucagagcca

SEQ ID NO: 2640943 - RNA, 19 nt, Homo sapiens
  misc_RNA (1)...(19): siRNA sense strand
ggugauacgagccggagau

SEQ ID NO: 2640944 - RNA, 19 nt, Homo sapiens
  misc_RNA (1)...(19): siRNA sense strand
gagcagaagugugugaagu

SEQ ID NO: 2640945 - RNA, 19 nt, Homo sapiens
  misc_RNA (1)...(19): siRNA sense strand
gggacuguuucaaggccuu

SEQ ID NO: 2640946 - RNA, 19 nt, Homo sapiens
  misc_RNA (1)...(19): siRNA sense strand
ggagagaccuucuggagcu

SEQ ID NO: 2640947 - RNA, 19 nt, Homo sapiens
  misc_RNA (1)...(19): siRNA sense strand
gcacagaagauguuggcaa

SEQ ID NO: 2640948 - RNA, 19 nt, Homo sapiens
  misc_RNA (1)...(19): siRNA sense strand
cagcagagccaaaggcaga

SEQ ID NO: 2640949 - RNA, 19 nt, Homo sapiens
  misc_RNA (1)...(19): siRNA sense strand
agucuagaggagaaagaaa

SEQ ID NO: 2640950 - RNA, 19 nt, Homo sapiens
  misc_RNA (1)...(19): siRNA sense strand
gggaaagggacgacaggga

SEQ ID NO: 2640951 - RNA, 19 nt, Homo sapiens
  misc_RNA (1)...(19): siRNA sense strand
aaaacaggguguagcgaaa

SEQ ID NO: 2640952 - RNA, 19 nt, Homo sapiens
  misc_RNA (1)...(19): siRNA sense strand
uggaaguggaagcgaggaa

SEQ ID NO: 2640953 - RNA, 19 nt, Homo sapiens
  misc_RNA (1)...(19): siRNA sense strand
cugcagacuuacaaggaca

SEQ ID NO: 2640954 - RNA, 19 nt, Homo sapiens
  misc_RNA (1)...(19): siRNA sense strand
ccgcaagcagcaagaaaga

SEQ ID NO: 2640955 - RNA, 19 nt, Homo sapiens
  misc_RNA (1)...(19): siRNA sense strand
cuuuaaggacauuguggaa

SEQ ID NO: 2640956 - RNA, 19 nt, Homo sapiens
  misc_RNA (1)...(19): siRNA sense strand
gcugauuggcauugagguu

SEQ ID NO: 2640957 - RNA, 19 nt, Homo sapiens
  misc_RNA (1)...(19): siRNA sense strand
gaacuggucuuuaaggaca

SEQ ID NO: 2640958 - RNA, 19 nt, Homo sapiens
  misc_RNA (1)...(19): siRNA sense strand
gggagcaguagcagggaca

SEQ ID NO: 2640959 - RNA, 19 nt, Homo sapiens
  misc_RNA (1)...(19): siRNA sense strand
ugaaucagcuuguguccua

SEQ ID NO: 2640960 - RNA, 19 nt, Homo sapiens
  misc_RNA (1)...(19): siRNA sense strand
cagagaugacugaggagga

SEQ ID NO: 2640961 - RNA, 19 nt, Homo sapiens
  misc_RNA (1)...(19): siRNA sense strand
ggagaaagaaagggcgcuu

SEQ ID NO: 2640962 - RNA, 19 nt, Homo sapiens
  misc_RNA (1)...(19): siRNA sense strand
ccaucaagccucuggagca

SEQ ID NO: 2640963 - RNA, 19 nt, Homo sapiens
  misc_RNA (1)...(19): siRNA sense strand
uagagaagcugauuggcau

SEQ ID NO: 2640964 - RNA, 19 nt, Homo sapiens
  misc_RNA (1)...(19): siRNA sense strand
ccgaggaaguccaggaggu

SEQ ID NO: 2640965 - RNA, 19 nt, Homo sapiens
  misc_RNA (1)...(19): siRNA sense strand
gagaagacccucaugcuga

SEQ ID NO: 2640966 - RNA, 19 nt, Homo sapiens
  misc_RNA (1)...(19): siRNA sense strand
ggaugugggucuagagcug

SEQ ID NO: 2640967 - RNA, 19 nt, Homo sapiens
  misc_RNA (1)...(19): siRNA sense strand
aggaagaagagacggagga

SEQ ID NO: 2640968 - RNA, 19 nt, Homo sapiens
  misc_RNA (1)...(19): siRNA sense strand
ggacaaggagaggaggaga

SEQ ID NO: 2640969 - RNA, 19 nt, Homo sapiens
  misc_RNA (1)...(19): siRNA sense strand
cggaggaugcaaaugaaga

SEQ ID NO: 2640970 - RNA, 19 nt, Homo sapiens
  misc_RNA (1)...(19): siRNA sense strand
cuggagagggacaaggaga

SEQ ID NO: 2640971 - RNA, 19 nt, Homo sapiens
  misc_RNA (1)...(19): siRNA sense strand
cagggacagcagagccaaa

SEQ ID NO: 2640972 - RNA, 19 nt, Homo sapiens
  misc_RNA (1)...(19): siRNA sense strand
ugaaaaccaucgagggcau

SEQ ID NO: 2640973 - RNA, 19 nt, Homo sapiens
  misc_RNA (1)...(19): siRNA sense strand
ggagguugcuuucuggaga

SEQ ID NO: 2640974 - RNA, 19 nt, Homo sapiens
  misc_RNA (1)...(19): siRNA sense strand
ccaaggggccuguggaaga

SEQ ID NO: 2640975 - RNA, 19 nt, Homo sapiens
  misc_RNA (1)...(19): siRNA sense strand
ugacugaggaggacgcaga

SEQ ID NO: 2640976 - RNA, 19 nt, Homo sapiens
  misc_RNA (1)...(19): siRNA sense strand
gguuccuguuggugaauca

SEQ ID NO: 2640977 - RNA, 19 nt, Homo sapiens
  misc_RNA (1)...(19): siRNA sense strand
cagaagaagcagagggcgc

SEQ ID NO: 2640978 - RNA, 19 nt, Homo sapiens
  misc_RNA (1)...(19): siRNA sense strand
ccagaauuuccuagagaag

SEQ ID NO: 2640979 - RNA, 19 nt, Homo sapiens
  misc_RNA (1)...(19): siRNA sense strand
ccuccaagcccaugguacu

SEQ ID NO: 2640980 - RNA, 19 nt, Homo sapiens
  misc_RNA (1)...(19): siRNA sense strand
gcucuauacaggcgcugaa

SEQ ID NO: 2640981 - RNA, 19 nt, Homo sapiens
  misc_RNA (1)...(19): siRNA sense strand
ucgagaacagacuggagaa

SEQ ID NO: 2640982 - RNA, 19 nt, Homo sapiens
  misc_RNA (1)...(19): siRNA sense strand
gagauuaccuccaagccca

SEQ ID NO: 2640983 - RNA, 19 nt, Homo sapiens
  misc_RNA (1)...(19): siRNA sense strand
uuggcaauuuguuggagaa

SEQ ID NO: 2640984 - RNA, 19 nt, Homo sapiens
  misc_RNA (1)...(19): siRNA sense strand
aagagacggaggaugcaaa

SEQ ID NO: 2640985 - RNA, 19 nt, Homo sapiens
  misc_RNA (1)...(19): siRNA sense strand
ccuuuaaagcagaagcaaa

SEQ ID NO: 2640986 - RNA, 19 nt, Homo sapiens
  misc_RNA (1)...(19): siRNA sense strand
caagaaaccuaaaagggaa

SEQ ID NO: 2640987 - RNA, 19 nt, Homo sapiens
  misc_RNA (1)...(19): siRNA sense strand
cgaaggagaugugguggaa

SEQ ID NO: 2640988 - RNA, 19 nt, Homo sapiens
  misc_RNA (1)...(19): siRNA sense strand
aaggagaugugguggaagu

SEQ ID NO: 2640989 - RNA, 19 nt, Homo sapiens
  misc_RNA (1)...(19): siRNA sense strand
cagaagagguugaugaguc

SEQ ID NO: 2640990 - RNA, 19 nt, Homo sapiens
  misc_RNA (1)...(19): siRNA sense strand
cggaauggaaggaugacga

SEQ ID NO: 2640991 - RNA, 19 nt, Homo sapiens
  misc_RNA (1)...(19): siRNA sense strand
ucauaacagaagagguuga

SEQ ID NO: 2640992 - RNA, 19 nt, Homo sapiens
  misc_RNA (1)...(19): siRNA sense strand
ucaugggaggagagaaauu

SEQ ID NO: 2640993 - RNA, 19 nt, Homo sapiens
  misc_RNA (1)...(19): siRNA sense strand
gguacaaagacgaugccga

SEQ ID NO: 2640994 - RNA, 19 nt, Homo sapiens
  misc_RNA (1)...(19): siRNA sense strand
gaucuauggcauugagaac

SEQ ID NO: 2640995 - RNA, 19 nt, Homo sapiens
  misc_RNA (1)...(19): siRNA sense strand
agaccaagcccucggacga

SEQ ID NO: 2640996 - RNA, 19 nt, Homo sapiens
  misc_RNA (1)...(19): siRNA sense strand
acaucgacauccaggcgaa

SEQ ID NO: 2640997 - RNA, 19 nt, Homo sapiens
  misc_RNA (1)...(19): siRNA sense strand
agaacauggaucugaacuu

SEQ ID NO: 2640998 - RNA, 19 nt, Homo sapiens
  misc_RNA (1)...(19): siRNA sense strand
aagaaaccuaaaagggaaa

SEQ ID NO: 2640999 - RNA, 19 nt, Homo sapiens
  misc_RNA (1)...(19): siRNA sense strand
agaacagcgacaacagcaa
